United States Patent Application Publication US 2007/0042381 A1 - sequence listing, part 26

SEQ ID NO: 1132742 - RNA, 22 nt, Human
uuucauguuuucuuaaauggca

SEQ ID NO: 1132743 - RNA, 22 nt, Human
uggcugggccgggccuugugcc

SEQ ID NO: 1132744 - RNA, 22 nt, Human
aauguuguuuuucugcaugucu

SEQ ID NO: 1132745 - RNA, 18 nt, Human
acagaggcagacauguau

SEQ ID NO: 1132746 - RNA, 22 nt, Human
aguaggaggcgggagcaugaag

SEQ ID NO: 1132747 - RNA, 22 nt, Human
cuuauguaaacuacagauaaua

SEQ ID NO: 1132748 - RNA, 22 nt, Human
gucccaggcagagucaggaggg

SEQ ID NO: 1132749 - RNA, 22 nt, Human
gaaaagcuaggccaguucagcu

SEQ ID NO: 1132750 - RNA, 20 nt, Human
gccagcccugacacaggagc

SEQ ID NO: 1132751 - RNA, 22 nt, Human
gggcacugaaugccaagcuagg

SEQ ID NO: 1132752 - RNA, 22 nt, Human
ucucagagauuuuguuucccuu

SEQ ID NO: 1132753 - RNA, 22 nt, Human
uguggcugucuguucuccuagg

SEQ ID NO: 1132754 - RNA, 23 nt, Human
ccaaagucgaagucuaguccaga

SEQ ID NO: 1132755 - RNA, 22 nt, Human
ucuuagaaugucaacugauguu

SEQ ID NO: 1132756 - RNA, 22 nt, Human
ggaagaagggucauuggcagcc

SEQ ID NO: 1132757 - RNA, 20 nt, Human
ccugccuguguuugugauga

SEQ ID NO: 1132758 - RNA, 22 nt, Human
gaaguucaggugggaauugagc

SEQ ID NO: 1132759 - RNA, 22 nt, Human
cauugucacccaaagcucauag

SEQ ID NO: 1132760 - RNA, 22 nt, Human
agucccagcucagaaccacuag

SEQ ID NO: 1132761 - RNA, 22 nt, Human
auguuucuaguuguaugucacu

SEQ ID NO: 1132762 - RNA, 22 nt, Human
augauugaccaucugcugggcu

SEQ ID NO: 1132763 - RNA, 22 nt, Human
aggggcucaguuacuuuggcag

SEQ ID NO: 1132764 - RNA, 17 nt, Human
ggcagcugccacuuuuu

SEQ ID NO: 1132765 - RNA, 22 nt, Human
ugagcuguagcagaugcuguug

SEQ ID NO: 1132766 - RNA, 22 nt, Human
gucccaggcuuauguggagcuu

SEQ ID NO: 1132767 - RNA, 22 nt, Human
caggugcugcguggcggagcug

SEQ ID NO: 1132768 - RNA, 22 nt, Human
guacauuuuacuuuguuugaau

SEQ ID NO: 1132769 - RNA, 22 nt, Human
uuuuuccaccguacuuccugag

SEQ ID NO: 1132770 - RNA, 22 nt, Human
ucacuugccuagcccaguucag

SEQ ID NO: 1132771 - RNA, 22 nt, Human
cacugccuggaaggagagacau

SEQ ID NO: 1132772 - RNA, 22 nt, Human
aauuaacaaauguagcugugau

SEQ ID NO: 1132773 - RNA, 18 nt, Human
acauuucuaggugaaagc

SEQ ID NO: 1132774 - RNA, 22 nt, Human
ugggaggcagguaggugaugau

SEQ ID NO: 1132775 - RNA, 22 nt, Human
auugaaagauaggcuacugugg

SEQ ID NO: 1132776 - RNA, 22 nt, Human
ggucccagcuggucacugucag

SEQ ID NO: 1132777 - RNA, 22 nt, Human
cagagccaaaccucagggcccg

SEQ ID NO: 1132778 - RNA, 22 nt, Human
cuggcagcuggaggcuagaggc

SEQ ID NO: 1132779 - RNA, 22 nt, Human
acagccaggagccaugggcagg

SEQ ID NO: 1132780 - RNA, 20 nt, Human
ccaccuggccaaggcugugc

SEQ ID NO: 1132781 - RNA, 23 nt, Human
ucacacagcuggucagguacaga

SEQ ID NO: 1132782 - RNA, 22 nt, Human
guauuugauacaugaaauggug

SEQ ID NO: 1132783 - RNA, 22 nt, Human
agaggggcucauauccugucau

SEQ ID NO: 1132784 - RNA, 22 nt, Human
agggagcugcucugcuuccgug

SEQ ID NO: 1132785 - RNA, 18 nt, Human
uucacaggaaaugucuuu

SEQ ID NO: 1132786 - RNA, 19 nt, Human
gccugccuggguuucugag

SEQ ID NO: 1132787 - RNA, 22 nt, Human
cuggcucaugugaugagggcaa

SEQ ID NO: 1132788 - RNA, 22 nt, Human
agauuucagguuggggcagaag

SEQ ID NO: 1132789 - RNA, 22 nt, Human
ucaacacuauccaggcaaucuu

SEQ ID NO: 1132790 - RNA, 22 nt, Human
acugucuuccaggucuggaggu

SEQ ID NO: 1132791 - RNA, 22 nt, Human
gggacagaaggaagugagcaca

SEQ ID NO: 1132792 - RNA, 22 nt, Human
ggcucugcuucagaaggcucau

SEQ ID NO: 1132793 - RNA, 22 nt, Human
cugagccuuauucaccagcccu

SEQ ID NO: 1132794 - RNA, 22 nt, Human
aaagauuuaugaaguucaauua

SEQ ID NO: 1132795 - RNA, 22 nt, Human
cagcugcccaagccccagaugu

SEQ ID NO: 1132796 - RNA, 22 nt, Human
ccugucugcaugaucccugcca

SEQ ID NO: 1132797 - RNA, 22 nt, Human
aggagccaggaaaccugcucug

SEQ ID NO: 1132798 - RNA, 22 nt, Human
gccagguggcugagcagcugca

SEQ ID NO: 1132799 - RNA, 22 nt, Human
aucuuugaagaggacuugaagu

SEQ ID NO: 1132800 - RNA, 22 nt, Human
gaaaucugcuucuugcauagua

SEQ ID NO: 1132801 - RNA, 22 nt, Human
gccugcagggugaugggcugcc

SEQ ID NO: 1132802 - RNA, 22 nt, Human
ggcugcugggaauaugccagcu

SEQ ID NO: 1132803 - RNA, 21 nt, Human
cagaggccucaugcucugugc

SEQ ID NO: 1132804 - RNA, 22 nt, Human
ggcccaucucuugcucuggguu

SEQ ID NO: 1132805 - RNA, 21 nt, Human
gcagccagacgggauucaguu

SEQ ID NO: 1132806 - RNA, 22 nt, Human
gucccuaguggaaagacaugau

SEQ ID NO: 1132807 - RNA, 22 nt, Human
cugucagcacucuacuacagau

SEQ ID NO: 1132808 - RNA, 22 nt, Human
cuugugcauuucauuccucagg

SEQ ID NO: 1132809 - RNA, 22 nt, Human
agaauucuggaguugggaggaa

SEQ ID NO: 1132810 - RNA, 22 nt, Human
gugugcaugcauagacaccaca

SEQ ID NO: 1132811 - RNA, 22 nt, Human
uuucaauguaugucuuucugag

SEQ ID NO: 1132812 - RNA, 22 nt, Human
uaaaugugcacagguuagaagg

SEQ ID NO: 1132813 - RNA, 22 nt, Human
aggccugacuugaauuuagggc

SEQ ID NO: 1132814 - RNA, 22 nt, Human
cuccucccucuuugccacacau

SEQ ID NO: 1132815 - RNA, 22 nt, Human
uggaggcaucagagugcuuggc

SEQ ID NO: 1132816 - RNA, 23 nt, Human
aguuccagaaaaaugcucaagca

SEQ ID NO: 1132817 - RNA, 22 nt, Human
agggugccugcugcagguucag

SEQ ID NO: 1132818 - RNA, 22 nt, Human
uuaggcaaugaauuauuccaag

SEQ ID NO: 1132819 - RNA, 22 nt, Human
ugucuagggagcugcucaggcu

SEQ ID NO: 1132820 - RNA, 22 nt, Human
ggcuggagauaugucuggaaca

SEQ ID NO: 1132821 - RNA, 22 nt, Human
cuggcugcaggaaggagugggc

SEQ ID NO: 1132822 - RNA, 22 nt, Human
uacccagcuucaagucaggacu

SEQ ID NO: 1132823 - RNA, 22 nt, Human
cucucugaggaaggagcaucug

SEQ ID NO: 1132824 - RNA, 22 nt, Human
ugcugcucucagccaccaggaa

SEQ ID NO: 1132825 - RNA, 22 nt, Human
ugcugccucagcuuccugggcu

SEQ ID NO: 1132826 - RNA, 22 nt, Human
cuggccugagcacagcggcugc

SEQ ID NO: 1132827 - RNA, 22 nt, Human
gaggucagucagaccaggguuu

SEQ ID NO: 1132828 - RNA, 22 nt, Human
ugugugugcacaugcauauaca

SEQ ID NO: 1132829 - RNA, 22 nt, Human
caaaugcauaguuuauaagaag

SEQ ID NO: 1132830 - RNA, 22 nt, Human
ugguggccuugauggcaucugc

SEQ ID NO: 1132831 - RNA, 22 nt, Human
augggggccugaacaggcaaaa

SEQ ID NO: 1132832 - RNA, 20 nt, Human
ugcucaggauggagaggugu

SEQ ID NO: 1132833 - RNA, 22 nt, Human
gcagcugccgugagcucacgcc

SEQ ID NO: 1132834 - RNA, 22 nt, Human
cccaguccuaaagcagacgcca

SEQ ID NO: 1132835 - RNA, 22 nt, Human
auaaggcagugacuucaucuau

SEQ ID NO: 1132836 - RNA, 22 nt, Human
gcucagagcuugaaguuccacu

SEQ ID NO: 1132837 - RNA, 22 nt, Human
ccucacucugcacccugcagca

SEQ ID NO: 1132838 - RNA, 22 nt, Human
agcugcaggcccaugcucaguc

SEQ ID NO: 1132839 - RNA, 22 nt, Human
gagagcugcauucucagacaca

SEQ ID NO: 1132840 - RNA, 22 nt, Human
cagguaggauggaagggcucaa

SEQ ID NO: 1132841 - RNA, 22 nt, Human
gcaguggggcgcugggaguugg

SEQ ID NO: 1132842 - RNA, 22 nt, Human
aucagcaaguccuguuaauucu

SEQ ID NO: 1132843 - RNA, 22 nt, Human
gaaaucugaacaacagcuguca

SEQ ID NO: 1132844 - RNA, 22 nt, Human
gagugugggcacgggggccuug

SEQ ID NO: 1132845 - RNA, 22 nt, Human
cugccaaggcuggggaggacaa

SEQ ID NO: 1132846 - RNA, 22 nt, Human
uccagcagcccgaaggcccauc

SEQ ID NO: 1132847 - RNA, 22 nt, Human
agcuuccugaugcaagagggcu

SEQ ID NO: 1132848 - RNA, 22 nt, Human
ugggccugacucaccugccucc

SEQ ID NO: 1132849 - RNA, 22 nt, Human
ucuggcuccaggaccgggcaca

SEQ ID NO: 1132850 - RNA, 22 nt, Human
cucuugggagugcucuggagaa

SEQ ID NO: 1132851 - RNA, 22 nt, Human
agcagugggugacagagcugag

SEQ ID NO: 1132852 - RNA, 22 nt, Human
ugagcccagucugucugacaug

SEQ ID NO: 1132853 - RNA, 22 nt, Human
aggagucaggaccaaauggaaa

SEQ ID NO: 1132854 - RNA, 22 nt, Human
caugcacagugauaucugaaga

SEQ ID NO: 1132855 - RNA, 22 nt, Human
gggcuggagccagcuguggcug

SEQ ID NO: 1132856 - RNA, 22 nt, Human
guguccagggccguguugucuu

SEQ ID NO: 1132857 - RNA, 22 nt, Human
uuuauguaguuacggacuauca

SEQ ID NO: 1132858 - RNA, 21 nt, Human
auccuugaucagaagagugcu

SEQ ID NO: 1132859 - RNA, 22 nt, Human
cagggcagccaggccccguggg

SEQ ID NO: 1132860 - RNA, 21 nt, Human
cagagguggccugaccucuga

SEQ ID NO: 1132861 - RNA, 18 nt, Human
caggaugagugaugggga

SEQ ID NO: 1132862 - RNA, 22 nt, Human
auguccuucuccucuuaccugc

SEQ ID NO: 1132863 - RNA, 22 nt, Human
gguggagcuggaccaggagagg

SEQ ID NO: 1132864 - RNA, 22 nt, Human
ucaagcaggguagcaagcuggu

SEQ ID NO: 1132865 - RNA, 22 nt, Human
ccagcagcgauagggugagugc

SEQ ID NO: 1132866 - RNA, 22 nt, Human
gccuuccugcagcucugagcgu

SEQ ID NO: 1132867 - RNA, 22 nt, Human
gccuaggaguggggauggcggu

SEQ ID NO: 1132868 - RNA, 22 nt, Human
ucugaggcuucagacuguacug

SEQ ID NO: 1132869 - RNA, 22 nt, Human
gguugccggggcaggacuggaa

SEQ ID NO: 1132870 - RNA, 22 nt, Human
ugucccaguucccaggguugcu

SEQ ID NO: 1132871 - RNA, 22 nt, Human
gaaagaagcuuuagauggcuau

SEQ ID NO: 1132872 - RNA, 22 nt, Human
aagcagaauuucccacuaguug

SEQ ID NO: 1132873 - RNA, 22 nt, Human
aaaguuuccugcuaagugcuau

SEQ ID NO: 1132874 - RNA, 22 nt, Human
agccuggagaagauguguauug

SEQ ID NO: 1132875 - RNA, 22 nt, Human
caucagcaggcaacacucuugg

SEQ ID NO: 1132876 - RNA, 22 nt, Human
ucuggagcuggcagggcccugg

SEQ ID NO: 1132877 - RNA, 22 nt, Human
uggcuggcuuguucacugacug

SEQ ID NO: 1132878 - RNA, 22 nt, Human
gagugagggcagcaggggcugc

SEQ ID NO: 1132879 - RNA, 22 nt, Human
uucagugugugauaccugcugu

SEQ ID NO: 1132880 - RNA, 22 nt, Human
aggagcugaaacuucucauaug

SEQ ID NO: 1132881 - RNA, 22 nt, Human
aaauugugagcuauagaucuag

SEQ ID NO: 1132882 - RNA, 22 nt, Human
acuggcagccacaacuggcagg

SEQ ID NO: 1132883 - RNA, 22 nt, Human
cugggguggugcaggccucaug

SEQ ID NO: 1132884 - RNA, 22 nt, Human
cugucaucacaguugagcagcc

SEQ ID NO: 1132885 - RNA, 22 nt, Human
gcugcuuccuuuccugcugacc

SEQ ID NO: 1132886 - RNA, 22 nt, Human
gaggggcuggcacgauggcugc

SEQ ID NO: 1132887 - RNA, 22 nt, Human
cuggcucaauuuguacugcugu

SEQ ID NO: 1132888 - RNA, 22 nt, Human
cagaaugcaaauuuuauaauau

SEQ ID NO: 1132889 - RNA, 22 nt, Human
cuggagccuucaccaggggaaa

SEQ ID NO: 1132890 - RNA, 22 nt, Human
uggaggaugccauccaggauac

SEQ ID NO: 1132891 - RNA, 22 nt, Human
gccaggcauucuagaaguagug

SEQ ID NO: 1132892 - RNA, 19 nt, Human
uccauaagcuuguguucau

SEQ ID NO: 1132893 - RNA, 22 nt, Human
gcuggcugaggucuagcucuuu

SEQ ID NO: 1132894 - RNA, 23 nt, Human
ugcagccacucaggagcucagug

SEQ ID NO: 1132895 - RNA, 22 nt, Human
ccuggagcuuggucacgcugcg

SEQ ID NO: 1132896 - RNA, 22 nt, Human
cccuggagugccggaaucaaga

SEQ ID NO: 1132897 - RNA, 22 nt, Human
uuggcuuccaggaucucagcag

SEQ ID NO: 1132898 - RNA, 22 nt, Human
gcagugguggagcuuacauauc

SEQ ID NO: 1132899 - RNA, 22 nt, Human
accucaggauguggacacagaa

SEQ ID NO: 1132900 - RNA, 22 nt, Human
ccuggcugggccugauuucuca

SEQ ID NO: 1132901 - RNA, 22 nt, Human
agcccagcaaagggagguucag

SEQ ID NO: 1132902 - RNA, 22 nt, Human
cuggccuggcagggagggcaug

SEQ ID NO: 1132903 - RNA, 18 nt, Human
uccugccugcgggcuccc

SEQ ID NO: 1132904 - RNA, 22 nt, Human
aggagccaagcagaacuaagga

SEQ ID NO: 1132905 - RNA, 22 nt, Human
auaauuuaauuuucacaguggu

SEQ ID NO: 1132906 - RNA, 20 nt, Human
cccucccagaugcuucccaa

SEQ ID NO: 1132907 - RNA, 22 nt, Human
ggcuucugccacgagagggaag

SEQ ID NO: 1132908 - RNA, 22 nt, Human
gcagccacuuugcaaccaagag

SEQ ID NO: 1132909 - RNA, 22 nt, Human
gcuggcucagggacuagaguuu

SEQ ID NO: 1132910 - RNA, 22 nt, Human
cuuccucacggugcaacaggaa

SEQ ID NO: 1132911 - RNA, 22 nt, Human
uugaaggacauccuauuucuag

SEQ ID NO: 1132912 - RNA, 22 nt, Human
uccuggagccacggagcuuuca

SEQ ID NO: 1132913 - RNA, 22 nt, Human
uuuccucuuccgagggggaggc

SEQ ID NO: 1132914 - RNA, 22 nt, Human
gucuuguuugggauguggaugg

SEQ ID NO: 1132915 - RNA, 22 nt, Human
cagccaggagccucugcaacua

SEQ ID NO: 1132916 - RNA, 22 nt, Human
aagccuugcagcauuaggcucu

SEQ ID NO: 1132917 - RNA, 22 nt, Human
gaggcagaggaagguggucucu

SEQ ID NO: 1132918 - RNA, 22 nt, Human
ccaggagcaacuugaaggcaag

SEQ ID NO: 1132919 - RNA, 22 nt, Human
aagcccagcaucccugcaccag

SEQ ID NO: 1132920 - RNA, 22 nt, Human
gcuuuuucaaaugaaagcuggu

SEQ ID NO: 1132921 - RNA, 23 nt, Human
uccagcagccaagaaggguagaa

SEQ ID NO: 1132922 - RNA, 22 nt, Human
ugcagaagcugcaggucagugg

SEQ ID NO: 1132923 - RNA, 18 nt, Human
acaggccucaguccugca

SEQ ID NO: 1132924 - RNA, 22 nt, Human
ggucccaguugcccaggucagg

SEQ ID NO: 1132925 - RNA, 22 nt, Human
agccaggacguugcucagcucc

SEQ ID NO: 1132926 - RNA, 22 nt, Human
aaaguguacuaugucaugaaca

SEQ ID NO: 1132927 - RNA, 22 nt, Human
agcagcaggcuguguggacuga

SEQ ID NO: 1132928 - RNA, 22 nt, Human
cucucugagugagggacaagcu

SEQ ID NO: 1132929 - RNA, 22 nt, Human
ugugugcauucacaugcaugcc

SEQ ID NO: 1132930 - RNA, 22 nt, Human
gaggccagcgcgcagcacuuuu

SEQ ID NO: 1132931 - RNA, 22 nt, Human
augaugugugcugaucaagcuu

SEQ ID NO: 1132932 - RNA, 18 nt, Human
agcagaauucuaggguuc

SEQ ID NO: 1132933 - RNA, 22 nt, Human
ucagcaguggcucucaugcagu

SEQ ID NO: 1132934 - RNA, 22 nt, Human
agaaacuucagcuauucuuuug

SEQ ID NO: 1132935 - RNA, 22 nt, Human
cucugcagaauuugagcugcuc

SEQ ID NO: 1132936 - RNA, 22 nt, Human
cagugggugaugaguccugggg

SEQ ID NO: 1132937 - RNA, 22 nt, Human
cagaacauucacucauaugugg

SEQ ID NO: 1132938 - RNA, 22 nt, Human
gugauuccuauuaguacaugca

SEQ ID NO: 1132939 - RNA, 22 nt, Human
auaaggcagaaauagggaaagu

SEQ ID NO: 1132940 - RNA, 22 nt, Human
uugcucaggcuuagagcuacua

SEQ ID NO: 1132941 - RNA, 22 nt, Human
caaaaugugagucccaccucaa

SEQ ID NO: 1132942 - RNA, 22 nt, Human
gugggugauguacuggaggcca

SEQ ID NO: 1132943 - RNA, 22 nt, Human
gucagcugucuccccagagugg

SEQ ID NO: 1132944 - RNA, 22 nt, Human
agcagggggccacagucacagc

SEQ ID NO: 1132945 - RNA, 22 nt, Human
ggcugcagauagccagccacca

SEQ ID NO: 1132946 - RNA, 22 nt, Human
ccuuccaggugcaggcaagccu

SEQ ID NO: 1132947 - RNA, 22 nt, Human
acagagccuccaggagugcugg

SEQ ID NO: 1132948 - RNA, 22 nt, Human
gccagcagggcccaaaugcugg

SEQ ID NO: 1132949 - RNA, 22 nt, Human
cugccugcugccuguggagggu

SEQ ID NO: 1132950 - RNA, 22 nt, Human
gaaggcugaugacagauucugc

SEQ ID NO: 1132951 - RNA, 22 nt, Human
cagggcagggagcuuagaauga

SEQ ID NO: 1132952 - RNA, 22 nt, Human
gcucugggaacugacugccuuc

SEQ ID NO: 1132953 - RNA, 22 nt, Human
aaaaugugaucuacaaaugcaa

SEQ ID NO: 1132954 - RNA, 22 nt, Human
ggaaaaggccauuguuucucug

SEQ ID NO: 1132955 - RNA, 21 nt, Human
agagaagaggacuuucucaca

SEQ ID NO: 1132956 - RNA, 22 nt, Human
aagucauuaucucuucuaaucu

SEQ ID NO: 1132957 - RNA, 20 nt, Human
ucucccaggcucagggaaga

SEQ ID NO: 1132958 - RNA, 22 nt, Human
gcccagcagcugguggagaagg

SEQ ID NO: 1132959 - RNA, 22 nt, Human
uugcauaaaugcuuaaaauuug

SEQ ID NO: 1132960 - RNA, 22 nt, Human
uggaggaaguggcuggccagaa

SEQ ID NO: 1132961 - RNA, 22 nt, Human
cuuguccuuuacuugagacuca

SEQ ID NO: 1132962 - RNA, 22 nt, Human
uuagggcuuuucugaauaggcc

SEQ ID NO: 1132963 - RNA, 20 nt, Human
cagaccugcacccacuucga

SEQ ID NO: 1132964 - RNA, 20 nt, Human
cuuugccuauucucugccug

SEQ ID NO: 1132965 - RNA, 22 nt, Human
ggggcggggcucugagaagcau

SEQ ID NO: 1132966 - RNA, 22 nt, Human
agguggggaaaccagcgauccc

SEQ ID NO: 1132967 - RNA, 22 nt, Human
uuugcauuuguucaaguauuga

SEQ ID NO: 1132968 - RNA, 22 nt, Human
ccugccugucccucaguccaca

SEQ ID NO: 1132969 - RNA, 22 nt, Human
acaauucuggguauuuauauag

SEQ ID NO: 1132970 - RNA, 22 nt, Human
agugccuggaccccaugacaua

SEQ ID NO: 1132971 - RNA, 22 nt, Human
ccaggccuccugugaguggacc

SEQ ID NO: 1132972 - RNA, 22 nt, Human
ggcucaggggccaggccugucc

SEQ ID NO: 1132973 - RNA, 22 nt, Human
guucauauuacuuugagugcag

SEQ ID NO: 1132974 - RNA, 22 nt, Human
ugggcacaggggaauggaugaa

SEQ ID NO: 1132975 - RNA, 22 nt, Human
acacaugagaaacaucaguugu

SEQ ID NO: 1132976 - RNA, 22 nt, Human
gccaggcuggugucacaacucu

SEQ ID NO: 1132977 - RNA, 22 nt, Human
auguuuuaugcuucagaugagg

SEQ ID NO: 1132978 - RNA, 22 nt, Human
ucuggccuauuucugucagauc

SEQ ID NO: 1132979 - RNA, 19 nt, Human
uuguucguuccugacaggc

SEQ ID NO: 1132980 - RNA, 19 nt, Human
uggccagguacugucugcu

SEQ ID NO: 1132981 - RNA, 22 nt, Human
agugaaauggaugcugcuacug

SEQ ID NO: 1132982 - RNA, 22 nt, Human
agauacaucauuuauaccuuca

SEQ ID NO: 1132983 - RNA, 22 nt, Human
ucaguuuucucauuuaugagau

SEQ ID NO: 1132984 - RNA, 22 nt, Human
gagagcugggcuuugggugaag

SEQ ID NO: 1132985 - RNA, 22 nt, Human
cuccagggagcuuggaaagacc

SEQ ID NO: 1132986 - RNA, 20 nt, Human
ggaccagguggggcgguggc

SEQ ID NO: 1132987 - RNA, 22 nt, Human
uucuuuccucccagccuuugga

SEQ ID NO: 1132988 - RNA, 20 nt, Human
uauuugaaauggccaagugu

SEQ ID NO: 1132989 - RNA, 22 nt, Human
ggcugggcucgcugauuggcug

SEQ ID NO: 1132990 - RNA, 22 nt, Human
ugugugugggcggaacggcccc

SEQ ID NO: 1132991 - RNA, 22 nt, Human
gagugcaucguggccauuuuaa

SEQ ID NO: 1132992 - RNA, 22 nt, Human
uggcucagcgcggccuggucuu

SEQ ID NO: 1132993 - RNA, 18 nt, Human
gggaucaggcugccuagg

SEQ ID NO: 1132994 - RNA, 22 nt, Human
uccucaggaugugggguagaau

SEQ ID NO: 1132995 - RNA, 22 nt, Human
cccagacuccucuggcuggugg

SEQ ID NO: 1132996 - RNA, 22 nt, Human
cagagcuguugcggggcuuggc

SEQ ID NO: 1132997 - RNA, 22 nt, Human
ggccugcacagagguggcucua

SEQ ID NO: 1132998 - RNA, 17 nt, Human
ugcugccaagucccaac

SEQ ID NO: 1132999 - RNA, 22 nt, Human
ggagagaauuccauggacaugu

SEQ ID NO: 1133000 - RNA, 22 nt, Human
acaggcugacuuccugccaugu

SEQ ID NO: 1133001 - RNA, 22 nt, Human
gcucucugccuuucucaaugac

SEQ ID NO: 1133002 - RNA, 22 nt, Human
uuaggcaaagauauuacguagu

SEQ ID NO: 1133003 - RNA, 22 nt, Human
aggcacugugcugaugucuuau

SEQ ID NO: 1133004 - RNA, 22 nt, Human
aggaguguggccagggcucugg

SEQ ID NO: 1133005 - RNA, 22 nt, Human
ugcagaagacacaagguaacgu

SEQ ID NO: 1133006 - RNA, 22 nt, Human
uagcagcuuccagagagggcag

SEQ ID NO: 1133007 - RNA, 21 nt, Human
ggcagccugacccccagagag

SEQ ID NO: 1133008 - RNA, 22 nt, Human
ugcagaagaccuuccagggcug

SEQ ID NO: 1133009 - RNA, 22 nt, Human
caggguggaauggaaugcuggc

SEQ ID NO: 1133010 - RNA, 22 nt, Human
agagauaugaguaguugugaca

SEQ ID NO: 1133011 - RNA, 23 nt, Human
ugucacauuuaguuggcauuguu

SEQ ID NO: 1133012 - RNA, 22 nt, Human
cacagaaucugugacuccaaga

SEQ ID NO: 1133013 - RNA, 22 nt, Human
cugaaauuccauuucagccaca

SEQ ID NO: 1133014 - RNA, 22 nt, Human
uccuugaauauaauaacaguag

SEQ ID NO: 1133015 - RNA, 22 nt, Human
cugccagccaggccagguaggc

SEQ ID NO: 1133016 - RNA, 22 nt, Human
cugggaggcacuauucaggagg

SEQ ID NO: 1133017 - RNA, 22 nt, Human
aggccugggucucgugccuacc

SEQ ID NO: 1133018 - RNA, 22 nt, Human
ucaagagagugcugcuuggggu

SEQ ID NO: 1133019 - RNA, 22 nt, Human
uguauuuugugaggaucacucu

SEQ ID NO: 1133020 - RNA, 22 nt, Human
agaagauuuagguugacgcuau

SEQ ID NO: 1133021 - RNA, 22 nt, Human
auaauuaauuucaguaaucucc

SEQ ID NO: 1133022 - RNA, 22 nt, Human
gcugggcugagcuagacuuggc

SEQ ID NO: 1133023 - RNA, 17 nt, Human
aauagcugcucagagag

SEQ ID NO: 1133024 - RNA, 20 nt, Human
ugaagcagccuugauucugu

SEQ ID NO: 1133025 - RNA, 22 nt, Human
agagccugugauugucaucacc

SEQ ID NO: 1133026 - RNA, 22 nt, Human
uccaagaucuacagcaguuuag

SEQ ID NO: 1133027 - RNA, 21 nt, Human
gauuucacuuaccuucauuua

SEQ ID NO: 1133028 - RNA, 22 nt, Human
aaguucuacuguggguaaaaug

SEQ ID NO: 1133029 - RNA, 22 nt, Human
uuaauaaacaggugcagcugaa

SEQ ID NO: 1133030 - RNA, 22 nt, Human
accccagcucugagccacacca

SEQ ID NO: 1133031 - RNA, 22 nt, Human
gccuccugagaagccacaggcu

SEQ ID NO: 1133032 - RNA, 22 nt, Human
gcugggagccguaccugucacg

SEQ ID NO: 1133033 - RNA, 22 nt, Human
ggcagcacugcagcuuguuggg

SEQ ID NO: 1133034 - RNA, 22 nt, Human
ggggagaguccuuuccaguucc

SEQ ID NO: 1133035 - RNA, 22 nt, Human
acaguguccuuguggucccugu

SEQ ID NO: 1133036 - RNA, 22 nt, Human
auaauaacaccugaauaggaaa

SEQ ID NO: 1133037 - RNA, 22 nt, Human
cucuccuggggagcacacacac

SEQ ID NO: 1133038 - RNA, 22 nt, Human
uuucuguaauuaaaagggcagg

SEQ ID NO: 1133039 - RNA, 22 nt, Human
ucacuuagauggggaucaucac

SEQ ID NO: 1133040 - RNA, 22 nt, Human
gagggggcgugcaaggcuccgc

SEQ ID NO: 1133041 - RNA, 22 nt, Human
ccugcuggccaguggagggcug

SEQ ID NO: 1133042 - RNA, 22 nt, Human
aggcccuggcacugccugggag

SEQ ID NO: 1133043 - RNA, 22 nt, Human
uccaauguuccaggguaaaugu

SEQ ID NO: 1133044 - RNA, 22 nt, Human
gaagcagcuagcccacuaguca

SEQ ID NO: 1133045 - RNA, 23 nt, Human
gcagacagagcagacuaagacaa

SEQ ID NO: 1133046 - RNA, 22 nt, Human
cugaagaugucugagaugcuca

SEQ ID NO: 1133047 - RNA, 22 nt, Human
cccagacucaucccugggagcu

SEQ ID NO: 1133048 - RNA, 22 nt, Human
agcagugggggaguguuaguuu

SEQ ID NO: 1133049 - RNA, 23 nt, Human
uggauaaagcugugcugcauagg

SEQ ID NO: 1133050 - RNA, 22 nt, Human
uugaagcaaggcgaaucuugug

SEQ ID NO: 1133051 - RNA, 19 nt, Human
ucuggagcugaugcaggug

SEQ ID NO: 1133052 - RNA, 22 nt, Human
ggggaggcugaugugggcaaag

SEQ ID NO: 1133053 - RNA, 22 nt, Human
aaaagaggagugguuuaugaca

SEQ ID NO: 1133054 - RNA, 22 nt, Human
agggggugcuacuuccagaguu

SEQ ID NO: 1133055 - RNA, 22 nt, Human
ccugaagagcacucuagaguug

SEQ ID NO: 1133056 - RNA, 20 nt, Human
aggcacuguugucuguaucc

SEQ ID NO: 1133057 - RNA, 22 nt, Human
aaggcaggaugcggacccaucu

SEQ ID NO: 1133058 - RNA, 22 nt, Human
ucaaaguuuguggcaauuuauu

SEQ ID NO: 1133059 - RNA, 22 nt, Human
ugucacuucaggaaugcaggga

SEQ ID NO: 1133060 - RNA, 22 nt, Human
gagagcugugguuugaccaggc

SEQ ID NO: 1133061 - RNA, 22 nt, Human
cugggagcugucaggagcgugu

SEQ ID NO: 1133062 - RNA, 22 nt, Human
uucucuuagcuguaaagucaau

SEQ ID NO: 1133063 - RNA, 19 nt, Human
ccaguagagacagcugcag

SEQ ID NO: 1133064 - RNA, 22 nt, Human
ucucagggaccaugaugaugac

SEQ ID NO: 1133065 - RNA, 18 nt, Human
uggagcaggaagccuggc

SEQ ID NO: 1133066 - RNA, 22 nt, Human
agggccugggauguccuccuag

SEQ ID NO: 1133067 - RNA, 22 nt, Human
gucauugcaguggcaaaucaca

SEQ ID NO: 1133068 - RNA, 17 nt, Human
ugagacagggcaggccc

SEQ ID NO: 1133069 - RNA, 22 nt, Human
ugcagggccuucuagaccaugg

SEQ ID NO: 1133070 - RNA, 18 nt, Human
caaagcucacguuccauc

SEQ ID NO: 1133071 - RNA, 22 nt, Human
ugcaagggcuuagggggcugug

SEQ ID NO: 1133072 - RNA, 22 nt, Human
aagccagggauuccugagggag

SEQ ID NO: 1133073 - RNA, 22 nt, Human
uguuauugagguuacuuauaag

SEQ ID NO: 1133074 - RNA, 22 nt, Human
uaaauccagcuucuaauuuaga

SEQ ID NO: 1133075 - RNA, 22 nt, Human
gcagggcucugcuguaguccua

SEQ ID NO: 1133076 - RNA, 21 nt, Human
gccucugcugucuuauuguga

SEQ ID NO: 1133077 - RNA, 22 nt, Human
ggccugcuccgggggcugagcu

SEQ ID NO: 1133078 - RNA, 22 nt, Human
gccuggagcucuccacuugggg

SEQ ID NO: 1133079 - RNA, 22 nt, Human
gcaggguaggugacagguaguc

SEQ ID NO: 1133080 - RNA, 22 nt, Human
aagggcugaaagaccuugggca

SEQ ID NO: 1133081 - RNA, 22 nt, Human
uucuuuggggaauauucugguu

SEQ ID NO: 1133082 - RNA, 22 nt, Human
gaaggaaaacagaucugccuga

SEQ ID NO: 1133083 - RNA, 22 nt, Human
ggccagagaauaugccuuacgu

SEQ ID NO: 1133084 - RNA, 22 nt, Human
gccagccugugggggcucugug

SEQ ID NO: 1133085 - RNA, 22 nt, Human
uggcccugacugauguggaggg

SEQ ID NO: 1133086 - RNA, 22 nt, Human
caacagaaggaagcagggucag

SEQ ID NO: 1133087 - RNA, 22 nt, Human
ccagagaccagaacauggggau

SEQ ID NO: 1133088 - RNA, 22 nt, Human
gggcccacuggcugucugaccc

SEQ ID NO: 1133089 - RNA, 22 nt, Human
auguauuucuauguagugaaga

SEQ ID NO: 1133090 - RNA, 22 nt, Human
uaaugcaguacugauauaaaca

SEQ ID NO: 1133091 - RNA, 22 nt, Human
cagacuugacggcagcugcuuu

SEQ ID NO: 1133092 - RNA, 22 nt, Human
ugcugggggugucucaccaggc

SEQ ID NO: 1133093 - RNA, 22 nt, Human
aaagaaauagauggcauuuaaa

SEQ ID NO: 1133094 - RNA, 22 nt, Human
ucucaagagggaggcaaucaug

SEQ ID NO: 1133095 - RNA, 19 nt, Human
gucacauuugucucccagg

SEQ ID NO: 1133096 - RNA, 22 nt, Human
guacauuucauuuaaaugaugu

SEQ ID NO: 1133097 - RNA, 22 nt, Human
aaaaguuaccucuguaauauaa

SEQ ID NO: 1133098 - RNA, 22 nt, Human
acacaguauuacaauaggugcu

SEQ ID NO: 1133099 - RNA, 22 nt, Human
agucauauguggcauuuucuaa

SEQ ID NO: 1133100 - RNA, 20 nt, Human
gguagcagcugcugucaucc

SEQ ID NO: 1133101 - RNA, 22 nt, Human
agucaguguucuccggagaggc

SEQ ID NO: 1133102 - RNA, 22 nt, Human
uuuauugcauacacaaauguca

SEQ ID NO: 1133103 - RNA, 22 nt, Human
agccuucacugggaccuuggau

SEQ ID NO: 1133104 - RNA, 22 nt, Human
aggacagaccuaggacuggagc

SEQ ID NO: 1133105 - RNA, 22 nt, Human
ucauugcaagcucauuuaucug

SEQ ID NO: 1133106 - RNA, 22 nt, Human
agucccagcucugccacuuacu

SEQ ID NO: 1133107 - RNA, 22 nt, Human
agcugcugcgccucacccuggc

SEQ ID NO: 1133108 - RNA, 22 nt, Human
gcugccaguguggcaugaugca

SEQ ID NO: 1133109 - RNA, 22 nt, Human
accugaggccuccccagcagac

SEQ ID NO: 1133110 - RNA, 21 nt, Human
guggcucugccaggacugaaa

SEQ ID NO: 1133111 - RNA, 22 nt, Human
caagggcucacggucugcuggg

SEQ ID NO: 1133112 - RNA, 22 nt, Human
uuguauuagcuguaaauuuucu

SEQ ID NO: 1133113 - RNA, 22 nt, Human
uuucuagaggcuccaggggagu

SEQ ID NO: 1133114 - RNA, 22 nt, Human
uaauacuuuugccuuguauuca

SEQ ID NO: 1133115 - RNA, 22 nt, Human
gaggcugcaggcaaugcugccc

SEQ ID NO: 1133116 - RNA, 22 nt, Human
aaguucaagagugacauauuag

SEQ ID NO: 1133117 - RNA, 17 nt, Human
aggugcagaggcagagc

SEQ ID NO: 1133118 - RNA, 22 nt, Human
ugggauggcauccugggccuug

SEQ ID NO: 1133119 - RNA, 22 nt, Human
cuggcagcauggagccugugcu

SEQ ID NO: 1133120 - RNA, 23 nt, Human
agacagaggcugaggcuggccgc

SEQ ID NO: 1133121 - RNA, 22 nt, Human
gggcugcuuuuaagggucucag

SEQ ID NO: 1133122 - RNA, 22 nt, Human
cugagcuggucuauggacuugg

SEQ ID NO: 1133123 - RNA, 22 nt, Human
uauuuccugcauggugauguaa

SEQ ID NO: 1133124 - RNA, 22 nt, Human
gagcuggcuccgccaugcugcu

SEQ ID NO: 1133125 - RNA, 22 nt, Human
agagcuggcugguagcccugau

SEQ ID NO: 1133126 - RNA, 22 nt, Human
agauacauauagaaaacaucaa

SEQ ID NO: 1133127 - RNA, 22 nt, Human
cagagccauccaggugccuguu

SEQ ID NO: 1133128 - RNA, 22 nt, Human
agccuccaguagcugaagagac

SEQ ID NO: 1133129 - RNA, 21 nt, Human
uuucaauguguucuuuguagu

SEQ ID NO: 1133130 - RNA, 22 nt, Human
agugaguggguuacagauggga

SEQ ID NO: 1133131 - RNA, 22 nt, Human
uaaaugugagugaugcggugaa

SEQ ID NO: 1133132 - RNA, 22 nt, Human
cagggcuggauccuccagacuc

SEQ ID NO: 1133133 - RNA, 22 nt, Human
cauggccucaaaggacugcaga

SEQ ID NO: 1133134 - RNA, 22 nt, Human
ucugcagcgugcaggcuggugc

SEQ ID NO: 1133135 - RNA, 21 nt, Human
uuugcauuuuacaugugggga

SEQ ID NO: 1133136 - RNA, 22 nt, Human
cuggccugaucucaugcugucc

SEQ ID NO: 1133137 - RNA, 22 nt, Human
ugggcugcugucugcacaugcu

SEQ ID NO: 1133138 - RNA, 17 nt, Human
uccuucagggccucaca

SEQ ID NO: 1133139 - RNA, 20 nt, Human
auaauuuacccugcaccacu

SEQ ID NO: 1133140 - RNA, 22 nt, Human
cuggacuuuggcccaucugcca

SEQ ID NO: 1133141 - RNA, 22 nt, Human
ucauccaguucacauggugagu

SEQ ID NO: 1133142 - RNA, 22 nt, Human
ugugcaguuucuauguugucca

SEQ ID NO: 1133143 - RNA, 22 nt, Human
uacauuaucuuguuaucuuuca

SEQ ID NO: 1133144 - RNA, 22 nt, Human
guggccugaugccagcccugug

SEQ ID NO: 1133145 - RNA, 22 nt, Human
ggaggccaucuggcuggaggcu

SEQ ID NO: 1133146 - RNA, 22 nt, Human
gguggggucacgacagagggaa

SEQ ID NO: 1133147 - RNA, 22 nt, Human
ggcugcaggcagaggcugucug

SEQ ID NO: 1133148 - RNA, 22 nt, Human
agggagacacaugaggaaguca

SEQ ID NO: 1133149 - RNA, 18 nt, Human
gcaggugccacugcuguu

SEQ ID NO: 1133150 - RNA, 22 nt, Human
aagcagccuggacuugggcugg

SEQ ID NO: 1133151 - RNA, 22 nt, Human
aauaauuuuagcucagaguugu

SEQ ID NO: 1133152 - RNA, 22 nt, Human
ugcuggccgugagcucucggga

SEQ ID NO: 1133153 - RNA, 21 nt, Human
ggggcagagcuaggcccugca

SEQ ID NO: 1133154 - RNA, 22 nt, Human
cagagcuggagaaguggauuua

SEQ ID NO: 1133155 - RNA, 22 nt, Human
cucuguccacagguuugucccu

SEQ ID NO: 1133156 - RNA, 22 nt, Human
ucccuuaaaacucauguguugu

SEQ ID NO: 1133157 - RNA, 22 nt, Human
ugaagacacauacaagggaaug

SEQ ID NO: 1133158 - RNA, 22 nt, Human
ccaggcugccgaggaaagaaag

SEQ ID NO: 1133159 - RNA, 22 nt, Human
caggaggaggugagguagaacu

SEQ ID NO: 1133160 - RNA, 22 nt, Human
ggacccugggcuugcuccuggg

SEQ ID NO: 1133161 - RNA, 22 nt, Human
gaggcucagagggagcaugguc

SEQ ID NO: 1133162 - RNA, 19 nt, Human
ugccagcauuaggcugaag

SEQ ID NO: 1133163 - RNA, 22 nt, Human
cacagaagaaucaugcuguguu

SEQ ID NO: 1133164 - RNA, 22 nt, Human
auuuugaaaccaaguuauuucc

SEQ ID NO: 1133165 - RNA, 21 nt, Human
acagaugggaugagcacacug

SEQ ID NO: 1133166 - RNA, 22 nt, Human
gauaugaaguggcauugugaag

SEQ ID NO: 1133167 - RNA, 22 nt, Human
ucuuuugugccaaguaaugaau

SEQ ID NO: 1133168 - RNA, 22 nt, Human
uuuccaauaaagugucauuguu

SEQ ID NO: 1133169 - RNA, 18 nt, Human
ugcucuguuuaaugauuu

SEQ ID NO: 1133170 - RNA, 22 nt, Human
uucccaggcugugcuaccagag

SEQ ID NO: 1133171 - RNA, 22 nt, Human
gcugcucugugacagccuccgg

SEQ ID NO: 1133172 - RNA, 20 nt, Human
cugagcccccagccugcagg

SEQ ID NO: 1133173 - RNA, 19 nt, Human
gaagaagcuugagaaguag

SEQ ID NO: 1133174 - RNA, 17 nt, Human
agugaaauuuacauugc

SEQ ID NO: 1133175 - RNA, 22 nt, Human
ggcgugggaaguggggcuucug

SEQ ID NO: 1133176 - RNA, 22 nt, Human
gcagagugaggaagagcuucca

SEQ ID NO: 1133177 - RNA, 22 nt, Human
cccagcuccuuggaugggcagg

SEQ ID NO: 1133178 - RNA, 22 nt, Human
gguuugcauucugaaaggcuca

SEQ ID NO: 1133179 - RNA, 22 nt, Human
cugggccucaaucucagaguuu

SEQ ID NO: 1133180 - RNA, 22 nt, Human
ucauuucuccgaccugcugucc

SEQ ID NO: 1133181 - RNA, 22 nt, Human
ucucaccaaagccuugaccaua

SEQ ID NO: 1133182 - RNA, 22 nt, Human
gccuuucaguuccaucaaagga

SEQ ID NO: 1133183 - RNA, 22 nt, Human
gcaggagccacuucagggaugc

SEQ ID NO: 1133184 - RNA, 22 nt, Human
cauucauuuaugaaauaucuau

SEQ ID NO: 1133185 - RNA, 22 nt, Human
acuuugcaauacuuaauacaaa

SEQ ID NO: 1133186 - RNA, 22 nt, Human
gaggcucugugaugugccaggc

SEQ ID NO: 1133187 - RNA, 22 nt, Human
gagcugaguuaccuccagauca

SEQ ID NO: 1133188 - RNA, 22 nt, Human
cccugggcagucugcacuucag

SEQ ID NO: 1133189 - RNA, 22 nt, Human
uccucaugccgggucucacgcu

SEQ ID NO: 1133190 - RNA, 22 nt, Human
guggcugcagagggcacagcau

SEQ ID NO: 1133191 - RNA, 22 nt, Human
ccugagggaggguauaggcugu

SEQ ID NO: 1133192 - RNA, 22 nt, Human
uacauucuggaaaggcacagac

SEQ ID NO: 1133193 - RNA, 22 nt, Human
cugucuguucagauucauuacu

SEQ ID NO: 1133194 - RNA, 22 nt, Human
ucugagagguuaagcaauuuga

SEQ ID NO: 1133195 - RNA, 22 nt, Human
ugggcuggugagggaucauuua

SEQ ID NO: 1133196 - RNA, 22 nt, Human
gugaaaucugaggcccaugaug

SEQ ID NO: 1133197 - RNA, 22 nt, Human
ucaaagucucugcuucuguaac

SEQ ID NO: 1133198 - RNA, 22 nt, Human
ugcuuuauuuauaaaauagcaa

SEQ ID NO: 1133199 - RNA, 22 nt, Human
aauguuuuguaugccucugagc

SEQ ID NO: 1133200 - RNA, 22 nt, Human
acauuucucuuagaguuggacu

SEQ ID NO: 1133201 - RNA, 22 nt, Human
gggaguggguuuggccuaggcc

SEQ ID NO: 1133202 - RNA, 22 nt, Human
cagcuugggucaggugccugcu

SEQ ID NO: 1133203 - RNA, 22 nt, Human
gagccagguuggaggcugcagu

SEQ ID NO: 1133204 - RNA, 22 nt, Human
agaaagcacucugucuuuuacc

SEQ ID NO: 1133205 - RNA, 22 nt, Human
ccagggcauccucacaucgcag

SEQ ID NO: 1133206 - RNA, 22 nt, Human
gcucaggaucccaggggugugc

SEQ ID NO: 1133207 - RNA, 22 nt, Human
ggccucucucccuggcuugcag

SEQ ID NO: 1133208 - RNA, 22 nt, Human
cugcagggcagggccuccuggc

SEQ ID NO: 1133209 - RNA, 22 nt, Human
gauuucaccugaucuugucauc

SEQ ID NO: 1133210 - RNA, 17 nt, Human
ugagcaguagaagaugc

SEQ ID NO: 1133211 - RNA, 22 nt, Human
uagggcuauaagagaauaagac

SEQ ID NO: 1133212 - RNA, 22 nt, Human
uagggcaguuauaacauuagug

SEQ ID NO: 1133213 - RNA, 22 nt, Human
cauuagaagaacaguuauauua

SEQ ID NO: 1133214 - RNA, 22 nt, Human
gcaggcugaugacuggaguugg

SEQ ID NO: 1133215 - RNA, 22 nt, Human
uccugggcugcagggaagagca

SEQ ID NO: 1133216 - RNA, 22 nt, Human
auguuuguugaacaucuacugc

SEQ ID NO: 1133217 - RNA, 22 nt, Human
ccuggcuuccuggagcucacaa

SEQ ID NO: 1133218 - RNA, 22 nt, Human
gagauuggccuggcuugccaac

SEQ ID NO: 1133219 - RNA, 22 nt, Human
ucucaggaauagaguggcagca

SEQ ID NO: 1133220 - RNA, 22 nt, Human
aagcaagacagaaguuacugcc

SEQ ID NO: 1133221 - RNA, 22 nt, Human
agccucuguagaaagcagugug

SEQ ID NO: 1133222 - RNA, 22 nt, Human
auaaggaaugauguaucaguuu

SEQ ID NO: 1133223 - RNA, 22 nt, Human
cucugugcccuacugcucagcu

SEQ ID NO: 1133224 - RNA, 22 nt, Human
ugggcagauguggcucuccuug

SEQ ID NO: 1133225 - RNA, 22 nt, Human
gcuaccugagcaagagcuucaa

SEQ ID NO: 1133226 - RNA, 22 nt, Human
uggcugggcccccaccugccuc

SEQ ID NO: 1133227 - RNA, 22 nt, Human
uuuuugcaccaaccuaauagaa

SEQ ID NO: 1133228 - RNA, 22 nt, Human
caagaauuguacaaacugggug

SEQ ID NO: 1133229 - RNA, 22 nt, Human
uacaagagguauauagaaacag

SEQ ID NO: 1133230 - RNA, 22 nt, Human
gaggcagcugaaggagugacag

SEQ ID NO: 1133231 - RNA, 22 nt, Human
aagcccaguuucacacugagac

SEQ ID NO: 1133232 - RNA, 22 nt, Human
ucauggagacuuugagccuguu

SEQ ID NO: 1133233 - RNA, 22 nt, Human
augagacuaccuguaauguggc

SEQ ID NO: 1133234 - RNA, 22 nt, Human
ccaggcagcaaauuuucugaau

SEQ ID NO: 1133235 - RNA, 22 nt, Human
uggccuggccacauccagcagg

SEQ ID NO: 1133236 - RNA, 22 nt, Human
ugucaugcagguuuguuauaga

SEQ ID NO: 1133237 - RNA, 22 nt, Human
gcugagucuugagcacugagca

SEQ ID NO: 1133238 - RNA, 22 nt, Human
gccuggagaauuaaaaggaagg

SEQ ID NO: 1133239 - RNA, 22 nt, Human
ggcaucuguccaucucuccagc

SEQ ID NO: 1133240 - RNA, 22 nt, Human
ucugcugcacaaauucaucucu

SEQ ID NO: 1133241 - RNA, 22 nt, Human
aaguuguauauaccgcuuuaag

SEQ ID NO: 1133242 - RNA, 22 nt, Human
ucaggaaagaagaugcucagug

SEQ ID NO: 1133243 - RNA, 22 nt, Human
ggcagcuggggcagugcccugu

SEQ ID NO: 1133244 - RNA, 22 nt, Human
cucccaggguagggagagacua

SEQ ID NO: 1133245 - RNA, 22 nt, Human
aacuucuugguccugagcuguu

SEQ ID NO: 1133246 - RNA, 22 nt, Human
gagccaggcccguacuugcugu

SEQ ID NO: 1133247 - RNA, 22 nt, Human
ggccucugcaacuggcuguggc

SEQ ID NO: 1133248 - RNA, 22 nt, Human
ggcagcuccucucagcaaaaga

SEQ ID NO: 1133249 - RNA, 22 nt, Human
aggcacugggggaugagcaagg

SEQ ID NO: 1133250 - RNA, 22 nt, Human
gucccuggaucugggacagcug

SEQ ID NO: 1133251 - RNA, 20 nt, Human
ccuggcugcauucaggacgg

SEQ ID NO: 1133252 - RNA, 22 nt, Human
agccccuuccaguucucagauc

SEQ ID NO: 1133253 - RNA, 20 nt, Human
acagaaagagagaaugucag

SEQ ID NO: 1133254 - RNA, 22 nt, Human
aguaucaaggaucuccagcacc

SEQ ID NO: 1133255 - RNA, 22 nt, Human
ugcccacauucaaaaggugaug

SEQ ID NO: 1133256 - RNA, 22 nt, Human
cugagccaaggggacagugaca

SEQ ID NO: 1133257 - RNA, 22 nt, Human
gcugaagagagaugcguccagc

SEQ ID NO: 1133258 - RNA, 22 nt, Human
ugccugggguuggcaaacugcu

SEQ ID NO: 1133259 - RNA, 22 nt, Human
aagcagccaccucaucuccacu

SEQ ID NO: 1133260 - RNA, 22 nt, Human
gcacccagaggucagcagugcu

SEQ ID NO: 1133261 - RNA, 22 nt, Human
ugcagaagcagagccgguggcc

SEQ ID NO: 1133262 - RNA, 22 nt, Human
ucucagagauuuauggaaaacu

SEQ ID NO: 1133263 - RNA, 22 nt, Human
ucucucuuuuuaaucauguaau

SEQ ID NO: 1133264 - RNA, 22 nt, Human
ccagggugugggcgucggcacg

SEQ ID NO: 1133265 - RNA, 22 nt, Human
cuugugcaauugacauugaauc

SEQ ID NO: 1133266 - RNA, 22 nt, Human
ggccugcugcuaugacuuccug

SEQ ID NO: 1133267 - RNA, 22 nt, Human
uaacagaagaaaacauauugga

SEQ ID NO: 1133268 - RNA, 21 nt, Human
agaugaggauacugaggccua

SEQ ID NO: 1133269 - RNA, 22 nt, Human
uugcauuguaggauguuagaag

SEQ ID NO: 1133270 - RNA, 22 nt, Human
uguguacucaauugagccauuu

SEQ ID NO: 1133271 - RNA, 17 nt, Human
agagagagcaugccacc

SEQ ID NO: 1133272 - RNA, 22 nt, Human
uaagcauaacuaaaaaugauuu

SEQ ID NO: 1133273 - RNA, 22 nt, Human
gccuccugaaaggaagagcucc

SEQ ID NO: 1133274 - RNA, 21 nt, Human
uggcccuggccacggcugcca

SEQ ID NO: 1133275 - RNA, 22 nt, Human
agaacagcagcacgucaagcug

SEQ ID NO: 1133276 - RNA, 22 nt, Human
gcccugugcgacucuagagguu

SEQ ID NO: 1133277 - RNA, 20 nt, Human
auugucagccuucagaggag

SEQ ID NO: 1133278 - RNA, 22 nt, Human
guguuuccucacuucucugacu

SEQ ID NO: 1133279 - RNA, 22 nt, Human
guuuuguuuugagucaacucca

SEQ ID NO: 1133280 - RNA, 22 nt, Human
aguguguguuugggcgguuuau

SEQ ID NO: 1133281 - RNA, 22 nt, Human
gggcagcucucacagcagccaa

SEQ ID NO: 1133282 - RNA, 22 nt, Human
uggcagaaguucacuaguagcu

SEQ ID NO: 1133283 - RNA, 22 nt, Human
cugggagcuagcucugagcuga

SEQ ID NO: 1133284 - RNA, 22 nt, Human
uuccauauuuguguggcaaaag

SEQ ID NO: 1133285 - RNA, 22 nt, Human
uguuaaucaaucaacaguauua

SEQ ID NO: 1133286 - RNA, 19 nt, Human
gcaggcacagcccugggug

SEQ ID NO: 1133287 - RNA, 22 nt, Human
ucagaguguggugagaugugca

SEQ ID NO: 1133288 - RNA, 22 nt, Human
cacagcuuaugccacugauugg

SEQ ID NO: 1133289 - RNA, 22 nt, Human
ugaagcaggcauugacugauga

SEQ ID NO: 1133290 - RNA, 20 nt, Human
gcagcugaaaguaugacacc

SEQ ID NO: 1133291 - RNA, 22 nt, Human
gagcccuccauggagccaggca

SEQ ID NO: 1133292 - RNA, 23 nt, Human
uggcuggcagaaacugaagcaug

SEQ ID NO: 1133293 - RNA, 22 nt, Human
cuggccuagcucucugcuugaa

SEQ ID NO: 1133294 - RNA, 22 nt, Human
caggaggccaacugugggacuu

SEQ ID NO: 1133295 - RNA, 22 nt, Human
agacagaacagaauaauuguug

SEQ ID NO: 1133296 - RNA, 22 nt, Human
aggcaggcucaggcccaugcuu

SEQ ID NO: 1133297 - RNA, 22 nt, Human
ccagucacagguguguuuauau

SEQ ID NO: 1133298 - RNA, 22 nt, Human
agggcccauagaucgucagcuu

SEQ ID NO: 1133299 - RNA, 22 nt, Human
ugcucugugguccaagauggcu

SEQ ID NO: 1133300 - RNA, 22 nt, Human
cucagggucugguccuuagauu

SEQ ID NO: 1133301 - RNA, 22 nt, Human
agccauggcgccacuagaggga

SEQ ID NO: 1133302 - RNA, 22 nt, Human
ccuagagcucugcuuuaucuaa

SEQ ID NO: 1133303 - RNA, 22 nt, Human
ucagaggaauaaugcugcauuu

SEQ ID NO: 1133304 - RNA, 22 nt, Human
uguuuuaagcucuagaagggga

SEQ ID NO: 1133305 - RNA, 22 nt, Human
cccagccucuguuugcuccucu

SEQ ID NO: 1133306 - RNA, 22 nt, Human
cucccagggccaucgagucacu

SEQ ID NO: 1133307 - RNA, 22 nt, Human
gcugccugucccaggaugagga

SEQ ID NO: 1133308 - RNA, 22 nt, Human
cuagaaauauuuuacagucaag

SEQ ID NO: 1133309 - RNA, 19 nt, Human
gagcacagcggcauuuggu

SEQ ID NO: 1133310 - RNA, 22 nt, Human
aaugaacaucaaaugccuacca

SEQ ID NO: 1133311 - RNA, 22 nt, Human
ggcagagaugugggucagaauc

SEQ ID NO: 1133312 - RNA, 22 nt, Human
agggaagaaaauccaucgcugc

SEQ ID NO: 1133313 - RNA, 22 nt, Human
aagugaguggccuggagaggug

SEQ ID NO: 1133314 - RNA, 22 nt, Human
ccuugcaggggaacaggcagug

SEQ ID NO: 1133315 - RNA, 22 nt, Human
cuggcagcugugugaagaacug

SEQ ID NO: 1133316 - RNA, 22 nt, Human
cugcaagauuggaagaugcaau

SEQ ID NO: 1133317 - RNA, 22 nt, Human
agaggccagggacacugcucaa

SEQ ID NO: 1133318 - RNA, 22 nt, Human
uaguuauuauuguuacuaucag

SEQ ID NO: 1133319 - RNA, 22 nt, Human
cugugcauugucuugucuguag

SEQ ID NO: 1133320 - RNA, 21 nt, Human
ggacuuacauagguaaggggu

SEQ ID NO: 1133321 - RNA, 22 nt, Human
acaaaguuauucuuucagagga

SEQ ID NO: 1133322 - RNA, 22 nt, Human
acaguaauaaguguuggugagg

SEQ ID NO: 1133323 - RNA, 22 nt, Human
gcuguccucugaucucuggagg

SEQ ID NO: 1133324 - RNA, 22 nt, Human
uucucuuucuacagugugauug

SEQ ID NO: 1133325 - RNA, 22 nt, Human
cugucaguucuuccagauagag

SEQ ID NO: 1133326 - RNA, 22 nt, Human
acaaagugaauugcaucgaguu

SEQ ID NO: 1133327 - RNA, 22 nt, Human
guguaauuauauaaagaucuac

SEQ ID NO: 1133328 - RNA, 22 nt, Human
cugaggccuaagacaugaauga

SEQ ID NO: 1133329 - RNA, 22 nt, Human
cugcugggcuccucaugugacu

SEQ ID NO: 1133330 - RNA, 20 nt, Human
gcugggggugugcugaguga

SEQ ID NO: 1133331 - RNA, 22 nt, Human
guuccacaaaauguacccaguu

SEQ ID NO: 1133332 - RNA, 22 nt, Human
gaaaucugaacucuguauccuu

SEQ ID NO: 1133333 - RNA, 22 nt, Human
acuuucucaggaauucacagac

SEQ ID NO: 1133334 - RNA, 22 nt, Human
ucuggcucaggagcuguguuca

SEQ ID NO: 1133335 - RNA, 22 nt, Human
gcccaugcucucaggcgggccu

SEQ ID NO: 1133336 - RNA, 22 nt, Human
uuccuggugguggugacagcac

SEQ ID NO: 1133337 - RNA, 19 nt, Human
ccagcagcuuugauucucu

SEQ ID NO: 1133338 - RNA, 22 nt, Human
aaggaggaauuucagggugaau

SEQ ID NO: 1133339 - RNA, 22 nt, Human
ggcggggguccaggagccugca

SEQ ID NO: 1133340 - RNA, 22 nt, Human
acugugugaaacaucaaugugu

SEQ ID NO: 1133341 - RNA, 22 nt, Human
cugggcuguaauguggcacuga

SEQ ID NO: 1133342 - RNA, 22 nt, Human
aggcacuguacuagguacaggg

SEQ ID NO: 1133343 - RNA, 21 nt, Human
ucucuacacuuucacuaggcu

SEQ ID NO: 1133344 - RNA, 22 nt, Human
ucccucuguguugggcaugccu

SEQ ID NO: 1133345 - RNA, 22 nt, Human
gagcagggagacaacucuggug

SEQ ID NO: 1133346 - RNA, 22 nt, Human
ucccuggcagcuaagggugguc

SEQ ID NO: 1133347 - RNA, 22 nt, Human
ggccuggcauggggacuaaggg

SEQ ID NO: 1133348 - RNA, 22 nt, Human
ggcugcaguuugucuuuugcuu

SEQ ID NO: 1133349 - RNA, 22 nt, Human
cuggcucacuagcccugcccug

SEQ ID NO: 1133350 - RNA, 22 nt, Human
ccaggggcuggugcugagcugg

SEQ ID NO: 1133351 - RNA, 22 nt, Human
ugggcaggauaauaucucaugu

SEQ ID NO: 1133352 - RNA, 22 nt, Human
agauacauagcugugagcacac

SEQ ID NO: 1133353 - RNA, 22 nt, Human
cuguacauauacauuuuuuucc

SEQ ID NO: 1133354 - RNA, 22 nt, Human
agcagcucuggcacuguagcau

SEQ ID NO: 1133355 - RNA, 22 nt, Human
ugugccuucucaguccugcuca

SEQ ID NO: 1133356 - RNA, 22 nt, Human
ggcagaggagcuggaaacaugg

SEQ ID NO: 1133357 - RNA, 21 nt, Human
aggugcagagccagggaccag

SEQ ID NO: 1133358 - RNA, 22 nt, Human
cacucccuucaggagccuagga

SEQ ID NO: 1133359 - RNA, 22 nt, Human
cugcccugugaggguccuuggg

SEQ ID NO: 1133360 - RNA, 22 nt, Human
gcagcagagcuuuguccuggcu

SEQ ID NO: 1133361 - RNA, 22 nt, Human
ucuggauggucagcucuuccug

SEQ ID NO: 1133362 - RNA, 22 nt, Human
agccuggagcuugaguuaugag

SEQ ID NO: 1133363 - RNA, 23 nt, Human
acacaauagaguacuauucagcc

SEQ ID NO: 1133364 - RNA, 22 nt, Human
uuugugaagggaacagaagugu

SEQ ID NO: 1133365 - RNA, 21 nt, Human
uagagaaaagaagcuguuccu

SEQ ID NO: 1133366 - RNA, 22 nt, Human
cucccagagaccaagcugagaa

SEQ ID NO: 1133367 - RNA, 22 nt, Human
caggagcugggucuggaagcag

SEQ ID NO: 1133368 - RNA, 22 nt, Human
ccagggcuggugggagaugcug

SEQ ID NO: 1133369 - RNA, 22 nt, Human
ccagcugcugugaggaccacag

SEQ ID NO: 1133370 - RNA, 22 nt, Human
gaggagcacaugaggcugaggg

SEQ ID NO: 1133371 - RNA, 22 nt, Human
gcuggggagggcgucaaggcca

SEQ ID NO: 1133372 - RNA, 22 nt, Human
uuugcauuauauuuauagaaga

SEQ ID NO: 1133373 - RNA, 22 nt, Human
cugucuguuucugauucaaccu

SEQ ID NO: 1133374 - RNA, 22 nt, Human
cugagccaaaaagcagagcuug

SEQ ID NO: 1133375 - RNA, 22 nt, Human
agagaggcgaguuaccugugcu

SEQ ID NO: 1133376 - RNA, 22 nt, Human
ugguacuuggaggcagaaaaau

SEQ ID NO: 1133377 - RNA, 22 nt, Human
aggaggccgcugaugggcuccc

SEQ ID NO: 1133378 - RNA, 22 nt, Human
agccaggaaccagcuacagucu

SEQ ID NO: 1133379 - RNA, 20 nt, Human
aggagaugauccagagucag

SEQ ID NO: 1133380 - RNA, 22 nt, Human
cuccaguaucuguaggaaaagg

SEQ ID NO: 1133381 - RNA, 22 nt, Human
gagguacagaguguuccaaugu

SEQ ID NO: 1133382 - RNA, 22 nt, Human
agcagcaacuuauuuuucuuau

SEQ ID NO: 1133383 - RNA, 22 nt, Human
ccagcuccccucagcagguaau

SEQ ID NO: 1133384 - RNA, 22 nt, Human
caggccugagacaucugagaua

SEQ ID NO: 1133385 - RNA, 22 nt, Human
uggcucagauaauucaaggggc

SEQ ID NO: 1133386 - RNA, 22 nt, Human
agaaaacauuacauaggugugu

SEQ ID NO: 1133387 - RNA, 22 nt, Human
aagcugccagcugagcugaggc

SEQ ID NO: 1133388 - RNA, 22 nt, Human
ggugccaggcucccagcucagg

SEQ ID NO: 1133389 - RNA, 22 nt, Human
ugugcucuggaguugccuucac

SEQ ID NO: 1133390 - RNA, 22 nt, Human
ucugcuggccuuagcaggucua

SEQ ID NO: 1133391 - RNA, 22 nt, Human
aucagcaaaaaugccuucagaa

SEQ ID NO: 1133392 - RNA, 22 nt, Human
ugggggucaggaugaggccuug

SEQ ID NO: 1133393 - RNA, 20 nt, Human
ucugugugccaucaccuaac

SEQ ID NO: 1133394 - RNA, 22 nt, Human
ugcugucugauucagggugauu

SEQ ID NO: 1133395 - RNA, 22 nt, Human
acagcagagacacucaggaggc

SEQ ID NO: 1133396 - RNA, 23 nt, Human
agcccagcagagaaccuaggucc

SEQ ID NO: 1133397 - RNA, 22 nt, Human
ccacugggcguuucuguccaau

SEQ ID NO: 1133398 - RNA, 22 nt, Human
guguaucaaagcacagacuuca

SEQ ID NO: 1133399 - RNA, 22 nt, Human
caauguuuuuccuuccuuaaua

SEQ ID NO: 1133400 - RNA, 22 nt, Human
ccaggccugcaucugcugcgca

SEQ ID NO: 1133401 - RNA, 22 nt, Human
ugauacagucagcucacaauug

SEQ ID NO: 1133402 - RNA, 22 nt, Human
ccaggagcauuaagagaacaua

SEQ ID NO: 1133403 - RNA, 22 nt, Human
ggcugagcucaggggcagcagg

SEQ ID NO: 1133404 - RNA, 22 nt, Human
cacagaggaaaggcaguuggua

SEQ ID NO: 1133405 - RNA, 22 nt, Human
gccugagcuacuagggagucug

SEQ ID NO: 1133406 - RNA, 22 nt, Human
agccugucugucuccaaagcug

SEQ ID NO: 1133407 - RNA, 22 nt, Human
aggccuggguguucaccagaag

SEQ ID NO: 1133408 - RNA, 22 nt, Human
uuguauauauucuuaaagaugu

SEQ ID NO: 1133409 - RNA, 21 nt, Human
cucaggauggcggccuggugg

SEQ ID NO: 1133410 - RNA, 22 nt, Human
aggagcccugcgggaggcagag

SEQ ID NO: 1133411 - RNA, 22 nt, Human
cagcccugccauggagccuccu

SEQ ID NO: 1133412 - RNA, 22 nt, Human
aaaucaguaaauguucauuaac

SEQ ID NO: 1133413 - RNA, 22 nt, Human
ggcauggcucggagucagaaca

SEQ ID NO: 1133414 - RNA, 22 nt, Human
auguguuugguuauaugguauu

SEQ ID NO: 1133415 - RNA, 22 nt, Human
cuggggcugcggacgggagccc

SEQ ID NO: 1133416 - RNA, 22 nt, Human
gcuggcugggucccugagaggc

SEQ ID NO: 1133417 - RNA, 22 nt, Human
ucccagggugcgccugcccucg

SEQ ID NO: 1133418 - RNA, 22 nt, Human
cagacagacagccguggccacc

SEQ ID NO: 1133419 - RNA, 22 nt, Human
uggcagagcccagaacugagca

SEQ ID NO: 1133420 - RNA, 22 nt, Human
aaaugcuguaacugauauucug

SEQ ID NO: 1133421 - RNA, 21 nt, Human
gcagccacagccaccaagcua

SEQ ID NO: 1133422 - RNA, 22 nt, Human
cuucccagacgggguggcagcc

SEQ ID NO: 1133423 - RNA, 22 nt, Human
caggaaggcccaccuguccugu

SEQ ID NO: 1133424 - RNA, 22 nt, Human
cuggagagauccuccugaaaaa

SEQ ID NO: 1133425 - RNA, 22 nt, Human
acccuuucuuacucacacgcuc

SEQ ID NO: 1133426 - RNA, 23 nt, Human
cugucuccugggcuagguggaau

SEQ ID NO: 1133427 - RNA, 22 nt, Human
ggguaauuggggccuugcagug

SEQ ID NO: 1133428 - RNA, 22 nt, Human
ggcaaaguuuucaucucauaac

SEQ ID NO: 1133429 - RNA, 22 nt, Human
cacaggcuuccaguccccagcu

SEQ ID NO: 1133430 - RNA, 22 nt, Human
cucuggagguggagguugcagu

SEQ ID NO: 1133431 - RNA, 22 nt, Human
uuuccucugggcccugccaccc

SEQ ID NO: 1133432 - RNA, 21 nt, Human
uucaaugaaaacaaagugagg

SEQ ID NO: 1133433 - RNA, 18 nt, Human
agggucagugucacuggc

SEQ ID NO: 1133434 - RNA, 22 nt, Human
gcucuuccauuucucuugaacu

SEQ ID NO: 1133435 - RNA, 19 nt, Human
uggcagggagugauauuag

SEQ ID NO: 1133436 - RNA, 22 nt, Human
ggugaaggcacaagagggcaag

SEQ ID NO: 1133437 - RNA, 21 nt, Human
agcuuccugcagugggagguc

SEQ ID NO: 1133438 - RNA, 22 nt, Human
uucuugauuucaugcaguuaag

SEQ ID NO: 1133439 - RNA, 22 nt, Human
cuagaaaugcucaagagaaagu

SEQ ID NO: 1133440 - RNA, 22 nt, Human
agccaggaauuggacaacacau

SEQ ID NO: 1133441 - RNA, 22 nt, Human
gccaccagggggcuccagugag

SEQ ID NO: 1133442 - RNA, 22 nt, Human
aaguucaaucagaugaaaaagc

SEQ ID NO: 1133443 - RNA, 22 nt, Human
ggcugcucugccuuccagcugg

SEQ ID NO: 1133444 - RNA, 20 nt, Human
augccucuaauuuugcaaac

SEQ ID NO: 1133445 - RNA, 22 nt, Human
ccaggccuagccccugagggua

SEQ ID NO: 1133446 - RNA, 22 nt, Human
aggguggggugcuacaucuuua

SEQ ID NO: 1133447 - RNA, 22 nt, Human
aaguaacaaugcuguugaauug

SEQ ID NO: 1133448 - RNA, 22 nt, Human
ugcugugcuggcggcagaggcc

SEQ ID NO: 1133449 - RNA, 22 nt, Human
ggcagcucugcuccacaugagu

SEQ ID NO: 1133450 - RNA, 22 nt, Human
cccugcagaaccacagacaaac

SEQ ID NO: 1133451 - RNA, 22 nt, Human
ccaaaguccuuucuccaccugc

SEQ ID NO: 1133452 - RNA, 22 nt, Human
uacauagcaaggaaaugacaga

SEQ ID NO: 1133453 - RNA, 22 nt, Human
cccagguggguuggccucuguc

SEQ ID NO: 1133454 - RNA, 22 nt, Human
aucuggcucaccuggguaaaua

SEQ ID NO: 1133455 - RNA, 21 nt, Human
aagggagauaggaaucaggcc

SEQ ID NO: 1133456 - RNA, 21 nt, Human
aacauuucaggauccaaauug

SEQ ID NO: 1133457 - RNA, 22 nt, Human
cagcuuggaggaggaucuaaga

SEQ ID NO: 1133458 - RNA, 22 nt, Human
ugaaaucuacccuauucagggu

SEQ ID NO: 1133459 - RNA, 22 nt, Human
guccucagggaauguggcgggu

SEQ ID NO: 1133460 - RNA, 22 nt, Human
ugggccuggagcccuggagagu

SEQ ID NO: 1133461 - RNA, 22 nt, Human
gaaaugugugacaaguuucaau

SEQ ID NO: 1133462 - RNA, 22 nt, Human
gcugauuauuacaugucugugg

SEQ ID NO: 1133463 - RNA, 22 nt, Human
gccagggaacccaagggccuca

SEQ ID NO: 1133464 - RNA, 22 nt, Human
cccugaggggaguggugaggug

SEQ ID NO: 1133465 - RNA, 22 nt, Human
cuggagcucuccagagccccgu

SEQ ID NO: 1133466 - RNA, 22 nt, Human
ucugagccguauggcuuggcua

SEQ ID NO: 1133467 - RNA, 22 nt, Human
gccuggcaggccuguuggggcu

SEQ ID NO: 1133468 - RNA, 22 nt, Human
ccugggcauucuuugaguucuc

SEQ ID NO: 1133469 - RNA, 22 nt, Human
uguacaguguagucaugagguu

SEQ ID NO: 1133470 - RNA, 22 nt, Human
gagccauacaaccuauaaagug

SEQ ID NO: 1133471 - RNA, 22 nt, Human
ucagacaguuugcagugugccu

SEQ ID NO: 1133472 - RNA, 22 nt, Human
cugccugggccggccacccucu

SEQ ID NO: 1133473 - RNA, 22 nt, Human
ucugccugcggcugcagguggc

SEQ ID NO: 1133474 - RNA, 22 nt, Human
gcauggcagugaggauggugcu

SEQ ID NO: 1133475 - RNA, 22 nt, Human
ggacaggguaaguacuagugug

SEQ ID NO: 1133476 - RNA, 22 nt, Human
ugcagaagaaugagcuuggagu

SEQ ID NO: 1133477 - RNA, 23 nt, Human
ugcagcugccucuggcgggccgg

SEQ ID NO: 1133478 - RNA, 22 nt, Human
gaagccaguacugugcucugca

SEQ ID NO: 1133479 - RNA, 22 nt, Human
acucuugucucaacuuuuguau

SEQ ID NO: 1133480 - RNA, 22 nt, Human
agagccugaggccaggaaaaug

SEQ ID NO: 1133481 - RNA, 22 nt, Human
cuggccugaggucggcuguagg

SEQ ID NO: 1133482 - RNA, 22 nt, Human
agccccucuguggcucugccuc

SEQ ID NO: 1133483 - RNA, 23 nt, Human
ucucaggacacacaugucuauca

SEQ ID NO: 1133484 - RNA, 22 nt, Human
uuguuuguaugcugagaagaau

SEQ ID NO: 1133485 - RNA, 17 nt, Human
cucagaguugcuuuguc

SEQ ID NO: 1133486 - RNA, 22 nt, Human
aucaauucuuaggaaaauagcu

SEQ ID NO: 1133487 - RNA, 22 nt, Human
ucuggcucccagccugcucuca

SEQ ID NO: 1133488 - RNA, 22 nt, Human
cuggcagcccaaccuagagucu

SEQ ID NO: 1133489 - RNA, 22 nt, Human
ucaggggcugugcauuucccag

SEQ ID NO: 1133490 - RNA, 22 nt, Human
ugugcccauuccacuugaguac

SEQ ID NO: 1133491 - RNA, 22 nt, Human
ucagggcaggcgagcagcugcu

SEQ ID NO: 1133492 - RNA, 22 nt, Human
gcugucugacuccaaguuggag

SEQ ID NO: 1133493 - RNA, 22 nt, Human
cagucccaugagcccagaacau

SEQ ID NO: 1133494 - RNA, 22 nt, Human
aagaaauuaaggaaugcaacga

SEQ ID NO: 1133495 - RNA, 22 nt, Human
cucuggagggaggcugagcugg

SEQ ID NO: 1133496 - RNA, 22 nt, Human
gcagcuggcccugacacgcaga

SEQ ID NO: 1133497 - RNA, 22 nt, Human
cucuggaguuagugaucugggc

SEQ ID NO: 1133498 - RNA, 22 nt, Human
ccucccacauccuagcucugcu

SEQ ID NO: 1133499 - RNA, 22 nt, Human
acauuuaggauguuuugagaga

SEQ ID NO: 1133500 - RNA, 20 nt, Human
accuuucaaaugauucagca

SEQ ID NO: 1133501 - RNA, 23 nt, Human
uaugugugggucuacuagaaguc

SEQ ID NO: 1133502 - RNA, 19 nt, Human
ugagaggcuuaaggcagcu

SEQ ID NO: 1133503 - RNA, 22 nt, Human
uacaguaacauguuguacaagc

SEQ ID NO: 1133504 - RNA, 20 nt, Human
agaggcuuccuugggaggag

SEQ ID NO: 1133505 - RNA, 23 nt, Human
uggggagaguuacccuggaagcg

SEQ ID NO: 1133506 - RNA, 22 nt, Human
gagcaggcuugcagagaagggg

SEQ ID NO: 1133507 - RNA, 22 nt, Human
ggcucuggguucugcaaugcgu

SEQ ID NO: 1133508 - RNA, 21 nt, Human
aaaaugugagcgugaugcuua

SEQ ID NO: 1133509 - RNA, 22 nt, Human
ccucccucuguuagagcugucu

SEQ ID NO: 1133510 - RNA, 22 nt, Human
gcaggaguuaggcgucguggau

SEQ ID NO: 1133511 - RNA, 22 nt, Human
caagagcugaggcuggagaggu

SEQ ID NO: 1133512 - RNA, 22 nt, Human
cugccugugccaccgccucauu

SEQ ID NO: 1133513 - RNA, 22 nt, Human
ucaucuaagagucuuacauuua

SEQ ID NO: 1133514 - RNA, 20 nt, Human
aggcucagcugagcucuugg

SEQ ID NO: 1133515 - RNA, 22 nt, Human
ggagccagagggaugcaguuga

SEQ ID NO: 1133516 - RNA, 22 nt, Human
gugccugccccacuccucagca

SEQ ID NO: 1133517 - RNA, 22 nt, Human
agggcagcacaaggcauggacu

SEQ ID NO: 1133518 - RNA, 22 nt, Human
augcaguaaauguucuaguuug

SEQ ID NO: 1133519 - RNA, 22 nt, Human
ucugcagauuuaucagcagcug

SEQ ID NO: 1133520 - RNA, 22 nt, Human
agaauaguggcaaugacugcac

SEQ ID NO: 1133521 - RNA, 21 nt, Human
gccugcagaccccaccaggcu

SEQ ID NO: 1133522 - RNA, 22 nt, Human
guggcagagguuccucagugug

SEQ ID NO: 1133523 - RNA, 22 nt, Human
gcugugcagccaagugccucug

SEQ ID NO: 1133524 - RNA, 22 nt, Human
uagggcuauucugaguaauaau

SEQ ID NO: 1133525 - RNA, 22 nt, Human
gguucacauauugagaguauuc

SEQ ID NO: 1133526 - RNA, 22 nt, Human
uguaggauuuucaccagaccuu

SEQ ID NO: 1133527 - RNA, 23 nt, Human
aggcuuccuaucuuagagcuggg

SEQ ID NO: 1133528 - RNA, 22 nt, Human
ucucugcugagaagggcuggca

SEQ ID NO: 1133529 - RNA, 22 nt, Human
aucaguuugauaauaaggcuug

SEQ ID NO: 1133530 - RNA, 22 nt, Human
gggcuucuagaccagcagugag

SEQ ID NO: 1133531 - RNA, 22 nt, Human
cuuacauuaaguaagagauuga

SEQ ID NO: 1133532 - RNA, 22 nt, Human
cuauuucugccuaaugaccugu

SEQ ID NO: 1133533 - RNA, 17 nt, Human
uauguguguuugcagca

SEQ ID NO: 1133534 - RNA, 22 nt, Human
ggcugcagaaguacuuccggau

SEQ ID NO: 1133535 - RNA, 22 nt, Human
aguuuuauuccaaugugcagca

SEQ ID NO: 1133536 - RNA, 22 nt, Human
agugugugcaugcauucgugca

SEQ ID NO: 1133537 - RNA, 23 nt, Human
uccuucagagccucccuccaagc

SEQ ID NO: 1133538 - RNA, 22 nt, Human
cacugaagccacuggaagagga

SEQ ID NO: 1133539 - RNA, 22 nt, Human
ugccuugguucucuacuuggag

SEQ ID NO: 1133540 - RNA, 22 nt, Human
ggugauuuucgaguuucauguu

SEQ ID NO: 1133541 - RNA, 22 nt, Human
auagucuuagucuauaguuuug

SEQ ID NO: 1133542 - RNA, 22 nt, Human
aaauaauugaguuggucaauau

SEQ ID NO: 1133543 - RNA, 22 nt, Human
cagaccugagguugaguaccag

SEQ ID NO: 1133544 - RNA, 17 nt, Human
gagagcugcugcuuccg

SEQ ID NO: 1133545 - RNA, 22 nt, Human
aggaccuguaccucagcaucua

SEQ ID NO: 1133546 - RNA, 22 nt, Human
gccuggaggaauguagcugagg

SEQ ID NO: 1133547 - RNA, 22 nt, Human
gcagcagaggcccuacucuuug

SEQ ID NO: 1133548 - RNA, 22 nt, Human
aggugaguugguaggaaguuug

SEQ ID NO: 1133549 - RNA, 20 nt, Human
auacacauauucuugcaacu

SEQ ID NO: 1133550 - RNA, 22 nt, Human
cagagggcucuuggcugccugc

SEQ ID NO: 1133551 - RNA, 22 nt, Human
ucaguuuucucaucugugaaau

SEQ ID NO: 1133552 - RNA, 22 nt, Human
ccugggcucaagugauccuccu

SEQ ID NO: 1133553 - RNA, 22 nt, Human
ccugggcuugcaucugugcugg

SEQ ID NO: 1133554 - RNA, 22 nt, Human
ggucaggguauaaucaagugag

SEQ ID NO: 1133555 - RNA, 22 nt, Human
aacucaguucuuuccacaaugc

SEQ ID NO: 1133556 - RNA, 22 nt, Human
aggccucacauugggcuucaag

SEQ ID NO: 1133557 - RNA, 22 nt, Human
ccaaggcuucccagagaugcuc

SEQ ID NO: 1133558 - RNA, 22 nt, Human
gggcagagguucaacuucaaca

SEQ ID NO: 1133559 - RNA, 22 nt, Human
cagcaucuuucucuucuggagu

SEQ ID NO: 1133560 - RNA, 22 nt, Human
auacauuagcucauaugauuaa

SEQ ID NO: 1133561 - RNA, 22 nt, Human
ucaacacucuuuggcacaguua

SEQ ID NO: 1133562 - RNA, 21 nt, Human
cagaaguaaggguaacuucuc

SEQ ID NO: 1133563 - RNA, 22 nt, Human
ggcugagcaauuuugaugacau

SEQ ID NO: 1133564 - RNA, 22 nt, Human
ucugggcuugguuagggcuguu

SEQ ID NO: 1133565 - RNA, 22 nt, Human
auggggugagacuaggauuaaa

SEQ ID NO: 1133566 - RNA, 22 nt, Human
gagagaagggggauaugagccu

SEQ ID NO: 1133567 - RNA, 19 nt, Human
ugagugggccccugcagac

SEQ ID NO: 1133568 - RNA, 22 nt, Human
ucaguguccggagccugagugc

SEQ ID NO: 1133569 - RNA, 22 nt, Human
aggggugugcauccuggaggau

SEQ ID NO: 1133570 - RNA, 22 nt, Human
cagggagaaaucuccaggaggu

SEQ ID NO: 1133571 - RNA, 15 nt, Human
ugggcagaucacuug

SEQ ID NO: 1133572 - RNA, 22 nt, Human
agcuggccuguuagagcugagu

SEQ ID NO: 1133573 - RNA, 22 nt, Human
uucuguauguacauauguguau

SEQ ID NO: 1133574 - RNA, 22 nt, Human
guugaauaucccguaucuuaaa

SEQ ID NO: 1133575 - RNA, 23 nt, Human
auguuuuaugucucuagcugcca

SEQ ID NO: 1133576 - RNA, 22 nt, Human
caucacagauguuguguggagu

SEQ ID NO: 1133577 - RNA, 22 nt, Human
gcaggaugggagcuucacuuug

SEQ ID NO: 1133578 - RNA, 22 nt, Human
ugguuuugcuccaguauaaaua

SEQ ID NO: 1133579 - RNA, 22 nt, Human
ccuuucucuuggauaccgauug

SEQ ID NO: 1133580 - RNA, 22 nt, Human
caggggcuuuuccucuauaagg

SEQ ID NO: 1133581 - RNA, 22 nt, Human
acuggcagagguuggacaccau

SEQ ID NO: 1133582 - RNA, 22 nt, Human
ccugucugcaugagugagcaua

SEQ ID NO: 1133583 - RNA, 22 nt, Human
gccugugcauagcagcggacuc

SEQ ID NO: 1133584 - RNA, 22 nt, Human
uacauucuacuuuuucacuccc

SEQ ID NO: 1133585 - RNA, 22 nt, Human
cuguagccaguuuggccucacc

SEQ ID NO: 1133586 - RNA, 22 nt, Human
cucuggaguggguggccgggag

SEQ ID NO: 1133587 - RNA, 22 nt, Human
cccugcugucaggugcugggag

SEQ ID NO: 1133588 - RNA, 22 nt, Human
gcucagaggaugcuccuuuaug

SEQ ID NO: 1133589 - RNA, 22 nt, Human
ccagggcaugggaagaacugaa

SEQ ID NO: 1133590 - RNA, 19 nt, Human
ugacaggcuguugccuuga

SEQ ID NO: 1133591 - RNA, 22 nt, Human
ggcuucucucuucacauggcuu

SEQ ID NO: 1133592 - RNA, 22 nt, Human
cagaggcugaugugggaugggc

SEQ ID NO: 1133593 - RNA, 22 nt, Human
cugagcugcucccgcugcagcg

SEQ ID NO: 1133594 - RNA, 22 nt, Human
uuacaugguuguuggaaaugcu

SEQ ID NO: 1133595 - RNA, 22 nt, Human
ccugggaagagcugacaggagg

SEQ ID NO: 1133596 - RNA, 22 nt, Human
gggcugacucugcacugagcca

SEQ ID NO: 1133597 - RNA, 18 nt, Human
uggccuggagacaacucu

SEQ ID NO: 1133598 - RNA, 22 nt, Human
gagaaagacguaggcugggagg

SEQ ID NO: 1133599 - RNA, 22 nt, Human
agucccagagaggucggggcca

SEQ ID NO: 1133600 - RNA, 22 nt, Human
ccucccacuucuugcugagguc

SEQ ID NO: 1133601 - RNA, 22 nt, Human
ucuggcucucauacucgccagu

SEQ ID NO: 1133602 - RNA, 22 nt, Human
caggagaagguuuggagugcag

SEQ ID NO: 1133603 - RNA, 22 nt, Human
ucacauuuucauauucucugag

SEQ ID NO: 1133604 - RNA, 22 nt, Human
gcugcccugucugcagcaggac

SEQ ID NO: 1133605 - RNA, 23 nt, Human
ccucagcauggcaggagcccagc

SEQ ID NO: 1133606 - RNA, 22 nt, Human
auuguacaugcagugagucauc

SEQ ID NO: 1133607 - RNA, 22 nt, Human
ugaggaugacgauggcaauggc

SEQ ID NO: 1133608 - RNA, 22 nt, Human
ugaagcaaacgcuucuguuccu

SEQ ID NO: 1133609 - RNA, 20 nt, Human
ugcagggcucugcuucucuc

SEQ ID NO: 1133610 - RNA, 22 nt, Human
uuuucuuauggugaagcacaaa

SEQ ID NO: 1133611 - RNA, 22 nt, Human
ccuuggaggacugcugcuucuu

SEQ ID NO: 1133612 - RNA, 22 nt, Human
augguugaagaccaguggaaaa

SEQ ID NO: 1133613 - RNA, 22 nt, Human
guggcaggucccauuggagcag

SEQ ID NO: 1133614 - RNA, 22 nt, Human
cagcagccuacaaugcacagaa

SEQ ID NO: 1133615 - RNA, 22 nt, Human
gcagggacugugaucucacaga

SEQ ID NO: 1133616 - RNA, 22 nt, Human
gcacagggcccugugcguaggu

SEQ ID NO: 1133617 - RNA, 20 nt, Human
ugagugauggaggcggguca

SEQ ID NO: 1133618 - RNA, 22 nt, Human
ccagggugaccagcuggccuag

SEQ ID NO: 1133619 - RNA, 18 nt, Human
ccugccagucuggagcag

SEQ ID NO: 1133620 - RNA, 22 nt, Human
uucacauuagugguucuauaua

SEQ ID NO: 1133621 - RNA, 22 nt, Human
agccagcuggugggucagcugg

SEQ ID NO: 1133622 - RNA, 22 nt, Human
uccuuugacuucuugcagucca

SEQ ID NO: 1133623 - RNA, 19 nt, Human
ugggcuuccccagggcaga

SEQ ID NO: 1133624 - RNA, 22 nt, Human
agcagagcccuuccauggccuu

SEQ ID NO: 1133625 - RNA, 22 nt, Human
agcugccugcuuaugagcucca

SEQ ID NO: 1133626 - RNA, 22 nt, Human
aacuagaacgucuaguugcugg

SEQ ID NO: 1133627 - RNA, 22 nt, Human
uccagaggcuccaaagggagau

SEQ ID NO: 1133628 - RNA, 20 nt, Human
agaauucuuacccuuugaug

SEQ ID NO: 1133629 - RNA, 22 nt, Human
gugagcagaacagguggcuucu

SEQ ID NO: 1133630 - RNA, 22 nt, Human
uccuucagggcugaccacaggc

SEQ ID NO: 1133631 - RNA, 22 nt, Human
agccugagagccaagcugugca

SEQ ID NO: 1133632 - RNA, 22 nt, Human
cagagccccucagcucucuccc

SEQ ID NO: 1133633 - RNA, 22 nt, Human
auccuucaaggggcugacagcu

SEQ ID NO: 1133634 - RNA, 22 nt, Human
uggcugcuagccagagcuucag

SEQ ID NO: 1133635 - RNA, 22 nt, Human
uaaggcaccuguccaggcuggg

SEQ ID NO: 1133636 - RNA, 22 nt, Human
uggcagaguucgcugugccuuu

SEQ ID NO: 1133637 - RNA, 22 nt, Human
aggcacugacucaagggagcca

SEQ ID NO: 1133638 - RNA, 22 nt, Human
cggcagagacggcgcuuugaac

SEQ ID NO: 1133639 - RNA, 22 nt, Human
ccagggcagaaaaagagggaau

SEQ ID NO: 1133640 - RNA, 22 nt, Human
cagcagcugauggggaagugau

SEQ ID NO: 1133641 - RNA, 22 nt, Human
ggugaagggccuuaggagacag

SEQ ID NO: 1133642 - RNA, 22 nt, Human
gucccagaaacauauugcuggu

SEQ ID NO: 1133643 - RNA, 22 nt, Human
aggcagaggaaggguggauuug

SEQ ID NO: 1133644 - RNA, 21 nt, Human
guuuuaagggagaaaaccuag

SEQ ID NO: 1133645 - RNA, 23 nt, Human
uacuuaggguuuagaucugacug

SEQ ID NO: 1133646 - RNA, 22 nt, Human
ccaggcaggcagcguucucagg

SEQ ID NO: 1133647 - RNA, 22 nt, Human
ggucucagcaguugcuuugacu

SEQ ID NO: 1133648 - RNA, 17 nt, Human
cugagcauccgugcucu

SEQ ID NO: 1133649 - RNA, 22 nt, Human
ccacccuggacaggccucugag

SEQ ID NO: 1133650 - RNA, 22 nt, Human
ggcugccugcucaggugcggcg

SEQ ID NO: 1133651 - RNA, 22 nt, Human
aacagaaugcaggggaugcugc

SEQ ID NO: 1133652 - RNA, 22 nt, Human
aggccaggcaacauucugaagu

SEQ ID NO: 1133653 - RNA, 22 nt, Human
acauuaucccuggcacaacugc

SEQ ID NO: 1133654 - RNA, 22 nt, Human
guccucagagugggcagguccu

SEQ ID NO: 1133655 - RNA, 22 nt, Human
cacagcagaaaguguaggagga

SEQ ID NO: 1133656 - RNA, 20 nt, Human
aaucagaaagugugagcucu

SEQ ID NO: 1133657 - RNA, 22 nt, Human
aggccuuccucggagacaggga

SEQ ID NO: 1133658 - RNA, 22 nt, Human
uggcagaguucgcuccuauuca

SEQ ID NO: 1133659 - RNA, 22 nt, Human
uccugccugcaaucccagcacu

SEQ ID NO: 1133660 - RNA, 22 nt, Human
uuugcuauaaaagggucacacg

SEQ ID NO: 1133661 - RNA, 22 nt, Human
uugcauaaaagaguauaucuua

SEQ ID NO: 1133662 - RNA, 22 nt, Human
agcaucuggucaugagugagaa

SEQ ID NO: 1133663 - RNA, 22 nt, Human
ccagcagcucccucaggguccg

SEQ ID NO: 1133664 - RNA, 22 nt, Human
ggccagagagccgcuguuagga

SEQ ID NO: 1133665 - RNA, 22 nt, Human
ccagguggugaaagugggcccu

SEQ ID NO: 1133666 - RNA, 22 nt, Human
acaggugguaaaauggacuguc

SEQ ID NO: 1133667 - RNA, 22 nt, Human
caugggagguuggcuuggcaug

SEQ ID NO: 1133668 - RNA, 22 nt, Human
gcucagagauguucaguagcuu

SEQ ID NO: 1133669 - RNA, 22 nt, Human
gaggagagagggacugucugca

SEQ ID NO: 1133670 - RNA, 23 nt, Human
gccugccugaccugugcaaaguc

SEQ ID NO: 1133671 - RNA, 22 nt, Human
agacaaagaaaccguagaagca

SEQ ID NO: 1133672 - RNA, 22 nt, Human
gcagggacaaggcagguguucu

SEQ ID NO: 1133673 - RNA, 22 nt, Human
gcugcccagcaggccccagggg

SEQ ID NO: 1133674 - RNA, 22 nt, Human
aaacaugagcaucucuucaagc

SEQ ID NO: 1133675 - RNA, 20 nt, Human
uugcagcagugaggugaagg

SEQ ID NO: 1133676 - RNA, 22 nt, Human
gaccagagaaaggcacuggaag

SEQ ID NO: 1133677 - RNA, 22 nt, Human
aauguguauacuggcaauuaag

SEQ ID NO: 1133678 - RNA, 22 nt, Human
cucaggauagauuguccucuca

SEQ ID NO: 1133679 - RNA, 22 nt, Human
uccuugaauugugccacuuacc

SEQ ID NO: 1133680 - RNA, 22 nt, Human
aagggcaggcacccacccucac

SEQ ID NO: 1133681 - RNA, 22 nt, Human
uuccauuuauucuuguccagau

SEQ ID NO: 1133682 - RNA, 22 nt, Human
cugggcagaauuuuaggauggc

SEQ ID NO: 1133683 - RNA, 22 nt, Human
cagucccaccaggaucgcucuu

SEQ ID NO: 1133684 - RNA, 22 nt, Human
cuggggcuggugaggcaggcuc

SEQ ID NO: 1133685 - RNA, 22 nt, Human
gcagggcugcugaaacuuguuu

SEQ ID NO: 1133686 - RNA, 22 nt, Human
ucucaggaucuaauacauggua

SEQ ID NO: 1133687 - RNA, 22 nt, Human
caggcagcguccugcuuccugu

SEQ ID NO: 1133688 - RNA, 22 nt, Human
aaaugccucugcuguacacaau

SEQ ID NO: 1133689 - RNA, 18 nt, Human
gucauugcaacauacugu

SEQ ID NO: 1133690 - RNA, 22 nt, Human
uaggccaguggcagguugugug

SEQ ID NO: 1133691 - RNA, 23 nt, Human
ggggccugcaccggucugcgcgg

SEQ ID NO: 1133692 - RNA, 21 nt, Human
gccacguuucagucuucucag

SEQ ID NO: 1133693 - RNA, 22 nt, Human
ggccugggcccacugucaagag

SEQ ID NO: 1133694 - RNA, 22 nt, Human
ggcuucucgugccgaagcaaga

SEQ ID NO: 1133695 - RNA, 22 nt, Human
aagcaaagaguuuaguggguga

SEQ ID NO: 1133696 - RNA, 22 nt, Human
auaauuuaaauuaguaugugau

SEQ ID NO: 1133697 - RNA, 22 nt, Human
ucuggcucuaacuaggcaucag

SEQ ID NO: 1133698 - RNA, 19 nt, Human
gccugagccagccaugcaa

SEQ ID NO: 1133699 - RNA, 21 nt, Human
gggaaauuaggauugcucauc

SEQ ID NO: 1133700 - RNA, 22 nt, Human
aauuuggcagugucuugaagua

SEQ ID NO: 1133701 - RNA, 22 nt, Human
ccugggagggcaagugcugaug

SEQ ID NO: 1133702 - RNA, 22 nt, Human
aggagcagcccacuccuguccu

SEQ ID NO: 1133703 - RNA, 22 nt, Human
aggcugggaaauguauuccagc

SEQ ID NO: 1133704 - RNA, 20 nt, Human
cucucuggaaggugggagcc

SEQ ID NO: 1133705 - RNA, 22 nt, Human
gcauucaucuuccuccaugcag

SEQ ID NO: 1133706 - RNA, 22 nt, Human
uguaccuuuuucugugcaugcu

SEQ ID NO: 1133707 - RNA, 22 nt, Human
ugccagccagguucugaggcua

SEQ ID NO: 1133708 - RNA, 22 nt, Human
gggcuacauugugagagaaguu

SEQ ID NO: 1133709 - RNA, 22 nt, Human
ugcaauaaagugcuauaaaucc

SEQ ID NO: 1133710 - RNA, 18 nt, Human
caguuuuuauaucuggca

SEQ ID NO: 1133711 - RNA, 23 nt, Human
uggcccugaaucuguccuggagg

SEQ ID NO: 1133712 - RNA, 22 nt, Human
ugcacagcgggugucugucagg

SEQ ID NO: 1133713 - RNA, 22 nt, Human
gauggcagguaguggucucauc

SEQ ID NO: 1133714 - RNA, 22 nt, Human
ugcagaccucccauggcugccu

SEQ ID NO: 1133715 - RNA, 22 nt, Human
ucccagcauuaaugccugucag

SEQ ID NO: 1133716 - RNA, 22 nt, Human
ucugccuguucaagucuucuag

SEQ ID NO: 1133717 - RNA, 22 nt, Human
ccaaggagaaaugcugugcuuu

SEQ ID NO: 1133718 - RNA, 22 nt, Human
agugacagcugggaaggugaaa

SEQ ID NO: 1133719 - RNA, 22 nt, Human
ucugucugagggagugacauuu

SEQ ID NO: 1133720 - RNA, 22 nt, Human
aacagaaaucauuuagggcucu

SEQ ID NO: 1133721 - RNA, 22 nt, Human
ucucagagccuaacuaaccuaa

SEQ ID NO: 1133722 - RNA, 22 nt, Human
ccugagguggcugcagcacugc

SEQ ID NO: 1133723 - RNA, 22 nt, Human
uuuugaaagccagguuuguaug

SEQ ID NO: 1133724 - RNA, 22 nt, Human
ccaauguuaggcucugguuuua

SEQ ID NO: 1133725 - RNA, 22 nt, Human
ggccugcuucucagugagcuug

SEQ ID NO: 1133726 - RNA, 18 nt, Human
aggaagcaggaggaaggc

SEQ ID NO: 1133727 - RNA, 22 nt, Human
accacuguaucuccagcacauu

SEQ ID NO: 1133728 - RNA, 22 nt, Human
cuggcaggaagaggaaagguca

SEQ ID NO: 1133729 - RNA, 22 nt, Human
ucucucuugaaguauuagcuag

SEQ ID NO: 1133730 - RNA, 22 nt, Human
cagcugugcuguauuaagcucu

SEQ ID NO: 1133731 - RNA, 22 nt, Human
aaguuuuaacaaguacuuacua

SEQ ID NO: 1133732 - RNA, 22 nt, Human
ccaagguuuauuuugauacauu

SEQ ID NO: 1133733 - RNA, 22 nt, Human
ccagcucuagccccauguggcu

SEQ ID NO: 1133734 - RNA, 22 nt, Human
uuugcauuuccagaguagcaga

SEQ ID NO: 1133735 - RNA, 22 nt, Human
ccaggagcagggcuggcugcac

SEQ ID NO: 1133736 - RNA, 22 nt, Human
ugacccugcuucuuggugcagg

SEQ ID NO: 1133737 - RNA, 23 nt, Human
uggugccucagaagcagugggcu

SEQ ID NO: 1133738 - RNA, 22 nt, Human
ugggccuccaauuccagcggga

SEQ ID NO: 1133739 - RNA, 22 nt, Human
aacaguaucuuuuaucagaaau

SEQ ID NO: 1133740 - RNA, 21 nt, Human
ugccagggauuuacagagccu

SEQ ID NO: 1133741 - RNA, 22 nt, Human
aaugagcuagaccugcuuccuc

SEQ ID NO: 1133742 - RNA, 22 nt, Human
cugggaggacaacuuggagcuc

SEQ ID NO: 1133743 - RNA, 22 nt, Human
agcucuccacacauaggacuag

SEQ ID NO: 1133744 - RNA, 21 nt, Human
ggagauggguaucgccugggc

SEQ ID NO: 1133745 - RNA, 22 nt, Human
ugcagccaccaccucugcugaa

SEQ ID NO: 1133746 - RNA, 17 nt, Human
gcugccaccuuuggagc

SEQ ID NO: 1133747 - RNA, 22 nt, Human
ggcaaaaaguucccaucagugu

SEQ ID NO: 1133748 - RNA, 22 nt, Human
cuguccuaugaguacucacuag

SEQ ID NO: 1133749 - RNA, 22 nt, Human
agccagccgggggaccacagug

SEQ ID NO: 1133750 - RNA, 22 nt, Human
caguacuuauuucuauuuaggg

SEQ ID NO: 1133751 - RNA, 22 nt, Human
cugguccuccuugccuucagau

SEQ ID NO: 1133752 - RNA, 22 nt, Human
cauguacacucauguaacuaua

SEQ ID NO: 1133753 - RNA, 22 nt, Human
aggauccuuuggccacuucuua

SEQ ID NO: 1133754 - RNA, 22 nt, Human
aggagagucuugagucacuggu

SEQ ID NO: 1133755 - RNA, 22 nt, Human
aacugcauucagaaagcucacu

SEQ ID NO: 1133756 - RNA, 22 nt, Human
aaaugcuguguuuuaacauaga

SEQ ID NO: 1133757 - RNA, 18 nt, Human
cagaaaucacaccagcac

SEQ ID NO: 1133758 - RNA, 22 nt, Human
ugugaaaggggucacagggaaa

SEQ ID NO: 1133759 - RNA, 22 nt, Human
cugggcuguucugccccugggu

SEQ ID NO: 1133760 - RNA, 22 nt, Human
agcuuccuguugagagagggag

SEQ ID NO: 1133761 - RNA, 22 nt, Human
ggugggcacccgagacuggauc

SEQ ID NO: 1133762 - RNA, 22 nt, Human
agcagagucugugugcacuuua

SEQ ID NO: 1133763 - RNA, 22 nt, Human
cagcucccaguggcagcuccuu

SEQ ID NO: 1133764 - RNA, 22 nt, Human
uaaaucaguuucucuuauuggu

SEQ ID NO: 1133765 - RNA, 22 nt, Human
ggcugcuggaagacugaacaag

SEQ ID NO: 1133766 - RNA, 22 nt, Human
ucugagggugggagaaggagcu

SEQ ID NO: 1133767 - RNA, 22 nt, Human
ccauuuguucgcccagcuccaa

SEQ ID NO: 1133768 - RNA, 22 nt, Human
aguaauaauuuauauuagggag

SEQ ID NO: 1133769 - RNA, 22 nt, Human
cuuagaaaugcagauucucagg

SEQ ID NO: 1133770 - RNA, 22 nt, Human
acuucuugggacccuggcaccg

SEQ ID NO: 1133771 - RNA, 22 nt, Human
agccacagucaaccuguccaua

SEQ ID NO: 1133772 - RNA, 22 nt, Human
augugacaauauuuggucuuau

SEQ ID NO: 1133773 - RNA, 23 nt, Human
gguggcaggaguggaugcugagc

SEQ ID NO: 1133774 - RNA, 22 nt, Human
acagguggagugguuagcaggc

SEQ ID NO: 1133775 - RNA, 22 nt, Human
gaagcagcaaguauaggacagg

SEQ ID NO: 1133776 - RNA, 22 nt, Human
ccugagugaauucccucacugu

SEQ ID NO: 1133777 - RNA, 22 nt, Human
ugcugaggagguggcugugcuu

SEQ ID NO: 1133778 - RNA, 22 nt, Human
aaagaugucauacacauuaaga

SEQ ID NO: 1133779 - RNA, 22 nt, Human
gugcauuucucauacacuaaau

SEQ ID NO: 1133780 - RNA, 22 nt, Human
aggauaauuggcauuuguaggc

SEQ ID NO: 1133781 - RNA, 22 nt, Human
cuccuugguguaguacugagca

SEQ ID NO: 1133782 - RNA, 22 nt, Human
aggaccaacauagcagcagugg

SEQ ID NO: 1133783 - RNA, 22 nt, Human
uggcagaggaaaaagucacugg

SEQ ID NO: 1133784 - RNA, 22 nt, Human
ucagagagccucaggcacugcc

SEQ ID NO: 1133785 - RNA, 22 nt, Human
uggccuuccuggugacucauga

SEQ ID NO: 1133786 - RNA, 22 nt, Human
uggagggcucuuucaccuggua

SEQ ID NO: 1133787 - RNA, 22 nt, Human
agcugcucugauaaaccuacuu

SEQ ID NO: 1133788 - RNA, 22 nt, Human
agagaugucgccuugcccaggg

SEQ ID NO: 1133789 - RNA, 19 nt, Human
uggcauugguccagauaaa

SEQ ID NO: 1133790 - RNA, 22 nt, Human
uuuuccucaggaaugcuaagcu

SEQ ID NO: 1133791 - RNA, 22 nt, Human
acagaagagcacauuuaguaug

SEQ ID NO: 1133792 - RNA, 22 nt, Human
cugcucugcagcuuggacuccc

SEQ ID NO: 1133793 - RNA, 22 nt, Human
uagugcacacgcauguagcagu

SEQ ID NO: 1133794 - RNA, 22 nt, Human
ucucucucagccauuacagaac

SEQ ID NO: 1133795 - RNA, 22 nt, Human
ucaucaaagcgcuuggaguagg

SEQ ID NO: 1133796 - RNA, 22 nt, Human
ucaggggcccuucccucagcag

SEQ ID NO: 1133797 - RNA, 22 nt, Human
agguacagcaauauaagagguc

SEQ ID NO: 1133798 - RNA, 22 nt, Human
ccagcugguuaaaauagagaaa

SEQ ID NO: 1133799 - RNA, 22 nt, Human
ggcuuccuggagaaggucugag

SEQ ID NO: 1133800 - RNA, 22 nt, Human
gcuaggagauugagcucugaag

SEQ ID NO: 1133801 - RNA, 22 nt, Human
cagcaucaccgccauuucugau

SEQ ID NO: 1133802 - RNA, 22 nt, Human
auguacaguggaaacuaacaaa

SEQ ID NO: 1133803 - RNA, 22 nt, Human
gcccugagggguggugucugua

SEQ ID NO: 1133804 - RNA, 22 nt, Human
cacugucuuuugugaagacaau

SEQ ID NO: 1133805 - RNA, 22 nt, Human
ucucuuccaguaagagucuuua

SEQ ID NO: 1133806 - RNA, 22 nt, Human
ggagccagcagggugacacuga

SEQ ID NO: 1133807 - RNA, 22 nt, Human
agaaugcauuuuguguagcuau

SEQ ID NO: 1133808 - RNA, 22 nt, Human
ccacugucagaggggcugugcc

SEQ ID NO: 1133809 - RNA, 22 nt, Human
cuguccuugcuggccagguaug

SEQ ID NO: 1133810 - RNA, 21 nt, Human
ucugucugguuuuagaguggc

SEQ ID NO: 1133811 - RNA, 22 nt, Human
cauggacucugguuuggggagc

SEQ ID NO: 1133812 - RNA, 22 nt, Human
ccuggagauuauuugguccaau

SEQ ID NO: 1133813 - RNA, 22 nt, Human
ccuggggagaagagcuuccccc

SEQ ID NO: 1133814 - RNA, 22 nt, Human
cacauuugaaggaauuagcauu

SEQ ID NO: 1133815 - RNA, 22 nt, Human
aaggcuaugaucuuuuucauga

SEQ ID NO: 1133816 - RNA, 22 nt, Human
ccaggccauucccagaguugcu

SEQ ID NO: 1133817 - RNA, 22 nt, Human
uaucuauuccaaauaucagcgu

SEQ ID NO: 1133818 - RNA, 22 nt, Human
agggagaaaauuggaugcacaa

SEQ ID NO: 1133819 - RNA, 22 nt, Human
caguuucugggcguucacaggu

SEQ ID NO: 1133820 - RNA, 22 nt, Human
agagugaaguuuuugaaaguga

SEQ ID NO: 1133821 - RNA, 22 nt, Human
guggccuggcgagcuggcgcgg

SEQ ID NO: 1133822 - RNA, 22 nt, Human
ggagaagggacagacucagcuu

SEQ ID NO: 1133823 - RNA, 22 nt, Human
aaguuugugguuauacuugauu

SEQ ID NO: 1133824 - RNA, 22 nt, Human
gcguaaggccucuggucucgga

SEQ ID NO: 1133825 - RNA, 21 nt, Human
agcaggaggcagucacagcuc

SEQ ID NO: 1133826 - RNA, 22 nt, Human
ugggcugcacccucagccucug

SEQ ID NO: 1133827 - RNA, 22 nt, Human
ugucugagugugccugggcauu

SEQ ID NO: 1133828 - RNA, 22 nt, Human
guggccaggccgacugccaggc

SEQ ID NO: 1133829 - RNA, 22 nt, Human
ccuggcagcuaagugcuuugag

SEQ ID NO: 1133830 - RNA, 22 nt, Human
agcaauaugacauugcuacauc

SEQ ID NO: 1133831 - RNA, 22 nt, Human
ggcuccugggaugggacugagc

SEQ ID NO: 1133832 - RNA, 21 nt, Human
uaaagaagaugaaugugauca

SEQ ID NO: 1133833 - RNA, 19 nt, Human
ccuuggaguuccaggugga

SEQ ID NO: 1133834 - RNA, 22 nt, Human
aggugccagugcuguggucccc

SEQ ID NO: 1133835 - RNA, 22 nt, Human
ucaagaaagggcuucaccagga

SEQ ID NO: 1133836 - RNA, 19 nt, Human
ugcaggaggacugagcaga

SEQ ID NO: 1133837 - RNA, 22 nt, Human
aagcugccuagaguugaauguc

SEQ ID NO: 1133838 - RNA, 22 nt, Human
auugaaagauuuugggcucaug

SEQ ID NO: 1133839 - RNA, 22 nt, Human
cagaagcaaaugccuugcugag

SEQ ID NO: 1133840 - RNA, 22 nt, Human
uggggaagggcacccuggagac

SEQ ID NO: 1133841 - RNA, 22 nt, Human
gcuuggaaguaggauugggaga

SEQ ID NO: 1133842 - RNA, 22 nt, Human
uagucucuggagacucuagggg

SEQ ID NO: 1133843 - RNA, 19 nt, Human
ccucccacggauuccuucc

SEQ ID NO: 1133844 - RNA, 22 nt, Human
cacagggcuuugauggcugagu

SEQ ID NO: 1133845 - RNA, 22 nt, Human
caguggcagagaacagagaccu

SEQ ID NO: 1133846 - RNA, 22 nt, Human
augauuuccaguuguugcuaag

SEQ ID NO: 1133847 - RNA, 22 nt, Human
ugcucuguaacaaauugacaug

SEQ ID NO: 1133848 - RNA, 22 nt, Human
acagcuguggggacucuugccc

SEQ ID NO: 1133849 - RNA, 22 nt, Human
ugcuccauucucuagccagugc

SEQ ID NO: 1133850 - RNA, 22 nt, Human
gaagcagcucagauugacugaa

SEQ ID NO: 1133851 - RNA, 22 nt, Human
aggcugucaucuuugcaggcag

SEQ ID NO: 1133852 - RNA, 22 nt, Human
cagcuucccuuggcugagcaga

SEQ ID NO: 1133853 - RNA, 22 nt, Human
cccagcaucuccaggcauggcc

SEQ ID NO: 1133854 - RNA, 22 nt, Human
agagccagccuucucagcuuac

SEQ ID NO: 1133855 - RNA, 22 nt, Human
uguggcccagaugagugugcua

SEQ ID NO: 1133856 - RNA, 22 nt, Human
cacugaagaugcgacuagugcu

SEQ ID NO: 1133857 - RNA, 20 nt, Human
cugccuggaggccucuaccu

SEQ ID NO: 1133858 - RNA, 22 nt, Human
uggcagcuccuggggccagcac

SEQ ID NO: 1133859 - RNA, 22 nt, Human
ccaggccuguguuguguggagg

SEQ ID NO: 1133860 - RNA, 22 nt, Human
aaggcacuagcagaauuaguga

SEQ ID NO: 1133861 - RNA, 22 nt, Human
acagggcagagggcaguuggua

SEQ ID NO: 1133862 - RNA, 22 nt, Human
cucugagaaagcugugagcuaa

SEQ ID NO: 1133863 - RNA, 22 nt, Human
gcuggccauauauuuugcuguu

SEQ ID NO: 1133864 - RNA, 22 nt, Human
gaagcccuauccucuccuggga

SEQ ID NO: 1133865 - RNA, 22 nt, Human
ugaggugaccgcagaugggaag

SEQ ID NO: 1133866 - RNA, 22 nt, Human
gaggccugucgcuaggccucug

SEQ ID NO: 1133867 - RNA, 22 nt, Human
ugcagcagacugaguaugagaa

SEQ ID NO: 1133868 - RNA, 22 nt, Human
gagccagccgcaagagcuguga

SEQ ID NO: 1133869 - RNA, 22 nt, Human
ucucugggugauggcagggcac

SEQ ID NO: 1133870 - RNA, 20 nt, Human
ccaauguuuacagauuacuu

SEQ ID NO: 1133871 - RNA, 22 nt, Human
ucuguuuaggcaaaauagcuac

SEQ ID NO: 1133872 - RNA, 22 nt, Human
gcccaggccggagagcagugcu

SEQ ID NO: 1133873 - RNA, 22 nt, Human
ccucagggacuccaugcugcag

SEQ ID NO: 1133874 - RNA, 22 nt, Human
ggagcuguaacgagccauugcu

SEQ ID NO: 1133875 - RNA, 18 nt, Human
aggcuucuuggcucaguc

SEQ ID NO: 1133876 - RNA, 22 nt, Human
aguaaugugccugaaauacuug

SEQ ID NO: 1133877 - RNA, 22 nt, Human
cuucucuucccagggacacagg

SEQ ID NO: 1133878 - RNA, 22 nt, Human
aauguuuugcauuaguuuucua

SEQ ID NO: 1133879 - RNA, 22 nt, Human
agcaagcuaccuagauagucua

SEQ ID NO: 1133880 - RNA, 17 nt, Human
ugguggcuggagucagg

SEQ ID NO: 1133881 - RNA, 22 nt, Human
auggacagugugucuguuucca

SEQ ID NO: 1133882 - RNA, 22 nt, Human
cagagguauugcaaaagccuag

SEQ ID NO: 1133883 - RNA, 22 nt, Human
agggcuggcaucucuaaugcug

SEQ ID NO: 1133884 - RNA, 22 nt, Human
guccuggggauuauagaguguu

SEQ ID NO: 1133885 - RNA, 22 nt, Human
uccuggagauaauugcagugaa

SEQ ID NO: 1133886 - RNA, 22 nt, Human
cugggggcaagcagacagcugu

SEQ ID NO: 1133887 - RNA, 22 nt, Human
agaaguuaccacauacuucucu

SEQ ID NO: 1133888 - RNA, 22 nt, Human
cccucaggagaugucagcugga

SEQ ID NO: 1133889 - RNA, 22 nt, Human
uggcucagugacauuccuccca

SEQ ID NO: 1133890 - RNA, 22 nt, Human
gcugucucauacaaggcccugc

SEQ ID NO: 1133891 - RNA, 22 nt, Human
cugccuuccaaccccagacucc

SEQ ID NO: 1133892 - RNA, 22 nt, Human
ggugaggcuaagugacacaggg

SEQ ID NO: 1133893 - RNA, 22 nt, Human
cagggacaugacuggucucugu

SEQ ID NO: 1133894 - RNA, 22 nt, Human
gaggucaggcuugcagcagggu

SEQ ID NO: 1133895 - RNA, 22 nt, Human
ucaugacaacuauauuauucca

SEQ ID NO: 1133896 - RNA, 22 nt, Human
cacagguggcuccaaguuagag

SEQ ID NO: 1133897 - RNA, 22 nt, Human
ugacagggugauuaugagagcu

SEQ ID NO: 1133898 - RNA, 22 nt, Human
uaaaugcaguacaaauuguucu

SEQ ID NO: 1133899 - RNA, 22 nt, Human
ugggcccaagagagucuccaac

SEQ ID NO: 1133900 - RNA, 22 nt, Human
aaaagcucuuucugcuguagau

SEQ ID NO: 1133901 - RNA, 17 nt, Human
gugcagggaugaaggau

SEQ ID NO: 1133902 - RNA, 22 nt, Human
agggcucugagugggaaagagg

SEQ ID NO: 1133903 - RNA, 22 nt, Human
aaaugaacaguugcauucucug

SEQ ID NO: 1133904 - RNA, 22 nt, Human
accagagcuuacaugcuagaaa

SEQ ID NO: 1133905 - RNA, 22 nt, Human
gaguguucccacaccccaguug

SEQ ID NO: 1133906 - RNA, 22 nt, Human
aauguuuuagauuacugcuggg

SEQ ID NO: 1133907 - RNA, 22 nt, Human
auucuggauuaucaguccacca

SEQ ID NO: 1133908 - RNA, 22 nt, Human
uaaggcacuucaauguuuagaa

SEQ ID NO: 1133909 - RNA, 19 nt, Human
aggugaugugacucuagaa

SEQ ID NO: 1133910 - RNA, 22 nt, Human
cagaagcacuaggaggaaacgu

SEQ ID NO: 1133911 - RNA, 22 nt, Human
uccuuuccagccucaccucagc

SEQ ID NO: 1133912 - RNA, 22 nt, Human
ccaaagucugcauuuuaacaug

SEQ ID NO: 1133913 - RNA, 22 nt, Human
aucuggcugcugugcuuaagcu

SEQ ID NO: 1133914 - RNA, 22 nt, Human
ccagaagucaggaaugagucuu

SEQ ID NO: 1133915 - RNA, 22 nt, Human
aggucauuacaauuaucauuuu

SEQ ID NO: 1133916 - RNA, 22 nt, Human
cagugcagccaaggacaggcac

SEQ ID NO: 1133917 - RNA, 22 nt, Human
uccuggagcuuccuucauggua

SEQ ID NO: 1133918 - RNA, 22 nt, Human
cucacaggcaucucaucaggcu

SEQ ID NO: 1133919 - RNA, 22 nt, Human
ugagcuucuuuauuuggccaga

SEQ ID NO: 1133920 - RNA, 22 nt, Human
acagagcaguucuggagcuggc

SEQ ID NO: 1133921 - RNA, 18 nt, Human
gauauauaggaggaaagu

SEQ ID NO: 1133922 - RNA, 22 nt, Human
ucauugaacgaagagcuccauu

SEQ ID NO: 1133923 - RNA, 22 nt, Human
agaguguaauaagggcaagggc

SEQ ID NO: 1133924 - RNA, 22 nt, Human
gagggcugaugcuuacuuauuu

SEQ ID NO: 1133925 - RNA, 18 nt, Human
gcagcugacacuggaguu

SEQ ID NO: 1133926 - RNA, 22 nt, Human
agguggcuccucccauggcugg

SEQ ID NO: 1133927 - RNA, 22 nt, Human
cagugcuccugauguacccuug

SEQ ID NO: 1133928 - RNA, 22 nt, Human
uuuccucuuugugacacagcug

SEQ ID NO: 1133929 - RNA, 21 nt, Human
ucagggcagugggagguuccu

SEQ ID NO: 1133930 - RNA, 22 nt, Human
gcaggaguguggugggacaucc

SEQ ID NO: 1133931 - RNA, 22 nt, Human
aauuuagauugauaaacaugga

SEQ ID NO: 1133932 - RNA, 22 nt, Human
uaagaacaucuguccccagauu

SEQ ID NO: 1133933 - RNA, 23 nt, Human
aaaguuugaagcaacaguaguug

SEQ ID NO: 1133934 - RNA, 22 nt, Human
ggcugccugugcccaggcacac

SEQ ID NO: 1133935 - RNA, 22 nt, Human
aggcacugcuucuaaguaggaa

SEQ ID NO: 1133936 - RNA, 22 nt, Human
auggggcugggauucuccucgg

SEQ ID NO: 1133937 - RNA, 22 nt, Human
uaacagaaacagauaaguguaa

SEQ ID NO: 1133938 - RNA, 22 nt, Human
aucugguuuggggauccuugug

SEQ ID NO: 1133939 - RNA, 22 nt, Human
caguagcacucugucagugaag

SEQ ID NO: 1133940 - RNA, 22 nt, Human
uggagccuguguuucugcccag

SEQ ID NO: 1133941 - RNA, 19 nt, Human
ugcucaggccaaggagccc

SEQ ID NO: 1133942 - RNA, 22 nt, Human
cacaggagguuaggaagugguc

SEQ ID NO: 1133943 - RNA, 22 nt, Human
agugggcagugcgcucggaugc

SEQ ID NO: 1133944 - RNA, 22 nt, Human
ucucagagcucacaccuccugg

SEQ ID NO: 1133945 - RNA, 22 nt, Human
ugucuucaucuccaugcacaga

SEQ ID NO: 1133946 - RNA, 22 nt, Human
auacagaaaaugaugcagaguu

SEQ ID NO: 1133947 - RNA, 22 nt, Human
gagccuguguuuccuguagcca

SEQ ID NO: 1133948 - RNA, 22 nt, Human
auuugucuuuggaccugugaga

SEQ ID NO: 1133949 - RNA, 22 nt, Human
agaggcugggaaggguccccgg

SEQ ID NO: 1133950 - RNA, 22 nt, Human
acucucagaggguggcagcaau

SEQ ID NO: 1133951 - RNA, 22 nt, Human
cauguuuucuaggcuuucacaa

SEQ ID NO: 1133952 - RNA, 22 nt, Human
uccuugaagagugggcggucga

SEQ ID NO: 1133953 - RNA, 20 nt, Human
ugcagaagaacguucugguu

SEQ ID NO: 1133954 - RNA, 22 nt, Human
ugcauauuuguaugauguuuag

SEQ ID NO: 1133955 - RNA, 22 nt, Human
cugggaguugacgaggcuugua

SEQ ID NO: 1133956 - RNA, 22 nt, Human
uggcagggccugaaucuuauac

SEQ ID NO: 1133957 - RNA, 22 nt, Human
aaucagaaaauucaguggaauu

SEQ ID NO: 1133958 - RNA, 22 nt, Human
cagggccugagggcugcucugc

SEQ ID NO: 1133959 - RNA, 22 nt, Human
ucugucugacaggguaugaacu

SEQ ID NO: 1133960 - RNA, 22 nt, Human
gaacaguaucaguagugccagu

SEQ ID NO: 1133961 - RNA, 22 nt, Human
ucuggcucucaacaaauauuua

SEQ ID NO: 1133962 - RNA, 22 nt, Human
ggugcagcugcagccugggagc

SEQ ID NO: 1133963 - RNA, 22 nt, Human
agggugggcuagacucuucccc

SEQ ID NO: 1133964 - RNA, 22 nt, Human
gugcaugugucuuuauaguagc

SEQ ID NO: 1133965 - RNA, 22 nt, Human
acguuuucagugacugugcuuc

SEQ ID NO: 1133966 - RNA, 22 nt, Human
uaacacugauuuguucucaggg

SEQ ID NO: 1133967 - RNA, 22 nt, Human
cucuggagaacuccuugugucu

SEQ ID NO: 1133968 - RNA, 22 nt, Human
augguugagaagguaagguacc

SEQ ID NO: 1133969 - RNA, 22 nt, Human
ucaggacagccagggugcagac

SEQ ID NO: 1133970 - RNA, 22 nt, Human
caggccacaaguuggguucaag

SEQ ID NO: 1133971 - RNA, 22 nt, Human
acagagaaagugggcugaagau

SEQ ID NO: 1133972 - RNA, 22 nt, Human
cucaguuucugacauuaaaauc

SEQ ID NO: 1133973 - RNA, 22 nt, Human
ggcaggagaauggcgugaacuc

SEQ ID NO: 1133974 - RNA, 22 nt, Human
gguguccaucaggcugugcuuc

SEQ ID NO: 1133975 - RNA, 22 nt, Human
acugucuccucaucaugccugg

SEQ ID NO: 1133976 - RNA, 22 nt, Human
guucauuuuacuguaaauagca

SEQ ID NO: 1133977 - RNA, 22 nt, Human
agggcugguauguccaugaaag

SEQ ID NO: 1133978 - RNA, 22 nt, Human
ggaggccaaagugugggcggcu

SEQ ID NO: 1133979 - RNA, 22 nt, Human
cagguggggagaguguggagca

SEQ ID NO: 1133980 - RNA, 23 nt, Human
uuacaguaggaguuggaaaacca

SEQ ID NO: 1133981 - RNA, 21 nt, Human
ucacaugcccauuacuggagc

SEQ ID NO: 1133982 - RNA, 19 nt, Human
agcuggggcgguguguguu

SEQ ID NO: 1133983 - RNA, 23 nt, Human
ucuccagugucucuucauugagu

SEQ ID NO: 1133984 - RNA, 22 nt, Human
uggcugccuagugucugagcag

SEQ ID NO: 1133985 - RNA, 22 nt, Human
cugugugcugaaaugcagugag

SEQ ID NO: 1133986 - RNA, 22 nt, Human
ggagggcaucaaucaggccugg

SEQ ID NO: 1133987 - RNA, 22 nt, Human
gcccagcaggacagagugguuu

SEQ ID NO: 1133988 - RNA, 22 nt, Human
cucaggaggaggaaguucauug

SEQ ID NO: 1133989 - RNA, 22 nt, Human
cuggcuggcaaguagaacacaa

SEQ ID NO: 1133990 - RNA, 22 nt, Human
gggagggaggugaugcuuggcu

SEQ ID NO: 1133991 - RNA, 22 nt, Human
aggcuggcuggcaggggacaca

SEQ ID NO: 1133992 - RNA, 22 nt, Human
agccagggauggcagugcccag

SEQ ID NO: 1133993 - RNA, 22 nt, Human
ugauuuccacagucaggggugc

SEQ ID NO: 1133994 - RNA, 22 nt, Human
gagcagaugugugccaggaugc

SEQ ID NO: 1133995 - RNA, 22 nt, Human
acagcagagugugagauagcca

SEQ ID NO: 1133996 - RNA, 22 nt, Human
agccuccaaaugucaggucccg

SEQ ID NO: 1133997 - RNA, 22 nt, Human
cucucugguacauagaguuugg

SEQ ID NO: 1133998 - RNA, 22 nt, Human
cucagagucugcauuucuguca

SEQ ID NO: 1133999 - RNA, 22 nt, Human
ggucucagcccucgccagcagc

SEQ ID NO: 1134000 - RNA, 22 nt, Human
gccuggcuccuaagagcacaac

SEQ ID NO: 1134001 - RNA, 22 nt, Human
ugguuucccauuaucugcagga

SEQ ID NO: 1134002 - RNA, 22 nt, Human
ccaggcaggcgauggugcagug

SEQ ID NO: 1134003 - RNA, 20 nt, Human
uccaguuuuggagacauucu

SEQ ID NO: 1134004 - RNA, 22 nt, Human
ccacuugugaaauaaucaaaua

SEQ ID NO: 1134005 - RNA, 22 nt, Human
cuggagcauccaugcccagggu

SEQ ID NO: 1134006 - RNA, 22 nt, Human
cuucuuuacuuucuagaaauaa

SEQ ID NO: 1134007 - RNA, 22 nt, Human
ggaaagaccugagauaggaaua

SEQ ID NO: 1134008 - RNA, 22 nt, Human
gccuggcccagggcuccgcagg

SEQ ID NO: 1134009 - RNA, 22 nt, Human
ccagcuccgggaguugcugcug

SEQ ID NO: 1134010 - RNA, 22 nt, Human
ucuuuccuaggugauaugcaau

SEQ ID NO: 1134011 - RNA, 22 nt, Human
ugcauauuuuauaaagauggaa

SEQ ID NO: 1134012 - RNA, 22 nt, Human
cuuggggcugucacucuggcau

SEQ ID NO: 1134013 - RNA, 22 nt, Human
agggcaaguugagugugcgugg

SEQ ID NO: 1134014 - RNA, 22 nt, Human
ucagcugccccaguggccccag

SEQ ID NO: 1134015 - RNA, 22 nt, Human
agcagcaugaugacagagucuc

SEQ ID NO: 1134016 - RNA, 22 nt, Human
cugcucugcaaggcacagugau

SEQ ID NO: 1134017 - RNA, 22 nt, Human
gaaaugcagauucugauucugu

SEQ ID NO: 1134018 - RNA, 22 nt, Human
ugaggugaagaguggagcucag

SEQ ID NO: 1134019 - RNA, 20 nt, Human
acuggagccaucucagccua

SEQ ID NO: 1134020 - RNA, 20 nt, Human
ucauccaggacaggaguggc

SEQ ID NO: 1134021 - RNA, 22 nt, Human
gccccagccaaggugacacgaa

SEQ ID NO: 1134022 - RNA, 22 nt, Human
uaauuuacuugcaaauaacaau

SEQ ID NO: 1134023 - RNA, 22 nt, Human
ugccuggcaacuguggugggcu

SEQ ID NO: 1134024 - RNA, 22 nt, Human
accagagcuggcucugagcacc

SEQ ID NO: 1134025 - RNA, 22 nt, Human
augguuuaaagaguaugacuuu

SEQ ID NO: 1134026 - RNA, 22 nt, Human
cuggcuggccggaggcaucccu

SEQ ID NO: 1134027 - RNA, 19 nt, Human
ggagccuggagcacgugcc

SEQ ID NO: 1134028 - RNA, 22 nt, Human
cugcccuggcagccuaccaugg

SEQ ID NO: 1134029 - RNA, 22 nt, Human
uuuccucuaaacgcauuugcuu

SEQ ID NO: 1134030 - RNA, 22 nt, Human
gggggcuggacuuucccacaca

SEQ ID NO: 1134031 - RNA, 22 nt, Human
augagcugggccauccagugau

SEQ ID NO: 1134032 - RNA, 17 nt, Human
ugaaggaaggaugaugu

SEQ ID NO: 1134033 - RNA, 18 nt, Human
gagcccugagucugcaca

SEQ ID NO: 1134034 - RNA, 18 nt, Human
gccugccuagagcuugcc

SEQ ID NO: 1134035 - RNA, 22 nt, Human
cccauuuaucccaagguuacuc

SEQ ID NO: 1134036 - RNA, 22 nt, Human
cauuucugucacguucuuuuau

SEQ ID NO: 1134037 - RNA, 22 nt, Human
agcagggccucuggcacugguc

SEQ ID NO: 1134038 - RNA, 22 nt, Human
uggcucaguuccaucaucugga

SEQ ID NO: 1134039 - RNA, 20 nt, Human
gggaguggugguagccugug

SEQ ID NO: 1134040 - RNA, 22 nt, Human
cacaaugcguacauauaucaaa

SEQ ID NO: 1134041 - RNA, 18 nt, Human
agcagagcccaugcauuc

SEQ ID NO: 1134042 - RNA, 22 nt, Human
ggccagaaguuggaaaagagcc

SEQ ID NO: 1134043 - RNA, 22 nt, Human
gucccagaggacagggucacau

SEQ ID NO: 1134044 - RNA, 22 nt, Human
uaaguucauuagacuacagaua

SEQ ID NO: 1134045 - RNA, 22 nt, Human
auauauuuugcggucacguggc

SEQ ID NO: 1134046 - RNA, 22 nt, Human
cacccaggcuagagugcagugg

SEQ ID NO: 1134047 - RNA, 22 nt, Human
cucagggcuugaguguccagga

SEQ ID NO: 1134048 - RNA, 22 nt, Human
cagagccaaaugcugugguuau

SEQ ID NO: 1134049 - RNA, 22 nt, Human
aucuggcugacuuugugggaca

SEQ ID NO: 1134050 - RNA, 22 nt, Human
uauguuuuucaagugcacacua

SEQ ID NO: 1134051 - RNA, 19 nt, Human
ggucacagggguuacaagg

SEQ ID NO: 1134052 - RNA, 22 nt, Human
cuuccucugcggcgccgggcgc

SEQ ID NO: 1134053 - RNA, 22 nt, Human
agcugaaggcuagaacagcugg

SEQ ID NO: 1134054 - RNA, 22 nt, Human
agaauuagucacaauuauagga

SEQ ID NO: 1134055 - RNA, 22 nt, Human
ccccagcugcauacuugccaag

SEQ ID NO: 1134056 - RNA, 22 nt, Human
aucuacagcugucugcacagua

SEQ ID NO: 1134057 - RNA, 22 nt, Human
aagagcuggauugugcugcaga

SEQ ID NO: 1134058 - RNA, 22 nt, Human
ucccugcucagcucaccuggca

SEQ ID NO: 1134059 - RNA, 22 nt, Human
gagugguaggcaguguuaggaa

SEQ ID NO: 1134060 - RNA, 22 nt, Human
agcagagccagaauuggaccag

SEQ ID NO: 1134061 - RNA, 22 nt, Human
gcccugucccuuggcuucuagg

SEQ ID NO: 1134062 - RNA, 22 nt, Human
caguagcaggcaggugcuuuug

SEQ ID NO: 1134063 - RNA, 21 nt, Human
aaguccaauaccuaaggcucc

SEQ ID NO: 1134064 - RNA, 22 nt, Human
ccugugucuuccccacuggugu

SEQ ID NO: 1134065 - RNA, 22 nt, Human
gggcccuggacguggcggcaga

SEQ ID NO: 1134066 - RNA, 22 nt, Human
gcagcugauggaaguccuauug

SEQ ID NO: 1134067 - RNA, 22 nt, Human
augaccccuaaaauuuacuguc

SEQ ID NO: 1134068 - RNA, 22 nt, Human
gaaugugugacucuauugagca

SEQ ID NO: 1134069 - RNA, 22 nt, Human
ucagagcuaaggggagagcaaa

SEQ ID NO: 1134070 - RNA, 23 nt, Human
aucaaacuggugagaaugucagu

SEQ ID NO: 1134071 - RNA, 22 nt, Human
ccucuccaguuuuaacgugacc

SEQ ID NO: 1134072 - RNA, 22 nt, Human
uguuaaauguuccuuuacugga

SEQ ID NO: 1134073 - RNA, 22 nt, Human
gcagccacagaggagggaugca

SEQ ID NO: 1134074 - RNA, 20 nt, Human
gagggcaggcacccauuuca

SEQ ID NO: 1134075 - RNA, 22 nt, Human
cccaggcugaguuagagguguc

SEQ ID NO: 1134076 - RNA, 22 nt, Human
uuccugaugcacacagucauuu

SEQ ID NO: 1134077 - RNA, 22 nt, Human
caggugaccuuuguccuaaguu

SEQ ID NO: 1134078 - RNA, 18 nt, Human
gccugggaggaggaaaug

SEQ ID NO: 1134079 - RNA, 22 nt, Human
ugccucagcugaggccgcucca

SEQ ID NO: 1134080 - RNA, 17 nt, Human
ggugaguguccaggugg

SEQ ID NO: 1134081 - RNA, 22 nt, Human
ucucuggagggcuccaggcggg

SEQ ID NO: 1134082 - RNA, 22 nt, Human
uuccaguucccaugaggauuaa

SEQ ID NO: 1134083 - RNA, 22 nt, Human
cugccuuggcccuaguucaugg

SEQ ID NO: 1134084 - RNA, 22 nt, Human
aaaugcacagaaaggaugugga

SEQ ID NO: 1134085 - RNA, 20 nt, Human
uccugggguaagccaugguc

SEQ ID NO: 1134086 - RNA, 22 nt, Human
ccaggagcaggagcuggacaga

SEQ ID NO: 1134087 - RNA, 22 nt, Human
acugaaggcuuucccaagguca

SEQ ID NO: 1134088 - RNA, 22 nt, Human
gagcucaggagcaucagaagaa

SEQ ID NO: 1134089 - RNA, 22 nt, Human
aggcuucuacguggucccaggg

SEQ ID NO: 1134090 - RNA, 22 nt, Human
aggcuucuaggguuggcagcgg

SEQ ID NO: 1134091 - RNA, 22 nt, Human
cauugcacuccacccuaggcaa

SEQ ID NO: 1134092 - RNA, 22 nt, Human
uuguaacagcugcuuaauagag

SEQ ID NO: 1134093 - RNA, 22 nt, Human
uggcacuggcgcaggauggcgg

SEQ ID NO: 1134094 - RNA, 22 nt, Human
caggauggucagaugcauuguc

SEQ ID NO: 1134095 - RNA, 20 nt, Human
guggccucucacauucugag

SEQ ID NO: 1134096 - RNA, 22 nt, Human
ucucaagcuuguugguauguuu

SEQ ID NO: 1134097 - RNA, 22 nt, Human
ugugucagagguagagauggca

SEQ ID NO: 1134098 - RNA, 22 nt, Human
uacagauacagaucuagauaca

SEQ ID NO: 1134099 - RNA, 22 nt, Human
gcucagagcaucccagugaaug

SEQ ID NO: 1134100 - RNA, 22 nt, Human
gaaaugcauaaucuuaguagau

SEQ ID NO: 1134101 - RNA, 22 nt, Human
uucaagauggccccagugagcc

SEQ ID NO: 1134102 - RNA, 22 nt, Human
gaggccugcagcguggucccug

SEQ ID NO: 1134103 - RNA, 22 nt, Human
uauaagccauccagccuguggu

SEQ ID NO: 1134104 - RNA, 22 nt, Human
ccacucugcugugcuccaugau

SEQ ID NO: 1134105 - RNA, 22 nt, Human
ucagaggaaaggucagauggcu

SEQ ID NO: 1134106 - RNA, 22 nt, Human
uccuggaggcaaaugagcacau

SEQ ID NO: 1134107 - RNA, 20 nt, Human
agggcagcuugaggagccgg

SEQ ID NO: 1134108 - RNA, 22 nt, Human
cugcagggcccgccugagcccu

SEQ ID NO: 1134109 - RNA, 22 nt, Human
uguauuagagcaguagaauuau

SEQ ID NO: 1134110 - RNA, 22 nt, Human
uccuucaggccucauucucaua

SEQ ID NO: 1134111 - RNA, 22 nt, Human
aaaugcacagguuuuaaauccu

SEQ ID NO: 1134112 - RNA, 22 nt, Human
caagcagagacuagauagcugu

SEQ ID NO: 1134113 - RNA, 22 nt, Human
ggagugggcagcacugcccugu

SEQ ID NO: 1134114 - RNA, 22 nt, Human
augcuguagaucuuagccucua

SEQ ID NO: 1134115 - RNA, 22 nt, Human
acagaauugaaaguauaaucug

SEQ ID NO: 1134116 - RNA, 22 nt, Human
ugccuggguccaggccaagccu

SEQ ID NO: 1134117 - RNA, 22 nt, Human
ugauuuccaguugcugggugcu

SEQ ID NO: 1134118 - RNA, 22 nt, Human
cugggaggcccacguugggaag

SEQ ID NO: 1134119 - RNA, 22 nt, Human
cuaaaugccuuuccuaccuaac

SEQ ID NO: 1134120 - RNA, 22 nt, Human
uaaggcacccgugagcugccag

SEQ ID NO: 1134121 - RNA, 22 nt, Human
ucagcugccucucccuggaaga

SEQ ID NO: 1134122 - RNA, 22 nt, Human
ugggaaauguguuucuggacca

SEQ ID NO: 1134123 - RNA, 22 nt, Human
agggccugcucuaucacucuca

SEQ ID NO: 1134124 - RNA, 22 nt, Human
cagggcagggccacacccccug

SEQ ID NO: 1134125 - RNA, 22 nt, Human
cuagagaggcagauguccugug

SEQ ID NO: 1134126 - RNA, 22 nt, Human
ggauauaugcauguuaucauuu

SEQ ID NO: 1134127 - RNA, 22 nt, Human
aagggccauaacuugcaguguu

SEQ ID NO: 1134128 - RNA, 22 nt, Human
gaugcugagagguggagggaac

SEQ ID NO: 1134129 - RNA, 22 nt, Human
ccagcuggugacauccccaacc

SEQ ID NO: 1134130 - RNA, 17 nt, Human
gaaagguccuagaaauc

SEQ ID NO: 1134131 - RNA, 22 nt, Human
ugcagggcuuccucuuggaguu

SEQ ID NO: 1134132 - RNA, 22 nt, Human
cuucaagauccauagauauugc

SEQ ID NO: 1134133 - RNA, 22 nt, Human
uggcucagagcagggacucugg

SEQ ID NO: 1134134 - RNA, 22 nt, Human
agccaggggauucaucagggac

SEQ ID NO: 1134135 - RNA, 22 nt, Human
uuucuucugagaucagggagaa

SEQ ID NO: 1134136 - RNA, 22 nt, Human
uguuuuaaagccauugccuuuc

SEQ ID NO: 1134137 - RNA, 22 nt, Human
uuguguccugauuugacacaau

SEQ ID NO: 1134138 - RNA, 22 nt, Human
gcacugaaugccaaaguguagg

SEQ ID NO: 1134139 - RNA, 22 nt, Human
cugucccucaucaccucugggu

SEQ ID NO: 1134140 - RNA, 19 nt, Human
agauggggaagagugugag

SEQ ID NO: 1134141 - RNA, 22 nt, Human
gccgaagcugccgucugguccu

SEQ ID NO: 1134142 - RNA, 22 nt, Human
gaggccugaaaggggaccuaug

SEQ ID NO: 1134143 - RNA, 22 nt, Human
uagaaaucagcaggcauaugua

SEQ ID NO: 1134144 - RNA, 22 nt, Human
ugcagggcccuugggguugaac

SEQ ID NO: 1134145 - RNA, 22 nt, Human
ucccaaagcuacucuucugacu

SEQ ID NO: 1134146 - RNA, 22 nt, Human
cugugcuugacagugggaagca

SEQ ID NO: 1134147 - RNA, 22 nt, Human
cuguggugagcaacugacugaa

SEQ ID NO: 1134148 - RNA, 22 nt, Human
auucuuggcaaggagauuuaaa

SEQ ID NO: 1134149 - RNA, 22 nt, Human
cugccagguuggcgcucgcucu

SEQ ID NO: 1134150 - RNA, 22 nt, Human
gccaggcugcuccagggaggcc

SEQ ID NO: 1134151 - RNA, 22 nt, Human
uuggcagggccaggcucucucu

SEQ ID NO: 1134152 - RNA, 19 nt, Human
uccugggcugggccagguc

SEQ ID NO: 1134153 - RNA, 22 nt, Human
ggaggccaggaaggcucggaga

SEQ ID NO: 1134154 - RNA, 18 nt, Human
gcccagaggucugggccc

SEQ ID NO: 1134155 - RNA, 22 nt, Human
ucagggcaagucucagaagguu

SEQ ID NO: 1134156 - RNA, 22 nt, Human
gcugugugcucacguaguggaa

SEQ ID NO: 1134157 - RNA, 22 nt, Human
gucacacuagggccaaguggag

SEQ ID NO: 1134158 - RNA, 22 nt, Human
ugggaggacuugugggcuucau

SEQ ID NO: 1134159 - RNA, 22 nt, Human
acauuucuuuucaucucuauau

SEQ ID NO: 1134160 - RNA, 22 nt, Human
cagcaugguggagcugcucuuu

SEQ ID NO: 1134161 - RNA, 22 nt, Human
agggcugccauuucuggcccaa

SEQ ID NO: 1134162 - RNA, 22 nt, Human
ugcaccauuuugucaggcuacu

SEQ ID NO: 1134163 - RNA, 22 nt, Human
aagauuuccuggauguaauucc

SEQ ID NO: 1134164 - RNA, 22 nt, Human
cggcagagcuuccugcucagcg

SEQ ID NO: 1134165 - RNA, 22 nt, Human
aaugauggauuuagacaagcug

SEQ ID NO: 1134166 - RNA, 22 nt, Human
gacauucacagguaaacauucc

SEQ ID NO: 1134167 - RNA, 22 nt, Human
uaauuuaauuucaugccagccu

SEQ ID NO: 1134168 - RNA, 22 nt, Human
aggccuggugaaugaaguaucu

SEQ ID NO: 1134169 - RNA, 23 nt, Human
uggcccugugcaugcugcuuccc

SEQ ID NO: 1134170 - RNA, 22 nt, Human
gaagcccagggcguggccgggc

SEQ ID NO: 1134171 - RNA, 22 nt, Human
cccaggaggcagagcuugcagu

SEQ ID NO: 1134172 - RNA, 22 nt, Human
ugucucagaguaucccugaacu

SEQ ID NO: 1134173 - RNA, 22 nt, Human
agccugguguggggcugcagag

SEQ ID NO: 1134174 - RNA, 22 nt, Human
uagucuuuuuaauaaauaaugc

SEQ ID NO: 1134175 - RNA, 22 nt, Human
ggcugccuacuuucccagaguu

SEQ ID NO: 1134176 - RNA, 22 nt, Human
ugcaggugccucuugagcuugu

SEQ ID NO: 1134177 - RNA, 22 nt, Human
ggccuuggggaggauggugucc

SEQ ID NO: 1134178 - RNA, 22 nt, Human
cugggaguguucuaggucacau

SEQ ID NO: 1134179 - RNA, 22 nt, Human
ucuuucagccacuuaccugucu

SEQ ID NO: 1134180 - RNA, 22 nt, Human
cagugggaagggcagaggcuuu

SEQ ID NO: 1134181 - RNA, 22 nt, Human
cuggaaggucuguccccacugc

SEQ ID NO: 1134182 - RNA, 22 nt, Human
ugugccaggcacuugcccaggc

SEQ ID NO: 1134183 - RNA, 22 nt, Human
agcaugcugguguucauggcag

SEQ ID NO: 1134184 - RNA, 23 nt, Human
aucaagauaauccagaugaccua

SEQ ID NO: 1134185 - RNA, 23 nt, Human
ggcuggcccggggcugcuccuga

SEQ ID NO: 1134186 - RNA, 22 nt, Human
agguggguccuggcucugccau

SEQ ID NO: 1134187 - RNA, 22 nt, Human
agggcagagggugccucaccug

SEQ ID NO: 1134188 - RNA, 22 nt, Human
ugacacaggcagcucccagcac

SEQ ID NO: 1134189 - RNA, 22 nt, Human
ucugagccaauuucugugucca

SEQ ID NO: 1134190 - RNA, 22 nt, Human
ucauugcaggcauuccccugcc

SEQ ID NO: 1134191 - RNA, 22 nt, Human
gcaggggcuacucugagcuucc

SEQ ID NO: 1134192 - RNA, 22 nt, Human
gagggagagugauggaccauug

SEQ ID NO: 1134193 - RNA, 20 nt, Human
caagcccucuuuagccugcc

SEQ ID NO: 1134194 - RNA, 21 nt, Human
agaggccuuacaggauagacc

SEQ ID NO: 1134195 - RNA, 22 nt, Human
uucagagcaucucuaaagccag

SEQ ID NO: 1134196 - RNA, 22 nt, Human
ugccugucuuaauaucuggaaa

SEQ ID NO: 1134197 - RNA, 22 nt, Human
cccucccagaugggcuugaggu

SEQ ID NO: 1134198 - RNA, 22 nt, Human
uaaagguaacaugaacugcuuu

SEQ ID NO: 1134199 - RNA, 22 nt, Human
gcuggcagaauuucuucuugcu

SEQ ID NO: 1134200 - RNA, 21 nt, Human
aguguccuugaucuugccuug

SEQ ID NO: 1134201 - RNA, 22 nt, Human
auugcagcuggucaggguaauu

SEQ ID NO: 1134202 - RNA, 22 nt, Human
gccagagccacuuuugggugau

SEQ ID NO: 1134203 - RNA, 22 nt, Human
uuagaaaggagcuuauuucuuu

SEQ ID NO: 1134204 - RNA, 22 nt, Human
ggcagcagggucuagauugaug

SEQ ID NO: 1134205 - RNA, 22 nt, Human
aucuggcuauuucuggucgggg

SEQ ID NO: 1134206 - RNA, 22 nt, Human
gggccucugugcagaggggccu

SEQ ID NO: 1134207 - RNA, 22 nt, Human
auguauguuaguguauuaucua

SEQ ID NO: 1134208 - RNA, 22 nt, Human
agcagccauuuaaaaugaauug

SEQ ID NO: 1134209 - RNA, 22 nt, Human
agggcagagcacugaauuggga

SEQ ID NO: 1134210 - RNA, 22 nt, Human
uagagcuggaauuugcagcaag

SEQ ID NO: 1134211 - RNA, 22 nt, Human
cucaggauuaaggaaucuaaau

SEQ ID NO: 1134212 - RNA, 23 nt, Human
ucuuuccucagcacacaccaaga

SEQ ID NO: 1134213 - RNA, 17 nt, Human
ccaggugggaggugggg

SEQ ID NO: 1134214 - RNA, 22 nt, Human
uaagacaugguugaucuagugu

SEQ ID NO: 1134215 - RNA, 22 nt, Human
gacacagcacuguacaaggaau

SEQ ID NO: 1134216 - RNA, 22 nt, Human
cuccagggaaaggggcguccgc

SEQ ID NO: 1134217 - RNA, 22 nt, Human
uagccgcuuaauuauuugguga

SEQ ID NO: 1134218 - RNA, 22 nt, Human
cuuccugaacaaugccaucaau

SEQ ID NO: 1134219 - RNA, 22 nt, Human
ugggagcucagaaagggagguc

SEQ ID NO: 1134220 - RNA, 22 nt, Human
acauuucucauaggagagccac

SEQ ID NO: 1134221 - RNA, 22 nt, Human
gccugguggugugcucaagugg

SEQ ID NO: 1134222 - RNA, 22 nt, Human
cccagggauuauaaaggugaaa

SEQ ID NO: 1134223 - RNA, 22 nt, Human
uaauguguccugaaagcuucug

SEQ ID NO: 1134224 - RNA, 22 nt, Human
ugccagaagugcuuuauaagug

SEQ ID NO: 1134225 - RNA, 22 nt, Human
uuaagucacuuaucuaaagaca

SEQ ID NO: 1134226 - RNA, 22 nt, Human
agcuggccuccgggugccuggg

SEQ ID NO: 1134227 - RNA, 19 nt, Human
uugguggugguuuugguuc

SEQ ID NO: 1134228 - RNA, 22 nt, Human
ugggccuggaguuuguccagag

SEQ ID NO: 1134229 - RNA, 22 nt, Human
caguccaggccuggaggagcca

SEQ ID NO: 1134230 - RNA, 22 nt, Human
gaggaggcuaagugggcucugg

SEQ ID NO: 1134231 - RNA, 22 nt, Human
ucaaaagucugcauucuucaca

SEQ ID NO: 1134232 - RNA, 22 nt, Human
uggcagcagacaaaaggccauu

SEQ ID NO: 1134233 - RNA, 22 nt, Human
aggggcuggaguucgagguuac

SEQ ID NO: 1134234 - RNA, 22 nt, Human
gcucucagguacaaagcugugu

SEQ ID NO: 1134235 - RNA, 22 nt, Human
auaagccugauucacuugucau

SEQ ID NO: 1134236 - RNA, 22 nt, Human
gugccugugcggacucagggaa

SEQ ID NO: 1134237 - RNA, 21 nt, Human
gugcucugggcagcagagggc

SEQ ID NO: 1134238 - RNA, 22 nt, Human
uguggucucguuauguugccca

SEQ ID NO: 1134239 - RNA, 22 nt, Human
cugagcugggaguggauagugg

SEQ ID NO: 1134240 - RNA, 22 nt, Human
uggcucagcugucacagccugg

SEQ ID NO: 1134241 - RNA, 22 nt, Human
auauauuuugaauagccucugu

SEQ ID NO: 1134242 - RNA, 22 nt, Human
ucucaggguuuccugggggcug

SEQ ID NO: 1134243 - RNA, 22 nt, Human
ccagggccucguguucugagug

SEQ ID NO: 1134244 - RNA, 22 nt, Human
ugcacuggggucccagcgcacg

SEQ ID NO: 1134245 - RNA, 22 nt, Human
agagacaggguuuugucguguu

SEQ ID NO: 1134246 - RNA, 22 nt, Human
cccagcuccagagccagaaaca

SEQ ID NO: 1134247 - RNA, 20 nt, Human
acagccagaggaggcagaca

SEQ ID NO: 1134248 - RNA, 22 nt, Human
uucaagaucuuccaaaggauac

SEQ ID NO: 1134249 - RNA, 22 nt, Human
ucuggaguccagauccauuugg

SEQ ID NO: 1134250 - RNA, 22 nt, Human
ggccuggaaugcuuuccuacca

SEQ ID NO: 1134251 - RNA, 19 nt, Human
gcugcucugggucucaucu

SEQ ID NO: 1134252 - RNA, 19 nt, Human
cucagcuguagcucaugug

SEQ ID NO: 1134253 - RNA, 22 nt, Human
cucagaguccccacaucugggu

SEQ ID NO: 1134254 - RNA, 22 nt, Human
cuugaaagucacaugcagcccu

SEQ ID NO: 1134255 - RNA, 22 nt, Human
ugcagggccagacuggguugga

SEQ ID NO: 1134256 - RNA, 22 nt, Human
gcucccagcauugcuucccagg

SEQ ID NO: 1134257 - RNA, 22 nt, Human
auuugucugcuugcugccuucc

SEQ ID NO: 1134258 - RNA, 22 nt, Human
cagauggccagaggcagcugca

SEQ ID NO: 1134259 - RNA, 22 nt, Human
aguaaugucccuuaaauguggu

SEQ ID NO: 1134260 - RNA, 23 nt, Human
uacauuguggauggaguccuggg

SEQ ID NO: 1134261 - RNA, 22 nt, Human
aucagcaaucaaauugcagagu

SEQ ID NO: 1134262 - RNA, 22 nt, Human
aagcugccugggaggaagggcu

SEQ ID NO: 1134263 - RNA, 22 nt, Human
uucacaggcuuggagguggggg

SEQ ID NO: 1134264 - RNA, 22 nt, Human
aaacugaauucccaagggcaug

SEQ ID NO: 1134265 - RNA, 22 nt, Human
ccaggagcuggagggugcagug

SEQ ID NO: 1134266 - RNA, 22 nt, Human
agcaggugacagggcuguggug

SEQ ID NO: 1134267 - RNA, 22 nt, Human
caaugauggcuaggcagcugcu

SEQ ID NO: 1134268 - RNA, 22 nt, Human
ugcagugccucggcagugcagc

SEQ ID NO: 1134269 - RNA, 22 nt, Human
agcuuuauauuuaaugaauucu

SEQ ID NO: 1134270 - RNA, 22 nt, Human
gaaggaaaggucucaugccuuu

SEQ ID NO: 1134271 - RNA, 22 nt, Human
uguggugagaaacugguagauu

SEQ ID NO: 1134272 - RNA, 22 nt, Human
ccaggcugugguuuagauagag

SEQ ID NO: 1134273 - RNA, 22 nt, Human
uuucauaaugucacagucaaaa

SEQ ID NO: 1134274 - RNA, 22 nt, Human
ucccagagacagagccuccucc

SEQ ID NO: 1134275 - RNA, 22 nt, Human
ugccuuccuggagcugaaggcu

SEQ ID NO: 1134276 - RNA, 22 nt, Human
agauacauuguucuaagcauug

SEQ ID NO: 1134277 - RNA, 22 nt, Human
cacccacccacugcucauuggc

SEQ ID NO: 1134278 - RNA, 22 nt, Human
gcucucugguuccagucaggaa

SEQ ID NO: 1134279 - RNA, 22 nt, Human
uccacugcagcuucugauggaa

SEQ ID NO: 1134280 - RNA, 22 nt, Human
cucaaggaaagucuggagaaga

SEQ ID NO: 1134281 - RNA, 22 nt, Human
ccugggcuuucaaaaccagccu

SEQ ID NO: 1134282 - RNA, 22 nt, Human
ccugggucuugguucaugcucu

SEQ ID NO: 1134283 - RNA, 22 nt, Human
cagagccagaacuagaccuugu

SEQ ID NO: 1134284 - RNA, 22 nt, Human
ugcugccuucuaggcgugcccu

SEQ ID NO: 1134285 - RNA, 22 nt, Human
caggcacucauucagagaggug

SEQ ID NO: 1134286 - RNA, 22 nt, Human
ccagggcuggguuugucggugu

SEQ ID NO: 1134287 - RNA, 18 nt, Human
gaaaggagagacaguagg

SEQ ID NO: 1134288 - RNA, 22 nt, Human
uggacucagaaguguucuuuua

SEQ ID NO: 1134289 - RNA, 22 nt, Human
ucagcaauaugauaggcuuugu

SEQ ID NO: 1134290 - RNA, 22 nt, Human
gcucccugcacucugcagcccu

SEQ ID NO: 1134291 - RNA, 21 nt, Human
uagggcaggcauuggaagaga

SEQ ID NO: 1134292 - RNA, 22 nt, Human
uacauuguuuuuucuugccauc

SEQ ID NO: 1134293 - RNA, 22 nt, Human
gcccaggcuggagugcaguagc

SEQ ID NO: 1134294 - RNA, 22 nt, Human
uaucuuuagaggaagagaaucu

SEQ ID NO: 1134295 - RNA, 22 nt, Human
uaguaacagauuuauacagucu

SEQ ID NO: 1134296 - RNA, 22 nt, Human
ccagguggaggugugagguccu

SEQ ID NO: 1134297 - RNA, 22 nt, Human
uagccucuggaauccuuucucu

SEQ ID NO: 1134298 - RNA, 22 nt, Human
gaggccugguuuccagcauccu

SEQ ID NO: 1134299 - RNA, 22 nt, Human
gccugguggacacugggcauca

SEQ ID NO: 1134300 - RNA, 19 nt, Human
cuguggcugaccucuggcc

SEQ ID NO: 1134301 - RNA, 22 nt, Human
guaaaugugcuucuuuuaacuu

SEQ ID NO: 1134302 - RNA, 22 nt, Human
ggaggccaccugaccugcuguu

SEQ ID NO: 1134303 - RNA, 22 nt, Human
agaaaguucugugaguuguuca

SEQ ID NO: 1134304 - RNA, 22 nt, Human
cccaggcugauguucagcgggu

SEQ ID NO: 1134305 - RNA, 22 nt, Human
uuacaaaguucugaguucaaac

SEQ ID NO: 1134306 - RNA, 22 nt, Human
cagggccagccauccugcuggg

SEQ ID NO: 1134307 - RNA, 22 nt, Human
caggcagcgcucguggccuggc

SEQ ID NO: 1134308 - RNA, 21 nt, Human
ugaagccugaggcauagcccc

SEQ ID NO: 1134309 - RNA, 22 nt, Human
uuuaaucaggcaaagcauaaua

SEQ ID NO: 1134310 - RNA, 22 nt, Human
uccacuuuagcaaugauugaau

SEQ ID NO: 1134311 - RNA, 22 nt, Human
ucaagagacaggacguguuuca

SEQ ID NO: 1134312 - RNA, 22 nt, Human
agcagagaagacacaggcuuca

SEQ ID NO: 1134313 - RNA, 22 nt, Human
aagccagggucaggggccuccu

SEQ ID NO: 1134314 - RNA, 22 nt, Human
guaggaagcucugaggcuaguu

SEQ ID NO: 1134315 - RNA, 22 nt, Human
uuucuuaggcucuaaaaugacu

SEQ ID NO: 1134316 - RNA, 22 nt, Human
ggagccuuccagacugcccaca

SEQ ID NO: 1134317 - RNA, 22 nt, Human
aucagcugaaaaacaggcagca

SEQ ID NO: 1134318 - RNA, 22 nt, Human
uagaucugauacaauucaucug

SEQ ID NO: 1134319 - RNA, 22 nt, Human
ugguggccaauucacagggcuc

SEQ ID NO: 1134320 - RNA, 22 nt, Human
gauuucaaccuaacaguaugac

SEQ ID NO: 1134321 - RNA, 22 nt, Human
agccuggccacucagggccuga

SEQ ID NO: 1134322 - RNA, 22 nt, Human
cacugcuuuaaggcugaguaac

SEQ ID NO: 1134323 - RNA, 22 nt, Human
gugcuuccaucuagagggucac

SEQ ID NO: 1134324 - RNA, 22 nt, Human
ggucccaggcugcgggcuggug

SEQ ID NO: 1134325 - RNA, 23 nt, Human
caguacuuaguguagcguuaauu

SEQ ID NO: 1134326 - RNA, 22 nt, Human
uaaggcaccauaauauauuuaa

SEQ ID NO: 1134327 - RNA, 18 nt, Human
ucacagugcucuugccua

SEQ ID NO: 1134328 - RNA, 22 nt, Human
aagcugccacacggugaguacu

SEQ ID NO: 1134329 - RNA, 22 nt, Human
uccaagggcagccauagaacuu

SEQ ID NO: 1134330 - RNA, 23 nt, Human
ucugcucugaaguucggcugagc

SEQ ID NO: 1134331 - RNA, 22 nt, Human
cauauaaauacaacauguguua

SEQ ID NO: 1134332 - RNA, 22 nt, Human
cugcaggcugagcgccugccgg

SEQ ID NO: 1134333 - RNA, 22 nt, Human
caggggcuuaagugacagaagg

SEQ ID NO: 1134334 - RNA, 22 nt, Human
auugucugaauccaaagcucug

SEQ ID NO: 1134335 - RNA, 22 nt, Human
cagcagagcauuugguaggagg

SEQ ID NO: 1134336 - RNA, 22 nt, Human
cucucucuuuagaagcgucugg

SEQ ID NO: 1134337 - RNA, 22 nt, Human
acucugugugaguagagccugu

SEQ ID NO: 1134338 - RNA, 22 nt, Human
cagagcugguguuacaagucca

SEQ ID NO: 1134339 - RNA, 22 nt, Human
cugucucugucuuaacucccag

SEQ ID NO: 1134340 - RNA, 22 nt, Human
gggcagggguagcauuccaagu

SEQ ID NO: 1134341 - RNA, 22 nt, Human
ucaucacuguaucauugauaga

SEQ ID NO: 1134342 - RNA, 22 nt, Human
gaggcugcccaacuggagugga

SEQ ID NO: 1134343 - RNA, 22 nt, Human
ggagcugggaauuggaucaucu

SEQ ID NO: 1134344 - RNA, 22 nt, Human
cucuccuccaacagcccugccg

SEQ ID NO: 1134345 - RNA, 22 nt, Human
gcaggggcugagcaccagcggg

SEQ ID NO: 1134346 - RNA, 22 nt, Human
ccugcagcuccggauuucuggg

SEQ ID NO: 1134347 - RNA, 22 nt, Human
ucacauuuuccuugguaucugu

SEQ ID NO: 1134348 - RNA, 22 nt, Human
uaaagucaucuuuacaucuuug

SEQ ID NO: 1134349 - RNA, 22 nt, Human
ucaggcugguggucagauggcu

SEQ ID NO: 1134350 - RNA, 22 nt, Human
gcugucaggaacaugccuuggu

SEQ ID NO: 1134351 - RNA, 22 nt, Human
ugggccuggguuccuccugggc

SEQ ID NO: 1134352 - RNA, 19 nt, Human
cagaacagaggucauggcc

SEQ ID NO: 1134353 - RNA, 22 nt, Human
ccagggcaaaugagaucauagc

SEQ ID NO: 1134354 - RNA, 22 nt, Human
ggcuccuggggaggugagcuug

SEQ ID NO: 1134355 - RNA, 22 nt, Human
accuggccauccagcuggcauc

SEQ ID NO: 1134356 - RNA, 22 nt, Human
gggaggcuggcucuggccacag

SEQ ID NO: 1134357 - RNA, 22 nt, Human
ucaaaugcuucuacuccuaaga

SEQ ID NO: 1134358 - RNA, 22 nt, Human
ccugccaggccagugagcuucc

SEQ ID NO: 1134359 - RNA, 22 nt, Human
aagagcuggucacagguccauu

SEQ ID NO: 1134360 - RNA, 22 nt, Human
cugggaggugcagcaaaaauca

SEQ ID NO: 1134361 - RNA, 22 nt, Human
ugggcacuauggcucugugcac

SEQ ID NO: 1134362 - RNA, 22 nt, Human
agggccagaggcaccuugcagc

SEQ ID NO: 1134363 - RNA, 22 nt, Human
cuguucaugcugauucuguaug

SEQ ID NO: 1134364 - RNA, 22 nt, Human
ugcuggccaauggcagaggcgg

SEQ ID NO: 1134365 - RNA, 22 nt, Human
gcagagcccuggggguauggug

SEQ ID NO: 1134366 - RNA, 22 nt, Human
agugaaaacacuaguucuugcc

SEQ ID NO: 1134367 - RNA, 22 nt, Human
gggugggaacaggaugccagga

SEQ ID NO: 1134368 - RNA, 21 nt, Human
ccaggcagagcugugaguucu

SEQ ID NO: 1134369 - RNA, 22 nt, Human
ucugggcucugucagcaccucu

SEQ ID NO: 1134370 - RNA, 22 nt, Human
aggcacugaauauccaguaaaa

SEQ ID NO: 1134371 - RNA, 22 nt, Human
uaaagguacgaagugagggauu

SEQ ID NO: 1134372 - RNA, 22 nt, Human
gcugucuggaggcucugaggga

SEQ ID NO: 1134373 - RNA, 22 nt, Human
cacugagaggucucauuuccaa

SEQ ID NO: 1134374 - RNA, 22 nt, Human
guuugauucaagaacaaagagu

SEQ ID NO: 1134375 - RNA, 22 nt, Human
uggcucaguaaucgagucuccu

SEQ ID NO: 1134376 - RNA, 22 nt, Human
caucagcacuaugauuaaagua

SEQ ID NO: 1134377 - RNA, 22 nt, Human
gcucugcuguguuuguucagca

SEQ ID NO: 1134378 - RNA, 22 nt, Human
ccuucugcuggucaucccagug

SEQ ID NO: 1134379 - RNA, 22 nt, Human
ugaaaucuucacuaagucucuu

SEQ ID NO: 1134380 - RNA, 17 nt, Human
cgagggcuugcuggcuc

SEQ ID NO: 1134381 - RNA, 22 nt, Human
agugaggcuaauaggcaauggu

SEQ ID NO: 1134382 - RNA, 22 nt, Human
cuggagccccagacagggagag

SEQ ID NO: 1134383 - RNA, 22 nt, Human
guaggcagucucucaggugauc

SEQ ID NO: 1134384 - RNA, 22 nt, Human
cauugcacuccagcuugggcaa

SEQ ID NO: 1134385 - RNA, 22 nt, Human
ggaaagagcuaaaagggugaga

SEQ ID NO: 1134386 - RNA, 22 nt, Human
gcaggcaguuugcuuuucccuc

SEQ ID NO: 1134387 - RNA, 22 nt, Human
agcagcucacaggauuccugaa

SEQ ID NO: 1134388 - RNA, 22 nt, Human
uaggagcuaaaauauuuuauau

SEQ ID NO: 1134389 - RNA, 22 nt, Human
aggcccuguuaugagccacugu

SEQ ID NO: 1134390 - RNA, 22 nt, Human
uauacuuuccugcaacuuugau

SEQ ID NO: 1134391 - RNA, 22 nt, Human
ccugccugcuuucugcuuugca

SEQ ID NO: 1134392 - RNA, 22 nt, Human
gcaaggcuuugugaauuuuaaa

SEQ ID NO: 1134393 - RNA, 22 nt, Human
gcaugggcaagaggacuggggg

SEQ ID NO: 1134394 - RNA, 22 nt, Human
aggcccugggcaguucuguagc

SEQ ID NO: 1134395 - RNA, 22 nt, Human
uggcucugugcuucuaguaucu

SEQ ID NO: 1134396 - RNA, 22 nt, Human
uggcccugccacucacugcuga

SEQ ID NO: 1134397 - RNA, 22 nt, Human
ccauaagguuuggggccaugca

SEQ ID NO: 1134398 - RNA, 22 nt, Human
gcaagauguuaacauagggaga

SEQ ID NO: 1134399 - RNA, 22 nt, Human
ucugucacuuuuauuuacugaa

SEQ ID NO: 1134400 - RNA, 22 nt, Human
cuuauaaaguccaucugaacaa

SEQ ID NO: 1134401 - RNA, 22 nt, Human
agacuuugagcucuuagagaag

SEQ ID NO: 1134402 - RNA, 22 nt, Human
uggccugggcaugaagcaucgu

SEQ ID NO: 1134403 - RNA, 23 nt, Human
ggcacugaagcuacaauggugag

SEQ ID NO: 1134404 - RNA, 23 nt, Human
ugaugggaaggaacgacuaccac

SEQ ID NO: 1134405 - RNA, 22 nt, Human
aggcccaguuauccuacuuguu

SEQ ID NO: 1134406 - RNA, 22 nt, Human
cacaggaggaggccagagcgua

SEQ ID NO: 1134407 - RNA, 22 nt, Human
ggcugggcugcugggucagagc

SEQ ID NO: 1134408 - RNA, 22 nt, Human
uggccucuuaggacauccucua

SEQ ID NO: 1134409 - RNA, 22 nt, Human
ggcugcagcagagggacucacg

SEQ ID NO: 1134410 - RNA, 22 nt, Human
auuugucuagugguauucacgu

SEQ ID NO: 1134411 - RNA, 22 nt, Human
ugaagcccugugucagcuucca

SEQ ID NO: 1134412 - RNA, 22 nt, Human
aagcaaaagguuacacuucugg

SEQ ID NO: 1134413 - RNA, 23 nt, Human
ucccagggaaggugagcgaggcu

SEQ ID NO: 1134414 - RNA, 23 nt, Human
ugcuucucugcuugacaguucug

SEQ ID NO: 1134415 - RNA, 22 nt, Human
caguguuccaggcggcagugaa

SEQ ID NO: 1134416 - RNA, 18 nt, Human
aggagccuuugcacugga

SEQ ID NO: 1134417 - RNA, 22 nt, Human
caaagugcuggaauuacaggug

SEQ ID NO: 1134418 - RNA, 22 nt, Human
ccagcagagcauggggaggaag

SEQ ID NO: 1134419 - RNA, 22 nt, Human
uuuccucuucuucccaugucau

SEQ ID NO: 1134420 - RNA, 22 nt, Human
aagggcagcuauuaucgucauc

SEQ ID NO: 1134421 - RNA, 22 nt, Human
cugccuggccugaucuccacgc

SEQ ID NO: 1134422 - RNA, 22 nt, Human
aagaacauguuaaaagauucac

SEQ ID NO: 1134423 - RNA, 22 nt, Human
ccugauggagcccugcugcaug

SEQ ID NO: 1134424 - RNA, 22 nt, Human
aagauuuccuucaguagagcua

SEQ ID NO: 1134425 - RNA, 22 nt, Human
ggcaaaaaccauaauuacuuuu

SEQ ID NO: 1134426 - RNA, 22 nt, Human
gcucccacgcaauucuuuucag

SEQ ID NO: 1134427 - RNA, 22 nt, Human
ccagguggacggcgaguacagg

SEQ ID NO: 1134428 - RNA, 22 nt, Human
ugcagaaggccugacauugcac

SEQ ID NO: 1134429 - RNA, 22 nt, Human
uaacagaaauuuuaguuagggg

SEQ ID NO: 1134430 - RNA, 22 nt, Human
gcucaggagcugacagccucaa

SEQ ID NO: 1134431 - RNA, 21 nt, Human
cagcuuugucugucuucgggg

SEQ ID NO: 1134432 - RNA, 22 nt, Human
ugcauccuuaaccagcaucacu

SEQ ID NO: 1134433 - RNA, 22 nt, Human
augggaggcagcagagcccagc

SEQ ID NO: 1134434 - RNA, 22 nt, Human
auguacauuuguaguaauauca

SEQ ID NO: 1134435 - RNA, 22 nt, Human
gggcagcagaggaucccuuaau

SEQ ID NO: 1134436 - RNA, 22 nt, Human
ugaugggaaaaugaggccuggg

SEQ ID NO: 1134437 - RNA, 22 nt, Human
gccuucugcgcucgugucuccg

SEQ ID NO: 1134438 - RNA, 22 nt, Human
guuguauagagggcaugaaucu

SEQ ID NO: 1134439 - RNA, 22 nt, Human
cagggcagcuuccuuuguuagg

SEQ ID NO: 1134440 - RNA, 22 nt, Human
auggacagugugaagcagauag

SEQ ID NO: 1134441 - RNA, 22 nt, Human
uuugcauuaucucacuuauaua

SEQ ID NO: 1134442 - RNA, 22 nt, Human
caggagcucucaucgucagggc

SEQ ID NO: 1134443 - RNA, 22 nt, Human
uagccucucuccuccacaaccu

SEQ ID NO: 1134444 - RNA, 22 nt, Human
cuguccuuacugcuucuggcuu

SEQ ID NO: 1134445 - RNA, 22 nt, Human
gggcuaggcuuggccagcacug

SEQ ID NO: 1134446 - RNA, 22 nt, Human
cccugccuacaggguuuucuuu

SEQ ID NO: 1134447 - RNA, 22 nt, Human
accaucagucacauguagagaa

SEQ ID NO: 1134448 - RNA, 22 nt, Human
cugccuguuagucuagcaguua

SEQ ID NO: 1134449 - RNA, 22 nt, Human
cuguauuuucaugccuacguac

SEQ ID NO: 1134450 - RNA, 22 nt, Human
uauguguacaucugguugagca

SEQ ID NO: 1134451 - RNA, 22 nt, Human
cugugucccccucagccaggug

SEQ ID NO: 1134452 - RNA, 22 nt, Human
auuuauuaugggauuuggcaca

SEQ ID NO: 1134453 - RNA, 22 nt, Human
gcagggacgccagggacagcaa

SEQ ID NO: 1134454 - RNA, 22 nt, Human
cuuggcagcuuuuggaggagcc

SEQ ID NO: 1134455 - RNA, 22 nt, Human
cagggccagccgcagcauccac

SEQ ID NO: 1134456 - RNA, 22 nt, Human
augauacaagcaaaacuaauca

SEQ ID NO: 1134457 - RNA, 22 nt, Human
aaggccugggaguacugggaca

SEQ ID NO: 1134458 - RNA, 22 nt, Human
ugagccagucugucugggugaa

SEQ ID NO: 1134459 - RNA, 22 nt, Human
ugggauggagccugaguauagu

SEQ ID NO: 1134460 - RNA, 22 nt, Human
aggggugaaggcccgauaggag

SEQ ID NO: 1134461 - RNA, 22 nt, Human
ugcugccaaaugcgagcucugu

SEQ ID NO: 1134462 - RNA, 22 nt, Human
gagccuggauagccuuguucca

SEQ ID NO: 1134463 - RNA, 22 nt, Human
caggagcccagaguccucagcu

SEQ ID NO: 1134464 - RNA, 22 nt, Human
caccaucagcagcaggugucaa

SEQ ID NO: 1134465 - RNA, 22 nt, Human
accuggagucauuugaggagua

SEQ ID NO: 1134466 - RNA, 22 nt, Human
ugugaaggcagcagcucugucc

SEQ ID NO: 1134467 - RNA, 22 nt, Human
gagggcugaagauuguggcccc

SEQ ID NO: 1134468 - RNA, 22 nt, Human
gugccugugccaggggugugcu

SEQ ID NO: 1134469 - RNA, 22 nt, Human
ugaugggaggugcugcaggacc

SEQ ID NO: 1134470 - RNA, 22 nt, Human
caaagcucaugcucuuagccau

SEQ ID NO: 1134471 - RNA, 22 nt, Human
ccacagagagugucagccuuug

SEQ ID NO: 1134472 - RNA, 22 nt, Human
acaaauguggacauggauaaug

SEQ ID NO: 1134473 - RNA, 22 nt, Human
uggucucugacucugaagaccc

SEQ ID NO: 1134474 - RNA, 22 nt, Human
cucuguagaaacagggcagaag

SEQ ID NO: 1134475 - RNA, 22 nt, Human
uucuaacucuguuauguguuuc

SEQ ID NO: 1134476 - RNA, 22 nt, Human
aaugcugcucucauaauuauag

SEQ ID NO: 1134477 - RNA, 22 nt, Human
uaaggcacccauguucauacag

SEQ ID NO: 1134478 - RNA, 20 nt, Human
gcugccagugccugaugcuu

SEQ ID NO: 1134479 - RNA, 22 nt, Human
gucuggaggaggaagaaggcac

SEQ ID NO: 1134480 - RNA, 21 nt, Human
ugcagagauaucugaagcaga

SEQ ID NO: 1134481 - RNA, 22 nt, Human
agccucugucaagcuuuucaaa

SEQ ID NO: 1134482 - RNA, 22 nt, Human
ccaggguggcguagaugcuggg

SEQ ID NO: 1134483 - RNA, 22 nt, Human
uccagccuuucuacucacugag

SEQ ID NO: 1134484 - RNA, 22 nt, Human
uaaagcaggccacauaugugau

SEQ ID NO: 1134485 - RNA, 22 nt, Human
augcaguaaauguuaagaaaaa

SEQ ID NO: 1134486 - RNA, 22 nt, Human
cuggggggagcugcguccagca

SEQ ID NO: 1134487 - RNA, 19 nt, Human
cagucccaaauucuuguca

SEQ ID NO: 1134488 - RNA, 22 nt, Human
uggcagagaauaaaucuugacu

SEQ ID NO: 1134489 - RNA, 22 nt, Human
ggcucaggccuguaauccuagc

SEQ ID NO: 1134490 - RNA, 22 nt, Human
uaggcaacaugucgaauacugu

SEQ ID NO: 1134491 - RNA, 22 nt, Human
agugucauuccagggacccucg

SEQ ID NO: 1134492 - RNA, 22 nt, Human
uggcagagguauauugggagga

SEQ ID NO: 1134493 - RNA, 20 nt, Human
agaaucugacccagagagac

SEQ ID NO: 1134494 - RNA, 22 nt, Human
cauuaucucuucuauaugcuag

SEQ ID NO: 1134495 - RNA, 22 nt, Human
aaguuugagagccuuuaguaua

SEQ ID NO: 1134496 - RNA, 22 nt, Human
guauauaucggcacuauuuuaa

SEQ ID NO: 1134497 - RNA, 22 nt, Human
gugcucaggaagcuguuccugc

SEQ ID NO: 1134498 - RNA, 22 nt, Human
caguuaaaggcccaauaucugg

SEQ ID NO: 1134499 - RNA, 22 nt, Human
uagacacaagagaaggguauaa

SEQ ID NO: 1134500 - RNA, 22 nt, Human
agccuucaguaaauccacugug

SEQ ID NO: 1134501 - RNA, 22 nt, Human
gcaggcagaucaccugucagga

SEQ ID NO: 1134502 - RNA, 19 nt, Human
uguuuuguuaaagcagucc

SEQ ID NO: 1134503 - RNA, 22 nt, Human
uguguguguccucauuugcaga

SEQ ID NO: 1134504 - RNA, 22 nt, Human
caggggacaguaugguggauga

SEQ ID NO: 1134505 - RNA, 22 nt, Human
cucuggagguugagcccagcaa

SEQ ID NO: 1134506 - RNA, 22 nt, Human
ccucucucuccugcacacacac

SEQ ID NO: 1134507 - RNA, 22 nt, Human
agagcuggguggacuuguaguu

SEQ ID NO: 1134508 - RNA, 22 nt, Human
cugugccuaagaugcaugucuc

SEQ ID NO: 1134509 - RNA, 17 nt, Human
gcaaucucagucuccuu

SEQ ID NO: 1134510 - RNA, 21 nt, Human
agggcagauuagcuguaagag

SEQ ID NO: 1134511 - RNA, 22 nt, Human
gcugagcugggacaguccuggg

SEQ ID NO: 1134512 - RNA, 22 nt, Human
aggauccugcgcuuugggggag

SEQ ID NO: 1134513 - RNA, 22 nt, Human
cucugaagggagggccaagccc

SEQ ID NO: 1134514 - RNA, 22 nt, Human
cuaggaggcgggggcugcagua

SEQ ID NO: 1134515 - RNA, 22 nt, Human
ugcagaggagcuggaaggcugg

SEQ ID NO: 1134516 - RNA, 22 nt, Human
cuguuuaucuaggaguugcagg

SEQ ID NO: 1134517 - RNA, 22 nt, Human
agaugcugucacacacacuguu

SEQ ID NO: 1134518 - RNA, 22 nt, Human
aggcuccuugcucacaggcuca

SEQ ID NO: 1134519 - RNA, 22 nt, Human
gcugccuuuugcuccucccacc

SEQ ID NO: 1134520 - RNA, 22 nt, Human
ucacauacacuaggauauuuuu

SEQ ID NO: 1134521 - RNA, 22 nt, Human
agacaaagacagcaucucaggu

SEQ ID NO: 1134522 - RNA, 22 nt, Human
agagccugaggaugucccagcu

SEQ ID NO: 1134523 - RNA, 22 nt, Human
agggcccuccccgcucagggca

SEQ ID NO: 1134524 - RNA, 22 nt, Human
cucucuucccgugaguguugca

SEQ ID NO: 1134525 - RNA, 22 nt, Human
ccuggagccccucuggccagcc

SEQ ID NO: 1134526 - RNA, 22 nt, Human
uggcucaguuucugcccagcug

SEQ ID NO: 1134527 - RNA, 22 nt, Human
cagcagugaugugugaggguuc

SEQ ID NO: 1134528 - RNA, 19 nt, Human
cagaguccuugaccagucc

SEQ ID NO: 1134529 - RNA, 22 nt, Human
ugcugggggcuuucuggauacc

SEQ ID NO: 1134530 - RNA, 22 nt, Human
ccagaagggcuauugcagugac

SEQ ID NO: 1134531 - RNA, 22 nt, Human
acugaaggguaaugugggagcc

SEQ ID NO: 1134532 - RNA, 22 nt, Human
ucagagguaagggcugagagga

SEQ ID NO: 1134533 - RNA, 22 nt, Human
uggcacugggacagaugcucuc

SEQ ID NO: 1134534 - RNA, 22 nt, Human
gcuggugagcaaaggagaagga

SEQ ID NO: 1134535 - RNA, 21 nt, Human
ugcuucucuagaucaacuacu

SEQ ID NO: 1134536 - RNA, 22 nt, Human
gcagggcuguucaggagggugg

SEQ ID NO: 1134537 - RNA, 22 nt, Human
gggcugcuuauacugaugauaa

SEQ ID NO: 1134538 - RNA, 22 nt, Human
caggaucccuggccuccgccca

SEQ ID NO: 1134539 - RNA, 22 nt, Human
gacacauagaucuaucucacuc

SEQ ID NO: 1134540 - RNA, 22 nt, Human
uuggccuuguuaaggaggcccu

SEQ ID NO: 1134541 - RNA, 21 nt, Human
ucucuggaauuagaccauguu

SEQ ID NO: 1134542 - RNA, 22 nt, Human
ccacagggucagccacucugca

SEQ ID NO: 1134543 - RNA, 22 nt, Human
acucugaggagugacuagaggu

SEQ ID NO: 1134544 - RNA, 22 nt, Human
cccagcaggucggugcugccug

SEQ ID NO: 1134545 - RNA, 22 nt, Human
gagggcagagucuaaugaugca

SEQ ID NO: 1134546 - RNA, 22 nt, Human
uggcacugccuggcagggcccc

SEQ ID NO: 1134547 - RNA, 22 nt, Human
agcugcugaaugacacugcaag

SEQ ID NO: 1134548 - RNA, 22 nt, Human
cuggaaggcucugcugccuguc

SEQ ID NO: 1134549 - RNA, 22 nt, Human
cuuggcagagggcugggcucag

SEQ ID NO: 1134550 - RNA, 22 nt, Human
gugucccagccccacaggccug

SEQ ID NO: 1134551 - RNA, 22 nt, Human
agcugcugugugcucaggcagg

SEQ ID NO: 1134552 - RNA, 20 nt, Human
ugcuugucaugcacucaggc

SEQ ID NO: 1134553 - RNA, 22 nt, Human
guccucagucaguuuggugggg

SEQ ID NO: 1134554 - RNA, 22 nt, Human
ccugucaggguuugccucagaa

SEQ ID NO: 1134555 - RNA, 22 nt, Human
agcagcugagccccagcuguga

SEQ ID NO: 1134556 - RNA, 22 nt, Human
ugcucuguauucuauggcaguu

SEQ ID NO: 1134557 - RNA, 19 nt, Human
auguuuuaugcugauggga

SEQ ID NO: 1134558 - RNA, 22 nt, Human
agcucccagcagagcuggccac

SEQ ID NO: 1134559 - RNA, 19 nt, Human
ucgagucaagacacuaggc

SEQ ID NO: 1134560 - RNA, 22 nt, Human
ugcagcuucuuguccugugauu

SEQ ID NO: 1134561 - RNA, 22 nt, Human
ggccaugguuggggaagacaug

SEQ ID NO: 1134562 - RNA, 22 nt, Human
gggaggugauggcaagcagcgg

SEQ ID NO: 1134563 - RNA, 22 nt, Human
uggcagcugucuguggggucuc

SEQ ID NO: 1134564 - RNA, 22 nt, Human
aggcuccaugcaaaggcuguuu

SEQ ID NO: 1134565 - RNA, 22 nt, Human
acuguacuguguauuguagaau

SEQ ID NO: 1134566 - RNA, 22 nt, Human
ggccaccuuccaguugccugca

SEQ ID NO: 1134567 - RNA, 22 nt, Human
cagagacaguuucacagggucu

SEQ ID NO: 1134568 - RNA, 23 nt, Human
cuuuuaacuugaucugagaccag

SEQ ID NO: 1134569 - RNA, 20 nt, Human
guggccuguccuguuguggg

SEQ ID NO: 1134570 - RNA, 20 nt, Human
gcucccagccugcagucccc

SEQ ID NO: 1134571 - RNA, 22 nt, Human
uaaaugcagcaguuucuguucu

SEQ ID NO: 1134572 - RNA, 22 nt, Human
uccacagaauguaagauccaca

SEQ ID NO: 1134573 - RNA, 22 nt, Human
uaugcacaauaugaucuauuug

SEQ ID NO: 1134574 - RNA, 22 nt, Human
ggcagaggaaggaugaauucac

SEQ ID NO: 1134575 - RNA, 17 nt, Human
uccagagcacagagcuc

SEQ ID NO: 1134576 - RNA, 18 nt, Human
cccacggugcuguagggc

SEQ ID NO: 1134577 - RNA, 22 nt, Human
cgccugggaguccacaccugcu

SEQ ID NO: 1134578 - RNA, 22 nt, Human
gggcuggcucccagguguugaa

SEQ ID NO: 1134579 - RNA, 22 nt, Human
caggggccaggcugucugcugu

SEQ ID NO: 1134580 - RNA, 22 nt, Human
ucaaaccaccuuguuacugggg

SEQ ID NO: 1134581 - RNA, 20 nt, Human
ucccuggaggugguggcauc

SEQ ID NO: 1134582 - RNA, 22 nt, Human
ugucaccaugccagcuucugcc

SEQ ID NO: 1134583 - RNA, 22 nt, Human
ccaaggcuccucagcuggucuu

SEQ ID NO: 1134584 - RNA, 22 nt, Human
gccccucccagucaggagcacu

SEQ ID NO: 1134585 - RNA, 22 nt, Human
aauuuagaauucgcuagcuaau

SEQ ID NO: 1134586 - RNA, 22 nt, Human
aaggcacugacugugcagggga

SEQ ID NO: 1134587 - RNA, 22 nt, Human
cagcaauaguguguuuguuuca

SEQ ID NO: 1134588 - RNA, 22 nt, Human
ccaggcugagcaugauuggagc

SEQ ID NO: 1134589 - RNA, 22 nt, Human
uccuugaacagagggccugggu

SEQ ID NO: 1134590 - RNA, 19 nt, Human
gcacugaagaguuggucac

SEQ ID NO: 1134591 - RNA, 19 nt, Human
uugaauaugcaaacugaag

SEQ ID NO: 1134592 - RNA, 22 nt, Human
ccuggcagcaggugggcccgug

SEQ ID NO: 1134593 - RNA, 22 nt, Human
augaugguggguaauguguaaa

SEQ ID NO: 1134594 - RNA, 22 nt, Human
cagagcuggguuugggaaaccu

SEQ ID NO: 1134595 - RNA, 22 nt, Human
auuuguaauuucuuaucugugu

SEQ ID NO: 1134596 - RNA, 22 nt, Human
uagaaagcuugggguguuuaaa

SEQ ID NO: 1134597 - RNA, 22 nt, Human
cugcccagaaucacucacucga

SEQ ID NO: 1134598 - RNA, 22 nt, Human
gagguggccucaagcagucuuc

SEQ ID NO: 1134599 - RNA, 18 nt, Human
agcagcugucagaaugcc

SEQ ID NO: 1134600 - RNA, 22 nt, Human
uuuucauuguaaaucaggaaac

SEQ ID NO: 1134601 - RNA, 22 nt, Human
gggaaccagccgcuuccgccuc

SEQ ID NO: 1134602 - RNA, 20 nt, Human
ugcuggggacauacagggug

SEQ ID NO: 1134603 - RNA, 19 nt, Human
augauggucccauucaccu

SEQ ID NO: 1134604 - RNA, 22 nt, Human
ggcuucagugacuggugcccuc

SEQ ID NO: 1134605 - RNA, 22 nt, Human
ucccaggcuaggccucugcguu

SEQ ID NO: 1134606 - RNA, 22 nt, Human
agauggggcagaauggagccau

SEQ ID NO: 1134607 - RNA, 22 nt, Human
ugcugccaggucuugcugucca

SEQ ID NO: 1134608 - RNA, 22 nt, Human
gaaaugcauggaucuuggcaga

SEQ ID NO: 1134609 - RNA, 22 nt, Human
uuugcauugccucugacuuaug

SEQ ID NO: 1134610 - RNA, 22 nt, Human
uggaggaaaauuacuggggucu

SEQ ID NO: 1134611 - RNA, 22 nt, Human
ugucagaacucuauugaugucc

SEQ ID NO: 1134612 - RNA, 22 nt, Human
uagaaaagaauuuuauuugaua

SEQ ID NO: 1134613 - RNA, 22 nt, Human
ucaguguaaguuauguagaugu

SEQ ID NO: 1134614 - RNA, 22 nt, Human
uggggccuggucagagcugcac

SEQ ID NO: 1134615 - RNA, 18 nt, Human
ugacagaaccuggagccu

SEQ ID NO: 1134616 - RNA, 22 nt, Human
ccagcugggauuaagggaaaau

SEQ ID NO: 1134617 - RNA, 22 nt, Human
uaagcuauuccugaagaagguu

SEQ ID NO: 1134618 - RNA, 22 nt, Human
cugaggccucuguucaccagaa

SEQ ID NO: 1134619 - RNA, 22 nt, Human
uggagcugacucacaccagcua

SEQ ID NO: 1134620 - RNA, 22 nt, Human
gucuuuauuugagauugucauu

SEQ ID NO: 1134621 - RNA, 22 nt, Human
uguggcuuaagaaugccuuuaa

SEQ ID NO: 1134622 - RNA, 22 nt, Human
uggccuuguguuuuagagaaag

SEQ ID NO: 1134623 - RNA, 22 nt, Human
auucucaaacaagugguuugau

SEQ ID NO: 1134624 - RNA, 22 nt, Human
cagggugcagugucgcugcuag

SEQ ID NO: 1134625 - RNA, 19 nt, Human
uccaaaggacccaccucca

SEQ ID NO: 1134626 - RNA, 22 nt, Human
uucaagaugacccagucacacg

SEQ ID NO: 1134627 - RNA, 22 nt, Human
cagggagaggcaucauagggaa

SEQ ID NO: 1134628 - RNA, 22 nt, Human
ugagccagaggaggcugugugg

SEQ ID NO: 1134629 - RNA, 22 nt, Human
agcugcucuugggugacuucaa

SEQ ID NO: 1134630 - RNA, 22 nt, Human
guacuuccguggacuaauuguu

SEQ ID NO: 1134631 - RNA, 22 nt, Human
uucacauugugcagauuauggu

SEQ ID NO: 1134632 - RNA, 22 nt, Human
uugaagcaugguacuuguucaa

SEQ ID NO: 1134633 - RNA, 17 nt, Human
ucugccgacugccagcu

SEQ ID NO: 1134634 - RNA, 22 nt, Human
gugcagcugugugagagcucca

SEQ ID NO: 1134635 - RNA, 22 nt, Human
ugcagaaggaggaggaaaucca

SEQ ID NO: 1134636 - RNA, 22 nt, Human
ggccuugggauguggcugcagc

SEQ ID NO: 1134637 - RNA, 22 nt, Human
agucucagggccacccggggaa

SEQ ID NO: 1134638 - RNA, 22 nt, Human
ucauugcacuccagccugggca

SEQ ID NO: 1134639 - RNA, 22 nt, Human
ggcagcucacugauuagcaauu

SEQ ID NO: 1134640 - RNA, 22 nt, Human
ggcuggcacucuguccaguguc

SEQ ID NO: 1134641 - RNA, 20 nt, Human
ugucauuguuucuaggaccu

SEQ ID NO: 1134642 - RNA, 22 nt, Human
cugcugagcccuggcacaggug

SEQ ID NO: 1134643 - RNA, 22 nt, Human
ggcugaaguguaguggcucacu

SEQ ID NO: 1134644 - RNA, 22 nt, Human
gaggucaggggagaggcugaug

SEQ ID NO: 1134645 - RNA, 22 nt, Human
auaugccauuagcuagaaauaa

SEQ ID NO: 1134646 - RNA, 22 nt, Human
gaaaaaugagcugaugucaggg

SEQ ID NO: 1134647 - RNA, 22 nt, Human
aggcacugaagaacucuuuuug

SEQ ID NO: 1134648 - RNA, 22 nt, Human
gaggcugcggggaggagccugc

SEQ ID NO: 1134649 - RNA, 22 nt, Human
uggcagagagacucuccuugau

SEQ ID NO: 1134650 - RNA, 22 nt, Human
auguguguguauauacacacau

SEQ ID NO: 1134651 - RNA, 22 nt, Human
aaguuuguguaguuuagcaucc

SEQ ID NO: 1134652 - RNA, 22 nt, Human
gccuucugugcuccuggccuuu

SEQ ID NO: 1134653 - RNA, 22 nt, Human
caagggaccugagauggucucu

SEQ ID NO: 1134654 - RNA, 22 nt, Human
guggagccaggaucuccgcaca

SEQ ID NO: 1134655 - RNA, 22 nt, Human
ggcugccagugagugcagaccg

SEQ ID NO: 1134656 - RNA, 18 nt, Human
uggagcugagugcugugc

SEQ ID NO: 1134657 - RNA, 22 nt, Human
ggcucuggugggaagguuagau

SEQ ID NO: 1134658 - RNA, 22 nt, Human
cuauugaaaguguacaauucaa

SEQ ID NO: 1134659 - RNA, 22 nt, Human
gcaggggaguggaugauggauu

SEQ ID NO: 1134660 - RNA, 22 nt, Human
cccugagagugagugccaccuu

SEQ ID NO: 1134661 - RNA, 22 nt, Human
ucuggcucacuucaggcuucac

SEQ ID NO: 1134662 - RNA, 22 nt, Human
cagagccugccaccuuucuccc

SEQ ID NO: 1134663 - RNA, 22 nt, Human
uccagggaugguaaugagcagu

SEQ ID NO: 1134664 - RNA, 22 nt, Human
uacaaagucaccagcuucuugc

SEQ ID NO: 1134665 - RNA, 22 nt, Human
ucuggcucugacacuacuguua

SEQ ID NO: 1134666 - RNA, 22 nt, Human
gcuucuggaggagcugggcuga

SEQ ID NO: 1134667 - RNA, 22 nt, Human
guuauaaaugacugcaaaaguu

SEQ ID NO: 1134668 - RNA, 22 nt, Human
acaguaaugauucugagucucu

SEQ ID NO: 1134669 - RNA, 22 nt, Human
acauuucucagguaagucauuu

SEQ ID NO: 1134670 - RNA, 22 nt, Human
ccagucugugugccagccugcg

SEQ ID NO: 1134671 - RNA, 22 nt, Human
gggccuccggggugagcugugg

SEQ ID NO: 1134672 - RNA, 22 nt, Human
cugagccauccauaccagcuua

SEQ ID NO: 1134673 - RNA, 22 nt, Human
aagcagggugucuugacccaug

SEQ ID NO: 1134674 - RNA, 22 nt, Human
cugcugccggcgagccucccuu

SEQ ID NO: 1134675 - RNA, 22 nt, Human
gucccuggucuaccguggcuuc

SEQ ID NO: 1134676 - RNA, 22 nt, Human
uugcauugggagugaggagacc

SEQ ID NO: 1134677 - RNA, 18 nt, Human
gaagggagcuggaaugca

SEQ ID NO: 1134678 - RNA, 19 nt, Human
accaggcuuauggucagug

SEQ ID NO: 1134679 - RNA, 22 nt, Human
uuggaaggagucaaccagcuga

SEQ ID NO: 1134680 - RNA, 22 nt, Human
uuuccucugacugcuccccugc

SEQ ID NO: 1134681 - RNA, 22 nt, Human
cagccaggcccccgagucguug

SEQ ID NO: 1134682 - RNA, 22 nt, Human
gcuggccugggcagaggcuaug

SEQ ID NO: 1134683 - RNA, 20 nt, Human
ucugucucugagcuagacuu

SEQ ID NO: 1134684 - RNA, 22 nt, Human
aaggcacugaaaaauugugugu

SEQ ID NO: 1134685 - RNA, 22 nt, Human
cccagcagaaucugaugagggc

SEQ ID NO: 1134686 - RNA, 20 nt, Human
auacaaagagauugauguau

SEQ ID NO: 1134687 - RNA, 22 nt, Human
cuucuccucugaguccugggag

SEQ ID NO: 1134688 - RNA, 22 nt, Human
gcacugcagccucagauggugg

SEQ ID NO: 1134689 - RNA, 22 nt, Human
caggccugcaggaaaggcuccc

SEQ ID NO: 1134690 - RNA, 22 nt, Human
agcccaaggcuucccugcuggc

SEQ ID NO: 1134691 - RNA, 22 nt, Human
agcuggagaugcccagcaccgg

SEQ ID NO: 1134692 - RNA, 22 nt, Human
cuuauaguaugauguugagaau

SEQ ID NO: 1134693 - RNA, 22 nt, Human
caggaaccuaaugaaggcucac

SEQ ID NO: 1134694 - RNA, 22 nt, Human
ccaaggaguagagcaggaagcu

SEQ ID NO: 1134695 - RNA, 22 nt, Human
ucuggcucuguguccucaccca

SEQ ID NO: 1134696 - RNA, 22 nt, Human
aggucacccguuugacuaucca

SEQ ID NO: 1134697 - RNA, 22 nt, Human
caaaugcagucccuuuguugcu

SEQ ID NO: 1134698 - RNA, 22 nt, Human
ggugggcacauucagucucugu

SEQ ID NO: 1134699 - RNA, 22 nt, Human
gagacauggcaaaagcacuggu

SEQ ID NO: 1134700 - RNA, 22 nt, Human
uggccuuggcagugagaagagu

SEQ ID NO: 1134701 - RNA, 22 nt, Human
guccucuggccuuucccaggac

SEQ ID NO: 1134702 - RNA, 20 nt, Human
uguacacaguacuuuacaau

SEQ ID NO: 1134703 - RNA, 22 nt, Human
uucuggagcuaaaguccacucu

SEQ ID NO: 1134704 - RNA, 18 nt, Human
cacaggcucccagugagg

SEQ ID NO: 1134705 - RNA, 22 nt, Human
gccugcagugagugcagaaggu

SEQ ID NO: 1134706 - RNA, 22 nt, Human
gagcagcucgagaaggaagcag

SEQ ID NO: 1134707 - RNA, 22 nt, Human
gcacacagccagcugagggcua

SEQ ID NO: 1134708 - RNA, 22 nt, Human
ggucauugucagagccuguacu

SEQ ID NO: 1134709 - RNA, 20 nt, Human
aagcaauauagugcaaaugu

SEQ ID NO: 1134710 - RNA, 22 nt, Human
gcagagccaugggagguuuuug

SEQ ID NO: 1134711 - RNA, 22 nt, Human
acuuagaacaggcagaauucca

SEQ ID NO: 1134712 - RNA, 22 nt, Human
ucugaggcauacccaggccccc

SEQ ID NO: 1134713 - RNA, 22 nt, Human
aaagauuugaaauuaggcauca

SEQ ID NO: 1134714 - RNA, 22 nt, Human
uacauguaagacaugagacucu

SEQ ID NO: 1134715 - RNA, 22 nt, Human
ucaggcagaccaccgugggcag

SEQ ID NO: 1134716 - RNA, 22 nt, Human
guguaauugaaauugagaacca

SEQ ID NO: 1134717 - RNA, 22 nt, Human
auuguggcuagacagucacaau

SEQ ID NO: 1134718 - RNA, 23 nt, Human
gugugccaagcacugugccagga

SEQ ID NO: 1134719 - RNA, 22 nt, Human
acuuucucaaaucagacuuuaa

SEQ ID NO: 1134720 - RNA, 22 nt, Human
cccaggaggccaagguugcagu

SEQ ID NO: 1134721 - RNA, 22 nt, Human
agccuccaucccaugcacaaag

SEQ ID NO: 1134722 - RNA, 22 nt, Human
aagcagccucauuugugguaag

SEQ ID NO: 1134723 - RNA, 22 nt, Human
uuguccuuggaugaagcuggga

SEQ ID NO: 1134724 - RNA, 22 nt, Human
cccagcucucucaguucugcuu

SEQ ID NO: 1134725 - RNA, 22 nt, Human
gcagaagggaauaaggagcuuu

SEQ ID NO: 1134726 - RNA, 22 nt, Human
guaaaguucuauuugaauuuag

SEQ ID NO: 1134727 - RNA, 22 nt, Human
cucugggcaggaccaguggacc

SEQ ID NO: 1134728 - RNA, 22 nt, Human
ccaaagugcugggguuacaggc

SEQ ID NO: 1134729 - RNA, 22 nt, Human
agaaaugcauuagcacauauag

SEQ ID NO: 1134730 - RNA, 22 nt, Human
aucagcaaucucguguauuagg

SEQ ID NO: 1134731 - RNA, 22 nt, Human
gugggacucuucuuuggcagug

SEQ ID NO: 1134732 - RNA, 22 nt, Human
uugugaaacauucauggauuug

SEQ ID NO: 1134733 - RNA, 22 nt, Human
ucaggauaaaauguaauggcaa

SEQ ID NO: 1134734 - RNA, 22 nt, Human
gcagugaaacaauaggaucaaa

SEQ ID NO: 1134735 - RNA, 22 nt, Human
ugcacacacgcggcacaucugu

SEQ ID NO: 1134736 - RNA, 22 nt, Human
acugccuugaaagauuguugag

SEQ ID NO: 1134737 - RNA, 22 nt, Human
ugaaaguugcacauaagagaau

SEQ ID NO: 1134738 - RNA, 22 nt, Human
ugagguggcuagggaggcacuc

SEQ ID NO: 1134739 - RNA, 20 nt, Human
ccucaagcagacugacagcu

SEQ ID NO: 1134740 - RNA, 22 nt, Human
gccuuccuuacaccugcucagc

SEQ ID NO: 1134741 - RNA, 22 nt, Human
ugucccucauugacgcugugcc

SEQ ID NO: 1134742 - RNA, 22 nt, Human
gcugucuugcucacucuugcag

SEQ ID NO: 1134743 - RNA, 22 nt, Human
uggcucaguuugggggauugaa

SEQ ID NO: 1134744 - RNA, 17 nt, Human
acaagcaguggccaugg

SEQ ID NO: 1134745 - RNA, 22 nt, Human
aaacuguaaacacagcaguaca

SEQ ID NO: 1134746 - RNA, 22 nt, Human
agccagagcugaugucauucuc

SEQ ID NO: 1134747 - RNA, 22 nt, Human
ccaggcuggagugcaauggugc

SEQ ID NO: 1134748 - RNA, 22 nt, Human
aagggcuggccacauucugggu

SEQ ID NO: 1134749 - RNA, 22 nt, Human
ggggcagaguagcuggggugug

SEQ ID NO: 1134750 - RNA, 22 nt, Human
cuguuuauaaauagaggggagu

SEQ ID NO: 1134751 - RNA, 22 nt, Human
aaugggagguaguaugggaggu

SEQ ID NO: 1134752 - RNA, 22 nt, Human
guugaauacuugagaaauccau

SEQ ID NO: 1134753 - RNA, 22 nt, Human
agugauggagcuuccucugcua

SEQ ID NO: 1134754 - RNA, 23 nt, Human
uuuuaauuuggacauaagaagau

SEQ ID NO: 1134755 - RNA, 22 nt, Human
uugaauucauuucucauugagu

SEQ ID NO: 1134756 - RNA, 22 nt, Human
cuccuggacauggagcggagga

SEQ ID NO: 1134757 - RNA, 22 nt, Human
gcucugcugcuuacuagauggu

SEQ ID NO: 1134758 - RNA, 22 nt, Human
gagguagccacagauagagacu

SEQ ID NO: 1134759 - RNA, 22 nt, Human
cuuagaaauaaugguuucaguu

SEQ ID NO: 1134760 - RNA, 22 nt, Human
ugcacacaguucucaggaaaga

SEQ ID NO: 1134761 - RNA, 22 nt, Human
uuguuucagcuguaugcuaugu

SEQ ID NO: 1134762 - RNA, 22 nt, Human
ggcauguuucaucacaucaaga

SEQ ID NO: 1134763 - RNA, 22 nt, Human
ccugggaggcagagguugcagu

SEQ ID NO: 1134764 - RNA, 22 nt, Human
aacucaguguguuucuuaguau

SEQ ID NO: 1134765 - RNA, 22 nt, Human
acagaguagcucaagaagauug

SEQ ID NO: 1134766 - RNA, 21 nt, Human
gccacugcacuccagccuggg

SEQ ID NO: 1134767 - RNA, 22 nt, Human
aucuggcucacuuagucuagga

SEQ ID NO: 1134768 - RNA, 21 nt, Human
uuacuuuugcagcaaccuaau

SEQ ID NO: 1134769 - RNA, 22 nt, Human
gcucacagccggcuggcagggg

SEQ ID NO: 1134770 - RNA, 22 nt, Human
caggaacacaaguucagggaug

SEQ ID NO: 1134771 - RNA, 17 nt, Human
gccuuccuuccuccaca

SEQ ID NO: 1134772 - RNA, 22 nt, Human
ccugcagagccacgugccagcg

SEQ ID NO: 1134773 - RNA, 22 nt, Human
gaggaagcagggcuuggcugag

SEQ ID NO: 1134774 - RNA, 22 nt, Human
agcagcugaccagugaguccug

SEQ ID NO: 1134775 - RNA, 22 nt, Human
uuucuuccuuaccuuacuagag

SEQ ID NO: 1134776 - RNA, 22 nt, Human
agugcagugguuaggagccagg

SEQ ID NO: 1134777 - RNA, 22 nt, Human
ccugucucuuucaaucugagag

SEQ ID NO: 1134778 - RNA, 22 nt, Human
cuggcugcaggaugaggcugcc

SEQ ID NO: 1134779 - RNA, 22 nt, Human
uggcucaggauaauuuucccaa

SEQ ID NO: 1134780 - RNA, 22 nt, Human
cugcccugcccaggccuugggc

SEQ ID NO: 1134781 - RNA, 22 nt, Human
cugggagggguagccaauccua

SEQ ID NO: 1134782 - RNA, 22 nt, Human
agucucugccagcuuguccucu

SEQ ID NO: 1134783 - RNA, 22 nt, Human
cagcucugaagaaaggugucua

SEQ ID NO: 1134784 - RNA, 22 nt, Human
gcucugcuugcaucaugacugc

SEQ ID NO: 1134785 - RNA, 17 nt, Human
gccucugcuugugucau

SEQ ID NO: 1134786 - RNA, 22 nt, Human
acacugcucacuucuucccuug

SEQ ID NO: 1134787 - RNA, 22 nt, Human
uuccucagagggcgcuggggaa

SEQ ID NO: 1134788 - RNA, 22 nt, Human
ucugcaggccucgacaaggcca

SEQ ID NO: 1134789 - RNA, 20 nt, Human
uuccagagaucugcauuuua

SEQ ID NO: 1134790 - RNA, 22 nt, Human
aaaucugguucaguaaguccuc

SEQ ID NO: 1134791 - RNA, 19 nt, Human
uggaggagaggaaaaguca

SEQ ID NO: 1134792 - RNA, 22 nt, Human
acagauugaucuugagaauuau

SEQ ID NO: 1134793 - RNA, 22 nt, Human
uggggguguccuggugcacaca

SEQ ID NO: 1134794 - RNA, 22 nt, Human
gccaggcagcagcgaggauggu

SEQ ID NO: 1134795 - RNA, 22 nt, Human
ccuaugccugucacucugcgcu

SEQ ID NO: 1134796 - RNA, 22 nt, Human
uacaugcaugucacagaaugaa

SEQ ID NO: 1134797 - RNA, 20 nt, Human
cuaucuccuggcgugccuuc

SEQ ID NO: 1134798 - RNA, 22 nt, Human
ggcagcuguaagaugagugaau

SEQ ID NO: 1134799 - RNA, 18 nt, Human
gcugccugcauuccucac

SEQ ID NO: 1134800 - RNA, 22 nt, Human
aaggucauugguucugaauucu

SEQ ID NO: 1134801 - RNA, 22 nt, Human
gugauuucagguuuuucauacu

SEQ ID NO: 1134802 - RNA, 22 nt, Human
ggucauugaaaucagaaggguu

SEQ ID NO: 1134803 - RNA, 22 nt, Human
ggcagccauggacacuggcuag

SEQ ID NO: 1134804 - RNA, 22 nt, Human
gcaucuucacacaaagccagug

SEQ ID NO: 1134805 - RNA, 18 nt, Human
ggcugagguugacuagaa

SEQ ID NO: 1134806 - RNA, 22 nt, Human
cacaugcauaaggauaauuacu

SEQ ID NO: 1134807 - RNA, 22 nt, Human
ggucacaggggagaagagugau

SEQ ID NO: 1134808 - RNA, 22 nt, Human
ccugagccugaguggugcaggg

SEQ ID NO: 1134809 - RNA, 22 nt, Human
ucagagucauugcaaguagaag

SEQ ID NO: 1134810 - RNA, 22 nt, Human
caggagugucuccacacagcaa

SEQ ID NO: 1134811 - RNA, 22 nt, Human
uacauacacaaauauacuguuu

SEQ ID NO: 1134812 - RNA, 22 nt, Human
uccugccuucauacugcuguau

SEQ ID NO: 1134813 - RNA, 22 nt, Human
cuguuuuugugcugugucuccc

SEQ ID NO: 1134814 - RNA, 23 nt, Human
agcacagacuagaaaggucuuuc

SEQ ID NO: 1134815 - RNA, 22 nt, Human
gauacaaauucaugucugaauu

SEQ ID NO: 1134816 - RNA, 22 nt, Human
ucacaggguguacaucaccuau

SEQ ID NO: 1134817 - RNA, 22 nt, Human
uucaagauccagcacaacagug

SEQ ID NO: 1134818 - RNA, 22 nt, Human
auaugucgcuacaucauuagau

SEQ ID NO: 1134819 - RNA, 22 nt, Human
guuuuguucuuguccagggaaa

SEQ ID NO: 1134820 - RNA, 22 nt, Human
uuugcauuaguuuagauuucaa

SEQ ID NO: 1134821 - RNA, 21 nt, Human
ucagggcagcugcucuucaga

SEQ ID NO: 1134822 - RNA, 22 nt, Human
ggccugcucugcagccucuaca

SEQ ID NO: 1134823 - RNA, 22 nt, Human
cauugacaguucuuuaaguugc

SEQ ID NO: 1134824 - RNA, 22 nt, Human
uagagcuggccgggacagcugg

SEQ ID NO: 1134825 - RNA, 22 nt, Human
aaauugugcucacacugauauu

SEQ ID NO: 1134826 - RNA, 22 nt, Human
aaaggucauugaaaaggaggaa

SEQ ID NO: 1134827 - RNA, 21 nt, Human
ucccugcuuucuggcccaguc

SEQ ID NO: 1134828 - RNA, 22 nt, Human
cccugcagccuugcaugccuuc

SEQ ID NO: 1134829 - RNA, 22 nt, Human
agguggggugagcugcagacua

SEQ ID NO: 1134830 - RNA, 22 nt, Human
acaggccugacacacagagggc

SEQ ID NO: 1134831 - RNA, 22 nt, Human
cugccagcucaaagcgcagcua

SEQ ID NO: 1134832 - RNA, 22 nt, Human
ggggcuguuuuuggaauggcug

SEQ ID NO: 1134833 - RNA, 22 nt, Human
aggcugucugaccccagagccc

SEQ ID NO: 1134834 - RNA, 22 nt, Human
ucagccugcuccaagugcugcc

SEQ ID NO: 1134835 - RNA, 22 nt, Human
agugauggugagugagaagcuc

SEQ ID NO: 1134836 - RNA, 22 nt, Human
agguugaacccccaagaccuau

SEQ ID NO: 1134837 - RNA, 22 nt, Human
uggaaggggagcuggaaagggg

SEQ ID NO: 1134838 - RNA, 22 nt, Human
uggccugauuuugcuaagagaa

SEQ ID NO: 1134839 - RNA, 22 nt, Human
ggaggugggagacauaggcggc

SEQ ID NO: 1134840 - RNA, 22 nt, Human
uauucacauguacauaugcuca

SEQ ID NO: 1134841 - RNA, 22 nt, Human
ugaagccuuguguggccucucu

SEQ ID NO: 1134842 - RNA, 22 nt, Human
gcacagggagacagccguggcc

SEQ ID NO: 1134843 - RNA, 22 nt, Human
ccagcagagggucuuggccauu

SEQ ID NO: 1134844 - RNA, 19 nt, Human
ucucaauguucagaaagcu

SEQ ID NO: 1134845 - RNA, 22 nt, Human
gauccuugcaacucugugaggu

SEQ ID NO: 1134846 - RNA, 22 nt, Human
cagagcuguccaaacccugaca

SEQ ID NO: 1134847 - RNA, 22 nt, Human
agcagcauguugggaugugaaa

SEQ ID NO: 1134848 - RNA, 22 nt, Human
gaggcugcugagagcccuguuu

SEQ ID NO: 1134849 - RNA, 22 nt, Human
aggccuguuggcgugggcucua

SEQ ID NO: 1134850 - RNA, 22 nt, Human
ucauugcagcuucagguguuca

SEQ ID NO: 1134851 - RNA, 22 nt, Human
cccagacugcagagcgggcaga

SEQ ID NO: 1134852 - RNA, 22 nt, Human
ggaggguuagcaaaggcacaga

SEQ ID NO: 1134853 - RNA, 22 nt, Human
agaagccauugaagcagaccuc

SEQ ID NO: 1134854 - RNA, 19 nt, Human
cugaagucuuuucagcugg

SEQ ID NO: 1134855 - RNA, 22 nt, Human
guaacaaaguuucuaggugcug

SEQ ID NO: 1134856 - RNA, 22 nt, Human
agggcugcuccuccuucaggcc

SEQ ID NO: 1134857 - RNA, 22 nt, Human
cugaggcuuggaggggucuggu

SEQ ID NO: 1134858 - RNA, 22 nt, Human
caagggccuccaccuugcucgu

SEQ ID NO: 1134859 - RNA, 22 nt, Human
aggcucagcugguggugaucgc

SEQ ID NO: 1134860 - RNA, 22 nt, Human
gagcaggccagcaauggaaggg

SEQ ID NO: 1134861 - RNA, 22 nt, Human
cagagcugggcauggugaaagg

SEQ ID NO: 1134862 - RNA, 22 nt, Human
uuccgcuggggccgccuggcgg

SEQ ID NO: 1134863 - RNA, 22 nt, Human
gccugucaauuuuguguacaau

SEQ ID NO: 1134864 - RNA, 22 nt, Human
cauguacaguuuuucuguccug

SEQ ID NO: 1134865 - RNA, 22 nt, Human
uuugcauugcauacaaggaacu

SEQ ID NO: 1134866 - RNA, 22 nt, Human
ccugcugggccugagcaaugag

SEQ ID NO: 1134867 - RNA, 22 nt, Human
ucugccuucgcugcucccugaa

SEQ ID NO: 1134868 - RNA, 22 nt, Human
gugcagugaaaaaagaaugucc

SEQ ID NO: 1134869 - RNA, 22 nt, Human
uauuucuguaugcauaaaagga

SEQ ID NO: 1134870 - RNA, 21 nt, Human
auuauuauuucuguguccagc

SEQ ID NO: 1134871 - RNA, 22 nt, Human
uacaguagacaauguuaguaug

SEQ ID NO: 1134872 - RNA, 17 nt, Human
ucuggccuuccugaacu

SEQ ID NO: 1134873 - RNA, 17 nt, Human
uauguguguguuuauac

SEQ ID NO: 1134874 - RNA, 22 nt, Human
uggcucagcgguggcagcagac

SEQ ID NO: 1134875 - RNA, 22 nt, Human
uggcucagagccuugagagcug

SEQ ID NO: 1134876 - RNA, 22 nt, Human
cuggagcccaggccuggugucu

SEQ ID NO: 1134877 - RNA, 17 nt, Human
ucuuuccugccaugcuc

SEQ ID NO: 1134878 - RNA, 22 nt, Human
cugcagagguugguucuaagau

SEQ ID NO: 1134879 - RNA, 22 nt, Human
guccucuguagggcugggccac

SEQ ID NO: 1134880 - RNA, 22 nt, Human
uauagagguggaaacugagguu

SEQ ID NO: 1134881 - RNA, 22 nt, Human
ggcugggcaggucugcacaggg

SEQ ID NO: 1134882 - RNA, 22 nt, Human
uggccaggggaguuccccucca

SEQ ID NO: 1134883 - RNA, 22 nt, Human
agaguguuucagucuuccuaga

SEQ ID NO: 1134884 - RNA, 22 nt, Human
cugagccagcgggcucacuuuu

SEQ ID NO: 1134885 - RNA, 22 nt, Human
uguguacauaucuauccuagau

SEQ ID NO: 1134886 - RNA, 22 nt, Human
uaauuuauuucaacugccaagg

SEQ ID NO: 1134887 - RNA, 20 nt, Human
ucaggcaguggggaaaggca

SEQ ID NO: 1134888 - RNA, 22 nt, Human
ccaggagccacucaggcccaca

SEQ ID NO: 1134889 - RNA, 17 nt, Human
agccccucagcgucacc

SEQ ID NO: 1134890 - RNA, 17 nt, Human
acagagguuauacagac

SEQ ID NO: 1134891 - RNA, 22 nt, Human
caguuucuguuuuaaauagcag

SEQ ID NO: 1134892 - RNA, 22 nt, Human
uggcucuggauuaaucuaggaa

SEQ ID NO: 1134893 - RNA, 22 nt, Human
gcugucugcugugcacugagca

SEQ ID NO: 1134894 - RNA, 17 nt, Human
agcagcuggguugaucu

SEQ ID NO: 1134895 - RNA, 22 nt, Human
ucuccuggauggaccuucucuu

SEQ ID NO: 1134896 - RNA, 22 nt, Human
caggaggaacaagagguucugg

SEQ ID NO: 1134897 - RNA, 22 nt, Human
ccagcucuggcuucuugcuggg

SEQ ID NO: 1134898 - RNA, 22 nt, Human
ugcauuaugcuacccagaagcu

SEQ ID NO: 1134899 - RNA, 22 nt, Human
ugggcuggcguggagaguuuag

SEQ ID NO: 1134900 - RNA, 22 nt, Human
ugcagaagaaaacagcugugug

SEQ ID NO: 1134901 - RNA, 22 nt, Human
aaaugucugagacuucugaacu

SEQ ID NO: 1134902 - RNA, 22 nt, Human
aaggcagauauaaagacuagag

SEQ ID NO: 1134903 - RNA, 22 nt, Human
aaguccauaguuugcauuacag

SEQ ID NO: 1134904 - RNA, 20 nt, Human
uccuucaggcagggccuagu

SEQ ID NO: 1134905 - RNA, 22 nt, Human
ugaagaugucagcagggguggu

SEQ ID NO: 1134906 - RNA, 22 nt, Human
cagggcuguuagcugcugcucu

SEQ ID NO: 1134907 - RNA, 22 nt, Human
aagccuuggcccuucauuauaa

SEQ ID NO: 1134908 - RNA, 22 nt, Human
ggcaaggccuugcccagcauuc

SEQ ID NO: 1134909 - RNA, 22 nt, Human
gcugugcagucuuuggugugcc

SEQ ID NO: 1134910 - RNA, 22 nt, Human
uagaauaugugguaggaucugg

SEQ ID NO: 1134911 - RNA, 22 nt, Human
uggcucuguuuguuaacuagac

SEQ ID NO: 1134912 - RNA, 22 nt, Human
aguggcagccgagcaggagaug

SEQ ID NO: 1134913 - RNA, 22 nt, Human
ugccacagaggugaagcccacu

SEQ ID NO: 1134914 - RNA, 22 nt, Human
cagacuuucaaggagugaaggc

SEQ ID NO: 1134915 - RNA, 22 nt, Human
cccuccagagcuugaccugcug

SEQ ID NO: 1134916 - RNA, 22 nt, Human
ggcugcugaguuggccaggaga

SEQ ID NO: 1134917 - RNA, 22 nt, Human
uggccucucuaccaggcagccu

SEQ ID NO: 1134918 - RNA, 20 nt, Human
aguguuccggaagacuggca

SEQ ID NO: 1134919 - RNA, 22 nt, Human
agagcagaggcauggccguggg

SEQ ID NO: 1134920 - RNA, 22 nt, Human
cccagcuccgagcuccgagccg

SEQ ID NO: 1134921 - RNA, 22 nt, Human
cuguccuggagggcauaggacg

SEQ ID NO: 1134922 - RNA, 22 nt, Human
aguggugcugcgcgcggagcuc

SEQ ID NO: 1134923 - RNA, 22 nt, Human
uagcauuuauggucaugugucc

SEQ ID NO: 1134924 - RNA, 22 nt, Human
ugucccaggcugaaguacagug

SEQ ID NO: 1134925 - RNA, 22 nt, Human
cucucucuuguguugcugcaga

SEQ ID NO: 1134926 - RNA, 22 nt, Human
gcguggugcugcccugcacaca

SEQ ID NO: 1134927 - RNA, 22 nt, Human
ggcagcugagcauggcuaccuu

SEQ ID NO: 1134928 - RNA, 22 nt, Human
guguguccaggcgggagucaag

SEQ ID NO: 1134929 - RNA, 22 nt, Human
uaaaugugaccuucauuuuaua

SEQ ID NO: 1134930 - RNA, 22 nt, Human
accagccugucugagucguggg

SEQ ID NO: 1134931 - RNA, 22 nt, Human
agcugcagagguuugugcaaca

SEQ ID NO: 1134932 - RNA, 22 nt, Human
uguauguguauguacauaugca

SEQ ID NO: 1134933 - RNA, 22 nt, Human
auacuuuggggguuaguguaga

SEQ ID NO: 1134934 - RNA, 22 nt, Human
caggccuggagugcaauggcac

SEQ ID NO: 1134935 - RNA, 23 nt, Human
uggcucuguggaucccucaggag

SEQ ID NO: 1134936 - RNA, 23 nt, Human
ugggggugcacgggccacaucuu

SEQ ID NO: 1134937 - RNA, 22 nt, Human
gagcuuccauggacgccaucug

SEQ ID NO: 1134938 - RNA, 22 nt, Human
auccaguucucagugcuuacag

SEQ ID NO: 1134939 - RNA, 22 nt, Human
cuuucucuguguuucacaugcu

SEQ ID NO: 1134940 - RNA, 22 nt, Human
auggcagggcagccucucagag

SEQ ID NO: 1134941 - RNA, 22 nt, Human
ugucaugcccaggagcaaggua

SEQ ID NO: 1134942 - RNA, 22 nt, Human
gacagggcgagacucagucuca

SEQ ID NO: 1134943 - RNA, 22 nt, Human
ucugggagagcugcugucagag

SEQ ID NO: 1134944 - RNA, 22 nt, Human
aggcucugugacaaucaagcug

SEQ ID NO: 1134945 - RNA, 22 nt, Human
ggcagcaggagccaucugguag

SEQ ID NO: 1134946 - RNA, 22 nt, Human
cccuggaggucagaggccuggg

SEQ ID NO: 1134947 - RNA, 22 nt, Human
aaaagagucuuaggcagucaua

SEQ ID NO: 1134948 - RNA, 22 nt, Human
uccugugccuccaccugcuccg

SEQ ID NO: 1134949 - RNA, 21 nt, Human
agcagagugcuuugacuuugu

SEQ ID NO: 1134950 - RNA, 22 nt, Human
uaggacaggugaggggcugugg

SEQ ID NO: 1134951 - RNA, 22 nt, Human
uugauacaggccuucuagauga

SEQ ID NO: 1134952 - RNA, 22 nt, Human
caggccagugugcuucccaggc

SEQ ID NO: 1134953 - RNA, 22 nt, Human
ccugggugaaaucucuccugca

SEQ ID NO: 1134954 - RNA, 22 nt, Human
cacugccugugagcugugugcc

SEQ ID NO: 1134955 - RNA, 22 nt, Human
ugagccagccuugcagcugugc

SEQ ID NO: 1134956 - RNA, 22 nt, Human
gcccauggacacccaagugcca

SEQ ID NO: 1134957 - RNA, 23 nt, Human
cagguggcuccacgagggguggg

SEQ ID NO: 1134958 - RNA, 22 nt, Human
uggagccagagcgcagccuggg

SEQ ID NO: 1134959 - RNA, 22 nt, Human
uccucaggucaaagcaggagaa

SEQ ID NO: 1134960 - RNA, 22 nt, Human
gagccuggccuccugccucagc

SEQ ID NO: 1134961 - RNA, 22 nt, Human
cccagcccccgagugucuggaa

SEQ ID NO: 1134962 - RNA, 22 nt, Human
aggcacugguccauuuucugca

SEQ ID NO: 1134963 - RNA, 19 nt, Human
cuguccuuggcugcacugu

SEQ ID NO: 1134964 - RNA, 22 nt, Human
ccagggugagugucauggguua

SEQ ID NO: 1134965 - RNA, 22 nt, Human
gugugugccaacuuuaugugca

SEQ ID NO: 1134966 - RNA, 19 nt, Human
cagagcugcuggccucguc

SEQ ID NO: 1134967 - RNA, 19 nt, Human
cuggcucuuggguggagga

SEQ ID NO: 1134968 - RNA, 22 nt, Human
ucaguuuuaagguuugagaauu

SEQ ID NO: 1134969 - RNA, 22 nt, Human
augcaguggcagcuccuggugu

SEQ ID NO: 1134970 - RNA, 22 nt, Human
gccaagagaaugugagagaaau

SEQ ID NO: 1134971 - RNA, 22 nt, Human
gaguuauuucagaaggaaagau

SEQ ID NO: 1134972 - RNA, 22 nt, Human
uauuucugauugcucaugaggc

SEQ ID NO: 1134973 - RNA, 22 nt, Human
caugcacuuaccugaaauucaa

SEQ ID NO: 1134974 - RNA, 22 nt, Human
ccucugccaccucccacgaggc

SEQ ID NO: 1134975 - RNA, 22 nt, Human
gguuugcaugugauguugggca

SEQ ID NO: 1134976 - RNA, 22 nt, Human
uacaugcucaguaacuuucagu

SEQ ID NO: 1134977 - RNA, 22 nt, Human
ccucaggggugcccacagcugc

SEQ ID NO: 1134978 - RNA, 22 nt, Human
gcagcuggagccagccagacac

SEQ ID NO: 1134979 - RNA, 22 nt, Human
caagccucagaaucuucuccau

SEQ ID NO: 1134980 - RNA, 22 nt, Human
acagagcucccagccaucuccu

SEQ ID NO: 1134981 - RNA, 22 nt, Human
cagggagaucuuggcuccuggu

SEQ ID NO: 1134982 - RNA, 22 nt, Human
cccuggaguagcacugggucgc

SEQ ID NO: 1134983 - RNA, 22 nt, Human
uuuccucuucgauuaaguuugg

SEQ ID NO: 1134984 - RNA, 21 nt, Human
guggcccugccgcagugucca

SEQ ID NO: 1134985 - RNA, 22 nt, Human
caagaaaugggauuugacugcc

SEQ ID NO: 1134986 - RNA, 22 nt, Human
cugggcugagccugggcugugu

SEQ ID NO: 1134987 - RNA, 22 nt, Human
agcagcagaggucagaaaggua

SEQ ID NO: 1134988 - RNA, 22 nt, Human
uguauguguccuaauucaagca

SEQ ID NO: 1134989 - RNA, 22 nt, Human
ccuggcugcuuucacuauggag

SEQ ID NO: 1134990 - RNA, 22 nt, Human
ugcauuguugaugaguugaaua

SEQ ID NO: 1134991 - RNA, 22 nt, Human
cagagccaugguaugggcuugu

SEQ ID NO: 1134992 - RNA, 22 nt, Human
aaagaacaucggagugggcggg

SEQ ID NO: 1134993 - RNA, 22 nt, Human
uucaaugagcccaagaacguga

SEQ ID NO: 1134994 - RNA, 22 nt, Human
ucaggcagagcuguggagcucu

SEQ ID NO: 1134995 - RNA, 22 nt, Human
aguguuccugcucucaggaagc

SEQ ID NO: 1134996 - RNA, 22 nt, Human
gcugcaggcgccugcggucucu

SEQ ID NO: 1134997 - RNA, 17 nt, Human
aucuggcugcuucuaga

SEQ ID NO: 1134998 - RNA, 22 nt, Human
uacaggaggauuaucaaaggau

SEQ ID NO: 1134999 - RNA, 22 nt, Human
gccucugcugcaagccugguug

SEQ ID NO: 1135000 - RNA, 22 nt, Human
uuucacaucagagguagauuag

SEQ ID NO: 1135001 - RNA, 22 nt, Human
uuaaacaguguuucaugugggg

SEQ ID NO: 1135002 - RNA, 22 nt, Human
cccuggagcuagucugagcaga

SEQ ID NO: 1135003 - RNA, 22 nt, Human
gggcuucucuuaugcuaacugg

SEQ ID NO: 1135004 - RNA, 22 nt, Human
gcucugcugucuucuugcaggc

SEQ ID NO: 1135005 - RNA, 22 nt, Human
ugagcugggcugggcugagcug

SEQ ID NO: 1135006 - RNA, 22 nt, Human
ccuggaagauucaccacuacca

SEQ ID NO: 1135007 - RNA, 22 nt, Human
agucccagccuguaggauuggg

SEQ ID NO: 1135008 - RNA, 22 nt, Human
ggagccuggccuggcucugugu

SEQ ID NO: 1135009 - RNA, 22 nt, Human
ccuccugggacaggcuggcaca

SEQ ID NO: 1135010 - RNA, 22 nt, Human
ggacagagcccugguggccuaa

SEQ ID NO: 1135011 - RNA, 22 nt, Human
ugcuggcuggccuggccuggac

SEQ ID NO: 1135012 - RNA, 22 nt, Human
ucacuuuugaucccuaugcagu

SEQ ID NO: 1135013 - RNA, 22 nt, Human
cuggagcugcuguccuugggug

SEQ ID NO: 1135014 - RNA, 22 nt, Human
agaggucauaucucagaagaga

SEQ ID NO: 1135015 - RNA, 22 nt, Human
ucagaagacuacuaggacacau

SEQ ID NO: 1135016 - RNA, 22 nt, Human
ggcugucugugguggagcguug

SEQ ID NO: 1135017 - RNA, 22 nt, Human
ccugccaggacauugcuugaag

SEQ ID NO: 1135018 - RNA, 22 nt, Human
gaggggcugggcagucccugga

SEQ ID NO: 1135019 - RNA, 22 nt, Human
uaauuauaacaguuacaucuua

SEQ ID NO: 1135020 - RNA, 22 nt, Human
aagauuuaccacuuuauucaag

SEQ ID NO: 1135021 - RNA, 22 nt, Human
uguacaauagcuauuaucucca

SEQ ID NO: 1135022 - RNA, 22 nt, Human
ccugggcagggcuggacucuca

SEQ ID NO: 1135023 - RNA, 20 nt, Human
ugcucugucuaaaacuuccc

SEQ ID NO: 1135024 - RNA, 22 nt, Human
uggcagaggagaauuaagauua

SEQ ID NO: 1135025 - RNA, 22 nt, Human
ugcuucaggagaugucaccaug

SEQ ID NO: 1135026 - RNA, 22 nt, Human
auguuuugauugguuaggucug

SEQ ID NO: 1135027 - RNA, 22 nt, Human
caggagcaaggagcagugggau

SEQ ID NO: 1135028 - RNA, 22 nt, Human
caguacuuguccucagguguua

SEQ ID NO: 1135029 - RNA, 22 nt, Human
uccagccaugcaugacaaucac

SEQ ID NO: 1135030 - RNA, 22 nt, Human
aauagguagccagauauauaaa

SEQ ID NO: 1135031 - RNA, 19 nt, Human
cccagagcauccugaacuu

SEQ ID NO: 1135032 - RNA, 23 nt, Human
uugugggcagauuccauggggag

SEQ ID NO: 1135033 - RNA, 22 nt, Human
gcaggcagagguggaggagaca

SEQ ID NO: 1135034 - RNA, 22 nt, Human
gccaggcagauaugugagcuua

SEQ ID NO: 1135035 - RNA, 22 nt, Human
acaggcugcugggcuccgugcu

SEQ ID NO: 1135036 - RNA, 22 nt, Human
cuggccuggucuggccucucca

SEQ ID NO: 1135037 - RNA, 22 nt, Human
uacauaguuccauuuacaggaa

SEQ ID NO: 1135038 - RNA, 22 nt, Human
ugucauugaggaaaacuaggug

SEQ ID NO: 1135039 - RNA, 22 nt, Human
aaauguguuuagaugguuuauu

SEQ ID NO: 1135040 - RNA, 20 nt, Human
uaacagaaguagaagugggu

SEQ ID NO: 1135041 - RNA, 22 nt, Human
gccaaagcagucuugccucugc

SEQ ID NO: 1135042 - RNA, 22 nt, Human
gugggggcaggcagugcuagga

SEQ ID NO: 1135043 - RNA, 22 nt, Human
acacaugcauaagccuucccuu

SEQ ID NO: 1135044 - RNA, 22 nt, Human
ugauuuccaauaaggagaaugu

SEQ ID NO: 1135045 - RNA, 22 nt, Human
aacauacagugagcaguggacu

SEQ ID NO: 1135046 - RNA, 19 nt, Human
gccagcagaaugaugaggc

SEQ ID NO: 1135047 - RNA, 22 nt, Human
aguccaugaugaaaccagaucc

SEQ ID NO: 1135048 - RNA, 18 nt, Human
aggccugggaagcugagg

SEQ ID NO: 1135049 - RNA, 22 nt, Human
ucugcagaaguggcugggccac

SEQ ID NO: 1135050 - RNA, 22 nt, Human
cagaacugggcagggagcagag

SEQ ID NO: 1135051 - RNA, 22 nt, Human
cuccucugucuggcccugagcc

SEQ ID NO: 1135052 - RNA, 22 nt, Human
ugcagaagugagucaugaggaa

SEQ ID NO: 1135053 - RNA, 22 nt, Human
gcagccuguuguaccagccugu

SEQ ID NO: 1135054 - RNA, 22 nt, Human
ucacagcaaaagugugcagagc

SEQ ID NO: 1135055 - RNA, 22 nt, Human
cagggccaccguguuugcugcu

SEQ ID NO: 1135056 - RNA, 22 nt, Human
caagacaagaucuaagcaugcu

SEQ ID NO: 1135057 - RNA, 22 nt, Human
caggguggaagcuguagagugg

SEQ ID NO: 1135058 - RNA, 22 nt, Human
gccuggaguggacuuggccccu

SEQ ID NO: 1135059 - RNA, 22 nt, Human
agcugguguccuccuggagcug

SEQ ID NO: 1135060 - RNA, 22 nt, Human
uugcaggggaaggagcagagcu

SEQ ID NO: 1135061 - RNA, 22 nt, Human
uccuucaguuaaagaucucaca

SEQ ID NO: 1135062 - RNA, 22 nt, Human
aaagaacagauguguggugcau

SEQ ID NO: 1135063 - RNA, 22 nt, Human
uccuggaggggacagcaugggc

SEQ ID NO: 1135064 - RNA, 22 nt, Human
acacagggcugcgccugacccc

SEQ ID NO: 1135065 - RNA, 22 nt, Human
agcuuaggaggaugaugaacau

SEQ ID NO: 1135066 - RNA, 22 nt, Human
ggaucauuaacacauccaucac

SEQ ID NO: 1135067 - RNA, 22 nt, Human
ugccagcaguagcaguaggcca

SEQ ID NO: 1135068 - RNA, 22 nt, Human
cugagccauaagggaggcuggg

SEQ ID NO: 1135069 - RNA, 22 nt, Human
uccagcucuaacaugcugggcc

SEQ ID NO: 1135070 - RNA, 22 nt, Human
cagcauggggcuuggagucagc

SEQ ID NO: 1135071 - RNA, 22 nt, Human
ugccucuguggaaauggugguc

SEQ ID NO: 1135072 - RNA, 22 nt, Human
acauuucuuugcuagacagcag

SEQ ID NO: 1135073 - RNA, 23 nt, Human
augcucugggcugugggaccugc

SEQ ID NO: 1135074 - RNA, 22 nt, Human
ugcacacaaaugugaacgugcc

SEQ ID NO: 1135075 - RNA, 22 nt, Human
ugaggcuguucuaccagggcca

SEQ ID NO: 1135076 - RNA, 22 nt, Human
agccuucauaaucuugggcuuu

SEQ ID NO: 1135077 - RNA, 22 nt, Human
agucccagcuacucaagaggcu

SEQ ID NO: 1135078 - RNA, 22 nt, Human
cugaggccagcugcagagcucu

SEQ ID NO: 1135079 - RNA, 22 nt, Human
gcccaugcacuuucugugaugg

SEQ ID NO: 1135080 - RNA, 22 nt, Human
uuccagggcuaauuccugugga

SEQ ID NO: 1135081 - RNA, 22 nt, Human
gcugucuguggugucagcugac

SEQ ID NO: 1135082 - RNA, 22 nt, Human
cuggcuuccucaggagcagugg

SEQ ID NO: 1135083 - RNA, 22 nt, Human
ccacugaaggucaacauagagc

SEQ ID NO: 1135084 - RNA, 22 nt, Human
gcagagacuccacugucuugug

SEQ ID NO: 1135085 - RNA, 22 nt, Human
gaaacccaaacuaagacaguag

SEQ ID NO: 1135086 - RNA, 22 nt, Human
uguggcucucaugcacucccag

SEQ ID NO: 1135087 - RNA, 21 nt, Human
uccacaaguuagaaggaaauu

SEQ ID NO: 1135088 - RNA, 22 nt, Human
ccuggcacgaagggcugagguu

SEQ ID NO: 1135089 - RNA, 22 nt, Human
gagccagccuucuucugagguc

SEQ ID NO: 1135090 - RNA, 20 nt, Human
aaaaacaguaaugcugaaga

SEQ ID NO: 1135091 - RNA, 22 nt, Human
gcuggggcugggcugaggaaga

SEQ ID NO: 1135092 - RNA, 22 nt, Human
acauuucucauucuccccuaac

SEQ ID NO: 1135093 - RNA, 22 nt, Human
aaaggucagacuuaggcugggc

SEQ ID NO: 1135094 - RNA, 22 nt, Human
agggcuggcuaggugcguuccc

SEQ ID NO: 1135095 - RNA, 21 nt, Human
ggcacugagccagauggacuc

SEQ ID NO: 1135096 - RNA, 22 nt, Human
aaggccugggaggccucucuuc

SEQ ID NO: 1135097 - RNA, 22 nt, Human
cccuggagggcagacagaugcc

SEQ ID NO: 1135098 - RNA, 22 nt, Human
gggcacuguacacugugcaugg

SEQ ID NO: 1135099 - RNA, 22 nt, Human
ucaguuuuguauguuguaaguc

SEQ ID NO: 1135100 - RNA, 22 nt, Human
ucagccacuacccaccuuaaca

SEQ ID NO: 1135101 - RNA, 22 nt, Human
accaugggucagccaccucagc

SEQ ID NO: 1135102 - RNA, 22 nt, Human
ucccagaaaaaggaggcuauga

SEQ ID NO: 1135103 - RNA, 18 nt, Human
acagaaauagcugugccu

SEQ ID NO: 1135104 - RNA, 22 nt, Human
gucaugccagcggagcucggga

SEQ ID NO: 1135105 - RNA, 22 nt, Human
agcacagaguugcagagagcgu

SEQ ID NO: 1135106 - RNA, 22 nt, Human
augcagguugggcaaguguggg

SEQ ID NO: 1135107 - RNA, 22 nt, Human
cuguauuuaguuaaaaugcuaa

SEQ ID NO: 1135108 - RNA, 23 nt, Human
ucagugauguugaaccuagcagu

SEQ ID NO: 1135109 - RNA, 22 nt, Human
cagagccaggucuaggagucuc

SEQ ID NO: 1135110 - RNA, 22 nt, Human
ccagggcacuuaggcccagccc

SEQ ID NO: 1135111 - RNA, 22 nt, Human
agcgggugcugugucagcccuc

SEQ ID NO: 1135112 - RNA, 22 nt, Human
caggcccugggcaggaucagcc

SEQ ID NO: 1135113 - RNA, 22 nt, Human
ugccugggccucugaggaaggc

SEQ ID NO: 1135114 - RNA, 19 nt, Human
agacagagcucaguggguu

SEQ ID NO: 1135115 - RNA, 22 nt, Human
ggccccacgggggaguccuagu

SEQ ID NO: 1135116 - RNA, 22 nt, Human
acccaggagguggaggcugcag

SEQ ID NO: 1135117 - RNA, 22 nt, Human
acacaggggaaaguggagcuga

SEQ ID NO: 1135118 - RNA, 22 nt, Human
ugcaccugagaggucucugagg

SEQ ID NO: 1135119 - RNA, 19 nt, Human
gccacuccugaugcugccc

SEQ ID NO: 1135120 - RNA, 22 nt, Human
ugcucugguaacucacuuccau

SEQ ID NO: 1135121 - RNA, 22 nt, Human
ugggaguguucuuggcuugcuu

SEQ ID NO: 1135122 - RNA, 23 nt, Human
cagggccaggcagcagcugucac

SEQ ID NO: 1135123 - RNA, 22 nt, Human
cccaucaggaacccaggagccc

SEQ ID NO: 1135124 - RNA, 18 nt, Human
uccugccugugccccagg

SEQ ID NO: 1135125 - RNA, 22 nt, Human
gugucacaugguuuacugcagc

SEQ ID NO: 1135126 - RNA, 22 nt, Human
uccugccucuccaugcuaacua

SEQ ID NO: 1135127 - RNA, 23 nt, Human
agaauuguaaauagaauauaccu

SEQ ID NO: 1135128 - RNA, 22 nt, Human
agaaaucaugacuaagagcagu

SEQ ID NO: 1135129 - RNA, 22 nt, Human
agaaauguacgauguuaugcag

SEQ ID NO: 1135130 - RNA, 22 nt, Human
cuggguggcagagccugcagug

SEQ ID NO: 1135131 - RNA, 22 nt, Human
uggcucugagacacaggcucuc

SEQ ID NO: 1135132 - RNA, 21 nt, Human
aagcuucccugcucuccaggg

SEQ ID NO: 1135133 - RNA, 22 nt, Human
aagaacaguugggaggugagcc

SEQ ID NO: 1135134 - RNA, 22 nt, Human
cugggaggugaacagaaaaacu

SEQ ID NO: 1135135 - RNA, 22 nt, Human
aggcuauuuccacucuucucau

SEQ ID NO: 1135136 - RNA, 23 nt, Human
gcugcagcuguggauguucucag

SEQ ID NO: 1135137 - RNA, 22 nt, Human
ggcugcagggcagcuggugugg

SEQ ID NO: 1135138 - RNA, 22 nt, Human
gguggcagaggugcaucagccc

SEQ ID NO: 1135139 - RNA, 22 nt, Human
ccagagcugauuccugggacuu

SEQ ID NO: 1135140 - RNA, 22 nt, Human
ccuggagcucacugggagccgg

SEQ ID NO: 1135141 - RNA, 19 nt, Human
augagcuggcauuucaggu

SEQ ID NO: 1135142 - RNA, 22 nt, Human
agccacagagagggagcugcaa

SEQ ID NO: 1135143 - RNA, 22 nt, Human
acaaaggugcgucccuucagcu

SEQ ID NO: 1135144 - RNA, 22 nt, Human
cugggcugugguguggcccaaa

SEQ ID NO: 1135145 - RNA, 22 nt, Human
ucagaguguuuuacuaaacaag

SEQ ID NO: 1135146 - RNA, 22 nt, Human
acauucaugucccacuucuagc

SEQ ID NO: 1135147 - RNA, 22 nt, Human
gacagguggggaaacuaaggua

SEQ ID NO: 1135148 - RNA, 22 nt, Human
acauuucugucuuagggacugu

SEQ ID NO: 1135149 - RNA, 22 nt, Human
uggcuggggagccccgacuccc

SEQ ID NO: 1135150 - RNA, 22 nt, Human
gccccugggagcagagccacca

SEQ ID NO: 1135151 - RNA, 22 nt, Human
uagagcauuuagaggggcagga

SEQ ID NO: 1135152 - RNA, 22 nt, Human
cagaccuggaaaacaggcuugc

SEQ ID NO: 1135153 - RNA, 22 nt, Human
cagggcccauggcucagguagg

SEQ ID NO: 1135154 - RNA, 22 nt, Human
gccuggaguagcauggcaagcc

SEQ ID NO: 1135155 - RNA, 21 nt, Human
auccauccaucuuggccuaac

SEQ ID NO: 1135156 - RNA, 22 nt, Human
gaugguuuaugauagaugggaa

SEQ ID NO: 1135157 - RNA, 22 nt, Human
uucacauuugcccuuaugugug

SEQ ID NO: 1135158 - RNA, 22 nt, Human
uccagggcuggguuggcucagc

SEQ ID NO: 1135159 - RNA, 22 nt, Human
ucuggcucuuugggugauugua

SEQ ID NO: 1135160 - RNA, 22 nt, Human
aaaugguguuucuaaugcuaga

SEQ ID NO: 1135161 - RNA, 18 nt, Human
uggcucagauggcuuuaa

SEQ ID NO: 1135162 - RNA, 22 nt, Human
gccuggagaaaggaagguggga

SEQ ID NO: 1135163 - RNA, 22 nt, Human
gucuggggaagucagggcauca

SEQ ID NO: 1135164 - RNA, 22 nt, Human
ucuagaaacaugacauugaucu

SEQ ID NO: 1135165 - RNA, 22 nt, Human
agagccuggucugagauaggac

SEQ ID NO: 1135166 - RNA, 22 nt, Human
gcaggggaguggcaggcccgga

SEQ ID NO: 1135167 - RNA, 20 nt, Human
acaauagauuugagcaaagu

SEQ ID NO: 1135168 - RNA, 22 nt, Human
ccucaggggcuuuucguuguug

SEQ ID NO: 1135169 - RNA, 22 nt, Human
aguggggagguccaggccaccc

SEQ ID NO: 1135170 - RNA, 21 nt, Human
ccuggcuucagggugcacugg

SEQ ID NO: 1135171 - RNA, 23 nt, Human
aacaauagguuuuggcagaauag

SEQ ID NO: 1135172 - RNA, 22 nt, Human
uaaaucucacuggguauauugg

SEQ ID NO: 1135173 - RNA, 22 nt, Human
ggaugcaggaguugaagaagga

SEQ ID NO: 1135174 - RNA, 22 nt, Human
augagcuucccagacaggaugg

SEQ ID NO: 1135175 - RNA, 22 nt, Human
ugggcugcagggguugagagcu

SEQ ID NO: 1135176 - RNA, 22 nt, Human
ggaguuggugagcaccaggcuu

SEQ ID NO: 1135177 - RNA, 22 nt, Human
aaguuuaagguggaaguggugg

SEQ ID NO: 1135178 - RNA, 22 nt, Human
cggagccugcuuguugcagcug

SEQ ID NO: 1135179 - RNA, 22 nt, Human
ugauuaacugucuauuaaucau

SEQ ID NO: 1135180 - RNA, 22 nt, Human
uagaaaucagguuuuuagaaag

SEQ ID NO: 1135181 - RNA, 22 nt, Human
acuucauuguaauauuauagca

SEQ ID NO: 1135182 - RNA, 22 nt, Human
uguaucaaggguuuauguaagc

SEQ ID NO: 1135183 - RNA, 22 nt, Human
aucaaaguaggcauauguuuuu

SEQ ID NO: 1135184 - RNA, 23 nt, Human
cucccuggaguuucuggaagaug

SEQ ID NO: 1135185 - RNA, 22 nt, Human
ccagagcccagggucaugcagg

SEQ ID NO: 1135186 - RNA, 22 nt, Human
ggccugagaaccauggggccaa

SEQ ID NO: 1135187 - RNA, 22 nt, Human
ccucagggaggccucuguggcu

SEQ ID NO: 1135188 - RNA, 22 nt, Human
ucagagugaggcccagcaaucu

SEQ ID NO: 1135189 - RNA, 18 nt, Human
uguuccaaggaaggaauc

SEQ ID NO: 1135190 - RNA, 22 nt, Human
guuugcauuuauuagucuucug

SEQ ID NO: 1135191 - RNA, 22 nt, Human
uguagcucuccagccagcaagg

SEQ ID NO: 1135192 - RNA, 22 nt, Human
uuucaguguaagguuuccagga

SEQ ID NO: 1135193 - RNA, 22 nt, Human
acugagcugcuugaagugaacu

SEQ ID NO: 1135194 - RNA, 22 nt, Human
augcagcaguuuacaaagcaau

SEQ ID NO: 1135195 - RNA, 22 nt, Human
caaagggcucuagacucagcag

SEQ ID NO: 1135196 - RNA, 22 nt, Human
uggacaggaucugagacugaga

SEQ ID NO: 1135197 - RNA, 22 nt, Human
acuauacauugaauguuaaggu

SEQ ID NO: 1135198 - RNA, 18 nt, Human
uggcagagugucuguucu

SEQ ID NO: 1135199 - RNA, 22 nt, Human
agcugccaucagccuuuggaug

SEQ ID NO: 1135200 - RNA, 22 nt, Human
uggggcuguccuuagucugaga

SEQ ID NO: 1135201 - RNA, 22 nt, Human
agaaaagguugaaaguaggauu

SEQ ID NO: 1135202 - RNA, 22 nt, Human
ccuuucucuaucgacccaucgc

SEQ ID NO: 1135203 - RNA, 22 nt, Human
agcugucugucuccugaggaga

SEQ ID NO: 1135204 - RNA, 22 nt, Human
ugcagcuguaacagaggccuca

SEQ ID NO: 1135205 - RNA, 22 nt, Human
agcugccacugagggugcacag

SEQ ID NO: 1135206 - RNA, 22 nt, Human
aggcaaaauuacaaaguuauua

SEQ ID NO: 1135207 - RNA, 22 nt, Human
cccuuucccuucuggcucaggg

SEQ ID NO: 1135208 - RNA, 22 nt, Human
aagagcuggaugaagaaaucaa

SEQ ID NO: 1135209 - RNA, 22 nt, Human
gggcugggaauggcuaaguaug

SEQ ID NO: 1135210 - RNA, 21 nt, Human
aucuuuauuacgcagagaaga

SEQ ID NO: 1135211 - RNA, 22 nt, Human
gcaaggcugugcacuuugcauu

SEQ ID NO: 1135212 - RNA, 22 nt, Human
ccuucucuacuccugaugcaug

SEQ ID NO: 1135213 - RNA, 21 nt, Human
gcaaggcuuuuguguuuccca

SEQ ID NO: 1135214 - RNA, 22 nt, Human
ugcaggugugguuccucagcca

SEQ ID NO: 1135215 - RNA, 23 nt, Human
gggagaauaugaggaugauggug

SEQ ID NO: 1135216 - RNA, 22 nt, Human
ugccuggcaagaggggcuggcu

SEQ ID NO: 1135217 - RNA, 22 nt, Human
agcugccaaguuggaguagcaa

SEQ ID NO: 1135218 - RNA, 22 nt, Human
acuuugaaggggaacauuuuaa

SEQ ID NO: 1135219 - RNA, 22 nt, Human
augaagucuagcaagcauugaa

SEQ ID NO: 1135220 - RNA, 22 nt, Human
ugggcugcccugaugguccuca

SEQ ID NO: 1135221 - RNA, 22 nt, Human
cugagccaugagccugcgccca

SEQ ID NO: 1135222 - RNA, 22 nt, Human
uugucuuaaauggauggacaau

SEQ ID NO: 1135223 - RNA, 22 nt, Human
ccaccagcuucagcagccgcgg

SEQ ID NO: 1135224 - RNA, 22 nt, Human
ucucuggaguauaaccagggau

SEQ ID NO: 1135225 - RNA, 17 nt, Human
uggacccuugggccucc

SEQ ID NO: 1135226 - RNA, 22 nt, Human
gcuucucucucagacugcaagc

SEQ ID NO: 1135227 - RNA, 22 nt, Human
gaucaaaagcuggguucuaaaa

SEQ ID NO: 1135228 - RNA, 20 nt, Human
agcagcuguguuuucauccu

SEQ ID NO: 1135229 - RNA, 22 nt, Human
ggcacugauaauguccucucuc

SEQ ID NO: 1135230 - RNA, 22 nt, Human
cucagaguccccaguggguuug

SEQ ID NO: 1135231 - RNA, 19 nt, Human
auuccucaaggacagaaau

SEQ ID NO: 1135232 - RNA, 23 nt, Human
ugcaggggaggcuuaaagcaggu

SEQ ID NO: 1135233 - RNA, 23 nt, Human
uccagggauuaaugaagucaguc

SEQ ID NO: 1135234 - RNA, 22 nt, Human
ugggcucugugccagguuggug

SEQ ID NO: 1135235 - RNA, 22 nt, Human
ccagggcaggagaaagacucac

SEQ ID NO: 1135236 - RNA, 22 nt, Human
caggacagagcccagacugugu

SEQ ID NO: 1135237 - RNA, 22 nt, Human
gccucccuggcccacagcagcg

SEQ ID NO: 1135238 - RNA, 22 nt, Human
aauaaacugcucaauugcauca

SEQ ID NO: 1135239 - RNA, 22 nt, Human
uacauauacugagugauuugcu

SEQ ID NO: 1135240 - RNA, 22 nt, Human
auauucacugagcauaaagcca

SEQ ID NO: 1135241 - RNA, 22 nt, Human
guggccaggacauugccaggca

SEQ ID NO: 1135242 - RNA, 22 nt, Human
ugggccuggacaaggccacuag

SEQ ID NO: 1135243 - RNA, 22 nt, Human
cccucuggcucuucucaggccg

SEQ ID NO: 1135244 - RNA, 22 nt, Human
accucugcucaagaccccuccg

SEQ ID NO: 1135245 - RNA, 22 nt, Human
aaggucauuuuuuccucuguug

SEQ ID NO: 1135246 - RNA, 22 nt, Human
ccuggcucuguccucgcgcaaa

SEQ ID NO: 1135247 - RNA, 22 nt, Human
gcaccaggcuuagagccccagg

SEQ ID NO: 1135248 - RNA, 22 nt, Human
cagcccuuuccuucucagcuuu

SEQ ID NO: 1135249 - RNA, 22 nt, Human
cagggccacccucugcugggug

SEQ ID NO: 1135250 - RNA, 22 nt, Human
aaaguguaaaagcauguuaggg

SEQ ID NO: 1135251 - RNA, 22 nt, Human
acaaaguuaacaguuggauagu

SEQ ID NO: 1135252 - RNA, 22 nt, Human
ccagcucugcagggccuggggu

SEQ ID NO: 1135253 - RNA, 22 nt, Human
cacagggcuucucauggggugc

SEQ ID NO: 1135254 - RNA, 22 nt, Human
ucacagugagccaugucagaga

SEQ ID NO: 1135255 - RNA, 22 nt, Human
ggcucaggcuggagugcagugg

SEQ ID NO: 1135256 - RNA, 22 nt, Human
ugcauuauacuuuuagaaauuu

SEQ ID NO: 1135257 - RNA, 22 nt, Human
gcaaaaaaugcuuguugcuuag

SEQ ID NO: 1135258 - RNA, 22 nt, Human
aaguuugugagguuaaucccuu

SEQ ID NO: 1135259 - RNA, 22 nt, Human
aguuacuugagacguuuaugaa

SEQ ID NO: 1135260 - RNA, 22 nt, Human
aaggcacugagccagccgucuc

SEQ ID NO: 1135261 - RNA, 23 nt, Human
uugcuucugugcaauucaguacu

SEQ ID NO: 1135262 - RNA, 22 nt, Human
cuggcucaggaaaguugcugcu

SEQ ID NO: 1135263 - RNA, 22 nt, Human
acugucugcccugagaugccag

SEQ ID NO: 1135264 - RNA, 22 nt, Human
cacagcuucuccuugauaucgc

SEQ ID NO: 1135265 - RNA, 23 nt, Human
auaaggcauaaagguacauugga

SEQ ID NO: 1135266 - RNA, 22 nt, Human
aggaaagggguagguguggacg

SEQ ID NO: 1135267 - RNA, 22 nt, Human
aggguagggcccggagacagac

SEQ ID NO: 1135268 - RNA, 22 nt, Human
ucccuggagauaacuucuggga

SEQ ID NO: 1135269 - RNA, 22 nt, Human
uagagcaguuggcagcuguauu

SEQ ID NO: 1135270 - RNA, 22 nt, Human
cugcccugggaguaccuguccu

SEQ ID NO: 1135271 - RNA, 22 nt, Human
ucccuggacagccuugccuggg

SEQ ID NO: 1135272 - RNA, 22 nt, Human
cacauuucuaggaaauuaaaug

SEQ ID NO: 1135273 - RNA, 22 nt, Human
gcuggccacacugcugauggag

SEQ ID NO: 1135274 - RNA, 22 nt, Human
cagguccccuccccuaccaggc

SEQ ID NO: 1135275 - RNA, 22 nt, Human
cacuggggugggccugguagag

SEQ ID NO: 1135276 - RNA, 22 nt, Human
gaggguccccaugcagagcuca

SEQ ID NO: 1135277 - RNA, 22 nt, Human
ucauucuccucuggaaaaggca

SEQ ID NO: 1135278 - RNA, 22 nt, Human
ucccagagcaguacuccaggag

SEQ ID NO: 1135279 - RNA, 22 nt, Human
cuguucucuggcgguggcuguu

SEQ ID NO: 1135280 - RNA, 22 nt, Human
acagaacugggaaaugcacaua

SEQ ID NO: 1135281 - RNA, 22 nt, Human
auugaaagagaauguagcucuu

SEQ ID NO: 1135282 - RNA, 19 nt, Human
gcaugcuugguggcuucug

SEQ ID NO: 1135283 - RNA, 22 nt, Human
guugaauauuuuaagaguuuug

SEQ ID NO: 1135284 - RNA, 22 nt, Human
ucugaaaguaucuggaucuuuu

SEQ ID NO: 1135285 - RNA, 22 nt, Human
gggaggucagggugccugcugg

SEQ ID NO: 1135286 - RNA, 22 nt, Human
uccagggguaccggccaggcag

SEQ ID NO: 1135287 - RNA, 22 nt, Human
guauauaugugugaacauguau

SEQ ID NO: 1135288 - RNA, 22 nt, Human
agggccuggcuucacuuucuca

SEQ ID NO: 1135289 - RNA, 19 nt, Human
ucuggcuccgccucuuagu

SEQ ID NO: 1135290 - RNA, 22 nt, Human
acagagcaauucuuggguguuu

SEQ ID NO: 1135291 - RNA, 22 nt, Human
ugccaggggaccuagggauguc

SEQ ID NO: 1135292 - RNA, 22 nt, Human
ugaaggaauggaggaucagagc

SEQ ID NO: 1135293 - RNA, 21 nt, Human
gaugaagcaaucuuucuguug

SEQ ID NO: 1135294 - RNA, 22 nt, Human
uccagccaccaccuugauugcc

SEQ ID NO: 1135295 - RNA, 22 nt, Human
uguaauggaagugggauugcau

SEQ ID NO: 1135296 - RNA, 23 nt, Human
aaggucacagaacuuagcaagcc

SEQ ID NO: 1135297 - RNA, 22 nt, Human
aaaggucaagcuggacucaggu

SEQ ID NO: 1135298 - RNA, 22 nt, Human
uggcugaaucugcagcaggaag

SEQ ID NO: 1135299 - RNA, 22 nt, Human
ugggugagugggaaaagcccag

SEQ ID NO: 1135300 - RNA, 22 nt, Human
gguggguuuggaagagcaggcu

SEQ ID NO: 1135301 - RNA, 22 nt, Human
uggaaagaugaagauguuuaag

SEQ ID NO: 1135302 - RNA, 22 nt, Human
ggcucugcaugugagugggugg

SEQ ID NO: 1135303 - RNA, 22 nt, Human
gcagcuggcucagagagguggg

SEQ ID NO: 1135304 - RNA, 22 nt, Human
ugggcugcagagcccggccuuc

SEQ ID NO: 1135305 - RNA, 22 nt, Human
agucucugcugguugugccuau

SEQ ID NO: 1135306 - RNA, 22 nt, Human
agucaaagcuacaggcauuuga

SEQ ID NO: 1135307 - RNA, 23 nt, Human
cccuggaguaaauucuuggaagg

SEQ ID NO: 1135308 - RNA, 22 nt, Human
caggugggagccacagcguaca

SEQ ID NO: 1135309 - RNA, 23 nt, Human
ugccagaggcagucacaguggug

SEQ ID NO: 1135310 - RNA, 22 nt, Human
aggagcugaagucucugcacuc

SEQ ID NO: 1135311 - RNA, 22 nt, Human
uguacaaugccgagacuaacuc

SEQ ID NO: 1135312 - RNA, 21 nt, Human
uccuccuucaaguccuggccu

SEQ ID NO: 1135313 - RNA, 22 nt, Human
cuggccaguuguccuggcuugg

SEQ ID NO: 1135314 - RNA, 22 nt, Human
ugggaugggaucucgcuguguc

SEQ ID NO: 1135315 - RNA, 22 nt, Human
agcucccauuaucuucugaaac

SEQ ID NO: 1135316 - RNA, 22 nt, Human
agauuucaauggauauugcaag

SEQ ID NO: 1135317 - RNA, 22 nt, Human
caguguacuuggaauguaacag

SEQ ID NO: 1135318 - RNA, 22 nt, Human
cagccaggacagggaaacuagu

SEQ ID NO: 1135319 - RNA, 20 nt, Human
gagauggcuaagugcugaac

SEQ ID NO: 1135320 - RNA, 22 nt, Human
accaaggaagaaucuauuugag

SEQ ID NO: 1135321 - RNA, 22 nt, Human
ccaggccuggaccaugccaggg

SEQ ID NO: 1135322 - RNA, 22 nt, Human
aauggcugggaguguauuuugg

SEQ ID NO: 1135323 - RNA, 22 nt, Human
acccugggcuuggccugcucag

SEQ ID NO: 1135324 - RNA, 22 nt, Human
auccaaaccuggacaugagugg

SEQ ID NO: 1135325 - RNA, 22 nt, Human
ggcugcuggcauugagguaggu

SEQ ID NO: 1135326 - RNA, 22 nt, Human
augugaaagagguguucagugg

SEQ ID NO: 1135327 - RNA, 22 nt, Human
aggggagaguuaaugugaaugu

SEQ ID NO: 1135328 - RNA, 22 nt, Human
acccugccgugggcugcuugug

SEQ ID NO: 1135329 - RNA, 22 nt, Human
ccucgaccuccccaggcucagg

SEQ ID NO: 1135330 - RNA, 23 nt, Human
gccuggccaccccagggcugcuu

SEQ ID NO: 1135331 - RNA, 20 nt, Human
ccugggcuccaggagccccg

SEQ ID NO: 1135332 - RNA, 22 nt, Human
aggcucagcaucugauucauau

SEQ ID NO: 1135333 - RNA, 22 nt, Human
aaaucuguaagcaauugcucag

SEQ ID NO: 1135334 - RNA, 22 nt, Human
cuccaggccauggcugcggagg

SEQ ID NO: 1135335 - RNA, 22 nt, Human
uugcaccauuucacuuccauua

SEQ ID NO: 1135336 - RNA, 18 nt, Human
ucugggcuucccgaggcu

SEQ ID NO: 1135337 - RNA, 22 nt, Human
aauaaauguuaagauugucuca

SEQ ID NO: 1135338 - RNA, 22 nt, Human
aguuggagugaacaugagauug

SEQ ID NO: 1135339 - RNA, 22 nt, Human
gggagagaugcugauugccaau

SEQ ID NO: 1135340 - RNA, 22 nt, Human
ucagaagaagagacuccacagc

SEQ ID NO: 1135341 - RNA, 22 nt, Human
agccucucuuucugguggcuaa

SEQ ID NO: 1135342 - RNA, 22 nt, Human
caggguacagaguuuucuaaac

SEQ ID NO: 1135343 - RNA, 22 nt, Human
aggugccaauuuucagugaaca

SEQ ID NO: 1135344 - RNA, 17 nt, Human
uagagcugguucaggag

SEQ ID NO: 1135345 - RNA, 22 nt, Human
ccagcagcuguggcuuugccuc

SEQ ID NO: 1135346 - RNA, 22 nt, Human
agauguuccagccaaugggaau

SEQ ID NO: 1135347 - RNA, 17 nt, Human
agcagcugaagcagcca

SEQ ID NO: 1135348 - RNA, 22 nt, Human
cucaggggaccuggcuccgagu

SEQ ID NO: 1135349 - RNA, 22 nt, Human
cucucuuuuucgugugccgaag

SEQ ID NO: 1135350 - RNA, 21 nt, Human
agcagccauggaugguaugua

SEQ ID NO: 1135351 - RNA, 22 nt, Human
uaaguccaaggguaugaguugg

SEQ ID NO: 1135352 - RNA, 22 nt, Human
uccucuggcccagcugccucug

SEQ ID NO: 1135353 - RNA, 22 nt, Human
ccuggccucagccuagggcuga

SEQ ID NO: 1135354 - RNA, 22 nt, Human
uucacagggcagcagcugagcc

SEQ ID NO: 1135355 - RNA, 21 nt, Human
ugguggagugugcugagcaug

SEQ ID NO: 1135356 - RNA, 22 nt, Human
aaugaugguuucaucacuugaa

SEQ ID NO: 1135357 - RNA, 22 nt, Human
ucaaaguaaaaguauagaguuu

SEQ ID NO: 1135358 - RNA, 22 nt, Human
gggauggcucaaaggagucagg

SEQ ID NO: 1135359 - RNA, 22 nt, Human
ugucauaaaacacaagcuguug

SEQ ID NO: 1135360 - RNA, 22 nt, Human
acaggcagcgucauugcugcuc

SEQ ID NO: 1135361 - RNA, 22 nt, Human
ucagaggugguaaaggacagca

SEQ ID NO: 1135362 - RNA, 22 nt, Human
aggagcuggguuccuuuggugg

SEQ ID NO: 1135363 - RNA, 22 nt, Human
uauauaagauggguaggcuugu

SEQ ID NO: 1135364 - RNA, 22 nt, Human
acaggugauucaggcucuggga

SEQ ID NO: 1135365 - RNA, 22 nt, Human
gaaaagagaacaucugaggauc

SEQ ID NO: 1135366 - RNA, 22 nt, Human
uuccuuccgggcaccaggcacu

SEQ ID NO: 1135367 - RNA, 22 nt, Human
gcugucagaaggugaaggguaa

SEQ ID NO: 1135368 - RNA, 22 nt, Human
cacagggcaccaguuggccauc

SEQ ID NO: 1135369 - RNA, 22 nt, Human
ggcugcuugcuguuucuuggau

SEQ ID NO: 1135370 - RNA, 22 nt, Human
gugccuuccccgguggucuguu

SEQ ID NO: 1135371 - RNA, 23 nt, Human
gggugggccaaauuagguagccu

SEQ ID NO: 1135372 - RNA, 22 nt, Human
cagcuccccucuguggggcagu

SEQ ID NO: 1135373 - RNA, 22 nt, Human
cucucuuucauuggucgccuug

SEQ ID NO: 1135374 - RNA, 22 nt, Human
gagcuguccuaccaggaguccu

SEQ ID NO: 1135375 - RNA, 22 nt, Human
uccaggaggguuuucugccuuc

SEQ ID NO: 1135376 - RNA, 22 nt, Human
uacaugaacaaaauagcagaaa

SEQ ID NO: 1135377 - RNA, 22 nt, Human
uggcucagcauucacuggucuu

SEQ ID NO: 1135378 - RNA, 22 nt, Human
gcucccaguucccaaagugacc

SEQ ID NO: 1135379 - RNA, 22 nt, Human
aaguuuguagcuggaugucugu

SEQ ID NO: 1135380 - RNA, 22 nt, Human
auugaaagguuuugagcagaua

SEQ ID NO: 1135381 - RNA, 22 nt, Human
ggaggaccccagcagcucccca

SEQ ID NO: 1135382 - RNA, 18 nt, Human
agcuggggccucuggucc

SEQ ID NO: 1135383 - RNA, 22 nt, Human
uuauuauugugaccugagaaug

SEQ ID NO: 1135384 - RNA, 22 nt, Human
caggcacuggccagucagcaca

SEQ ID NO: 1135385 - RNA, 22 nt, Human
aaguucaagaucaagguuccag

SEQ ID NO: 1135386 - RNA, 22 nt, Human
aagccagcauuuucccauuccu

SEQ ID NO: 1135387 - RNA, 22 nt, Human
ccugugugucugucacugcaca

SEQ ID NO: 1135388 - RNA, 22 nt, Human
ggaaaguggugguggaaagagg

SEQ ID NO: 1135389 - RNA, 22 nt, Human
agccuggcuguaaccucauggu

SEQ ID NO: 1135390 - RNA, 23 nt, Human
caggcaggaugaggacuacacuc

SEQ ID NO: 1135391 - RNA, 22 nt, Human
gaagagcuauguccagggagca

SEQ ID NO: 1135392 - RNA, 22 nt, Human
ugugugacccccagugaagccu

SEQ ID NO: 1135393 - RNA, 22 nt, Human
uccugccucuugccuucuucac

SEQ ID NO: 1135394 - RNA, 19 nt, Human
gcucugagaggggcauggg

SEQ ID NO: 1135395 - RNA, 22 nt, Human
cuggagccggcgagccccagcc

SEQ ID NO: 1135396 - RNA, 22 nt, Human
cugggcuggagugcaauggcgc

SEQ ID NO: 1135397 - RNA, 22 nt, Human
guggagacuucuacuagagacc

SEQ ID NO: 1135398 - RNA, 22 nt, Human
gcugaagcugcagcaggaggaa

SEQ ID NO: 1135399 - RNA, 22 nt, Human
cagagcagugaggaguugugua

SEQ ID NO: 1135400 - RNA, 22 nt, Human
uuauuuauggcacuguuggugg

SEQ ID NO: 1135401 - RNA, 22 nt, Human
agcccagcagaaaguccagccu

SEQ ID NO: 1135402 - RNA, 22 nt, Human
uuguaacagguacuaaauaacu

SEQ ID NO: 1135403 - RNA, 22 nt, Human
ccuggcagcuguuuggcuuggc

SEQ ID NO: 1135404 - RNA, 22 nt, Human
uggccugcccagagcagcucug

SEQ ID NO: 1135405 - RNA, 22 nt, Human
accaucagucauugucaguggg

SEQ ID NO: 1135406 - RNA, 22 nt, Human
agagauguucauucagcauguu

SEQ ID NO: 1135407 - RNA, 21 nt, Human
ggccucugucauccugggaag

SEQ ID NO: 1135408 - RNA, 22 nt, Human
uucaaaggcaggauagcagcug

SEQ ID NO: 1135409 - RNA, 20 nt, Human
gggcaguggcgcuaucucag

SEQ ID NO: 1135410 - RNA, 22 nt, Human
ggagagcagggaggcugcucug

SEQ ID NO: 1135411 - RNA, 20 nt, Human
ccuccaggcacacccaugug

SEQ ID NO: 1135412 - RNA, 22 nt, Human
auguuuuauuaccaacuuguac

SEQ ID NO: 1135413 - RNA, 22 nt, Human
caccagcagaagacugagggug

SEQ ID NO: 1135414 - RNA, 22 nt, Human
agccucuggcccuagacugcuu

SEQ ID NO: 1135415 - RNA, 22 nt, Human
auuauguagguuaggugguugu

SEQ ID NO: 1135416 - RNA, 22 nt, Human
gcuggccaguguggugaccacc

SEQ ID NO: 1135417 - RNA, 22 nt, Human
cccuguccuggaugggagcacu

SEQ ID NO: 1135418 - RNA, 18 nt, Human
ggcugugcguggaggcug

SEQ ID NO: 1135419 - RNA, 21 nt, Human
cagugcucaaucugacagugg

SEQ ID NO: 1135420 - RNA, 22 nt, Human
uggagccaugccuggccuuucc

SEQ ID NO: 1135421 - RNA, 22 nt, Human
acacagccgugaaucugcuucu

SEQ ID NO: 1135422 - RNA, 22 nt, Human
gaaggaagugcucauacuaguu

SEQ ID NO: 1135423 - RNA, 22 nt, Human
ccaggcagagugcuccagaaag

SEQ ID NO: 1135424 - RNA, 22 nt, Human
cuuccagagauagggccucaag

SEQ ID NO: 1135425 - RNA, 22 nt, Human
caggugggagcggagacugauu

SEQ ID NO: 1135426 - RNA, 22 nt, Human
acaggcugcugagccauuugcu

SEQ ID NO: 1135427 - RNA, 22 nt, Human
caggugccgggaaugcagcaau

SEQ ID NO: 1135428 - RNA, 22 nt, Human
ucuggcuccugaguccaugcuc

SEQ ID NO: 1135429 - RNA, 22 nt, Human
cugggccucauccucagaguuu

SEQ ID NO: 1135430 - RNA, 22 nt, Human
aauguuaaaaccuucagugcuu

SEQ ID NO: 1135431 - RNA, 22 nt, Human
agcaggagagcagugcgugguc

SEQ ID NO: 1135432 - RNA, 22 nt, Human
uuuccucuucuggcaggcaggg

SEQ ID NO: 1135433 - RNA, 22 nt, Human
aggaagcucggagagggcaaau

SEQ ID NO: 1135434 - RNA, 22 nt, Human
ugaugcuucacgcugaauaugc

SEQ ID NO: 1135435 - RNA, 22 nt, Human
gggagguucuguucgcacuuga

SEQ ID NO: 1135436 - RNA, 22 nt, Human
acagguggcuuauuggcugauu

SEQ ID NO: 1135437 - RNA, 22 nt, Human
uccaauguuccugcuuucagcu

SEQ ID NO: 1135438 - RNA, 22 nt, Human
uggguagaggaauugggcuacc

SEQ ID NO: 1135439 - RNA, 22 nt, Human
caggggcaggugugagaucauc

SEQ ID NO: 1135440 - RNA, 22 nt, Human
acagagcugggugcccccugga

SEQ ID NO: 1135441 - RNA, 22 nt, Human
gauuucaaggaguuuucacagu

SEQ ID NO: 1135442 - RNA, 22 nt, Human
ucaggauccauagacucccaaa

SEQ ID NO: 1135443 - RNA, 22 nt, Human
cccauuuaaacacaagcuuuca

SEQ ID NO: 1135444 - RNA, 20 nt, Human
ucucaggguucagcaaagua

SEQ ID NO: 1135445 - RNA, 22 nt, Human
cagacacagcaauucuguguug

SEQ ID NO: 1135446 - RNA, 22 nt, Human
uaugugugcuuuuuccaugcau

SEQ ID NO: 1135447 - RNA, 22 nt, Human
aacaguaaugugguguuggguu

SEQ ID NO: 1135448 - RNA, 22 nt, Human
ucccagcauaacaaacugcccg

SEQ ID NO: 1135449 - RNA, 22 nt, Human
caguuuuuagauuaguuggugg

SEQ ID NO: 1135450 - RNA, 22 nt, Human
acaaaugcuuaguucaccaaaa

SEQ ID NO: 1135451 - RNA, 22 nt, Human
aggcugccucgugagcucgcug

SEQ ID NO: 1135452 - RNA, 22 nt, Human
agugaccauuuucagcuagagg

SEQ ID NO: 1135453 - RNA, 20 nt, Human
ugguugaauuuuuagugacc

SEQ ID NO: 1135454 - RNA, 20 nt, Human
ugcuuccuggccacugcggg

SEQ ID NO: 1135455 - RNA, 22 nt, Human
agccacagagguugaugugguu

SEQ ID NO: 1135456 - RNA, 22 nt, Human
caguacuuaacuuauaggagag

SEQ ID NO: 1135457 - RNA, 22 nt, Human
acucccacuccagaguagaagc

SEQ ID NO: 1135458 - RNA, 22 nt, Human
ccugccucaucaacuugucgug

SEQ ID NO: 1135459 - RNA, 22 nt, Human
ucaugccacuuacaaaauaaug

SEQ ID NO: 1135460 - RNA, 22 nt, Human
uggcagcauuuuuuccagaaca

SEQ ID NO: 1135461 - RNA, 22 nt, Human
ugugugugacaaccuaguucag

SEQ ID NO: 1135462 - RNA, 18 nt, Human
ucaaagucuggcuccacu

SEQ ID NO: 1135463 - RNA, 22 nt, Human
agguacagggugaaaguuuaug

SEQ ID NO: 1135464 - RNA, 22 nt, Human
cuggcuccaucacugggugaug

SEQ ID NO: 1135465 - RNA, 22 nt, Human
cugggcacuuuggggagccuac

SEQ ID NO: 1135466 - RNA, 22 nt, Human
agcugggccugagcuggaagcu

SEQ ID NO: 1135467 - RNA, 22 nt, Human
cugaggcugcccagggccaggu

SEQ ID NO: 1135468 - RNA, 22 nt, Human
gcucccagggcagcgcagaaga

SEQ ID NO: 1135469 - RNA, 22 nt, Human
cugggccagggaggugucugua

SEQ ID NO: 1135470 - RNA, 21 nt, Human
agcugggccucagccugcagu

SEQ ID NO: 1135471 - RNA, 22 nt, Human
gggagggaggugcugguucacg

SEQ ID NO: 1135472 - RNA, 22 nt, Human
gagccucguggcggccacugcg

SEQ ID NO: 1135473 - RNA, 22 nt, Human
cuggcccuucucuugcuuccug

SEQ ID NO: 1135474 - RNA, 22 nt, Human
cggggcugcgcucuuccugccg

SEQ ID NO: 1135475 - RNA, 22 nt, Human
gccugucugcagggcugucauu

SEQ ID NO: 1135476 - RNA, 22 nt, Human
acuuguguaacacagaaagaac

SEQ ID NO: 1135477 - RNA, 23 nt, Human
agcaauaagaagggauacaugug

SEQ ID NO: 1135478 - RNA, 22 nt, Human
cugggcacaaguggcccuggau

SEQ ID NO: 1135479 - RNA, 22 nt, Human
cagggcaggaugcugugauuau

SEQ ID NO: 1135480 - RNA, 22 nt, Human
gcuguccugggaacaggcacua

SEQ ID NO: 1135481 - RNA, 22 nt, Human
ccagggcagugggagaaggugc

SEQ ID NO: 1135482 - RNA, 22 nt, Human
ucccagccggugccuggguccc

SEQ ID NO: 1135483 - RNA, 22 nt, Human
aggaaaaaagucugugauuaua

SEQ ID NO: 1135484 - RNA, 22 nt, Human
ucagggcaagauugguuaauaa

SEQ ID NO: 1135485 - RNA, 22 nt, Human
ccaggaguuggagguugcagug

SEQ ID NO: 1135486 - RNA, 22 nt, Human
uagcugccuagacagcuauagc

SEQ ID NO: 1135487 - RNA, 22 nt, Human
aaguuugucucauuugaucuuc

SEQ ID NO: 1135488 - RNA, 22 nt, Human
uguuuuguucacugcauugucc

SEQ ID NO: 1135489 - RNA, 22 nt, Human
gagggcagaaaauuaugcggug

SEQ ID NO: 1135490 - RNA, 22 nt, Human
cuuauguauaauguuccacaua

SEQ ID NO: 1135491 - RNA, 22 nt, Human
ccaggccugauugggaaucuug

SEQ ID NO: 1135492 - RNA, 22 nt, Human
cugcugggcagaggcugcauga

SEQ ID NO: 1135493 - RNA, 22 nt, Human
agauuguagaaacuguagcauu

SEQ ID NO: 1135494 - RNA, 22 nt, Human
agagcuuagaauuucagaugau

SEQ ID NO: 1135495 - RNA, 22 nt, Human
ugucaccagcugcuccucagga

SEQ ID NO: 1135496 - RNA, 22 nt, Human
uguguacagcaggauuucucaa

SEQ ID NO: 1135497 - RNA, 19 nt, Human
cauaauacaguggaucuga

SEQ ID NO: 1135498 - RNA, 22 nt, Human
ucuggcucaucucuccagguaa

SEQ ID NO: 1135499 - RNA, 22 nt, Human
acauuucuccuacuuguuauuu

SEQ ID NO: 1135500 - RNA, 22 nt, Human
agcaaaguagcugcuguucuua

SEQ ID NO: 1135501 - RNA, 23 nt, Human
ggccuguguuuugucugaaguac

SEQ ID NO: 1135502 - RNA, 22 nt, Human
cagagcagaagcgguccucaca

SEQ ID NO: 1135503 - RNA, 22 nt, Human
ggguuggggcccagcagucugc

SEQ ID NO: 1135504 - RNA, 22 nt, Human
aucuauuaugcugagaaacugu

SEQ ID NO: 1135505 - RNA, 22 nt, Human
uguggccuccuguuccugggua

SEQ ID NO: 1135506 - RNA, 22 nt, Human
agggucugacuccucuggcaag

SEQ ID NO: 1135507 - RNA, 22 nt, Human
cagagccacugucugccaggca

SEQ ID NO: 1135508 - RNA, 22 nt, Human
guggcuucuggcugggccucag

SEQ ID NO: 1135509 - RNA, 22 nt, Human
auuuagaaauuccaaaaguauu

SEQ ID NO: 1135510 - RNA, 19 nt, Human
ccugucugucuucagcuag

SEQ ID NO: 1135511 - RNA, 19 nt, Human
gagcagcugcacccauuga

SEQ ID NO: 1135512 - RNA, 22 nt, Human
cagaggcagaggucaucucugg

SEQ ID NO: 1135513 - RNA, 22 nt, Human
gagucacauuaauuuaauuuua

SEQ ID NO: 1135514 - RNA, 20 nt, Human
gagauuuccaaucaugccca

SEQ ID NO: 1135515 - RNA, 22 nt, Human
uccaaacacccuccaugcugca

SEQ ID NO: 1135516 - RNA, 22 nt, Human
uaaaaguuuuaguuguacauaa

SEQ ID NO: 1135517 - RNA, 20 nt, Human
uggagccaaggugugucugg

SEQ ID NO: 1135518 - RNA, 22 nt, Human
auguuuuacccuuugcacaaac

SEQ ID NO: 1135519 - RNA, 22 nt, Human
gaggcagcaugguaccuuggag

SEQ ID NO: 1135520 - RNA, 22 nt, Human
ugucacagggauaccauggggc

SEQ ID NO: 1135521 - RNA, 20 nt, Human
aggaagccaaaggcugucuu

SEQ ID NO: 1135522 - RNA, 22 nt, Human
caaaggcaguuacugaaugaag

SEQ ID NO: 1135523 - RNA, 22 nt, Human
gggauggggggaagcguccaug

SEQ ID NO: 1135524 - RNA, 22 nt, Human
ucagagaaguaagguggggugc

SEQ ID NO: 1135525 - RNA, 22 nt, Human
guuuuauaggugaaauauuacu

SEQ ID NO: 1135526 - RNA, 22 nt, Human
uucauguaauuccauaagguaa

SEQ ID NO: 1135527 - RNA, 20 nt, Human
aggcugccaggucucacauc

SEQ ID NO: 1135528 - RNA, 22 nt, Human
cagggccagcgcccaggcccag

SEQ ID NO: 1135529 - RNA, 22 nt, Human
ggagccaggggaccuucacaga

SEQ ID NO: 1135530 - RNA, 22 nt, Human
cagacuggccacaucugcacug

SEQ ID NO: 1135531 - RNA, 19 nt, Human
cccuggcaggcaagccugg

SEQ ID NO: 1135532 - RNA, 17 nt, Human
cagacagauauccuggg

SEQ ID NO: 1135533 - RNA, 22 nt, Human
agcugccaucugaagaacugca

SEQ ID NO: 1135534 - RNA, 22 nt, Human
uacuuacagagcuuauaaguua

SEQ ID NO: 1135535 - RNA, 22 nt, Human
cugaagcaaaggaucgagcuaa

SEQ ID NO: 1135536 - RNA, 22 nt, Human
ucucaggguuuguacaagugua

SEQ ID NO: 1135537 - RNA, 22 nt, Human
uccugggcugugugccacucug

SEQ ID NO: 1135538 - RNA, 22 nt, Human
caguauguacucuuaucaugua

SEQ ID NO: 1135539 - RNA, 22 nt, Human
agggcugggcugcuuguuguca

SEQ ID NO: 1135540 - RNA, 22 nt, Human
agggcagcagcggcccaggccu

SEQ ID NO: 1135541 - RNA, 22 nt, Human
ccugggagagucuguggucucc

SEQ ID NO: 1135542 - RNA, 22 nt, Human
cacuguguaagaagaugggcuu

SEQ ID NO: 1135543 - RNA, 22 nt, Human
acuuugcacuaaguuacucauu

SEQ ID NO: 1135544 - RNA, 22 nt, Human
agccacagugcaagagagaaaa

SEQ ID NO: 1135545 - RNA, 22 nt, Human
uauugucuguccgggucaaagc

SEQ ID NO: 1135546 - RNA, 22 nt, Human
cugggcagugguggcaucuuug

SEQ ID NO: 1135547 - RNA, 22 nt, Human
agaagaaacugucggggauauu

SEQ ID NO: 1135548 - RNA, 22 nt, Human
auaacagaguugggaagugaaa

SEQ ID NO: 1135549 - RNA, 22 nt, Human
ugaggcagaaauuccuguuuuc

SEQ ID NO: 1135550 - RNA, 22 nt, Human
gcugccuccugaaagcgcucug

SEQ ID NO: 1135551 - RNA, 22 nt, Human
gaggaguggaguugcuggguug

SEQ ID NO: 1135552 - RNA, 22 nt, Human
ugcagggccgcuggaggucaug

SEQ ID NO: 1135553 - RNA, 22 nt, Human
gcucugcuggaaguucucugga

SEQ ID NO: 1135554 - RNA, 22 nt, Human
auauacuugauuuaacugagca

SEQ ID NO: 1135555 - RNA, 22 nt, Human
cccagccuuugcuuccugguuc

SEQ ID NO: 1135556 - RNA, 22 nt, Human
gcugcucuuuucagagaugaga

SEQ ID NO: 1135557 - RNA, 22 nt, Human
agucccagugagaugagccacg

SEQ ID NO: 1135558 - RNA, 22 nt, Human
uuggagcccugaggaucuggau

SEQ ID NO: 1135559 - RNA, 22 nt, Human
caggaaugacugcagauggggc

SEQ ID NO: 1135560 - RNA, 22 nt, Human
gcccccucuuuggagccagcca

SEQ ID NO: 1135561 - RNA, 22 nt, Human
guccucugcuucaugcccugau

SEQ ID NO: 1135562 - RNA, 22 nt, Human
agcagggcuugccgcuuguccu

SEQ ID NO: 1135563 - RNA, 22 nt, Human
ccucagaguaggucucagcugu

SEQ ID NO: 1135564 - RNA, 20 nt, Human
aaagucuuaugguuaauuuu

SEQ ID NO: 1135565 - RNA, 22 nt, Human
ggcuggcaagugucugcucaug

SEQ ID NO: 1135566 - RNA, 22 nt, Human
acauuugucuucuuucagauua

SEQ ID NO: 1135567 - RNA, 22 nt, Human
ugggcuggcugaacuucaaccu

SEQ ID NO: 1135568 - RNA, 22 nt, Human
uggccugaggcucggcaugggu

SEQ ID NO: 1135569 - RNA, 22 nt, Human
augcauaauguauguauugacu

SEQ ID NO: 1135570 - RNA, 22 nt, Human
caaagugcuaggauuacaggcc

SEQ ID NO: 1135571 - RNA, 22 nt, Human
ucagggcaccaaaaaagaugcc

SEQ ID NO: 1135572 - RNA, 22 nt, Human
cccagguggcagaagcugcagu

SEQ ID NO: 1135573 - RNA, 22 nt, Human
ccagcuccuucugucuguggag

SEQ ID NO: 1135574 - RNA, 22 nt, Human
aaaugaccagaauacaggcuuc

SEQ ID NO: 1135575 - RNA, 22 nt, Human
ccaguuuuuccagugcuuucug

SEQ ID NO: 1135576 - RNA, 21 nt, Human
ggcuccugcuuugugaggggc

SEQ ID NO: 1135577 - RNA, 22 nt, Human
agcuguccuggcucaggcugug

SEQ ID NO: 1135578 - RNA, 22 nt, Human
ggcacugagcugccuuggggca

SEQ ID NO: 1135579 - RNA, 22 nt, Human
cugccuggggaaugugaggauu

SEQ ID NO: 1135580 - RNA, 22 nt, Human
aggucagaagugccagggaauu

SEQ ID NO: 1135581 - RNA, 19 nt, Human
acagaagcauagaaaagga

SEQ ID NO: 1135582 - RNA, 22 nt, Human
auuuguagugaagugaaaauaa

SEQ ID NO: 1135583 - RNA, 22 nt, Human
agcagggcagcugaugcgcacg

SEQ ID NO: 1135584 - RNA, 22 nt, Human
ccaaggcuggagugcaguggcg

SEQ ID NO: 1135585 - RNA, 22 nt, Human
gaggcagaaguugcagugagca

SEQ ID NO: 1135586 - RNA, 22 nt, Human
gcaugguggccuuaggguagcc

SEQ ID NO: 1135587 - RNA, 22 nt, Human
ucagaaauguaagcugaugacu

SEQ ID NO: 1135588 - RNA, 22 nt, Human
ccuguggcugccacuuggguga

SEQ ID NO: 1135589 - RNA, 22 nt, Human
gggacugggagauccuccuggc

SEQ ID NO: 1135590 - RNA, 22 nt, Human
caguacuuuucuggcuuucuac

SEQ ID NO: 1135591 - RNA, 22 nt, Human
aggcagcccacaggacacagga

SEQ ID NO: 1135592 - RNA, 22 nt, Human
uuugcauuuugauaagaucacu

SEQ ID NO: 1135593 - RNA, 22 nt, Human
acacagaaccucauagccucuc

SEQ ID NO: 1135594 - RNA, 22 nt, Human
cucccaagggguaagggagcug

SEQ ID NO: 1135595 - RNA, 22 nt, Human
gacagacauuuccugauccaau

SEQ ID NO: 1135596 - RNA, 22 nt, Human
agggccugagcuggcugaccuc

SEQ ID NO: 1135597 - RNA, 22 nt, Human
gagcagcuccagccgcaugacu

SEQ ID NO: 1135598 - RNA, 22 nt, Human
agugaaauagcauuuaugaagc

SEQ ID NO: 1135599 - RNA, 22 nt, Human
gccagggggucagcaggcacuu

SEQ ID NO: 1135600 - RNA, 22 nt, Human
cugcuggccuagcccauccucu

SEQ ID NO: 1135601 - RNA, 22 nt, Human
uauagaagagacaugugcauag

SEQ ID NO: 1135602 - RNA, 22 nt, Human
uuugacaguaauaaagcacaag

SEQ ID NO: 1135603 - RNA, 22 nt, Human
ucccuggacaacagacuucacu

SEQ ID NO: 1135604 - RNA, 22 nt, Human
cucucuuugauguauaaauaau

SEQ ID NO: 1135605 - RNA, 22 nt, Human
aacaaauguguuuuguaauuaa

SEQ ID NO: 1135606 - RNA, 22 nt, Human
ccuguguggaaaccgcaugacg

SEQ ID NO: 1135607 - RNA, 22 nt, Human
gcugagagcaaagcaugucuag

SEQ ID NO: 1135608 - RNA, 22 nt, Human
ccagccuccauguagauagcug

SEQ ID NO: 1135609 - RNA, 22 nt, Human
ugcaugcauaaauguacacaca

SEQ ID NO: 1135610 - RNA, 21 nt, Human
agagucugcauuucugacaag

SEQ ID NO: 1135611 - RNA, 22 nt, Human
ucuggagauaagacagacagau

SEQ ID NO: 1135612 - RNA, 22 nt, Human
gcuggggagcuagaccucagca

SEQ ID NO: 1135613 - RNA, 22 nt, Human
cuggcaggcggcagagcccagg

SEQ ID NO: 1135614 - RNA, 22 nt, Human
uugcauugaugucuauacgcug

SEQ ID NO: 1135615 - RNA, 21 nt, Human
ugcuuuaugggaaaaauguca

SEQ ID NO: 1135616 - RNA, 19 nt, Human
cagcucaguuugauucucu

SEQ ID NO: 1135617 - RNA, 22 nt, Human
guaacugaggcagcuuuuaaga

SEQ ID NO: 1135618 - RNA, 22 nt, Human
ugcaagcacucaaugcaaacag

SEQ ID NO: 1135619 - RNA, 22 nt, Human
acugcaucugaaacauggguca

SEQ ID NO: 1135620 - RNA, 22 nt, Human
cucaggauggaagccuacagga

SEQ ID NO: 1135621 - RNA, 22 nt, Human
uggcagcuuccugcucauagga

SEQ ID NO: 1135622 - RNA, 22 nt, Human
auuuuuccaugauacuuaucug

SEQ ID NO: 1135623 - RNA, 22 nt, Human
agcaggugacccaagcaggcug

SEQ ID NO: 1135624 - RNA, 22 nt, Human
gaaaguuucuucauuaagaugu

SEQ ID NO: 1135625 - RNA, 21 nt, Human
ucaaagcacauauuugcacau

SEQ ID NO: 1135626 - RNA, 22 nt, Human
guacuucccugggaggcaagca

SEQ ID NO: 1135627 - RNA, 22 nt, Human
gcuggagccauuggcuuggccu

SEQ ID NO: 1135628 - RNA, 22 nt, Human
gagcucagcccaaagagcagug

SEQ ID NO: 1135629 - RNA, 22 nt, Human
gaggacagugugaucugccagc

SEQ ID NO: 1135630 - RNA, 22 nt, Human
uaauuuaauccaaguguuacau

SEQ ID NO: 1135631 - RNA, 22 nt, Human
agccacagcauguguguaugua

SEQ ID NO: 1135632 - RNA, 20 nt, Human
cucaggauacugcaaaguug

SEQ ID NO: 1135633 - RNA, 22 nt, Human
acagccugcugccugcuucuug

SEQ ID NO: 1135634 - RNA, 22 nt, Human
cagggugacugcccuggccacu

SEQ ID NO: 1135635 - RNA, 21 nt, Human
gaaaggucuuaacuuacagag

SEQ ID NO: 1135636 - RNA, 22 nt, Human
ucuuagaaaugaaguucuuucu

SEQ ID NO: 1135637 - RNA, 22 nt, Human
uguguccauucaggcacugacc

SEQ ID NO: 1135638 - RNA, 21 nt, Human
cuugaaagguagagucuacag

SEQ ID NO: 1135639 - RNA, 22 nt, Human
gcagagccaggagagacccuug

SEQ ID NO: 1135640 - RNA, 23 nt, Human
gcugagguacauuuacaggaaga

SEQ ID NO: 1135641 - RNA, 19 nt, Human
ggaggccuggguauuugcc

SEQ ID NO: 1135642 - RNA, 22 nt, Human
uucaagaugucuucacaauagu

SEQ ID NO: 1135643 - RNA, 22 nt, Human
acuacuuugggccauuuguuua

SEQ ID NO: 1135644 - RNA, 19 nt, Human
agccuggagggcuggucac

SEQ ID NO: 1135645 - RNA, 22 nt, Human
gccaggcuguuuuuauuacugu

SEQ ID NO: 1135646 - RNA, 22 nt, Human
uguggccagcagguggcugugu

SEQ ID NO: 1135647 - RNA, 22 nt, Human
aggaccugacuggcuccugcuu

SEQ ID NO: 1135648 - RNA, 22 nt, Human
cuucuggaggacacuggcccca

SEQ ID NO: 1135649 - RNA, 22 nt, Human
gcaguggggaaugcuggggaga

SEQ ID NO: 1135650 - RNA, 22 nt, Human
guacaugucaaaaaaugcauaa

SEQ ID NO: 1135651 - RNA, 22 nt, Human
aaagaacaauguggaaucuccu

SEQ ID NO: 1135652 - RNA, 22 nt, Human
aucuggguucaccaugcuccug

SEQ ID NO: 1135653 - RNA, 22 nt, Human
agagacaccgcgcaucauggcu

SEQ ID NO: 1135654 - RNA, 22 nt, Human
cucccacuccuggcucaccaca

SEQ ID NO: 1135655 - RNA, 22 nt, Human
cccuggcaugcaugucccuggc

SEQ ID NO: 1135656 - RNA, 21 nt, Human
guauugcagaguuaugugcuc

SEQ ID NO: 1135657 - RNA, 22 nt, Human
acauuuguaugcguuuuuacug

SEQ ID NO: 1135658 - RNA, 22 nt, Human
ugcaggugaaaauuaugaggau

SEQ ID NO: 1135659 - RNA, 23 nt, Human
cccuggccuuggggcacaggcug

SEQ ID NO: 1135660 - RNA, 22 nt, Human
uuuuaauacugcuauuguagga

SEQ ID NO: 1135661 - RNA, 22 nt, Human
uggccugacugucaggcuguau

SEQ ID NO: 1135662 - RNA, 22 nt, Human
acaaggcugaacagugaagccg

SEQ ID NO: 1135663 - RNA, 21 nt, Human
gcccucaggggaggauggccu

SEQ ID NO: 1135664 - RNA, 22 nt, Human
cucagaauuacaucccauuuua

SEQ ID NO: 1135665 - RNA, 19 nt, Human
cccucaggucugagcaguc

SEQ ID NO: 1135666 - RNA, 22 nt, Human
gcacagggagcaggucucuggu

SEQ ID NO: 1135667 - RNA, 22 nt, Human
uguuuuguagcuaauagcuauu

SEQ ID NO: 1135668 - RNA, 22 nt, Human
ccuccuggcccugggccuggaa

SEQ ID NO: 1135669 - RNA, 22 nt, Human
agcaggcuuguuaugucugaga

SEQ ID NO: 1135670 - RNA, 22 nt, Human
auccuugaacuuagacacuagg

SEQ ID NO: 1135671 - RNA, 22 nt, Human
ggcagggaaacagcugauccca

SEQ ID NO: 1135672 - RNA, 22 nt, Human
gccugcuggcuguccauugcag

SEQ ID NO: 1135673 - RNA, 22 nt, Human
ccaagggcugcugaggugucca

SEQ ID NO: 1135674 - RNA, 20 nt, Human
ugcugcaguuucaugggacu

SEQ ID NO: 1135675 - RNA, 22 nt, Human
uaaauuguuuucuagaaguugu

SEQ ID NO: 1135676 - RNA, 22 nt, Human
uguccucuuccagugcuccuuc

SEQ ID NO: 1135677 - RNA, 22 nt, Human
aaguucaaggcagguccugagg

SEQ ID NO: 1135678 - RNA, 22 nt, Human
ccugugcccucagccuggcucu

SEQ ID NO: 1135679 - RNA, 22 nt, Human
gcugucuccauagcuguguguc

SEQ ID NO: 1135680 - RNA, 22 nt, Human
gggcacugcuuugcucugucac

SEQ ID NO: 1135681 - RNA, 22 nt, Human
caggcacuguguuaggcacugu

SEQ ID NO: 1135682 - RNA, 22 nt, Human
auucuccagcucacuguccaua

SEQ ID NO: 1135683 - RNA, 18 nt, Human
ucagagguacagaaaagu

SEQ ID NO: 1135684 - RNA, 22 nt, Human
ucaaauguucccuguacuggcc

SEQ ID NO: 1135685 - RNA, 22 nt, Human
ugcaggccggcccuaggccuca

SEQ ID NO: 1135686 - RNA, 22 nt, Human
ucugccugcaguguggcagggc

SEQ ID NO: 1135687 - RNA, 22 nt, Human
cuuucagagguuacucaggaaa

SEQ ID NO: 1135688 - RNA, 21 nt, Human
guugaauauccauguaugugu

SEQ ID NO: 1135689 - RNA, 22 nt, Human
caucaaauggcaagugaaagcu

SEQ ID NO: 1135690 - RNA, 22 nt, Human
ugccugucuuggaguccuggcc

SEQ ID NO: 1135691 - RNA, 22 nt, Human
gucccagaggcuuuggccacag

SEQ ID NO: 1135692 - RNA, 22 nt, Human
aaaucaguuaagaugaggccau

SEQ ID NO: 1135693 - RNA, 20 nt, Human
caccaggcgcucugagaaca

SEQ ID NO: 1135694 - RNA, 22 nt, Human
ugcagccaauucauucauucuu

SEQ ID NO: 1135695 - RNA, 22 nt, Human
agguggaacguucaggugcuag

SEQ ID NO: 1135696 - RNA, 22 nt, Human
cugaggugcuagggucccugcu

SEQ ID NO: 1135697 - RNA, 22 nt, Human
agacaacaccaaaugcuagugu

SEQ ID NO: 1135698 - RNA, 19 nt, Human
gcuucccaccagccagccc

SEQ ID NO: 1135699 - RNA, 22 nt, Human
aaauuuaagaagugugugcgug

SEQ ID NO: 1135700 - RNA, 22 nt, Human
auucuucauguugaagcuguca

SEQ ID NO: 1135701 - RNA, 22 nt, Human
cauugcaccacauugcaucccu

SEQ ID NO: 1135702 - RNA, 22 nt, Human
ggaggacaggggcugcagcaca

SEQ ID NO: 1135703 - RNA, 22 nt, Human
cagcugcaggaacaaaaaugug

SEQ ID NO: 1135704 - RNA, 19 nt, Human
aggcagcacccaguccuug

SEQ ID NO: 1135705 - RNA, 22 nt, Human
aaaaucaguacacuuuauuuug

SEQ ID NO: 1135706 - RNA, 20 nt, Human
cccuggagagaagcuccacg

SEQ ID NO: 1135707 - RNA, 22 nt, Human
ggccucagugggccgcugcagg

SEQ ID NO: 1135708 - RNA, 22 nt, Human
uccuggagaauccugccaccug

SEQ ID NO: 1135709 - RNA, 22 nt, Human
ucucugggaaugggccugggua

SEQ ID NO: 1135710 - RNA, 22 nt, Human
cucucugggcccaguuggcacc

SEQ ID NO: 1135711 - RNA, 22 nt, Human
ccugcucugguuuagucagucu

SEQ ID NO: 1135712 - RNA, 22 nt, Human
ggggcagagagaaggaagcuug

SEQ ID NO: 1135713 - RNA, 22 nt, Human
aagaggaaaugauugacuauau

SEQ ID NO: 1135714 - RNA, 22 nt, Human
ucugcaggaaaaaagugccugg

SEQ ID NO: 1135715 - RNA, 22 nt, Human
gccacugcacuccagcccaggc

SEQ ID NO: 1135716 - RNA, 22 nt, Human
ugcugcuccccagcacacagca

SEQ ID NO: 1135717 - RNA, 22 nt, Human
gcugugcagguccccacugccu

SEQ ID NO: 1135718 - RNA, 22 nt, Human
uccuucagaaaaccucagucuu

SEQ ID NO: 1135719 - RNA, 22 nt, Human
cagccacguagcccuuggccgu

SEQ ID NO: 1135720 - RNA, 22 nt, Human
uccauguggccagacacuggca

SEQ ID NO: 1135721 - RNA, 22 nt, Human
aaggacuccaauucuuucaucu

SEQ ID NO: 1135722 - RNA, 22 nt, Human
caggcagcagaggaguguggga

SEQ ID NO: 1135723 - RNA, 22 nt, Human
gccagcagccacagaagucacu

SEQ ID NO: 1135724 - RNA, 22 nt, Human
gagagcccugcuccuaucccag

SEQ ID NO: 1135725 - RNA, 22 nt, Human
caaugugugcuuacaggccagu

SEQ ID NO: 1135726 - RNA, 22 nt, Human
gcacccagcccagggcgugaug

SEQ ID NO: 1135727 - RNA, 22 nt, Human
uugugaaauguuucaaaauagu

SEQ ID NO: 1135728 - RNA, 22 nt, Human
ucccagggacugggcuaggcuu

SEQ ID NO: 1135729 - RNA, 16 nt, Human
agcagccagcacugga

SEQ ID NO: 1135730 - RNA, 22 nt, Human
augugaaacugaagcauccaua

SEQ ID NO: 1135731 - RNA, 22 nt, Human
aguacuuugcacuuugcucaga

SEQ ID NO: 1135732 - RNA, 22 nt, Human
aguacauuuauuaaugguaaaa

SEQ ID NO: 1135733 - RNA, 22 nt, Human
uggccugggccggcagauauac

SEQ ID NO: 1135734 - RNA, 22 nt, Human
auuuaaauuuucugauggagag

SEQ ID NO: 1135735 - RNA, 22 nt, Human
cagggccugcuuccuucuuguu

SEQ ID NO: 1135736 - RNA, 22 nt, Human
ugcugccagagagacagggacu

SEQ ID NO: 1135737 - RNA, 22 nt, Human
ggcagaguggagugcggccucc

SEQ ID NO: 1135738 - RNA, 22 nt, Human
agucucagcuacuugggaggcu

SEQ ID NO: 1135739 - RNA, 22 nt, Human
aaguuauuuccucgugacugaa

SEQ ID NO: 1135740 - RNA, 22 nt, Human
aagagcuggcccaaucugagca

SEQ ID NO: 1135741 - RNA, 22 nt, Human
auuuaaaugcuuaagaggguuu

SEQ ID NO: 1135742 - RNA, 22 nt, Human
aagaauguggguggauaugaug

SEQ ID NO: 1135743 - RNA, 22 nt, Human
acagagcaugcucaguguguga

SEQ ID NO: 1135744 - RNA, 22 nt, Human
cucucugguuucagcgaagggg

SEQ ID NO: 1135745 - RNA, 22 nt, Human
uuaaacagucccagaggcugac

SEQ ID NO: 1135746 - RNA, 23 nt, Human
uggagcugggcucagacccuggg

SEQ ID NO: 1135747 - RNA, 22 nt, Human
ugucucugcuuuccuugcaggg

SEQ ID NO: 1135748 - RNA, 22 nt, Human
aucaaaguuucccagaaguugu

SEQ ID NO: 1135749 - RNA, 22 nt, Human
aagauacugaugauguaggcua

SEQ ID NO: 1135750 - RNA, 22 nt, Human
agccacagagcaggagaccuuu

SEQ ID NO: 1135751 - RNA, 22 nt, Human
gcugucugucucugugacuuaa

SEQ ID NO: 1135752 - RNA, 22 nt, Human
caggcugagcucuggccugggc

SEQ ID NO: 1135753 - RNA, 22 nt, Human
aaggcacuuuuccugagaugau

SEQ ID NO: 1135754 - RNA, 22 nt, Human
ggagccugggcauuaguaauuu

SEQ ID NO: 1135755 - RNA, 22 nt, Human
agucucugcaugaugcagcaca

SEQ ID NO: 1135756 - RNA, 22 nt, Human
ucccagccuuccagucugguuu

SEQ ID NO: 1135757 - RNA, 22 nt, Human
acugccuugucucuugccuguu

SEQ ID NO: 1135758 - RNA, 22 nt, Human
ugaaagcucugucaucauuccu

SEQ ID NO: 1135759 - RNA, 22 nt, Human
ucaaaugcggucauggcuuuua

SEQ ID NO: 1135760 - RNA, 22 nt, Human
uggccagguugggcuuugcagc

SEQ ID NO: 1135761 - RNA, 22 nt, Human
ccugucaguugcugucagggau

SEQ ID NO: 1135762 - RNA, 22 nt, Human
aggcucaguuugguuuccauug

SEQ ID NO: 1135763 - RNA, 22 nt, Human
cuuaggcauccaggguucuucc

SEQ ID NO: 1135764 - RNA, 20 nt, Human
acaggagaucugaggaaagg

SEQ ID NO: 1135765 - RNA, 19 nt, Human
cugugcaggccgggcugag

SEQ ID NO: 1135766 - RNA, 22 nt, Human
cuggccuuggaagggagcccgu

SEQ ID NO: 1135767 - RNA, 22 nt, Human
aaaguucugggggagaagaacg

SEQ ID NO: 1135768 - RNA, 22 nt, Human
ggggcuggcucacuaagagacu

SEQ ID NO: 1135769 - RNA, 22 nt, Human
ugacagaacagguugggagcaa

SEQ ID NO: 1135770 - RNA, 22 nt, Human
aagggcaggcagagaucauaua

SEQ ID NO: 1135771 - RNA, 22 nt, Human
gguuuaaugggugaaggcauga

SEQ ID NO: 1135772 - RNA, 22 nt, Human
aucuaagaguuaacaucaagaa

SEQ ID NO: 1135773 - RNA, 22 nt, Human
ugggccaggauuucaagacccu

SEQ ID NO: 1135774 - RNA, 22 nt, Human
ccacagcaugcaggccugacac

SEQ ID NO: 1135775 - RNA, 22 nt, Human
cuggcccagagagcagagcuua

SEQ ID NO: 1135776 - RNA, 22 nt, Human
ugcuuuggccacuagaauucag

SEQ ID NO: 1135777 - RNA, 22 nt, Human
acagagaugcaaguguguauuu

SEQ ID NO: 1135778 - RNA, 22 nt, Human
gcucugucauuuugcagacacu

SEQ ID NO: 1135779 - RNA, 22 nt, Human
agccaucauuucugucacuggc

SEQ ID NO: 1135780 - RNA, 22 nt, Human
gagcagcuuaugucaagccaga

SEQ ID NO: 1135781 - RNA, 22 nt, Human
cuuuccuagauggccaucuuuc

SEQ ID NO: 1135782 - RNA, 21 nt, Human
ugcauaaagaaauacaaauac

SEQ ID NO: 1135783 - RNA, 22 nt, Human
ggugccagccuagugcaguggu

SEQ ID NO: 1135784 - RNA, 22 nt, Human
cugccucucaggucccugagau

SEQ ID NO: 1135785 - RNA, 23 nt, Human
cccuggagcuagucugagcagag

SEQ ID NO: 1135786 - RNA, 22 nt, Human
cccaagggagugccuggucaac

SEQ ID NO: 1135787 - RNA, 22 nt, Human
agcugccauccgaggugucaga

SEQ ID NO: 1135788 - RNA, 22 nt, Human
cugcaggcucgaagacacggau

SEQ ID NO: 1135789 - RNA, 22 nt, Human
agcccaagcuaugaggugaccu

SEQ ID NO: 1135790 - RNA, 22 nt, Human
gguugaaucauucuuugcaccg

SEQ ID NO: 1135791 - RNA, 18 nt, Human
aguggucuguuauaucau

SEQ ID NO: 1135792 - RNA, 22 nt, Human
gcccagcugucuggcagggaug

SEQ ID NO: 1135793 - RNA, 22 nt, Human
gccuggagugcaguggcgugau

SEQ ID NO: 1135794 - RNA, 22 nt, Human
ccugaggcuuaaucugucccaa

SEQ ID NO: 1135795 - RNA, 22 nt, Human
aggcaguggcugagaccagggg

SEQ ID NO: 1135796 - RNA, 22 nt, Human
uuuaaaaaacuagucugagucu

SEQ ID NO: 1135797 - RNA, 22 nt, Human
gucagaggaauggaugagugau

SEQ ID NO: 1135798 - RNA, 20 nt, Human
gcugaggucauuaugccuca

SEQ ID NO: 1135799 - RNA, 22 nt, Human
gagcaggcucugccuguguguc

SEQ ID NO: 1135800 - RNA, 22 nt, Human
ugugugccugagccgugccugg

SEQ ID NO: 1135801 - RNA, 22 nt, Human
ggagccagagucugcaguguaa

SEQ ID NO: 1135802 - RNA, 22 nt, Human
ccuggcagguggagguugcagu

SEQ ID NO: 1135803 - RNA, 22 nt, Human
ccagggugugagaaggaaguag

SEQ ID NO: 1135804 - RNA, 22 nt, Human
gcaggcagguggcaucuuguga

SEQ ID NO: 1135805 - RNA, 22 nt, Human
caaugguggugucagaagagau

SEQ ID NO: 1135806 - RNA, 22 nt, Human
ccuccagcugccucagucucuu

SEQ ID NO: 1135807 - RNA, 22 nt, Human
caggcacagaguuauucauuua

SEQ ID NO: 1135808 - RNA, 22 nt, Human
uaaagaacacagggaauagcac

SEQ ID NO: 1135809 - RNA, 20 nt, Human
ggccuuggguuucgccuguu

SEQ ID NO: 1135810 - RNA, 22 nt, Human
ccagcuccaggacugggagcug

SEQ ID NO: 1135811 - RNA, 22 nt, Human
ucucagggccucccucuguuuc

SEQ ID NO: 1135812 - RNA, 22 nt, Human
uucaaugagcccggggccauag

SEQ ID NO: 1135813 - RNA, 22 nt, Human
uggcugaauaaaauaugguguu

SEQ ID NO: 1135814 - RNA, 22 nt, Human
uagccgggugugguggaacucc

SEQ ID NO: 1135815 - RNA, 22 nt, Human
gcccuggccuucaucucagaca

SEQ ID NO: 1135816 - RNA, 22 nt, Human
cuccugggaauuuaguugugag

SEQ ID NO: 1135817 - RNA, 22 nt, Human
cugggaggauucauugagguga

SEQ ID NO: 1135818 - RNA, 22 nt, Human
uuguuucauggggauguuuauu

SEQ ID NO: 1135819 - RNA, 22 nt, Human
guuauaaauaccuaauaggauu

SEQ ID NO: 1135820 - RNA, 22 nt, Human
agugcauugcaucucugcuuca

SEQ ID NO: 1135821 - RNA, 22 nt, Human
cuggccugggagcugcuagcgu

SEQ ID NO: 1135822 - RNA, 22 nt, Human
ggcagugaaugaaacagaggcu

SEQ ID NO: 1135823 - RNA, 23 nt, Human
ucugggcaccuuguugacaugau

SEQ ID NO: 1135824 - RNA, 22 nt, Human
ucaggcugaggucaucugcauc

SEQ ID NO: 1135825 - RNA, 22 nt, Human
gcagauggcucagacacugggg

SEQ ID NO: 1135826 - RNA, 22 nt, Human
ucugcagcuucuugccagagag

SEQ ID NO: 1135827 - RNA, 20 nt, Human
uggagcugugguaaggagca

SEQ ID NO: 1135828 - RNA, 22 nt, Human
ucauguaaguauagaaagcagu

SEQ ID NO: 1135829 - RNA, 22 nt, Human
gccuggugguauccuggcaaga

SEQ ID NO: 1135830 - RNA, 21 nt, Human
cauuucuauugaugagaaaag

SEQ ID NO: 1135831 - RNA, 22 nt, Human
uggcucagaacuacuucuaguu

SEQ ID NO: 1135832 - RNA, 15 nt, Human
cagucccagggaccc

SEQ ID NO: 1135833 - RNA, 22 nt, Human
gcuggguggaucggaggcucug

SEQ ID NO: 1135834 - RNA, 22 nt, Human
agaagugccauacuguggucca

SEQ ID NO: 1135835 - RNA, 22 nt, Human
gagaggcugaaaucacaggagc

SEQ ID NO: 1135836 - RNA, 22 nt, Human
uggaggcaccacuggcugcccg

SEQ ID NO: 1135837 - RNA, 22 nt, Human
uagcagaaccagcagucaauuu

SEQ ID NO: 1135838 - RNA, 22 nt, Human
uauuuagaacagacaauagaaa

SEQ ID NO: 1135839 - RNA, 22 nt, Human
gggugggaucuguggagccuca

SEQ ID NO: 1135840 - RNA, 21 nt, Human
cagggcacacagaggauggua

SEQ ID NO: 1135841 - RNA, 20 nt, Human
cagcucugggaaagaggcca

SEQ ID NO: 1135842 - RNA, 18 nt, Human
guucaaggucaagagaga

SEQ ID NO: 1135843 - RNA, 22 nt, Human
ucgagucauguucucccauuaa

SEQ ID NO: 1135844 - RNA, 22 nt, Human
ggaggugguggcagugacaauu

SEQ ID NO: 1135845 - RNA, 22 nt, Human
ugggcagagucauacaggagac

SEQ ID NO: 1135846 - RNA, 22 nt, Human
uagagcugcuggacuguaacag

SEQ ID NO: 1135847 - RNA, 23 nt, Human
cugcagucgccggccugggugcc

SEQ ID NO: 1135848 - RNA, 22 nt, Human
cagggacauugguggccagguu

SEQ ID NO: 1135849 - RNA, 22 nt, Human
guggauggacaugggcaagagg

SEQ ID NO: 1135850 - RNA, 22 nt, Human
uccucccacauaggacaauggg

SEQ ID NO: 1135851 - RNA, 22 nt, Human
uaauacuugucauaaaggcauu

SEQ ID NO: 1135852 - RNA, 22 nt, Human
uuugcauuacuugacuuuaguu

SEQ ID NO: 1135853 - RNA, 22 nt, Human
ugaaaucugucccacuuuagcu

SEQ ID NO: 1135854 - RNA, 22 nt, Human
agagcuguuuggacaucugagu

SEQ ID NO: 1135855 - RNA, 22 nt, Human
uauaauccauucauugauuucu

SEQ ID NO: 1135856 - RNA, 18 nt, Human
uccagagcuacuguggug

SEQ ID NO: 1135857 - RNA, 22 nt, Human
gaggccuggagccgccuaggcg

SEQ ID NO: 1135858 - RNA, 22 nt, Human
gccuggguccacugaucaugcu

SEQ ID NO: 1135859 - RNA, 22 nt, Human
guggagcccugguagggacccc

SEQ ID NO: 1135860 - RNA, 22 nt, Human
gaguggggucugggcaucaguc

SEQ ID NO: 1135861 - RNA, 22 nt, Human
accagagaaaacacagcaggcu

SEQ ID NO: 1135862 - RNA, 18 nt, Human
ugcucuggucucacuugg

SEQ ID NO: 1135863 - RNA, 22 nt, Human
agaacagaugugggcagaccug

SEQ ID NO: 1135864 - RNA, 22 nt, Human
auuuucugguugagguuuaaca

SEQ ID NO: 1135865 - RNA, 22 nt, Human
gcugccuuuuaaagccucgcuu

SEQ ID NO: 1135866 - RNA, 22 nt, Human
auucuagaugcuguaaguagca

SEQ ID NO: 1135867 - RNA, 22 nt, Human
ucaaagucauggcaggcucaga

SEQ ID NO: 1135868 - RNA, 22 nt, Human
aggaaaaucgagucuggaggca

SEQ ID NO: 1135869 - RNA, 22 nt, Human
cugugcuuaccugcccagguga

SEQ ID NO: 1135870 - RNA, 22 nt, Human
ccagggagccuggugugucagc

SEQ ID NO: 1135871 - RNA, 22 nt, Human
uuucuggcagcgggacaggggu

SEQ ID NO: 1135872 - RNA, 22 nt, Human
ggcacugaauuucuuggcaucu

SEQ ID NO: 1135873 - RNA, 22 nt, Human
aagaugauaggacuugcuuaag

SEQ ID NO: 1135874 - RNA, 22 nt, Human
uagcacaucuggcgcuuauagg

SEQ ID NO: 1135875 - RNA, 22 nt, Human
agaaagaacgcacuugugcugc

SEQ ID NO: 1135876 - RNA, 22 nt, Human
agacaggacacaagcugcauaa

SEQ ID NO: 1135877 - RNA, 22 nt, Human
gcagagccugacgggauuuuuc

SEQ ID NO: 1135878 - RNA, 22 nt, Human
cagcaguguacaaggugucaga

SEQ ID NO: 1135879 - RNA, 18 nt, Human
gggcaagcggcugucacc

SEQ ID NO: 1135880 - RNA, 22 nt, Human
ggagauggcucugcaaggucua

SEQ ID NO: 1135881 - RNA, 22 nt, Human
ugaagcagcaaaugaugggaga

SEQ ID NO: 1135882 - RNA, 23 nt, Human
gccuucagcucgggaaggcuccc

SEQ ID NO: 1135883 - RNA, 23 nt, Human
gggagccauggguggucauggag

SEQ ID NO: 1135884 - RNA, 22 nt, Human
cuuuggcaugguccucacuaua

SEQ ID NO: 1135885 - RNA, 22 nt, Human
uuguaacagcuguuuauauagu

SEQ ID NO: 1135886 - RNA, 22 nt, Human
uagcugucagcaaucaaguggu

SEQ ID NO: 1135887 - RNA, 22 nt, Human
agugaaauuuguuuagauaggu

SEQ ID NO: 1135888 - RNA, 22 nt, Human
ggaaggaggggcaaagcaguuc

SEQ ID NO: 1135889 - RNA, 22 nt, Human
cagggcaguuugugccuaugag

SEQ ID NO: 1135890 - RNA, 22 nt, Human
ccucuggcuguaccacuggcac

SEQ ID NO: 1135891 - RNA, 22 nt, Human
gagagcacaugaacauggagga

SEQ ID NO: 1135892 - RNA, 22 nt, Human
cugagagccuccuguuggcuag

SEQ ID NO: 1135893 - RNA, 22 nt, Human
ccucucauagucuguauccuuu

SEQ ID NO: 1135894 - RNA, 22 nt, Human
aaagccuucaaguagauguaag

SEQ ID NO: 1135895 - RNA, 22 nt, Human
agugucugaaccaccggggcau

SEQ ID NO: 1135896 - RNA, 22 nt, Human
gugugccagacaugaugcuaug

SEQ ID NO: 1135897 - RNA, 23 nt, Human
ccugugugcccuuaauucacagc

SEQ ID NO: 1135898 - RNA, 22 nt, Human
gucaaguuaagauaaggucaug

SEQ ID NO: 1135899 - RNA, 22 nt, Human
agccagcuggagaccacuguuu

SEQ ID NO: 1135900 - RNA, 22 nt, Human
accucugcaacccuggaauggg

SEQ ID NO: 1135901 - RNA, 22 nt, Human
uccuucagugucccgcucaggu

SEQ ID NO: 1135902 - RNA, 22 nt, Human
aggaagccugcaggugacugcu

SEQ ID NO: 1135903 - RNA, 22 nt, Human
ugucucugguauuaggugaaaa

SEQ ID NO: 1135904 - RNA, 22 nt, Human
gcuguccagagcaugggagcaa

SEQ ID NO: 1135905 - RNA, 23 nt, Human
aaguucaagucacagccugucuu

SEQ ID NO: 1135906 - RNA, 18 nt, Human
uggagcagguaggcauga

SEQ ID NO: 1135907 - RNA, 22 nt, Human
uggcagcaaguucuugggaggu

SEQ ID NO: 1135908 - RNA, 22 nt, Human
ggcugcuguacugaugucaguu

SEQ ID NO: 1135909 - RNA, 22 nt, Human
agcccuccucacaucagcgucc

SEQ ID NO: 1135910 - RNA, 22 nt, Human
caggugggaccaugauagggca

SEQ ID NO: 1135911 - RNA, 22 nt, Human
ucaagagaagugcuccacagua

SEQ ID NO: 1135912 - RNA, 22 nt, Human
gagcucauccccaugguccguc

SEQ ID NO: 1135913 - RNA, 22 nt, Human
gagagucacugucugcauuucc

SEQ ID NO: 1135914 - RNA, 22 nt, Human
ccagggcugagcugugaccaug

SEQ ID NO: 1135915 - RNA, 22 nt, Human
ugauuuccaugaagcugaaggc

SEQ ID NO: 1135916 - RNA, 22 nt, Human
cuggccagaguuggagggugug

SEQ ID NO: 1135917 - RNA, 22 nt, Human
agauuuccaucuuuuucaugug

SEQ ID NO: 1135918 - RNA, 23 nt, Human
ccagcucccaggucugaggacug

SEQ ID NO: 1135919 - RNA, 22 nt, Human
caggggaagaugccaagggaga

SEQ ID NO: 1135920 - RNA, 22 nt, Human
ccuucagaccuagacaggaauc

SEQ ID NO: 1135921 - RNA, 22 nt, Human
uauaagucuggcauauguaugc

SEQ ID NO: 1135922 - RNA, 22 nt, Human
cucugguguccuuuagaauuua

SEQ ID NO: 1135923 - RNA, 22 nt, Human
ggccuuggugcucuguguugca

SEQ ID NO: 1135924 - RNA, 22 nt, Human
accugggagucacaccugagaa

SEQ ID NO: 1135925 - RNA, 22 nt, Human
agugaaauaugcccauugcugu

SEQ ID NO: 1135926 - RNA, 22 nt, Human
aagacccacaaggcugaauguu

SEQ ID NO: 1135927 - RNA, 22 nt, Human
ccacagggcucuaggcgcuucc

SEQ ID NO: 1135928 - RNA, 22 nt, Human
acccaggguagagugcaguggc

SEQ ID NO: 1135929 - RNA, 21 nt, Human
ucagcagcaucugccuagagu

SEQ ID NO: 1135930 - RNA, 22 nt, Human
uggggagugaugccucggauaa

SEQ ID NO: 1135931 - RNA, 22 nt, Human
ugcuucucccaaccagggccug

SEQ ID NO: 1135932 - RNA, 22 nt, Human
ucucucuugucaccccaucugc

SEQ ID NO: 1135933 - RNA, 22 nt, Human
cuggcucaguucuugguuuuca

SEQ ID NO: 1135934 - RNA, 22 nt, Human
ggccucugaggacagccuuggc

SEQ ID NO: 1135935 - RNA, 22 nt, Human
agcugcucuuugaaggacacuu

SEQ ID NO: 1135936 - RNA, 22 nt, Human
ccagcccugccagagagagcug

SEQ ID NO: 1135937 - RNA, 22 nt, Human
agccuggauccauguggcuacc

SEQ ID NO: 1135938 - RNA, 22 nt, Human
ggaaggagggcggcaaugauga

SEQ ID NO: 1135939 - RNA, 22 nt, Human
cagggccaaguuggugccuuuu

SEQ ID NO: 1135940 - RNA, 22 nt, Human
cccagcugcaccucuauggccu

SEQ ID NO: 1135941 - RNA, 22 nt, Human
ggcaggagaaaggucucuucuu

SEQ ID NO: 1135942 - RNA, 22 nt, Human
agaggcugcacuugcucaugau

SEQ ID NO: 1135943 - RNA, 22 nt, Human
caucaguguggcaguucacugu

SEQ ID NO: 1135944 - RNA, 22 nt, Human
ccugccugauuccaggauggcu

SEQ ID NO: 1135945 - RNA, 22 nt, Human
ggagagugggagcaacuguugc

SEQ ID NO: 1135946 - RNA, 22 nt, Human
uauguacaccggggaagguggg

SEQ ID NO: 1135947 - RNA, 22 nt, Human
aggcacugaaggaagcuugcgc

SEQ ID NO: 1135948 - RNA, 22 nt, Human
ugagcuucaaaauaugugaauc

SEQ ID NO: 1135949 - RNA, 22 nt, Human
ccagggcacguugggacaguac

SEQ ID NO: 1135950 - RNA, 22 nt, Human
aaggcagcagugcacgacugau

SEQ ID NO: 1135951 - RNA, 22 nt, Human
aggccuguuccaggccccuuuu

SEQ ID NO: 1135952 - RNA, 22 nt, Human
gaaaugugaccuacuuccuugu

SEQ ID NO: 1135953 - RNA, 22 nt, Human
acaggugggcuuaagagucggc

SEQ ID NO: 1135954 - RNA, 19 nt, Human
aguccaugaauggaggaug

SEQ ID NO: 1135955 - RNA, 22 nt, Human
uuccucugaaauggcuuggaaa

SEQ ID NO: 1135956 - RNA, 22 nt, Human
agggagagguugaaaccucagu

SEQ ID NO: 1135957 - RNA, 22 nt, Human
uaaacaugugagugugcauaua

SEQ ID NO: 1135958 - RNA, 22 nt, Human
ugucauuuucuaaucuguuguc

SEQ ID NO: 1135959 - RNA, 22 nt, Human
ccuggcugcauuuugcuggaug

SEQ ID NO: 1135960 - RNA, 22 nt, Human
aucaguuucuaccauguggaau

SEQ ID NO: 1135961 - RNA, 22 nt, Human
ccugggcuucugucuagauguu

SEQ ID NO: 1135962 - RNA, 22 nt, Human
agccagugcaacagcagugaag

SEQ ID NO: 1135963 - RNA, 22 nt, Human
agggcagaaauauugauacugu

SEQ ID NO: 1135964 - RNA, 22 nt, Human
ccucuggcaacuucacagccca

SEQ ID NO: 1135965 - RNA, 22 nt, Human
ggcagucagugugguucauaaa

SEQ ID NO: 1135966 - RNA, 22 nt, Human
uccuggagggaggcggugcuac

SEQ ID NO: 1135967 - RNA, 22 nt, Human
auguaaggcugccuaugacacu

SEQ ID NO: 1135968 - RNA, 22 nt, Human
ugagcccaggaguuggaggcug

SEQ ID NO: 1135969 - RNA, 21 nt, Human
gcagcuggucucagagcuugc

SEQ ID NO: 1135970 - RNA, 22 nt, Human
caggccugucugcacaugaggc

SEQ ID NO: 1135971 - RNA, 17 nt, Human
uucaagauauugaaaug

SEQ ID NO: 1135972 - RNA, 20 nt, Human
ucuggcucuuugcuccuccc

SEQ ID NO: 1135973 - RNA, 22 nt, Human
cugcagugaaaucaggaagcaa

SEQ ID NO: 1135974 - RNA, 22 nt, Human
aaaagguaguugccaaauaagg

SEQ ID NO: 1135975 - RNA, 22 nt, Human
aguauuucugcucaugaaagag

SEQ ID NO: 1135976 - RNA, 22 nt, Human
agcuucuggaagccuggcagca

SEQ ID NO: 1135977 - RNA, 22 nt, Human
ccagcagaagcucccgcugggu

SEQ ID NO: 1135978 - RNA, 20 nt, Human
ggaagcagagaacuguuuuc

SEQ ID NO: 1135979 - RNA, 22 nt, Human
ccuuuggguucaaucucggucu

SEQ ID NO: 1135980 - RNA, 22 nt, Human
gccucugcugacaagauggaca

SEQ ID NO: 1135981 - RNA, 22 nt, Human
uggccuggggaccugugagacc

SEQ ID NO: 1135982 - RNA, 22 nt, Human
uccauuggucucugugcccagg

SEQ ID NO: 1135983 - RNA, 22 nt, Human
ugggcagaaugugggauccaga

SEQ ID NO: 1135984 - RNA, 22 nt, Human
cagcccaggccgacaguuccuc

SEQ ID NO: 1135985 - RNA, 22 nt, Human
cuacccaggcuggagugcagua

SEQ ID NO: 1135986 - RNA, 22 nt, Human
agcugccuguccuaggccauca

SEQ ID NO: 1135987 - RNA, 22 nt, Human
uggcagagaugaagaguuguuu

SEQ ID NO: 1135988 - RNA, 22 nt, Human
cuccagggaugagacagaguag

SEQ ID NO: 1135989 - RNA, 22 nt, Human
ccagucccgcaugguccagaau

SEQ ID NO: 1135990 - RNA, 19 nt, Human
ggaugagggucaggcauag

SEQ ID NO: 1135991 - RNA, 22 nt, Human
gcugccacuuggucaugucaug

SEQ ID NO: 1135992 - RNA, 22 nt, Human
caguugcuacaguucaagugug

SEQ ID NO: 1135993 - RNA, 22 nt, Human
gugucaugcacacucaguguug

SEQ ID NO: 1135994 - RNA, 23 nt, Human
cuccucguaacucuguggugggu

SEQ ID NO: 1135995 - RNA, 22 nt, Human
aggucauuaaaguuaaaugagg

SEQ ID NO: 1135996 - RNA, 20 nt, Human
gugggcagcaggcauacugg

SEQ ID NO: 1135997 - RNA, 22 nt, Human
ucugucacugagcucaggauuc

SEQ ID NO: 1135998 - RNA, 22 nt, Human
cucugagagcggucuguggcuu

SEQ ID NO: 1135999 - RNA, 22 nt, Human
acuucucuucauagguggcaau

SEQ ID NO: 1136000 - RNA, 22 nt, Human
gacaucauagggugggaggaaa

SEQ ID NO: 1136001 - RNA, 18 nt, Human
accugccuguucuucucu

SEQ ID NO: 1136002 - RNA, 22 nt, Human
ugaaagguuaaaaguaguauug

SEQ ID NO: 1136003 - RNA, 22 nt, Human
gcugccuggagcucagccugcc

SEQ ID NO: 1136004 - RNA, 22 nt, Human
gagcugggcacacgccacuuga

SEQ ID NO: 1136005 - RNA, 22 nt, Human
uagagcuggaaaacugcaggua

SEQ ID NO: 1136006 - RNA, 22 nt, Human
ugguggcaauguccuggagaag

SEQ ID NO: 1136007 - RNA, 20 nt, Human
aucuggcucagauccugcag

SEQ ID NO: 1136008 - RNA, 22 nt, Human
uucuuucccaguagaugugaaa

SEQ ID NO: 1136009 - RNA, 22 nt, Human
gcagagccccucaagccagccu

SEQ ID NO: 1136010 - RNA, 22 nt, Human
gguucacacuuucaugauuuca

SEQ ID NO: 1136011 - RNA, 22 nt, Human
agcugagcucaggcugauguaa

SEQ ID NO: 1136012 - RNA, 22 nt, Human
ugucacauguguggcauuuuuc

SEQ ID NO: 1136013 - RNA, 22 nt, Human
uuucacauuuuauacuuaagcc

SEQ ID NO: 1136014 - RNA, 22 nt, Human
agcagcucugagaggccagcac

SEQ ID NO: 1136015 - RNA, 22 nt, Human
agaaaucuaagaugcucaagga

SEQ ID NO: 1136016 - RNA, 22 nt, Human
ugauuuccuaggucuggagaag

SEQ ID NO: 1136017 - RNA, 22 nt, Human
guggccuggaugagcuucgaca

SEQ ID NO: 1136018 - RNA, 18 nt, Human
cccucuccugcuaguggg

SEQ ID NO: 1136019 - RNA, 22 nt, Human
cuggugagacgguugacaggag

SEQ ID NO: 1136020 - RNA, 22 nt, Human
aaguucaagucuccugaguaua

SEQ ID NO: 1136021 - RNA, 22 nt, Human
cagggcucaucugugugaccag

SEQ ID NO: 1136022 - RNA, 22 nt, Human
gcucuguccagcgugcacagaa

SEQ ID NO: 1136023 - RNA, 22 nt, Human
aggccuggcaugagaccugaga

SEQ ID NO: 1136024 - RNA, 23 nt, Human
gagugcagaauagacaugcagug

SEQ ID NO: 1136025 - RNA, 22 nt, Human
ucagggcaucaucaugaauaua

SEQ ID NO: 1136026 - RNA, 22 nt, Human
gcucugagcacugugcggcugg

SEQ ID NO: 1136027 - RNA, 22 nt, Human
ugagccugcaauaagcacagcc

SEQ ID NO: 1136028 - RNA, 22 nt, Human
cacacaggagagugcuggaggu

SEQ ID NO: 1136029 - RNA, 22 nt, Human
cagcugcccugccuugcccuua

SEQ ID NO: 1136030 - RNA, 22 nt, Human
uccucuggggcgugguccugga

SEQ ID NO: 1136031 - RNA, 18 nt, Human
ugugguggagcugccuuc

SEQ ID NO: 1136032 - RNA, 22 nt, Human
cagagcaggcccacugcccucc

SEQ ID NO: 1136033 - RNA, 22 nt, Human
uuacauuagacccacuuucaug

SEQ ID NO: 1136034 - RNA, 22 nt, Human
cauuuagagucuugcaauuuua

SEQ ID NO: 1136035 - RNA, 23 nt, Human
ugcagagggacugaagccagcuu

SEQ ID NO: 1136036 - RNA, 22 nt, Human
ccucucaucauuaucgcuuugu

SEQ ID NO: 1136037 - RNA, 22 nt, Human
ccagggugcucuguggcgucgc

SEQ ID NO: 1136038 - RNA, 22 nt, Human
gaaaauguuagcuucauaguca

SEQ ID NO: 1136039 - RNA, 22 nt, Human
agcaucuggugagggccuaguu

SEQ ID NO: 1136040 - RNA, 22 nt, Human
acccagcucuuugauggucuug

SEQ ID NO: 1136041 - RNA, 22 nt, Human
uucuucaauuauuggaaagaaa

SEQ ID NO: 1136042 - RNA, 20 nt, Human
gccuguccugagugucaugg

SEQ ID NO: 1136043 - RNA, 22 nt, Human
gugaggggaguaaagccauguu

SEQ ID NO: 1136044 - RNA, 22 nt, Human
gcagccugaugaucuggguugu

SEQ ID NO: 1136045 - RNA, 22 nt, Human
cacagggcaggccccaggccuc

SEQ ID NO: 1136046 - RNA, 22 nt, Human
ccagagucuuuauauuccugaa

SEQ ID NO: 1136047 - RNA, 20 nt, Human
caggaggcaaggucaagguc

SEQ ID NO: 1136048 - RNA, 22 nt, Human
gcugucugcaucucuagagcuu

SEQ ID NO: 1136049 - RNA, 22 nt, Human
aucuacaggauuuuacagaguu

SEQ ID NO: 1136050 - RNA, 22 nt, Human
gguggggcccuggcacugguau

SEQ ID NO: 1136051 - RNA, 22 nt, Human
gccucaggacuggcauacucau

SEQ ID NO: 1136052 - RNA, 22 nt, Human
accaggggugucaacagcauuu

SEQ ID NO: 1136053 - RNA, 22 nt, Human
ucacaggagggagagacaccca

SEQ ID NO: 1136054 - RNA, 22 nt, Human
ugugcgcgugcagcggaguguu

SEQ ID NO: 1136055 - RNA, 22 nt, Human
ucauccaguaccauggaaggca

SEQ ID NO: 1136056 - RNA, 23 nt, Human
augcaguauaugucaguaguuua

SEQ ID NO: 1136057 - RNA, 22 nt, Human
uauguacacauacacuuguaau

SEQ ID NO: 1136058 - RNA, 19 nt, Human
ucacaggcaucuccccaga

SEQ ID NO: 1136059 - RNA, 22 nt, Human
cagcagagcuuauguuggguca

SEQ ID NO: 1136060 - RNA, 22 nt, Human
cugagauggaguuuugcucuug

SEQ ID NO: 1136061 - RNA, 22 nt, Human
cccuggaggcggagcuugcagu

SEQ ID NO: 1136062 - RNA, 19 nt, Human
guaagggcuaauggacuau

SEQ ID NO: 1136063 - RNA, 22 nt, Human
uuagcuaaacuguaacuagaau

SEQ ID NO: 1136064 - RNA, 18 nt, Human
acagacaaaauggaaaug

SEQ ID NO: 1136065 - RNA, 17 nt, Human
agcagaagucagaggga

SEQ ID NO: 1136066 - RNA, 21 nt, Human
agagagaaggccauauggucc

SEQ ID NO: 1136067 - RNA, 22 nt, Human
ccaggccucuggcugcuuaguc

SEQ ID NO: 1136068 - RNA, 22 nt, Human
agagggcauuaacucugucuug

SEQ ID NO: 1136069 - RNA, 22 nt, Human
uccaugguagguuucuuaaaga

SEQ ID NO: 1136070 - RNA, 22 nt, Human
cagaaagaccugggcucaagag

SEQ ID NO: 1136071 - RNA, 22 nt, Human
ucucccacugcaagcccaggcu

SEQ ID NO: 1136072 - RNA, 18 nt, Human
cucucugggugaggacaa

SEQ ID NO: 1136073 - RNA, 22 nt, Human
uuuucuuacugucugugauccu

SEQ ID NO: 1136074 - RNA, 22 nt, Human
ugcagaagcagagaguugccaa

SEQ ID NO: 1136075 - RNA, 22 nt, Human
agguagagcuccaguagaaaau

SEQ ID NO: 1136076 - RNA, 22 nt, Human
aaaugguauuuacucuguauua

SEQ ID NO: 1136077 - RNA, 22 nt, Human
ggcucugcuggauugaggccag

SEQ ID NO: 1136078 - RNA, 22 nt, Human
ucccuguccugggcaaucccag

SEQ ID NO: 1136079 - RNA, 22 nt, Human
aaggaagggaaauagugauguc

SEQ ID NO: 1136080 - RNA, 19 nt, Human
ucugcuggcagaauucccu

SEQ ID NO: 1136081 - RNA, 22 nt, Human
ggcuucuccccuuugagucuuc

SEQ ID NO: 1136082 - RNA, 22 nt, Human
uauuaucauugguaauaugguc

SEQ ID NO: 1136083 - RNA, 22 nt, Human
gaggccacgguuuuccuugggg

SEQ ID NO: 1136084 - RNA, 22 nt, Human
gccugaaguuucaugccucuau

SEQ ID NO: 1136085 - RNA, 22 nt, Human
gaggggcugggguugacuccaa

SEQ ID NO: 1136086 - RNA, 22 nt, Human
cacauuuaaagguugaagcuga

SEQ ID NO: 1136087 - RNA, 21 nt, Human
ugggggagaauugguugcuuu

SEQ ID NO: 1136088 - RNA, 22 nt, Human
aggggaggagcuuuucuugccu

SEQ ID NO: 1136089 - RNA, 22 nt, Human
gcuguggcuguacagagaccau

SEQ ID NO: 1136090 - RNA, 22 nt, Human
uggccucuuacgacauagccuu

SEQ ID NO: 1136091 - RNA, 22 nt, Human
gggauggggagcuggaaagggg

SEQ ID NO: 1136092 - RNA, 22 nt, Human
gcuugcuggugccugcaggcuc

SEQ ID NO: 1136093 - RNA, 22 nt, Human
gcaggguauaauacuuagguga

SEQ ID NO: 1136094 - RNA, 22 nt, Human
uccugggcuguggccccgggca

SEQ ID NO: 1136095 - RNA, 22 nt, Human
ugucuguacaaauuuucugugu

SEQ ID NO: 1136096 - RNA, 22 nt, Human
cgccaggcuugguagcucaugc

SEQ ID NO: 1136097 - RNA, 22 nt, Human
cagaggcuaagaugagugggug

SEQ ID NO: 1136098 - RNA, 22 nt, Human
gccuaauaacuagcuguguaac

SEQ ID NO: 1136099 - RNA, 22 nt, Human
gcacagaacuucucuuaguagg

SEQ ID NO: 1136100 - RNA, 22 nt, Human
ugcauugcaguuaacucaguau

SEQ ID NO: 1136101 - RNA, 22 nt, Human
ggcuggcauccagggaaaucca

SEQ ID NO: 1136102 - RNA, 22 nt, Human
ggaaggaggaugcucuggccuu

SEQ ID NO: 1136103 - RNA, 23 nt, Human
uggccugcagaguuucugcuggg

SEQ ID NO: 1136104 - RNA, 18 nt, Human
agucucagcggaggagua

SEQ ID NO: 1136105 - RNA, 20 nt, Human
gcugucuggauuagaagccu

SEQ ID NO: 1136106 - RNA, 22 nt, Human
gggcucugggaugcucuuagag

SEQ ID NO: 1136107 - RNA, 22 nt, Human
ggaggccaugaggcucuaggug

SEQ ID NO: 1136108 - RNA, 22 nt, Human
ucaccaggcuggaaugcagugg

SEQ ID NO: 1136109 - RNA, 22 nt, Human
agggccugacacccuugccagc

SEQ ID NO: 1136110 - RNA, 22 nt, Human
ccuggaaggugaugguacagca

SEQ ID NO: 1136111 - RNA, 19 nt, Human
caguggccuggaggucucu

SEQ ID NO: 1136112 - RNA, 22 nt, Human
cuggccuuuaaaaugaccuuau

SEQ ID NO: 1136113 - RNA, 22 nt, Human
aaggaagacacagaugaaguga

SEQ ID NO: 1136114 - RNA, 18 nt, Human
cagauccaggcagcuauu

SEQ ID NO: 1136115 - RNA, 22 nt, Human
cucacagguaccagcacccucc

SEQ ID NO: 1136116 - RNA, 22 nt, Human
uccaguucuaggucacucucug

SEQ ID NO: 1136117 - RNA, 22 nt, Human
auaagaaacauuauucuuucca

SEQ ID NO: 1136118 - RNA, 22 nt, Human
ccuggcaggcuggggacagugc

SEQ ID NO: 1136119 - RNA, 22 nt, Human
uggagggcaucuguggucaggc

SEQ ID NO: 1136120 - RNA, 22 nt, Human
accaucagagcacaguccgugc

SEQ ID NO: 1136121 - RNA, 22 nt, Human
augaaauaucuugaagaaauuc

SEQ ID NO: 1136122 - RNA, 22 nt, Human
gcugagcugaggcagggcuggg

SEQ ID NO: 1136123 - RNA, 22 nt, Human
cugaggucuagacaccccaggg

SEQ ID NO: 1136124 - RNA, 22 nt, Human
ccacacugaaccucagugucuu

SEQ ID NO: 1136125 - RNA, 17 nt, Human
gcacugaacaauccugu

SEQ ID NO: 1136126 - RNA, 22 nt, Human
aaggcacugcuuugcugcgccc

SEQ ID NO: 1136127 - RNA, 22 nt, Human
uauuaguagcuugaaauuggug

SEQ ID NO: 1136128 - RNA, 22 nt, Human
cagggccagcgucucgggcuau

SEQ ID NO: 1136129 - RNA, 22 nt, Human
ggcugagcacuuuaggcaggag

SEQ ID NO: 1136130 - RNA, 22 nt, Human
aggcugaggcagguggaucauu

SEQ ID NO: 1136131 - RNA, 17 nt, Human
ccugggaggaguuauga

SEQ ID NO: 1136132 - RNA, 22 nt, Human
ggcagccauacucagaccuggg

SEQ ID NO: 1136133 - RNA, 22 nt, Human
gagauuggauuuaauggccaaa

SEQ ID NO: 1136134 - RNA, 16 nt, Human
uguuagcugugcauua

SEQ ID NO: 1136135 - RNA, 22 nt, Human
ccuuagagaguacugggcugcc

SEQ ID NO: 1136136 - RNA, 21 nt, Human
uccagggaacuucucaggaau

SEQ ID NO: 1136137 - RNA, 22 nt, Human
cgaugguucuggcugcuuguau

SEQ ID NO: 1136138 - RNA, 22 nt, Human
acagagcuuaggaugacuccca

SEQ ID NO: 1136139 - RNA, 22 nt, Human
gauccuugcacuugacuuggca

SEQ ID NO: 1136140 - RNA, 22 nt, Human
aagauuucugcuuuuggaggca

SEQ ID NO: 1136141 - RNA, 19 nt, Human
ccuggaggugaagguucuc

SEQ ID NO: 1136142 - RNA, 22 nt, Human
ggguccaggucuucaggcagag

SEQ ID NO: 1136143 - RNA, 22 nt, Human
ggugucccaggccagcugugug

SEQ ID NO: 1136144 - RNA, 22 nt, Human
cagaagccugccucagaugcac

SEQ ID NO: 1136145 - RNA, 21 nt, Human
uggcugcuggcccucucucca

SEQ ID NO: 1136146 - RNA, 22 nt, Human
augccagucaaagaagaugaca

SEQ ID NO: 1136147 - RNA, 22 nt, Human
gcugucacucuccggccuuccc

SEQ ID NO: 1136148 - RNA, 22 nt, Human
gcucccugacucaguuccugag

SEQ ID NO: 1136149 - RNA, 22 nt, Human
uuuuuaagagauucuccagucu

SEQ ID NO: 1136150 - RNA, 22 nt, Human
gguugaauaucuuuauguuggu

SEQ ID NO: 1136151 - RNA, 22 nt, Human
ggcuggaaguccaagaucaagg

SEQ ID NO: 1136152 - RNA, 20 nt, Human
ucagugauuaucucugagug

SEQ ID NO: 1136153 - RNA, 18 nt, Human
aaguccauggguuuggga

SEQ ID NO: 1136154 - RNA, 22 nt, Human
agcaccaucagaugcaauaucu

SEQ ID NO: 1136155 - RNA, 23 nt, Human
guggccuccccggaaugccucgc

SEQ ID NO: 1136156 - RNA, 22 nt, Human
uuuucacacaaggugauaaguu

SEQ ID NO: 1136157 - RNA, 18 nt, Human
uccuccuuuggccuuuuc

SEQ ID NO: 1136158 - RNA, 22 nt, Human
cagccuccugggacacucaccg

SEQ ID NO: 1136159 - RNA, 22 nt, Human
ugcugcacaauuggaaaguauc

SEQ ID NO: 1136160 - RNA, 22 nt, Human
accucugcaguagggcugugcc

SEQ ID NO: 1136161 - RNA, 22 nt, Human
cccugccuugggguccacaccg

SEQ ID NO: 1136162 - RNA, 22 nt, Human
gcucccagggaccgcagggcag

SEQ ID NO: 1136163 - RNA, 22 nt, Human
ccaggagcagauauggacauaa

SEQ ID NO: 1136164 - RNA, 22 nt, Human
cugcaggcccccuuccuggagu

SEQ ID NO: 1136165 - RNA, 22 nt, Human
aguuuuucugcuggucucacua

SEQ ID NO: 1136166 - RNA, 22 nt, Human
agcugagcacauucaaacaggu

SEQ ID NO: 1136167 - RNA, 22 nt, Human
uacaaaguuugagaaugcuuuc

SEQ ID NO: 1136168 - RNA, 22 nt, Human
gugggaugguagguagguaaua

SEQ ID NO: 1136169 - RNA, 22 nt, Human
gggcagcagcaggaggucucug

SEQ ID NO: 1136170 - RNA, 22 nt, Human
cagucccaucucccagguggcu

SEQ ID NO: 1136171 - RNA, 23 nt, Human
ucucucuuagcuaugcuuauggc

SEQ ID NO: 1136172 - RNA, 22 nt, Human
acuuuggaucugauguaaucag

SEQ ID NO: 1136173 - RNA, 22 nt, Human
gagagcuggauucuggauaggu

SEQ ID NO: 1136174 - RNA, 22 nt, Human
cugagccacugcuuguucagug

SEQ ID NO: 1136175 - RNA, 21 nt, Human
ucagaguggaagacaguuuga

SEQ ID NO: 1136176 - RNA, 22 nt, Human
uggcugggugcuauccaguacu

SEQ ID NO: 1136177 - RNA, 22 nt, Human
auuucacucucccugccacuua

SEQ ID NO: 1136178 - RNA, 22 nt, Human
cuucucucccuggcacucagac

SEQ ID NO: 1136179 - RNA, 22 nt, Human
ggagcugcucagagccaguccc

SEQ ID NO: 1136180 - RNA, 22 nt, Human
gggggcuggaauauccaucaac

SEQ ID NO: 1136181 - RNA, 22 nt, Human
ccaggguguagggauuccagau

SEQ ID NO: 1136182 - RNA, 22 nt, Human
uggggcuggggaucuugagccu

SEQ ID NO: 1136183 - RNA, 22 nt, Human
cuccugggcucaagugauccuc

SEQ ID NO: 1136184 - RNA, 22 nt, Human
agggcucuguccccagaggccc

SEQ ID NO: 1136185 - RNA, 22 nt, Human
ucacugcaaucucugccuucca

SEQ ID NO: 1136186 - RNA, 22 nt, Human
cuccauugaacauccucucaga

SEQ ID NO: 1136187 - RNA, 22 nt, Human
aaaggucagcugccaucguucu

SEQ ID NO: 1136188 - RNA, 22 nt, Human
gcuuccugagaaacaaucugau

SEQ ID NO: 1136189 - RNA, 21 nt, Human
ugcucaugcaaugcaugucca

SEQ ID NO: 1136190 - RNA, 22 nt, Human
cugcucucuguuccccuggauc

SEQ ID NO: 1136191 - RNA, 22 nt, Human
uauguacaucguugaauucaaa

SEQ ID NO: 1136192 - RNA, 20 nt, Human
ccuggagccuggaaggaguc

SEQ ID NO: 1136193 - RNA, 19 nt, Human
acagagcucucugcuucug

SEQ ID NO: 1136194 - RNA, 22 nt, Human
caagaaauuucuuaagaacuaa

SEQ ID NO: 1136195 - RNA, 22 nt, Human
gggcuacagacaugcucuaagc

SEQ ID NO: 1136196 - RNA, 22 nt, Human
cacagggcagugcugcccacuc

SEQ ID NO: 1136197 - RNA, 21 nt, Human
guuugcaugaacaagucagcc

SEQ ID NO: 1136198 - RNA, 22 nt, Human
aagcagcagaccugauuuugaa

SEQ ID NO: 1136199 - RNA, 22 nt, Human
cuggcagccaagugggauacuc

SEQ ID NO: 1136200 - RNA, 22 nt, Human
ucaggcagaggauggggagcgu

SEQ ID NO: 1136201 - RNA, 22 nt, Human
uuucagaucauuuuuuaaguac

SEQ ID NO: 1136202 - RNA, 21 nt, Human
aagaagcaauuuauuggaagg

SEQ ID NO: 1136203 - RNA, 22 nt, Human
aaggcugagagucacaguccua

SEQ ID NO: 1136204 - RNA, 22 nt, Human
ggagccugugggaugagaugug

SEQ ID NO: 1136205 - RNA, 22 nt, Human
gcacacccucucaccagcacug

SEQ ID NO: 1136206 - RNA, 22 nt, Human
caggauccccaggucgccgucc

SEQ ID NO: 1136207 - RNA, 22 nt, Human
uuccauaacugaccgaaugcau

SEQ ID NO: 1136208 - RNA, 22 nt, Human
cugccuggcauggagaagagaa

SEQ ID NO: 1136209 - RNA, 22 nt, Human
ggcaugggguguauguggcacg

SEQ ID NO: 1136210 - RNA, 22 nt, Human
cacauacaaugguguuauuugg

SEQ ID NO: 1136211 - RNA, 19 nt, Human
agaggccucagcagcuggc

SEQ ID NO: 1136212 - RNA, 22 nt, Human
aagaauguucauuaaacuguug

SEQ ID NO: 1136213 - RNA, 22 nt, Human
ugaauggucacugagcaucugu

SEQ ID NO: 1136214 - RNA, 22 nt, Human
ugcagcaggcacaggacggaag

SEQ ID NO: 1136215 - RNA, 22 nt, Human
gagggcagugaauuuugaagcu

SEQ ID NO: 1136216 - RNA, 22 nt, Human
gagccuucaucgcagccuuguu

SEQ ID NO: 1136217 - RNA, 22 nt, Human
agaggcuccuagccacuggcuu

SEQ ID NO: 1136218 - RNA, 22 nt, Human
ccucaggguggcaucagaucuu

SEQ ID NO: 1136219 - RNA, 22 nt, Human
ggagcuggucagccuugagcau

SEQ ID NO: 1136220 - RNA, 21 nt, Human
uggagcugccacuuguccucc

SEQ ID NO: 1136221 - RNA, 22 nt, Human
aaccaggacaauuuugaaagua

SEQ ID NO: 1136222 - RNA, 22 nt, Human
guauucuugguuaucaaaauac

SEQ ID NO: 1136223 - RNA, 22 nt, Human
ucugcaggaggcuggcugcagg

SEQ ID NO: 1136224 - RNA, 22 nt, Human
ugugcagcuaguccuggacuug

SEQ ID NO: 1136225 - RNA, 19 nt, Human
ccaggccuccugggagguc

SEQ ID NO: 1136226 - RNA, 22 nt, Human
gccuuggcugaugugcgaauga

SEQ ID NO: 1136227 - RNA, 22 nt, Human
cuggggcugcgguggaggagcc

SEQ ID NO: 1136228 - RNA, 22 nt, Human
cauuguauugaggauacuuaag

SEQ ID NO: 1136229 - RNA, 22 nt, Human
uggggccugagguggagcugca

SEQ ID NO: 1136230 - RNA, 22 nt, Human
gagggcugauaaaugcgcaugg

SEQ ID NO: 1136231 - RNA, 22 nt, Human
caauguuuuguugaaugaauag

SEQ ID NO: 1136232 - RNA, 22 nt, Human
ggccucaguuucuucaacugua

SEQ ID NO: 1136233 - RNA, 22 nt, Human
auaaggcagucccuuaacaagg

SEQ ID NO: 1136234 - RNA, 22 nt, Human
gcagugcuaaguagcuggccca

SEQ ID NO: 1136235 - RNA, 22 nt, Human
uggccaggcagguagaacggcc

SEQ ID NO: 1136236 - RNA, 22 nt, Human
ugcugccaccccucaccagagc

SEQ ID NO: 1136237 - RNA, 22 nt, Human
gcuggcagucccaucagcuggg

SEQ ID NO: 1136238 - RNA, 22 nt, Human
agccucugguccucccucagcu

SEQ ID NO: 1136239 - RNA, 21 nt, Human
uggcagggguaguaguacagc

SEQ ID NO: 1136240 - RNA, 22 nt, Human
cuuagaaaucgaacucagguua

SEQ ID NO: 1136241 - RNA, 22 nt, Human
agucccaggcagccgagccggu

SEQ ID NO: 1136242 - RNA, 22 nt, Human
uggcuccuucauucuccugcca

SEQ ID NO: 1136243 - RNA, 22 nt, Human
aaaucaguucucccuuucuuca

SEQ ID NO: 1136244 - RNA, 22 nt, Human
uuuccucugucaugacagcuga

SEQ ID NO: 1136245 - RNA, 22 nt, Human
uucucuucuguucagugcccaa

SEQ ID NO: 1136246 - RNA, 22 nt, Human
augcucuggaguacgugaaauu

SEQ ID NO: 1136247 - RNA, 22 nt, Human
cacagcagaaauaugaaggcag

SEQ ID NO: 1136248 - RNA, 22 nt, Human
agcaggugcauggcgagcgcgg

SEQ ID NO: 1136249 - RNA, 21 nt, Human
ugggaugggucugggaccagc

SEQ ID NO: 1136250 - RNA, 22 nt, Human
ggcagggugccuggcuccuguu

SEQ ID NO: 1136251 - RNA, 22 nt, Human
gcuuccuucuaccacaucaugc

SEQ ID NO: 1136252 - RNA, 22 nt, Human
uggagccauaacccuuucguac

SEQ ID NO: 1136253 - RNA, 19 nt, Human
ugaagcaggcagagaagau

SEQ ID NO: 1136254 - RNA, 22 nt, Human
uccugcaggccuguucccagua

SEQ ID NO: 1136255 - RNA, 22 nt, Human
uuuuugaaggcugaugugauua

SEQ ID NO: 1136256 - RNA, 20 nt, Human
aagagcugacucacaguggu

SEQ ID NO: 1136257 - RNA, 22 nt, Human
cugaaggaagcagguggccugu

SEQ ID NO: 1136258 - RNA, 20 nt, Human
uccugagauuuaagggguuc

SEQ ID NO: 1136259 - RNA, 23 nt, Human
caugggagugagaaugccagcuc

SEQ ID NO: 1136260 - RNA, 22 nt, Human
gugcgccagcucaaggggaggc

SEQ ID NO: 1136261 - RNA, 22 nt, Human
guccagggcuaaaucagguucc

SEQ ID NO: 1136262 - RNA, 22 nt, Human
ugaaggaaugagggaguggguc

SEQ ID NO: 1136263 - RNA, 22 nt, Human
acauuucuugaugccucuguga

SEQ ID NO: 1136264 - RNA, 22 nt, Human
gcagaugguggggcaggaaaau

SEQ ID NO: 1136265 - RNA, 22 nt, Human
gccuuugccugcgacguggcug

SEQ ID NO: 1136266 - RNA, 22 nt, Human
ccuggcugucguuuugugaaau

SEQ ID NO: 1136267 - RNA, 22 nt, Human
cugagaggaugcugcaguggag

SEQ ID NO: 1136268 - RNA, 22 nt, Human
ucagagcuuuggagaccaggaa

SEQ ID NO: 1136269 - RNA, 21 nt, Human
aggccucuucauggccaugau

SEQ ID NO: 1136270 - RNA, 18 nt, Human
ucucuuuuccccucauug

SEQ ID NO: 1136271 - RNA, 23 nt, Human
uggcucugugucacauacaggau

SEQ ID NO: 1136272 - RNA, 22 nt, Human
caucagcagucacaugaugcug

SEQ ID NO: 1136273 - RNA, 22 nt, Human
ucaggagcagcaugggugagag

SEQ ID NO: 1136274 - RNA, 22 nt, Human
agccuggagguaaugaggaaac

SEQ ID NO: 1136275 - RNA, 21 nt, Human
gcccagcaaggugagaaggcc

SEQ ID NO: 1136276 - RNA, 22 nt, Human
ugccucugggugaccaaggagc

SEQ ID NO: 1136277 - RNA, 21 nt, Human
ugagagccuccaaccggcuac

SEQ ID NO: 1136278 - RNA, 22 nt, Human
ccucagcugcuucccuggagcc

SEQ ID NO: 1136279 - RNA, 22 nt, Human
uggaccugcuggaugggcaggu

SEQ ID NO: 1136280 - RNA, 22 nt, Human
gaaacuguauguaguuuuuggg

SEQ ID NO: 1136281 - RNA, 22 nt, Human
ugggcagagaucuggaucaaac

SEQ ID NO: 1136282 - RNA, 22 nt, Human
cagaaauguuuauauguggugu

SEQ ID NO: 1136283 - RNA, 22 nt, Human
ggcaggaggaagaguuagcacc

SEQ ID NO: 1136284 - RNA, 22 nt, Human
aagcagcauaauugcuauuuua

SEQ ID NO: 1136285 - RNA, 22 nt, Human
ccagcccuguaaggaugaggca

SEQ ID NO: 1136286 - RNA, 22 nt, Human
cagcagggaagcugugcuguuu

SEQ ID NO: 1136287 - RNA, 22 nt, Human
ugucaugccaggaaauaguccc

SEQ ID NO: 1136288 - RNA, 22 nt, Human
accaggcuggagugcaguggcg

SEQ ID NO: 1136289 - RNA, 22 nt, Human
agucccagccuaggcugugcug

SEQ ID NO: 1136290 - RNA, 22 nt, Human
ugcuucaggaagaaacgccagg

SEQ ID NO: 1136291 - RNA, 21 nt, Human
gcagagccugagguucuugag

SEQ ID NO: 1136292 - RNA, 22 nt, Human
cugagggccuuggcuccugccc

SEQ ID NO: 1136293 - RNA, 22 nt, Human
uuuauuaugauggacaccuucg

SEQ ID NO: 1136294 - RNA, 22 nt, Human
ggcuggaaaagacaaagcuauu

SEQ ID NO: 1136295 - RNA, 19 nt, Human
ccagcagacacagcugccc

SEQ ID NO: 1136296 - RNA, 22 nt, Human
uggcagaaguacacaagcaugc

SEQ ID NO: 1136297 - RNA, 22 nt, Human
uucacauuauaaucaguucugc

SEQ ID NO: 1136298 - RNA, 22 nt, Human
cccagcagaccgcugugauggc

SEQ ID NO: 1136299 - RNA, 22 nt, Human
accugccuaguugguucugccc

SEQ ID NO: 1136300 - RNA, 22 nt, Human
caguagcagggauuauuuuagg

SEQ ID NO: 1136301 - RNA, 22 nt, Human
ggucucuguugccuccaucaag

SEQ ID NO: 1136302 - RNA, 22 nt, Human
uuuauuauagugguggggacug

SEQ ID NO: 1136303 - RNA, 22 nt, Human
ucagagugaggcgucaacauga

SEQ ID NO: 1136304 - RNA, 22 nt, Human
ccuuggagcggucagcacuggu

SEQ ID NO: 1136305 - RNA, 19 nt, Human
auaaggcaggaggaaauuu

SEQ ID NO: 1136306 - RNA, 22 nt, Human
agaggcuggauugagcauagac

SEQ ID NO: 1136307 - RNA, 22 nt, Human
aaacauugcuaaauaaugcugc

SEQ ID NO: 1136308 - RNA, 22 nt, Human
aaggacagaaacagauugcugg

SEQ ID NO: 1136309 - RNA, 22 nt, Human
guggccucuguuggcuccuagg

SEQ ID NO: 1136310 - RNA, 22 nt, Human
cuggcucccucgcugaggugcu

SEQ ID NO: 1136311 - RNA, 22 nt, Human
ucaaaugcucuuugcagagagg

SEQ ID NO: 1136312 - RNA, 22 nt, Human
cagggcuggcuguggcaaucuc

SEQ ID NO: 1136313 - RNA, 22 nt, Human
ccaggagguggagauugcagug

SEQ ID NO: 1136314 - RNA, 22 nt, Human
aaaaccaggcguuuccuauuau

SEQ ID NO: 1136315 - RNA, 19 nt, Human
guuuuguuugcagaacuua

SEQ ID NO: 1136316 - RNA, 22 nt, Human
ggccaggagcaagccaggcucu

SEQ ID NO: 1136317 - RNA, 22 nt, Human
aagaggucauaccagauaaggg

SEQ ID NO: 1136318 - RNA, 22 nt, Human
ccucagccuuggccccaggcag

SEQ ID NO: 1136319 - RNA, 22 nt, Human
ccagccagucccgcaugaccgc

SEQ ID NO: 1136320 - RNA, 22 nt, Human
gaggcagcaucuauggugggaa

SEQ ID NO: 1136321 - RNA, 22 nt, Human
ugccugggaaccaauccuggcu

SEQ ID NO: 1136322 - RNA, 22 nt, Human
ugagcccaggaguuggagaccg

SEQ ID NO: 1136323 - RNA, 22 nt, Human
agaaaugggccuugggacacaa

SEQ ID NO: 1136324 - RNA, 22 nt, Human
gcucagaggcacgaccucuugg

SEQ ID NO: 1136325 - RNA, 19 nt, Human
ggcagaagguguaggggga

SEQ ID NO: 1136326 - RNA, 22 nt, Human
ucccuggggauguuggccugcc

SEQ ID NO: 1136327 - RNA, 19 nt, Human
acuuugcaugugugucuaa

SEQ ID NO: 1136328 - RNA, 22 nt, Human
caggacagguguucuagaucag

SEQ ID NO: 1136329 - RNA, 21 nt, Human
ccugggccaaauucccuggac

SEQ ID NO: 1136330 - RNA, 22 nt, Human
ugacagggcuagaggcaaugca

SEQ ID NO: 1136331 - RNA, 22 nt, Human
ucugagagcuguagaagccuau

SEQ ID NO: 1136332 - RNA, 22 nt, Human
uggguagagcaggcuggggcuu

SEQ ID NO: 1136333 - RNA, 22 nt, Human
gccugccugaaggcuguaccag

SEQ ID NO: 1136334 - RNA, 22 nt, Human
aacuuuaaggcuauaaauuaug

SEQ ID NO: 1136335 - RNA, 22 nt, Human
gggcacagagggucuugaagaa

SEQ ID NO: 1136336 - RNA, 22 nt, Human
cugggaggauacacaagaucag

SEQ ID NO: 1136337 - RNA, 22 nt, Human
aagaugauguuguguuuucacu

SEQ ID NO: 1136338 - RNA, 22 nt, Human
ugaagcagaggggucuugagcu

SEQ ID NO: 1136339 - RNA, 22 nt, Human
aagaaaugcagaaaugugcugg

SEQ ID NO: 1136340 - RNA, 18 nt, Human
ccagcaugccagaggcug

SEQ ID NO: 1136341 - RNA, 22 nt, Human
ucacguuuuacugagugagaua

SEQ ID NO: 1136342 - RNA, 22 nt, Human
gaaucacgguauucugcacggg

SEQ ID NO: 1136343 - RNA, 23 nt, Human
uugaaagguagcuggcagcuaga

SEQ ID NO: 1136344 - RNA, 22 nt, Human
uugcuauuuugagagucauagu

SEQ ID NO: 1136345 - RNA, 22 nt, Human
gcuggccuuugaggaagcugcg

SEQ ID NO: 1136346 - RNA, 22 nt, Human
gcagcugaagcugcaguuccag

SEQ ID NO: 1136347 - RNA, 22 nt, Human
ugggccuggcccuguggaggag

SEQ ID NO: 1136348 - RNA, 22 nt, Human
uaacagaaaggggacagaaaua

SEQ ID NO: 1136349 - RNA, 20 nt, Human
agcugguuaucuuaauucuu

SEQ ID NO: 1136350 - RNA, 22 nt, Human
uuguaacaggcacucugugcca

SEQ ID NO: 1136351 - RNA, 17 nt, Human
uuuuguucaucuucaaa

SEQ ID NO: 1136352 - RNA, 22 nt, Human
gugucccagcagcacauuggcu

SEQ ID NO: 1136353 - RNA, 22 nt, Human
agcacagauucugaagaguccu

SEQ ID NO: 1136354 - RNA, 23 nt, Human
gcucugagggcuuaucccuccca

SEQ ID NO: 1136355 - RNA, 18 nt, Human
acagaacucaggggcacc

SEQ ID NO: 1136356 - RNA, 20 nt, Human
agucccuuuggucagguauu

SEQ ID NO: 1136357 - RNA, 22 nt, Human
uaugugugcauguauacauuaa

SEQ ID NO: 1136358 - RNA, 22 nt, Human
gcugcccaguucugcugcugcc

SEQ ID NO: 1136359 - RNA, 22 nt, Human
agcagcuccugccaugagugcu

SEQ ID NO: 1136360 - RNA, 22 nt, Human
agcaggaguguccccuggcugu

SEQ ID NO: 1136361 - RNA, 22 nt, Human
auuccaguucuccucucuaaag

SEQ ID NO: 1136362 - RNA, 22 nt, Human
uaccuugggcuauuaucuuuga

SEQ ID NO: 1136363 - RNA, 22 nt, Human
gccucucucuacccaguaugau

SEQ ID NO: 1136364 - RNA, 22 nt, Human
gcagagccaggcuggggcaggu

SEQ ID NO: 1136365 - RNA, 22 nt, Human
uacaguaucuucuggcaagcau

SEQ ID NO: 1136366 - RNA, 22 nt, Human
cagggcaguuuuacuucucucu

SEQ ID NO: 1136367 - RNA, 22 nt, Human
ugagcccagagcccuuguaggg

SEQ ID NO: 1136368 - RNA, 22 nt, Human
cugugccuggggggcagagcug

SEQ ID NO: 1136369 - RNA, 22 nt, Human
cugccagcagaggccagcgcug

SEQ ID NO: 1136370 - RNA, 20 nt, Human
aaggcacuaugucugcuagc

SEQ ID NO: 1136371 - RNA, 22 nt, Human
acaaagucucuaauaaucuucu

SEQ ID NO: 1136372 - RNA, 22 nt, Human
ggcagcaguggcugcuauuguc

SEQ ID NO: 1136373 - RNA, 22 nt, Human
ucaggccacggcucacugagac

SEQ ID NO: 1136374 - RNA, 22 nt, Human
cccaggccccagggcuugucag

SEQ ID NO: 1136375 - RNA, 22 nt, Human
cuggccuguccugacccagccu

SEQ ID NO: 1136376 - RNA, 22 nt, Human
gggaugucacugugccuggcac

SEQ ID NO: 1136377 - RNA, 22 nt, Human
cuggccuggcaggggaccucua

SEQ ID NO: 1136378 - RNA, 22 nt, Human
auaaagucuaccguauuaaaga

SEQ ID NO: 1136379 - RNA, 21 nt, Human
ggugucaguuuuggucauuag

SEQ ID NO: 1136380 - RNA, 22 nt, Human
caggcugcggucggcucugguc

SEQ ID NO: 1136381 - RNA, 22 nt, Human
ugggcagauguccucugaagug

SEQ ID NO: 1136382 - RNA, 22 nt, Human
caguguguggauccucccagga

SEQ ID NO: 1136383 - RNA, 21 nt, Human
gaggccacuaauaggggcaga

SEQ ID NO: 1136384 - RNA, 22 nt, Human
acagccagguaaaggcauggca

SEQ ID NO: 1136385 - RNA, 22 nt, Human
gaaaccucuuagccucucuuug

SEQ ID NO: 1136386 - RNA, 22 nt, Human
ucugaggcauaaccuguucugc

SEQ ID NO: 1136387 - RNA, 22 nt, Human
uagcagggccaggcugggaacc

SEQ ID NO: 1136388 - RNA, 22 nt, Human
ucucagagcuucaguuauuuuc

SEQ ID NO: 1136389 - RNA, 22 nt, Human
cagcuuugauucuuucugccau

SEQ ID NO: 1136390 - RNA, 22 nt, Human
agguccagcuguugcagccucc

SEQ ID NO: 1136391 - RNA, 22 nt, Human
gccaggcuggugcaaggauauu

SEQ ID NO: 1136392 - RNA, 18 nt, Human
acauuucuaugcuucugg

SEQ ID NO: 1136393 - RNA, 22 nt, Human
gauuuagagaauguuuuguaag

SEQ ID NO: 1136394 - RNA, 22 nt, Human
aggagucauugagagggguccu

SEQ ID NO: 1136395 - RNA, 22 nt, Human
uauauuuuagacacccucacgc

SEQ ID NO: 1136396 - RNA, 22 nt, Human
gcuggccugcugggcaccaccg

SEQ ID NO: 1136397 - RNA, 17 nt, Human
guuugcaugguguuaac

SEQ ID NO: 1136398 - RNA, 22 nt, Human
caggccugaguguggaagucuu

SEQ ID NO: 1136399 - RNA, 22 nt, Human
cccuggccagcucaugucugag

SEQ ID NO: 1136400 - RNA, 22 nt, Human
gugauuucuaaucaucugaaug

SEQ ID NO: 1136401 - RNA, 22 nt, Human
ucccagcagucagagcuaugug

SEQ ID NO: 1136402 - RNA, 22 nt, Human
uccugcagagccgcccucaggu

SEQ ID NO: 1136403 - RNA, 22 nt, Human
gaaugcacuuccaacaucuauu

SEQ ID NO: 1136404 - RNA, 22 nt, Human
agggggcccuugcaggugagcg

SEQ ID NO: 1136405 - RNA, 22 nt, Human
ccugucuggccaccagggcgau

SEQ ID NO: 1136406 - RNA, 22 nt, Human
uggcuggcaguaggcuaguggc

SEQ ID NO: 1136407 - RNA, 22 nt, Human
ugaagccacagagcaucugccu

SEQ ID NO: 1136408 - RNA, 22 nt, Human
acacacaacucauuguguaaua

SEQ ID NO: 1136409 - RNA, 22 nt, Human
ugucccaguuuaucugggacug

SEQ ID NO: 1136410 - RNA, 22 nt, Human
gaugugggguugagggaccagc

SEQ ID NO: 1136411 - RNA, 22 nt, Human
auacaaguugugauaauguaaa

SEQ ID NO: 1136412 - RNA, 22 nt, Human
caaugugucaggaaaagggcca

SEQ ID NO: 1136413 - RNA, 22 nt, Human
uggccgggccgggcgccuccac

SEQ ID NO: 1136414 - RNA, 22 nt, Human
cugggacagcugagacaggaga

SEQ ID NO: 1136415 - RNA, 22 nt, Human
gccugguguccagaggcgagug

SEQ ID NO: 1136416 - RNA, 22 nt, Human
aaaugcagguaguauuuauuuu

SEQ ID NO: 1136417 - RNA, 22 nt, Human
uuaugacauaugaguacaagua

SEQ ID NO: 1136418 - RNA, 21 nt, Human
caggaaaagcggaagucuagc

SEQ ID NO: 1136419 - RNA, 23 nt, Human
uucuuucaagaaguucacagugc

SEQ ID NO: 1136420 - RNA, 22 nt, Human
acugggccuugccauggcagcc

SEQ ID NO: 1136421 - RNA, 22 nt, Human
uuguuuucacagcuuugcccgg

SEQ ID NO: 1136422 - RNA, 22 nt, Human
uggcuucagacuucugcuacgu

SEQ ID NO: 1136423 - RNA, 22 nt, Human
uuaagaauggaaugaggaauuu

SEQ ID NO: 1136424 - RNA, 22 nt, Human
ccaggcagcucugauuuauguc

SEQ ID NO: 1136425 - RNA, 22 nt, Human
ugcugucccuaagucucuucaa

SEQ ID NO: 1136426 - RNA, 22 nt, Human
agacccugucaguguuaggaaa

SEQ ID NO: 1136427 - RNA, 22 nt, Human
agcugcuaugacaacaccagcc

SEQ ID NO: 1136428 - RNA, 21 nt, Human
acagagccgggcacaaagcug

SEQ ID NO: 1136429 - RNA, 22 nt, Human
gaggaggaaacccuguuccucu

SEQ ID NO: 1136430 - RNA, 22 nt, Human
caagcagacaguaggccuagaa

SEQ ID NO: 1136431 - RNA, 22 nt, Human
uuugcauuguaauauuuaguuc

SEQ ID NO: 1136432 - RNA, 22 nt, Human
uguauuagaucugagaacuucu

SEQ ID NO: 1136433 - RNA, 22 nt, Human
cagaauaugacaagauuuuccu

SEQ ID NO: 1136434 - RNA, 22 nt, Human
uauuugaaaguguacaaaaacu

SEQ ID NO: 1136435 - RNA, 22 nt, Human
gaaggaaaaauacucuguaagg

SEQ ID NO: 1136436 - RNA, 22 nt, Human
gauuucuucauucauuagaugg

SEQ ID NO: 1136437 - RNA, 18 nt, Human
cccagcccaccauuucuc

SEQ ID NO: 1136438 - RNA, 22 nt, Human
gcuccugucuuggggcacuggc

SEQ ID NO: 1136439 - RNA, 22 nt, Human
uacaguauuaugagugauugaa

SEQ ID NO: 1136440 - RNA, 20 nt, Human
agugacagagacuguguggc

SEQ ID NO: 1136441 - RNA, 22 nt, Human
cugugcaagacuuacuuuaaua

SEQ ID NO: 1136442 - RNA, 22 nt, Human
agccucugcuggcccuggcacu

SEQ ID NO: 1136443 - RNA, 22 nt, Human
auuguggugucaguuauaggca

SEQ ID NO: 1136444 - RNA, 22 nt, Human
cugguuuagcuguaagguuccc

SEQ ID NO: 1136445 - RNA, 22 nt, Human
aagggcuggaucucucugagca

SEQ ID NO: 1136446 - RNA, 22 nt, Human
agagcuggauggucaagauggc

SEQ ID NO: 1136447 - RNA, 22 nt, Human
gccaggcaaauuaaggaaugca

SEQ ID NO: 1136448 - RNA, 22 nt, Human
agccagcaugaagacagaggcc

SEQ ID NO: 1136449 - RNA, 22 nt, Human
gugcccugaguggguaggagag

SEQ ID NO: 1136450 - RNA, 22 nt, Human
gagcagugaagacagaaguaca

SEQ ID NO: 1136451 - RNA, 22 nt, Human
ccucuggucccagcucugcugc

SEQ ID NO: 1136452 - RNA, 22 nt, Human
aaaugcauaucaaagacuugaa

SEQ ID NO: 1136453 - RNA, 22 nt, Human
aguggggacuuaugccagcauu

SEQ ID NO: 1136454 - RNA, 22 nt, Human
aauaugugagguauguucagug

SEQ ID NO: 1136455 - RNA, 22 nt, Human
gugugcgcgcucauaggugugu

SEQ ID NO: 1136456 - RNA, 21 nt, Human
aggcuguccuuugccagcccu

SEQ ID NO: 1136457 - RNA, 22 nt, Human
acccagaggugucuagcaagcu

SEQ ID NO: 1136458 - RNA, 22 nt, Human
ucucccacgguacaggauaaac

SEQ ID NO: 1136459 - RNA, 22 nt, Human
gugcaguggcagauccuagcuc

SEQ ID NO: 1136460 - RNA, 22 nt, Human
gcagacaggcccaguggaggga

SEQ ID NO: 1136461 - RNA, 22 nt, Human
uucuuuaaaauagugagaaaga

SEQ ID NO: 1136462 - RNA, 22 nt, Human
uaaaugcaguuaguacuugcca

SEQ ID NO: 1136463 - RNA, 22 nt, Human
caggccucccggugcacacuga

SEQ ID NO: 1136464 - RNA, 22 nt, Human
gccaggggacgcggagcgacga

SEQ ID NO: 1136465 - RNA, 22 nt, Human
gcucccaccuuugcuaucagua

SEQ ID NO: 1136466 - RNA, 22 nt, Human
ugcugccuuagcagccaggcaa

SEQ ID NO: 1136467 - RNA, 22 nt, Human
uuauuuucuccucagaaagugg

SEQ ID NO: 1136468 - RNA, 20 nt, Human
agggcagagggauuacaggc

SEQ ID NO: 1136469 - RNA, 22 nt, Human
cccagcacuuugaauaugucac

SEQ ID NO: 1136470 - RNA, 22 nt, Human
gccugagacagugugguccaau

SEQ ID NO: 1136471 - RNA, 22 nt, Human
ugucccagauacuggacauaga

SEQ ID NO: 1136472 - RNA, 19 nt, Human
augucuguugaauuucaua

SEQ ID NO: 1136473 - RNA, 22 nt, Human
uuauguaauuuguuugcucuuc

SEQ ID NO: 1136474 - RNA, 22 nt, Human
guaggcagauaggagugcagcc

SEQ ID NO: 1136475 - RNA, 22 nt, Human
aggccugucuggggcucagcca

SEQ ID NO: 1136476 - RNA, 22 nt, Human
gcugucugagaacaugguggaa

SEQ ID NO: 1136477 - RNA, 22 nt, Human
aagcuggcaauuaucaaaacug

SEQ ID NO: 1136478 - RNA, 20 nt, Human
ccagagcugauggcugcccg

SEQ ID NO: 1136479 - RNA, 22 nt, Human
gggccacauugaagggugggua

SEQ ID NO: 1136480 - RNA, 21 nt, Human
agacagagugcagucuacaua

SEQ ID NO: 1136481 - RNA, 22 nt, Human
gugccaggugcuaagcugugcu

SEQ ID NO: 1136482 - RNA, 22 nt, Human
gggccccuuguaucucuggcuc

SEQ ID NO: 1136483 - RNA, 22 nt, Human
auauauuuacucuccuguugca

SEQ ID NO: 1136484 - RNA, 22 nt, Human
guacauuuugagguuaaaacaa

SEQ ID NO: 1136485 - RNA, 22 nt, Human
cugaggcucccucgggucugcu

SEQ ID NO: 1136486 - RNA, 22 nt, Human
guggcugcuacagagcuggagg

SEQ ID NO: 1136487 - RNA, 22 nt, Human
augggaggcaggcucagaaccg

SEQ ID NO: 1136488 - RNA, 22 nt, Human
ugggacagagugagcuuuggcc

SEQ ID NO: 1136489 - RNA, 22 nt, Human
aucuggcucuuccuggaguucc

SEQ ID NO: 1136490 - RNA, 22 nt, Human
agcuggagcuucaagcagguaa

SEQ ID NO: 1136491 - RNA, 22 nt, Human
uagaaaguaaaucaguuuuauu

SEQ ID NO: 1136492 - RNA, 22 nt, Human
gcagugaaucuggcaagaauuu

SEQ ID NO: 1136493 - RNA, 22 nt, Human
ccacacagggggaugaguuauu

SEQ ID NO: 1136494 - RNA, 22 nt, Human
ucauugcaccccagucccagcu

SEQ ID NO: 1136495 - RNA, 22 nt, Human
uacaaagccugguagauaucug

SEQ ID NO: 1136496 - RNA, 22 nt, Human
uccuguaguugcuaaguuuguu

SEQ ID NO: 1136497 - RNA, 22 nt, Human
gagcuuggugaugccuccuggu

SEQ ID NO: 1136498 - RNA, 22 nt, Human
gcucaaggcaggcagacaugag

SEQ ID NO: 1136499 - RNA, 22 nt, Human
acagagcauuugggacagagag

SEQ ID NO: 1136500 - RNA, 22 nt, Human
ugucccagacacaguaugcgcu

SEQ ID NO: 1136501 - RNA, 22 nt, Human
cugccucaugcugccugcagcc

SEQ ID NO: 1136502 - RNA, 22 nt, Human
gcauuuaaauuugaacuucaga

SEQ ID NO: 1136503 - RNA, 22 nt, Human
ugcaggggcuugucugggccug

SEQ ID NO: 1136504 - RNA, 17 nt, Human
ggccuuggggccucagu

SEQ ID NO: 1136505 - RNA, 22 nt, Human
ucacagggauggaauagaaaua

SEQ ID NO: 1136506 - RNA, 22 nt, Human
uucacauuggugauauguuucu

SEQ ID NO: 1136507 - RNA, 22 nt, Human
guacaaaguggaccugauagua

SEQ ID NO: 1136508 - RNA, 22 nt, Human
ggacagcccauacacaugucug

SEQ ID NO: 1136509 - RNA, 22 nt, Human
auuauauugaguauaaccagag

SEQ ID NO: 1136510 - RNA, 22 nt, Human
ccacccugagccgcaagagcag

SEQ ID NO: 1136511 - RNA, 22 nt, Human
cugcuuugcauagcugccagag

SEQ ID NO: 1136512 - RNA, 22 nt, Human
gaguaagagcuggcuuuggugu

SEQ ID NO: 1136513 - RNA, 20 nt, Human
ucucaggccccaguuuucuu

SEQ ID NO: 1136514 - RNA, 23 nt, Human
agaggccaacuucuugccccucc

SEQ ID NO: 1136515 - RNA, 22 nt, Human
ucucucagucagaugcuaaaga

SEQ ID NO: 1136516 - RNA, 22 nt, Human
auccccagaaaauaggugccua

SEQ ID NO: 1136517 - RNA, 23 nt, Human
gagagcugacugucaagacuguu

SEQ ID NO: 1136518 - RNA, 22 nt, Human
uugaacauuaacuucagucuau

SEQ ID NO: 1136519 - RNA, 20 nt, Human
uccaauguaggauaaaugug

SEQ ID NO: 1136520 - RNA, 23 nt, Human
uacuuaggaauggggacggcaag

SEQ ID NO: 1136521 - RNA, 22 nt, Human
gcugccucccccauggcuggaa

SEQ ID NO: 1136522 - RNA, 22 nt, Human
caggugggcguggcgagaaggc

SEQ ID NO: 1136523 - RNA, 22 nt, Human
guccuggggaauacagaagccg

SEQ ID NO: 1136524 - RNA, 22 nt, Human
agaggcaggaagagcugauuuu

SEQ ID NO: 1136525 - RNA, 20 nt, Human
guccugggagccacagcaca

SEQ ID NO: 1136526 - RNA, 22 nt, Human
agcccugggaggccagcuugua

SEQ ID NO: 1136527 - RNA, 19 nt, Human
ccagcccugucacuucuug

SEQ ID NO: 1136528 - RNA, 20 nt, Human
uguguguguacuucuaaaua

SEQ ID NO: 1136529 - RNA, 22 nt, Human
cagagccugccucuggcugugg

SEQ ID NO: 1136530 - RNA, 22 nt, Human
aaguuuguucagggcuuacauu

SEQ ID NO: 1136531 - RNA, 21 nt, Human
uucagcaguccucuagagaua

SEQ ID NO: 1136532 - RNA, 22 nt, Human
ugccugccaugcagaaagcuga

SEQ ID NO: 1136533 - RNA, 22 nt, Human
ggcacugagaacaggcugacuu

SEQ ID NO: 1136534 - RNA, 22 nt, Human
cccugcagaccaaugccauaga

SEQ ID NO: 1136535 - RNA, 22 nt, Human
uugaaggaggcuccuuuuuaaa

SEQ ID NO: 1136536 - RNA, 21 nt, Human
aacugcuggucuuuucugucu

SEQ ID NO: 1136537 - RNA, 22 nt, Human
ccacagggauaggaauggggcu

SEQ ID NO: 1136538 - RNA, 22 nt, Human
gcucaggaucagccaccucuuu

SEQ ID NO: 1136539 - RNA, 19 nt, Human
ucccagagucuagagguug

SEQ ID NO: 1136540 - RNA, 22 nt, Human
ggugggcaacauuuggccugag

SEQ ID NO: 1136541 - RNA, 22 nt, Human
agugucauaugccacugcaucc

SEQ ID NO: 1136542 - RNA, 22 nt, Human
guuugcauauuugcacaggaau

SEQ ID NO: 1136543 - RNA, 22 nt, Human
augaugguuguccuaggugcau

SEQ ID NO: 1136544 - RNA, 22 nt, Human
ggggcagaaguagugccccuga

SEQ ID NO: 1136545 - RNA, 22 nt, Human
gccugccuagaauugcagcuuu

SEQ ID NO: 1136546 - RNA, 22 nt, Human
uguuuugucuaauagggcaggu

SEQ ID NO: 1136547 - RNA, 22 nt, Human
ugcagugguugagagcccagac

SEQ ID NO: 1136548 - RNA, 19 nt, Human
uccuccuuacuuccucuug

SEQ ID NO: 1136549 - RNA, 22 nt, Human
ggucccagcugcucaagaggcu

SEQ ID NO: 1136550 - RNA, 22 nt, Human
uggccugguccuugucaaggca

SEQ ID NO: 1136551 - RNA, 22 nt, Human
ggccuugggcagacacgucaca

SEQ ID NO: 1136552 - RNA, 22 nt, Human
uuuuaucaaucauuaagacauu

SEQ ID NO: 1136553 - RNA, 18 nt, Human
uuucacaaccuccagagg

SEQ ID NO: 1136554 - RNA, 19 nt, Human
agcagccauagacaauaug

SEQ ID NO: 1136555 - RNA, 22 nt, Human
guggccugucagaagccguggg

SEQ ID NO: 1136556 - RNA, 22 nt, Human
uguggccaccagagcugcuauu

SEQ ID NO: 1136557 - RNA, 22 nt, Human
ucugcaggacugaggccuguuu

SEQ ID NO: 1136558 - RNA, 23 nt, Human
gugcucugcggucugcuagucug

SEQ ID NO: 1136559 - RNA, 22 nt, Human
acugggccuggauuggcguguc

SEQ ID NO: 1136560 - RNA, 22 nt, Human
gcaaggagacuguagggccaag

SEQ ID NO: 1136561 - RNA, 22 nt, Human
uccugccucuuuucuuauucca

SEQ ID NO: 1136562 - RNA, 22 nt, Human
gcugagaggcacuaucuccgga

SEQ ID NO: 1136563 - RNA, 22 nt, Human
guguccagagaaacucacagcu

SEQ ID NO: 1136564 - RNA, 22 nt, Human
cagcacugcuucgcagccaggg

SEQ ID NO: 1136565 - RNA, 22 nt, Human
ugguggcuguugcagaacugag

SEQ ID NO: 1136566 - RNA, 22 nt, Human
uguaugcaccauuguauuaccu

SEQ ID NO: 1136567 - RNA, 22 nt, Human
gccuggugcuaugagggccagc

SEQ ID NO: 1136568 - RNA, 22 nt, Human
uacuuccagcaaucugcauauu

SEQ ID NO: 1136569 - RNA, 22 nt, Human
ugcagccauuuucugccaaugc

SEQ ID NO: 1136570 - RNA, 22 nt, Human
ucugcgcugccuugauccuugg

SEQ ID NO: 1136571 - RNA, 22 nt, Human
caguuucuuaucuucaaaauug

SEQ ID NO: 1136572 - RNA, 22 nt, Human
guggcuugaccaucccugcuac

SEQ ID NO: 1136573 - RNA, 22 nt, Human
ccagggcaauuauuuggagggu

SEQ ID NO: 1136574 - RNA, 22 nt, Human
acagagccacuuuggugccuac

SEQ ID NO: 1136575 - RNA, 22 nt, Human
gagugaaaaaggaagggccaua

SEQ ID NO: 1136576 - RNA, 22 nt, Human
gugcaggggaucagguugcagc

SEQ ID NO: 1136577 - RNA, 22 nt, Human
agcaaggcagucagcuggcugg

SEQ ID NO: 1136578 - RNA, 20 nt, Human
ccagguggugccuggagagg

SEQ ID NO: 1136579 - RNA, 23 nt, Human
aggcagguuugggcucuucuugu

SEQ ID NO: 1136580 - RNA, 22 nt, Human
ugucugccugcgggccggcaca

SEQ ID NO: 1136581 - RNA, 22 nt, Human
guugaguguugugcaugcacca

SEQ ID NO: 1136582 - RNA, 22 nt, Human
agguggucuuguggaugccgca

SEQ ID NO: 1136583 - RNA, 22 nt, Human
aagugcaggucucagcuacucu

SEQ ID NO: 1136584 - RNA, 22 nt, Human
cgugaugcucaggaggucauag

SEQ ID NO: 1136585 - RNA, 22 nt, Human
gugcugccuccauauccgucag

SEQ ID NO: 1136586 - RNA, 22 nt, Human
guuuuaguggguggccacugau

SEQ ID NO: 1136587 - RNA, 22 nt, Human
gucguucucugccagggcguug

SEQ ID NO: 1136588 - RNA, 22 nt, Human
uugcuugaacccaggaagugga

SEQ ID NO: 1136589 - RNA, 22 nt, Human
auuaguguuguggcuucauggc

SEQ ID NO: 1136590 - RNA, 22 nt, Human
agugacauuauuuuguguacua

SEQ ID NO: 1136591 - RNA, 19 nt, Human
auucuucucuuccugcugu

SEQ ID NO: 1136592 - RNA, 22 nt, Human
ugcccucagcagcagcuccugc

SEQ ID NO: 1136593 - RNA, 21 nt, Human
uugcuguuuucccaaugcagu

SEQ ID NO: 1136594 - RNA, 22 nt, Human
uuuggcgucucucaggagcuca

SEQ ID NO: 1136595 - RNA, 22 nt, Human
cagacucuugagcugauuguau

SEQ ID NO: 1136596 - RNA, 22 nt, Human
auggaguucugccagcgcugcu

SEQ ID NO: 1136597 - RNA, 22 nt, Human
aggcucucucugccagccgugc

SEQ ID NO: 1136598 - RNA, 22 nt, Human
caggaaugccaaccagugcaug

SEQ ID NO: 1136599 - RNA, 22 nt, Human
cagagcagaaaccugggugauu

SEQ ID NO: 1136600 - RNA, 19 nt, Human
ccugcugaagugaugcagc

SEQ ID NO: 1136601 - RNA, 22 nt, Human
guuucuccucugugucuuguuu

SEQ ID NO: 1136602 - RNA, 20 nt, Human
ugugugaauuagggcauguu

SEQ ID NO: 1136603 - RNA, 22 nt, Human
ucaugcaccucuccaugucccc

SEQ ID NO: 1136604 - RNA, 22 nt, Human
cacauuuaaagguugaagcuga

SEQ ID NO: 1136605 - RNA, 22 nt, Human
auguuguugaacucuuugcaug

SEQ ID NO: 1136606 - RNA, 22 nt, Human
auaguguguaaagugcagugau

SEQ ID NO: 1136607 - RNA, 23 nt, Human
gaaguucuguucagccagacaag

SEQ ID NO: 1136608 - RNA, 20 nt, Human
cuuguuaaauaugcagguag

SEQ ID NO: 1136609 - RNA, 22 nt, Human
ucuccucuauuucuguauguau

SEQ ID NO: 1136610 - RNA, 22 nt, Human
uugaccacugaaugguucugaa

SEQ ID NO: 1136611 - RNA, 22 nt, Human
cagcaugaauguguucguaggg

SEQ ID NO: 1136612 - RNA, 22 nt, Human
uuucuucucacccaggacagag

SEQ ID NO: 1136613 - RNA, 22 nt, Human
uccuuggagaaucuuguuuuac

SEQ ID NO: 1136614 - RNA, 22 nt, Human
cuucauuuggcaggcuggccuc

SEQ ID NO: 1136615 - RNA, 22 nt, Human
cccguguggaugcgcuggugcu

SEQ ID NO: 1136616 - RNA, 22 nt, Human
caaugcagauaccuuccagaga

SEQ ID NO: 1136617 - RNA, 22 nt, Human
ccaggcagccaagugugugugu

SEQ ID NO: 1136618 - RNA, 22 nt, Human
agggcccaccuuggugcugagg

SEQ ID NO: 1136619 - RNA, 23 nt, Human
uuguucuuggaucuuccugaagc

SEQ ID NO: 1136620 - RNA, 22 nt, Human
gugggccugaugcugccaugag

SEQ ID NO: 1136621 - RNA, 20 nt, Human
ugugguuuuugccaguugaa

SEQ ID NO: 1136622 - RNA, 19 nt, Human
ugguucuccuuccacaguc

SEQ ID NO: 1136623 - RNA, 22 nt, Human
uuccuuggaaagagacgucgcu

SEQ ID NO: 1136624 - RNA, 22 nt, Human
ugaggauggaaugcugugcaag

SEQ ID NO: 1136625 - RNA, 22 nt, Human
cacagcuucuccccgcugcggc

SEQ ID NO: 1136626 - RNA, 22 nt, Human
gcuuccuucuaccacaucaugc

SEQ ID NO: 1136627 - RNA, 22 nt, Human
gauggugcaggugaagugcugg

SEQ ID NO: 1136628 - RNA, 22 nt, Human
ggaaugcacuagacugugaaac

SEQ ID NO: 1136629 - RNA, 22 nt, Human
uguggguccuccugugugcccg

SEQ ID NO: 1136630 - RNA, 21 nt, Human
cugcacugugauuuaaaaugu

SEQ ID NO: 1136631 - RNA, 22 nt, Human
ugugguuuugguucagaaacaa

SEQ ID NO: 1136632 - RNA, 22 nt, Human
ucagccagaggcuucuugguuu

SEQ ID NO: 1136633 - RNA, 22 nt, Human
cucggaauggaacaacagcggu

SEQ ID NO: 1136634 - RNA, 18 nt, Human
cuuuagcugucaucuuug

SEQ ID NO: 1136635 - RNA, 22 nt, Human
uugcaggucuggggguccuggu

SEQ ID NO: 1136636 - RNA, 22 nt, Human
cuagcagcauucuucuaguuag

SEQ ID NO: 1136637 - RNA, 22 nt, Human
caauuuuuaaacuaugaaguug

SEQ ID NO: 1136638 - RNA, 22 nt, Human
ugaguguuguaaccauaugauu

SEQ ID NO: 1136639 - RNA, 22 nt, Human
uaacauuucggugacaguggga

SEQ ID NO: 1136640 - RNA, 22 nt, Human
auccuucaaaaggaauagcagg

SEQ ID NO: 1136641 - RNA, 22 nt, Human
ggcuuccuccuuccugcuguca

SEQ ID NO: 1136642 - RNA, 22 nt, Human
ucaagcggacugagauacucug

SEQ ID NO: 1136643 - RNA, 19 nt, Human
ugcagcuguaugagcuuaa

SEQ ID NO: 1136644 - RNA, 22 nt, Human
ccugguuugggugccagugagu

SEQ ID NO: 1136645 - RNA, 22 nt, Human
cugggcccacgagggcucuggg

SEQ ID NO: 1136646 - RNA, 22 nt, Human
cuuccucuguggccagagugua

SEQ ID NO: 1136647 - RNA, 22 nt, Human
guucuccaggggcuguucaucu

SEQ ID NO: 1136648 - RNA, 22 nt, Human
aauaguguauuuuucaaaauua

SEQ ID NO: 1136649 - RNA, 22 nt, Human
agcccucucccuuucuucuuag

SEQ ID NO: 1136650 - RNA, 22 nt, Human
aguguucuagcgcugugcuugu

SEQ ID NO: 1136651 - RNA, 22 nt, Human
gccuggcgccgggcugccuguc

SEQ ID NO: 1136652 - RNA, 19 nt, Human
agcagccaucgaccaugga

SEQ ID NO: 1136653 - RNA, 22 nt, Human
ggugaccagggucaguagcuuu

SEQ ID NO: 1136654 - RNA, 22 nt, Human
cuccuucacgcaggcugccaug

SEQ ID NO: 1136655 - RNA, 22 nt, Human
agcuccugaaaauccagacugg

SEQ ID NO: 1136656 - RNA, 22 nt, Human
ccccuuucucccgcgucuggcc

SEQ ID NO: 1136657 - RNA, 22 nt, Human
augugauacuccuucuagugga

SEQ ID NO: 1136658 - RNA, 19 nt, Human
aguguuuauguagugccua

SEQ ID NO: 1136659 - RNA, 20 nt, Human
ucugugugccaucaccuaac

SEQ ID NO: 1136660 - RNA, 22 nt, Human
uuuccaaggaugugucucucua

SEQ ID NO: 1136661 - RNA, 22 nt, Human
aagccuuccugagugcaaggcc

SEQ ID NO: 1136662 - RNA, 22 nt, Human
aucgaguucugaugucccuucu

SEQ ID NO: 1136663 - RNA, 22 nt, Human
aagccuucaguccguugcagag

SEQ ID NO: 1136664 - RNA, 22 nt, Human
auauaaguguguggcuguuagu

SEQ ID NO: 1136665 - RNA, 22 nt, Human
gcagcuuuggagguggaacucu

SEQ ID NO: 1136666 - RNA, 22 nt, Human
auauguggcauuauuucugagg

SEQ ID NO: 1136667 - RNA, 22 nt, Human
ggucagugccuaucaugugggc

SEQ ID NO: 1136668 - RNA, 22 nt, Human
agcggcgccggagggaggugcg

SEQ ID NO: 1136669 - RNA, 22 nt, Human
ggcagcugaagaggaacuuugg

SEQ ID NO: 1136670 - RNA, 22 nt, Human
ucucauacguuuccagguguca

SEQ ID NO: 1136671 - RNA, 22 nt, Human
caguuuuaugaaugcuuauuag

SEQ ID NO: 1136672 - RNA, 22 nt, Human
uagcuguucucuguaaauugga

SEQ ID NO: 1136673 - RNA, 22 nt, Human
uuaugcaaaggggccucuuccu

SEQ ID NO: 1136674 - RNA, 22 nt, Human
uugcuuuauuccuagcccuugu

SEQ ID NO: 1136675 - RNA, 22 nt, Human
acaguguuacuugauaguguau

SEQ ID NO: 1136676 - RNA, 22 nt, Human
aagcagccagccaucaugcccg

SEQ ID NO: 1136677 - RNA, 22 nt, Human
gcuucucauguuuauuuuuaca

SEQ ID NO: 1136678 - RNA, 22 nt, Human
ucuccucuccuuucauguuguu

SEQ ID NO: 1136679 - RNA, 21 nt, Human
uggacauuuacccuucaggga

SEQ ID NO: 1136680 - RNA, 22 nt, Human
guucuucagauuccauuucagu

SEQ ID NO: 1136681 - RNA, 22 nt, Human
ucugagugggaacucucaugac

SEQ ID NO: 1136682 - RNA, 22 nt, Human
acugugugccaggcgcuggucu

SEQ ID NO: 1136683 - RNA, 22 nt, Human
ccugguuuaaugcucacuguug

SEQ ID NO: 1136684 - RNA, 22 nt, Human
agacugugagaagauggcugcg

SEQ ID NO: 1136685 - RNA, 22 nt, Human
ccaggcagccugcuccauucug

SEQ ID NO: 1136686 - RNA, 22 nt, Human
ugguuuguauauguuugugaga

SEQ ID NO: 1136687 - RNA, 22 nt, Human
ggcagucuuucccuugagcucu

SEQ ID NO: 1136688 - RNA, 22 nt, Human
uuuguugguugcacuggugggu

SEQ ID NO: 1136689 - RNA, 22 nt, Human
uauagugucucuagaucaaaga

SEQ ID NO: 1136690 - RNA, 22 nt, Human
uuuaggcucaaaagaguuggug

SEQ ID NO: 1136691 - RNA, 22 nt, Human
agcggcgccgagcuuggccagg

SEQ ID NO: 1136692 - RNA, 22 nt, Human
ugcucagaauugcgcuggugga

SEQ ID NO: 1136693 - RNA, 22 nt, Human
uccuucaaucacccagugggga

SEQ ID NO: 1136694 - RNA, 22 nt, Human
aaagcagcagcacguggaagag

SEQ ID NO: 1136695 - RNA, 22 nt, Human
ugugugaacucucugauguaca

SEQ ID NO: 1136696 - RNA, 22 nt, Human
gaguuucuucauggugcagagg

SEQ ID NO: 1136697 - RNA, 22 nt, Human
caguuuuacccaagcuuauuuu

SEQ ID NO: 1136698 - RNA, 20 nt, Human
ugugggccuucggcgugcuc

SEQ ID NO: 1136699 - RNA, 18 nt, Human
gaaggcauucaguggcuu

SEQ ID NO: 1136700 - RNA, 22 nt, Human
auaaugacauucuuagacugga

SEQ ID NO: 1136701 - RNA, 22 nt, Human
ccaggcccugcuccucacacca

SEQ ID NO: 1136702 - RNA, 22 nt, Human
ccagcccuuagauaaaccuggc

SEQ ID NO: 1136703 - RNA, 19 nt, Human
ccagucccauacaggagau

SEQ ID NO: 1136704 - RNA, 22 nt, Human
ucuggcagcagcaucaguggcu

SEQ ID NO: 1136705 - RNA, 22 nt, Human
cuccuggcaggcugagugaaau

SEQ ID NO: 1136706 - RNA, 22 nt, Human
uccaggaggaggaaggcugcca

SEQ ID NO: 1136707 - RNA, 22 nt, Human
gcuggcaguuuccucaccgagg

SEQ ID NO: 1136708 - RNA, 19 nt, Human
ccuuccuccccagggccau

SEQ ID NO: 1136709 - RNA, 22 nt, Human
agggagacacaugaggaaguca

SEQ ID NO: 1136710 - RNA, 22 nt, Human
uggcaucuccgacagucuugau

SEQ ID NO: 1136711 - RNA, 20 nt, Human
aaaagagugcuucaacugcu

SEQ ID NO: 1136712 - RNA, 22 nt, Human
gccuccggagucacagugucuu

SEQ ID NO: 1136713 - RNA, 22 nt, Human
ggcaaggggucaggcugagaca

SEQ ID NO: 1136714 - RNA, 22 nt, Human
uuccaggcuauccggugaaggg

SEQ ID NO: 1136715 - RNA, 22 nt, Human
gccccaccuugagagcagaaac

SEQ ID NO: 1136716 - RNA, 22 nt, Human
cuggccucauagccaagcugug

SEQ ID NO: 1136717 - RNA, 21 nt, Human
ucuggcaguggucuuucaaau

SEQ ID NO: 1136718 - RNA, 22 nt, Human
ccaggcccaggguacugaccaa

SEQ ID NO: 1136719 - RNA, 22 nt, Human
ucaggcccagagucacggaucc

SEQ ID NO: 1136720 - RNA, 22 nt, Human
aggaggcugcaacccugaggcc

SEQ ID NO: 1136721 - RNA, 20 nt, Human
acuggcagccugccugcugu

SEQ ID NO: 1136722 - RNA, 22 nt, Human
gccuggcaggggccugggagug

SEQ ID NO: 1136723 - RNA, 23 nt, Human
uuggagagggugaguagugucag

SEQ ID NO: 1136724 - RNA, 22 nt, Human
guccuggcccaggaguacacau

SEQ ID NO: 1136725 - RNA, 22 nt, Human
ugggagaaacugucucucccac

SEQ ID NO: 1136726 - RNA, 22 nt, Human
ccugccucccagagguccucua

SEQ ID NO: 1136727 - RNA, 22 nt, Human
aggccacaguacuuugcagacc

SEQ ID NO: 1136728 - RNA, 22 nt, Human
ucuggcagugagcaacuugaca

SEQ ID NO: 1136729 - RNA, 22 nt, Human
gguucccggaucuccgaguccc

SEQ ID NO: 1136730 - RNA, 22 nt, Human
ucuggcagaggaaggaggccug

SEQ ID NO: 1136731 - RNA, 22 nt, Human
ccuccuggcuuuucccauugaa

SEQ ID NO: 1136732 - RNA, 22 nt, Human
ccuggcaggccccuccuggauu

SEQ ID NO: 1136733 - RNA, 22 nt, Human
uuccaggcaugucagacauagg

SEQ ID NO: 1136734 - RNA, 22 nt, Human
gaccugccugagcugccucugc

SEQ ID NO: 1136735 - RNA, 22 nt, Human
uacaaaaggaagagggaucuua

SEQ ID NO: 1136736 - RNA, 22 nt, Human
ggugccagugggucucaggaua

SEQ ID NO: 1136737 - RNA, 22 nt, Human
acuggcagagguuggacaccau

SEQ ID NO: 1136738 - RNA, 23 nt, Human
uuccaggcagagcagggauuaga

SEQ ID NO: 1136739 - RNA, 22 nt, Human
uauuacagaaucaggcauaacu

SEQ ID NO: 1136740 - RNA, 22 nt, Human
cccaggccagaacuugguugcu

SEQ ID NO: 1136741 - RNA, 22 nt, Human
ccacccuaacaauccuuacugu

SEQ ID NO: 1136742 - RNA, 22 nt, Human
ucuggcaguggaugagggcagc

SEQ ID NO: 1136743 - RNA, 22 nt, Human
gcuccaggugucccagguaaaa

SEQ ID NO: 1136744 - RNA, 22 nt, Human
uccaggcuagguuuacaggaca

SEQ ID NO: 1136745 - RNA, 22 nt, Human
acuggcaguggcagcagaaaga

SEQ ID NO: 1136746 - RNA, 21 nt, Human
cccuugccugcacuccucggc

SEQ ID NO: 1136747 - RNA, 20 nt, Human
gcuggcagaugucuugagau

SEQ ID NO: 1136748 - RNA, 22 nt, Human
cuugggaaugcuaacagaugac

SEQ ID NO: 1136749 - RNA, 22 nt, Human
uuggagagauuuaggucucagu

SEQ ID NO: 1136750 - RNA, 22 nt, Human
ugccucucuaacccaugcccaa

SEQ ID NO: 1136751 - RNA, 22 nt, Human
ucuggcagcucaguucaggucu

SEQ ID NO: 1136752 - RNA, 22 nt, Human
cccugccucugaagcugcucag

SEQ ID NO: 1136753 - RNA, 22 nt, Human
gugugggaaggcuaggaugcug

SEQ ID NO: 1136754 - RNA, 22 nt, Human
acagguggggcacuuggagccu

SEQ ID NO: 1136755 - RNA, 22 nt, Human
guugggaaggugaacaugaugc

SEQ ID NO: 1136756 - RNA, 22 nt, Human
cucucuccuuagcugcagacca

SEQ ID NO: 1136757 - RNA, 22 nt, Human
acuggcagcuguaggaugcaug

SEQ ID NO: 1136758 - RNA, 22 nt, Human
gcccucucuucugcagccucca

SEQ ID NO: 1136759 - RNA, 22 nt, Human
ccuggcagacagcacugaagcu

SEQ ID NO: 1136760 - RNA, 22 nt, Human
uccugccuguuuaccuguacuu

SEQ ID NO: 1136761 - RNA, 22 nt, Human
ccuggcaguggugaagaagagg

SEQ ID NO: 1136762 - RNA, 18 nt, Human
uccuggcagucagagagg

SEQ ID NO: 1136763 - RNA, 22 nt, Human
aggcugcuucagcugcagggag

SEQ ID NO: 1136764 - RNA, 22 nt, Human
guugggaagcagauggaugagc

SEQ ID NO: 1136765 - RNA, 22 nt, Human
acuggcagguccaucgcccuuu

SEQ ID NO: 1136766 - RNA, 22 nt, Human
acuggcagggggagccccgaga

SEQ ID NO: 1136767 - RNA, 22 nt, Human
ucuggcaguugccgcuucaguc

SEQ ID NO: 1136768 - RNA, 19 nt, Human
acuggcagggcugcggugg

SEQ ID NO: 1136769 - RNA, 22 nt, Human
gaaaagaguccugugugaggag

SEQ ID NO: 1136770 - RNA, 22 nt, Human
gaggagcugggacccugucauc

SEQ ID NO: 1136771 - RNA, 22 nt, Human
caugagauaauuuuucuccagu

SEQ ID NO: 1136772 - RNA, 22 nt, Human
ggagcugaaggggugggcucag

SEQ ID NO: 1136773 - RNA, 22 nt, Human
cccgagugucuacucacuccca

SEQ ID NO: 1136774 - RNA, 22 nt, Human
ugcacaggugagacucaggaag

SEQ ID NO: 1136775 - RNA, 22 nt, Human
gcuggcaggagaccauacccua

SEQ ID NO: 1136776 - RNA, 22 nt, Human
ccuggcugguggcagcgacaag

SEQ ID NO: 1136777 - RNA, 22 nt, Human
cucaccccacuaccccuuggug

SEQ ID NO: 1136778 - RNA, 22 nt, Human
ucccagccacaguuuccaccug

SEQ ID NO: 1136779 - RNA, 22 nt, Human
ucccuccccacuucugagcuuu

SEQ ID NO: 1136780 - RNA, 17 nt, Human
uugggagagaaagguau

SEQ ID NO: 1136781 - RNA, 22 nt, Human
gcagccucaaacuccccagcuc

SEQ ID NO: 1136782 - RNA, 18 nt, Human
uccugccugugccccagg

SEQ ID NO: 1136783 - RNA, 22 nt, Human
aggggugugcauccuggaggau

SEQ ID NO: 1136784 - RNA, 22 nt, Human
aggaaagauggaaggaggauaa

SEQ ID NO: 1136785 - RNA, 22 nt, Human
gcuggcaggguucucacugaaa

SEQ ID NO: 1136786 - RNA, 22 nt, Human
ccuggcagcaggugggcccgug

SEQ ID NO: 1136787 - RNA, 22 nt, Human
gcuccaggaggaugaccuuccu

SEQ ID NO: 1136788 - RNA, 22 nt, Human
cuccugaggacuucuauugggu

SEQ ID NO: 1136789 - RNA, 22 nt, Human
gaagagaaaggcaaggaguuuu

SEQ ID NO: 1136790 - RNA, 22 nt, Human
cucugagcagaggccguggcua

SEQ ID NO: 1136791 - RNA, 22 nt, Human
cuggcacgcccacguaggcacu

SEQ ID NO: 1136792 - RNA, 22 nt, Human
acccacccuacuagcagugucc

SEQ ID NO: 1136793 - RNA, 22 nt, Human
aggaggcuuuugcaggugccac

SEQ ID NO: 1136794 - RNA, 19 nt, Human
uccuggcauuuguaggaaa

SEQ ID NO: 1136795 - RNA, 19 nt, Human
ugccuggcaccagcuccac

SEQ ID NO: 1136796 - RNA, 22 nt, Human
cugagcagugguucuugagcgc

SEQ ID NO: 1136797 - RNA, 22 nt, Human
ucaggagcucuucccuggugug

SEQ ID NO: 1136798 - RNA, 22 nt, Human
agacacagcugcaggagguggg

SEQ ID NO: 1136799 - RNA, 22 nt, Human
uuggaaaguuuuuacugaagac

SEQ ID NO: 1136800 - RNA, 22 nt, Human
ugagggacucccggcccugcca

SEQ ID NO: 1136801 - RNA, 21 nt, Human
aaagagcccgcugagagguuc

SEQ ID NO: 1136802 - RNA, 22 nt, Human
uccuggcacuuugggggcucgc

SEQ ID NO: 1136803 - RNA, 23 nt, Human
cauccaggagcugagucugacug

SEQ ID NO: 1136804 - RNA, 22 nt, Human
acaggugguagaguggaaagag

SEQ ID NO: 1136805 - RNA, 22 nt, Human
ccuggcagcuaagugcuuugag

SEQ ID NO: 1136806 - RNA, 22 nt, Human
cuuggcaggguggaggaugcag

SEQ ID NO: 1136807 - RNA, 22 nt, Human
agcacagggacaaugccaggug

SEQ ID NO: 1136808 - RNA, 22 nt, Human
ccuggcaguuuugcccaggauu

SEQ ID NO: 1136809 - RNA, 22 nt, Human
uccaggcaaaaaccaacuacag

SEQ ID NO: 1136810 - RNA, 22 nt, Human
gaggagcuguucccucaccucu

SEQ ID NO: 1136811 - RNA, 22 nt, Human
agccagggucucucgcucuguu

SEQ ID NO: 1136812 - RNA, 22 nt, Human
ccccacccaccuaagagaaacu

SEQ ID NO: 1136813 - RNA, 22 nt, Human
gccuggcaggccuguuggggcu

SEQ ID NO: 1136814 - RNA, 22 nt, Human
uucuuucaauagcuggcauaug

SEQ ID NO: 1136815 - RNA, 22 nt, Human
acuggcagagggaaaaccauuc

SEQ ID NO: 1136816 - RNA, 22 nt, Human
ugggacucacucuuuuggccag

SEQ ID NO: 1136817 - RNA, 22 nt, Human
ucuggcaggucaaucauucuuu

SEQ ID NO: 1136818 - RNA, 22 nt, Human
ucuggcaggguguguauuuaca

SEQ ID NO: 1136819 - RNA, 22 nt, Human
ucccaccccggucaagggcuga

SEQ ID NO: 1136820 - RNA, 22 nt, Human
ccuggcagcccagagcgccgcu

SEQ ID NO: 1136821 - RNA, 22 nt, Human
ucuggcagguucccauguuaug

SEQ ID NO: 1136822 - RNA, 22 nt, Human
uccugagccugacaaucaccau

SEQ ID NO: 1136823 - RNA, 20 nt, Human
ugccuggccuuucucugccc

SEQ ID NO: 1136824 - RNA, 18 nt, Human
acaggcugugggaauggu

SEQ ID NO: 1136825 - RNA, 22 nt, Human
agcacaggaacauggagauggg

SEQ ID NO: 1136826 - RNA, 17 nt, Human
gcccacccuuaggagcu

SEQ ID NO: 1136827 - RNA, 22 nt, Human
ucccugccugacagcacccacc

SEQ ID NO: 1136828 - RNA, 22 nt, Human
ccucucccgggugccgcugggc

SEQ ID NO: 1136829 - RNA, 22 nt, Human
gacucugggcugagccagggcc

SEQ ID NO: 1136830 - RNA, 22 nt, Human
uccuggcagggucuaggucuag

SEQ ID NO: 1136831 - RNA, 22 nt, Human
ccuccagcgcgauccacuccgg

SEQ ID NO: 1136832 - RNA, 22 nt, Human
uuccuggcagaggccccgacag

SEQ ID NO: 1136833 - RNA, 22 nt, Human
uggcagugucuuaucaggagug

SEQ ID NO: 1136834 - RNA, 22 nt, Human
uugggaaguuuaaugacagacu

SEQ ID NO: 1136835 - RNA, 22 nt, Human
guccacagagggcugggcaggc

SEQ ID NO: 1136836 - RNA, 22 nt, Human
uccugagcaacacagcuaagug

SEQ ID NO: 1136837 - RNA, 22 nt, Human
gcugcgccggaucccacguucc

SEQ ID NO: 1136838 - RNA, 22 nt, Human
gacaaaaguguuuugaacaagg

SEQ ID NO: 1136839 - RNA, 22 nt, Human
gaggacucugggcguguauggg

SEQ ID NO: 1136840 - RNA, 22 nt, Human
gcuggcagagacaagaagacua

SEQ ID NO: 1136841 - RNA, 22 nt, Human
gucuggaaggaggagauggagc

SEQ ID NO: 1136842 - RNA, 22 nt, Human
ccuggcagacugugagggcagg

SEQ ID NO: 1136843 - RNA, 22 nt, Human
ccagcccuugcugaaggguggc

SEQ ID NO: 1136844 - RNA, 22 nt, Human
gacuguggggggcggacacaag

SEQ ID NO: 1136845 - RNA, 22 nt, Human
uucauugcaguucuucagguua

SEQ ID NO: 1136846 - RNA, 21 nt, Human
ccuagccucuuacccagcuuu

SEQ ID NO: 1136847 - RNA, 22 nt, Human
aggcuggauuuauggggacuuc

SEQ ID NO: 1136848 - RNA, 22 nt, Human
gcuggcaguaaaggguuuggca

SEQ ID NO: 1136849 - RNA, 22 nt, Human
cuggcaggagcauucacagagg

SEQ ID NO: 1136850 - RNA, 22 nt, Human
uggcaguagauccagucucucu

SEQ ID NO: 1136851 - RNA, 22 nt, Human
aagagcacuaacagagcugaua

SEQ ID NO: 1136852 - RNA, 22 nt, Human
cuccuggcucgcccccagcuga

SEQ ID NO: 1136853 - RNA, 22 nt, Human
ggaggacaggggcugcagcaca

SEQ ID NO: 1136854 - RNA, 22 nt, Human
cagugggggggccaugcugcag

SEQ ID NO: 1136855 - RNA, 22 nt, Human
ggccucucagggcagagacccu

SEQ ID NO: 1136856 - RNA, 22 nt, Human
cuuacaaauacacuuaggagag

SEQ ID NO: 1136857 - RNA, 22 nt, Human
ccuggcaggacuguuguaagaa

SEQ ID NO: 1136858 - RNA, 22 nt, Human
ccuggcagguagcauugaggag

SEQ ID NO: 1136859 - RNA, 22 nt, Human
gaaagacuuccuuugagaguac

SEQ ID NO: 1136860 - RNA, 22 nt, Human
auccuggcccagguguggaggg

SEQ ID NO: 1136861 - RNA, 19 nt, Human
cagcccucuuaccacugug

SEQ ID NO: 1136862 - RNA, 22 nt, Human
gagggugucugcguaacuggca

SEQ ID NO: 1136863 - RNA, 22 nt, Human
uggcaguggauaggggagcggu

SEQ ID NO: 1136864 - RNA, 22 nt, Human
ccucccuucaguagagcccaau

SEQ ID NO: 1136865 - RNA, 19 nt, Human
uccuggcacaguggaacca

SEQ ID NO: 1136866 - RNA, 19 nt, Human
agaggccucagcagcuggc

SEQ ID NO: 1136867 - RNA, 21 nt, Human
aggcugcuggcucaggguccu

SEQ ID NO: 1136868 - RNA, 22 nt, Human
uggccucugggaaagcagauuc

SEQ ID NO: 1136869 - RNA, 22 nt, Human
uuccaggccgggcaggaaacac

SEQ ID NO: 1136870 - RNA, 22 nt, Human
gagaggcuggcagugccagguu

SEQ ID NO: 1136871 - RNA, 22 nt, Human
ccuggcagcgugccgagcugcg

SEQ ID NO: 1136872 - RNA, 20 nt, Human
ucuggcaggugaacgagcug

SEQ ID NO: 1136873 - RNA, 22 nt, Human
ucuugggauagugucucauggc

SEQ ID NO: 1136874 - RNA, 22 nt, Human
aaaagagucuuaggcagucaua

SEQ ID NO: 1136875 - RNA, 22 nt, Human
aaaagagugacugauaaguaua

SEQ ID NO: 1136876 - RNA, 22 nt, Human
uccuggcagaaauggggcugug

SEQ ID NO: 1136877 - RNA, 22 nt, Human
ggaggacacuggcucugccuuc

SEQ ID NO: 1136878 - RNA, 22 nt, Human
aggcaguggagcuggaauaggc

SEQ ID NO: 1136879 - RNA, 18 nt, Human
acucugcggaggccccag

SEQ ID NO: 1136880 - RNA, 22 nt, Human
gcuggcaguguauuguuagcug

SEQ ID NO: 1136881 - RNA, 22 nt, Human
ucaggcccuucucccaggacuc

SEQ ID NO: 1136882 - RNA, 22 nt, Human
cccugagcucaggcccuugggg

SEQ ID NO: 1136883 - RNA, 22 nt, Human
gcuggcagaauuucuucuugcu

SEQ ID NO: 1136884 - RNA, 22 nt, Human
acuggcagaacuggugauuguc

SEQ ID NO: 1136885 - RNA, 17 nt, Human
gccuucucugcccucac

SEQ ID NO: 1136886 - RNA, 22 nt, Human
uccucuccaugucucacgccac

SEQ ID NO: 1136887 - RNA, 22 nt, Human
uccacccugcuuuugucuuuga

SEQ ID NO: 1136888 - RNA, 22 nt, Human
cccagcccacgguccugggugg

SEQ ID NO: 1136889 - RNA, 22 nt, Human
uccaggcucuaggcugcucucc

SEQ ID NO: 1136890 - RNA, 22 nt, Human
guugggaaggcaagaaguagaa

SEQ ID NO: 1136891 - RNA, 22 nt, Human
cugcaggacgaccgccucaucu

SEQ ID NO: 1136892 - RNA, 22 nt, Human
uccaggccauugacugcauccu

SEQ ID NO: 1136893 - RNA, 22 nt, Human
agcacaggcuuuggugugaggg

SEQ ID NO: 1136894 - RNA, 22 nt, Human
guggcaguuuugacaucacaaa

SEQ ID NO: 1136895 - RNA, 22 nt, Human
cccuuccugggugucccggagu

SEQ ID NO: 1136896 - RNA, 22 nt, Human
cccagccugugacagccguccu

SEQ ID NO: 1136897 - RNA, 22 nt, Human
uccuggcaguaauuugauguug

SEQ ID NO: 1136898 - RNA, 22 nt, Human
uggcaggaaaguaacagagcac

SEQ ID NO: 1136899 - RNA, 22 nt, Human
cagguuggggacuuaggaugac

SEQ ID NO: 1136900 - RNA, 22 nt, Human
ugcacaggaggcuguggagaag

SEQ ID NO: 1136901 - RNA, 22 nt, Human
gcuggcagccaagugaagaggg

SEQ ID NO: 1136902 - RNA, 22 nt, Human
agaggccugugugcuccagugg

SEQ ID NO: 1136903 - RNA, 22 nt, Human
cuccaggccauggcugcggagg

SEQ ID NO: 1136904 - RNA, 21 nt, Human
agagucugagugugcaagggc

SEQ ID NO: 1136905 - RNA, 22 nt, Human
ggagcugaguucuucagccggg

SEQ ID NO: 1136906 - RNA, 22 nt, Human
aaaaagucugcaaaggagguug

SEQ ID NO: 1136907 - RNA, 20 nt, Human
agggcugagaagggacuagc

SEQ ID NO: 1136908 - RNA, 22 nt, Human
ucuggcagagugauaggauaag

SEQ ID NO: 1136909 - RNA, 22 nt, Human
uccuggcauccgugggucugug

SEQ ID NO: 1136910 - RNA, 22 nt, Human
uccugagcugccgcaucagcag

SEQ ID NO: 1136911 - RNA, 22 nt, Human
ccuggcaggcuggggacagugc

SEQ ID NO: 1136912 - RNA, 22 nt, Human
ccuggcagcuccuccccggcgg

SEQ ID NO: 1136913 - RNA, 22 nt, Human
uguggggaagaguaugacuugg

SEQ ID NO: 1136914 - RNA, 22 nt, Human
auccaggccccaagaccccgac

SEQ ID NO: 1136915 - RNA, 22 nt, Human
ggggcugagucagugggaagag

SEQ ID NO: 1136916 - RNA, 22 nt, Human
gccucaggccgcccugcugcuc

SEQ ID NO: 1136917 - RNA, 22 nt, Human
acuggcagcagcagcccuuggg

SEQ ID NO: 1136918 - RNA, 22 nt, Human
uuggaacaugccgggguccagg

SEQ ID NO: 1136919 - RNA, 19 nt, Human
guccucucaacaacccggg

SEQ ID NO: 1136920 - RNA, 19 nt, Human
acuggcagcuguagucugu

SEQ ID NO: 1136921 - RNA, 22 nt, Human
ucuggcagggucagggcccagg

SEQ ID NO: 1136922 - RNA, 22 nt, Human
gccuggcaauggccucaggaag

SEQ ID NO: 1136923 - RNA, 22 nt, Human
caggagggcccgagacucuucc

SEQ ID NO: 1136924 - RNA, 22 nt, Human
ggcagagguagcuggaaccagg

SEQ ID NO: 1136925 - RNA, 22 nt, Human
ggagcugaaccccaucgugcug

SEQ ID NO: 1136926 - RNA, 22 nt, Human
ucccuccuggccgucaccgcug

SEQ ID NO: 1136927 - RNA, 22 nt, Human
ucuggcaguuugagaaaggcua

SEQ ID NO: 1136928 - RNA, 22 nt, Human
ugccugacugcugccaccacua

SEQ ID NO: 1136929 - RNA, 22 nt, Human
uuccuggcauagagagggcaca

SEQ ID NO: 1136930 - RNA, 22 nt, Human
gaggagcuggcagcgucuccgc

SEQ ID NO: 1136931 - RNA, 22 nt, Human
uuccuggccuaagguaggugac

SEQ ID NO: 1136932 - RNA, 22 nt, Human
cccugagcgugaggaggaagua

SEQ ID NO: 1136933 - RNA, 18 nt, Human
ccuagccuccaagcucau

SEQ ID NO: 1136934 - RNA, 20 nt, Human
aagagucuuuacugagcuaa

SEQ ID NO: 1136935 - RNA, 18 nt, Human
ggcagggaaaagauaggg

SEQ ID NO: 1136936 - RNA, 22 nt, Human
ccugaccuauuuuucucagcug

SEQ ID NO: 1136937 - RNA, 22 nt, Human
cccuuccucccaggcuucugug

SEQ ID NO: 1136938 - RNA, 22 nt, Human
uccacccugcuuucuuaucucc

SEQ ID NO: 1136939 - RNA, 22 nt, Human
agacacagucugucuggaggag

SEQ ID NO: 1136940 - RNA, 21 nt, Human
agaugcugaugcugcaggucc

SEQ ID NO: 1136941 - RNA, 22 nt, Human
gaggagcugcagggggagucua

SEQ ID NO: 1136942 - RNA, 22 nt, Human
gccgggaccaaggccacggagc

SEQ ID NO: 1136943 - RNA, 22 nt, Human
gggccccuuguaucucuggcuc

SEQ ID NO: 1136944 - RNA, 22 nt, Human
cuccuggcaguuccccuuguca

SEQ ID NO: 1136945 - RNA, 22 nt, Human
gcuggcagggugguugagagag

SEQ ID NO: 1136946 - RNA, 22 nt, Human
uuccaggcuucucuggggcguc

SEQ ID NO: 1136947 - RNA, 22 nt, Human
uggccugccacugccacgccac

SEQ ID NO: 1136948 - RNA, 22 nt, Human
cuccaggccccuggccuucugc

SEQ ID NO: 1136949 - RNA, 22 nt, Human
ucccagccuuccagucugguuu

SEQ ID NO: 1136950 - RNA, 22 nt, Human
cccacccucaagggugucuaua

SEQ ID NO: 1136951 - RNA, 22 nt, Human
agggccccauagucacugcccg

SEQ ID NO: 1136952 - RNA, 22 nt, Human
gcuggcagggacagcugcgugu

SEQ ID NO: 1136953 - RNA, 22 nt, Human
ugguaagaacccaucagagaag

SEQ ID NO: 1136954 - RNA, 22 nt, Human
cccagccuacucugccauagca

SEQ ID NO: 1136955 - RNA, 22 nt, Human
cuggcaguuggcauuggcaucu

SEQ ID NO: 1136956 - RNA, 22 nt, Human
ucuggcaggcaaucggcucugg

SEQ ID NO: 1136957 - RNA, 22 nt, Human
gcuccaggagagggaagcagau

SEQ ID NO: 1136958 - RNA, 22 nt, Human
auggccuggggauuccugagca

SEQ ID NO: 1136959 - RNA, 22 nt, Human
uccccaccuaagauacccaucu

SEQ ID NO: 1136960 - RNA, 22 nt, Human
gaggagcucaugaaagcggugu

SEQ ID NO: 1136961 - RNA, 22 nt, Human
ucuggcagcuauccucuggcca

SEQ ID NO: 1136962 - RNA, 22 nt, Human
gcuggcagagcucugggcuggg

SEQ ID NO: 1136963 - RNA, 22 nt, Human
uccaggcucccucaggaugcac

SEQ ID NO: 1136964 - RNA, 22 nt, Human
acuggcagagacccugauggcc

SEQ ID NO: 1136965 - RNA, 22 nt, Human
cccagccucuguuugcuccucu

SEQ ID NO: 1136966 - RNA, 22 nt, Human
accugccuucucaaggacauga

SEQ ID NO: 1136967 - RNA, 22 nt, Human
ucuggcaggauaucgaagugaa

SEQ ID NO: 1136968 - RNA, 22 nt, Human
cuccuggcacucaguguggaag

SEQ ID NO: 1136969 - RNA, 22 nt, Human
ucuggcagaucuucccacguuu

SEQ ID NO: 1136970 - RNA, 22 nt, Human
guccuggcccacuggcaggcug

SEQ ID NO: 1136971 - RNA, 22 nt, Human
gggccccuugcugcucugcugg

SEQ ID NO: 1136972 - RNA, 22 nt, Human
ucaggcccuuugcugcugcccc

SEQ ID NO: 1136973 - RNA, 22 nt, Human
gcuggcagacugggggcagaac

SEQ ID NO: 1136974 - RNA, 22 nt, Human
ccucuccuugcacccgucccgc

SEQ ID NO: 1136975 - RNA, 17 nt, Human
ugccagccugucccagg

SEQ ID NO: 1136976 - RNA, 17 nt, Human
agccugccccaugcugc

SEQ ID NO: 1136977 - RNA, 22 nt, Human
ucuggcagugaagucaugaggu

SEQ ID NO: 1136978 - RNA, 22 nt, Human
uccuggcauugugcagggugug

SEQ ID NO: 1136979 - RNA, 22 nt, Human
gagauggccagugccaggacaa

SEQ ID NO: 1136980 - RNA, 22 nt, Human
accugccucagugcagcuggau

SEQ ID NO: 1136981 - RNA, 22 nt, Human
uuccaggcugaugggccacagg

SEQ ID NO: 1136982 - RNA, 22 nt, Human
ucuggcaggccuugucaaucug

SEQ ID NO: 1136983 - RNA, 22 nt, Human
ccuggcagcuccguggccuucc

SEQ ID NO: 1136984 - RNA, 22 nt, Human
gaugccuggcacccagcaagga

SEQ ID NO: 1136985 - RNA, 22 nt, Human
ucuggcagaaggcagaaauuca

SEQ ID NO: 1136986 - RNA, 22 nt, Human
cugccugccuuggccuccagga

SEQ ID NO: 1136987 - RNA, 22 nt, Human
ucccaccccuugacucuuuaag

SEQ ID NO: 1136988 - RNA, 23 nt, Human
uccuuccuuugagaggcuccauc

SEQ ID NO: 1136989 - RNA, 22 nt, Human
gcacucuccuggcugccacagu

SEQ ID NO: 1136990 - RNA, 22 nt, Human
uggcacucacucucagagucug

SEQ ID NO: 1136991 - RNA, 22 nt, Human
uugggaucucaaauccagcuau

SEQ ID NO: 1136992 - RNA, 22 nt, Human
ccuggcagaauauuaaagugca

SEQ ID NO: 1136993 - RNA, 22 nt, Human
aggguagggcccggagacagac

SEQ ID NO: 1136994 - RNA, 22 nt, Human
ccagcccugccagagagagcug

SEQ ID NO: 1136995 - RNA, 22 nt, Human
uccaggcuugagaccaggcucu

SEQ ID NO: 1136996 - RNA, 22 nt, Human
cugccugcugcccuccagagcc

SEQ ID NO: 1136997 - RNA, 22 nt, Human
aguguggcaggaaugacuagaa

SEQ ID NO: 1136998 - RNA, 22 nt, Human
ccuggcagguggcgcccucggc

SEQ ID NO: 1136999 - RNA, 22 nt, Human
gguggcauaagaacacuaaaga

SEQ ID NO: 1137000 - RNA, 22 nt, Human
guggcagucgcugacagauaca

SEQ ID NO: 1137001 - RNA, 22 nt, Human
ugccugccucuggcagcccugc

SEQ ID NO: 1137002 - RNA, 22 nt, Human
ccuggcagggcugcaguaaugg

SEQ ID NO: 1137003 - RNA, 22 nt, Human
uccugcagccacugcaggcaga

SEQ ID NO: 1137004 - RNA, 22 nt, Human
cuccaggcucguccaagaucga

SEQ ID NO: 1137005 - RNA, 22 nt, Human
aggcacaggaggugguaagaag

SEQ ID NO: 1137006 - RNA, 22 nt, Human
cagccaggauggagaacuguug

SEQ ID NO: 1137007 - RNA, 20 nt, Human
ucccucccuccagcucuggg

SEQ ID NO: 1137008 - RNA, 22 nt, Human
gagaaagaugaagaguggcguu

SEQ ID NO: 1137009 - RNA, 22 nt, Human
aggccccaaagcagugcaagua

SEQ ID NO: 1137010 - RNA, 22 nt, Human
ccuggcagcagcacaugccuuc

SEQ ID NO: 1137011 - RNA, 18 nt, Human
aggaaagaaaggcaggug

SEQ ID NO: 1137012 - RNA, 21 nt, Human
ucuggcaggaagacggauggg

SEQ ID NO: 1137013 - RNA, 17 nt, Human
uuaagguggaucagcac

SEQ ID NO: 1137014 - RNA, 22 nt, Human
uuccuggcucacagcagugggg

SEQ ID NO: 1137015 - RNA, 22 nt, Human
gccuggcacaggaauuaggagg

SEQ ID NO: 1137016 - RNA, 18 nt, Human
cuccuggcugauggugag

SEQ ID NO: 1137017 - RNA, 22 nt, Human
ccauucauacaauuuuguucua

SEQ ID NO: 1137018 - RNA, 22 nt, Human
ccuggcagcgccgaagcuggcc

SEQ ID NO: 1137019 - RNA, 22 nt, Human
gccuccuguuaugccaugugcc

SEQ ID NO: 1137020 - RNA, 22 nt, Human
ccucucagcgauuccucuugga

SEQ ID NO: 1137021 - RNA, 22 nt, Human
gaggcugcuuugaugacaggag

SEQ ID NO: 1137022 - RNA, 22 nt, Human
ccuggcagcauugguagagauu

SEQ ID NO: 1137023 - RNA, 22 nt, Human
cagguggguguaugaaugcaaa

SEQ ID NO: 1137024 - RNA, 22 nt, Human
aaagagucguguuccagguuug

SEQ ID NO: 1137025 - RNA, 22 nt, Human
cagguugguauucaucuccaca

SEQ ID NO: 1137026 - RNA, 22 nt, Human
agagggugcuggagagacauug

SEQ ID NO: 1137027 - RNA, 22 nt, Human
gaggagcugagccacguccugg

SEQ ID NO: 1137028 - RNA, 22 nt, Human
gcuugggaagggcccuguguac

SEQ ID NO: 1137029 - RNA, 22 nt, Human
ccagcccugucaccaacuggag

SEQ ID NO: 1137030 - RNA, 22 nt, Human
ggccucucugagagcagacguu

SEQ ID NO: 1137031 - RNA, 22 nt, Human
ucuggcagcgaagcguguacuu

SEQ ID NO: 1137032 - RNA, 22 nt, Human
aggcaggggagcuggaagggua

SEQ ID NO: 1137033 - RNA, 22 nt, Human
ccugccuucagcccugaagucu

SEQ ID NO: 1137034 - RNA, 20 nt, Human
cccagccccuaccuguugcc

SEQ ID NO: 1137035 - RNA, 22 nt, Human
ucuggcagaagugcugucagua

SEQ ID NO: 1137036 - RNA, 22 nt, Human
cuggcagucugguggaaggccu

SEQ ID NO: 1137037 - RNA, 22 nt, Human
acuggcagugucguuuacauga

SEQ ID NO: 1137038 - RNA, 22 nt, Human
cccagccuuccacccuggacua

SEQ ID NO: 1137039 - RNA, 22 nt, Human
cuguccagcuuggcuccugggg

SEQ ID NO: 1137040 - RNA, 22 nt, Human
ucccugcccucagugcacccgg

SEQ ID NO: 1137041 - RNA, 20 nt, Human
aaagagcccuuggagcaggc

SEQ ID NO: 1137042 - RNA, 22 nt, Human
gaggggcuggguagggcaaccc

SEQ ID NO: 1137043 - RNA, 22 nt, Human
ccuccccaugacccggugcugg

SEQ ID NO: 1137044 - RNA, 22 nt, Human
cccagcccaucucaaaggucua

SEQ ID NO: 1137045 - RNA, 22 nt, Human
cccaggccuggucugggccagu

SEQ ID NO: 1137046 - RNA, 22 nt, Human
caccagggccccaggcugugcc

SEQ ID NO: 1137047 - RNA, 22 nt, Human
ucuggcagcaagauaacaaugg

SEQ ID NO: 1137048 - RNA, 22 nt, Human
cucucugggcccaguuggcacc

SEQ ID NO: 1137049 - RNA, 17 nt, Human
uccaggcagcaacugag

SEQ ID NO: 1137050 - RNA, 22 nt, Human
auggccugcagugcugccacag

SEQ ID NO: 1137051 - RNA, 22 nt, Human
ucuggcagcucuccucggcgga

SEQ ID NO: 1137052 - RNA, 22 nt, Human
gauggccuuguuuucucccuuc

SEQ ID NO: 1137053 - RNA, 22 nt, Human
gguguugggcucacugguccuu

SEQ ID NO: 1137054 - RNA, 22 nt, Human
guccuggcaccucacuggcuac

SEQ ID NO: 1137055 - RNA, 22 nt, Human
agggacucccugggccgacacg

SEQ ID NO: 1137056 - RNA, 21 nt, Human
uccacccucucugcucccagu

SEQ ID NO: 1137057 - RNA, 22 nt, Human
aggaggcugaacuagggucugg

SEQ ID NO: 1137058 - RNA, 22 nt, Human
gcuggcaggauaacuucuaagc

SEQ ID NO: 1137059 - RNA, 22 nt, Human
cugccugcucuauccaggccug

SEQ ID NO: 1137060 - RNA, 22 nt, Human
uggucucugcaggccaggcuca

SEQ ID NO: 1137061 - RNA, 22 nt, Human
guccuggcugguucuguggggc

SEQ ID NO: 1137062 - RNA, 22 nt, Human
cccuuccuugugacuggugggg

SEQ ID NO: 1137063 - RNA, 22 nt, Human
gcuggcagaagagcugguucaa

SEQ ID NO: 1137064 - RNA, 22 nt, Human
acuggcagaggauagcacuaau

SEQ ID NO: 1137065 - RNA, 22 nt, Human
uccaggcuaauuuugcauuguu

SEQ ID NO: 1137066 - RNA, 22 nt, Human
cugccucuauaggaguccacca

SEQ ID NO: 1137067 - RNA, 22 nt, Human
agucuagggugggguccacagg

SEQ ID NO: 1137068 - RNA, 19 nt, Human
gcuggcagaauuuugaacc

SEQ ID NO: 1137069 - RNA, 22 nt, Human
cccuuccuugauuuuaacugga

SEQ ID NO: 1137070 - RNA, 23 nt, Human
uugggaaauaguuaagacaugag

SEQ ID NO: 1137071 - RNA, 22 nt, Human
cggcuggugucgggcacagcaa

SEQ ID NO: 1137072 - RNA, 23 nt, Human
ugagggacaugguggcuucugag

SEQ ID NO: 1137073 - RNA, 22 nt, Human
gcacaggaugauggguugaggg

SEQ ID NO: 1137074 - RNA, 22 nt, Human
cagaaagaccugggcucaagag

SEQ ID NO: 1137075 - RNA, 22 nt, Human
ucuggcagcaagucuguuucuc

SEQ ID NO: 1137076 - RNA, 22 nt, Human
gguggcagaggugcaucagccc

SEQ ID NO: 1137077 - RNA, 22 nt, Human
ccagugcccagcugcccaggca

SEQ ID NO: 1137078 - RNA, 22 nt, Human
cucuccagccuuuagcccacgc

SEQ ID NO: 1137079 - RNA, 22 nt, Human
ggcaagagggcagauggagugc

SEQ ID NO: 1137080 - RNA, 22 nt, Human
cuggcaguauuaagagaaguga

SEQ ID NO: 1137081 - RNA, 22 nt, Human
uccuggcaaagauguugguguu

SEQ ID NO: 1137082 - RNA, 22 nt, Human
gagaaagacguaggcugggagg

SEQ ID NO: 1137083 - RNA, 22 nt, Human
gauggccuggguccccuuccgg

SEQ ID NO: 1137084 - RNA, 22 nt, Human
cuuggcagagggcugggcucag

SEQ ID NO: 1137085 - RNA, 21 nt, Human
gggagggauggaaaugauguu

SEQ ID NO: 1137086 - RNA, 22 nt, Human
acuggcagaacgugaugcgggu

SEQ ID NO: 1137087 - RNA, 22 nt, Human
gccacagguacuaugggagaga

SEQ ID NO: 1137088 - RNA, 22 nt, Human
gagacacacauucuggagagaa

SEQ ID NO: 1137089 - RNA, 22 nt, Human
ccuucucucugaagaccccaaa

SEQ ID NO: 1137090 - RNA, 22 nt, Human
cccacccugggaagcuaggcag

SEQ ID NO: 1137091 - RNA, 22 nt, Human
aaagagucaaaggcaugucucu

SEQ ID NO: 1137092 - RNA, 22 nt, Human
ccaggcuguaagagugauguug

SEQ ID NO: 1137093 - RNA, 20 nt, Human
uggccucugagaugccacgg

SEQ ID NO: 1137094 - RNA, 22 nt, Human
ggccucagagaaggcugugcgg

SEQ ID NO: 1137095 - RNA, 22 nt, Human
aagugccaucauagcauggcug

SEQ ID NO: 1137096 - RNA, 22 nt, Human
aagucguggcaggcuugcacga

SEQ ID NO: 1137097 - RNA, 20 nt, Human
ccuggcaggcggguuacuua

SEQ ID NO: 1137098 - RNA, 22 nt, Human
ccucagcugcuucccuggagcc

SEQ ID NO: 1137099 - RNA, 22 nt, Human
gagccugaugaaacaggcagac

SEQ ID NO: 1137100 - RNA, 22 nt, Human
agguagggaagaaggcaugaaa

SEQ ID NO: 1137101 - RNA, 23 nt, Human
gcccacccucagcguccucacgg

SEQ ID NO: 1137102 - RNA, 22 nt, Human
aagaggucauaccagauaaggg

SEQ ID NO: 1137103 - RNA, 22 nt, Human
gcuggcagcauuagacccuggg

SEQ ID NO: 1137104 - RNA, 22 nt, Human
ccaggccucuggcugcuuaguc

SEQ ID NO: 1137105 - RNA, 18 nt, Human
ccuggcagccaugcgcgc

SEQ ID NO: 1137106 - RNA, 22 nt, Human
cccugccuugggguccacaccg

SEQ ID NO: 1137107 - RNA, 22 nt, Human
uccaggcuuuuucaugcugucu

SEQ ID NO: 1137108 - RNA, 22 nt, Human
cacaaaaguaggaggcaggcgg

SEQ ID NO: 1137109 - RNA, 20 nt, Human
gagucacagaagaagcugaa

SEQ ID NO: 1137110 - RNA, 22 nt, Human
ggcugaguugagaggauuacuu

SEQ ID NO: 1137111 - RNA, 23 nt, Human
ccuggcagcaaacgaggagguua

SEQ ID NO: 1137112 - RNA, 22 nt, Human
ccuggcagguggagguugcagu

SEQ ID NO: 1137113 - RNA, 22 nt, Human
acagguggccccgagggagugg

SEQ ID NO: 1137114 - RNA, 22 nt, Human
gcuggcagagagcuggugagga

SEQ ID NO: 1137115 - RNA, 22 nt, Human
uggcagugguaccggcucucag

SEQ ID NO: 1137116 - RNA, 19 nt, Human
ccuugccugucccugcagc

SEQ ID NO: 1137117 - RNA, 22 nt, Human
acuggcaguuugagaaugcauu

SEQ ID NO: 1137118 - RNA, 22 nt, Human
cuugccucccucagcucacagc

SEQ ID NO: 1137119 - RNA, 22 nt, Human
gcuggcaggagaaacggggugc

SEQ ID NO: 1137120 - RNA, 22 nt, Human
ccuggcagccucagccaauucu

SEQ ID NO: 1137121 - RNA, 22 nt, Human
ucuggcaguaauaggggagaga

SEQ ID NO: 1137122 - RNA, 22 nt, Human
ucuggcaggaccaugaagcgua

SEQ ID NO: 1137123 - RNA, 22 nt, Human
ucuggcagagucagugcacaca

SEQ ID NO: 1137124 - RNA, 22 nt, Human
caggacaaagcccuuugagaaa

SEQ ID NO: 1137125 - RNA, 22 nt, Human
auccaggcgaaugcagaaggcc

SEQ ID NO: 1137126 - RNA, 22 nt, Human
aggaggcugggcacaguggccu

SEQ ID NO: 1137127 - RNA, 22 nt, Human
cuccuggcuuucccagaccagg

SEQ ID NO: 1137128 - RNA, 22 nt, Human
uggaaagagguagaggaucugg

SEQ ID NO: 1137129 - RNA, 22 nt, Human
gccuggcaaggcccuguugacu

SEQ ID NO: 1137130 - RNA, 22 nt, Human
uccugugccaucucuagagacu

SEQ ID NO: 1137131 - RNA, 22 nt, Human
cuccuggcacugucuugaccca

SEQ ID NO: 1137132 - RNA, 22 nt, Human
ggugccaggcuguagucagggu

SEQ ID NO: 1137133 - RNA, 22 nt, Human
ucccacccccuccaaggaggaa

SEQ ID NO: 1137134 - RNA, 22 nt, Human
aaagaaucagaagucucaaaca

SEQ ID NO: 1137135 - RNA, 22 nt, Human
ccuggcagcuguuuggcuuggc

SEQ ID NO: 1137136 - RNA, 22 nt, Human
uccugagcuacaguaguaugau

SEQ ID NO: 1137137 - RNA, 20 nt, Human
cugcuccacccggcucucag

SEQ ID NO: 1137138 - RNA, 21 nt, Human
agugccaguagguauggagga

SEQ ID NO: 1137139 - RNA, 22 nt, Human
cugccugccacguucagcugua

SEQ ID NO: 1137140 - RNA, 22 nt, Human
gcagggacagggcagggccuuu

SEQ ID NO: 1137141 - RNA, 22 nt, Human
cugcaggagcaaagccucugcu

SEQ ID NO: 1137142 - RNA, 22 nt, Human
gguuccuucugaggucccugua

SEQ ID NO: 1137143 - RNA, 22 nt, Human
ccagccucacuggcaucaccua

SEQ ID NO: 1137144 - RNA, 22 nt, Human
uccaaggcuccggcccuggcgu

SEQ ID NO: 1137145 - RNA, 22 nt, Human
gagaaagauuguccuucagggg

SEQ ID NO: 1137146 - RNA, 22 nt, Human
acuggcagaauugaauaguugu

SEQ ID NO: 1137147 - RNA, 22 nt, Human
gucacaggccuggaugaggggc

SEQ ID NO: 1137148 - RNA, 22 nt, Human
cuggccucuguguucaccauag

SEQ ID NO: 1137149 - RNA, 22 nt, Human
gccuggcacucaaucaucugcu

SEQ ID NO: 1137150 - RNA, 22 nt, Human
aacaaaagccgaaguagguguc

SEQ ID NO: 1137151 - RNA, 22 nt, Human
cugccugcaggacaccucgcua

SEQ ID NO: 1137152 - RNA, 22 nt, Human
augacugcucugggcucccaug

SEQ ID NO: 1137153 - RNA, 23 nt, Human
uccaggagcaugcuggcuggcga

SEQ ID NO: 1137154 - RNA, 22 nt, Human
gaaagaagcuuuagauggcuau

SEQ ID NO: 1137155 - RNA, 22 nt, Human
cuggcaugaaauggcaucucau

SEQ ID NO: 1137156 - RNA, 22 nt, Human
ggagucugcucccagacaugau

SEQ ID NO: 1137157 - RNA, 22 nt, Human
ccuggcaggcaagaggaaggga

SEQ ID NO: 1137158 - RNA, 22 nt, Human
gcaguguuuguguucucacaug

SEQ ID NO: 1137159 - RNA, 22 nt, Human
agggaagaagcugguaguaggu

SEQ ID NO: 1137160 - RNA, 22 nt, Human
ucuggcagagauauccauccca

SEQ ID NO: 1137161 - RNA, 21 nt, Human
ucuggcagcaguuuguugagu

SEQ ID NO: 1137162 - RNA, 22 nt, Human
agggcugaagggaggugcucau

SEQ ID NO: 1137163 - RNA, 22 nt, Human
agagcacagaagaauaggugcu

SEQ ID NO: 1137164 - RNA, 22 nt, Human
acagguggaggcuuuaggaggu

SEQ ID NO: 1137165 - RNA, 22 nt, Human
ucuggcagugauuucugugauc

SEQ ID NO: 1137166 - RNA, 22 nt, Human
gagagaaaagggggaauugauu

SEQ ID NO: 1137167 - RNA, 18 nt, Human
gacaaaaguacagacaga

SEQ ID NO: 1137168 - RNA, 22 nt, Human
agacaagaaacugggagucucu

SEQ ID NO: 1137169 - RNA, 22 nt, Human
gcuggcagguccaagauagagc

SEQ ID NO: 1137170 - RNA, 22 nt, Human
agcagguugugauacacucaga

SEQ ID NO: 1137171 - RNA, 22 nt, Human
aaagaucaauagauaaagcuac

SEQ ID NO: 1137172 - RNA, 22 nt, Human
aggccuccagccacaugccagu

SEQ ID NO: 1137173 - RNA, 22 nt, Human
cugagccagggccacacaugga

SEQ ID NO: 1137174 - RNA, 23 nt, Human
aguguugguugggaagccaagca

SEQ ID NO: 1137175 - RNA, 22 nt, Human
ccaggcugggcggggaaccugg

SEQ ID NO: 1137176 - RNA, 22 nt, Human
uggcagggugccaguugcgagu

SEQ ID NO: 1137177 - RNA, 22 nt, Human
acuggcaguagagggagcgcau

SEQ ID NO: 1137178 - RNA, 22 nt, Human
ucuccugggaggacaaggaagg

SEQ ID NO: 1137179 - RNA, 22 nt, Human
gcuccaggcagcauaguggaug

SEQ ID NO: 1137180 - RNA, 22 nt, Human
ggugccagaguggcccaggggc

SEQ ID NO: 1137181 - RNA, 22 nt, Human
uuccuggcgccacggagccggu

SEQ ID NO: 1137182 - RNA, 22 nt, Human
ucuuuuucugcacacguguccc

SEQ ID NO: 1137183 - RNA, 22 nt, Human
ggagacucggguucuagccuug

SEQ ID NO: 1137184 - RNA, 22 nt, Human
acaggugguaaaauggacuguc

SEQ ID NO: 1137185 - RNA, 22 nt, Human
cugccugcuuaccaugcaucag

SEQ ID NO: 1137186 - RNA, 22 nt, Human
ucccagccaggcucuaccacuu

SEQ ID NO: 1137187 - RNA, 22 nt, Human
agaggcuucucggauggggcag

SEQ ID NO: 1137188 - RNA, 22 nt, Human
uuccugccccugagagcuccca

SEQ ID NO: 1137189 - RNA, 22 nt, Human
gcuggcaggagccuuucccuuu

SEQ ID NO: 1137190 - RNA, 22 nt, Human
aggacaagcuaaaggacuuccu

SEQ ID NO: 1137191 - RNA, 22 nt, Human
uggccuccccuaacagccucuu

SEQ ID NO: 1137192 - RNA, 22 nt, Human
gaggagcucugcuccauccuuc

SEQ ID NO: 1137193 - RNA, 22 nt, Human
uggcaguggcucagagugcaga

SEQ ID NO: 1137194 - RNA, 20 nt, Human
agaggcuuccuugggaggag

SEQ ID NO: 1137195 - RNA, 22 nt, Human
gccuggcauauaguaguugugc

SEQ ID NO: 1137196 - RNA, 22 nt, Human
caggucccugcgccccggccuc

SEQ ID NO: 1137197 - RNA, 22 nt, Human
agcacaggaccaaggaagcugu

SEQ ID NO: 1137198 - RNA, 22 nt, Human
uccaggcuccccugcgugcucc

SEQ ID NO: 1137199 - RNA, 22 nt, Human
uuccuggccaagcagaguggaa

SEQ ID NO: 1137200 - RNA, 22 nt, Human
acuggcagccacaacuggcagg

SEQ ID NO: 1137201 - RNA, 22 nt, Human
aggaagaaccuaagaaagucuc

SEQ ID NO: 1137202 - RNA, 22 nt, Human
ucccugccuccuggcagugcca

SEQ ID NO: 1137203 - RNA, 22 nt, Human
ugccugccaugcagaaagcuga

SEQ ID NO: 1137204 - RNA, 22 nt, Human
auggccugaugcaccuguccca

SEQ ID NO: 1137205 - RNA, 22 nt, Human
ucuggcaguuccuuguugauau

SEQ ID NO: 1137206 - RNA, 22 nt, Human
agaaagaggaugcagaucucau

SEQ ID NO: 1137207 - RNA, 22 nt, Human
cagggacaauggcagagccuga

SEQ ID NO: 1137208 - RNA, 22 nt, Human
gcuggcagcuggaaguugggcu

SEQ ID NO: 1137209 - RNA, 22 nt, Human
uuccuggccccaccccuggaga

SEQ ID NO: 1137210 - RNA, 22 nt, Human
gccuccggaguugcagugucuu

SEQ ID NO: 1137211 - RNA, 22 nt, Human
gcuggcaggauagaagucuaau

SEQ ID NO: 1137212 - RNA, 22 nt, Human
cuccugaggaaaagcuugguca

SEQ ID NO: 1137213 - RNA, 22 nt, Human
gucacaggcaguaacuaggacc

SEQ ID NO: 1137214 - RNA, 22 nt, Human
uggccucugugggagcugagca

SEQ ID NO: 1137215 - RNA, 22 nt, Human
aggagcugcagauucugccuug

SEQ ID NO: 1137216 - RNA, 22 nt, Human
acuccugggugcugaccagcgu

SEQ ID NO: 1137217 - RNA, 22 nt, Human
gccuccuggaagucacauguuu

SEQ ID NO: 1137218 - RNA, 22 nt, Human
ccuggcaguucaucaaauggca

SEQ ID NO: 1137219 - RNA, 22 nt, Human
uccuggcagagggcggccucga

SEQ ID NO: 1137220 - RNA, 22 nt, Human
ccacaaaacugugugucaaaga

SEQ ID NO: 1137221 - RNA, 22 nt, Human
acagaguccuagcugcaaagaa

SEQ ID NO: 1137222 - RNA, 20 nt, Human
gcuccaggucagagaggacg

SEQ ID NO: 1137223 - RNA, 22 nt, Human
ccucugccaccucccacgaggc

SEQ ID NO: 1137224 - RNA, 22 nt, Human
ccagguccuguuuucaccacag

SEQ ID NO: 1137225 - RNA, 22 nt, Human
ugaccaggauacugcagggaug

SEQ ID NO: 1137226 - RNA, 22 nt, Human
gagaaagauguaggcugggagg

SEQ ID NO: 1137227 - RNA, 22 nt, Human
ggcacagggggcugaggacuag

SEQ ID NO: 1137228 - RNA, 22 nt, Human
caggcuggagugcaauggcaca

SEQ ID NO: 1137229 - RNA, 22 nt, Human
cccuggcagagggggcaggugc

SEQ ID NO: 1137230 - RNA, 22 nt, Human
cuuggcaguuucggaaggauga

SEQ ID NO: 1137231 - RNA, 22 nt, Human
ggagcugaggcugaggccucac

SEQ ID NO: 1137232 - RNA, 20 nt, Human
acaaagacuggaaaagcaag

SEQ ID NO: 1137233 - RNA, 22 nt, Human
uucaguuccauuucaggugggu

SEQ ID NO: 1137234 - RNA, 22 nt, Human
ucaggauggagggaagcacaga

SEQ ID NO: 1137235 - RNA, 22 nt, Human
aaagagucuggcacuguaccag

SEQ ID NO: 1137236 - RNA, 22 nt, Human
uugggaagaaacauguccauca

SEQ ID NO: 1137237 - RNA, 22 nt, Human
guuaggaacacuggagccuaaa

SEQ ID NO: 1137238 - RNA, 22 nt, Human
uggcagugggaauggacaaaca

SEQ ID NO: 1137239 - RNA, 22 nt, Human
aaagaucacgucccaggacucg

SEQ ID NO: 1137240 - RNA, 22 nt, Human
ggagagaauuccauggacaugu

SEQ ID NO: 1137241 - RNA, 22 nt, Human
gaggcugcggggaggagccugc

SEQ ID NO: 1137242 - RNA, 19 nt, Human
uggcagguagugagcaguc

SEQ ID NO: 1137243 - RNA, 22 nt, Human
ggccucucaugcccagagccaa

SEQ ID NO: 1137244 - RNA, 22 nt, Human
agggcugacagugaggagucaa

SEQ ID NO: 1137245 - RNA, 22 nt, Human
ugccagccagggaagcucaccc

SEQ ID NO: 1137246 - RNA, 17 nt, Human
cccaggccgccgggagc

SEQ ID NO: 1137247 - RNA, 22 nt, Human
cccagccuuugcuuccugguuc

SEQ ID NO: 1137248 - RNA, 22 nt, Human
uacaaaaguaauuacgguuuuu

SEQ ID NO: 1137249 - RNA, 23 nt, Human
acuccccagucucuucuugccaa

SEQ ID NO: 1137250 - RNA, 22 nt, Human
agaggccuccgaaaggugggcu

SEQ ID NO: 1137251 - RNA, 19 nt, Human
ucuggcagguaauuaggga

SEQ ID NO: 1137252 - RNA, 19 nt, Human
acuggcaguuucugcaugg

SEQ ID NO: 1137253 - RNA, 22 nt, Human
agucacaguuucccugagagag

SEQ ID NO: 1137254 - RNA, 22 nt, Human
uccugagcccuguaggacccug

SEQ ID NO: 1137255 - RNA, 22 nt, Human
ccccacccucgcuccauuucgg

SEQ ID NO: 1137256 - RNA, 22 nt, Human
ucuggcaggacaugcugaccau

SEQ ID NO: 1137257 - RNA, 22 nt, Human
caggaguggugugagggacucc

SEQ ID NO: 1137258 - RNA, 18 nt, Human
gccugcucugcucucccc

SEQ ID NO: 1137259 - RNA, 22 nt, Human
ggagaagaggagcuggaagccu

SEQ ID NO: 1137260 - RNA, 22 nt, Human
cugccugcucaccagggcucug

SEQ ID NO: 1137261 - RNA, 22 nt, Human
ggagccugaaaagucugcauuu

SEQ ID NO: 1137262 - RNA, 22 nt, Human
ugcuccagugccugccccacag

SEQ ID NO: 1137263 - RNA, 22 nt, Human
aguguugggucuuuagaauuua

SEQ ID NO: 1137264 - RNA, 22 nt, Human
accugccuaucagcugccugcu

SEQ ID NO: 1137265 - RNA, 21 nt, Human
ccuggcagaagccugauaugc

SEQ ID NO: 1137266 - RNA, 22 nt, Human
acagguggcuuauuggcugauu

SEQ ID NO: 1137267 - RNA, 22 nt, Human
gaggcacagucccgaggcaagg

SEQ ID NO: 1137268 - RNA, 22 nt, Human
ugcuggcacguggaccaggaga

SEQ ID NO: 1137269 - RNA, 22 nt, Human
acaagagcauugcagguguguu

SEQ ID NO: 1137270 - RNA, 22 nt, Human
uccuggcagcccgcaggugcug

SEQ ID NO: 1137271 - RNA, 22 nt, Human
cucuccagaauaugccgccgug

SEQ ID NO: 1137272 - RNA, 22 nt, Human
accugccuauggagccacaugg

SEQ ID NO: 1137273 - RNA, 21 nt, Human
ucacguggucacaugagcuuu

SEQ ID NO: 1137274 - RNA, 22 nt, Human
aggaagaacagauaauggacgc

SEQ ID NO: 1137275 - RNA, 22 nt, Human
uggaaagaggaagugcccagca

SEQ ID NO: 1137276 - RNA, 22 nt, Human
uuccaggcucccuuggaggugu

SEQ ID NO: 1137277 - RNA, 22 nt, Human
aguugggaguuauagacucuau

SEQ ID NO: 1137278 - RNA, 22 nt, Human
gaggcuguuaggagggacucug

SEQ ID NO: 1137279 - RNA, 22 nt, Human
gacugccucaguuucccugcag

SEQ ID NO: 1137280 - RNA, 19 nt, Human
gcuggcagauguggccgug

SEQ ID NO: 1137281 - RNA, 22 nt, Human
gugggagaaauuagcucuaguu

SEQ ID NO: 1137282 - RNA, 22 nt, Human
gaggcacauauauacagagccc

SEQ ID NO: 1137283 - RNA, 19 nt, Human
guccuggcgccgccacacc

SEQ ID NO: 1137284 - RNA, 22 nt, Human
acuggcaggcugcuggccggcg

SEQ ID NO: 1137285 - RNA, 22 nt, Human
gucaggacucugacccgucccg

SEQ ID NO: 1137286 - RNA, 19 nt, Human
gggagcugaggucuuuggu

SEQ ID NO: 1137287 - RNA, 22 nt, Human
uccuucccaggugucgccgccu

SEQ ID NO: 1137288 - RNA, 22 nt, Human
uccugagcacagagacaaggaa

SEQ ID NO: 1137289 - RNA, 22 nt, Human
uccaggcaagggaggagcaugg

SEQ ID NO: 1137290 - RNA, 22 nt, Human
aggcaguguguagcuggaagag

SEQ ID NO: 1137291 - RNA, 22 nt, Human
agugccccaugggugccugggg

SEQ ID NO: 1137292 - RNA, 22 nt, Human
ccuggcagucaggggaguccuu

SEQ ID NO: 1137293 - RNA, 22 nt, Human
caggauggucucgaucuccuga

SEQ ID NO: 1137294 - RNA, 22 nt, Human
gcuggcagucccaucagcuggg

SEQ ID NO: 1137295 - RNA, 22 nt, Human
ccugccuguacuagagacccag

SEQ ID NO: 1137296 - RNA, 22 nt, Human
aagagccagcuagugaagaggc

SEQ ID NO: 1137297 - RNA, 22 nt, Human
uguuggaauuaggauacagagg

SEQ ID NO: 1137298 - RNA, 22 nt, Human
guggcagugggaugcuaucagg

SEQ ID NO: 1137299 - RNA, 22 nt, Human
cuggcaguuugccaggagcucg

SEQ ID NO: 1137300 - RNA, 22 nt, Human
uccuggcacccuuggguuggag

SEQ ID NO: 1137301 - RNA, 22 nt, Human
agaggcuuggaggugcaagguu

SEQ ID NO: 1137302 - RNA, 22 nt, Human
gcuggcagguaaagccccgggg

SEQ ID NO: 1137303 - RNA, 22 nt, Human
ucccacccauccugcaucucuu

SEQ ID NO: 1137304 - RNA, 17 nt, Human
ugcuggcaacauacaaa

SEQ ID NO: 1137305 - RNA, 22 nt, Human
gccagguugcugacgacgaucu

SEQ ID NO: 1137306 - RNA, 22 nt, Human
guggcagugaaggucauagcau

SEQ ID NO: 1137307 - RNA, 21 nt, Human
ucuggcaggcacgggcccagc

SEQ ID NO: 1137308 - RNA, 22 nt, Human
ccuggcagaaagaguuacaccu

SEQ ID NO: 1137309 - RNA, 22 nt, Human
aaagaucaaguaggcauggccu

SEQ ID NO: 1137310 - RNA, 22 nt, Human
ucccagccuuucuuuucugcug

SEQ ID NO: 1137311 - RNA, 22 nt, Human
ugacaggaggcuugaggccagg

SEQ ID NO: 1137312 - RNA, 22 nt, Human
cuggcagguuuggugucuggug

SEQ ID NO: 1137313 - RNA, 22 nt, Human
gccuggcacaguagggacccaa

SEQ ID NO: 1137314 - RNA, 22 nt, Human
agggcugacaaauggcagugac

SEQ ID NO: 1137315 - RNA, 21 nt, Human
uccugccuuaguccagagcag

SEQ ID NO: 1137316 - RNA, 22 nt, Human
gcuggcagugugaaugacaagc

SEQ ID NO: 1137317 - RNA, 22 nt, Human
uugggaagaauggaggugguua

SEQ ID NO: 1137318 - RNA, 18 nt, Human
cuccuccacagccccugc

SEQ ID NO: 1137319 - RNA, 22 nt, Human
cagguuggucggcaaguacaca

SEQ ID NO: 1137320 - RNA, 22 nt, Human
ccuggcagguuacaaccaguua

SEQ ID NO: 1137321 - RNA, 22 nt, Human
aggaggcuguggagcacuccau

SEQ ID NO: 1137322 - RNA, 22 nt, Human
uccuggcagugcuuguuuugga

SEQ ID NO: 1137323 - RNA, 22 nt, Human
ucuggcagggguucugcacuug

SEQ ID NO: 1137324 - RNA, 22 nt, Human
gguguuguacauucuguggauu

SEQ ID NO: 1137325 - RNA, 22 nt, Human
ugaguguuguaaccauaugauu

SEQ ID NO: 1137326 - RNA, 22 nt, Human
aguuauguccucagcaaaucaa

SEQ ID NO: 1137327 - RNA, 21 nt, Human
guucaauagcucuuugaaugc

SEQ ID NO: 1137328 - RNA, 22 nt, Human
agaauaaccaguguuucacagu

SEQ ID NO: 1137329 - RNA, 22 nt, Human
cauuuagaagucuuagaacuau

SEQ ID NO: 1137330 - RNA, 22 nt, Human
ccuguauggcuauuccuuggac

SEQ ID NO: 1137331 - RNA, 20 nt, Human
uugagcuuuuaguacagaca

SEQ ID NO: 1137332 - RNA, 22 nt, Human
caagggcagaggcagggccccg

SEQ ID NO: 1137333 - RNA, 22 nt, Human
acaagucaguggaauuaauauu

SEQ ID NO: 1137334 - RNA, 22 nt, Human
ucauccugaagaaccugcuucc

SEQ ID NO: 1137335 - RNA, 22 nt, Human
guucuuaaagauucaucaagca

SEQ ID NO: 1137336 - RNA, 22 nt, Human
aucaacuuguccuugauguuaa

SEQ ID NO: 1137337 - RNA, 22 nt, Human
gacauuuauuggauuuuacgag

SEQ ID NO: 1137338 - RNA, 22 nt, Human
ugugaagcgugugcaggggaca

SEQ ID NO: 1137339 - RNA, 22 nt, Human
auugacuuucccuucuccucau

SEQ ID NO: 1137340 - RNA, 22 nt, Human
caguauguuuauuagaacugca

SEQ ID NO: 1137341 - RNA, 22 nt, Human
ccugguuuaaugcucacuguug

SEQ ID NO: 1137342 - RNA, 22 nt, Human
aggcaguguggagggcuguugc

SEQ ID NO: 1137343 - RNA, 22 nt, Human
auacuucuuuagcauauugaac

SEQ ID NO: 1137344 - RNA, 22 nt, Human
uuagacaucaagaagccaaugu

SEQ ID NO: 1137345 - RNA, 22 nt, Human
ccagcuugcuccucugcaaugg

SEQ ID NO: 1137346 - RNA, 18 nt, Human
agggcugaugaguuuggg

SEQ ID NO: 1137347 - RNA, 22 nt, Human
aaagacuaaccaguugucaaaa

SEQ ID NO: 1137348 - RNA, 22 nt, Human
uggaucugcucuaugaacugcu

SEQ ID NO: 1137349 - RNA, 22 nt, Human
uacauuuauaaggcuucucugu

SEQ ID NO: 1137350 - RNA, 22 nt, Human
aucauuaacccuugaugcuggg

SEQ ID NO: 1137351 - RNA, 22 nt, Human
cagguugaaaguggaggagcua

SEQ ID NO: 1137352 - RNA, 22 nt, Human
aguguuaaggcugguugcuaua

SEQ ID NO: 1137353 - RNA, 21 nt, Human
ucaauuauggaugugugcaaa

SEQ ID NO: 1137354 - RNA, 22 nt, Human
acugguuuuggaaaucaguaca

SEQ ID NO: 1137355 - RNA, 22 nt, Human
aacuuagagcucuccuaaauga

SEQ ID NO: 1137356 - RNA, 22 nt, Human
augcuugaaaguuauuucauuu

SEQ ID NO: 1137357 - RNA, 22 nt, Human
guaugucaugagccuugugcgu

SEQ ID NO: 1137358 - RNA, 22 nt, Human
ggcagaggaagcuggaaguggg

SEQ ID NO: 1137359 - RNA, 22 nt, Human
caucaggaauaaaugaggcugu

SEQ ID NO: 1137360 - RNA, 22 nt, Human
ucucugucucccguguguccgg

SEQ ID NO: 1137361 - RNA, 22 nt, Human
cugaagcugggcacuuccuuuu

SEQ ID NO: 1137362 - RNA, 20 nt, Human
uucaugcagugguugcugug

SEQ ID NO: 1137363 - RNA, 22 nt, Human
ccacugauucugccaggucucu

SEQ ID NO: 1137364 - RNA, 22 nt, Human
gcauuuaaauuugaacuucaga

SEQ ID NO: 1137365 - RNA, 22 nt, Human
uuugaaaggagcuuuauccaga

SEQ ID NO: 1137366 - RNA, 22 nt, Human
agcugcugcaaguggugcuaac

SEQ ID NO: 1137367 - RNA, 21 nt, Human
cuuuggcaagggagaagucac

SEQ ID NO: 1137368 - RNA, 22 nt, Human
cucagcuucuaccuccugagug

SEQ ID NO: 1137369 - RNA, 22 nt, Human
uuucaaguagagggaucgcuag

SEQ ID NO: 1137370 - RNA, 22 nt, Human
auauaugaagaagucuugauua

SEQ ID NO: 1137371 - RNA, 22 nt, Human
gauucugaaauuaacagacugg

SEQ ID NO: 1137372 - RNA, 22 nt, Human
aguaucagaugugauuaaaggg

SEQ ID NO: 1137373 - RNA, 22 nt, Human
cuggccagggugcgaucguggu

SEQ ID NO: 1137374 - RNA, 22 nt, Human
guggggacgggauggcucacug

SEQ ID NO: 1137375 - RNA, 22 nt, Human
ggcagaggagcuggaaacaugg

SEQ ID NO: 1137376 - RNA, 22 nt, Human
uguggccaccagagcugcuauu

SEQ ID NO: 1137377 - RNA, 22 nt, Human
ucaagaaagggcuucaccagga

SEQ ID NO: 1137378 - RNA, 21 nt, Human
ucagagggcccuggaggcuca

SEQ ID NO: 1137379 - RNA, 22 nt, Human
uaucuguagucucaugguuccu

SEQ ID NO: 1137380 - RNA, 22 nt, Human
cuugucugcuauaaaaauccag

SEQ ID NO: 1137381 - RNA, 23 nt, Human
ugucuggauucgacugugguugg

SEQ ID NO: 1137382 - RNA, 22 nt, Human
ugcugcgggacccacugugggc

SEQ ID NO: 1137383 - RNA, 22 nt, Human
uuugccaguauuuuauugauga

SEQ ID NO: 1137384 - RNA, 22 nt, Human
uguuaguauuggcaaauuuguu

SEQ ID NO: 1137385 - RNA, 22 nt, Human
uauaagaaacaaggcaaauuuu

SEQ ID NO: 1137386 - RNA, 22 nt, Human
caaucaaugcugcuaguuccuu

SEQ ID NO: 1137387 - RNA, 22 nt, Human
aguguauuugccuauaaaaaug

SEQ ID NO: 1137388 - RNA, 22 nt, Human
uugcaguugcuguauuuaagga

SEQ ID NO: 1137389 - RNA, 21 nt, Human
ucaggaagagccaguucaugc

SEQ ID NO: 1137390 - RNA, 22 nt, Human
ggcugcugcccaccccugcaug

SEQ ID NO: 1137391 - RNA, 22 nt, Human
guguaucaaagcacagacuuca

SEQ ID NO: 1137392 - RNA, 22 nt, Human
aauguuaaguuuagauuauaac

SEQ ID NO: 1137393 - RNA, 22 nt, Human
acaaguuucauuguuuagaacc

SEQ ID NO: 1137394 - RNA, 22 nt, Human
cacuuuuaacaggagaauuccc

SEQ ID NO: 1137395 - RNA, 22 nt, Human
uuugaaauguaucaguauaggu

SEQ ID NO: 1137396 - RNA, 22 nt, Human
uccuuagagugguugugcuaug

SEQ ID NO: 1137397 - RNA, 22 nt, Human
aucaucaucuaaauugugucgc

SEQ ID NO: 1137398 - RNA, 22 nt, Human
ugucaaguuguuaaguucuggg

SEQ ID NO: 1137399 - RNA, 22 nt, Human
uccugagauaggaguugaaggc

SEQ ID NO: 1137400 - RNA, 22 nt, Human
agauuauuuaagacaggaacca

SEQ ID NO: 1137401 - RNA, 22 nt, Human
cuauuuucccauaugguugaca

SEQ ID NO: 1137402 - RNA, 22 nt, Human
ugcagcuucucugcaacaggag

SEQ ID NO: 1137403 - RNA, 22 nt, Human
uccucuucaaaauagcucugaa

SEQ ID NO: 1137404 - RNA, 22 nt, Human
gcugucccgaaccccugguaau

SEQ ID NO: 1137405 - RNA, 22 nt, Human
aagaauaagaggauuuagaaca

SEQ ID NO: 1137406 - RNA, 22 nt, Human
uggauaaaaugacauuaccuga

SEQ ID NO: 1137407 - RNA, 22 nt, Human
caguuaaacagauugaguguua

SEQ ID NO: 1137408 - RNA, 22 nt, Human
uuaggaaguguguccagaagcg

SEQ ID NO: 1137409 - RNA, 22 nt, Human
gggaccugggccagaggacagu

SEQ ID NO: 1137410 - RNA, 22 nt, Human
auuauuaggugcucucugacaa

SEQ ID NO: 1137411 - RNA, 22 nt, Human
acaggacauguaccaggugguc

SEQ ID NO: 1137412 - RNA, 22 nt, Human
aaugauuuggcaaaggaaucca

SEQ ID NO: 1137413 - RNA, 22 nt, Human
cuggggaccagugucuguuugu

SEQ ID NO: 1137414 - RNA, 22 nt, Human
uauggaaacuaauucauuuuuc

SEQ ID NO: 1137415 - RNA, 22 nt, Human
uuucauaauacuguacaugaaa

SEQ ID NO: 1137416 - RNA, 20 nt, Human
agggucugaugugguggccc

SEQ ID NO: 1137417 - RNA, 22 nt, Human
cccugagcucaggcccuugggg

SEQ ID NO: 1137418 - RNA, 20 nt, Human
guauuaggagguaaauguaa

SEQ ID NO: 1137419 - RNA, 22 nt, Human
acuucacagauauuuauuuggu

SEQ ID NO: 1137420 - RNA, 22 nt, Human
uuaggaauauuuucugaguagu

SEQ ID NO: 1137421 - RNA, 22 nt, Human
cccacccugggcuacacaucca

SEQ ID NO: 1137422 - RNA, 22 nt, Human
uccaggcaugucugaguccuuc

SEQ ID NO: 1137423 - RNA, 23 nt, Human
agcuuuggugaugugacagauaa

SEQ ID NO: 1137424 - RNA, 22 nt, Human
ucccuccuggccgucaccgcug

SEQ ID NO: 1137425 - RNA, 22 nt, Human
uguaaaaccaaaucaaucuagu

SEQ ID NO: 1137426 - RNA, 22 nt, Human
caguagacacauuaauauggaa

SEQ ID NO: 1137427 - RNA, 22 nt, Human
agggcuacugccugccuucagg

SEQ ID NO: 1137428 - RNA, 22 nt, Human
ugcuucuguuucauugaucuua

SEQ ID NO: 1137429 - RNA, 22 nt, Human
uguagaaccuguuuauuauaga

SEQ ID NO: 1137430 - RNA, 22 nt, Human
ugggcugagaguaccuuauaaa

SEQ ID NO: 1137431 - RNA, 22 nt, Human
aagggacccuggaucaaaugga

SEQ ID NO: 1137432 - RNA, 22 nt, Human
uagggcucugcucaucaguugu

SEQ ID NO: 1137433 - RNA, 22 nt, Human
uucugucacuuuuuuggaaucu

SEQ ID NO: 1137434 - RNA, 22 nt, Human
guccucugagggggcugcacgc

SEQ ID NO: 1137435 - RNA, 19 nt, Human
cagcccucuuaccacugug

SEQ ID NO: 1137436 - RNA, 22 nt, Human
aauaauuuuagcucagaguugu

SEQ ID NO: 1137437 - RNA, 22 nt, Human
guggccagcaagugcugccucu

SEQ ID NO: 1137438 - RNA, 22 nt, Human
aagagagaacucccuucgccag

SEQ ID NO: 1137439 - RNA, 22 nt, Human
ccauacacacaccaaauuugua

SEQ ID NO: 1137440 - RNA, 22 nt, Human
uacacaacugacaaccauucug

SEQ ID NO: 1137441 - RNA, 22 nt, Human
aguaugaauugcuuugccugua

SEQ ID NO: 1137442 - RNA, 22 nt, Human
agguagggaagaaggcaugaaa

SEQ ID NO: 1137443 - RNA, 22 nt, Human
uuugaaauaugaggcauuauga

SEQ ID NO: 1137444 - RNA, 22 nt, Human
aauucuguuacuaaugugaugu

SEQ ID NO: 1137445 - RNA, 22 nt, Human
auacacauauguguguauaugu

SEQ ID NO: 1137446 - RNA, 22 nt, Human
ucagcuuucucuucuaucgaua

SEQ ID NO: 1137447 - RNA, 19 nt, Human
ugcuucuggaaccaugauc

SEQ ID NO: 1137448 - RNA, 22 nt, Human
ucccagccuccugacaguuuug

SEQ ID NO: 1137449 - RNA, 22 nt, Human
auaugaaguuacagguaagaaa

SEQ ID NO: 1137450 - RNA, 22 nt, Human
ugcucugcacaucccucacaaa

SEQ ID NO: 1137451 - RNA, 22 nt, Human
aggccacaguacuuugcagacc

SEQ ID NO: 1137452 - RNA, 22 nt, Human
uaugcauacaaugagauauucc

SEQ ID NO: 1137453 - RNA, 22 nt, Human
ugcuucuggcagauugagugag

SEQ ID NO: 1137454 - RNA, 22 nt, Human
agacaucagcuugugugcaggg

SEQ ID NO: 1137455 - RNA, 22 nt, Human
guccuggcccaggaguacacau

SEQ ID NO: 1137456 - RNA, 22 nt, Human
aacagcaugcuggguaacauug

SEQ ID NO: 1137457 - RNA, 22 nt, Human
ucagagagugcaaaauauagcu

SEQ ID NO: 1137458 - RNA, 22 nt, Human
ucugggcugguugugcuugcuu

SEQ ID NO: 1137459 - RNA, 22 nt, Human
ggggucccugcaccagcauguc

SEQ ID NO: 1137460 - RNA, 22 nt, Human
gugcuaaaggguuaugaacaag

SEQ ID NO: 1137461 - RNA, 23 nt, Human
aauguauguuaguaucuuagaga

SEQ ID NO: 1137462 - RNA, 23 nt, Human
acugggcuuaugaggaggcuugu

SEQ ID NO: 1137463 - RNA, 22 nt, Human
ugggaccuguuacauugaguua

SEQ ID NO: 1137464 - RNA, 22 nt, Human
aaguuucauuguucauguaaca

SEQ ID NO: 1137465 - RNA, 22 nt, Human
uccaagcuacugaagguuuggg

SEQ ID NO: 1137466 - RNA, 22 nt, Human
ggcuucugcucagccugcacgc

SEQ ID NO: 1137467 - RNA, 23 nt, Human
uaaauuaccuuuccagugcaggg

SEQ ID NO: 1137468 - RNA, 22 nt, Human
auugaaaaaugacuauugcuua

SEQ ID NO: 1137469 - RNA, 22 nt, Human
gggcugacaguuuccccugaaa

SEQ ID NO: 1137470 - RNA, 22 nt, Human
uauguacaugauuucauuugcu

SEQ ID NO: 1137471 - RNA, 21 nt, Human
acacacucugagucuucuauu

SEQ ID NO: 1137472 - RNA, 22 nt, Human
ggggaccuggccacccauccuu

SEQ ID NO: 1137473 - RNA, 21 nt, Human
auucugucaucccagcuacuu

SEQ ID NO: 1137474 - RNA, 22 nt, Human
uucucauggugucuuuauacau

SEQ ID NO: 1137475 - RNA, 22 nt, Human
aucugucuugccuugcauauuu

SEQ ID NO: 1137476 - RNA, 22 nt, Human
uucacauugugcagauuauggu

SEQ ID NO: 1137477 - RNA, 22 nt, Human
acuuuacaagcuuauagccuag

SEQ ID NO: 1137478 - RNA, 19 nt, Human
cauuuagaaguacauauua

SEQ ID NO: 1137479 - RNA, 22 nt, Human
ucauauaaguuuaaaacuaucu

SEQ ID NO: 1137480 - RNA, 22 nt, Human
ccugggcucaagcgaucuuguc

SEQ ID NO: 1137481 - RNA, 22 nt, Human
aguguggcugcguagggcucuc

SEQ ID NO: 1137482 - RNA, 22 nt, Human
augcuacagcaucucucaucag

SEQ ID NO: 1137483 - RNA, 22 nt, Human
guauuaggaggaacacaggccu

SEQ ID NO: 1137484 - RNA, 22 nt, Human
uuguauuucuccacuuucuguu

SEQ ID NO: 1137485 - RNA, 21 nt, Human
agaaaaacacgauauaagccc

SEQ ID NO: 1137486 - RNA, 22 nt, Human
cucugucaggcugcagaugcuc

SEQ ID NO: 1137487 - RNA, 22 nt, Human
gucugucacucaggggcuggag

SEQ ID NO: 1137488 - RNA, 22 nt, Human
cuuuucaugagucuguuauggg

SEQ ID NO: 1137489 - RNA, 22 nt, Human
cagcucugagacugaggcuaug

SEQ ID NO: 1137490 - RNA, 22 nt, Human
auguggcugguaguugacaacu

SEQ ID NO: 1137491 - RNA, 18 nt, Human
acuggcuuuagcaucaga

SEQ ID NO: 1137492 - RNA, 22 nt, Human
aaauauacuagaugaugaccca

SEQ ID NO: 1137493 - RNA, 16 nt, Human
ccugggcucuguugga

SEQ ID NO: 1137494 - RNA, 22 nt, Human
cuuucauuugauaagaaugcca

SEQ ID NO: 1137495 - RNA, 22 nt, Human
guggccagccccauggacaguu

SEQ ID NO: 1137496 - RNA, 22 nt, Human
cacaauguauauguauaucaaa

SEQ ID NO: 1137497 - RNA, 22 nt, Human
auuaauuuuucugacagccaca

SEQ ID NO: 1137498 - RNA, 22 nt, Human
ucagagaggauuuuaauaagug

SEQ ID NO: 1137499 - RNA, 22 nt, Human
aacauucaaaacccaguucagu

SEQ ID NO: 1137500 - RNA, 20 nt, Human
ccuggcaggcggguuacuua

SEQ ID NO: 1137501 - RNA, 22 nt, Human
uaaguuuuaagcaaucugauaa

SEQ ID NO: 1137502 - RNA, 22 nt, Human
gagaggcuggcagugccagguu

SEQ ID NO: 1137503 - RNA, 22 nt, Human
agaggcucugccgccucaggua

SEQ ID NO: 1137504 - RNA, 22 nt, Human
ucuguguugauaauuuuggaga

SEQ ID NO: 1137505 - RNA, 22 nt, Human
gugcaguggcagauccuagcuc

SEQ ID NO: 1137506 - RNA, 23 nt, Human
acucacaaagcaggaucauguug

SEQ ID NO: 1137507 - RNA, 22 nt, Human
gcagagaggaaugaagccaucc

SEQ ID NO: 1137508 - RNA, 22 nt, Human
cuugccucccucagcucacagc

SEQ ID NO: 1137509 - RNA, 22 nt, Human
cuacaaugacagaauugaguag

SEQ ID NO: 1137510 - RNA, 22 nt, Human
gucacaggcaguaacuaggacc

SEQ ID NO: 1137511 - RNA, 22 nt, Human
ugguauaaaacuuuuuauugaa

SEQ ID NO: 1137512 - RNA, 22 nt, Human
gacucugggcugagccagggcc

SEQ ID NO: 1137513 - RNA, 21 nt, Human
ccaggcugggagggcaguucc

SEQ ID NO: 1137514 - RNA, 22 nt, Human
gccaggcaaauuaaggaaugca

SEQ ID NO: 1137515 - RNA, 19 nt, Human
ccaggccugcgggcguugg

SEQ ID NO: 1137516 - RNA, 23 nt, Human
uguggcugagaaauugacaacuu

SEQ ID NO: 1137517 - RNA, 22 nt, Human
auucugucuuuuuaaaauaaua

SEQ ID NO: 1137518 - RNA, 20 nt, Human
uuccagagaucugcauuuua

SEQ ID NO: 1137519 - RNA, 22 nt, Human
caguguuucugaguuccagcuc

SEQ ID NO: 1137520 - RNA, 22 nt, Human
cuuuucacaggaggauaagccc

SEQ ID NO: 1137521 - RNA, 22 nt, Human
ggcuuuauauuguuugagcaga

SEQ ID NO: 1137522 - RNA, 22 nt, Human
cgcugauaaacgucacguuccc

SEQ ID NO: 1137523 - RNA, 22 nt, Human
auccccacgauauagccaaagc

SEQ ID NO: 1137524 - RNA, 22 nt, Human
auucacaugugcuucuuaucac

SEQ ID NO: 1137525 - RNA, 22 nt, Human
guguaugaggggagaauguuuu

SEQ ID NO: 1137526 - RNA, 22 nt, Human
uucugucuguaaacuucucaau

SEQ ID NO: 1137527 - RNA, 17 nt, Human
ccagagaguaguuagga

SEQ ID NO: 1137528 - RNA, 22 nt, Human
acuggggaauggaacugggaau

SEQ ID NO: 1137529 - RNA, 22 nt, Human
ggccucucaugcccagagccaa

SEQ ID NO: 1137530 - RNA, 22 nt, Human
aaauccuaaaaguuugacuuaa

SEQ ID NO: 1137531 - RNA, 22 nt, Human
caggauggucucgaucuccuga

SEQ ID NO: 1137532 - RNA, 22 nt, Human
cuggaaagaccugcuugcuuuu

SEQ ID NO: 1137533 - RNA, 22 nt, Human
ccagugcccagcugcccaggca

SEQ ID NO: 1137534 - RNA, 22 nt, Human
acaauucugaugguuucccagu

SEQ ID NO: 1137535 - RNA, 22 nt, Human
agagcacagaagaauaggugcu

SEQ ID NO: 1137536 - RNA, 22 nt, Human
accugccuucucaaggacauga

SEQ ID NO: 1137537 - RNA, 22 nt, Human
cagcaaucgggugauaugcaau

SEQ ID NO: 1137538 - RNA, 17 nt, Human
uuauuuuuugggcugag

SEQ ID NO: 1137539 - RNA, 22 nt, Human
gagcauuugguuauaguaauuu

SEQ ID NO: 1137540 - RNA, 22 nt, Human
ccacacagauaaguguuuucua

SEQ ID NO: 1137541 - RNA, 22 nt, Human
cugcucuaauaucagauagacu

SEQ ID NO: 1137542 - RNA, 22 nt, Human
augugaaagagguguucagugg

SEQ ID NO: 1137543 - RNA, 22 nt, Human
acuggcaguggcagcagaaaga

SEQ ID NO: 1137544 - RNA, 22 nt, Human
gcugggcucugucaugccuucc

SEQ ID NO: 1137545 - RNA, 22 nt, Human
ucauuuauaaggaugcaauuaa

SEQ ID NO: 1137546 - RNA, 22 nt, Human
aguaugaagauuauaauuuuuc

SEQ ID NO: 1137547 - RNA, 22 nt, Human
ucugugacugauggaggcuuuu

SEQ ID NO: 1137548 - RNA, 22 nt, Human
uccaggcuuuuucaugcugucu

SEQ ID NO: 1137549 - RNA, 22 nt, Human
caucacagggggcuagaagucu

SEQ ID NO: 1137550 - RNA, 22 nt, Human
aauaauuauuugagagcagacc

SEQ ID NO: 1137551 - RNA, 23 nt, Human
agcaggcugcuucuccacagcug

SEQ ID NO: 1137552 - RNA, 22 nt, Human
uuucacauaaauauuaugccua

SEQ ID NO: 1137553 - RNA, 22 nt, Human
acuggcaguuugagaaugcauu

SEQ ID NO: 1137554 - RNA, 22 nt, Human
uacauaaugagcuaguuaaguu

SEQ ID NO: 1137555 - RNA, 22 nt, Human
caugaagcucuugcaccucuag

SEQ ID NO: 1137556 - RNA, 22 nt, Human
uguuuauucauggcuaaugaaa

SEQ ID NO: 1137557 - RNA, 22 nt, Human
auuaaauuaaguggcuaauuua

SEQ ID NO: 1137558 - RNA, 20 nt, Human
uauuuacaacuuagagccuc

SEQ ID NO: 1137559 - RNA, 22 nt, Human
aagagcaucaaugacucgcagu

SEQ ID NO: 1137560 - RNA, 22 nt, Human
ccaggcucugcaaaaucaggcu

SEQ ID NO: 1137561 - RNA, 22 nt, Human
ugcuucugggccugguguuccc

SEQ ID NO: 1137562 - RNA, 22 nt, Human
agucuagggugggguccacagg

SEQ ID NO: 1137563 - RNA, 22 nt, Human
aauugcaauuuucuuaaggucu

SEQ ID NO: 1137564 - RNA, 22 nt, Human
guggcaggggcgggcuguuccg

SEQ ID NO: 1137565 - RNA, 23 nt, Human
auauuagggagauuagcccucua

SEQ ID NO: 1137566 - RNA, 22 nt, Human
aaacuucauggauaauauaaag

SEQ ID NO: 1137567 - RNA, 23 nt, Human
uuuuaauuuggacauaagaagau

SEQ ID NO: 1137568 - RNA, 22 nt, Human
ugggcuucugauguugagugcu

SEQ ID NO: 1137569 - RNA, 22 nt, Human
aaaaguauuuauggcuauguaa

SEQ ID NO: 1137570 - RNA, 22 nt, Human
cagcuuuaccuuuaggaguaac

SEQ ID NO: 1137571 - RNA, 22 nt, Human
ccugaggggcugcaggccagcu

SEQ ID NO: 1137572 - RNA, 22 nt, Human
ccacccuaacaauccuuacugu

SEQ ID NO: 1137573 - RNA, 22 nt, Human
ucucugaagauauuuauuauua

SEQ ID NO: 1137574 - RNA, 22 nt, Human
agggcccuagggaaugagacau

SEQ ID NO: 1137575 - RNA, 22 nt, Human
gcagcuuucuuuuugcaugucu

SEQ ID NO: 1137576 - RNA, 22 nt, Human
ugaauccagagcuauuucgucc

SEQ ID NO: 1137577 - RNA, 22 nt, Human
ccugcaggcugcaggccaguuc

SEQ ID NO: 1137578 - RNA, 22 nt, Human
aacaguaaaaaucauuuaguug

SEQ ID NO: 1137579 - RNA, 22 nt, Human
ugcuuuauagacaaggaaguag

SEQ ID NO: 1137580 - RNA, 22 nt, Human
acaccauacucauguugguucc

SEQ ID NO: 1137581 - RNA, 15 nt, Human
uccaggcauucauuc

SEQ ID NO: 1137582 - RNA, 22 nt, Human
ggagccugaaaagucugcauuu

SEQ ID NO: 1137583 - RNA, 22 nt, Human
guccucugacucagccuuggga

SEQ ID NO: 1137584 - RNA, 22 nt, Human
uccaggcauagaaggcacgcac

SEQ ID NO: 1137585 - RNA, 22 nt, Human
uucagagacagcaaccaggaca

SEQ ID NO: 1137586 - RNA, 22 nt, Human
gcugggcucaccaggccacuag

SEQ ID NO: 1137587 - RNA, 22 nt, Human
ucuguuuaggcaaaauagcuac

SEQ ID NO: 1137588 - RNA, 22 nt, Human
auuauuagugauguuguuacug

SEQ ID NO: 1137589 - RNA, 22 nt, Human
acaugauauuaaugucuuauuu

SEQ ID NO: 1137590 - RNA, 22 nt, Human
ucuccaggaagcccucccugac

SEQ ID NO: 1137591 - RNA, 22 nt, Human
uaugaacuguaacccucaccgc

SEQ ID NO: 1137592 - RNA, 22 nt, Human
auaugauuccacuauuguaugg

SEQ ID NO: 1137593 - RNA, 22 nt, Human
uuuacacaaaagauagcacacc

SEQ ID NO: 1137594 - RNA, 22 nt, Human
ggagcugaggcugaggccucac

SEQ ID NO: 1137595 - RNA, 19 nt, Human
uccuggcacaguggaacca

SEQ ID NO: 1137596 - RNA, 23 nt, Human
uuaggcacuuaguagggccagag

SEQ ID NO: 1137597 - RNA, 22 nt, Human
uccaagcuugcuuuagccacag

SEQ ID NO: 1137598 - RNA, 22 nt, Human
cauuuguaggaugcuucuuguu

SEQ ID NO: 1137599 - RNA, 23 nt, Human
aaaguuugaagcaacaguaguug

SEQ ID NO: 1137600 - RNA, 22 nt, Human
ggcaggcuggcuuuguuccagg

SEQ ID NO: 1137601 - RNA, 19 nt, Human
auguaugaggucuucugcu

SEQ ID NO: 1137602 - RNA, 22 nt, Human
aaauuagucgguuuaggaauuu

SEQ ID NO: 1137603 - RNA, 22 nt, Human
aaccugcaguuuuuauucugag

SEQ ID NO: 1137604 - RNA, 22 nt, Human
cuccaagucggcugcagcugga

SEQ ID NO: 1137605 - RNA, 22 nt, Human
gaaagaagcuuuagauggcuau

SEQ ID NO: 1137606 - RNA, 22 nt, Human
auccugugcaaugacugcaucu

SEQ ID NO: 1137607 - RNA, 22 nt, Human
uauucccagccucuuucuaucu

SEQ ID NO: 1137608 - RNA, 22 nt, Human
uacacagauuucaguaucauca

SEQ ID NO: 1137609 - RNA, 22 nt, Human
uuaugaaggaucagguacuugg

SEQ ID NO: 1137610 - RNA, 19 nt, Human
ucuuuucacgcauuuugaa

SEQ ID NO: 1137611 - RNA, 22 nt, Human
cccagccugugacagccguccu

SEQ ID NO: 1137612 - RNA, 22 nt, Human
auucucaauggcuacuuucaua

SEQ ID NO: 1137613 - RNA, 22 nt, Human
aagggcuccacuugaaucacac

SEQ ID NO: 1137614 - RNA, 22 nt, Human
cacacaucuuaucccaguuauu

SEQ ID NO: 1137615 - RNA, 22 nt, Human
cccaggcagcccuucugacgca

SEQ ID NO: 1137616 - RNA, 21 nt, Human
cccugcaggccagggcugagc

SEQ ID NO: 1137617 - RNA, 22 nt, Human
ggcuuugguagacacagauuga

SEQ ID NO: 1137618 - RNA, 22 nt, Human
auuauucuuaugucaucauggc

SEQ ID NO: 1137619 - RNA, 22 nt, Human
acuuaaaaccagacagcgucau

SEQ ID NO: 1137620 - RNA, 22 nt, Human
auuuauuaugggauuuggcuca

SEQ ID NO: 1137621 - RNA, 22 nt, Human
ugugugaaggagccacuguuca

SEQ ID NO: 1137622 - RNA, 19 nt, Human
uggccagguacugucugcu

SEQ ID NO: 1137623 - RNA, 22 nt, Human
ucugugcauuguaacaacuaaa

SEQ ID NO: 1137624 - RNA, 22 nt, Human
acugggcugccugguucuucua

SEQ ID NO: 1137625 - RNA, 22 nt, Human
auguaugagagauucuuuuauu

SEQ ID NO: 1137626 - RNA, 22 nt, Human
cugagggagcugcuggccuugg

SEQ ID NO: 1137627 - RNA, 20 nt, Human
ucacacaugguaagcuauga

SEQ ID NO: 1137628 - RNA, 22 nt, Human
ugaccuuauuugaaaauagaga

SEQ ID NO: 1137629 - RNA, 22 nt, Human
uuaguuaguggggcugucaguc

SEQ ID NO: 1137630 - RNA, 22 nt, Human
uuguaugaauguauccuaauuu

SEQ ID NO: 1137631 - RNA, 22 nt, Human
auguuucaucaguaagguuuug

SEQ ID NO: 1137632 - RNA, 22 nt, Human
ucacuguaccuuccauuucauu

SEQ ID NO: 1137633 - RNA, 22 nt, Human
uaugagaaucugcaguaugcuu

SEQ ID NO: 1137634 - RNA, 22 nt, Human
ucaucccuaaggacagcucugc

SEQ ID NO: 1137635 - RNA, 22 nt, Human
gacccagcuuaagucacauguu

SEQ ID NO: 1137636 - RNA, 22 nt, Human
ugggcuccaauuuguccuuuca

SEQ ID NO: 1137637 - RNA, 22 nt, Human
gcuccaggugucccagguaaaa

SEQ ID NO: 1137638 - RNA, 22 nt, Human
caugagauuugggaggggccag

SEQ ID NO: 1137639 - RNA, 20 nt, Human
uuaagaaaagcacauccugc

SEQ ID NO: 1137640 - RNA, 22 nt, Human
auucugucuuuuuauacaucua

SEQ ID NO: 1137641 - RNA, 22 nt, Human
cugggcugucaguuuuguuuua

SEQ ID NO: 1137642 - RNA, 22 nt, Human
ugggaccugcccuggccccauc

SEQ ID NO: 1137643 - RNA, 18 nt, Human
cauaauuuucuuucuuua

SEQ ID NO: 1137644 - RNA, 22 nt, Human
cagaagucacccucagaauaac

SEQ ID NO: 1137645 - RNA, 22 nt, Human
aauguaugugcaucauuuacau

SEQ ID NO: 1137646 - RNA, 20 nt, Human
cagcccuccaguggaggcag

SEQ ID NO: 1137647 - RNA, 22 nt, Human
aaauccuaagcagaggaauuua

SEQ ID NO: 1137648 - RNA, 22 nt, Human
agagcauccaucggccaggacc

SEQ ID NO: 1137649 - RNA, 22 nt, Human
uuucaaacauagaucugaauau

SEQ ID NO: 1137650 - RNA, 18 nt, Human
ccaaggccccugcugggg

SEQ ID NO: 1137651 - RNA, 22 nt, Human
gccugcagacguguuuuccuca

SEQ ID NO: 1137652 - RNA, 22 nt, Human
auacuuuggucacuauuauugg

SEQ ID NO: 1137653 - RNA, 22 nt, Human
aaguccaguuucauuugagguc

SEQ ID NO: 1137654 - RNA, 22 nt, Human
gcuccaggaggaugaccuuccu

SEQ ID NO: 1137655 - RNA, 22 nt, Human
ugcagggaaagggcacugggcu

SEQ ID NO: 1137656 - RNA, 22 nt, Human
auuaauuuccaggcacugugcu

SEQ ID NO: 1137657 - RNA, 22 nt, Human
uguaugaaagaacaagggcuua

SEQ ID NO: 1137658 - RNA, 22 nt, Human
ugaaugauuugggugcauucag

SEQ ID NO: 1137659 - RNA, 21 nt, Human
uccagaccucccucuccuagc

SEQ ID NO: 1137660 - RNA, 22 nt, Human
cccacacaaaucauggggagaa

SEQ ID NO: 1137661 - RNA, 22 nt, Human
cagggcuagugacaccccaguc

SEQ ID NO: 1137662 - RNA, 22 nt, Human
cagcauuuagaauuugaagugu

SEQ ID NO: 1137663 - RNA, 22 nt, Human
uaauuucaauagcuugcauaau

SEQ ID NO: 1137664 - RNA, 22 nt, Human
ugcuucuggcacuugagggggu

SEQ ID NO: 1137665 - RNA, 21 nt, Human
ugggaccuauuucaacuggau

SEQ ID NO: 1137666 - RNA, 22 nt, Human
uuggaacaugccgggguccagg

SEQ ID NO: 1137667 - RNA, 19 nt, Human
ugcuucuggggcuucucca

SEQ ID NO: 1137668 - RNA, 22 nt, Human
cugcucuagagagcauuaguca

SEQ ID NO: 1137669 - RNA, 22 nt, Human
uagcuuuagaaauauucucaga

SEQ ID NO: 1137670 - RNA, 22 nt, Human
agcagguugugauacacucaga

SEQ ID NO: 1137671 - RNA, 22 nt, Human
agcaggcuaaauaauaauacau

SEQ ID NO: 1137672 - RNA, 22 nt, Human
cagguggcuucucccuaggcca

SEQ ID NO: 1137673 - RNA, 22 nt, Human
cagaggcucagauggcccuggc

SEQ ID NO: 1137674 - RNA, 22 nt, Human
gccugcagaggugcugcuagcu

SEQ ID NO: 1137675 - RNA, 22 nt, Human
ccugggcuuacgaccucugacu

SEQ ID NO: 1137676 - RNA, 22 nt, Human
aaagaucaaguaggcauggccu

SEQ ID NO: 1137677 - RNA, 22 nt, Human
aaauacauacacuguacguggc

SEQ ID NO: 1137678 - RNA, 22 nt, Human
uucugucagcgucagaaauucu

SEQ ID NO: 1137679 - RNA, 22 nt, Human
cuuucauaaaggaaaugaugag

SEQ ID NO: 1137680 - RNA, 22 nt, Human
uuuagggaauagaagaucugaa

SEQ ID NO: 1137681 - RNA, 22 nt, Human
auggcagauggcuggagcaggu

SEQ ID NO: 1137682 - RNA, 22 nt, Human
agugaaccaggcugcgucccug

SEQ ID NO: 1137683 - RNA, 22 nt, Human
gcacccaggcuugggcagcaac

SEQ ID NO: 1137684 - RNA, 19 nt, Human
uugaaauuguuugauaugg

SEQ ID NO: 1137685 - RNA, 22 nt, Human
uugcaacaucugaacauuuauc

SEQ ID NO: 1137686 - RNA, 22 nt, Human
cagggcucccugcagccucugu

SEQ ID NO: 1137687 - RNA, 22 nt, Human
agacccucuccaugcccacugc

SEQ ID NO: 1137688 - RNA, 22 nt, Human
cugccugcaggacaccucgcua

SEQ ID NO: 1137689 - RNA, 22 nt, Human
acagugugguuugagcacuggg

SEQ ID NO: 1137690 - RNA, 22 nt, Human
ggcugcagagcugggugggccu

SEQ ID NO: 1137691 - RNA, 22 nt, Human
aaguauuucguucugaaaaagu

SEQ ID NO: 1137692 - RNA, 22 nt, Human
guccucugucccuggggcacgg

SEQ ID NO: 1137693 - RNA, 22 nt, Human
gccaagcucuuuaaaggccaaa

SEQ ID NO: 1137694 - RNA, 21 nt, Human
gggcagaggggccuccugggu

SEQ ID NO: 1137695 - RNA, 22 nt, Human
ccuggcagguagcauugaggag

SEQ ID NO: 1137696 - RNA, 22 nt, Human
ccagagagguagcuuacccucu

SEQ ID NO: 1137697 - RNA, 16 nt, Human
uucugucacguacggc

SEQ ID NO: 1137698 - RNA, 22 nt, Human
agaauccucuucaguaaauucu

SEQ ID NO: 1137699 - RNA, 22 nt, Human
ugaaacuucuaauaugaauagu

SEQ ID NO: 1137700 - RNA, 21 nt, Human
ccacuguagacucauucugag

SEQ ID NO: 1137701 - RNA, 22 nt, Human
gaagcacugccauaauucagac

SEQ ID NO: 1137702 - RNA, 22 nt, Human
acagcuuuguguuaaugggaag

SEQ ID NO: 1137703 - RNA, 22 nt, Human
ggcuccacugcugaccacucca

SEQ ID NO: 1137704 - RNA, 22 nt, Human
uuucagaugugugucucugaag

SEQ ID NO: 1137705 - RNA, 22 nt, Human
aaggccacacuugcuggccagc

SEQ ID NO: 1137706 - RNA, 22 nt, Human
auucacaguuuccucauauucu

SEQ ID NO: 1137707 - RNA, 22 nt, Human
ggccucucagggcagagacccu

SEQ ID NO: 1137708 - RNA, 22 nt, Human
cugggcugcaguuccugguccu

SEQ ID NO: 1137709 - RNA, 21 nt, Human
agaauaaugguaucauuugcu

SEQ ID NO: 1137710 - RNA, 22 nt, Human
gaggccagaaugagcugaaugc

SEQ ID NO: 1137711 - RNA, 22 nt, Human
auguagaaaguucauagaugcg

SEQ ID NO: 1137712 - RNA, 19 nt, Human
guccaguguuuuccaguca

SEQ ID NO: 1137713 - RNA, 22 nt, Human
aaugaagccagcugggaugcga

SEQ ID NO: 1137714 - RNA, 22 nt, Human
cagcuuuaccaauauuuggaaa

SEQ ID NO: 1137715 - RNA, 22 nt, Human
gcuccaagguauccaccagggu

SEQ ID NO: 1137716 - RNA, 22 nt, Human
agucacaguuccuacccaguaa

SEQ ID NO: 1137717 - RNA, 22 nt, Human
gcagcucucuggccugcccugg

SEQ ID NO: 1137718 - RNA, 22 nt, Human
ucuggcagugauuucugugauc

SEQ ID NO: 1137719 - RNA, 22 nt, Human
uauaauuuuaagugguaaauua

SEQ ID NO: 1137720 - RNA, 22 nt, Human
aucacagagauugcuuuuaaaa

SEQ ID NO: 1137721 - RNA, 22 nt, Human
ucauuuguucucauucucuacu

SEQ ID NO: 1137722 - RNA, 22 nt, Human
uugugcaauuuaaaaucuuccu

SEQ ID NO: 1137723 - RNA, 22 nt, Human
gcagagaggauauuauugucca

SEQ ID NO: 1137724 - RNA, 22 nt, Human
ccaggcccaggguacugaccaa

SEQ ID NO: 1137725 - RNA, 22 nt, Human
guucugggaagguggaccuguu

SEQ ID NO: 1137726 - RNA, 22 nt, Human
aaguccuuggagaauagaaagg

SEQ ID NO: 1137727 - RNA, 22 nt, Human
ccuggggaccugccucagcccu

SEQ ID NO: 1137728 - RNA, 18 nt, Human
ucuaggagaguaccuacc

SEQ ID NO: 1137729 - RNA, 22 nt, Human
cagcucaggcucuccaugcucc

SEQ ID NO: 1137730 - RNA, 22 nt, Human
uugcagcuucuaccacuguuuc

SEQ ID NO: 1137731 - RNA, 22 nt, Human
cacaugcaucugucauguuugg

SEQ ID NO: 1137732 - RNA, 22 nt, Human
cugcaggguuuuucaaggacaa

SEQ ID NO: 1137733 - RNA, 23 nt, Human
cagugugacgaggugaggcaggc

SEQ ID NO: 1137734 - RNA, 22 nt, Human
uccaggaggaggaaggcugcca

SEQ ID NO: 1137735 - RNA, 22 nt, Human
cuguaaauaugaagaauauaug

SEQ ID NO: 1137736 - RNA, 20 nt, Human
agacccucuggacugggccc

SEQ ID NO: 1137737 - RNA, 22 nt, Human
gcauacagagaggauguggcau

SEQ ID NO: 1137738 - RNA, 22 nt, Human
auguccagaguguccuggaaag

SEQ ID NO: 1137739 - RNA, 22 nt, Human
ccaggcucaggccugcucguug

SEQ ID NO: 1137740 - RNA, 22 nt, Human
acagcuuuucaauucugcugag

SEQ ID NO: 1137741 - RNA, 22 nt, Human
acacucucagcuuuucaacuua

SEQ ID NO: 1137742 - RNA, 22 nt, Human
uucuggggccccaguguccucg

SEQ ID NO: 1137743 - RNA, 23 nt, Human
gcugacugugaaauucuggagcu

SEQ ID NO: 1137744 - RNA, 22 nt, Human
auuucccuccagggaaagcuua

SEQ ID NO: 1137745 - RNA, 22 nt, Human
uacagagaguacagcauccaca

SEQ ID NO: 1137746 - RNA, 22 nt, Human
ucuggcagugagcaacuugaca

SEQ ID NO: 1137747 - RNA, 22 nt, Human
auuucacaaagaacagaugcag

SEQ ID NO: 1137748 - RNA, 22 nt, Human
ucagagaguuuucacuagggug

SEQ ID NO: 1137749 - RNA, 22 nt, Human
auguccagccaaccacuggauu

SEQ ID NO: 1137750 - RNA, 22 nt, Human
uggcuggagcauuccuugucuu

SEQ ID NO: 1137751 - RNA, 22 nt, Human
gggaccuggucuagcacugagc

SEQ ID NO: 1137752 - RNA, 22 nt, Human
gagggcucacugagaaagcagu

SEQ ID NO: 1137753 - RNA, 22 nt, Human
cauuuguaguaucuguuuauau

SEQ ID NO: 1137754 - RNA, 22 nt, Human
acauacuuaugcuaaaaauaua

SEQ ID NO: 1137755 - RNA, 22 nt, Human
augggcugacaagacaugcaua

SEQ ID NO: 1137756 - RNA, 22 nt, Human
auuuaaauuuucugauggagag

SEQ ID NO: 1137757 - RNA, 22 nt, Human
aguaugaaucucuuuauucugc

SEQ ID NO: 1137758 - RNA, 22 nt, Human
uccaugagacagauacuguaag

SEQ ID NO: 1137759 - RNA, 22 nt, Human
gcagccuccgcacugcgagucc

SEQ ID NO: 1137760 - RNA, 22 nt, Human
ucuccaggccuuucccaucuua

SEQ ID NO: 1137761 - RNA, 22 nt, Human
ucuggggaauguucauuucuga

SEQ ID NO: 1137762 - RNA, 22 nt, Human
acugauuacacgaguucugacu

SEQ ID NO: 1137763 - RNA, 22 nt, Human
uuaaauauuuucagcaggguca

SEQ ID NO: 1137764 - RNA, 22 nt, Human
uuccugggugguccugguagag

SEQ ID NO: 1137765 - RNA, 22 nt, Human
auggccuggggauuccugagca

SEQ ID NO: 1137766 - RNA, 22 nt, Human
uucuuucaauagcuggcauaug

SEQ ID NO: 1137767 - RNA, 22 nt, Human
cucccagguuccgacgccucuu

SEQ ID NO: 1137768 - RNA, 22 nt, Human
ucagagaggcaauacuguuuaa

SEQ ID NO: 1137769 - RNA, 22 nt, Human
gaaacauauuaauccagugaaa

SEQ ID NO: 1137770 - RNA, 22 nt, Human
ggcuuuaugcagggauagaaau

SEQ ID NO: 1137771 - RNA, 22 nt, Human
aggacuuagaacauuauguacu

SEQ ID NO: 1137772 - RNA, 22 nt, Human
aaggcucccucuucucgagugu

SEQ ID NO: 1137773 - RNA, 22 nt, Human
ugcuucugcugauauuuuguga

SEQ ID NO: 1137774 - RNA, 22 nt, Human
cccacacucugagaaaugcuga

SEQ ID NO: 1137775 - RNA, 22 nt, Human
ugcaggcuauccuuugcugcaa

SEQ ID NO: 1137776 - RNA, 22 nt, Human
uauuaaauuauggauuuaggag

SEQ ID NO: 1137777 - RNA, 22 nt, Human
uacaaaaguaauuacgguuuuu

SEQ ID NO: 1137778 - RNA, 23 nt, Human
aacagccaacuuuagcggguggc

SEQ ID NO: 1137779 - RNA, 18 nt, Human
cccacacagcaguagcuc

SEQ ID NO: 1137780 - RNA, 16 nt, Human
uccaggcauaucugag

SEQ ID NO: 1137781 - RNA, 22 nt, Human
agcuagaaguacagccauauga

SEQ ID NO: 1137782 - RNA, 21 nt, Human
uaaauaauaaguugcugagau

SEQ ID NO: 1137783 - RNA, 22 nt, Human
uauuagggaacugcaagacuaa

SEQ ID NO: 1137784 - RNA, 22 nt, Human
gaggcagcgggucaggaccgug

SEQ ID NO: 1137785 - RNA, 22 nt, Human
uauaauuuuagaagagauggaa

SEQ ID NO: 1137786 - RNA, 19 nt, Human
cucagagaggggcagugcc

SEQ ID NO: 1137787 - RNA, 22 nt, Human
ucuggcagaaggcagaaauuca

SEQ ID NO: 1137788 - RNA, 22 nt, Human
gcuucugggguucuggcaugcu

SEQ ID NO: 1137789 - RNA, 22 nt, Human
agagggugcuggagagacauug

SEQ ID NO: 1137790 - RNA, 22 nt, Human
ccuggggauucugacacggagu

SEQ ID NO: 1137791 - RNA, 22 nt, Human
agcucccagcagagcuggccac

SEQ ID NO: 1137792 - RNA, 22 nt, Human
uauuuaaaaagaggccagcugg

SEQ ID NO: 1137793 - RNA, 22 nt, Human
ucugucaaaugagcaaguaacu

SEQ ID NO: 1137794 - RNA, 22 nt, Human
gcugggcugagcuagacuuggc

SEQ ID NO: 1137795 - RNA, 22 nt, Human
gcaaacuguuggaguagagucu

SEQ ID NO: 1137796 - RNA, 22 nt, Human
ccugggcucaccaugccuugga

SEQ ID NO: 1137797 - RNA, 22 nt, Human
aggcugugacagggucauggag

SEQ ID NO: 1137798 - RNA, 22 nt, Human
cuccaggccauggcugcggagg

SEQ ID NO: 1137799 - RNA, 22 nt, Human
agcaggcuuuccacagaaggag

SEQ ID NO: 1137800 - RNA, 17 nt, Human
ugcaggcuguuauagcc

SEQ ID NO: 1137801 - RNA, 22 nt, Human
gcuuggaaguaggauugggaga

SEQ ID NO: 1137802 - RNA, 22 nt, Human
ugucuucaucuccaugcacaga

SEQ ID NO: 1137803 - RNA, 22 nt, Human
agggcuccaggggcugggugac

SEQ ID NO: 1137804 - RNA, 22 nt, Human
cuucugggcauggcagagccug

SEQ ID NO: 1137805 - RNA, 22 nt, Human
auggcuagcaccgcguugcugg

SEQ ID NO: 1137806 - RNA, 22 nt, Human
ucccacccccuccaaggaggaa

SEQ ID NO: 1137807 - RNA, 18 nt, Human
cccucuugcacaaagcaa

SEQ ID NO: 1137808 - RNA, 22 nt, Human
uauguacuacacuagaacauuu

SEQ ID NO: 1137809 - RNA, 22 nt, Human
accaggcaguauggugcugcaa

SEQ ID NO: 1137810 - RNA, 22 nt, Human
uggcgucucucauaaguaugug

SEQ ID NO: 1137811 - RNA, 22 nt, Human
gaggcacagucccgaggcaagg

SEQ ID NO: 1137812 - RNA, 22 nt, Human
ucagcucuguguacaguuagca

SEQ ID NO: 1137813 - RNA, 22 nt, Human
aggcuguguggaugagucuuac

SEQ ID NO: 1137814 - RNA, 22 nt, Human
uccugcagccaagggucaucga

SEQ ID NO: 1137815 - RNA, 22 nt, Human
uuuauugacccaaagcgagagu

SEQ ID NO: 1137816 - RNA, 22 nt, Human
cacauaauaaauguuccugaug

SEQ ID NO: 1137817 - RNA, 22 nt, Human
ccagagcccagggucaugcagg

SEQ ID NO: 1137818 - RNA, 21 nt, Human
ggccucagccaccuggcucug

SEQ ID NO: 1137819 - RNA, 20 nt, Human
aguuuauuccaggagaacug

SEQ ID NO: 1137820 - RNA, 22 nt, Human
ucaggcucucagaccaacagca

SEQ ID NO: 1137821 - RNA, 22 nt, Human
ugagcaucuuuuuacagguuua

SEQ ID NO: 1137822 - RNA, 22 nt, Human
uccugcagagucccacugauuu

SEQ ID NO: 1137823 - RNA, 22 nt, Human
ucccagggcacucacccucccu

SEQ ID NO: 1137824 - RNA, 22 nt, Human
aaauuucuggaagugucagagu

SEQ ID NO: 1137825 - RNA, 22 nt, Human
cauuuguaucugggcugcugug

SEQ ID NO: 1137826 - RNA, 22 nt, Human
cagauuuaccuaacuccaaguu

SEQ ID NO: 1137827 - RNA, 23 nt, Human
cugcagagaacugagggacagcc

SEQ ID NO: 1137828 - RNA, 22 nt, Human
ccucugccaccucccacgaggc

SEQ ID NO: 1137829 - RNA, 22 nt, Human
cagacccugggccacagaggag

SEQ ID NO: 1137830 - RNA, 22 nt, Human
aaaagguuuugaguacaaauau

SEQ ID NO: 1137831 - RNA, 22 nt, Human
uucaagauggcaccagugagug

SEQ ID NO: 1137832 - RNA, 23 nt, Human
ugagcaucacaggagaaccaggc

SEQ ID NO: 1137833 - RNA, 22 nt, Human
ucuggcaggcaaucggcucugg

SEQ ID NO: 1137834 - RNA, 22 nt, Human
ucauuuguucaucugcucuucu

SEQ ID NO: 1137835 - RNA, 22 nt, Human
agggcuccuaugccccauggac

SEQ ID NO: 1137836 - RNA, 22 nt, Human
uacacacaugcauuugccuuau

SEQ ID NO: 1137837 - RNA, 22 nt, Human
uuauuagcugggcuucagggug

SEQ ID NO: 1137838 - RNA, 22 nt, Human
agggaccucuucuugcagcuga

SEQ ID NO: 1137839 - RNA, 22 nt, Human
uuaucacuuaugagcuuuuugc

SEQ ID NO: 1137840 - RNA, 22 nt, Human
ccacccagcagaggaggcaaga

SEQ ID NO: 1137841 - RNA, 22 nt, Human
uccacacacauuucuaugugca

SEQ ID NO: 1137842 - RNA, 22 nt, Human
uagggcucugagaguucagccu

SEQ ID NO: 1137843 - RNA, 22 nt, Human
auacauucaaaggaaggauaga

SEQ ID NO: 1137844 - RNA, 22 nt, Human
cagugggggggccaugcugcag

SEQ ID NO: 1137845 - RNA, 22 nt, Human
cauuugcagagggugacacucu

SEQ ID NO: 1137846 - RNA, 22 nt, Human
ucugauuagagcauucuugagu

SEQ ID NO: 1137847 - RNA, 22 nt, Human
gggcugacuccuauuggaugaa

SEQ ID NO: 1137848 - RNA, 22 nt, Human
agaugguuuugucuuuaugauu

SEQ ID NO: 1137849 - RNA, 18 nt, Human
uagggcucuagggaguga

SEQ ID NO: 1137850 - RNA, 22 nt, Human
auaaacaguaaaugugagcagu

SEQ ID NO: 1137851 - RNA, 21 nt, Human
aauuacagauggaauuacaga

SEQ ID NO: 1137852 - RNA, 22 nt, Human
ccugggcuccacuccaagagca

SEQ ID NO: 1137853 - RNA, 22 nt, Human
uugcagcuucgagucuaucugu

SEQ ID NO: 1137854 - RNA, 22 nt, Human
guuaauuugcagcuuucgagcu

SEQ ID NO: 1137855 - RNA, 22 nt, Human
ccugccucccagagguccucua

SEQ ID NO: 1137856 - RNA, 22 nt, Human
agaggcuucucggauggggcag

SEQ ID NO: 1137857 - RNA, 22 nt, Human
gaugaagcuaaaucuaagguuu

SEQ ID NO: 1137858 - RNA, 22 nt, Human
aacccaggguggagguugcagu

SEQ ID NO: 1137859 - RNA, 22 nt, Human
ucucuuaaaggucuucagcuga

SEQ ID NO: 1137860 - RNA, 22 nt, Human
uuuucauuguuccucgagcauu

SEQ ID NO: 1137861 - RNA, 22 nt, Human
uuuugagauggugucucgcucc

SEQ ID NO: 1137862 - RNA, 22 nt, Human
gaauccaggguuguuugagcua

SEQ ID NO: 1137863 - RNA, 22 nt, Human
ucuccgaucacagguuuucaau

SEQ ID NO: 1137864 - RNA, 22 nt, Human
uuuauacuccacucugcaagcg

SEQ ID NO: 1137865 - RNA, 22 nt, Human
ugucaagucucugaaugaaaug

SEQ ID NO: 1137866 - RNA, 22 nt, Human
augugcaaauccaaugugaaug

SEQ ID NO: 1137867 - RNA, 22 nt, Human
ccacacuaaacugcucaaacca

SEQ ID NO: 1137868 - RNA, 22 nt, Human
caucacagaaauaaacauaccu

SEQ ID NO: 1137869 - RNA, 22 nt, Human
aaaauccucuaauucuagaaua

SEQ ID NO: 1137870 - RNA, 22 nt, Human
ugggacucacucuuuuggccag

SEQ ID NO: 1137871 - RNA, 22 nt, Human
agauacaaaagauaagauuuag

SEQ ID NO: 1137872 - RNA, 22 nt, Human
cucuuaaagcuuccaguuucaa

SEQ ID NO: 1137873 - RNA, 22 nt, Human
uaggccauucuuggagcuuacu

SEQ ID NO: 1137874 - RNA, 22 nt, Human
uuucacaagacagcuacuguug

SEQ ID NO: 1137875 - RNA, 22 nt, Human
cagaggcauacucccagucuug

SEQ ID NO: 1137876 - RNA, 22 nt, Human
guggcagugaaggucauagcau

SEQ ID NO: 1137877 - RNA, 22 nt, Human
ccuggcagguggagguugcagu

SEQ ID NO: 1137878 - RNA, 22 nt, Human
acuggcagguccaucgcccuuu

SEQ ID NO: 1137879 - RNA, 22 nt, Human
cccugcagaccaaugccauaga

SEQ ID NO: 1137880 - RNA, 22 nt, Human
aagggcucugggcuacgcacug

SEQ ID NO: 1137881 - RNA, 22 nt, Human
acacucacccucccacugccug

SEQ ID NO: 1137882 - RNA, 22 nt, Human
augcagcugugggcaagaaaug

SEQ ID NO: 1137883 - RNA, 22 nt, Human
agagacaggguuuugucguguu

SEQ ID NO: 1137884 - RNA, 22 nt, Human
uuucaugauuaacuuagugaau

SEQ ID NO: 1137885 - RNA, 22 nt, Human
cccaggcagucuggcucuaaag

SEQ ID NO: 1137886 - RNA, 22 nt, Human
cagcuuuauugagguauaauug

SEQ ID NO: 1137887 - RNA, 22 nt, Human
guuucgucaggcuuauucuauc

SEQ ID NO: 1137888 - RNA, 22 nt, Human
ugcaggcugcuggcaguagcuu

SEQ ID NO: 1137889 - RNA, 22 nt, Human
aagggcucugugcuugucccau

SEQ ID NO: 1137890 - RNA, 22 nt, Human
gggcaaaaccugggcaucauga

SEQ ID NO: 1137891 - RNA, 22 nt, Human
ccuggcagggcugcaguaaugg

SEQ ID NO: 1137892 - RNA, 22 nt, Human
agaggcuuggaggugcaagguu

SEQ ID NO: 1137893 - RNA, 22 nt, Human
ucagagaguuacacaaauuguu

SEQ ID NO: 1137894 - RNA, 20 nt, Human
ucacuguaauugccuacauu

SEQ ID NO: 1137895 - RNA, 22 nt, Human
uccaggagaggccugaccaggu

SEQ ID NO: 1137896 - RNA, 22 nt, Human
ggcggguguaaguaggacagcg

SEQ ID NO: 1137897 - RNA, 22 nt, Human
cccaggcagugcugaucccuca

SEQ ID NO: 1137898 - RNA, 22 nt, Human
agagucccagggacacuccaga

SEQ ID NO: 1137899 - RNA, 22 nt, Human
gcugggcugcgucggggaagcc

SEQ ID NO: 1137900 - RNA, 20 nt, Human
agcauuugaaauaugacuau

SEQ ID NO: 1137901 - RNA, 22 nt, Human
acagguggcuuauuggcugauu

SEQ ID NO: 1137902 - RNA, 22 nt, Human
cugagggucaacuugauuguau

SEQ ID NO: 1137903 - RNA, 18 nt, Human
cuccuccacagccccugc

SEQ ID NO: 1137904 - RNA, 22 nt, Human
cagauuuagaguggggcuugga

SEQ ID NO: 1137905 - RNA, 21 nt, Human
aggcugcuggcucaggguccu

SEQ ID NO: 1137906 - RNA, 22 nt, Human
gccuggcacaguagggacccaa

SEQ ID NO: 1137907 - RNA, 22 nt, Human
acauuuagaguucuuuacucca

SEQ ID NO: 1137908 - RNA, 22 nt, Human
aagcuuuaaggaauuuuaugga

SEQ ID NO: 1137909 - RNA, 22 nt, Human
ucacaggcuugugaacauugca

SEQ ID NO: 1137910 - RNA, 22 nt, Human
caggacugauguuccuccagcc

SEQ ID NO: 1137911 - RNA, 22 nt, Human
aggcuuuggggcauucuguguu

SEQ ID NO: 1137912 - RNA, 22 nt, Human
ucacauaaauuauacaauuuca

SEQ ID NO: 1137913 - RNA, 22 nt, Human
acaggcucgugcgcgcacgugu

SEQ ID NO: 1137914 - RNA, 20 nt, Human
auacacaugcagacagaugc

SEQ ID NO: 1137915 - RNA, 22 nt, Human
ugagugugcagggaaguggcgg

SEQ ID NO: 1137916 - RNA, 22 nt, Human
auugcuuaucuaucuuuaaguc

SEQ ID NO: 1137917 - RNA, 22 nt, Human
ucaggcucuacacuugacacac

SEQ ID NO: 1137918 - RNA, 22 nt, Human
acugauacgguuuuagagucca

SEQ ID NO: 1137919 - RNA, 22 nt, Human
cacauaagaaaugaauaugaga

SEQ ID NO: 1137920 - RNA, 22 nt, Human
cuguaugaaauugucauuuuua

SEQ ID NO: 1137921 - RNA, 22 nt, Human
cuguaugauuccauuucuauaa

SEQ ID NO: 1137922 - RNA, 22 nt, Human
ucuuccagaaugcauucucuuu

SEQ ID NO: 1137923 - RNA, 22 nt, Human
aaacaccagucccaguauacac

SEQ ID NO: 1137924 - RNA, 22 nt, Human
ugcauguuaagaaaauauugag

SEQ ID NO: 1137925 - RNA, 22 nt, Human
cagggacccuacuagcucacac

SEQ ID NO: 1137926 - RNA, 22 nt, Human
auauuaggugcucaauacaugc

SEQ ID NO: 1137927 - RNA, 22 nt, Human
aagaugcagcuuuacaauaagg

SEQ ID NO: 1137928 - RNA, 21 nt, Human
uccugcagaaugccuuccuac

SEQ ID NO: 1137929 - RNA, 22 nt, Human
ucugucaauauaugugcugcag

SEQ ID NO: 1137930 - RNA, 22 nt, Human
cacauacuuguguguacauaug

SEQ ID NO: 1137931 - RNA, 22 nt, Human
gccuccuguuaugccaugugcc

SEQ ID NO: 1137932 - RNA, 22 nt, Human
uccugggguuuuggccgcagcu

SEQ ID NO: 1137933 - RNA, 22 nt, Human
uacacagacucuucaauucaga

SEQ ID NO: 1137934 - RNA, 22 nt, Human
uggacuggaaugcugauccucu

SEQ ID NO: 1137935 - RNA, 22 nt, Human
acaugauuuuaguaucauaaua

SEQ ID NO: 1137936 - RNA, 22 nt, Human
cauuuauugguuaggccagcag

SEQ ID NO: 1137937 - RNA, 20 nt, Human
gcuccccuucucugggccuc

SEQ ID NO: 1137938 - RNA, 21 nt, Human
uccugccuuaguccagagcag

SEQ ID NO: 1137939 - RNA, 22 nt, Human
cuccaguggcaaguccgggcgg

SEQ ID NO: 1137940 - RNA, 22 nt, Human
agcaaucaccaccucuauauuu

SEQ ID NO: 1137941 - RNA, 22 nt, Human
uuccaagugcccauauuucauc

SEQ ID NO: 1137942 - RNA, 22 nt, Human
gcuccuggguguggcugccccu

SEQ ID NO: 1137943 - RNA, 22 nt, Human
ggcagggaguggagacucccua

SEQ ID NO: 1137944 - RNA, 22 nt, Human
ucuuugaugugguuaauuauga

SEQ ID NO: 1137945 - RNA, 22 nt, Human
uuuuaccugaaccacacaguau

SEQ ID NO: 1137946 - RNA, 22 nt, Human
gcugccacauuuucaggacuaa

SEQ ID NO: 1137947 - RNA, 22 nt, Human
cagcuauuuucucauuaaggau

SEQ ID NO: 1137948 - RNA, 22 nt, Human
cugguggagagugggcucugga

SEQ ID NO: 1137949 - RNA, 22 nt, Human
ccugggcucacagccaaggcuc

SEQ ID NO: 1137950 - RNA, 22 nt, Human
uuaacauuguccuuagcagauu

SEQ ID NO: 1137951 - RNA, 21 nt, Human
gaugaagcaaucuuucuguug

SEQ ID NO: 1137952 - RNA, 22 nt, Human
gggcucucgauuagacccuggg

SEQ ID NO: 1137953 - RNA, 22 nt, Human
aauguaugacaguucuaguggu

SEQ ID NO: 1137954 - RNA, 22 nt, Human
caguaaaagauggaaauagaau

SEQ ID NO: 1137955 - RNA, 22 nt, Human
ugucagaggcucagggucucag

SEQ ID NO: 1137956 - RNA, 21 nt, Human
ucuggcaggcacgggcccagc

SEQ ID NO: 1137957 - RNA, 22 nt, Human
gggggcucugacucccucagcu

SEQ ID NO: 1137958 - RNA, 22 nt, Human
cacccacauuccaucacucugc

SEQ ID NO: 1137959 - RNA, 22 nt, Human
cauuguuaccaucuuuuaccua

SEQ ID NO: 1137960 - RNA, 22 nt, Human
ggggcuccagucuucacauuuu

SEQ ID NO: 1137961 - RNA, 23 nt, Human
cuguaugauguuaaguggaaagc

SEQ ID NO: 1137962 - RNA, 22 nt, Human
ucauuacaguguuuauaugucu

SEQ ID NO: 1137963 - RNA, 21 nt, Human
cauuagggcagaagcaggaag

SEQ ID NO: 1137964 - RNA, 22 nt, Human
ggagcugaguucuucagccggg

SEQ ID NO: 1137965 - RNA, 22 nt, Human
cuucuggguauuccagauaccu

SEQ ID NO: 1137966 - RNA, 22 nt, Human
acauaaugagcucuuuauaaau

SEQ ID NO: 1137967 - RNA, 22 nt, Human
uuccuggcauagagagggcaca

SEQ ID NO: 1137968 - RNA, 22 nt, Human
gugggcuuguuuugaugagauc

SEQ ID NO: 1137969 - RNA, 22 nt, Human
cacaggccugucucuuucuaac

SEQ ID NO: 1137970 - RNA, 22 nt, Human
ccaggcucaggugcgagagaca

SEQ ID NO: 1137971 - RNA, 22 nt, Human
cacaauuuuaauacacagucaa

SEQ ID NO: 1137972 - RNA, 22 nt, Human
cuggggacugaaggauguugcu

SEQ ID NO: 1137973 - RNA, 22 nt, Human
aaaauccuuagccgagugaggu

SEQ ID NO: 1137974 - RNA, 23 nt, Human
ugcaggcuaggaagagagccuuc

SEQ ID NO: 1137975 - RNA, 21 nt, Human
acagauauuucauugaacauu

SEQ ID NO: 1137976 - RNA, 22 nt, Human
ucagagaguuagugucuuagcu

SEQ ID NO: 1137977 - RNA, 22 nt, Human
ccuggcaggccccuccuggauu

SEQ ID NO: 1137978 - RNA, 22 nt, Human
aauacuauguagccaaaauaau

SEQ ID NO: 1137979 - RNA, 22 nt, Human
uuaaaacugcaaauccuacuga

SEQ ID NO: 1137980 - RNA, 22 nt, Human
gcuggcagguccaagauagagc

SEQ ID NO: 1137981 - RNA, 22 nt, Human
cccugcagaaccacagacaaac

SEQ ID NO: 1137982 - RNA, 22 nt, Human
ucugggcuuuuccaugccugug

SEQ ID NO: 1137983 - RNA, 22 nt, Human
guggcagguuccguagacagca

SEQ ID NO: 1137984 - RNA, 22 nt, Human
acaaauuuauugaagggcauau

SEQ ID NO: 1137985 - RNA, 22 nt, Human
agccaccuucuccaaggccuag

SEQ ID NO: 1137986 - RNA, 22 nt, Human
uaacacaugguucugucaggaa

SEQ ID NO: 1137987 - RNA, 22 nt, Human
uugugaaauguuucaaaauagu

SEQ ID NO: 1137988 - RNA, 22 nt, Human
caguguuugcuuaaguuauaug

SEQ ID NO: 1137989 - RNA, 17 nt, Human
uccaggcagcaacugag

SEQ ID NO: 1137990 - RNA, 22 nt, Human
uggcacaguccugggugccugc

SEQ ID NO: 1137991 - RNA, 22 nt, Human
gcagccucaaacuccccagcuc

SEQ ID NO: 1137992 - RNA, 22 nt, Human
ucaggcucaggaauguguuuau

SEQ ID NO: 1137993 - RNA, 22 nt, Human
cuggaaagugucuccauccugg

SEQ ID NO: 1137994 - RNA, 22 nt, Human
gggcuccaccuagggacacugg

SEQ ID NO: 1137995 - RNA, 22 nt, Human
aggcaggggagcuggaagggua

SEQ ID NO: 1137996 - RNA, 22 nt, Human
ucugcagaauucgaggaagaaa

SEQ ID NO: 1137997 - RNA, 22 nt, Human
caugaagcacagcucucuuuuu

SEQ ID NO: 1137998 - RNA, 22 nt, Human
aagcuuuagagaugaguuccuu

SEQ ID NO: 1137999 - RNA, 22 nt, Human
acagcucuguugccagaucugc

SEQ ID NO: 1138000 - RNA, 22 nt, Human
cuggaucuguuugugcuugugg

SEQ ID NO: 1138001 - RNA, 22 nt, Human
ucccagccuuucuuuucugcug

SEQ ID NO: 1138002 - RNA, 23 nt, Human
ucugcagacgcuguucuauuguc

SEQ ID NO: 1138003 - RNA, 22 nt, Human
aaaauauuuuagggccaggaga

SEQ ID NO: 1138004 - RNA, 22 nt, Human
guccuggcaccucacuggcuac

SEQ ID NO: 1138005 - RNA, 22 nt, Human
caugaagcauguuuugucauga

SEQ ID NO: 1138006 - RNA, 22 nt, Human
ucaucacauguguagucauccc

SEQ ID NO: 1138007 - RNA, 22 nt, Human
cacugucccuguuuccuggaaa

SEQ ID NO: 1138008 - RNA, 22 nt, Human
cagcauuuucuuaauguaggug

SEQ ID NO: 1138009 - RNA, 20 nt, Human
uccaggcagacagcuauggg

SEQ ID NO: 1138010 - RNA, 22 nt, Human
uggccaggaggcugcuucugac

SEQ ID NO: 1138011 - RNA, 22 nt, Human
gaaucauuuagcucugcaugga

SEQ ID NO: 1138012 - RNA, 22 nt, Human
uaacacauauuugcaguaagca

SEQ ID NO: 1138013 - RNA, 22 nt, Human
uccagaccauggauggcugcaa

SEQ ID NO: 1138014 - RNA, 22 nt, Human
cagguuggucggcaaguacaca

SEQ ID NO: 1138015 - RNA, 20 nt, Human
uucaugggagcaaagaggcc

SEQ ID NO: 1138016 - RNA, 22 nt, Human
gguuucaaaguggacaguuagu

SEQ ID NO: 1138017 - RNA, 22 nt, Human
uuuuucauauuccccucucugg

SEQ ID NO: 1138018 - RNA, 22 nt, Human
agacaaguucugugggucaccu

SEQ ID NO: 1138019 - RNA, 22 nt, Human
cuccugcaagccuccccaagca

SEQ ID NO: 1138020 - RNA, 22 nt, Human
uacauugcuuucuaauacaucu

SEQ ID NO: 1138021 - RNA, 17 nt, Human
gcccacccuuaggagcu

SEQ ID NO: 1138022 - RNA, 22 nt, Human
cauguacaaaaggcaaaugccu

SEQ ID NO: 1138023 - RNA, 22 nt, Human
cugggccugucagggcuuuuug

SEQ ID NO: 1138024 - RNA, 22 nt, Human
cacucuccagcacaccccauuu

SEQ ID NO: 1138025 - RNA, 22 nt, Human
auuuuccucaagccucuggaag

SEQ ID NO: 1138026 - RNA, 22 nt, Human
aaauuucuguuguuuugagcca

SEQ ID NO: 1138027 - RNA, 22 nt, Human
aaaguucuuucucuuauuuggu

SEQ ID NO: 1138028 - RNA, 22 nt, Human
ugaccugcagucaagaggggaa

SEQ ID NO: 1138029 - RNA, 22 nt, Human
uagaauucaagauucaacaggc

SEQ ID NO: 1138030 - RNA, 22 nt, Human
uggcuaggaauccaugacucuc

SEQ ID NO: 1138031 - RNA, 22 nt, Human
ggcagggaagcuggcaucacgg

SEQ ID NO: 1138032 - RNA, 19 nt, Human
auauauguauacaaugugg

SEQ ID NO: 1138033 - RNA, 22 nt, Human
uccugcagguggaugauucucu

SEQ ID NO: 1138034 - RNA, 22 nt, Human
gguuccuucugaggucccugua

SEQ ID NO: 1138035 - RNA, 22 nt, Human
guucacaagaguuacagacaga

SEQ ID NO: 1138036 - RNA, 22 nt, Human
uacauguuugguaaaugauggc

SEQ ID NO: 1138037 - RNA, 22 nt, Human
uguuuauuacaguucuuggaau

SEQ ID NO: 1138038 - RNA, 22 nt, Human
cuguccagcuuggcuccugggg

SEQ ID NO: 1138039 - RNA, 22 nt, Human
uuucugaaaucucuuuugagga

SEQ ID NO: 1138040 - RNA, 22 nt, Human
cacccagcacagagggaggcga

SEQ ID NO: 1138041 - RNA, 22 nt, Human
gcuggcagggacagcugcgugu

SEQ ID NO: 1138042 - RNA, 22 nt, Human
gcacauacugcaaagauuacua

SEQ ID NO: 1138043 - RNA, 22 nt, Human
ucugggcuuuaguuuguuaucu

SEQ ID NO: 1138044 - RNA, 22 nt, Human
ccagcuuuggaguguuguugcu

SEQ ID NO: 1138045 - RNA, 22 nt, Human
uuccaaguagaagcauuugcau

SEQ ID NO: 1138046 - RNA, 22 nt, Human
uugugaaacauucauggauuug

SEQ ID NO: 1138047 - RNA, 22 nt, Human
guccaggucuggacccugagcc

SEQ ID NO: 1138048 - RNA, 22 nt, Human
uugguuccuucugaaaguauug

SEQ ID NO: 1138049 - RNA, 22 nt, Human
gagcuuuaagggcacuggucuu

SEQ ID NO: 1138050 - RNA, 20 nt, Human
acuggcagccugccugcugu

SEQ ID NO: 1138051 - RNA, 22 nt, Human
ucacacacauuugcugucugau

SEQ ID NO: 1138052 - RNA, 22 nt, Human
acagagagaaacaaucagcagc

SEQ ID NO: 1138053 - RNA, 22 nt, Human
ugcuucuguauugaaauuguua

SEQ ID NO: 1138054 - RNA, 22 nt, Human
caugaaugcuggguucauguaa

SEQ ID NO: 1138055 - RNA, 22 nt, Human
uuguaaacugcugcaggagugc

SEQ ID NO: 1138056 - RNA, 22 nt, Human
uggcaguggauaggggagcggu

SEQ ID NO: 1138057 - RNA, 22 nt, Human
guguaugagccuccagcugggc

SEQ ID NO: 1138058 - RNA, 22 nt, Human
cacauaauacauguuccacuua

SEQ ID NO: 1138059 - RNA, 22 nt, Human
ucaaggagcccacagucuaaug

SEQ ID NO: 1138060 - RNA, 22 nt, Human
aagggcucucugcauugaaauu

SEQ ID NO: 1138061 - RNA, 22 nt, Human
cccagcuugucugauucagccu

SEQ ID NO: 1138062 - RNA, 22 nt, Human
ugaccugcguaggugguuucug

SEQ ID NO: 1138063 - RNA, 19 nt, Human
ccaggccuccugggagguc

SEQ ID NO: 1138064 - RNA, 22 nt, Human
cucuccaggacuuuggcccaau

SEQ ID NO: 1138065 - RNA, 17 nt, Human
cccaggccgccgggagc

SEQ ID NO: 1138066 - RNA, 22 nt, Human
ucauuguuucugcuuuucauga

SEQ ID NO: 1138067 - RNA, 22 nt, Human
gaaaacacuuugaucugaaagu

SEQ ID NO: 1138068 - RNA, 22 nt, Human
caggcccucaggcaagggcucu

SEQ ID NO: 1138069 - RNA, 22 nt, Human
ucuggcagagauauccauccca

SEQ ID NO: 1138070 - RNA, 22 nt, Human
ggcucugcagugacuugagggg

SEQ ID NO: 1138071 - RNA, 22 nt, Human
uccaggccauugacugcauccu

SEQ ID NO: 1138072 - RNA, 22 nt, Human
gaacacaucacauuuuacagug

SEQ ID NO: 1138073 - RNA, 22 nt, Human
uucacuuaacaucauaucauga

SEQ ID NO: 1138074 - RNA, 22 nt, Human
ucuggggaugaggaccuagaug

SEQ ID NO: 1138075 - RNA, 21 nt, Human
acacacugaguuuuccacugu

SEQ ID NO: 1138076 - RNA, 22 nt, Human
ccaggccuagccccugagggua

SEQ ID NO: 1138077 - RNA, 22 nt, Human
uaugucaaaguuaagaaauagg

SEQ ID NO: 1138078 - RNA, 22 nt, Human
aauuagggagagguagcuaggu

SEQ ID NO: 1138079 - RNA, 22 nt, Human
cagguggccaguacucaaggau

SEQ ID NO: 1138080 - RNA, 22 nt, Human
ucauuuguaccauuuuuuaaga

SEQ ID NO: 1138081 - RNA, 22 nt, Human
uaauuuuaacugugcuguuugg

SEQ ID NO: 1138082 - RNA, 22 nt, Human
gcaggcucguuggaaguccccu

SEQ ID NO: 1138083 - RNA, 22 nt, Human
aauacugccugugagguaacuc

SEQ ID NO: 1138084 - RNA, 22 nt, Human
aaaccaucagauaauucauacu

SEQ ID NO: 1138085 - RNA, 22 nt, Human
cagugaggaguccagggcagag

SEQ ID NO: 1138086 - RNA, 22 nt, Human
ugcaggcuggcagugcugaaau

SEQ ID NO: 1138087 - RNA, 22 nt, Human
ccaggccugcaucugcugcgca

SEQ ID NO: 1138088 - RNA, 22 nt, Human
uucugucacuuaggaggucaua

SEQ ID NO: 1138089 - RNA, 22 nt, Human
ugcuucugacugggucaguuga

SEQ ID NO: 1138090 - RNA, 22 nt, Human
guggggacgggauggcucacug

SEQ ID NO: 1138091 - RNA, 22 nt, Human
ucuuuauuuuaugcuugugcaa

SEQ ID NO: 1138092 - RNA, 22 nt, Human
ugaaugauguauaauauugaga

SEQ ID NO: 1138093 - RNA, 18 nt, Human
cucucuuuccacucuuug

SEQ ID NO: 1138094 - RNA, 22 nt, Human
cacacacucuuccuggcaccua

SEQ ID NO: 1138095 - RNA, 19 nt, Human
cccucuugcacaaagcaaa

SEQ ID NO: 1138096 - RNA, 22 nt, Human
gguguugggcucacugguccuu

SEQ ID NO: 1138097 - RNA, 22 nt, Human
uggcagugucuuaucaggagug

SEQ ID NO: 1138098 - RNA, 22 nt, Human
uuagggaaggcugcugucagcu

SEQ ID NO: 1138099 - RNA, 22 nt, Human
cauuuguauguuccuccuuagg

SEQ ID NO: 1138100 - RNA, 18 nt, Human
agcagguggcgucugcag

SEQ ID NO: 1138101 - RNA, 22 nt, Human
gcacccagcccagggcgugaug

SEQ ID NO: 1138102 - RNA, 22 nt, Human
uaauaguugugacuuuguaaag

SEQ ID NO: 1138103 - RNA, 22 nt, Human
agggccccauagucacugcccg

SEQ ID NO: 1138104 - RNA, 22 nt, Human
ugcagggaauccagucuagggu

SEQ ID NO: 1138105 - RNA, 22 nt, Human
gcagggguuuucugacuugagu

SEQ ID NO: 1138106 - RNA, 22 nt, Human
cagagcauaauugacaugaggu

SEQ ID NO: 1138107 - RNA, 22 nt, Human
ucuggcagaggaaggaggccug

SEQ ID NO: 1138108 - RNA, 22 nt, Human
cacacaguaggcacucauuaau

SEQ ID NO: 1138109 - RNA, 22 nt, Human
aauuucuccaagaaugcuuaga

SEQ ID NO: 1138110 - RNA, 22 nt, Human
acaaauccagugaacuccagug

SEQ ID NO: 1138111 - RNA, 19 nt, Human
cacacccaugcuugccaag

SEQ ID NO: 1138112 - RNA, 22 nt, Human
cacaaaaguaggaggcaggcgg

SEQ ID NO: 1138113 - RNA, 22 nt, Human
cuacauaaauauuuaugugucu

SEQ ID NO: 1138114 - RNA, 22 nt, Human
cuuccaagaugaacagcaagcg

SEQ ID NO: 1138115 - RNA, 22 nt, Human
gaauuucuggacccuuugagaa

SEQ ID NO: 1138116 - RNA, 22 nt, Human
gggaccugaggcccugcuccac

SEQ ID NO: 1138117 - RNA, 22 nt, Human
uucauacaaugggauauuauga

SEQ ID NO: 1138118 - RNA, 22 nt, Human
cucccaagauaaauaaggcagu

SEQ ID NO: 1138119 - RNA, 22 nt, Human
gguuucaaauuaaagucuuaag

SEQ ID NO: 1138120 - RNA, 22 nt, Human
cuccugaggaaaagcuugguca

SEQ ID NO: 1138121 - RNA, 22 nt, Human
cagcuuugccaaguaaggucuu

SEQ ID NO: 1138122 - RNA, 22 nt, Human
ucuggggagucaaagagaccug

SEQ ID NO: 1138123 - RNA, 22 nt, Human
uggcagagaacacggcugaucu

SEQ ID NO: 1138124 - RNA, 22 nt, Human
aagguuaaauagguauuuucca

SEQ ID NO: 1138125 - RNA, 22 nt, Human
agauuucucuuucccuggcuga

SEQ ID NO: 1138126 - RNA, 22 nt, Human
auuaagggccaauccuccagcc

SEQ ID NO: 1138127 - RNA, 22 nt, Human
agcacugugauuuauaacauuu

SEQ ID NO: 1138128 - RNA, 22 nt, Human
ccugggcuuuggaacaguacuu

SEQ ID NO: 1138129 - RNA, 22 nt, Human
cagcucuggguaggaggaaucu

SEQ ID NO: 1138130 - RNA, 22 nt, Human
aaacacaucauucaugucguca

SEQ ID NO: 1138131 - RNA, 22 nt, Human
uuguaaauaguaguaagaugcc

SEQ ID NO: 1138132 - RNA, 22 nt, Human
cccagggaagggcuaccugagg

SEQ ID NO: 1138133 - RNA, 22 nt, Human
guagggacuguucucaccugag

SEQ ID NO: 1138134 - RNA, 22 nt, Human
uuagggacaaauuugcagaacc

SEQ ID NO: 1138135 - RNA, 22 nt, Human
aucaguuauuuuuaagcuauaa

SEQ ID NO: 1138136 - RNA, 22 nt, Human
uugaaaaaauugguagaggaug

SEQ ID NO: 1138137 - RNA, 22 nt, Human
ggcaggcuugauauggggggac

SEQ ID NO: 1138138 - RNA, 22 nt, Human
acaggccugagauuuugcauuu

SEQ ID NO: 1138139 - RNA, 22 nt, Human
uaugacuuauuucaucaguucu

SEQ ID NO: 1138140 - RNA, 22 nt, Human
auuauaaagaacaugugugugg

SEQ ID NO: 1138141 - RNA, 21 nt, Human
uucaaaguuugccuaaagauu

SEQ ID NO: 1138142 - RNA, 22 nt, Human
gcuggcagggugguugagagag

SEQ ID NO: 1138143 - RNA, 22 nt, Human
ucucacagugcaggucugucuc

SEQ ID NO: 1138144 - RNA, 22 nt, Human
cauaauuucacugucguauggc

SEQ ID NO: 1138145 - RNA, 22 nt, Human
gggcuaggcuuggccagcacug

SEQ ID NO: 1138146 - RNA, 19 nt, Human
acuggcaguuucugcaugg

SEQ ID NO: 1138147 - RNA, 22 nt, Human
cugggcuguuuguucuggucuc

SEQ ID NO: 1138148 - RNA, 22 nt, Human
caccugcagggggagucaagag

SEQ ID NO: 1138149 - RNA, 22 nt, Human
ccuggcagaaagaguuacaccu

SEQ ID NO: 1138150 - RNA, 22 nt, Human
aucuccagauugugaucaucag

SEQ ID NO: 1138151 - RNA, 22 nt, Human
uucugucauuuagcauugucau

SEQ ID NO: 1138152 - RNA, 22 nt, Human
uguauaaaccauggacagcuuu

SEQ ID NO: 1138153 - RNA, 22 nt, Human
cuaaaauuaucaagauaauucc

SEQ ID NO: 1138154 - RNA, 20 nt, Human
cccacacccuucccacuugg

SEQ ID NO: 1138155 - RNA, 23 nt, Human
ggacacauuuauuucagaauuca

SEQ ID NO: 1138156 - RNA, 22 nt, Human
ucugucaucucuaaaauagaaa

SEQ ID NO: 1138157 - RNA, 22 nt, Human
ccagcuuucugggugguuucug

SEQ ID NO: 1138158 - RNA, 22 nt, Human
ucaggcucccugcugggcucug

SEQ ID NO: 1138159 - RNA, 22 nt, Human
uccaggcaaagccuuguagacg

SEQ ID NO: 1138160 - RNA, 22 nt, Human
acauacacaugaauauauuuuu

SEQ ID NO: 1138161 - RNA, 22 nt, Human
ugcuuuaucugacuuggcgcug

SEQ ID NO: 1138162 - RNA, 22 nt, Human
acaucuucacugguuucuggaa

SEQ ID NO: 1138163 - RNA, 22 nt, Human
cagcuuuguggccuugaccucg

SEQ ID NO: 1138164 - RNA, 22 nt, Human
ccaggcuccgcauagaccccac

SEQ ID NO: 1138165 - RNA, 22 nt, Human
uggccaggcuggucuggaacgc

SEQ ID NO: 1138166 - RNA, 22 nt, Human
uguguuuugaacucaucuacug

SEQ ID NO: 1138167 - RNA, 22 nt, Human
augggcuggggaagcucacucc

SEQ ID NO: 1138168 - RNA, 22 nt, Human
cugggcuggauaauucuuugcu

SEQ ID NO: 1138169 - RNA, 22 nt, Human
uuuaaaaaacuagucugagucu

SEQ ID NO: 1138170 - RNA, 22 nt, Human
guccucugggcuuugagcaguc

SEQ ID NO: 1138171 - RNA, 22 nt, Human
ggcuccaaagggcagugugagg

SEQ ID NO: 1138172 - RNA, 22 nt, Human
ucagcuuuuuacaugugaaaua

SEQ ID NO: 1138173 - RNA, 22 nt, Human
caacuuuaugauugguuuguca

SEQ ID NO: 1138174 - RNA, 22 nt, Human
uagucaaaccucagaauacccc

SEQ ID NO: 1138175 - RNA, 22 nt, Human
ugcagggacaggcucuggggau

SEQ ID NO: 1138176 - RNA, 22 nt, Human
cagcauuuggugaucaucuuaa

SEQ ID NO: 1138177 - RNA, 19 nt, Human
gcuggggaauggauauuga

SEQ ID NO: 1138178 - RNA, 22 nt, Human
acagauuuuaaaugacacuccc

SEQ ID NO: 1138179 - RNA, 22 nt, Human
gaaauauuacaguggaggggau

SEQ ID NO: 1138180 - RNA, 20 nt, Human
uggccucugagaugccacgg

SEQ ID NO: 1138181 - RNA, 19 nt, Human
cuuuucaucaacagccaau

SEQ ID NO: 1138182 - RNA, 20 nt, Human
ccaggccugggccugcucua

SEQ ID NO: 1138183 - RNA, 22 nt, Human
uucugggggccaggacaguggu

SEQ ID NO: 1138184 - RNA, 22 nt, Human
aacuuucaggcaaugaauauuu

SEQ ID NO: 1138185 - RNA, 23 nt, Human
caggacaugggaggaaguauggc

SEQ ID NO: 1138186 - RNA, 22 nt, Human
gccagguugcugacgacgaucu

SEQ ID NO: 1138187 - RNA, 22 nt, Human
auuuucaucauggguuuaacau

SEQ ID NO: 1138188 - RNA, 22 nt, Human
cuaugagaagaaaacaagauua

SEQ ID NO: 1138189 - RNA, 22 nt, Human
uuaguuagucccugguaccuuu

SEQ ID NO: 1138190 - RNA, 22 nt, Human
ccugccugucuuuauccccugu

SEQ ID NO: 1138191 - RNA, 22 nt, Human
ucuuugaaguugaaguaguugg

SEQ ID NO: 1138192 - RNA, 22 nt, Human
aagcuuuaugacuuggagacag

SEQ ID NO: 1138193 - RNA, 19 nt, Human
ccaaaagcaauuccaagua

SEQ ID NO: 1138194 - RNA, 22 nt, Human
aucuguuccccuaugcucucua

SEQ ID NO: 1138195 - RNA, 22 nt, Human
ugcaggcugcagucucaggugg

SEQ ID NO: 1138196 - RNA, 22 nt, Human
acagagagaggcccgaggcugc

SEQ ID NO: 1138197 - RNA, 22 nt, Human
uguagaaauuaguaagaucaac

SEQ ID NO: 1138198 - RNA, 19 nt, Human
cacaucagcagggcugugg

SEQ ID NO: 1138199 - RNA, 22 nt, Human
ucuugggauagugucucauggc

SEQ ID NO: 1138200 - RNA, 22 nt, Human
ggggcugagaauucagucucgg

SEQ ID NO: 1138201 - RNA, 22 nt, Human
gcuggcaguaaaggguuuggca

SEQ ID NO: 1138202 - RNA, 22 nt, Human
ccugccuguacuagagacccag

SEQ ID NO: 1138203 - RNA, 22 nt, Human
uggcagagagacucuccuugau

SEQ ID NO: 1138204 - RNA, 22 nt, Human
cagccucuuuccacaucaggca

SEQ ID NO: 1138205 - RNA, 22 nt, Human
agaggccuccgaaaggugggcu

SEQ ID NO: 1138206 - RNA, 22 nt, Human
cuuagggaauugggaggaugcc

SEQ ID NO: 1138207 - RNA, 22 nt, Human
agcaggugggaucaagcuggca

SEQ ID NO: 1138208 - RNA, 22 nt, Human
caggcugccuggaagaggacug

SEQ ID NO: 1138209 - RNA, 21 nt, Human
ccuggcagaagccugauaugc

SEQ ID NO: 1138210 - RNA, 22 nt, Human
auagauauuugaguuguuucca

SEQ ID NO: 1138211 - RNA, 22 nt, Human
ugucagagcaaugagguucagc

SEQ ID NO: 1138212 - RNA, 22 nt, Human
uccccaccccagaacuacuagg

SEQ ID NO: 1138213 - RNA, 22 nt, Human
cacccagcauuggcuaagagag

SEQ ID NO: 1138214 - RNA, 22 nt, Human
ugggcuucuggaguggggcaga

SEQ ID NO: 1138215 - RNA, 22 nt, Human
cuuccuccgaagaaguugcugg

SEQ ID NO: 1138216 - RNA, 22 nt, Human
ugcaggcucugugugugccugg

SEQ ID NO: 1138217 - RNA, 22 nt, Human
acacucuguaaugucacacucc

SEQ ID NO: 1138218 - RNA, 22 nt, Human
aagggcucugcugucucucccc

SEQ ID NO: 1138219 - RNA, 22 nt, Human
uugcagcuuagugauguuaucu

SEQ ID NO: 1138220 - RNA, 21 nt, Human
caguguggugaccagggucuc

SEQ ID NO: 1138221 - RNA, 22 nt, Human
uaugaacuguacuguacuaagc

SEQ ID NO: 1138222 - RNA, 22 nt, Human
agcuuuaugaggagaccuuagu

SEQ ID NO: 1138223 - RNA, 23 nt, Human
uugggcuggcucucgaugccucu

SEQ ID NO: 1138224 - RNA, 22 nt, Human
acaggcucaguucacuggauuu

SEQ ID NO: 1138225 - RNA, 22 nt, Human
uauaauuuggggaaaguggugu

SEQ ID NO: 1138226 - RNA, 22 nt, Human
uuuagacauggcuugcucacuu

SEQ ID NO: 1138227 - RNA, 22 nt, Human
ggcuuuauuuugcaugaaugcu

SEQ ID NO: 1138228 - RNA, 22 nt, Human
agugccccaugggugccugggg

SEQ ID NO: 1138229 - RNA, 22 nt, Human
ccuggcagacugugagggcagg

SEQ ID NO: 1138230 - RNA, 22 nt, Human
ucacacaugcuaagccagagau

SEQ ID NO: 1138231 - RNA, 22 nt, Human
cuuccucccggcccaugcucug

SEQ ID NO: 1138232 - RNA, 22 nt, Human
guaaaauucuagcaucugaaag

SEQ ID NO: 1138233 - RNA, 22 nt, Human
aauuaguaaccuaauuccaucu

SEQ ID NO: 1138234 - RNA, 22 nt, Human
ccugggcuuugcuggcaaggcc

SEQ ID NO: 1138235 - RNA, 22 nt, Human
cccaggcagccccagaagcuug

SEQ ID NO: 1138236 - RNA, 22 nt, Human
ugagagucucagaccuccuggu

SEQ ID NO: 1138237 - RNA, 22 nt, Human
agggccucugacgcccccagcc

SEQ ID NO: 1138238 - RNA, 22 nt, Human
cuauugaauuaacuauuaaagu

SEQ ID NO: 1138239 - RNA, 22 nt, Human
uuauuagguuuacauaaagguu

SEQ ID NO: 1138240 - RNA, 22 nt, Human
cccugcagccggccagcucauu

SEQ ID NO: 1138241 - RNA, 22 nt, Human
uagcuuuaccauagaagaguau

SEQ ID NO: 1138242 - RNA, 22 nt, Human
aauaacuuaagaaauuucccca

SEQ ID NO: 1138243 - RNA, 22 nt, Human
guuuuauaauugcuucauaaga

SEQ ID NO: 1138244 - RNA, 22 nt, Human
ugcuucugacuaagcugcauga

SEQ ID NO: 1138245 - RNA, 22 nt, Human
caaauaguaugagcaaugauuc

SEQ ID NO: 1138246 - RNA, 22 nt, Human
cuuaauuuaagccuagaaugca

SEQ ID NO: 1138247 - RNA, 22 nt, Human
ugcuccagugccugccccacag

SEQ ID NO: 1138248 - RNA, 22 nt, Human
cauucccacguguucuuugcuu

SEQ ID NO: 1138249 - RNA, 22 nt, Human
gaccucagugaauggucaugua

SEQ ID NO: 1138250 - RNA, 23 nt, Human
uagaaugucauucaaugauaugg

SEQ ID NO: 1138251 - RNA, 22 nt, Human
cucuggggaagcagccagcugg

SEQ ID NO: 1138252 - RNA, 20 nt, Human
guggcaggcagugaaggagc

SEQ ID NO: 1138253 - RNA, 20 nt, Human
cagagaccaggccagguguc

SEQ ID NO: 1138254 - RNA, 18 nt, Human
gcuuuauuucuuggggaa

SEQ ID NO: 1138255 - RNA, 22 nt, Human
ucuccaagaaaagaucucagcu

SEQ ID NO: 1138256 - RNA, 22 nt, Human
augggcugugagguccggcagg

SEQ ID NO: 1138257 - RNA, 22 nt, Human
uuacauuuugggguaaggauaa

SEQ ID NO: 1138258 - RNA, 22 nt, Human
cagucucucuuguagugcagcu

SEQ ID NO: 1138259 - RNA, 22 nt, Human
guccucuggugaaagcauuccc

SEQ ID NO: 1138260 - RNA, 22 nt, Human
ccaggaccuggagcucuaugaa

SEQ ID NO: 1138261 - RNA, 22 nt, Human
cucagagaaccuaagcggagga

SEQ ID NO: 1138262 - RNA, 22 nt, Human
uuugaaaagaaccaucgccuua

SEQ ID NO: 1138263 - RNA, 22 nt, Human
uugucaaguaaggcugacauuu

SEQ ID NO: 1138264 - RNA, 22 nt, Human
ucuucauauauaaaguggaaua

SEQ ID NO: 1138265 - RNA, 22 nt, Human
gcagcuuuggagguggaacucu

SEQ ID NO: 1138266 - RNA, 20 nt, Human
uuuacauuuugaaacaguga

SEQ ID NO: 1138267 - RNA, 22 nt, Human
cacacacuguuaauguaggagu

SEQ ID NO: 1138268 - RNA, 22 nt, Human
ucugggcugaaaugaaggccuu

SEQ ID NO: 1138269 - RNA, 17 nt, Human
gccugcaggcccgcaga

SEQ ID NO: 1138270 - RNA, 22 nt, Human
uccugcagcucugagaagcauc

SEQ ID NO: 1138271 - RNA, 22 nt, Human
guaugaaggcgagagcccacua

SEQ ID NO: 1138272 - RNA, 22 nt, Human
ucacauacacuaggauauuuuu

SEQ ID NO: 1138273 - RNA, 18 nt, Human
uguagagccagguuugcc

SEQ ID NO: 1138274 - RNA, 22 nt, Human
uucagagaagcaaaggcagauu

SEQ ID NO: 1138275 - RNA, 22 nt, Human
agauauauuuaagguaauaagu

SEQ ID NO: 1138276 - RNA, 22 nt, Human
acagcucuguguauugucaucu

SEQ ID NO: 1138277 - RNA, 22 nt, Human
cagugagguggauggauggccu

SEQ ID NO: 1138278 - RNA, 22 nt, Human
cauuuacuuaaaucuuuacaag

SEQ ID NO: 1138279 - RNA, 22 nt, Human
accaggcagucaccguccagga

SEQ ID NO: 1138280 - RNA, 22 nt, Human
ugcuuuauuaagagagaaauuu

SEQ ID NO: 1138281 - RNA, 22 nt, Human
cucagcucugacaggaggcauc

SEQ ID NO: 1138282 - RNA, 22 nt, Human
ucauuuguugaacuuuagugcg

SEQ ID NO: 1138283 - RNA, 22 nt, Human
acagguggggcacuuggagccu

SEQ ID NO: 1138284 - RNA, 23 nt, Human
auguuauuauuagcagucuugcc

SEQ ID NO: 1138285 - RNA, 22 nt, Human
ggcuucuguccucuggaucugu

SEQ ID NO: 1138286 - RNA, 23 nt, Human
ucacauaauccuucauccacagg

SEQ ID NO: 1138287 - RNA, 21 nt, Human
uccugcaggaggccugagagg

SEQ ID NO: 1138288 - RNA, 20 nt, Human
ggcugcaggacucauuggcu

SEQ ID NO: 1138289 - RNA, 22 nt, Human
ccuggggaaucuugcaggggaa

SEQ ID NO: 1138290 - RNA, 22 nt, Human
acacagaugcauuacacaucua

SEQ ID NO: 1138291 - RNA, 22 nt, Human
gaggagcugagccacguccugg

SEQ ID NO: 1138292 - RNA, 22 nt, Human
cuaaaauuaccuaccaguuuag

SEQ ID NO: 1138293 - RNA, 22 nt, Human
acuuuauuuccuauugcaucca

SEQ ID NO: 1138294 - RNA, 22 nt, Human
uaaauucugaucaaguuccuuc

SEQ ID NO: 1138295 - RNA, 22 nt, Human
ccugggcugcucauggggauga

SEQ ID NO: 1138296 - RNA, 22 nt, Human
agauauguuuguauauauuugu

SEQ ID NO: 1138297 - RNA, 22 nt, Human
ucccagccaggcucuaccacuu

SEQ ID NO: 1138298 - RNA, 22 nt, Human
agagggaucacccuguuucugg

SEQ ID NO: 1138299 - RNA, 22 nt, Human
agcuuuaucagaggagucucua

SEQ ID NO: 1138300 - RNA, 22 nt, Human
accacccauucagaaacacuga

SEQ ID NO: 1138301 - RNA, 20 nt, Human
gcugggcuaccacuggcccu

SEQ ID NO: 1138302 - RNA, 22 nt, Human
cuggccucagagggucauggug

SEQ ID NO: 1138303 - RNA, 20 nt, Human
ucuguacacucaucuucugc

SEQ ID NO: 1138304 - RNA, 22 nt, Human
uacauaugaacuuuauaacuug

SEQ ID NO: 1138305 - RNA, 22 nt, Human
uccgccaggacugagggcccau

SEQ ID NO: 1138306 - RNA, 22 nt, Human
aacagccacugauacugaauag

SEQ ID NO: 1138307 - RNA, 22 nt, Human
gcagcuuucuacuuccuacagc

SEQ ID NO: 1138308 - RNA, 22 nt, Human
aggcuuuaauuaucuacaggag

SEQ ID NO: 1138309 - RNA, 22 nt, Human
ucauuucuguugugcaucacug

SEQ ID NO: 1138310 - RNA, 22 nt, Human
ggggcucaguucggacagccug

SEQ ID NO: 1138311 - RNA, 22 nt, Human
ucuggcagcuauccucuggcca

SEQ ID NO: 1138312 - RNA, 22 nt, Human
aggcagcaauugaaaucauugu

SEQ ID NO: 1138313 - RNA, 22 nt, Human
ugcaggcugugucauuuaguga

SEQ ID NO: 1138314 - RNA, 22 nt, Human
ucccacauuacccugacugaca

SEQ ID NO: 1138315 - RNA, 22 nt, Human
cccagcucugcagaccugcccu

SEQ ID NO: 1138316 - RNA, 21 nt, Human
aauguauguuuaucucacagu

SEQ ID NO: 1138317 - RNA, 22 nt, Human
caaaguuuuaguaaacauauau

SEQ ID NO: 1138318 - RNA, 22 nt, Human
uacauguuauuucacuauuggu

SEQ ID NO: 1138319 - RNA, 22 nt, Human
ccaggcuccccaggaggcccuu

SEQ ID NO: 1138320 - RNA, 22 nt, Human
cagguuuagguggacgugcagg

SEQ ID NO: 1138321 - RNA, 20 nt, Human
uuaucugucaaucugucuca

SEQ ID NO: 1138322 - RNA, 22 nt, Human
auuauuucucacucacauaaua

SEQ ID NO: 1138323 - RNA, 22 nt, Human
uuauucagauuggcuacaggau

SEQ ID NO: 1138324 - RNA, 22 nt, Human
ucucuuaauuuuggaauagugu

SEQ ID NO: 1138325 - RNA, 22 nt, Human
ugcuucugcucagcuuccuacu

SEQ ID NO: 1138326 - RNA, 22 nt, Human
gugugggaaggcuaggaugcug

SEQ ID NO: 1138327 - RNA, 22 nt, Human
uaauuucuucaucucugcagcu

SEQ ID NO: 1138328 - RNA, 22 nt, Human
ucuggggcaguuacuggggccu

SEQ ID NO: 1138329 - RNA, 22 nt, Human
ugaggccagugacauauauuaa

SEQ ID NO: 1138330 - RNA, 22 nt, Human
ugcagggauuguuggcauccau

SEQ ID NO: 1138331 - RNA, 17 nt, Human
uuucagauucacuuucu

SEQ ID NO: 1138332 - RNA, 22 nt, Human
uugcagcugcaguaaauguuca

SEQ ID NO: 1138333 - RNA, 22 nt, Human
auguuagaaggaauguuaaaag

SEQ ID NO: 1138334 - RNA, 22 nt, Human
ccugggcuugcaucugugcugg

SEQ ID NO: 1138335 - RNA, 19 nt, Human
gcaucagagcagaaggggu

SEQ ID NO: 1138336 - RNA, 22 nt, Human
ugagcagagucgcuccagagug

SEQ ID NO: 1138337 - RNA, 22 nt, Human
guggagcaggacuagcugagaa

SEQ ID NO: 1138338 - RNA, 22 nt, Human
agcagcuccugccaugagugcu

SEQ ID NO: 1138339 - RNA, 22 nt, Human
aacacauauuuauauaugcaca

SEQ ID NO: 1138340 - RNA, 22 nt, Human
uuucacaugguacugccuguuu

SEQ ID NO: 1138341 - RNA, 22 nt, Human
cuggcaguuugccaggagcucg

SEQ ID NO: 1138342 - RNA, 22 nt, Human
aauuacuuaagagaaacuuuga

SEQ ID NO: 1138343 - RNA, 22 nt, Human
uucuggggacauaacaguaagc

SEQ ID NO: 1138344 - RNA, 22 nt, Human
uggcacagggcuuggucgcuca

SEQ ID NO: 1138345 - RNA, 22 nt, Human
uggaaacaucucugccuuuauu

SEQ ID NO: 1138346 - RNA, 23 nt, Human
cuggggcuuucaaaucugggcag

SEQ ID NO: 1138347 - RNA, 22 nt, Human
ccuggcaguucaucaaauggca

SEQ ID NO: 1138348 - RNA, 22 nt, Human
uggaagagaaaauccacccuua

SEQ ID NO: 1138349 - RNA, 22 nt, Human
ucagagagcuggugggcagagg

SEQ ID NO: 1138350 - RNA, 22 nt, Human
ucagccucagguguucagauuu

SEQ ID NO: 1138351 - RNA, 22 nt, Human
gugauaaagacgugucauaauu

SEQ ID NO: 1138352 - RNA, 22 nt, Human
ccuagaugggauggcggccggg

SEQ ID NO: 1138353 - RNA, 22 nt, Human
cccaggcagggacgugcucugg

SEQ ID NO: 1138354 - RNA, 22 nt, Human
aggcucccaagcacugacccca

SEQ ID NO: 1138355 - RNA, 22 nt, Human
gacugccucaguuucccugcag

SEQ ID NO: 1138356 - RNA, 22 nt, Human
cuauuaggcuuccauuucaugc

SEQ ID NO: 1138357 - RNA, 22 nt, Human
gcacacauucggauucuuaacc

SEQ ID NO: 1138358 - RNA, 19 nt, Human
uuuuccuucuauauguuuc

SEQ ID NO: 1138359 - RNA, 22 nt, Human
uaacacaugguuaguacacaau

SEQ ID NO: 1138360 - RNA, 22 nt, Human
aaagagucguguuccagguuug

SEQ ID NO: 1138361 - RNA, 22 nt, Human
ucaauaaaauuguuuuccuauc

SEQ ID NO: 1138362 - RNA, 22 nt, Human
ugagaaaugggucugcugaaga

SEQ ID NO: 1138363 - RNA, 22 nt, Human
uuccaggcaugucagacauagg

SEQ ID NO: 1138364 - RNA, 22 nt, Human
ucuggggagcagcccuggugag

SEQ ID NO: 1138365 - RNA, 22 nt, Human
ccuacucugagcgccuccgcau

SEQ ID NO: 1138366 - RNA, 23 nt, Human
ucagagaggcccccugcagagau

SEQ ID NO: 1138367 - RNA, 22 nt, Human
acacuaauuaagcugcuuuacu

SEQ ID NO: 1138368 - RNA, 22 nt, Human
gggucuccauguuaacaucacu

SEQ ID NO: 1138369 - RNA, 22 nt, Human
gaggcugcggggaggagccugc

SEQ ID NO: 1138370 - RNA, 22 nt, Human
gagggugucugcguaacuggca

SEQ ID NO: 1138371 - RNA, 22 nt, Human
cugagagaucaagccacaggau

SEQ ID NO: 1138372 - RNA, 22 nt, Human
uaaucuguguaccuucaucgga

SEQ ID NO: 1138373 - RNA, 22 nt, Human
gacacagaauuuacucccgaua

SEQ ID NO: 1138374 - RNA, 22 nt, Human
ccuggcagcuccguggccuucc

SEQ ID NO: 1138375 - RNA, 23 nt, Human
agagcaucaugaugcuaagucug

SEQ ID NO: 1138376 - RNA, 20 nt, Human
ucuggcaggugaacgagcug

SEQ ID NO: 1138377 - RNA, 22 nt, Human
gugcuaggauuacaggcauggg

SEQ ID NO: 1138378 - RNA, 22 nt, Human
auguaaacaagguuauugucca

SEQ ID NO: 1138379 - RNA, 22 nt, Human
gggcugacucugcacugagcca

SEQ ID NO: 1138380 - RNA, 22 nt, Human
ugaaccacaugcaaagugaaua

SEQ ID NO: 1138381 - RNA, 22 nt, Human
uccuggcauugugcagggugug

SEQ ID NO: 1138382 - RNA, 22 nt, Human
gccuggggaacuugauccuguc

SEQ ID NO: 1138383 - RNA, 22 nt, Human
acagcuuuguuuucccugcuga

SEQ ID NO: 1138384 - RNA, 22 nt, Human
agcugccaaguuucucaguuua

SEQ ID NO: 1138385 - RNA, 22 nt, Human
gggaccuggcgagggucacaca

SEQ ID NO: 1138386 - RNA, 22 nt, Human
uccaggcagucauuaaucucua

SEQ ID NO: 1138387 - RNA, 22 nt, Human
cucugguuucgcaggaaauaga

SEQ ID NO: 1138388 - RNA, 22 nt, Human
uucccaguuagucauuuuuaca

SEQ ID NO: 1138389 - RNA, 22 nt, Human
guccaguguguuuaucuuggau

SEQ ID NO: 1138390 - RNA, 22 nt, Human
uauguacacacacaugcaugua

SEQ ID NO: 1138391 - RNA, 22 nt, Human
agcaggcuuaugguugaaggga

SEQ ID NO: 1138392 - RNA, 18 nt, Human
ugucauaauauaucaccu

SEQ ID NO: 1138393 - RNA, 22 nt, Human
uagauacaggcucucugagccu

SEQ ID NO: 1138394 - RNA, 22 nt, Human
ucuggcaggguguguauuuaca

SEQ ID NO: 1138395 - RNA, 19 nt, Human
gggaccugacuaauuggca

SEQ ID NO: 1138396 - RNA, 22 nt, Human
uggguacuccuauuaguucagu

SEQ ID NO: 1138397 - RNA, 19 nt, Human
cucuuaaauugucucuugc

SEQ ID NO: 1138398 - RNA, 21 nt, Human
cagaggcaggcucugugugug

SEQ ID NO: 1138399 - RNA, 22 nt, Human
agcucccaggcagucaugagga

SEQ ID NO: 1138400 - RNA, 22 nt, Human
gccagccuucuguggccugcaa

SEQ ID NO: 1138401 - RNA, 21 nt, Human
acauacauaccuuaccaccuu

SEQ ID NO: 1138402 - RNA, 22 nt, Human
gugggcuggauuugcuugcaga

SEQ ID NO: 1138403 - RNA, 22 nt, Human
caggcagcugcgacaagagagc

SEQ ID NO: 1138404 - RNA, 19 nt, Human
aaacacagauuucuuacca

SEQ ID NO: 1138405 - RNA, 17 nt, Human
gaauuucuuggucaaaa

SEQ ID NO: 1138406 - RNA, 22 nt, Human
gaugaagcuuugaagucuaauc

SEQ ID NO: 1138407 - RNA, 22 nt, Human
guauuagguuggugcaaaagua

SEQ ID NO: 1138408 - RNA, 22 nt, Human
gugggagaaauuagcucuaguu

SEQ ID NO: 1138409 - RNA, 22 nt, Human
uucuaccuacccucugcauaca

SEQ ID NO: 1138410 - RNA, 22 nt, Human
acagauauaaacuauaguagug

SEQ ID NO: 1138411 - RNA, 22 nt, Human
ugcaggcuccaugaggacaggc

SEQ ID NO: 1138412 - RNA, 16 nt, Human
ucacauacuuccuugc

SEQ ID NO: 1138413 - RNA, 22 nt, Human
ucaggauggagggaagcacaga

SEQ ID NO: 1138414 - RNA, 22 nt, Human
gaauauuuuuaaagggacuaau

SEQ ID NO: 1138415 - RNA, 22 nt, Human
guccucuguuagaaaugugcuu

SEQ ID NO: 1138416 - RNA, 22 nt, Human
auaaacagaguaguugcuacug

SEQ ID NO: 1138417 - RNA, 22 nt, Human
guuaaauucgaugauggauaaa

SEQ ID NO: 1138418 - RNA, 22 nt, Human
ggccucaguuucuccauggguu

SEQ ID NO: 1138419 - RNA, 22 nt, Human
gccaggcauguccucugcagaa

SEQ ID NO: 1138420 - RNA, 23 nt, Human
acuuuauugaccccaggucaguu

SEQ ID NO: 1138421 - RNA, 22 nt, Human
ucuggcagaagugcugucagua

SEQ ID NO: 1138422 - RNA, 22 nt, Human
ugcuucuguuacauaccagaac

SEQ ID NO: 1138423 - RNA, 22 nt, Human
uuugaaaauuagacacaggcua

SEQ ID NO: 1138424 - RNA, 21 nt, Human
auucagaaagggaauaaacuc

SEQ ID NO: 1138425 - RNA, 22 nt, Human
ugcaggcuguuugguggaucuc

SEQ ID NO: 1138426 - RNA, 22 nt, Human
cacacagaaccgcucgccacuu

SEQ ID NO: 1138427 - RNA, 22 nt, Human
ucuccugggaggacaaggaagg

SEQ ID NO: 1138428 - RNA, 22 nt, Human
uaugacauuauaaaggauuauu

SEQ ID NO: 1138429 - RNA, 19 nt, Human
ccagucccauacaggagau

SEQ ID NO: 1138430 - RNA, 22 nt, Human
gaccugccugagcugccucugc

SEQ ID NO: 1138431 - RNA, 22 nt, Human
ggccucagaaauagaguaaaau

SEQ ID NO: 1138432 - RNA, 22 nt, Human
uuucacauguggaaugccaggu

SEQ ID NO: 1138433 - RNA, 22 nt, Human
ggaagaaagcacacaaacuuga

SEQ ID NO: 1138434 - RNA, 21 nt, Human
cccuugccugcacuccucggc

SEQ ID NO: 1138435 - RNA, 22 nt, Human
ugcuacaauucacaucuggaua

SEQ ID NO: 1138436 - RNA, 22 nt, Human
accugccuauggagccacaugg

SEQ ID NO: 1138437 - RNA, 22 nt, Human
gcccacaccauuuauucuuugu

SEQ ID NO: 1138438 - RNA, 22 nt, Human
ugcauaaagugccauaguauua

SEQ ID NO: 1138439 - RNA, 22 nt, Human
cccaggcaucccauuaaggagc

SEQ ID NO: 1138440 - RNA, 22 nt, Human
ugggcuccucgucacucgcugu

SEQ ID NO: 1138441 - RNA, 22 nt, Human
ugaaacauugcacuguaugaau

SEQ ID NO: 1138442 - RNA, 22 nt, Human
aacaaccaaaaagaugaaugua

SEQ ID NO: 1138443 - RNA, 22 nt, Human
ugugaaauucuugaaaugcaca

SEQ ID NO: 1138444 - RNA, 22 nt, Human
uaacacauauuucaagaguagu

SEQ ID NO: 1138445 - RNA, 22 nt, Human
agggaccucauguaaguggauu

SEQ ID NO: 1138446 - RNA, 22 nt, Human
aggcuggauuuauggggacuuc

SEQ ID NO: 1138447 - RNA, 22 nt, Human
uagcauuucacugaucuucacu

SEQ ID NO: 1138448 - RNA, 22 nt, Human
cccacccugggaagcuaggcag

SEQ ID NO: 1138449 - RNA, 22 nt, Human
gccugcagcaugcuaggucuug

SEQ ID NO: 1138450 - RNA, 22 nt, Human
gguggccaggccagcucuggcc

SEQ ID NO: 1138451 - RNA, 22 nt, Human
aaauacugcugcuauuccuuuu

SEQ ID NO: 1138452 - RNA, 22 nt, Human
uuuuccuucuagagcagauuuc

SEQ ID NO: 1138453 - RNA, 21 nt, Human
agaaaauggcguuuuagauuu

SEQ ID NO: 1138454 - RNA, 22 nt, Human
ucuggcagggguucugcacuug

SEQ ID NO: 1138455 - RNA, 22 nt, Human
cagcuuuaggacucauaauaaa

SEQ ID NO: 1138456 - RNA, 22 nt, Human
ucccaggccauaaaacucagag

SEQ ID NO: 1138457 - RNA, 23 nt, Human
ugagggacaugguggcuucugag

SEQ ID NO: 1138458 - RNA, 22 nt, Human
auaacuuucuucacccuugcug

SEQ ID NO: 1138459 - RNA, 22 nt, Human
uguaugaaaaggaauagauuga

SEQ ID NO: 1138460 - RNA, 22 nt, Human
gcacacacaugugaguacaugc

SEQ ID NO: 1138461 - RNA, 22 nt, Human
auguaugaagcuuuguuuggga

SEQ ID NO: 1138462 - RNA, 22 nt, Human
ugcauacacaagcauacaugua

SEQ ID NO: 1138463 - RNA, 22 nt, Human
ucuggggagugccuaaguggaa

SEQ ID NO: 1138464 - RNA, 22 nt, Human
augggcugacccagucguggca

SEQ ID NO: 1138465 - RNA, 22 nt, Human
uuuuucuugugcuggaucuaau

SEQ ID NO: 1138466 - RNA, 22 nt, Human
augggcugcuuggcuuccaccc

SEQ ID NO: 1138467 - RNA, 22 nt, Human
ucccacccauccugcaucucuu

SEQ ID NO: 1138468 - RNA, 22 nt, Human
agggccucuaccauccaagguu

SEQ ID NO: 1138469 - RNA, 22 nt, Human
aggacaguguggaagagggugc

SEQ ID NO: 1138470 - RNA, 18 nt, Human
guuaauuuugaaguucau

SEQ ID NO: 1138471 - RNA, 22 nt, Human
uuucagauuaucucaacuuugg

SEQ ID NO: 1138472 - RNA, 22 nt, Human
caggagggcccgagacucuucc

SEQ ID NO: 1138473 - RNA, 22 nt, Human
uccugcagagacagaggccuca

SEQ ID NO: 1138474 - RNA, 22 nt, Human
auucacagaauaguuuuaccag

SEQ ID NO: 1138475 - RNA, 22 nt, Human
ugcagggauuauguagggguug

SEQ ID NO: 1138476 - RNA, 22 nt, Human
ugcagccccugaaaauggcagc

SEQ ID NO: 1138477 - RNA, 22 nt, Human
cauacauuuauacacaucuaug

SEQ ID NO: 1138478 - RNA, 22 nt, Human
acuggagcugagagcaugggua

SEQ ID NO: 1138479 - RNA, 22 nt, Human
uuuucuuauggugaagcacaaa

SEQ ID NO: 1138480 - RNA, 22 nt, Human
uguaugaauauguauuuucaua

SEQ ID NO: 1138481 - RNA, 22 nt, Human
gccuggcaggggccugggagug

SEQ ID NO: 1138482 - RNA, 22 nt, Human
guccucugauuucuagguauau

SEQ ID NO: 1138483 - RNA, 22 nt, Human
gcaggugaugugaugugagcau

SEQ ID NO: 1138484 - RNA, 22 nt, Human
uggcagagagagugcagucgac

SEQ ID NO: 1138485 - RNA, 22 nt, Human
gcagcuuuaaacauuggaaaua

SEQ ID NO: 1138486 - RNA, 22 nt, Human
ggagagaauuccauggacaugu

SEQ ID NO: 1138487 - RNA, 22 nt, Human
gauuuauuuuuaaucagcaggg

SEQ ID NO: 1138488 - RNA, 22 nt, Human
ugcuagaauuagguuaaacaaa

SEQ ID NO: 1138489 - RNA, 22 nt, Human
cacauaaucaccaaguccuuuc

SEQ ID NO: 1138490 - RNA, 22 nt, Human
aaguaugaaucaaagacuaucu

SEQ ID NO: 1138491 - RNA, 19 nt, Human
guccuggcgccgccacacc

SEQ ID NO: 1138492 - RNA, 22 nt, Human
aacuacauuguccuuucugaag

SEQ ID NO: 1138493 - RNA, 22 nt, Human
uaaauuguuuucuagaaguugu

SEQ ID NO: 1138494 - RNA, 22 nt, Human
gcugucugccgcaggcugccac

SEQ ID NO: 1138495 - RNA, 22 nt, Human
gccaggcagagccccgugcagc

SEQ ID NO: 1138496 - RNA, 22 nt, Human
aggcccaaaagaaaccacuggg

SEQ ID NO: 1138497 - RNA, 19 nt, Human
agcauuuggaauucuacac

SEQ ID NO: 1138498 - RNA, 22 nt, Human
ugggaccugcuccuggaaugag

SEQ ID NO: 1138499 - RNA, 20 nt, Human
gcuggcagaugucuugagau

SEQ ID NO: 1138500 - RNA, 22 nt, Human
cucuccagaauaugccgccgug

SEQ ID NO: 1138501 - RNA, 22 nt, Human
ccagccucacuggcaucaccua

SEQ ID NO: 1138502 - RNA, 22 nt, Human
aaaaaucuaugacugcuucucc

SEQ ID NO: 1138503 - RNA, 22 nt, Human
augggcugaggugggauagaag

SEQ ID NO: 1138504 - RNA, 20 nt, Human
cucuuaaauguaaaguaggc

SEQ ID NO: 1138505 - RNA, 22 nt, Human
ccagagagaaauggauuugagu

SEQ ID NO: 1138506 - RNA, 22 nt, Human
uguuagaauauuguaauauucg

SEQ ID NO: 1138507 - RNA, 22 nt, Human
cuuauaaaguccaucugaacaa

SEQ ID NO: 1138508 - RNA, 22 nt, Human
agucacccuccaacucuccacu

SEQ ID NO: 1138509 - RNA, 22 nt, Human
uuccaagugucagaucagauuu

SEQ ID NO: 1138510 - RNA, 22 nt, Human
ccagcuuuugcacuggacuggg

SEQ ID NO: 1138511 - RNA, 22 nt, Human
gcucugagaggaugcugagcag

SEQ ID NO: 1138512 - RNA, 21 nt, Human
ugacugaggcuucuucacaca

SEQ ID NO: 1138513 - RNA, 22 nt, Human
ucacuguauuuggaagggaugg

SEQ ID NO: 1138514 - RNA, 22 nt, Human
ugggaccugcucuuggaaugag

SEQ ID NO: 1138515 - RNA, 18 nt, Human
ugcuuuaugcuuauauaa

SEQ ID NO: 1138516 - RNA, 22 nt, Human
augaacuuauuucugaacuuuu

SEQ ID NO: 1138517 - RNA, 21 nt, Human
uggccaaaaccauauuauuaa

SEQ ID NO: 1138518 - RNA, 22 nt, Human
uagcuuuacaaagugcugcacc

SEQ ID NO: 1138519 - RNA, 22 nt, Human
gguucccggaucuccgaguccc

SEQ ID NO: 1138520 - RNA, 18 nt, Human
acucugcggaggccccag

SEQ ID NO: 1138521 - RNA, 22 nt, Human
acaugauucuugauaggcauug

SEQ ID NO: 1138522 - RNA, 22 nt, Human
aaauaguucagcuuguaaaccc

SEQ ID NO: 1138523 - RNA, 22 nt, Human
acccagcuguuucccgugucau

SEQ ID NO: 1138524 - RNA, 22 nt, Human
uuggcagggccaggcucucucu

SEQ ID NO: 1138525 - RNA, 22 nt, Human
caugaguucaucugcuucucuu

SEQ ID NO: 1138526 - RNA, 22 nt, Human
aucccacaccccuacaacauau

SEQ ID NO: 1138527 - RNA, 23 nt, Human
aaauaugucugagggcaaagaau

SEQ ID NO: 1138528 - RNA, 22 nt, Human
guccagugacaaguagcuggcc

SEQ ID NO: 1138529 - RNA, 22 nt, Human
uccuccuccucacagucaccug

SEQ ID NO: 1138530 - RNA, 22 nt, Human
uaguuaggaaaguccagggagc

SEQ ID NO: 1138531 - RNA, 21 nt, Human
uauuugcugccaucuuugagg

SEQ ID NO: 1138532 - RNA, 22 nt, Human
cccacacacauuuaugauagga

SEQ ID NO: 1138533 - RNA, 22 nt, Human
gcuggcagugugaaugacaagc

SEQ ID NO: 1138534 - RNA, 22 nt, Human
guguuuuaucagacaaaguaua

SEQ ID NO: 1138535 - RNA, 22 nt, Human
uuucuugacugcuuaggaaugc

SEQ ID NO: 1138536 - RNA, 22 nt, Human
uaacuuucuucauaugugaacc

SEQ ID NO: 1138537 - RNA, 22 nt, Human
acagcucugcauggcaguuauu

SEQ ID NO: 1138538 - RNA, 22 nt, Human
gaggagcucugcuccauccuuc

SEQ ID NO: 1138539 - RNA, 22 nt, Human
accaggcagcugggggugaugu

SEQ ID NO: 1138540 - RNA, 22 nt, Human
ugggcugagcagugaagcucau

SEQ ID NO: 1138541 - RNA, 22 nt, Human
aagucguggcaggcuugcacga

SEQ ID NO: 1138542 - RNA, 22 nt, Human
cuucuggggauggagcccagaa

SEQ ID NO: 1138543 - RNA, 22 nt, Human
ugcuccagugagcuggccaucc

SEQ ID NO: 1138544 - RNA, 22 nt, Human
gcagcucuuuucuuaaagagau

SEQ ID NO: 1138545 - RNA, 22 nt, Human
guccucuguagggcugggccac

SEQ ID NO: 1138546 - RNA, 22 nt, Human
cuuucacacacauacauuugga

SEQ ID NO: 1138547 - RNA, 22 nt, Human
guugggaagcagauggaugagc

SEQ ID NO: 1138548 - RNA, 22 nt, Human
cuuagggaaucuuagagcugga

SEQ ID NO: 1138549 - RNA, 22 nt, Human
ccccacacucuuuacauucaua

SEQ ID NO: 1138550 - RNA, 22 nt, Human
gcuaggaaucggacccaggaag

SEQ ID NO: 1138551 - RNA, 22 nt, Human
cauuagggccaccauaacaaaa

SEQ ID NO: 1138552 - RNA, 19 nt, Human
ccaggccucuggggccugu

SEQ ID NO: 1138553 - RNA, 22 nt, Human
gccuccuggaagucacauguuu

SEQ ID NO: 1138554 - RNA, 21 nt, Human
aaaaagcuggggcaugcaugc

SEQ ID NO: 1138555 - RNA, 22 nt, Human
ugcuucugaaguggaugggugc

SEQ ID NO: 1138556 - RNA, 20 nt, Human
cucuuuugacucuuugcaag

SEQ ID NO: 1138557 - RNA, 22 nt, Human
uagaauucauguuacuguuagc

SEQ ID NO: 1138558 - RNA, 22 nt, Human
agaauaugaucggaauacagau

SEQ ID NO: 1138559 - RNA, 22 nt, Human
ugcaggcuccacguuguugucc

SEQ ID NO: 1138560 - RNA, 22 nt, Human
cuaggaauccuuuuagaguugg

SEQ ID NO: 1138561 - RNA, 22 nt, Human
gguggcauaagaacacuaaaga

SEQ ID NO: 1138562 - RNA, 22 nt, Human
ccaggccuucugaggacacucu

SEQ ID NO: 1138563 - RNA, 22 nt, Human
cuguccuccagacgacaguccc

SEQ ID NO: 1138564 - RNA, 22 nt, Human
uccaggagguagugcuuaauuu

SEQ ID NO: 1138565 - RNA, 22 nt, Human
ccccuguguuguucaaggguca

SEQ ID NO: 1138566 - RNA, 22 nt, Human
aaauccuaccaagaaauucccu

SEQ ID NO: 1138567 - RNA, 22 nt, Human
uucauugcaguucuucagguua

SEQ ID NO: 1138568 - RNA, 22 nt, Human
gagguggcuccuucagggaaua

SEQ ID NO: 1138569 - RNA, 22 nt, Human
gggcucucaugaguguguggua

SEQ ID NO: 1138570 - RNA, 22 nt, Human
gccaaaucuggauuuagcaaga

SEQ ID NO: 1138571 - RNA, 22 nt, Human
acaggcucuggggcaggauggc

SEQ ID NO: 1138572 - RNA, 22 nt, Human
ucacacaugaguaaauacaggg

SEQ ID NO: 1138573 - RNA, 22 nt, Human
uaaaguuuggcagacaauaaca

SEQ ID NO: 1138574 - RNA, 22 nt, Human
cuuucucaaugccggaaggcac

SEQ ID NO: 1138575 - RNA, 21 nt, Human
ugcuuuaugggaaaaauguca

SEQ ID NO: 1138576 - RNA, 17 nt, Human
uauauguaugccucucc

SEQ ID NO: 1138577 - RNA, 22 nt, Human
uguccagguggccucugcugcu

SEQ ID NO: 1138578 - RNA, 22 nt, Human
agcuuuauagaaaggaucagug

SEQ ID NO: 1138579 - RNA, 22 nt, Human
gcagcuuuaaucugaauaagua

SEQ ID NO: 1138580 - RNA, 22 nt, Human
uuuucguuuauuugacauguaa

SEQ ID NO: 1138581 - RNA, 19 nt, Human
gcuggcagaauuuugaacc

SEQ ID NO: 1138582 - RNA, 22 nt, Human
cagggcucugccuugagggaug

SEQ ID NO: 1138583 - RNA, 22 nt, Human
aguuauuucaguaacauaauag

SEQ ID NO: 1138584 - RNA, 22 nt, Human
uuauuuacaacucuucucuucc

SEQ ID NO: 1138585 - RNA, 22 nt, Human
ugagaauuuucaguuucacuuu

SEQ ID NO: 1138586 - RNA, 20 nt, Human
auaaaauaacugccacaaga

SEQ ID NO: 1138587 - RNA, 22 nt, Human
augaaugcugggacaaauauau

SEQ ID NO: 1138588 - RNA, 22 nt, Human
accaagcuguauauuauugguu

SEQ ID NO: 1138589 - RNA, 20 nt, Human
agccugccagcuggcccaga

SEQ ID NO: 1138590 - RNA, 22 nt, Human
agagcagauggagcuggaagag

SEQ ID NO: 1138591 - RNA, 19 nt, Human
guccucucaacaacccggg

SEQ ID NO: 1138592 - RNA, 20 nt, Human
ucccaaggaugccugggugu

SEQ ID NO: 1138593 - RNA, 22 nt, Human
aaacaaacauagguuugaaagu

SEQ ID NO: 1138594 - RNA, 19 nt, Human
uucuggggccuggccuugg

SEQ ID NO: 1138595 - RNA, 22 nt, Human
auuauaaaccuuugaggguggg

SEQ ID NO: 1138596 - RNA, 22 nt, Human
ggcaggcucuuggccuuaugag

SEQ ID NO: 1138597 - RNA, 22 nt, Human
uguaugaagacuucuucugugu

SEQ ID NO: 1138598 - RNA, 22 nt, Human
cuggggacuuugguucuccaug

SEQ ID NO: 1138599 - RNA, 22 nt, Human
gucaaaaaguagucauuucugu

SEQ ID NO: 1138600 - RNA, 22 nt, Human
accaagcuucguggaggaaguu

SEQ ID NO: 1138601 - RNA, 22 nt, Human
aagggcucccaacucaucuuuu

SEQ ID NO: 1138602 - RNA, 22 nt, Human
cagguugguauucaucuccaca

SEQ ID NO: 1138603 - RNA, 22 nt, Human
acugggcuuauuucuugugaac

SEQ ID NO: 1138604 - RNA, 22 nt, Human
acugggcuagaguggaagcugg

SEQ ID NO: 1138605 - RNA, 22 nt, Human
auuuaaaugcuuaagaggguuu

SEQ ID NO: 1138606 - RNA, 22 nt, Human
acugggcugguuaguuuuacua

SEQ ID NO: 1138607 - RNA, 22 nt, Human
auuaauuuuaccuuuguaaaca

SEQ ID NO: 1138608 - RNA, 22 nt, Human
ugguccuggaagguccugaggg

SEQ ID NO: 1138609 - RNA, 22 nt, Human
cccuuccugggugucccggagu

SEQ ID NO: 1138610 - RNA, 20 nt, Human
ccugggcuccaggagccccg

SEQ ID NO: 1138611 - RNA, 22 nt, Human
agggcuccgggccaccggccug

SEQ ID NO: 1138612 - RNA, 22 nt, Human
gcuggcagcauuagacccuggg

SEQ ID NO: 1138613 - RNA, 22 nt, Human
acuccaggcaucugcuucugcu

SEQ ID NO: 1138614 - RNA, 22 nt, Human
gguauaaaugaucagaucgcug

SEQ ID NO: 1138615 - RNA, 22 nt, Human
auucagcaaugagcuuggauuu

SEQ ID NO: 1138616 - RNA, 22 nt, Human
uugaagcagagaaauacuugaa

SEQ ID NO: 1138617 - RNA, 22 nt, Human
uucuuugcccuuaaugaaauaa

SEQ ID NO: 1138618 - RNA, 22 nt, Human
accauuugacucucuaaggaua

SEQ ID NO: 1138619 - RNA, 22 nt, Human
acacacagguaaaggagccugg

SEQ ID NO: 1138620 - RNA, 22 nt, Human
ucagagagcagaacuuuuuuac

SEQ ID NO: 1138621 - RNA, 22 nt, Human
ugccaaauugcccuauaaauga

SEQ ID NO: 1138622 - RNA, 22 nt, Human
ggcucccugccuguccucaguc

SEQ ID NO: 1138623 - RNA, 22 nt, Human
agcaggcuuguuaugucugaga

SEQ ID NO: 1138624 - RNA, 22 nt, Human
uaggaaaugcuccauugcauaa

SEQ ID NO: 1138625 - RNA, 22 nt, Human
uaugagguagguauuauacuua

SEQ ID NO: 1138626 - RNA, 22 nt, Human
ucagggaccccucugaguggag

SEQ ID NO: 1138627 - RNA, 22 nt, Human
guggcagggcuuugcuguucuu

SEQ ID NO: 1138628 - RNA, 22 nt, Human
aggcugugggaguugagagucu

SEQ ID NO: 1138629 - RNA, 22 nt, Human
cacacagacagcucucugaaga

SEQ ID NO: 1138630 - RNA, 22 nt, Human
gcuggcagucccaucagcuggg

SEQ ID NO: 1138631 - RNA, 22 nt, Human
guagggacccacagucuauauu

SEQ ID NO: 1138632 - RNA, 22 nt, Human
gcuggggagcaagaguagugag

SEQ ID NO: 1138633 - RNA, 22 nt, Human
caaauauuccagguacaucccu

SEQ ID NO: 1138634 - RNA, 20 nt, Human
uccaggcagcucagaguguc

SEQ ID NO: 1138635 - RNA, 22 nt, Human
ucugucacccaggcuggagugc

SEQ ID NO: 1138636 - RNA, 17 nt, Human
aggccucccuccaggcc

SEQ ID NO: 1138637 - RNA, 22 nt, Human
cuucuggguguggagugaggac

SEQ ID NO: 1138638 - RNA, 22 nt, Human
auuucucacucacaguccaugu

SEQ ID NO: 1138639 - RNA, 22 nt, Human
aaaguuaguuucuuauaugucu

SEQ ID NO: 1138640 - RNA, 22 nt, Human
uggcagagucaucacaucugga

SEQ ID NO: 1138641 - RNA, 22 nt, Human
cucugagcagaggccguggcua

SEQ ID NO: 1138642 - RNA, 22 nt, Human
cacucugaugguuucuguucaa

SEQ ID NO: 1138643 - RNA, 22 nt, Human
guccucugcuucaugcccugau

SEQ ID NO: 1138644 - RNA, 22 nt, Human
uuuguuagagugugggaggcug

SEQ ID NO: 1138645 - RNA, 22 nt, Human
caagauaagaucauuuacacua

SEQ ID NO: 1138646 - RNA, 22 nt, Human
aaacacauuagcccuguggaaa

SEQ ID NO: 1138647 - RNA, 22 nt, Human
ugcauacacaugugcacauacg

SEQ ID NO: 1138648 - RNA, 22 nt, Human
uacauugacuuggauuguuaga

SEQ ID NO: 1138649 - RNA, 20 nt, Human
accccacagaguccauugca

SEQ ID NO: 1138650 - RNA, 22 nt, Human
agacacauaggaccacacugug

SEQ ID NO: 1138651 - RNA, 17 nt, Human
ugcuucuguauugcugg

SEQ ID NO: 1138652 - RNA, 21 nt, Human
uuuaauuugcauguaugacgc

SEQ ID NO: 1138653 - RNA, 22 nt, Human
gugggcuucccuuaagccagag

SEQ ID NO: 1138654 - RNA, 22 nt, Human
ugccucucuaacccaugcccaa

SEQ ID NO: 1138655 - RNA, 22 nt, Human
ugcuuuauaacuuaguuuaugg

SEQ ID NO: 1138656 - RNA, 22 nt, Human
cagcauuuggaggagaggcuuu

SEQ ID NO: 1138657 - RNA, 22 nt, Human
agggcuccgggcaggcgaugga

SEQ ID NO: 1138658 - RNA, 22 nt, Human
aggaccuguguuuuccuugaau

SEQ ID NO: 1138659 - RNA, 22 nt, Human
gacaggcuuugagucccagaac

SEQ ID NO: 1138660 - RNA, 22 nt, Human
uagaaacaaugacaugcuugua

SEQ ID NO: 1138661 - RNA, 22 nt, Human
gcauuauuaauagcugcaugag

SEQ ID NO: 1138662 - RNA, 22 nt, Human
caguggugaagagcaggggcuc

SEQ ID NO: 1138663 - RNA, 22 nt, Human
gggcugacucaaccuugcaaag

SEQ ID NO: 1138664 - RNA, 22 nt, Human
caaauacuacgauucuugcagu

SEQ ID NO: 1138665 - RNA, 22 nt, Human
uuuccacaauguuuuugcagga

SEQ ID NO: 1138666 - RNA, 22 nt, Human
aauauaaugcuguuuuaugcca

SEQ ID NO: 1138667 - RNA, 22 nt, Human
cuuacaaauacacuuaggagag

SEQ ID NO: 1138668 - RNA, 23 nt, Human
ugaaauauucuuuugcaugagcu

SEQ ID NO: 1138669 - RNA, 22 nt, Human
acuuggcaaguaucuauaaagu

SEQ ID NO: 1138670 - RNA, 21 nt, Human
ccagagagagggaaguggguu

SEQ ID NO: 1138671 - RNA, 22 nt, Human
cagagcauuaaaaccagcucug

SEQ ID NO: 1138672 - RNA, 22 nt, Human
cuauuagguaugcagccuauuu

SEQ ID NO: 1138673 - RNA, 22 nt, Human
cagcuugaaauauuaggagaug

SEQ ID NO: 1138674 - RNA, 22 nt, Human
gaggcucugugaugugccaggc

SEQ ID NO: 1138675 - RNA, 22 nt, Human
ucacauuuuuuacuggacuuaa

SEQ ID NO: 1138676 - RNA, 22 nt, Human
ggaccugccagaacucaggcua

SEQ ID NO: 1138677 - RNA, 18 nt, Human
uccuggcagucagagagg

SEQ ID NO: 1138678 - RNA, 22 nt, Human
cugggagaggaaccucgagggu

SEQ ID NO: 1138679 - RNA, 22 nt, Human
cccagcccccgagugucuggaa

SEQ ID NO: 1138680 - RNA, 22 nt, Human
uccugcagccacugcaggcaga

SEQ ID NO: 1138681 - RNA, 22 nt, Human
ugaauaaucuuggguauuaaua

SEQ ID NO: 1138682 - RNA, 22 nt, Human
auaugcauuuaccuggcauaua

SEQ ID NO: 1138683 - RNA, 22 nt, Human
cuggaaaggguccucauucugu

SEQ ID NO: 1138684 - RNA, 22 nt, Human
agcucccagaaggcccugcgcc

SEQ ID NO: 1138685 - RNA, 22 nt, Human
cugggcuugaguuccugcucgu

SEQ ID NO: 1138686 - RNA, 22 nt, Human
aggaccuguaccucagcaucua

SEQ ID NO: 1138687 - RNA, 22 nt, Human
gugccaaaagcuauaauuuggu

SEQ ID NO: 1138688 - RNA, 22 nt, Human
ccaggcccugcuccucacacca

SEQ ID NO: 1138689 - RNA, 22 nt, Human
gagggcucuaccaaguaacucu

SEQ ID NO: 1138690 - RNA, 22 nt, Human
ucuucacaugaccuucaugucu

SEQ ID NO: 1138691 - RNA, 22 nt, Human
aauuagggaaaauuuacuugua

SEQ ID NO: 1138692 - RNA, 22 nt, Human
aucugucaucagcaccacaggu

SEQ ID NO: 1138693 - RNA, 22 nt, Human
uuugacaaauccuucagcaaug

SEQ ID NO: 1138694 - RNA, 19 nt, Human
uccaggaggcugccauuga

SEQ ID NO: 1138695 - RNA, 17 nt, Human
agguauaaaaugguagc

SEQ ID NO: 1138696 - RNA, 22 nt, Human
cagugagggcccccuuccaggu

SEQ ID NO: 1138697 - RNA, 22 nt, Human
uaacuacauuucacugcaauua

SEQ ID NO: 1138698 - RNA, 22 nt, Human
uguagaaagcucuucugaaauc

SEQ ID NO: 1138699 - RNA, 22 nt, Human
accugcagcugagaaaaugacu

SEQ ID NO: 1138700 - RNA, 22 nt, Human
agcuuuauuaacucuccaggug

SEQ ID NO: 1138701 - RNA, 22 nt, Human
aacccagccguguagcugccgc

SEQ ID NO: 1138702 - RNA, 22 nt, Human
guuuuccugaaacugauggugu

SEQ ID NO: 1138703 - RNA, 22 nt, Human
cuuauuagugucugucugaguu

SEQ ID NO: 1138704 - RNA, 22 nt, Human
uugggaaguuuaaugacagacu

SEQ ID NO: 1138705 - RNA, 21 nt, Human
uaugaacaugaccaauagucc

SEQ ID NO: 1138706 - RNA, 22 nt, Human
ggggaccugggcuucaaggguu

SEQ ID NO: 1138707 - RNA, 19 nt, Human
ucugcagaaggcauacaug

SEQ ID NO: 1138708 - RNA, 22 nt, Human
aauguaugugauuauuccucua

SEQ ID NO: 1138709 - RNA, 22 nt, Human
aggcuccugcaggugaggugcu

SEQ ID NO: 1138710 - RNA, 22 nt, Human
ucuggggacggggcccagcaau

SEQ ID NO: 1138711 - RNA, 22 nt, Human
gguuucaacucagcuaguaagg

SEQ ID NO: 1138712 - RNA, 22 nt, Human
gaggacucugggcguguauggg

SEQ ID NO: 1138713 - RNA, 22 nt, Human
uggcacucacucucagagucug

SEQ ID NO: 1138714 - RNA, 22 nt, Human
agauuuauguggucacacucag

SEQ ID NO: 1138715 - RNA, 22 nt, Human
ccuggcagccucagccaauucu

SEQ ID NO: 1138716 - RNA, 22 nt, Human
cagaugagaguggccaggguuc

SEQ ID NO: 1138717 - RNA, 22 nt, Human
aggcuuuguaccuggggucuua

SEQ ID NO: 1138718 - RNA, 22 nt, Human
aucugggggagcugcucaugga

SEQ ID NO: 1138719 - RNA, 22 nt, Human
agcuuuggagacugacuccauc

SEQ ID NO: 1138720 - RNA, 22 nt, Human
cuggggacucauucagagcaua

SEQ ID NO: 1138721 - RNA, 22 nt, Human
cccaggccuggucugggccagu

SEQ ID NO: 1138722 - RNA, 22 nt, Human
gagggcuccauuccccgugccc

SEQ ID NO: 1138723 - RNA, 22 nt, Human
ggcuuuaugcacagcagauggu

SEQ ID NO: 1138724 - RNA, 22 nt, Human
guagggacuuguuuuacuagua

SEQ ID NO: 1138725 - RNA, 22 nt, Human
ggcuuugggcccucaagucucc

SEQ ID NO: 1138726 - RNA, 22 nt, Human
agcucccauuaucuucugaaac

SEQ ID NO: 1138727 - RNA, 22 nt, Human
ugguuccuucugcauuuucagc

SEQ ID NO: 1138728 - RNA, 22 nt, Human
gagccaccuucaacucaggaau

SEQ ID NO: 1138729 - RNA, 22 nt, Human
acugcuuacccggccugacuuc

SEQ ID NO: 1138730 - RNA, 22 nt, Human
ucaaaguuacuugugguuuucu

SEQ ID NO: 1138731 - RNA, 22 nt, Human
ucacacagcugacagagccuuu

SEQ ID NO: 1138732 - RNA, 22 nt, Human
gcaaauacauguugagcaccua

SEQ ID NO: 1138733 - RNA, 22 nt, Human
ugaacacugccauauuuaagaa

SEQ ID NO: 1138734 - RNA, 22 nt, Human
auuucuacaguacacaugcauu

SEQ ID NO: 1138735 - RNA, 22 nt, Human
ccugggcucaagugauccuccu

SEQ ID NO: 1138736 - RNA, 22 nt, Human
ugauugacuuuagaauagcacu

SEQ ID NO: 1138737 - RNA, 20 nt, Human
ugccuggccuuucucugccc

SEQ ID NO: 1138738 - RNA, 22 nt, Human
ugcacaggaggcuguggagaag

SEQ ID NO: 1138739 - RNA, 22 nt, Human
ccagccacagcuuccagcuccu

SEQ ID NO: 1138740 - RNA, 22 nt, Human
guuuauuagaguuuucugucug

SEQ ID NO: 1138741 - RNA, 22 nt, Human
ugugaaaagcguguguucuagg

SEQ ID NO: 1138742 - RNA, 22 nt, Human
auguaauuugcccucaaguuaa

SEQ ID NO: 1138743 - RNA, 22 nt, Human
agacaagaaacugggagucucu

SEQ ID NO: 1138744 - RNA, 22 nt, Human
cacaacuuuaggaaccacauuc

SEQ ID NO: 1138745 - RNA, 22 nt, Human
auuucucagcacuuccuaucuc

SEQ ID NO: 1138746 - RNA, 22 nt, Human
ugcuucuguuuguuucugucau

SEQ ID NO: 1138747 - RNA, 21 nt, Human
uucucuccauaugcccagccc

SEQ ID NO: 1138748 - RNA, 22 nt, Human
ucugggcugcugugcagugacc

SEQ ID NO: 1138749 - RNA, 22 nt, Human
cuacugaguccuucagcugcca

SEQ ID NO: 1138750 - RNA, 22 nt, Human
cugccuggccacaacccagggu

SEQ ID NO: 1138751 - RNA, 18 nt, Human
gggcucacacaggucauc

SEQ ID NO: 1138752 - RNA, 17 nt, Human
ucgguuugccaggcuuc

SEQ ID NO: 1138753 - RNA, 22 nt, Human
ugcaggcuauaucuuauuugac

SEQ ID NO: 1138754 - RNA, 22 nt, Human
cauuuguaucauauguaucuua

SEQ ID NO: 1138755 - RNA, 22 nt, Human
uucuagcagagggcaucugcug

SEQ ID NO: 1138756 - RNA, 20 nt, Human
cccaggcagagcuagcggca

SEQ ID NO: 1138757 - RNA, 22 nt, Human
uacagagacuuuauggcacaaa

SEQ ID NO: 1138758 - RNA, 22 nt, Human
uuucacauuuaggcgugaauug

SEQ ID NO: 1138759 - RNA, 22 nt, Human
ugguuuaccccuguccuauauc

SEQ ID NO: 1138760 - RNA, 22 nt, Human
aucuagcaguguuauaauugga

SEQ ID NO: 1138761 - RNA, 22 nt, Human
aagggcuccaagagguagcugg

SEQ ID NO: 1138762 - RNA, 22 nt, Human
auuacaguaacagcuacaaugc

SEQ ID NO: 1138763 - RNA, 22 nt, Human
uaggaagcugagcagcauuccu

SEQ ID NO: 1138764 - RNA, 21 nt, Human
auuuucauuuccaggggagga

SEQ ID NO: 1138765 - RNA, 22 nt, Human
cuccugaggacuucuauugggu

SEQ ID NO: 1138766 - RNA, 22 nt, Human
cagcuuugugcaaugcagucuc

SEQ ID NO: 1138767 - RNA, 22 nt, Human
uaauaucuggcauucaaacaug

SEQ ID NO: 1138768 - RNA, 22 nt, Human
ugcuagaaaucugaaacuagca

SEQ ID NO: 1138769 - RNA, 22 nt, Human
uccugagccugacaaucaccau

SEQ ID NO: 1138770 - RNA, 22 nt, Human
aaaguucuaaaacucuuuguga

SEQ ID NO: 1138771 - RNA, 22 nt, Human
uggaacacaagucauugagggg

SEQ ID NO: 1138772 - RNA, 22 nt, Human
cugggcuuucaggcccuaaggc

SEQ ID NO: 1138773 - RNA, 22 nt, Human
uccaggcauguugggaagauga

SEQ ID NO: 1138774 - RNA, 22 nt, Human
uuagaacuuaagaauacugucu

SEQ ID NO: 1138775 - RNA, 20 nt, Human
ucuggggaugaggucuagga

SEQ ID NO: 1138776 - RNA, 22 nt, Human
guuagggaagcgcuguguucuu

SEQ ID NO: 1138777 - RNA, 22 nt, Human
acaagagcauugcagguguguu

SEQ ID NO: 1138778 - RNA, 22 nt, Human
ugggcuucauaauugguccuag

SEQ ID NO: 1138779 - RNA, 22 nt, Human
ucaccagggcuccagccagccu

SEQ ID NO: 1138780 - RNA, 22 nt, Human
acucugaaugugcauguaaauc

SEQ ID NO: 1138781 - RNA, 22 nt, Human
guaguuuucugaaaauuacuuu

SEQ ID NO: 1138782 - RNA, 22 nt, Human
uuguucaugguuguaaguuuga

SEQ ID NO: 1138783 - RNA, 22 nt, Human
aaucuuuuaggggauccugagg

SEQ ID NO: 1138784 - RNA, 22 nt, Human
uuucacaaucaaauggugaaau

SEQ ID NO: 1138785 - RNA, 22 nt, Human
ugcuucugauucaugguuauug

SEQ ID NO: 1138786 - RNA, 22 nt, Human
gccaggcaggugucggagcccu

SEQ ID NO: 1138787 - RNA, 22 nt, Human
ggagcugaaccccaucgugcug

SEQ ID NO: 1138788 - RNA, 21 nt, Human
uccaaaucccauucuguaguc

SEQ ID NO: 1138789 - RNA, 22 nt, Human
guaugaaaauuguaaaguucuu

SEQ ID NO: 1138790 - RNA, 22 nt, Human
uguuaggguccugugcaggggc

SEQ ID NO: 1138791 - RNA, 23 nt, Human
ccucucucccuguuuggcaaaua

SEQ ID NO: 1138792 - RNA, 22 nt, Human
ugcaggcucaccugccagggcc

SEQ ID NO: 1138793 - RNA, 22 nt, Human
ugcauaaacagauacuucaugu

SEQ ID NO: 1138794 - RNA, 22 nt, Human
gcuucuauuauuuggagcugag

SEQ ID NO: 1138795 - RNA, 22 nt, Human
cuguagaacgauccaggcauuu

SEQ ID NO: 1138796 - RNA, 23 nt, Human
uuccaagugcuuuacuuaauccu

SEQ ID NO: 1138797 - RNA, 17 nt, Human
cagcuuuaugcuacugu

SEQ ID NO: 1138798 - RNA, 22 nt, Human
gacacauaugcguauaguuuag

SEQ ID NO: 1138799 - RNA, 22 nt, Human
ucaucaguuuagaaaaaauaug

SEQ ID NO: 1138800 - RNA, 22 nt, Human
cauaauuugauaugcuugaugg

SEQ ID NO: 1138801 - RNA, 22 nt, Human
caguguggugagauuccaggug

SEQ ID NO: 1138802 - RNA, 22 nt, Human
cagggcucaccacugggauccu

SEQ ID NO: 1138803 - RNA, 22 nt, Human
caggcauggugagaacucagcc

SEQ ID NO: 1138804 - RNA, 22 nt, Human
acuauaaaaggauaaaccagaa

SEQ ID NO: 1138805 - RNA, 20 nt, Human
cagggcucugggccuggccu

SEQ ID NO: 1138806 - RNA, 22 nt, Human
cucuugcagauaccuugaagga

SEQ ID NO: 1138807 - RNA, 20 nt, Human
uuucuggguacucucccucu

SEQ ID NO: 1138808 - RNA, 22 nt, Human
ugcaguggaaagacucagacuu

SEQ ID NO: 1138809 - RNA, 19 nt, Human
ugccuggcaccagcuccac

SEQ ID NO: 1138810 - RNA, 22 nt, Human
aacaugauuuaguauaaugcag

SEQ ID NO: 1138811 - RNA, 22 nt, Human
aaucugucguaguaaaaagcag

SEQ ID NO: 1138812 - RNA, 22 nt, Human
gcuggggagaauuggguuaucu

SEQ ID NO: 1138813 - RNA, 22 nt, Human
cacacacaguuuuguauucugu

SEQ ID NO: 1138814 - RNA, 22 nt, Human
cuguccagaaagggggcaacaa

SEQ ID NO: 1138815 - RNA, 22 nt, Human
cuguaugauauccaaauugaua

SEQ ID NO: 1138816 - RNA, 22 nt, Human
cagccaggauggagaacuguug

SEQ ID NO: 1138817 - RNA, 22 nt, Human
ugaauaugugacuuugauuuca

SEQ ID NO: 1138818 - RNA, 22 nt, Human
ccaggcucagcgcgcacgucug

SEQ ID NO: 1138819 - RNA, 22 nt, Human
uugggcucaggaguuugagacc

SEQ ID NO: 1138820 - RNA, 22 nt, Human
uccugcaguuacaucccagcca

SEQ ID NO: 1138821 - RNA, 22 nt, Human
cauuagggacugaggaauaagg

SEQ ID NO: 1138822 - RNA, 22 nt, Human
ggcccaaacggguccagugaaa

SEQ ID NO: 1138823 - RNA, 22 nt, Human
cuucuggguaauucuucuucau

SEQ ID NO: 1138824 - RNA, 22 nt, Human
ugggcugaaaugcuguggacua

SEQ ID NO: 1138825 - RNA, 20 nt, Human
gccucagccaacccaugggg

SEQ ID NO: 1138826 - RNA, 22 nt, Human
ucugauuagcaguuuagggaaa

SEQ ID NO: 1138827 - RNA, 22 nt, Human
cauaauuuuccaugguuugcua

SEQ ID NO: 1138828 - RNA, 22 nt, Human
gguggcagagaggagguaguuu

SEQ ID NO: 1138829 - RNA, 22 nt, Human
cagcucagucuggagagaugca

SEQ ID NO: 1138830 - RNA, 22 nt, Human
auaugaagucagacaaacuggg

SEQ ID NO: 1138831 - RNA, 21 nt, Human
uccugcagggcagcagagugg

SEQ ID NO: 1138832 - RNA, 19 nt, Human
gggagcugaggucuuuggu

SEQ ID NO: 1138833 - RNA, 22 nt, Human
uuauuuuuaaaaguucacacag

SEQ ID NO: 1138834 - RNA, 22 nt, Human
uguuucuuuguagauauucuuu

SEQ ID NO: 1138835 - RNA, 22 nt, Human
gcuaggagugggauggaagucg

SEQ ID NO: 1138836 - RNA, 22 nt, Human
uuuaauuuuccucuuccuggag

SEQ ID NO: 1138837 - RNA, 22 nt, Human
gguuucaacuaaaucaagaagg

SEQ ID NO: 1138838 - RNA, 22 nt, Human
gaaguucuuagucucauuugca

SEQ ID NO: 1138839 - RNA, 18 nt, Human
ggacaucaucaggugcuu

SEQ ID NO: 1138840 - RNA, 22 nt, Human
acagaguccuagcugcaaagaa

SEQ ID NO: 1138841 - RNA, 22 nt, Human
uuauucuucuucucuugccagg

SEQ ID NO: 1138842 - RNA, 22 nt, Human
ugcuuuauuggaaccucauccu

SEQ ID NO: 1138843 - RNA, 22 nt, Human
augugaaaaauuucuuauuaca

SEQ ID NO: 1138844 - RNA, 22 nt, Human
aaacaugcauucaagaaaaucu

SEQ ID NO: 1138845 - RNA, 20 nt, Human
uauaaauucagagcuuuggu

SEQ ID NO: 1138846 - RNA, 22 nt, Human
acaaguaccaaaugcucaagua

SEQ ID NO: 1138847 - RNA, 22 nt, Human
uucugucaaagacuuuuucagg

SEQ ID NO: 1138848 - RNA, 22 nt, Human
ugcuuuauucccuucugaugug

SEQ ID NO: 1138849 - RNA, 22 nt, Human
ggcuccaagucucagagugaag

SEQ ID NO: 1138850 - RNA, 22 nt, Human
ucuggggaugagguccagugau

SEQ ID NO: 1138851 - RNA, 17 nt, Human
cucuggggacaguucua

SEQ ID NO: 1138852 - RNA, 22 nt, Human
gguaugaauucacuacuuccaa

SEQ ID NO: 1138853 - RNA, 22 nt, Human
acaggcagagaacucagccaga

SEQ ID NO: 1138854 - RNA, 22 nt, Human
uuugcuuguucaagauuucugu

SEQ ID NO: 1138855 - RNA, 22 nt, Human
uuugcaaauauguguuucuauu

SEQ ID NO: 1138856 - RNA, 22 nt, Human
uuccaggcucccuuggaggugu

SEQ ID NO: 1138857 - RNA, 23 nt, Human
uccugcugaaagcuccagcuggc

SEQ ID NO: 1138858 - RNA, 22 nt, Human
aaacucuguagcuaaacauaau

SEQ ID NO: 1138859 - RNA, 22 nt, Human
caugaaauugcuccuuuggugc

SEQ ID NO: 1138860 - RNA, 23 nt, Human
acuccccagucucuucuugccaa

SEQ ID NO: 1138861 - RNA, 22 nt, Human
acacacucaauugcauaagcac

SEQ ID NO: 1138862 - RNA, 22 nt, Human
uucugucacagugcugguauca

SEQ ID NO: 1138863 - RNA, 22 nt, Human
uuaguuuucccaucuuuauggu

SEQ ID NO: 1138864 - RNA, 22 nt, Human
cuucugggccauggccuuccuc

SEQ ID NO: 1138865 - RNA, 22 nt, Human
uacccaggggcugagcagaggu

SEQ ID NO: 1138866 - RNA, 22 nt, Human
acagauuuguucuuuugggcua

SEQ ID NO: 1138867 - RNA, 22 nt, Human
aguguuugucccguuagaaaug

SEQ ID NO: 1138868 - RNA, 22 nt, Human
agcauucauugcuagaauguaa

SEQ ID NO: 1138869 - RNA, 22 nt, Human
ucagcuuucucucgccaucagg

SEQ ID NO: 1138870 - RNA, 18 nt, Human
aguuccuuaaauuggugu

SEQ ID NO: 1138871 - RNA, 23 nt, Human
accaugaugggagugcaaauaag

SEQ ID NO: 1138872 - RNA, 22 nt, Human
aaacacaccuuuggaacuguga

SEQ ID NO: 1138873 - RNA, 22 nt, Human
uuuucauuguaaaucaggaaac

SEQ ID NO: 1138874 - RNA, 22 nt, Human
uccagaccaugugagaggcgca

SEQ ID NO: 1138875 - RNA, 22 nt, Human
uggccuccccuaacagccucuu

SEQ ID NO: 1138876 - RNA, 22 nt, Human
uuuaguagaaugauacagggca

SEQ ID NO: 1138877 - RNA, 22 nt, Human
agaggccugugugcuccagugg

SEQ ID NO: 1138878 - RNA, 22 nt, Human
aaagauucgagcgauguauaaa

SEQ ID NO: 1138879 - RNA, 19 nt, Human
uccuggcauuuguaggaaa

SEQ ID NO: 1138880 - RNA, 22 nt, Human
aagauauagauaaaacuaugca

SEQ ID NO: 1138881 - RNA, 22 nt, Human
auguccagggcacacagcagug

SEQ ID NO: 1138882 - RNA, 22 nt, Human
aucagagauuguaguaugugca

SEQ ID NO: 1138883 - RNA, 22 nt, Human
ucugaaauagaagugucuuucu

SEQ ID NO: 1138884 - RNA, 22 nt, Human
gcacacaguagggauucaauga

SEQ ID NO: 1138885 - RNA, 22 nt, Human
cacacauuucagaugcuacaau

SEQ ID NO: 1138886 - RNA, 22 nt, Human
uagggacacugcucaugaguuc

SEQ ID NO: 1138887 - RNA, 22 nt, Human
gcagcuuucuugcccuaaucuu

SEQ ID NO: 1138888 - RNA, 22 nt, Human
uuaaauuccagccucauaauag

SEQ ID NO: 1138889 - RNA, 22 nt, Human
ccugggcuucugucuagauguu

SEQ ID NO: 1138890 - RNA, 22 nt, Human
cuucugggcagaaguuuugaga

SEQ ID NO: 1138891 - RNA, 22 nt, Human
ccuggcagcaggugggcccgug

SEQ ID NO: 1138892 - RNA, 22 nt, Human
uuguaugaguaugguguauagg

SEQ ID NO: 1138893 - RNA, 17 nt, Human
acaggccugcuugcacu

SEQ ID NO: 1138894 - RNA, 22 nt, Human
uccugccuguuuaccuguacuu

SEQ ID NO: 1138895 - RNA, 22 nt, Human
ucagccuccgaaagugcuggga

SEQ ID NO: 1138896 - RNA, 22 nt, Human
augggcuggccuuucccgcucu

SEQ ID NO: 1138897 - RNA, 22 nt, Human
uuccaggccgggcaggaaacac

SEQ ID NO: 1138898 - RNA, 22 nt, Human
cuccuggcaguuccccuuguca

SEQ ID NO: 1138899 - RNA, 18 nt, Human
ugaggcagucagugaugg

SEQ ID NO: 1138900 - RNA, 23 nt, Human
ucagagagcuguugagagcugcc

SEQ ID NO: 1138901 - RNA, 22 nt, Human
ccacacagggggaugaguuauu

SEQ ID NO: 1138902 - RNA, 22 nt, Human
gggcugacaaccaucugacaag

SEQ ID NO: 1138903 - RNA, 22 nt, Human
uuggcuucuugugaaaucugag

SEQ ID NO: 1138904 - RNA, 22 nt, Human
auuauuagacuuauaugguagu

SEQ ID NO: 1138905 - RNA, 22 nt, Human
ucccagccuuccuuguggugaa

SEQ ID NO: 1138906 - RNA, 22 nt, Human
aaaauuuugcccuauccuucau

SEQ ID NO: 1138907 - RNA, 22 nt, Human
auauuugucaauucacuguuca

SEQ ID NO: 1138908 - RNA, 22 nt, Human
uccuaguucucugccagucgcu

SEQ ID NO: 1138909 - RNA, 22 nt, Human
ucuuugaaaagggagauagaaa

SEQ ID NO: 1138910 - RNA, 22 nt, Human
ggcaggcugcuugggucauguc

SEQ ID NO: 1138911 - RNA, 22 nt, Human
aguaugaaaguuaaucaauuua

SEQ ID NO: 1138912 - RNA, 22 nt, Human
uuuaaaauuuagaccucuccac

SEQ ID NO: 1138913 - RNA, 18 nt, Human
acacugcagcagucugcu

SEQ ID NO: 1138914 - RNA, 22 nt, Human
aggaagaaccuaagaaagucuc

SEQ ID NO: 1138915 - RNA, 19 nt, Human
guagggacagugguucuga

SEQ ID NO: 1138916 - RNA, 21 nt, Human
ucagcuuugcaacugcacauc

SEQ ID NO: 1138917 - RNA, 22 nt, Human
gagugaugucuguagugaagaa

SEQ ID NO: 1138918 - RNA, 21 nt, Human
gaaaagcaagggaguagaaca

SEQ ID NO: 1138919 - RNA, 22 nt, Human
uccuggcauccgugggucugug

SEQ ID NO: 1138920 - RNA, 22 nt, Human
cuggcagggugggcuuugcuuu

SEQ ID NO: 1138921 - RNA, 22 nt, Human
ucuaggagcuuaaaggaggcca

SEQ ID NO: 1138922 - RNA, 22 nt, Human
augaucucauucuuucaaaggg

SEQ ID NO: 1138923 - RNA, 22 nt, Human
uucuacaauaugaauaaugaag

SEQ ID NO: 1138924 - RNA, 22 nt, Human
uguaaagaaagacgcagaguua

SEQ ID NO: 1138925 - RNA, 22 nt, Human
gaagccucaacaucucugcguc

SEQ ID NO: 1138926 - RNA, 22 nt, Human
uaugacauuggccaaguucugu

SEQ ID NO: 1138927 - RNA, 22 nt, Human
gcuggcagagcucugggcuggg

SEQ ID NO: 1138928 - RNA, 22 nt, Human
ccagagagggcgccaccuggag

SEQ ID NO: 1138929 - RNA, 22 nt, Human
gacauaauaaucugaccuagau

SEQ ID NO: 1138930 - RNA, 22 nt, Human
uaugcacauucacacaaaaaug

SEQ ID NO: 1138931 - RNA, 22 nt, Human
aagggcucuguugccauuucag

SEQ ID NO: 1138932 - RNA, 22 nt, Human
cugcagggaugugaggcccguu

SEQ ID NO: 1138933 - RNA, 22 nt, Human
ccuugcucaagcuagugacggg

SEQ ID NO: 1138934 - RNA, 22 nt, Human
uuauucugcacuuuuaaaauau

SEQ ID NO: 1138935 - RNA, 22 nt, Human
ugcuagaagauagcuagaagau

SEQ ID NO: 1138936 - RNA, 22 nt, Human
ugugcauguauugauuuguacc

SEQ ID NO: 1138937 - RNA, 22 nt, Human
auucugucauuucaagaaaaac

SEQ ID NO: 1138938 - RNA, 22 nt, Human
cccugcagacgucuugaugccu

SEQ ID NO: 1138939 - RNA, 22 nt, Human
agagcaauggcauccagcugau

SEQ ID NO: 1138940 - RNA, 22 nt, Human
caauacugaguuuacauucauc

SEQ ID NO: 1138941 - RNA, 22 nt, Human
acauccagaucucagcauggcu

SEQ ID NO: 1138942 - RNA, 21 nt, Human
ugggaccuagcuuugcacagg

SEQ ID NO: 1138943 - RNA, 22 nt, Human
uuuauuagugcuuguaucacug

SEQ ID NO: 1138944 - RNA, 22 nt, Human
gagccugaugaaacaggcagac

SEQ ID NO: 1138945 - RNA, 22 nt, Human
aaugaagccagguagaagagaa

SEQ ID NO: 1138946 - RNA, 22 nt, Human
gccaggcauuauuccgaucccu

SEQ ID NO: 1138947 - RNA, 22 nt, Human
ccagagagucgaugggggacac

SEQ ID NO: 1138948 - RNA, 22 nt, Human
uguaggcugaagaugaagugga

SEQ ID NO: 1138949 - RNA, 19 nt, Human
ucuggcagguaauuaggga

SEQ ID NO: 1138950 - RNA, 19 nt, Human
gugggacagacauuacaua

SEQ ID NO: 1138951 - RNA, 22 nt, Human
agggacccugaugacugaggag

SEQ ID NO: 1138952 - RNA, 22 nt, Human
cacacacugacaccuuaucuug

SEQ ID NO: 1138953 - RNA, 20 nt, Human
ucagagagagggugccacuu

SEQ ID NO: 1138954 - RNA, 22 nt, Human
uuaacacaucccugcucuaccc

SEQ ID NO: 1138955 - RNA, 22 nt, Human
ucaguuaacaacuauuuauuga

SEQ ID NO: 1138956 - RNA, 22 nt, Human
uuacaauaccacaucaccucau

SEQ ID NO: 1138957 - RNA, 22 nt, Human
gcacucuccuggcugccacagu

SEQ ID NO: 1138958 - RNA, 22 nt, Human
gagggguccaggaggcacuuac

SEQ ID NO: 1138959 - RNA, 22 nt, Human
cugcagggaccacaagcagguu

SEQ ID NO: 1138960 - RNA, 23 nt, Human
agcuucauugaccuccgcagggg

SEQ ID NO: 1138961 - RNA, 22 nt, Human
agacacagucugucuggaggag

SEQ ID NO: 1138962 - RNA, 22 nt, Human
cagggggugcaggcccugugac

SEQ ID NO: 1138963 - RNA, 22 nt, Human
cuaauguaucauggcucucagc

SEQ ID NO: 1138964 - RNA, 22 nt, Human
uacacagaaccugguguacagu

SEQ ID NO: 1138965 - RNA, 22 nt, Human
uuuuccuuucaucaggacaaag

SEQ ID NO: 1138966 - RNA, 22 nt, Human
ccagcuuuaucaagucugagcu

SEQ ID NO: 1138967 - RNA, 22 nt, Human
gagcucagcaaaggucugugug

SEQ ID NO: 1138968 - RNA, 22 nt, Human
acaguguucacuuaacaaugga

SEQ ID NO: 1138969 - RNA, 22 nt, Human
agaauaugaugguuggagaauu

SEQ ID NO: 1138970 - RNA, 22 nt, Human
ugcuuuauucaggguuuacccc

SEQ ID NO: 1138971 - RNA, 22 nt, Human
cccugcagggaggauucugaag

SEQ ID NO: 1138972 - RNA, 22 nt, Human
cccugagcgugaggaggaagua

SEQ ID NO: 1138973 - RNA, 22 nt, Human
gcuaggaguggugggucaagga

SEQ ID NO: 1138974 - RNA, 17 nt, Human
acaggcagaucaccuga

SEQ ID NO: 1138975 - RNA, 19 nt, Human
ccugccugagcugucccuc

SEQ ID NO: 1138976 - RNA, 22 nt, Human
ucuauaaauuaugcagucucag

SEQ ID NO: 1138977 - RNA, 22 nt, Human
cauaauaucuccgauuacuugc

SEQ ID NO: 1138978 - RNA, 22 nt, Human
aauguauuccucaugcaagagu

SEQ ID NO: 1138979 - RNA, 22 nt, Human
agggcugacaaauggcagugac

SEQ ID NO: 1138980 - RNA, 22 nt, Human
ggaccugcccuggcucagaugc

SEQ ID NO: 1138981 - RNA, 22 nt, Human
uaacacauuuuccucauacgga

SEQ ID NO: 1138982 - RNA, 22 nt, Human
accagugggaaguggaaaauga

SEQ ID NO: 1138983 - RNA, 22 nt, Human
aagcaacucccuccucauuuuu

SEQ ID NO: 1138984 - RNA, 22 nt, Human
uaucaauugggccaaaugguac

SEQ ID NO: 1138985 - RNA, 22 nt, Human
aggcaauccccugaggauacuu

SEQ ID NO: 1138986 - RNA, 18 nt, Human
gccugcucugcucucccc

SEQ ID NO: 1138987 - RNA, 22 nt, Human
augcuauacauaugacaucaca

SEQ ID NO: 1138988 - RNA, 22 nt, Human
uaauuucuggagggagaaagag

SEQ ID NO: 1138989 - RNA, 22 nt, Human
uugaaauacugcauuguucagu

SEQ ID NO: 1138990 - RNA, 22 nt, Human
ccagcccugccagagagagcug

SEQ ID NO: 1138991 - RNA, 22 nt, Human
caggcagcugacugucagauau

SEQ ID NO: 1138992 - RNA, 22 nt, Human
cugccugcaugcugccauagcu

SEQ ID NO: 1138993 - RNA, 22 nt, Human
uuucuagagugggcaugucuua

SEQ ID NO: 1138994 - RNA, 22 nt, Human
gcagcuuugucacggagugucg

SEQ ID NO: 1138995 - RNA, 18 nt, Human
uuuuacucauagcaggcc

SEQ ID NO: 1138996 - RNA, 22 nt, Human
ccacaucauggauacaguuaug

SEQ ID NO: 1138997 - RNA, 22 nt, Human
aacaaagucguugccuagaaga

SEQ ID NO: 1138998 - RNA, 22 nt, Human
cugggcugaaaguguuccuuga

SEQ ID NO: 1138999 - RNA, 22 nt, Human
ccagugcauaaucaauacagcc

SEQ ID NO: 1139000 - RNA, 22 nt, Human
aauucuguaacuuuacugaauu

SEQ ID NO: 1139001 - RNA, 22 nt, Human
agggggucguccggaagaccug

SEQ ID NO: 1139002 - RNA, 22 nt, Human
agagggcugcugcacagugcuc

SEQ ID NO: 1139003 - RNA, 22 nt, Human
gaacugaguuuucugccuggac

SEQ ID NO: 1139004 - RNA, 23 nt, Human
auguaucucauccaaggaagcuc

SEQ ID NO: 1139005 - RNA, 20 nt, Human
cccagagccauagccagaca

SEQ ID NO: 1139006 - RNA, 22 nt, Human
ggcugaguugagaggauuacuu

SEQ ID NO: 1139007 - RNA, 22 nt, Human
uccugcagaucaaagccuuuga

SEQ ID NO: 1139008 - RNA, 22 nt, Human
gaagagaaaggcaaggaguuuu

SEQ ID NO: 1139009 - RNA, 22 nt, Human
gccaggcagacaggucaucagg

SEQ ID NO: 1139010 - RNA, 20 nt, Human
uagggcucauuaugaucucc

SEQ ID NO: 1139011 - RNA, 22 nt, Human
cagcacagugaccagacccacu

SEQ ID NO: 1139012 - RNA, 23 nt, Human
uugugggcagauuccauggggag

SEQ ID NO: 1139013 - RNA, 22 nt, Human
gauucuuacuucuaagcaagcu

SEQ ID NO: 1139014 - RNA, 22 nt, Human
cuguccagucuuuagcaagcug

SEQ ID NO: 1139015 - RNA, 22 nt, Human
acuuaaaaagaaucuuuucacg

SEQ ID NO: 1139016 - RNA, 22 nt, Human
ccaaguacagauuccuccacug

SEQ ID NO: 1139017 - RNA, 22 nt, Human
uuggcaggaauauugcagaggu

SEQ ID NO: 1139018 - RNA, 22 nt, Human
gggcaaguccggugcccagagc

SEQ ID NO: 1139019 - RNA, 22 nt, Human
cugaaccaucucuguucuguau

SEQ ID NO: 1139020 - RNA, 22 nt, Human
ugguccugccccgugcacagag

SEQ ID NO: 1139021 - RNA, 22 nt, Human
uguaaaauaauucuccauguuu

SEQ ID NO: 1139022 - RNA, 22 nt, Human
cagcccaaagccccaggcuaga

SEQ ID NO: 1139023 - RNA, 22 nt, Human
aggaggcugaacuagggucugg

SEQ ID NO: 1139024 - RNA, 20 nt, Human
ucugugcaccugcuacaagg

SEQ ID NO: 1139025 - RNA, 22 nt, Human
cccagcccacgguccugggugg

SEQ ID NO: 1139026 - RNA, 22 nt, Human
ucuccaggagcaagucacccag

SEQ ID NO: 1139027 - RNA, 22 nt, Human
ccauucauacaauuuuguucua

SEQ ID NO: 1139028 - RNA, 19 nt, Human
aauuagggagucgguuaag

SEQ ID NO: 1139029 - RNA, 22 nt, Human
uuguaaaugaccuuuucuaauu

SEQ ID NO: 1139030 - RNA, 17 nt, Human
uccaggcauaucuccua

SEQ ID NO: 1139031 - RNA, 22 nt, Human
gccagaagggguggauccaggc

SEQ ID NO: 1139032 - RNA, 22 nt, Human
aacagcauaccaauguacauau

SEQ ID NO: 1139033 - RNA, 22 nt, Human
acaggcaggcuucggccagagc

SEQ ID NO: 1139034 - RNA, 22 nt, Human
gaugggcguggcgcguuuggug

SEQ ID NO: 1139035 - RNA, 22 nt, Human
uuuuucaugagacuagaaguca

SEQ ID NO: 1139036 - RNA, 22 nt, Human
uucacaauagcuggcaucaucu

SEQ ID NO: 1139037 - RNA, 22 nt, Human
ccagcuuucauaucaugaggua

SEQ ID NO: 1139038 - RNA, 22 nt, Human
cuggcuuucauuucaagcacgu

SEQ ID NO: 1139039 - RNA, 22 nt, Human
cuuaaauuggaugaguuaaguu

SEQ ID NO: 1139040 - RNA, 22 nt, Human
gggccccuuguaucucuggcuc

SEQ ID NO: 1139041 - RNA, 22 nt, Human
cauuuguaauacugacuugcag

SEQ ID NO: 1139042 - RNA, 22 nt, Human
guuucauuuacaucuguaggua

SEQ ID NO: 1139043 - RNA, 19 nt, Human
ggcaggcuggauagagagg

SEQ ID NO: 1139044 - RNA, 22 nt, Human
cagcccagccuugucucuuuau

SEQ ID NO: 1139045 - RNA, 22 nt, Human
uuuccuaagguagugauaauuu

SEQ ID NO: 1139046 - RNA, 22 nt, Human
agacaucauguuacagauuaag

SEQ ID NO: 1139047 - RNA, 22 nt, Human
agaccugcagggccaggccugc

SEQ ID NO: 1139048 - RNA, 22 nt, Human
aaugaaugaaccacauauaaca

SEQ ID NO: 1139049 - RNA, 22 nt, Human
agagggcuuugauucucaguuc

SEQ ID NO: 1139050 - RNA, 22 nt, Human
cugccugccacguucagcugua

SEQ ID NO: 1139051 - RNA, 22 nt, Human
gugggcuucuguuagggaggcu

SEQ ID NO: 1139052 - RNA, 22 nt, Human
aucagagacaaaaccagcacuu

SEQ ID NO: 1139053 - RNA, 22 nt, Human
guuuuuaucuaauagcaguuau

SEQ ID NO: 1139054 - RNA, 22 nt, Human
aaaaugacauuccagugauauu

SEQ ID NO: 1139055 - RNA, 22 nt, Human
ccaggcucugagaggaauguga

SEQ ID NO: 1139056 - RNA, 22 nt, Human
ggcaggcuccaagcauccuaug

SEQ ID NO: 1139057 - RNA, 22 nt, Human
uucacacacagcuuccuauugu

SEQ ID NO: 1139058 - RNA, 22 nt, Human
cuggcagucugguggaaggccu

SEQ ID NO: 1139059 - RNA, 22 nt, Human
gccuggcaggccuguuggggcu

SEQ ID NO: 1139060 - RNA, 22 nt, Human
uagcuagaaugcuucgugauau

SEQ ID NO: 1139061 - RNA, 22 nt, Human
gccaggggugcccacccaagga

SEQ ID NO: 1139062 - RNA, 22 nt, Human
augcuacauuuugguuuauaaa

SEQ ID NO: 1139063 - RNA, 22 nt, Human
cagagcugcuucccaguuugug

SEQ ID NO: 1139064 - RNA, 22 nt, Human
uguugauuaguguuuagacuua

SEQ ID NO: 1139065 - RNA, 22 nt, Human
gcccaggccggagagcagugcu

SEQ ID NO: 1139066 - RNA, 22 nt, Human
gcagggacagggcagggccuuu

SEQ ID NO: 1139067 - RNA, 20 nt, Human
uuucacaucugucccuuuaa

SEQ ID NO: 1139068 - RNA, 22 nt, Human
accaugaugcauccuuaaggaa

SEQ ID NO: 1139069 - RNA, 18 nt, Human
ucuggaacaacuucaugu

SEQ ID NO: 1139070 - RNA, 22 nt, Human
aaacacagggauauauauucca

SEQ ID NO: 1139071 - RNA, 22 nt, Human
uccccacaucucugcaucaggc

SEQ ID NO: 1139072 - RNA, 22 nt, Human
cugaaaauguuacacaggaaga

SEQ ID NO: 1139073 - RNA, 22 nt, Human
uccaggcaggguuaaggguccu

SEQ ID NO: 1139074 - RNA, 22 nt, Human
cugagcagugguucuugagcgc

SEQ ID NO: 1139075 - RNA, 20 nt, Human
gccugcagagaaggucagag

SEQ ID NO: 1139076 - RNA, 22 nt, Human
aaauacagauuccagggucuua

SEQ ID NO: 1139077 - RNA, 22 nt, Human
cugggcugcaggaguggggcaa

SEQ ID NO: 1139078 - RNA, 22 nt, Human
cucagagaaaaggagcaagggu

SEQ ID NO: 1139079 - RNA, 22 nt, Human
aucugucaggagcaaggacuac

SEQ ID NO: 1139080 - RNA, 22 nt, Human
cucugauuuccuuauucuguca

SEQ ID NO: 1139081 - RNA, 22 nt, Human
acacacacaagcagguugugga

SEQ ID NO: 1139082 - RNA, 22 nt, Human
uauguaaaaauucaucaggcug

SEQ ID NO: 1139083 - RNA, 22 nt, Human
uguaugaauauguuggggaggu

SEQ ID NO: 1139084 - RNA, 22 nt, Human
guuagggagggugcauaugugu

SEQ ID NO: 1139085 - RNA, 22 nt, Human
ucugcucuguggcuucagcuaa

SEQ ID NO: 1139086 - RNA, 20 nt, Human
guauuagguguuccucuuuc

SEQ ID NO: 1139087 - RNA, 22 nt, Human
cugggcuuugaagccaggcugc

SEQ ID NO: 1139088 - RNA, 22 nt, Human
uucuggggcuaauacagagguc

SEQ ID NO: 1139089 - RNA, 22 nt, Human
ugcaggcucaucucaagaguag

SEQ ID NO: 1139090 - RNA, 22 nt, Human
uugauuucuuacucuuccaagg

SEQ ID NO: 1139091 - RNA, 22 nt, Human
aaagaguucuaugaucuuucca

SEQ ID NO: 1139092 - RNA, 22 nt, Human
gcccagccuccaagcuccaagg

SEQ ID NO: 1139093 - RNA, 22 nt, Human
uccaggcaguuuuccagguugu

SEQ ID NO: 1139094 - RNA, 22 nt, Human
ccaggcucuaucccuccuucuu

SEQ ID NO: 1139095 - RNA, 22 nt, Human
ggcagugagaggucuccugguc

SEQ ID NO: 1139096 - RNA, 22 nt, Human
caccagggccccaggcugugcc

SEQ ID NO: 1139097 - RNA, 22 nt, Human
uucuagaggggagauacuagua

SEQ ID NO: 1139098 - RNA, 22 nt, Human
ucauguuauugacucauaauau

SEQ ID NO: 1139099 - RNA, 22 nt, Human
ccagagaccagaacauggggau

SEQ ID NO: 1139100 - RNA, 22 nt, Human
cuggggacgucgggcaguguuc

SEQ ID NO: 1139101 - RNA, 22 nt, Human
uggccaggccucuuggugccca

SEQ ID NO: 1139102 - RNA, 22 nt, Human
ucccacacuacacgguuguugg

SEQ ID NO: 1139103 - RNA, 20 nt, Human
uucuuaaagaccucacuuug

SEQ ID NO: 1139104 - RNA, 22 nt, Human
ugcuauaaguagacauucaaca

SEQ ID NO: 1139105 - RNA, 21 nt, Human
ugcauaaagaaauacaaauac

SEQ ID NO: 1139106 - RNA, 22 nt, Human
gcccggcagucacacacccagg

SEQ ID NO: 1139107 - RNA, 19 nt, Human
ugcauaaauuauauacuuu

SEQ ID NO: 1139108 - RNA, 22 nt, Human
gggccccuugcugcucugcugg

SEQ ID NO: 1139109 - RNA, 22 nt, Human
aaagucuuuauuuuguaucuuu

SEQ ID NO: 1139110 - RNA, 22 nt, Human
uuccuggcagaggccccgacag

SEQ ID NO: 1139111 - RNA, 22 nt, Human
uucagagagaaaccagugggaa

SEQ ID NO: 1139112 - RNA, 22 nt, Human
acacaucucaggggacacucuc

SEQ ID NO: 1139113 - RNA, 22 nt, Human
caggcuggagugcaauggcaca

SEQ ID NO: 1139114 - RNA, 22 nt, Human
ugacaaaacugcaauuacuuuu

SEQ ID NO: 1139115 - RNA, 22 nt, Human
cuuacaaaggagaggagauagg

SEQ ID NO: 1139116 - RNA, 20 nt, Human
agaggcuuccuugggaggag

SEQ ID NO: 1139117 - RNA, 22 nt, Human
ggcuucuggugggagcaugacu

SEQ ID NO: 1139118 - RNA, 22 nt, Human
guuagggaucaggaacaagagc

SEQ ID NO: 1139119 - RNA, 22 nt, Human
gcuggcagaagagcugguucaa

SEQ ID NO: 1139120 - RNA, 22 nt, Human
cuuggcaggguggaggaugcag

SEQ ID NO: 1139121 - RNA, 22 nt, Human
ucuuugaaaagauauuccuccu

SEQ ID NO: 1139122 - RNA, 22 nt, Human
gcagggcucaacaggacacccc

SEQ ID NO: 1139123 - RNA, 20 nt, Human
augggcugguuaggaagugu

SEQ ID NO: 1139124 - RNA, 17 nt, Human
agccugccccaugcugc

SEQ ID NO: 1139125 - RNA, 22 nt, Human
acaauacuuaccaauguuuuug

SEQ ID NO: 1139126 - RNA, 22 nt, Human
cugguggaggugccaggauuug

SEQ ID NO: 1139127 - RNA, 22 nt, Human
gccaggcagcuagcaaccccug

SEQ ID NO: 1139128 - RNA, 21 nt, Human
ggcuuuaugcucacccagccu

SEQ ID NO: 1139129 - RNA, 22 nt, Human
gaaaacuauuggccuagaacaa

SEQ ID NO: 1139130 - RNA, 22 nt, Human
ugggcugaggggccuugaugac

SEQ ID NO: 1139131 - RNA, 22 nt, Human
ccugggcuguaccugugcgcgg

SEQ ID NO: 1139132 - RNA, 17 nt, Human
ugcuggcaacauacaaa

SEQ ID NO: 1139133 - RNA, 22 nt, Human
uucugggguuaugggugauucu

SEQ ID NO: 1139134 - RNA, 22 nt, Human
gcuucuggaggagcugggcuga

SEQ ID NO: 1139135 - RNA, 22 nt, Human
cacauacaaggcacacuggagg

SEQ ID NO: 1139136 - RNA, 22 nt, Human
acagcuuuaguguggguggugc

SEQ ID NO: 1139137 - RNA, 22 nt, Human
gaggguggccuuuagagcccau

SEQ ID NO: 1139138 - RNA, 22 nt, Human
ucacauaaauuuaccagaugau

SEQ ID NO: 1139139 - RNA, 22 nt, Human
agcuuuauauaaaagaguacau

SEQ ID NO: 1139140 - RNA, 22 nt, Human
gcuuucuugguucugcaggggc

SEQ ID NO: 1139141 - RNA, 22 nt, Human
uuuucauuuuuguagaugcaag

SEQ ID NO: 1139142 - RNA, 22 nt, Human
uucacauaaugauacaaagcuu

SEQ ID NO: 1139143 - RNA, 22 nt, Human
ccuggcagcgugccgagcugcg

SEQ ID NO: 1139144 - RNA, 22 nt, Human
cuuauuagaaagaaaagacaug

SEQ ID NO: 1139145 - RNA, 22 nt, Human
uguccaggucagcagcagggac

SEQ ID NO: 1139146 - RNA, 22 nt, Human
acaugauuaaaagauuuuaaag

SEQ ID NO: 1139147 - RNA, 22 nt, Human
auguagaacagguuaaugacag

SEQ ID NO: 1139148 - RNA, 22 nt, Human
cagcuuuuuagaaucuagggca

SEQ ID NO: 1139149 - RNA, 22 nt, Human
cccugccuugggguccacaccg

SEQ ID NO: 1139150 - RNA, 22 nt, Human
uuauuagggugguuuauguucu

SEQ ID NO: 1139151 - RNA, 22 nt, Human
ccagagaguaggaggcauuauu

SEQ ID NO: 1139152 - RNA, 22 nt, Human
uccaggcucccucaggaugcac

SEQ ID NO: 1139153 - RNA, 18 nt, Human
acacacacaccuguguau

SEQ ID NO: 1139154 - RNA, 22 nt, Human
cuacauaaucuggauuugucug

SEQ ID NO: 1139155 - RNA, 22 nt, Human
cagggcucagggacugcagaaa

SEQ ID NO: 1139156 - RNA, 22 nt, Human
acuggaaaacacuacuacaugc

SEQ ID NO: 1139157 - RNA, 22 nt, Human
cuuugaaaggaagccacacagc

SEQ ID NO: 1139158 - RNA, 22 nt, Human
ucugaacauccagcaaugcaca

SEQ ID NO: 1139159 - RNA, 22 nt, Human
cgcaggcuggcgcggaguggca

SEQ ID NO: 1139160 - RNA, 22 nt, Human
aggcaguggagcuggaauaggc

SEQ ID NO: 1139161 - RNA, 22 nt, Human
cguguggucccggcaaggcaag

SEQ ID NO: 1139162 - RNA, 22 nt, Human
aaggcuuucagcuaacuugauu

SEQ ID NO: 1139163 - RNA, 22 nt, Human
ggcaggcuccagagcccucucc

SEQ ID NO: 1139164 - RNA, 22 nt, Human
cccaguuucaacuuuccagugg

SEQ ID NO: 1139165 - RNA, 22 nt, Human
ugagcagaacacgggauccaug

SEQ ID NO: 1139166 - RNA, 22 nt, Human
auuuaugauuagccuauuguug

SEQ ID NO: 1139167 - RNA, 22 nt, Human
uauucacaugaaaacaaauuuu

SEQ ID NO: 1139168 - RNA, 21 nt, Human
ccagcuuucccaagucccuuu

SEQ ID NO: 1139169 - RNA, 22 nt, Human
aaggcuuuugggaauuuucaac

SEQ ID NO: 1139170 - RNA, 22 nt, Human
acacaucagaaauaugaaugag

SEQ ID NO: 1139171 - RNA, 22 nt, Human
uaugaagcugauaaucacugau

SEQ ID NO: 1139172 - RNA, 22 nt, Human
uuguaugaucaaaagaaaugua

SEQ ID NO: 1139173 - RNA, 22 nt, Human
uuggcaggaggcuucaguuccu

SEQ ID NO: 1139174 - RNA, 18 nt, Human
ucauuuguuuugcaugaa

SEQ ID NO: 1139175 - RNA, 22 nt, Human
acaguguguuggaggagacugu

SEQ ID NO: 1139176 - RNA, 22 nt, Human
ugucuuuagccagcagucuucu

SEQ ID NO: 1139177 - RNA, 22 nt, Human
ugauguucuguauaucauauag

SEQ ID NO: 1139178 - RNA, 22 nt, Human
augggcugagaaucaagaauau

SEQ ID NO: 1139179 - RNA, 22 nt, Human
ccugcagggaaucgaggcagaa

SEQ ID NO: 1139180 - RNA, 22 nt, Human
gagacaucauaaugaaguuucc

SEQ ID NO: 1139181 - RNA, 23 nt, Human
ucuuuucaaugguucuuuaugug

SEQ ID NO: 1139182 - RNA, 22 nt, Human
cuccagggggcauccacacagc

SEQ ID NO: 1139183 - RNA, 22 nt, Human
acagagagggagugauaaaucc

SEQ ID NO: 1139184 - RNA, 22 nt, Human
gccuccggaguugcagugucuu

SEQ ID NO: 1139185 - RNA, 22 nt, Human
acugggcuguuuuuugagugga

SEQ ID NO: 1139186 - RNA, 22 nt, Human
ugggcucagucugcuugguccu

SEQ ID NO: 1139187 - RNA, 22 nt, Human
ggggaccuaggcucugucucuu

SEQ ID NO: 1139188 - RNA, 22 nt, Human
caauuucucuuuauaucucaca

SEQ ID NO: 1139189 - RNA, 22 nt, Human
cagucacauagguauacacaua

SEQ ID NO: 1139190 - RNA, 22 nt, Human
ccagggggcuuggugaggccau

SEQ ID NO: 1139191 - RNA, 22 nt, Human
cccaggcacagauuaucccaau

SEQ ID NO: 1139192 - RNA, 22 nt, Human
aaggccaucuacuuacggaauu

SEQ ID NO: 1139193 - RNA, 20 nt, Human
gcaaaauaggcucuguuggu

SEQ ID NO: 1139194 - RNA, 22 nt, Human
uuucaaacuuuacucuugaauc

SEQ ID NO: 1139195 - RNA, 22 nt, Human
aggggugugcauccuggaggau

SEQ ID NO: 1139196 - RNA, 22 nt, Human
aggcaguguguagcuggaagag

SEQ ID NO: 1139197 - RNA, 22 nt, Human
ggcuuuauuugcagccauuguu

SEQ ID NO: 1139198 - RNA, 22 nt, Human
auuagggaaggauuuggccuga

SEQ ID NO: 1139199 - RNA, 22 nt, Human
uuugucauaucacacaauuuug

SEQ ID NO: 1139200 - RNA, 22 nt, Human
uuggaaauggcuguaguuauga

SEQ ID NO: 1139201 - RNA, 22 nt, Human
guccucugcccaggucaagguu

SEQ ID NO: 1139202 - RNA, 22 nt, Human
ggcaaggggucaggcugagaca

SEQ ID NO: 1139203 - RNA, 22 nt, Human
uuuagggacaagggucuggggu

SEQ ID NO: 1139204 - RNA, 22 nt, Human
gcuaggagauugagcucugaag

SEQ ID NO: 1139205 - RNA, 22 nt, Human
aauguaugagcgugaaagcacu

SEQ ID NO: 1139206 - RNA, 22 nt, Human
ccaguguucauaauuuuacacu

SEQ ID NO: 1139207 - RNA, 22 nt, Human
gccuggaagugugucgugggaa

SEQ ID NO: 1139208 - RNA, 22 nt, Human
ggcuucugaaccaggcccugga

SEQ ID NO: 1139209 - RNA, 22 nt, Human
caggcucuuuugguggcaagga

SEQ ID NO: 1139210 - RNA, 22 nt, Human
gacacuucaccuuucccagccu

SEQ ID NO: 1139211 - RNA, 22 nt, Human
ucagcuuucucaaagaagcugg

SEQ ID NO: 1139212 - RNA, 20 nt, Human
gagucacagaagaagcugaa

SEQ ID NO: 1139213 - RNA, 22 nt, Human
ugcuucuggaguaacaggguga

SEQ ID NO: 1139214 - RNA, 22 nt, Human
guggccagccagggugcugaug

SEQ ID NO: 1139215 - RNA, 22 nt, Human
guuaauuuaguagaguccagau

SEQ ID NO: 1139216 - RNA, 22 nt, Human
uauugaggaucuccugcuaauu

SEQ ID NO: 1139217 - RNA, 22 nt, Human
ugcuuuaucugugagaaccuga

SEQ ID NO: 1139218 - RNA, 22 nt, Human
uucuggggccaauugccacugc

SEQ ID NO: 1139219 - RNA, 22 nt, Human
aagcuuccugaaugcucauuua

SEQ ID NO: 1139220 - RNA, 22 nt, Human
gaacacauguccuccuuggauu

SEQ ID NO: 1139221 - RNA, 22 nt, Human
uccugcaggcuugaguccucag

SEQ ID NO: 1139222 - RNA, 22 nt, Human
uacagcauguccuuagcaaggc

SEQ ID NO: 1139223 - RNA, 22 nt, Human
uuuugagauggagucuugcucu

SEQ ID NO: 1139224 - RNA, 22 nt, Human
uccuggcagaaauggggcugug

SEQ ID NO: 1139225 - RNA, 22 nt, Human
acuggcagaauugaauaguugu

SEQ ID NO: 1139226 - RNA, 22 nt, Human
agggaccuugauggguuuggga

SEQ ID NO: 1139227 - RNA, 22 nt, Human
auaugaagaauuccaauuugga

SEQ ID NO: 1139228 - RNA, 22 nt, Human
cuuuucauuguuuguacaugca

SEQ ID NO: 1139229 - RNA, 22 nt, Human
uggcagggugccaguugcgagu

SEQ ID NO: 1139230 - RNA, 22 nt, Human
gccacauagaggaggauauuaa

SEQ ID NO: 1139231 - RNA, 21 nt, Human
guccagagagccggcuccuga

SEQ ID NO: 1139232 - RNA, 22 nt, Human
ugugucaauuuucauuccuacu

SEQ ID NO: 1139233 - RNA, 22 nt, Human
gcaguccaaaguggcucucacc

SEQ ID NO: 1139234 - RNA, 22 nt, Human
ugcagagagauccucaggguuu

SEQ ID NO: 1139235 - RNA, 22 nt, Human
uaauuuuacuuccugagcaccu

SEQ ID NO: 1139236 - RNA, 22 nt, Human
aaguguuuggggaucauuuuaa

SEQ ID NO: 1139237 - RNA, 22 nt, Human
cuucuggguugcaggucuuggc

SEQ ID NO: 1139238 - RNA, 21 nt, Human
agaugcugaugcugcaggucc

SEQ ID NO: 1139239 - RNA, 22 nt, Human
uggaaagaggaagugcccagca

SEQ ID NO: 1139240 - RNA, 20 nt, Human
agcaggcugcagggugaaau

SEQ ID NO: 1139241 - RNA, 22 nt, Human
guaugcaucgacucaagucuga

SEQ ID NO: 1139242 - RNA, 22 nt, Human
cagggcucccaaauaucucuuc

SEQ ID NO: 1139243 - RNA, 22 nt, Human
uaaucuguauuccuacuuugca

SEQ ID NO: 1139244 - RNA, 22 nt, Human
acaauacuauuuucaguauccu

SEQ ID NO: 1139245 - RNA, 22 nt, Human
aaugauugcaaacauugagaac

SEQ ID NO: 1139246 - RNA, 22 nt, Human
caguauuuguucccuaucaaug

SEQ ID NO: 1139247 - RNA, 22 nt, Human
uuaaagaugcagcuuuagagaa

SEQ ID NO: 1139248 - RNA, 22 nt, Human
guuuucauuacugcugugauuu

SEQ ID NO: 1139249 - RNA, 22 nt, Human
auuugaaaucccuucuacugua

SEQ ID NO: 1139250 - RNA, 22 nt, Human
uuucacauucagauauagacuu

SEQ ID NO: 1139251 - RNA, 22 nt, Human
agcccggcuuccccgguugcua

SEQ ID NO: 1139252 - RNA, 22 nt, Human
uccaggcaagggaggagcaugg

SEQ ID NO: 1139253 - RNA, 22 nt, Human
uaucauuguguuauuucuucca

SEQ ID NO: 1139254 - RNA, 22 nt, Human
uuucacauuuguuuuaagaagu

SEQ ID NO: 1139255 - RNA, 22 nt, Human
ccauaaucuggcuuugagagag

SEQ ID NO: 1139256 - RNA, 22 nt, Human
aauguaugcugugguaucuucu

SEQ ID NO: 1139257 - RNA, 22 nt, Human
uagggcucgggcacaggacagg

SEQ ID NO: 1139258 - RNA, 22 nt, Human
ugcuuaaaaugaugauuauuuu

SEQ ID NO: 1139259 - RNA, 23 nt, Human
auggaagucacuguuuucuuguc

SEQ ID NO: 1139260 - RNA, 21 nt, Human
ucagagagucacagugaacug

SEQ ID NO: 1139261 - RNA, 22 nt, Human
cagggcuccaugcagggacucc

SEQ ID NO: 1139262 - RNA, 22 nt, Human
ucuucaaauccuacagugucug

SEQ ID NO: 1139263 - RNA, 22 nt, Human
ugaaauuaugcauuguuguacc

SEQ ID NO: 1139264 - RNA, 22 nt, Human
gaggggucacaugggcuggcuu

SEQ ID NO: 1139265 - RNA, 22 nt, Human
uccacccugcuuucuuaucucc

SEQ ID NO: 1139266 - RNA, 22 nt, Human
uagcaauagaaacauauaaagu

SEQ ID NO: 1139267 - RNA, 22 nt, Human
auguguuuguaccuuuaaauau

SEQ ID NO: 1139268 - RNA, 22 nt, Human
gaaauauuguacuggagauguu

SEQ ID NO: 1139269 - RNA, 23 nt, Human
aucuguucaucugacacagauuc

SEQ ID NO: 1139270 - RNA, 22 nt, Human
ccagcucucagcgggagacuca

SEQ ID NO: 1139271 - RNA, 22 nt, Human
aaaguuuguugcuuacaaagaa

SEQ ID NO: 1139272 - RNA, 22 nt, Human
ugggcacuguagcuggugcugg

SEQ ID NO: 1139273 - RNA, 22 nt, Human
gagggaccuuuacacagacauu

SEQ ID NO: 1139274 - RNA, 22 nt, Human
ccaggccuuccaguacgcagaa

SEQ ID NO: 1139275 - RNA, 22 nt, Human
agcaggcuacuccuguguucgu

SEQ ID NO: 1139276 - RNA, 22 nt, Human
gucuggaaggaggagauggagc

SEQ ID NO: 1139277 - RNA, 22 nt, Human
acagcuuuaucucagggaucag

SEQ ID NO: 1139278 - RNA, 22 nt, Human
ccaggcugggcggggaaccugg

SEQ ID NO: 1139279 - RNA, 22 nt, Human
gguaugaaaugauuccauguua

SEQ ID NO: 1139280 - RNA, 22 nt, Human
cuagggaccucagcuccuggag

SEQ ID NO: 1139281 - RNA, 21 nt, Human
uuucugaaggcaacaucuauc

SEQ ID NO: 1139282 - RNA, 22 nt, Human
auuuugcuggucugaauuacuu

SEQ ID NO: 1139283 - RNA, 22 nt, Human
cuuagggagaaugccucugcag

SEQ ID NO: 1139284 - RNA, 22 nt, Human
ugcaggcucacccuggagcuga

SEQ ID NO: 1139285 - RNA, 22 nt, Human
aaaguuugucacuuggcuagaa

SEQ ID NO: 1139286 - RNA, 22 nt, Human
uuccaggcuucucuggggcguc

SEQ ID NO: 1139287 - RNA, 21 nt, Human
uguguuuuaaugauauucugu

SEQ ID NO: 1139288 - RNA, 22 nt, Human
cagguggguguaugaaugcaaa

SEQ ID NO: 1139289 - RNA, 22 nt, Human
gagggcucugaaaggaggucac

SEQ ID NO: 1139290 - RNA, 22 nt, Human
ccacacagucaguuuccaagaa

SEQ ID NO: 1139291 - RNA, 22 nt, Human
uucugucagcugcuuugucuca

SEQ ID NO: 1139292 - RNA, 22 nt, Human
ucaucacauaugucaugauuug

SEQ ID NO: 1139293 - RNA, 22 nt, Human
acacccaggcuggcgugcagug

SEQ ID NO: 1139294 - RNA, 22 nt, Human
cccaaguuaauuuguagcugaa

SEQ ID NO: 1139295 - RNA, 22 nt, Human
caggaguccagagugucauuuu

SEQ ID NO: 1139296 - RNA, 22 nt, Human
agcuuuguggcuuugcaagacu

SEQ ID NO: 1139297 - RNA, 22 nt, Human
aucauuuuuaagagacucuucu

SEQ ID NO: 1139298 - RNA, 22 nt, Human
uccaggcagcccuuccugacuc

SEQ ID NO: 1139299 - RNA, 22 nt, Human
gccuggaaugcaaugugacgaa

SEQ ID NO: 1139300 - RNA, 19 nt, Human
uuaugaaggcuggggggag

SEQ ID NO: 1139301 - RNA, 22 nt, Human
acccagcaugacaccugcacau

SEQ ID NO: 1139302 - RNA, 17 nt, Human
cagugaggccuuuccuc

SEQ ID NO: 1139303 - RNA, 22 nt, Human
gcagggacaucuucagaucacu

SEQ ID NO: 1139304 - RNA, 22 nt, Human
cccugcagagggaugggggcag

SEQ ID NO: 1139305 - RNA, 22 nt, Human
uccucuccaugucucacgccac

SEQ ID NO: 1139306 - RNA, 22 nt, Human
cccagcaugcacgcugacacuc

SEQ ID NO: 1139307 - RNA, 22 nt, Human
acacagaguuugacacauggga

SEQ ID NO: 1139308 - RNA, 20 nt, Human
cauauauaccuagaagugga

SEQ ID NO: 1139309 - RNA, 22 nt, Human
gcuggcaguguauuguuagcug

SEQ ID NO: 1139310 - RNA, 22 nt, Human
gggaccugcgccacucacuguc

SEQ ID NO: 1139311 - RNA, 22 nt, Human
ggccucagggucacucuguaga

SEQ ID NO: 1139312 - RNA, 22 nt, Human
acugggcucccaggcuugucau

SEQ ID NO: 1139313 - RNA, 21 nt, Human
uucauaaaccauucucaugca

SEQ ID NO: 1139314 - RNA, 22 nt, Human
cagcucagucuugaagcacugg

SEQ ID NO: 1139315 - RNA, 22 nt, Human
cagagacuggagugcaguggcg

SEQ ID NO: 1139316 - RNA, 23 nt, Human
uugggaaauaguuaagacaugag

SEQ ID NO: 1139317 - RNA, 22 nt, Human
cagggagcuuucccaggacccu

SEQ ID NO: 1139318 - RNA, 23 nt, Human
cccagagcacagccuccagaugc

SEQ ID NO: 1139319 - RNA, 22 nt, Human
agcacaggcuuuggugugaggg

SEQ ID NO: 1139320 - RNA, 22 nt, Human
uggcaucuccgacagucuugau

SEQ ID NO: 1139321 - RNA, 22 nt, Human
cugguggagggacaggcuuagc

SEQ ID NO: 1139322 - RNA, 22 nt, Human
cacaugaugguggaagccauag

SEQ ID NO: 1139323 - RNA, 22 nt, Human
ccaccccaaaugaagaccucuc

SEQ ID NO: 1139324 - RNA, 22 nt, Human
uuucauugaugggugauagaaa

SEQ ID NO: 1139325 - RNA, 22 nt, Human
ccugggcugggcgucucauggg

SEQ ID NO: 1139326 - RNA, 18 nt, Human
gccaggcaggguggggaa

SEQ ID NO: 1139327 - RNA, 18 nt, Human
ggcagggaaaagauaggg

SEQ ID NO: 1139328 - RNA, 22 nt, Human
uagacauuucugguuauugaca

SEQ ID NO: 1139329 - RNA, 21 nt, Human
acagauuuuauaucucugcug

SEQ ID NO: 1139330 - RNA, 22 nt, Human
auaacuuagaguaggcaaaagu

SEQ ID NO: 1139331 - RNA, 22 nt, Human
cuccuggcaggcugagugaaau

SEQ ID NO: 1139332 - RNA, 22 nt, Human
ggaaacugcuuacacuagaggg

SEQ ID NO: 1139333 - RNA, 22 nt, Human
aaauuacagaucaccaaugcau

SEQ ID NO: 1139334 - RNA, 19 nt, Human
uccaggcauccuucaggcu

SEQ ID NO: 1139335 - RNA, 22 nt, Human
ucaggcucagguuaggggccaa

SEQ ID NO: 1139336 - RNA, 22 nt, Human
acaggugguagaguggaaagag

SEQ ID NO: 1139337 - RNA, 22 nt, Human
ucuggcaguaauaggggagaga

SEQ ID NO: 1139338 - RNA, 23 nt, Human
acagaaaguucugcuggacagag

SEQ ID NO: 1139339 - RNA, 21 nt, Human
gccugcagaccccaccaggcu

SEQ ID NO: 1139340 - RNA, 22 nt, Human
gcaguguuuacauauuagaaac

SEQ ID NO: 1139341 - RNA, 22 nt, Human
gucacuguauccagguuccagc

SEQ ID NO: 1139342 - RNA, 22 nt, Human
ucccagccacaguuuccaccug

SEQ ID NO: 1139343 - RNA, 22 nt, Human
ugggcuuuaucaugggucuggu

SEQ ID NO: 1139344 - RNA, 22 nt, Human
acaaaguuugugguauuccaag

SEQ ID NO: 1139345 - RNA, 22 nt, Human
ccuggcagaauauuaaagugca

SEQ ID NO: 1139346 - RNA, 22 nt, Human
cagcuuguuaccgagggagggu

SEQ ID NO: 1139347 - RNA, 22 nt, Human
ccuucucucugaagaccccaaa

SEQ ID NO: 1139348 - RNA, 22 nt, Human
ucagcuuugccaccagcuguaa

SEQ ID NO: 1139349 - RNA, 22 nt, Human
aaauuucuugaggcucucuagc

SEQ ID NO: 1139350 - RNA, 22 nt, Human
auuuucauuuugcagggugaga

SEQ ID NO: 1139351 - RNA, 22 nt, Human
aaauaguuagcccugcauauau

SEQ ID NO: 1139352 - RNA, 22 nt, Human
agugugagccuacaggccaaag

SEQ ID NO: 1139353 - RNA, 22 nt, Human
aaauauagcaauuaugccuacu

SEQ ID NO: 1139354 - RNA, 22 nt, Human
ugaaaucaaugucuucugucuc

SEQ ID NO: 1139355 - RNA, 22 nt, Human
aaguaugugauacauguuaauu

SEQ ID NO: 1139356 - RNA, 22 nt, Human
cuccagggaugagacagaguag

SEQ ID NO: 1139357 - RNA, 22 nt, Human
gugggcuuugcuggauccuucc

SEQ ID NO: 1139358 - RNA, 22 nt, Human
caauguaucaaccagaaaguuc

SEQ ID NO: 1139359 - RNA, 22 nt, Human
acacauaagaaacuacaaagag

SEQ ID NO: 1139360 - RNA, 22 nt, Human
uuuuauuaguggcuagaugggg

SEQ ID NO: 1139361 - RNA, 22 nt, Human
acaguucccgucuugcacagcu

SEQ ID NO: 1139362 - RNA, 22 nt, Human
uacaaaaggaagagggaucuua

SEQ ID NO: 1139363 - RNA, 22 nt, Human
agugauuugggugucagaaagu

SEQ ID NO: 1139364 - RNA, 22 nt, Human
auaaucuuucuuuuccagauag

SEQ ID NO: 1139365 - RNA, 22 nt, Human
ucagaaagaacacaggcaguag

SEQ ID NO: 1139366 - RNA, 22 nt, Human
aggccucugcuggaaagaguug

SEQ ID NO: 1139367 - RNA, 22 nt, Human
guccucugggagccuugagccu

SEQ ID NO: 1139368 - RNA, 22 nt, Human
guggcagggugcucaucaugca

SEQ ID NO: 1139369 - RNA, 22 nt, Human
acaggugguaaaauggacuguc

SEQ ID NO: 1139370 - RNA, 22 nt, Human
cuugggcucugugggccuuagu

SEQ ID NO: 1139371 - RNA, 22 nt, Human
uuucuacagcuggugcaacuuu

SEQ ID NO: 1139372 - RNA, 22 nt, Human
auugggaugccggcugauaaga

SEQ ID NO: 1139373 - RNA, 22 nt, Human
aauauguuccacuuaaagcugg

SEQ ID NO: 1139374 - RNA, 22 nt, Human
uccuggcagcccgcaggugcug

SEQ ID NO: 1139375 - RNA, 22 nt, Human
auaguguuacccuucuuaaagu

SEQ ID NO: 1139376 - RNA, 22 nt, Human
agcuuuauggugccucacuuga

SEQ ID NO: 1139377 - RNA, 22 nt, Human
uacauguuuacuccaagucagg

SEQ ID NO: 1139378 - RNA, 22 nt, Human
gaccaccagagguccgugggua

SEQ ID NO: 1139379 - RNA, 22 nt, Human
gacccagcuaaccaggugggga

SEQ ID NO: 1139380 - RNA, 22 nt, Human
agaauauugaaaguucuugaca

SEQ ID NO: 1139381 - RNA, 21 nt, Human
acauucacaggauauuaucau

SEQ ID NO: 1139382 - RNA, 22 nt, Human
gugcaggguagcgacggcagga

SEQ ID NO: 1139383 - RNA, 22 nt, Human
guacacacaaucucuggucagu

SEQ ID NO: 1139384 - RNA, 22 nt, Human
gcugcgccggaucccacguucc

SEQ ID NO: 1139385 - RNA, 22 nt, Human
ggugccagaguggcccaggggc

SEQ ID NO: 1139386 - RNA, 22 nt, Human
uaugaagcucucacuguguguc

SEQ ID NO: 1139387 - RNA, 22 nt, Human
ugaagccaaucugccaggcaga

SEQ ID NO: 1139388 - RNA, 22 nt, Human
uacccagcaaucccuagagguu

SEQ ID NO: 1139389 - RNA, 22 nt, Human
aaaguugugaaaccgaacaugu

SEQ ID NO: 1139390 - RNA, 22 nt, Human
ucaggagcugcacugggcccac

SEQ ID NO: 1139391 - RNA, 22 nt, Human
ccugcagguugcagaggcggaa

SEQ ID NO: 1139392 - RNA, 22 nt, Human
agaagaaaugaggccguucugc

SEQ ID NO: 1139393 - RNA, 22 nt, Human
gacacagacaguuagagguaau

SEQ ID NO: 1139394 - RNA, 22 nt, Human
ccuggcagcccagagcgccgcu

SEQ ID NO: 1139395 - RNA, 22 nt, Human
ggcaggcuuucagcaucaaguc

SEQ ID NO: 1139396 - RNA, 22 nt, Human
ugcaggcuuggaucacaucucc

SEQ ID NO: 1139397 - RNA, 18 nt, Human
ccuggcagccaugcgcgc

SEQ ID NO: 1139398 - RNA, 22 nt, Human
uucagugucaauuuuuaaauau

SEQ ID NO: 1139399 - RNA, 22 nt, Human
cccaggcacacugaagugacau

SEQ ID NO: 1139400 - RNA, 22 nt, Human
cagguacauucguagacccauu

SEQ ID NO: 1139401 - RNA, 22 nt, Human
cccugcagugugaccucaccua

SEQ ID NO: 1139402 - RNA, 17 nt, Human
ggagaucuggcagaggg

SEQ ID NO: 1139403 - RNA, 22 nt, Human
uggguaggaccagaaaugcacu

SEQ ID NO: 1139404 - RNA, 22 nt, Human
uuuaaauuuguguuuagagggu

SEQ ID NO: 1139405 - RNA, 22 nt, Human
gcagcucuccucugugaggaac

SEQ ID NO: 1139406 - RNA, 22 nt, Human
gggacccugggaggcuggcgca

SEQ ID NO: 1139407 - RNA, 22 nt, Human
ccuuuauucaauuaguccuaau

SEQ ID NO: 1139408 - RNA, 22 nt, Human
ugcagggaagcaaggguggcuc

SEQ ID NO: 1139409 - RNA, 22 nt, Human
ucuggcagcucuccucggcgga

SEQ ID NO: 1139410 - RNA, 22 nt, Human
cuguuauuucugccaggugagu

SEQ ID NO: 1139411 - RNA, 22 nt, Human
uucugucucuguguuuacauua

SEQ ID NO: 1139412 - RNA, 22 nt, Human
uccuggcaguaauuugauguug

SEQ ID NO: 1139413 - RNA, 22 nt, Human
guuauuaguaagacucgcacau

SEQ ID NO: 1139414 - RNA, 20 nt, Human
acuccagguggcaugaggac

SEQ ID NO: 1139415 - RNA, 22 nt, Human
accugcagguguuuccacacuu

SEQ ID NO: 1139416 - RNA, 22 nt, Human
aguaaaauuucugcugaggaga

SEQ ID NO: 1139417 - RNA, 22 nt, Human
ugcuucugcauucaauguugga

SEQ ID NO: 1139418 - RNA, 22 nt, Human
ugcuucugcuuuacuugguuca

SEQ ID NO: 1139419 - RNA, 22 nt, Human
ugccuacauuccuugcuuaugg

SEQ ID NO: 1139420 - RNA, 22 nt, Human
uccugcagcugaagcucaugug

SEQ ID NO: 1139421 - RNA, 22 nt, Human
cuccaaguauguuaaaaucuaa

SEQ ID NO: 1139422 - RNA, 22 nt, Human
ucacauuuucuacuacuguacg

SEQ ID NO: 1139423 - RNA, 22 nt, Human
ugcaggcugaggcuggcucaac

SEQ ID NO: 1139424 - RNA, 22 nt, Human
uuugugcagauguauauuugug

SEQ ID NO: 1139425 - RNA, 22 nt, Human
auauacuuggagacuaucauug

SEQ ID NO: 1139426 - RNA, 22 nt, Human
uuacuucuuacaaaagaaauau

SEQ ID NO: 1139427 - RNA, 22 nt, Human
gccaagcuguuuuucagagacg

SEQ ID NO: 1139428 - RNA, 22 nt, Human
cugggcucaccuguggcuggca

SEQ ID NO: 1139429 - RNA, 22 nt, Human
ccagcccugucaccaacuggag

SEQ ID NO: 1139430 - RNA, 22 nt, Human
uaguuaggguucugcagagaca

SEQ ID NO: 1139431 - RNA, 22 nt, Human
ugcagggaggccccgcagcccu

SEQ ID NO: 1139432 - RNA, 22 nt, Human
gacccggcuccaggcccagcag

SEQ ID NO: 1139433 - RNA, 22 nt, Human
uguuccaauaaggaguugaaau

SEQ ID NO: 1139434 - RNA, 21 nt, Human
cacacagugaucuauccacau

SEQ ID NO: 1139435 - RNA, 22 nt, Human
auaugcauguacgugugcacaa

SEQ ID NO: 1139436 - RNA, 21 nt, Human
gcaaguacuaucaucauuauc

SEQ ID NO: 1139437 - RNA, 22 nt, Human
cuuggcaguuucggaaggauga

SEQ ID NO: 1139438 - RNA, 22 nt, Human
aggaaacuguccccucauccua

SEQ ID NO: 1139439 - RNA, 22 nt, Human
auggccugcagugcugccacag

SEQ ID NO: 1139440 - RNA, 21 nt, Human
acugggcuagccugacuucug

SEQ ID NO: 1139441 - RNA, 22 nt, Human
ugcaggcucucugcugccagau

SEQ ID NO: 1139442 - RNA, 22 nt, Human
caguuuauaugucagagcugua

SEQ ID NO: 1139443 - RNA, 22 nt, Human
aagcacauuguacauuugugcu

SEQ ID NO: 1139444 - RNA, 22 nt, Human
caggacaaagcccuuugagaaa

SEQ ID NO: 1139445 - RNA, 22 nt, Human
cagggcucuuccggagcaggga

SEQ ID NO: 1139446 - RNA, 22 nt, Human
ugucauaacuuagugacaaauc

SEQ ID NO: 1139447 - RNA, 22 nt, Human
uguaaacagccccauggagagc

SEQ ID NO: 1139448 - RNA, 22 nt, Human
cagggcucagaagacagaccuc

SEQ ID NO: 1139449 - RNA, 21 nt, Human
agccugcaauguagguaccgg

SEQ ID NO: 1139450 - RNA, 22 nt, Human
cccacccucaagggugucuaua

SEQ ID NO: 1139451 - RNA, 22 nt, Human
uuguaugaucccauuuagugaa

SEQ ID NO: 1139452 - RNA, 21 nt, Human
uagggcucuauuuuuauuuca

SEQ ID NO: 1139453 - RNA, 22 nt, Human
uacauaauugucuuuguccuca

SEQ ID NO: 1139454 - RNA, 19 nt, Human
cgcaggcuucgggucgcuc

SEQ ID NO: 1139455 - RNA, 21 nt, Human
ccacucaugacuccacucacc

SEQ ID NO: 1139456 - RNA, 22 nt, Human
accugcagcuaaagauguaggg

SEQ ID NO: 1139457 - RNA, 22 nt, Human
gaaucauuggaaccacauccaa

SEQ ID NO: 1139458 - RNA, 22 nt, Human
auguaugauauuuccaguauca

SEQ ID NO: 1139459 - RNA, 22 nt, Human
ggguaccaagcugcuugggggc

SEQ ID NO: 1139460 - RNA, 22 nt, Human
aagcuuuaugaucucucagcua

SEQ ID NO: 1139461 - RNA, 22 nt, Human
augugaaaauccaauggcagca

SEQ ID NO: 1139462 - RNA, 22 nt, Human
cuuauuagaguuguguucuguu

SEQ ID NO: 1139463 - RNA, 22 nt, Human
uggcagugggaauggacaaaca

SEQ ID NO: 1139464 - RNA, 22 nt, Human
uagaacauaagucauucauuug

SEQ ID NO: 1139465 - RNA, 22 nt, Human
aacaaacaaacauuuugucauc

SEQ ID NO: 1139466 - RNA, 22 nt, Human
guacacacuauguauuguacac

SEQ ID NO: 1139467 - RNA, 16 nt, Human
gcacacacaucaauga

SEQ ID NO: 1139468 - RNA, 22 nt, Human
gaaacaugucugacaauuuacc

SEQ ID NO: 1139469 - RNA, 22 nt, Human
gccaaugacagucucaguucug

SEQ ID NO: 1139470 - RNA, 22 nt, Human
guuguuuuuguucucuauagcu

SEQ ID NO: 1139471 - RNA, 22 nt, Human
gcuucuaucccuccacugcacu

SEQ ID NO: 1139472 - RNA, 22 nt, Human
gcccagcuggcuuccagcacau

SEQ ID NO: 1139473 - RNA, 22 nt, Human
uuggguaggagaaagaacagau

SEQ ID NO: 1139474 - RNA, 22 nt, Human
agcucccagaagccagagucgg

SEQ ID NO: 1139475 - RNA, 22 nt, Human
aauuugauuuucuuaaaccaua

SEQ ID NO: 1139476 - RNA, 22 nt, Human
aaaguuugcaauuuauguuaau

SEQ ID NO: 1139477 - RNA, 22 nt, Human
uucaagauggccccagugagcc

SEQ ID NO: 1139478 - RNA, 22 nt, Human
ucaucacaauuuuaugacccuc

SEQ ID NO: 1139479 - RNA, 21 nt, Human
aggcucucauccagggaccca

SEQ ID NO: 1139480 - RNA, 22 nt, Human
augccaaauucucagccucuuu

SEQ ID NO: 1139481 - RNA, 22 nt, Human
ccaggcucuguuccccgaggag

SEQ ID NO: 1139482 - RNA, 22 nt, Human
ccuggcaggcuggggacagugc

SEQ ID NO: 1139483 - RNA, 22 nt, Human
cagggacaauggcagagccuga

SEQ ID NO: 1139484 - RNA, 22 nt, Human
uccaggaggugaggggaccaaa

SEQ ID NO: 1139485 - RNA, 22 nt, Human
ggaccaggccagccucccugcg

SEQ ID NO: 1139486 - RNA, 22 nt, Human
ugcuuuauucgacaucugguag

SEQ ID NO: 1139487 - RNA, 22 nt, Human
ugcuuuauaucucucuucuuag

SEQ ID NO: 1139488 - RNA, 17 nt, Human
accaggcaacacgccca

SEQ ID NO: 1139489 - RNA, 22 nt, Human
auguuauuaaaguacagauucu

SEQ ID NO: 1139490 - RNA, 22 nt, Human
uacccagggcuuuucugaugca

SEQ ID NO: 1139491 - RNA, 22 nt, Human
ccugcagagccacgugccagcg

SEQ ID NO: 1139492 - RNA, 22 nt, Human
aacacauaggcagagcaugaca

SEQ ID NO: 1139493 - RNA, 22 nt, Human
uggccagguugggcuuugcagc

SEQ ID NO: 1139494 - RNA, 22 nt, Human
ugcaggcuccaggugcacauau

SEQ ID NO: 1139495 - RNA, 22 nt, Human
agcaggcuaagggaccuguuua

SEQ ID NO: 1139496 - RNA, 22 nt, Human
acuggcagagggaaaaccauuc

SEQ ID NO: 1139497 - RNA, 22 nt, Human
cuaggaaugguaccucuuacaa

SEQ ID NO: 1139498 - RNA, 22 nt, Human
ccugaccuauuuuucucagcug

SEQ ID NO: 1139499 - RNA, 22 nt, Human
gugcaggggccuccccuugcug

SEQ ID NO: 1139500 - RNA, 21 nt, Human
ucuagaauccuguauaagacu

SEQ ID NO: 1139501 - RNA, 22 nt, Human
uaugaacuuuugaugugacaug

SEQ ID NO: 1139502 - RNA, 22 nt, Human
aucucauaacucauuugaagac

SEQ ID NO: 1139503 - RNA, 22 nt, Human
cggcuggugucgggcacagcaa

SEQ ID NO: 1139504 - RNA, 22 nt, Human
agaauaauacugaaaugcugaa

SEQ ID NO: 1139505 - RNA, 22 nt, Human
ccuggcagguuacaaccaguua

SEQ ID NO: 1139506 - RNA, 22 nt, Human
gcuggcagcuggaaguugggcu

SEQ ID NO: 1139507 - RNA, 22 nt, Human
acauaugugcuuauauccauga

SEQ ID NO: 1139508 - RNA, 22 nt, Human
cugccugcucuauccaggccug

SEQ ID NO: 1139509 - RNA, 22 nt, Human
ccagcuuuucuuaucauuauaa

SEQ ID NO: 1139510 - RNA, 22 nt, Human
accaggcaacugugaaugggcu

SEQ ID NO: 1139511 - RNA, 22 nt, Human
ucucaaaucaaacuuugagcuu

SEQ ID NO: 1139512 - RNA, 22 nt, Human
uccaggcacagaguuggucagu

SEQ ID NO: 1139513 - RNA, 22 nt, Human
augauuucuauauaaacuuaaa

SEQ ID NO: 1139514 - RNA, 22 nt, Human
cacacaucaaccuagacauugu

SEQ ID NO: 1139515 - RNA, 22 nt, Human
uucugucaaacucacaggccga

SEQ ID NO: 1139516 - RNA, 22 nt, Human
agggaccugucaaugacaguua

SEQ ID NO: 1139517 - RNA, 16 nt, Human
cuacccagugagaagg

SEQ ID NO: 1139518 - RNA, 22 nt, Human
uucugucagaagcuagcuccug

SEQ ID NO: 1139519 - RNA, 22 nt, Human
uuuucauuagaaugacugagaa

SEQ ID NO: 1139520 - RNA, 22 nt, Human
gcagcuuuguaaaguaugaagc

SEQ ID NO: 1139521 - RNA, 22 nt, Human
uaacacauuaguucuccuagau

SEQ ID NO: 1139522 - RNA, 22 nt, Human
auuuggcaacauuaauugaauc

SEQ ID NO: 1139523 - RNA, 22 nt, Human
cagucucucuccuugcaggcgu

SEQ ID NO: 1139524 - RNA, 22 nt, Human
ucaaucacguguuccauguucu

SEQ ID NO: 1139525 - RNA, 22 nt, Human
acaggcucucagccaguuggca

SEQ ID NO: 1139526 - RNA, 20 nt, Human
ugcuuuaugcuauacuuugu

SEQ ID NO: 1139527 - RNA, 18 nt, Human
gaugaagcugcuggggau

SEQ ID NO: 1139528 - RNA, 22 nt, Human
uaugaaacauucauacaaauaa

SEQ ID NO: 1139529 - RNA, 22 nt, Human
ggcucccacccauagggcgagu

SEQ ID NO: 1139530 - RNA, 22 nt, Human
ugcaggcugcaccccugcccug

SEQ ID NO: 1139531 - RNA, 22 nt, Human
uuucugaacaaagccauuauca

SEQ ID NO: 1139532 - RNA, 22 nt, Human
uuguuaaagaugcagauuccau

SEQ ID NO: 1139533 - RNA, 22 nt, Human
cuggggaccgagcaagcucugg

SEQ ID NO: 1139534 - RNA, 22 nt, Human
uuggaagacagugaaacagcac

SEQ ID NO: 1139535 - RNA, 22 nt, Human
acuggggauuagggacucagug

SEQ ID NO: 1139536 - RNA, 22 nt, Human
gcugcuaagcguuucuguucca

SEQ ID NO: 1139537 - RNA, 22 nt, Human
aaauacauaaagguuguaccag

SEQ ID NO: 1139538 - RNA, 22 nt, Human
ucuggcagcgaagcguguacuu

SEQ ID NO: 1139539 - RNA, 22 nt, Human
aguaugaagaauacauagauga

SEQ ID NO: 1139540 - RNA, 22 nt, Human
uucucagugaaguuuagaacau

SEQ ID NO: 1139541 - RNA, 22 nt, Human
acaggcaggcgggacagcccga

SEQ ID NO: 1139542 - RNA, 22 nt, Human
ucccacacuugaaacaaggcug

SEQ ID NO: 1139543 - RNA, 22 nt, Human
ggauuucuuccuuccucagaag

SEQ ID NO: 1139544 - RNA, 22 nt, Human
uagcuuuaaugaguugguaaga

SEQ ID NO: 1139545 - RNA, 22 nt, Human
ccaggcucacugacuaccacau

SEQ ID NO: 1139546 - RNA, 22 nt, Human
uucauaguguuuccuuccagug

SEQ ID NO: 1139547 - RNA, 22 nt, Human
acccagccacagcauugaggga

SEQ ID NO: 1139548 - RNA, 22 nt, Human
ccagcuuuuccucucauugcuu

SEQ ID NO: 1139549 - RNA, 22 nt, Human
aaaaagucugcaaaggagguug

SEQ ID NO: 1139550 - RNA, 22 nt, Human
acccacaccuccguauaucacu

SEQ ID NO: 1139551 - RNA, 22 nt, Human
cugugggaacacugaggacuuc

SEQ ID NO: 1139552 - RNA, 22 nt, Human
ccacuguagagauuugaaugcc

SEQ ID NO: 1139553 - RNA, 22 nt, Human
augacacuuggugauacuuugu

SEQ ID NO: 1139554 - RNA, 22 nt, Human
auuacaaucgagagaaacaaau

SEQ ID NO: 1139555 - RNA, 22 nt, Human
aucuguaaaugcaaauguagcu

SEQ ID NO: 1139556 - RNA, 22 nt, Human
uuucacauggaagcucucgaga

SEQ ID NO: 1139557 - RNA, 22 nt, Human
cuuacacagucuggcacuucuu

SEQ ID NO: 1139558 - RNA, 22 nt, Human
gccaagcuggaugaagagguug

SEQ ID NO: 1139559 - RNA, 22 nt, Human
ucuccacacuuucucucccagg

SEQ ID NO: 1139560 - RNA, 22 nt, Human
cauacaagcguucaauagaugu

SEQ ID NO: 1139561 - RNA, 22 nt, Human
ggcuucugagugcucugcuguu

SEQ ID NO: 1139562 - RNA, 18 nt, Human
gaguguggcacugggccc

SEQ ID NO: 1139563 - RNA, 22 nt, Human
auuguugggucucacuccuaga

SEQ ID NO: 1139564 - RNA, 22 nt, Human
gcagcuuuuuggaugucaguua

SEQ ID NO: 1139565 - RNA, 22 nt, Human
gaggagcugcagggggagucua

SEQ ID NO: 1139566 - RNA, 22 nt, Human
gcacauaaagggcaugggaggu

SEQ ID NO: 1139567 - RNA, 22 nt, Human
ucuuuauuucugaaucccccau

SEQ ID NO: 1139568 - RNA, 22 nt, Human
uccaggcauuccagccauucca

SEQ ID NO: 1139569 - RNA, 22 nt, Human
ccaggcucugucuggucagaag

SEQ ID NO: 1139570 - RNA, 22 nt, Human
agcacagggacaaugccaggug

SEQ ID NO: 1139571 - RNA, 19 nt, Human
guuucauuaagauaggaaa

SEQ ID NO: 1139572 - RNA, 22 nt, Human
ucccaggcugggggccugaagu

SEQ ID NO: 1139573 - RNA, 23 nt, Human
uuuauuuauuuaggcugagggau

SEQ ID NO: 1139574 - RNA, 22 nt, Human
cauuuauucaugaucuguagcu

SEQ ID NO: 1139575 - RNA, 22 nt, Human
aauuagggaaguauuuaguagu

SEQ ID NO: 1139576 - RNA, 22 nt, Human
agggcugacagugaggagucaa

SEQ ID NO: 1139577 - RNA, 22 nt, Human
gacuguggggggcggacacaag

SEQ ID NO: 1139578 - RNA, 22 nt, Human
ucacaauacucacucaauggcu

SEQ ID NO: 1139579 - RNA, 21 nt, Human
acaggcucacgauccauuucu

SEQ ID NO: 1139580 - RNA, 22 nt, Human
caggccuccacuccacgcagac

SEQ ID NO: 1139581 - RNA, 23 nt, Human
uuggagagggugaguagugucag

SEQ ID NO: 1139582 - RNA, 22 nt, Human
uccaggaggccucauuuccugu

SEQ ID NO: 1139583 - RNA, 22 nt, Human
guggcuuggaccagucacagug

SEQ ID NO: 1139584 - RNA, 22 nt, Human
cauucacaucuuguuccaucac

SEQ ID NO: 1139585 - RNA, 20 nt, Human
uucugucagauuauauggga

SEQ ID NO: 1139586 - RNA, 22 nt, Human
auccuggcccagguguggaggg

SEQ ID NO: 1139587 - RNA, 22 nt, Human
auuucacaucuaucucagauuu

SEQ ID NO: 1139588 - RNA, 22 nt, Human
cagagagcuuagugugcugcau

SEQ ID NO: 1139589 - RNA, 22 nt, Human
uccaggcagggcagccaucaag

SEQ ID NO: 1139590 - RNA, 22 nt, Human
ccagagagauugcuucuaaaga

SEQ ID NO: 1139591 - RNA, 22 nt, Human
cagcuuuauuaaugauugucuu

SEQ ID NO: 1139592 - RNA, 22 nt, Human
ucagggacugcagagggaagcu

SEQ ID NO: 1139593 - RNA, 22 nt, Human
acaguuugcccugacauucucc

SEQ ID NO: 1139594 - RNA, 22 nt, Human
cauuaggguaauugaacacuua

SEQ ID NO: 1139595 - RNA, 22 nt, Human
aucugcuuuugagaauuuacuu

SEQ ID NO: 1139596 - RNA, 22 nt, Human
aacaugauggggaagaacaaga

SEQ ID NO: 1139597 - RNA, 22 nt, Human
cauuuguauagugcuuagacca

SEQ ID NO: 1139598 - RNA, 22 nt, Human
gucuucuguucugugaggcuuc

SEQ ID NO: 1139599 - RNA, 22 nt, Human
cuucugggugccugugaguguu

SEQ ID NO: 1139600 - RNA, 18 nt, Human
uuucacaaccuccagagg

SEQ ID NO: 1139601 - RNA, 22 nt, Human
gccuggcaaggcccuguugacu

SEQ ID NO: 1139602 - RNA, 22 nt, Human
aauuagggaggacaaagguaca

SEQ ID NO: 1139603 - RNA, 17 nt, Human
ugccagccugucccagg

SEQ ID NO: 1139604 - RNA, 22 nt, Human
cacccaggacaggccagaugug

SEQ ID NO: 1139605 - RNA, 22 nt, Human
gcugggcuugguuucccugcuu

SEQ ID NO: 1139606 - RNA, 22 nt, Human
uucaguuccauuucaggugggu

SEQ ID NO: 1139607 - RNA, 22 nt, Human
cuuaggaacgcucugccuagug

SEQ ID NO: 1139608 - RNA, 22 nt, Human
ucuggggauaagacccagguau

SEQ ID NO: 1139609 - RNA, 22 nt, Human
ucccugccuccuggcagugcca

SEQ ID NO: 1139610 - RNA, 22 nt, Human
auuucauacuaaggcucaaaaa

SEQ ID NO: 1139611 - RNA, 23 nt, Human
uccaggcaugagcucuggaugga

SEQ ID NO: 1139612 - RNA, 22 nt, Human
gcguccagggaaggcccagcug

SEQ ID NO: 1139613 - RNA, 22 nt, Human
uuucacacugcagcaucagaga

SEQ ID NO: 1139614 - RNA, 22 nt, Human
ucuucaaacugaaaauuuagaa

SEQ ID NO: 1139615 - RNA, 22 nt, Human
ggagugugggauggagcucagg

SEQ ID NO: 1139616 - RNA, 22 nt, Human
ucaagagaaggggaaauagacu

SEQ ID NO: 1139617 - RNA, 22 nt, Human
acauuucucuugaugucucuau

SEQ ID NO: 1139618 - RNA, 22 nt, Human
gggcugaccaaugccuugcuuu

SEQ ID NO: 1139619 - RNA, 22 nt, Human
gugggguagaucuuucucagga

SEQ ID NO: 1139620 - RNA, 22 nt, Human
auuucauugaaguuaauucuuc

SEQ ID NO: 1139621 - RNA, 22 nt, Human
ugcauuuuuaacaaggcuaauu

SEQ ID NO: 1139622 - RNA, 22 nt, Human
acuggcuugaaguagauucaaa

SEQ ID NO: 1139623 - RNA, 22 nt, Human
agucccuucucaaagugugcgg

SEQ ID NO: 1139624 - RNA, 22 nt, Human
gaaagacuuccuuugagaguac

SEQ ID NO: 1139625 - RNA, 22 nt, Human
uucugcaucugaauuuaaguac

SEQ ID NO: 1139626 - RNA, 22 nt, Human
ucaugaacaucucaaauaacca

SEQ ID NO: 1139627 - RNA, 22 nt, Human
acccagcaaagauaaacuuaug

SEQ ID NO: 1139628 - RNA, 22 nt, Human
gccugcagugagugcagaaggu

SEQ ID NO: 1139629 - RNA, 22 nt, Human
auuuucauggcuucugcucagu

SEQ ID NO: 1139630 - RNA, 22 nt, Human
auuuauuaccucggaguuucug

SEQ ID NO: 1139631 - RNA, 22 nt, Human
ggcugcaggcagaggcugucug

SEQ ID NO: 1139632 - RNA, 22 nt, Human
ucuuccaggagggcauuucuuu

SEQ ID NO: 1139633 - RNA, 22 nt, Human
uuucugaagauacagcuuugcu

SEQ ID NO: 1139634 - RNA, 22 nt, Human
gaacuguaguuaauacuacaca

SEQ ID NO: 1139635 - RNA, 22 nt, Human
uuccuggccaagcagaguggaa

SEQ ID NO: 1139636 - RNA, 22 nt, Human
acuguccauucacucauauuca

SEQ ID NO: 1139637 - RNA, 22 nt, Human
aaaaauaggucaaccguguaug

SEQ ID NO: 1139638 - RNA, 22 nt, Human
agcccagcuuugaaccauauca

SEQ ID NO: 1139639 - RNA, 22 nt, Human
gggcuguaggagcuggaauggg

SEQ ID NO: 1139640 - RNA, 22 nt, Human
uaugacaagguggaguaugagu

SEQ ID NO: 1139641 - RNA, 22 nt, Human
gaauaguucuauggcugcaggg

SEQ ID NO: 1139642 - RNA, 22 nt, Human
uuccagagaaaagguuuauuuc

SEQ ID NO: 1139643 - RNA, 22 nt, Human
uauugacaauuugugaaacuau

SEQ ID NO: 1139644 - RNA, 17 nt, Human
uuuagaauacaauguuu

SEQ ID NO: 1139645 - RNA, 22 nt, Human
acagauuuuauuauucagguau

SEQ ID NO: 1139646 - RNA, 22 nt, Human
ggcucugcaugugagugggugg

SEQ ID NO: 1139647 - RNA, 22 nt, Human
ucuuuauugcuacugguuuguc

SEQ ID NO: 1139648 - RNA, 22 nt, Human
ucugggcuuuugcacuggccau

SEQ ID NO: 1139649 - RNA, 22 nt, Human
caguguuuguauagaauaugca

SEQ ID NO: 1139650 - RNA, 22 nt, Human
uuaugaaguuccuguuacagug

SEQ ID NO: 1139651 - RNA, 22 nt, Human
uccaggcaaggauaauaaacau

SEQ ID NO: 1139652 - RNA, 22 nt, Human
acaggccuuggcaggcauguga

SEQ ID NO: 1139653 - RNA, 22 nt, Human
aaaguuugagugauuugacaca

SEQ ID NO: 1139654 - RNA, 22 nt, Human
gcuucuggaagcauaugcaaga

SEQ ID NO: 1139655 - RNA, 22 nt, Human
gcaggcuccaggccggccccuu

SEQ ID NO: 1139656 - RNA, 20 nt, Human
ucccaggcuccacccuagac

SEQ ID NO: 1139657 - RNA, 22 nt, Human
uccugagcacagagacaaggaa

SEQ ID NO: 1139658 - RNA, 22 nt, Human
aaguccagcucuaaauaucuga

SEQ ID NO: 1139659 - RNA, 22 nt, Human
guccucugaaagaugaaccaug

SEQ ID NO: 1139660 - RNA, 22 nt, Human
aauaacuucauguaacauuuaa

SEQ ID NO: 1139661 - RNA, 22 nt, Human
ggaccugcauuuuaacaagauc

SEQ ID NO: 1139662 - RNA, 22 nt, Human
agggacccauagagagaccagu

SEQ ID NO: 1139663 - RNA, 22 nt, Human
uggguaggggacguggaagaaa

SEQ ID NO: 1139664 - RNA, 22 nt, Human
guccucuggccuuucccaggac

SEQ ID NO: 1139665 - RNA, 22 nt, Human
uacccagcuucaagucaggacu

SEQ ID NO: 1139666 - RNA, 22 nt, Human
acuggcagaacgugaugcgggu

SEQ ID NO: 1139667 - RNA, 22 nt, Human
agccagagcagggaauuggaca

SEQ ID NO: 1139668 - RNA, 22 nt, Human
uacauucccccaauuaccaaug

SEQ ID NO: 1139669 - RNA, 22 nt, Human
uaaacaucugucauguguuuau

SEQ ID NO: 1139670 - RNA, 22 nt, Human
agucacaguuucccugagagag

SEQ ID NO: 1139671 - RNA, 22 nt, Human
gaaauauugggacucagagcuu

SEQ ID NO: 1139672 - RNA, 22 nt, Human
cauguuaaugaauuuuugcagu

SEQ ID NO: 1139673 - RNA, 22 nt, Human
ggggcugaaccuggaggugguc

SEQ ID NO: 1139674 - RNA, 17 nt, Human
gcaucacagauaacacg

SEQ ID NO: 1139675 - RNA, 22 nt, Human
uguaaagguaggugcaaaauga

SEQ ID NO: 1139676 - RNA, 22 nt, Human
uuucuuuguuguuaucacauca

SEQ ID NO: 1139677 - RNA, 22 nt, Human
ccucuccuugcacccgucccgc

SEQ ID NO: 1139678 - RNA, 22 nt, Human
ugaagcuugagugucaguuccu

SEQ ID NO: 1139679 - RNA, 22 nt, Human
uuccaggcuauccggugaaggg

SEQ ID NO: 1139680 - RNA, 22 nt, Human
augggcugaaagaguaagcugu

SEQ ID NO: 1139681 - RNA, 22 nt, Human
aaguauuucuggccugugaaag

SEQ ID NO: 1139682 - RNA, 22 nt, Human
guacccagaggcaugaucccag

SEQ ID NO: 1139683 - RNA, 22 nt, Human
agcaggcuccuuccuucucugg

SEQ ID NO: 1139684 - RNA, 22 nt, Human
auauuucaugggguuccauacu

SEQ ID NO: 1139685 - RNA, 22 nt, Human
acugggcuuaugcuguggagua

SEQ ID NO: 1139686 - RNA, 22 nt, Human
ucagagagccucaggcacugcc

SEQ ID NO: 1139687 - RNA, 22 nt, Human
aaguuucaugauguaauuauug

SEQ ID NO: 1139688 - RNA, 22 nt, Human
auaauauaauccuacuucccau

SEQ ID NO: 1139689 - RNA, 22 nt, Human
agacuucuuugugagcauuuuc

SEQ ID NO: 1139690 - RNA, 22 nt, Human
agguauauauucugguccuuau

SEQ ID NO: 1139691 - RNA, 17 nt, Human
gugaagagucauugaau

SEQ ID NO: 1139692 - RNA, 22 nt, Human
aacagcauaaguauuuauuuca

SEQ ID NO: 1139693 - RNA, 22 nt, Human
ccagagaguaaacauuuuccgg

SEQ ID NO: 1139694 - RNA, 22 nt, Human
cugccugcuuaccaugcaucag

SEQ ID NO: 1139695 - RNA, 22 nt, Human
gcugggcuucucaaugcugccu

SEQ ID NO: 1139696 - RNA, 22 nt, Human
ggaggugggcuaaggacucucu

SEQ ID NO: 1139697 - RNA, 22 nt, Human
accaugaucugcucugguguuu

SEQ ID NO: 1139698 - RNA, 22 nt, Human
gagacagaguuucacucuuguu

SEQ ID NO: 1139699 - RNA, 22 nt, Human
agcuuuaugcuuccuacaagcu

SEQ ID NO: 1139700 - RNA, 22 nt, Human
uuguaugaccacaaucugacgu

SEQ ID NO: 1139701 - RNA, 22 nt, Human
gauggcagguaguggucucauc

SEQ ID NO: 1139702 - RNA, 22 nt, Human
uaccugcacagccagccaugug

SEQ ID NO: 1139703 - RNA, 22 nt, Human
aauguuguuuuucugcaugucu

SEQ ID NO: 1139704 - RNA, 22 nt, Human
gagggcucaacuacuacuaggc

SEQ ID NO: 1139705 - RNA, 22 nt, Human
gaaauauuucucuugagccccu

SEQ ID NO: 1139706 - RNA, 22 nt, Human
augcuuuuaugucacaugguca

SEQ ID NO: 1139707 - RNA, 23 nt, Human
ccuggcagcaaacgaggagguua

SEQ ID NO: 1139708 - RNA, 22 nt, Human
cagggagcuggugccagccgac

SEQ ID NO: 1139709 - RNA, 22 nt, Human
ugggcugaacuucaucugauga

SEQ ID NO: 1139710 - RNA, 22 nt, Human
ucccagccuggacccugccagu

SEQ ID NO: 1139711 - RNA, 22 nt, Human
cugggcugagccugggcugugu

SEQ ID NO: 1139712 - RNA, 22 nt, Human
ugauuucuuccuugucauuaga

SEQ ID NO: 1139713 - RNA, 22 nt, Human
uguaacacucaaucuguuuaac

SEQ ID NO: 1139714 - RNA, 21 nt, Human
guagggacagagaguugguga

SEQ ID NO: 1139715 - RNA, 21 nt, Human
cagacccucuagaggccaccu

SEQ ID NO: 1139716 - RNA, 22 nt, Human
agccauccuacuaccucagcau

SEQ ID NO: 1139717 - RNA, 22 nt, Human
cccgagugucuacucacuccca

SEQ ID NO: 1139718 - RNA, 22 nt, Human
gaacacaugauuauaaaugcua

SEQ ID NO: 1139719 - RNA, 22 nt, Human
caggucuguuuccaucagugcu

SEQ ID NO: 1139720 - RNA, 22 nt, Human
acacauaagccuaaucaucucc

SEQ ID NO: 1139721 - RNA, 22 nt, Human
gcacccagagggcagggucucc

SEQ ID NO: 1139722 - RNA, 22 nt, Human
cuccucuguauugauugggacu

SEQ ID NO: 1139723 - RNA, 19 nt, Human
agaggccucagcagcuggc

SEQ ID NO: 1139724 - RNA, 22 nt, Human
auauaauuguucugaaguguuu

SEQ ID NO: 1139725 - RNA, 21 nt, Human
aauuagggugccucuuauaau

SEQ ID NO: 1139726 - RNA, 22 nt, Human
uacuuuuagccuauuugauucu

SEQ ID NO: 1139727 - RNA, 22 nt, Human
uucucuuuucaccaguugcuaa

SEQ ID NO: 1139728 - RNA, 22 nt, Human
cccagccuacucugccauagca

SEQ ID NO: 1139729 - RNA, 22 nt, Human
auguuaaaugguuuauuauuaa

SEQ ID NO: 1139730 - RNA, 22 nt, Human
ucaauauauuccauguuuucuc

SEQ ID NO: 1139731 - RNA, 23 nt, Human
gggcuccagucucugcucaguug

SEQ ID NO: 1139732 - RNA, 22 nt, Human
acaggcucacagucauuucauu

SEQ ID NO: 1139733 - RNA, 21 nt, Human
acugugauaaugcuuuuucug

SEQ ID NO: 1139734 - RNA, 22 nt, Human
uuauauaucuugauuuguucca

SEQ ID NO: 1139735 - RNA, 18 nt, Human
cuccagggaacucaguca

SEQ ID NO: 1139736 - RNA, 22 nt, Human
gcagcuuugaagacuuauuugc

SEQ ID NO: 1139737 - RNA, 22 nt, Human
agugcuccuauggaucaguugu

SEQ ID NO: 1139738 - RNA, 22 nt, Human
auucagugugagguuuucaagu

SEQ ID NO: 1139739 - RNA, 21 nt, Human
aacacauccagaguauuugac

SEQ ID NO: 1139740 - RNA, 22 nt, Human
ugggcuccguugccuggggcag

SEQ ID NO: 1139741 - RNA, 22 nt, Human
uuuaaagugcugcuccuauccu

SEQ ID NO: 1139742 - RNA, 22 nt, Human
gacccagaaggagugcccuaga

SEQ ID NO: 1139743 - RNA, 22 nt, Human
aauuauguagccauaugaaaca

SEQ ID NO: 1139744 - RNA, 22 nt, Human
aguaugaaucuuucagaccgua

SEQ ID NO: 1139745 - RNA, 22 nt, Human
gcacccaguuugucucaggguu

SEQ ID NO: 1139746 - RNA, 22 nt, Human
ucaggcccagagucacggaucc

SEQ ID NO: 1139747 - RNA, 23 nt, Human
cugggcugcuugagucccuggcu

SEQ ID NO: 1139748 - RNA, 22 nt, Human
auuaaauuuucacuaggcuccc

SEQ ID NO: 1139749 - RNA, 22 nt, Human
gccugcagcugcuuccacacac

SEQ ID NO: 1139750 - RNA, 21 nt, Human
aaagagcccgcugagagguuc

SEQ ID NO: 1139751 - RNA, 22 nt, Human
uucuuaaagaggcaaaacacag

SEQ ID NO: 1139752 - RNA, 22 nt, Human
aaguuuaacuugaauucuuucu

SEQ ID NO: 1139753 - RNA, 22 nt, Human
ugcugagcgcauccggcggccg

SEQ ID NO: 1139754 - RNA, 22 nt, Human
gccugcagggugaugggcugcc

SEQ ID NO: 1139755 - RNA, 22 nt, Human
aaacagauaaugcuauaaaugg

SEQ ID NO: 1139756 - RNA, 22 nt, Human
ugcuuaaacccugaucaugugu

SEQ ID NO: 1139757 - RNA, 22 nt, Human
cauuuucagcacccaucugaaa

SEQ ID NO: 1139758 - RNA, 21 nt, Human
augugaaaccuuccacgcuga

SEQ ID NO: 1139759 - RNA, 22 nt, Human
uaauuucuaauucauuuucagu

SEQ ID NO: 1139760 - RNA, 22 nt, Human
agcaggcuaaucuugcugaaca

SEQ ID NO: 1139761 - RNA, 22 nt, Human
guauuaggagguggagccuuug

SEQ ID NO: 1139762 - RNA, 22 nt, Human
uauucauaguaaacaaaagugg

SEQ ID NO: 1139763 - RNA, 22 nt, Human
ggcccagccucagacaugcccu

SEQ ID NO: 1139764 - RNA, 21 nt, Human
agcaggcuuuggaguggggcu

SEQ ID NO: 1139765 - RNA, 22 nt, Human
uguacuaaggcuguguagaugu

SEQ ID NO: 1139766 - RNA, 22 nt, Human
auguccagaguaaagcacauuc

SEQ ID NO: 1139767 - RNA, 22 nt, Human
gcuucugguagaauucaauaga

SEQ ID NO: 1139768 - RNA, 22 nt, Human
ucugggcuuggauuggcucugc

SEQ ID NO: 1139769 - RNA, 19 nt, Human
cuccaaguuaagagggagg

SEQ ID NO: 1139770 - RNA, 22 nt, Human
cuuuucaugccagcccaucaca

SEQ ID NO: 1139771 - RNA, 22 nt, Human
acaucacagagcccagauaaag

SEQ ID NO: 1139772 - RNA, 22 nt, Human
ugaaacaaugugaaguugcuga

SEQ ID NO: 1139773 - RNA, 22 nt, Human
cugugggaugggaccucagcug

SEQ ID NO: 1139774 - RNA, 22 nt, Human
cucagccccaauucuccccauu

SEQ ID NO: 1139775 - RNA, 22 nt, Human
auggcagaccuccuggccacaa

SEQ ID NO: 1139776 - RNA, 22 nt, Human
uucaaauuaccacauuugcuua

SEQ ID NO: 1139777 - RNA, 22 nt, Human
auguaugaugcuaggcucucag

SEQ ID NO: 1139778 - RNA, 22 nt, Human
ugucagagcaaggccaggccag

SEQ ID NO: 1139779 - RNA, 22 nt, Human
acaggcucucuauugagugcag

SEQ ID NO: 1139780 - RNA, 22 nt, Human
uccaaguccauuaugguggucu

SEQ ID NO: 1139781 - RNA, 22 nt, Human
ucacacagcuccuuuccuuagu

SEQ ID NO: 1139782 - RNA, 22 nt, Human
cucauuaaaggaaaucaccugc

SEQ ID NO: 1139783 - RNA, 22 nt, Human
uccugugccaucucuagagacu

SEQ ID NO: 1139784 - RNA, 22 nt, Human
cagaguuuuaucauacguggau

SEQ ID NO: 1139785 - RNA, 22 nt, Human
uuagaacuuaaacuucagaaag

SEQ ID NO: 1139786 - RNA, 22 nt, Human
uucacaauggcaaaccauuaaa

SEQ ID NO: 1139787 - RNA, 22 nt, Human
aguggcugccaagagcaaugcu

SEQ ID NO: 1139788 - RNA, 22 nt, Human
acuggcagcagcagcccuuggg

SEQ ID NO: 1139789 - RNA, 22 nt, Human
uggcuaggacucauccuguuuc

SEQ ID NO: 1139790 - RNA, 22 nt, Human
gaggccugucgcuaggccucug

SEQ ID NO: 1139791 - RNA, 16 nt, Human
ugggaccuguggccaa

SEQ ID NO: 1139792 - RNA, 22 nt, Human
cuguaugaggaucagacuggac

SEQ ID NO: 1139793 - RNA, 22 nt, Human
ggccucaguuucuucaacugua

SEQ ID NO: 1139794 - RNA, 22 nt, Human
auaugcaagcacauagaauacu

SEQ ID NO: 1139795 - RNA, 22 nt, Human
aauuuagauugauaaacaugga

SEQ ID NO: 1139796 - RNA, 20 nt, Human
ucauuacagugcuaagaugu

SEQ ID NO: 1139797 - RNA, 22 nt, Human
ugcagggagcucuggggugcag

SEQ ID NO: 1139798 - RNA, 21 nt, Human
ccuuuacaauuuugcauuccu

SEQ ID NO: 1139799 - RNA, 20 nt, Human
ugccaggcacggagugcaug

SEQ ID NO: 1139800 - RNA, 22 nt, Human
gcuggggacuccccaccauagc

SEQ ID NO: 1139801 - RNA, 22 nt, Human
uccugcaggggcugaggaacca

SEQ ID NO: 1139802 - RNA, 22 nt, Human
agggcuccaggggaccaucagu

SEQ ID NO: 1139803 - RNA, 22 nt, Human
cagggcucccucuggcucccag

SEQ ID NO: 1139804 - RNA, 22 nt, Human
aaauccuaaugacaaguuuagu

SEQ ID NO: 1139805 - RNA, 22 nt, Human
aaauuauuaugccccucuauaa

SEQ ID NO: 1139806 - RNA, 22 nt, Human
gugaaacacccuccaaugcaca

SEQ ID NO: 1139807 - RNA, 22 nt, Human
aagaauacguaucaacaauggu

SEQ ID NO: 1139808 - RNA, 22 nt, Human
acaggacaggcugggcuagacu

SEQ ID NO: 1139809 - RNA, 22 nt, Human
aagagcaucgguggagccccca

SEQ ID NO: 1139810 - RNA, 22 nt, Human
acauuuagcuguacaaucuaug

SEQ ID NO: 1139811 - RNA, 22 nt, Human
cagcuuuggcccagucgggagg

SEQ ID NO: 1139812 - RNA, 22 nt, Human
agcacaggaacauggagauggg

SEQ ID NO: 1139813 - RNA, 22 nt, Human
cagccucugagccuuggcagau

SEQ ID NO: 1139814 - RNA, 22 nt, Human
cuuggcagagggcugggcucag

SEQ ID NO: 1139815 - RNA, 22 nt, Human
acacacagcgccuaccaugugc

SEQ ID NO: 1139816 - RNA, 22 nt, Human
ugccagccagggaagcucaccc

SEQ ID NO: 1139817 - RNA, 22 nt, Human
gaacacauuucucugacuguag

SEQ ID NO: 1139818 - RNA, 21 nt, Human
ucacguggucacaugagcuuu

SEQ ID NO: 1139819 - RNA, 22 nt, Human
gcaaguacaaacgcaucggcug

SEQ ID NO: 1139820 - RNA, 22 nt, Human
gagggcucuacucaccacccug

SEQ ID NO: 1139821 - RNA, 22 nt, Human
cuccagugcacccagaggauuu

SEQ ID NO: 1139822 - RNA, 22 nt, Human
uucucuuagcuguaaagucaau

SEQ ID NO: 1139823 - RNA, 18 nt, Human
ggcaggcucucuggguca

SEQ ID NO: 1139824 - RNA, 19 nt, Human
uuugugaagaaaaugaugc

SEQ ID NO: 1139825 - RNA, 22 nt, Human
ucugggcuugguuagggcuguu

SEQ ID NO: 1139826 - RNA, 22 nt, Human
aggaccugaaauucuugcuuuu

SEQ ID NO: 1139827 - RNA, 23 nt, Human
gcccacccucagcguccucacgg

SEQ ID NO: 1139828 - RNA, 22 nt, Human
uggaacacugaucauugccuuu

SEQ ID NO: 1139829 - RNA, 22 nt, Human
auggccugaugcaccuguccca

SEQ ID NO: 1139830 - RNA, 22 nt, Human
uagcuuuaggcacguuugaauu

SEQ ID NO: 1139831 - RNA, 22 nt, Human
uuuuacuuaauucuuggucaug

SEQ ID NO: 1139832 - RNA, 22 nt, Human
guaugaaguaagauauuguuca

SEQ ID NO: 1139833 - RNA, 22 nt, Human
uguggggaagaguaugacuugg

SEQ ID NO: 1139834 - RNA, 22 nt, Human
ccuggggagagaaagcccagcc

SEQ ID NO: 1139835 - RNA, 22 nt, Human
aggacaagcuaaaggacuuccu

SEQ ID NO: 1139836 - RNA, 22 nt, Human
ggcauccaguucugaucaacaa

SEQ ID NO: 1139837 - RNA, 22 nt, Human
cucucuggaagggggagcugau

SEQ ID NO: 1139838 - RNA, 22 nt, Human
uauacacaaggugugcauuugu

SEQ ID NO: 1139839 - RNA, 22 nt, Human
cuuaauuuaaaauaguucaggc

SEQ ID NO: 1139840 - RNA, 22 nt, Human
caggcccucgcccgcagcgacc

SEQ ID NO: 1139841 - RNA, 22 nt, Human
ugggggcugugcacaggcucac

SEQ ID NO: 1139842 - RNA, 22 nt, Human
caguauagaaaguuuuaaauug

SEQ ID NO: 1139843 - RNA, 22 nt, Human
ccaggccucuggcugcuuaguc

SEQ ID NO: 1139844 - RNA, 22 nt, Human
uuugauuuacuggauauucuca

SEQ ID NO: 1139845 - RNA, 22 nt, Human
ugcacaggugagacucaggaag

SEQ ID NO: 1139846 - RNA, 22 nt, Human
uucacauuucauaccacagcuu

SEQ ID NO: 1139847 - RNA, 22 nt, Human
acacacaugguauuguucagaa

SEQ ID NO: 1139848 - RNA, 22 nt, Human
gcuggcaggagaaacggggugc

SEQ ID NO: 1139849 - RNA, 22 nt, Human
uuauuuaggagaaggaacccug

SEQ ID NO: 1139850 - RNA, 22 nt, Human
ggcugcagggcagcuggugugg

SEQ ID NO: 1139851 - RNA, 22 nt, Human
gacacagaaggucacauguuca

SEQ ID NO: 1139852 - RNA, 22 nt, Human
ggggcugauggaacucaggccu

SEQ ID NO: 1139853 - RNA, 22 nt, Human
ggcuuuauuauguggccaugug

SEQ ID NO: 1139854 - RNA, 22 nt, Human
aaucuucagugucuaaaaagca

SEQ ID NO: 1139855 - RNA, 22 nt, Human
auguccagagccggccugcuga

SEQ ID NO: 1139856 - RNA, 22 nt, Human
cagggcucgcucgcucgcucgc

SEQ ID NO: 1139857 - RNA, 22 nt, Human
ccaggccugugcaaggagggag

SEQ ID NO: 1139858 - RNA, 22 nt, Human
ugcagggaaucuguggcuggac

SEQ ID NO: 1139859 - RNA, 22 nt, Human
ugaagcacaggcauacacaacc

SEQ ID NO: 1139860 - RNA, 22 nt, Human
acaguaaaucaacagaauaucu

SEQ ID NO: 1139861 - RNA, 22 nt, Human
aaaguucuggggguguuucugg

SEQ ID NO: 1139862 - RNA, 22 nt, Human
agcaggcuuucaagagucuucu

SEQ ID NO: 1139863 - RNA, 22 nt, Human
ucuggcaguuccuuguugauau

SEQ ID NO: 1139864 - RNA, 22 nt, Human
ucagggacagggugcugcugcg

SEQ ID NO: 1139865 - RNA, 22 nt, Human
gccuggcacucaaucaucugcu

SEQ ID NO: 1139866 - RNA, 22 nt, Human
uacauuccuucguuuagagauu

SEQ ID NO: 1139867 - RNA, 22 nt, Human
uggccucugggaaagcagauuc

SEQ ID NO: 1139868 - RNA, 17 nt, Human
aggcauggucuggggug

SEQ ID NO: 1139869 - RNA, 21 nt, Human
uaaaucucuguauucuucagu

SEQ ID NO: 1139870 - RNA, 22 nt, Human
ugucaacacaccuaucucaauu

SEQ ID NO: 1139871 - RNA, 22 nt, Human
ccagcuuuuagugggcuuauua

SEQ ID NO: 1139872 - RNA, 22 nt, Human
auguagaagugggcauuauaga

SEQ ID NO: 1139873 - RNA, 22 nt, Human
aauaacuuuuaaaagacccugg

SEQ ID NO: 1139874 - RNA, 22 nt, Human
uucugugcccauuuuaaaaugg

SEQ ID NO: 1139875 - RNA, 22 nt, Human
agguauaagucucauuucuguu

SEQ ID NO: 1139876 - RNA, 22 nt, Human
augggcugaggaagcuccugag

SEQ ID NO: 1139877 - RNA, 22 nt, Human
uccugcagaccucagucagguc

SEQ ID NO: 1139878 - RNA, 22 nt, Human
cuuucuuauaccugucagggcc

SEQ ID NO: 1139879 - RNA, 22 nt, Human
uccaagcuguauguuccuagag

SEQ ID NO: 1139880 - RNA, 22 nt, Human
ucagagaguuggaaagaauuaa

SEQ ID NO: 1139881 - RNA, 22 nt, Human
uacauugcuagaaauguauuuu

SEQ ID NO: 1139882 - RNA, 22 nt, Human
gcagggacgcagcacucuccgu

SEQ ID NO: 1139883 - RNA, 21 nt, Human
uccacccucucugcucccagu

SEQ ID NO: 1139884 - RNA, 22 nt, Human
ugagagcacacagaaauauuuu

SEQ ID NO: 1139885 - RNA, 22 nt, Human
gccugcagccccucugcaguag

SEQ ID NO: 1139886 - RNA, 22 nt, Human
gacccaggguauccagagcugc

SEQ ID NO: 1139887 - RNA, 22 nt, Human
auguccaguuucuacacacaua

SEQ ID NO: 1139888 - RNA, 22 nt, Human
ugaacacauaaggcuuuccugu

SEQ ID NO: 1139889 - RNA, 22 nt, Human
ccaggcucagggcagacuuuca

SEQ ID NO: 1139890 - RNA, 22 nt, Human
uucaaaauuguucuaagcucug

SEQ ID NO: 1139891 - RNA, 18 nt, Human
gacaaaaguacagacaga

SEQ ID NO: 1139892 - RNA, 22 nt, Human
augcauugucugguuucauuuu

SEQ ID NO: 1139893 - RNA, 22 nt, Human
ugcagggaaugcuugcagcaug

SEQ ID NO: 1139894 - RNA, 19 nt, Human
aggcuuggcuagauuuacu

SEQ ID NO: 1139895 - RNA, 22 nt, Human
ucacauuucugauuauaccaaa

SEQ ID NO: 1139896 - RNA, 22 nt, Human
cagucucuuuauccaccaagcc

SEQ ID NO: 1139897 - RNA, 22 nt, Human
ucucugaaggggagcuguuuaa

SEQ ID NO: 1139898 - RNA, 18 nt, Human
gccugcaggcacgggggu

SEQ ID NO: 1139899 - RNA, 22 nt, Human
gccaggcauucuagaaguagug

SEQ ID NO: 1139900 - RNA, 21 nt, Human
uccaagcucaacucccuuccu

SEQ ID NO: 1139901 - RNA, 22 nt, Human
cacacugucagguaaauaacac

SEQ ID NO: 1139902 - RNA, 22 nt, Human
caggagcaaggagcagugggau

SEQ ID NO: 1139903 - RNA, 22 nt, Human
aucucuguaaaccauaaauuga

SEQ ID NO: 1139904 - RNA, 22 nt, Human
aaauggauggaauugacauuua

SEQ ID NO: 1139905 - RNA, 22 nt, Human
cgcaggcucgguucacagagca

SEQ ID NO: 1139906 - RNA, 22 nt, Human
uccugcagagccgcccucaggu

SEQ ID NO: 1139907 - RNA, 22 nt, Human
augaccagccgagauaaacaga

SEQ ID NO: 1139908 - RNA, 22 nt, Human
gagggcuccucacauucucuau

SEQ ID NO: 1139909 - RNA, 22 nt, Human
uuaaauuagucaagcuucucug

SEQ ID NO: 1139910 - RNA, 22 nt, Human
ugggcugagcacugaggaagga

SEQ ID NO: 1139911 - RNA, 22 nt, Human
gaggagcucaugaaagcggugu

SEQ ID NO: 1139912 - RNA, 22 nt, Human
ucauuuaauugguuuugcucgu

SEQ ID NO: 1139913 - RNA, 22 nt, Human
auccaagucagggauaguuuga

SEQ ID NO: 1139914 - RNA, 22 nt, Human
uacacacuuacuggagaugaag

SEQ ID NO: 1139915 - RNA, 22 nt, Human
aggugaguugguaggaaguuug

SEQ ID NO: 1139916 - RNA, 22 nt, Human
ccugggcuuucggcggcuuccu

SEQ ID NO: 1139917 - RNA, 22 nt, Human
ucacauuuuauaucucugguuu

SEQ ID NO: 1139918 - RNA, 22 nt, Human
aauguauguguauaucaaauca

SEQ ID NO: 1139919 - RNA, 22 nt, Human
ugcuucugcaacuugaauguac

SEQ ID NO: 1139920 - RNA, 22 nt, Human
acugggcuccaaggaccuggag

SEQ ID NO: 1139921 - RNA, 22 nt, Human
ggcaggcugggagucaucagag

SEQ ID NO: 1139922 - RNA, 22 nt, Human
agcccaggucuggcccagccug

SEQ ID NO: 1139923 - RNA, 22 nt, Human
gacacagagcucacagucuccu

SEQ ID NO: 1139924 - RNA, 22 nt, Human
aauaguauuuauuuggaaaaag

SEQ ID NO: 1139925 - RNA, 22 nt, Human
aauacuauguugugacacauga

SEQ ID NO: 1139926 - RNA, 22 nt, Human
guuuuacacaccuaugaaagac

SEQ ID NO: 1139927 - RNA, 22 nt, Human
agcaggcugaugggcaugcuug

SEQ ID NO: 1139928 - RNA, 22 nt, Human
aguaugaagaugaugaaaaaua

SEQ ID NO: 1139929 - RNA, 20 nt, Human
aguguacagacacuagaaau

SEQ ID NO: 1139930 - RNA, 22 nt, Human
gcucucagaugcuccagcagcc

SEQ ID NO: 1139931 - RNA, 22 nt, Human
ugggccagcaauugcugcucag

SEQ ID NO: 1139932 - RNA, 22 nt, Human
uggccugccacugccacgccac

SEQ ID NO: 1139933 - RNA, 21 nt, Human
acaaacugaaaugaguuuccu

SEQ ID NO: 1139934 - RNA, 23 nt, Human
ggccucagcgcacagaaacugcu

SEQ ID NO: 1139935 - RNA, 22 nt, Human
ucuagggaacaugggucaagcu

SEQ ID NO: 1139936 - RNA, 22 nt, Human
uuguacaaguauuaugugaaca

SEQ ID NO: 1139937 - RNA, 22 nt, Human
ccugggcugcaugauggcauuu

SEQ ID NO: 1139938 - RNA, 22 nt, Human
uggaaagagguagaggaucugg

SEQ ID NO: 1139939 - RNA, 22 nt, Human
uacaaaugaguuguaugaacca

SEQ ID NO: 1139940 - RNA, 22 nt, Human
aagauaauauucauuaacuaga

SEQ ID NO: 1139941 - RNA, 22 nt, Human
cuucacauguuggaguccuuug

SEQ ID NO: 1139942 - RNA, 22 nt, Human
gaaauauucuugucuuguuuuc

SEQ ID NO: 1139943 - RNA, 22 nt, Human
gcugcaggcggccgugguggcg

SEQ ID NO: 1139944 - RNA, 22 nt, Human
gcuucugggcaccugaacagga

SEQ ID NO: 1139945 - RNA, 21 nt, Human
uagcuuuaauauucccacauu

SEQ ID NO: 1139946 - RNA, 22 nt, Human
acauaugauauugaggaucuca

SEQ ID NO: 1139947 - RNA, 22 nt, Human
uccaggcaaagugcugggcugc

SEQ ID NO: 1139948 - RNA, 22 nt, Human
ucucuuaaaagauuuuaaugac

SEQ ID NO: 1139949 - RNA, 22 nt, Human
ugcacagcuggcucuccuuuuc

SEQ ID NO: 1139950 - RNA, 22 nt, Human
uuccuggccccaccccuggaga

SEQ ID NO: 1139951 - RNA, 22 nt, Human
gagcuuuaagggauaaaaugau

SEQ ID NO: 1139952 - RNA, 22 nt, Human
ggcuuuauuaacucauccguaa

SEQ ID NO: 1139953 - RNA, 22 nt, Human
cagagagcaugggaggcccgag

SEQ ID NO: 1139954 - RNA, 22 nt, Human
gauauguauugaaugaucauuu

SEQ ID NO: 1139955 - RNA, 22 nt, Human
ugaaugaugcaguauaaugaua

SEQ ID NO: 1139956 - RNA, 22 nt, Human
uguaugaaccuuuaauauagug

SEQ ID NO: 1139957 - RNA, 22 nt, Human
uuuaauauucugcauucuccuu

SEQ ID NO: 1139958 - RNA, 22 nt, Human
cuuuggaauauuuuauugagaa

SEQ ID NO: 1139959 - RNA, 22 nt, Human
agcaggcugccuuccaaagccu

SEQ ID NO: 1139960 - RNA, 22 nt, Human
ugaagccacuuuccagaaucac

SEQ ID NO: 1139961 - RNA, 22 nt, Human
uagcauuucccaaaugcauuug

SEQ ID NO: 1139962 - RNA, 22 nt, Human
gcacauacccacugucaagcac

SEQ ID NO: 1139963 - RNA, 22 nt, Human
uuguuucauggggauguuuauu

SEQ ID NO: 1139964 - RNA, 22 nt, Human
aagggcucacccaacucacuuc

SEQ ID NO: 1139965 - RNA, 22 nt, Human
ggcacagggggcugaggacuag

SEQ ID NO: 1139966 - RNA, 22 nt, Human
cauuacaaccccaaauuacaaa

SEQ ID NO: 1139967 - RNA, 22 nt, Human
uccaggcucuaggcugcucucc

SEQ ID NO: 1139968 - RNA, 22 nt, Human
uguaugaagccagaaucuguuu

SEQ ID NO: 1139969 - RNA, 22 nt, Human
ucuggcagggucagggcccagg

SEQ ID NO: 1139970 - RNA, 22 nt, Human
aagucucucauggcugacagca

SEQ ID NO: 1139971 - RNA, 19 nt, Human
uuuacucuccaaggugagu

SEQ ID NO: 1139972 - RNA, 22 nt, Human
ggcaggcuugguggcaccgguu

SEQ ID NO: 1139973 - RNA, 22 nt, Human
auguuucaaauauauagaguug

SEQ ID NO: 1139974 - RNA, 18 nt, Human
ugagaggcuauuuuuugc

SEQ ID NO: 1139975 - RNA, 22 nt, Human
acugggcugcuugagugccuuc

SEQ ID NO: 1139976 - RNA, 22 nt, Human
aaaguuguaauggaagaaaugc

SEQ ID NO: 1139977 - RNA, 22 nt, Human
uaauauuucuacccugcugccu

SEQ ID NO: 1139978 - RNA, 22 nt, Human
gcucugagacaguagagauggc

SEQ ID NO: 1139979 - RNA, 22 nt, Human
gcagagcacccugcagugguau

SEQ ID NO: 1139980 - RNA, 22 nt, Human
gcuccaggcagcauaguggaug

SEQ ID NO: 1139981 - RNA, 22 nt, Human
ucccucuaaacuguaagauucu

SEQ ID NO: 1139982 - RNA, 22 nt, Human
gccugcagccucaagggcugag

SEQ ID NO: 1139983 - RNA, 22 nt, Human
uggcagagaacacacaugauuc

SEQ ID NO: 1139984 - RNA, 22 nt, Human
cacaucagggcugcuugggggu

SEQ ID NO: 1139985 - RNA, 22 nt, Human
ccucagcugcuucccuggagcc

SEQ ID NO: 1139986 - RNA, 22 nt, Human
ucuaggagcaugaagggaaggc

SEQ ID NO: 1139987 - RNA, 20 nt, Human
uauuuguauuugggaaaguu

SEQ ID NO: 1139988 - RNA, 22 nt, Human
acaucacacgccuuccaggagg

SEQ ID NO: 1139989 - RNA, 22 nt, Human
uaacacaugaaagcaccuucuu

SEQ ID NO: 1139990 - RNA, 22 nt, Human
ugauucuauggaaggcauaagg

SEQ ID NO: 1139991 - RNA, 22 nt, Human
ugcccccuuuucuuguuacacu

SEQ ID NO: 1139992 - RNA, 23 nt, Human
cgcccagccucagugaccugggc

SEQ ID NO: 1139993 - RNA, 22 nt, Human
cagucccaugagcccagaacau

SEQ ID NO: 1139994 - RNA, 22 nt, Human
uaugaacuagcugauuuaguuu

SEQ ID NO: 1139995 - RNA, 22 nt, Human
auuucauagauuguaaaucccu

SEQ ID NO: 1139996 - RNA, 22 nt, Human
ccccuuccuuccucagacagcc

SEQ ID NO: 1139997 - RNA, 22 nt, Human
uuccugccccugagagcuccca

SEQ ID NO: 1139998 - RNA, 22 nt, Human
acaggcacugucaagucaugaa

SEQ ID NO: 1139999 - RNA, 22 nt, Human
ccaggcucaccuggagccccug

SEQ ID NO: 1140000 - RNA, 22 nt, Human
cagagcagggguuucccagguu

SEQ ID NO: 1140001 - RNA, 20 nt, Human
aaaggaauauaugaaguaua

SEQ ID NO: 1140002 - RNA, 22 nt, Human
ugucuucaguaaaauacacuau

SEQ ID NO: 1140003 - RNA, 22 nt, Human
uucccacaguguugaauccucu

SEQ ID NO: 1140004 - RNA, 22 nt, Human
gaugaagccccaguguaaguaa

SEQ ID NO: 1140005 - RNA, 18 nt, Human
gacacauccccaggccuc

SEQ ID NO: 1140006 - RNA, 22 nt, Human
cacacagaugguaagggaggga

SEQ ID NO: 1140007 - RNA, 21 nt, Human
gaauaguucuguggcagcagu

SEQ ID NO: 1140008 - RNA, 22 nt, Human
uacacaucucugucaguaguga

SEQ ID NO: 1140009 - RNA, 22 nt, Human
uuggaaaaacacgauagugguu

SEQ ID NO: 1140010 - RNA, 22 nt, Human
cauccagggcagccauggccug

SEQ ID NO: 1140011 - RNA, 20 nt, Human
cccagccccuaccuguugcc

SEQ ID NO: 1140012 - RNA, 22 nt, Human
aaugaagcaguuuucaucaagu

SEQ ID NO: 1140013 - RNA, 22 nt, Human
ugccugccaugcagaaagcuga

SEQ ID NO: 1140014 - RNA, 22 nt, Human
guuuauuauucaacuucauguu

SEQ ID NO: 1140015 - RNA, 22 nt, Human
uuguuucaggaugguuuguuac

SEQ ID NO: 1140016 - RNA, 22 nt, Human
ucaggcucugccaccuagauua

SEQ ID NO: 1140017 - RNA, 22 nt, Human
cagaguuuugugaacaacuugg

SEQ ID NO: 1140018 - RNA, 22 nt, Human
uuucaaauagaaucuuuccaaa

SEQ ID NO: 1140019 - RNA, 22 nt, Human
cagagcucagagcagggcacuc

SEQ ID NO: 1140020 - RNA, 22 nt, Human
cccugcaguccuuucuuggcuc

SEQ ID NO: 1140021 - RNA, 22 nt, Human
uccaggcacuauauauacuuuu

SEQ ID NO: 1140022 - RNA, 22 nt, Human
acagagcaugcucaguguguga

SEQ ID NO: 1140023 - RNA, 22 nt, Human
ggugccagugggucucaggaua

SEQ ID NO: 1140024 - RNA, 22 nt, Human
cauaauuucuguaucagcacca

SEQ ID NO: 1140025 - RNA, 22 nt, Human
auuucucaguguacauuauguu

SEQ ID NO: 1140026 - RNA, 22 nt, Human
cauuagggucucucagcugaau

SEQ ID NO: 1140027 - RNA, 22 nt, Human
aucuuuuacauuacugcccaga

SEQ ID NO: 1140028 - RNA, 22 nt, Human
uguuucaggaccuaucuuuuag

SEQ ID NO: 1140029 - RNA, 22 nt, Human
cacauaauugaacgugaugagu

SEQ ID NO: 1140030 - RNA, 22 nt, Human
uacaaagucacauugaaaugaa

SEQ ID NO: 1140031 - RNA, 22 nt, Human
uucccacauucuuuacauucau

SEQ ID NO: 1140032 - RNA, 22 nt, Human
guuuauuauacaacaaaagcua

SEQ ID NO: 1140033 - RNA, 22 nt, Human
uuauuugcccauguuuagcaga

SEQ ID NO: 1140034 - RNA, 22 nt, Human
ccaggccuggaccaugccaggg

SEQ ID NO: 1140035 - RNA, 22 nt, Human
caauuucuggaacuaauucuga

SEQ ID NO: 1140036 - RNA, 22 nt, Human
aaguuucaaauguugauuaugc

SEQ ID NO: 1140037 - RNA, 22 nt, Human
cucugaauggacacuccagugu

SEQ ID NO: 1140038 - RNA, 22 nt, Human
gacccaggcccaaggcugccag

SEQ ID NO: 1140039 - RNA, 22 nt, Human
aaauauguauggaguucaugaa

SEQ ID NO: 1140040 - RNA, 22 nt, Human
uuggaaauacagcaguuacuuu

SEQ ID NO: 1140041 - RNA, 22 nt, Human
gcccacacagcagauccuuugg

SEQ ID NO: 1140042 - RNA, 22 nt, Human
uggaccugcuggaugggcaggu

SEQ ID NO: 1140043 - RNA, 22 nt, Human
uaauuucacugauaugaaguca

SEQ ID NO: 1140044 - RNA, 22 nt, Human
acugagagucaagauagcaugg

SEQ ID NO: 1140045 - RNA, 22 nt, Human
uaaaggguagguuuuacuguaa

SEQ ID NO: 1140046 - RNA, 22 nt, Human
ugcaggcugccuucacagagcc

SEQ ID NO: 1140047 - RNA, 22 nt, Human
cacauacauacguauguauaca

SEQ ID NO: 1140048 - RNA, 21 nt, Human
uccccacauuucuaaacagac

SEQ ID NO: 1140049 - RNA, 22 nt, Human
gugcagggcuggcaccggaggc

SEQ ID NO: 1140050 - RNA, 19 nt, Human
acauucccaucagcaaugu

SEQ ID NO: 1140051 - RNA, 22 nt, Human
cacauacugagaaucacaccca

SEQ ID NO: 1140052 - RNA, 22 nt, Human
cuaggaaucaccaagauucuag

SEQ ID NO: 1140053 - RNA, 22 nt, Human
uguguugugacauucuuggaug

SEQ ID NO: 1140054 - RNA, 22 nt, Human
cccugcagaucagugagaacuu

SEQ ID NO: 1140055 - RNA, 22 nt, Human
ccagagagaguacugggcucug

SEQ ID NO: 1140056 - RNA, 21 nt, Human
auuuucauuaauucagugugg

SEQ ID NO: 1140057 - RNA, 22 nt, Human
gcaaacuggcaaaccugucugu

SEQ ID NO: 1140058 - RNA, 22 nt, Human
guccaaguacauguguguacau

SEQ ID NO: 1140059 - RNA, 22 nt, Human
uuauuuugguaaauguuugccu

SEQ ID NO: 1140060 - RNA, 22 nt, Human
ugcagagaagaggacaguucua

SEQ ID NO: 1140061 - RNA, 22 nt, Human
cagaggcugcucuggguggcau

SEQ ID NO: 1140062 - RNA, 22 nt, Human
uauugaaauucuucauguccuc

SEQ ID NO: 1140063 - RNA, 22 nt, Human
aaucacaugugcucaauuuuaa

SEQ ID NO: 1140064 - RNA, 22 nt, Human
guuucauuaccugacccaugag

SEQ ID NO: 1140065 - RNA, 22 nt, Human
gggaccuggcaccuuugcucug

SEQ ID NO: 1140066 - RNA, 22 nt, Human
gccaggcauuuauugauugaau

SEQ ID NO: 1140067 - RNA, 19 nt, Human
caggucuucuuggaggacu

SEQ ID NO: 1140068 - RNA, 21 nt, Human
uggaccuguccuucucgcugu

SEQ ID NO: 1140069 - RNA, 22 nt, Human
caccugcaaggagcuuucauuu

SEQ ID NO: 1140070 - RNA, 22 nt, Human
uuagccauguugaagauuuaga

SEQ ID NO: 1140071 - RNA, 22 nt, Human
ugcuuuauguggcugauacuca

SEQ ID NO: 1140072 - RNA, 17 nt, Human
ccauacugacauauuga

SEQ ID NO: 1140073 - RNA, 22 nt, Human
gacuuuggcaucuagacauugu

SEQ ID NO: 1140074 - RNA, 22 nt, Human
auguuucaugacugagcaaaau

SEQ ID NO: 1140075 - RNA, 22 nt, Human
uauacaaugaguacauucuggg

SEQ ID NO: 1140076 - RNA, 22 nt, Human
augugaaacugaagcauccaua

SEQ ID NO: 1140077 - RNA, 22 nt, Human
ucuggcaggacaugcugaccau

SEQ ID NO: 1140078 - RNA, 22 nt, Human
ucccaaggccaggcaucuagaa

SEQ ID NO: 1140079 - RNA, 22 nt, Human
gcuggcagagacaagaagacua

SEQ ID NO: 1140080 - RNA, 22 nt, Human
ccaggcaggcuagaauguaaau

SEQ ID NO: 1140081 - RNA, 22 nt, Human
cccaggcacauccacucuguga

SEQ ID NO: 1140082 - RNA, 22 nt, Human
uccugcagucugcacucugccu

SEQ ID NO: 1140083 - RNA, 22 nt, Human
uuucaaaccuacuuguauguuu

SEQ ID NO: 1140084 - RNA, 22 nt, Human
uggcagugguaccggcucucag

SEQ ID NO: 1140085 - RNA, 22 nt, Human
aaacaucauaggcaugcaugau

SEQ ID NO: 1140086 - RNA, 22 nt, Human
ccuggcaguggugaagaagagg

SEQ ID NO: 1140087 - RNA, 22 nt, Human
ccuggggagccgccugagcccc

SEQ ID NO: 1140088 - RNA, 22 nt, Human
aaaagagugacugauaaguaua

SEQ ID NO: 1140089 - RNA, 22 nt, Human
uuccagccaugguuucccuaug

SEQ ID NO: 1140090 - RNA, 22 nt, Human
uuucauaaccucaagcuacagu

SEQ ID NO: 1140091 - RNA, 22 nt, Human
uaccugcaaaguuccuuuugcc

SEQ ID NO: 1140092 - RNA, 22 nt, Human
guccacagagggcugggcaggc

SEQ ID NO: 1140093 - RNA, 22 nt, Human
aguaugaauacagauuuucucu

SEQ ID NO: 1140094 - RNA, 22 nt, Human
uguauacaggauuacucauagc

SEQ ID NO: 1140095 - RNA, 22 nt, Human
cgacccuacagacagugcugag

SEQ ID NO: 1140096 - RNA, 22 nt, Human
ugcuuuaucaaagcuauaguga

SEQ ID NO: 1140097 - RNA, 22 nt, Human
aggcuuuggaaucagaguucug

SEQ ID NO: 1140098 - RNA, 22 nt, Human
gguuucaacuucaaccucucca

SEQ ID NO: 1140099 - RNA, 22 nt, Human
uucugucaugcucauguaauug

SEQ ID NO: 1140100 - RNA, 22 nt, Human
acuucacagaaauuuuaugagg

SEQ ID NO: 1140101 - RNA, 22 nt, Human
acuuaaaaacagauccagcagg

SEQ ID NO: 1140102 - RNA, 22 nt, Human
ccugggcuuccacgagcagagg

SEQ ID NO: 1140103 - RNA, 22 nt, Human
ucaucaguguccuuaucacuua

SEQ ID NO: 1140104 - RNA, 18 nt, Human
uaaauauauuucccccuu

SEQ ID NO: 1140105 - RNA, 22 nt, Human
gaggcugcuuugaugacaggag

SEQ ID NO: 1140106 - RNA, 22 nt, Human
cacccagccuucacacaggagu

SEQ ID NO: 1140107 - RNA, 22 nt, Human
agcuagaauauugaucugaaau

SEQ ID NO: 1140108 - RNA, 22 nt, Human
ucuacuauguuucuuaaauaga

SEQ ID NO: 1140109 - RNA, 22 nt, Human
cccuuccucccaggcuucugug

SEQ ID NO: 1140110 - RNA, 22 nt, Human
gagcuuuaggagaaggagguca

SEQ ID NO: 1140111 - RNA, 22 nt, Human
ucuggcaguggaugagggcagc

SEQ ID NO: 1140112 - RNA, 22 nt, Human
uccugagcaacacagcuaagug

SEQ ID NO: 1140113 - RNA, 22 nt, Human
uagauauggccgucuguuuuaa

SEQ ID NO: 1140114 - RNA, 22 nt, Human
gauuuucugagccuucaaauuu

SEQ ID NO: 1140115 - RNA, 21 nt, Human
gggagggauggaaaugauguu

SEQ ID NO: 1140116 - RNA, 22 nt, Human
cugcucuaacugcauuaguuuu

SEQ ID NO: 1140117 - RNA, 22 nt, Human
ccaggcucagcuauuaagaaac

SEQ ID NO: 1140118 - RNA, 22 nt, Human
guucuuaagaccacaauaaaaa

SEQ ID NO: 1140119 - RNA, 22 nt, Human
ggcagagguagcuggaaccagg

SEQ ID NO: 1140120 - RNA, 22 nt, Human
gcccacacaccagcucaggagg

SEQ ID NO: 1140121 - RNA, 22 nt, Human
gagagaaaagggggaauugauu

SEQ ID NO: 1140122 - RNA, 22 nt, Human
auuguuaugaaaauaagauguu

SEQ ID NO: 1140123 - RNA, 22 nt, Human
gccuggaaucaugcagggguua

SEQ ID NO: 1140124 - RNA, 22 nt, Human
cccuuccuccucgccugucaga

SEQ ID NO: 1140125 - RNA, 22 nt, Human
aggacacacagaauacaaaucc

SEQ ID NO: 1140126 - RNA, 22 nt, Human
ugcagggaaaguguuggcagca

SEQ ID NO: 1140127 - RNA, 22 nt, Human
ccaggcucugccaggcccuuga

SEQ ID NO: 1140128 - RNA, 22 nt, Human
ccagcucucaaggcucccuggg

SEQ ID NO: 1140129 - RNA, 22 nt, Human
uuucuuauacuauauugucauc

SEQ ID NO: 1140130 - RNA, 20 nt, Human
aagagucuuuacugagcuaa

SEQ ID NO: 1140131 - RNA, 22 nt, Human
ucaggcucaaagggccggauga

SEQ ID NO: 1140132 - RNA, 22 nt, Human
ccccuuccacagugcuuccuaa

SEQ ID NO: 1140133 - RNA, 22 nt, Human
cacagcuucccaaaguggaccu

SEQ ID NO: 1140134 - RNA, 23 nt, Human
uguaaacaucacccccuggaguu

SEQ ID NO: 1140135 - RNA, 21 nt, Human
augugaaauaucaucagagca

SEQ ID NO: 1140136 - RNA, 22 nt, Human
augggcugggaauacacagggg

SEQ ID NO: 1140137 - RNA, 20 nt, Human
ugcaaacacagaguguauga

SEQ ID NO: 1140138 - RNA, 23 nt, Human
caggcucccggaccaggauccgc

SEQ ID NO: 1140139 - RNA, 19 nt, Human
aggugagugugggaaaggg

SEQ ID NO: 1140140 - RNA, 22 nt, Human
gaggguggggaauagacugcua

SEQ ID NO: 1140141 - RNA, 22 nt, Human
cuugggaaugcuaacagaugac

SEQ ID NO: 1140142 - RNA, 22 nt, Human
ucccugcccucagugcacccgg

SEQ ID NO: 1140143 - RNA, 22 nt, Human
ggguuucaugguucucacaaug

SEQ ID NO: 1140144 - RNA, 22 nt, Human
aauguaugggugagaaaguuga

SEQ ID NO: 1140145 - RNA, 22 nt, Human
ucaggcccuuugcugcugcccc

SEQ ID NO: 1140146 - RNA, 22 nt, Human
auguccaggaucuauccccaga

SEQ ID NO: 1140147 - RNA, 22 nt, Human
uauaauuuaucaugucacaguu

SEQ ID NO: 1140148 - RNA, 18 nt, Human
uccugccugugccccagg

SEQ ID NO: 1140149 - RNA, 22 nt, Human
ccuacauucucugaguuuuccu

SEQ ID NO: 1140150 - RNA, 22 nt, Human
acccaggguagaaccucagagc

SEQ ID NO: 1140151 - RNA, 22 nt, Human
ggcuuuggggugugcagagaug

SEQ ID NO: 1140152 - RNA, 22 nt, Human
ucagcauaucuugagcuucaug

SEQ ID NO: 1140153 - RNA, 22 nt, Human
ccugcaguuuguugugaccccg

SEQ ID NO: 1140154 - RNA, 22 nt, Human
uuucucauagucaugccucuua

SEQ ID NO: 1140155 - RNA, 22 nt, Human
aggcuccauaccaucuccggag

SEQ ID NO: 1140156 - RNA, 22 nt, Human
ccaggcuccucaugaucuuguu

SEQ ID NO: 1140157 - RNA, 22 nt, Human
augggcugacuaaugguaaacu

SEQ ID NO: 1140158 - RNA, 22 nt, Human
ccaggccuggccaggggaugcc

SEQ ID NO: 1140159 - RNA, 22 nt, Human
cauuuguacagaacagcuuuau

SEQ ID NO: 1140160 - RNA, 22 nt, Human
gccgggaccaaggccacggagc

SEQ ID NO: 1140161 - RNA, 22 nt, Human
auucucuguuuccaagaugaaa

SEQ ID NO: 1140162 - RNA, 22 nt, Human
uuuagggaugucagaacaggga

SEQ ID NO: 1140163 - RNA, 23 nt, Human
gcugggcuuacucuuucagugag

SEQ ID NO: 1140164 - RNA, 22 nt, Human
ugggccagcugaagugccgccc

SEQ ID NO: 1140165 - RNA, 22 nt, Human
aauaaucucccuuuuuguaugu

SEQ ID NO: 1140166 - RNA, 20 nt, Human
cagcuuuagaucuuugauua

SEQ ID NO: 1140167 - RNA, 22 nt, Human
guauuaggugguggaauuguag

SEQ ID NO: 1140168 - RNA, 22 nt, Human
gcuccugggcccugggcuaacu

SEQ ID NO: 1140169 - RNA, 22 nt, Human
augaacugcaguauaaacuugg

SEQ ID NO: 1140170 - RNA, 22 nt, Human
ucauauaacuggauauuuucaa

SEQ ID NO: 1140171 - RNA, 22 nt, Human
cccaggcaguagaaagaagagg

SEQ ID NO: 1140172 - RNA, 22 nt, Human
uccaggcaaaaggaacugcuug

SEQ ID NO: 1140173 - RNA, 22 nt, Human
cagaguggcgacccccucagcu

SEQ ID NO: 1140174 - RNA, 22 nt, Human
agucuacaaagaaaaguuauug

SEQ ID NO: 1140175 - RNA, 22 nt, Human
aaaguuguucaguaagaaacuc

SEQ ID NO: 1140176 - RNA, 22 nt, Human
cauuuauugaguggccacagug

SEQ ID NO: 1140177 - RNA, 22 nt, Human
ucuagaauuuugccauauagcu

SEQ ID NO: 1140178 - RNA, 22 nt, Human
auuuagcaaaaaaugaugaagc

SEQ ID NO: 1140179 - RNA, 22 nt, Human
cgcauacauagaaacacacaga

SEQ ID NO: 1140180 - RNA, 22 nt, Human
agcagguguauauaaggcugag

SEQ ID NO: 1140181 - RNA, 22 nt, Human
uguuugaaacuuugaucacuaa

SEQ ID NO: 1140182 - RNA, 22 nt, Human
acuaaauacacacauuuguuca

SEQ ID NO: 1140183 - RNA, 22 nt, Human
caauuucugggccucacacaag

SEQ ID NO: 1140184 - RNA, 23 nt, Human
ugggaccuguuugcccacagaug

SEQ ID NO: 1140185 - RNA, 22 nt, Human
aagggcucuucuauuuauggcc

SEQ ID NO: 1140186 - RNA, 22 nt, Human
ccugggcucaagugaugguccc

SEQ ID NO: 1140187 - RNA, 23 nt, Human
acagugugguggacaaggagcag

SEQ ID NO: 1140188 - RNA, 22 nt, Human
agccuccaucucccaucuguga

SEQ ID NO: 1140189 - RNA, 22 nt, Human
uucugucacuugcaaucaagag

SEQ ID NO: 1140190 - RNA, 22 nt, Human
ucuggcagugaagucaugaggu

SEQ ID NO: 1140191 - RNA, 22 nt, Human
ugagagucuguuccucuugcag

SEQ ID NO: 1140192 - RNA, 23 nt, Human
uguaugaauaugccacaguuuaa

SEQ ID NO: 1140193 - RNA, 23 nt, Human
ccaggcucuuucaccugcuauuc

SEQ ID NO: 1140194 - RNA, 22 nt, Human
acugggcuguaaagagaggcaa

SEQ ID NO: 1140195 - RNA, 18 nt, Human
ggccucagccuggccgga

SEQ ID NO: 1140196 - RNA, 22 nt, Human
cucugaccauucccuugauuuu

SEQ ID NO: 1140197 - RNA, 22 nt, Human
ucauggcacuuagcacaguccu

SEQ ID NO: 1140198 - RNA, 22 nt, Human
cuagaauugcauucuaugaaua

SEQ ID NO: 1140199 - RNA, 22 nt, Human
agauuucugucaccuucuaugc

SEQ ID NO: 1140200 - RNA, 22 nt, Human
cugggcuguucugccccugggu

SEQ ID NO: 1140201 - RNA, 20 nt, Human
augugaaagaucaguugucu

SEQ ID NO: 1140202 - RNA, 22 nt, Human
ucagcuuuugucagaaauugua

SEQ ID NO: 1140203 - RNA, 22 nt, Human
ugcuuuauguuaucagaagggu

SEQ ID NO: 1140204 - RNA, 22 nt, Human
cugcagggcagaagggcauaga

SEQ ID NO: 1140205 - RNA, 22 nt, Human
uacacauccauguuuugacuuu

SEQ ID NO: 1140206 - RNA, 22 nt, Human
ucccacauaugcaauccugaau

SEQ ID NO: 1140207 - RNA, 22 nt, Human
cagugagggaagaucucagcac

SEQ ID NO: 1140208 - RNA, 22 nt, Human
aguuagaaaguaaaucauuuga

SEQ ID NO: 1140209 - RNA, 22 nt, Human
guuauuagaagugaaggauugu

SEQ ID NO: 1140210 - RNA, 22 nt, Human
agggcccuaaggaaggcacaca

SEQ ID NO: 1140211 - RNA, 22 nt, Human
uaugaacauguucauugacuua

SEQ ID NO: 1140212 - RNA, 22 nt, Human
gcuggggaggcagcagagaaca

SEQ ID NO: 1140213 - RNA, 19 nt, Human
uccugcagguggcuugcag

SEQ ID NO: 1140214 - RNA, 22 nt, Human
ccagagagcuacaaggcauaaa

SEQ ID NO: 1140215 - RNA, 22 nt, Human
uuuguaaauagcaguacucaug

SEQ ID NO: 1140216 - RNA, 22 nt, Human
ggcuuuauuucacuguaccaua

SEQ ID NO: 1140217 - RNA, 22 nt, Human
agagugaaaagcuagagcagua

SEQ ID NO: 1140218 - RNA, 22 nt, Human
gccuccggagucacagugucuu

SEQ ID NO: 1140219 - RNA, 22 nt, Human
ccaggcucugugugggcuagag

SEQ ID NO: 1140220 - RNA, 22 nt, Human
uuucauaauagugcaguuuguu

SEQ ID NO: 1140221 - RNA, 22 nt, Human
gauucacucauauuuuacguuu

SEQ ID NO: 1140222 - RNA, 22 nt, Human
ucagcucuaaguuuuaugcaaa

SEQ ID NO: 1140223 - RNA, 22 nt, Human
accuggagaaagccucucccug

SEQ ID NO: 1140224 - RNA, 21 nt, Human
agugccaguagguauggagga

SEQ ID NO: 1140225 - RNA, 22 nt, Human
ugggagaaacugucucucccac

SEQ ID NO: 1140226 - RNA, 22 nt, Human
agucuucugaauaagaaucacu

SEQ ID NO: 1140227 - RNA, 22 nt, Human
gcagcucugacaaugccuggaa

SEQ ID NO: 1140228 - RNA, 22 nt, Human
auauauuugagaauauucauga

SEQ ID NO: 1140229 - RNA, 22 nt, Human
ugaccaggauacugcagggaug

SEQ ID NO: 1140230 - RNA, 22 nt, Human
guagggacaugccauuaucuca

SEQ ID NO: 1140231 - RNA, 22 nt, Human
uguauaaauuuaaauuccugcu

SEQ ID NO: 1140232 - RNA, 15 nt, Human
cacacagacagcuug

SEQ ID NO: 1140233 - RNA, 22 nt, Human
caccuaggguuucgccuuucuu

SEQ ID NO: 1140234 - RNA, 22 nt, Human
cgaggcagggaagcugcaaaag

SEQ ID NO: 1140235 - RNA, 23 nt, Human
agcuuugugaaagcagacauggg

SEQ ID NO: 1140236 - RNA, 22 nt, Human
uacccagcuccucagaagacca

SEQ ID NO: 1140237 - RNA, 22 nt, Human
cccugcagagccagcccugacc

SEQ ID NO: 1140238 - RNA, 22 nt, Human
agcuuuauuugucauucacggc

SEQ ID NO: 1140239 - RNA, 22 nt, Human
uccccacacagauacagaguag

SEQ ID NO: 1140240 - RNA, 22 nt, Human
guuaacacaggacucucugccu

SEQ ID NO: 1140241 - RNA, 22 nt, Human
ucuuuauuuaagucuguuguaa

SEQ ID NO: 1140242 - RNA, 22 nt, Human
uguggagacuauagccauaaca

SEQ ID NO: 1140243 - RNA, 22 nt, Human
aggccuccagccacaugccagu

SEQ ID NO: 1140244 - RNA, 22 nt, Human
agcucugcuucuugggaagaug

SEQ ID NO: 1140245 - RNA, 22 nt, Human
ucccacaccugucuauuccuag

SEQ ID NO: 1140246 - RNA, 22 nt, Human
gguuucaacuuuugugaggaau

SEQ ID NO: 1140247 - RNA, 21 nt, Human
ccaggcuccugaggcugguca

SEQ ID NO: 1140248 - RNA, 18 nt, Human
ugcaggcuguugaaacug

SEQ ID NO: 1140249 - RNA, 17 nt, Human
gcauccaguaacaugcc

SEQ ID NO: 1140250 - RNA, 22 nt, Human
ucagcuuuccugcagcuaaggg

SEQ ID NO: 1140251 - RNA, 22 nt, Human
gccuccuggccuuugcuccuca

SEQ ID NO: 1140252 - RNA, 22 nt, Human
cuucuuaaauuggauugcuauu

SEQ ID NO: 1140253 - RNA, 22 nt, Human
ccagcucucuuugaagcauaaa

SEQ ID NO: 1140254 - RNA, 22 nt, Human
gcacacacuguuuuccucacau

SEQ ID NO: 1140255 - RNA, 22 nt, Human
cuccuggcacugucuugaccca

SEQ ID NO: 1140256 - RNA, 22 nt, Human
uguagaaacuacacaugcaaca

SEQ ID NO: 1140257 - RNA, 22 nt, Human
acagcuuuuaugggaccagcca

SEQ ID NO: 1140258 - RNA, 22 nt, Human
uagcuuuaggaugguucucuug

SEQ ID NO: 1140259 - RNA, 22 nt, Human
uauuugauagagauaaaugaua

SEQ ID NO: 1140260 - RNA, 22 nt, Human
aauacauauggaauuccauguu

SEQ ID NO: 1140261 - RNA, 22 nt, Human
aagggcucugugugccucccca

SEQ ID NO: 1140262 - RNA, 22 nt, Human
aggaccugcuaaugugccaagu

SEQ ID NO: 1140263 - RNA, 22 nt, Human
uaaacauuuguuauucuuguuu

SEQ ID NO: 1140264 - RNA, 20 nt, Human
ugcaggcuucgcucuaggag

SEQ ID NO: 1140265 - RNA, 22 nt, Human
uuccaggcugaugggccacagg

SEQ ID NO: 1140266 - RNA, 20 nt, Human
agcuuugguuaagccagugg

SEQ ID NO: 1140267 - RNA, 22 nt, Human
caucacagguccugaugacauu

SEQ ID NO: 1140268 - RNA, 19 nt, Human
ggcauccagaacuaccagu

SEQ ID NO: 1140269 - RNA, 22 nt, Human
aaaguucuggcauuuucugucu

SEQ ID NO: 1140270 - RNA, 22 nt, Human
uaugaccuuaggaagcaagaag

SEQ ID NO: 1140271 - RNA, 22 nt, Human
gcuggcaggagaccauacccua

SEQ ID NO: 1140272 - RNA, 22 nt, Human
aguaugaaccuggguucuggau

SEQ ID NO: 1140273 - RNA, 22 nt, Human
uuagaauuauuguuuccuucua

SEQ ID NO: 1140274 - RNA, 22 nt, Human
caggcccugccuugagggaccu

SEQ ID NO: 1140275 - RNA, 22 nt, Human
gaaacaauuuuuguugucuaag

SEQ ID NO: 1140276 - RNA, 22 nt, Human
ccugggcuggaguacagcagug

SEQ ID NO: 1140277 - RNA, 22 nt, Human
uuccagcccgcgacuuguucag

SEQ ID NO: 1140278 - RNA, 22 nt, Human
aagaggucauaccagauaaggg

SEQ ID NO: 1140279 - RNA, 22 nt, Human
gagauggccagugccaggacaa

SEQ ID NO: 1140280 - RNA, 22 nt, Human
ccugcagggugcugccacagau

SEQ ID NO: 1140281 - RNA, 22 nt, Human
uuauuacacugaaagaauugcg

SEQ ID NO: 1140282 - RNA, 19 nt, Human
cuuauuagagugagagcuu

SEQ ID NO: 1140283 - RNA, 22 nt, Human
gcagcuuucugcaaugucaucc

SEQ ID NO: 1140284 - RNA, 22 nt, Human
cuggccagagguuccucugccc

SEQ ID NO: 1140285 - RNA, 22 nt, Human
gccaggcagcaggaagccagug

SEQ ID NO: 1140286 - RNA, 22 nt, Human
cagccaagaaccacagacccag

SEQ ID NO: 1140287 - RNA, 22 nt, Human
uuucaaauaccauaaaccuaau

SEQ ID NO: 1140288 - RNA, 22 nt, Human
uuaauuuuuauguauagugugu

SEQ ID NO: 1140289 - RNA, 22 nt, Human
uuucuuagcgaugcuugauaaa

SEQ ID NO: 1140290 - RNA, 22 nt, Human
auaauucagguuuucuggcaca

SEQ ID NO: 1140291 - RNA, 22 nt, Human
ggcaggguuuacaauagcaaua

SEQ ID NO: 1140292 - RNA, 22 nt, Human
cagucuggaggucagcuggcuu

SEQ ID NO: 1140293 - RNA, 22 nt, Human
aaaguuuguuauaugauaagga

SEQ ID NO: 1140294 - RNA, 22 nt, Human
caggcugccgugaagcaggccu

SEQ ID NO: 1140295 - RNA, 22 nt, Human
ucaggcucuggguacaccugac

SEQ ID NO: 1140296 - RNA, 18 nt, Human
ucaggcucucuggcuaga

SEQ ID NO: 1140297 - RNA, 22 nt, Human
gcacacaugcaugcacaggagu

SEQ ID NO: 1140298 - RNA, 22 nt, Human
caggucuuuucuacugguggag

SEQ ID NO: 1140299 - RNA, 22 nt, Human
gcagggguagugucuuccugag

SEQ ID NO: 1140300 - RNA, 20 nt, Human
guguuucaugugauacaaug

SEQ ID NO: 1140301 - RNA, 22 nt, Human
cuguaugaacccauauacuuau

SEQ ID NO: 1140302 - RNA, 22 nt, Human
cauaauuuuuuuaagucagaac

SEQ ID NO: 1140303 - RNA, 22 nt, Human
ucugcagauuuaucagcagcug

SEQ ID NO: 1140304 - RNA, 22 nt, Human
aguuagaauagucagauuguag

SEQ ID NO: 1140305 - RNA, 22 nt, Human
uguuagaaguuaaucacuaauu

SEQ ID NO: 1140306 - RNA, 22 nt, Human
uacaaagucagaauaacaggug

SEQ ID NO: 1140307 - RNA, 22 nt, Human
gacccagccugguuuuuauagg

SEQ ID NO: 1140308 - RNA, 22 nt, Human
cagggcucccuugcaaggaggg

SEQ ID NO: 1140309 - RNA, 22 nt, Human
acaucccacagaaacauacaua

SEQ ID NO: 1140310 - RNA, 22 nt, Human
uagggcuccacucccagagauu

SEQ ID NO: 1140311 - RNA, 22 nt, Human
gccugcagauauauaggauggu

SEQ ID NO: 1140312 - RNA, 22 nt, Human
uuguaauuugcaaauguauugu

SEQ ID NO: 1140313 - RNA, 21 nt, Human
cagcccagcccauugacagug

SEQ ID NO: 1140314 - RNA, 22 nt, Human
aaugaucuggcucaggauauca

SEQ ID NO: 1140315 - RNA, 22 nt, Human
uggaaauauacaaugugucucu

SEQ ID NO: 1140316 - RNA, 22 nt, Human
uuccaaguguugagauuagagg

SEQ ID NO: 1140317 - RNA, 22 nt, Human
cuuccucuagccuaguaaugcc

SEQ ID NO: 1140318 - RNA, 22 nt, Human
cuggggcuggugaggcaggcuc

SEQ ID NO: 1140319 - RNA, 22 nt, Human
aagacauugucauuuuauaauu

SEQ ID NO: 1140320 - RNA, 22 nt, Human
uauauguaagcuauguaagagu

SEQ ID NO: 1140321 - RNA, 20 nt, Human
aaagagcccuuggagcaggc

SEQ ID NO: 1140322 - RNA, 22 nt, Human
uuuauuagauuaucaaagaggu

SEQ ID NO: 1140323 - RNA, 22 nt, Human
cucccaagcugugcugaacugu

SEQ ID NO: 1140324 - RNA, 22 nt, Human
agcaggcugcuggcguugaagu

SEQ ID NO: 1140325 - RNA, 20 nt, Human
gcuccaggucagagaggacg

SEQ ID NO: 1140326 - RNA, 22 nt, Human
gcacauaacugaccacaucuaa

SEQ ID NO: 1140327 - RNA, 22 nt, Human
cuuucacagcacaagccugccu

SEQ ID NO: 1140328 - RNA, 23 nt, Human
gggaccugguaggaggugauugg

SEQ ID NO: 1140329 - RNA, 22 nt, Human
gccugcaguucugugcuaggca

SEQ ID NO: 1140330 - RNA, 22 nt, Human
uccaaggcuccggcccuggcgu

SEQ ID NO: 1140331 - RNA, 22 nt, Human
gagugcaggccugagcaccauc

SEQ ID NO: 1140332 - RNA, 22 nt, Human
gcuucuggugaggccucaggaa

SEQ ID NO: 1140333 - RNA, 22 nt, Human
gcuggcagaauuucuucuugcu

SEQ ID NO: 1140334 - RNA, 22 nt, Human
accugcaggcacaggugugcgc

SEQ ID NO: 1140335 - RNA, 22 nt, Human
acacauacauggggaagaugag

SEQ ID NO: 1140336 - RNA, 20 nt, Human
ccuuuauuauuuguaugaug

SEQ ID NO: 1140337 - RNA, 22 nt, Human
aaaagagucuuaggcagucaua

SEQ ID NO: 1140338 - RNA, 22 nt, Human
aauagauacuacuuagauguag

SEQ ID NO: 1140339 - RNA, 22 nt, Human
ugggcugaguggcagccagagu

SEQ ID NO: 1140340 - RNA, 22 nt, Human
acugugauguucucuaucuugg

SEQ ID NO: 1140341 - RNA, 22 nt, Human
cagggcucacucggcuggcguc

SEQ ID NO: 1140342 - RNA, 22 nt, Human
cugggcuuugguacugugauua

SEQ ID NO: 1140343 - RNA, 22 nt, Human
gccaggcauuuguuaggugcug

SEQ ID NO: 1140344 - RNA, 22 nt, Human
uuauucagucugucuagggagu

SEQ ID NO: 1140345 - RNA, 22 nt, Human
ggcaggcucagcagccaaggag

SEQ ID NO: 1140346 - RNA, 21 nt, Human
aguuugaugcaauuucugaga

SEQ ID NO: 1140347 - RNA, 22 nt, Human
gauuuuucaguauaaaauauau

SEQ ID NO: 1140348 - RNA, 22 nt, Human
ugggcuccagcaccugugcucu

SEQ ID NO: 1140349 - RNA, 22 nt, Human
aucagagaaauggagggcgcuu

SEQ ID NO: 1140350 - RNA, 22 nt, Human
guccaagucuuccuucccaaac

SEQ ID NO: 1140351 - RNA, 23 nt, Human
acacugucucauggauagacugc

SEQ ID NO: 1140352 - RNA, 22 nt, Human
aucagagauggcuccagugcuc

SEQ ID NO: 1140353 - RNA, 22 nt, Human
guauuagggccaaaggcaggaa

SEQ ID NO: 1140354 - RNA, 22 nt, Human
cagggcucgcucuugcccuucg

SEQ ID NO: 1140355 - RNA, 22 nt, Human
uucugggggaauacagcuauga

SEQ ID NO: 1140356 - RNA, 22 nt, Human
uuauuagguuauucucuguacu

SEQ ID NO: 1140357 - RNA, 22 nt, Human
uuucugaagggcagcagacucu

SEQ ID NO: 1140358 - RNA, 22 nt, Human
cccugcagcuuuugcauaguca

SEQ ID NO: 1140359 - RNA, 22 nt, Human
gagccucguggcggccacugcg

SEQ ID NO: 1140360 - RNA, 22 nt, Human
ucugggcuuuguaaugggaggu

SEQ ID NO: 1140361 - RNA, 22 nt, Human
agguuuaugccuuggagcuggg

SEQ ID NO: 1140362 - RNA, 22 nt, Human
aaggcucuggguuucauaggug

SEQ ID NO: 1140363 - RNA, 22 nt, Human
auaaagauuucuuuuucucuac

SEQ ID NO: 1140364 - RNA, 22 nt, Human
uacauucagcaaaagaaugguu

SEQ ID NO: 1140365 - RNA, 22 nt, Human
ucuccaagcagggcugcaaggc

SEQ ID NO: 1140366 - RNA, 22 nt, Human
cuccaggccccuggccuucugc

SEQ ID NO: 1140367 - RNA, 22 nt, Human
cuacccagcaccuaggcugccu

SEQ ID NO: 1140368 - RNA, 19 nt, Human
ccaggccuggcgucuccgc

SEQ ID NO: 1140369 - RNA, 22 nt, Human
uucaaauacauucuuugccacu

SEQ ID NO: 1140370 - RNA, 22 nt, Human
agaaaauauucauugagaggcu

SEQ ID NO: 1140371 - RNA, 22 nt, Human
cugccugcucaccagggcucug

SEQ ID NO: 1140372 - RNA, 22 nt, Human
gacccaggguggucaccugaaa

SEQ ID NO: 1140373 - RNA, 22 nt, Human
ucacaauauuuaucuuccaauu

SEQ ID NO: 1140374 - RNA, 22 nt, Human
cuguacaaguccuucaucaggg

SEQ ID NO: 1140375 - RNA, 22 nt, Human
gcacacaggcaguuuccagcca

SEQ ID NO: 1140376 - RNA, 22 nt, Human
aggaccugacauuguguuuucu

SEQ ID NO: 1140377 - RNA, 22 nt, Human
ugaaacuuauaagaauaugaau

SEQ ID NO: 1140378 - RNA, 22 nt, Human
ccaaugauggugcccacgauga

SEQ ID NO: 1140379 - RNA, 22 nt, Human
ccacagaccuuggcuuccaccu

SEQ ID NO: 1140380 - RNA, 21 nt, Human
aaauuucugcaagccucaacu

SEQ ID NO: 1140381 - RNA, 22 nt, Human
aaagaaucagaagucucaaaca

SEQ ID NO: 1140382 - RNA, 22 nt, Human
gcaaaucaccaccuagcuggau

SEQ ID NO: 1140383 - RNA, 22 nt, Human
agggacucccugggccgacacg

SEQ ID NO: 1140384 - RNA, 22 nt, Human
augcaacaaaugcuacgaaucg

SEQ ID NO: 1140385 - RNA, 22 nt, Human
uucugucaaauuugccauaugg

SEQ ID NO: 1140386 - RNA, 22 nt, Human
uucaauaucauuguuuagucuc

SEQ ID NO: 1140387 - RNA, 22 nt, Human
uuccaagucacccuuaggguca

SEQ ID NO: 1140388 - RNA, 22 nt, Human
auacacacugcuauccuuuuuu

SEQ ID NO: 1140389 - RNA, 22 nt, Human
gacccugccaugagugacaggg

SEQ ID NO: 1140390 - RNA, 22 nt, Human
ccaucacaguccccaucgugau

SEQ ID NO: 1140391 - RNA, 22 nt, Human
ugcuuuauucagucucugccau

SEQ ID NO: 1140392 - RNA, 20 nt, Human
cuguuaaaagguaugaauuc

SEQ ID NO: 1140393 - RNA, 22 nt, Human
aggaagcuuggggcagggcuac

SEQ ID NO: 1140394 - RNA, 22 nt, Human
uuagaacugaagaagauuaagg

SEQ ID NO: 1140395 - RNA, 23 nt, Human
ugaaacauuuaggguagaauuuc

SEQ ID NO: 1140396 - RNA, 22 nt, Human
uuccuggcucacagcagugggg

SEQ ID NO: 1140397 - RNA, 22 nt, Human
gcagcuuucuaagcuuuauugc

SEQ ID NO: 1140398 - RNA, 22 nt, Human
uuucacauuggcuucuauuucu

SEQ ID NO: 1140399 - RNA, 22 nt, Human
cucagagaaaugucacaacaau

SEQ ID NO: 1140400 - RNA, 22 nt, Human
auaugugaaguggguuauuuug

SEQ ID NO: 1140401 - RNA, 22 nt, Human
gcuuuuaauuaguugcuuccau

SEQ ID NO: 1140402 - RNA, 22 nt, Human
acacacuggcccccaguacuga

SEQ ID NO: 1140403 - RNA, 22 nt, Human
ucacuguaauagguuugaagau

SEQ ID NO: 1140404 - RNA, 22 nt, Human
ucucuuucuauugcaccaugcu

SEQ ID NO: 1140405 - RNA, 22 nt, Human
aggguagggcccggagacagac

SEQ ID NO: 1140406 - RNA, 22 nt, Human
aaguguuuauuuauaacgaucu

SEQ ID NO: 1140407 - RNA, 22 nt, Human
ugcagggaaaacccaggaugcu

SEQ ID NO: 1140408 - RNA, 22 nt, Human
ucccacacagcccgcucaccgg

SEQ ID NO: 1140409 - RNA, 19 nt, Human
cugagagaugcuucacaca

SEQ ID NO: 1140410 - RNA, 22 nt, Human
acaauguaggauauguacuugu

SEQ ID NO: 1140411 - RNA, 22 nt, Human
ggcuccacccugcuuccagaag

SEQ ID NO: 1140412 - RNA, 22 nt, Human
ccagcucugcauguuucccuug

SEQ ID NO: 1140413 - RNA, 22 nt, Human
ccagcuuuccaggguugacugg

SEQ ID NO: 1140414 - RNA, 22 nt, Human
aagggcucgguagcaguccuga

SEQ ID NO: 1140415 - RNA, 23 nt, Human
acugggcugaaauuuuucauggc

SEQ ID NO: 1140416 - RNA, 22 nt, Human
augggcuggcagccugaacagc

SEQ ID NO: 1140417 - RNA, 22 nt, Human
ucuggcaguuugagaaaggcua

SEQ ID NO: 1140418 - RNA, 22 nt, Human
aaaguuagacagcaucauuucu

SEQ ID NO: 1140419 - RNA, 22 nt, Human
cccaggcaggagugugguggcu

SEQ ID NO: 1140420 - RNA, 22 nt, Human
agcaaacuaauugcaguucugg

SEQ ID NO: 1140421 - RNA, 22 nt, Human
ugaacuuagugggaauaucucu

SEQ ID NO: 1140422 - RNA, 22 nt, Human
ggcaggcuguucaccugcuuuu

SEQ ID NO: 1140423 - RNA, 22 nt, Human
agcaggcuugguccccagccuc

SEQ ID NO: 1140424 - RNA, 22 nt, Human
gaaacuuacuuacucacauuuc

SEQ ID NO: 1140425 - RNA, 22 nt, Human
ggcucccaggagggccuggagg

SEQ ID NO: 1140426 - RNA, 22 nt, Human
gaggagcuggcagcgucuccgc

SEQ ID NO: 1140427 - RNA, 22 nt, Human
ccagcccugaacccugcugcau

SEQ ID NO: 1140428 - RNA, 22 nt, Human
acagguccucaagucagcuggg

SEQ ID NO: 1140429 - RNA, 22 nt, Human
uauacaauggcugaaucaucca

SEQ ID NO: 1140430 - RNA, 20 nt, Human
ccagagaguagguuagugau

SEQ ID NO: 1140431 - RNA, 22 nt, Human
ugaguagagaauucagcuaagg

SEQ ID NO: 1140432 - RNA, 22 nt, Human
auuuguagugaagugaaaauaa

SEQ ID NO: 1140433 - RNA, 22 nt, Human
accugcaguggccacuccuaau

SEQ ID NO: 1140434 - RNA, 22 nt, Human
cuguaugaguugggaauagaau

SEQ ID NO: 1140435 - RNA, 22 nt, Human
ggcuuuauuaagcaggguaagu

SEQ ID NO: 1140436 - RNA, 22 nt, Human
aaucuuucccuauuaaaugugg

SEQ ID NO: 1140437 - RNA, 22 nt, Human
cccacacauuuuucacuuaccg

SEQ ID NO: 1140438 - RNA, 23 nt, Human
gccaggcacaugguggacacgca

SEQ ID NO: 1140439 - RNA, 22 nt, Human
caacacauugaagcuaugauga

SEQ ID NO: 1140440 - RNA, 22 nt, Human
gagcauuuuugucugcauuuua

SEQ ID NO: 1140441 - RNA, 22 nt, Human
ucccuccccacuucugagcuuu

SEQ ID NO: 1140442 - RNA, 22 nt, Human
augggcugcuucuccagcaccu

SEQ ID NO: 1140443 - RNA, 22 nt, Human
gcuggcagacugggggcagaac

SEQ ID NO: 1140444 - RNA, 21 nt, Human
cuguccaguaauuccuggcac

SEQ ID NO: 1140445 - RNA, 22 nt, Human
augugagggaaaucagucagaa

SEQ ID NO: 1140446 - RNA, 22 nt, Human
cauacuuuugcccugacauucu

SEQ ID NO: 1140447 - RNA, 22 nt, Human
uguaaacauauguauguaugua

SEQ ID NO: 1140448 - RNA, 22 nt, Human
ugugaucugccuuggaucugca

SEQ ID NO: 1140449 - RNA, 22 nt, Human
uuaugcaacaggugagcagaca

SEQ ID NO: 1140450 - RNA, 22 nt, Human
gcagcuuuguggagaggcccau

SEQ ID NO: 1140451 - RNA, 23 nt, Human
cuucacaaucaaaaucaguucug

SEQ ID NO: 1140452 - RNA, 22 nt, Human
gcuuggccagcagccgggaugc

SEQ ID NO: 1140453 - RNA, 19 nt, Human
agugcagggagcacccuca

SEQ ID NO: 1140454 - RNA, 22 nt, Human
auagggccuaaaaaguauugcu

SEQ ID NO: 1140455 - RNA, 22 nt, Human
ccacccagaccagggaucuggg

SEQ ID NO: 1140456 - RNA, 22 nt, Human
accaggcacucuuguggcagug

SEQ ID NO: 1140457 - RNA, 22 nt, Human
uacauguauguguacgugcaug

SEQ ID NO: 1140458 - RNA, 22 nt, Human
aaauuaguacauugcaaagucc

SEQ ID NO: 1140459 - RNA, 21 nt, Human
cuugggcuuguagauggugga

SEQ ID NO: 1140460 - RNA, 22 nt, Human
ucccaggcaaaggcagcucauu

SEQ ID NO: 1140461 - RNA, 17 nt, Human
ucugcagaggcaaaccu

SEQ ID NO: 1140462 - RNA, 22 nt, Human
gagggcucugucuggaagggaa

SEQ ID NO: 1140463 - RNA, 22 nt, Human
uugauacaggccuucuagauga

SEQ ID NO: 1140464 - RNA, 22 nt, Human
ccagagaggggaagggcuugcc

SEQ ID NO: 1140465 - RNA, 22 nt, Human
uggaccugcguaggugcugggc

SEQ ID NO: 1140466 - RNA, 22 nt, Human
ucuggcaguugccgcuucaguc

SEQ ID NO: 1140467 - RNA, 22 nt, Human
cagagcauuuggaagccacgug

SEQ ID NO: 1140468 - RNA, 22 nt, Human
uuucugaauaacucuaugauau

SEQ ID NO: 1140469 - RNA, 22 nt, Human
ucagagagguuaaauaucuugu

SEQ ID NO: 1140470 - RNA, 22 nt, Human
auaauggccgggggcugaaugc

SEQ ID NO: 1140471 - RNA, 22 nt, Human
auguuugaaauuguaaguauau

SEQ ID NO: 1140472 - RNA, 22 nt, Human
gcuggcagguaaagccccgggg

SEQ ID NO: 1140473 - RNA, 22 nt, Human
ugcaggcuguaaucugaggcua

SEQ ID NO: 1140474 - RNA, 22 nt, Human
uuugucaucccuuuugaaacug

SEQ ID NO: 1140475 - RNA, 23 nt, Human
ugugaaauuugaggucagugcuu

SEQ ID NO: 1140476 - RNA, 19 nt, Human
cccagcuugaccaccugcu

SEQ ID NO: 1140477 - RNA, 22 nt, Human
gaaugaauagguguccagaugg

SEQ ID NO: 1140478 - RNA, 22 nt, Human
acagagagaauuggguuuacag

SEQ ID NO: 1140479 - RNA, 22 nt, Human
guuucuuagguaaauucuuuga

SEQ ID NO: 1140480 - RNA, 22 nt, Human
ugcuuaaaauaguucauuuuug

SEQ ID NO: 1140481 - RNA, 22 nt, Human
gccccacagccugcggucucag

SEQ ID NO: 1140482 - RNA, 22 nt, Human
aaacaugagcauuucuguuuaa

SEQ ID NO: 1140483 - RNA, 22 nt, Human
cccugcaggcucagacuggagu

SEQ ID NO: 1140484 - RNA, 22 nt, Human
uucagagauggaaggcagaaug

SEQ ID NO: 1140485 - RNA, 22 nt, Human
ccugggcugaagucaagugugg

SEQ ID NO: 1140486 - RNA, 22 nt, Human
uagggcucagcucuagcuccug

SEQ ID NO: 1140487 - RNA, 22 nt, Human
cccagcuugcgggcggcaggag

SEQ ID NO: 1140488 - RNA, 22 nt, Human
ccuccuggcuuuucccauugaa

SEQ ID NO: 1140489 - RNA, 17 nt, Human
aaguccagaguugagca

SEQ ID NO: 1140490 - RNA, 22 nt, Human
caugagauaauuuuucuccagu

SEQ ID NO: 1140491 - RNA, 22 nt, Human
cagaugaggggcauauaacaau

SEQ ID NO: 1140492 - RNA, 22 nt, Human
ugugaaaagggcuuuguacaaa

SEQ ID NO: 1140493 - RNA, 22 nt, Human
cccuuccuugauuuuaacugga

SEQ ID NO: 1140494 - RNA, 22 nt, Human
uauuucccagggagcaacaagc

SEQ ID NO: 1140495 - RNA, 23 nt, Human
uuuuccuguggagacaugacugg

SEQ ID NO: 1140496 - RNA, 22 nt, Human
aggaagaacagauaauggacgc

SEQ ID NO: 1140497 - RNA, 22 nt, Human
auuucucaucaagugccaacuc

SEQ ID NO: 1140498 - RNA, 22 nt, Human
ccugggcuuucaaaaccagccu

SEQ ID NO: 1140499 - RNA, 22 nt, Human
uggcuagguagcuuucugcugu

SEQ ID NO: 1140500 - RNA, 19 nt, Human
acacauuugcacaauccac

SEQ ID NO: 1140501 - RNA, 22 nt, Human
guguauaaugcuguuuguacau

SEQ ID NO: 1140502 - RNA, 22 nt, Human
caguguggagggagagagccug

SEQ ID NO: 1140503 - RNA, 22 nt, Human
agagggcugccucagucagcua

SEQ ID NO: 1140504 - RNA, 22 nt, Human
uucauaaugagguccuagaggc

SEQ ID NO: 1140505 - RNA, 22 nt, Human
acuggcaguagagggagcgcau

SEQ ID NO: 1140506 - RNA, 22 nt, Human
aaaacaggugucagcaaacuau

SEQ ID NO: 1140507 - RNA, 22 nt, Human
cagggcucaggcucugggauuc

SEQ ID NO: 1140508 - RNA, 22 nt, Human
gagacugcauagauggccacaa

SEQ ID NO: 1140509 - RNA, 22 nt, Human
uguuugaauuuugcuaacgugu

SEQ ID NO: 1140510 - RNA, 22 nt, Human
cuucugggagagcuuuugcuuc

SEQ ID NO: 1140511 - RNA, 22 nt, Human
gcaggcuccaaggccugggaga

SEQ ID NO: 1140512 - RNA, 22 nt, Human
aaacagcaggaacaucuugcca

SEQ ID NO: 1140513 - RNA, 22 nt, Human
uccaagcuuuccaugcccucac

SEQ ID NO: 1140514 - RNA, 22 nt, Human
cuucugggauuaauuuuuccug

SEQ ID NO: 1140515 - RNA, 22 nt, Human
uuuacucuugcuacacaacugu

SEQ ID NO: 1140516 - RNA, 22 nt, Human
ucagggacgugagcucagaguc

SEQ ID NO: 1140517 - RNA, 18 nt, Human
cuguccaguagacucugc

SEQ ID NO: 1140518 - RNA, 19 nt, Human
gagggcucauuugaacaau

SEQ ID NO: 1140519 - RNA, 22 nt, Human
uguaggaaaaacaaugaucugc

SEQ ID NO: 1140520 - RNA, 22 nt, Human
cugcagccuccuccagcuacgu

SEQ ID NO: 1140521 - RNA, 22 nt, Human
ucaggguugcugugaucagucc

SEQ ID NO: 1140522 - RNA, 22 nt, Human
gggaccugccauugcucacagg

SEQ ID NO: 1140523 - RNA, 22 nt, Human
ugggcugaguguggaacuaguu

SEQ ID NO: 1140524 - RNA, 22 nt, Human
aucacagagcucccuuccacug

SEQ ID NO: 1140525 - RNA, 22 nt, Human
acuggcagccacaacuggcagg

SEQ ID NO: 1140526 - RNA, 22 nt, Human
acagauuuaggacuguagcgau

SEQ ID NO: 1140527 - RNA, 22 nt, Human
uggcaggaaaguaacagagcac

SEQ ID NO: 1140528 - RNA, 22 nt, Human
ugggccaggucugugucagcug

SEQ ID NO: 1140529 - RNA, 22 nt, Human
guccucuggaagaugaguucuu

SEQ ID NO: 1140530 - RNA, 22 nt, Human
uccaggcaugguguaauuuugc

SEQ ID NO: 1140531 - RNA, 22 nt, Human
uugaauuagacuuugcuacagg

SEQ ID NO: 1140532 - RNA, 22 nt, Human
gagcucagauucuggugucaga

SEQ ID NO: 1140533 - RNA, 22 nt, Human
acacauauauacauauuugugc

SEQ ID NO: 1140534 - RNA, 20 nt, Human
gccaggcacuguucucaaua

SEQ ID NO: 1140535 - RNA, 22 nt, Human
aucaaguuuucuuaguugacug

SEQ ID NO: 1140536 - RNA, 22 nt, Human
caugaagcuugaagcaguccac

SEQ ID NO: 1140537 - RNA, 22 nt, Human
ugcuuaaacauacuauuuauau

SEQ ID NO: 1140538 - RNA, 22 nt, Human
uagaaacagaaaacuguaauag

SEQ ID NO: 1140539 - RNA, 22 nt, Human
uuugugaauagguuggcuucca

SEQ ID NO: 1140540 - RNA, 22 nt, Human
auugaaaaauucacaauucugg

SEQ ID NO: 1140541 - RNA, 22 nt, Human
uuccaaguuaggcgagcuggug

SEQ ID NO: 1140542 - RNA, 22 nt, Human
auuaaauuggaucugcauaguu

SEQ ID NO: 1140543 - RNA, 22 nt, Human
cucugucacuucuccagcugag

SEQ ID NO: 1140544 - RNA, 22 nt, Human
ggugccaggcuguagucagggu

SEQ ID NO: 1140545 - RNA, 23 nt, Human
uggaccugaaccagugccucugu

SEQ ID NO: 1140546 - RNA, 22 nt, Human
ccagcccuugcugaaggguggc

SEQ ID NO: 1140547 - RNA, 22 nt, Human
auuuauuaugggauuuggcaca

SEQ ID NO: 1140548 - RNA, 22 nt, Human
ucuccugcucagaacagccuca

SEQ ID NO: 1140549 - RNA, 22 nt, Human
uuuuucaucugauugauaacuc

SEQ ID NO: 1140550 - RNA, 22 nt, Human
ucugggcugcuaugaggcagag

SEQ ID NO: 1140551 - RNA, 22 nt, Human
aaugaagcaguccaucugcucu

SEQ ID NO: 1140552 - RNA, 22 nt, Human
accugccuaucagcugccugcu

SEQ ID NO: 1140553 - RNA, 22 nt, Human
ucccaggcuaggccucugcguu

SEQ ID NO: 1140554 - RNA, 22 nt, Human
ggggccuuuucugaauguggaa

SEQ ID NO: 1140555 - RNA, 22 nt, Human
ucccaccccuugacucuuuaag

SEQ ID NO: 1140556 - RNA, 22 nt, Human
cagggcucaucugugugaccag

SEQ ID NO: 1140557 - RNA, 22 nt, Human
cugggcuucucccccuggcaga

SEQ ID NO: 1140558 - RNA, 22 nt, Human
uauguacuaacuuucauucuag

SEQ ID NO: 1140559 - RNA, 18 nt, Human
ucagagagcagcuuuauu

SEQ ID NO: 1140560 - RNA, 22 nt, Human
uucuagauagagugcaaauuau

SEQ ID NO: 1140561 - RNA, 22 nt, Human
uaauuucaccguugcuagaaau

SEQ ID NO: 1140562 - RNA, 22 nt, Human
cacuuagucucaccaguucagu

SEQ ID NO: 1140563 - RNA, 22 nt, Human
uacacacagaggccaugggauu

SEQ ID NO: 1140564 - RNA, 22 nt, Human
auauuagguuggugcaaaagua

SEQ ID NO: 1140565 - RNA, 22 nt, Human
gugugaaaaugugcacaauaug

SEQ ID NO: 1140566 - RNA, 22 nt, Human
gcugggcuguaguuugcugacc

SEQ ID NO: 1140567 - RNA, 22 nt, Human
gaugaagcuauuugguuggcac

SEQ ID NO: 1140568 - RNA, 22 nt, Human
uguguaaagcuuguuccagaaa

SEQ ID NO: 1140569 - RNA, 22 nt, Human
cugggaggcagucucucuagaa

SEQ ID NO: 1140570 - RNA, 23 nt, Human
uccuuuaaugcuggaauggcuag

SEQ ID NO: 1140571 - RNA, 22 nt, Human
uccaggcauaaugcccaguggu

SEQ ID NO: 1140572 - RNA, 22 nt, Human
augcagcuucaggauuaugaug

SEQ ID NO: 1140573 - RNA, 22 nt, Human
uacaaaguaauguauaauaucg

SEQ ID NO: 1140574 - RNA, 22 nt, Human
cugccucuauaggaguccacca

SEQ ID NO: 1140575 - RNA, 22 nt, Human
acuuugcagggcuugauaucca

SEQ ID NO: 1140576 - RNA, 18 nt, Human
agacccucuaagggcagu

SEQ ID NO: 1140577 - RNA, 22 nt, Human
acuggcaggcugcuggccggcg

SEQ ID NO: 1140578 - RNA, 22 nt, Human
uuuguucaugccuauauucuca

SEQ ID NO: 1140579 - RNA, 22 nt, Human
cugaaccacuaauauuuugauu

SEQ ID NO: 1140580 - RNA, 22 nt, Human
auuuucaugacuaccuuaaaua

SEQ ID NO: 1140581 - RNA, 22 nt, Human
uacccagcccaugccuaccuca

SEQ ID NO: 1140582 - RNA, 22 nt, Human
agucagugaaaacuagaauguu

SEQ ID NO: 1140583 - RNA, 19 nt, Human
ugcuagaaauucugugacu

SEQ ID NO: 1140584 - RNA, 22 nt, Human
augcauaauguauguauugacu

SEQ ID NO: 1140585 - RNA, 23 nt, Human
ucugggcugagacuuggaagguc

SEQ ID NO: 1140586 - RNA, 22 nt, Human
uuagacauagaauauugucuag

SEQ ID NO: 1140587 - RNA, 20 nt, Human
gaggccucagccucagcucc

SEQ ID NO: 1140588 - RNA, 22 nt, Human
guacacacuguuugaucauuuc

SEQ ID NO: 1140589 - RNA, 22 nt, Human
ccacauacaaauggggugcugu

SEQ ID NO: 1140590 - RNA, 22 nt, Human
augcuuuauuauuuugcaggga

SEQ ID NO: 1140591 - RNA, 17 nt, Human
cucugggcagccugggg

SEQ ID NO: 1140592 - RNA, 22 nt, Human
uggaccugaagaauaggaagua

SEQ ID NO: 1140593 - RNA, 22 nt, Human
aagucuguuugagugucacacu

SEQ ID NO: 1140594 - RNA, 17 nt, Human
ugaauucaaucugcacu

SEQ ID NO: 1140595 - RNA, 20 nt, Human
gcugggcuuugacugacaca

SEQ ID NO: 1140596 - RNA, 22 nt, Human
aaucaagaaaaugaggauucuu

SEQ ID NO: 1140597 - RNA, 19 nt, Human
gggguggcuggggcuccag

SEQ ID NO: 1140598 - RNA, 22 nt, Human
cccaaggccuucaagccagcuc

SEQ ID NO: 1140599 - RNA, 22 nt, Human
cacuguccaauagauacauaau

SEQ ID NO: 1140600 - RNA, 22 nt, Human
accaagcucucuucccggcucu

SEQ ID NO: 1140601 - RNA, 22 nt, Human
agucccagcuucccccaugcag

SEQ ID NO: 1140602 - RNA, 22 nt, Human
ucuggucaguaauaagaagugg

SEQ ID NO: 1140603 - RNA, 22 nt, Human
accaugaugggaagcucagggc

SEQ ID NO: 1140604 - RNA, 21 nt, Human
ucuggcaggaagacggauggg

SEQ ID NO: 1140605 - RNA, 22 nt, Human
uagaacacuugaccacugcucc

SEQ ID NO: 1140606 - RNA, 22 nt, Human
auuagagguacaaaccuucacu

SEQ ID NO: 1140607 - RNA, 22 nt, Human
aaccucaggcucucuggacaau

SEQ ID NO: 1140608 - RNA, 22 nt, Human
aggccccaaagcagugcaagua

SEQ ID NO: 1140609 - RNA, 22 nt, Human
ccuccagcgcgauccacuccgg

SEQ ID NO: 1140610 - RNA, 22 nt, Human
guccagagauggacgagcagau

SEQ ID NO: 1140611 - RNA, 22 nt, Human
ccuucuucuguguggcccaaga

SEQ ID NO: 1140612 - RNA, 22 nt, Human
auugacuuccauagcuaccugg

SEQ ID NO: 1140613 - RNA, 22 nt, Human
ggcuuuaucaaaugagacccug

SEQ ID NO: 1140614 - RNA, 20 nt, Human
ccagcuuucccugcagcauc

SEQ ID NO: 1140615 - RNA, 22 nt, Human
gcuuuauuuugugagggauuac

SEQ ID NO: 1140616 - RNA, 22 nt, Human
uugggaucucaaauccagcuau

SEQ ID NO: 1140617 - RNA, 22 nt, Human
gaugccuggcacccagcaagga

SEQ ID NO: 1140618 - RNA, 22 nt, Human
cugcagagcagccaguccccca

SEQ ID NO: 1140619 - RNA, 22 nt, Human
ggggcugagucagugggaagag

SEQ ID NO: 1140620 - RNA, 22 nt, Human
acaguguuuuagaaaagcuuga

SEQ ID NO: 1140621 - RNA, 22 nt, Human
auugguggugaggacaugccag

SEQ ID NO: 1140622 - RNA, 22 nt, Human
gccaggcacaguucuaggugcu

SEQ ID NO: 1140623 - RNA, 22 nt, Human
ggagucugcucccagacaugau

SEQ ID NO: 1140624 - RNA, 22 nt, Human
agaaagaggaugcagaucucau

SEQ ID NO: 1140625 - RNA, 20 nt, Human
uccugcagucgcuagcgccc

SEQ ID NO: 1140626 - RNA, 22 nt, Human
cucugggcugccuuuuagcucu

SEQ ID NO: 1140627 - RNA, 22 nt, Human
gcacaggaugauggguugaggg

SEQ ID NO: 1140628 - RNA, 22 nt, Human
aauugcaacagguagacuuuuc

SEQ ID NO: 1140629 - RNA, 22 nt, Human
uuaauacaagcauaugcacaca

SEQ ID NO: 1140630 - RNA, 20 nt, Human
agguuccuuuguggagaauu

SEQ ID NO: 1140631 - RNA, 22 nt, Human
cuucaaaugugauuuuaauaac

SEQ ID NO: 1140632 - RNA, 22 nt, Human
uacaacauguaaagugguuuaa

SEQ ID NO: 1140633 - RNA, 19 nt, Human
ggcggguggacuggagccc

SEQ ID NO: 1140634 - RNA, 21 nt, Human
ggcuaggaugcugggguuucc

SEQ ID NO: 1140635 - RNA, 22 nt, Human
auauauuuacucuccuguugca

SEQ ID NO: 1140636 - RNA, 22 nt, Human
accaggcaaaaccacaggagca

SEQ ID NO: 1140637 - RNA, 17 nt, Human
gggcugacaguggccuc

SEQ ID NO: 1140638 - RNA, 22 nt, Human
cugccugccuuggccuccagga

SEQ ID NO: 1140639 - RNA, 22 nt, Human
cagcuuuauuucacguguuugu

SEQ ID NO: 1140640 - RNA, 22 nt, Human
cccuggcagagggggcaggugc

SEQ ID NO: 1140641 - RNA, 22 nt, Human
agcuuuaucccuugcccaucga

SEQ ID NO: 1140642 - RNA, 22 nt, Human
ccugggcuugguuguugagaac

SEQ ID NO: 1140643 - RNA, 22 nt, Human
cuuaauuucaaacugcuaguga

SEQ ID NO: 1140644 - RNA, 22 nt, Human
aucucccagccacagcauucuu

SEQ ID NO: 1140645 - RNA, 22 nt, Human
cuuaaauuuucaucuacaagaa

SEQ ID NO: 1140646 - RNA, 23 nt, Human
cuuuucauugccuuagcgcagag

SEQ ID NO: 1140647 - RNA, 22 nt, Human
uuucacaucagagguagauuag

SEQ ID NO: 1140648 - RNA, 22 nt, Human
uuaaacauuuauggaggcagca

SEQ ID NO: 1140649 - RNA, 22 nt, Human
aguccagucucacucuuggcag

SEQ ID NO: 1140650 - RNA, 22 nt, Human
agaaaguuuugugcuauauaug

SEQ ID NO: 1140651 - RNA, 22 nt, Human
agggagacacaugaggaaguca

SEQ ID NO: 1140652 - RNA, 22 nt, Human
agccagaguugaaugugagucu

SEQ ID NO: 1140653 - RNA, 22 nt, Human
aggugaguccugggcacaggua

SEQ ID NO: 1140654 - RNA, 22 nt, Human
uuccaaguccagccaggccaaa

SEQ ID NO: 1140655 - RNA, 20 nt, Human
cugcuccacccggcucucag

SEQ ID NO: 1140656 - RNA, 22 nt, Human
ugcuucuggaaacaguggcugu

SEQ ID NO: 1140657 - RNA, 23 nt, Human
acaagauagggauaaaaagauaa

SEQ ID NO: 1140658 - RNA, 22 nt, Human
gcaggcucuucuuucugcccag

SEQ ID NO: 1140659 - RNA, 22 nt, Human
acccacccuacuagcagugucc

SEQ ID NO: 1140660 - RNA, 22 nt, Human
uacauauguaaacauguauaaa

SEQ ID NO: 1140661 - RNA, 22 nt, Human
gaugaagccugacuucucggug

SEQ ID NO: 1140662 - RNA, 22 nt, Human
uaacacauaagcugagaccaug

SEQ ID NO: 1140663 - RNA, 22 nt, Human
ccagcuuucucagaggcuucua

SEQ ID NO: 1140664 - RNA, 18 nt, Human
cucugucauaagugucau

SEQ ID NO: 1140665 - RNA, 22 nt, Human
guccucuguuuccaucugacuu

SEQ ID NO: 1140666 - RNA, 22 nt, Human
uauuaggguuuugaagguuugu

SEQ ID NO: 1140667 - RNA, 21 nt, Human
uuuagggaccaggucauaggc

SEQ ID NO: 1140668 - RNA, 22 nt, Human
ugaaaaaccucaguccgcuuua

SEQ ID NO: 1140669 - RNA, 22 nt, Human
uccaaguugauguuucuuaaau

SEQ ID NO: 1140670 - RNA, 22 nt, Human
guccucugaaguugugcaaugc

SEQ ID NO: 1140671 - RNA, 22 nt, Human
aaauaguuuagcucucauuuca

SEQ ID NO: 1140672 - RNA, 22 nt, Human
cgggcuccgggucuuugcaguc

SEQ ID NO: 1140673 - RNA, 22 nt, Human
cagggcacggagaagucacccc

SEQ ID NO: 1140674 - RNA, 22 nt, Human
cuagaaauauuuuacagucaag

SEQ ID NO: 1140675 - RNA, 22 nt, Human
ugcuagaauuugcagaagcaua

SEQ ID NO: 1140676 - RNA, 22 nt, Human
cgcaggcuuuagaaucugcuac

SEQ ID NO: 1140677 - RNA, 22 nt, Human
gagaaagauuguccuucagggg

SEQ ID NO: 1140678 - RNA, 22 nt, Human
ucuggggauggucuacuuucug

SEQ ID NO: 1140679 - RNA, 22 nt, Human
agccuauuccaggaugagcuca

SEQ ID NO: 1140680 - RNA, 22 nt, Human
cugcaggcccccuuccuggagu

SEQ ID NO: 1140681 - RNA, 22 nt, Human
uaugcacacauguaugcaugug

SEQ ID NO: 1140682 - RNA, 22 nt, Human
caggcagcccugcaccaagugu

SEQ ID NO: 1140683 - RNA, 22 nt, Human
aaagagucaaaggcaugucucu

SEQ ID NO: 1140684 - RNA, 22 nt, Human
acauuucacuguucacagcagg

SEQ ID NO: 1140685 - RNA, 22 nt, Human
gcuggggaccagcugucucuga

SEQ ID NO: 1140686 - RNA, 22 nt, Human
gacacagauaucucugagauua

SEQ ID NO: 1140687 - RNA, 22 nt, Human
acagcuuuugaaaaauuacugg

SEQ ID NO: 1140688 - RNA, 22 nt, Human
ugucacuuuggggagaguuuug

SEQ ID NO: 1140689 - RNA, 22 nt, Human
cccaggacucuucacugcagcc

SEQ ID NO: 1140690 - RNA, 22 nt, Human
uaacacaugucugggaugugaa

SEQ ID NO: 1140691 - RNA, 22 nt, Human
cagaagaggacuggguagcuca

SEQ ID NO: 1140692 - RNA, 22 nt, Human
ugcuucuguauuuugggcuuga

SEQ ID NO: 1140693 - RNA, 22 nt, Human
caggccucuuccaugcagcagc

SEQ ID NO: 1140694 - RNA, 23 nt, Human
cauccaggagcugagucugacug

SEQ ID NO: 1140695 - RNA, 22 nt, Human
aaauuugauaagccauuguuac

SEQ ID NO: 1140696 - RNA, 22 nt, Human
uccaggcauaagccuugagugu

SEQ ID NO: 1140697 - RNA, 22 nt, Human
gccaggcaugggcuucugggcg

SEQ ID NO: 1140698 - RNA, 21 nt, Human
ccuagccucuuacccagcuuu

SEQ ID NO: 1140699 - RNA, 21 nt, Human
caugaagccgguucccuguuu

SEQ ID NO: 1140700 - RNA, 22 nt, Human
ucacuguagugagcagaauaua

SEQ ID NO: 1140701 - RNA, 22 nt, Human
aguccggggucuggacaccugg

SEQ ID NO: 1140702 - RNA, 22 nt, Human
auauuagggucucuaaauucua

SEQ ID NO: 1140703 - RNA, 22 nt, Human
cuuaaaaucuggcaguuagcua

SEQ ID NO: 1140704 - RNA, 22 nt, Human
cagagccucagaauccugugga

SEQ ID NO: 1140705 - RNA, 22 nt, Human
ucuucuuaugugccauuaucuc

SEQ ID NO: 1140706 - RNA, 22 nt, Human
agagaguugaggaagcaacacu

SEQ ID NO: 1140707 - RNA, 22 nt, Human
acacacaauuaguuuuaugcuu

SEQ ID NO: 1140708 - RNA, 22 nt, Human
ucagagagaaauaguuuuugac

SEQ ID NO: 1140709 - RNA, 22 nt, Human
aggaccugacuggcuccugcuu

SEQ ID NO: 1140710 - RNA, 22 nt, Human
cugggcugcggugguagguugu

SEQ ID NO: 1140711 - RNA, 22 nt, Human
acuggcagagacccugauggcc

SEQ ID NO: 1140712 - RNA, 22 nt, Human
uacaaaguagaaauucaguaaa

SEQ ID NO: 1140713 - RNA, 21 nt, Human
ucauuugugaucugauuucca

SEQ ID NO: 1140714 - RNA, 22 nt, Human
uuauuauagauuaugcaagauu

SEQ ID NO: 1140715 - RNA, 22 nt, Human
uacauaauaaggggcauggugu

SEQ ID NO: 1140716 - RNA, 22 nt, Human
gcagcuuucugggacagaaagg

SEQ ID NO: 1140717 - RNA, 22 nt, Human
aagaacuuccuaauauauuuuc

SEQ ID NO: 1140718 - RNA, 22 nt, Human
aaugaucuacucucauuaucuc

SEQ ID NO: 1140719 - RNA, 20 nt, Human
acaauauguagaugaauagc

SEQ ID NO: 1140720 - RNA, 22 nt, Human
ggcaggcaggucuucauggccc

SEQ ID NO: 1140721 - RNA, 22 nt, Human
cagcucuguucauagauggugc

SEQ ID NO: 1140722 - RNA, 22 nt, Human
cugccugcugcccuccagagcc

SEQ ID NO: 1140723 - RNA, 22 nt, Human
uuuauuuggcauccagggagaa

SEQ ID NO: 1140724 - RNA, 22 nt, Human
uuggaaagauuauuauuaugaa

SEQ ID NO: 1140725 - RNA, 22 nt, Human
ggaccugaacauaaaacgaggc

SEQ ID NO: 1140726 - RNA, 22 nt, Human
acacaucuuagacugaaauaug

SEQ ID NO: 1140727 - RNA, 22 nt, Human
auaucauuauguuaugagcaca

SEQ ID NO: 1140728 - RNA, 22 nt, Human
gcuggcaguuuccucaccgagg

SEQ ID NO: 1140729 - RNA, 22 nt, Human
aacacaaagaagcugcaggauc

SEQ ID NO: 1140730 - RNA, 17 nt, Human
uauacacagacagacug

SEQ ID NO: 1140731 - RNA, 22 nt, Human
uuuccuuugcccaauacauguc

SEQ ID NO: 1140732 - RNA, 22 nt, Human
cccaggcagugugugcaugcgu

SEQ ID NO: 1140733 - RNA, 22 nt, Human
gaaaacuaacggaaaaguuagg

SEQ ID NO: 1140734 - RNA, 22 nt, Human
ucuggcaggucaaucauucuuu

SEQ ID NO: 1140735 - RNA, 22 nt, Human
uaguauuuaaucacuuuugucu

SEQ ID NO: 1140736 - RNA, 22 nt, Human
cccagccuuugcuuccugguuc

SEQ ID NO: 1140737 - RNA, 22 nt, Human
cucucuccuuagcugcagacca

SEQ ID NO: 1140738 - RNA, 22 nt, Human
ugaaauaucauuuucaucuccc

SEQ ID NO: 1140739 - RNA, 22 nt, Human
gccugcagggcccuuguggguc

SEQ ID NO: 1140740 - RNA, 22 nt, Human
gagaaagacguaggcugggagg

SEQ ID NO: 1140741 - RNA, 22 nt, Human
ccagauagaaaagaaggcagga

SEQ ID NO: 1140742 - RNA, 22 nt, Human
cugcagggagaggggacagccu

SEQ ID NO: 1140743 - RNA, 22 nt, Human
ccuggcagcagcacaugccuuc

SEQ ID NO: 1140744 - RNA, 20 nt, Human
ucccucccuccagcucuggg

SEQ ID NO: 1140745 - RNA, 20 nt, Human
cuaggaacuauggucuggcu

SEQ ID NO: 1140746 - RNA, 22 nt, Human
acagguggccccgagggagugg

SEQ ID NO: 1140747 - RNA, 22 nt, Human
aacaguaacgagauguccuaac

SEQ ID NO: 1140748 - RNA, 22 nt, Human
uauuuguauguguguacauaua

SEQ ID NO: 1140749 - RNA, 22 nt, Human
gcuggcaggauagaagucuaau

SEQ ID NO: 1140750 - RNA, 22 nt, Human
cauccaggcaccacaaccagcu

SEQ ID NO: 1140751 - RNA, 19 nt, Human
acuggcagggcugcggugg

SEQ ID NO: 1140752 - RNA, 22 nt, Human
aagcgccaugguuccugcgcag

SEQ ID NO: 1140753 - RNA, 22 nt, Human
cccaggcauuuucaacuuuagu

SEQ ID NO: 1140754 - RNA, 22 nt, Human
uuuucauugagcaccugaguaa

SEQ ID NO: 1140755 - RNA, 22 nt, Human
aaagcagggaugaggcuagagg

SEQ ID NO: 1140756 - RNA, 22 nt, Human
auucugucuaagcuggcuacgu

SEQ ID NO: 1140757 - RNA, 22 nt, Human
agcuuugggcagaagaggauuc

SEQ ID NO: 1140758 - RNA, 22 nt, Human
guuuuauaugucucugcugaca

SEQ ID NO: 1140759 - RNA, 22 nt, Human
uuauuucauguaaaauuuaugu

SEQ ID NO: 1140760 - RNA, 22 nt, Human
acuggcagugucguuuacauga

SEQ ID NO: 1140761 - RNA, 22 nt, Human
agguaugagauaaaucaaugaa

SEQ ID NO: 1140762 - RNA, 22 nt, Human
cuguggcuucugcuugggccuc

SEQ ID NO: 1140763 - RNA, 22 nt, Human
ugcagggcuaagucagagccug

SEQ ID NO: 1140764 - RNA, 22 nt, Human
uacacaucccagacucccagga

SEQ ID NO: 1140765 - RNA, 22 nt, Human
uuucauaaacaguagaagacua

SEQ ID NO: 1140766 - RNA, 22 nt, Human
augggcugugggacccuggacc

SEQ ID NO: 1140767 - RNA, 17 nt, Human
aguguuuccuuaucauu

SEQ ID NO: 1140768 - RNA, 22 nt, Human
gguggcagaggugcaucagccc

SEQ ID NO: 1140769 - RNA, 22 nt, Human
uccaggcuaauuuugcauuguu

SEQ ID NO: 1140770 - RNA, 22 nt, Human
cuuaaauucuuaaugcccucau

SEQ ID NO: 1140771 - RNA, 22 nt, Human
agaaaauuagauuuuacugugu

SEQ ID NO: 1140772 - RNA, 22 nt, Human
agaauccuguuuuacuucauca

SEQ ID NO: 1140773 - RNA, 22 nt, Human
cagcucugcugggaggaugcag

SEQ ID NO: 1140774 - RNA, 22 nt, Human
ugcccccugguggccagagccg

SEQ ID NO: 1140775 - RNA, 22 nt, Human
ggccucucugagagcagacguu

SEQ ID NO: 1140776 - RNA, 22 nt, Human
agcuuuauucaugauuucaggg

SEQ ID NO: 1140777 - RNA, 22 nt, Human
gcauguuuugcaacaagugacc

SEQ ID NO: 1140778 - RNA, 22 nt, Human
uuuaauuuguauuucuagaggg

SEQ ID NO: 1140779 - RNA, 22 nt, Human
ccagagagagaggucaauggca

SEQ ID NO: 1140780 - RNA, 21 nt, Human
auaaaguuuuacaggaaugca

SEQ ID NO: 1140781 - RNA, 22 nt, Human
ccagcuuuuggggugacaauuu

SEQ ID NO: 1140782 - RNA, 22 nt, Human
ugggcuccuugggagcaaguga

SEQ ID NO: 1140783 - RNA, 22 nt, Human
ucugggcuggcuuuaugcugac

SEQ ID NO: 1140784 - RNA, 22 nt, Human
ccuggggaaaagcaggcauuua

SEQ ID NO: 1140785 - RNA, 22 nt, Human
uaauuuuaugacaguguauuuu

SEQ ID NO: 1140786 - RNA, 22 nt, Human
aguccagugucaaggugccauu

SEQ ID NO: 1140787 - RNA, 23 nt, Human
acaggcucuuaaucagugcuccu

SEQ ID NO: 1140788 - RNA, 22 nt, Human
cagagaaagggugaauuccuuc

SEQ ID NO: 1140789 - RNA, 20 nt, Human
ggcaggcuuuauauggaggg

SEQ ID NO: 1140790 - RNA, 22 nt, Human
acccagcuaacccuacccugga

SEQ ID NO: 1140791 - RNA, 22 nt, Human
cagcccaggccgacaguuccuc

SEQ ID NO: 1140792 - RNA, 22 nt, Human
ccaggccucccuuuuccagcca

SEQ ID NO: 1140793 - RNA, 22 nt, Human
uuuaauuuucugggcccagcag

SEQ ID NO: 1140794 - RNA, 22 nt, Human
uuaucauugucgcagucuaauu

SEQ ID NO: 1140795 - RNA, 22 nt, Human
augucaaaucaguuuuaucaga

SEQ ID NO: 1140796 - RNA, 22 nt, Human
cauaauuugugguaguggggga

SEQ ID NO: 1140797 - RNA, 22 nt, Human
ucuuuuucugcacacguguccc

SEQ ID NO: 1140798 - RNA, 22 nt, Human
agaggccggccgagcccauggg

SEQ ID NO: 1140799 - RNA, 22 nt, Human
uaauacuguauacugcaaauuu

SEQ ID NO: 1140800 - RNA, 22 nt, Human
ucauacaauucaaucucugauu

SEQ ID NO: 1140801 - RNA, 22 nt, Human
uggcagagcccagacuccaguc

SEQ ID NO: 1140802 - RNA, 22 nt, Human
gagaggcugaaaucacaggagc

SEQ ID NO: 1140803 - RNA, 22 nt, Human
acauuuuuauucaucaaagcag

SEQ ID NO: 1140804 - RNA, 22 nt, Human
cccaggaguaagugacauuguu

SEQ ID NO: 1140805 - RNA, 22 nt, Human
uagcuuuaagacauggugaaug

SEQ ID NO: 1140806 - RNA, 23 nt, Human
guccucuggagagaaaggcagua

SEQ ID NO: 1140807 - RNA, 22 nt, Human
uccugagcugccgcaucagcag

SEQ ID NO: 1140808 - RNA, 22 nt, Human
auuugcuuuuacuauguuaaaa

SEQ ID NO: 1140809 - RNA, 22 nt, Human
uccaggcaaagggacuagcagg

SEQ ID NO: 1140810 - RNA, 22 nt, Human
acaugauuuuuaaagagauaau

SEQ ID NO: 1140811 - RNA, 22 nt, Human
aacaaaagccgaaguagguguc

SEQ ID NO: 1140812 - RNA, 22 nt, Human
ugcuuuauuuauaaaauagcaa

SEQ ID NO: 1140813 - RNA, 22 nt, Human
ggcaggcuagcacugauguccu

SEQ ID NO: 1140814 - RNA, 22 nt, Human
cuagggacugggaccuuaguua

SEQ ID NO: 1140815 - RNA, 22 nt, Human
augaaaauguacauguguauaa

SEQ ID NO: 1140816 - RNA, 22 nt, Human
uaugaacugugagugugauggg

SEQ ID NO: 1140817 - RNA, 22 nt, Human
agcaggcuaggaaccucacugc

SEQ ID NO: 1140818 - RNA, 22 nt, Human
ugaagccauaggacagaggaua

SEQ ID NO: 1140819 - RNA, 22 nt, Human
agcuuuaccugccuuggggcac

SEQ ID NO: 1140820 - RNA, 23 nt, Human
agggcuccuuguugauuagcauu

SEQ ID NO: 1140821 - RNA, 22 nt, Human
gcaggcucacucuguuuggcuc

SEQ ID NO: 1140822 - RNA, 22 nt, Human
aaugaagcaagcugcuguguuu

SEQ ID NO: 1140823 - RNA, 23 nt, Human
ccaggccucucagagggugugcc

SEQ ID NO: 1140824 - RNA, 21 nt, Human
gcccccuggacuccucaucca

SEQ ID NO: 1140825 - RNA, 22 nt, Human
ugagggacucccggcccugcca

SEQ ID NO: 1140826 - RNA, 22 nt, Human
caaaugcagauucaggaguucu

SEQ ID NO: 1140827 - RNA, 22 nt, Human
agggcucugagcuggaccaccu

SEQ ID NO: 1140828 - RNA, 22 nt, Human
gccuggcaauggccucaggaag

SEQ ID NO: 1140829 - RNA, 22 nt, Human
ucauaaaugcagugucauaaau

SEQ ID NO: 1140830 - RNA, 20 nt, Human
aucugcuugccuguccucgg

SEQ ID NO: 1140831 - RNA, 21 nt, Human
agagucugagugugcaagggc

SEQ ID NO: 1140832 - RNA, 22 nt, Human
uacuuacagaaggaagcaauug

SEQ ID NO: 1140833 - RNA, 21 nt, Human
aaaugaaugugguagugcaag

SEQ ID NO: 1140834 - RNA, 22 nt, Human
auaaaguuuaaaagucaauagu

SEQ ID NO: 1140835 - RNA, 19 nt, Human
ccagagacauuggcaucuu

SEQ ID NO: 1140836 - RNA, 22 nt, Human
uuggaaauugcaagugauuugc

SEQ ID NO: 1140837 - RNA, 22 nt, Human
aguguggcaggaaugacuagaa

SEQ ID NO: 1140838 - RNA, 22 nt, Human
gccccaccuugagagcagaaac

SEQ ID NO: 1140839 - RNA, 22 nt, Human
acccacacaucucuaauucagu

SEQ ID NO: 1140840 - RNA, 22 nt, Human
caauuucuuguuaauucucagg

SEQ ID NO: 1140841 - RNA, 22 nt, Human
cuggccucauagccaagcugug

SEQ ID NO: 1140842 - RNA, 22 nt, Human
caauuucucgaacucuaaucca

SEQ ID NO: 1140843 - RNA, 22 nt, Human
uccaggcuagguuuacaggaca

SEQ ID NO: 1140844 - RNA, 22 nt, Human
acagacuggccugucucgcacc

SEQ ID NO: 1140845 - RNA, 22 nt, Human
ccaggcagagggaauagcaagu

SEQ ID NO: 1140846 - RNA, 22 nt, Human
gaauauuuucaguacagauggu

SEQ ID NO: 1140847 - RNA, 22 nt, Human
guccuggcugguucuguggggc

SEQ ID NO: 1140848 - RNA, 22 nt, Human
gccaagcucaccuucugaugga

SEQ ID NO: 1140849 - RNA, 20 nt, Human
uaguauuugcauaaggauag

SEQ ID NO: 1140850 - RNA, 22 nt, Human
uuaugacaggaaaaucacagaa

SEQ ID NO: 1140851 - RNA, 22 nt, Human
agggcuccaaggaaguguagcu

SEQ ID NO: 1140852 - RNA, 22 nt, Human
ccaucuccaaauaccaucacau

SEQ ID NO: 1140853 - RNA, 22 nt, Human
uagaaacauguucuguucuguu

SEQ ID NO: 1140854 - RNA, 22 nt, Human
uuccuugaaugagucauggaaa

SEQ ID NO: 1140855 - RNA, 23 nt, Human
aaauuauugcucuucaauugccu

SEQ ID NO: 1140856 - RNA, 22 nt, Human
uccauucuaugcuuacauuuau

SEQ ID NO: 1140857 - RNA, 22 nt, Human
ucuggcaggaccaugaagcgua

SEQ ID NO: 1140858 - RNA, 22 nt, Human
uuuaaauuuagaagaaacacug

SEQ ID NO: 1140859 - RNA, 22 nt, Human
gccugcagccucagagaauuuu

SEQ ID NO: 1140860 - RNA, 22 nt, Human
cauuuauucauuugcuagggcu

SEQ ID NO: 1140861 - RNA, 22 nt, Human
uucucuuuuagaggcuccauga

SEQ ID NO: 1140862 - RNA, 17 nt, Human
ucugggcuucagugguc

SEQ ID NO: 1140863 - RNA, 18 nt, Human
gcagcuuuugauucaccc

SEQ ID NO: 1140864 - RNA, 22 nt, Human
augacaugaccugguagagaca

SEQ ID NO: 1140865 - RNA, 19 nt, Human
cugcagggaugugcagagu

SEQ ID NO: 1140866 - RNA, 21 nt, Human
gccugcaguuuugaagcccuu

SEQ ID NO: 1140867 - RNA, 22 nt, Human
agguauaagaagauuauuuaua

SEQ ID NO: 1140868 - RNA, 22 nt, Human
uccugcagccuugggcuggagc

SEQ ID NO: 1140869 - RNA, 22 nt, Human
uuaacacauauuuaucaauugc

SEQ ID NO: 1140870 - RNA, 22 nt, Human
auacaaauuuauagaugcauuu

SEQ ID NO: 1140871 - RNA, 22 nt, Human
agauuugcggcuuuacuuugca

SEQ ID NO: 1140872 - RNA, 22 nt, Human
ucugcagaaggaaucagcugag

SEQ ID NO: 1140873 - RNA, 22 nt, Human
ccuggcagucaggggaguccuu

SEQ ID NO: 1140874 - RNA, 22 nt, Human
acuggggagugguuuugggaag

SEQ ID NO: 1140875 - RNA, 21 nt, Human
cagugagguccccagccuagg

SEQ ID NO: 1140876 - RNA, 22 nt, Human
aucuacauaaaacgaauacaua

SEQ ID NO: 1140877 - RNA, 22 nt, Human
gaggggcuggguagggcaaccc

SEQ ID NO: 1140878 - RNA, 22 nt, Human
ggccucagagaaggcugugcgg

SEQ ID NO: 1140879 - RNA, 22 nt, Human
ggcagaccucuccagccccaca

SEQ ID NO: 1140880 - RNA, 22 nt, Human
uuucaaaugcaugucuuuccuc

SEQ ID NO: 1140881 - RNA, 22 nt, Human
ugucuuuauauauuuggaaaau

SEQ ID NO: 1140882 - RNA, 22 nt, Human
agggacuauuuacccaucucac

SEQ ID NO: 1140883 - RNA, 22 nt, Human
gaggcuccccaugaggccccag

SEQ ID NO: 1140884 - RNA, 22 nt, Human
auguagaauggugauuggcagg

SEQ ID NO: 1140885 - RNA, 22 nt, Human
ugaaguuguuaagguugccauu

SEQ ID NO: 1140886 - RNA, 22 nt, Human
cucugcagauucaucccuucac

SEQ ID NO: 1140887 - RNA, 22 nt, Human
cauuuguagcuauuuacuguau

SEQ ID NO: 1140888 - RNA, 22 nt, Human
gccaggcagcagcgaggauggu

SEQ ID NO: 1140889 - RNA, 22 nt, Human
ugggaccugaagcagguuggca

SEQ ID NO: 1140890 - RNA, 22 nt, Human
cccaggcagccugcagggaagg

SEQ ID NO: 1140891 - RNA, 22 nt, Human
ccagagaggcaaaacuccuucc

SEQ ID NO: 1140892 - RNA, 22 nt, Human
caucaaauaggaauauuuggca

SEQ ID NO: 1140893 - RNA, 20 nt, Human
auuuggcaugaaguauugau

SEQ ID NO: 1140894 - RNA, 22 nt, Human
gggaccugccaaggccacccag

SEQ ID NO: 1140895 - RNA, 22 nt, Human
ugcagggagggcccagcaaucu

SEQ ID NO: 1140896 - RNA, 21 nt, Human
acacagaggcaucaucacuuu

SEQ ID NO: 1140897 - RNA, 22 nt, Human
agguauuauuagcaucucuauu

SEQ ID NO: 1140898 - RNA, 22 nt, Human
gugcauuugugcaugcacaugu

SEQ ID NO: 1140899 - RNA, 22 nt, Human
guguaugaacgaaagaauggau

SEQ ID NO: 1140900 - RNA, 22 nt, Human
aaauccuaaggagaauaugauu

SEQ ID NO: 1140901 - RNA, 22 nt, Human
auaugugaaugauaucacuuug

SEQ ID NO: 1140902 - RNA, 22 nt, Human
augggcugggaucugaguguca

SEQ ID NO: 1140903 - RNA, 22 nt, Human
gaaagauauuuauuggcaacag

SEQ ID NO: 1140904 - RNA, 22 nt, Human
agcaggcuuacuuucugauuag

SEQ ID NO: 1140905 - RNA, 19 nt, Human
uucuaccuuacuguaggcu

SEQ ID NO: 1140906 - RNA, 22 nt, Human
uccaggcaugucccaagccgga

SEQ ID NO: 1140907 - RNA, 22 nt, Human
cucugagauaguuucuaucaau

SEQ ID NO: 1140908 - RNA, 22 nt, Human
uuucacauaucaacucuauccu

SEQ ID NO: 1140909 - RNA, 22 nt, Human
caaugaaaauuuaaguugcagc

SEQ ID NO: 1140910 - RNA, 22 nt, Human
uggaccugagccuggcccugcc

SEQ ID NO: 1140911 - RNA, 22 nt, Human
caagcucugggauagcagagag

SEQ ID NO: 1140912 - RNA, 22 nt, Human
gcauagucaguaggauucucaa

SEQ ID NO: 1140913 - RNA, 22 nt, Human
uuuagggaaauugaggguuaag

SEQ ID NO: 1140914 - RNA, 22 nt, Human
uguuuuucaaauauugcucugu

SEQ ID NO: 1140915 - RNA, 22 nt, Human
uguacauagaucuugaaaauua

SEQ ID NO: 1140916 - RNA, 22 nt, Human
gucaggacucugacccgucccg

SEQ ID NO: 1140917 - RNA, 22 nt, Human
gcccaggcuggagugcaguagc

SEQ ID NO: 1140918 - RNA, 22 nt, Human
aagagcauauuaauaguggaga

SEQ ID NO: 1140919 - RNA, 22 nt, Human
agagccaggugcugcuguuuga

SEQ ID NO: 1140920 - RNA, 22 nt, Human
uccaagcucucuaugccaugau

SEQ ID NO: 1140921 - RNA, 22 nt, Human
uacauugaauuuuuuagcaugu

SEQ ID NO: 1140922 - RNA, 22 nt, Human
ccagagacgucggucagggcgc

SEQ ID NO: 1140923 - RNA, 22 nt, Human
gugggcuuuugacagugccugg

SEQ ID NO: 1140924 - RNA, 22 nt, Human
uuuaauuugaaaugaguaaccc

SEQ ID NO: 1140925 - RNA, 22 nt, Human
gcacacagcuagauuaccauuc

SEQ ID NO: 1140926 - RNA, 22 nt, Human
gccugcagaacugugaggcaau

SEQ ID NO: 1140927 - RNA, 22 nt, Human
cuggccucuguguucaccauag

SEQ ID NO: 1140928 - RNA, 22 nt, Human
cagcuugugcaaagguccuggg

SEQ ID NO: 1140929 - RNA, 22 nt, Human
cacacacuggagcaaggagaug

SEQ ID NO: 1140930 - RNA, 22 nt, Human
ucagcuuugcaaguuagaaaau

SEQ ID NO: 1140931 - RNA, 22 nt, Human
acagguggaggcuuuaggaggu

SEQ ID NO: 1140932 - RNA, 17 nt, Human
gccuucucugcccucac

SEQ ID NO: 1140933 - RNA, 22 nt, Human
cauguuaaaauauacauucuga

SEQ ID NO: 1140934 - RNA, 19 nt, Human
ccacacagugugcaauuua

SEQ ID NO: 1140935 - RNA, 22 nt, Human
acccagcuggaugcauggaggc

SEQ ID NO: 1140936 - RNA, 22 nt, Human
cuauuagguaugugguugcuau

SEQ ID NO: 1140937 - RNA, 20 nt, Human
uccugcaguuccuaggaggg

SEQ ID NO: 1140938 - RNA, 22 nt, Human
uuagcauuucaguacacauguu

SEQ ID NO: 1140939 - RNA, 22 nt, Human
uccccacacuuucacuccuggc

SEQ ID NO: 1140940 - RNA, 22 nt, Human
auauuauucuagcucuugugug

SEQ ID NO: 1140941 - RNA, 22 nt, Human
uccccaccuaagauacccaucu

SEQ ID NO: 1140942 - RNA, 22 nt, Human
agcaggugggcaugaaagcuga

SEQ ID NO: 1140943 - RNA, 22 nt, Human
ugggcagggagcuggaaccaca

SEQ ID NO: 1140944 - RNA, 22 nt, Human
uagaauaugauuaauuuucuua

SEQ ID NO: 1140945 - RNA, 22 nt, Human
ugucuuuagagucacaaaacca

SEQ ID NO: 1140946 - RNA, 18 nt, Human
uuucacagauucaugacu

SEQ ID NO: 1140947 - RNA, 22 nt, Human
gccagggaaacugcagaccagc

SEQ ID NO: 1140948 - RNA, 22 nt, Human
gccaggcacugcucuaagcccu

SEQ ID NO: 1140949 - RNA, 22 nt, Human
cacccagcuuuugcauccuccg

SEQ ID NO: 1140950 - RNA, 22 nt, Human
auaucauucugauguauaucuu

SEQ ID NO: 1140951 - RNA, 22 nt, Human
cccagcccaucucaaaggucua

SEQ ID NO: 1140952 - RNA, 22 nt, Human
ugcaggcuggcagauaucucau

SEQ ID NO: 1140953 - RNA, 23 nt, Human
uccuuccuuugagaggcuccauc

SEQ ID NO: 1140954 - RNA, 22 nt, Human
gcagagaccccgcagugaggcc

SEQ ID NO: 1140955 - RNA, 22 nt, Human
agcucugacugaagagaugcaa

SEQ ID NO: 1140956 - RNA, 19 nt, Human
agcaggcuaggcugccucu

SEQ ID NO: 1140957 - RNA, 22 nt, Human
gcuggcaggauaacuucuaagc

SEQ ID NO: 1140958 - RNA, 22 nt, Human
guggcagucgcugacagauaca

SEQ ID NO: 1140959 - RNA, 22 nt, Human
gagccuccuccuggugugccga

SEQ ID NO: 1140960 - RNA, 22 nt, Human
acuggcagaacuggugauuguc

SEQ ID NO: 1140961 - RNA, 22 nt, Human
acaagauagcuuagaagauuca

SEQ ID NO: 1140962 - RNA, 22 nt, Human
uuuguaaaggccugaauuucag

SEQ ID NO: 1140963 - RNA, 22 nt, Human
guuagggagucagguggcucuu

SEQ ID NO: 1140964 - RNA, 22 nt, Human
cauucacaaagcugauugaugg

SEQ ID NO: 1140965 - RNA, 22 nt, Human
accauugccuagaaaaauuccu

SEQ ID NO: 1140966 - RNA, 22 nt, Human
uagggcucagaguccaguuucu

SEQ ID NO: 1140967 - RNA, 22 nt, Human
aggaaagauggaaggaggauaa

SEQ ID NO: 1140968 - RNA, 22 nt, Human
aagagagagugcgcucacagaa

SEQ ID NO: 1140969 - RNA, 22 nt, Human
gcaggcucccuugcagagcagg

SEQ ID NO: 1140970 - RNA, 22 nt, Human
gcaaggaccuuugagcgugcca

SEQ ID NO: 1140971 - RNA, 22 nt, Human
cccuuccuugugacuggugggg

SEQ ID NO: 1140972 - RNA, 22 nt, Human
gcuaggaggaagaaugugaauu

SEQ ID NO: 1140973 - RNA, 22 nt, Human
aacacagcuaauuucugucaau

SEQ ID NO: 1140974 - RNA, 22 nt, Human
gccugcagggccugggccuacc

SEQ ID NO: 1140975 - RNA, 22 nt, Human
uuauuuaaaagugguaagauuc

SEQ ID NO: 1140976 - RNA, 22 nt, Human
auuuauuaagcaucugcuaugu

SEQ ID NO: 1140977 - RNA, 22 nt, Human
ugucuuuagaaagaagcagaca

SEQ ID NO: 1140978 - RNA, 22 nt, Human
gccugcagccagggaguucucu

SEQ ID NO: 1140979 - RNA, 22 nt, Human
gacccauauaggacccuccaaa

SEQ ID NO: 1140980 - RNA, 22 nt, Human
uuuuccuguccaggcaauuauu

SEQ ID NO: 1140981 - RNA, 22 nt, Human
cccagcuugcccaggacugagg

SEQ ID NO: 1140982 - RNA, 19 nt, Human
cagguggcgcucuacaggg

SEQ ID NO: 1140983 - RNA, 20 nt, Human
gcucugaccauaucaagaca

SEQ ID NO: 1140984 - RNA, 20 nt, Human
cuggggacagcaauggcugu

SEQ ID NO: 1140985 - RNA, 22 nt, Human
aggaggcugggcacaguggccu

SEQ ID NO: 1140986 - RNA, 22 nt, Human
auguuugacugaguuuggcaga

SEQ ID NO: 1140987 - RNA, 22 nt, Human
gucacaggccuggaugaggggc

SEQ ID NO: 1140988 - RNA, 22 nt, Human
auaugaagaaucuaggauaggc

SEQ ID NO: 1140989 - RNA, 22 nt, Human
auuauuagauucuuaauuguaa

SEQ ID NO: 1140990 - RNA, 22 nt, Human
ccugggcucugaggagggaguc

SEQ ID NO: 1140991 - RNA, 21 nt, Human
acagagcauaaugguguggca

SEQ ID NO: 1140992 - RNA, 22 nt, Human
aucacauugccagugauuaccc

SEQ ID NO: 1140993 - RNA, 22 nt, Human
cagcuuguuuuauuuggggacc

SEQ ID NO: 1140994 - RNA, 20 nt, Human
ccugggcucaaagcauccuc

SEQ ID NO: 1140995 - RNA, 22 nt, Human
aggaccuggaucacagagaucu

SEQ ID NO: 1140996 - RNA, 22 nt, Human
guccaagagucaagaagggggc

SEQ ID NO: 1140997 - RNA, 16 nt, Human
gcagggguggguggag

SEQ ID NO: 1140998 - RNA, 22 nt, Human
uguuagaaauuauuaguaauau

SEQ ID NO: 1140999 - RNA, 22 nt, Human
gaaugaauucagcacauggaau

SEQ ID NO: 1141000 - RNA, 22 nt, Human
ccucccuucaguagagcccaau

SEQ ID NO: 1141001 - RNA, 22 nt, Human
ccaggcaggcgauggugcagug

SEQ ID NO: 1141002 - RNA, 22 nt, Human
cagugagggcauucagugcugg

SEQ ID NO: 1141003 - RNA, 22 nt, Human
cccugcaggggaccugcagccu

SEQ ID NO: 1141004 - RNA, 22 nt, Human
auauucuuccaaaacaucauuu

SEQ ID NO: 1141005 - RNA, 20 nt, Human
aaaagagugcuucaacugcu

SEQ ID NO: 1141006 - RNA, 22 nt, Human
uccuggcaaagauguugguguu

SEQ ID NO: 1141007 - RNA, 22 nt, Human
ccuggcagcuaagugcuuugag

SEQ ID NO: 1141008 - RNA, 21 nt, Human
uuuagggaggauauuuaacuu

SEQ ID NO: 1141009 - RNA, 22 nt, Human
agggcuccugaggcccuucugg

SEQ ID NO: 1141010 - RNA, 22 nt, Human
ugggcugcuucuauuggugguc

SEQ ID NO: 1141011 - RNA, 22 nt, Human
auuccacacaguaauacucaau

SEQ ID NO: 1141012 - RNA, 22 nt, Human
ucacuguauuugcugaugcaua

SEQ ID NO: 1141013 - RNA, 22 nt, Human
uccugaggcacaauccuagaau

SEQ ID NO: 1141014 - RNA, 22 nt, Human
aaauuauuacaagcuaguuggc

SEQ ID NO: 1141015 - RNA, 22 nt, Human
uuccagcuaacucacaucccuu

SEQ ID NO: 1141016 - RNA, 21 nt, Human
ugcaggcuguuuaagaggcaa

SEQ ID NO: 1141017 - RNA, 22 nt, Human
ugggcuuaggucggaggcggcc

SEQ ID NO: 1141018 - RNA, 22 nt, Human
ccuggcagcuccuccccggcgg

SEQ ID NO: 1141019 - RNA, 22 nt, Human
ucagcuuucuauguugcuaaac

SEQ ID NO: 1141020 - RNA, 22 nt, Human
cagggcuccccagagagccucu

SEQ ID NO: 1141021 - RNA, 20 nt, Human
cugcagggugagugggcgau

SEQ ID NO: 1141022 - RNA, 22 nt, Human
agguggcucugacagcucuggu

SEQ ID NO: 1141023 - RNA, 22 nt, Human
ucaaagagcuauucaguugugg

SEQ ID NO: 1141024 - RNA, 22 nt, Human
gccuggcauauaguaguugugc

SEQ ID NO: 1141025 - RNA, 22 nt, Human
cagcccaggucucucuuccagu

SEQ ID NO: 1141026 - RNA, 19 nt, Human
acauuuagaauguacuugc

SEQ ID NO: 1141027 - RNA, 22 nt, Human
uguaugaaucucauuuguuuaa

SEQ ID NO: 1141028 - RNA, 22 nt, Human
gagggaccccaggcuggcccuu

SEQ ID NO: 1141029 - RNA, 23 nt, Human
uauuagggccaggacuggcaaau

SEQ ID NO: 1141030 - RNA, 22 nt, Human
uuuaugaacuacagauauaacu

SEQ ID NO: 1141031 - RNA, 22 nt, Human
guccucugggcagcugccccac

SEQ ID NO: 1141032 - RNA, 22 nt, Human
cauuguuauagcauuacacacc

SEQ ID NO: 1141033 - RNA, 22 nt, Human
ugcaggcuuuagccccauggcu

SEQ ID NO: 1141034 - RNA, 19 nt, Human
gacuccaacuuuaagcaug

SEQ ID NO: 1141035 - RNA, 22 nt, Human
guuuuauaggcuguugcuauau

SEQ ID NO: 1141036 - RNA, 22 nt, Human
guguaugauuucaaauggcuag

SEQ ID NO: 1141037 - RNA, 22 nt, Human
cuccagugagcgcggggcaugg

SEQ ID NO: 1141038 - RNA, 22 nt, Human
cuccuggcacucaguguggaag

SEQ ID NO: 1141039 - RNA, 22 nt, Human
gacagccaucagcacacgcugc

SEQ ID NO: 1141040 - RNA, 22 nt, Human
gcaggcucaaaagcugguagga

SEQ ID NO: 1141041 - RNA, 22 nt, Human
ggaaucagaauuaggauuugaa

SEQ ID NO: 1141042 - RNA, 22 nt, Human
gggacaauggaggccucucucc

SEQ ID NO: 1141043 - RNA, 22 nt, Human
uuuucucuuguuaauguacuga

SEQ ID NO: 1141044 - RNA, 22 nt, Human
aaugaagccacugaagacaauc

SEQ ID NO: 1141045 - RNA, 22 nt, Human
uuuguacauccuaauucugagu

SEQ ID NO: 1141046 - RNA, 22 nt, Human
uuccaagugggggaagcugagu

SEQ ID NO: 1141047 - RNA, 22 nt, Human
cuggauuuaauuaacuguugcu

SEQ ID NO: 1141048 - RNA, 22 nt, Human
ccaggcucacagcaucccagga

SEQ ID NO: 1141049 - RNA, 22 nt, Human
aaaugcuagggagaaacucucc

SEQ ID NO: 1141050 - RNA, 22 nt, Human
ugcaggcucugguuuauagugc

SEQ ID NO: 1141051 - RNA, 22 nt, Human
uguaugaaugggaaaaggaaac

SEQ ID NO: 1141052 - RNA, 22 nt, Human
aaaguguggucguucauuuugu

SEQ ID NO: 1141053 - RNA, 19 nt, Human
uccugcagaccagaccugu

SEQ ID NO: 1141054 - RNA, 22 nt, Human
ucagcuuuuuggauugcccaag

SEQ ID NO: 1141055 - RNA, 22 nt, Human
ucuguggaaauuuccugaggca

SEQ ID NO: 1141056 - RNA, 22 nt, Human
gggucaggcucagcagggcagc

SEQ ID NO: 1141057 - RNA, 22 nt, Human
ucuggcagaucuucccacguuu

SEQ ID NO: 1141058 - RNA, 22 nt, Human
uaucaauacauguuaucagugu

SEQ ID NO: 1141059 - RNA, 22 nt, Human
ugugaaauauuuauauacucaa

SEQ ID NO: 1141060 - RNA, 19 nt, Human
gcagagugggguggagggu

SEQ ID NO: 1141061 - RNA, 22 nt, Human
cccagcuucugagggggccuug

SEQ ID NO: 1141062 - RNA, 22 nt, Human
ccagagaggccuuggcaagaca

SEQ ID NO: 1141063 - RNA, 22 nt, Human
ggaccugcucucccaguucucu

SEQ ID NO: 1141064 - RNA, 22 nt, Human
uccuuucccuuuccauccuggc

SEQ ID NO: 1141065 - RNA, 22 nt, Human
ucuggcagguucccauguuaug

SEQ ID NO: 1141066 - RNA, 22 nt, Human
acuaaagaagccaaaguuuucu

SEQ ID NO: 1141067 - RNA, 22 nt, Human
cagggacccgcacagguagcau

SEQ ID NO: 1141068 - RNA, 22 nt, Human
ccccacccaccuaagagaaacu

SEQ ID NO: 1141069 - RNA, 22 nt, Human
aaacauuguaauuuuagcaugg

SEQ ID NO: 1141070 - RNA, 22 nt, Human
guugggaaggugaacaugaugc

SEQ ID NO: 1141071 - RNA, 22 nt, Human
acagcuuugggcaaugcuauga

SEQ ID NO: 1141072 - RNA, 22 nt, Human
ucgggcucgcucuccuagcgga

SEQ ID NO: 1141073 - RNA, 22 nt, Human
ucuggcagcaagauaacaaugg

SEQ ID NO: 1141074 - RNA, 22 nt, Human
cuggcaugaaauggcaucucau

SEQ ID NO: 1141075 - RNA, 22 nt, Human
augcuacagaguuugaauaugu

SEQ ID NO: 1141076 - RNA, 22 nt, Human
uccuucccaggugucgccgccu

SEQ ID NO: 1141077 - RNA, 22 nt, Human
gacugccagaaugugaggccug

SEQ ID NO: 1141078 - RNA, 22 nt, Human
uuucacauaugguuguugauug

SEQ ID NO: 1141079 - RNA, 22 nt, Human
uagauauguguuuauuaugcug

SEQ ID NO: 1141080 - RNA, 22 nt, Human
ugggcuuccuggagccugugcu

SEQ ID NO: 1141081 - RNA, 22 nt, Human
aauguauggauucaugucugug

SEQ ID NO: 1141082 - RNA, 22 nt, Human
ugaaagauugugauucaauaug

SEQ ID NO: 1141083 - RNA, 22 nt, Human
uauuccuauuucuaaacauaug

SEQ ID NO: 1141084 - RNA, 22 nt, Human
agcuuuaugggagcuuagauaa

SEQ ID NO: 1141085 - RNA, 22 nt, Human
aaacaucaauugcaucucccaa

SEQ ID NO: 1141086 - RNA, 22 nt, Human
cgucacuucuuagucuauuuuc

SEQ ID NO: 1141087 - RNA, 22 nt, Human
uuguacaaaggauuuggaagag

SEQ ID NO: 1141088 - RNA, 22 nt, Human
ugaguacucggagugcuuugga

SEQ ID NO: 1141089 - RNA, 22 nt, Human
uucauauaaauggaaucagaau

SEQ ID NO: 1141090 - RNA, 22 nt, Human
ucccaggcuggcaggcagcagu

SEQ ID NO: 1141091 - RNA, 22 nt, Human
gcagcuuuagaaacaagggcug

SEQ ID NO: 1141092 - RNA, 22 nt, Human
ccucucagcgauuccucuugga

SEQ ID NO: 1141093 - RNA, 22 nt, Human
ucagcuuugggggucucaggag

SEQ ID NO: 1141094 - RNA, 22 nt, Human
ccugggcuguugcaucauccuu

SEQ ID NO: 1141095 - RNA, 22 nt, Human
uuuugcuuuuguaacacagugu

SEQ ID NO: 1141096 - RNA, 22 nt, Human
ggggcugacgggcauguggcuu

SEQ ID NO: 1141097 - RNA, 19 nt, Human
ccuuccuccccagggccau

SEQ ID NO: 1141098 - RNA, 22 nt, Human
auaaaauuugcuacuguuaaau

SEQ ID NO: 1141099 - RNA, 22 nt, Human
aguaugaagcugaaugauuuua

SEQ ID NO: 1141100 - RNA, 22 nt, Human
uucacaauaggagcaugcaaau

SEQ ID NO: 1141101 - RNA, 22 nt, Human
caggggccaaggguccagaccu

SEQ ID NO: 1141102 - RNA, 22 nt, Human
cucuuaaagaauguuccagcug

SEQ ID NO: 1141103 - RNA, 23 nt, Human
cucccuggcccuugggagaccug

SEQ ID NO: 1141104 - RNA, 20 nt, Human
cacaacuguccacaugcucc

SEQ ID NO: 1141105 - RNA, 22 nt, Human
uccaggcuugagaccaggcucu

SEQ ID NO: 1141106 - RNA, 22 nt, Human
caggaguggugugagggacucc

SEQ ID NO: 1141107 - RNA, 22 nt, Human
ugcuucuguucuuucaccuacg

SEQ ID NO: 1141108 - RNA, 22 nt, Human
uccuggcagugcuuguuuugga

SEQ ID NO: 1141109 - RNA, 22 nt, Human
aaacuucagugaaugacuuaug

SEQ ID NO: 1141110 - RNA, 22 nt, Human
gggaccugaggagggguuucag

SEQ ID NO: 1141111 - RNA, 22 nt, Human
guuuauuaacugucaagugauu

SEQ ID NO: 1141112 - RNA, 17 nt, Human
uuaagguggaucagcac

SEQ ID NO: 1141113 - RNA, 22 nt, Human
agucacuuccagacaccugccu

SEQ ID NO: 1141114 - RNA, 22 nt, Human
aaugauuggcacuagauacaca

SEQ ID NO: 1141115 - RNA, 22 nt, Human
acaguaaaaagccuuagaauuu

SEQ ID NO: 1141116 - RNA, 21 nt, Human
uuacaaagcaagugcuguguc

SEQ ID NO: 1141117 - RNA, 22 nt, Human
uuuacauugcauuagguauuau

SEQ ID NO: 1141118 - RNA, 22 nt, Human
gcacccagggacuuggcuggcc

SEQ ID NO: 1141119 - RNA, 22 nt, Human
gggguggccaaggacucugacc

SEQ ID NO: 1141120 - RNA, 22 nt, Human
aggccuccuggcuccaggccuu

SEQ ID NO: 1141121 - RNA, 22 nt, Human
gggcugaccccaccccucacuc

SEQ ID NO: 1141122 - RNA, 18 nt, Human
ugcaggcugggguuccuc

SEQ ID NO: 1141123 - RNA, 22 nt, Human
acgugcaggaucugguuggcga

SEQ ID NO: 1141124 - RNA, 23 nt, Human
gagggcucugagugcuugggcca

SEQ ID NO: 1141125 - RNA, 22 nt, Human
gcuggaguuggcaaggcaugua

SEQ ID NO: 1141126 - RNA, 22 nt, Human
auauuaggaguuaaauguauua

SEQ ID NO: 1141127 - RNA, 22 nt, Human
cuguugcaucauggcucuuaau

SEQ ID NO: 1141128 - RNA, 22 nt, Human
guacacacuauuuaaaguguuu

SEQ ID NO: 1141129 - RNA, 22 nt, Human
accaagcuagaacauuacaggc

SEQ ID NO: 1141130 - RNA, 20 nt, Human
gccugcagguuggaugggau

SEQ ID NO: 1141131 - RNA, 22 nt, Human
cugcaggggccucgagcacagg

SEQ ID NO: 1141132 - RNA, 22 nt, Human
gcuggcagccaagugaagaggg

SEQ ID NO: 1141133 - RNA, 22 nt, Human
uaugacauugcuuuuuagaacu

SEQ ID NO: 1141134 - RNA, 22 nt, Human
ggcaggcuuugagaaagagcau

SEQ ID NO: 1141135 - RNA, 22 nt, Human
ucagcuuuuaaaaacaagaagu

SEQ ID NO: 1141136 - RNA, 22 nt, Human
ugcuucugaguugcaggacuug

SEQ ID NO: 1141137 - RNA, 22 nt, Human
agggacuugaugucagggagau

SEQ ID NO: 1141138 - RNA, 22 nt, Human
aaucacuuuucucuaauguagc

SEQ ID NO: 1141139 - RNA, 22 nt, Human
gaaacauaguugagacacugcu

SEQ ID NO: 1141140 - RNA, 22 nt, Human
augugaaauagcuggauaugaa

SEQ ID NO: 1141141 - RNA, 22 nt, Human
accugcagccacuucucuccuu

SEQ ID NO: 1141142 - RNA, 22 nt, Human
gcagagaguugggcugcgccag

SEQ ID NO: 1141143 - RNA, 18 nt, Human
ucagagagaauaguaauu

SEQ ID NO: 1141144 - RNA, 22 nt, Human
aucacaauguacguuaaaaugu

SEQ ID NO: 1141145 - RNA, 19 nt, Human
gcuggcagauguggccgug

SEQ ID NO: 1141146 - RNA, 22 nt, Human
aaggcuuuaugugaccaaaaga

SEQ ID NO: 1141147 - RNA, 22 nt, Human
agggcucccgugaggugacugc

SEQ ID NO: 1141148 - RNA, 22 nt, Human
gagcacccuuugcacaucaguc

SEQ ID NO: 1141149 - RNA, 22 nt, Human
uauaauguuuuccauggacuga

SEQ ID NO: 1141150 - RNA, 22 nt, Human
acaaucauuccguucacaacag

SEQ ID NO: 1141151 - RNA, 22 nt, Human
agacaucaaugaucagagguag

SEQ ID NO: 1141152 - RNA, 23 nt, Human
aguaugaauucauuguuuuaguu

SEQ ID NO: 1141153 - RNA, 22 nt, Human
gccugcaggcuguaguuuguga

SEQ ID NO: 1141154 - RNA, 22 nt, Human
cucugggcaaguuucuucauga

SEQ ID NO: 1141155 - RNA, 22 nt, Human
auggcagagggauugaacagcu

SEQ ID NO: 1141156 - RNA, 22 nt, Human
ucugcucugggccagcuauuaa

SEQ ID NO: 1141157 - RNA, 22 nt, Human
uuaauuuucucaucugugaaau

SEQ ID NO: 1141158 - RNA, 22 nt, Human
uuuagggaagaagcccauggcc

SEQ ID NO: 1141159 - RNA, 22 nt, Human
uuuuauuaucuuugaaugggac

SEQ ID NO: 1141160 - RNA, 22 nt, Human
gcacacaggggaguucucagaa

SEQ ID NO: 1141161 - RNA, 22 nt, Human
cuccuggcucgcccccagcuga

SEQ ID NO: 1141162 - RNA, 22 nt, Human
accaggcagcaccaaagccggu

SEQ ID NO: 1141163 - RNA, 22 nt, Human
gccucaggccgcccugcugcuc

SEQ ID NO: 1141164 - RNA, 20 nt, Human
uuucacaaugaacaugucuc

SEQ ID NO: 1141165 - RNA, 23 nt, Human
uuucacaaugagcauuacagaau

SEQ ID NO: 1141166 - RNA, 22 nt, Human
ugcaggcugggaagagggacaa

SEQ ID NO: 1141167 - RNA, 22 nt, Human
guggcagguggagccuccugca

SEQ ID NO: 1141168 - RNA, 18 nt, Human
uccucucuuuccccaggg

SEQ ID NO: 1141169 - RNA, 20 nt, Human
uuccacaucuuugcacaugc

SEQ ID NO: 1141170 - RNA, 22 nt, Human
ugcuucugcaggagcuccugau

SEQ ID NO: 1141171 - RNA, 22 nt, Human
cuuuauuccuacaagauuuucu

SEQ ID NO: 1141172 - RNA, 22 nt, Human
auuaaauuggacgcugggggaa

SEQ ID NO: 1141173 - RNA, 22 nt, Human
guggcaguuuugacaucacaaa

SEQ ID NO: 1141174 - RNA, 22 nt, Human
gagcacugauuuauuuuugucu

SEQ ID NO: 1141175 - RNA, 22 nt, Human
cacagucacauaucuaugugug

SEQ ID NO: 1141176 - RNA, 22 nt, Human
auucaagagcccauguuuccug

SEQ ID NO: 1141177 - RNA, 22 nt, Human
cagaagaguagcugaacaaguu

SEQ ID NO: 1141178 - RNA, 22 nt, Human
uccaggcauuggagagauaaug

SEQ ID NO: 1141179 - RNA, 22 nt, Human
aagagcacuaacagagcugaua

SEQ ID NO: 1141180 - RNA, 20 nt, Human
cugcaggguuagaggcucca

SEQ ID NO: 1141181 - RNA, 22 nt, Human
auaugagaauuggaaaauauca

SEQ ID NO: 1141182 - RNA, 19 nt, Human
agacaaguuuccagaagcc

SEQ ID NO: 1141183 - RNA, 22 nt, Human
uuuaaaaucagaugggaguugg

SEQ ID NO: 1141184 - RNA, 22 nt, Human
agcaccaucacagcuguauguc

SEQ ID NO: 1141185 - RNA, 22 nt, Human
cauauguauuucucauaauuag

SEQ ID NO: 1141186 - RNA, 22 nt, Human
cgcaggcugcagccaagaagag

SEQ ID NO: 1141187 - RNA, 22 nt, Human
aacaggcaggagaauucugccu

SEQ ID NO: 1141188 - RNA, 22 nt, Human
gaaacauacgauuuaggagaaa

SEQ ID NO: 1141189 - RNA, 22 nt, Human
caggcagcugcuggguucagcc

SEQ ID NO: 1141190 - RNA, 22 nt, Human
agggcgacaauggagagcguuu

SEQ ID NO: 1141191 - RNA, 22 nt, Human
cagagcaugaauaaaaguuaca

SEQ ID NO: 1141192 - RNA, 22 nt, Human
aaauccuaauaaugcacuagug

SEQ ID NO: 1141193 - RNA, 21 nt, Human
uaacacauuuugguacuuugg

SEQ ID NO: 1141194 - RNA, 22 nt, Human
auguuagaaucucugaaugugg

SEQ ID NO: 1141195 - RNA, 22 nt, Human
uccaggaggguuuucugccuuc

SEQ ID NO: 1141196 - RNA, 18 nt, Human
acauuucuccuucugacc

SEQ ID NO: 1141197 - RNA, 22 nt, Human
ucauuuguggaagugauugugg

SEQ ID NO: 1141198 - RNA, 22 nt, Human
aucugcuugaguuugaagucag

SEQ ID NO: 1141199 - RNA, 22 nt, Human
guaaaauugcaauuacuuuugc

SEQ ID NO: 1141200 - RNA, 22 nt, Human
agcuuuaucuucaccugggaau

SEQ ID NO: 1141201 - RNA, 20 nt, Human
gagggcucguggauggauaa

SEQ ID NO: 1141202 - RNA, 22 nt, Human
aggaccugagaguuggaaaucc

SEQ ID NO: 1141203 - RNA, 20 nt, Human
acccagcucugugcccuggg

SEQ ID NO: 1141204 - RNA, 22 nt, Human
auuuauuauugugguuacuucu

SEQ ID NO: 1141205 - RNA, 22 nt, Human
agacacagcugcaggagguggg

SEQ ID NO: 1141206 - RNA, 22 nt, Human
uaagaacaguagaacaguaggu

SEQ ID NO: 1141207 - RNA, 22 nt, Human
ucugugcaggaagucauuauga

SEQ ID NO: 1141208 - RNA, 22 nt, Human
uggcaguagauccagucucucu

SEQ ID NO: 1141209 - RNA, 22 nt, Human
aaagcuuuucaguauguucaug

SEQ ID NO: 1141210 - RNA, 22 nt, Human
uagcauuaucugucuuaucauu

SEQ ID NO: 1141211 - RNA, 22 nt, Human
uuuaaauucugucugccgcuua

SEQ ID NO: 1141212 - RNA, 22 nt, Human
gccaggcagauaugugagcuua

SEQ ID NO: 1141213 - RNA, 22 nt, Human
uggccucugugggagcugagca

SEQ ID NO: 1141214 - RNA, 22 nt, Human
uagcuuuagugaaaaauaucag

SEQ ID NO: 1141215 - RNA, 22 nt, Human
ggaaccacagcccccagcaggc

SEQ ID NO: 1141216 - RNA, 22 nt, Human
cccaggcacucuuggucauuuu

SEQ ID NO: 1141217 - RNA, 22 nt, Human
cccagccuuccacccuggacua

SEQ ID NO: 1141218 - RNA, 22 nt, Human
ugcuuuauugcaucaguguggg

SEQ ID NO: 1141219 - RNA, 22 nt, Human
cugcaggacgaccgccucaucu

SEQ ID NO: 1141220 - RNA, 18 nt, Human
aggaaagaaaggcaggug

SEQ ID NO: 1141221 - RNA, 21 nt, Human
ccugggcugugguuuggagac

SEQ ID NO: 1141222 - RNA, 18 nt, Human
cuacauucauaggaaagg

SEQ ID NO: 1141223 - RNA, 22 nt, Human
gugggcuuuggccucuuucucc

SEQ ID NO: 1141224 - RNA, 22 nt, Human
accaggcacuccugaggucuga

SEQ ID NO: 1141225 - RNA, 20 nt, Human
agaaauauugaguucagagg

SEQ ID NO: 1141226 - RNA, 22 nt, Human
ccaggccucaccugcccaccua

SEQ ID NO: 1141227 - RNA, 22 nt, Human
uuuuccuucugauacuccauuu

SEQ ID NO: 1141228 - RNA, 22 nt, Human
ugagaauuuuuugucaugcauu

SEQ ID NO: 1141229 - RNA, 22 nt, Human
agggcucccgcgguguccggga

SEQ ID NO: 1141230 - RNA, 22 nt, Human
cccugcagcauucucuaacugg

SEQ ID NO: 1141231 - RNA, 22 nt, Human
cuuucauucuuagauauuagug

SEQ ID NO: 1141232 - RNA, 19 nt, Human
ccuugccugucccugcagc

SEQ ID NO: 1141233 - RNA, 22 nt, Human
uauuaggguaaauuugacaugc

SEQ ID NO: 1141234 - RNA, 20 nt, Human
cccugcagccaugggagugg

SEQ ID NO: 1141235 - RNA, 22 nt, Human
gagaagcaaucaguggccaccc

SEQ ID NO: 1141236 - RNA, 21 nt, Human
acaggcucuggggaugcuggg

SEQ ID NO: 1141237 - RNA, 22 nt, Human
uagacacaucuucauccacaau

SEQ ID NO: 1141238 - RNA, 22 nt, Human
agccauccucccaccucagccu

SEQ ID NO: 1141239 - RNA, 22 nt, Human
gcaggcucagagcagauuagca

SEQ ID NO: 1141240 - RNA, 22 nt, Human
ccagguccuguuuucaccacag

SEQ ID NO: 1141241 - RNA, 22 nt, Human
auuacaauaagguuuauuugua

SEQ ID NO: 1141242 - RNA, 23 nt, Human
aguguugguugggaagccaagca

SEQ ID NO: 1141243 - RNA, 22 nt, Human
agggcacccucucugcaguacc

SEQ ID NO: 1141244 - RNA, 22 nt, Human
uaauaguuaugguugguucuca

SEQ ID NO: 1141245 - RNA, 22 nt, Human
cagggcuccccgcaccgcagcc

SEQ ID NO: 1141246 - RNA, 22 nt, Human
uguuggaauuaggauacagagg

SEQ ID NO: 1141247 - RNA, 22 nt, Human
cugggcuuagcagcuccugguc

SEQ ID NO: 1141248 - RNA, 22 nt, Human
cuccaggcucguccaagaucga

SEQ ID NO: 1141249 - RNA, 22 nt, Human
guuaggaacacuggagccuaaa

SEQ ID NO: 1141250 - RNA, 22 nt, Human
aucugucaagauagacucugca

SEQ ID NO: 1141251 - RNA, 22 nt, Human
cccaggcacaccccgaacggaa

SEQ ID NO: 1141252 - RNA, 22 nt, Human
uccagacccaugacccugggga

SEQ ID NO: 1141253 - RNA, 22 nt, Human
gcagggacaacugugcaccuga

SEQ ID NO: 1141254 - RNA, 22 nt, Human
acacagccgugaaucugcuucu

SEQ ID NO: 1141255 - RNA, 22 nt, Human
cucugggcacuguauggguucu

SEQ ID NO: 1141256 - RNA, 22 nt, Human
cccugcagagagugcuuuugug

SEQ ID NO: 1141257 - RNA, 22 nt, Human
cugcagggugacguugcccacc

SEQ ID NO: 1141258 - RNA, 22 nt, Human
gcuaggagccgcugcacuaggu

SEQ ID NO: 1141259 - RNA, 22 nt, Human
cacuguccaugcuugcuaaccc

SEQ ID NO: 1141260 - RNA, 22 nt, Human
uggaacacuguggaugagaaga

SEQ ID NO: 1141261 - RNA, 22 nt, Human
aaaauccugcugacucgagaug

SEQ ID NO: 1141262 - RNA, 22 nt, Human
auguuucagauacagaucaaau

SEQ ID NO: 1141263 - RNA, 22 nt, Human
gagaacucagacgcaggucaug

SEQ ID NO: 1141264 - RNA, 22 nt, Human
cucugucagaguguugucccca

SEQ ID NO: 1141265 - RNA, 22 nt, Human
gagaccucuugguaucgcuagg

SEQ ID NO: 1141266 - RNA, 22 nt, Human
agcaggcugagcacccaggggg

SEQ ID NO: 1141267 - RNA, 22 nt, Human
ccaggcuguaagagugauguug

SEQ ID NO: 1141268 - RNA, 22 nt, Human
aucugucagccugggauuaggg

SEQ ID NO: 1141269 - RNA, 22 nt, Human
gccacagguacuaugggagaga

SEQ ID NO: 1141270 - RNA, 19 nt, Human
ggcauccacgaaugcagag

SEQ ID NO: 1141271 - RNA, 22 nt, Human
ccacaaaacugugugucaaaga

SEQ ID NO: 1141272 - RNA, 22 nt, Human
guugggaaggcaagaaguagaa

SEQ ID NO: 1141273 - RNA, 22 nt, Human
uuaacacagggggagacaaagu

SEQ ID NO: 1141274 - RNA, 22 nt, Human
uuggagagcaguaaaccacacu

SEQ ID NO: 1141275 - RNA, 22 nt, Human
uccugcagugugucuccugcac

SEQ ID NO: 1141276 - RNA, 22 nt, Human
ugccugacugcugccaccacua

SEQ ID NO: 1141277 - RNA, 22 nt, Human
aaauaguuguuuggaucaauaa

SEQ ID NO: 1141278 - RNA, 22 nt, Human
gaauacauuggaaaucagaaua

SEQ ID NO: 1141279 - RNA, 22 nt, Human
ccacacugucuaacaaggcaua

SEQ ID NO: 1141280 - RNA, 22 nt, Human
ccuaggaacccccaggcuucug

SEQ ID NO: 1141281 - RNA, 22 nt, Human
uuguuucaaauauuucagaaua

SEQ ID NO: 1141282 - RNA, 22 nt, Human
ccuccccaugacccggugcugg

SEQ ID NO: 1141283 - RNA, 22 nt, Human
aggaggcuguggagcacuccau

SEQ ID NO: 1141284 - RNA, 22 nt, Human
agcuuuauauguuguuucucca

SEQ ID NO: 1141285 - RNA, 22 nt, Human
ccuuuaaagacugcauaacuuc

SEQ ID NO: 1141286 - RNA, 22 nt, Human
ggccucagaggaggugugaguc

SEQ ID NO: 1141287 - RNA, 22 nt, Human
caugaagcccucaucagucuga

SEQ ID NO: 1141288 - RNA, 22 nt, Human
cauuuguaguuaaaaaugucuc

SEQ ID NO: 1141289 - RNA, 22 nt, Human
agcacaggaccaaggaagcugu

SEQ ID NO: 1141290 - RNA, 22 nt, Human
acauacacaagcguacaugaac

SEQ ID NO: 1141291 - RNA, 21 nt, Human
uugaccaagggugcgugcucc

SEQ ID NO: 1141292 - RNA, 22 nt, Human
gggaccuggggacuccuuguuc

SEQ ID NO: 1141293 - RNA, 22 nt, Human
aaacacauuuuaggaaaaucua

SEQ ID NO: 1141294 - RNA, 22 nt, Human
aauauaauuuuauuccuagagu

SEQ ID NO: 1141295 - RNA, 22 nt, Human
aggaggcuuuugcaggugccac

SEQ ID NO: 1141296 - RNA, 18 nt, Human
cccagcuuagcgccccuc

SEQ ID NO: 1141297 - RNA, 22 nt, Human
caguauuuauggcuugaguauu

SEQ ID NO: 1141298 - RNA, 22 nt, Human
uuucuacauucaaaaacuacca

SEQ ID NO: 1141299 - RNA, 22 nt, Human
acuguccaagcaugccuggcuu

SEQ ID NO: 1141300 - RNA, 22 nt, Human
uggcaggcaaguucagcuccac

SEQ ID NO: 1141301 - RNA, 22 nt, Human
ggcuuuauaggguagaggauca

SEQ ID NO: 1141302 - RNA, 22 nt, Human
guggcagugggaugcuaucagg

SEQ ID NO: 1141303 - RNA, 22 nt, Human
aucacuguuaucuagaagcaca

SEQ ID NO: 1141304 - RNA, 22 nt, Human
ugucagaugcgauaaacuagug

SEQ ID NO: 1141305 - RNA, 22 nt, Human
gcaguguuaggaauaaaaauga

SEQ ID NO: 1141306 - RNA, 22 nt, Human
uaucuguuaugggcugaauugc

SEQ ID NO: 1141307 - RNA, 22 nt, Human
uuacaguuuaguccaagccaga

SEQ ID NO: 1141308 - RNA, 22 nt, Human
acaagguauccacauuaaaugu

SEQ ID NO: 1141309 - RNA, 22 nt, Human
cuggcagguuuggugucuggug

SEQ ID NO: 1141310 - RNA, 22 nt, Human
auguagaauuccuucuacuuug

SEQ ID NO: 1141311 - RNA, 22 nt, Human
ucugggcugggagcguguggac

SEQ ID NO: 1141312 - RNA, 22 nt, Human
ucuauuuuauacucaaaucuuc

SEQ ID NO: 1141313 - RNA, 19 nt, Human
agaugucuauuugacuauc

SEQ ID NO: 1141314 - RNA, 22 nt, Human
gccaagcuuugcaggaguguug

SEQ ID NO: 1141315 - RNA, 22 nt, Human
cucauaaugugacuguauuuga

SEQ ID NO: 1141316 - RNA, 20 nt, Human
ugggcugaggaucaggugcc

SEQ ID NO: 1141317 - RNA, 22 nt, Human
gccaggcagcugggagggugcc

SEQ ID NO: 1141318 - RNA, 22 nt, Human
gcuggggagcuagaccucagca

SEQ ID NO: 1141319 - RNA, 22 nt, Human
aauacuuuccuauauaaggugc

SEQ ID NO: 1141320 - RNA, 22 nt, Human
uagggaccuuagaauuguaugu

SEQ ID NO: 1141321 - RNA, 22 nt, Human
aauauuuguuaguguuuuaaug

SEQ ID NO: 1141322 - RNA, 22 nt, Human
ggcaggcugggugucauggagu

SEQ ID NO: 1141323 - RNA, 22 nt, Human
cccaggcagaauuaguguuuca

SEQ ID NO: 1141324 - RNA, 22 nt, Human
uuagacauguuugcuaaaauga

SEQ ID NO: 1141325 - RNA, 21 nt, Human
guacacacagguggaugggcu

SEQ ID NO: 1141326 - RNA, 22 nt, Human
aaaguuugaaugauauauuagu

SEQ ID NO: 1141327 - RNA, 22 nt, Human
augucaaacacaacaccagugg

SEQ ID NO: 1141328 - RNA, 22 nt, Human
ccacuguauuuuggaagcagau

SEQ ID NO: 1141329 - RNA, 23 nt, Human
cuuucauugugguuucacagagc

SEQ ID NO: 1141330 - RNA, 22 nt, Human
ccugccuucagcccugaagucu

SEQ ID NO: 1141331 - RNA, 22 nt, Human
uccuggcacuuugggggcucgc

SEQ ID NO: 1141332 - RNA, 22 nt, Human
acacacagaguuuauacaggca

SEQ ID NO: 1141333 - RNA, 22 nt, Human
uguacaaagguacuuugauguu

SEQ ID NO: 1141334 - RNA, 22 nt, Human
cuucuuaacuguauauacuaug

SEQ ID NO: 1141335 - RNA, 19 nt, Human
gcugggcuuggguuuguag

SEQ ID NO: 1141336 - RNA, 22 nt, Human
augacucuuagcuaaagguaag

SEQ ID NO: 1141337 - RNA, 22 nt, Human
aauggcagaggcaaagauggua

SEQ ID NO: 1141338 - RNA, 22 nt, Human
ucauuuguugcuguuaccugag

SEQ ID NO: 1141339 - RNA, 22 nt, Human
ggcccagcgaggccaccuacag

SEQ ID NO: 1141340 - RNA, 22 nt, Human
aaggcuuuuaacuacuguuuua

SEQ ID NO: 1141341 - RNA, 22 nt, Human
caggcccugggcaggcacagag

SEQ ID NO: 1141342 - RNA, 21 nt, Human
ccagcccagcugugucccagc

SEQ ID NO: 1141343 - RNA, 22 nt, Human
ccccaggcagggccuaacagag

SEQ ID NO: 1141344 - RNA, 22 nt, Human
cccugccucugaagcugcucag

SEQ ID NO: 1141345 - RNA, 22 nt, Human
ccuggggaauagagucaagggg

SEQ ID NO: 1141346 - RNA, 22 nt, Human
uguaugaagguuuaccugcugu

SEQ ID NO: 1141347 - RNA, 21 nt, Human
agcaacucugacuagaugagg

SEQ ID NO: 1141348 - RNA, 22 nt, Human
gcaguguuuguguucucacaug

SEQ ID NO: 1141349 - RNA, 22 nt, Human
aagagccagcuagugaagaggc

SEQ ID NO: 1141350 - RNA, 22 nt, Human
uggcagaaagaaccaugugcaa

SEQ ID NO: 1141351 - RNA, 22 nt, Human
acagugugaugggccugccuga

SEQ ID NO: 1141352 - RNA, 22 nt, Human
uuauuaggaacucaggauuuuu

SEQ ID NO: 1141353 - RNA, 19 nt, Human
ccagagagcuagguacaga

SEQ ID NO: 1141354 - RNA, 22 nt, Human
uuacaagauaaccugaugcugu

SEQ ID NO: 1141355 - RNA, 22 nt, Human
uuucuugaccacuauguugaua

SEQ ID NO: 1141356 - RNA, 19 nt, Human
gucuucugaauguggcugc

SEQ ID NO: 1141357 - RNA, 22 nt, Human
uccugagcccuguaggacccug

SEQ ID NO: 1141358 - RNA, 23 nt, Human
cacacccaucacuaagagcuccu

SEQ ID NO: 1141359 - RNA, 22 nt, Human
acuggggagagucaugccagca

SEQ ID NO: 1141360 - RNA, 22 nt, Human
gggcucucaaggcagggcccca

SEQ ID NO: 1141361 - RNA, 22 nt, Human
augauugcagcccuacagcugu

SEQ ID NO: 1141362 - RNA, 22 nt, Human
uucagagagaccaaguggcgug

SEQ ID NO: 1141363 - RNA, 22 nt, Human
uguauaaacuuaagcaggaacc

SEQ ID NO: 1141364 - RNA, 22 nt, Human
agaaucucuacucaaguacuug

SEQ ID NO: 1141365 - RNA, 22 nt, Human
ugcuucugacauguucuugguu

SEQ ID NO: 1141366 - RNA, 22 nt, Human
ugcuucuggcuuaucucgugcc

SEQ ID NO: 1141367 - RNA, 23 nt, Human
gagugcagaauagacaugcagug

SEQ ID NO: 1141368 - RNA, 22 nt, Human
ugacuagaccuauaucuuuuug

SEQ ID NO: 1141369 - RNA, 22 nt, Human
aaguaugacauuuaagacaauu

SEQ ID NO: 1141370 - RNA, 22 nt, Human
cuucuacacaucccucuugcuu

SEQ ID NO: 1141371 - RNA, 22 nt, Human
guccucuguguaggcugcagac

SEQ ID NO: 1141372 - RNA, 20 nt, Human
caccacagaauuggggacag

SEQ ID NO: 1141373 - RNA, 22 nt, Human
gcuucuggcagugcagccacca

SEQ ID NO: 1141374 - RNA, 22 nt, Human
aucaaauauaauaauuuucgcu

SEQ ID NO: 1141375 - RNA, 22 nt, Human
uguucauaucauuuugaaagcu

SEQ ID NO: 1141376 - RNA, 22 nt, Human
ccacccagccagaugcaggaag

SEQ ID NO: 1141377 - RNA, 20 nt, Human
aauuuacucacagaaugaau

SEQ ID NO: 1141378 - RNA, 22 nt, Human
cccugcagccuugcaugccuuc

SEQ ID NO: 1141379 - RNA, 19 nt, Human
uuagggacaugaauucuag

SEQ ID NO: 1141380 - RNA, 19 nt, Human
ugcuucuggaaugcaaggc

SEQ ID NO: 1141381 - RNA, 22 nt, Human
uaugaagcuuugaaaagcuuac

SEQ ID NO: 1141382 - RNA, 22 nt, Human
agcagguggacagaggaagaaa

SEQ ID NO: 1141383 - RNA, 23 nt, Human
gaauaguuuuagaaauuggagaa

SEQ ID NO: 1141384 - RNA, 22 nt, Human
ucaggcucugagcugaugcuaa

SEQ ID NO: 1141385 - RNA, 22 nt, Human
ggaggacaggggcugcagcaca

SEQ ID NO: 1141386 - RNA, 22 nt, Human
auccacagucuuagccaucaaa

SEQ ID NO: 1141387 - RNA, 22 nt, Human
uuuuggaaugaggaacauccag

SEQ ID NO: 1141388 - RNA, 22 nt, Human
augcugucgaaaccaaacaucu

SEQ ID NO: 1141389 - RNA, 22 nt, Human
uguacauacauagauauacaca

SEQ ID NO: 1141390 - RNA, 22 nt, Human
uucacaguggcugugccauuug

SEQ ID NO: 1141391 - RNA, 22 nt, Human
ggcacagagcuuugucccaguu

SEQ ID NO: 1141392 - RNA, 22 nt, Human
gggcugcaaugcuucaguuguu

SEQ ID NO: 1141393 - RNA, 22 nt, Human
gugagagggcugggcucaugau

SEQ ID NO: 1141394 - RNA, 22 nt, Human
uuaugcaaaggggccucuuccu

SEQ ID NO: 1141395 - RNA, 22 nt, Human
cucuccagccuuuagcccacgc

SEQ ID NO: 1141396 - RNA, 22 nt, Human
cagcuucuggcguggagccuga

SEQ ID NO: 1141397 - RNA, 22 nt, Human
aauuaugagguagauaucacau

SEQ ID NO: 1141398 - RNA, 22 nt, Human
agaucuuuagugaagcuaaauc

SEQ ID NO: 1141399 - RNA, 22 nt, Human
agccagggucucucgcucuguu

SEQ ID NO: 1141400 - RNA, 22 nt, Human
aggaccauccuaagguaggcaa

SEQ ID NO: 1141401 - RNA, 22 nt, Human
cuucuuaaucccuuauauauuu

SEQ ID NO: 1141402 - RNA, 17 nt, Human
uguuuucauucauugcu

SEQ ID NO: 1141403 - RNA, 22 nt, Human
guuucauucggcagcucauaag

SEQ ID NO: 1141404 - RNA, 22 nt, Human
gaggcacauauauacagagccc

SEQ ID NO: 1141405 - RNA, 21 nt, Human
uccuguaagcuuggguggcuc

SEQ ID NO: 1141406 - RNA, 22 nt, Human
gcacacaguauaugcucauuaa

SEQ ID NO: 1141407 - RNA, 22 nt, Human
ugacaggaggcuugaggccagg

SEQ ID NO: 1141408 - RNA, 22 nt, Human
aucagagaaguuucacuggcau

SEQ ID NO: 1141409 - RNA, 22 nt, Human
acaguguguucugggaccucca

SEQ ID NO: 1141410 - RNA, 22 nt, Human
ucacacacauggauaguauuuu

SEQ ID NO: 1141411 - RNA, 22 nt, Human
cuggcaguuggcauuggcaucu

SEQ ID NO: 1141412 - RNA, 22 nt, Human
ucaggagcuugguagugugauu

SEQ ID NO: 1141413 - RNA, 22 nt, Human
cuuaauuuuuguaguagaugga

SEQ ID NO: 1141414 - RNA, 22 nt, Human
gguuuccugcauugggaaauuu

SEQ ID NO: 1141415 - RNA, 22 nt, Human
ugccugccucuggcagcccugc

SEQ ID NO: 1141416 - RNA, 21 nt, Human
uagggcucucugugucaggug

SEQ ID NO: 1141417 - RNA, 22 nt, Human
ccagccuuacugcccuucagug

SEQ ID NO: 1141418 - RNA, 22 nt, Human
aggcugcuucagcugcagggag

SEQ ID NO: 1141419 - RNA, 22 nt, Human
auuuguuccacacauauuuacu

SEQ ID NO: 1141420 - RNA, 22 nt, Human
agagcaucuaacacauaagccu

SEQ ID NO: 1141421 - RNA, 22 nt, Human
ugucagagagcaggcaguagaa

SEQ ID NO: 1141422 - RNA, 20 nt, Human
uggaaguucuguugcauugg

SEQ ID NO: 1141423 - RNA, 22 nt, Human
gccaggcagccacccucugcga

SEQ ID NO: 1141424 - RNA, 22 nt, Human
ucacauacugaaaguccaguga

SEQ ID NO: 1141425 - RNA, 22 nt, Human
auacuguacgucccagauagga

SEQ ID NO: 1141426 - RNA, 22 nt, Human
aggcacaggaggugguaagaag

SEQ ID NO: 1141427 - RNA, 22 nt, Human
ugcagggauuagaggccgggga

SEQ ID NO: 1141428 - RNA, 22 nt, Human
uccaggcauguggccaguacuc

SEQ ID NO: 1141429 - RNA, 22 nt, Human
ccuggcugguggcagcgacaag

SEQ ID NO: 1141430 - RNA, 22 nt, Human
caguguuuaaucauugugaauu

SEQ ID NO: 1141431 - RNA, 22 nt, Human
gcuccaggagagggaagcagau

SEQ ID NO: 1141432 - RNA, 22 nt, Human
uaacacauagauauuuuaacuu

SEQ ID NO: 1141433 - RNA, 22 nt, Human
cagcucuuugaguauuccauuu

SEQ ID NO: 1141434 - RNA, 22 nt, Human
ugcuuuauaggggauugcaggc

SEQ ID NO: 1141435 - RNA, 22 nt, Human
agggaccugcucacugccuggc

SEQ ID NO: 1141436 - RNA, 19 nt, Human
agaaucaggucaggugaca

SEQ ID NO: 1141437 - RNA, 22 nt, Human
guagggacaauauguuauuaga

SEQ ID NO: 1141438 - RNA, 22 nt, Human
acccagccuacaaagcucaccu

SEQ ID NO: 1141439 - RNA, 22 nt, Human
gcauccaaaccauucaucagcc

SEQ ID NO: 1141440 - RNA, 23 nt, Human
uccaggagcaugcuggcuggcga

SEQ ID NO: 1141441 - RNA, 22 nt, Human
cauuuacacuucuaaccacaag

SEQ ID NO: 1141442 - RNA, 22 nt, Human
gcuugggaagggcccuguguac

SEQ ID NO: 1141443 - RNA, 22 nt, Human
ugugaaaagcaggcuacuuucu

SEQ ID NO: 1141444 - RNA, 22 nt, Human
ccuggggagaagagcuuccccc

SEQ ID NO: 1141445 - RNA, 22 nt, Human
acaaacugaauggguuuucugu

SEQ ID NO: 1141446 - RNA, 22 nt, Human
uccugcagacauuuacaccuuu

SEQ ID NO: 1141447 - RNA, 22 nt, Human
cucagagauauagucccugcuu

SEQ ID NO: 1141448 - RNA, 22 nt, Human
aauauguugagucuaucuuuau

SEQ ID NO: 1141449 - RNA, 22 nt, Human
ccagcuuuucagaaucugccug

SEQ ID NO: 1141450 - RNA, 22 nt, Human
aaagaauagccuuuguccaaau

SEQ ID NO: 1141451 - RNA, 17 nt, Human
gcuaggagagggaggag

SEQ ID NO: 1141452 - RNA, 22 nt, Human
cagguuggggacuuaggaugac

SEQ ID NO: 1141453 - RNA, 22 nt, Human
ucaaauauuggcuauuucacau

SEQ ID NO: 1141454 - RNA, 22 nt, Human
ugcaaaauaaugaacgauuuuu

SEQ ID NO: 1141455 - RNA, 22 nt, Human
caauaguucgguccugaaggcc

SEQ ID NO: 1141456 - RNA, 22 nt, Human
gacaggcuuccuaagugccaga

SEQ ID NO: 1141457 - RNA, 18 nt, Human
ucucugaauauuuuaugu

SEQ ID NO: 1141458 - RNA, 22 nt, Human
ugcuuuauggauuuguguccug

SEQ ID NO: 1141459 - RNA, 18 nt, Human
ucagcuuuugaaaaccaa

SEQ ID NO: 1141460 - RNA, 22 nt, Human
cagggccagcgcccaggcccag

SEQ ID NO: 1141461 - RNA, 22 nt, Human
ugcuucugaaaugcaggucuuc

SEQ ID NO: 1141462 - RNA, 22 nt, Human
aguugggaguuauagacucuau

SEQ ID NO: 1141463 - RNA, 22 nt, Human
aggacagugguguucuggagug

SEQ ID NO: 1141464 - RNA, 22 nt, Human
gaggagcuguucccucaccucu

SEQ ID NO: 1141465 - RNA, 22 nt, Human
auuauuaggacuacugggguug

SEQ ID NO: 1141466 - RNA, 22 nt, Human
cacaccagagguuaccugcaaa

SEQ ID NO: 1141467 - RNA, 22 nt, Human
aggaccugccaggugcaaagca

SEQ ID NO: 1141468 - RNA, 22 nt, Human
ugcuucuggguaggccucagga

SEQ ID NO: 1141469 - RNA, 23 nt, Human
acauacauggagauaaagugaug

SEQ ID NO: 1141470 - RNA, 22 nt, Human
cccaggccagaacuugguugcu

SEQ ID NO: 1141471 - RNA, 22 nt, Human
ccugggcucaggcuugggcagc

SEQ ID NO: 1141472 - RNA, 20 nt, Human
auacacauucauagaaaaau

SEQ ID NO: 1141473 - RNA, 22 nt, Human
acacacagaaggaagccccacu

SEQ ID NO: 1141474 - RNA, 22 nt, Human
gagccagguuugaaucucaguc

SEQ ID NO: 1141475 - RNA, 20 nt, Human
ugcagggcugccucccagcu

SEQ ID NO: 1141476 - RNA, 22 nt, Human
uuucucuugcgauaugcuacac

SEQ ID NO: 1141477 - RNA, 22 nt, Human
ucuggcaggauaucgaagugaa

SEQ ID NO: 1141478 - RNA, 22 nt, Human
cgaggcucagagagggugacuu

SEQ ID NO: 1141479 - RNA, 22 nt, Human
ucccacaggaaaguagacauug

SEQ ID NO: 1141480 - RNA, 22 nt, Human
uugauaaaaugauaucuucuuu

SEQ ID NO: 1141481 - RNA, 22 nt, Human
gugugagggacagagaaagggg

SEQ ID NO: 1141482 - RNA, 22 nt, Human
aaacacagauuucuuuguccca

SEQ ID NO: 1141483 - RNA, 22 nt, Human
ugucuuuaaaauuaaacacauc

SEQ ID NO: 1141484 - RNA, 22 nt, Human
uccugcaggccuguucccagua

SEQ ID NO: 1141485 - RNA, 22 nt, Human
accugccucagugcagcuggau

SEQ ID NO: 1141486 - RNA, 22 nt, Human
ccugggcuuugagggcaggaug

SEQ ID NO: 1141487 - RNA, 22 nt, Human
uuccacauuccuuacauucaua

SEQ ID NO: 1141488 - RNA, 22 nt, Human
aucagagaccggucaagucaug

SEQ ID NO: 1141489 - RNA, 22 nt, Human
aagggcucccugccugaggugg

SEQ ID NO: 1141490 - RNA, 22 nt, Human
uagggcucagagaaguggggcc

SEQ ID NO: 1141491 - RNA, 17 nt, Human
gcuucuggagcuucugu

SEQ ID NO: 1141492 - RNA, 22 nt, Human
gcagggaccuugcccacccucc

SEQ ID NO: 1141493 - RNA, 22 nt, Human
uucuuuuacauuaagauuucag

SEQ ID NO: 1141494 - RNA, 22 nt, Human
ucuggggagggagccacagguc

SEQ ID NO: 1141495 - RNA, 22 nt, Human
gaauuugaaaagugaugggaau

SEQ ID NO: 1141496 - RNA, 22 nt, Human
ggaggacacuggcucugccuuc

SEQ ID NO: 1141497 - RNA, 22 nt, Human
ucccugccugacagcacccacc

SEQ ID NO: 1141498 - RNA, 22 nt, Human
uauuagguaaaggacuugcagg

SEQ ID NO: 1141499 - RNA, 22 nt, Human
auguauuucuauguagugaaga

SEQ ID NO: 1141500 - RNA, 22 nt, Human
ggccucagaccggagcuggcca

SEQ ID NO: 1141501 - RNA, 22 nt, Human
cacccagggcugugccugccca

SEQ ID NO: 1141502 - RNA, 22 nt, Human
caagcuuguuucuccugggggu

SEQ ID NO: 1141503 - RNA, 22 nt, Human
ccugcagaaaggguccccagga

SEQ ID NO: 1141504 - RNA, 22 nt, Human
uagcuuuaauaagcugcugaau

SEQ ID NO: 1141505 - RNA, 22 nt, Human
ccagcuuuauagcuucaaagga

SEQ ID NO: 1141506 - RNA, 22 nt, Human
gcacccagaggucagcagugcu

SEQ ID NO: 1141507 - RNA, 22 nt, Human
gagaaagauguaggcugggagg

SEQ ID NO: 1141508 - RNA, 22 nt, Human
gagcucagacucgggccugggg

SEQ ID NO: 1141509 - RNA, 22 nt, Human
uuuguacauauauaaaaucugu

SEQ ID NO: 1141510 - RNA, 22 nt, Human
cuucccacuaguaucacagagc

SEQ ID NO: 1141511 - RNA, 22 nt, Human
uagcuuuaaaaaucaucaaagc

SEQ ID NO: 1141512 - RNA, 22 nt, Human
gagcuuuacuucugacuggugc

SEQ ID NO: 1141513 - RNA, 22 nt, Human
uuuaugagcaaugcugagggga

SEQ ID NO: 1141514 - RNA, 22 nt, Human
guaaacaucgacccaacagggg

SEQ ID NO: 1141515 - RNA, 22 nt, Human
ggcaagagggcagauggagugc

SEQ ID NO: 1141516 - RNA, 22 nt, Human
gauggccuuguuuucucccuuc

SEQ ID NO: 1141517 - RNA, 22 nt, Human
acuggaaaugagaugauaucag

SEQ ID NO: 1141518 - RNA, 22 nt, Human
aggccuuaccauagcuguagca

SEQ ID NO: 1141519 - RNA, 22 nt, Human
acuggcagcuguaggaugcaug

SEQ ID NO: 1141520 - RNA, 22 nt, Human
cuuuauuagauguagacuuucu

SEQ ID NO: 1141521 - RNA, 22 nt, Human
gccaaaucuugcacacucuugu

SEQ ID NO: 1141522 - RNA, 22 nt, Human
ugcagagagaccccugggccag

SEQ ID NO: 1141523 - RNA, 22 nt, Human
aaagacuuggcuuaugauuugc

SEQ ID NO: 1141524 - RNA, 22 nt, Human
agcucccaauugacuugaacua

SEQ ID NO: 1141525 - RNA, 22 nt, Human
aauuagggaaaacauuugcuuu

SEQ ID NO: 1141526 - RNA, 17 nt, Human
uugggagagaaagguau

SEQ ID NO: 1141527 - RNA, 22 nt, Human
ucagcuuuggucacauugaguu

SEQ ID NO: 1141528 - RNA, 22 nt, Human
auguagaagcugacagugcugu

SEQ ID NO: 1141529 - RNA, 22 nt, Human
gcuucuggagucuucagaggaa

SEQ ID NO: 1141530 - RNA, 22 nt, Human
ucauuugugugagugauuugac

SEQ ID NO: 1141531 - RNA, 22 nt, Human
gggcugacaaucucuuuacuua

SEQ ID NO: 1141532 - RNA, 22 nt, Human
ucauuuugggguuugucaucuu

SEQ ID NO: 1141533 - RNA, 22 nt, Human
uccuggcagggucuaggucuag

SEQ ID NO: 1141534 - RNA, 22 nt, Human
aaggcuuuuguuccuauuuagu

SEQ ID NO: 1141535 - RNA, 22 nt, Human
gggacccagguaauccugugcu

SEQ ID NO: 1141536 - RNA, 22 nt, Human
acugggcucaagugauuguccu

SEQ ID NO: 1141537 - RNA, 22 nt, Human
gcccaagcuggacugcaguggc

SEQ ID NO: 1141538 - RNA, 22 nt, Human
ugucaaagccugaaucacauag

SEQ ID NO: 1141539 - RNA, 22 nt, Human
cagcuuugcaggcuggucagug

SEQ ID NO: 1141540 - RNA, 22 nt, Human
uccaagaugguugguguggugg

SEQ ID NO: 1141541 - RNA, 22 nt, Human
cagagaaagaagcccauucauu

SEQ ID NO: 1141542 - RNA, 22 nt, Human
aggcaccuugagagcaggagcu

SEQ ID NO: 1141543 - RNA, 22 nt, Human
ucuggcagcaagucuguuucuc

SEQ ID NO: 1141544 - RNA, 22 nt, Human
uaccugcagcgggaauccauua

SEQ ID NO: 1141545 - RNA, 22 nt, Human
uccugagcuacaguaguaugau

SEQ ID NO: 1141546 - RNA, 22 nt, Human
ucuaggagaaccaucagggagg

SEQ ID NO: 1141547 - RNA, 22 nt, Human
gacacauagaucuaucucacuc

SEQ ID NO: 1141548 - RNA, 22 nt, Human
gggcugacaccacccaggcgca

SEQ ID NO: 1141549 - RNA, 22 nt, Human
uagggcucuggugggcucuguu

SEQ ID NO: 1141550 - RNA, 22 nt, Human
uccaggcaaaaaccaacuacag

SEQ ID NO: 1141551 - RNA, 22 nt, Human
agcuuuauauuuaaugaauucu

SEQ ID NO: 1141552 - RNA, 22 nt, Human
uccugcagccauuagaggucaa

SEQ ID NO: 1141553 - RNA, 22 nt, Human
cugagccagggccacacaugga

SEQ ID NO: 1141554 - RNA, 22 nt, Human
uccagaccuagggcaccccagu

SEQ ID NO: 1141555 - RNA, 22 nt, Human
ggagacucggguucuagccuug

SEQ ID NO: 1141556 - RNA, 22 nt, Human
aguuagaauauaauuauguuaa

SEQ ID NO: 1141557 - RNA, 22 nt, Human
ugcuucugggcaaaugugugug

SEQ ID NO: 1141558 - RNA, 22 nt, Human
cccacacacuggcugcugccaa

SEQ ID NO: 1141559 - RNA, 22 nt, Human
agagugaaguucaucgugcagc

SEQ ID NO: 1141560 - RNA, 22 nt, Human
aaaguaguuagucaugugaaaa

SEQ ID NO: 1141561 - RNA, 22 nt, Human
ucagcuuucucagaggccuaac

SEQ ID NO: 1141562 - RNA, 22 nt, Human
uggaacacuuuguugaaaugca

SEQ ID NO: 1141563 - RNA, 22 nt, Human
cuauuagguuggugcaaaagua

SEQ ID NO: 1141564 - RNA, 19 nt, Human
uggcagguagugagcaguc

SEQ ID NO: 1141565 - RNA, 22 nt, Human
ggccucagugggccgcugcagg

SEQ ID NO: 1141566 - RNA, 22 nt, Human
gucacacagggccuccaaauca

SEQ ID NO: 1141567 - RNA, 22 nt, Human
cagaggcagacccuccagggcg

SEQ ID NO: 1141568 - RNA, 22 nt, Human
uaugaaaugguaguaggaaggg

SEQ ID NO: 1141569 - RNA, 22 nt, Human
gaacaucagucauaauuuaacg

SEQ ID NO: 1141570 - RNA, 22 nt, Human
agcaguccaacugagguggcau

SEQ ID NO: 1141571 - RNA, 22 nt, Human
uucacauuugaaaggaaagaua

SEQ ID NO: 1141572 - RNA, 22 nt, Human
uggcagggccuaccccaauauc

SEQ ID NO: 1141573 - RNA, 22 nt, Human
aaagcagguugcaauuacagug

SEQ ID NO: 1141574 - RNA, 22 nt, Human
caguguggugugcacagcuuag

SEQ ID NO: 1141575 - RNA, 20 nt, Human
uaacuuucuaugcuuucagc

SEQ ID NO: 1141576 - RNA, 22 nt, Human
cucagagagggcaccagggcca

SEQ ID NO: 1141577 - RNA, 19 nt, Human
uggaccugugcccauggcu

SEQ ID NO: 1141578 - RNA, 22 nt, Human
agagggcaugcuugguggccug

SEQ ID NO: 1141579 - RNA, 22 nt, Human
aaagaucacgucccaggacucg

SEQ ID NO: 1141580 - RNA, 22 nt, Human
acagagagcugugauugaguua

SEQ ID NO: 1141581 - RNA, 20 nt, Human
ucccaggcugggcuccagcu

SEQ ID NO: 1141582 - RNA, 22 nt, Human
gcuggcaggagccuuucccuuu

SEQ ID NO: 1141583 - RNA, 22 nt, Human
uucuaucauacuugaauacauu

SEQ ID NO: 1141584 - RNA, 22 nt, Human
cuggcaguauuaagagaaguga

SEQ ID NO: 1141585 - RNA, 22 nt, Human
cuucauuaaugucuauaaguuu

SEQ ID NO: 1141586 - RNA, 22 nt, Human
auccugucaucauaguacuuga

SEQ ID NO: 1141587 - RNA, 22 nt, Human
caaagucagccagcuaguaggu

SEQ ID NO: 1141588 - RNA, 22 nt, Human
gacacagagggcaccagauaug

SEQ ID NO: 1141589 - RNA, 22 nt, Human
uacaauauguggccuuuuguga

SEQ ID NO: 1141590 - RNA, 22 nt, Human
ccucucccgggugccgcugggc

SEQ ID NO: 1141591 - RNA, 22 nt, Human
cucuuaaauaacaucauugcuu

SEQ ID NO: 1141592 - RNA, 22 nt, Human
ugcagugguugagagcccagac

SEQ ID NO: 1141593 - RNA, 22 nt, Human
ucacacauuucucaaguguagg

SEQ ID NO: 1141594 - RNA, 23 nt, Human
gaggcagcuccugcagugcccug

SEQ ID NO: 1141595 - RNA, 22 nt, Human
ugauucacagacuucacaaggc

SEQ ID NO: 1141596 - RNA, 22 nt, Human
ucagagaguccuggucauuugc

SEQ ID NO: 1141597 - RNA, 22 nt, Human
caaugauugcuauuuacauaaa

SEQ ID NO: 1141598 - RNA, 22 nt, Human
uggggaccagauuagaccaugg

SEQ ID NO: 1141599 - RNA, 23 nt, Human
uccaggcacgcauuucuucuagc

SEQ ID NO: 1141600 - RNA, 22 nt, Human
cagccucuguggcugccacacc

SEQ ID NO: 1141601 - RNA, 22 nt, Human
aaauuucaguuggaaugagcuc

SEQ ID NO: 1141602 - RNA, 22 nt, Human
acacauuugcauaauaccucau

SEQ ID NO: 1141603 - RNA, 19 nt, Human
cuccaagugccaaggacag

SEQ ID NO: 1141604 - RNA, 23 nt, Human
uccugcagauaagcugguugaca

SEQ ID NO: 1141605 - RNA, 22 nt, Human
augauugaaaaugacauugcca

SEQ ID NO: 1141606 - RNA, 22 nt, Human
acaugacuuuucucuuccagag

SEQ ID NO: 1141607 - RNA, 22 nt, Human
gauggccuggguccccuuccgg

SEQ ID NO: 1141608 - RNA, 22 nt, Human
ccugcagaggucaggccagaaa

SEQ ID NO: 1141609 - RNA, 22 nt, Human
guauuagguuggugcaaaauug

SEQ ID NO: 1141610 - RNA, 22 nt, Human
ugcuucugucucuuaugccuug

SEQ ID NO: 1141611 - RNA, 22 nt, Human
aaucuucauuuugacaagauuc

SEQ ID NO: 1141612 - RNA, 22 nt, Human
uauauauucuuaaguaguguag

SEQ ID NO: 1141613 - RNA, 22 nt, Human
ucuaggaguaaugagcuagcac

SEQ ID NO: 1141614 - RNA, 22 nt, Human
gcacccagccagcaucucagag

SEQ ID NO: 1141615 - RNA, 22 nt, Human
gaaacugaguaggcuagagcac

SEQ ID NO: 1141616 - RNA, 22 nt, Human
ugcaggcugcucaagacuuagu

SEQ ID NO: 1141617 - RNA, 22 nt, Human
augcuucagugcuaccuucaaa

SEQ ID NO: 1141618 - RNA, 22 nt, Human
ugguuccucaagcgcuggcggc

SEQ ID NO: 1141619 - RNA, 22 nt, Human
uccaggcagagcaacaaaauau

SEQ ID NO: 1141620 - RNA, 22 nt, Human
ccaaguacucucaccaaagcuu

SEQ ID NO: 1141621 - RNA, 21 nt, Human
ucuggcaguggucuuucaaau

SEQ ID NO: 1141622 - RNA, 22 nt, Human
uuucauaauauccagagauuuu

SEQ ID NO: 1141623 - RNA, 23 nt, Human
ccagcccuccaccagcucuaggc

SEQ ID NO: 1141624 - RNA, 20 nt, Human
ucaggcuccgcauuaacuua

SEQ ID NO: 1141625 - RNA, 22 nt, Human
uuuaauuuuccugguaggccug

SEQ ID NO: 1141626 - RNA, 22 nt, Human
guaugaaguuggacuguauaaa

SEQ ID NO: 1141627 - RNA, 22 nt, Human
cagugaggcucugcugagcggu

SEQ ID NO: 1141628 - RNA, 22 nt, Human
gaggagcugggacccugucauc

SEQ ID NO: 1141629 - RNA, 22 nt, Human
gaggugagaagggggucagaug

SEQ ID NO: 1141630 - RNA, 18 nt, Human
auccuugaugagaggucu

SEQ ID NO: 1141631 - RNA, 22 nt, Human
cuagggacagaaagaggguaga

SEQ ID NO: 1141632 - RNA, 22 nt, Human
gggcugacauauuuggugcucu

SEQ ID NO: 1141633 - RNA, 22 nt, Human
ucccacaugugaauccucaggu

SEQ ID NO: 1141634 - RNA, 22 nt, Human
aggaggcugcaacccugaggcc

SEQ ID NO: 1141635 - RNA, 22 nt, Human
acagauauuuggggaaagacgu

SEQ ID NO: 1141636 - RNA, 22 nt, Human
gcuucuggaagcugcuucugcc

SEQ ID NO: 1141637 - RNA, 22 nt, Human
uaaaauagcaugugcagugaaa

SEQ ID NO: 1141638 - RNA, 22 nt, Human
uccugcaggccagaggggugag

SEQ ID NO: 1141639 - RNA, 22 nt, Human
acacacaugcaugcuugccauu

SEQ ID NO: 1141640 - RNA, 22 nt, Human
aggugaguuacaggaggagguc

SEQ ID NO: 1141641 - RNA, 20 nt, Human
gcaggcuccgggcuugggag

SEQ ID NO: 1141642 - RNA, 22 nt, Human
cagcuuuccagagaccugcccc

SEQ ID NO: 1141643 - RNA, 22 nt, Human
aauuugcaugaugagaacaaua

SEQ ID NO: 1141644 - RNA, 22 nt, Human
gccaaaguaccuagcccucugc

SEQ ID NO: 1141645 - RNA, 22 nt, Human
gccaggcaggccacgcuguguu

SEQ ID NO: 1141646 - RNA, 22 nt, Human
aauugucaaacacaaauaagag

SEQ ID NO: 1141647 - RNA, 22 nt, Human
ggagaagaggagcuggaagccu

SEQ ID NO: 1141648 - RNA, 23 nt, Human
aaacuacauuuauaguuuuucuc

SEQ ID NO: 1141649 - RNA, 19 nt, Human
ccagcccacagugacuuuc

SEQ ID NO: 1141650 - RNA, 22 nt, Human
uacugacacaaagccaaucccu

SEQ ID NO: 1141651 - RNA, 22 nt, Human
auacaugacucacacauucugc

SEQ ID NO: 1141652 - RNA, 22 nt, Human
uuuaccaguguuaaacaccagc

SEQ ID NO: 1141653 - RNA, 22 nt, Human
ggacuccucuagaaguugaggc

SEQ ID NO: 1141654 - RNA, 22 nt, Human
ucaggcccuucucccaggacuc

SEQ ID NO: 1141655 - RNA, 20 nt, Human
ucagauuuuucuaacuuuga

SEQ ID NO: 1141656 - RNA, 22 nt, Human
cucugaaagaguuuaguauuau

SEQ ID NO: 1141657 - RNA, 22 nt, Human
gccuggcacaggaauuaggagg

SEQ ID NO: 1141658 - RNA, 22 nt, Human
uaggaaauggcucaguuacugc

SEQ ID NO: 1141659 - RNA, 22 nt, Human
cuguaugaaauuaaguaaacag

SEQ ID NO: 1141660 - RNA, 22 nt, Human
cuggcacgcccacguaggcacu

SEQ ID NO: 1141661 - RNA, 22 nt, Human
cauuuauuggcauguaguaggu

SEQ ID NO: 1141662 - RNA, 22 nt, Human
cauuuauucucagauccuuguc

SEQ ID NO: 1141663 - RNA, 22 nt, Human
ucuucaaagaauuuuaguaauu

SEQ ID NO: 1141664 - RNA, 18 nt, Human
uccugcagcuucuaugua

SEQ ID NO: 1141665 - RNA, 22 nt, Human
agaggcuuggccucaguucugu

SEQ ID NO: 1141666 - RNA, 22 nt, Human
aaauauguaagauuagcacuag

SEQ ID NO: 1141667 - RNA, 22 nt, Human
aaagaucaauagauaaagcuac

SEQ ID NO: 1141668 - RNA, 21 nt, Human
ucuggcagcaguuuguugagu

SEQ ID NO: 1141669 - RNA, 22 nt, Human
aagagcaucuauuucacagugg

SEQ ID NO: 1141670 - RNA, 22 nt, Human
gcucacagccggcuggcagggg

SEQ ID NO: 1141671 - RNA, 22 nt, Human
guuaugaaauaaauauagauca

SEQ ID NO: 1141672 - RNA, 22 nt, Human
ccagcuuuccugcgaguugauu

SEQ ID NO: 1141673 - RNA, 22 nt, Human
aaacaucaccauuuuaccuaau

SEQ ID NO: 1141674 - RNA, 22 nt, Human
uccaugagggacacuggaugcu

SEQ ID NO: 1141675 - RNA, 22 nt, Human
aaauauuugucugaggcgguug

SEQ ID NO: 1141676 - RNA, 22 nt, Human
gguuucaaugagaagugcuugu

SEQ ID NO: 1141677 - RNA, 22 nt, Human
ugguaagaacccaucagagaag

SEQ ID NO: 1141678 - RNA, 22 nt, Human
cagggcucaggaaaucagacgu

SEQ ID NO: 1141679 - RNA, 22 nt, Human
cacagagacagaagcacuuaug

SEQ ID NO: 1141680 - RNA, 22 nt, Human
uccacccugcuuuugucuuuga

SEQ ID NO: 1141681 - RNA, 23 nt, Human
aaacaugcagcacaugaaugcua

SEQ ID NO: 1141682 - RNA, 22 nt, Human
cccugcagagaccacugaccuu

SEQ ID NO: 1141683 - RNA, 22 nt, Human
ucagcuuugaucucaggcaauc

SEQ ID NO: 1141684 - RNA, 22 nt, Human
guuagguagaaguuuacuuuga

SEQ ID NO: 1141685 - RNA, 22 nt, Human
uuugauaagagcugcugaaacu

SEQ ID NO: 1141686 - RNA, 22 nt, Human
gcagggaccagggccagaucca

SEQ ID NO: 1141687 - RNA, 18 nt, Human
acaaaugugucacaggaa

SEQ ID NO: 1141688 - RNA, 22 nt, Human
cugcagccacgagucacagccc

SEQ ID NO: 1141689 - RNA, 22 nt, Human
cauguuuuguguacagaauauu

SEQ ID NO: 1141690 - RNA, 22 nt, Human
agggcugaagggaggugcucau

SEQ ID NO: 1141691 - RNA, 22 nt, Human
cacccacauggaaauucacagu

SEQ ID NO: 1141692 - RNA, 22 nt, Human
ugcagagaaaacuccuggguac

SEQ ID NO: 1141693 - RNA, 22 nt, Human
gaggcuguuaggagggacucug

SEQ ID NO: 1141694 - RNA, 20 nt, Human
uguucugucgucuuucuuca

SEQ ID NO: 1141695 - RNA, 18 nt, Human
cucagagaugcccuuauu

SEQ ID NO: 1141696 - RNA, 22 nt, Human
uaaaucuccuguuuuucaucua

SEQ ID NO: 1141697 - RNA, 22 nt, Human
auuucucaguuccuacuguuua

SEQ ID NO: 1141698 - RNA, 22 nt, Human
cgugagcaaaauggacacuccc

SEQ ID NO: 1141699 - RNA, 22 nt, Human
guacccaggcacgccuugcuga

SEQ ID NO: 1141700 - RNA, 22 nt, Human
ucauaaaucauacuccauuugc

SEQ ID NO: 1141701 - RNA, 22 nt, Human
aauuagggagccaucauaaggu

SEQ ID NO: 1141702 - RNA, 22 nt, Human
uuggaaaguuuuuacugaagac

SEQ ID NO: 1141703 - RNA, 22 nt, Human
cguaugaaauuuuugacauuug

SEQ ID NO: 1141704 - RNA, 22 nt, Human
uuuauucugugcuacaugaaga

SEQ ID NO: 1141705 - RNA, 22 nt, Human
ccucugugucuugguuucaaga

SEQ ID NO: 1141706 - RNA, 22 nt, Human
cgcaggcuccggggugcccugg

SEQ ID NO: 1141707 - RNA, 22 nt, Human
cagagcaucgcgcagagagccu

SEQ ID NO: 1141708 - RNA, 22 nt, Human
ccuggcagguggcgcccucggc

SEQ ID NO: 1141709 - RNA, 22 nt, Human
gucugucauacggcuuauguaa

SEQ ID NO: 1141710 - RNA, 19 nt, Human
aggcugugagggaggacuc

SEQ ID NO: 1141711 - RNA, 22 nt, Human
cccagcuugcaaauggguugcu

SEQ ID NO: 1141712 - RNA, 22 nt, Human
caguuuauuuccaagaugacaa

SEQ ID NO: 1141713 - RNA, 22 nt, Human
uauucccauuccacuuaucaag

SEQ ID NO: 1141714 - RNA, 22 nt, Human
ugugaagauuuggcaugcagaa

SEQ ID NO: 1141715 - RNA, 20 nt, Human
gcauccagacacccagcugc

SEQ ID NO: 1141716 - RNA, 22 nt, Human
ccaggcucugagccucacucuu

SEQ ID NO: 1141717 - RNA, 22 nt, Human
aacuuaaacccacucauguaga

SEQ ID NO: 1141718 - RNA, 22 nt, Human
ccugggcucugucagaauuggg

SEQ ID NO: 1141719 - RNA, 22 nt, Human
gagacacacauucuggagagaa

SEQ ID NO: 1141720 - RNA, 22 nt, Human
uuugacaaaggaaaaaugcaca

SEQ ID NO: 1141721 - RNA, 22 nt, Human
ugcuucugaacucagcaugugg

SEQ ID NO: 1141722 - RNA, 22 nt, Human
cagcuuuagagaaaacauauuu

SEQ ID NO: 1141723 - RNA, 22 nt, Human
uauauguaaauaagucuaaugu

SEQ ID NO: 1141724 - RNA, 22 nt, Human
uacauucagaagaauggacacg

SEQ ID NO: 1141725 - RNA, 22 nt, Human
ccacaggcugcugcaggucccg

SEQ ID NO: 1141726 - RNA, 22 nt, Human
uuuuucauugcagccucucucc

SEQ ID NO: 1141727 - RNA, 22 nt, Human
aggacaguccgggguccuccac

SEQ ID NO: 1141728 - RNA, 22 nt, Human
gcaguguuguuaaaagauuaga

SEQ ID NO: 1141729 - RNA, 22 nt, Human
ccagacccugcucuggggcucu

SEQ ID NO: 1141730 - RNA, 22 nt, Human
gccaagcuuggaaggaucaugg

SEQ ID NO: 1141731 - RNA, 22 nt, Human
uauguaaaguagauggcaggua

SEQ ID NO: 1141732 - RNA, 22 nt, Human
ggggaccuuuccauuucugaga

SEQ ID NO: 1141733 - RNA, 22 nt, Human
ccccacccucgcuccauuucgg

SEQ ID NO: 1141734 - RNA, 22 nt, Human
aguaugaacggaaggccuggga

SEQ ID NO: 1141735 - RNA, 22 nt, Human
acaucugaggagaccagccucu

SEQ ID NO: 1141736 - RNA, 22 nt, Human
acccaggcugcuucucaguggc

SEQ ID NO: 1141737 - RNA, 22 nt, Human
ugugugaaggaauauauacuca

SEQ ID NO: 1141738 - RNA, 22 nt, Human
uuccuggcgccacggagccggu

SEQ ID NO: 1141739 - RNA, 23 nt, Human
uuccaggcagagcagggauuaga

SEQ ID NO: 1141740 - RNA, 21 nt, Human
guuuucaugauagagucugua

SEQ ID NO: 1141741 - RNA, 22 nt, Human
uccuggcagagggcggccucga

SEQ ID NO: 1141742 - RNA, 22 nt, Human
augaaaaguucgaucuagaagg

SEQ ID NO: 1141743 - RNA, 22 nt, Human
cucaucaccacauauaacaaag

SEQ ID NO: 1141744 - RNA, 22 nt, Human
aaggaccuauauugucagagga

SEQ ID NO: 1141745 - RNA, 22 nt, Human
cugggcugcuguccacuagggu

SEQ ID NO: 1141746 - RNA, 21 nt, Human
acagugugcuucucucccucc

SEQ ID NO: 1141747 - RNA, 20 nt, Human
gauuacaaaaugaaaugcau

SEQ ID NO: 1141748 - RNA, 22 nt, Human
uucauacacgaaaaugcaugca

SEQ ID NO: 1141749 - RNA, 22 nt, Human
uuucauugucuacauaugacau

SEQ ID NO: 1141750 - RNA, 22 nt, Human
aguaugaauggaaacuaccuau

SEQ ID NO: 1141751 - RNA, 22 nt, Human
uggcaugggcaaaccagggaaa

SEQ ID NO: 1141752 - RNA, 22 nt, Human
uuucagauggagguuuaggaca

SEQ ID NO: 1141753 - RNA, 22 nt, Human
auccaggccccaagaccccgac

SEQ ID NO: 1141754 - RNA, 22 nt, Human
aucugcuuccugggcuccauga

SEQ ID NO: 1141755 - RNA, 21 nt, Human
ucuggggaagacaucuaggau

SEQ ID NO: 1141756 - RNA, 22 nt, Human
cagaagagaugaaauaguauua

SEQ ID NO: 1141757 - RNA, 22 nt, Human
augcuuuuccaggagaaauaua

SEQ ID NO: 1141758 - RNA, 22 nt, Human
aguucacauaucuguuuuauuu

SEQ ID NO: 1141759 - RNA, 22 nt, Human
caggcuccuucccagggauggu

SEQ ID NO: 1141760 - RNA, 22 nt, Human
acucacuuuccauucaagcacc

SEQ ID NO: 1141761 - RNA, 22 nt, Human
cagaaagaccugggcucaagag

SEQ ID NO: 1141762 - RNA, 22 nt, Human
cauguuaauaugcauugaguac

SEQ ID NO: 1141763 - RNA, 22 nt, Human
aguguugggucuuuagaauuua

SEQ ID NO: 1141764 - RNA, 22 nt, Human
uuccaaguugagcgauuuuccu

SEQ ID NO: 1141765 - RNA, 22 nt, Human
agggaagaagcugguaguaggu

SEQ ID NO: 1141766 - RNA, 21 nt, Human
ugcaggcuacuucugacucua

SEQ ID NO: 1141767 - RNA, 22 nt, Human
acugccaaugguaguuugaugg

SEQ ID NO: 1141768 - RNA, 22 nt, Human
cauaauauacuacauugaugaa

SEQ ID NO: 1141769 - RNA, 22 nt, Human
cagagggcucggcggccgcucc

SEQ ID NO: 1141770 - RNA, 22 nt, Human
agacaggcuuugcuguauauca

SEQ ID NO: 1141771 - RNA, 22 nt, Human
agcaggcuccaggcuggccauc

SEQ ID NO: 1141772 - RNA, 22 nt, Human
auuuucaucgcuagguuggccu

SEQ ID NO: 1141773 - RNA, 22 nt, Human
ggcuuuauguuuuucauguggu

SEQ ID NO: 1141774 - RNA, 22 nt, Human
ugcaggcuggauuugcuuuugu

SEQ ID NO: 1141775 - RNA, 22 nt, Human
aauaacuucaguucuuacauua

SEQ ID NO: 1141776 - RNA, 22 nt, Human
ccuggcaggcaagaggaaggga

SEQ ID NO: 1141777 - RNA, 22 nt, Human
ugaaugauacagaauuauguag

SEQ ID NO: 1141778 - RNA, 22 nt, Human
cugcaggggcuggaguuggcuu

SEQ ID NO: 1141779 - RNA, 22 nt, Human
acacacuguugcucauccaggc

SEQ ID NO: 1141780 - RNA, 22 nt, Human
cugcaggagcaaagccucugcu

SEQ ID NO: 1141781 - RNA, 22 nt, Human
cuguuuaucucuaaccuguuua

SEQ ID NO: 1141782 - RNA, 22 nt, Human
uaauuucuagggacuaaggugc

SEQ ID NO: 1141783 - RNA, 22 nt, Human
cagcccucaucucagcuucuuu

SEQ ID NO: 1141784 - RNA, 18 nt, Human
ggccucuggacuggcagc

SEQ ID NO: 1141785 - RNA, 22 nt, Human
aauaucuucuaaggauagaacu

SEQ ID NO: 1141786 - RNA, 22 nt, Human
gcugggcuggaaggccaaggca

SEQ ID NO: 1141787 - RNA, 22 nt, Human
acauauuuugaaagcuuucuaa

SEQ ID NO: 1141788 - RNA, 22 nt, Human
acagcuuuucugauagauccug

SEQ ID NO: 1141789 - RNA, 22 nt, Human
ccagcuuuagguugccugccag

SEQ ID NO: 1141790 - RNA, 22 nt, Human
ugcuuuauaaccauuucugugg

SEQ ID NO: 1141791 - RNA, 20 nt, Human
uggaccugucucuuuaggga

SEQ ID NO: 1141792 - RNA, 22 nt, Human
gagcucagccugaggccuggcu

SEQ ID NO: 1141793 - RNA, 18 nt, Human
ccuagccuccaagcucau

SEQ ID NO: 1141794 - RNA, 22 nt, Human
uucuuaaaacuuauggacaggu

SEQ ID NO: 1141795 - RNA, 22 nt, Human
ucccagccuuccagucugguuu

SEQ ID NO: 1141796 - RNA, 22 nt, Human
ugcagggccuucuagaccaugg

SEQ ID NO: 1141797 - RNA, 22 nt, Human
cuagguauucauguuucguggc

SEQ ID NO: 1141798 - RNA, 20 nt, Human
auacacauauucuugcaacu

SEQ ID NO: 1141799 - RNA, 22 nt, Human
auuagggaaacugacuugucuc

SEQ ID NO: 1141800 - RNA, 22 nt, Human
ccuggcaggacuguuguaagaa

SEQ ID NO: 1141801 - RNA, 20 nt, Human
ggccucaguguccuuguuug

SEQ ID NO: 1141802 - RNA, 22 nt, Human
gcuggcaggguucucacugaaa

SEQ ID NO: 1141803 - RNA, 22 nt, Human
uauuacagaaucaggcauaacu

SEQ ID NO: 1141804 - RNA, 22 nt, Human
ccagagaggccaaggucguggu

SEQ ID NO: 1141805 - RNA, 22 nt, Human
auguuauggcucaaacauuugg

SEQ ID NO: 1141806 - RNA, 22 nt, Human
ccugggcucgcgcacuucaccc

SEQ ID NO: 1141807 - RNA, 22 nt, Human
uuuaucuuuaggacuuugcaga

SEQ ID NO: 1141808 - RNA, 22 nt, Human
cagggccagagagggcuggcug

SEQ ID NO: 1141809 - RNA, 22 nt, Human
cugcuuuagacaacugcuggga

SEQ ID NO: 1141810 - RNA, 22 nt, Human
agauaugugcgucuuagauuga

SEQ ID NO: 1141811 - RNA, 22 nt, Human
gggagcuguaagggacagguag

SEQ ID NO: 1141812 - RNA, 22 nt, Human
ugcuuuauuuuaaauaugccau

SEQ ID NO: 1141813 - RNA, 22 nt, Human
uucucuuaucuggcauuauugg

SEQ ID NO: 1141814 - RNA, 22 nt, Human
aauuaugauuggucuaaaccag

SEQ ID NO: 1141815 - RNA, 22 nt, Human
uugggaagaauggaggugguua

SEQ ID NO: 1141816 - RNA, 22 nt, Human
guuacucuuccccggggucugg

SEQ ID NO: 1141817 - RNA, 22 nt, Human
ccagcccuuagauaaaccuggc

SEQ ID NO: 1141818 - RNA, 22 nt, Human
ucuggcagcucaguucaggucu

SEQ ID NO: 1141819 - RNA, 22 nt, Human
uuaggaaaaucaugagagauga

SEQ ID NO: 1141820 - RNA, 22 nt, Human
augaagcugaaaaaggcauaua

SEQ ID NO: 1141821 - RNA, 22 nt, Human
aaauaguucagccacggugacu

SEQ ID NO: 1141822 - RNA, 22 nt, Human
acaggcagguccugucccagcu

SEQ ID NO: 1141823 - RNA, 16 nt, Human
cagcuuuaugucagug

SEQ ID NO: 1141824 - RNA, 22 nt, Human
auuccacagcuacaucaaucua

SEQ ID NO: 1141825 - RNA, 22 nt, Human
agcuugauuucucugcagugug

SEQ ID NO: 1141826 - RNA, 22 nt, Human
cauaugaaauaugaguugaaca

SEQ ID NO: 1141827 - RNA, 22 nt, Human
agucucuuuaaucacagugucu

SEQ ID NO: 1141828 - RNA, 22 nt, Human
uggggacccggacuccuggguc

SEQ ID NO: 1141829 - RNA, 22 nt, Human
aagggcuccauccuuauaaaug

SEQ ID NO: 1141830 - RNA, 18 nt, Human
cuccuggcugauggugag

SEQ ID NO: 1141831 - RNA, 20 nt, Human
gauacacagcacagagggcc

SEQ ID NO: 1141832 - RNA, 22 nt, Human
uggaacacuggcuuuccacugu

SEQ ID NO: 1141833 - RNA, 22 nt, Human
augacugcucugggcucccaug

SEQ ID NO: 1141834 - RNA, 22 nt, Human
ggcuuucuaugaacucaaaggc

SEQ ID NO: 1141835 - RNA, 22 nt, Human
uauggaaagcucuuuuugauug

SEQ ID NO: 1141836 - RNA, 22 nt, Human
cuggccuggggggacacauccc

SEQ ID NO: 1141837 - RNA, 22 nt, Human
ccuggcagcauugguagagauu

SEQ ID NO: 1141838 - RNA, 22 nt, Human
gcagggaccucacuacccccag

SEQ ID NO: 1141839 - RNA, 22 nt, Human
uccugcagcugauaaauacagu

SEQ ID NO: 1141840 - RNA, 23 nt, Human
ugccaaaguuuaccuaacacugg

SEQ ID NO: 1141841 - RNA, 22 nt, Human
cccugcagaucuaggguccuuc

SEQ ID NO: 1141842 - RNA, 22 nt, Human
aauucugugcaggcagagcuau

SEQ ID NO: 1141843 - RNA, 22 nt, Human
gccaagcuuauaugaugcuuga

SEQ ID NO: 1141844 - RNA, 22 nt, Human
aaucuuagguuuggcuucaucu

SEQ ID NO: 1141845 - RNA, 22 nt, Human
acuagauaauuauaaaagguag

SEQ ID NO: 1141846 - RNA, 22 nt, Human
accugcaggggugcucucuggg

SEQ ID NO: 1141847 - RNA, 22 nt, Human
gagaaagaugaagaguggcguu

SEQ ID NO: 1141848 - RNA, 22 nt, Human
uugggaagaaacauguccauca

SEQ ID NO: 1141849 - RNA, 22 nt, Human
uuuuucuuaaauguggguuggc

SEQ ID NO: 1141850 - RNA, 22 nt, Human
uacauaauuaaucuuuaaguuc

SEQ ID NO: 1141851 - RNA, 22 nt, Human
uagggcucacugagaugaauau

SEQ ID NO: 1141852 - RNA, 22 nt, Human
uaacuuucacaucacacugacu

SEQ ID NO: 1141853 - RNA, 22 nt, Human
aaauaguuacuucugcugucuu

SEQ ID NO: 1141854 - RNA, 22 nt, Human
uaguuaggaauagcagcgacuc

SEQ ID NO: 1141855 - RNA, 22 nt, Human
aacaaucaaguuucuaaaugac

SEQ ID NO: 1141856 - RNA, 22 nt, Human
acacacuuuaaauuaaaccucu

SEQ ID NO: 1141857 - RNA, 22 nt, Human
acacacaugccuuuccuaagua

SEQ ID NO: 1141858 - RNA, 22 nt, Human
cccucucucaggcugacagccu

SEQ ID NO: 1141859 - RNA, 22 nt, Human
cacaucccuggaguuacccagu

SEQ ID NO: 1141860 - RNA, 22 nt, Human
gcuggggagggcgucaaggcca

SEQ ID NO: 1141861 - RNA, 22 nt, Human
uggaacacaucuaaggaagcag

SEQ ID NO: 1141862 - RNA, 22 nt, Human
uguaugaaguuacugagccucu

SEQ ID NO: 1141863 - RNA, 19 nt, Human
acauauguggauauacaug

SEQ ID NO: 1141864 - RNA, 22 nt, Human
ccuucaaaacacuaguuuuuga

SEQ ID NO: 1141865 - RNA, 22 nt, Human
ucaugaacauggaauaucuuuu

SEQ ID NO: 1141866 - RNA, 22 nt, Human
ugggaccucucuugagagagca

SEQ ID NO: 1141867 - RNA, 22 nt, Human
uggaccugggguggccuccucu

SEQ ID NO: 1141868 - RNA, 22 nt, Human
uuuguuuucaaugugucauuca

SEQ ID NO: 1141869 - RNA, 22 nt, Human
ugggcucucaaagugcggcuug

SEQ ID NO: 1141870 - RNA, 22 nt, Human
uuuaacaugugaauuuuggaag

SEQ ID NO: 1141871 - RNA, 22 nt, Human
gcacacugcggugaugugaguc

SEQ ID NO: 1141872 - RNA, 22 nt, Human
ccaggcagggcucaaggaaccu

SEQ ID NO: 1141873 - RNA, 22 nt, Human
cagcuuauucaguaagcacaua

SEQ ID NO: 1141874 - RNA, 22 nt, Human
uuccaagugcugaggacaguag

SEQ ID NO: 1141875 - RNA, 22 nt, Human
ggccagggggcuucagacucca

SEQ ID NO: 1141876 - RNA, 22 nt, Human
uuauuuucuccucagaaagugg

SEQ ID NO: 1141877 - RNA, 22 nt, Human
uacacagauaugugaucaauca

SEQ ID NO: 1141878 - RNA, 22 nt, Human
auguuggagucguaaggcaugg

SEQ ID NO: 1141879 - RNA, 22 nt, Human
uguuuucauuugauguaacaaa

SEQ ID NO: 1141880 - RNA, 22 nt, Human
ucaggagcucuucccuggugug

SEQ ID NO: 1141881 - RNA, 22 nt, Human
gcacccaggccggcgacugcag

SEQ ID NO: 1141882 - RNA, 22 nt, Human
ucucuuaauuguaaugguuccu

SEQ ID NO: 1141883 - RNA, 20 nt, Human
uccaugaguuagagacuaua

SEQ ID NO: 1141884 - RNA, 22 nt, Human
ucugucaaaaguuuucaauaaa

SEQ ID NO: 1141885 - RNA, 22 nt, Human
uguuugaacugaauaacauagu

SEQ ID NO: 1141886 - RNA, 22 nt, Human
cacacucauuagucauuucucu

SEQ ID NO: 1141887 - RNA, 22 nt, Human
ccaaggcaggggaucaaaguuu

SEQ ID NO: 1141888 - RNA, 22 nt, Human
gggcugacgaaggccaugugug

SEQ ID NO: 1141889 - RNA, 23 nt, Human
cagcuuucagggcuuuagggaag

SEQ ID NO: 1141890 - RNA, 21 nt, Human
ugucagagcuuguaggacauu

SEQ ID NO: 1141891 - RNA, 22 nt, Human
gacuacucaaacuuucucuaua

SEQ ID NO: 1141892 - RNA, 22 nt, Human
ucagcucuguuuugaguggaac

SEQ ID NO: 1141893 - RNA, 22 nt, Human
acagagagguaaaauauauagu

SEQ ID NO: 1141894 - RNA, 22 nt, Human
gcauaugaucacgugugucggu

SEQ ID NO: 1141895 - RNA, 22 nt, Human
cagagccuuccuagcagacucu

SEQ ID NO: 1141896 - RNA, 22 nt, Human
ccacuguaguuaugaugaaguu

SEQ ID NO: 1141897 - RNA, 22 nt, Human
uuccaagucuaaguuauaaauc

SEQ ID NO: 1141898 - RNA, 22 nt, Human
agcuuuaucacaauauuggcua

SEQ ID NO: 1141899 - RNA, 22 nt, Human
augugguugaagaauuacaucu

SEQ ID NO: 1141900 - RNA, 22 nt, Human
cuguaaaacacuguaguaucug

SEQ ID NO: 1141901 - RNA, 22 nt, Human
ccuggcagcgccgaagcuggcc

SEQ ID NO: 1141902 - RNA, 22 nt, Human
cccccaaaguuugcacggauaa

SEQ ID NO: 1141903 - RNA, 22 nt, Human
aagcuuuaagugucagucagcc

SEQ ID NO: 1141904 - RNA, 22 nt, Human
ucugaacagaaaagaugcacaa

SEQ ID NO: 1141905 - RNA, 22 nt, Human
uauucacaggcacgaaauauug

SEQ ID NO: 1141906 - RNA, 22 nt, Human
ccuggggaagucacuucucuuu

SEQ ID NO: 1141907 - RNA, 22 nt, Human
accaggcaugauguggagcaca

SEQ ID NO: 1141908 - RNA, 22 nt, Human
uagcuuuaagaugagaugugga

SEQ ID NO: 1141909 - RNA, 20 nt, Human
aacacagauaccaaagguug

SEQ ID NO: 1141910 - RNA, 22 nt, Human
agcucugacauugauucucagc

SEQ ID NO: 1141911 - RNA, 22 nt, Human
ggcauccaaauaccaagaugua

SEQ ID NO: 1141912 - RNA, 22 nt, Human
ccuggcagcuguuuggcuuggc

SEQ ID NO: 1141913 - RNA, 22 nt, Human
aacccaggagacagguugcagu

SEQ ID NO: 1141914 - RNA, 21 nt, Human
ucacacacguuuccaagggca

SEQ ID NO: 1141915 - RNA, 22 nt, Human
cuccucuggguccugguggcca

SEQ ID NO: 1141916 - RNA, 22 nt, Human
guaaacaugcuguguacucagc

SEQ ID NO: 1141917 - RNA, 22 nt, Human
ucuggcagagugauaggauaag

SEQ ID NO: 1141918 - RNA, 22 nt, Human
uggaacacagugauugauagcg

SEQ ID NO: 1141919 - RNA, 22 nt, Human
gaacacauuagucugaguuggc

SEQ ID NO: 1141920 - RNA, 19 nt, Human
agcaacaccguuuauuucc

SEQ ID NO: 1141921 - RNA, 22 nt, Human
cacauuccuggugcucagcagc

SEQ ID NO: 1141922 - RNA, 22 nt, Human
gcaggcuccaacuggaggaguu

SEQ ID NO: 1141923 - RNA, 22 nt, Human
cucucugggcccaguuggcacc

SEQ ID NO: 1141924 - RNA, 22 nt, Human
ucuggcaggccuugucaaucug

SEQ ID NO: 1141925 - RNA, 17 nt, Human
gagccacccugugcgag

SEQ ID NO: 1141926 - RNA, 22 nt, Human
cccaggcagagagcuggugagc

SEQ ID NO: 1141927 - RNA, 20 nt, Human
ccccacacuauugagcacuu

SEQ ID NO: 1141928 - RNA, 22 nt, Human
uccuggcacccuuggguuggag

SEQ ID NO: 1141929 - RNA, 19 nt, Human
aaaguuuuauucucauuug

SEQ ID NO: 1141930 - RNA, 22 nt, Human
uuaauuuuaaccuguuuguguc

SEQ ID NO: 1141931 - RNA, 22 nt, Human
cugugaucauucuugauuuaag

SEQ ID NO: 1141932 - RNA, 22 nt, Human
acagcuuuuuacuaauagauug

SEQ ID NO: 1141933 - RNA, 22 nt, Human
accaggcagagcugggccuuaa

SEQ ID NO: 1141934 - RNA, 22 nt, Human
cuuguuaaaaugcagauuccaa

SEQ ID NO: 1141935 - RNA, 22 nt, Human
auauuaggcaaggagauuauuu

SEQ ID NO: 1141936 - RNA, 22 nt, Human
gauaauauuagaagauacaaau

SEQ ID NO: 1141937 - RNA, 22 nt, Human
uucugucaaaugccaguagaga

SEQ ID NO: 1141938 - RNA, 20 nt, Human
auguccagugacuggaccau

SEQ ID NO: 1141939 - RNA, 22 nt, Human
auacuucuuugauguucacagg

SEQ ID NO: 1141940 - RNA, 22 nt, Human
auucucuggcuaaaaccugaag

SEQ ID NO: 1141941 - RNA, 22 nt, Human
uguuuauugagugccuacuaua

SEQ ID NO: 1141942 - RNA, 16 nt, Human
uguaugaacgucucca

SEQ ID NO: 1141943 - RNA, 22 nt, Human
uagggacaaagagcugaggccu

SEQ ID NO: 1141944 - RNA, 22 nt, Human
uucccacagagauuacauugaa

SEQ ID NO: 1141945 - RNA, 22 nt, Human
uccaggcaucuguauuuuuuaa

SEQ ID NO: 1141946 - RNA, 22 nt, Human
gcagcuuuaaaggaggcucuga

SEQ ID NO: 1141947 - RNA, 22 nt, Human
uuaaauuuuagaaacagacucu

SEQ ID NO: 1141948 - RNA, 22 nt, Human
guccuggcccacuggcaggcug

SEQ ID NO: 1141949 - RNA, 22 nt, Human
uucugucauccuuucuagaugu

SEQ ID NO: 1141950 - RNA, 22 nt, Human
caggacauugauccauuggcac

SEQ ID NO: 1141951 - RNA, 22 nt, Human
cauaauuucccaagagauugaa

SEQ ID NO: 1141952 - RNA, 22 nt, Human
ugcauaaacuucucugguguga

SEQ ID NO: 1141953 - RNA, 22 nt, Human
gguggccugaauuagcucaggg

SEQ ID NO: 1141954 - RNA, 22 nt, Human
aaauggaucuguggaauacauu

SEQ ID NO: 1141955 - RNA, 18 nt, Human
ugaccugcgcuucacggu

SEQ ID NO: 1141956 - RNA, 22 nt, Human
ucccugugagaaaugaagcagg

SEQ ID NO: 1141957 - RNA, 22 nt, Human
aaaguguugauaugugacaucc

SEQ ID NO: 1141958 - RNA, 22 nt, Human
cagccucuugcacuuugaaggc

SEQ ID NO: 1141959 - RNA, 22 nt, Human
aaagagucuggcacuguaccag

SEQ ID NO: 1141960 - RNA, 22 nt, Human
ugcuggcacguggaccaggaga

SEQ ID NO: 1141961 - RNA, 22 nt, Human
ccuggcaguuuugcccaggauu

SEQ ID NO: 1141962 - RNA, 22 nt, Human
cucaccccacuaccccuuggug

SEQ ID NO: 1141963 - RNA, 22 nt, Human
aguccaguguguucuggcagca

SEQ ID NO: 1141964 - RNA, 20 nt, Human
aguguuugcucacagucucc

SEQ ID NO: 1141965 - RNA, 22 nt, Human
cuggcaggagcauucacagagg

SEQ ID NO: 1141966 - RNA, 22 nt, Human
uauucacaguugauuuacaguu

SEQ ID NO: 1141967 - RNA, 22 nt, Human
aauguaugaagguuccaguuuc

SEQ ID NO: 1141968 - RNA, 21 nt, Human
aggucccagguuugggcagca

SEQ ID NO: 1141969 - RNA, 22 nt, Human
cacaugaagagagucuaguaau

SEQ ID NO: 1141970 - RNA, 22 nt, Human
aguauaaagugguuuucagcac

SEQ ID NO: 1141971 - RNA, 22 nt, Human
aggagcugcagauucugccuug

SEQ ID NO: 1141972 - RNA, 22 nt, Human
uccaggcaucccccaggacaga

SEQ ID NO: 1141973 - RNA, 22 nt, Human
caguguggcugagacagaggcu

SEQ ID NO: 1141974 - RNA, 23 nt, Human
ugcagggcaaguuagagacccca

SEQ ID NO: 1141975 - RNA, 22 nt, Human
ucuaugaaaagucuauucauuc

SEQ ID NO: 1141976 - RNA, 22 nt, Human
guuuucaugucuauugggcaua

SEQ ID NO: 1141977 - RNA, 22 nt, Human
uugugcucuguguuauuuaagg

SEQ ID NO: 1141978 - RNA, 22 nt, Human
uaugaacucuggagucugagug

SEQ ID NO: 1141979 - RNA, 22 nt, Human
acacauuucucuuuuuguaagu

SEQ ID NO: 1141980 - RNA, 22 nt, Human
auaugagaguaaaugccgaucu

SEQ ID NO: 1141981 - RNA, 22 nt, Human
cagggcucgcugccagcuucag

SEQ ID NO: 1141982 - RNA, 22 nt, Human
cuucugggcauucagcugcaca

SEQ ID NO: 1141983 - RNA, 20 nt, Human
cugaaccaaggcuuucucag

SEQ ID NO: 1141984 - RNA, 23 nt, Human
ccuggggagcuguauccagagug

SEQ ID NO: 1141985 - RNA, 22 nt, Human
gcaaggacucccugggucauuc

SEQ ID NO: 1141986 - RNA, 22 nt, Human
cagcuuuaguaacccacugcuc

SEQ ID NO: 1141987 - RNA, 22 nt, Human
guauuaggaaauaugaagaaag

SEQ ID NO: 1141988 - RNA, 22 nt, Human
gcaggggcuaaggacacagaga

SEQ ID NO: 1141989 - RNA, 22 nt, Human
cacccagcagcacuuaagacua

SEQ ID NO: 1141990 - RNA, 22 nt, Human
cucaaauauaagcuaaaugugg

SEQ ID NO: 1141991 - RNA, 23 nt, Human
ucuguacaauugagaagagaaca

SEQ ID NO: 1141992 - RNA, 22 nt, Human
uucauagagcagcucacugaau

SEQ ID NO: 1141993 - RNA, 22 nt, Human
uucacuuauagggauguuauug

SEQ ID NO: 1141994 - RNA, 22 nt, Human
ggagcugaaggggugggcucag

SEQ ID NO: 1141995 - RNA, 22 nt, Human
ucaagagauugaauaauaacug

SEQ ID NO: 1141996 - RNA, 22 nt, Human
uccaguggcaccuuggcccuca

SEQ ID NO: 1141997 - RNA, 22 nt, Human
uugaauuauaagugugucuacu

SEQ ID NO: 1141998 - RNA, 22 nt, Human
caaagagcuguucagugucgcu

SEQ ID NO: 1141999 - RNA, 22 nt, Human
acacaucaugccaaguuucacc

SEQ ID NO: 1142000 - RNA, 22 nt, Human
ccaggcucugacauagauggga

SEQ ID NO: 1142001 - RNA, 22 nt, Human
cuucauuaaccaaaaugcaaua

SEQ ID NO: 1142002 - RNA, 19 nt, Human
gccugcagaaaaggcaggg

SEQ ID NO: 1142003 - RNA, 22 nt, Human
cagggcucuucaucacacagua

SEQ ID NO: 1142004 - RNA, 22 nt, Human
uacaaguaaauuguagauacca

SEQ ID NO: 1142005 - RNA, 22 nt, Human
agucuacaaucuuaaaugaacu

SEQ ID NO: 1142006 - RNA, 22 nt, Human
guuaaccaaggcaccaagugua

SEQ ID NO: 1142007 - RNA, 22 nt, Human
gguuuauuaaugugaacuguau

SEQ ID NO: 1142008 - RNA, 22 nt, Human
uguaggaauguuuuuaaguugg

SEQ ID NO: 1142009 - RNA, 22 nt, Human
ugaguguauaucaggagagagc

SEQ ID NO: 1142010 - RNA, 22 nt, Human
gugaaacagaagcuccuggaau

SEQ ID NO: 1142011 - RNA, 22 nt, Human
uaauaguuucauaaugugcuuc

SEQ ID NO: 1142012 - RNA, 22 nt, Human
aauacugucuuucacagauauu

SEQ ID NO: 1142013 - RNA, 22 nt, Human
cagugaggugcccagccugccc

SEQ ID NO: 1142014 - RNA, 22 nt, Human
ugcuucuggggacaggcugccu

SEQ ID NO: 1142015 - RNA, 22 nt, Human
caugaaaucugaguauguuucc

SEQ ID NO: 1142016 - RNA, 22 nt, Human
cuuccucccccacacacucacu

SEQ ID NO: 1142017 - RNA, 22 nt, Human
auuucucagugaaaugacaggc

SEQ ID NO: 1142018 - RNA, 22 nt, Human
ggccucaggguugggcccauua

SEQ ID NO: 1142019 - RNA, 22 nt, Human
guggccaggccgacugccaggc

SEQ ID NO: 1142020 - RNA, 22 nt, Human
cagcacaggucaguuuuuuaag

SEQ ID NO: 1142021 - RNA, 22 nt, Human
uagggacccucccugcucuaac

SEQ ID NO: 1142022 - RNA, 22 nt, Human
ccccacaccugccgggcagcag

SEQ ID NO: 1142023 - RNA, 22 nt, Human
ucagagagguuggugauaagaa

SEQ ID NO: 1142024 - RNA, 22 nt, Human
uccugcagcauccgucgucugu

SEQ ID NO: 1142025 - RNA, 22 nt, Human
guccucuggagguuuuuaggug

SEQ ID NO: 1142026 - RNA, 22 nt, Human
cacaucagguagaccuacagag

SEQ ID NO: 1142027 - RNA, 15 nt, Human
ccaggcucugcacuc

SEQ ID NO: 1142028 - RNA, 22 nt, Human
ggggaccuucccagagcaguug

SEQ ID NO: 1142029 - RNA, 22 nt, Human
uccccacagcagaagaucugag

SEQ ID NO: 1142030 - RNA, 22 nt, Human
gcccagcuuuucacuuccacac

SEQ ID NO: 1142031 - RNA, 22 nt, Human
uuuaaauuauaguuaaugucug

SEQ ID NO: 1142032 - RNA, 19 nt, Human
acuggcagcuguagucugu

SEQ ID NO: 1142033 - RNA, 22 nt, Human
cuccagugagugagcaggcgac

SEQ ID NO: 1142034 - RNA, 22 nt, Human
cagccucugacaccacagucgu

SEQ ID NO: 1142035 - RNA, 22 nt, Human
cagcauuuaaugcagugcuucc

SEQ ID NO: 1142036 - RNA, 22 nt, Human
auuagggcuggaugcaaggaaa

SEQ ID NO: 1142037 - RNA, 22 nt, Human
accaggcagcacuuuccuugca

SEQ ID NO: 1142038 - RNA, 22 nt, Human
ccagagagaaaauggagggcca

SEQ ID NO: 1142039 - RNA, 21 nt, Human
cagcuucuucugugaccuggu

SEQ ID NO: 1142040 - RNA, 22 nt, Human
aacauaauguggccaaagucac

SEQ ID NO: 1142041 - RNA, 22 nt, Human
uuucuuucaauucuccuaaugc

SEQ ID NO: 1142042 - RNA, 22 nt, Human
auuuagacuucccagcacugug

SEQ ID NO: 1142043 - RNA, 22 nt, Human
gcccucucuucugcagccucca

SEQ ID NO: 1142044 - RNA, 22 nt, Human
caggucccugcgccccggccuc

SEQ ID NO: 1142045 - RNA, 22 nt, Human
agcaggggcuccuccacagcca

SEQ ID NO: 1142046 - RNA, 22 nt, Human
ugccaggcacgugagaguggcc

SEQ ID NO: 1142047 - RNA, 22 nt, Human
acuggcagaggauagcacuaau

SEQ ID NO: 1142048 - RNA, 22 nt, Human
acuccugggugcugaccagcgu

SEQ ID NO: 1142049 - RNA, 22 nt, Human
auuaaauuagcaaacugugaaa

SEQ ID NO: 1142050 - RNA, 22 nt, Human
ucucuuaauaaguaaauacuga

SEQ ID NO: 1142051 - RNA, 22 nt, Human
gaaaagaguccugugugaggag

SEQ ID NO: 1142052 - RNA, 22 nt, Human
cuccuggcuuucccagaccagg

SEQ ID NO: 1142053 - RNA, 22 nt, Human
gucugucaucugagauggagug

SEQ ID NO: 1142054 - RNA, 22 nt, Human
gagcuuuagcugagaccugcuu

SEQ ID NO: 1142055 - RNA, 22 nt, Human
aauauuucuguagcuauguucu

SEQ ID NO: 1142056 - RNA, 22 nt, Human
cagacagagucuucccaucagu

SEQ ID NO: 1142057 - RNA, 22 nt, Human
gccaaaucacagggccaaaagc

SEQ ID NO: 1142058 - RNA, 22 nt, Human
uuccaagugaaaguagcuuugu

SEQ ID NO: 1142059 - RNA, 22 nt, Human
auuacucugucugccucugacc

SEQ ID NO: 1142060 - RNA, 22 nt, Human
cagaggcugccagccaugugca

SEQ ID NO: 1142061 - RNA, 22 nt, Human
gggguggcccuacccucuggaa

SEQ ID NO: 1142062 - RNA, 22 nt, Human
uggcaguggcucagagugcaga

SEQ ID NO: 1142063 - RNA, 22 nt, Human
ucccaccccggucaagggcuga

SEQ ID NO: 1142064 - RNA, 22 nt, Human
guuuagaacacggaaauacuga

SEQ ID NO: 1142065 - RNA, 22 nt, Human
aauuaggggaggacguaucaua

SEQ ID NO: 1142066 - RNA, 23 nt, Human
uggccaggguacuacacccaccc

SEQ ID NO: 1142067 - RNA, 22 nt, Human
acuggcagagguuggacaccau

SEQ ID NO: 1142068 - RNA, 22 nt, Human
uacacaucacuguaucuuucag

SEQ ID NO: 1142069 - RNA, 22 nt, Human
uuucuauugaucuaauaaacau

SEQ ID NO: 1142070 - RNA, 22 nt, Human
acacacuguaaggacuaucacu

SEQ ID NO: 1142071 - RNA, 22 nt, Human
cgcuaggauuaggauuaauccu

SEQ ID NO: 1142072 - RNA, 22 nt, Human
cuacauggagaagaaaauucuu

SEQ ID NO: 1142073 - RNA, 22 nt, Human
uuuucauuguuacuaugagcua

SEQ ID NO: 1142074 - RNA, 22 nt, Human
ugcucuguauucuauggcaguu

SEQ ID NO: 1142075 - RNA, 21 nt, Human
aggcucccagaaaugggcauc

SEQ ID NO: 1142076 - RNA, 20 nt, Human
aggcucugccugcaggccca

SEQ ID NO: 1142077 - RNA, 22 nt, Human
agggcccaggacagcaucaggg

SEQ ID NO: 1142078 - RNA, 22 nt, Human
ccuggcuccugccucugcaggg

SEQ ID NO: 1142079 - RNA, 22 nt, Human
uggaaauacuugccauaaaacu

SEQ ID NO: 1142080 - RNA, 22 nt, Human
ggguuccuccaguuccuagagc

SEQ ID NO: 1142081 - RNA, 22 nt, Human
uacagcauauacagaaugaaca

SEQ ID NO: 1142082 - RNA, 22 nt, Human
uuuucauuuacauuagggaaga

SEQ ID NO: 1142083 - RNA, 23 nt, Human
agaccugcaucugauaggcccug

SEQ ID NO: 1142084 - RNA, 23 nt, Human
ucagggacaugaugugucauauc

SEQ ID NO: 1142085 - RNA, 22 nt, Human
acuggcagggggagccccgaga

SEQ ID NO: 1142086 - RNA, 22 nt, Human
auggcagacgaggcagcagggg

SEQ ID NO: 1142087 - RNA, 22 nt, Human
gauuuauugucccuguccugcu

SEQ ID NO: 1142088 - RNA, 22 nt, Human
cuucugggauuuuugaagacuc

SEQ ID NO: 1142089 - RNA, 22 nt, Human
ccagccacugggccacugccag

SEQ ID NO: 1142090 - RNA, 22 nt, Human
uggucucugcaggccaggcuca

SEQ ID NO: 1142091 - RNA, 22 nt, Human
gaggagggagcuggaagcucuu

SEQ ID NO: 1142092 - RNA, 22 nt, Human
gccaggcaauguguuagaagcg

SEQ ID NO: 1142093 - RNA, 22 nt, Human
uccaggcacgaggcccugugca

SEQ ID NO: 1142094 - RNA, 22 nt, Human
uguaaacauaccagagccaagu

SEQ ID NO: 1142095 - RNA, 22 nt, Human
ucuggggaugagugaugucgua

SEQ ID NO: 1142096 - RNA, 22 nt, Human
uuagggacagcucuguagguga

SEQ ID NO: 1142097 - RNA, 17 nt, Human
ugcaggcuccugucccu

SEQ ID NO: 1142098 - RNA, 20 nt, Human
acaaagacuggaaaagcaag

SEQ ID NO: 1142099 - RNA, 22 nt, Human
uuguaugaggauagcaagaagc

SEQ ID NO: 1142100 - RNA, 22 nt, Human
agagagcauggcacagaggggu

SEQ ID NO: 1142101 - RNA, 22 nt, Human
ccuggcagacagcacugaagcu

SEQ ID NO: 1142102 - RNA, 22 nt, Human
cacaggcugcccgcagcuggga

SEQ ID NO: 1142103 - RNA, 22 nt, Human
caguuuauagcucuagcagcuu

SEQ ID NO: 1142104 - RNA, 22 nt, Human
uaacacauaucuacaacaugug

SEQ ID NO: 1142105 - RNA, 22 nt, Human
cugggcuuaggaccuggugcgg

SEQ ID NO: 1142106 - RNA, 22 nt, Human
agcaggcugggcaauaugggca

SEQ ID NO: 1142107 - RNA, 22 nt, Human
agagucagcuuaugacacaguc

SEQ ID NO: 1142108 - RNA, 22 nt, Human
ucacacacauaaucuaagauua

SEQ ID NO: 1142109 - RNA, 22 nt, Human
gcuggcagagagcuggugagga

SEQ ID NO: 1142110 - RNA, 22 nt, Human
uccugcagcugcagaccugggg

SEQ ID NO: 1142111 - RNA, 22 nt, Human
acaucacaguaguuaagccaga

SEQ ID NO: 1142112 - RNA, 22 nt, Human
ucuggcagcagcaucaguggcu

SEQ ID NO: 1142113 - RNA, 22 nt, Human
ccugggcucuauccugacccag

SEQ ID NO: 1142114 - RNA, 20 nt, Human
cugaacacagaauaagcaca

SEQ ID NO: 1142115 - RNA, 22 nt, Human
ggcaggcuccguguuccauucc

SEQ ID NO: 1142116 - RNA, 22 nt, Human
ugcaggcuggggaggcagacuu

SEQ ID NO: 1142117 - RNA, 22 nt, Human
uauaaaguuucgaaagauguau

SEQ ID NO: 1142118 - RNA, 22 nt, Human
augaaacagugaauuagucaag

SEQ ID NO: 1142119 - RNA, 22 nt, Human
ugcuucugaugugagcagcccc

SEQ ID NO: 1142120 - RNA, 22 nt, Human
acagauuugacugguaccuggc

SEQ ID NO: 1142121 - RNA, 22 nt, Human
aagugugggaaguugcuaaaau

SEQ ID NO: 1142122 - RNA, 22 nt, Human
aagugauuucugccugcauguu

SEQ ID NO: 1142123 - RNA, 22 nt, Human
cacccaggcagguggcugagaa

SEQ ID NO: 1142124 - RNA, 22 nt, Human
uagcauuuauuccagauuugga

SEQ ID NO: 1142125 - RNA, 22 nt, Human
cuguggcucauucuugguggca

SEQ ID NO: 1142126 - RNA, 22 nt, Human
uacuuacacagcuguagaaggu

SEQ ID NO: 1142127 - RNA, 22 nt, Human
uuccuggccuaagguaggugac

SEQ ID NO: 1142128 - RNA, 22 nt, Human
gagauggagucuuuuucuguca

SEQ ID NO: 1142129 - RNA, 17 nt, Human
agcaggcugcagaggcc

SEQ ID NO: 1142130 - RNA, 22 nt, Human
uuaugggagcaauuggggaggu

SEQ ID NO: 1142131 - RNA, 22 nt, Human
gacauaauccuccucaccuacu

SEQ ID NO: 1142132 - RNA, 22 nt, Human
ugcaggcuggaggagggacuaa

SEQ ID NO: 1142133 - RNA, 22 nt, Human
auguagaaauuaggaugauagu

SEQ ID NO: 1142134 - RNA, 22 nt, Human
aggaccuguagggccugcaucc

SEQ ID NO: 1142135 - RNA, 22 nt, Human
ugggccaggcaugugaucagca

SEQ ID NO: 1142136 - RNA, 20 nt, Human
uuuuccuucugaguauguug

SEQ ID NO: 1142137 - RNA, 19 nt, Human
accugcaguaauaauuccu

SEQ ID NO: 1142138 - RNA, 22 nt, Human
uacagccacaggugacucucau

SEQ ID NO: 1142139 - RNA, 22 nt, Human
aauuugauucccugcaccuguu

SEQ ID NO: 1142140 - RNA, 22 nt, Human
cuggggacuugcagacacaauu

SEQ ID NO: 1142141 - RNA, 22 nt, Human
aggcuuuaaguggccuacagcu

SEQ ID NO: 1142142 - RNA, 22 nt, Human
cugcagggaacugaggcccaga

SEQ ID NO: 1142143 - RNA, 22 nt, Human
ugcuucugggucccagccuggc

SEQ ID NO: 1142144 - RNA, 22 nt, Human
acagauuuauugaagcugcugc

SEQ ID NO: 1142145 - RNA, 22 nt, Human
augggcuguccuaguccagccc

SEQ ID NO: 1142146 - RNA, 22 nt, Human
uuauuaggaaaaggucagaugu

SEQ ID NO: 1142147 - RNA, 18 nt, Human
gacccagcagaugggcuu

SEQ ID NO: 1142148 - RNA, 22 nt, Human
gccaggcaguucaaguacacca

SEQ ID NO: 1142149 - RNA, 21 nt, Human
ugcaggcugugcgcuccugcc

SEQ ID NO: 1142150 - RNA, 22 nt, Human
gugugaaagcuuguccucugua

SEQ ID NO: 1142151 - RNA, 20 nt, Human
agggcugagaagggacuagc

SEQ ID NO: 1142152 - RNA, 22 nt, Human
aaccugcauguuucuaaaagca

SEQ ID NO: 1142153 - RNA, 22 nt, Human
cuauuacauuucuggacauuca

SEQ ID NO: 1142154 - RNA, 22 nt, Human
uacauuccuguuagcaucuaag

SEQ ID NO: 1142155 - RNA, 22 nt, Human
aaauuucuaagcagccacuucc

SEQ ID NO: 1142156 - RNA, 22 nt, Human
ccacuguaaguuugaaaauaac

SEQ ID NO: 1142157 - RNA, 22 nt, Human
gggcugacagcacgccuucugu

SEQ ID NO: 1142158 - RNA, 22 nt, Human
cacauugcagcuucuuuuggcu

SEQ ID NO: 1142159 - RNA, 22 nt, Human
cacauacauucauguuacucua

SEQ ID NO: 1142160 - RNA, 22 nt, Human
cccagccucuguuugcuccucu

SEQ ID NO: 1142161 - RNA, 22 nt, Human
aagagcauggaauggagaucca

SEQ ID NO: 1142162 - RNA, 22 nt, Human
uucacaaaacacuauuuucugg

SEQ ID NO: 1142163 - RNA, 22 nt, Human
acagaccaaguuuccagcaggu

SEQ ID NO: 1142164 - RNA, 22 nt, Human
agggcugaaguuauggcugagc

SEQ ID NO: 1142165 - RNA, 22 nt, Human
aaguguuuacuuaaagucaugg

SEQ ID NO: 1142166 - RNA, 22 nt, Human
gaauauuuguaauuacuguuga

SEQ ID NO: 1142167 - RNA, 22 nt, Human
cuccaaguccgagggcucucaa

SEQ ID NO: 1142168 - RNA, 22 nt, Human
uggcaggcgggagccauagagg

SEQ ID NO: 1142169 - RNA, 22 nt, Human
cacaggcuuccaguccccagcu

SEQ ID NO: 1142170 - RNA, 22 nt, Human
acaauauuguacccagaaguuu

SEQ ID NO: 1142171 - RNA, 22 nt, Human
ucccaaggugcucggcaacagg

SEQ ID NO: 1142172 - RNA, 22 nt, Human
cagcauuuaucuuguagcagga

SEQ ID NO: 1142173 - RNA, 22 nt, Human
acuggggaguugaagcacuuuc

SEQ ID NO: 1142174 - RNA, 22 nt, Human
uuguaugagcuccaggaacuca

SEQ ID NO: 1142175 - RNA, 22 nt, Human
aacacagaucaaaauauuuccu

SEQ ID NO: 1142176 - RNA, 22 nt, Human
agguuuauguuuggugcaggag

SEQ ID NO: 1142177 - RNA, 22 nt, Human
auucucaguucacuaguuucuu

SEQ ID NO: 1142178 - RNA, 21 nt, Human
uccagcucuuauguucaugaa

SEQ ID NO: 1142179 - RNA, 22 nt, Human
cuugggcucagacuugaggaca

SEQ ID NO: 1142180 - RNA, 22 nt, Human
cuccaggguuccccgauccacu

SEQ ID NO: 1142181 - RNA, 22 nt, Human
cucuuaaaaacuugauauauuu

SEQ ID NO: 1142182 - RNA, 21 nt, Human
caauaaacugcacauugagac

SEQ ID NO: 1142183 - RNA, 22 nt, Human
gccuccuggguucaugccauuc

SEQ ID NO: 1142184 - RNA, 22 nt, Human
agggcuccuccccggccuccac

SEQ ID NO: 1142185 - RNA, 22 nt, Human
ucuggcagagucagugcacaca

SEQ ID NO: 1142186 - RNA, 22 nt, Human
aaccccgcucaggcugggugag

SEQ ID NO: 1142187 - RNA, 22 nt, Human
ucuggggaccauggcaucuaaa

SEQ ID NO: 1142188 - RNA, 22 nt, Human
cuaucauuuuacaugguuggug

SEQ ID NO: 1142189 - RNA, 22 nt, Human
acccaggccugagagacaggag

SEQ ID NO: 1142190 - RNA, 18 nt, Human
uguuuauuuuucucuuac

SEQ ID NO: 1142191 - RNA, 22 nt, Human
aguuuucuguucuacaauuuga

SEQ ID NO: 1142192 - RNA, 22 nt, Human
uucuugaaucacuuuagagaua

SEQ ID NO: 1142193 - RNA, 22 nt, Human
ugggcuccggcggccucaggcu

SEQ ID NO: 1142194 - RNA, 22 nt, Human
ucuccugucuucucagcacccc

SEQ ID NO: 1142195 - RNA, 23 nt, Human
cccugcagucagggugagauggu

SEQ ID NO: 1142196 - RNA, 22 nt, Human
uacccaggaggaaacugaggcu

SEQ ID NO: 1142197 - RNA, 22 nt, Human
aaugucauugguaaagauuagg

SEQ ID NO: 1142198 - RNA, 22 nt, Human
cuugggaggagaacaaagcucc

SEQ ID NO: 1142199 - RNA, 22 nt, Human
aagugccaucauagcauggcug

SEQ ID NO: 1142200 - RNA, 17 nt, Human
ccaggcuccaucacugu

SEQ ID NO: 1142201 - RNA, 22 nt, Human
uuggagagauuuaggucucagu

SEQ ID NO: 1142202 - RNA, 22 nt, Human
gagcuuuaccuuagguucuguu

SEQ ID NO: 1142203 - RNA, 22 nt, Human
uucaugaaacuuaacuguuggg

SEQ ID NO: 1142204 - RNA, 22 nt, Human
cagagcauugagggucugccaa

SEQ ID NO: 1142205 - RNA, 22 nt, Human
ccagagaguaucauggagagua

SEQ ID NO: 1142206 - RNA, 22 nt, Human
acauuuuaauaugcuuagugug

SEQ ID NO: 1142207 - RNA, 22 nt, Human
ccucugcaaagaauuugucucc

SEQ ID NO: 1142208 - RNA, 22 nt, Human
agggcuccuaugaugcucugcc

SEQ ID NO: 1142209 - RNA, 22 nt, Human
gacaaaaguguuuugaacaagg

SEQ ID NO: 1142210 - RNA, 22 nt, Human
ggcugccacgucgaggguccaa

SEQ ID NO: 1142211 - RNA, 22 nt, Human
cagcuucuucaguccuggagcu

SEQ ID NO: 1142212 - RNA, 22 nt, Human
gugauaaaauucaaauagcucu

SEQ ID NO: 1142213 - RNA, 22 nt, Human
ucuuaaaccacaaaauucagag

SEQ ID NO: 1142214 - RNA, 22 nt, Human
auccucuguggauuacaccuag

SEQ ID NO: 1142215 - RNA, 22 nt, Human
uaacacauuuuaagccauuuua

SEQ ID NO: 1142216 - RNA, 22 nt, Human
auugaaaauauaauucuaggag

SEQ ID NO: 1142217 - RNA, 22 nt, Human
ucagcuuuccuugcuuuagauu

SEQ ID NO: 1142218 - RNA, 22 nt, Human
acagugugugcuuucccuuacg

SEQ ID NO: 1142219 - RNA, 22 nt, Human
caucuuuucagaagccauucug

SEQ ID NO: 1142220 - RNA, 22 nt, Human
uccaggcuccccugcgugcucc

SEQ ID NO: 1142221 - RNA, 22 nt, Human
cugggagggguagccaauccua

SEQ ID NO: 1142222 - RNA, 22 nt, Human
ucacuguaaaguaauacuguca

SEQ ID NO: 1142223 - RNA, 23 nt, Human
uggccagguagaggagguaguga

SEQ ID NO: 1142224 - RNA, 22 nt, Human
cuguggcugcguaggucuggca

SEQ ID NO: 1142225 - RNA, 22 nt, Human
uaaguuuucuggaauaacuugg

SEQ ID NO: 1142226 - RNA, 22 nt, Human
gaagcacugcauuucaagauca

SEQ ID NO: 1142227 - RNA, 18 nt, Human
acaggcugugggaauggu

SEQ ID NO: 1142228 - RNA, 22 nt, Human
auuaaaauuccaagguaugcca

SEQ ID NO: 1142229 - RNA, 22 nt, Human
cccaggcagcggggucuccuug

SEQ ID NO: 1142230 - RNA, 22 nt, Human
ugcuuuauggagcccaucucau

SEQ ID NO: 1142231 - RNA, 22 nt, Human
auucauuuagguauucacuuac

SEQ ID NO: 1142232 - RNA, 22 nt, Human
gagggcuccacacgggcccagc

SEQ ID NO: 1142233 - RNA, 22 nt, Human
gggaccuggacaugugugugcu

SEQ ID NO: 1142234 - RNA, 22 nt, Human
auccaggcgaaugcagaaggcc

SEQ ID NO: 1142235 - RNA, 21 nt, Human
uggccaaacuggagcauuuga

SEQ ID NO: 1142236 - RNA, 22 nt, Human
ccaggcucugcgcuggacaugg

SEQ ID NO: 1142237 - RNA, 22 nt, Human
ugcauguuuuauaccaaagcuu

SEQ ID NO: 1142238 - RNA, 22 nt, Human
cugcauaucaaauuacuccugg

SEQ ID NO: 1142239 - RNA, 22 nt, Human
gccucugcaccaguacugugcc

SEQ ID NO: 1142240 - RNA, 22 nt, Human
gaauguuauugaacuacgagcu

SEQ ID NO: 1142241 - RNA, 22 nt, Human
auacaccaccuuggaucuuuca

SEQ ID NO: 1142242 - RNA, 23 nt, Human
ugaaagcaaugggucuauaguau

SEQ ID NO: 1142243 - RNA, 22 nt, Human
uugcaucagcaggcauaauugg

SEQ ID NO: 1142244 - RNA, 22 nt, Human
ugcaggccuggacugauguggu

SEQ ID NO: 1142245 - RNA, 22 nt, Human
uaucacauacuucucauccagg

SEQ ID NO: 1142246 - RNA, 22 nt, Human
auuauguagcuaaaaauugugu

SEQ ID NO: 1142247 - RNA, 22 nt, Human
gccuuugcugugacaaugcugg

SEQ ID NO: 1142248 - RNA, 20 nt, Human
uugcaaagugaauagcaauu

SEQ ID NO: 1142249 - RNA, 23 nt, Human
auaauaacgucugucuugucucu

SEQ ID NO: 1142250 - RNA, 22 nt, Human
agacugugagaagauggcugcg

SEQ ID NO: 1142251 - RNA, 22 nt, Human
gagugcucgggccucugccugc

SEQ ID NO: 1142252 - RNA, 22 nt, Human
aaaucaugguggaagaaacaga

SEQ ID NO: 1142253 - RNA, 22 nt, Human
ugcucuguucaguguaucuugu

SEQ ID NO: 1142254 - RNA, 22 nt, Human
ccaggaagaaacagucuuuaua

SEQ ID NO: 1142255 - RNA, 22 nt, Human
agugauguagguggauucuggc

SEQ ID NO: 1142256 - RNA, 22 nt, Human
uaucuguauucugacagucacu

SEQ ID NO: 1142257 - RNA, 22 nt, Human
caugucaagacugaagauccag

SEQ ID NO: 1142258 - RNA, 22 nt, Human
guuuauuggguauuguggagcc

SEQ ID NO: 1142259 - RNA, 22 nt, Human
agucagucugcuagccugugga

SEQ ID NO: 1142260 - RNA, 22 nt, Human
aagugucuucugauggggugug

SEQ ID NO: 1142261 - RNA, 22 nt, Human
augaucaagaauuuuguauucc

SEQ ID NO: 1142262 - RNA, 20 nt, Human
cuugaguucagagcugucau

SEQ ID NO: 1142263 - RNA, 22 nt, Human
gggaccuggacaugugugugcu

SEQ ID NO: 1142264 - RNA, 22 nt, Human
augcauaucuccuaucuccuca

SEQ ID NO: 1142265 - RNA, 22 nt, Human
ugccucugcugcauauucaccu

SEQ ID NO: 1142266 - RNA, 22 nt, Human
uguaucauauggggaagcuuca

SEQ ID NO: 1142267 - RNA, 23 nt, Human
acaaguguuuccaauauggcugg

SEQ ID NO: 1142268 - RNA, 22 nt, Human
aggcaguggcuuuuguuguguu

SEQ ID NO: 1142269 - RNA, 22 nt, Human
uccuggccaaguagauguggcg

SEQ ID NO: 1142270 - RNA, 22 nt, Human
caaugcagauaccuuccagaga

SEQ ID NO: 1142271 - RNA, 22 nt, Human
guaaaucagugucauuuuagaa

SEQ ID NO: 1142272 - RNA, 22 nt, Human
aauuagaagcuguuagcaaaau

SEQ ID NO: 1142273 - RNA, 22 nt, Human
gacucugguugcggguucugcu

SEQ ID NO: 1142274 - RNA, 22 nt, Human
auaacugagugagcagcgacuc

SEQ ID NO: 1142275 - RNA, 22 nt, Human
uagauuaucccugauuugucca

SEQ ID NO: 1142276 - RNA, 19 nt, Human
auagaguagaguaucuguu

SEQ ID NO: 1142277 - RNA, 22 nt, Human
aguaacagguguacagacuauc

SEQ ID NO: 1142278 - RNA, 22 nt, Human
ucacuguuaauaaauagcaaag

SEQ ID NO: 1142279 - RNA, 22 nt, Human
gaaguucugguguaugugauaa

SEQ ID NO: 1142280 - RNA, 22 nt, Human
gagguauaguucuauuagauga

SEQ ID NO: 1142281 - RNA, 22 nt, Human
aaggauuuuuggaaugagaugg

SEQ ID NO: 1142282 - RNA, 22 nt, Human
agucaguaugacuuauaguucu

SEQ ID NO: 1142283 - RNA, 22 nt, Human
uagcauuucacugaucuucacu

SEQ ID NO: 1142284 - RNA, 17 nt, Human
auucaugaacauguccu

SEQ ID NO: 1142285 - RNA, 22 nt, Human
guuugcaaauuguguuaaagcu

SEQ ID NO: 1142286 - RNA, 22 nt, Human
guguaucaacauguuuuuugug

SEQ ID NO: 1142287 - RNA, 22 nt, Human
auccauuuuuucagaaugcucu

SEQ ID NO: 1142288 - RNA, 22 nt, Human
uugcacagaugcacaugguugc

SEQ ID NO: 1142289 - RNA, 22 nt, Human
cauuguccucugaugccuuccc

SEQ ID NO: 1142290 - RNA, 22 nt, Human
gucaggaugagggaugaggagu

SEQ ID NO: 1142291 - RNA, 22 nt, Human
auccuucaaaaggaauagcagg

SEQ ID NO: 1142292 - RNA, 22 nt, Human
augugaaagagguguucagugg

SEQ ID NO: 1142293 - RNA, 22 nt, Human
auuuacugagguaaauaaacug

SEQ ID NO: 1142294 - RNA, 22 nt, Human
aauaguguauuuuucaaaauua

SEQ ID NO: 1142295 - RNA, 22 nt, Human
guguuuggucagacguccgggg

SEQ ID NO: 1142296 - RNA, 22 nt, Human
uuucaugauuaacuuagugaau

SEQ ID NO: 1142297 - RNA, 22 nt, Human
ccugugcaugccaggguacacc

SEQ ID NO: 1142298 - RNA, 22 nt, Human
ugugaagaauuaaugugaauca

SEQ ID NO: 1142299 - RNA, 22 nt, Human
cucuggucaagcaaagagguuu

SEQ ID NO: 1142300 - RNA, 22 nt, Human
uagcuucccugcuggaucauaa

SEQ ID NO: 1142301 - RNA, 22 nt, Human
aaguuacacauuuucauuguaa

SEQ ID NO: 1142302 - RNA, 22 nt, Human
ugaggcuggaugggaugccucc

SEQ ID NO: 1142303 - RNA, 22 nt, Human
agagcaauuagcuuagguaaaa

SEQ ID NO: 1142304 - RNA, 22 nt, Human
uugaggucuggcaguagcguug

SEQ ID NO: 1142305 - RNA, 22 nt, Human
agauaucuuacacuuugaaguu

SEQ ID NO: 1142306 - RNA, 22 nt, Human
gccucugcacuguggcacacca

SEQ ID NO: 1142307 - RNA, 18 nt, Human
auuugcaggcaugcaggc

SEQ ID NO: 1142308 - RNA, 22 nt, Human
augauuuguuaacagacuuaau

SEQ ID NO: 1142309 - RNA, 22 nt, Human
uggugcugccaccuccucugcu

SEQ ID NO: 1142310 - RNA, 22 nt, Human
aaauugcuugagauuagucucc

SEQ ID NO: 1142311 - RNA, 22 nt, Human
uuacaguuuacauaagaauugu

SEQ ID NO: 1142312 - RNA, 22 nt, Human
uuuggcaagcgaguacuuucug

SEQ ID NO: 1142313 - RNA, 22 nt, Human
ugggugugagcccgggagccgc

SEQ ID NO: 1142314 - RNA, 22 nt, Human
ucuuuuaucuguuguguaacaa

SEQ ID NO: 1142315 - RNA, 22 nt, Human
guugguccuuugagcaagaucc

SEQ ID NO: 1142316 - RNA, 22 nt, Human
uaaucuuagacauguauuuuuc

SEQ ID NO: 1142317 - RNA, 22 nt, Human
uaucuagagccuggaagucuug

SEQ ID NO: 1142318 - RNA, 20 nt, Human
uccaguuuuggagacauucu

SEQ ID NO: 1142319 - RNA, 22 nt, Human
caaguaugagaaagcuauuacc

SEQ ID NO: 1142320 - RNA, 22 nt, Human
cugagcaugcuacaugcagcac

SEQ ID NO: 1142321 - RNA, 22 nt, Human
gaauguuaaugcacuucuagcu

SEQ ID NO: 1142322 - RNA, 22 nt, Human
ucugcuggaaaaccagggaauu

SEQ ID NO: 1142323 - RNA, 22 nt, Human
aaagccauaucuauucuauucu

SEQ ID NO: 1142324 - RNA, 22 nt, Human
uuuuuggguccaggcuguaucu

SEQ ID NO: 1142325 - RNA, 22 nt, Human
agagaagagucuugucaaauua

SEQ ID NO: 1142326 - RNA, 22 nt, Human
ugucuguccaucugucugggac

SEQ ID NO: 1142327 - RNA, 22 nt, Human
aacuagaaagaacauauuucca

SEQ ID NO: 1142328 - RNA, 22 nt, Human
gaggcugaacagguucucauga

SEQ ID NO: 1142329 - RNA, 22 nt, Human
cuuauuagaaagaaaagacaug

SEQ ID NO: 1142330 - RNA, 22 nt, Human
aggcauuuaaagauguaagacu

SEQ ID NO: 1142331 - RNA, 22 nt, Human
uaaguauuggccuauagcuaga

SEQ ID NO: 1142332 - RNA, 21 nt, Human
ccuguggugccagaucgccag

SEQ ID NO: 1142333 - RNA, 22 nt, Human
acuugcaucuuagagacucacc

SEQ ID NO: 1142334 - RNA, 22 nt, Human
cuguauaugugcauacacacac

SEQ ID NO: 1142335 - RNA, 22 nt, Human
uuucuacauuuguaaccagauu

SEQ ID NO: 1142336 - RNA, 22 nt, Human
acuggauucucuuacacagaug

SEQ ID NO: 1142337 - RNA, 22 nt, Human
auguuguugaacucuuugcaug

SEQ ID NO: 1142338 - RNA, 20 nt, Human
agugauuuguuaguacauug

SEQ ID NO: 1142339 - RNA, 22 nt, Human
ucauuccuccagcgggagucca

SEQ ID NO: 1142340 - RNA, 22 nt, Human
cuucucuuggguguggugucuu

SEQ ID NO: 1142341 - RNA, 22 nt, Human
cucugcaaggcccuccaguagc

SEQ ID NO: 1142342 - RNA, 22 nt, Human
cugguuuuccaauguuuugacu

SEQ ID NO: 1142343 - RNA, 22 nt, Human
aaauugaauuugggaaacauug

SEQ ID NO: 1142344 - RNA, 22 nt, Human
aaugcugugauuuauuaaguau

SEQ ID NO: 1142345 - RNA, 22 nt, Human
cucaggaaaauauugaagaagu

SEQ ID NO: 1142346 - RNA, 22 nt, Human
guaugugucuuagaacuuggga

SEQ ID NO: 1142347 - RNA, 22 nt, Human
cuccaggacugaggacagagcu

SEQ ID NO: 1142348 - RNA, 22 nt, Human
uaaagacaauuucgagcuguag

SEQ ID NO: 1142349 - RNA, 22 nt, Human
uguacauauucaagcacuucua

SEQ ID NO: 1142350 - RNA, 22 nt, Human
auuacugaggcaaaguaguuuu

SEQ ID NO: 1142351 - RNA, 22 nt, Human
cagcacauggauggaguuagga

SEQ ID NO: 1142352 - RNA, 20 nt, Human
ugggguccuggaggggaucc

SEQ ID NO: 1142353 - RNA, 20 nt, Human
uugaggagauauugaauacu

SEQ ID NO: 1142354 - RNA, 18 nt, Human
ugugccucugcaggacgu

SEQ ID NO: 1142355 - RNA, 22 nt, Human
aaucuguugucaggaauccaca

SEQ ID NO: 1142356 - RNA, 22 nt, Human
uaucaguagaacaauggacauu

SEQ ID NO: 1142357 - RNA, 22 nt, Human
ccugguuugggugccagugagu

SEQ ID NO: 1142358 - RNA, 23 nt, Human
auagaccauugucucacacuuca

SEQ ID NO: 1142359 - RNA, 22 nt, Human
ggcuguggucauuaggagguug

SEQ ID NO: 1142360 - RNA, 22 nt, Human
gcugcuggcuuccugcuguuuu

SEQ ID NO: 1142361 - RNA, 22 nt, Human
uugagauagguggaaucucuuu

SEQ ID NO: 1142362 - RNA, 20 nt, Human
ugugguuuuugccaguugaa

SEQ ID NO: 1142363 - RNA, 22 nt, Human
augguuuuguccucuuugguuc

SEQ ID NO: 1142364 - RNA, 22 nt, Human
ggucagugccuaucaugugggc

SEQ ID NO: 1142365 - RNA, 22 nt, Human
aguaauggguugaaauuuaguu

SEQ ID NO: 1142366 - RNA, 22 nt, Human
auauuuguuuggcagaguucag

SEQ ID NO: 1142367 - RNA, 22 nt, Human
uaauucuagauugacauuuuga

SEQ ID NO: 1142368 - RNA, 22 nt, Human
caggaacagcaccaggagcuag

SEQ ID NO: 1142369 - RNA, 22 nt, Human
aaguuacaggagaaagagauca

SEQ ID NO: 1142370 - RNA, 22 nt, Human
aaucuucaggguccuggggcuc

SEQ ID NO: 1142371 - RNA, 22 nt, Human
ugggguccucucacuuggaggg

SEQ ID NO: 1142372 - RNA, 22 nt, Human
gacagucccccagcagcaaacc

SEQ ID NO: 1142373 - RNA, 22 nt, Human
uugcuauuuugagagucauagu

SEQ ID NO: 1142374 - RNA, 21 nt, Human
ucugugcuuuuuuggcuccua

SEQ ID NO: 1142375 - RNA, 22 nt, Human
guauuucuuuacauaugcucau

SEQ ID NO: 1142376 - RNA, 22 nt, Human
augaaacaacagacuuggucaa

SEQ ID NO: 1142377 - RNA, 22 nt, Human
cagccuuugggucagaagauuc

SEQ ID NO: 1142378 - RNA, 22 nt, Human
cauuuugugcuagacacuaugg

SEQ ID NO: 1142379 - RNA, 22 nt, Human
ucuuugcauggacauguguuuu

SEQ ID NO: 1142380 - RNA, 22 nt, Human
cuggcuuugaucagagugaccu

SEQ ID NO: 1142381 - RNA, 22 nt, Human
gggaaucuuccuuuuuuguaag

SEQ ID NO: 1142382 - RNA, 19 nt, Human
ugaggauugagguccagua

SEQ ID NO: 1142383 - RNA, 22 nt, Human
ucaauuuauguggcuauucauu

SEQ ID NO: 1142384 - RNA, 20 nt, Human
uguauuuaaugaaggcuuuu

SEQ ID NO: 1142385 - RNA, 17 nt, Human
gugcuggccuggggcuc

SEQ ID NO: 1142386 - RNA, 22 nt, Human
aaugguaauauuucauaguugu

SEQ ID NO: 1142387 - RNA, 22 nt, Human
cucucuguuaugcuuucaugaa

SEQ ID NO: 1142388 - RNA, 22 nt, Human
ugucauuggugaucugaugccu

SEQ ID NO: 1142389 - RNA, 22 nt, Human
auaucuaggcugaauguaaaau

SEQ ID NO: 1142390 - RNA, 22 nt, Human
agaaaagaggcuuucuaagcau

SEQ ID NO: 1142391 - RNA, 22 nt, Human
uguucauaucauuuugaaagcu

SEQ ID NO: 1142392 - RNA, 22 nt, Human
agaaucugcauuuuaacaagau

SEQ ID NO: 1142393 - RNA, 22 nt, Human
guaaagcaaaauguagagauug

SEQ ID NO: 1142394 - RNA, 22 nt, Human
auauaguuggguuucauucuac

SEQ ID NO: 1142395 - RNA, 22 nt, Human
aauuauguuugcuuuagaugga

SEQ ID NO: 1142396 - RNA, 22 nt, Human
ugucuuaugcugcauagacuau

SEQ ID NO: 1142397 - RNA, 22 nt, Human
cuggcuuuuuucccauuaugca

SEQ ID NO: 1142398 - RNA, 22 nt, Human
uuaaggcuguggggauuacugc

SEQ ID NO: 1142399 - RNA, 22 nt, Human
ucugcuguuuacugugugauau

SEQ ID NO: 1142400 - RNA, 22 nt, Human
agcuaguauuucauugaggauu

SEQ ID NO: 1142401 - RNA, 22 nt, Human
ugcaucauuaagguacaguugg

SEQ ID NO: 1142402 - RNA, 22 nt, Human
aguguauucugcaugggagacu

SEQ ID NO: 1142403 - RNA, 22 nt, Human
aaugucaacacaagagaaaugc

SEQ ID NO: 1142404 - RNA, 22 nt, Human
caagggcagcagccucaagcgg

SEQ ID NO: 1142405 - RNA, 22 nt, Human
uccagcugugcuccaggaggug

SEQ ID NO: 1142406 - RNA, 22 nt, Human
acuugguggcgaacgaggguca

SEQ ID NO: 1142407 - RNA, 22 nt, Human
cuuaagacaggcucaaagauua

SEQ ID NO: 1142408 - RNA, 22 nt, Human
gcacaguauuuaguagaaugag

SEQ ID NO: 1142409 - RNA, 22 nt, Human
uuuauacuccacucugcaagcg

SEQ ID NO: 1142410 - RNA, 22 nt, Human
aaaucugagaaauauuguccag

SEQ ID NO: 1142411 - RNA, 22 nt, Human
uuguauuaaaauguguuucugu

SEQ ID NO: 1142412 - RNA, 22 nt, Human
ucugguuucccaguuccuccgu

SEQ ID NO: 1142413 - RNA, 22 nt, Human
ugaaucaaugaauugcacuuca

SEQ ID NO: 1142414 - RNA, 22 nt, Human
cacauuuaaagguugaagcuga

SEQ ID NO: 1142415 - RNA, 22 nt, Human
guugugcaaacacuggggucug

SEQ ID NO: 1142416 - RNA, 22 nt, Human
caagauauguccuguuacuaag

SEQ ID NO: 1142417 - RNA, 14 nt, Human
accacgcccggcua

SEQ ID NO: 1142418 - RNA, 20 nt, Human
accacgcccggcuaauuuuu

SEQ ID NO: 1142419 - RNA, 22 nt, Human
accccaaaauuagccaguaauc

SEQ ID NO: 1142420 - RNA, 23 nt, Human
accccaaaauuagccaguaaucc

SEQ ID NO: 1142421 - RNA, 18 nt, Human
accccgaccaccugccca

SEQ ID NO: 1142422 - RNA, 22 nt, Human
accccuaaagagauacuuugau

SEQ ID NO: 1142423 - RNA, 21 nt, Human
acaaguaugaauaaagacacc

SEQ ID NO: 1142424 - RNA, 23 nt, Human
acaaguaugaauaaagacaccua

SEQ ID NO: 1142425 - RNA, 13 nt, Human
aauuuuaucugcc

SEQ ID NO: 1142426 - RNA, 18 nt, Human
acaacuaugauuuggaaa

SEQ ID NO: 1142427 - RNA, 17 nt, Human
acacgcuccuuccucug

SEQ ID NO: 1142428 - RNA, 19 nt, Human
acacgcuccuuccucugag

SEQ ID NO: 1142429 - RNA, 21 nt, Human
acaauuagauaaauguccauu

SEQ ID NO: 1142430 - RNA, 21 nt, Human
acagaacacauaauucaggaa

SEQ ID NO: 1142431 - RNA, 14 nt, Human
acagcaucucagcu

SEQ ID NO: 1142432 - RNA, 15 nt, Human
acagcaucucagcuc

SEQ ID NO: 1142433 - RNA, 21 nt, Human
acagcugcucaauaaaguaca

SEQ ID NO: 1142434 - RNA, 21 nt, Human
acaggguaacuaacuaaaaca

SEQ ID NO: 1142435 - RNA, 22 nt, Human
acaggguaacuaacuaaaacaa

SEQ ID NO: 1142436 - RNA, 21 nt, Human
acaggugugagccaccacgcc

SEQ ID NO: 1142437 - RNA, 22 nt, Human
acaggugugagccaccacgccc

SEQ ID NO: 1142438 - RNA, 14 nt, Human
acuagcuauggugu

SEQ ID NO: 1142439 - RNA, 15 nt, Human
acuaggguccugggg

SEQ ID NO: 1142440 - RNA, 16 nt, Human
acuaggguccugggga

SEQ ID NO: 1142441 - RNA, 14 nt, Human
acucaguggggagg

SEQ ID NO: 1142442 - RNA, 20 nt, Human
accugccccuccucucugcc

SEQ ID NO: 1142443 - RNA, 22 nt, Human
accugccccuccucucugcccu

SEQ ID NO: 1142444 - RNA, 12 nt, Human
accuuuauucug

SEQ ID NO: 1142445 - RNA, 13 nt, Human
accuuuauucugg

SEQ ID NO: 1142446 - RNA, 21 nt, Human
accugcccaaccugcucuccu

SEQ ID NO: 1142447 - RNA, 14 nt, Human
accugccccuccuc

SEQ ID NO: 1142448 - RNA, 18 nt, Human
accugccccuccucucug

SEQ ID NO: 1142449 - RNA, 17 nt, Human
acuaauacagcugagcu

SEQ ID NO: 1142450 - RNA, 22 nt, Human
acgugauuagugaaaggaagau

SEQ ID NO: 1142451 - RNA, 14 nt, Human
agaaaauaacaaua

SEQ ID NO: 1142452 - RNA, 21 nt, Human
acugguggcccgacagccugg

SEQ ID NO: 1142453 - RNA, 22 nt, Human
acugguggcccgacagccuggc

SEQ ID NO: 1142454 - RNA, 23 nt, Human
acugguggcccgacagccuggca

SEQ ID NO: 1142455 - RNA, 19 nt, Human
acugucucaagagggcacu

SEQ ID NO: 1142456 - RNA, 20 nt, Human
acugaaguaaaacaaacaau

SEQ ID NO: 1142457 - RNA, 19 nt, Human
acugcccccucugcccugc

SEQ ID NO: 1142458 - RNA, 20 nt, Human
acugcccccucugcccugcg

SEQ ID NO: 1142459 - RNA, 17 nt, Human
acuguuguuaucuguuu

SEQ ID NO: 1142460 - RNA, 13 nt, Human
acuguuuucuagu

SEQ ID NO: 1142461 - RNA, 17 nt, Human
acuguuuucuaguguau

SEQ ID NO: 1142462 - RNA, 18 nt, Human
acuguuuucuaguguauc

SEQ ID NO: 1142463 - RNA, 19 nt, Human
acuguuuucuaguguauca

SEQ ID NO: 1142464 - RNA, 20 nt, Human
acuguuuucuaguguaucaa

SEQ ID NO: 1142465 - RNA, 21 nt, Human
acuguuuucuaguguaucaaa

SEQ ID NO: 1142466 - RNA, 23 nt, Human
acuguuuucuaguguaucaaaau

SEQ ID NO: 1142467 - RNA, 24 nt, Human
acuguuuucuaguguaucaaaaug

SEQ ID NO: 1142468 - RNA, 20 nt, Human
acuuguaaaugugguaaaga

SEQ ID NO: 1142469 - RNA, 18 nt, Human
acuuguaaaugugguaaa

SEQ ID NO: 1142470 - RNA, 19 nt, Human
acuuguaaaggaauuuaaa

SEQ ID NO: 1142471 - RNA, 20 nt, Human
acuuguaaaggaauuuaaaa

SEQ ID NO: 1142472 - RNA, 18 nt, Human
aauccaggguggugguga

SEQ ID NO: 1142473 - RNA, 19 nt, Human
aaugaagacaaaacauaca

SEQ ID NO: 1142474 - RNA, 21 nt, Human
aaugaucugauugaccguguu

SEQ ID NO: 1142475 - RNA, 22 nt, Human
aauggucuuucuaaugugugaa

SEQ ID NO: 1142476 - RNA, 16 nt, Human
aaugucucacugagca

SEQ ID NO: 1142477 - RNA, 19 nt, Human
aaugucucacugagcacug

SEQ ID NO: 1142478 - RNA, 22 nt, Human
aaugucucacugagcacuguuu

SEQ ID NO: 1142479 - RNA, 21 nt, Human
aauaauccuaaacauaugaau

SEQ ID NO: 1142480 - RNA, 23 nt, Human
aauaaaauuaaagcugaaaacug

SEQ ID NO: 1142481 - RNA, 12 nt, Human
aagcugcucaac

SEQ ID NO: 1142482 - RNA, 23 nt, Human
aagcugcucaacuugcaaaauca

SEQ ID NO: 1142483 - RNA, 20 nt, Human
aagcugcucaacuugcaaaa

SEQ ID NO: 1142484 - RNA, 18 nt, Human
aaggacccggaggggccu

SEQ ID NO: 1142485 - RNA, 21 nt, Human
aaggacccggaggggccuggc

SEQ ID NO: 1142486 - RNA, 18 nt, Human
aaggacuaggguccuggg

SEQ ID NO: 1142487 - RNA, 20 nt, Human
aaggacuaggguccugggga

SEQ ID NO: 1142488 - RNA, 11 nt, Human
aaacugccccc

SEQ ID NO: 1142489 - RNA, 22 nt, Human
aaacagauguccaucagaugac

SEQ ID NO: 1142490 - RNA, 14 nt, Human
aaacagauguccau

SEQ ID NO: 1142491 - RNA, 22 nt, Human
aaauaaaauuaaagcugaaaac

SEQ ID NO: 1142492 - RNA, 12 nt, Human
aaauaacaauga

SEQ ID NO: 1142493 - RNA, 22 nt, Human
aaauacuguuuuuaacaacuau

SEQ ID NO: 1142494 - RNA, 14 nt, Human
aaauacuugucugu

SEQ ID NO: 1142495 - RNA, 16 nt, Human
aaauacuugucuguuu

SEQ ID NO: 1142496 - RNA, 19 nt, Human
aaauacuugucuguuuuaa

SEQ ID NO: 1142497 - RNA, 14 nt, Human
aaauagaauguaaa

SEQ ID NO: 1142498 - RNA, 17 nt, Human
aaauagaauguaaaugu

SEQ ID NO: 1142499 - RNA, 21 nt, Human
aaauagaauguaaaugucuca

SEQ ID NO: 1142500 - RNA, 19 nt, Human
aaauagaauguaaaugucu

SEQ ID NO: 1142501 - RNA, 13 nt, Human
aaauaguaaaaau

SEQ ID NO: 1142502 - RNA, 16 nt, Human
aaauaguaaaaauaaa

SEQ ID NO: 1142503 - RNA, 14 nt, Human
aaaucuuccaauuu

SEQ ID NO: 1142504 - RNA, 12 nt, Human
aaaucuuccaau

SEQ ID NO: 1142505 - RNA, 18 nt, Human
aaauugcauuuccugaca

SEQ ID NO: 1142506 - RNA, 12 nt, Human
aaauuggagaaa

SEQ ID NO: 1142507 - RNA, 16 nt, Human
aacaaagccacuuuca

SEQ ID NO: 1142508 - RNA, 13 nt, Human
aacagcucgacuu

SEQ ID NO: 1142509 - RNA, 12 nt, Human
aacaugcagaac

SEQ ID NO: 1142510 - RNA, 19 nt, Human
aacaugcagaacaaaugaa

SEQ ID NO: 1142511 - RNA, 20 nt, Human
aacaugcagaacaaaugaag

SEQ ID NO: 1142512 - RNA, 22 nt, Human
aaccacuggaaaguuuaugguu

SEQ ID NO: 1142513 - RNA, 16 nt, Human
aacugaacucugacaa

SEQ ID NO: 1142514 - RNA, 19 nt, Human
aacugaacucugacaacag

SEQ ID NO: 1142515 - RNA, 20 nt, Human
aacugaacucugacaacaga

SEQ ID NO: 1142516 - RNA, 23 nt, Human
aacugaacucugacaacagacuu

SEQ ID NO: 1142517 - RNA, 19 nt, Human
aacugacaagcuccauuua

SEQ ID NO: 1142518 - RNA, 20 nt, Human
aacugacaagcuccauuuaa

SEQ ID NO: 1142519 - RNA, 14 nt, Human
aacugaccagccuc

SEQ ID NO: 1142520 - RNA, 19 nt, Human
aacugaccagccuccaugc

SEQ ID NO: 1142521 - RNA, 21 nt, Human
aacuuagcauuuucugcaucu

SEQ ID NO: 1142522 - RNA, 23 nt, Human
aacuuagcauuuucugcaucucc

SEQ ID NO: 1142523 - RNA, 13 nt, Human
aagaaaucuauuu

SEQ ID NO: 1142524 - RNA, 19 nt, Human
auauacucaagagugguau

SEQ ID NO: 1142525 - RNA, 12 nt, Human
auaguauaaacc

SEQ ID NO: 1142526 - RNA, 19 nt, Human
auaccugaaugcucuguag

SEQ ID NO: 1142527 - RNA, 22 nt, Human
auacccccugcaaagcccagcu

SEQ ID NO: 1142528 - RNA, 18 nt, Human
agugauucucaugccuca

SEQ ID NO: 1142529 - RNA, 19 nt, Human
agugauucucaugccucag

SEQ ID NO: 1142530 - RNA, 18 nt, Human
agucaaggguaggguggg

SEQ ID NO: 1142531 - RNA, 15 nt, Human
auguacauagugcua

SEQ ID NO: 1142532 - RNA, 17 nt, Human
auguacauagugcuaac

SEQ ID NO: 1142533 - RNA, 18 nt, Human
auguacauagugcuaaca

SEQ ID NO: 1142534 - RNA, 15 nt, Human
augucaagauucagc

SEQ ID NO: 1142535 - RNA, 16 nt, Human
augucaagauucagcu

SEQ ID NO: 1142536 - RNA, 17 nt, Human
augucaagauucagcua

SEQ ID NO: 1142537 - RNA, 18 nt, Human
augucaagauucagcuag

SEQ ID NO: 1142538 - RNA, 14 nt, Human
augucaagggcagc

SEQ ID NO: 1142539 - RNA, 21 nt, Human
augucaagggcagcuuugcuc

SEQ ID NO: 1142540 - RNA, 23 nt, Human
augucaagggcagcuuugcucau

SEQ ID NO: 1142541 - RNA, 16 nt, Human
auguggugaaaagcag

SEQ ID NO: 1142542 - RNA, 20 nt, Human
auguggugaaaagcagguug

SEQ ID NO: 1142543 - RNA, 13 nt, Human
auguuugcauaua

SEQ ID NO: 1142544 - RNA, 15 nt, Human
auguuugcauauaag

SEQ ID NO: 1142545 - RNA, 14 nt, Human
auguuugcauauaa

SEQ ID NO: 1142546 - RNA, 11 nt, Human
augaugugcuu

SEQ ID NO: 1142547 - RNA, 13 nt, Human
augaugugcuuaa

SEQ ID NO: 1142548 - RNA, 16 nt, Human
augaugugugaaaacu

SEQ ID NO: 1142549 - RNA, 13 nt, Human
auggaaauguuua

SEQ ID NO: 1142550 - RNA, 16 nt, Human
auggaggaaaaccaag

SEQ ID NO: 1142551 - RNA, 14 nt, Human
aucccggcugcccu

SEQ ID NO: 1142552 - RNA, 15 nt, Human
aucccggcugcccuu

SEQ ID NO: 1142553 - RNA, 15 nt, Human
auccuuugugaaaaa

SEQ ID NO: 1142554 - RNA, 12 nt, Human
aucaccugcccu

SEQ ID NO: 1142555 - RNA, 13 nt, Human
aucaccugcccug

SEQ ID NO: 1142556 - RNA, 15 nt, Human
aucugggccagaauu

SEQ ID NO: 1142557 - RNA, 17 nt, Human
aucugggccagaauuuc

SEQ ID NO: 1142558 - RNA, 22 nt, Human
aucuuauaauuuaaaauaugcu

SEQ ID NO: 1142559 - RNA, 22 nt, Human
aucuuccaauuuaguuguugua

SEQ ID NO: 1142560 - RNA, 17 nt, Human
augacuccauagaccuu

SEQ ID NO: 1142561 - RNA, 16 nt, Human
agaugggacaauuaga

SEQ ID NO: 1142562 - RNA, 13 nt, Human
agccccacuuacc

SEQ ID NO: 1142563 - RNA, 17 nt, Human
agccccacuuaccgcgu

SEQ ID NO: 1142564 - RNA, 23 nt, Human
agccccauaauuuuuuuuuuccu

SEQ ID NO: 1142565 - RNA, 21 nt, Human
agauaggucagugcaaauacu

SEQ ID NO: 1142566 - RNA, 23 nt, Human
agauggcugugccucugccuguc

SEQ ID NO: 1142567 - RNA, 15 nt, Human
agagcccuucauuug

SEQ ID NO: 1142568 - RNA, 14 nt, Human
agagaguggcuccu

SEQ ID NO: 1142569 - RNA, 16 nt, Human
agagaguggcuccucc

SEQ ID NO: 1142570 - RNA, 17 nt, Human
agagaguggcuccuccc

SEQ ID NO: 1142571 - RNA, 16 nt, Human
agagagcuucuguugc

SEQ ID NO: 1142572 - RNA, 20 nt, Human
agagagcuucuguugcugcc

SEQ ID NO: 1142573 - RNA, 23 nt, Human
agagagcuucuguugcugccuca

SEQ ID NO: 1142574 - RNA, 17 nt, Human
agguaaucgaccugccu

SEQ ID NO: 1142575 - RNA, 18 nt, Human
agguaaucgaccugccuc

SEQ ID NO: 1142576 - RNA, 19 nt, Human
agguaaucgaccugccucg

SEQ ID NO: 1142577 - RNA, 20 nt, Human
aggcugaacuuguuuucugg

SEQ ID NO: 1142578 - RNA, 21 nt, Human
aggcugaacuuguuuucuggg

SEQ ID NO: 1142579 - RNA, 17 nt, Human
aggacccggaggggccu

SEQ ID NO: 1142580 - RNA, 14 nt, Human
aggcacugcugccc

SEQ ID NO: 1142581 - RNA, 16 nt, Human
aggcacugcugcccag

SEQ ID NO: 1142582 - RNA, 22 nt, Human
aggcacugcugcccagccucca

SEQ ID NO: 1142583 - RNA, 21 nt, Human
agcugacaaaauacuugucug

SEQ ID NO: 1142584 - RNA, 16 nt, Human
agcugacaaaauacuu

SEQ ID NO: 1142585 - RNA, 14 nt, Human
agcuggguuggaaa

SEQ ID NO: 1142586 - RNA, 21 nt, Human
agcuucuguugcugccucaug

SEQ ID NO: 1142587 - RNA, 22 nt, Human
agcuucuguugcugccucaugc

SEQ ID NO: 1142588 - RNA, 17 nt, Human
aggaaauccaggguggu

SEQ ID NO: 1142589 - RNA, 22 nt, Human
aggaacguaaucguguccccua

SEQ ID NO: 1142590 - RNA, 23 nt, Human
agcuucuguugcugccucaugcu

SEQ ID NO: 1142591 - RNA, 13 nt, Human
agcuuuucccuuc

SEQ ID NO: 1142592 - RNA, 16 nt, Human
agcuuuucccuucuuu

SEQ ID NO: 1142593 - RNA, 12 nt, Human
cagaacaaauga

SEQ ID NO: 1142594 - RNA, 14 nt, Human
cagaacaaaugaag

SEQ ID NO: 1142595 - RNA, 16 nt, Human
cagaacaaaugaagac

SEQ ID NO: 1142596 - RNA, 15 nt, Human
cagaacacauaauuc

SEQ ID NO: 1142597 - RNA, 15 nt, Human
cagaaguuucucagc

SEQ ID NO: 1142598 - RNA, 22 nt, Human
cagaauauuagugaccucagcu

SEQ ID NO: 1142599 - RNA, 21 nt, Human
cacuuucaaucuucaauccuu

SEQ ID NO: 1142600 - RNA, 13 nt, Human
cacugguggcccg

SEQ ID NO: 1142601 - RNA, 21 nt, Human
cacugguggcccgacagccug

SEQ ID NO: 1142602 - RNA, 22 nt, Human
cacugguggcccgacagccugg

SEQ ID NO: 1142603 - RNA, 21 nt, Human
cacuguuucacuacucagcau

SEQ ID NO: 1142604 - RNA, 22 nt, Human
cacuguuucacuacucagcaug

SEQ ID NO: 1142605 - RNA, 17 nt, Human
cacuuagaaauugcauu

SEQ ID NO: 1142606 - RNA, 19 nt, Human
cacuuagaaauugcauuuc

SEQ ID NO: 1142607 - RNA, 24 nt, Human
cacuuagaaauugcauuuccugac

SEQ ID NO: 1142608 - RNA, 20 nt, Human
cacuuagaaauugcauuucc

SEQ ID NO: 1142609 - RNA, 20 nt, Human
caccuaccaccacgcccggc

SEQ ID NO: 1142610 - RNA, 14 nt, Human
caccuuuauucugg

SEQ ID NO: 1142611 - RNA, 14 nt, Human
cacuacucagcaug

SEQ ID NO: 1142612 - RNA, 13 nt, Human
cacuacucagcau

SEQ ID NO: 1142613 - RNA, 16 nt, Human
caauaaaccaaugaac

SEQ ID NO: 1142614 - RNA, 19 nt, Human
caauaaaccaaugaacgaa

SEQ ID NO: 1142615 - RNA, 20 nt, Human
caauaaaccaaugaacgaag

SEQ ID NO: 1142616 - RNA, 13 nt, Human
caagauucagcua

SEQ ID NO: 1142617 - RNA, 17 nt, Human
caauucuccugccucag

SEQ ID NO: 1142618 - RNA, 19 nt, Human
caauucuccugccucagcc

SEQ ID NO: 1142619 - RNA, 13 nt, Human
auucaagauuccc

SEQ ID NO: 1142620 - RNA, 12 nt, Human
auucaagauucc

SEQ ID NO: 1142621 - RNA, 16 nt, Human
auucaauuugaugugg

SEQ ID NO: 1142622 - RNA, 21 nt, Human
auucaauuugauguggugaaa

SEQ ID NO: 1142623 - RNA, 14 nt, Human
auugaugauccauu

SEQ ID NO: 1142624 - RNA, 23 nt, Human
auuguaauaggcguaacuaauuu

SEQ ID NO: 1142625 - RNA, 23 nt, Human
auuuauaccucaauuuucacugu

SEQ ID NO: 1142626 - RNA, 16 nt, Human
auuucagcagcugcag

SEQ ID NO: 1142627 - RNA, 13 nt, Human
caaaugcagcuuu

SEQ ID NO: 1142628 - RNA, 14 nt, Human
caaccauuccccau

SEQ ID NO: 1142629 - RNA, 17 nt, Human
caacuaugauuuggaaa

SEQ ID NO: 1142630 - RNA, 18 nt, Human
caacuaugauuuggaaaa

SEQ ID NO: 1142631 - RNA, 19 nt, Human
caacuaugauuuggaaaau

SEQ ID NO: 1142632 - RNA, 22 nt, Human
caacuaugauuuggaaaauaaa

SEQ ID NO: 1142633 - RNA, 13 nt, Human
caagacacaguga

SEQ ID NO: 1142634 - RNA, 21 nt, Human
auuuuaucugccucucuugua

SEQ ID NO: 1142635 - RNA, 22 nt, Human
auuuuaucugccucucuuguaa

SEQ ID NO: 1142636 - RNA, 17 nt, Human
auuuuauagcuacuaau

SEQ ID NO: 1142637 - RNA, 19 nt, Human
cagauccccaagccuggca

SEQ ID NO: 1142638 - RNA, 15 nt, Human
cagagguccacaaca

SEQ ID NO: 1142639 - RNA, 20 nt, Human
cagagguccacaacacacag

SEQ ID NO: 1142640 - RNA, 15 nt, Human
caggccacuugauga

SEQ ID NO: 1142641 - RNA, 22 nt, Human
cagguugucugaagucacugca

SEQ ID NO: 1142642 - RNA, 23 nt, Human
cagguugucugaagucacugcac

SEQ ID NO: 1142643 - RNA, 12 nt, Human
cagugcaucuca

SEQ ID NO: 1142644 - RNA, 15 nt, Human
cagugcaucucagcc

SEQ ID NO: 1142645 - RNA, 16 nt, Human
cagugcaucucagccc

SEQ ID NO: 1142646 - RNA, 17 nt, Human
cagugcaucucagccca

SEQ ID NO: 1142647 - RNA, 18 nt, Human
cagugcaucucagcccac

SEQ ID NO: 1142648 - RNA, 20 nt, Human
caguggggaggggcuguggg

SEQ ID NO: 1142649 - RNA, 18 nt, Human
cauauggauccacuggcu

SEQ ID NO: 1142650 - RNA, 17 nt, Human
cauauggauccacuggc

SEQ ID NO: 1142651 - RNA, 13 nt, Human
cauauuaagaaug

SEQ ID NO: 1142652 - RNA, 19 nt, Human
cauauuaagaaugaucuga

SEQ ID NO: 1142653 - RNA, 15 nt, Human
cauauuaagaaugau

SEQ ID NO: 1142654 - RNA, 21 nt, Human
cauucuagagugcauauauuu

SEQ ID NO: 1142655 - RNA, 14 nt, Human
caugucaaacguga

SEQ ID NO: 1142656 - RNA, 19 nt, Human
caugucaaacgugaaaaug

SEQ ID NO: 1142657 - RNA, 16 nt, Human
caugucccuaccgagu

SEQ ID NO: 1142658 - RNA, 22 nt, Human
caugucccuaccgagucucuuc

SEQ ID NO: 1142659 - RNA, 23 nt, Human
caugucccuaccgagucucuucu

SEQ ID NO: 1142660 - RNA, 14 nt, Human
cauguuaguaauac

SEQ ID NO: 1142661 - RNA, 16 nt, Human
cauguuaguaauaccu

SEQ ID NO: 1142662 - RNA, 17 nt, Human
cauguuaguaauaccuc

SEQ ID NO: 1142663 - RNA, 18 nt, Human
cauguuaguaauaccucu

SEQ ID NO: 1142664 - RNA, 19 nt, Human
cauguuaguaauaccucua

SEQ ID NO: 1142665 - RNA, 20 nt, Human
cauguuaguaauaccucuaa

SEQ ID NO: 1142666 - RNA, 24 nt, Human
cauguuaguaauaccucuaauagu

SEQ ID NO: 1142667 - RNA, 20 nt, Human
cauguuggccaggcugcucu

SEQ ID NO: 1142668 - RNA, 13 nt, Human
caugauuucaugu

SEQ ID NO: 1142669 - RNA, 14 nt, Human
caugauuucaugua

SEQ ID NO: 1142670 - RNA, 16 nt, Human
caugauuucauguacu

SEQ ID NO: 1142671 - RNA, 17 nt, Human
caugauuucauguacug

SEQ ID NO: 1142672 - RNA, 19 nt, Human
caugauuucauguacugca

SEQ ID NO: 1142673 - RNA, 20 nt, Human
caugauuucauguacugcau

SEQ ID NO: 1142674 - RNA, 17 nt, Human
cauuuguggguuuuuau

SEQ ID NO: 1142675 - RNA, 23 nt, Human
cauuuguggguuuuuauuuccua

SEQ ID NO: 1142676 - RNA, 22 nt, Human
cauuuguggguuuuuauuuccu

SEQ ID NO: 1142677 - RNA, 13 nt, Human
ccacgcccggcua

SEQ ID NO: 1142678 - RNA, 14 nt, Human
ccacagcugcucaa

SEQ ID NO: 1142679 - RNA, 17 nt, Human
cuccacuuggcauuagc

SEQ ID NO: 1142680 - RNA, 13 nt, Human
cucagucucccuc

SEQ ID NO: 1142681 - RNA, 15 nt, Human
cucagucucccuccc

SEQ ID NO: 1142682 - RNA, 16 nt, Human
cucagucucccucccu

SEQ ID NO: 1142683 - RNA, 17 nt, Human
cucagucucccucccuu

SEQ ID NO: 1142684 - RNA, 12 nt, Human
cucaugccucag

SEQ ID NO: 1142685 - RNA, 16 nt, Human
cucaugccucagccuc

SEQ ID NO: 1142686 - RNA, 14 nt, Human
cuccaagcuccauc

SEQ ID NO: 1142687 - RNA, 18 nt, Human
cuccaagcuccaucucca

SEQ ID NO: 1142688 - RNA, 19 nt, Human
cuccaagcuccaucuccac

SEQ ID NO: 1142689 - RNA, 13 nt, Human
cucccccaucucu

SEQ ID NO: 1142690 - RNA, 13 nt, Human
cuccucucugccc

SEQ ID NO: 1142691 - RNA, 14 nt, Human
cuccucucugcccu

SEQ ID NO: 1142692 - RNA, 15 nt, Human
cuccucucugcccua

SEQ ID NO: 1142693 - RNA, 19 nt, Human
cuccucucugcccuaaugc

SEQ ID NO: 1142694 - RNA, 18 nt, Human
cuccucuucaacugacca

SEQ ID NO: 1142695 - RNA, 23 nt, Human
cuccucuucaacugaccagccuc

SEQ ID NO: 1142696 - RNA, 15 nt, Human
cuccuggacuccugc

SEQ ID NO: 1142697 - RNA, 18 nt, Human
cuccuggggguucuuucu

SEQ ID NO: 1142698 - RNA, 20 nt, Human
cuccuggggguucuuucuuc

SEQ ID NO: 1142699 - RNA, 22 nt, Human
cuccuggggguucuuucuuccu

SEQ ID NO: 1142700 - RNA, 23 nt, Human
cuccuggggguucuuucuuccuc

SEQ ID NO: 1142701 - RNA, 15 nt, Human
cucuaucaccaagga

SEQ ID NO: 1142702 - RNA, 12 nt, Human
cucuguccaggc

SEQ ID NO: 1142703 - RNA, 13 nt, Human
cucuuauuucauc

SEQ ID NO: 1142704 - RNA, 14 nt, Human
cucuuauuucauca

SEQ ID NO: 1142705 - RNA, 16 nt, Human
cucuucaacugaccag

SEQ ID NO: 1142706 - RNA, 17 nt, Human
cucuucaacugaccagc

SEQ ID NO: 1142707 - RNA, 20 nt, Human
cucuucaacugaccagccuc

SEQ ID NO: 1142708 - RNA, 16 nt, Human
cugacaaaauacuugu

SEQ ID NO: 1142709 - RNA, 15 nt, Human
cugacaacagacuuc

SEQ ID NO: 1142710 - RNA, 18 nt, Human
cugacaacagacuucuga

SEQ ID NO: 1142711 - RNA, 19 nt, Human
cugacaacagacuucugaa

SEQ ID NO: 1142712 - RNA, 18 nt, Human
cugacaagcuccauuuaa

SEQ ID NO: 1142713 - RNA, 13 nt, Human
cugacaagcucca

SEQ ID NO: 1142714 - RNA, 14 nt, Human
cugaggaccagcca

SEQ ID NO: 1142715 - RNA, 22 nt, Human
cugaggacuuaaaauauuccug

SEQ ID NO: 1142716 - RNA, 14 nt, Human
cugaguagcuggga

SEQ ID NO: 1142717 - RNA, 15 nt, Human
cugaguagcugggau

SEQ ID NO: 1142718 - RNA, 20 nt, Human
cugaguagcugggauuacag

SEQ ID NO: 1142719 - RNA, 23 nt, Human
cgguguuuaagacauuuuuggaa

SEQ ID NO: 1142720 - RNA, 16 nt, Human
cgagucucuucuccac

SEQ ID NO: 1142721 - RNA, 13 nt, Human
cgcaggcuggccc

SEQ ID NO: 1142722 - RNA, 15 nt, Human
ccuuucacaaccuuc

SEQ ID NO: 1142723 - RNA, 12 nt, Human
cgacagccuggc

SEQ ID NO: 1142724 - RNA, 13 nt, Human
cgacagccuggca

SEQ ID NO: 1142725 - RNA, 14 nt, Human
cgacagccuggcac

SEQ ID NO: 1142726 - RNA, 11 nt, Human
cuacucagcau

SEQ ID NO: 1142727 - RNA, 11 nt, Human
cgugugugugu

SEQ ID NO: 1142728 - RNA, 17 nt, Human
cuacguuaccaggcagg

SEQ ID NO: 1142729 - RNA, 15 nt, Human
cucaauuuucacugu

SEQ ID NO: 1142730 - RNA, 11 nt, Human
cucacaaaaga

SEQ ID NO: 1142731 - RNA, 17 nt, Human
cucaauuuucacugugu

SEQ ID NO: 1142732 - RNA, 20 nt, Human
cucaauaaaauuauagcucu

SEQ ID NO: 1142733 - RNA, 14 nt, Human
cucaauaaaguaca

SEQ ID NO: 1142734 - RNA, 17 nt, Human
ccugccccagggcuccc

SEQ ID NO: 1142735 - RNA, 18 nt, Human
ccugugacuucagcucug

SEQ ID NO: 1142736 - RNA, 16 nt, Human
ccugugaacugaacuc

SEQ ID NO: 1142737 - RNA, 17 nt, Human
ccugugaacugaacucu

SEQ ID NO: 1142738 - RNA, 13 nt, Human
ccugguuuccugc

SEQ ID NO: 1142739 - RNA, 14 nt, Human
ccugguuuccugcc

SEQ ID NO: 1142740 - RNA, 16 nt, Human
ccugguuuccugcccu

SEQ ID NO: 1142741 - RNA, 15 nt, Human
ccugguuuccugccc

SEQ ID NO: 1142742 - RNA, 17 nt, Human
ccuguccugccuaaggc

SEQ ID NO: 1142743 - RNA, 19 nt, Human
ccuguccugccuaaggcug

SEQ ID NO: 1142744 - RNA, 20 nt, Human
ccugggccccaguuguauuu

SEQ ID NO: 1142745 - RNA, 23 nt, Human
ccucauuuuugaauacaggcaua

SEQ ID NO: 1142746 - RNA, 13 nt, Human
cccucagagccac

SEQ ID NO: 1142747 - RNA, 12 nt, Human
cccggcugcccu

SEQ ID NO: 1142748 - RNA, 13 nt, Human
cccggcugcccuu

SEQ ID NO: 1142749 - RNA, 15 nt, Human
ccccugcaaagccca

SEQ ID NO: 1142750 - RNA, 16 nt, Human
ccccugcaaagcccag

SEQ ID NO: 1142751 - RNA, 17 nt, Human
ccccugcaaagcccagc

SEQ ID NO: 1142752 - RNA, 23 nt, Human
cccauaauuuuuuuuuuccuuuu

SEQ ID NO: 1142753 - RNA, 22 nt, Human
cccauaauuuuuuuuuuccuuu

SEQ ID NO: 1142754 - RNA, 14 nt, Human
ccagucccccugcc

SEQ ID NO: 1142755 - RNA, 22 nt, Human
ccaggauguacaaggacagccc

SEQ ID NO: 1142756 - RNA, 17 nt, Human
ccaggcaacuugggaac

SEQ ID NO: 1142757 - RNA, 18 nt, Human
ccagcuugaaaccuucac

SEQ ID NO: 1142758 - RNA, 20 nt, Human
ccagcuugaaaccuucacuu

SEQ ID NO: 1142759 - RNA, 20 nt, Human
ccauaauuuuuuuuuuccuu

SEQ ID NO: 1142760 - RNA, 12 nt, Human
cugcccuggugc

SEQ ID NO: 1142761 - RNA, 13 nt, Human
cugcccuggugcu

SEQ ID NO: 1142762 - RNA, 14 nt, Human
cugcccuggugcug

SEQ ID NO: 1142763 - RNA, 15 nt, Human
cugcccuggugcugc

SEQ ID NO: 1142764 - RNA, 16 nt, Human
cugcccuggugcugcc

SEQ ID NO: 1142765 - RNA, 17 nt, Human
cugcccugguuuccugc

SEQ ID NO: 1142766 - RNA, 18 nt, Human
cugcccugguuuccugcc

SEQ ID NO: 1142767 - RNA, 19 nt, Human
cugcccugguuuccugccc

SEQ ID NO: 1142768 - RNA, 21 nt, Human
cugcccugguuuccugcccug

SEQ ID NO: 1142769 - RNA, 20 nt, Human
cugcccugguuuccugcccu

SEQ ID NO: 1142770 - RNA, 15 nt, Human
cugccuguucccauu

SEQ ID NO: 1142771 - RNA, 19 nt, Human
cugccuguucccauucuug

SEQ ID NO: 1142772 - RNA, 16 nt, Human
cugcucaacuugcaaa

SEQ ID NO: 1142773 - RNA, 22 nt, Human
cuggacuccucuguccaggcac

SEQ ID NO: 1142774 - RNA, 23 nt, Human
cuggacuccucuguccaggcacu

SEQ ID NO: 1142775 - RNA, 14 nt, Human
cuggagaacuagag

SEQ ID NO: 1142776 - RNA, 15 nt, Human
cuggagaacuagaga

SEQ ID NO: 1142777 - RNA, 17 nt, Human
cuggauccaucaggcca

SEQ ID NO: 1142778 - RNA, 19 nt, Human
cuggauccaucaggccacu

SEQ ID NO: 1142779 - RNA, 20 nt, Human
cuggaucuccauucucucag

SEQ ID NO: 1142780 - RNA, 13 nt, Human
cuggcagccgugc

SEQ ID NO: 1142781 - RNA, 17 nt, Human
cuggcagccgugccuuc

SEQ ID NO: 1142782 - RNA, 18 nt, Human
cuggcagccgugccuuca

SEQ ID NO: 1142783 - RNA, 19 nt, Human
cuggcagccgugccuucag

SEQ ID NO: 1142784 - RNA, 19 nt, Human
cuggcucccacaggcccuu

SEQ ID NO: 1142785 - RNA, 22 nt, Human
cuggcucccacaggcccuuccu

SEQ ID NO: 1142786 - RNA, 22 nt, Human
cuguagccuaaacuccaaacau

SEQ ID NO: 1142787 - RNA, 17 nt, Human
cuguaggaagguacugu

SEQ ID NO: 1142788 - RNA, 18 nt, Human
cuguaggaagguacugua

SEQ ID NO: 1142789 - RNA, 19 nt, Human
cuguaggaagguacuguau

SEQ ID NO: 1142790 - RNA, 20 nt, Human
cuguaggaagguacuguaug

SEQ ID NO: 1142791 - RNA, 21 nt, Human
cuguaggaagguacuguauga

SEQ ID NO: 1142792 - RNA, 13 nt, Human
cugugaacugaac

SEQ ID NO: 1142793 - RNA, 15 nt, Human
cugugaacugaacuc

SEQ ID NO: 1142794 - RNA, 16 nt, Human
cugugaacugaacucu

SEQ ID NO: 1142795 - RNA, 13 nt, Human
cuguucacucuac

SEQ ID NO: 1142796 - RNA, 14 nt, Human
cuguugcugccuca

SEQ ID NO: 1142797 - RNA, 13 nt, Human
cuguuguuaucug

SEQ ID NO: 1142798 - RNA, 22 nt, Human
cuguuguuaucuguuugagaaa

SEQ ID NO: 1142799 - RNA, 14 nt, Human
cuguuguuaugaug

SEQ ID NO: 1142800 - RNA, 15 nt, Human
cuguuguuaugaugu

SEQ ID NO: 1142801 - RNA, 17 nt, Human
cuguuguuaugaugugc

SEQ ID NO: 1142802 - RNA, 19 nt, Human
cuguuguuaugaugugcuu

SEQ ID NO: 1142803 - RNA, 23 nt, Human
cuguuguuaugaugugcuuaaca

SEQ ID NO: 1142804 - RNA, 21 nt, Human
cuguuguuaugaugugcuuaa

SEQ ID NO: 1142805 - RNA, 18 nt, Human
cuuaaacaguugcacagc

SEQ ID NO: 1142806 - RNA, 19 nt, Human
cuuaaacaguugcacagca

SEQ ID NO: 1142807 - RNA, 20 nt, Human
cuuaaacaguugcacagcau

SEQ ID NO: 1142808 - RNA, 22 nt, Human
cuuaaacaguugcacagcaucu

SEQ ID NO: 1142809 - RNA, 23 nt, Human
cuuaaagaauucaaauuuuaucu

SEQ ID NO: 1142810 - RNA, 15 nt, Human
cuuaaagaauucaaa

SEQ ID NO: 1142811 - RNA, 17 nt, Human
cuuaaagaauucaaauu

SEQ ID NO: 1142812 - RNA, 18 nt, Human
cuuaaagaauucaaauuu

SEQ ID NO: 1142813 - RNA, 16 nt, Human
cuuaaauacagcuuuu

SEQ ID NO: 1142814 - RNA, 20 nt, Human
cuuacauuagcaguuugcuu

SEQ ID NO: 1142815 - RNA, 14 nt, Human
cuuccauauggauc

SEQ ID NO: 1142816 - RNA, 16 nt, Human
cuuccucuccacugcc

SEQ ID NO: 1142817 - RNA, 17 nt, Human
cuuccucuccacugccu

SEQ ID NO: 1142818 - RNA, 19 nt, Human
cuuccucuccacugccuuc

SEQ ID NO: 1142819 - RNA, 21 nt, Human
cuuccucuccacugccuucga

SEQ ID NO: 1142820 - RNA, 11 nt, Human
cuuccucugcu

SEQ ID NO: 1142821 - RNA, 12 nt, Human
cuuccucugcug

SEQ ID NO: 1142822 - RNA, 13 nt, Human
cuuccucugcuga

SEQ ID NO: 1142823 - RNA, 19 nt, Human
gaaaacugcaacuuguaaa

SEQ ID NO: 1142824 - RNA, 18 nt, Human
gaaaauuaggauuucaug

SEQ ID NO: 1142825 - RNA, 22 nt, Human
gaaaauuaggauuucaugauuu

SEQ ID NO: 1142826 - RNA, 18 nt, Human
gaaagaaguggggacaga

SEQ ID NO: 1142827 - RNA, 13 nt, Human
gaaugaucugauu

SEQ ID NO: 1142828 - RNA, 16 nt, Human
gaaugaucugauugac

SEQ ID NO: 1142829 - RNA, 19 nt, Human
gacauuguagagcuucugg

SEQ ID NO: 1142830 - RNA, 16 nt, Human
gaccccugagcuugca

SEQ ID NO: 1142831 - RNA, 17 nt, Human
gacccggaggggccugg

SEQ ID NO: 1142832 - RNA, 18 nt, Human
gacccggaggggccuggc

SEQ ID NO: 1142833 - RNA, 19 nt, Human
gacccggaggggccuggca

SEQ ID NO: 1142834 - RNA, 20 nt, Human
gacccggaggggccuggcag

SEQ ID NO: 1142835 - RNA, 22 nt, Human
gaccucagguaaucgaccugcc

SEQ ID NO: 1142836 - RNA, 23 nt, Human
gaccucagguaaucgaccugccu

SEQ ID NO: 1142837 - RNA, 18 nt, Human
gacuuuuauuuccaguga

SEQ ID NO: 1142838 - RNA, 20 nt, Human
gagaaaaagaaaaaauauau

SEQ ID NO: 1142839 - RNA, 22 nt, Human
gagagcuucuguugcugccuca

SEQ ID NO: 1142840 - RNA, 15 nt, Human
gagauuauguucuuu

SEQ ID NO: 1142841 - RNA, 12 nt, Human
gagggccugggc

SEQ ID NO: 1142842 - RNA, 18 nt, Human
gauacuuugauauuuuca

SEQ ID NO: 1142843 - RNA, 19 nt, Human
gauauuuucaacgcagccc

SEQ ID NO: 1142844 - RNA, 21 nt, Human
gauauuuucaacgcagcccug

SEQ ID NO: 1142845 - RNA, 22 nt, Human
gauauuuucaacgcagcccugc

SEQ ID NO: 1142846 - RNA, 23 nt, Human
gauauuuucaacgcagcccugcu

SEQ ID NO: 1142847 - RNA, 22 nt, Human
gaucaaaccccgaccaccugcc

SEQ ID NO: 1142848 - RNA, 14 nt, Human
gaucaaauguuuaa

SEQ ID NO: 1142849 - RNA, 16 nt, Human
gaucaaauguuuaauc

SEQ ID NO: 1142850 - RNA, 20 nt, Human
gaucaaauguuuaaucauau

SEQ ID NO: 1142851 - RNA, 18 nt, Human
gaucaaauguuuaaucau

SEQ ID NO: 1142852 - RNA, 19 nt, Human
gauccacuggcuggacaaa

SEQ ID NO: 1142853 - RNA, 13 nt, Human
gauccacuggcug

SEQ ID NO: 1142854 - RNA, 17 nt, Human
gaucugaugcaagcaag

SEQ ID NO: 1142855 - RNA, 16 nt, Human
gaucugauugaccgug

SEQ ID NO: 1142856 - RNA, 23 nt, Human
gaucugauugaccguguuggucu

SEQ ID NO: 1142857 - RNA, 13 nt, Human
gcaaaaucaguuu

SEQ ID NO: 1142858 - RNA, 15 nt, Human
gcaaaaucaguuuuc

SEQ ID NO: 1142859 - RNA, 20 nt, Human
gcaaccuucgccaccugggu

SEQ ID NO: 1142860 - RNA, 17 nt, Human
gcauccuccgccucccg

SEQ ID NO: 1142861 - RNA, 20 nt, Human
gcaucuagcaugucgucaaa

SEQ ID NO: 1142862 - RNA, 17 nt, Human
gccauugacuucuuccc

SEQ ID NO: 1142863 - RNA, 15 nt, Human
gcccccucugcccug

SEQ ID NO: 1142864 - RNA, 16 nt, Human
gcccccucugcccugc

SEQ ID NO: 1142865 - RNA, 17 nt, Human
gcccccucugcccugcg

SEQ ID NO: 1142866 - RNA, 20 nt, Human
gcccugcgggucacaggagg

SEQ ID NO: 1142867 - RNA, 12 nt, Human
gcccuuccaugu

SEQ ID NO: 1142868 - RNA, 21 nt, Human
gcccuuccaugucgccucugc

SEQ ID NO: 1142869 - RNA, 22 nt, Human
gcccuuccaugucgccucugca

SEQ ID NO: 1142870 - RNA, 12 nt, Human
gcccuuccucuc

SEQ ID NO: 1142871 - RNA, 14 nt, Human
gcccuuccucucca

SEQ ID NO: 1142872 - RNA, 15 nt, Human
gcccuuccucuccac

SEQ ID NO: 1142873 - RNA, 16 nt, Human
gcccuuccucuccacu

SEQ ID NO: 1142874 - RNA, 19 nt, Human
gccucaugcuaagacucag

SEQ ID NO: 1142875 - RNA, 19 nt, Human
gccuccugaguagcuggga

SEQ ID NO: 1142876 - RNA, 14 nt, Human
gcgcaggcuggccc

SEQ ID NO: 1142877 - RNA, 15 nt, Human
gcgcaggcuggcccu

SEQ ID NO: 1142878 - RNA, 16 nt, Human
gcgcaggcuggcccug

SEQ ID NO: 1142879 - RNA, 17 nt, Human
gcgcaggcuggcccugc

SEQ ID NO: 1142880 - RNA, 15 nt, Human
gcucaacuugcaaaa

SEQ ID NO: 1142881 - RNA, 13 nt, Human
gcugccucaugcu

SEQ ID NO: 1142882 - RNA, 23 nt, Human
gcugcucuugaacuccugaccuc

SEQ ID NO: 1142883 - RNA, 11 nt, Human
gcuggcugccu

SEQ ID NO: 1142884 - RNA, 14 nt, Human
gcuggcugccuuag

SEQ ID NO: 1142885 - RNA, 20 nt, Human
gcuggcugccuuagaaccuu

SEQ ID NO: 1142886 - RNA, 14 nt, Human
gcugugccucugcc

SEQ ID NO: 1142887 - RNA, 15 nt, Human
gcugugccucugccu

SEQ ID NO: 1142888 - RNA, 16 nt, Human
gcugugccucugccug

SEQ ID NO: 1142889 - RNA, 13 nt, Human
gcuguuguuauga

SEQ ID NO: 1142890 - RNA, 14 nt, Human
gcuguuguuaugau

SEQ ID NO: 1142891 - RNA, 15 nt, Human
gcuguuguuaugaug

SEQ ID NO: 1142892 - RNA, 19 nt, Human
gcuguuguuaugaugugcu

SEQ ID NO: 1142893 - RNA, 17 nt, Human
gcuguuguuaugaugug

SEQ ID NO: 1142894 - RNA, 18 nt, Human
gcuuuuggauuggacaaa

SEQ ID NO: 1142895 - RNA, 16 nt, Human
ggaaaaaauaacaaug

SEQ ID NO: 1142896 - RNA, 16 nt, Human
ggaaauccaggguggu

SEQ ID NO: 1142897 - RNA, 19 nt, Human
ggacaggcugcggccccuc

SEQ ID NO: 1142898 - RNA, 21 nt, Human
ggacaggcugcggccccuccc

SEQ ID NO: 1142899 - RNA, 22 nt, Human
ggacaggcugcggccccucccc

SEQ ID NO: 1142900 - RNA, 15 nt, Human
ggacagggcauggcc

SEQ ID NO: 1142901 - RNA, 22 nt, Human
ggacagggcauggccagguggc

SEQ ID NO: 1142902 - RNA, 21 nt, Human
ggaucucuucuuaauguacau

SEQ ID NO: 1142903 - RNA, 22 nt, Human
ggaucucuucuuaauguacaua

SEQ ID NO: 1142904 - RNA, 16 nt, Human
ggcagccucuucaaaa

SEQ ID NO: 1142905 - RNA, 10 nt, Human
ggcagggagg

SEQ ID NO: 1142906 - RNA, 17 nt, Human
ggcagggagggccuggg

SEQ ID NO: 1142907 - RNA, 18 nt, Human
ggcagggagggccugggc

SEQ ID NO: 1142908 - RNA, 19 nt, Human
ggcagggagggccugggcc

SEQ ID NO: 1142909 - RNA, 20 nt, Human
ggcagggagggccugggccc

SEQ ID NO: 1142910 - RNA, 20 nt, Human
ggcaucgcaauguaagacuc

SEQ ID NO: 1142911 - RNA, 22 nt, Human
ggccaagagaugcagugccagg

SEQ ID NO: 1142912 - RNA, 11 nt, Human
ggccugccugu

SEQ ID NO: 1142913 - RNA, 14 nt, Human
ggccuggcagccgu

SEQ ID NO: 1142914 - RNA, 15 nt, Human
ggccuggcagccgug

SEQ ID NO: 1142915 - RNA, 17 nt, Human
ggccuucagggagugag

SEQ ID NO: 1142916 - RNA, 14 nt, Human
ggcgugagaccugc

SEQ ID NO: 1142917 - RNA, 16 nt, Human
ggcgugagaccugccc

SEQ ID NO: 1142918 - RNA, 17 nt, Human
ggcgugagaccugcccc

SEQ ID NO: 1142919 - RNA, 18 nt, Human
ggcgugagaccugccccu

SEQ ID NO: 1142920 - RNA, 20 nt, Human
ggcuaagcuucacuguaaaa

SEQ ID NO: 1142921 - RNA, 18 nt, Human
ggcuaauuuuuguuuugu

SEQ ID NO: 1142922 - RNA, 22 nt, Human
ggcuacaccuuagccugcccuc

SEQ ID NO: 1142923 - RNA, 23 nt, Human
ggcuacaccuuagccugcccucc

SEQ ID NO: 1142924 - RNA, 12 nt, Human
ggcugcccuggu

SEQ ID NO: 1142925 - RNA, 10 nt, Human
ggcugcccuu

SEQ ID NO: 1142926 - RNA, 11 nt, Human
ggcugcccuuu

SEQ ID NO: 1142927 - RNA, 14 nt, Human
ggcugcccuuucug

SEQ ID NO: 1142928 - RNA, 18 nt, Human
ggcugcccuuucugggca

SEQ ID NO: 1142929 - RNA, 20 nt, Human
aaaauacuugucuguuuuaa

SEQ ID NO: 1142930 - RNA, 22 nt, Human
aaaauaugaccacacuccagcu

SEQ ID NO: 1142931 - RNA, 15 nt, Human
aaaauauuccugcau

SEQ ID NO: 1142932 - RNA, 23 nt, Human
aaaaugcuguauuagucacagag

SEQ ID NO: 1142933 - RNA, 18 nt, Human
gggcgugagaccugcccc

SEQ ID NO: 1142934 - RNA, 19 nt, Human
gggcgugagaccugccccu

SEQ ID NO: 1142935 - RNA, 20 nt, Human
gggcuaggaaauccagggug

SEQ ID NO: 1142936 - RNA, 17 nt, Human
aaaccuucacuuaggaa

SEQ ID NO: 1142937 - RNA, 13 nt, Human
aaacgcaucuagu

SEQ ID NO: 1142938 - RNA, 15 nt, Human
gggugguggugauag

SEQ ID NO: 1142939 - RNA, 23 nt, Human
ggguuuuuauuuccuaugaugua

SEQ ID NO: 1142940 - RNA, 11 nt, Human
gguaggguggg

SEQ ID NO: 1142941 - RNA, 23 nt, Human
gguagggugggccuucagggagu

SEQ ID NO: 1142942 - RNA, 21 nt, Human
gguauaucuagguuuaugaca

SEQ ID NO: 1142943 - RNA, 19 nt, Human
gguauaucuagguuuauga

SEQ ID NO: 1142944 - RNA, 14 nt, Human
ggucagugcaaaua

SEQ ID NO: 1142945 - RNA, 17 nt, Human
aaacuucguuuaaugaa

SEQ ID NO: 1142946 - RNA, 14 nt, Human
aaacuucguuuaau

SEQ ID NO: 1142947 - RNA, 21 nt, Human
aaagcagguugauaaaucauu

SEQ ID NO: 1142948 - RNA, 12 nt, Human
gguuuccugccc

SEQ ID NO: 1142949 - RNA, 13 nt, Human
gguuuccugcccu

SEQ ID NO: 1142950 - RNA, 15 nt, Human
gguuuccugcccugg

SEQ ID NO: 1142951 - RNA, 16 nt, Human
gguuuccugcccuggg

SEQ ID NO: 1142952 - RNA, 19 nt, Human
gguuuccugcccugggagg

SEQ ID NO: 1142953 - RNA, 16 nt, Human
guaacuaacuaaaaca

SEQ ID NO: 1142954 - RNA, 17 nt, Human
guaacuaacuaaaacaa

SEQ ID NO: 1142955 - RNA, 21 nt, Human
guaauaccucuaauaguauaa

SEQ ID NO: 1142956 - RNA, 22 nt, Human
guaauaccucuaauaguauaaa

SEQ ID NO: 1142957 - RNA, 12 nt, Human
guaauccuguag

SEQ ID NO: 1142958 - RNA, 15 nt, Human
guaaucgaccugccu

SEQ ID NO: 1142959 - RNA, 17 nt, Human
guaaucgaccugccucg

SEQ ID NO: 1142960 - RNA, 21 nt, Human
guacaaaaaaaucuuccaauu

SEQ ID NO: 1142961 - RNA, 22 nt, Human
guacaaccuguucugcuuuccu

SEQ ID NO: 1142962 - RNA, 14 nt, Human
aaauauauacucaa

SEQ ID NO: 1142963 - RNA, 18 nt, Human
aaauauaugcuaagucuu

SEQ ID NO: 1142964 - RNA, 20 nt, Human
aaauauuccugcauuuguga

SEQ ID NO: 1142965 - RNA, 11 nt, Human
guauugacaaa

SEQ ID NO: 1142966 - RNA, 13 nt, Human
guauugacaaaau

SEQ ID NO: 1142967 - RNA, 15 nt, Human
guauugacaaaaugu

SEQ ID NO: 1142968 - RNA, 16 nt, Human
guauugacaaaauguu

SEQ ID NO: 1142969 - RNA, 17 nt, Human
guauugacaaaauguua

SEQ ID NO: 1142970 - RNA, 19 nt, Human
guauugacaaaauguuauu

SEQ ID NO: 1142971 - RNA, 18 nt, Human
guauugacaaaauguuau

SEQ ID NO: 1142972 - RNA, 11 nt, Human
guauuuauuca

SEQ ID NO: 1142973 - RNA, 16 nt, Human
aaaugucucacugagc

SEQ ID NO: 1142974 - RNA, 17 nt, Human
aaaugucucacugagca

SEQ ID NO: 1142975 - RNA, 14 nt, Human
aaaugucuuccugg

SEQ ID NO: 1142976 - RNA, 15 nt, Human
aaauguggcuccugg

SEQ ID NO: 1142977 - RNA, 14 nt, Human
aaauuaaucugggc

SEQ ID NO: 1142978 - RNA, 20 nt, Human
aaauuagccaguaauccugu

SEQ ID NO: 1142979 - RNA, 21 nt, Human
aaauuagccaguaauccugua

SEQ ID NO: 1142980 - RNA, 22 nt, Human
aaauuagccaguaauccuguag

SEQ ID NO: 1142981 - RNA, 18 nt, Human
aaauuaggauuucaugau

SEQ ID NO: 1142982 - RNA, 19 nt, Human
aaauuaggauuucaugauu

SEQ ID NO: 1142983 - RNA, 17 nt, Human
aaauuccaagugauuga

SEQ ID NO: 1142984 - RNA, 17 nt, Human
aaauuguauuacaaauc

SEQ ID NO: 1142985 - RNA, 18 nt, Human
aaauugucagaugcugug

SEQ ID NO: 1142986 - RNA, 17 nt, Human
gucacaggacucugccu

SEQ ID NO: 1142987 - RNA, 18 nt, Human
gucacaggacucugccuc

SEQ ID NO: 1142988 - RNA, 19 nt, Human
gucacaggacucugccucc

SEQ ID NO: 1142989 - RNA, 16 nt, Human
gucacaggagggaggg

SEQ ID NO: 1142990 - RNA, 20 nt, Human
gucacugcacagugcaucuc

SEQ ID NO: 1142991 - RNA, 23 nt, Human
gucacugcacagugcaucucagc

SEQ ID NO: 1142992 - RNA, 17 nt, Human
gucacuuuguuuuacug

SEQ ID NO: 1142993 - RNA, 18 nt, Human
guccuggagguuccccag

SEQ ID NO: 1142994 - RNA, 12 nt, Human
gucgccucugca

SEQ ID NO: 1142995 - RNA, 22 nt, Human
gucuuguuuuuuuuuuccacuu

SEQ ID NO: 1142996 - RNA, 23 nt, Human
aaccuggucacaggacucugccu

SEQ ID NO: 1142997 - RNA, 21 nt, Human
aaccuucgccaccuggguucc

SEQ ID NO: 1142998 - RNA, 12 nt, Human
aacgugaaaaug

SEQ ID NO: 1142999 - RNA, 13 nt, Human
aacuaaaacaaag

SEQ ID NO: 1143000 - RNA, 17 nt, Human
aacuaaaacaaagccac

SEQ ID NO: 1143001 - RNA, 20 nt, Human
aacuaaaacaaagccacuuu

SEQ ID NO: 1143002 - RNA, 15 nt, Human
aacuauguugauaaa

SEQ ID NO: 1143003 - RNA, 12 nt, Human
aacuccugaccu

SEQ ID NO: 1143004 - RNA, 14 nt, Human
aacuccugaccuca

SEQ ID NO: 1143005 - RNA, 22 nt, Human
gugacauguguuggcagccucu

SEQ ID NO: 1143006 - RNA, 16 nt, Human
gugacuucagcucugu

SEQ ID NO: 1143007 - RNA, 13 nt, Human
gugagaccugccc

SEQ ID NO: 1143008 - RNA, 14 nt, Human
gugagaccugcccc

SEQ ID NO: 1143009 - RNA, 15 nt, Human
gugagaccugccccu

SEQ ID NO: 1143010 - RNA, 16 nt, Human
gugagaccugccccuc

SEQ ID NO: 1143011 - RNA, 23 nt, Human
gugagaccugccccuccucucug

SEQ ID NO: 1143012 - RNA, 16 nt, Human
aacucugacaacagac

SEQ ID NO: 1143013 - RNA, 16 nt, Human
aacugcccccucugcc

SEQ ID NO: 1143014 - RNA, 17 nt, Human
aacugcccccucugccc

SEQ ID NO: 1143015 - RNA, 18 nt, Human
aacugcccccucugcccu

SEQ ID NO: 1143016 - RNA, 19 nt, Human
aacugcccccucugcccug

SEQ ID NO: 1143017 - RNA, 20 nt, Human
aacugcccccucugcccugc

SEQ ID NO: 1143018 - RNA, 21 nt, Human
aacugcccccucugcccugcg

SEQ ID NO: 1143019 - RNA, 23 nt, Human
gugaugguuccccuguucacucu

SEQ ID NO: 1143020 - RNA, 13 nt, Human
gugauuagugaaa

SEQ ID NO: 1143021 - RNA, 20 nt, Human
gugauucacagugugaaucu

SEQ ID NO: 1143022 - RNA, 16 nt, Human
aagauggcugugccuc

SEQ ID NO: 1143023 - RNA, 18 nt, Human
aagauggcugugccucug

SEQ ID NO: 1143024 - RNA, 16 nt, Human
aagcacuaaacaaaga

SEQ ID NO: 1143025 - RNA, 13 nt, Human
aagcccagcuuga

SEQ ID NO: 1143026 - RNA, 19 nt, Human
guuaauauuuauaggucac

SEQ ID NO: 1143027 - RNA, 23 nt, Human
guuacucuucaguuaagccuuug

SEQ ID NO: 1143028 - RNA, 19 nt, Human
guuauuauauuuacaaaug

SEQ ID NO: 1143029 - RNA, 20 nt, Human
guuauuauauuuacaaaugg

SEQ ID NO: 1143030 - RNA, 13 nt, Human
aagccguggcuuc

SEQ ID NO: 1143031 - RNA, 14 nt, Human
aagccguggcuucc

SEQ ID NO: 1143032 - RNA, 15 nt, Human
aagccguggcuuccc

SEQ ID NO: 1143033 - RNA, 19 nt, Human
guucuucgacuguuguuau

SEQ ID NO: 1143034 - RNA, 15 nt, Human
guuuaugacaguaau

SEQ ID NO: 1143035 - RNA, 17 nt, Human
guuuaugacaguaauug

SEQ ID NO: 1143036 - RNA, 13 nt, Human
guuuauucauaug

SEQ ID NO: 1143037 - RNA, 14 nt, Human
guuuauucauaugc

SEQ ID NO: 1143038 - RNA, 16 nt, Human
guuuauucauaugcau

SEQ ID NO: 1143039 - RNA, 17 nt, Human
guuuauucauaugcaua

SEQ ID NO: 1143040 - RNA, 19 nt, Human
guuuauucauaugcauauu

SEQ ID NO: 1143041 - RNA, 18 nt, Human
guuuauucauaugcauau

SEQ ID NO: 1143042 - RNA, 23 nt, Human
aagguauaucuagguuuaugaca

SEQ ID NO: 1143043 - RNA, 22 nt, Human
aagguauaucuagguuuaugac

SEQ ID NO: 1143044 - RNA, 23 nt, Human
aagguuucagaaagaagugggga

SEQ ID NO: 1143045 - RNA, 20 nt, Human
guuugcuuuguaugcacuuu

SEQ ID NO: 1143046 - RNA, 13 nt, Human
guuuggagacaga

SEQ ID NO: 1143047 - RNA, 22 nt, Human
aagucacugcacagugcaucuc

SEQ ID NO: 1143048 - RNA, 16 nt, Human
aagucaggaaucauca

SEQ ID NO: 1143049 - RNA, 22 nt, Human
uaaaaagcuccaaaugcagcuu

SEQ ID NO: 1143050 - RNA, 13 nt, Human
aagugauucucau

SEQ ID NO: 1143051 - RNA, 16 nt, Human
aagugauucucaugcc

SEQ ID NO: 1143052 - RNA, 19 nt, Human
aagugauucucaugccuca

SEQ ID NO: 1143053 - RNA, 17 nt, Human
aagugauucucaugccu

SEQ ID NO: 1143054 - RNA, 11 nt, Human
aaguuaagaau

SEQ ID NO: 1143055 - RNA, 23 nt, Human
aaguuaagaauguucuuauguug

SEQ ID NO: 1143056 - RNA, 14 nt, Human
aaguucccuacuuc

SEQ ID NO: 1143057 - RNA, 17 nt, Human
aaguucccuacuuccug

SEQ ID NO: 1143058 - RNA, 20 nt, Human
aaguucccuacuuccuguga

SEQ ID NO: 1143059 - RNA, 14 nt, Human
aauaguuguugauu

SEQ ID NO: 1143060 - RNA, 15 nt, Human
uaacaugaagaccuu

SEQ ID NO: 1143061 - RNA, 20 nt, Human
uaacgauaaaagacagugaa

SEQ ID NO: 1143062 - RNA, 15 nt, Human
aauauuccugcauuu

SEQ ID NO: 1143063 - RNA, 14 nt, Human
uaagauuccagaga

SEQ ID NO: 1143064 - RNA, 21 nt, Human
uaagauuccagagaguggcuc

SEQ ID NO: 1143065 - RNA, 12 nt, Human
aaucauauaaau

SEQ ID NO: 1143066 - RNA, 17 nt, Human
aaucauauaaauagaau

SEQ ID NO: 1143067 - RNA, 18 nt, Human
aaucauauaaauagaaug

SEQ ID NO: 1143068 - RNA, 20 nt, Human
aaucauauaaauagaaugua

SEQ ID NO: 1143069 - RNA, 21 nt, Human
aaucauauaaauagaauguaa

SEQ ID NO: 1143070 - RNA, 22 nt, Human
aaucauauaaauagaauguaaa

SEQ ID NO: 1143071 - RNA, 18 nt, Human
aauccuguaggaagguac

SEQ ID NO: 1143072 - RNA, 20 nt, Human
aauccuguaggaagguacug

SEQ ID NO: 1143073 - RNA, 23 nt, Human
aauccuguaggaagguacuguau

SEQ ID NO: 1143074 - RNA, 22 nt, Human
aauccuguaggaagguacugua

SEQ ID NO: 1143075 - RNA, 13 nt, Human
aauccuuugugaa

SEQ ID NO: 1143076 - RNA, 15 nt, Human
aaucgaccugccucg

SEQ ID NO: 1143077 - RNA, 16 nt, Human
aaucugggccagaauu

SEQ ID NO: 1143078 - RNA, 17 nt, Human
aaucugggccagaauuu

SEQ ID NO: 1143079 - RNA, 18 nt, Human
aaucugggccagaauuuc

SEQ ID NO: 1143080 - RNA, 19 nt, Human
aaucuuauaauuuaaaaua

SEQ ID NO: 1143081 - RNA, 12 nt, Human
uaaugaauaccu

SEQ ID NO: 1143082 - RNA, 13 nt, Human
uaaugaauaccuu

SEQ ID NO: 1143083 - RNA, 18 nt, Human
uaaugaauaccuuagugc

SEQ ID NO: 1143084 - RNA, 20 nt, Human
uaaugaauaccuuagugcag

SEQ ID NO: 1143085 - RNA, 15 nt, Human
uaaugaaugcauaaa

SEQ ID NO: 1143086 - RNA, 23 nt, Human
uaaugaaugcuuaaagaauucaa

SEQ ID NO: 1143087 - RNA, 13 nt, Human
uaaugaaugcuua

SEQ ID NO: 1143088 - RNA, 18 nt, Human
uaaugaaugcuuaaagaa

SEQ ID NO: 1143089 - RNA, 20 nt, Human
uaaugaaugcuuaaagaauu

SEQ ID NO: 1143090 - RNA, 13 nt, Human
uaauguacauagu

SEQ ID NO: 1143091 - RNA, 19 nt, Human
uaauguacauagugcuaac

SEQ ID NO: 1143092 - RNA, 17 nt, Human
aaugaaugcauaaaaug

SEQ ID NO: 1143093 - RNA, 14 nt, Human
aaugaaugcuuaaa

SEQ ID NO: 1143094 - RNA, 22 nt, Human
aaugcuguauuagucacagaga

SEQ ID NO: 1143095 - RNA, 19 nt, Human
aaugcuuaaagaauucaaa

SEQ ID NO: 1143096 - RNA, 21 nt, Human
aaugcuuaaagaauucaaauu

SEQ ID NO: 1143097 - RNA, 22 nt, Human
aaugcuuaaagaauucaaauuu

SEQ ID NO: 1143098 - RNA, 23 nt, Human
aauggcacaaucucggcucacug

SEQ ID NO: 1143099 - RNA, 12 nt, Human
aauguaaauguc

SEQ ID NO: 1143100 - RNA, 13 nt, Human
aauguaaaugucu

SEQ ID NO: 1143101 - RNA, 14 nt, Human
aauguaaaugucuc

SEQ ID NO: 1143102 - RNA, 15 nt, Human
aauguaaaugucuca

SEQ ID NO: 1143103 - RNA, 16 nt, Human
aauguaaaugucucac

SEQ ID NO: 1143104 - RNA, 18 nt, Human
aauguaaaugucucacug

SEQ ID NO: 1143105 - RNA, 24 nt, Human
aauguaaaugucucacugagcacu

SEQ ID NO: 1143106 - RNA, 20 nt, Human
uacagauccccaagccuggc

SEQ ID NO: 1143107 - RNA, 11 nt, Human
aaugugugugu

SEQ ID NO: 1143108 - RNA, 22 nt, Human
aauuaaucugggccagaauuuc

SEQ ID NO: 1143109 - RNA, 16 nt, Human
uacauucuucaagauc

SEQ ID NO: 1143110 - RNA, 17 nt, Human
uacauucuucaagaucc

SEQ ID NO: 1143111 - RNA, 21 nt, Human
uacauucuucaagaucccauu

SEQ ID NO: 1143112 - RNA, 20 nt, Human
uacauucuucaagaucccau

SEQ ID NO: 1143113 - RNA, 14 nt, Human
uaccaccugacauu

SEQ ID NO: 1143114 - RNA, 12 nt, Human
aauuagccagua

SEQ ID NO: 1143115 - RNA, 14 nt, Human
aauuagccaguaau

SEQ ID NO: 1143116 - RNA, 20 nt, Human
aauuagccaguaauccugua

SEQ ID NO: 1143117 - RNA, 17 nt, Human
aauuagccaguaauccu

SEQ ID NO: 1143118 - RNA, 18 nt, Human
aauuagccaguaauccug

SEQ ID NO: 1143119 - RNA, 19 nt, Human
aauuagccaguaauccugu

SEQ ID NO: 1143120 - RNA, 22 nt, Human
aauuagcuuauguuaacugaca

SEQ ID NO: 1143121 - RNA, 16 nt, Human
aauuagcuuauguuaa

SEQ ID NO: 1143122 - RNA, 22 nt, Human
aauucaaauuuuaucugccucu

SEQ ID NO: 1143123 - RNA, 18 nt, Human
aauuccaagugauugaaa

SEQ ID NO: 1143124 - RNA, 24 nt, Human
uacgcuccaucgcugucaucucag

SEQ ID NO: 1143125 - RNA, 20 nt, Human
uacuaucaugucaaacguga

SEQ ID NO: 1143126 - RNA, 18 nt, Human
acaaaaggauaaugaaua

SEQ ID NO: 1143127 - RNA, 23 nt, Human
uagaugcugacuguacuccuccc

SEQ ID NO: 1143128 - RNA, 18 nt, Human
uagcaugucgucaaagcu

SEQ ID NO: 1143129 - RNA, 17 nt, Human
uagcauuuucugcaucu

SEQ ID NO: 1143130 - RNA, 19 nt, Human
uagcauuuucugcaucucc

SEQ ID NO: 1143131 - RNA, 22 nt, Human
acaaggacagccccuccuccau

SEQ ID NO: 1143132 - RNA, 18 nt, Human
acaaggacuaggguccug

SEQ ID NO: 1143133 - RNA, 19 nt, Human
acaaggacuaggguccugg

SEQ ID NO: 1143134 - RNA, 10 nt, Human
acaauaccug

SEQ ID NO: 1143135 - RNA, 16 nt, Human
uaggaaauccagggug

SEQ ID NO: 1143136 - RNA, 21 nt, Human
uagugaaaggaagauaaacgu

SEQ ID NO: 1143137 - RNA, 15 nt, Human
uaguuccccuguuua

SEQ ID NO: 1143138 - RNA, 16 nt, Human
uaguuccccuguuuau

SEQ ID NO: 1143139 - RNA, 14 nt, Human
acaccgggccugga

SEQ ID NO: 1143140 - RNA, 16 nt, Human
acaccgggccuggaga

SEQ ID NO: 1143141 - RNA, 21 nt, Human
acaccuuagccugcccuccuu

SEQ ID NO: 1143142 - RNA, 17 nt, Human
uauauuguucacuucuu

SEQ ID NO: 1143143 - RNA, 17 nt, Human
acagauccccaagccug

SEQ ID NO: 1143144 - RNA, 18 nt, Human
acagauccccaagccugg

SEQ ID NO: 1143145 - RNA, 22 nt, Human
acagaucucugcuuuggaaauc

SEQ ID NO: 1143146 - RNA, 14 nt, Human
acagauuugagcuc

SEQ ID NO: 1143147 - RNA, 15 nt, Human
acagauuugagcuca

SEQ ID NO: 1143148 - RNA, 18 nt, Human
acagccguuuguucccca

SEQ ID NO: 1143149 - RNA, 12 nt, Human
acagccuggcac

SEQ ID NO: 1143150 - RNA, 11 nt, Human
acagccuggca

SEQ ID NO: 1143151 - RNA, 14 nt, Human
acaggacucugccu

SEQ ID NO: 1143152 - RNA, 15 nt, Human
acaggacucugccuc

SEQ ID NO: 1143153 - RNA, 19 nt, Human
uauuagugaccucagcuuu

SEQ ID NO: 1143154 - RNA, 21 nt, Human
uauuagugaccucagcuuuga

SEQ ID NO: 1143155 - RNA, 22 nt, Human
acaggcgugagccaccgugccu

SEQ ID NO: 1143156 - RNA, 12 nt, Human
acaggcuccugc

SEQ ID NO: 1143157 - RNA, 13 nt, Human
acaggcuccugcc

SEQ ID NO: 1143158 - RNA, 15 nt, Human
acaggcuccugccac

SEQ ID NO: 1143159 - RNA, 21 nt, Human
acaggcuccugccaccacgcc

SEQ ID NO: 1143160 - RNA, 22 nt, Human
acaggcuccugccaccacgccc

SEQ ID NO: 1143161 - RNA, 16 nt, Human
acaggcugcggccccu

SEQ ID NO: 1143162 - RNA, 18 nt, Human
acaggcugcggccccucc

SEQ ID NO: 1143163 - RNA, 19 nt, Human
acaggcugcggccccuccc

SEQ ID NO: 1143164 - RNA, 21 nt, Human
acaggcugcggccccuccccc

SEQ ID NO: 1143165 - RNA, 24 nt, Human
acaggcugcggccccucccccguc

SEQ ID NO: 1143166 - RNA, 21 nt, Human
acagggaacgugauuagugaa

SEQ ID NO: 1143167 - RNA, 22 nt, Human
acagggaacgugauuagugaaa

SEQ ID NO: 1143168 - RNA, 15 nt, Human
acaguaauuguguuu

SEQ ID NO: 1143169 - RNA, 17 nt, Human
acaguaauuguguuuac

SEQ ID NO: 1143170 - RNA, 18 nt, Human
acaguaauuguguuuaca

SEQ ID NO: 1143171 - RNA, 21 nt, Human
acaguaauuguguuuacauuu

SEQ ID NO: 1143172 - RNA, 21 nt, Human
acauuccuugcugaaacgcau

SEQ ID NO: 1143173 - RNA, 14 nt, Human
acauuccuugcuga

SEQ ID NO: 1143174 - RNA, 14 nt, Human
ucaaauuuuaucug

SEQ ID NO: 1143175 - RNA, 22 nt, Human
ucaaauuuuaucugccucucuu

SEQ ID NO: 1143176 - RNA, 15 nt, Human
ucaaccauuccccau

SEQ ID NO: 1143177 - RNA, 18 nt, Human
ucaaccauuccccauggg

SEQ ID NO: 1143178 - RNA, 13 nt, Human
ucaacuugcaaaa

SEQ ID NO: 1143179 - RNA, 14 nt, Human
ucaacuugcaaaau

SEQ ID NO: 1143180 - RNA, 16 nt, Human
ucaacuugcaaaauca

SEQ ID NO: 1143181 - RNA, 20 nt, Human
ucaacuugcaaaaucaguuu

SEQ ID NO: 1143182 - RNA, 19 nt, Human
ucaacuugcaaaaucaguu

SEQ ID NO: 1143183 - RNA, 15 nt, Human
ucaagucuaccaacc

SEQ ID NO: 1143184 - RNA, 22 nt, Human
ucaagucuaccaaccuguucaa

SEQ ID NO: 1143185 - RNA, 18 nt, Human
ucaagucuaccaauuaua

SEQ ID NO: 1143186 - RNA, 17 nt, Human
ucaaucuucaauccuug

SEQ ID NO: 1143187 - RNA, 21 nt, Human
acauucuucaagaucccauuu

SEQ ID NO: 1143188 - RNA, 16 nt, Human
ucaauucuugccaaau

SEQ ID NO: 1143189 - RNA, 16 nt, Human
ucaauuugauguggug

SEQ ID NO: 1143190 - RNA, 14 nt, Human
ucacaaccuucugu

SEQ ID NO: 1143191 - RNA, 21 nt, Human
ucacagaugugugauucacag

SEQ ID NO: 1143192 - RNA, 23 nt, Human
ucacagaugugugauucacagug

SEQ ID NO: 1143193 - RNA, 22 nt, Human
ucaccauguuggccaggcuggu

SEQ ID NO: 1143194 - RNA, 16 nt, Human
ucacuaggcuucuggu

SEQ ID NO: 1143195 - RNA, 19 nt, Human
ucacuaucccggcugcccu

SEQ ID NO: 1143196 - RNA, 20 nt, Human
ucacuaucccggcugcccuu

SEQ ID NO: 1143197 - RNA, 13 nt, Human
ucacugcauccuc

SEQ ID NO: 1143198 - RNA, 16 nt, Human
ucacugugcuguuguu

SEQ ID NO: 1143199 - RNA, 19 nt, Human
ucacugugcuguuguuaug

SEQ ID NO: 1143200 - RNA, 20 nt, Human
ucacugugcuguuguuauga

SEQ ID NO: 1143201 - RNA, 23 nt, Human
ucacugugcuguuguuaugaugu

SEQ ID NO: 1143202 - RNA, 15 nt, Human
ucacuguguccaggu

SEQ ID NO: 1143203 - RNA, 14 nt, Human
ucacuguuucacua

SEQ ID NO: 1143204 - RNA, 21 nt, Human
ucacuguuucacuacucagca

SEQ ID NO: 1143205 - RNA, 15 nt, Human
ucacuguuucacuac

SEQ ID NO: 1143206 - RNA, 13 nt, Human
accauacuaauua

SEQ ID NO: 1143207 - RNA, 13 nt, Human
ucagcccucccug

SEQ ID NO: 1143208 - RNA, 14 nt, Human
ucagcccucccugc

SEQ ID NO: 1143209 - RNA, 15 nt, Human
ucagcccucccugcc

SEQ ID NO: 1143210 - RNA, 16 nt, Human
ucagcccucccugccc

SEQ ID NO: 1143211 - RNA, 17 nt, Human
ucagcccucccugcccc

SEQ ID NO: 1143212 - RNA, 15 nt, Human
accccugagcuugca

SEQ ID NO: 1143213 - RNA, 18 nt, Human
accccuggcuuuucacug

SEQ ID NO: 1143214 - RNA, 19 nt, Human
accccuggcuuuucacugc

SEQ ID NO: 1143215 - RNA, 20 nt, Human
accccuggcuuuucacugcu

SEQ ID NO: 1143216 - RNA, 21 nt, Human
accccuggcuuuucacugcug

SEQ ID NO: 1143217 - RNA, 18 nt, Human
acccggaggggccuggca

SEQ ID NO: 1143218 - RNA, 21 nt, Human
acccggaggggccuggcagcc

SEQ ID NO: 1143219 - RNA, 20 nt, Human
ucagugcccuccaggauaga

SEQ ID NO: 1143220 - RNA, 16 nt, Human
ucaguggggaggggcu

SEQ ID NO: 1143221 - RNA, 20 nt, Human
ucaguggggcccauggaugu

SEQ ID NO: 1143222 - RNA, 15 nt, Human
ucaguuuuugugaaa

SEQ ID NO: 1143223 - RNA, 17 nt, Human
ucaguuuuugugaaaag

SEQ ID NO: 1143224 - RNA, 20 nt, Human
ucaguuuuccucucaauaaa

SEQ ID NO: 1143225 - RNA, 13 nt, Human
ucauauaaauaga

SEQ ID NO: 1143226 - RNA, 14 nt, Human
ucauauaaauagaa

SEQ ID NO: 1143227 - RNA, 16 nt, Human
ucauauaaauagaaug

SEQ ID NO: 1143228 - RNA, 18 nt, Human
ucauauaaauagaaugua

SEQ ID NO: 1143229 - RNA, 21 nt, Human
ucauauaaauagaauguaaau

SEQ ID NO: 1143230 - RNA, 22 nt, Human
ucauauaaauagaauguaaaug

SEQ ID NO: 1143231 - RNA, 13 nt, Human
ucauaugcauauu

SEQ ID NO: 1143232 - RNA, 13 nt, Human
ucauauuucccau

SEQ ID NO: 1143233 - RNA, 19 nt, Human
ucauauuucccaugauuuc

SEQ ID NO: 1143234 - RNA, 21 nt, Human
ucauauuucccaugauuucau

SEQ ID NO: 1143235 - RNA, 22 nt, Human
ucauauuucccaugauuucaug

SEQ ID NO: 1143236 - RNA, 16 nt, Human
accgagucucuucucc

SEQ ID NO: 1143237 - RNA, 17 nt, Human
accgagucucuucucca

SEQ ID NO: 1143238 - RNA, 18 nt, Human
accgagucucuucuccac

SEQ ID NO: 1143239 - RNA, 13 nt, Human
ucauccauccagg

SEQ ID NO: 1143240 - RNA, 11 nt, Human
ucaugauuuuu

SEQ ID NO: 1143241 - RNA, 18 nt, Human
uccagaauggucuuucua

SEQ ID NO: 1143242 - RNA, 13 nt, Human
uccagaccccugg

SEQ ID NO: 1143243 - RNA, 14 nt, Human
acgcuccuuccucu

SEQ ID NO: 1143244 - RNA, 15 nt, Human
acgcuccuuccucug

SEQ ID NO: 1143245 - RNA, 15 nt, Human
acguuaccaggcagg

SEQ ID NO: 1143246 - RNA, 15 nt, Human
acuaauuuuaaaaug

SEQ ID NO: 1143247 - RNA, 19 nt, Human
acuagacucccaagcugga

SEQ ID NO: 1143248 - RNA, 15 nt, Human
acuccagaccccugg

SEQ ID NO: 1143249 - RNA, 18 nt, Human
acuccagaccccuggcuu

SEQ ID NO: 1143250 - RNA, 19 nt, Human
acuccagaccccuggcuuu

SEQ ID NO: 1143251 - RNA, 21 nt, Human
acuccagaccccuggcuuuuc

SEQ ID NO: 1143252 - RNA, 19 nt, Human
acuccauagaccuuuucau

SEQ ID NO: 1143253 - RNA, 12 nt, Human
acuccucccagg

SEQ ID NO: 1143254 - RNA, 18 nt, Human
uccgguguuuaagacauu

SEQ ID NO: 1143255 - RNA, 12 nt, Human
acucugccuccu

SEQ ID NO: 1143256 - RNA, 16 nt, Human
acucugccuccucuuc

SEQ ID NO: 1143257 - RNA, 13 nt, Human
uccucccaggcgc

SEQ ID NO: 1143258 - RNA, 19 nt, Human
uccucccaggcgccccuuc

SEQ ID NO: 1143259 - RNA, 21 nt, Human
uccucccaggcgccccuuccc

SEQ ID NO: 1143260 - RNA, 21 nt, Human
uccugaauuuuauuuuuuggg

SEQ ID NO: 1143261 - RNA, 20 nt, Human
acugaacucugacaacagac

SEQ ID NO: 1143262 - RNA, 13 nt, Human
acugagcacuguu

SEQ ID NO: 1143263 - RNA, 15 nt, Human
acugagcacuguuuu

SEQ ID NO: 1143264 - RNA, 16 nt, Human
acugagcacuguuuuc

SEQ ID NO: 1143265 - RNA, 23 nt, Human
acugagcacuguuuucuagugua

SEQ ID NO: 1143266 - RNA, 17 nt, Human
acugagcacuguuuucu

SEQ ID NO: 1143267 - RNA, 20 nt, Human
acugcaacuuguaaaugugg

SEQ ID NO: 1143268 - RNA, 23 nt, Human
acugcacagugcaucucagccca

SEQ ID NO: 1143269 - RNA, 19 nt, Human
acugcaccaguugcugcuu

SEQ ID NO: 1143270 - RNA, 14 nt, Human
uccugcacacgcuc

SEQ ID NO: 1143271 - RNA, 21 nt, Human
uccugcacacgcuccuuccuc

SEQ ID NO: 1143272 - RNA, 22 nt, Human
uccugcacacgcuccuuccucu

SEQ ID NO: 1143273 - RNA, 20 nt, Human
ucuacagcuaaucagcauuc

SEQ ID NO: 1143274 - RNA, 23 nt, Human
ucuacagcuaaucagcauucuca

SEQ ID NO: 1143275 - RNA, 17 nt, Human
acuuacagcaaauccuu

SEQ ID NO: 1143276 - RNA, 14 nt, Human
acuuagcugggaga

SEQ ID NO: 1143277 - RNA, 16 nt, Human
acuuaguauugcaaag

SEQ ID NO: 1143278 - RNA, 13 nt, Human
acuuccccuuccu

SEQ ID NO: 1143279 - RNA, 19 nt, Human
acuuccccuuccuaauucc

SEQ ID NO: 1143280 - RNA, 13 nt, Human
acuugcaaaauca

SEQ ID NO: 1143281 - RNA, 16 nt, Human
acuugcaaaaucaguu

SEQ ID NO: 1143282 - RNA, 17 nt, Human
acuugcaaaaucaguuu

SEQ ID NO: 1143283 - RNA, 18 nt, Human
acuugcaaaaucaguuuu

SEQ ID NO: 1143284 - RNA, 21 nt, Human
ucucaugccucagccuccuga

SEQ ID NO: 1143285 - RNA, 19 nt, Human
ucucauuugccaauaauaa

SEQ ID NO: 1143286 - RNA, 16 nt, Human
ucuccuuucacaaccu

SEQ ID NO: 1143287 - RNA, 16 nt, Human
ucugaugcaagcaaga

SEQ ID NO: 1143288 - RNA, 21 nt, Human
ucugaugcaagcaagaaacac

SEQ ID NO: 1143289 - RNA, 23 nt, Human
ucugaugcaagcaagaaacacug

SEQ ID NO: 1143290 - RNA, 17 nt, Human
agaaauugcauuuccug

SEQ ID NO: 1143291 - RNA, 20 nt, Human
agaaauugcauuuccugaca

SEQ ID NO: 1143292 - RNA, 10 nt, Human
ucugcccugc

SEQ ID NO: 1143293 - RNA, 11 nt, Human
ucugcccugcg

SEQ ID NO: 1143294 - RNA, 12 nt, Human
ucugcccugcgg

SEQ ID NO: 1143295 - RNA, 22 nt, Human
ucugcccugcgggucacaggag

SEQ ID NO: 1143296 - RNA, 12 nt, Human
ucugcuuuccuc

SEQ ID NO: 1143297 - RNA, 13 nt, Human
ucugcuuuccucu

SEQ ID NO: 1143298 - RNA, 18 nt, Human
ucugcuuuccucuuccug

SEQ ID NO: 1143299 - RNA, 20 nt, Human
agaaguggggacagagcaga

SEQ ID NO: 1143300 - RNA, 16 nt, Human
agaauagaugcugacu

SEQ ID NO: 1143301 - RNA, 20 nt, Human
agaauccagcaccggcccca

SEQ ID NO: 1143302 - RNA, 13 nt, Human
agaauguaaaugu

SEQ ID NO: 1143303 - RNA, 14 nt, Human
agaauguaaauguc

SEQ ID NO: 1143304 - RNA, 17 nt, Human
agaauguaaaugucuca

SEQ ID NO: 1143305 - RNA, 19 nt, Human
agaauguaaaugucucacu

SEQ ID NO: 1143306 - RNA, 22 nt, Human
agaauguaaaugucucacugag

SEQ ID NO: 1143307 - RNA, 17 nt, Human
agaauucaaauuuuauc

SEQ ID NO: 1143308 - RNA, 12 nt, Human
agaauucaaauu

SEQ ID NO: 1143309 - RNA, 14 nt, Human
ucugggccagaauu

SEQ ID NO: 1143310 - RNA, 15 nt, Human
ucugggccagaauuu

SEQ ID NO: 1143311 - RNA, 15 nt, Human
ucuguugcugccuca

SEQ ID NO: 1143312 - RNA, 21 nt, Human
agacuccagcuggguuggaaa

SEQ ID NO: 1143313 - RNA, 16 nt, Human
agacucccaagcugga

SEQ ID NO: 1143314 - RNA, 14 nt, Human
ucuuuuuuugugau

SEQ ID NO: 1143315 - RNA, 16 nt, Human
ucuuuuuuugugaugu

SEQ ID NO: 1143316 - RNA, 13 nt, Human
ugaaagaaaauaa

SEQ ID NO: 1143317 - RNA, 23 nt, Human
ugaaauagacccacaagaggcag

SEQ ID NO: 1143318 - RNA, 15 nt, Human
ugaacuccugaccuc

SEQ ID NO: 1143319 - RNA, 23 nt, Human
ugaaguaaaacaaacaauaccug

SEQ ID NO: 1143320 - RNA, 13 nt, Human
ugaaguaaaacaa

SEQ ID NO: 1143321 - RNA, 22 nt, Human
ugaaguaaaacaaacaauaccu

SEQ ID NO: 1143322 - RNA, 13 nt, Human
ugaaguaagcaaa

SEQ ID NO: 1143323 - RNA, 14 nt, Human
ugaaguaagcaaag

SEQ ID NO: 1143324 - RNA, 15 nt, Human
ugaaguaagcaaaga

SEQ ID NO: 1143325 - RNA, 17 nt, Human
ugaaugcuuaaagaauu

SEQ ID NO: 1143326 - RNA, 22 nt, Human
ugaaugcuuaaagaauucaaau

SEQ ID NO: 1143327 - RNA, 21 nt, Human
ugaaugcuuaaagaauucaaa

SEQ ID NO: 1143328 - RNA, 15 nt, Human
ugacauuccuugcug

SEQ ID NO: 1143329 - RNA, 18 nt, Human
agauccccaagccuggca

SEQ ID NO: 1143330 - RNA, 21 nt, Human
ugacucguauaugucucaggu

SEQ ID NO: 1143331 - RNA, 13 nt, Human
agauucagcuagu

SEQ ID NO: 1143332 - RNA, 21 nt, Human
agauuccagagaguggcuccu

SEQ ID NO: 1143333 - RNA, 22 nt, Human
agauuccagagaguggcuccuc

SEQ ID NO: 1143334 - RNA, 13 nt, Human
ugagaagcugcuc

SEQ ID NO: 1143335 - RNA, 14 nt, Human
ugagaagcugcuca

SEQ ID NO: 1143336 - RNA, 16 nt, Human
ugagaagcugcucaac

SEQ ID NO: 1143337 - RNA, 17 nt, Human
ugagaagcugcucaacu

SEQ ID NO: 1143338 - RNA, 21 nt, Human
ugagaagcugcucaacuugca

SEQ ID NO: 1143339 - RNA, 20 nt, Human
ugagacagaaucucgcucug

SEQ ID NO: 1143340 - RNA, 15 nt, Human
ugagcaaauguggcu

SEQ ID NO: 1143341 - RNA, 14 nt, Human
ugagcauuagauuu

SEQ ID NO: 1143342 - RNA, 16 nt, Human
ugagcauuagauuucu

SEQ ID NO: 1143343 - RNA, 17 nt, Human
agcaccuagccucgcuc

SEQ ID NO: 1143344 - RNA, 15 nt, Human
ugauggugaugaaau

SEQ ID NO: 1143345 - RNA, 16 nt, Human
ugauggugaugaaaug

SEQ ID NO: 1143346 - RNA, 17 nt, Human
ugauggugaugaaaugu

SEQ ID NO: 1143347 - RNA, 17 nt, Human
ugauuaauggaaauguu

SEQ ID NO: 1143348 - RNA, 23 nt, Human
agcccagcuugaaaccuucacuu

SEQ ID NO: 1143349 - RNA, 13 nt, Human
ugauucucaugcc

SEQ ID NO: 1143350 - RNA, 14 nt, Human
ugauucucaugccu

SEQ ID NO: 1143351 - RNA, 15 nt, Human
ugauucucaugccuc

SEQ ID NO: 1143352 - RNA, 16 nt, Human
ugauucucaugccuca

SEQ ID NO: 1143353 - RNA, 17 nt, Human
ugauuucagcucacugc

SEQ ID NO: 1143354 - RNA, 13 nt, Human
ugauuucauguac

SEQ ID NO: 1143355 - RNA, 15 nt, Human
ugauuucauguacug

SEQ ID NO: 1143356 - RNA, 16 nt, Human
ugauuucauguacugc

SEQ ID NO: 1143357 - RNA, 17 nt, Human
ugauuucauguacugca

SEQ ID NO: 1143358 - RNA, 18 nt, Human
ugauuucauguacugcau

SEQ ID NO: 1143359 - RNA, 16 nt, Human
ugcaauacaaguuuca

SEQ ID NO: 1143360 - RNA, 17 nt, Human
ugcaauacaaguuucau

SEQ ID NO: 1143361 - RNA, 18 nt, Human
ugcaauacaaguuucauc

SEQ ID NO: 1143362 - RNA, 23 nt, Human
ugcaauacaaguuucauccagaa

SEQ ID NO: 1143363 - RNA, 17 nt, Human
agcccugcuuugggcug

SEQ ID NO: 1143364 - RNA, 19 nt, Human
agcccugcuuugggcugcc

SEQ ID NO: 1143365 - RNA, 20 nt, Human
agcccugcuuugggcugccc

SEQ ID NO: 1143366 - RNA, 13 nt, Human
agccucagucucc

SEQ ID NO: 1143367 - RNA, 16 nt, Human
agccucagucucccuc

SEQ ID NO: 1143368 - RNA, 19 nt, Human
agccucagucucccucccu

SEQ ID NO: 1143369 - RNA, 20 nt, Human
agccucagucucccucccuu

SEQ ID NO: 1143370 - RNA, 22 nt, Human
agccucagucucccucccuugg

SEQ ID NO: 1143371 - RNA, 21 nt, Human
agccuccaagcuccaucucca

SEQ ID NO: 1143372 - RNA, 17 nt, Human
agccuccaugcugccuc

SEQ ID NO: 1143373 - RNA, 14 nt, Human
agcgcacucuucau

SEQ ID NO: 1143374 - RNA, 15 nt, Human
ugcauuauuugagaa

SEQ ID NO: 1143375 - RNA, 16 nt, Human
ugcauuauuugagaag

SEQ ID NO: 1143376 - RNA, 23 nt, Human
ugcauuauuugagaagcugcuca

SEQ ID NO: 1143377 - RNA, 13 nt, Human
ugcauuuccugac

SEQ ID NO: 1143378 - RNA, 13 nt, Human
ugccacugccucu

SEQ ID NO: 1143379 - RNA, 17 nt, Human
ugccacugccucuuccu

SEQ ID NO: 1143380 - RNA, 18 nt, Human
ugccacugccucuuccuc

SEQ ID NO: 1143381 - RNA, 19 nt, Human
ugccacugccucuuccucc

SEQ ID NO: 1143382 - RNA, 20 nt, Human
ugccacugccucuuccuccc

SEQ ID NO: 1143383 - RNA, 23 nt, Human
ugccacugccucuuccucccuca

SEQ ID NO: 1143384 - RNA, 19 nt, Human
ugccaggaacccuuaaaca

SEQ ID NO: 1143385 - RNA, 14 nt, Human
ugcccccucugccc

SEQ ID NO: 1143386 - RNA, 15 nt, Human
ugcccccucugcccu

SEQ ID NO: 1143387 - RNA, 16 nt, Human
ugcccccucugcccug

SEQ ID NO: 1143388 - RNA, 17 nt, Human
ugcccccucugcccugc

SEQ ID NO: 1143389 - RNA, 18 nt, Human
ugcccccucugcccugcg

SEQ ID NO: 1143390 - RNA, 20 nt, Human
ugcccuaaugcgcaggcugg

SEQ ID NO: 1143391 - RNA, 23 nt, Human
ugcccuaaugcgcaggcuggccc

SEQ ID NO: 1143392 - RNA, 14 nt, Human
agcuccauuuaaac

SEQ ID NO: 1143393 - RNA, 15 nt, Human
agcuccauuuaaaca

SEQ ID NO: 1143394 - RNA, 18 nt, Human
agcuccauuuaaacagau

SEQ ID NO: 1143395 - RNA, 21 nt, Human
agcuccauuuaaacagauguc

SEQ ID NO: 1143396 - RNA, 14 nt, Human
agcucuaauguuug

SEQ ID NO: 1143397 - RNA, 17 nt, Human
agcucuaauguuugcau

SEQ ID NO: 1143398 - RNA, 18 nt, Human
agcucuaauguuugcaua

SEQ ID NO: 1143399 - RNA, 20 nt, Human
agcucuaauguuugcauaua

SEQ ID NO: 1143400 - RNA, 22 nt, Human
agcucuaauguuugcauauaag

SEQ ID NO: 1143401 - RNA, 21 nt, Human
agcucuaauguuugcauauaa

SEQ ID NO: 1143402 - RNA, 17 nt, Human
agcucuaucaccaagga

SEQ ID NO: 1143403 - RNA, 21 nt, Human
agcucugcagagcaggaaaca

SEQ ID NO: 1143404 - RNA, 15 nt, Human
ugccucagccucccg

SEQ ID NO: 1143405 - RNA, 15 nt, Human
ugccucagccuccug

SEQ ID NO: 1143406 - RNA, 11 nt, Human
ugccucugccu

SEQ ID NO: 1143407 - RNA, 22 nt, Human
agcuggaucuccauucucucag

SEQ ID NO: 1143408 - RNA, 14 nt, Human
ugcugacuguacuc

SEQ ID NO: 1143409 - RNA, 11 nt, Human
aggaauuuaaa

SEQ ID NO: 1143410 - RNA, 15 nt, Human
ugcuggcugccuuag

SEQ ID NO: 1143411 - RNA, 21 nt, Human
ugcuggcugccuuagaaccuu

SEQ ID NO: 1143412 - RNA, 21 nt, Human
ugcuguacugaaguaaaacaa

SEQ ID NO: 1143413 - RNA, 16 nt, Human
ugcuuauauuguucac

SEQ ID NO: 1143414 - RNA, 12 nt, Human
aggacaggcugc

SEQ ID NO: 1143415 - RNA, 16 nt, Human
aggacaggcugcggcc

SEQ ID NO: 1143416 - RNA, 20 nt, Human
aggacaggcugcggccccuc

SEQ ID NO: 1143417 - RNA, 21 nt, Human
aggacaggcugcggccccucc

SEQ ID NO: 1143418 - RNA, 18 nt, Human
ugcuuugggcugcccugg

SEQ ID NO: 1143419 - RNA, 19 nt, Human
ugcuuugggcugcccuggu

SEQ ID NO: 1143420 - RNA, 20 nt, Human
ugcuuugggcugcccuggug

SEQ ID NO: 1143421 - RNA, 21 nt, Human
ugcuuugggcugcccuggugc

SEQ ID NO: 1143422 - RNA, 21 nt, Human
aggagggagcaucagugcccu

SEQ ID NO: 1143423 - RNA, 14 nt, Human
aggagggaggggga

SEQ ID NO: 1143424 - RNA, 17 nt, Human
aggaugccccguccccc

SEQ ID NO: 1143425 - RNA, 18 nt, Human
uggacgagaaaacaauaa

SEQ ID NO: 1143426 - RNA, 19 nt, Human
uggagucagacagaugugg

SEQ ID NO: 1143427 - RNA, 16 nt, Human
uggcagccgugccuuc

SEQ ID NO: 1143428 - RNA, 23 nt, Human
uggcagccgugccuucagcucua

SEQ ID NO: 1143429 - RNA, 15 nt, Human
uggcagccucuucaa

SEQ ID NO: 1143430 - RNA, 16 nt, Human
uggcagccucuucaaa

SEQ ID NO: 1143431 - RNA, 13 nt, Human
aggccugccuguu

SEQ ID NO: 1143432 - RNA, 20 nt, Human
uggccaggcuggucucgaac

SEQ ID NO: 1143433 - RNA, 11 nt, Human
uggccaggugg

SEQ ID NO: 1143434 - RNA, 14 nt, Human
uggcccgacagccu

SEQ ID NO: 1143435 - RNA, 15 nt, Human
uggcccgacagccug

SEQ ID NO: 1143436 - RNA, 16 nt, Human
uggcccgacagccugg

SEQ ID NO: 1143437 - RNA, 17 nt, Human
uggcccgacagccuggc

SEQ ID NO: 1143438 - RNA, 18 nt, Human
uggcccgacagccuggca

SEQ ID NO: 1143439 - RNA, 19 nt, Human
uggcccgacagccuggcac

SEQ ID NO: 1143440 - RNA, 15 nt, Human
uggccgggagccuga

SEQ ID NO: 1143441 - RNA, 14 nt, Human
aggcuccugccacc

SEQ ID NO: 1143442 - RNA, 20 nt, Human
aggcuccugccaccacgccc

SEQ ID NO: 1143443 - RNA, 16 nt, Human
aggcugcggccccucc

SEQ ID NO: 1143444 - RNA, 17 nt, Human
aggcugcggccccuccc

SEQ ID NO: 1143445 - RNA, 18 nt, Human
aggcugcggccccucccc

SEQ ID NO: 1143446 - RNA, 19 nt, Human
aggcugcggccccuccccc

SEQ ID NO: 1143447 - RNA, 23 nt, Human
aggcugcucuugaacuccugacc

SEQ ID NO: 1143448 - RNA, 22 nt, Human
aggcugcuguacugaaguaaaa

SEQ ID NO: 1143449 - RNA, 12 nt, Human
aggcuggcccug

SEQ ID NO: 1143450 - RNA, 14 nt, Human
aggcuggcccugcc

SEQ ID NO: 1143451 - RNA, 15 nt, Human
aggcuggcccugccc

SEQ ID NO: 1143452 - RNA, 16 nt, Human
aggcuggcccugcccu

SEQ ID NO: 1143453 - RNA, 17 nt, Human
aggcuggcccugcccug

SEQ ID NO: 1143454 - RNA, 18 nt, Human
aggcuggcccugcccugg

SEQ ID NO: 1143455 - RNA, 19 nt, Human
aggcuggcccugcccuggu

SEQ ID NO: 1143456 - RNA, 23 nt, Human
uggcuagauuaaccuucucuguc

SEQ ID NO: 1143457 - RNA, 15 nt, Human
uggcuucccgcucag

SEQ ID NO: 1143458 - RNA, 16 nt, Human
uggcuucccgcucagc

SEQ ID NO: 1143459 - RNA, 18 nt, Human
uggcuucccgcucagccc

SEQ ID NO: 1143460 - RNA, 17 nt, Human
uggcuucccgcucagcc

SEQ ID NO: 1143461 - RNA, 13 nt, Human
ugggaacuagacu

SEQ ID NO: 1143462 - RNA, 15 nt, Human
agggggaaggcaggg

SEQ ID NO: 1143463 - RNA, 12 nt, Human
aggguagggugg

SEQ ID NO: 1143464 - RNA, 22 nt, Human
ugggucuuguuuuuuuuuucca

SEQ ID NO: 1143465 - RNA, 22 nt, Human
uggguuuuuauuuccuaugaug

SEQ ID NO: 1143466 - RNA, 22 nt, Human
ugguaauuuaagauuccagaga

SEQ ID NO: 1143467 - RNA, 22 nt, Human
ugguccaugggccauaugaaaa

SEQ ID NO: 1143468 - RNA, 19 nt, Human
uggucucgaacuccugacc

SEQ ID NO: 1143469 - RNA, 20 nt, Human
uggucucgaacuccugaccu

SEQ ID NO: 1143470 - RNA, 21 nt, Human
uggucucgaacuccugaccuu

SEQ ID NO: 1143471 - RNA, 22 nt, Human
uggugaaaagcagguugauaaa

SEQ ID NO: 1143472 - RNA, 23 nt, Human
uggugaaaagcagguugauaaau

SEQ ID NO: 1143473 - RNA, 19 nt, Human
agguauaucuagguuuaug

SEQ ID NO: 1143474 - RNA, 22 nt, Human
agguauaucuagguuuaugaca

SEQ ID NO: 1143475 - RNA, 15 nt, Human
aggucagugcaaaua

SEQ ID NO: 1143476 - RNA, 17 nt, Human
agguccacaacacacag

SEQ ID NO: 1143477 - RNA, 19 nt, Human
agguccacaacacacagau

SEQ ID NO: 1143478 - RNA, 15 nt, Human
ugguguguguaugcg

SEQ ID NO: 1143479 - RNA, 16 nt, Human
uguaaaggaauuuaaa

SEQ ID NO: 1143480 - RNA, 21 nt, Human
uguaaauacuguuuuuaacaa

SEQ ID NO: 1143481 - RNA, 22 nt, Human
aggugauccacucgccuucauc

SEQ ID NO: 1143482 - RNA, 20 nt, Human
aggugugagccaccacgccc

SEQ ID NO: 1143483 - RNA, 16 nt, Human
agguugucugaaguca

SEQ ID NO: 1143484 - RNA, 20 nt, Human
agguugucugaagucacugc

SEQ ID NO: 1143485 - RNA, 17 nt, Human
uguagagaaaacaugca

SEQ ID NO: 1143486 - RNA, 19 nt, Human
uguagagaaaacaugcaga

SEQ ID NO: 1143487 - RNA, 15 nt, Human
uguauuagucacaga

SEQ ID NO: 1143488 - RNA, 22 nt, Human
aguauugacaaaauguuauuuc

SEQ ID NO: 1143489 - RNA, 16 nt, Human
aguauugcaaagucag

SEQ ID NO: 1143490 - RNA, 12 nt, Human
aguauugcaaag

SEQ ID NO: 1143491 - RNA, 22 nt, Human
agucacagagauaauucuagcu

SEQ ID NO: 1143492 - RNA, 19 nt, Human
uguccaggcacugcugccc

SEQ ID NO: 1143493 - RNA, 20 nt, Human
uguccaggcacugcugccca

SEQ ID NO: 1143494 - RNA, 21 nt, Human
uguccaggcacugcugcccag

SEQ ID NO: 1143495 - RNA, 20 nt, Human
ugucccuaccgagucucuuc

SEQ ID NO: 1143496 - RNA, 21 nt, Human
ugucccuaccgagucucuucu

SEQ ID NO: 1143497 - RNA, 22 nt, Human
ugucccuaccgagucucuucuc

SEQ ID NO: 1143498 - RNA, 17 nt, Human
agucagauucuugcauc

SEQ ID NO: 1143499 - RNA, 16 nt, Human
agucagauucuugcau

SEQ ID NO: 1143500 - RNA, 14 nt, Human
ugugaacugaacuc

SEQ ID NO: 1143501 - RNA, 23 nt, Human
ugugaacugaacucugacaacag

SEQ ID NO: 1143502 - RNA, 14 nt, Human
agucucccucccuu

SEQ ID NO: 1143503 - RNA, 18 nt, Human
agucucccucccuugggg

SEQ ID NO: 1143504 - RNA, 17 nt, Human
agugagcaguguuagcu

SEQ ID NO: 1143505 - RNA, 14 nt, Human
aguguaaugaauac

SEQ ID NO: 1143506 - RNA, 16 nt, Human
aguguaaugaauaccu

SEQ ID NO: 1143507 - RNA, 22 nt, Human
aguguaaugaauaccuuagugc

SEQ ID NO: 1143508 - RNA, 12 nt, Human
uguuaugaugug

SEQ ID NO: 1143509 - RNA, 14 nt, Human
uguuaugaugugcu

SEQ ID NO: 1143510 - RNA, 16 nt, Human
uguuaugaugugcuua

SEQ ID NO: 1143511 - RNA, 17 nt, Human
uguuaugaugugcuuaa

SEQ ID NO: 1143512 - RNA, 19 nt, Human
uguuaugaugugcuuaaca

SEQ ID NO: 1143513 - RNA, 22 nt, Human
uguuaugaugugcuuaacaggg

SEQ ID NO: 1143514 - RNA, 16 nt, Human
uguucccauucuugca

SEQ ID NO: 1143515 - RNA, 20 nt, Human
aguuauuauauuuacaaaug

SEQ ID NO: 1143516 - RNA, 17 nt, Human
aguucccuacuuccugu

SEQ ID NO: 1143517 - RNA, 14 nt, Human
aguuccugugcaca

SEQ ID NO: 1143518 - RNA, 16 nt, Human
aguuccugugcacagc

SEQ ID NO: 1143519 - RNA, 17 nt, Human
aguuccugugcacagcc

SEQ ID NO: 1143520 - RNA, 14 nt, Human
uguuguagagaaaa

SEQ ID NO: 1143521 - RNA, 17 nt, Human
uguuguagagaaaacau

SEQ ID NO: 1143522 - RNA, 23 nt, Human
uguuguagagaaaacaugcagaa

SEQ ID NO: 1143523 - RNA, 13 nt, Human
uguuugcauauaa

SEQ ID NO: 1143524 - RNA, 14 nt, Human
uguuugcauauaag

SEQ ID NO: 1143525 - RNA, 13 nt, Human
uguuuucuagugu

SEQ ID NO: 1143526 - RNA, 14 nt, Human
uguuuucuagugua

SEQ ID NO: 1143527 - RNA, 15 nt, Human
uguuuucuaguguau

SEQ ID NO: 1143528 - RNA, 16 nt, Human
uguuuucuaguguauc

SEQ ID NO: 1143529 - RNA, 18 nt, Human
uguuuucuaguguaucaa

SEQ ID NO: 1143530 - RNA, 19 nt, Human
uguuuucuaguguaucaaa

SEQ ID NO: 1143531 - RNA, 20 nt, Human
uguuuucuaguguaucaaaa

SEQ ID NO: 1143532 - RNA, 21 nt, Human
uguuuucuaguguaucaaaau

SEQ ID NO: 1143533 - RNA, 11 nt, Human
aguugcacagc

SEQ ID NO: 1143534 - RNA, 12 nt, Human
aguugcacagca

SEQ ID NO: 1143535 - RNA, 13 nt, Human
aguugcacagcau

SEQ ID NO: 1143536 - RNA, 14 nt, Human
aguugcacagcauc

SEQ ID NO: 1143537 - RNA, 15 nt, Human
aguugcacagcaucu

SEQ ID NO: 1143538 - RNA, 16 nt, Human
aguugcacagcaucuc

SEQ ID NO: 1143539 - RNA, 17 nt, Human
aguugcacagcaucuca

SEQ ID NO: 1143540 - RNA, 20 nt, Human
aguugcacagcaucucagcu

SEQ ID NO: 1143541 - RNA, 16 nt, Human
uuaaaauauuccugca

SEQ ID NO: 1143542 - RNA, 19 nt, Human
uuaaaauauuccugcauuu

SEQ ID NO: 1143543 - RNA, 16 nt, Human
aguuucucagcuccca

SEQ ID NO: 1143544 - RNA, 17 nt, Human
auaaaccaaugaacgaa

SEQ ID NO: 1143545 - RNA, 22 nt, Human
auaaaccccaccccaaaauuag

SEQ ID NO: 1143546 - RNA, 23 nt, Human
auaaaccccaccccaaaauuagc

SEQ ID NO: 1143547 - RNA, 18 nt, Human
auaaacguggauguuacu

SEQ ID NO: 1143548 - RNA, 17 nt, Human
auaaacguggauguuac

SEQ ID NO: 1143549 - RNA, 21 nt, Human
uuaccgcguaaugcgccaaua

SEQ ID NO: 1143550 - RNA, 22 nt, Human
uuaccgcguaaugcgccaauaa

SEQ ID NO: 1143551 - RNA, 14 nt, Human
auaaugaauacuuu

SEQ ID NO: 1143552 - RNA, 16 nt, Human
uuagcaguuugcuuug

SEQ ID NO: 1143553 - RNA, 14 nt, Human
uuagccccauaauu

SEQ ID NO: 1143554 - RNA, 21 nt, Human
uuagccaguaauccuguagga

SEQ ID NO: 1143555 - RNA, 18 nt, Human
uuauacccccugcaaagc

SEQ ID NO: 1143556 - RNA, 14 nt, Human
uuauaccucaauuu

SEQ ID NO: 1143557 - RNA, 22 nt, Human
uuauaccucaauuuucacugug

SEQ ID NO: 1143558 - RNA, 21 nt, Human
uuauaccucaauuuucacugu

SEQ ID NO: 1143559 - RNA, 12 nt, Human
uuauagcucuaa

SEQ ID NO: 1143560 - RNA, 15 nt, Human
uuauagcucuaaugu

SEQ ID NO: 1143561 - RNA, 16 nt, Human
uuauagcucuaauguu

SEQ ID NO: 1143562 - RNA, 17 nt, Human
uuauagcucuaauguuu

SEQ ID NO: 1143563 - RNA, 18 nt, Human
uuauagcucuaauguuug

SEQ ID NO: 1143564 - RNA, 20 nt, Human
uuauagcucuaauguuugca

SEQ ID NO: 1143565 - RNA, 16 nt, Human
auacagcuuuuggauu

SEQ ID NO: 1143566 - RNA, 20 nt, Human
auacauucuucaagauccca

SEQ ID NO: 1143567 - RNA, 16 nt, Human
auacauuuuguaccaa

SEQ ID NO: 1143568 - RNA, 23 nt, Human
auacucaagagugguaucuugca

SEQ ID NO: 1143569 - RNA, 11 nt, Human
uuaucauguua

SEQ ID NO: 1143570 - RNA, 17 nt, Human
uuaucauguuaguaaua

SEQ ID NO: 1143571 - RNA, 18 nt, Human
uuaucauguuaguaauac

SEQ ID NO: 1143572 - RNA, 22 nt, Human
uuaucauguuaguaauaccucu

SEQ ID NO: 1143573 - RNA, 23 nt, Human
uuaucauguuaguaauaccucua

SEQ ID NO: 1143574 - RNA, 16 nt, Human
uucacuucacugugcu

SEQ ID NO: 1143575 - RNA, 14 nt, Human
uucagcucacugca

SEQ ID NO: 1143576 - RNA, 12 nt, Human
uucauaugcaua

SEQ ID NO: 1143577 - RNA, 13 nt, Human
auauaugcuaagu

SEQ ID NO: 1143578 - RNA, 20 nt, Human
auaugcaaacaggguaacua

SEQ ID NO: 1143579 - RNA, 17 nt, Human
uuccaauuuaguuguug

SEQ ID NO: 1143580 - RNA, 15 nt, Human
uuccaccuucccaug

SEQ ID NO: 1143581 - RNA, 22 nt, Human
uuccagugaaaucaguuacucu

SEQ ID NO: 1143582 - RNA, 13 nt, Human
auauuuacaaaug

SEQ ID NO: 1143583 - RNA, 12 nt, Human
uucccgcucagc

SEQ ID NO: 1143584 - RNA, 14 nt, Human
uucccgcucagccc

SEQ ID NO: 1143585 - RNA, 15 nt, Human
uucccgcucagcccu

SEQ ID NO: 1143586 - RNA, 14 nt, Human
uucccuacauuaaa

SEQ ID NO: 1143587 - RNA, 19 nt, Human
uucccuacauuaaacauga

SEQ ID NO: 1143588 - RNA, 13 nt, Human
uucccuacuuccu

SEQ ID NO: 1143589 - RNA, 18 nt, Human
uuccucuccacugccuuc

SEQ ID NO: 1143590 - RNA, 19 nt, Human
uuccucuccacugccuucg

SEQ ID NO: 1143591 - RNA, 13 nt, Human
uuccucugagccu

SEQ ID NO: 1143592 - RNA, 13 nt, Human
aucagugcccucc

SEQ ID NO: 1143593 - RNA, 15 nt, Human
aucagugcccuccag

SEQ ID NO: 1143594 - RNA, 17 nt, Human
aucagugcccuccagga

SEQ ID NO: 1143595 - RNA, 21 nt, Human
aucaguuacacaugaucauaa

SEQ ID NO: 1143596 - RNA, 14 nt, Human
aucauauaaauaga

SEQ ID NO: 1143597 - RNA, 18 nt, Human
aucauauaaauagaaugu

SEQ ID NO: 1143598 - RNA, 19 nt, Human
aucauauaaauagaaugua

SEQ ID NO: 1143599 - RNA, 21 nt, Human
aucauauaaauagaauguaaa

SEQ ID NO: 1143600 - RNA, 22 nt, Human
aucauauaaauagaauguaaau

SEQ ID NO: 1143601 - RNA, 23 nt, Human
aucauauaaauagaauguaaaug

SEQ ID NO: 1143602 - RNA, 24 nt, Human
aucauauaaauagaauguaaaugu

SEQ ID NO: 1143603 - RNA, 18 nt, Human
uucuccuuucacaaccuu

SEQ ID NO: 1143604 - RNA, 22 nt, Human
uucuccuuucacaaccuucugu

SEQ ID NO: 1143605 - RNA, 22 nt, Human
auccaauuagcuuauguuaacu

SEQ ID NO: 1143606 - RNA, 20 nt, Human
auccaauuagcuuauguuaa

SEQ ID NO: 1143607 - RNA, 22 nt, Human
auccucuuccauauggauccac

SEQ ID NO: 1143608 - RNA, 19 nt, Human
auccuguaggaagguacug

SEQ ID NO: 1143609 - RNA, 20 nt, Human
auccuguaggaagguacugu

SEQ ID NO: 1143610 - RNA, 22 nt, Human
auccuguaggaagguacuguau

SEQ ID NO: 1143611 - RNA, 21 nt, Human
auccuguaggaagguacugua

SEQ ID NO: 1143612 - RNA, 15 nt, Human
aucuaaacugccccc

SEQ ID NO: 1143613 - RNA, 13 nt, Human
uugagaagcugcu

SEQ ID NO: 1143614 - RNA, 15 nt, Human
uugagaagcugcuca

SEQ ID NO: 1143615 - RNA, 16 nt, Human
uugagaagcugcucaa

SEQ ID NO: 1143616 - RNA, 15 nt, Human
uugauaaaucauuuu

SEQ ID NO: 1143617 - RNA, 21 nt, Human
uugauaaaucauuuuauguca

SEQ ID NO: 1143618 - RNA, 18 nt, Human
uugauaaaucauuuuaug

SEQ ID NO: 1143619 - RNA, 15 nt, Human
uugcugaaugcaaga

SEQ ID NO: 1143620 - RNA, 19 nt, Human
augaaagauggcugugccu

SEQ ID NO: 1143621 - RNA, 20 nt, Human
augaaagauggcugugccuc

SEQ ID NO: 1143622 - RNA, 23 nt, Human
augaaagauggcugugccucugc

SEQ ID NO: 1143623 - RNA, 22 nt, Human
uuguaaaaauuaaaaguuaugg

SEQ ID NO: 1143624 - RNA, 21 nt, Human
augacaagaaaggcugcugua

SEQ ID NO: 1143625 - RNA, 12 nt, Human
augacaguaauu

SEQ ID NO: 1143626 - RNA, 20 nt, Human
augacaguaauuguguuuac

SEQ ID NO: 1143627 - RNA, 22 nt, Human
augacaguaauuguguuuacau

SEQ ID NO: 1143628 - RNA, 21 nt, Human
augacaguaauuguguuuaca

SEQ ID NO: 1143629 - RNA, 12 nt, Human
augaucaaaugu

SEQ ID NO: 1143630 - RNA, 13 nt, Human
augaucaaauguu

SEQ ID NO: 1143631 - RNA, 14 nt, Human
augaucaaauguuu

SEQ ID NO: 1143632 - RNA, 15 nt, Human
augaucaaauguuua

SEQ ID NO: 1143633 - RNA, 16 nt, Human
augaucaaauguuuaa

SEQ ID NO: 1143634 - RNA, 17 nt, Human
augaucaaauguuuaau

SEQ ID NO: 1143635 - RNA, 19 nt, Human
augaucaaauguuuaauca

SEQ ID NO: 1143636 - RNA, 20 nt, Human
augaucaaauguuuaaucau

SEQ ID NO: 1143637 - RNA, 15 nt, Human
augauccuaaugaau

SEQ ID NO: 1143638 - RNA, 13 nt, Human
augaucugauuga

SEQ ID NO: 1143639 - RNA, 18 nt, Human
uuguuuuuuuuuuccacu

SEQ ID NO: 1143640 - RNA, 19 nt, Human
uuguuuuuuuuuuccacuu

SEQ ID NO: 1143641 - RNA, 17 nt, Human
uuuaaaaaauuaaucug

SEQ ID NO: 1143642 - RNA, 21 nt, Human
uuuaaaaaauuaaucugggcc

SEQ ID NO: 1143643 - RNA, 15 nt, Human
augcgccaauaaacc

SEQ ID NO: 1143644 - RNA, 16 nt, Human
augcgccaauaaacca

SEQ ID NO: 1143645 - RNA, 18 nt, Human
augcgccaauaaaccaau

SEQ ID NO: 1143646 - RNA, 18 nt, Human
augcuacaggauuugaaa

SEQ ID NO: 1143647 - RNA, 15 nt, Human
uuuagcugacaaaau

SEQ ID NO: 1143648 - RNA, 14 nt, Human
augcuguauauguu

SEQ ID NO: 1143649 - RNA, 20 nt, Human
augcuuauauuguucacuuc

SEQ ID NO: 1143650 - RNA, 13 nt, Human
uuuauuuuuuggg

SEQ ID NO: 1143651 - RNA, 16 nt, Human
uuuauuuuuugggaaa

SEQ ID NO: 1143652 - RNA, 14 nt, Human
uuucccaugauuuc

SEQ ID NO: 1143653 - RNA, 15 nt, Human
augggacuggccucu

SEQ ID NO: 1143654 - RNA, 21 nt, Human
uuuccuuuuaaaacacuucca

SEQ ID NO: 1143655 - RNA, 16 nt, Human
uuucuaguguaucaaa

SEQ ID NO: 1143656 - RNA, 19 nt, Human
uuucuaguguaucaaaaug

SEQ ID NO: 1143657 - RNA, 20 nt, Human
uuucuaguguaucaaaaugc

SEQ ID NO: 1143658 - RNA, 21 nt, Human
uuucuaguguaucaaaaugcu

SEQ ID NO: 1143659 - RNA, 22 nt, Human
uuucucauuugccaauaauaau

SEQ ID NO: 1143660 - RNA, 13 nt, Human
uuucugcaucucc

SEQ ID NO: 1143661 - RNA, 16 nt, Human
uuucugcaucuccacu

SEQ ID NO: 1143662 - RNA, 15 nt, Human
uuucugcaucuccac

SEQ ID NO: 1143663 - RNA, 12 nt, Human
augugugugugc

SEQ ID NO: 1143664 - RNA, 11 nt, Human
uuuuauuuccu

SEQ ID NO: 1143665 - RNA, 18 nt, Human
uuuuauuuccuaugaugu

SEQ ID NO: 1143666 - RNA, 16 nt, Human
uuuuauuuccuaugau

SEQ ID NO: 1143667 - RNA, 23 nt, Human
auuaaacaugacuccauagaccu

SEQ ID NO: 1143668 - RNA, 21 nt, Human
uuuugugaugucccaacuugu

SEQ ID NO: 1143669 - RNA, 20 nt, Human
uuuuuacccauuuguucaua

SEQ ID NO: 1143670 - RNA, 19 nt, Human
uuuuugugaaaagcuccau

SEQ ID NO: 1143671 - RNA, 15 nt, Human
auuacuuaguauugc

SEQ ID NO: 1143672 - RNA, 18 nt, Human
auuacuuaguauugcaaa

SEQ ID NO: 1143673 - RNA, 22 nt, Human
auuacuuaguauugcaaaguca

SEQ ID NO: 1143674 - RNA, 12 nt, Human
auucccucccca

SEQ ID NO: 1143675 - RNA, 14 nt, Human
auucucaugccuca

SEQ ID NO: 1143676 - RNA, 15 nt, Human
auucucaugccucag

SEQ ID NO: 1143677 - RNA, 21 nt, Human
auucucaugccucagccuccu

SEQ ID NO: 1143678 - RNA, 12 nt, Human
auucuccugccu

SEQ ID NO: 1143679 - RNA, 13 nt, Human
auucuccugccuc

SEQ ID NO: 1143680 - RNA, 14 nt, Human
auucuccugccuca

SEQ ID NO: 1143681 - RNA, 18 nt, Human
auucuucaagaucccauu

SEQ ID NO: 1143682 - RNA, 21 nt, Human
auucuucaagaucccauuuga

SEQ ID NO: 1143683 - RNA, 15 nt, Human
auugugcauucuaga

SEQ ID NO: 1143684 - RNA, 16 nt, Human
auuucaaacggccuca

SEQ ID NO: 1143685 - RNA, 22 nt, Human
auuucauuugugccagaaugcu

SEQ ID NO: 1143686 - RNA, 20 nt, Human
auuuccagugaaaucaguua

SEQ ID NO: 1143687 - RNA, 18 nt, Human
auuucccaugauuucaug

SEQ ID NO: 1143688 - RNA, 18 nt, Human
auuuucaacgcagcccug

SEQ ID NO: 1143689 - RNA, 20 nt, Human
auuuucaacgcagcccugcu

SEQ ID NO: 1143690 - RNA, 14 nt, Human
auuuucacuguguc

SEQ ID NO: 1143691 - RNA, 13 nt, Human
auuuucacugugu

SEQ ID NO: 1143692 - RNA, 22 nt, Human
auuuucaguuauuauauuuaca

SEQ ID NO: 1143693 - RNA, 21 nt, Human
caaaacuucguuuaaugaaug

SEQ ID NO: 1143694 - RNA, 22 nt, Human
caaaaugcucuuauuucaucau

SEQ ID NO: 1143695 - RNA, 16 nt, Human
caaaauguuauuuccc

SEQ ID NO: 1143696 - RNA, 17 nt, Human
caaaauguuauuucccu

SEQ ID NO: 1143697 - RNA, 18 nt, Human
caaaauguuauuucccua

SEQ ID NO: 1143698 - RNA, 13 nt, Human
caaaauuagccag

SEQ ID NO: 1143699 - RNA, 20 nt, Human
caaaauuagccaguaauccu

SEQ ID NO: 1143700 - RNA, 21 nt, Human
caaaauuagccaguaauccug

SEQ ID NO: 1143701 - RNA, 22 nt, Human
caaaauuagccaguaauccugu

SEQ ID NO: 1143702 - RNA, 23 nt, Human
caaaauuagccaguaauccugua

SEQ ID NO: 1143703 - RNA, 19 nt, Human
caaagugcugggauuacag

SEQ ID NO: 1143704 - RNA, 15 nt, Human
caaaugucuuccugg

SEQ ID NO: 1143705 - RNA, 13 nt, Human
caacccucagagc

SEQ ID NO: 1143706 - RNA, 18 nt, Human
caacccucagagccaccc

SEQ ID NO: 1143707 - RNA, 17 nt, Human
caacccuggcacccagg

SEQ ID NO: 1143708 - RNA, 20 nt, Human
caaccuguucugcuuuccuc

SEQ ID NO: 1143709 - RNA, 19 nt, Human
caaccuucgccaccugggu

SEQ ID NO: 1143710 - RNA, 16 nt, Human
caaccuucuguggcuc

SEQ ID NO: 1143711 - RNA, 15 nt, Human
caacugaccagccuc

SEQ ID NO: 1143712 - RNA, 17 nt, Human
caacugaccagccucca

SEQ ID NO: 1143713 - RNA, 19 nt, Human
caacugaccagccuccaug

SEQ ID NO: 1143714 - RNA, 13 nt, Human
caagagggcacug

SEQ ID NO: 1143715 - RNA, 14 nt, Human
caagagggcacugg

SEQ ID NO: 1143716 - RNA, 15 nt, Human
caagagggcacuggu

SEQ ID NO: 1143717 - RNA, 17 nt, Human
caagagggcacuggugg

SEQ ID NO: 1143718 - RNA, 18 nt, Human
caagccguggcuucccgc

SEQ ID NO: 1143719 - RNA, 14 nt, Human
caagccuggcaagg

SEQ ID NO: 1143720 - RNA, 18 nt, Human
caaggacagccccuccuc

SEQ ID NO: 1143721 - RNA, 15 nt, Human
caaggacugcaggga

SEQ ID NO: 1143722 - RNA, 22 nt, Human
caaggacugcagggacugccag

SEQ ID NO: 1143723 - RNA, 18 nt, Human
caaggguagggugggccu

SEQ ID NO: 1143724 - RNA, 19 nt, Human
caaggguagggugggccuu

SEQ ID NO: 1143725 - RNA, 17 nt, Human
caagugauucucaugcc

SEQ ID NO: 1143726 - RNA, 18 nt, Human
caagugauucucaugccu

SEQ ID NO: 1143727 - RNA, 20 nt, Human
caagugauucucaugccuca

SEQ ID NO: 1143728 - RNA, 21 nt, Human
caagugauucucaugccucag

SEQ ID NO: 1143729 - RNA, 19 nt, Human
caaguggcucccacacccu

SEQ ID NO: 1143730 - RNA, 12 nt, Human
caaguguaauga

SEQ ID NO: 1143731 - RNA, 15 nt, Human
caaguguaaugaaua

SEQ ID NO: 1143732 - RNA, 19 nt, Human
caaguguaaugaauaccuu

SEQ ID NO: 1143733 - RNA, 18 nt, Human
caaguguaaugaauaccu

SEQ ID NO: 1143734 - RNA, 16 nt, Human
caauacaaguuucauc

SEQ ID NO: 1143735 - RNA, 21 nt, Human
caauacaaguuucauccagaa

SEQ ID NO: 1143736 - RNA, 13 nt, Human
caauucuccugcc

SEQ ID NO: 1143737 - RNA, 14 nt, Human
caauucuccugccu

SEQ ID NO: 1143738 - RNA, 15 nt, Human
caauucuccugccuc

SEQ ID NO: 1143739 - RNA, 16 nt, Human
caauucuccugccuca

SEQ ID NO: 1143740 - RNA, 13 nt, Human
caauuugaugugg

SEQ ID NO: 1143741 - RNA, 14 nt, Human
cacaggagggaggg

SEQ ID NO: 1143742 - RNA, 19 nt, Human
cacaggagggagggggaag

SEQ ID NO: 1143743 - RNA, 21 nt, Human
cacaggagggagggggaaggc

SEQ ID NO: 1143744 - RNA, 14 nt, Human
cacagugcaucuca

SEQ ID NO: 1143745 - RNA, 17 nt, Human
cacagugcaucucagcc

SEQ ID NO: 1143746 - RNA, 21 nt, Human
cacauagugaugguuccccug

SEQ ID NO: 1143747 - RNA, 22 nt, Human
caccggccccauuuacccaacu

SEQ ID NO: 1143748 - RNA, 13 nt, Human
caccgggccugga

SEQ ID NO: 1143749 - RNA, 15 nt, Human
caccggggccucgga

SEQ ID NO: 1143750 - RNA, 15 nt, Human
caccgugccuggcca

SEQ ID NO: 1143751 - RNA, 20 nt, Human
caccgugccuggccacgccc

SEQ ID NO: 1143752 - RNA, 14 nt, Human
caccucccccaucu

SEQ ID NO: 1143753 - RNA, 21 nt, Human
caccucccccaucucuucugg

SEQ ID NO: 1143754 - RNA, 22 nt, Human
caccuuagccugcccuccuuuc

SEQ ID NO: 1143755 - RNA, 13 nt, Human
caccuucccaugc

SEQ ID NO: 1143756 - RNA, 14 nt, Human
caccuucccaugcc

SEQ ID NO: 1143757 - RNA, 14 nt, Human
cacgcuccuuccuc

SEQ ID NO: 1143758 - RNA, 15 nt, Human
cacgggggccaagga

SEQ ID NO: 1143759 - RNA, 13 nt, Human
cacgugacagccg

SEQ ID NO: 1143760 - RNA, 13 nt, Human
cacuaaacaaaga

SEQ ID NO: 1143761 - RNA, 18 nt, Human
cacuaucccggcugcccu

SEQ ID NO: 1143762 - RNA, 19 nt, Human
cacuaucccggcugcccuu

SEQ ID NO: 1143763 - RNA, 13 nt, Human
cacuccuaccugg

SEQ ID NO: 1143764 - RNA, 14 nt, Human
cacuccuaccuggu

SEQ ID NO: 1143765 - RNA, 19 nt, Human
cacucgaggucgggcagca

SEQ ID NO: 1143766 - RNA, 14 nt, Human
cacucuacuuagca

SEQ ID NO: 1143767 - RNA, 13 nt, Human
cacugagcacugu

SEQ ID NO: 1143768 - RNA, 15 nt, Human
cacugagcacuguuu

SEQ ID NO: 1143769 - RNA, 16 nt, Human
cacugagcacuguuuu

SEQ ID NO: 1143770 - RNA, 17 nt, Human
cacugagcacuguuuuc

SEQ ID NO: 1143771 - RNA, 18 nt, Human
cacugagcacuguuuucu

SEQ ID NO: 1143772 - RNA, 22 nt, Human
cacugagcacuguuuucuagug

SEQ ID NO: 1143773 - RNA, 19 nt, Human
cacugagcacuguuuucua

SEQ ID NO: 1143774 - RNA, 14 nt, Human
cacugcaaccuucg

SEQ ID NO: 1143775 - RNA, 22 nt, Human
cacugcaaccuucgccaccugg

SEQ ID NO: 1143776 - RNA, 23 nt, Human
cacugcaaccuucgccaccuggg

SEQ ID NO: 1143777 - RNA, 18 nt, Human
cacugcacagugcaucuc

SEQ ID NO: 1143778 - RNA, 19 nt, Human
cacugcacagugcaucuca

SEQ ID NO: 1143779 - RNA, 21 nt, Human
cacugcacagugcaucucagc

SEQ ID NO: 1143780 - RNA, 22 nt, Human
cacugcacagugcaucucagcc

SEQ ID NO: 1143781 - RNA, 23 nt, Human
cacugcacagugcaucucagccc

SEQ ID NO: 1143782 - RNA, 16 nt, Human
cacugccucuuccucc

SEQ ID NO: 1143783 - RNA, 20 nt, Human
cacugccuucgauacaccgg

SEQ ID NO: 1143784 - RNA, 22 nt, Human
cacugccuucgauacaccgggc

SEQ ID NO: 1143785 - RNA, 20 nt, Human
cacugcucugaugaagagga

SEQ ID NO: 1143786 - RNA, 15 nt, Human
cacugcugcccagcc

SEQ ID NO: 1143787 - RNA, 17 nt, Human
cacugcugcccagccuc

SEQ ID NO: 1143788 - RNA, 12 nt, Human
cacugcuggcug

SEQ ID NO: 1143789 - RNA, 13 nt, Human
cacugcuggcugc

SEQ ID NO: 1143790 - RNA, 14 nt, Human
cacugcuggcugcc

SEQ ID NO: 1143791 - RNA, 15 nt, Human
cacugcuggcugccu

SEQ ID NO: 1143792 - RNA, 16 nt, Human
cacugcuggcugccuu

SEQ ID NO: 1143793 - RNA, 21 nt, Human
cacugcuggcugccuuagaac

SEQ ID NO: 1143794 - RNA, 15 nt, Human
cacuggacucaccuc

SEQ ID NO: 1143795 - RNA, 18 nt, Human
cacuggacucaccucccc

SEQ ID NO: 1143796 - RNA, 14 nt, Human
cacugugcuguugu

SEQ ID NO: 1143797 - RNA, 15 nt, Human
cacugugcuguuguu

SEQ ID NO: 1143798 - RNA, 17 nt, Human
cacugugcuguuguuau

SEQ ID NO: 1143799 - RNA, 19 nt, Human
cacugugcuguuguuauga

SEQ ID NO: 1143800 - RNA, 20 nt, Human
cacugugcuguuguuaugau

SEQ ID NO: 1143801 - RNA, 23 nt, Human
cacugugcuguuguuaugaugug

SEQ ID NO: 1143802 - RNA, 21 nt, Human
cacugugcuguuguuaugaug

SEQ ID NO: 1143803 - RNA, 12 nt, Human
cacuucacugug

SEQ ID NO: 1143804 - RNA, 13 nt, Human
cacuucacugugc

SEQ ID NO: 1143805 - RNA, 15 nt, Human
cacuucacugugcug

SEQ ID NO: 1143806 - RNA, 14 nt, Human
cacuucaggcucuu

SEQ ID NO: 1143807 - RNA, 15 nt, Human
cacuucaggcucuuc

SEQ ID NO: 1143808 - RNA, 16 nt, Human
cacuucaggcucuucu

SEQ ID NO: 1143809 - RNA, 20 nt, Human
cacuucaggcucuucuccuu

SEQ ID NO: 1143810 - RNA, 23 nt, Human
cacuucaggcucuucuccuuuca

SEQ ID NO: 1143811 - RNA, 20 nt, Human
cacuuccauaaucuggacuc

SEQ ID NO: 1143812 - RNA, 19 nt, Human
cacuugaugacccccaacc

SEQ ID NO: 1143813 - RNA, 18 nt, Human
cacuuuuauuuagcacca

SEQ ID NO: 1143814 - RNA, 24 nt, Human
cagaaagaaguggggacagagcag

SEQ ID NO: 1143815 - RNA, 22 nt, Human
cagaacccuuggagccaaugga

SEQ ID NO: 1143816 - RNA, 19 nt, Human
cagaacuaccaccugacau

SEQ ID NO: 1143817 - RNA, 15 nt, Human
cagaaucucgcucug

SEQ ID NO: 1143818 - RNA, 14 nt, Human
cagacauugugcua

SEQ ID NO: 1143819 - RNA, 13 nt, Human
cagaccccuggcu

SEQ ID NO: 1143820 - RNA, 14 nt, Human
cagaccccuggcuu

SEQ ID NO: 1143821 - RNA, 15 nt, Human
cagaccccuggcuuu

SEQ ID NO: 1143822 - RNA, 16 nt, Human
cagaccccuggcuuuu

SEQ ID NO: 1143823 - RNA, 18 nt, Human
cagaccccuggcuuuuca

SEQ ID NO: 1143824 - RNA, 21 nt, Human
cagaccccuggcuuuucacug

SEQ ID NO: 1143825 - RNA, 22 nt, Human
cagaccccuggcuuuucacugc

SEQ ID NO: 1143826 - RNA, 23 nt, Human
cagaccccuggcuuuucacugcu

SEQ ID NO: 1143827 - RNA, 20 nt, Human
cagacuuuuuuuaaauagua

SEQ ID NO: 1143828 - RNA, 13 nt, Human
cagagaguggcuc

SEQ ID NO: 1143829 - RNA, 14 nt, Human
cagagaguggcucc

SEQ ID NO: 1143830 - RNA, 15 nt, Human
cagagaguggcuccu

SEQ ID NO: 1143831 - RNA, 18 nt, Human
cagagaguggcuccuccc

SEQ ID NO: 1143832 - RNA, 18 nt, Human
cagagcacagcagccccu

SEQ ID NO: 1143833 - RNA, 22 nt, Human
cagagccaccccuaaagagaua

SEQ ID NO: 1143834 - RNA, 23 nt, Human
cagaugacaagaaaggcugcugu

SEQ ID NO: 1143835 - RNA, 15 nt, Human
cagaugcugugcaaa

SEQ ID NO: 1143836 - RNA, 16 nt, Human
cagauguccaucagau

SEQ ID NO: 1143837 - RNA, 19 nt, Human
cagauguccaucagaugac

SEQ ID NO: 1143838 - RNA, 21 nt, Human
cagauguccaucagaugacaa

SEQ ID NO: 1143839 - RNA, 15 nt, Human
cagaugucuauauug

SEQ ID NO: 1143840 - RNA, 15 nt, Human
cagauucuugcaucc

SEQ ID NO: 1143841 - RNA, 19 nt, Human
cagauuuuuuacagcugcc

SEQ ID NO: 1143842 - RNA, 22 nt, Human
cagauuuuuuacagcugccugc

SEQ ID NO: 1143843 - RNA, 16 nt, Human
cagcaaauccuuugug

SEQ ID NO: 1143844 - RNA, 18 nt, Human
cagcaaauccuuugugaa

SEQ ID NO: 1143845 - RNA, 15 nt, Human
cagcaauucuccugc

SEQ ID NO: 1143846 - RNA, 16 nt, Human
cagcaauucuccugcc

SEQ ID NO: 1143847 - RNA, 17 nt, Human
cagcaauucuccugccu

SEQ ID NO: 1143848 - RNA, 18 nt, Human
cagcaauucuccugccuc

SEQ ID NO: 1143849 - RNA, 19 nt, Human
cagcaauucuccugccuca

SEQ ID NO: 1143850 - RNA, 20 nt, Human
cagcaauucuccugccucag

SEQ ID NO: 1143851 - RNA, 13 nt, Human
cagcagccccugc

SEQ ID NO: 1143852 - RNA, 16 nt, Human
cagcagccccugcaca

SEQ ID NO: 1143853 - RNA, 23 nt, Human
cagcagccccugcacaaagcccu

SEQ ID NO: 1143854 - RNA, 13 nt, Human
cagcaucucagcu

SEQ ID NO: 1143855 - RNA, 14 nt, Human
cagcaucucagcuc

SEQ ID NO: 1143856 - RNA, 14 nt, Human
cagcauucucacuc

SEQ ID NO: 1143857 - RNA, 15 nt, Human
cagcauucucacucc

SEQ ID NO: 1143858 - RNA, 19 nt, Human
cagcccacauagugauggu

SEQ ID NO: 1143859 - RNA, 18 nt, Human
cagccuccaugcugccuc

SEQ ID NO: 1143860 - RNA, 22 nt, Human
cagcccuccaucuaaacugccc

SEQ ID NO: 1143861 - RNA, 23 nt, Human
cagcccuccaucuaaacugcccc

SEQ ID NO: 1143862 - RNA, 13 nt, Human
cagcccucccugc

SEQ ID NO: 1143863 - RNA, 15 nt, Human
cagcccucccugccc

SEQ ID NO: 1143864 - RNA, 16 nt, Human
cagcccucccugcccc

SEQ ID NO: 1143865 - RNA, 17 nt, Human
cagcccucccugccccu

SEQ ID NO: 1143866 - RNA, 18 nt, Human
cagcccucccugccccuc

SEQ ID NO: 1143867 - RNA, 22 nt, Human
cagcccucccugccccucccuu

SEQ ID NO: 1143868 - RNA, 11 nt, Human
cagcccugcuu

SEQ ID NO: 1143869 - RNA, 13 nt, Human
cagcccugcuuug

SEQ ID NO: 1143870 - RNA, 19 nt, Human
cagcccugcuuugggcugc

SEQ ID NO: 1143871 - RNA, 20 nt, Human
cagcccugcuuugggcugcc

SEQ ID NO: 1143872 - RNA, 21 nt, Human
cagcccugcuuugggcugccc

SEQ ID NO: 1143873 - RNA, 22 nt, Human
cagcccugcuuugggcugcccu

SEQ ID NO: 1143874 - RNA, 23 nt, Human
cagcccugcuuugggcugcccug

SEQ ID NO: 1143875 - RNA, 9 nt, Human
cagccgugc

SEQ ID NO: 1143876 - RNA, 14 nt, Human
cagccgugccuuca

SEQ ID NO: 1143877 - RNA, 16 nt, Human
cagccgugccuucagc

SEQ ID NO: 1143878 - RNA, 18 nt, Human
cagccgugccuucagcuc

SEQ ID NO: 1143879 - RNA, 20 nt, Human
cagccgugccuucagcucua

SEQ ID NO: 1143880 - RNA, 14 nt, Human
cagccuccaagcuc

SEQ ID NO: 1143881 - RNA, 20 nt, Human
cagccuccaagcuccaucuc

SEQ ID NO: 1143882 - RNA, 14 nt, Human
cagccuccaugcug

SEQ ID NO: 1143883 - RNA, 15 nt, Human
cagccuccaugcugc

SEQ ID NO: 1143884 - RNA, 17 nt, Human
cagccuccaugcugccu

SEQ ID NO: 1143885 - RNA, 20 nt, Human
cagccuccaugcugccucca

SEQ ID NO: 1143886 - RNA, 15 nt, Human
cagccuccugaguag

SEQ ID NO: 1143887 - RNA, 10 nt, Human
cagccuggca

SEQ ID NO: 1143888 - RNA, 13 nt, Human
cagccuggcacag

SEQ ID NO: 1143889 - RNA, 20 nt, Human
cagccuggcacagggcagug

SEQ ID NO: 1143890 - RNA, 21 nt, Human
cagccuggcacagggcagugg

SEQ ID NO: 1143891 - RNA, 19 nt, Human
cagcuaaucagcauucuca

SEQ ID NO: 1143892 - RNA, 12 nt, Human
cagcucacugca

SEQ ID NO: 1143893 - RNA, 14 nt, Human
cagcucacugcaac

SEQ ID NO: 1143894 - RNA, 15 nt, Human
cagcucacugcaacc

SEQ ID NO: 1143895 - RNA, 21 nt, Human
cagcucacugcaaccuucgcc

SEQ ID NO: 1143896 - RNA, 21 nt, Human
cagcugcucaauaaaguacaa

SEQ ID NO: 1143897 - RNA, 19 nt, Human
cagcuggccgggagccuga

SEQ ID NO: 1143898 - RNA, 23 nt, Human
cagcugggaucacauguggacuu

SEQ ID NO: 1143899 - RNA, 16 nt, Human
cagcuggguuggaaaa

SEQ ID NO: 1143900 - RNA, 17 nt, Human
cagcuggguuggaaaac

SEQ ID NO: 1143901 - RNA, 22 nt, Human
cagcuuuaaaaaauuaaucugg

SEQ ID NO: 1143902 - RNA, 23 nt, Human
cagcuuuccccaugucucgacuc

SEQ ID NO: 1143903 - RNA, 14 nt, Human
cagcuuugauauuu

SEQ ID NO: 1143904 - RNA, 16 nt, Human
cagcuuugcucauauu

SEQ ID NO: 1143905 - RNA, 21 nt, Human
cagcuuugcucauauuuccca

SEQ ID NO: 1143906 - RNA, 20 nt, Human
cagcuuugcucauauuuccc

SEQ ID NO: 1143907 - RNA, 23 nt, Human
cagcuuuuggauuggacaaaaug

SEQ ID NO: 1143908 - RNA, 15 nt, Human
caggaacguuuagcu

SEQ ID NO: 1143909 - RNA, 14 nt, Human
caggaagcagcuuu

SEQ ID NO: 1143910 - RNA, 19 nt, Human
caggaaggcugagaggaga

SEQ ID NO: 1143911 - RNA, 12 nt, Human
caggacucugcc

SEQ ID NO: 1143912 - RNA, 13 nt, Human
caggacucugccu

SEQ ID NO: 1143913 - RNA, 15 nt, Human
caggacucugccucc

SEQ ID NO: 1143914 - RNA, 16 nt, Human
caggacucugccuccu

SEQ ID NO: 1143915 - RNA, 16 nt, Human
caggaguuggaagugu

SEQ ID NO: 1143916 - RNA, 13 nt, Human
caggauagacuuu

SEQ ID NO: 1143917 - RNA, 19 nt, Human
caggauguacaaggacagc

SEQ ID NO: 1143918 - RNA, 20 nt, Human
caggcaggaaggcugagagg

SEQ ID NO: 1143919 - RNA, 18 nt, Human
caggccauuccccgucuc

SEQ ID NO: 1143920 - RNA, 21 nt, Human
caggccauuccccgucucugg

SEQ ID NO: 1143921 - RNA, 15 nt, Human
caggcccuuccucuc

SEQ ID NO: 1143922 - RNA, 16 nt, Human
caggcccuuccucucc

SEQ ID NO: 1143923 - RNA, 17 nt, Human
caggcccuuccucucca

SEQ ID NO: 1143924 - RNA, 19 nt, Human
caggcccuuccucuccacu

SEQ ID NO: 1143925 - RNA, 20 nt, Human
caggcccuuccucuccacug

SEQ ID NO: 1143926 - RNA, 21 nt, Human
caggcccuuccucuccacugc

SEQ ID NO: 1143927 - RNA, 23 nt, Human
caggcccuuccucuccacugccu

SEQ ID NO: 1143928 - RNA, 13 nt, Human
caggcuccugcca

SEQ ID NO: 1143929 - RNA, 14 nt, Human
caggcuccugccac

SEQ ID NO: 1143930 - RNA, 15 nt, Human
caggcuccugccacc

SEQ ID NO: 1143931 - RNA, 16 nt, Human
caggcuccugccacca

SEQ ID NO: 1143932 - RNA, 18 nt, Human
caggcuccugccaccacg

SEQ ID NO: 1143933 - RNA, 12 nt, Human
caggcucuucuc

SEQ ID NO: 1143934 - RNA, 14 nt, Human
caggcucuucuccu

SEQ ID NO: 1143935 - RNA, 15 nt, Human
caggcucuucuccuu

SEQ ID NO: 1143936 - RNA, 18 nt, Human
caggcucuucuccuuuca

SEQ ID NO: 1143937 - RNA, 22 nt, Human
caggcucuucuccuuucacaac

SEQ ID NO: 1143938 - RNA, 12 nt, Human
caggcugagccu

SEQ ID NO: 1143939 - RNA, 13 nt, Human
caggcugagccuc

SEQ ID NO: 1143940 - RNA, 14 nt, Human
caggcugagccuca

SEQ ID NO: 1143941 - RNA, 15 nt, Human
caggcugagccucag

SEQ ID NO: 1143942 - RNA, 16 nt, Human
caggcugagccucagu

SEQ ID NO: 1143943 - RNA, 17 nt, Human
caggcugagccucaguc

SEQ ID NO: 1143944 - RNA, 21 nt, Human
caggcugagccucagucuccc

SEQ ID NO: 1143945 - RNA, 15 nt, Human
caggcugcggccccu

SEQ ID NO: 1143946 - RNA, 16 nt, Human
caggcugcggccccuc

SEQ ID NO: 1143947 - RNA, 18 nt, Human
caggcugcggccccuccc

SEQ ID NO: 1143948 - RNA, 19 nt, Human
caggcugcggccccucccc

SEQ ID NO: 1143949 - RNA, 20 nt, Human
caggcugcggccccuccccc

SEQ ID NO: 1143950 - RNA, 12 nt, Human
caggcugcucuu

SEQ ID NO: 1143951 - RNA, 20 nt, Human
caggcugcucuugaacuccu

SEQ ID NO: 1143952 - RNA, 23 nt, Human
caggcugcucuugaacuccugac

SEQ ID NO: 1143953 - RNA, 12 nt, Human
caggcuggcccu

SEQ ID NO: 1143954 - RNA, 14 nt, Human
caggcuggcccugc

SEQ ID NO: 1143955 - RNA, 15 nt, Human
caggcuggcccugcc

SEQ ID NO: 1143956 - RNA, 16 nt, Human
caggcuggcccugccc

SEQ ID NO: 1143957 - RNA, 17 nt, Human
caggcuggcccugcccu

SEQ ID NO: 1143958 - RNA, 20 nt, Human
caggcuggucucgaacuccu

SEQ ID NO: 1143959 - RNA, 22 nt, Human
caggcuggucucgaacuccuga

SEQ ID NO: 1143960 - RNA, 23 nt, Human
caggcuggucucgaacuccugac

SEQ ID NO: 1143961 - RNA, 14 nt, Human
caggcugugaguuu

SEQ ID NO: 1143962 - RNA, 19 nt, Human
cagggaacgugauuaguga

SEQ ID NO: 1143963 - RNA, 18 nt, Human
cagggaacgugauuagug

SEQ ID NO: 1143964 - RNA, 15 nt, Human
cagggaaggggacaa

SEQ ID NO: 1143965 - RNA, 17 nt, Human
cagggaaggggacaagg

SEQ ID NO: 1143966 - RNA, 20 nt, Human
cagggcauggccagguggcc

SEQ ID NO: 1143967 - RNA, 12 nt, Human
caggguaacuaa

SEQ ID NO: 1143968 - RNA, 19 nt, Human
caggguaacuaacuaaaac

SEQ ID NO: 1143969 - RNA, 22 nt, Human
caggguaacuaacuaaaacaaa

SEQ ID NO: 1143970 - RNA, 21 nt, Human
caggguaacuaacuaaaacaa

SEQ ID NO: 1143971 - RNA, 17 nt, Human
cagguaaucgaccugcc

SEQ ID NO: 1143972 - RNA, 18 nt, Human
cagguaaucgaccugccu

SEQ ID NO: 1143973 - RNA, 19 nt, Human
cagguaaucgaccugccuc

SEQ ID NO: 1143974 - RNA, 20 nt, Human
cagguaaucgaccugccucg

SEQ ID NO: 1143975 - RNA, 15 nt, Human
cagguggccacucca

SEQ ID NO: 1143976 - RNA, 16 nt, Human
cagguggccacuccag

SEQ ID NO: 1143977 - RNA, 19 nt, Human
cagguggccacuccagacc

SEQ ID NO: 1143978 - RNA, 21 nt, Human
cagguggccacuccagacccc

SEQ ID NO: 1143979 - RNA, 18 nt, Human
caggugugagccaccacg

SEQ ID NO: 1143980 - RNA, 21 nt, Human
caggugugagccaccacgccc

SEQ ID NO: 1143981 - RNA, 12 nt, Human
caguaauccugu

SEQ ID NO: 1143982 - RNA, 13 nt, Human
caguaauccugua

SEQ ID NO: 1143983 - RNA, 16 nt, Human
caguaauccuguagga

SEQ ID NO: 1143984 - RNA, 17 nt, Human
caguaauccuguaggaa

SEQ ID NO: 1143985 - RNA, 21 nt, Human
caguaauccuguaggaaggua

SEQ ID NO: 1143986 - RNA, 23 nt, Human
caguaauccuguaggaagguacu

SEQ ID NO: 1143987 - RNA, 17 nt, Human
caguaauuguguuuaca

SEQ ID NO: 1143988 - RNA, 18 nt, Human
caguaauuguguuuacau

SEQ ID NO: 1143989 - RNA, 20 nt, Human
caguaauuguguuuacauuu

SEQ ID NO: 1143990 - RNA, 14 nt, Human
caguaucggcacug

SEQ ID NO: 1143991 - RNA, 15 nt, Human
caguaucggcacugu

SEQ ID NO: 1143992 - RNA, 16 nt, Human
caguaucggcacugua

SEQ ID NO: 1143993 - RNA, 20 nt, Human
caguaucggcacuguacaaa

SEQ ID NO: 1143994 - RNA, 19 nt, Human
caguaucggcacuguacaa

SEQ ID NO: 1143995 - RNA, 23 nt, Human
caguccccgugaaggagagcccu

SEQ ID NO: 1143996 - RNA, 16 nt, Human
cagucccccugcccca

SEQ ID NO: 1143997 - RNA, 17 nt, Human
cagucccccugccccag

SEQ ID NO: 1143998 - RNA, 16 nt, Human
cagugaaagaaaauaa

SEQ ID NO: 1143999 - RNA, 20 nt, Human
cagugaaagaaaauaacaau

SEQ ID NO: 1144000 - RNA, 15 nt, Human
cagugcccuccagga

SEQ ID NO: 1144001 - RNA, 18 nt, Human
cauagugaugguuccccu

SEQ ID NO: 1144002 - RNA, 19 nt, Human
cauagugaugguuccccug

SEQ ID NO: 1144003 - RNA, 22 nt, Human
cauagugaugguuccccuguuc

SEQ ID NO: 1144004 - RNA, 20 nt, Human
cauauaaauagaauguaaau

SEQ ID NO: 1144005 - RNA, 21 nt, Human
cauauaaauagaauguaaaug

SEQ ID NO: 1144006 - RNA, 22 nt, Human
cauauaaauagaauguaaaugu

SEQ ID NO: 1144007 - RNA, 19 nt, Human
cauauaagggaaguaguua

SEQ ID NO: 1144008 - RNA, 23 nt, Human
cauauaagggaaguaguuaucau

SEQ ID NO: 1144009 - RNA, 16 nt, Human
caucauucacuucacu

SEQ ID NO: 1144010 - RNA, 17 nt, Human
caucauucacuucacug

SEQ ID NO: 1144011 - RNA, 18 nt, Human
caucauucacuucacugu

SEQ ID NO: 1144012 - RNA, 20 nt, Human
caucauucacuucacugugc

SEQ ID NO: 1144013 - RNA, 19 nt, Human
caucauucacuucacugug

SEQ ID NO: 1144014 - RNA, 12 nt, Human
cauccauccagg

SEQ ID NO: 1144015 - RNA, 18 nt, Human
cauccuacaagacacagu

SEQ ID NO: 1144016 - RNA, 19 nt, Human
cauccuacaagacacagug

SEQ ID NO: 1144017 - RNA, 15 nt, Human
caugaagaccuuuuu

SEQ ID NO: 1144018 - RNA, 22 nt, Human
caugaagaccuuuuucugcacu

SEQ ID NO: 1144019 - RNA, 17 nt, Human
caugaagaccuuuuucu

SEQ ID NO: 1144020 - RNA, 19 nt, Human
caugaagaccuuuuucugc

SEQ ID NO: 1144021 - RNA, 20 nt, Human
caugaagaccuuuuucugca

SEQ ID NO: 1144022 - RNA, 20 nt, Human
caugacucguauaugucuca

SEQ ID NO: 1144023 - RNA, 23 nt, Human
caugacucguauaugucucaggu

SEQ ID NO: 1144024 - RNA, 20 nt, Human
caugcagaacaaaugaagac

SEQ ID NO: 1144025 - RNA, 19 nt, Human
caugcagaacaaaugaaga

SEQ ID NO: 1144026 - RNA, 14 nt, Human
caugcagcaucuaa

SEQ ID NO: 1144027 - RNA, 23 nt, Human
cauggaaacaagaugaaauucca

SEQ ID NO: 1144028 - RNA, 15 nt, Human
cauguacugcauuau

SEQ ID NO: 1144029 - RNA, 16 nt, Human
cauguacugcauuauu

SEQ ID NO: 1144030 - RNA, 17 nt, Human
cauguacugcauuauuu

SEQ ID NO: 1144031 - RNA, 22 nt, Human
cauguacugcauuauuugagaa

SEQ ID NO: 1144032 - RNA, 23 nt, Human
cauguacugcauuauuugagaag

SEQ ID NO: 1144033 - RNA, 14 nt, Human
caugucucgacuca

SEQ ID NO: 1144034 - RNA, 18 nt, Human
cauguguuggcagccucu

SEQ ID NO: 1144035 - RNA, 15 nt, Human
cauuaaacaugacuc

SEQ ID NO: 1144036 - RNA, 14 nt, Human
cauucaagauuccc

SEQ ID NO: 1144037 - RNA, 14 nt, Human
cauucacuucacug

SEQ ID NO: 1144038 - RNA, 17 nt, Human
cauucacuucacugugc

SEQ ID NO: 1144039 - RNA, 18 nt, Human
cauucacuucacugugcu

SEQ ID NO: 1144040 - RNA, 19 nt, Human
cauucacuucacugugcug

SEQ ID NO: 1144041 - RNA, 20 nt, Human
cauucacuucacugugcugu

SEQ ID NO: 1144042 - RNA, 17 nt, Human
cauuccaccuucccaug

SEQ ID NO: 1144043 - RNA, 22 nt, Human
cauuccaccuucccaugcccug

SEQ ID NO: 1144044 - RNA, 13 nt, Human
cauuccccauggg

SEQ ID NO: 1144045 - RNA, 17 nt, Human
cauuccccgucucuggu

SEQ ID NO: 1144046 - RNA, 18 nt, Human
cauuccucccauucaaga

SEQ ID NO: 1144047 - RNA, 19 nt, Human
cauuccucccauucaagau

SEQ ID NO: 1144048 - RNA, 13 nt, Human
cauucuggaauaa

SEQ ID NO: 1144049 - RNA, 12 nt, Human
cauucuucaaga

SEQ ID NO: 1144050 - RNA, 13 nt, Human
cauucuucaagau

SEQ ID NO: 1144051 - RNA, 17 nt, Human
cauucuucaagauccca

SEQ ID NO: 1144052 - RNA, 14 nt, Human
cauuuucugcaucu

SEQ ID NO: 1144053 - RNA, 16 nt, Human
cauuuucugcaucucc

SEQ ID NO: 1144054 - RNA, 17 nt, Human
cauuuucugcaucucca

SEQ ID NO: 1144055 - RNA, 23 nt, Human
ccaaaauuagccaguaauccugu

SEQ ID NO: 1144056 - RNA, 14 nt, Human
ccacacuccagcug

SEQ ID NO: 1144057 - RNA, 17 nt, Human
ccacacuccagcuggga

SEQ ID NO: 1144058 - RNA, 19 nt, Human
ccacauagugaugguuccc

SEQ ID NO: 1144059 - RNA, 21 nt, Human
ccacauagugaugguuccccu

SEQ ID NO: 1144060 - RNA, 22 nt, Human
ccacauagugaugguuccccug

SEQ ID NO: 1144061 - RNA, 23 nt, Human
ccacauagugaugguuccccugu

SEQ ID NO: 1144062 - RNA, 20 nt, Human
ccaccugacauuccuugcug

SEQ ID NO: 1144063 - RNA, 14 nt, Human
ccaccugcccaacc

SEQ ID NO: 1144064 - RNA, 17 nt, Human
ccacuccagaccccugg

SEQ ID NO: 1144065 - RNA, 19 nt, Human
ccacuccagaccccuggcu

SEQ ID NO: 1144066 - RNA, 20 nt, Human
ccacuccagaccccuggcuu

SEQ ID NO: 1144067 - RNA, 11 nt, Human
ccacugccucu

SEQ ID NO: 1144068 - RNA, 23 nt, Human
ccacuggcuggacaaacugcacc

SEQ ID NO: 1144069 - RNA, 16 nt, Human
ccacuggcuggacaaa

SEQ ID NO: 1144070 - RNA, 16 nt, Human
ccagcaauucuccugc

SEQ ID NO: 1144071 - RNA, 18 nt, Human
ccagcaauucuccugccu

SEQ ID NO: 1144072 - RNA, 19 nt, Human
ccagcaauucuccugccuc

SEQ ID NO: 1144073 - RNA, 20 nt, Human
ccagcaauucuccugccuca

SEQ ID NO: 1144074 - RNA, 21 nt, Human
ccagcaauucuccugccucag

SEQ ID NO: 1144075 - RNA, 21 nt, Human
ccagcccuccuuaucaaagga

SEQ ID NO: 1144076 - RNA, 21 nt, Human
ccagccuccaagcuccaucuc

SEQ ID NO: 1144077 - RNA, 15 nt, Human
ccagccuccaugcug

SEQ ID NO: 1144078 - RNA, 16 nt, Human
ccagccuccaugcugc

SEQ ID NO: 1144079 - RNA, 18 nt, Human
ccaggcgccccuuccccc

SEQ ID NO: 1144080 - RNA, 19 nt, Human
ccaggcgccccuucccccu

SEQ ID NO: 1144081 - RNA, 21 nt, Human
ccagggcuggaaugauuucag

SEQ ID NO: 1144082 - RNA, 12 nt, Human
ccauaggucacc

SEQ ID NO: 1144083 - RNA, 21 nt, Human
ccauaguaugggacuggccuc

SEQ ID NO: 1144084 - RNA, 14 nt, Human
ccaucuaaacugcc

SEQ ID NO: 1144085 - RNA, 15 nt, Human
ccaucuaaacugccc

SEQ ID NO: 1144086 - RNA, 16 nt, Human
ccaucuaaacugcccc

SEQ ID NO: 1144087 - RNA, 21 nt, Human
ccaugggaaaugucaacaagu

SEQ ID NO: 1144088 - RNA, 18 nt, Human
ccauguuggccaggcugc

SEQ ID NO: 1144089 - RNA, 21 nt, Human
ccauguuggccaggcugcucu

SEQ ID NO: 1144090 - RNA, 18 nt, Human
ccauguuggccaggcugg

SEQ ID NO: 1144091 - RNA, 13 nt, Human
ccauuuguucaua

SEQ ID NO: 1144092 - RNA, 15 nt, Human
cccaacccuggcacc

SEQ ID NO: 1144093 - RNA, 13 nt, Human
cccaaccugcucu

SEQ ID NO: 1144094 - RNA, 17 nt, Human
cccaaggcucugagcaa

SEQ ID NO: 1144095 - RNA, 23 nt, Human
cccaccgggcugggagcucugca

SEQ ID NO: 1144096 - RNA, 18 nt, Human
cccggugcccaagaauag

SEQ ID NO: 1144097 - RNA, 22 nt, Human
cccgucucugguuccuccccuc

SEQ ID NO: 1144098 - RNA, 17 nt, Human
cccuaaugcgcaggcug

SEQ ID NO: 1144099 - RNA, 21 nt, Human
cccuaaugcgcaggcuggccc

SEQ ID NO: 1144100 - RNA, 22 nt, Human
cccuaaugcgcaggcuggcccu

SEQ ID NO: 1144101 - RNA, 23 nt, Human
cccuaaugcgcaggcuggcccug

SEQ ID NO: 1144102 - RNA, 18 nt, Human
cccuaccgagucucuucu

SEQ ID NO: 1144103 - RNA, 21 nt, Human
cccuaccgagucucuucucca

SEQ ID NO: 1144104 - RNA, 22 nt, Human
cccuauccuacuuccccuuccu

SEQ ID NO: 1144105 - RNA, 13 nt, Human
cccucccccgucc

SEQ ID NO: 1144106 - RNA, 15 nt, Human
cccugcaaagcccag

SEQ ID NO: 1144107 - RNA, 16 nt, Human
cccugcaaagcccagc

SEQ ID NO: 1144108 - RNA, 17 nt, Human
cccugcaaagcccagcu

SEQ ID NO: 1144109 - RNA, 19 nt, Human
cccugcaaagcccagcuug

SEQ ID NO: 1144110 - RNA, 20 nt, Human
cccugcaaagcccagcuuga

SEQ ID NO: 1144111 - RNA, 17 nt, Human
cccugcuuugggcugcc

SEQ ID NO: 1144112 - RNA, 18 nt, Human
cccugcuuugggcugccc

SEQ ID NO: 1144113 - RNA, 19 nt, Human
cccugcuuugggcugcccu

SEQ ID NO: 1144114 - RNA, 20 nt, Human
cccugcuuugggcugcccug

SEQ ID NO: 1144115 - RNA, 22 nt, Human
cccugcuuugggcugcccuggu

SEQ ID NO: 1144116 - RNA, 18 nt, Human
cccuggcuuuucacugcu

SEQ ID NO: 1144117 - RNA, 19 nt, Human
cccuggcuuuucacugcug

SEQ ID NO: 1144118 - RNA, 22 nt, Human
cccuggcuuuucacugcuggcu

SEQ ID NO: 1144119 - RNA, 18 nt, Human
cccugggaggcagugaug

SEQ ID NO: 1144120 - RNA, 16 nt, Human
cccugguuuccugccc

SEQ ID NO: 1144121 - RNA, 17 nt, Human
cccugguuuccugcccu

SEQ ID NO: 1144122 - RNA, 18 nt, Human
cccugguuuccugcccug

SEQ ID NO: 1144123 - RNA, 19 nt, Human
cccugguuuccugcccugg

SEQ ID NO: 1144124 - RNA, 11 nt, Human
ccgcucagccc

SEQ ID NO: 1144125 - RNA, 12 nt, Human
ccgcucagcccu

SEQ ID NO: 1144126 - RNA, 13 nt, Human
ccgcucagcccuc

SEQ ID NO: 1144127 - RNA, 15 nt, Human
ccgcucagcccuccc

SEQ ID NO: 1144128 - RNA, 19 nt, Human
ccgcucagcccucccugcc

SEQ ID NO: 1144129 - RNA, 21 nt, Human
ccgcucagcccucccugcccc

SEQ ID NO: 1144130 - RNA, 22 nt, Human
ccgcucagcccucccugccccu

SEQ ID NO: 1144131 - RNA, 13 nt, Human
ccgggacccccag

SEQ ID NO: 1144132 - RNA, 15 nt, Human
ccgggacccccagga

SEQ ID NO: 1144133 - RNA, 17 nt, Human
ccgggacccccaggaca

SEQ ID NO: 1144134 - RNA, 13 nt, Human
ccgggcugggagc

SEQ ID NO: 1144135 - RNA, 18 nt, Human
ccgggcugggagcucugc

SEQ ID NO: 1144136 - RNA, 19 nt, Human
ccgggcugggagcucugca

SEQ ID NO: 1144137 - RNA, 15 nt, Human
ccuacaagacacagu

SEQ ID NO: 1144138 - RNA, 22 nt, Human
ccuaccgagucucuucuccacu

SEQ ID NO: 1144139 - RNA, 23 nt, Human
ccuaccgagucucuucuccacug

SEQ ID NO: 1144140 - RNA, 13 nt, Human
ccuacuuccugug

SEQ ID NO: 1144141 - RNA, 15 nt, Human
ccuacuuccugugac

SEQ ID NO: 1144142 - RNA, 22 nt, Human
ccuaugauguauacugccacua

SEQ ID NO: 1144143 - RNA, 19 nt, Human
ccuaugcagagguccacaa

SEQ ID NO: 1144144 - RNA, 17 nt, Human
ccucauagcccucaccc

SEQ ID NO: 1144145 - RNA, 18 nt, Human
ccucauagcccucacccu

SEQ ID NO: 1144146 - RNA, 21 nt, Human
ccucauagcccucacccuggg

SEQ ID NO: 1144147 - RNA, 22 nt, Human
ccucauagcccucacccugggg

SEQ ID NO: 1144148 - RNA, 23 nt, Human
ccuccaaucccaccaacccucag

SEQ ID NO: 1144149 - RNA, 18 nt, Human
ccuccaucuaaacugccc

SEQ ID NO: 1144150 - RNA, 14 nt, Human
ccuccaugcugccu

SEQ ID NO: 1144151 - RNA, 15 nt, Human
ccuccaugcugccuc

SEQ ID NO: 1144152 - RNA, 16 nt, Human
ccuccaugcugccucc

SEQ ID NO: 1144153 - RNA, 18 nt, Human
ccucccugccccucccuu

SEQ ID NO: 1144154 - RNA, 21 nt, Human
ccucccugccccucccuucaa

SEQ ID NO: 1144155 - RNA, 22 nt, Human
ccucccugccccucccuucaac

SEQ ID NO: 1144156 - RNA, 24 nt, Human
ccucccugccccucccuucaacca

SEQ ID NO: 1144157 - RNA, 16 nt, Human
ccugacagaaggacuc

SEQ ID NO: 1144158 - RNA, 17 nt, Human
ccugacauuccuugcug

SEQ ID NO: 1144159 - RNA, 18 nt, Human
ccugacauuccuugcuga

SEQ ID NO: 1144160 - RNA, 20 nt, Human
ccugcacaaagcccuuccau

SEQ ID NO: 1144161 - RNA, 15 nt, Human
ccugcagggccaagc

SEQ ID NO: 1144162 - RNA, 18 nt, Human
ccugcaguacuuuaccuc

SEQ ID NO: 1144163 - RNA, 20 nt, Human
ccugcaguacuuuaccuccu

SEQ ID NO: 1144164 - RNA, 14 nt, Human
ccugccccccagcc

SEQ ID NO: 1144165 - RNA, 14 nt, Human
ccugccccucccuu

SEQ ID NO: 1144166 - RNA, 20 nt, Human
ccugccuuuuaguuccugug

SEQ ID NO: 1144167 - RNA, 22 nt, Human
ccugccuuuuaguuccugugca

SEQ ID NO: 1144168 - RNA, 18 nt, Human
ccugcgggucacaggagg

SEQ ID NO: 1144169 - RNA, 22 nt, Human
ccugcgggucacaggagggagg

SEQ ID NO: 1144170 - RNA, 16 nt, Human
ccugcucuccucuugc

SEQ ID NO: 1144171 - RNA, 18 nt, Human
ccugcucuccucuugcca

SEQ ID NO: 1144172 - RNA, 19 nt, Human
ccugcucuccucuugccac

SEQ ID NO: 1144173 - RNA, 21 nt, Human
ccugcucuccucuugccacug

SEQ ID NO: 1144174 - RNA, 22 nt, Human
ccugcucuccucuugccacugc

SEQ ID NO: 1144175 - RNA, 15 nt, Human
ccugcugagucccag

SEQ ID NO: 1144176 - RNA, 20 nt, Human
ccugcuuugggcugcccugg

SEQ ID NO: 1144177 - RNA, 21 nt, Human
ccugcuuugggcugcccuggu

SEQ ID NO: 1144178 - RNA, 22 nt, Human
ccugcuuugggcugcccuggug

SEQ ID NO: 1144179 - RNA, 23 nt, Human
ccugcuuugggcugcccuggugc

SEQ ID NO: 1144180 - RNA, 22 nt, Human
ccuggcagccgugccuucagcu

SEQ ID NO: 1144181 - RNA, 17 nt, Human
ccuggcucccacaggcc

SEQ ID NO: 1144182 - RNA, 23 nt, Human
ccuggcucccacaggcccuuccu

SEQ ID NO: 1144183 - RNA, 20 nt, Human
ccuggcuuuucacugcuggc

SEQ ID NO: 1144184 - RNA, 21 nt, Human
ccuggcuuuucacugcuggcu

SEQ ID NO: 1144185 - RNA, 22 nt, Human
ccuggcuuuucacugcuggcug

SEQ ID NO: 1144186 - RNA, 23 nt, Human
ccuggcuuuucacugcuggcugc

SEQ ID NO: 1144187 - RNA, 24 nt, Human
ccuggcuuuucacugcuggcugcc

SEQ ID NO: 1144188 - RNA, 18 nt, Human
ccuggggguucuuucuuc

SEQ ID NO: 1144189 - RNA, 21 nt, Human
ccuggggguucuuucuuccuc

SEQ ID NO: 1144190 - RNA, 22 nt, Human
ccuggggguucuuucuuccucu

SEQ ID NO: 1144191 - RNA, 23 nt, Human
ccuggggguucuuucuuccucug

SEQ ID NO: 1144192 - RNA, 21 nt, Human
ccuggucacaggacucugccu

SEQ ID NO: 1144193 - RNA, 22 nt, Human
ccuggucacaggacucugccuc

SEQ ID NO: 1144194 - RNA, 23 nt, Human
ccuggucacaggacucugccucc

SEQ ID NO: 1144195 - RNA, 21 nt, Human
ccuguuuauucauaugcauau

SEQ ID NO: 1144196 - RNA, 19 nt, Human
ccuuaaacaguugcacagc

SEQ ID NO: 1144197 - RNA, 20 nt, Human
ccuuaaacaguugcacagca

SEQ ID NO: 1144198 - RNA, 17 nt, Human
ccuuaccacugcucuga

SEQ ID NO: 1144199 - RNA, 20 nt, Human
ccuuaccacugcucugauga

SEQ ID NO: 1144200 - RNA, 14 nt, Human
ccuucacuuaggaa

SEQ ID NO: 1144201 - RNA, 15 nt, Human
ccuuccucugagccu

SEQ ID NO: 1144202 - RNA, 16 nt, Human
ccuuccucugagccuu

SEQ ID NO: 1144203 - RNA, 20 nt, Human
ccuuccucugagccuuggga

SEQ ID NO: 1144204 - RNA, 13 nt, Human
ccuuccucugagg

SEQ ID NO: 1144205 - RNA, 14 nt, Human
ccuuccucugaggc

SEQ ID NO: 1144206 - RNA, 15 nt, Human
ccuucgauacaccgg

SEQ ID NO: 1144207 - RNA, 14 nt, Human
ccuucuguggcuca

SEQ ID NO: 1144208 - RNA, 21 nt, Human
ccuucuguggcucacagaacc

SEQ ID NO: 1144209 - RNA, 14 nt, Human
ccuugaagguauau

SEQ ID NO: 1144210 - RNA, 12 nt, Human
ccuugggacccc

SEQ ID NO: 1144211 - RNA, 14 nt, Human
ccuuguccccauga

SEQ ID NO: 1144212 - RNA, 22 nt, Human
ccuuuuaguuccugugcacagc

SEQ ID NO: 1144213 - RNA, 16 nt, Human
ccuuuuaguuccugug

SEQ ID NO: 1144214 - RNA, 14 nt, Human
cgaacuccugaccu

SEQ ID NO: 1144215 - RNA, 19 nt, Human
cgacuguuguuaucuguuu

SEQ ID NO: 1144216 - RNA, 11 nt, Human
cgacuguuguu

SEQ ID NO: 1144217 - RNA, 10 nt, Human
cgcagcccug

SEQ ID NO: 1144218 - RNA, 12 nt, Human
cuagguuuauga

SEQ ID NO: 1144219 - RNA, 16 nt, Human
cuagguuuaugacagu

SEQ ID NO: 1144220 - RNA, 20 nt, Human
cuauauugcugaaugcaaga

SEQ ID NO: 1144221 - RNA, 20 nt, Human
cuaugcagagguccacaaca

SEQ ID NO: 1144222 - RNA, 19 nt, Human
cuauugucaccagggcugg

SEQ ID NO: 1144223 - RNA, 22 nt, Human
cuauuuaugugauccuuuugga

SEQ ID NO: 1144224 - RNA, 13 nt, Human
cucacuccuaccu

SEQ ID NO: 1144225 - RNA, 15 nt, Human
cucacuccuaccugg

SEQ ID NO: 1144226 - RNA, 16 nt, Human
cucacuccuaccuggu

SEQ ID NO: 1144227 - RNA, 17 nt, Human
cucacuccuaccuggua

SEQ ID NO: 1144228 - RNA, 19 nt, Human
cucacuccuaccugguaau

SEQ ID NO: 1144229 - RNA, 15 nt, Human
cucacugagcacugu

SEQ ID NO: 1144230 - RNA, 16 nt, Human
cucacugagcacuguu

SEQ ID NO: 1144231 - RNA, 18 nt, Human
cucacugagcacuguuuu

SEQ ID NO: 1144232 - RNA, 17 nt, Human
cucacugagcacuguuu

SEQ ID NO: 1144233 - RNA, 19 nt, Human
cucagcccacauagugaug

SEQ ID NO: 1144234 - RNA, 21 nt, Human
cucagcccacauagugauggu

SEQ ID NO: 1144235 - RNA, 13 nt, Human
cucauagcccuca

SEQ ID NO: 1144236 - RNA, 17 nt, Human
cucauagcccucacccu

SEQ ID NO: 1144237 - RNA, 20 nt, Human
cucauagcccucacccuggg

SEQ ID NO: 1144238 - RNA, 21 nt, Human
cucauagcccucacccugggg

SEQ ID NO: 1144239 - RNA, 19 nt, Human
cuccaaaacuucguuuaau

SEQ ID NO: 1144240 - RNA, 22 nt, Human
cuccaaucccaccaacccucag

SEQ ID NO: 1144241 - RNA, 12 nt, Human
cuccccuccucc

SEQ ID NO: 1144242 - RNA, 20 nt, Human
cuccccuccuccuggacucc

SEQ ID NO: 1144243 - RNA, 15 nt, Human
cucccggugcccaag

SEQ ID NO: 1144244 - RNA, 21 nt, Human
cucccggugcccaagaauaga

SEQ ID NO: 1144245 - RNA, 17 nt, Human
cucccugccccccagcc

SEQ ID NO: 1144246 - RNA, 23 nt, Human
cucccugccccccagcccuccuu

SEQ ID NO: 1144247 - RNA, 13 nt, Human
cucccugccccuc

SEQ ID NO: 1144248 - RNA, 14 nt, Human
cucccugccccucc

SEQ ID NO: 1144249 - RNA, 17 nt, Human
cucccugccccucccuu

SEQ ID NO: 1144250 - RNA, 18 nt, Human
cucccugccccucccuuc

SEQ ID NO: 1144251 - RNA, 20 nt, Human
cucccugccccucccuucaa

SEQ ID NO: 1144252 - RNA, 21 nt, Human
cucccugccccucccuucaac

SEQ ID NO: 1144253 - RNA, 19 nt, Human
cucccuuggggccuaugca

SEQ ID NO: 1144254 - RNA, 17 nt, Human
cuccucccaggcgcccc

SEQ ID NO: 1144255 - RNA, 22 nt, Human
cuccucccaggcgccccuuccc

SEQ ID NO: 1144256 - RNA, 23 nt, Human
cuccucccaggcgccccuucccc

SEQ ID NO: 1144257 - RNA, 14 nt, Human
cuccuccuggacuc

SEQ ID NO: 1144258 - RNA, 15 nt, Human
cuccuccuggacucc

SEQ ID NO: 1144259 - RNA, 19 nt, Human
cuccuccuggacuccugca

SEQ ID NO: 1144260 - RNA, 11 nt, Human
cuccugccuca

SEQ ID NO: 1144261 - RNA, 12 nt, Human
cuccugccucag

SEQ ID NO: 1144262 - RNA, 13 nt, Human
cuccugccucagc

SEQ ID NO: 1144263 - RNA, 19 nt, Human
cuccugccucagccucccg

SEQ ID NO: 1144264 - RNA, 11 nt, Human
cuccuggacuc

SEQ ID NO: 1144265 - RNA, 12 nt, Human
cuccuggacucc

SEQ ID NO: 1144266 - RNA, 17 nt, Human
cuccuuaucaaaggaca

SEQ ID NO: 1144267 - RNA, 22 nt, Human
cuccuuaucaaaggacaccauu

SEQ ID NO: 1144268 - RNA, 17 nt, Human
cucgaggucgggcagca

SEQ ID NO: 1144269 - RNA, 15 nt, Human
cucgccuucaucucc

SEQ ID NO: 1144270 - RNA, 23 nt, Human
cucgcucugucgcccaggcugga

SEQ ID NO: 1144271 - RNA, 16 nt, Human
cucugacaacagacuu

SEQ ID NO: 1144272 - RNA, 21 nt, Human
cucugacaacagacuucugaa

SEQ ID NO: 1144273 - RNA, 22 nt, Human
cucugacaacagacuucugaaa

SEQ ID NO: 1144274 - RNA, 20 nt, Human
cucugcccuaaugcgcaggc

SEQ ID NO: 1144275 - RNA, 22 nt, Human
cucugcccuaaugcgcaggcug

SEQ ID NO: 1144276 - RNA, 15 nt, Human
cucugucgcccaggc

SEQ ID NO: 1144277 - RNA, 18 nt, Human
cucugucgcccaggcugg

SEQ ID NO: 1144278 - RNA, 22 nt, Human
cucugucgcccaggcuggagug

SEQ ID NO: 1144279 - RNA, 12 nt, Human
cucuucuccacu

SEQ ID NO: 1144280 - RNA, 13 nt, Human
cucuucuccacug

SEQ ID NO: 1144281 - RNA, 13 nt, Human
cugaagucacugc

SEQ ID NO: 1144282 - RNA, 14 nt, Human
cugaagucacugca

SEQ ID NO: 1144283 - RNA, 15 nt, Human
cugaagucacugcac

SEQ ID NO: 1144284 - RNA, 16 nt, Human
cugaagucacugcaca

SEQ ID NO: 1144285 - RNA, 14 nt, Human
cugaaugcucugua

SEQ ID NO: 1144286 - RNA, 17 nt, Human
cugaccagccuccaugc

SEQ ID NO: 1144287 - RNA, 21 nt, Human
cugaccagccuccaugcugcc

SEQ ID NO: 1144288 - RNA, 23 nt, Human
cugaccagccuccaugcugccuc

SEQ ID NO: 1144289 - RNA, 17 nt, Human
cugacuguacuccuccc

SEQ ID NO: 1144290 - RNA, 23 nt, Human
cugagauuauaggcaccuaccac

SEQ ID NO: 1144291 - RNA, 15 nt, Human
cugagcaaauguggc

SEQ ID NO: 1144292 - RNA, 17 nt, Human
cugagcaaauguggcuc

SEQ ID NO: 1144293 - RNA, 20 nt, Human
cugagcaaauguggcuccug

SEQ ID NO: 1144294 - RNA, 21 nt, Human
cugagcaaauguggcuccugg

SEQ ID NO: 1144295 - RNA, 12 nt, Human
cugagcacuguu

SEQ ID NO: 1144296 - RNA, 13 nt, Human
cugagcacuguuu

SEQ ID NO: 1144297 - RNA, 14 nt, Human
cugagcacuguuuu

SEQ ID NO: 1144298 - RNA, 15 nt, Human
cugagcacuguuuuc

SEQ ID NO: 1144299 - RNA, 23 nt, Human
cugagcacuguuuucuaguguau

SEQ ID NO: 1144300 - RNA, 21 nt, Human
cugagcacuguuuucuagugu

SEQ ID NO: 1144301 - RNA, 20 nt, Human
cugagucccaggcugagccu

SEQ ID NO: 1144302 - RNA, 15 nt, Human
cugaucaccugcccu

SEQ ID NO: 1144303 - RNA, 13 nt, Human
cugcaaagcccag

SEQ ID NO: 1144304 - RNA, 15 nt, Human
cugcaaagcccagcu

SEQ ID NO: 1144305 - RNA, 17 nt, Human
cugcaaagcccagcuug

SEQ ID NO: 1144306 - RNA, 18 nt, Human
cugcaauacaaguuucau

SEQ ID NO: 1144307 - RNA, 13 nt, Human
cugcacacagcac

SEQ ID NO: 1144308 - RNA, 14 nt, Human
cugcacacagcacg

SEQ ID NO: 1144309 - RNA, 20 nt, Human
cugcacacgcuccuuccucu

SEQ ID NO: 1144310 - RNA, 22 nt, Human
cugcacacgcuccuuccucuga

SEQ ID NO: 1144311 - RNA, 19 nt, Human
cugcauccuccgccucccg

SEQ ID NO: 1144312 - RNA, 20 nt, Human
cugcauccuccgccucccgg

SEQ ID NO: 1144313 - RNA, 17 nt, Human
cugcccagccuccaagc

SEQ ID NO: 1144314 - RNA, 21 nt, Human
cugccccuccucucugcccua

SEQ ID NO: 1144315 - RNA, 17 nt, Human
cugccucagccucccga

SEQ ID NO: 1144316 - RNA, 14 nt, Human
cugccuccagaaug

SEQ ID NO: 1144317 - RNA, 22 nt, Human
cugccuccagaauggucuuucu

SEQ ID NO: 1144318 - RNA, 17 nt, Human
cugccuuuuaguuccug

SEQ ID NO: 1144319 - RNA, 19 nt, Human
cugccuuuuaguuccugug

SEQ ID NO: 1144320 - RNA, 20 nt, Human
cugccuuuuaguuccugugc

SEQ ID NO: 1144321 - RNA, 23 nt, Human
cugccuuuuaguuccugugcaca

SEQ ID NO: 1144322 - RNA, 21 nt, Human
cugccuuuuaguuccugugca

SEQ ID NO: 1144323 - RNA, 16 nt, Human
cugcggccccuccccc

SEQ ID NO: 1144324 - RNA, 18 nt, Human
cugggauuacaggcguga

SEQ ID NO: 1144325 - RNA, 20 nt, Human
cuggggguucuuucuuccuc

SEQ ID NO: 1144326 - RNA, 23 nt, Human
cuggggguucuuucuuccucugc

SEQ ID NO: 1144327 - RNA, 14 nt, Human
cuguacuccuccca

SEQ ID NO: 1144328 - RNA, 15 nt, Human
cuguacuccucccag

SEQ ID NO: 1144329 - RNA, 16 nt, Human
cuguacuccucccagg

SEQ ID NO: 1144330 - RNA, 19 nt, Human
cuguacuccucccaggcgc

SEQ ID NO: 1144331 - RNA, 21 nt, Human
cuguacuccucccaggcgccc

SEQ ID NO: 1144332 - RNA, 17 nt, Human
cuguauuagucacagag

SEQ ID NO: 1144333 - RNA, 19 nt, Human
cuguauuagucacagagau

SEQ ID NO: 1144334 - RNA, 12 nt, Human
cugugccucugc

SEQ ID NO: 1144335 - RNA, 13 nt, Human
cugugccucugcc

SEQ ID NO: 1144336 - RNA, 14 nt, Human
cugugccucugccu

SEQ ID NO: 1144337 - RNA, 15 nt, Human
cugugccucugccug

SEQ ID NO: 1144338 - RNA, 16 nt, Human
cugugccucugccugu

SEQ ID NO: 1144339 - RNA, 17 nt, Human
cugugccucugccuguc

SEQ ID NO: 1144340 - RNA, 12 nt, Human
cuguuugagaaa

SEQ ID NO: 1144341 - RNA, 13 nt, Human
cuguuugagaaag

SEQ ID NO: 1144342 - RNA, 22 nt, Human
cuguuuuacaaaaaagaaaaga

SEQ ID NO: 1144343 - RNA, 15 nt, Human
cuguuuucuagugua

SEQ ID NO: 1144344 - RNA, 17 nt, Human
cuguuuucuaguguauc

SEQ ID NO: 1144345 - RNA, 18 nt, Human
cuguuuucuaguguauca

SEQ ID NO: 1144346 - RNA, 20 nt, Human
cuguuuucuaguguaucaaa

SEQ ID NO: 1144347 - RNA, 22 nt, Human
cuguuuucuaguguaucaaaau

SEQ ID NO: 1144348 - RNA, 19 nt, Human
cuuaacagggaacgugauu

SEQ ID NO: 1144349 - RNA, 18 nt, Human
cuuaagaauuuugagcag

SEQ ID NO: 1144350 - RNA, 16 nt, Human
cuuagaaauugcauuu

SEQ ID NO: 1144351 - RNA, 18 nt, Human
cuuagaaguuuguuguga

SEQ ID NO: 1144352 - RNA, 13 nt, Human
cuuaguauugcaa

SEQ ID NO: 1144353 - RNA, 17 nt, Human
cuucaacugaccagccu

SEQ ID NO: 1144354 - RNA, 20 nt, Human
cuucaacugaccagccucca

SEQ ID NO: 1144355 - RNA, 23 nt, Human
cuucaacugaccagccuccaugc

SEQ ID NO: 1144356 - RNA, 18 nt, Human
cuucaagaucccauuuga

SEQ ID NO: 1144357 - RNA, 21 nt, Human
cuucaauuuauaccucaauuu

SEQ ID NO: 1144358 - RNA, 14 nt, Human
cuuccaaaaauuac

SEQ ID NO: 1144359 - RNA, 12 nt, Human
cuucccccucca

SEQ ID NO: 1144360 - RNA, 15 nt, Human
cuucccccuccaauc

SEQ ID NO: 1144361 - RNA, 13 nt, Human
cuuccugugacuu

SEQ ID NO: 1144362 - RNA, 16 nt, Human
cuuccugugacuucag

SEQ ID NO: 1144363 - RNA, 21 nt, Human
cuucgauacaccgggccugga

SEQ ID NO: 1144364 - RNA, 14 nt, Human
cuucgccaccuggg

SEQ ID NO: 1144365 - RNA, 15 nt, Human
cuucgccaccugggu

SEQ ID NO: 1144366 - RNA, 14 nt, Human
cuugccacugccuc

SEQ ID NO: 1144367 - RNA, 15 nt, Human
cuugccacugccucu

SEQ ID NO: 1144368 - RNA, 19 nt, Human
cuuguaaaggaauuuaaaa

SEQ ID NO: 1144369 - RNA, 14 nt, Human
cuuguuuucuggga

SEQ ID NO: 1144370 - RNA, 19 nt, Human
cuuguuuuuuuuuuccacu

SEQ ID NO: 1144371 - RNA, 20 nt, Human
cuuguuuuuuuuuuccacuu

SEQ ID NO: 1144372 - RNA, 21 nt, Human
cuuguuuuuuuuuuccacuua

SEQ ID NO: 1144373 - RNA, 20 nt, Human
cuuuauucuggcagaggagg

SEQ ID NO: 1144374 - RNA, 21 nt, Human
cuuuauuuucuauaauuuaaa

SEQ ID NO: 1144375 - RNA, 17 nt, Human
cuuuucacugcuggcug

SEQ ID NO: 1144376 - RNA, 18 nt, Human
cuuuucacugcuggcugc

SEQ ID NO: 1144377 - RNA, 20 nt, Human
cuuuucacugcuggcugccu

SEQ ID NO: 1144378 - RNA, 14 nt, Human
cuuuucccuucuuu

SEQ ID NO: 1144379 - RNA, 22 nt, Human
gaaaacaauaacgauaaaagac

SEQ ID NO: 1144380 - RNA, 14 nt, Human
gaaaacaugcagaa

SEQ ID NO: 1144381 - RNA, 18 nt, Human
gaaaaccaagccguggcu

SEQ ID NO: 1144382 - RNA, 19 nt, Human
gaaaaccaagccguggcuu

SEQ ID NO: 1144383 - RNA, 21 nt, Human
gaaaaccaagccguggcuucc

SEQ ID NO: 1144384 - RNA, 19 nt, Human
gaaaauaacgauaaaagac

SEQ ID NO: 1144385 - RNA, 19 nt, Human
gaaaaucuuauaauuuaaa

SEQ ID NO: 1144386 - RNA, 20 nt, Human
gaaaaucuuauaauuuaaaa

SEQ ID NO: 1144387 - RNA, 22 nt, Human
gaaacacugggcuucuagaacc

SEQ ID NO: 1144388 - RNA, 15 nt, Human
gaaacagcucgacuu

SEQ ID NO: 1144389 - RNA, 20 nt, Human
gaaacagcucgacuuuaaaa

SEQ ID NO: 1144390 - RNA, 20 nt, Human
gaaacaugacucguauaugu

SEQ ID NO: 1144391 - RNA, 19 nt, Human
gaaauugcauuuccugaca

SEQ ID NO: 1144392 - RNA, 11 nt, Human
gaaccugaccc

SEQ ID NO: 1144393 - RNA, 12 nt, Human
gaaccugacccc

SEQ ID NO: 1144394 - RNA, 22 nt, Human
gaacgugauuagugaaaggaag

SEQ ID NO: 1144395 - RNA, 23 nt, Human
gaacguuuagcugacaaaauacu

SEQ ID NO: 1144396 - RNA, 20 nt, Human
gaacguuuagcugacaaaau

SEQ ID NO: 1144397 - RNA, 21 nt, Human
gaacuuguaaaggaauuuaaa

SEQ ID NO: 1144398 - RNA, 22 nt, Human
gaacuuguaaaggaauuuaaaa

SEQ ID NO: 1144399 - RNA, 10 nt, Human
gaagccuuug

SEQ ID NO: 1144400 - RNA, 11 nt, Human
gaagccuuugu

SEQ ID NO: 1144401 - RNA, 13 nt, Human
gaaggcagggagg

SEQ ID NO: 1144402 - RNA, 14 nt, Human
gaaggcagggaggg

SEQ ID NO: 1144403 - RNA, 18 nt, Human
gaaggcagggagggccug

SEQ ID NO: 1144404 - RNA, 13 nt, Human
gaagguacuguau

SEQ ID NO: 1144405 - RNA, 14 nt, Human
gaauaaagacaccu

SEQ ID NO: 1144406 - RNA, 15 nt, Human
gaauaaauugcuccu

SEQ ID NO: 1144407 - RNA, 14 nt, Human
gaauacuuuauaaa

SEQ ID NO: 1144408 - RNA, 15 nt, Human
gaauagaugcugacu

SEQ ID NO: 1144409 - RNA, 15 nt, Human
gaaugcuguauaugu

SEQ ID NO: 1144410 - RNA, 22 nt, Human
gagcacuguuuucuaguguauc

SEQ ID NO: 1144411 - RNA, 14 nt, Human
gagcacuguuuucu

SEQ ID NO: 1144412 - RNA, 14 nt, Human
gagccaccgugccu

SEQ ID NO: 1144413 - RNA, 20 nt, Human
gagccaccgugccuggccac

SEQ ID NO: 1144414 - RNA, 18 nt, Human
gagccucagucucccucc

SEQ ID NO: 1144415 - RNA, 12 nt, Human
gagcuacaaaug

SEQ ID NO: 1144416 - RNA, 13 nt, Human
gagcuacaaaugc

SEQ ID NO: 1144417 - RNA, 14 nt, Human
gagcuacaaaugca

SEQ ID NO: 1144418 - RNA, 16 nt, Human
gagcucugcagagcag

SEQ ID NO: 1144419 - RNA, 15 nt, Human
gagcuuaacagugug

SEQ ID NO: 1144420 - RNA, 14 nt, Human
gagcuucuggcacu

SEQ ID NO: 1144421 - RNA, 18 nt, Human
gagcuucuguugcugccu

SEQ ID NO: 1144422 - RNA, 21 nt, Human
gagcuucuguugcugccucau

SEQ ID NO: 1144423 - RNA, 13 nt, Human
gaggcccggccuc

SEQ ID NO: 1144424 - RNA, 12 nt, Human
gagggcacuggu

SEQ ID NO: 1144425 - RNA, 16 nt, Human
gagggcacugguggcc

SEQ ID NO: 1144426 - RNA, 18 nt, Human
gagggcacugguggcccg

SEQ ID NO: 1144427 - RNA, 13 nt, Human
gaggggccuggca

SEQ ID NO: 1144428 - RNA, 14 nt, Human
gaggggccuggcag

SEQ ID NO: 1144429 - RNA, 18 nt, Human
gaggggccuggcagccgu

SEQ ID NO: 1144430 - RNA, 20 nt, Human
gaggggccuggcagccgugc

SEQ ID NO: 1144431 - RNA, 18 nt, Human
gagguccacaacacacag

SEQ ID NO: 1144432 - RNA, 18 nt, Human
gagucccaggcugagccu

SEQ ID NO: 1144433 - RNA, 19 nt, Human
gagucccaggcugagccuc

SEQ ID NO: 1144434 - RNA, 23 nt, Human
gagucucgcuauugucaccaggg

SEQ ID NO: 1144435 - RNA, 12 nt, Human
gagucucuucuc

SEQ ID NO: 1144436 - RNA, 14 nt, Human
gagucucuucucca

SEQ ID NO: 1144437 - RNA, 15 nt, Human
gagucucuucuccac

SEQ ID NO: 1144438 - RNA, 16 nt, Human
gagucucuucuccacu

SEQ ID NO: 1144439 - RNA, 17 nt, Human
gagucucuucuccacug

SEQ ID NO: 1144440 - RNA, 18 nt, Human
gagucucuucuccacugg

SEQ ID NO: 1144441 - RNA, 13 nt, Human
gaguggcuccucc

SEQ ID NO: 1144442 - RNA, 15 nt, Human
gaguggcuccucccg

SEQ ID NO: 1144443 - RNA, 21 nt, Human
gaguugaaaaucuuauaauuu

SEQ ID NO: 1144444 - RNA, 23 nt, Human
gauagauaggucagugcaaauac

SEQ ID NO: 1144445 - RNA, 15 nt, Human
gauccuuuuggaguc

SEQ ID NO: 1144446 - RNA, 17 nt, Human
gauccuuuuggagucag

SEQ ID NO: 1144447 - RNA, 22 nt, Human
gaugggacaauuagauaaaugu

SEQ ID NO: 1144448 - RNA, 19 nt, Human
gaugugcuuguuaacugag

SEQ ID NO: 1144449 - RNA, 20 nt, Human
gaugugcuuguuaacugagu

SEQ ID NO: 1144450 - RNA, 13 nt, Human
gaugugcuuaaca

SEQ ID NO: 1144451 - RNA, 14 nt, Human
gaugugcuuaacag

SEQ ID NO: 1144452 - RNA, 24 nt, Human
gauugaccguguuggucuguacug

SEQ ID NO: 1144453 - RNA, 14 nt, Human
gauuggacaaaaug

SEQ ID NO: 1144454 - RNA, 15 nt, Human
gauuggacaaaauga

SEQ ID NO: 1144455 - RNA, 13 nt, Human
gcacagcaucuca

SEQ ID NO: 1144456 - RNA, 18 nt, Human
gcacagcaucucagcuca

SEQ ID NO: 1144457 - RNA, 16 nt, Human
gcacagggcaguggga

SEQ ID NO: 1144458 - RNA, 19 nt, Human
gcacuguuuucuaguguau

SEQ ID NO: 1144459 - RNA, 20 nt, Human
gcacuguuuucuaguguauc

SEQ ID NO: 1144460 - RNA, 21 nt, Human
gcacuguuuucuaguguauca

SEQ ID NO: 1144461 - RNA, 22 nt, Human
gcacuguuuucuaguguaucaa

SEQ ID NO: 1144462 - RNA, 23 nt, Human
gcacuguuuucuaguguaucaaa

SEQ ID NO: 1144463 - RNA, 21 nt, Human
gcagagguccacaacacacag

SEQ ID NO: 1144464 - RNA, 18 nt, Human
gcagauguccuugaugcu

SEQ ID NO: 1144465 - RNA, 24 nt, Human
gcagcccugcuuugggcugcccug

SEQ ID NO: 1144466 - RNA, 14 nt, Human
gcagccgugccuuc

SEQ ID NO: 1144467 - RNA, 21 nt, Human
gcagugggacagggcauggcc

SEQ ID NO: 1144468 - RNA, 15 nt, Human
gcaucagugcccucc

SEQ ID NO: 1144469 - RNA, 23 nt, Human
gcaucagugcccuccaggauaga

SEQ ID NO: 1144470 - RNA, 22 nt, Human
gcaucuaguuccccuguuuauu

SEQ ID NO: 1144471 - RNA, 20 nt, Human
gcaucuaguuccccuguuua

SEQ ID NO: 1144472 - RNA, 12 nt, Human
gcaucucagccc

SEQ ID NO: 1144473 - RNA, 13 nt, Human
gcaucucagccca

SEQ ID NO: 1144474 - RNA, 14 nt, Human
gcaucucagcccac

SEQ ID NO: 1144475 - RNA, 15 nt, Human
gcaucucagcccaca

SEQ ID NO: 1144476 - RNA, 14 nt, Human
gcaucucagcucau

SEQ ID NO: 1144477 - RNA, 22 nt, Human
gcaucucagcucaucuucacug

SEQ ID NO: 1144478 - RNA, 12 nt, Human
gcauuugugaaa

SEQ ID NO: 1144479 - RNA, 16 nt, Human
gccaauaaaccaauga

SEQ ID NO: 1144480 - RNA, 19 nt, Human
gccaauaaaccaaugaacg

SEQ ID NO: 1144481 - RNA, 22 nt, Human
gccaauaaaccaaugaacgaag

SEQ ID NO: 1144482 - RNA, 20 nt, Human
gccaauaauaauaccucccu

SEQ ID NO: 1144483 - RNA, 16 nt, Human
gccaauggagacuguc

SEQ ID NO: 1144484 - RNA, 19 nt, Human
gccaauggagacugucuca

SEQ ID NO: 1144485 - RNA, 21 nt, Human
gccaauggagacugucucaag

SEQ ID NO: 1144486 - RNA, 17 nt, Human
gccacacgagaaccuga

SEQ ID NO: 1144487 - RNA, 20 nt, Human
gccacacuucaggcucuucu

SEQ ID NO: 1144488 - RNA, 22 nt, Human
gccacacuucaggcucuucucc

SEQ ID NO: 1144489 - RNA, 23 nt, Human
gccacacuucaggcucuucuccu

SEQ ID NO: 1144490 - RNA, 17 nt, Human
gccaccgugccuggcca

SEQ ID NO: 1144491 - RNA, 22 nt, Human
gccaccgugccuggccacgccc

SEQ ID NO: 1144492 - RNA, 11 nt, Human
gccaccugggu

SEQ ID NO: 1144493 - RNA, 20 nt, Human
gccacgcccaacuaauuuuu

SEQ ID NO: 1144494 - RNA, 13 nt, Human
gccaggcugcucu

SEQ ID NO: 1144495 - RNA, 14 nt, Human
gccaggcugcucuu

SEQ ID NO: 1144496 - RNA, 22 nt, Human
gccaggcugcucuugaacuccu

SEQ ID NO: 1144497 - RNA, 22 nt, Human
gccaggcuggucucgaacuccu

SEQ ID NO: 1144498 - RNA, 14 nt, Human
gcccaaccugcucu

SEQ ID NO: 1144499 - RNA, 21 nt, Human
gcccagcuugaaaccuucacu

SEQ ID NO: 1144500 - RNA, 13 nt, Human
gccuggcacaggg

SEQ ID NO: 1144501 - RNA, 14 nt, Human
gccuggcacagggc

SEQ ID NO: 1144502 - RNA, 18 nt, Human
gccuggcacagggcagug

SEQ ID NO: 1144503 - RNA, 19 nt, Human
gccuggcacagggcagugg

SEQ ID NO: 1144504 - RNA, 12 nt, Human
gccuggcagccg

SEQ ID NO: 1144505 - RNA, 20 nt, Human
gccuggcagccgugccuuca

SEQ ID NO: 1144506 - RNA, 21 nt, Human
gccuggcagccgugccuucag

SEQ ID NO: 1144507 - RNA, 22 nt, Human
gccuggcagccgugccuucagc

SEQ ID NO: 1144508 - RNA, 18 nt, Human
gcgcaggcuggcccugcc

SEQ ID NO: 1144509 - RNA, 19 nt, Human
gcgcaggcuggcccugccc

SEQ ID NO: 1144510 - RNA, 20 nt, Human
gcgcaggcuggcccugcccu

SEQ ID NO: 1144511 - RNA, 21 nt, Human
gcgcaggcuggcccugcccug

SEQ ID NO: 1144512 - RNA, 22 nt, Human
gcgcaggcuggcccugcccugg

SEQ ID NO: 1144513 - RNA, 13 nt, Human
gcgccaauaaacc

SEQ ID NO: 1144514 - RNA, 13 nt, Human
gcgccccuucccc

SEQ ID NO: 1144515 - RNA, 20 nt, Human
gcuauaacuauguugauaaa

SEQ ID NO: 1144516 - RNA, 22 nt, Human
gcucacagaacccuuggagcca

SEQ ID NO: 1144517 - RNA, 12 nt, Human
gcucagcccucc

SEQ ID NO: 1144518 - RNA, 15 nt, Human
gcucagcccucccug

SEQ ID NO: 1144519 - RNA, 16 nt, Human
gcucagcccucccugc

SEQ ID NO: 1144520 - RNA, 17 nt, Human
gcucagcccucccugcc

SEQ ID NO: 1144521 - RNA, 18 nt, Human
gcucagcccucccugccc

SEQ ID NO: 1144522 - RNA, 19 nt, Human
gcucagcccucccugcccc

SEQ ID NO: 1144523 - RNA, 21 nt, Human
gcucagcccucccugccccuc

SEQ ID NO: 1144524 - RNA, 15 nt, Human
gcucauauuucccau

SEQ ID NO: 1144525 - RNA, 15 nt, Human
gcucccacaggcccu

SEQ ID NO: 1144526 - RNA, 14 nt, Human
gcuccucccggugc

SEQ ID NO: 1144527 - RNA, 16 nt, Human
gcuccucccggugccc

SEQ ID NO: 1144528 - RNA, 18 nt, Human
gcuccuuccucugaggcu

SEQ ID NO: 1144529 - RNA, 20 nt, Human
gcuccuuccucugaggcuga

SEQ ID NO: 1144530 - RNA, 22 nt, Human
gcuccuuccucugaggcugaaa

SEQ ID NO: 1144531 - RNA, 14 nt, Human
gcucuugaacuccu

SEQ ID NO: 1144532 - RNA, 16 nt, Human
gcucuugaacuccuga

SEQ ID NO: 1144533 - RNA, 19 nt, Human
gcucuugaacuccugaccu

SEQ ID NO: 1144534 - RNA, 21 nt, Human
gcucuugaacuccugaccuca

SEQ ID NO: 1144535 - RNA, 19 nt, Human
gcucuuggcagguacucag

SEQ ID NO: 1144536 - RNA, 16 nt, Human
gcugagaggagagaga

SEQ ID NO: 1144537 - RNA, 15 nt, Human
gcugccacacuucag

SEQ ID NO: 1144538 - RNA, 17 nt, Human
gcugccacacuucaggc

SEQ ID NO: 1144539 - RNA, 18 nt, Human
gcugccacacuucaggcu

SEQ ID NO: 1144540 - RNA, 21 nt, Human
gcugccacacuucaggcucuu

SEQ ID NO: 1144541 - RNA, 22 nt, Human
gcugccacacuucaggcucuuc

SEQ ID NO: 1144542 - RNA, 23 nt, Human
gcugccacacuucaggcucuucu

SEQ ID NO: 1144543 - RNA, 12 nt, Human
gcugcccuggug

SEQ ID NO: 1144544 - RNA, 13 nt, Human
gcugcccuggugc

SEQ ID NO: 1144545 - RNA, 14 nt, Human
gcugcccuggugcu

SEQ ID NO: 1144546 - RNA, 15 nt, Human
gcugcccuggugcug

SEQ ID NO: 1144547 - RNA, 18 nt, Human
gcugcccuggugcugcca

SEQ ID NO: 1144548 - RNA, 17 nt, Human
gcugcccuggugcugcc

SEQ ID NO: 1144549 - RNA, 15 nt, Human
gcugccuuagaaccu

SEQ ID NO: 1144550 - RNA, 20 nt, Human
gcugccuuagaaccuuucuu

SEQ ID NO: 1144551 - RNA, 15 nt, Human
gcugcggccccuccc

SEQ ID NO: 1144552 - RNA, 17 nt, Human
gcugcggccccuccccc

SEQ ID NO: 1144553 - RNA, 23 nt, Human
gcuggaaugauuucagcucacug

SEQ ID NO: 1144554 - RNA, 19 nt, Human
gcuggacaaacugcaccag

SEQ ID NO: 1144555 - RNA, 14 nt, Human
gcuggacaaacugc

SEQ ID NO: 1144556 - RNA, 14 nt, Human
gcuggcccugcccu

SEQ ID NO: 1144557 - RNA, 15 nt, Human
gcuggcccugcccug

SEQ ID NO: 1144558 - RNA, 16 nt, Human
gcuggcccugcccugg

SEQ ID NO: 1144559 - RNA, 19 nt, Human
gcuggcccuggcucccaca

SEQ ID NO: 1144560 - RNA, 19 nt, Human
gcuggucucgaacuccuga

SEQ ID NO: 1144561 - RNA, 22 nt, Human
gcuggucucgaacuccugaccu

SEQ ID NO: 1144562 - RNA, 23 nt, Human
gcuggucucgaacuccugaccuu

SEQ ID NO: 1144563 - RNA, 13 nt, Human
gcugucaucucag

SEQ ID NO: 1144564 - RNA, 15 nt, Human
gcuuauauuguucac

SEQ ID NO: 1144565 - RNA, 17 nt, Human
gcuucuguugcugccuc

SEQ ID NO: 1144566 - RNA, 18 nt, Human
gcuucuguugcugccuca

SEQ ID NO: 1144567 - RNA, 19 nt, Human
gcuucuguugcugccucau

SEQ ID NO: 1144568 - RNA, 19 nt, Human
gcuuugggcugcccuggug

SEQ ID NO: 1144569 - RNA, 12 nt, Human
gcuuuucacugc

SEQ ID NO: 1144570 - RNA, 15 nt, Human
ggacagccccuccuc

SEQ ID NO: 1144571 - RNA, 16 nt, Human
ggacagccccuccucc

SEQ ID NO: 1144572 - RNA, 13 nt, Human
ggagggccugggc

SEQ ID NO: 1144573 - RNA, 13 nt, Human
ggaggggccuggc

SEQ ID NO: 1144574 - RNA, 14 nt, Human
ggaggggccuggca

SEQ ID NO: 1144575 - RNA, 18 nt, Human
ggaggggccuggcagccg

SEQ ID NO: 1144576 - RNA, 21 nt, Human
ggaggggccuggcagccgugc

SEQ ID NO: 1144577 - RNA, 17 nt, Human
ggaugccccgucccccu

SEQ ID NO: 1144578 - RNA, 21 nt, Human
ggcagugggacagggcauggc

SEQ ID NO: 1144579 - RNA, 15 nt, Human
ggccgggagccugau

SEQ ID NO: 1144580 - RNA, 17 nt, Human
ggccucggacuuagcug

SEQ ID NO: 1144581 - RNA, 11 nt, Human
ggccugggccc

SEQ ID NO: 1144582 - RNA, 13 nt, Human
ggcugugccucug

SEQ ID NO: 1144583 - RNA, 16 nt, Human
ggcugugccucugccu

SEQ ID NO: 1144584 - RNA, 11 nt, Human
ggcuugcugcc

SEQ ID NO: 1144585 - RNA, 13 nt, Human
ggcuuuucacugc

SEQ ID NO: 1144586 - RNA, 11 nt, Human
gggacccccag

SEQ ID NO: 1144587 - RNA, 13 nt, Human
gggacccccagga

SEQ ID NO: 1144588 - RNA, 23 nt, Human
gggacugccagucccccugcccc

SEQ ID NO: 1144589 - RNA, 21 nt, Human
gggagccugaucaccugcccu

SEQ ID NO: 1144590 - RNA, 12 nt, Human
gggagcucugca

SEQ ID NO: 1144591 - RNA, 23 nt, Human
uauggauccacuggcuggacaaa

SEQ ID NO: 1144592 - RNA, 22 nt, Human
uauggugccuaguauugacaaa

SEQ ID NO: 1144593 - RNA, 16 nt, Human
uaugucaagggcagcu

SEQ ID NO: 1144594 - RNA, 23 nt, Human
uaugucaagggcagcuuugcuca

SEQ ID NO: 1144595 - RNA, 14 nt, Human
uauguugauaaaag

SEQ ID NO: 1144596 - RNA, 12 nt, Human
uauuaagaauga

SEQ ID NO: 1144597 - RNA, 17 nt, Human
uauuccugcauuuguga

SEQ ID NO: 1144598 - RNA, 19 nt, Human
uauuccugcauuugugaaa

SEQ ID NO: 1144599 - RNA, 20 nt, Human
uauuccugcauuugugaaau

SEQ ID NO: 1144600 - RNA, 21 nt, Human
uauuccugcauuugugaaaug

SEQ ID NO: 1144601 - RNA, 23 nt, Human
uauucuaacuuuuauuuuuauca

SEQ ID NO: 1144602 - RNA, 17 nt, Human
uauugcugaaugcaaga

SEQ ID NO: 1144603 - RNA, 19 nt, Human
uauuuucaacgcagcccug

SEQ ID NO: 1144604 - RNA, 14 nt, Human
ucaacgcagcccug

SEQ ID NO: 1144605 - RNA, 15 nt, Human
ucaacgcagcccugc

SEQ ID NO: 1144606 - RNA, 18 nt, Human
ucaacgcagcccugcuuu

SEQ ID NO: 1144607 - RNA, 14 nt, Human
ucaauaaaauuaua

SEQ ID NO: 1144608 - RNA, 15 nt, Human
ucaauaaaauuauag

SEQ ID NO: 1144609 - RNA, 17 nt, Human
ucaauaaaauuauagcu

SEQ ID NO: 1144610 - RNA, 19 nt, Human
ucaauaaaauuauagcucu

SEQ ID NO: 1144611 - RNA, 18 nt, Human
ucacugcauccuccgccu

SEQ ID NO: 1144612 - RNA, 19 nt, Human
ucacugcauccuccgccuc

SEQ ID NO: 1144613 - RNA, 12 nt, Human
ucacugcuggcu

SEQ ID NO: 1144614 - RNA, 13 nt, Human
ucacugcuggcug

SEQ ID NO: 1144615 - RNA, 14 nt, Human
ucacugcuggcugc

SEQ ID NO: 1144616 - RNA, 15 nt, Human
ucacugcuggcugcc

SEQ ID NO: 1144617 - RNA, 16 nt, Human
ucacugcuggcugccu

SEQ ID NO: 1144618 - RNA, 17 nt, Human
ucacugcuggcugccuu

SEQ ID NO: 1144619 - RNA, 18 nt, Human
ucacugcuggcugccuua

SEQ ID NO: 1144620 - RNA, 22 nt, Human
ucacugcuggcugccuuagaac

SEQ ID NO: 1144621 - RNA, 17 nt, Human
ucagcauucucacuccu

SEQ ID NO: 1144622 - RNA, 20 nt, Human
ucagcauucucacuccuacc

SEQ ID NO: 1144623 - RNA, 23 nt, Human
ucagcauucucacuccuaccugg

SEQ ID NO: 1144624 - RNA, 20 nt, Human
ucagccuccugaguagcugg

SEQ ID NO: 1144625 - RNA, 22 nt, Human
ucagccuccugaguagcuggga

SEQ ID NO: 1144626 - RNA, 15 nt, Human
ucaggcucuucuccu

SEQ ID NO: 1144627 - RNA, 21 nt, Human
ucauagcccucacccuggggc

SEQ ID NO: 1144628 - RNA, 15 nt, Human
ucaucaggaacguuu

SEQ ID NO: 1144629 - RNA, 13 nt, Human
ucaucuucacugc

SEQ ID NO: 1144630 - RNA, 23 nt, Human
ucauuccaccuucccaugcccug

SEQ ID NO: 1144631 - RNA, 18 nt, Human
uccaauuuaguuguugua

SEQ ID NO: 1144632 - RNA, 15 nt, Human
uccaccuucccaugc

SEQ ID NO: 1144633 - RNA, 11 nt, Human
uccaggguggu

SEQ ID NO: 1144634 - RNA, 16 nt, Human
ucccuacauuaaacau

SEQ ID NO: 1144635 - RNA, 13 nt, Human
ucccuacauuaaa

SEQ ID NO: 1144636 - RNA, 20 nt, Human
ucccugccccucccuucaac

SEQ ID NO: 1144637 - RNA, 22 nt, Human
uccuaaugaaugcauaaaaugu

SEQ ID NO: 1144638 - RNA, 15 nt, Human
uccuaauuccacagc

SEQ ID NO: 1144639 - RNA, 16 nt, Human
uccuaauuccacagcu

SEQ ID NO: 1144640 - RNA, 17 nt, Human
uccuaauuccacagcug

SEQ ID NO: 1144641 - RNA, 18 nt, Human
uccuaauuccacagcugc

SEQ ID NO: 1144642 - RNA, 15 nt, Human
uccuacaagacacag

SEQ ID NO: 1144643 - RNA, 21 nt, Human
uccucuuccugaauuuuauuu

SEQ ID NO: 1144644 - RNA, 14 nt, Human
uccugccucagccu

SEQ ID NO: 1144645 - RNA, 13 nt, Human
uccuugaagguau

SEQ ID NO: 1144646 - RNA, 17 nt, Human
uccuugaagguauaucu

SEQ ID NO: 1144647 - RNA, 19 nt, Human
uccuuuuaaaacacuucca

SEQ ID NO: 1144648 - RNA, 15 nt, Human
ucgaacuccugaccu

SEQ ID NO: 1144649 - RNA, 22 nt, Human
ucggccucccaaagugcuggga

SEQ ID NO: 1144650 - RNA, 12 nt, Human
ucuaauaguaua

SEQ ID NO: 1144651 - RNA, 17 nt, Human
ucuaauaguauaaaccc

SEQ ID NO: 1144652 - RNA, 14 nt, Human
ucuaauaguauaaa

SEQ ID NO: 1144653 - RNA, 14 nt, Human
ucuaaugugugaau

SEQ ID NO: 1144654 - RNA, 13 nt, Human
ucuaauguuugca

SEQ ID NO: 1144655 - RNA, 14 nt, Human
ucuaauguuugcau

SEQ ID NO: 1144656 - RNA, 15 nt, Human
ucuaauguuugcaua

SEQ ID NO: 1144657 - RNA, 16 nt, Human
ucuaauguuugcauau

SEQ ID NO: 1144658 - RNA, 17 nt, Human
ucuaauguuugcauaua

SEQ ID NO: 1144659 - RNA, 19 nt, Human
ucuaauguuugcauauaag

SEQ ID NO: 1144660 - RNA, 18 nt, Human
ucuaauguuugcauauaa

SEQ ID NO: 1144661 - RNA, 17 nt, Human
ucucaagagggcacugg

SEQ ID NO: 1144662 - RNA, 18 nt, Human
ucucaagagggcacuggu

SEQ ID NO: 1144663 - RNA, 19 nt, Human
ucucaagagggcacuggug

SEQ ID NO: 1144664 - RNA, 21 nt, Human
ucucaauaaaauuauagcucu

SEQ ID NO: 1144665 - RNA, 23 nt, Human
ucucaauaaaauuauagcucuaa

SEQ ID NO: 1144666 - RNA, 22 nt, Human
ucucaauaaaauuauagcucua

SEQ ID NO: 1144667 - RNA, 17 nt, Human
ucuccugccucagccuc

SEQ ID NO: 1144668 - RNA, 19 nt, Human
ucuccugccucagccuccc

SEQ ID NO: 1144669 - RNA, 15 nt, Human
ucucuguccgagugu

SEQ ID NO: 1144670 - RNA, 11 nt, Human
ucugaggcuga

SEQ ID NO: 1144671 - RNA, 23 nt, Human
ucugaggcugaaauucagaauau

SEQ ID NO: 1144672 - RNA, 13 nt, Human
ucugcaucuccac

SEQ ID NO: 1144673 - RNA, 11 nt, Human
ucugcaucucc

SEQ ID NO: 1144674 - RNA, 17 nt, Human
ucugcauucaggaucaa

SEQ ID NO: 1144675 - RNA, 22 nt, Human
ucugcugauccucccaggcuuc

SEQ ID NO: 1144676 - RNA, 15 nt, Human
ucuggcuccagcugg

SEQ ID NO: 1144677 - RNA, 13 nt, Human
ucugguuccuccc

SEQ ID NO: 1144678 - RNA, 20 nt, Human
ucugguuccuccccuccucc

SEQ ID NO: 1144679 - RNA, 21 nt, Human
ucugguuccuccccuccuccu

SEQ ID NO: 1144680 - RNA, 17 nt, Human
ucuuccuggauuauuca

SEQ ID NO: 1144681 - RNA, 12 nt, Human
ucuucuccacug

SEQ ID NO: 1144682 - RNA, 13 nt, Human
ucuucuccuuuca

SEQ ID NO: 1144683 - RNA, 14 nt, Human
ucuucuccuuucac

SEQ ID NO: 1144684 - RNA, 16 nt, Human
ucuucuuuuuuuguga

SEQ ID NO: 1144685 - RNA, 17 nt, Human
ucuucuuuuuuugugau

SEQ ID NO: 1144686 - RNA, 18 nt, Human
ucuucuuuuuuugugaug

SEQ ID NO: 1144687 - RNA, 17 nt, Human
ucuugaacuccugaccu

SEQ ID NO: 1144688 - RNA, 19 nt, Human
ucuugaacuccugaccuca

SEQ ID NO: 1144689 - RNA, 19 nt, Human
ugaccguguuggucuguac

SEQ ID NO: 1144690 - RNA, 20 nt, Human
ugaccguguuggucuguacu

SEQ ID NO: 1144691 - RNA, 21 nt, Human
ugaccguguuggucuguacug

SEQ ID NO: 1144692 - RNA, 16 nt, Human
ugaccucagcuuugau

SEQ ID NO: 1144693 - RNA, 16 nt, Human
ugacuguacuccuccc

SEQ ID NO: 1144694 - RNA, 17 nt, Human
ugacuguacuccuccca

SEQ ID NO: 1144695 - RNA, 18 nt, Human
ugacuguacuccucccag

SEQ ID NO: 1144696 - RNA, 22 nt, Human
ugacuguacuccucccaggcgc

SEQ ID NO: 1144697 - RNA, 23 nt, Human
ugaggacuuaaaauauuccugca

SEQ ID NO: 1144698 - RNA, 14 nt, Human
ugauaaaucauuuu

SEQ ID NO: 1144699 - RNA, 15 nt, Human
ugauaaaucauuuua

SEQ ID NO: 1144700 - RNA, 20 nt, Human
ugauaaaucauuuuauguca

SEQ ID NO: 1144701 - RNA, 18 nt, Human
ugauagguauaaguggug

SEQ ID NO: 1144702 - RNA, 14 nt, Human
ugauccacucgccu

SEQ ID NO: 1144703 - RNA, 20 nt, Human
ugaucugaugcaagcaagaa

SEQ ID NO: 1144704 - RNA, 21 nt, Human
ugaucugaugcaagcaagaaa

SEQ ID NO: 1144705 - RNA, 13 nt, Human
ugaugugcuuaac

SEQ ID NO: 1144706 - RNA, 17 nt, Human
ugaugugcuuaacaggg

SEQ ID NO: 1144707 - RNA, 16 nt, Human
ugauuuuuuuuuuuca

SEQ ID NO: 1144708 - RNA, 22 nt, Human
ugauuuuuuuuuuuuuccuguc

SEQ ID NO: 1144709 - RNA, 14 nt, Human
ugcaaaaucaguuu

SEQ ID NO: 1144710 - RNA, 15 nt, Human
ugcaaaaucaguuuu

SEQ ID NO: 1144711 - RNA, 20 nt, Human
ugcaaaaucaguuuuccucu

SEQ ID NO: 1144712 - RNA, 18 nt, Human
ugcaaccuucgccaccug

SEQ ID NO: 1144713 - RNA, 21 nt, Human
ugcaaccuucgccaccugggu

SEQ ID NO: 1144714 - RNA, 16 nt, Human
ugcaacuuguaaaugu

SEQ ID NO: 1144715 - RNA, 18 nt, Human
ugcaacuuguaaaugugg

SEQ ID NO: 1144716 - RNA, 22 nt, Human
ugcaagaaguggggcagcagca

SEQ ID NO: 1144717 - RNA, 15 nt, Human
ugcacaaagcccuuc

SEQ ID NO: 1144718 - RNA, 17 nt, Human
ugcacaaagcccuucca

SEQ ID NO: 1144719 - RNA, 15 nt, Human
ugcacagugcaucuc

SEQ ID NO: 1144720 - RNA, 16 nt, Human
ugcacagugcaucuca

SEQ ID NO: 1144721 - RNA, 17 nt, Human
ugcacagugcaucucag

SEQ ID NO: 1144722 - RNA, 18 nt, Human
ugcacagugcaucucagc

SEQ ID NO: 1144723 - RNA, 19 nt, Human
ugcagagguccacaacaca

SEQ ID NO: 1144724 - RNA, 14 nt, Human
ugcaucccuggcug

SEQ ID NO: 1144725 - RNA, 14 nt, Human
ugcauccuccgccu

SEQ ID NO: 1144726 - RNA, 15 nt, Human
ugcauccuccgccuc

SEQ ID NO: 1144727 - RNA, 15 nt, Human
ugccaccacgcccgg

SEQ ID NO: 1144728 - RNA, 19 nt, Human
ugcccugcgggucacagga

SEQ ID NO: 1144729 - RNA, 18 nt, Human
ugcccugcugagucccag

SEQ ID NO: 1144730 - RNA, 22 nt, Human
ugcccugcugagucccaggcug

SEQ ID NO: 1144731 - RNA, 23 nt, Human
ugcccugcugagucccaggcuga

SEQ ID NO: 1144732 - RNA, 18 nt, Human
ugcccuggauccaucagg

SEQ ID NO: 1144733 - RNA, 20 nt, Human
ugcccuggugcugccacacu

SEQ ID NO: 1144734 - RNA, 21 nt, Human
ugcccuggugcugccacacuu

SEQ ID NO: 1144735 - RNA, 15 nt, Human
ugcccugguuuccug

SEQ ID NO: 1144736 - RNA, 13 nt, Human
ugccucugccugu

SEQ ID NO: 1144737 - RNA, 14 nt, Human
ugccucugccuguc

SEQ ID NO: 1144738 - RNA, 18 nt, Human
ugccucugccugucuccc

SEQ ID NO: 1144739 - RNA, 13 nt, Human
ugccucuuccucc

SEQ ID NO: 1144740 - RNA, 18 nt, Human
ugcuuaaagaauucaaau

SEQ ID NO: 1144741 - RNA, 19 nt, Human
ugcuuaaagaauucaaauu

SEQ ID NO: 1144742 - RNA, 20 nt, Human
ugcuuaaagaauucaaauuu

SEQ ID NO: 1144743 - RNA, 22 nt, Human
ugcuuaacagggaacgugauua

SEQ ID NO: 1144744 - RNA, 14 nt, Human
ugcuuguuaacuga

SEQ ID NO: 1144745 - RNA, 16 nt, Human
ugcuuguuaacugagu

SEQ ID NO: 1144746 - RNA, 17 nt, Human
ugcuuucgguuccaguu

SEQ ID NO: 1144747 - RNA, 13 nt, Human
ugcuuuggaaauc

SEQ ID NO: 1144748 - RNA, 17 nt, Human
uggcuccagcuggccgg

SEQ ID NO: 1144749 - RNA, 19 nt, Human
uggcuucccgcucagcccu

SEQ ID NO: 1144750 - RNA, 20 nt, Human
uggcuucccgcucagcccuc

SEQ ID NO: 1144751 - RNA, 21 nt, Human
uggcuucccgcucagcccucc

SEQ ID NO: 1144752 - RNA, 22 nt, Human
uggcuucccgcucagcccuccc

SEQ ID NO: 1144753 - RNA, 16 nt, Human
uggcuuuucacugcug

SEQ ID NO: 1144754 - RNA, 18 nt, Human
uggcuuuucacugcuggc

SEQ ID NO: 1144755 - RNA, 19 nt, Human
uggcuuuucacugcuggcu

SEQ ID NO: 1144756 - RNA, 21 nt, Human
uggcuuuucacugcuggcugc

SEQ ID NO: 1144757 - RNA, 22 nt, Human
uggcuuuucacugcuggcugcc

SEQ ID NO: 1144758 - RNA, 19 nt, Human
ugggaucacauguggacuu

SEQ ID NO: 1144759 - RNA, 19 nt, Human
ugguggcccgacagccugg

SEQ ID NO: 1144760 - RNA, 21 nt, Human
ugguggcccgacagccuggca

SEQ ID NO: 1144761 - RNA, 11 nt, Human
ugguuccccug

SEQ ID NO: 1144762 - RNA, 18 nt, Human
ugguuccccuguucacuc

SEQ ID NO: 1144763 - RNA, 19 nt, Human
ugguuccccuguucacucu

SEQ ID NO: 1144764 - RNA, 20 nt, Human
ugguuccccuguucacucua

SEQ ID NO: 1144765 - RNA, 23 nt, Human
ugguuccccuguucacucuacuu

SEQ ID NO: 1144766 - RNA, 12 nt, Human
ugguuccucccc

SEQ ID NO: 1144767 - RNA, 18 nt, Human
ugguuccuccccuccucc

SEQ ID NO: 1144768 - RNA, 23 nt, Human
ugguuccuccccuccuccuggac

SEQ ID NO: 1144769 - RNA, 13 nt, Human
ugguugcauccua

SEQ ID NO: 1144770 - RNA, 16 nt, Human
uguaggaagguacugu

SEQ ID NO: 1144771 - RNA, 18 nt, Human
uguaggaagguacuguau

SEQ ID NO: 1144772 - RNA, 19 nt, Human
uguaggaagguacuguaug

SEQ ID NO: 1144773 - RNA, 20 nt, Human
uguaggaagguacuguauga

SEQ ID NO: 1144774 - RNA, 22 nt, Human
uguaggaagguacuguaugauc

SEQ ID NO: 1144775 - RNA, 22 nt, Human
uguaugaaagauggcugugccu

SEQ ID NO: 1144776 - RNA, 12 nt, Human
uguaugaucaaa

SEQ ID NO: 1144777 - RNA, 13 nt, Human
uguaugcgugugu

SEQ ID NO: 1144778 - RNA, 13 nt, Human
ugucaucucagcu

SEQ ID NO: 1144779 - RNA, 13 nt, Human
uguccccuauccu

SEQ ID NO: 1144780 - RNA, 22 nt, Human
uguccugccuaaggcugaacuu

SEQ ID NO: 1144781 - RNA, 17 nt, Human
ugucucaagagggcacu

SEQ ID NO: 1144782 - RNA, 18 nt, Human
ugucucaagagggcacug

SEQ ID NO: 1144783 - RNA, 19 nt, Human
ugucucaagagggcacugg

SEQ ID NO: 1144784 - RNA, 14 nt, Human
ugucucacugagca

SEQ ID NO: 1144785 - RNA, 20 nt, Human
ugucucacugagcacuguuu

SEQ ID NO: 1144786 - RNA, 16 nt, Human
ugucucaggucccugc

SEQ ID NO: 1144787 - RNA, 16 nt, Human
ugucuguuuuaaaaac

SEQ ID NO: 1144788 - RNA, 19 nt, Human
uuagugaccucagcuuuga

SEQ ID NO: 1144789 - RNA, 15 nt, Human
uuagugacuaaacca

SEQ ID NO: 1144790 - RNA, 23 nt, Human
uuagugacuaaaccauugugcau

SEQ ID NO: 1144791 - RNA, 17 nt, Human
uuagugacuaaaccauu

SEQ ID NO: 1144792 - RNA, 22 nt, Human
uuauaagggcaaauuggagaaa

SEQ ID NO: 1144793 - RNA, 18 nt, Human
uuauaagggcaaauugga

SEQ ID NO: 1144794 - RNA, 12 nt, Human
uuauaauuuaaa

SEQ ID NO: 1144795 - RNA, 15 nt, Human
uuauauuguucacuu

SEQ ID NO: 1144796 - RNA, 17 nt, Human
uuauauuguucacuucu

SEQ ID NO: 1144797 - RNA, 16 nt, Human
uuauauuuacaaaugg

SEQ ID NO: 1144798 - RNA, 16 nt, Human
uuaucuguuugagaaa

SEQ ID NO: 1144799 - RNA, 20 nt, Human
uuaucuguuugagaaaguca

SEQ ID NO: 1144800 - RNA, 14 nt, Human
uuaugauuagcuuu

SEQ ID NO: 1144801 - RNA, 12 nt, Human
uuauuugagaag

SEQ ID NO: 1144802 - RNA, 18 nt, Human
uuauuugagaagcugcuc

SEQ ID NO: 1144803 - RNA, 20 nt, Human
uuauuugagaagcugcucaa

SEQ ID NO: 1144804 - RNA, 15 nt, Human
uucaaccauucccca

SEQ ID NO: 1144805 - RNA, 21 nt, Human
uucacaaccuucuguggcuca

SEQ ID NO: 1144806 - RNA, 23 nt, Human
uucaguuauuauauuuacaaaug

SEQ ID NO: 1144807 - RNA, 22 nt, Human
uuccaaaaauuacuuaguauug

SEQ ID NO: 1144808 - RNA, 18 nt, Human
uuccauauggauccacug

SEQ ID NO: 1144809 - RNA, 19 nt, Human
uuccauauggauccacugg

SEQ ID NO: 1144810 - RNA, 21 nt, Human
uuccauauggauccacuggcu

SEQ ID NO: 1144811 - RNA, 22 nt, Human
uuccauauggauccacuggcug

SEQ ID NO: 1144812 - RNA, 15 nt, Human
uuccaugucaagauu

SEQ ID NO: 1144813 - RNA, 21 nt, Human
uuccaugucaagauucagcua

SEQ ID NO: 1144814 - RNA, 16 nt, Human
uuccaugucgccucug

SEQ ID NO: 1144815 - RNA, 17 nt, Human
uuccaugucaagauuca

SEQ ID NO: 1144816 - RNA, 15 nt, Human
uuccugcauuuguga

SEQ ID NO: 1144817 - RNA, 18 nt, Human
uucggugagcuacaaaug

SEQ ID NO: 1144818 - RNA, 23 nt, Human
uucuaaugugugaaucagagcac

SEQ ID NO: 1144819 - RNA, 13 nt, Human
uucuacuauuuau

SEQ ID NO: 1144820 - RNA, 20 nt, Human
uucucauuugccaauaauaa

SEQ ID NO: 1144821 - RNA, 12 nt, Human
uucuccacugga

SEQ ID NO: 1144822 - RNA, 18 nt, Human
uucugcuuuccucuuccu

SEQ ID NO: 1144823 - RNA, 15 nt, Human
uucuggcagaggagg

SEQ ID NO: 1144824 - RNA, 17 nt, Human
uugaacuccugaccuca

SEQ ID NO: 1144825 - RNA, 14 nt, Human
uugacaaaauguua

SEQ ID NO: 1144826 - RNA, 19 nt, Human
uugacaaaauguuauuucc

SEQ ID NO: 1144827 - RNA, 20 nt, Human
uugacaaaauguuauuuccc

SEQ ID NO: 1144828 - RNA, 21 nt, Human
uugacaaaauguuauuucccu

SEQ ID NO: 1144829 - RNA, 17 nt, Human
uugaugacccccaacca

SEQ ID NO: 1144830 - RNA, 21 nt, Human
uuguaaaugugguaaagaguu

SEQ ID NO: 1144831 - RNA, 13 nt, Human
uuguaaauuguca

SEQ ID NO: 1144832 - RNA, 14 nt, Human
uuguauuacaaauc

SEQ ID NO: 1144833 - RNA, 21 nt, Human
uugucugaagucacugcacag

SEQ ID NO: 1144834 - RNA, 14 nt, Human
uugugaaaugaugg

SEQ ID NO: 1144835 - RNA, 16 nt, Human
uugugccagaaugcuu

SEQ ID NO: 1144836 - RNA, 21 nt, Human
uugugccagaaugcuuuagga

SEQ ID NO: 1144837 - RNA, 21 nt, Human
uuguggaaaaugaaaauuagg

SEQ ID NO: 1144838 - RNA, 12 nt, Human
uuguguuuacau

SEQ ID NO: 1144839 - RNA, 13 nt, Human
uuguguuuacauu

SEQ ID NO: 1144840 - RNA, 18 nt, Human
uuguguuuacauuuuaug

SEQ ID NO: 1144841 - RNA, 22 nt, Human
uuguguuuacauuuuauggugc

SEQ ID NO: 1144842 - RNA, 13 nt, Human
uuguuaucuguuu

SEQ ID NO: 1144843 - RNA, 13 nt, Human
uuguuaugaugug

SEQ ID NO: 1144844 - RNA, 15 nt, Human
uuguuaugaugugcu

SEQ ID NO: 1144845 - RNA, 17 nt, Human
uuguuaugaugugcuua

SEQ ID NO: 1144846 - RNA, 18 nt, Human
uuguuaugaugugcuuaa

SEQ ID NO: 1144847 - RNA, 18 nt, Human
uuguuuggagacagaguc

SEQ ID NO: 1144848 - RNA, 23 nt, Human
uuuaacaacuaugauuuggaaaa

SEQ ID NO: 1144849 - RNA, 19 nt, Human
uuuaacucuauaauguguu

SEQ ID NO: 1144850 - RNA, 19 nt, Human
uuuaagacauuuuuggaag

SEQ ID NO: 1144851 - RNA, 15 nt, Human
uuuacagcugccugc

SEQ ID NO: 1144852 - RNA, 16 nt, Human
uuuacagcugccugca

SEQ ID NO: 1144853 - RNA, 13 nt, Human
uuuacauuuuaug

SEQ ID NO: 1144854 - RNA, 17 nt, Human
uuuacauuuuauggugc

SEQ ID NO: 1144855 - RNA, 22 nt, Human
uuuacauuuuauggugccuagu

SEQ ID NO: 1144856 - RNA, 23 nt, Human
uuuacauuuuauggugccuagua

SEQ ID NO: 1144857 - RNA, 20 nt, Human
uuuauggcagacauugugcu

SEQ ID NO: 1144858 - RNA, 21 nt, Human
uuuauggcagacauugugcua

SEQ ID NO: 1144859 - RNA, 15 nt, Human
uuucaacgcagcccu

SEQ ID NO: 1144860 - RNA, 16 nt, Human
uuucaacgcagcccug

SEQ ID NO: 1144861 - RNA, 20 nt, Human
uuucaacgcagcccugcuuu

SEQ ID NO: 1144862 - RNA, 21 nt, Human
uuucaacgcagcccugcuuug

SEQ ID NO: 1144863 - RNA, 16 nt, Human
uuucacaaccuucugu

SEQ ID NO: 1144864 - RNA, 22 nt, Human
uuucacaaccuucuguggcuca

SEQ ID NO: 1144865 - RNA, 15 nt, Human
uuucagcagcugcag

SEQ ID NO: 1144866 - RNA, 14 nt, Human
uuuguauuuuuagu

SEQ ID NO: 1144867 - RNA, 20 nt, Human
uuuuaaacccuauugguaaa

SEQ ID NO: 1144868 - RNA, 21 nt, Human
uuuuaaaguaacccuacaaaa

SEQ ID NO: 1144869 - RNA, 19 nt, Human
uuuuacaaaaaagaaaaga

SEQ ID NO: 1144870 - RNA, 17 nt, Human
uuuuacaauaaaaucuu

SEQ ID NO: 1144871 - RNA, 16 nt, Human
uuuuacagcugccugc

SEQ ID NO: 1144872 - RNA, 13 nt, Human
uuuuuuccacuua

SEQ ID NO: 1144873 - RNA, 15 nt, Human
uuuuuuccugucaua

SEQ ID NO: 1144874 - RNA, 13 nt, Human
uuuuuuuuccugu

SEQ ID NO: 1144875 - RNA, 23 nt, Human
aaauagcuuggguagcgcacucu

SEQ ID NO: 1144876 - RNA, 19 nt, Human
aaaucaaugcuauaacuau

SEQ ID NO: 1144877 - RNA, 22 nt, Human
aaagcccuuccaugucgccucu

SEQ ID NO: 1144878 - RNA, 23 nt, Human
aaagcccuuccaugucgccucug

SEQ ID NO: 1144879 - RNA, 19 nt, Human
aaaauaaaauuaaagcuga

SEQ ID NO: 1144880 - RNA, 16 nt, Human
aaacccuauugguaaa

SEQ ID NO: 1144881 - RNA, 20 nt, Human
aaagaagguuucagaaagaa

SEQ ID NO: 1144882 - RNA, 15 nt, Human
aacccuauugguaaa

SEQ ID NO: 1144883 - RNA, 12 nt, Human
aacccucagagc

SEQ ID NO: 1144884 - RNA, 21 nt, Human
aacccuuggagccaauggaga

SEQ ID NO: 1144885 - RNA, 11 nt, Human
aaauguuuaau

SEQ ID NO: 1144886 - RNA, 13 nt, Human
aaauguuuaauca

SEQ ID NO: 1144887 - RNA, 14 nt, Human
aaauguuuaaucau

SEQ ID NO: 1144888 - RNA, 15 nt, Human
aaauguuuaaucaua

SEQ ID NO: 1144889 - RNA, 17 nt, Human
aaauguuuaaucauaua

SEQ ID NO: 1144890 - RNA, 19 nt, Human
aaauguuuaaucauauaaa

SEQ ID NO: 1144891 - RNA, 18 nt, Human
aaauguuuaaucauauaa

SEQ ID NO: 1144892 - RNA, 17 nt, Human
aaaucuuauaauuuaaa

SEQ ID NO: 1144893 - RNA, 13 nt, Human
aaauuaaagcuga

SEQ ID NO: 1144894 - RNA, 17 nt, Human
aaauuaaagcugaaaac

SEQ ID NO: 1144895 - RNA, 13 nt, Human
aaauugcuccuug

SEQ ID NO: 1144896 - RNA, 14 nt, Human
aaauugcuccuuga

SEQ ID NO: 1144897 - RNA, 16 nt, Human
aacugagugccuuuug

SEQ ID NO: 1144898 - RNA, 11 nt, Human
aacgcagcccu

SEQ ID NO: 1144899 - RNA, 12 nt, Human
aacgcagcccug

SEQ ID NO: 1144900 - RNA, 14 nt, Human
aaugcgcaggcugg

SEQ ID NO: 1144901 - RNA, 22 nt, Human
aaugcgcaggcuggcccugccc

SEQ ID NO: 1144902 - RNA, 15 nt, Human
aaugcgccaauaaac

SEQ ID NO: 1144903 - RNA, 23 nt, Human
aaugcuauaacuauguugauaaa

SEQ ID NO: 1144904 - RNA, 18 nt, Human
aauguccauucuuuauca

SEQ ID NO: 1144905 - RNA, 13 nt, Human
aauguuuaaucau

SEQ ID NO: 1144906 - RNA, 14 nt, Human
aauguuuaaucaua

SEQ ID NO: 1144907 - RNA, 16 nt, Human
aauguuuaaucauaua

SEQ ID NO: 1144908 - RNA, 17 nt, Human
aauguuuaaucauauaa

SEQ ID NO: 1144909 - RNA, 18 nt, Human
aauguuuaaucauauaaa

SEQ ID NO: 1144910 - RNA, 20 nt, Human
aauguuuaaucauauaaaua

SEQ ID NO: 1144911 - RNA, 23 nt, Human
aauguuuaaucauauaaauagaa

SEQ ID NO: 1144912 - RNA, 22 nt, Human
aauguuuacagauccccaagcc

SEQ ID NO: 1144913 - RNA, 13 nt, Human
aauguuugcauau

SEQ ID NO: 1144914 - RNA, 14 nt, Human
aauguuugcauaua

SEQ ID NO: 1144915 - RNA, 15 nt, Human
aauccaaugaaauga

SEQ ID NO: 1144916 - RNA, 15 nt, Human
aauacuugucuguuu

SEQ ID NO: 1144917 - RNA, 23 nt, Human
aaucaaguuggcuucuaaucaaa

SEQ ID NO: 1144918 - RNA, 19 nt, Human
aaucacauucgaguguuuc

SEQ ID NO: 1144919 - RNA, 21 nt, Human
aauauuagugaccucagcuuu

SEQ ID NO: 1144920 - RNA, 14 nt, Human
aauagaauguaaau

SEQ ID NO: 1144921 - RNA, 16 nt, Human
aauagaauguaaaugu

SEQ ID NO: 1144922 - RNA, 14 nt, Human
aaguguaaugaaua

SEQ ID NO: 1144923 - RNA, 22 nt, Human
aagggaaguaguuaucauguua

SEQ ID NO: 1144924 - RNA, 20 nt, Human
aagggaaguaguuaucaugu

SEQ ID NO: 1144925 - RNA, 20 nt, Human
aagucuaccaaccuguucaa

SEQ ID NO: 1144926 - RNA, 21 nt, Human
aagauaaacguggauguuacu

SEQ ID NO: 1144927 - RNA, 12 nt, Human
aaggcagggagg

SEQ ID NO: 1144928 - RNA, 13 nt, Human
aaggacagccccu

SEQ ID NO: 1144929 - RNA, 19 nt, Human
aaggacagccccuccucca

SEQ ID NO: 1144930 - RNA, 22 nt, Human
acuuuauuuucuauaauuuaaa

SEQ ID NO: 1144931 - RNA, 23 nt, Human
acuuuuauuuccagugaaaucag

SEQ ID NO: 1144932 - RNA, 15 nt, Human
agaaaggcugcugua

SEQ ID NO: 1144933 - RNA, 16 nt, Human
agaaagugagcagugu

SEQ ID NO: 1144934 - RNA, 14 nt, Human
agaaagugagcagu

SEQ ID NO: 1144935 - RNA, 14 nt, Human
acugcccccucugc

SEQ ID NO: 1144936 - RNA, 15 nt, Human
acugcccccucugcc

SEQ ID NO: 1144937 - RNA, 16 nt, Human
acugcccccucugccc

SEQ ID NO: 1144938 - RNA, 17 nt, Human
acugcccccucugcccu

SEQ ID NO: 1144939 - RNA, 18 nt, Human
acugcccccucugcccug

SEQ ID NO: 1144940 - RNA, 20 nt, Human
acugucucaagagggcacug

SEQ ID NO: 1144941 - RNA, 21 nt, Human
acugucucaagagggcacugg

SEQ ID NO: 1144942 - RNA, 23 nt, Human
acugucucaagagggcacuggug

SEQ ID NO: 1144943 - RNA, 13 nt, Human
acuucacugugcu

SEQ ID NO: 1144944 - RNA, 14 nt, Human
acuucacugugcug

SEQ ID NO: 1144945 - RNA, 17 nt, Human
acuucacugugcuguug

SEQ ID NO: 1144946 - RNA, 19 nt, Human
acuucacugugcuguuguu

SEQ ID NO: 1144947 - RNA, 20 nt, Human
acuucacugugcuguuguua

SEQ ID NO: 1144948 - RNA, 21 nt, Human
acuucacugugcuguuguuau

SEQ ID NO: 1144949 - RNA, 24 nt, Human
acuucacugugcuguuguuaugau

SEQ ID NO: 1144950 - RNA, 22 nt, Human
acuucacugugcuguuguuaug

SEQ ID NO: 1144951 - RNA, 18 nt, Human
acuuguaaaggaauuuaa

SEQ ID NO: 1144952 - RNA, 22 nt, Human
acgcaucuaguuccccuguuua

SEQ ID NO: 1144953 - RNA, 20 nt, Human
accugcccugcugaguccca

SEQ ID NO: 1144954 - RNA, 11 nt, Human
acucagcaugg

SEQ ID NO: 1144955 - RNA, 16 nt, Human
acacgcuccuuccucu

SEQ ID NO: 1144956 - RNA, 14 nt, Human
acacgcuccuuccu

SEQ ID NO: 1144957 - RNA, 17 nt, Human
acacagauuugagcuca

SEQ ID NO: 1144958 - RNA, 17 nt, Human
acaaaauguuauuuccc

SEQ ID NO: 1144959 - RNA, 11 nt, Human
acaaaauguua

SEQ ID NO: 1144960 - RNA, 12 nt, Human
acaaaauguuau

SEQ ID NO: 1144961 - RNA, 21 nt, Human
acaagaaaggcugcuguacug

SEQ ID NO: 1144962 - RNA, 22 nt, Human
acaagaaaggcugcuguacuga

SEQ ID NO: 1144963 - RNA, 17 nt, Human
accccucauagcccuca

SEQ ID NO: 1144964 - RNA, 15 nt, Human
acccauuuguucaua

SEQ ID NO: 1144965 - RNA, 14 nt, Human
acccccugcaaagc

SEQ ID NO: 1144966 - RNA, 17 nt, Human
acccccugcaaagccca

SEQ ID NO: 1144967 - RNA, 18 nt, Human
acccccugcaaagcccag

SEQ ID NO: 1144968 - RNA, 20 nt, Human
acccccugcaaagcccagcu

SEQ ID NO: 1144969 - RNA, 22 nt, Human
acccccugcaaagcccagcuug

SEQ ID NO: 1144970 - RNA, 14 nt, Human
acccauuuguucau

SEQ ID NO: 1144971 - RNA, 21 nt, Human
aggguccuggggaaccugacc

SEQ ID NO: 1144972 - RNA, 23 nt, Human
aggguccuggggaaccugacccc

SEQ ID NO: 1144973 - RNA, 12 nt, Human
aggguccugggg

SEQ ID NO: 1144974 - RNA, 15 nt, Human
aggguccuggggaac

SEQ ID NO: 1144975 - RNA, 20 nt, Human
agguaaaagcaucacaugaa

SEQ ID NO: 1144976 - RNA, 21 nt, Human
agguaaucgaccugccucggc

SEQ ID NO: 1144977 - RNA, 17 nt, Human
agguacaaccuguucug

SEQ ID NO: 1144978 - RNA, 18 nt, Human
agguuauuaugauuagcu

SEQ ID NO: 1144979 - RNA, 21 nt, Human
aggcgugagccaccgugccug

SEQ ID NO: 1144980 - RNA, 19 nt, Human
aggcccuuccucuccacug

SEQ ID NO: 1144981 - RNA, 13 nt, Human
aggcccuuccucu

SEQ ID NO: 1144982 - RNA, 15 nt, Human
aggcccuuccucucc

SEQ ID NO: 1144983 - RNA, 17 nt, Human
aggcccuuccucuccac

SEQ ID NO: 1144984 - RNA, 18 nt, Human
aggcccuuccucuccacu

SEQ ID NO: 1144985 - RNA, 23 nt, Human
agcugagauuauaggcaccuacc

SEQ ID NO: 1144986 - RNA, 20 nt, Human
agcugcucaacuugcaaaau

SEQ ID NO: 1144987 - RNA, 16 nt, Human
agcugcucaacuugca

SEQ ID NO: 1144988 - RNA, 19 nt, Human
agcuucuguugcugccuca

SEQ ID NO: 1144989 - RNA, 14 nt, Human
aggauuaaauaaug

SEQ ID NO: 1144990 - RNA, 20 nt, Human
aggauuaaauaauguaaaua

SEQ ID NO: 1144991 - RNA, 22 nt, Human
aggauguacaaggacagccccu

SEQ ID NO: 1144992 - RNA, 20 nt, Human
agcuucuguugcugccucau

SEQ ID NO: 1144993 - RNA, 15 nt, Human
agaugaaauuccauu

SEQ ID NO: 1144994 - RNA, 14 nt, Human
agauggcugugccu

SEQ ID NO: 1144995 - RNA, 17 nt, Human
agauggcugugccucug

SEQ ID NO: 1144996 - RNA, 19 nt, Human
agaguggcuccucccggug

SEQ ID NO: 1144997 - RNA, 23 nt, Human
agaguggcuccucccggugccca

SEQ ID NO: 1144998 - RNA, 16 nt, Human
agagaaaacaugcaga

SEQ ID NO: 1144999 - RNA, 17 nt, Human
agagaaaacaugcagaa

SEQ ID NO: 1145000 - RNA, 23 nt, Human
agagaaaacaugcagaacaaaug

SEQ ID NO: 1145001 - RNA, 15 nt, Human
agcacuguuuucuag

SEQ ID NO: 1145002 - RNA, 18 nt, Human
agcacuguuuucuagugu

SEQ ID NO: 1145003 - RNA, 13 nt, Human
agcaguguuagcu

SEQ ID NO: 1145004 - RNA, 17 nt, Human
agcaguguuagcuuagu

SEQ ID NO: 1145005 - RNA, 17 nt, Human
agcccucacccuggggc

SEQ ID NO: 1145006 - RNA, 21 nt, Human
agcccuccaucuaaacugccc

SEQ ID NO: 1145007 - RNA, 15 nt, Human
agccgugccuucagc

SEQ ID NO: 1145008 - RNA, 16 nt, Human
agccgugccuucagcu

SEQ ID NO: 1145009 - RNA, 17 nt, Human
agccgugccuucagcuc

SEQ ID NO: 1145010 - RNA, 13 nt, Human
agccguggcuucc

SEQ ID NO: 1145011 - RNA, 13 nt, Human
augucuuccugga

SEQ ID NO: 1145012 - RNA, 19 nt, Human
auggcugugccucugccug

SEQ ID NO: 1145013 - RNA, 20 nt, Human
auggcugugccucugccugu

SEQ ID NO: 1145014 - RNA, 22 nt, Human
auggaaacaagaugaaauucca

SEQ ID NO: 1145015 - RNA, 22 nt, Human
auggaggaaaaccaagccgugg

SEQ ID NO: 1145016 - RNA, 12 nt, Human
auccucccaggc

SEQ ID NO: 1145017 - RNA, 13 nt, Human
auccccaagccug

SEQ ID NO: 1145018 - RNA, 16 nt, Human
auccccaagccuggca

SEQ ID NO: 1145019 - RNA, 15 nt, Human
aucacauguggacuu

SEQ ID NO: 1145020 - RNA, 21 nt, Human
aucauguuaguaauaccucua

SEQ ID NO: 1145021 - RNA, 22 nt, Human
aucauguuaguaauaccucuaa

SEQ ID NO: 1145022 - RNA, 14 nt, Human
aucauguuaguaau

SEQ ID NO: 1145023 - RNA, 19 nt, Human
aucauguuaguaauaccuc

SEQ ID NO: 1145024 - RNA, 14 nt, Human
aucucggcucacug

SEQ ID NO: 1145025 - RNA, 15 nt, Human
aucucggcucacugc

SEQ ID NO: 1145026 - RNA, 16 nt, Human
aucucggcucacugca

SEQ ID NO: 1145027 - RNA, 15 nt, Human
aucuggacuccucug

SEQ ID NO: 1145028 - RNA, 16 nt, Human
aucuggacuccucugu

SEQ ID NO: 1145029 - RNA, 17 nt, Human
aucuggacuccucuguc

SEQ ID NO: 1145030 - RNA, 18 nt, Human
aucuggacuccucugucc

SEQ ID NO: 1145031 - RNA, 19 nt, Human
aucuggacuccucugucca

SEQ ID NO: 1145032 - RNA, 22 nt, Human
aucuggacuccucuguccaggc

SEQ ID NO: 1145033 - RNA, 18 nt, Human
agugaccauacuaauuau

SEQ ID NO: 1145034 - RNA, 12 nt, Human
aguccuguaaug

SEQ ID NO: 1145035 - RNA, 17 nt, Human
aguaugggacuggccuc

SEQ ID NO: 1145036 - RNA, 20 nt, Human
aguaugggacuggccucugc

SEQ ID NO: 1145037 - RNA, 16 nt, Human
aguaugaauaaagaca

SEQ ID NO: 1145038 - RNA, 13 nt, Human
aguggcuccuccc

SEQ ID NO: 1145039 - RNA, 17 nt, Human
aguggcuccucccggug

SEQ ID NO: 1145040 - RNA, 21 nt, Human
aguggcuccucccggugccca

SEQ ID NO: 1145041 - RNA, 13 nt, Human
aguguaucaaaau

SEQ ID NO: 1145042 - RNA, 14 nt, Human
aguguaucaaaaug

SEQ ID NO: 1145043 - RNA, 15 nt, Human
aguguaucaaaaugc

SEQ ID NO: 1145044 - RNA, 16 nt, Human
aguguaucaaaaugcu

SEQ ID NO: 1145045 - RNA, 17 nt, Human
aguguaucaaaaugcuc

SEQ ID NO: 1145046 - RNA, 18 nt, Human
aguguaucaaaaugcucu

SEQ ID NO: 1145047 - RNA, 14 nt, Human
aguuaagccuuugg

SEQ ID NO: 1145048 - RNA, 13 nt, Human
aguuaagccuuug

SEQ ID NO: 1145049 - RNA, 22 nt, Human
aguugaaaaucuuauaauuuaa

SEQ ID NO: 1145050 - RNA, 14 nt, Human
aguuguuguagaga

SEQ ID NO: 1145051 - RNA, 23 nt, Human
aguugaaaaucuuauaauuuaaa

SEQ ID NO: 1145052 - RNA, 18 nt, Human
auaaaggauuaaugucaa

SEQ ID NO: 1145053 - RNA, 15 nt, Human
auaaaagacagugaa

SEQ ID NO: 1145054 - RNA, 12 nt, Human
auaaagacaccu

SEQ ID NO: 1145055 - RNA, 18 nt, Human
auaccuuagugcaguuau

SEQ ID NO: 1145056 - RNA, 20 nt, Human
auaccucaauuuucacugug

SEQ ID NO: 1145057 - RNA, 14 nt, Human
auaccucuaauagu

SEQ ID NO: 1145058 - RNA, 18 nt, Human
auaccucuaauaguauaa

SEQ ID NO: 1145059 - RNA, 19 nt, Human
auaccucuaauaguauaaa

SEQ ID NO: 1145060 - RNA, 20 nt, Human
auaccucuaauaguauaaac

SEQ ID NO: 1145061 - RNA, 21 nt, Human
auagguauaaguggugugugu

SEQ ID NO: 1145062 - RNA, 15 nt, Human
auagguuuaauaauu

SEQ ID NO: 1145063 - RNA, 14 nt, Human
cuccgggaccccca

SEQ ID NO: 1145064 - RNA, 15 nt, Human
cuccgggacccccag

SEQ ID NO: 1145065 - RNA, 16 nt, Human
cuccgggacccccagg

SEQ ID NO: 1145066 - RNA, 17 nt, Human
cuccgggacccccagga

SEQ ID NO: 1145067 - RNA, 19 nt, Human
cuccauagaccuuuucauu

SEQ ID NO: 1145068 - RNA, 13 nt, Human
cucgaacuccuga

SEQ ID NO: 1145069 - RNA, 16 nt, Human
cucgaacuccugaccu

SEQ ID NO: 1145070 - RNA, 17 nt, Human
cucgaacuccugaccuu

SEQ ID NO: 1145071 - RNA, 18 nt, Human
cucgguauaguuuuguca

SEQ ID NO: 1145072 - RNA, 18 nt, Human
cucguauaugucucaggu

SEQ ID NO: 1145073 - RNA, 20 nt, Human
cucguauaugucucaggucc

SEQ ID NO: 1145074 - RNA, 14 nt, Human
cugacagaaggacu

SEQ ID NO: 1145075 - RNA, 17 nt, Human
cugaccccucauagccc

SEQ ID NO: 1145076 - RNA, 20 nt, Human
cugaccccucauagcccuca

SEQ ID NO: 1145077 - RNA, 21 nt, Human
cugaccccucauagcccucac

SEQ ID NO: 1145078 - RNA, 22 nt, Human
cugagcuugcagagaugaggcc

SEQ ID NO: 1145079 - RNA, 21 nt, Human
cuagacccacuggacucaccu

SEQ ID NO: 1145080 - RNA, 13 nt, Human
cuaggguccuggg

SEQ ID NO: 1145081 - RNA, 14 nt, Human
cuaggguccugggg

SEQ ID NO: 1145082 - RNA, 15 nt, Human
cuaggguccugggga

SEQ ID NO: 1145083 - RNA, 21 nt, Human
cuaguuccccuguuuauucau

SEQ ID NO: 1145084 - RNA, 18 nt, Human
cuaccuuccaguuccuca

SEQ ID NO: 1145085 - RNA, 14 nt, Human
cucacccuggggcu

SEQ ID NO: 1145086 - RNA, 16 nt, Human
cucaccucccccaucu

SEQ ID NO: 1145087 - RNA, 22 nt, Human
cgcaucuaguuccccuguuuau

SEQ ID NO: 1145088 - RNA, 22 nt, Human
cgaggucgggcagcacaagugu

SEQ ID NO: 1145089 - RNA, 19 nt, Human
cgaguagcugagauuauag

SEQ ID NO: 1145090 - RNA, 18 nt, Human
cgauacaccgggccugga

SEQ ID NO: 1145091 - RNA, 20 nt, Human
cgauacaccgggccuggaga

SEQ ID NO: 1145092 - RNA, 21 nt, Human
cgauacaccgggccuggagaa

SEQ ID NO: 1145093 - RNA, 17 nt, Human
cguaaugcgccaauaaa

SEQ ID NO: 1145094 - RNA, 22 nt, Human
cguguccccuauccuacuuccc

SEQ ID NO: 1145095 - RNA, 14 nt, Human
cguuaccaggcagg

SEQ ID NO: 1145096 - RNA, 21 nt, Human
cuaaagaagguuucagaaaga

SEQ ID NO: 1145097 - RNA, 16 nt, Human
cccacuggacucaccu

SEQ ID NO: 1145098 - RNA, 16 nt, Human
cccaggcugagccuca

SEQ ID NO: 1145099 - RNA, 17 nt, Human
cccaggcugagccucag

SEQ ID NO: 1145100 - RNA, 18 nt, Human
cccaggcugagccucagu

SEQ ID NO: 1145101 - RNA, 13 nt, Human
cccaggcuggagu

SEQ ID NO: 1145102 - RNA, 17 nt, Human
ccccagaggcuggguga

SEQ ID NO: 1145103 - RNA, 16 nt, Human
cccuccucucugcccu

SEQ ID NO: 1145104 - RNA, 16 nt, Human
cccucacccuggggcu

SEQ ID NO: 1145105 - RNA, 20 nt, Human
cccggcuaauuuuuguauuu

SEQ ID NO: 1145106 - RNA, 23 nt, Human
ccccucugcccugcgggucacag

SEQ ID NO: 1145107 - RNA, 15 nt, Human
ccccucugcccugcg

SEQ ID NO: 1145108 - RNA, 20 nt, Human
ccccucugcccugcggguca

SEQ ID NO: 1145109 - RNA, 16 nt, Human
ccccucuggcuccagc

SEQ ID NO: 1145110 - RNA, 18 nt, Human
ccccucuggcuccagcug

SEQ ID NO: 1145111 - RNA, 18 nt, Human
ccccugcaaagcccagcu

SEQ ID NO: 1145112 - RNA, 20 nt, Human
ccccugcaaagcccagcuug

SEQ ID NO: 1145113 - RNA, 21 nt, Human
ccccugcaaagcccagcuuga

SEQ ID NO: 1145114 - RNA, 12 nt, Human
ccaugucgccuc

SEQ ID NO: 1145115 - RNA, 15 nt, Human
ccaugucgccucugc

SEQ ID NO: 1145116 - RNA, 16 nt, Human
ccaugucgccucugca

SEQ ID NO: 1145117 - RNA, 17 nt, Human
ccaugucgccucugcau

SEQ ID NO: 1145118 - RNA, 19 nt, Human
ccaugucgccucugcauuc

SEQ ID NO: 1145119 - RNA, 19 nt, Human
ccaguucuucgacuguugu

SEQ ID NO: 1145120 - RNA, 21 nt, Human
ccaguugcugcuucaauuuau

SEQ ID NO: 1145121 - RNA, 14 nt, Human
ccauaaucuggacu

SEQ ID NO: 1145122 - RNA, 21 nt, Human
ccauaaucuggacuccucugu

SEQ ID NO: 1145123 - RNA, 21 nt, Human
ccauuucauuugugccagaau

SEQ ID NO: 1145124 - RNA, 22 nt, Human
ccauuucauuugugccagaaug

SEQ ID NO: 1145125 - RNA, 21 nt, Human
ccaggcugcucuugaacuccu

SEQ ID NO: 1145126 - RNA, 18 nt, Human
ccagucccccugccccag

SEQ ID NO: 1145127 - RNA, 17 nt, Human
ccugccucagccucccg

SEQ ID NO: 1145128 - RNA, 18 nt, Human
ccugcugagucccaggcu

SEQ ID NO: 1145129 - RNA, 19 nt, Human
ccugcugagucccaggcug

SEQ ID NO: 1145130 - RNA, 20 nt, Human
ccugcugagucccaggcuga

SEQ ID NO: 1145131 - RNA, 18 nt, Human
ccugaccccucauagccc

SEQ ID NO: 1145132 - RNA, 23 nt, Human
ccucuugccacugccucuuccuc

SEQ ID NO: 1145133 - RNA, 22 nt, Human
ccucuugccacugccucuuccu

SEQ ID NO: 1145134 - RNA, 14 nt, Human
ccuggauuugcaua

SEQ ID NO: 1145135 - RNA, 18 nt, Human
ccuggggaaccugacccc

SEQ ID NO: 1145136 - RNA, 18 nt, Human
ccugguuuccugcccugg

SEQ ID NO: 1145137 - RNA, 19 nt, Human
ccugguuuccugcccuggg

SEQ ID NO: 1145138 - RNA, 20 nt, Human
ccugguuuccugcccuggga

SEQ ID NO: 1145139 - RNA, 21 nt, Human
ccugguuuccugcccugggag

SEQ ID NO: 1145140 - RNA, 22 nt, Human
ccugguuuccugcccugggagg

SEQ ID NO: 1145141 - RNA, 21 nt, Human
ccucauuccaccuucccaugc

SEQ ID NO: 1145142 - RNA, 20 nt, Human
ccucccuuggggccuaugca

SEQ ID NO: 1145143 - RNA, 19 nt, Human
ccuccuaucagaaguuucu

SEQ ID NO: 1145144 - RNA, 19 nt, Human
ccucggacuuagcugggag

SEQ ID NO: 1145145 - RNA, 20 nt, Human
ccucggacuuagcugggaga

SEQ ID NO: 1145146 - RNA, 12 nt, Human
ccgacagccugg

SEQ ID NO: 1145147 - RNA, 13 nt, Human
ccgacagccuggc

SEQ ID NO: 1145148 - RNA, 14 nt, Human
ccgacagccuggca

SEQ ID NO: 1145149 - RNA, 15 nt, Human
ccgacagccuggcac

SEQ ID NO: 1145150 - RNA, 22 nt, Human
ccgacagccuggcacagggcag

SEQ ID NO: 1145151 - RNA, 14 nt, Human
ccgucccccucugg

SEQ ID NO: 1145152 - RNA, 21 nt, Human
ccuaaugcgcaggcuggcccu

SEQ ID NO: 1145153 - RNA, 13 nt, Human
ccuaauuccacag

SEQ ID NO: 1145154 - RNA, 19 nt, Human
ccaccgggcugggagcucu

SEQ ID NO: 1145155 - RNA, 22 nt, Human
ccaccgggcugggagcucugca

SEQ ID NO: 1145156 - RNA, 16 nt, Human
ccacacuucaggcucu

SEQ ID NO: 1145157 - RNA, 20 nt, Human
ccacacuucaggcucuucuc

SEQ ID NO: 1145158 - RNA, 21 nt, Human
ccacacuucaggcucuucucc

SEQ ID NO: 1145159 - RNA, 22 nt, Human
ccacacuucaggcucuucuccu

SEQ ID NO: 1145160 - RNA, 15 nt, Human
ccaccacgcccggcu

SEQ ID NO: 1145161 - RNA, 14 nt, Human
cauuugugaaauga

SEQ ID NO: 1145162 - RNA, 16 nt, Human
cauuugugaaaugaug

SEQ ID NO: 1145163 - RNA, 13 nt, Human
ccaaaugcagcuu

SEQ ID NO: 1145164 - RNA, 15 nt, Human
ccaaaugcagcuuua

SEQ ID NO: 1145165 - RNA, 18 nt, Human
ccaaaugcagcuuuaaaa

SEQ ID NO: 1145166 - RNA, 18 nt, Human
ccaaggaugccccguccc

SEQ ID NO: 1145167 - RNA, 14 nt, Human
caugucaagauuca

SEQ ID NO: 1145168 - RNA, 17 nt, Human
caugucaagauucagcu

SEQ ID NO: 1145169 - RNA, 19 nt, Human
caugucaagauucagcuag

SEQ ID NO: 1145170 - RNA, 14 nt, Human
cauucucacuccua

SEQ ID NO: 1145171 - RNA, 15 nt, Human
cauuccuugcugaaa

SEQ ID NO: 1145172 - RNA, 18 nt, Human
cauucuagguuugcaaga

SEQ ID NO: 1145173 - RNA, 13 nt, Human
cauucucacuccu

SEQ ID NO: 1145174 - RNA, 14 nt, Human
cauggccagguggc

SEQ ID NO: 1145175 - RNA, 13 nt, Human
cauggccaggugg

SEQ ID NO: 1145176 - RNA, 14 nt, Human
cagggagggccugg

SEQ ID NO: 1145177 - RNA, 16 nt, Human
cagggagggccugggc

SEQ ID NO: 1145178 - RNA, 17 nt, Human
cagggagggccugggcc

SEQ ID NO: 1145179 - RNA, 20 nt, Human
caggccugccuguucccauu

SEQ ID NO: 1145180 - RNA, 15 nt, Human
caggcgccccuuccc

SEQ ID NO: 1145181 - RNA, 17 nt, Human
caggcgccccuuccccc

SEQ ID NO: 1145182 - RNA, 18 nt, Human
caggcuggcccugcccug

SEQ ID NO: 1145183 - RNA, 19 nt, Human
caggcuggcccugcccugg

SEQ ID NO: 1145184 - RNA, 20 nt, Human
caggcuggcccugcccuggu

SEQ ID NO: 1145185 - RNA, 12 nt, Human
cagggagggccu

SEQ ID NO: 1145186 - RNA, 13 nt, Human
cagggagggccug

SEQ ID NO: 1145187 - RNA, 15 nt, Human
caggagggaggggga

SEQ ID NO: 1145188 - RNA, 23 nt, Human
caggagggagggggaaggcaggg

SEQ ID NO: 1145189 - RNA, 14 nt, Human
cagucucccucccu

SEQ ID NO: 1145190 - RNA, 18 nt, Human
cagugccaggaacccuua

SEQ ID NO: 1145191 - RNA, 19 nt, Human
cagugggacagggcauggc

SEQ ID NO: 1145192 - RNA, 21 nt, Human
cagcucccaaggcucugagca

SEQ ID NO: 1145193 - RNA, 12 nt, Human
cagcugccugca

SEQ ID NO: 1145194 - RNA, 13 nt, Human
caccagggaaggg

SEQ ID NO: 1145195 - RNA, 18 nt, Human
caccagggaaggggacaa

SEQ ID NO: 1145196 - RNA, 21 nt, Human
caccagggaaggggacaagga

SEQ ID NO: 1145197 - RNA, 13 nt, Human
caccaacccucag

SEQ ID NO: 1145198 - RNA, 13 nt, Human
cacagaacccuug

SEQ ID NO: 1145199 - RNA, 16 nt, Human
caaucccaccaacccu

SEQ ID NO: 1145200 - RNA, 17 nt, Human
caaucccaccaacccuc

SEQ ID NO: 1145201 - RNA, 22 nt, Human
caaucccaccaacccucagagc

SEQ ID NO: 1145202 - RNA, 23 nt, Human
caaucccaccaacccucagagcc

SEQ ID NO: 1145203 - RNA, 23 nt, Human
caauaaaauuauagcucuaaugu

SEQ ID NO: 1145204 - RNA, 13 nt, Human
caauaaaauuaua

SEQ ID NO: 1145205 - RNA, 20 nt, Human
caauaaaauuauagcucuaa

SEQ ID NO: 1145206 - RNA, 20 nt, Human
caauaaaaucuugaaaaugc

SEQ ID NO: 1145207 - RNA, 15 nt, Human
caaggcucugagcaa

SEQ ID NO: 1145208 - RNA, 13 nt, Human
caaguuucaucca

SEQ ID NO: 1145209 - RNA, 20 nt, Human
caaguuucauccagaacuac

SEQ ID NO: 1145210 - RNA, 16 nt, Human
caaguuucauccagaa

SEQ ID NO: 1145211 - RNA, 14 nt, Human
cacucuucauggug

SEQ ID NO: 1145212 - RNA, 12 nt, Human
caccuacugagu

SEQ ID NO: 1145213 - RNA, 13 nt, Human
caccugcccaacc

SEQ ID NO: 1145214 - RNA, 18 nt, Human
caccugcccaaccugcuc

SEQ ID NO: 1145215 - RNA, 19 nt, Human
caccugcccaaccugcucu

SEQ ID NO: 1145216 - RNA, 23 nt, Human
caccuuuauucuggcagaggagg

SEQ ID NO: 1145217 - RNA, 19 nt, Human
cagaaguuucucagcuccc

SEQ ID NO: 1145218 - RNA, 13 nt, Human
cacugggcuucua

SEQ ID NO: 1145219 - RNA, 14 nt, Human
cacuguuuucuagu

SEQ ID NO: 1145220 - RNA, 16 nt, Human
cacuguuuucuagugu

SEQ ID NO: 1145221 - RNA, 17 nt, Human
cacuguuuucuagugua

SEQ ID NO: 1145222 - RNA, 21 nt, Human
cacuguuuucuaguguaucaa

SEQ ID NO: 1145223 - RNA, 23 nt, Human
cacuguuuucuaguguaucaaaa

SEQ ID NO: 1145224 - RNA, 19 nt, Human
cacuuguugauuaauggaa

SEQ ID NO: 1145225 - RNA, 12 nt, Human
auuguguuuaca

SEQ ID NO: 1145226 - RNA, 14 nt, Human
auuguguuuacauu

SEQ ID NO: 1145227 - RNA, 15 nt, Human
auuguguuuacauuu

SEQ ID NO: 1145228 - RNA, 18 nt, Human
auuguguuuacauuuuau

SEQ ID NO: 1145229 - RNA, 19 nt, Human
auuguguuuacauuuuaug

SEQ ID NO: 1145230 - RNA, 23 nt, Human
auuguguuuacauuuuauggugc

SEQ ID NO: 1145231 - RNA, 22 nt, Human
auuguguuuacauuuuauggug

SEQ ID NO: 1145232 - RNA, 17 nt, Human
auucuugccaaauauaa

SEQ ID NO: 1145233 - RNA, 15 nt, Human
auuccugcauuugug

SEQ ID NO: 1145234 - RNA, 18 nt, Human
auuccugcauuugugaaa

SEQ ID NO: 1145235 - RNA, 13 nt, Human
auucaaauuuuau

SEQ ID NO: 1145236 - RNA, 14 nt, Human
auuaggauuucaug

SEQ ID NO: 1145237 - RNA, 16 nt, Human
auuaggauuucaugau

SEQ ID NO: 1145238 - RNA, 14 nt, Human
caaccauccaauua

SEQ ID NO: 1145239 - RNA, 18 nt, Human
caacuaauuuuuguauuu

SEQ ID NO: 1145240 - RNA, 21 nt, Human
caacacacagauuugagcuca

SEQ ID NO: 1145241 - RNA, 22 nt, Human
caacacacagauuugagcucag

SEQ ID NO: 1145242 - RNA, 18 nt, Human
caaagucaggaaucauca

SEQ ID NO: 1145243 - RNA, 22 nt, Human
caaagucaggaaucaucaggaa

SEQ ID NO: 1145244 - RNA, 19 nt, Human
caaaugaagacaaaacaua

SEQ ID NO: 1145245 - RNA, 22 nt, Human
auuuuauggugccuaguauuga

SEQ ID NO: 1145246 - RNA, 21 nt, Human
caaaaggauaaugaauacuuu

SEQ ID NO: 1145247 - RNA, 18 nt, Human
caaaccccgaccaccugc

SEQ ID NO: 1145248 - RNA, 21 nt, Human
caaaccccgaccaccugccca

SEQ ID NO: 1145249 - RNA, 20 nt, Human
cugaucugaugcaagcaaga

SEQ ID NO: 1145250 - RNA, 13 nt, Human
cugccuccucuuc

SEQ ID NO: 1145251 - RNA, 14 nt, Human
cugccuccucuuca

SEQ ID NO: 1145252 - RNA, 15 nt, Human
cugccuccucuucaa

SEQ ID NO: 1145253 - RNA, 24 nt, Human
cugccuccucuucaacugaccagc

SEQ ID NO: 1145254 - RNA, 14 nt, Human
cuggcagaggaggg

SEQ ID NO: 1145255 - RNA, 20 nt, Human
cuggcagccgugccuucagc

SEQ ID NO: 1145256 - RNA, 21 nt, Human
cuggcagccgugccuucagcu

SEQ ID NO: 1145257 - RNA, 22 nt, Human
cuggcagccgugccuucagcuc

SEQ ID NO: 1145258 - RNA, 11 nt, Human
cuggcccugcc

SEQ ID NO: 1145259 - RNA, 13 nt, Human
cuggcccugcccu

SEQ ID NO: 1145260 - RNA, 14 nt, Human
cuggcccugcccug

SEQ ID NO: 1145261 - RNA, 15 nt, Human
cuggcccugcccugg

SEQ ID NO: 1145262 - RNA, 16 nt, Human
cuggccgggagccuga

SEQ ID NO: 1145263 - RNA, 12 nt, Human
cugggccagaau

SEQ ID NO: 1145264 - RNA, 14 nt, Human
cugggccagaauuu

SEQ ID NO: 1145265 - RNA, 22 nt, Human
cuggguuccagcaauucuccug

SEQ ID NO: 1145266 - RNA, 13 nt, Human
cugguuuccugcc

SEQ ID NO: 1145267 - RNA, 14 nt, Human
cugguuuccugccc

SEQ ID NO: 1145268 - RNA, 16 nt, Human
cugguuuccugcccug

SEQ ID NO: 1145269 - RNA, 20 nt, Human
cuguacugaaguaaaacaaa

SEQ ID NO: 1145270 - RNA, 19 nt, Human
cuguacugaaguaaaacaa

SEQ ID NO: 1145271 - RNA, 13 nt, Human
cuguacugauuca

SEQ ID NO: 1145272 - RNA, 14 nt, Human
cuguacugauucaa

SEQ ID NO: 1145273 - RNA, 17 nt, Human
cuguacugauucaauuu

SEQ ID NO: 1145274 - RNA, 21 nt, Human
cuguacugauucaauuugaug

SEQ ID NO: 1145275 - RNA, 21 nt, Human
cuuacauuagcaguuugcuuu

SEQ ID NO: 1145276 - RNA, 22 nt, Human
cuuacauuagcaguuugcuuug

SEQ ID NO: 1145277 - RNA, 21 nt, Human
cuuagcauuuucugcaucucc

SEQ ID NO: 1145278 - RNA, 19 nt, Human
cuuagcauuuucugcaucu

SEQ ID NO: 1145279 - RNA, 13 nt, Human
cuuagcugggaga

SEQ ID NO: 1145280 - RNA, 13 nt, Human
cuuccucuccacu

SEQ ID NO: 1145281 - RNA, 14 nt, Human
cuuccucuccacug

SEQ ID NO: 1145282 - RNA, 15 nt, Human
cuuccucuccacugc

SEQ ID NO: 1145283 - RNA, 14 nt, Human
cuuccucugagccu

SEQ ID NO: 1145284 - RNA, 15 nt, Human
cuuccucugagccuu

SEQ ID NO: 1145285 - RNA, 16 nt, Human
cuuccucugaggcuga

SEQ ID NO: 1145286 - RNA, 22 nt, Human
cuuccucugaggcugaaauuca

SEQ ID NO: 1145287 - RNA, 13 nt, Human
cuucucacauuua

SEQ ID NO: 1145288 - RNA, 20 nt, Human
cuucucacauuuauauuuuu

SEQ ID NO: 1145289 - RNA, 15 nt, Human
cuucuuaauguacau

SEQ ID NO: 1145290 - RNA, 16 nt, Human
cuucuuaauguacaua

SEQ ID NO: 1145291 - RNA, 20 nt, Human
cuucuuaauguacauagugc

SEQ ID NO: 1145292 - RNA, 18 nt, Human
cuucuuaauguacauagu

SEQ ID NO: 1145293 - RNA, 23 nt, Human
cuugaagguauaucuagguuuau

SEQ ID NO: 1145294 - RNA, 15 nt, Human
cuugcaaaaucaguu

SEQ ID NO: 1145295 - RNA, 16 nt, Human
cuugcaaaaucaguuu

SEQ ID NO: 1145296 - RNA, 17 nt, Human
cuugcaaaaucaguuuu

SEQ ID NO: 1145297 - RNA, 22 nt, Human
cuugcaaaaucaguuuuccucu

SEQ ID NO: 1145298 - RNA, 16 nt, Human
cuuggguagcgcacuc

SEQ ID NO: 1145299 - RNA, 12 nt, Human
cuuuguaugcac

SEQ ID NO: 1145300 - RNA, 12 nt, Human
gaaaaugugugu

SEQ ID NO: 1145301 - RNA, 15 nt, Human
gaaaaugugugugug

SEQ ID NO: 1145302 - RNA, 13 nt, Human
gaacaaaugaaga

SEQ ID NO: 1145303 - RNA, 17 nt, Human
gaacacauaauucagga

SEQ ID NO: 1145304 - RNA, 20 nt, Human
gaacacauaauucaggaagc

SEQ ID NO: 1145305 - RNA, 14 nt, Human
gaagaccuuuuucu

SEQ ID NO: 1145306 - RNA, 17 nt, Human
gaagaccuuuuucugca

SEQ ID NO: 1145307 - RNA, 21 nt, Human
gaagaccuuuuucugcacuau

SEQ ID NO: 1145308 - RNA, 21 nt, Human
gacacucgaggucgggcagca

SEQ ID NO: 1145309 - RNA, 11 nt, Human
gacagccuggc

SEQ ID NO: 1145310 - RNA, 12 nt, Human
gacagccuggca

SEQ ID NO: 1145311 - RNA, 13 nt, Human
gacagccuggcac

SEQ ID NO: 1145312 - RNA, 17 nt, Human
gacaggguuucaccaug

SEQ ID NO: 1145313 - RNA, 15 nt, Human
gacaguaauuguguu

SEQ ID NO: 1145314 - RNA, 18 nt, Human
gacaguaauuguguuuac

SEQ ID NO: 1145315 - RNA, 19 nt, Human
gacaguaauuguguuuaca

SEQ ID NO: 1145316 - RNA, 22 nt, Human
gacaguaauuguguuuacauuu

SEQ ID NO: 1145317 - RNA, 20 nt, Human
gacaguaauuguguuuacau

SEQ ID NO: 1145318 - RNA, 13 nt, Human
gaccccuggcuuu

SEQ ID NO: 1145319 - RNA, 21 nt, Human
gaccccuggcuuuucacugcu

SEQ ID NO: 1145320 - RNA, 22 nt, Human
gaccccuggcuuuucacugcug

SEQ ID NO: 1145321 - RNA, 16 nt, Human
gacuguacuccuccca

SEQ ID NO: 1145322 - RNA, 17 nt, Human
gacuguacuccucccag

SEQ ID NO: 1145323 - RNA, 18 nt, Human
gacuguacuccucccagg

SEQ ID NO: 1145324 - RNA, 21 nt, Human
gacugucucaagagggcacug

SEQ ID NO: 1145325 - RNA, 22 nt, Human
gacugucucaagagggcacugg

SEQ ID NO: 1145326 - RNA, 23 nt, Human
gacugucucaagagggcacuggu

SEQ ID NO: 1145327 - RNA, 13 nt, Human
gagaagcugcuca

SEQ ID NO: 1145328 - RNA, 22 nt, Human
gagaagcugcucaacuugcaaa

SEQ ID NO: 1145329 - RNA, 23 nt, Human
gauggaggaaaaccaagccgugg

SEQ ID NO: 1145330 - RNA, 17 nt, Human
gaugucccaacuuguaa

SEQ ID NO: 1145331 - RNA, 18 nt, Human
gaugucccaacuuguaaa

SEQ ID NO: 1145332 - RNA, 15 nt, Human
gauuucagcucacug

SEQ ID NO: 1145333 - RNA, 17 nt, Human
gauuucagcucacugca

SEQ ID NO: 1145334 - RNA, 20 nt, Human
gauuucagcucacugcaacc

SEQ ID NO: 1145335 - RNA, 21 nt, Human
gauuuuuuuuuuuuuccuguc

SEQ ID NO: 1145336 - RNA, 17 nt, Human
gcaauacaaguuucauc

SEQ ID NO: 1145337 - RNA, 11 nt, Human
gcacacagcac

SEQ ID NO: 1145338 - RNA, 23 nt, Human
gcacacagcacgggggccaagga

SEQ ID NO: 1145339 - RNA, 18 nt, Human
gcacacagaggggaguca

SEQ ID NO: 1145340 - RNA, 17 nt, Human
gcaccuaccaccacgcc

SEQ ID NO: 1145341 - RNA, 18 nt, Human
gcaccuaccaccacgccc

SEQ ID NO: 1145342 - RNA, 14 nt, Human
gcacuauaugcaaa

SEQ ID NO: 1145343 - RNA, 15 nt, Human
gcacuauaugcaaac

SEQ ID NO: 1145344 - RNA, 18 nt, Human
gcacuauaugcaaacagg

SEQ ID NO: 1145345 - RNA, 13 nt, Human
gcacucuucaugg

SEQ ID NO: 1145346 - RNA, 15 nt, Human
gcacucuucauggug

SEQ ID NO: 1145347 - RNA, 13 nt, Human
gcaggcuggcccu

SEQ ID NO: 1145348 - RNA, 14 nt, Human
gcaggcuggcccug

SEQ ID NO: 1145349 - RNA, 13 nt, Human
gcaucgcaaugua

SEQ ID NO: 1145350 - RNA, 13 nt, Human
gcauggccaggug

SEQ ID NO: 1145351 - RNA, 14 nt, Human
gcauggccaggugg

SEQ ID NO: 1145352 - RNA, 17 nt, Human
gcauggccagguggcca

SEQ ID NO: 1145353 - RNA, 23 nt, Human
gcaugucccuaccgagucucuuc

SEQ ID NO: 1145354 - RNA, 22 nt, Human
gccaagcaccuagccucgcucu

SEQ ID NO: 1145355 - RNA, 16 nt, Human
gcccuaaugcgcaggc

SEQ ID NO: 1145356 - RNA, 17 nt, Human
gcccuaaugcgcaggcu

SEQ ID NO: 1145357 - RNA, 19 nt, Human
gcccuaaugcgcaggcugg

SEQ ID NO: 1145358 - RNA, 20 nt, Human
gcccuaaugcgcaggcuggc

SEQ ID NO: 1145359 - RNA, 23 nt, Human
gcccuaaugcgcaggcuggcccu

SEQ ID NO: 1145360 - RNA, 15 nt, Human
gcccucacccugggg

SEQ ID NO: 1145361 - RNA, 11 nt, Human
gcccugcccug

SEQ ID NO: 1145362 - RNA, 12 nt, Human
gcccugcccugg

SEQ ID NO: 1145363 - RNA, 16 nt, Human
gcccugcccugguuuc

SEQ ID NO: 1145364 - RNA, 18 nt, Human
gcccugcccugguuuccu

SEQ ID NO: 1145365 - RNA, 22 nt, Human
gcccuguccugccuaaggcuga

SEQ ID NO: 1145366 - RNA, 16 nt, Human
gccuaguauugacaaa

SEQ ID NO: 1145367 - RNA, 14 nt, Human
gccuaguauugaca

SEQ ID NO: 1145368 - RNA, 12 nt, Human
gccucuuccucc

SEQ ID NO: 1145369 - RNA, 23 nt, Human
gccuguucccauucuugcauggc

SEQ ID NO: 1145370 - RNA, 14 nt, Human
gcuaaucagcauuc

SEQ ID NO: 1145371 - RNA, 16 nt, Human
gcuaaucagcauucuc

SEQ ID NO: 1145372 - RNA, 17 nt, Human
gcuaaucagcauucuca

SEQ ID NO: 1145373 - RNA, 22 nt, Human
gcuaaucagcauucucacuccu

SEQ ID NO: 1145374 - RNA, 16 nt, Human
gcucacugcauccucc

SEQ ID NO: 1145375 - RNA, 20 nt, Human
gcucacugcauccuccgccu

SEQ ID NO: 1145376 - RNA, 16 nt, Human
gcucccacaggcccuu

SEQ ID NO: 1145377 - RNA, 17 nt, Human
gcucccacaggcccuuc

SEQ ID NO: 1145378 - RNA, 20 nt, Human
gcucccacaggcccuuccuc

SEQ ID NO: 1145379 - RNA, 21 nt, Human
gcucccacaggcccuuccucu

SEQ ID NO: 1145380 - RNA, 22 nt, Human
gcucccacaggcccuuccucuc

SEQ ID NO: 1145381 - RNA, 12 nt, Human
gcuccugccacc

SEQ ID NO: 1145382 - RNA, 18 nt, Human
gcuccugccaccacgccc

SEQ ID NO: 1145383 - RNA, 21 nt, Human
gcuccugccaccacgcccggc

SEQ ID NO: 1145384 - RNA, 23 nt, Human
gcuccuggggguucuuucuuccu

SEQ ID NO: 1145385 - RNA, 12 nt, Human
gcuuauguuaac

SEQ ID NO: 1145386 - RNA, 19 nt, Human
ggacaaggacuaggguccu

SEQ ID NO: 1145387 - RNA, 12 nt, Human
ggacuccucugu

SEQ ID NO: 1145388 - RNA, 22 nt, Human
ggagacugcugagucaacccaa

SEQ ID NO: 1145389 - RNA, 15 nt, Human
ggcacugguggcccg

SEQ ID NO: 1145390 - RNA, 13 nt, Human
ggcacuguacaaa

SEQ ID NO: 1145391 - RNA, 20 nt, Human
ggcagacauugugcuagugc

SEQ ID NO: 1145392 - RNA, 18 nt, Human
ggcagccgugccuucagc

SEQ ID NO: 1145393 - RNA, 19 nt, Human
ggccucacuaggcuucugg

SEQ ID NO: 1145394 - RNA, 12 nt, Human
ggcucuucuccu

SEQ ID NO: 1145395 - RNA, 13 nt, Human
ggcucuucuccuu

SEQ ID NO: 1145396 - RNA, 14 nt, Human
ggcucuucuccuuu

SEQ ID NO: 1145397 - RNA, 15 nt, Human
ggcucuucuccuuuc

SEQ ID NO: 1145398 - RNA, 23 nt, Human
ggcucuucuccuuucacaaccuu

SEQ ID NO: 1145399 - RNA, 16 nt, Human
ggcucuucuccuuuca

SEQ ID NO: 1145400 - RNA, 22 nt, Human
ggcugacagacagcccuccauc

SEQ ID NO: 1145401 - RNA, 13 nt, Human
ggcugcccuggug

SEQ ID NO: 1145402 - RNA, 14 nt, Human
ggcugcccuggugc

SEQ ID NO: 1145403 - RNA, 15 nt, Human
ggcugcccuggugcu

SEQ ID NO: 1145404 - RNA, 16 nt, Human
ggcugcccuggugcug

SEQ ID NO: 1145405 - RNA, 19 nt, Human
ggcugcccuggugcugcca

SEQ ID NO: 1145406 - RNA, 22 nt, Human
ggcugcccuggugcugccacac

SEQ ID NO: 1145407 - RNA, 16 nt, Human
ggcugccuuagaaccu

SEQ ID NO: 1145408 - RNA, 12 nt, Human
ggcugcggcccc

SEQ ID NO: 1145409 - RNA, 18 nt, Human
ggcugcggccccuccccc

SEQ ID NO: 1145410 - RNA, 14 nt, Human
aaaaauaacaauga

SEQ ID NO: 1145411 - RNA, 15 nt, Human
ggcuucccgcucagc

SEQ ID NO: 1145412 - RNA, 16 nt, Human
ggcuucccgcucagcc

SEQ ID NO: 1145413 - RNA, 17 nt, Human
ggcuucccgcucagccc

SEQ ID NO: 1145414 - RNA, 18 nt, Human
ggcuucccgcucagcccu

SEQ ID NO: 1145415 - RNA, 19 nt, Human
ggcuucccgcucagcccuc

SEQ ID NO: 1145416 - RNA, 21 nt, Human
ggcuucccgcucagcccuccc

SEQ ID NO: 1145417 - RNA, 22 nt, Human
ggcuucccgcucagcccucccu

SEQ ID NO: 1145418 - RNA, 13 nt, Human
gggaaccugaccc

SEQ ID NO: 1145419 - RNA, 13 nt, Human
gggacagagcaga

SEQ ID NO: 1145420 - RNA, 21 nt, Human
aaaacaugcagaacaaaugaa

SEQ ID NO: 1145421 - RNA, 23 nt, Human
aaaacaugcagaacaaaugaaga

SEQ ID NO: 1145422 - RNA, 23 nt, Human
aaaaccuguucaagucuaccaac

SEQ ID NO: 1145423 - RNA, 22 nt, Human
aaaaccuuccaugucaagauuc

SEQ ID NO: 1145424 - RNA, 11 nt, Human
aaaaccuguuc

SEQ ID NO: 1145425 - RNA, 20 nt, Human
aaaacuucguuuaaugaaug

SEQ ID NO: 1145426 - RNA, 15 nt, Human
aaaauguuauuuccc

SEQ ID NO: 1145427 - RNA, 16 nt, Human
aaaauguuauuucccu

SEQ ID NO: 1145428 - RNA, 12 nt, Human
aaacaauaccug

SEQ ID NO: 1145429 - RNA, 20 nt, Human
aaacaggguaacuaacuaaa

SEQ ID NO: 1145430 - RNA, 13 nt, Human
ggggaaggcaggg

SEQ ID NO: 1145431 - RNA, 15 nt, Human
aaacauuaugaugug

SEQ ID NO: 1145432 - RNA, 22 nt, Human
aaacugcccccucugcccugcg

SEQ ID NO: 1145433 - RNA, 13 nt, Human
aaagacagugaaa

SEQ ID NO: 1145434 - RNA, 21 nt, Human
aaagauggcugugccucugcc

SEQ ID NO: 1145435 - RNA, 22 nt, Human
aaagauggcugugccucugccu

SEQ ID NO: 1145436 - RNA, 23 nt, Human
aaagauggcugugccucugccug

SEQ ID NO: 1145437 - RNA, 15 nt, Human
aaagcugaaaacugc

SEQ ID NO: 1145438 - RNA, 12 nt, Human
aaagcugaaaac

SEQ ID NO: 1145439 - RNA, 20 nt, Human
guaauaggcguaacuaauuu

SEQ ID NO: 1145440 - RNA, 13 nt, Human
guaauuguguuua

SEQ ID NO: 1145441 - RNA, 15 nt, Human
guaauuguguuuaca

SEQ ID NO: 1145442 - RNA, 17 nt, Human
guaauuguguuuacauu

SEQ ID NO: 1145443 - RNA, 18 nt, Human
guaauuguguuuacauuu

SEQ ID NO: 1145444 - RNA, 20 nt, Human
guaauuguguuuacauuuua

SEQ ID NO: 1145445 - RNA, 18 nt, Human
guaauuuggaucucuucu

SEQ ID NO: 1145446 - RNA, 15 nt, Human
aaauauuccugcauu

SEQ ID NO: 1145447 - RNA, 14 nt, Human
aaaucauuuuaugu

SEQ ID NO: 1145448 - RNA, 15 nt, Human
aaaucauuuuauguc

SEQ ID NO: 1145449 - RNA, 17 nt, Human
aaaucauuuuaugucaa

SEQ ID NO: 1145450 - RNA, 17 nt, Human
guaccaaccauccaauu

SEQ ID NO: 1145451 - RNA, 14 nt, Human
guacuccucccagg

SEQ ID NO: 1145452 - RNA, 16 nt, Human
guacugauucaauuug

SEQ ID NO: 1145453 - RNA, 15 nt, Human
guacugauucaauuu

SEQ ID NO: 1145454 - RNA, 15 nt, Human
guacugcauuauuug

SEQ ID NO: 1145455 - RNA, 13 nt, Human
guacugcauuauu

SEQ ID NO: 1145456 - RNA, 14 nt, Human
guacuguaugauca

SEQ ID NO: 1145457 - RNA, 17 nt, Human
guacuguaugaucaaau

SEQ ID NO: 1145458 - RNA, 18 nt, Human
guacuguaugaucaaaug

SEQ ID NO: 1145459 - RNA, 20 nt, Human
guacuguaugaucaaauguu

SEQ ID NO: 1145460 - RNA, 21 nt, Human
guacuguaugaucaaauguuu

SEQ ID NO: 1145461 - RNA, 22 nt, Human
guacuguaugaucaaauguuua

SEQ ID NO: 1145462 - RNA, 23 nt, Human
guacuguaugaucaaauguuuaa

SEQ ID NO: 1145463 - RNA, 11 nt, Human
guagagacagg

SEQ ID NO: 1145464 - RNA, 12 nt, Human
gucccccucugg

SEQ ID NO: 1145465 - RNA, 14 nt, Human
gucccccucuggcu

SEQ ID NO: 1145466 - RNA, 20 nt, Human
aacagauguccaucagauga

SEQ ID NO: 1145467 - RNA, 19 nt, Human
aacagauguccaucagaug

SEQ ID NO: 1145468 - RNA, 14 nt, Human
gucgcccaggcugg

SEQ ID NO: 1145469 - RNA, 15 nt, Human
gucgcccaggcugga

SEQ ID NO: 1145470 - RNA, 20 nt, Human
gucgcccaggcuggagugca

SEQ ID NO: 1145471 - RNA, 15 nt, Human
gucucaagagggcac

SEQ ID NO: 1145472 - RNA, 17 nt, Human
gucucaagagggcacug

SEQ ID NO: 1145473 - RNA, 20 nt, Human
gucucaagagggcacuggug

SEQ ID NO: 1145474 - RNA, 22 nt, Human
gucucaagagggcacugguggc

SEQ ID NO: 1145475 - RNA, 15 nt, Human
gucucaggucccugc

SEQ ID NO: 1145476 - RNA, 16 nt, Human
gucucaggucccugca

SEQ ID NO: 1145477 - RNA, 16 nt, Human
aaccaagccguggcuu

SEQ ID NO: 1145478 - RNA, 16 nt, Human
gucugaagucacugca

SEQ ID NO: 1145479 - RNA, 17 nt, Human
gucugaagucacugcac

SEQ ID NO: 1145480 - RNA, 19 nt, Human
gucugaagucacugcacag

SEQ ID NO: 1145481 - RNA, 13 nt, Human
aaccuguucugcu

SEQ ID NO: 1145482 - RNA, 17 nt, Human
aaccuguucugcuuucc

SEQ ID NO: 1145483 - RNA, 18 nt, Human
aacguuuagcugacaaaa

SEQ ID NO: 1145484 - RNA, 13 nt, Human
aacuaacuaaaac

SEQ ID NO: 1145485 - RNA, 20 nt, Human
aacuagacucccaagcugga

SEQ ID NO: 1145486 - RNA, 15 nt, Human
gugagcaggcuguga

SEQ ID NO: 1145487 - RNA, 17 nt, Human
gugagcaggcugugagu

SEQ ID NO: 1145488 - RNA, 14 nt, Human
aacugaacucugac

SEQ ID NO: 1145489 - RNA, 16 nt, Human
gugccuggccacgccc

SEQ ID NO: 1145490 - RNA, 15 nt, Human
aacuuguaaaugugg

SEQ ID NO: 1145491 - RNA, 13 nt, Human
aacuuguuuucug

SEQ ID NO: 1145492 - RNA, 15 nt, Human
aagaaaggcugcugu

SEQ ID NO: 1145493 - RNA, 22 nt, Human
aagaaagugagcaguguuagcu

SEQ ID NO: 1145494 - RNA, 20 nt, Human
aagaaaggcugcuguacuga

SEQ ID NO: 1145495 - RNA, 23 nt, Human
aagaagguuucagaaagaagugg

SEQ ID NO: 1145496 - RNA, 12 nt, Human
aagaauucaaau

SEQ ID NO: 1145497 - RNA, 13 nt, Human
aagaauucaaauu

SEQ ID NO: 1145498 - RNA, 17 nt, Human
aagaauucaaauuuuau

SEQ ID NO: 1145499 - RNA, 18 nt, Human
aagaauucaaauuuuauc

SEQ ID NO: 1145500 - RNA, 21 nt, Human
aagaauucaaauuuuaucugc

SEQ ID NO: 1145501 - RNA, 12 nt, Human
aagaccagucca

SEQ ID NO: 1145502 - RNA, 23 nt, Human
aagaccccuuaccacugcucuga

SEQ ID NO: 1145503 - RNA, 16 nt, Human
guggcccgacagccug

SEQ ID NO: 1145504 - RNA, 17 nt, Human
guggcccgacagccugg

SEQ ID NO: 1145505 - RNA, 21 nt, Human
guggcuucccgcucagcccuc

SEQ ID NO: 1145506 - RNA, 14 nt, Human
aagaucccauuuga

SEQ ID NO: 1145507 - RNA, 12 nt, Human
aagcaaaugucu

SEQ ID NO: 1145508 - RNA, 19 nt, Human
guguguguaugcgugugug

SEQ ID NO: 1145509 - RNA, 13 nt, Human
guguuuaagacau

SEQ ID NO: 1145510 - RNA, 14 nt, Human
guguuuaagacauu

SEQ ID NO: 1145511 - RNA, 22 nt, Human
guguuuaagacauuuuuggaag

SEQ ID NO: 1145512 - RNA, 14 nt, Human
guguuuacauuuua

SEQ ID NO: 1145513 - RNA, 16 nt, Human
aaggaaaaaauaacaa

SEQ ID NO: 1145514 - RNA, 19 nt, Human
aaggaaaaaauaacaauga

SEQ ID NO: 1145515 - RNA, 15 nt, Human
guuccccuguucacu

SEQ ID NO: 1145516 - RNA, 17 nt, Human
guuccccuguucacucu

SEQ ID NO: 1145517 - RNA, 18 nt, Human
guuccccuguucacucua

SEQ ID NO: 1145518 - RNA, 17 nt, Human
guuccccuguuuauuca

SEQ ID NO: 1145519 - RNA, 18 nt, Human
guuccccuguuuauucau

SEQ ID NO: 1145520 - RNA, 19 nt, Human
guuccccuguuuauucaua

SEQ ID NO: 1145521 - RNA, 13 nt, Human
aaggauaaugaau

SEQ ID NO: 1145522 - RNA, 12 nt, Human
guugcugccuca

SEQ ID NO: 1145523 - RNA, 19 nt, Human
aaggcugagaggagagaga

SEQ ID NO: 1145524 - RNA, 16 nt, Human
aaggcugcuguacuga

SEQ ID NO: 1145525 - RNA, 17 nt, Human
aaguaaaacaaacaaua

SEQ ID NO: 1145526 - RNA, 20 nt, Human
aaguaaaacaaacaauaccu

SEQ ID NO: 1145527 - RNA, 14 nt, Human
guuucucagcuccc

SEQ ID NO: 1145528 - RNA, 23 nt, Human
guuugcauauaagggaaguaguu

SEQ ID NO: 1145529 - RNA, 15 nt, Human
aagucaacuuagcau

SEQ ID NO: 1145530 - RNA, 19 nt, Human
aagucaaggguaggguggg

SEQ ID NO: 1145531 - RNA, 12 nt, Human
aagucacugcac

SEQ ID NO: 1145532 - RNA, 14 nt, Human
aagucacugcacag

SEQ ID NO: 1145533 - RNA, 22 nt, Human
aagucuuauauauuguagauaa

SEQ ID NO: 1145534 - RNA, 16 nt, Human
uaaaauuaaagcugaa

SEQ ID NO: 1145535 - RNA, 18 nt, Human
uaaaauuaaagcugaaaa

SEQ ID NO: 1145536 - RNA, 19 nt, Human
uaaaauuaaagcugaaaac

SEQ ID NO: 1145537 - RNA, 15 nt, Human
uaaaauuauagcucu

SEQ ID NO: 1145538 - RNA, 16 nt, Human
uaaaauuauagcucua

SEQ ID NO: 1145539 - RNA, 18 nt, Human
uaaaauuauagcucuaau

SEQ ID NO: 1145540 - RNA, 21 nt, Human
uaaaauuauagcucuaauguu

SEQ ID NO: 1145541 - RNA, 20 nt, Human
uaaaauuauagcucuaaugu

SEQ ID NO: 1145542 - RNA, 17 nt, Human
uaaaccaaugaacgaag

SEQ ID NO: 1145543 - RNA, 14 nt, Human
uaaaccauugugca

SEQ ID NO: 1145544 - RNA, 22 nt, Human
uaaaccccaccccaaaauuagc

SEQ ID NO: 1145545 - RNA, 18 nt, Human
uaaacguggauguuacuc

SEQ ID NO: 1145546 - RNA, 14 nt, Human
uaaacguggauguu

SEQ ID NO: 1145547 - RNA, 12 nt, Human
uaaacugccccc

SEQ ID NO: 1145548 - RNA, 14 nt, Human
uaaagaagguuuca

SEQ ID NO: 1145549 - RNA, 14 nt, Human
uaaagaauucaaau

SEQ ID NO: 1145550 - RNA, 15 nt, Human
uaaagaauucaaauu

SEQ ID NO: 1145551 - RNA, 15 nt, Human
uaaagacaccuacug

SEQ ID NO: 1145552 - RNA, 18 nt, Human
uaaagaguuaguuugagu

SEQ ID NO: 1145553 - RNA, 12 nt, Human
aauaaaaauaau

SEQ ID NO: 1145554 - RNA, 16 nt, Human
aauaaaaucuugaaaa

SEQ ID NO: 1145555 - RNA, 16 nt, Human
aauaaaguacaagagc

SEQ ID NO: 1145556 - RNA, 15 nt, Human
aauaacaauaaaaga

SEQ ID NO: 1145557 - RNA, 17 nt, Human
aauacaaguuucaucca

SEQ ID NO: 1145558 - RNA, 19 nt, Human
uaaauaguaaaaauaaaau

SEQ ID NO: 1145559 - RNA, 20 nt, Human
uaaauaguaaaaauaaaauu

SEQ ID NO: 1145560 - RNA, 16 nt, Human
uaacaacuaugauuug

SEQ ID NO: 1145561 - RNA, 21 nt, Human
uaacaacuaugauuuggaaaa

SEQ ID NO: 1145562 - RNA, 22 nt, Human
uaacaacuaugauuuggaaaau

SEQ ID NO: 1145563 - RNA, 15 nt, Human
uaauacagcugagcu

SEQ ID NO: 1145564 - RNA, 13 nt, Human
uaauaccucccuu

SEQ ID NO: 1145565 - RNA, 21 nt, Human
uaauaccucuaauaguauaaa

SEQ ID NO: 1145566 - RNA, 23 nt, Human
uaauaccucuaauaguauaaacc

SEQ ID NO: 1145567 - RNA, 13 nt, Human
aaucuugaaaaug

SEQ ID NO: 1145568 - RNA, 20 nt, Human
uaauuauacccccugcaaag

SEQ ID NO: 1145569 - RNA, 14 nt, Human
uacaaguuucaucc

SEQ ID NO: 1145570 - RNA, 18 nt, Human
uacaaguuucauccagaa

SEQ ID NO: 1145571 - RNA, 20 nt, Human
uacaauaaaaucuugaaaau

SEQ ID NO: 1145572 - RNA, 15 nt, Human
uacaaguuucaucca

SEQ ID NO: 1145573 - RNA, 21 nt, Human
aauguacauagugcuaacaug

SEQ ID NO: 1145574 - RNA, 20 nt, Human
uacagcaaauccuuugugaa

SEQ ID NO: 1145575 - RNA, 14 nt, Human
uacagcaaauccuu

SEQ ID NO: 1145576 - RNA, 12 nt, Human
uacauuaaacau

SEQ ID NO: 1145577 - RNA, 20 nt, Human
uacauuaaacaugacuccau

SEQ ID NO: 1145578 - RNA, 14 nt, Human
uacauuaaacauga

SEQ ID NO: 1145579 - RNA, 19 nt, Human
uacauuagcaguuugcuuu

SEQ ID NO: 1145580 - RNA, 20 nt, Human
uacauuagcaguuugcuuug

SEQ ID NO: 1145581 - RNA, 21 nt, Human
aauucuugccaaauauaaaua

SEQ ID NO: 1145582 - RNA, 14 nt, Human
uacguuaccaggca

SEQ ID NO: 1145583 - RNA, 23 nt, Human
uacucaagagugguaucuugcag

SEQ ID NO: 1145584 - RNA, 22 nt, Human
uacucaagagugguaucuugca

SEQ ID NO: 1145585 - RNA, 18 nt, Human
uacucuuauagacaacau

SEQ ID NO: 1145586 - RNA, 22 nt, Human
uacucuucaguuaagccuuugg

SEQ ID NO: 1145587 - RNA, 16 nt, Human
uacugaaguaaaacaa

SEQ ID NO: 1145588 - RNA, 17 nt, Human
uacugaaguaaaacaaa

SEQ ID NO: 1145589 - RNA, 12 nt, Human
aauugcuccuug

SEQ ID NO: 1145590 - RNA, 14 nt, Human
aauuguguuuacau

SEQ ID NO: 1145591 - RNA, 19 nt, Human
aauuguguuuacauuuuau

SEQ ID NO: 1145592 - RNA, 20 nt, Human
aauuguguuuacauuuuaug

SEQ ID NO: 1145593 - RNA, 21 nt, Human
aauuguguuuacauuuuaugg

SEQ ID NO: 1145594 - RNA, 22 nt, Human
aauuguguuuacauuuuauggu

SEQ ID NO: 1145595 - RNA, 12 nt, Human
aauuugaugugg

SEQ ID NO: 1145596 - RNA, 22 nt, Human
aauuugauguggugaaaagcag

SEQ ID NO: 1145597 - RNA, 14 nt, Human
aauuuuuguauuuu

SEQ ID NO: 1145598 - RNA, 19 nt, Human
acaaaaaaaucuuccaauu

SEQ ID NO: 1145599 - RNA, 14 nt, Human
acaaaaaaaucuuc

SEQ ID NO: 1145600 - RNA, 15 nt, Human
uagagcuucuggcac

SEQ ID NO: 1145601 - RNA, 13 nt, Human
uagcaccagggaa

SEQ ID NO: 1145602 - RNA, 14 nt, Human
uagcaccagggaag

SEQ ID NO: 1145603 - RNA, 21 nt, Human
uagcaugucgucaaagcugaa

SEQ ID NO: 1145604 - RNA, 16 nt, Human
uagcaccagggaaggg

SEQ ID NO: 1145605 - RNA, 15 nt, Human
acaacaaccugguca

SEQ ID NO: 1145606 - RNA, 13 nt, Human
acaagacacagug

SEQ ID NO: 1145607 - RNA, 18 nt, Human
acaagcacuaaacaaaga

SEQ ID NO: 1145608 - RNA, 21 nt, Human
acaaggacagccccuccucca

SEQ ID NO: 1145609 - RNA, 22 nt, Human
uagugacuaaaccauugugcau

SEQ ID NO: 1145610 - RNA, 23 nt, Human
uagugacuaaaccauugugcauu

SEQ ID NO: 1145611 - RNA, 13 nt, Human
uagugaugguucc

SEQ ID NO: 1145612 - RNA, 23 nt, Human
uaguuccccuguuuauucauaug

SEQ ID NO: 1145613 - RNA, 19 nt, Human
uaguuccccuguuuauuca

SEQ ID NO: 1145614 - RNA, 17 nt, Human
uaguuccugugcacagc

SEQ ID NO: 1145615 - RNA, 14 nt, Human
uauagcucuaaugu

SEQ ID NO: 1145616 - RNA, 16 nt, Human
uauagcucuaauguuu

SEQ ID NO: 1145617 - RNA, 20 nt, Human
uauagcucuaauguuugcau

SEQ ID NO: 1145618 - RNA, 18 nt, Human
uauagcucuaauguuugc

SEQ ID NO: 1145619 - RNA, 13 nt, Human
acagacagcccuc

SEQ ID NO: 1145620 - RNA, 15 nt, Human
acagacagcccucca

SEQ ID NO: 1145621 - RNA, 15 nt, Human
uauauuuacaaaugg

SEQ ID NO: 1145622 - RNA, 15 nt, Human
uaucuagguuuauga

SEQ ID NO: 1145623 - RNA, 21 nt, Human
uaucuagguuuaugacaguaa

SEQ ID NO: 1145624 - RNA, 17 nt, Human
uaucuagguuuaugaca

SEQ ID NO: 1145625 - RNA, 13 nt, Human
acagacuucugaa

SEQ ID NO: 1145626 - RNA, 14 nt, Human
acagacuucugaaa

SEQ ID NO: 1145627 - RNA, 18 nt, Human
acagcagccccugcacaa

SEQ ID NO: 1145628 - RNA, 23 nt, Human
uaucuugcaguaucggcacugua

SEQ ID NO: 1145629 - RNA, 22 nt, Human
uaucuugcaguaucggcacugu

SEQ ID NO: 1145630 - RNA, 19 nt, Human
uaugauguauacugccacu

SEQ ID NO: 1145631 - RNA, 21 nt, Human
uaugauguauacugccacuaa

SEQ ID NO: 1145632 - RNA, 14 nt, Human
uaugaugugcuuaa

SEQ ID NO: 1145633 - RNA, 17 nt, Human
uaugaugugcuuaacag

SEQ ID NO: 1145634 - RNA, 21 nt, Human
uaugaugugcuuaacagggaa

SEQ ID NO: 1145635 - RNA, 14 nt, Human
acagccuggcacag

SEQ ID NO: 1145636 - RNA, 15 nt, Human
acagccuggcacagg

SEQ ID NO: 1145637 - RNA, 20 nt, Human
acagcuaaucagcauucuca

SEQ ID NO: 1145638 - RNA, 22 nt, Human
acagcuaaucagcauucucacu

SEQ ID NO: 1145639 - RNA, 13 nt, Human
uauucauaugcau

SEQ ID NO: 1145640 - RNA, 14 nt, Human
uauucauaugcaua

SEQ ID NO: 1145641 - RNA, 15 nt, Human
uauucauaugcauau

SEQ ID NO: 1145642 - RNA, 16 nt, Human
uauucauaugcauauu

SEQ ID NO: 1145643 - RNA, 17 nt, Human
uauucauaugcauauuu

SEQ ID NO: 1145644 - RNA, 20 nt, Human
acagugaaagaaaauaacaa

SEQ ID NO: 1145645 - RNA, 19 nt, Human
acaguucggugagcuacaa

SEQ ID NO: 1145646 - RNA, 22 nt, Human
acaguucggugagcuacaaaug

SEQ ID NO: 1145647 - RNA, 23 nt, Human
acaguucggugagcuacaaaugc

SEQ ID NO: 1145648 - RNA, 12 nt, Human
uauugacaaaau

SEQ ID NO: 1145649 - RNA, 13 nt, Human
uauugacaaaaug

SEQ ID NO: 1145650 - RNA, 16 nt, Human
uauugacaaaauguua

SEQ ID NO: 1145651 - RNA, 22 nt, Human
uauugacaaaauguuauuuccc

SEQ ID NO: 1145652 - RNA, 21 nt, Human
uauugacaaaauguuauuucc

SEQ ID NO: 1145653 - RNA, 20 nt, Human
uauuuagcaccagggaaggg

SEQ ID NO: 1145654 - RNA, 14 nt, Human
uauuuauuuaguau

SEQ ID NO: 1145655 - RNA, 19 nt, Human
uauuucaucauucacuuca

SEQ ID NO: 1145656 - RNA, 15 nt, Human
accacugcucugaug

SEQ ID NO: 1145657 - RNA, 19 nt, Human
accaggcaacuugggaacu

SEQ ID NO: 1145658 - RNA, 13 nt, Human
ucaccucccccau

SEQ ID NO: 1145659 - RNA, 15 nt, Human
ucaccucccccaucu

SEQ ID NO: 1145660 - RNA, 20 nt, Human
ucacugcacagugcaucuca

SEQ ID NO: 1145661 - RNA, 22 nt, Human
ucacugcacagugcaucucagc

SEQ ID NO: 1145662 - RNA, 24 nt, Human
ucacugcacagugcaucucagccc

SEQ ID NO: 1145663 - RNA, 14 nt, Human
accaguugcugcuu

SEQ ID NO: 1145664 - RNA, 15 nt, Human
accauuccccauggg

SEQ ID NO: 1145665 - RNA, 13 nt, Human
accauugugcauu

SEQ ID NO: 1145666 - RNA, 18 nt, Human
ucagcccucccugccccu

SEQ ID NO: 1145667 - RNA, 19 nt, Human
ucagcccucccugccccuc

SEQ ID NO: 1145668 - RNA, 12 nt, Human
acccccaggaca

SEQ ID NO: 1145669 - RNA, 12 nt, Human
accccuggcuuu

SEQ ID NO: 1145670 - RNA, 15 nt, Human
accccuggcuuuuca

SEQ ID NO: 1145671 - RNA, 17 nt, Human
accccuggcuuuucacu

SEQ ID NO: 1145672 - RNA, 18 nt, Human
ucaggaacguuuagcuga

SEQ ID NO: 1145673 - RNA, 23 nt, Human
ucaggaacguuuagcugacaaaa

SEQ ID NO: 1145674 - RNA, 22 nt, Human
ucaggaacguuuagcugacaaa

SEQ ID NO: 1145675 - RNA, 14 nt, Human
ucauauuaagaaug

SEQ ID NO: 1145676 - RNA, 15 nt, Human
ucauauuaagaauga

SEQ ID NO: 1145677 - RNA, 17 nt, Human
ucauauuaagaaugauc

SEQ ID NO: 1145678 - RNA, 18 nt, Human
ucauauuaagaaugaucu

SEQ ID NO: 1145679 - RNA, 22 nt, Human
ucauauuaagaaugaucugauu

SEQ ID NO: 1145680 - RNA, 20 nt, Human
accgagucucuucuccacug

SEQ ID NO: 1145681 - RNA, 21 nt, Human
accgagucucuucuccacugg

SEQ ID NO: 1145682 - RNA, 24 nt, Human
accgagucucuucuccacuggaug

SEQ ID NO: 1145683 - RNA, 22 nt, Human
accguguuggucuguacugauu

SEQ ID NO: 1145684 - RNA, 16 nt, Human
accguguuggucugua

SEQ ID NO: 1145685 - RNA, 20 nt, Human
accucaauuuucacuguguc

SEQ ID NO: 1145686 - RNA, 18 nt, Human
accucaauuuucacugug

SEQ ID NO: 1145687 - RNA, 14 nt, Human
ucauguuaguaaua

SEQ ID NO: 1145688 - RNA, 17 nt, Human
ucauguuaguaauaccu

SEQ ID NO: 1145689 - RNA, 18 nt, Human
ucauguuaguaauaccuc

SEQ ID NO: 1145690 - RNA, 19 nt, Human
ucauguuaguaauaccucu

SEQ ID NO: 1145691 - RNA, 21 nt, Human
ucauguuaguaauaccucuaa

SEQ ID NO: 1145692 - RNA, 12 nt, Human
accucuaauagu

SEQ ID NO: 1145693 - RNA, 16 nt, Human
accucuaauaguauaa

SEQ ID NO: 1145694 - RNA, 17 nt, Human
accucuaauaguauaaa

SEQ ID NO: 1145695 - RNA, 20 nt, Human
accucuaauaguauaaaccc

SEQ ID NO: 1145696 - RNA, 19 nt, Human
accucuaauaguauaaacc

SEQ ID NO: 1145697 - RNA, 16 nt, Human
accugaaugcucugua

SEQ ID NO: 1145698 - RNA, 18 nt, Human
accugcucuccucuugcc

SEQ ID NO: 1145699 - RNA, 19 nt, Human
accugcucuccucuugcca

SEQ ID NO: 1145700 - RNA, 18 nt, Human
ucauuugugccagaaugc

SEQ ID NO: 1145701 - RNA, 18 nt, Human
ucauuuguggguuuuuau

SEQ ID NO: 1145702 - RNA, 23 nt, Human
ucauuuguggguuuuuauuuccu

SEQ ID NO: 1145703 - RNA, 22 nt, Human
ucauuuguggguuuuuauuucc

SEQ ID NO: 1145704 - RNA, 14 nt, Human
ucauuuuaugucaa

SEQ ID NO: 1145705 - RNA, 14 nt, Human
uccaaaugcagcuu

SEQ ID NO: 1145706 - RNA, 15 nt, Human
uccaaaugcagcuuu

SEQ ID NO: 1145707 - RNA, 18 nt, Human
uccaagcuccaucuccac

SEQ ID NO: 1145708 - RNA, 23 nt, Human
accuggucacaggacucugccuc

SEQ ID NO: 1145709 - RNA, 14 nt, Human
accuuagccugccc

SEQ ID NO: 1145710 - RNA, 21 nt, Human
accuuagugcaguuauuugcu

SEQ ID NO: 1145711 - RNA, 17 nt, Human
accuuagugcaguuauu

SEQ ID NO: 1145712 - RNA, 20 nt, Human
accuuccaugucaagauuca

SEQ ID NO: 1145713 - RNA, 12 nt, Human
accuucuguggc

SEQ ID NO: 1145714 - RNA, 13 nt, Human
accuucuguggcu

SEQ ID NO: 1145715 - RNA, 15 nt, Human
accuucuguggcuca

SEQ ID NO: 1145716 - RNA, 16 nt, Human
accuucuguggcucac

SEQ ID NO: 1145717 - RNA, 15 nt, Human
uccagaccccuggcu

SEQ ID NO: 1145718 - RNA, 16 nt, Human
uccagaccccuggcuu

SEQ ID NO: 1145719 - RNA, 17 nt, Human
uccagaccccuggcuuu

SEQ ID NO: 1145720 - RNA, 18 nt, Human
uccagaccccuggcuuuu

SEQ ID NO: 1145721 - RNA, 23 nt, Human
uccagaccccuggcuuuucacug

SEQ ID NO: 1145722 - RNA, 22 nt, Human
acguuuagcugacaaaauacuu

SEQ ID NO: 1145723 - RNA, 17 nt, Human
acguuuagcugacaaaa

SEQ ID NO: 1145724 - RNA, 19 nt, Human
acuaaaacaaagccacuuu

SEQ ID NO: 1145725 - RNA, 16 nt, Human
acuaaaacaaagccac

SEQ ID NO: 1145726 - RNA, 15 nt, Human
uccccaagccuggca

SEQ ID NO: 1145727 - RNA, 13 nt, Human
acuauaugcaaac

SEQ ID NO: 1145728 - RNA, 14 nt, Human
acuauaugcaaaca

SEQ ID NO: 1145729 - RNA, 18 nt, Human
acuauaugcaaacagggu

SEQ ID NO: 1145730 - RNA, 22 nt, Human
acuaucaugucaaacgugaaaa

SEQ ID NO: 1145731 - RNA, 16 nt, Human
acuaucccggcugccc

SEQ ID NO: 1145732 - RNA, 17 nt, Human
acuaucccggcugcccu

SEQ ID NO: 1145733 - RNA, 18 nt, Human
acuaucccggcugcccuu

SEQ ID NO: 1145734 - RNA, 13 nt, Human
ucccgcucagccc

SEQ ID NO: 1145735 - RNA, 14 nt, Human
ucccgcucagcccu

SEQ ID NO: 1145736 - RNA, 15 nt, Human
ucccgcucagcccuc

SEQ ID NO: 1145737 - RNA, 16 nt, Human
ucccgcucagcccucc

SEQ ID NO: 1145738 - RNA, 20 nt, Human
ucccgcucagcccucccugc

SEQ ID NO: 1145739 - RNA, 23 nt, Human
ucccucauuccaccuucccaugc

SEQ ID NO: 1145740 - RNA, 20 nt, Human
acuccagcuggguuggaaaa

SEQ ID NO: 1145741 - RNA, 14 nt, Human
acuccuaccuggua

SEQ ID NO: 1145742 - RNA, 23 nt, Human
acuccugcacacgcuccuuccuc

SEQ ID NO: 1145743 - RNA, 11 nt, Human
ucccuucaacc

SEQ ID NO: 1145744 - RNA, 21 nt, Human
ucccuucaaccauuccccaug

SEQ ID NO: 1145745 - RNA, 22 nt, Human
ucccuucaaccauuccccaugg

SEQ ID NO: 1145746 - RNA, 13 nt, Human
acucugacaacag

SEQ ID NO: 1145747 - RNA, 16 nt, Human
uccuccccuccuccug

SEQ ID NO: 1145748 - RNA, 18 nt, Human
uccuccccuccuccugga

SEQ ID NO: 1145749 - RNA, 20 nt, Human
uccuccccuccuccuggacu

SEQ ID NO: 1145750 - RNA, 22 nt, Human
uccuccccuccuccuggacucc

SEQ ID NO: 1145751 - RNA, 12 nt, Human
uccucuccacug

SEQ ID NO: 1145752 - RNA, 13 nt, Human
uccucuccacugc

SEQ ID NO: 1145753 - RNA, 14 nt, Human
uccucuccacugcc

SEQ ID NO: 1145754 - RNA, 15 nt, Human
uccucuccacugccu

SEQ ID NO: 1145755 - RNA, 16 nt, Human
uccucuccacugccuu

SEQ ID NO: 1145756 - RNA, 15 nt, Human
acugaggaccagcca

SEQ ID NO: 1145757 - RNA, 16 nt, Human
acugagugccuuuugg

SEQ ID NO: 1145758 - RNA, 20 nt, Human
acugcaaccuucgccaccug

SEQ ID NO: 1145759 - RNA, 23 nt, Human
acugcaaccuucgccaccugggu

SEQ ID NO: 1145760 - RNA, 16 nt, Human
acugcacagugcaucu

SEQ ID NO: 1145761 - RNA, 18 nt, Human
acugcacagugcaucuca

SEQ ID NO: 1145762 - RNA, 22 nt, Human
acugcacagugcaucucagccc

SEQ ID NO: 1145763 - RNA, 20 nt, Human
uccugaguagcugggauuac

SEQ ID NO: 1145764 - RNA, 16 nt, Human
uccugcauuugugaaa

SEQ ID NO: 1145765 - RNA, 18 nt, Human
uccuggggaaccugaccc

SEQ ID NO: 1145766 - RNA, 19 nt, Human
uccuggggaaccugacccc

SEQ ID NO: 1145767 - RNA, 21 nt, Human
uccuggggguucuuucuuccu

SEQ ID NO: 1145768 - RNA, 22 nt, Human
uccuggggguucuuucuuccuc

SEQ ID NO: 1145769 - RNA, 23 nt, Human
uccuggggguucuuucuuccucu

SEQ ID NO: 1145770 - RNA, 18 nt, Human
uccugugacuucagcucu

SEQ ID NO: 1145771 - RNA, 13 nt, Human
uccugugcacagc

SEQ ID NO: 1145772 - RNA, 14 nt, Human
uccugugcacagcc

SEQ ID NO: 1145773 - RNA, 16 nt, Human
acugcagggacugcca

SEQ ID NO: 1145774 - RNA, 17 nt, Human
acugcagggacugccag

SEQ ID NO: 1145775 - RNA, 18 nt, Human
acugcagggacugccagu

SEQ ID NO: 1145776 - RNA, 12 nt, Human
acugcucugaug

SEQ ID NO: 1145777 - RNA, 16 nt, Human
acugcugcccagccuc

SEQ ID NO: 1145778 - RNA, 18 nt, Human
acugcugcccagccucca

SEQ ID NO: 1145779 - RNA, 21 nt, Human
acugcugcccagccuccaagc

SEQ ID NO: 1145780 - RNA, 12 nt, Human
acugcuggcugc

SEQ ID NO: 1145781 - RNA, 13 nt, Human
acugcuggcugcc

SEQ ID NO: 1145782 - RNA, 14 nt, Human
acugcuggcugccu

SEQ ID NO: 1145783 - RNA, 23 nt, Human
acuggccucugcugauccuccca

SEQ ID NO: 1145784 - RNA, 16 nt, Human
uccuuccucugagccu

SEQ ID NO: 1145785 - RNA, 17 nt, Human
uccuuccucugagccuu

SEQ ID NO: 1145786 - RNA, 16 nt, Human
uccuuccucugaggcu

SEQ ID NO: 1145787 - RNA, 16 nt, Human
uccuuucacaaccuuc

SEQ ID NO: 1145788 - RNA, 18 nt, Human
uccuuucacaaccuucug

SEQ ID NO: 1145789 - RNA, 19 nt, Human
uccuuucacaaccuucugu

SEQ ID NO: 1145790 - RNA, 20 nt, Human
uccuuucacaaccuucugug

SEQ ID NO: 1145791 - RNA, 13 nt, Human
ucgaccugccucg

SEQ ID NO: 1145792 - RNA, 17 nt, Human
acuguacaaaaaaaucu

SEQ ID NO: 1145793 - RNA, 19 nt, Human
acuguacaaaaaaaucuuc

SEQ ID NO: 1145794 - RNA, 22 nt, Human
acuguacaaaaaaaucuuccaa

SEQ ID NO: 1145795 - RNA, 13 nt, Human
acuguacuccucc

SEQ ID NO: 1145796 - RNA, 14 nt, Human
acuguacuccuccc

SEQ ID NO: 1145797 - RNA, 15 nt, Human
acuguacuccuccca

SEQ ID NO: 1145798 - RNA, 18 nt, Human
ucucccaaagugcuggga

SEQ ID NO: 1145799 - RNA, 19 nt, Human
acuuguugauuaauggaaa

SEQ ID NO: 1145800 - RNA, 21 nt, Human
acuuguugauuaauggaaaug

SEQ ID NO: 1145801 - RNA, 11 nt, Human
ucucugcccua

SEQ ID NO: 1145802 - RNA, 22 nt, Human
ucucugcccuaaugcgcaggcu

SEQ ID NO: 1145803 - RNA, 18 nt, Human
ucucuucuggguuccuuc

SEQ ID NO: 1145804 - RNA, 19 nt, Human
ucucuucuggguuccuucc

SEQ ID NO: 1145805 - RNA, 20 nt, Human
ucucuucuggguuccuuccu

SEQ ID NO: 1145806 - RNA, 21 nt, Human
ucucuucuggguuccuuccuc

SEQ ID NO: 1145807 - RNA, 18 nt, Human
ucucuucuuaauguacau

SEQ ID NO: 1145808 - RNA, 14 nt, Human
ucucuucuuaaugu

SEQ ID NO: 1145809 - RNA, 19 nt, Human
agaaaaauaugaccacacu

SEQ ID NO: 1145810 - RNA, 20 nt, Human
agaaaacaugcagaacaaau

SEQ ID NO: 1145811 - RNA, 12 nt, Human
ucugcagagcag

SEQ ID NO: 1145812 - RNA, 18 nt, Human
agaacuaccaccugacau

SEQ ID NO: 1145813 - RNA, 13 nt, Human
agaagcugcucaa

SEQ ID NO: 1145814 - RNA, 23 nt, Human
agaagcugcucaacuugcaaaau

SEQ ID NO: 1145815 - RNA, 16 nt, Human
ucuggguuccuuccuc

SEQ ID NO: 1145816 - RNA, 24 nt, Human
ucuguccaggcacugcugcccagc

SEQ ID NO: 1145817 - RNA, 12 nt, Human
ucuguuccacau

SEQ ID NO: 1145818 - RNA, 16 nt, Human
ucuguuuuaaaaaccu

SEQ ID NO: 1145819 - RNA, 18 nt, Human
agacagaaucucgcucug

SEQ ID NO: 1145820 - RNA, 22 nt, Human
agacagaaucucgcucugucgc

SEQ ID NO: 1145821 - RNA, 17 nt, Human
ucuucaaaaugagcccu

SEQ ID NO: 1145822 - RNA, 22 nt, Human
ucuuccauauggauccacuggc

SEQ ID NO: 1145823 - RNA, 13 nt, Human
agaccugccccuc

SEQ ID NO: 1145824 - RNA, 12 nt, Human
agaccugccccu

SEQ ID NO: 1145825 - RNA, 15 nt, Human
agagcuucuggcacu

SEQ ID NO: 1145826 - RNA, 19 nt, Human
agagcuucuguugcugccu

SEQ ID NO: 1145827 - RNA, 20 nt, Human
agagcuucuguugcugccuc

SEQ ID NO: 1145828 - RNA, 21 nt, Human
agagcuucuguugcugccuca

SEQ ID NO: 1145829 - RNA, 22 nt, Human
agagcuucuguugcugccucau

SEQ ID NO: 1145830 - RNA, 15 nt, Human
ugaaugcauaaaaug

SEQ ID NO: 1145831 - RNA, 16 nt, Human
ugaaugcauaaaaugu

SEQ ID NO: 1145832 - RNA, 20 nt, Human
agauaaacguggauguuacu

SEQ ID NO: 1145833 - RNA, 18 nt, Human
agauaauucuagcuuuga

SEQ ID NO: 1145834 - RNA, 14 nt, Human
ugacaguaauugug

SEQ ID NO: 1145835 - RNA, 15 nt, Human
ugacaguaauugugu

SEQ ID NO: 1145836 - RNA, 20 nt, Human
ugacaguaauuguguuuaca

SEQ ID NO: 1145837 - RNA, 21 nt, Human
ugacaguaauuguguuuacau

SEQ ID NO: 1145838 - RNA, 22 nt, Human
ugacaguaauuguguuuacauu

SEQ ID NO: 1145839 - RNA, 18 nt, Human
ugacauuguagagcuucu

SEQ ID NO: 1145840 - RNA, 22 nt, Human
ugacauuguagagcuucuggca

SEQ ID NO: 1145841 - RNA, 12 nt, Human
ugaccacacucc

SEQ ID NO: 1145842 - RNA, 17 nt, Human
ugaccacacuccagcug

SEQ ID NO: 1145843 - RNA, 19 nt, Human
ugaccacacuccagcuggg

SEQ ID NO: 1145844 - RNA, 20 nt, Human
ugaccacacuccagcuggga

SEQ ID NO: 1145845 - RNA, 21 nt, Human
agauguccaucagaugacaag

SEQ ID NO: 1145846 - RNA, 23 nt, Human
agauguccaucagaugacaagaa

SEQ ID NO: 1145847 - RNA, 14 nt, Human
agaugucuauauug

SEQ ID NO: 1145848 - RNA, 22 nt, Human
ugacccccaaccaaguggcucc

SEQ ID NO: 1145849 - RNA, 17 nt, Human
ugaccccucauagcccu

SEQ ID NO: 1145850 - RNA, 19 nt, Human
ugaccccucauagcccuca

SEQ ID NO: 1145851 - RNA, 20 nt, Human
ugaccccucauagcccucac

SEQ ID NO: 1145852 - RNA, 23 nt, Human
ugaccccucauagcccucacccu

SEQ ID NO: 1145853 - RNA, 22 nt, Human
ugacuugaagacuuacagcaaa

SEQ ID NO: 1145854 - RNA, 20 nt, Human
agauuauaggcaccuaccac

SEQ ID NO: 1145855 - RNA, 16 nt, Human
agauucaaucccagga

SEQ ID NO: 1145856 - RNA, 16 nt, Human
ugagcaaauguggcuc

SEQ ID NO: 1145857 - RNA, 18 nt, Human
ugagcaaauguggcuccu

SEQ ID NO: 1145858 - RNA, 19 nt, Human
ugagcaaauguggcuccug

SEQ ID NO: 1145859 - RNA, 13 nt, Human
ugagcacuguuuu

SEQ ID NO: 1145860 - RNA, 22 nt, Human
ugagcacuguuuucuaguguau

SEQ ID NO: 1145861 - RNA, 14 nt, Human
ugagcacuguuuuc

SEQ ID NO: 1145862 - RNA, 15 nt, Human
ugagcacuguuuucu

SEQ ID NO: 1145863 - RNA, 21 nt, Human
ugagcacuguuuucuagugua

SEQ ID NO: 1145864 - RNA, 15 nt, Human
ugagccaccacgccc

SEQ ID NO: 1145865 - RNA, 14 nt, Human
ugagccaccgugcc

SEQ ID NO: 1145866 - RNA, 18 nt, Human
ugagccaccgugccuggc

SEQ ID NO: 1145867 - RNA, 19 nt, Human
ugagccaccgugccuggcc

SEQ ID NO: 1145868 - RNA, 20 nt, Human
ugagccaccgugccuggcca

SEQ ID NO: 1145869 - RNA, 21 nt, Human
ugagccaccgugccuggccac

SEQ ID NO: 1145870 - RNA, 21 nt, Human
agcacagcagccccugcacaa

SEQ ID NO: 1145871 - RNA, 10 nt, Human
agcaccaggg

SEQ ID NO: 1145872 - RNA, 12 nt, Human
agcaccagggaa

SEQ ID NO: 1145873 - RNA, 13 nt, Human
agcaccagggaag

SEQ ID NO: 1145874 - RNA, 13 nt, Human
ugagcuacaaaug

SEQ ID NO: 1145875 - RNA, 14 nt, Human
ugagcuacaaaugc

SEQ ID NO: 1145876 - RNA, 16 nt, Human
ugagcuacaaaugcau

SEQ ID NO: 1145877 - RNA, 18 nt, Human
ugaggaacggaucagaug

SEQ ID NO: 1145878 - RNA, 15 nt, Human
ugagggauuaucuuu

SEQ ID NO: 1145879 - RNA, 19 nt, Human
ugagguacaaccuguucug

SEQ ID NO: 1145880 - RNA, 14 nt, Human
ugcagaacaaauga

SEQ ID NO: 1145881 - RNA, 15 nt, Human
ugcagaacaaaugaa

SEQ ID NO: 1145882 - RNA, 18 nt, Human
ugcagaacaaaugaagac

SEQ ID NO: 1145883 - RNA, 13 nt, Human
agcccuucauuug

SEQ ID NO: 1145884 - RNA, 14 nt, Human
agcccuucauuugg

SEQ ID NO: 1145885 - RNA, 19 nt, Human
agcccuuccaugucgccuc

SEQ ID NO: 1145886 - RNA, 22 nt, Human
agcccuuccaugucgccucugc

SEQ ID NO: 1145887 - RNA, 23 nt, Human
agcccuuccaugucgccucugca

SEQ ID NO: 1145888 - RNA, 23 nt, Human
agccguuuguuccccaagacauu

SEQ ID NO: 1145889 - RNA, 11 nt, Human
ugcauaaaaug

SEQ ID NO: 1145890 - RNA, 23 nt, Human
ugcaucuccacuuggcauuagcu

SEQ ID NO: 1145891 - RNA, 18 nt, Human
agccugaucaccugcccu

SEQ ID NO: 1145892 - RNA, 19 nt, Human
agccugaucaccugcccug

SEQ ID NO: 1145893 - RNA, 12 nt, Human
agccugcccucc

SEQ ID NO: 1145894 - RNA, 20 nt, Human
agcgcccacuagacccacug

SEQ ID NO: 1145895 - RNA, 14 nt, Human
ugcauuuccugaca

SEQ ID NO: 1145896 - RNA, 19 nt, Human
ugccacacgagaaccugaa

SEQ ID NO: 1145897 - RNA, 12 nt, Human
ugccacacuuca

SEQ ID NO: 1145898 - RNA, 17 nt, Human
ugccagucccccugccc

SEQ ID NO: 1145899 - RNA, 19 nt, Human
ugccagucccccugcccca

SEQ ID NO: 1145900 - RNA, 20 nt, Human
ugccagucccccugccccag

SEQ ID NO: 1145901 - RNA, 19 nt, Human
agcuauggugucauaggcu

SEQ ID NO: 1145902 - RNA, 18 nt, Human
ugcccaaccugcucuccu

SEQ ID NO: 1145903 - RNA, 22 nt, Human
ugcccaaccugcucuccucuug

SEQ ID NO: 1145904 - RNA, 23 nt, Human
ugcccaaccugcucuccucuugc

SEQ ID NO: 1145905 - RNA, 24 nt, Human
ugcccaaccugcucuccucuugcc

SEQ ID NO: 1145906 - RNA, 15 nt, Human
ugcccaggccugccu

SEQ ID NO: 1145907 - RNA, 17 nt, Human
ugcccaggccugccugu

SEQ ID NO: 1145908 - RNA, 12 nt, Human
ugccccccagcc

SEQ ID NO: 1145909 - RNA, 16 nt, Human
ugccccgucccccucu

SEQ ID NO: 1145910 - RNA, 18 nt, Human
ugccccgucccccucugg

SEQ ID NO: 1145911 - RNA, 22 nt, Human
agcucuaucaccaaggagccaa

SEQ ID NO: 1145912 - RNA, 15 nt, Human
ugcccuuucugggca

SEQ ID NO: 1145913 - RNA, 22 nt, Human
agcugggaucacauguggacuu

SEQ ID NO: 1145914 - RNA, 18 nt, Human
agcugggauuacaggcuc

SEQ ID NO: 1145915 - RNA, 21 nt, Human
agcugggauuacaggcuccug

SEQ ID NO: 1145916 - RNA, 22 nt, Human
agcugggauuacaggcuccugc

SEQ ID NO: 1145917 - RNA, 23 nt, Human
agcugggauuacaggcuccugcc

SEQ ID NO: 1145918 - RNA, 14 nt, Human
ugccuuagaaccuu

SEQ ID NO: 1145919 - RNA, 17 nt, Human
ugccuuagaaccuuucu

SEQ ID NO: 1145920 - RNA, 21 nt, Human
ugccuuagaaccuuucuuaca

SEQ ID NO: 1145921 - RNA, 20 nt, Human
agcuuauguuaacugacaag

SEQ ID NO: 1145922 - RNA, 21 nt, Human
ugcuauaacuauguugauaaa

SEQ ID NO: 1145923 - RNA, 18 nt, Human
ugcucugaugaagaggag

SEQ ID NO: 1145924 - RNA, 19 nt, Human
ugcucugaugaagaggagu

SEQ ID NO: 1145925 - RNA, 14 nt, Human
ugcucuguagccua

SEQ ID NO: 1145926 - RNA, 15 nt, Human
ugcugagucccaggc

SEQ ID NO: 1145927 - RNA, 18 nt, Human
ugcugagucccaggcuga

SEQ ID NO: 1145928 - RNA, 22 nt, Human
ugcugagucccaggcugagccu

SEQ ID NO: 1145929 - RNA, 15 nt, Human
ugcugccacacuuca

SEQ ID NO: 1145930 - RNA, 16 nt, Human
ugcugccacacuucag

SEQ ID NO: 1145931 - RNA, 19 nt, Human
ugcugccacacuucaggcu

SEQ ID NO: 1145932 - RNA, 22 nt, Human
ugcugccacacuucaggcucuu

SEQ ID NO: 1145933 - RNA, 14 nt, Human
ugcugcccagccuc

SEQ ID NO: 1145934 - RNA, 16 nt, Human
ugcugcccagccucca

SEQ ID NO: 1145935 - RNA, 16 nt, Human
aggcaacuugggaacu

SEQ ID NO: 1145936 - RNA, 14 nt, Human
uggacaaaaugacu

SEQ ID NO: 1145937 - RNA, 21 nt, Human
uggaggaaaaccaagccgugg

SEQ ID NO: 1145938 - RNA, 23 nt, Human
uggaggaaaaccaagccguggcu

SEQ ID NO: 1145939 - RNA, 16 nt, Human
aggcagggagggccug

SEQ ID NO: 1145940 - RNA, 17 nt, Human
aggcaucgcaauguaag

SEQ ID NO: 1145941 - RNA, 15 nt, Human
uggcacagggcagug

SEQ ID NO: 1145942 - RNA, 16 nt, Human
uggcacagggcagugg

SEQ ID NO: 1145943 - RNA, 17 nt, Human
uggcagccgugccuuca

SEQ ID NO: 1145944 - RNA, 18 nt, Human
uggcagccgugccuucag

SEQ ID NO: 1145945 - RNA, 19 nt, Human
uggcagccgugccuucagc

SEQ ID NO: 1145946 - RNA, 20 nt, Human
uggcagccgugccuucagcu

SEQ ID NO: 1145947 - RNA, 21 nt, Human
uggcagccgugccuucagcuc

SEQ ID NO: 1145948 - RNA, 22 nt, Human
uggcagccgugccuucagcucu

SEQ ID NO: 1145949 - RNA, 20 nt, Human
aggccauuccccgucucugg

SEQ ID NO: 1145950 - RNA, 12 nt, Human
uggcccugcccu

SEQ ID NO: 1145951 - RNA, 13 nt, Human
uggcccugcccug

SEQ ID NO: 1145952 - RNA, 21 nt, Human
uggccucugcugauccuccca

SEQ ID NO: 1145953 - RNA, 14 nt, Human
aggcgccccuuccc

SEQ ID NO: 1145954 - RNA, 13 nt, Human
aggcuccugccac

SEQ ID NO: 1145955 - RNA, 14 nt, Human
uggcugugccucug

SEQ ID NO: 1145956 - RNA, 15 nt, Human
uggcugugccucugc

SEQ ID NO: 1145957 - RNA, 16 nt, Human
uggcugugccucugcc

SEQ ID NO: 1145958 - RNA, 17 nt, Human
uggcugugccucugccu

SEQ ID NO: 1145959 - RNA, 18 nt, Human
uggcugugccucugccug

SEQ ID NO: 1145960 - RNA, 19 nt, Human
uggcugugccucugccugu

SEQ ID NO: 1145961 - RNA, 22 nt, Human
uggcugugccucugccugucuc

SEQ ID NO: 1145962 - RNA, 18 nt, Human
ugggaaacaaaaggauaa

SEQ ID NO: 1145963 - RNA, 20 nt, Human
ugggaacaccauaggucacc

SEQ ID NO: 1145964 - RNA, 23 nt, Human
aggcuucugguugaugccuguga

SEQ ID NO: 1145965 - RNA, 13 nt, Human
agggaaauuucag

SEQ ID NO: 1145966 - RNA, 18 nt, Human
agggagcaucagugcccu

SEQ ID NO: 1145967 - RNA, 14 nt, Human
ugggacuggccucu

SEQ ID NO: 1145968 - RNA, 16 nt, Human
ugggacuggccucugc

SEQ ID NO: 1145969 - RNA, 13 nt, Human
agggagggccugg

SEQ ID NO: 1145970 - RNA, 15 nt, Human
agggagggccugggc

SEQ ID NO: 1145971 - RNA, 13 nt, Human
ugggcugcccugg

SEQ ID NO: 1145972 - RNA, 14 nt, Human
ugggcugcccuggu

SEQ ID NO: 1145973 - RNA, 15 nt, Human
ugggcugcccuggug

SEQ ID NO: 1145974 - RNA, 16 nt, Human
ugggcugcccuggugc

SEQ ID NO: 1145975 - RNA, 22 nt, Human
agguuuaugacaguaauugugu

SEQ ID NO: 1145976 - RNA, 17 nt, Human
uguacaaaaaaaucuuc

SEQ ID NO: 1145977 - RNA, 21 nt, Human
uguacaaaaaaaucuuccaau

SEQ ID NO: 1145978 - RNA, 22 nt, Human
uguacaaaaaaaucuuccaauu

SEQ ID NO: 1145979 - RNA, 14 nt, Human
uguacauagugcua

SEQ ID NO: 1145980 - RNA, 17 nt, Human
uguacauagugcuaaca

SEQ ID NO: 1145981 - RNA, 19 nt, Human
uguacauagugcuaacaug

SEQ ID NO: 1145982 - RNA, 21 nt, Human
uguacauagugcuaacaugaa

SEQ ID NO: 1145983 - RNA, 20 nt, Human
uguacauagugcuaacauga

SEQ ID NO: 1145984 - RNA, 20 nt, Human
aguaauaccucuaauaguau

SEQ ID NO: 1145985 - RNA, 21 nt, Human
aguaauaccucuaauaguaua

SEQ ID NO: 1145986 - RNA, 22 nt, Human
aguaauaccucuaauaguauaa

SEQ ID NO: 1145987 - RNA, 23 nt, Human
aguaauaccucuaauaguauaaa

SEQ ID NO: 1145988 - RNA, 12 nt, Human
aguaauccugua

SEQ ID NO: 1145989 - RNA, 16 nt, Human
aguaauuguguuuaca

SEQ ID NO: 1145990 - RNA, 18 nt, Human
aguaauuguguuuacauu

SEQ ID NO: 1145991 - RNA, 21 nt, Human
aguaauuguguuuacauuuua

SEQ ID NO: 1145992 - RNA, 22 nt, Human
aguaauuguguuuacauuuuau

SEQ ID NO: 1145993 - RNA, 23 nt, Human
aguaauuguguuuacauuuuaug

SEQ ID NO: 1145994 - RNA, 14 nt, Human
ugucgccucugcau

SEQ ID NO: 1145995 - RNA, 17 nt, Human
agucccaggcugagccu

SEQ ID NO: 1145996 - RNA, 18 nt, Human
agucccaggcugagccuc

SEQ ID NO: 1145997 - RNA, 19 nt, Human
agucccaggcugagccuca

SEQ ID NO: 1145998 - RNA, 20 nt, Human
agucccaggcugagccucag

SEQ ID NO: 1145999 - RNA, 16 nt, Human
agucccccugccccag

SEQ ID NO: 1146000 - RNA, 21 nt, Human
agucuaccaaccuguucaagu

SEQ ID NO: 1146001 - RNA, 11 nt, Human
agucuaccaau

SEQ ID NO: 1146002 - RNA, 18 nt, Human
ugugacuucagcucuguu

SEQ ID NO: 1146003 - RNA, 19 nt, Human
ugugacuucagcucuguuu

SEQ ID NO: 1146004 - RNA, 19 nt, Human
agucucuucuccacuggau

SEQ ID NO: 1146005 - RNA, 21 nt, Human
agucucuucuccacuggaugg

SEQ ID NO: 1146006 - RNA, 16 nt, Human
agucuuucacauuuaa

SEQ ID NO: 1146007 - RNA, 18 nt, Human
agucuuucacauuuaaau

SEQ ID NO: 1146008 - RNA, 15 nt, Human
agugcaguuauuugc

SEQ ID NO: 1146009 - RNA, 17 nt, Human
agugcaguuauuugcuu

SEQ ID NO: 1146010 - RNA, 14 nt, Human
agugcaucucagcc

SEQ ID NO: 1146011 - RNA, 16 nt, Human
agugcccuccaggaua

SEQ ID NO: 1146012 - RNA, 20 nt, Human
uguggguuuuuauuuccuau

SEQ ID NO: 1146013 - RNA, 16 nt, Human
uguuaacugagugccu

SEQ ID NO: 1146014 - RNA, 22 nt, Human
uguuaacugagugccuuuuggu

SEQ ID NO: 1146015 - RNA, 22 nt, Human
uguuaaguugauggugaugaaa

SEQ ID NO: 1146016 - RNA, 17 nt, Human
aguggauggaaggggcu

SEQ ID NO: 1146017 - RNA, 15 nt, Human
aguggggacagagca

SEQ ID NO: 1146018 - RNA, 14 nt, Human
aguggggaggggcu

SEQ ID NO: 1146019 - RNA, 15 nt, Human
agugguaucuugcag

SEQ ID NO: 1146020 - RNA, 23 nt, Human
aguuacuaucaugucaaacguga

SEQ ID NO: 1146021 - RNA, 20 nt, Human
aguuuaaauuguaauaggcg

SEQ ID NO: 1146022 - RNA, 13 nt, Human
aguuucucagcuc

SEQ ID NO: 1146023 - RNA, 15 nt, Human
aguuucucagcuccc

SEQ ID NO: 1146024 - RNA, 19 nt, Human
uuaagaaugaucugauuga

SEQ ID NO: 1146025 - RNA, 15 nt, Human
uuaagaaugaucuga

SEQ ID NO: 1146026 - RNA, 18 nt, Human
uuaagacauuuuuggaag

SEQ ID NO: 1146027 - RNA, 23 nt, Human
uuaagacauuuuuggaaggggac

SEQ ID NO: 1146028 - RNA, 13 nt, Human
uuaaucauauaaa

SEQ ID NO: 1146029 - RNA, 15 nt, Human
uuaaucauauaaaua

SEQ ID NO: 1146030 - RNA, 16 nt, Human
uuaaucauauaaauag

SEQ ID NO: 1146031 - RNA, 17 nt, Human
uuaaucauauaaauaga

SEQ ID NO: 1146032 - RNA, 19 nt, Human
uuaaucauauaaauagaau

SEQ ID NO: 1146033 - RNA, 13 nt, Human
auaaauugcuccu

SEQ ID NO: 1146034 - RNA, 16 nt, Human
auaaauugcuccuuga

SEQ ID NO: 1146035 - RNA, 18 nt, Human
auaaauugcuccuugaca

SEQ ID NO: 1146036 - RNA, 15 nt, Human
auaacuauguugaua

SEQ ID NO: 1146037 - RNA, 24 nt, Human
uuacuccaaaacuucguuuaauga

SEQ ID NO: 1146038 - RNA, 20 nt, Human
auaauucaggaagcagcuuu

SEQ ID NO: 1146039 - RNA, 14 nt, Human
uuaguaauaccucu

SEQ ID NO: 1146040 - RNA, 16 nt, Human
uuaguaauaccucuaa

SEQ ID NO: 1146041 - RNA, 17 nt, Human
uuaguaauaccucuaau

SEQ ID NO: 1146042 - RNA, 17 nt, Human
uuaguagagacaggguu

SEQ ID NO: 1146043 - RNA, 13 nt, Human
auacaaguuucau

SEQ ID NO: 1146044 - RNA, 14 nt, Human
auacaaguuucauc

SEQ ID NO: 1146045 - RNA, 21 nt, Human
auacaguucggugagcuacaa

SEQ ID NO: 1146046 - RNA, 13 nt, Human
uuaugacaguaau

SEQ ID NO: 1146047 - RNA, 15 nt, Human
uuaugacaguaauug

SEQ ID NO: 1146048 - RNA, 16 nt, Human
uuaugacaguaauugu

SEQ ID NO: 1146049 - RNA, 24 nt, Human
uuaugacaguaauuguguuuacau

SEQ ID NO: 1146050 - RNA, 11 nt, Human
uuaugaugugc

SEQ ID NO: 1146051 - RNA, 13 nt, Human
uuaugaugugcuu

SEQ ID NO: 1146052 - RNA, 14 nt, Human
uuaugaugugcuua

SEQ ID NO: 1146053 - RNA, 16 nt, Human
uuaugaugugcuuaac

SEQ ID NO: 1146054 - RNA, 17 nt, Human
uuaugaugugcuuaaca

SEQ ID NO: 1146055 - RNA, 18 nt, Human
uuaugaugugcuuaacag

SEQ ID NO: 1146056 - RNA, 14 nt, Human
uuauuauauuuaca

SEQ ID NO: 1146057 - RNA, 15 nt, Human
uuauuauauuuacaa

SEQ ID NO: 1146058 - RNA, 20 nt, Human
uuauucacuuuuauuuagca

SEQ ID NO: 1146059 - RNA, 14 nt, Human
uuauucauaugcau

SEQ ID NO: 1146060 - RNA, 16 nt, Human
uuauucauaugcauau

SEQ ID NO: 1146061 - RNA, 15 nt, Human
uuauucauaugcaua

SEQ ID NO: 1146062 - RNA, 18 nt, Human
auacucuuauagacaaca

SEQ ID NO: 1146063 - RNA, 17 nt, Human
auacugccacuaaccuu

SEQ ID NO: 1146064 - RNA, 13 nt, Human
auagaaguaaaaa

SEQ ID NO: 1146065 - RNA, 14 nt, Human
auagaauguaaaug

SEQ ID NO: 1146066 - RNA, 15 nt, Human
auagaauguaaaugu

SEQ ID NO: 1146067 - RNA, 17 nt, Human
auagaauguaaaugucu

SEQ ID NO: 1146068 - RNA, 19 nt, Human
auagaauguaaaugucuca

SEQ ID NO: 1146069 - RNA, 20 nt, Human
auagaauguaaaugucucac

SEQ ID NO: 1146070 - RNA, 18 nt, Human
auagacccacaagaggca

SEQ ID NO: 1146071 - RNA, 17 nt, Human
auagaccuuuucauuug

SEQ ID NO: 1146072 - RNA, 18 nt, Human
auagauaggucagugcaa

SEQ ID NO: 1146073 - RNA, 16 nt, Human
uucccgcucagcccuc

SEQ ID NO: 1146074 - RNA, 18 nt, Human
uucccgcucagcccuccc

SEQ ID NO: 1146075 - RNA, 21 nt, Human
uucccgcucagcccucccugc

SEQ ID NO: 1146076 - RNA, 22 nt, Human
uucccgcucagcccucccugcc

SEQ ID NO: 1146077 - RNA, 19 nt, Human
uuccguagguuauuuucag

SEQ ID NO: 1146078 - RNA, 16 nt, Human
uuccuaauuccacagc

SEQ ID NO: 1146079 - RNA, 17 nt, Human
uuccuaauuccacagcu

SEQ ID NO: 1146080 - RNA, 18 nt, Human
uuccuaauuccacagcug

SEQ ID NO: 1146081 - RNA, 14 nt, Human
uuccucugagccuu

SEQ ID NO: 1146082 - RNA, 17 nt, Human
uuccucugagccuuggg

SEQ ID NO: 1146083 - RNA, 21 nt, Human
uuccucugaggcugaaauuca

SEQ ID NO: 1146084 - RNA, 14 nt, Human
uuccugugcacagc

SEQ ID NO: 1146085 - RNA, 15 nt, Human
uuccugugcacagcc

SEQ ID NO: 1146086 - RNA, 22 nt, Human
aucaaauguuuaaucauauaaa

SEQ ID NO: 1146087 - RNA, 16 nt, Human
uucucacuccuaccug

SEQ ID NO: 1146088 - RNA, 18 nt, Human
uucucacuccuaccuggu

SEQ ID NO: 1146089 - RNA, 18 nt, Human
aucagaaguuucucagcu

SEQ ID NO: 1146090 - RNA, 17 nt, Human
uucuccuuucacaaccu

SEQ ID NO: 1146091 - RNA, 14 nt, Human
aucauuuuauguca

SEQ ID NO: 1146092 - RNA, 23 nt, Human
aucauuuuaugucaagggcagcu

SEQ ID NO: 1146093 - RNA, 13 nt, Human
auccaucaggcca

SEQ ID NO: 1146094 - RNA, 14 nt, Human
uucuuuuuuuguga

SEQ ID NO: 1146095 - RNA, 17 nt, Human
uugaaauuguauuacaa

SEQ ID NO: 1146096 - RNA, 18 nt, Human
auccuacaagacacagug

SEQ ID NO: 1146097 - RNA, 19 nt, Human
auccuacaagacacaguga

SEQ ID NO: 1146098 - RNA, 13 nt, Human
uugaagccuuugu

SEQ ID NO: 1146099 - RNA, 17 nt, Human
uugaagggaaauuucag

SEQ ID NO: 1146100 - RNA, 13 nt, Human
uugaaucacagua

SEQ ID NO: 1146101 - RNA, 15 nt, Human
aucuccacuccagau

SEQ ID NO: 1146102 - RNA, 21 nt, Human
aucucuucuggguuccuuccu

SEQ ID NO: 1146103 - RNA, 13 nt, Human
aucucuucuuaau

SEQ ID NO: 1146104 - RNA, 17 nt, Human
aucucuucuuaauguac

SEQ ID NO: 1146105 - RNA, 18 nt, Human
aucucuucuuaauguaca

SEQ ID NO: 1146106 - RNA, 19 nt, Human
aucucuucuuaauguacau

SEQ ID NO: 1146107 - RNA, 22 nt, Human
aucucuucuuaauguacauagu

SEQ ID NO: 1146108 - RNA, 20 nt, Human
aucucuucuuaauguacaua

SEQ ID NO: 1146109 - RNA, 23 nt, Human
uugcauauaagggaaguaguuau

SEQ ID NO: 1146110 - RNA, 15 nt, Human
aucugccucucuugu

SEQ ID NO: 1146111 - RNA, 18 nt, Human
aucugccucucuuguaau

SEQ ID NO: 1146112 - RNA, 13 nt, Human
aucuguuugagaa

SEQ ID NO: 1146113 - RNA, 14 nt, Human
aucuguuugagaaa

SEQ ID NO: 1146114 - RNA, 19 nt, Human
aucuguuugagaaagucag

SEQ ID NO: 1146115 - RNA, 15 nt, Human
aucuguuugagaaag

SEQ ID NO: 1146116 - RNA, 14 nt, Human
aucuuauaauuuaa

SEQ ID NO: 1146117 - RNA, 21 nt, Human
aucuugcaguaucggcacugu

SEQ ID NO: 1146118 - RNA, 22 nt, Human
aucuugcaguaucggcacugua

SEQ ID NO: 1146119 - RNA, 24 nt, Human
aucuugcaguaucggcacuguaca

SEQ ID NO: 1146120 - RNA, 16 nt, Human
uugcucauauuuccca

SEQ ID NO: 1146121 - RNA, 12 nt, Human
uugcuccuugac

SEQ ID NO: 1146122 - RNA, 11 nt, Human
uuggagacaga

SEQ ID NO: 1146123 - RNA, 13 nt, Human
augaaauuccauu

SEQ ID NO: 1146124 - RNA, 18 nt, Human
augaacuuguaaaggaau

SEQ ID NO: 1146125 - RNA, 19 nt, Human
augaagaccuuuuucugca

SEQ ID NO: 1146126 - RNA, 24 nt, Human
augaagaccuuuuucugcacuaua

SEQ ID NO: 1146127 - RNA, 21 nt, Human
augaagaccuuuuucugcacu

SEQ ID NO: 1146128 - RNA, 22 nt, Human
augaagaccuuuuucugcacua

SEQ ID NO: 1146129 - RNA, 11 nt, Human
augaagaggag

SEQ ID NO: 1146130 - RNA, 21 nt, Human
augaaugcuuaaagaauucaa

SEQ ID NO: 1146131 - RNA, 20 nt, Human
augaaugcuuaaagaauuca

SEQ ID NO: 1146132 - RNA, 17 nt, Human
uuguucauauuaagaau

SEQ ID NO: 1146133 - RNA, 19 nt, Human
uuguucauauuaagaauga

SEQ ID NO: 1146134 - RNA, 18 nt, Human
uuuaaauauaugcuaagu

SEQ ID NO: 1146135 - RNA, 17 nt, Human
augcagcaucuaaguaa

SEQ ID NO: 1146136 - RNA, 14 nt, Human
augcccuggaucca

SEQ ID NO: 1146137 - RNA, 16 nt, Human
augccucagccuccug

SEQ ID NO: 1146138 - RNA, 16 nt, Human
augcuaagacucagug

SEQ ID NO: 1146139 - RNA, 18 nt, Human
auggagacugucucaaga

SEQ ID NO: 1146140 - RNA, 14 nt, Human
uuucugcacuauau

SEQ ID NO: 1146141 - RNA, 17 nt, Human
uuucugcacuauaugca

SEQ ID NO: 1146142 - RNA, 23 nt, Human
uuucugggcaccggggccucgga

SEQ ID NO: 1146143 - RNA, 23 nt, Human
uuucuuuuuacccauuuguucau

SEQ ID NO: 1146144 - RNA, 17 nt, Human
augggggcacugaggac

SEQ ID NO: 1146145 - RNA, 14 nt, Human
auggugaugaaaug

SEQ ID NO: 1146146 - RNA, 16 nt, Human
auggugaugaaaugua

SEQ ID NO: 1146147 - RNA, 17 nt, Human
auggugaugaaauguaa

SEQ ID NO: 1146148 - RNA, 16 nt, Human
auggugccuaguauug

SEQ ID NO: 1146149 - RNA, 19 nt, Human
auggugccuaguauugaca

SEQ ID NO: 1146150 - RNA, 21 nt, Human
auggugccuaguauugacaaa

SEQ ID NO: 1146151 - RNA, 20 nt, Human
auggugccuaguauugacaa

SEQ ID NO: 1146152 - RNA, 19 nt, Human
augguuccccuguucacuc

SEQ ID NO: 1146153 - RNA, 20 nt, Human
augguuccccuguucacucu

SEQ ID NO: 1146154 - RNA, 18 nt, Human
auguaaaugucucacuga

SEQ ID NO: 1146155 - RNA, 19 nt, Human
auguaaaugucucacugag

SEQ ID NO: 1146156 - RNA, 23 nt, Human
auguaaaugucucacugagcacu

SEQ ID NO: 1146157 - RNA, 21 nt, Human
auguaaaugucucacugagca

SEQ ID NO: 1146158 - RNA, 13 nt, Human
auguacugcauua

SEQ ID NO: 1146159 - RNA, 20 nt, Human
auguacugcauuauuugaga

SEQ ID NO: 1146160 - RNA, 15 nt, Human
auguacugcauuauu

SEQ ID NO: 1146161 - RNA, 18 nt, Human
auguaugagguacaaccu

SEQ ID NO: 1146162 - RNA, 13 nt, Human
augucgccucugc

SEQ ID NO: 1146163 - RNA, 14 nt, Human
augucgccucugca

SEQ ID NO: 1146164 - RNA, 15 nt, Human
augucgccucugcau

SEQ ID NO: 1146165 - RNA, 14 nt, Human
augucucacugagc

SEQ ID NO: 1146166 - RNA, 15 nt, Human
augucucacugagca

SEQ ID NO: 1146167 - RNA, 18 nt, Human
augucucacugagcacug

SEQ ID NO: 1146168 - RNA, 17 nt, Human
augucucaggucccugc

SEQ ID NO: 1146169 - RNA, 22 nt, Human
augucucaggucccugcagggc

SEQ ID NO: 1146170 - RNA, 19 nt, Human
augucucacugagcacugu

SEQ ID NO: 1146171 - RNA, 20 nt, Human
augucucacugagcacuguu

SEQ ID NO: 1146172 - RNA, 22 nt, Human
augucucacugagcacuguuuu

SEQ ID NO: 1146173 - RNA, 17 nt, Human
augucucugagcauuag

SEQ ID NO: 1146174 - RNA, 22 nt, Human
uuugugaaaugauggugaaagu

SEQ ID NO: 1146175 - RNA, 11 nt, Human
uuuguggaaaa

SEQ ID NO: 1146176 - RNA, 19 nt, Human
auuauacccccugcaaagc

SEQ ID NO: 1146177 - RNA, 15 nt, Human
auuauauuuacaaau

SEQ ID NO: 1146178 - RNA, 13 nt, Human
auuauuugagaag

SEQ ID NO: 1146179 - RNA, 21 nt, Human
auuauuugagaagcugcucaa

SEQ ID NO: 1146180 - RNA, 22 nt, Human
auucaggaagcagcuuucccca

SEQ ID NO: 1146181 - RNA, 21 nt, Human
auuccagagaguggcuccucc

SEQ ID NO: 1146182 - RNA, 23 nt, Human
auuccccgucucugguuccuccc

SEQ ID NO: 1146183 - RNA, 15 nt, Human
auucuagcuuugagc

SEQ ID NO: 1146184 - RNA, 22 nt, Human
auucucaugccucagccuccug

SEQ ID NO: 1146185 - RNA, 11 nt, Human
auugacuucuu

SEQ ID NO: 1146186 - RNA, 19 nt, Human
auuggacaguaaaauccac

SEQ ID NO: 1146187 - RNA, 18 nt, Human
auugguaaagaauggaag

SEQ ID NO: 1146188 - RNA, 15 nt, Human
auuucccuacauuaa

SEQ ID NO: 1146189 - RNA, 17 nt, Human
auuucccuacauuaaac

SEQ ID NO: 1146190 - RNA, 20 nt, Human
auuucccuacauuaaacaug

SEQ ID NO: 1146191 - RNA, 20 nt, Human
auuucuugagguaaaagcau

SEQ ID NO: 1146192 - RNA, 23 nt, Human
auuugugaaaugauggugaaagu

SEQ ID NO: 1146193 - RNA, 14 nt, Human
auuuucuauaauuu

SEQ ID NO: 1146194 - RNA, 15 nt, Human
auuuucuauaauuua

SEQ ID NO: 1146195 - RNA, 18 nt, Human
auuuugccagugggaacu

SEQ ID NO: 1146196 - RNA, 22 nt, Human
auuuuugugauuuugugauuga

SEQ ID NO: 1146197 - RNA, 18 nt, Human
auuuuuuaaauugaauuc

SEQ ID NO: 1146198 - RNA, 19 nt, Human
auuuuuuacagcugccugc

SEQ ID NO: 1146199 - RNA, 16 nt, Human
auuuuuuagugacuaa

SEQ ID NO: 1146200 - RNA, 18 nt, Human
caaaaaaaucuuccaauu

SEQ ID NO: 1146201 - RNA, 18 nt, Human
caaaugucuuccuggauu

SEQ ID NO: 1146202 - RNA, 14 nt, Human
caaauguggcuccu

SEQ ID NO: 1146203 - RNA, 13 nt, Human
caaauguuuaauc

SEQ ID NO: 1146204 - RNA, 15 nt, Human
caaauguuuaaucau

SEQ ID NO: 1146205 - RNA, 16 nt, Human
caaauguuuaaucaua

SEQ ID NO: 1146206 - RNA, 21 nt, Human
caacccucagagccaccccua

SEQ ID NO: 1146207 - RNA, 12 nt, Human
caacgcagcccu

SEQ ID NO: 1146208 - RNA, 13 nt, Human
caacgcagcccug

SEQ ID NO: 1146209 - RNA, 15 nt, Human
caacgcagcccugcu

SEQ ID NO: 1146210 - RNA, 18 nt, Human
caacgcagcccugcuuug

SEQ ID NO: 1146211 - RNA, 20 nt, Human
caagaaaggcugcuguacug

SEQ ID NO: 1146212 - RNA, 17 nt, Human
caagcacuaaacaaaga

SEQ ID NO: 1146213 - RNA, 14 nt, Human
caagccguggcuuc

SEQ ID NO: 1146214 - RNA, 15 nt, Human
caagccguggcuucc

SEQ ID NO: 1146215 - RNA, 16 nt, Human
caagccguggcuuccc

SEQ ID NO: 1146216 - RNA, 17 nt, Human
caagccguggcuucccg

SEQ ID NO: 1146217 - RNA, 14 nt, Human
caaggacuaggguc

SEQ ID NO: 1146218 - RNA, 19 nt, Human
caaggaugccccguccccc

SEQ ID NO: 1146219 - RNA, 14 nt, Human
caagucuaccaauu

SEQ ID NO: 1146220 - RNA, 22 nt, Human
caagugauucucaugccucagc

SEQ ID NO: 1146221 - RNA, 14 nt, Human
caauuuucacugug

SEQ ID NO: 1146222 - RNA, 20 nt, Human
caauuuucacuguguccagg

SEQ ID NO: 1146223 - RNA, 15 nt, Human
caauuuucacugugu

SEQ ID NO: 1146224 - RNA, 18 nt, Human
cacaaagcccuuccaugu

SEQ ID NO: 1146225 - RNA, 22 nt, Human
cacaacacacagauuugagcuc

SEQ ID NO: 1146226 - RNA, 17 nt, Human
cacaaccuucuguggcu

SEQ ID NO: 1146227 - RNA, 18 nt, Human
cacaaccuucuguggcuc

SEQ ID NO: 1146228 - RNA, 19 nt, Human
cacaaccuucuguggcuca

SEQ ID NO: 1146229 - RNA, 23 nt, Human
cacaaccuucuguggcucacaga

SEQ ID NO: 1146230 - RNA, 14 nt, Human
cacacccuguuuua

SEQ ID NO: 1146231 - RNA, 17 nt, Human
cacacgagaaccugaag

SEQ ID NO: 1146232 - RNA, 14 nt, Human
cacacuucaggcuc

SEQ ID NO: 1146233 - RNA, 17 nt, Human
cacacuucaggcucuuc

SEQ ID NO: 1146234 - RNA, 18 nt, Human
cacacuucaggcucuucu

SEQ ID NO: 1146235 - RNA, 20 nt, Human
cacacuucaggcucuucucc

SEQ ID NO: 1146236 - RNA, 21 nt, Human
cacacuucaggcucuucuccu

SEQ ID NO: 1146237 - RNA, 22 nt, Human
cacacuucaggcucuucuccuu

SEQ ID NO: 1146238 - RNA, 20 nt, Human
cacagcacgggggccaagga

SEQ ID NO: 1146239 - RNA, 16 nt, Human
cacagcagccccugca

SEQ ID NO: 1146240 - RNA, 12 nt, Human
cacagcaucuca

SEQ ID NO: 1146241 - RNA, 13 nt, Human
cacagcaucucag

SEQ ID NO: 1146242 - RNA, 14 nt, Human
cacagcaucucagc

SEQ ID NO: 1146243 - RNA, 15 nt, Human
cacagcaucucagcu

SEQ ID NO: 1146244 - RNA, 16 nt, Human
cacagcaucucagcuc

SEQ ID NO: 1146245 - RNA, 19 nt, Human
cacagcaucucagcucauc

SEQ ID NO: 1146246 - RNA, 15 nt, Human
cacaggcccuuccuc

SEQ ID NO: 1146247 - RNA, 22 nt, Human
cacauaauucaggaagcagcuu

SEQ ID NO: 1146248 - RNA, 13 nt, Human
cacauguggacuu

SEQ ID NO: 1146249 - RNA, 15 nt, Human
caccccuaaagagau

SEQ ID NO: 1146250 - RNA, 14 nt, Human
caccccuaaagaga

SEQ ID NO: 1146251 - RNA, 14 nt, Human
ccaccuucccaugc

SEQ ID NO: 1146252 - RNA, 13 nt, Human
ccacugccucuuc

SEQ ID NO: 1146253 - RNA, 16 nt, Human
ccacugccucuuccuc

SEQ ID NO: 1146254 - RNA, 21 nt, Human
ccacugccuucgauacaccgg

SEQ ID NO: 1146255 - RNA, 24 nt, Human
ccagaccccuggcuuuucacugcu

SEQ ID NO: 1146256 - RNA, 14 nt, Human
ccagagaguggcuc

SEQ ID NO: 1146257 - RNA, 15 nt, Human
ccagagaguggcucc

SEQ ID NO: 1146258 - RNA, 16 nt, Human
ccagagaguggcuccu

SEQ ID NO: 1146259 - RNA, 18 nt, Human
ccagagaguggcuccucc

SEQ ID NO: 1146260 - RNA, 22 nt, Human
ccagagaguggcuccucccggu

SEQ ID NO: 1146261 - RNA, 24 nt, Human
ccagauuuuuuacagcugccugca

SEQ ID NO: 1146262 - RNA, 22 nt, Human
ccagcaccggccccauuuaccc

SEQ ID NO: 1146263 - RNA, 16 nt, Human
ccagguggccacucca

SEQ ID NO: 1146264 - RNA, 21 nt, Human
ccagguggccacuccagaccc

SEQ ID NO: 1146265 - RNA, 16 nt, Human
ccauauggauccacug

SEQ ID NO: 1146266 - RNA, 20 nt, Human
ccauuaaguaaacaauaaaa

SEQ ID NO: 1146267 - RNA, 22 nt, Human
ccauuugaauuuuuuagugacu

SEQ ID NO: 1146268 - RNA, 15 nt, Human
ccauuuguucauauu

SEQ ID NO: 1146269 - RNA, 20 nt, Human
ccauuuguucauauuaagaa

SEQ ID NO: 1146270 - RNA, 16 nt, Human
ccauuuguucauauua

SEQ ID NO: 1146271 - RNA, 16 nt, Human
cccacaggcccuuccu

SEQ ID NO: 1146272 - RNA, 18 nt, Human
cccacaggcccuuccucu

SEQ ID NO: 1146273 - RNA, 19 nt, Human
cccacauagugaugguucc

SEQ ID NO: 1146274 - RNA, 13 nt, Human
cccaguuguauuu

SEQ ID NO: 1146275 - RNA, 14 nt, Human
cccaucucuucugg

SEQ ID NO: 1146276 - RNA, 16 nt, Human
cccaugauuucaugua

SEQ ID NO: 1146277 - RNA, 17 nt, Human
cccaugauuucauguac

SEQ ID NO: 1146278 - RNA, 19 nt, Human
cccaugauuucauguacug

SEQ ID NO: 1146279 - RNA, 15 nt, Human
cccauucaagauucc

SEQ ID NO: 1146280 - RNA, 17 nt, Human
ccccaccccaaaauuag

SEQ ID NO: 1146281 - RNA, 18 nt, Human
ccccacuuaccgcguaau

SEQ ID NO: 1146282 - RNA, 22 nt, Human
ccccauaauuuuuuuuuuccuu

SEQ ID NO: 1146283 - RNA, 12 nt, Human
cccccucuggcu

SEQ ID NO: 1146284 - RNA, 19 nt, Human
cccccucuggcuccagcug

SEQ ID NO: 1146285 - RNA, 21 nt, Human
cccccucuggcuccagcuggc

SEQ ID NO: 1146286 - RNA, 18 nt, Human
cccccugcaaagcccagc

SEQ ID NO: 1146287 - RNA, 19 nt, Human
cccccugcaaagcccagcu

SEQ ID NO: 1146288 - RNA, 21 nt, Human
cccccugcaaagcccagcuug

SEQ ID NO: 1146289 - RNA, 20 nt, Human
ccccucauagcccucacccu

SEQ ID NO: 1146290 - RNA, 23 nt, Human
ccccuccaaucccaccaacccuc

SEQ ID NO: 1146291 - RNA, 15 nt, Human
ccccucccuucaacc

SEQ ID NO: 1146292 - RNA, 18 nt, Human
ccccuccuccuggacucc

SEQ ID NO: 1146293 - RNA, 22 nt, Human
ccccuccuccuggacuccugca

SEQ ID NO: 1146294 - RNA, 15 nt, Human
ccccuccucucugcc

SEQ ID NO: 1146295 - RNA, 17 nt, Human
ccccuccucucugcccu

SEQ ID NO: 1146296 - RNA, 12 nt, Human
ccccucugcccu

SEQ ID NO: 1146297 - RNA, 13 nt, Human
ccccucugcccug

SEQ ID NO: 1146298 - RNA, 14 nt, Human
ccccucugcccugc

SEQ ID NO: 1146299 - RNA, 18 nt, Human
ccccuggcuuuucacugc

SEQ ID NO: 1146300 - RNA, 20 nt, Human
ccccuggcuuuucacugcug

SEQ ID NO: 1146301 - RNA, 22 nt, Human
ccccuggcuuuucacugcuggc

SEQ ID NO: 1146302 - RNA, 15 nt, Human
ccccuguucacucua

SEQ ID NO: 1146303 - RNA, 14 nt, Human
cccgacagccuggc

SEQ ID NO: 1146304 - RNA, 15 nt, Human
cccgacagccuggca

SEQ ID NO: 1146305 - RNA, 18 nt, Human
cccgacagccuggcacag

SEQ ID NO: 1146306 - RNA, 15 nt, Human
cccgcucagcccucc

SEQ ID NO: 1146307 - RNA, 12 nt, Human
cccgcucagccc

SEQ ID NO: 1146308 - RNA, 13 nt, Human
cccgcucagcccu

SEQ ID NO: 1146309 - RNA, 14 nt, Human
cccgcucagcccuc

SEQ ID NO: 1146310 - RNA, 14 nt, Human
cccucccugccccu

SEQ ID NO: 1146311 - RNA, 12 nt, Human
cccucugcccug

SEQ ID NO: 1146312 - RNA, 13 nt, Human
cccucugcccugc

SEQ ID NO: 1146313 - RNA, 14 nt, Human
cccucugcccugcg

SEQ ID NO: 1146314 - RNA, 12 nt, Human
cccucuggcucc

SEQ ID NO: 1146315 - RNA, 16 nt, Human
cccucuggcuccagcu

SEQ ID NO: 1146316 - RNA, 17 nt, Human
cccucuggcuccagcug

SEQ ID NO: 1146317 - RNA, 22 nt, Human
cccucuggcuccagcuggccgg

SEQ ID NO: 1146318 - RNA, 20 nt, Human
cccucuguucugcacacagc

SEQ ID NO: 1146319 - RNA, 21 nt, Human
cccucuguucugcacacagca

SEQ ID NO: 1146320 - RNA, 19 nt, Human
cccugcgggucacaggagg

SEQ ID NO: 1146321 - RNA, 21 nt, Human
cccugcgggucacaggaggga

SEQ ID NO: 1146322 - RNA, 21 nt, Human
cccugcugagucccaggcuga

SEQ ID NO: 1146323 - RNA, 23 nt, Human
cccugcugagucccaggcugagc

SEQ ID NO: 1146324 - RNA, 16 nt, Human
cccuggugcugccaca

SEQ ID NO: 1146325 - RNA, 13 nt, Human
cccuggugcugcc

SEQ ID NO: 1146326 - RNA, 14 nt, Human
cccuggugcugcca

SEQ ID NO: 1146327 - RNA, 15 nt, Human
cccuggugcugccac

SEQ ID NO: 1146328 - RNA, 20 nt, Human
cccuuaaacaguugcacagc

SEQ ID NO: 1146329 - RNA, 21 nt, Human
cccuuaaacaguugcacagca

SEQ ID NO: 1146330 - RNA, 22 nt, Human
cccuuaaacaguugcacagcau

SEQ ID NO: 1146331 - RNA, 20 nt, Human
cccuuagaaguuuguuguga

SEQ ID NO: 1146332 - RNA, 14 nt, Human
cccuucaaccauuc

SEQ ID NO: 1146333 - RNA, 18 nt, Human
cccuucaaccauucccca

SEQ ID NO: 1146334 - RNA, 20 nt, Human
cccuuccaugucgccucugc

SEQ ID NO: 1146335 - RNA, 20 nt, Human
ccgaguagcugagauuauag

SEQ ID NO: 1146336 - RNA, 14 nt, Human
ccgagucucuucuc

SEQ ID NO: 1146337 - RNA, 16 nt, Human
ccgagucucuucucca

SEQ ID NO: 1146338 - RNA, 18 nt, Human
ccgagucucuucuccacu

SEQ ID NO: 1146339 - RNA, 19 nt, Human
ccgagucucuucuccacug

SEQ ID NO: 1146340 - RNA, 20 nt, Human
ccgagucucuucuccacugg

SEQ ID NO: 1146341 - RNA, 21 nt, Human
ccgagucucuucuccacugga

SEQ ID NO: 1146342 - RNA, 17 nt, Human
ccgccuccgggaccccc

SEQ ID NO: 1146343 - RNA, 18 nt, Human
ccgccuccgggaccccca

SEQ ID NO: 1146344 - RNA, 21 nt, Human
ccgccuccgggacccccagga

SEQ ID NO: 1146345 - RNA, 22 nt, Human
ccgccuccgggacccccaggac

SEQ ID NO: 1146346 - RNA, 23 nt, Human
ccgccuccgggacccccaggaca

SEQ ID NO: 1146347 - RNA, 14 nt, Human
ccggaggggccugg

SEQ ID NO: 1146348 - RNA, 15 nt, Human
ccggaggggccuggc

SEQ ID NO: 1146349 - RNA, 16 nt, Human
ccggaggggccuggca

SEQ ID NO: 1146350 - RNA, 17 nt, Human
ccggaggggccuggcag

SEQ ID NO: 1146351 - RNA, 14 nt, Human
ccguggcuucccgc

SEQ ID NO: 1146352 - RNA, 11 nt, Human
ccguggcuucc

SEQ ID NO: 1146353 - RNA, 16 nt, Human
ccuaccgagucucuuc

SEQ ID NO: 1146354 - RNA, 17 nt, Human
ccuaccgagucucuucu

SEQ ID NO: 1146355 - RNA, 19 nt, Human
ccuaccgagucucuucucc

SEQ ID NO: 1146356 - RNA, 20 nt, Human
ccuaccgagucucuucucca

SEQ ID NO: 1146357 - RNA, 21 nt, Human
ccuaccgagucucuucuccac

SEQ ID NO: 1146358 - RNA, 11 nt, Human
ccuaugaugua

SEQ ID NO: 1146359 - RNA, 14 nt, Human
ccuaugauguauac

SEQ ID NO: 1146360 - RNA, 15 nt, Human
ccuaugauguauacu

SEQ ID NO: 1146361 - RNA, 18 nt, Human
ccuaugauguauacugcc

SEQ ID NO: 1146362 - RNA, 11 nt, Human
ccucuuccuga

SEQ ID NO: 1146363 - RNA, 19 nt, Human
ccugaaguaagcaaagacu

SEQ ID NO: 1146364 - RNA, 14 nt, Human
ccugcaaagcccag

SEQ ID NO: 1146365 - RNA, 15 nt, Human
ccugcaaagcccagc

SEQ ID NO: 1146366 - RNA, 16 nt, Human
ccugcaaagcccagcu

SEQ ID NO: 1146367 - RNA, 17 nt, Human
ccugcaaagcccagcuu

SEQ ID NO: 1146368 - RNA, 18 nt, Human
ccugcaaagcccagcuug

SEQ ID NO: 1146369 - RNA, 22 nt, Human
ccugcacaaagcccuuccaugu

SEQ ID NO: 1146370 - RNA, 23 nt, Human
ccugcacaaagcccuuccauguc

SEQ ID NO: 1146371 - RNA, 19 nt, Human
ccugcaaagcccagcuuga

SEQ ID NO: 1146372 - RNA, 21 nt, Human
ccugcacacgcuccuuccucu

SEQ ID NO: 1146373 - RNA, 23 nt, Human
ccugcauuugugaaaugauggug

SEQ ID NO: 1146374 - RNA, 15 nt, Human
ccugccaccacgccc

SEQ ID NO: 1146375 - RNA, 19 nt, Human
ccugccaccacgcccggcu

SEQ ID NO: 1146376 - RNA, 15 nt, Human
ccugccccucccuuc

SEQ ID NO: 1146377 - RNA, 16 nt, Human
ccugccccucccuuca

SEQ ID NO: 1146378 - RNA, 18 nt, Human
ccugccccucccuucaac

SEQ ID NO: 1146379 - RNA, 18 nt, Human
ccugccccuccucucugc

SEQ ID NO: 1146380 - RNA, 19 nt, Human
ccugccccuccucucugcc

SEQ ID NO: 1146381 - RNA, 20 nt, Human
ccugccccuccucucugccc

SEQ ID NO: 1146382 - RNA, 21 nt, Human
ccugccccuccucucugcccu

SEQ ID NO: 1146383 - RNA, 22 nt, Human
ccugccccuccucucugcccua

SEQ ID NO: 1146384 - RNA, 10 nt, Human
ccugcccugg

SEQ ID NO: 1146385 - RNA, 12 nt, Human
ccugcccuggga

SEQ ID NO: 1146386 - RNA, 14 nt, Human
ccugcccugggagg

SEQ ID NO: 1146387 - RNA, 15 nt, Human
ccugcccugggaggc

SEQ ID NO: 1146388 - RNA, 20 nt, Human
ccugcccugggaggcaguga

SEQ ID NO: 1146389 - RNA, 22 nt, Human
ccugcccugggaggcagugaug

SEQ ID NO: 1146390 - RNA, 14 nt, Human
ccugcccugguuuc

SEQ ID NO: 1146391 - RNA, 19 nt, Human
ccugcccugguuuccugcc

SEQ ID NO: 1146392 - RNA, 20 nt, Human
ccugcccugguuuccugccc

SEQ ID NO: 1146393 - RNA, 21 nt, Human
ccugcccugguuuccugcccu

SEQ ID NO: 1146394 - RNA, 22 nt, Human
ccugcccugguuuccugcccug

SEQ ID NO: 1146395 - RNA, 23 nt, Human
ccugcccugguuuccugcccugg

SEQ ID NO: 1146396 - RNA, 12 nt, Human
ccugccucagcc

SEQ ID NO: 1146397 - RNA, 22 nt, Human
ccugccuguucccauucuugca

SEQ ID NO: 1146398 - RNA, 12 nt, Human
ccuggagaacua

SEQ ID NO: 1146399 - RNA, 13 nt, Human
ccuggagaacuag

SEQ ID NO: 1146400 - RNA, 16 nt, Human
ccuggagaacuagaga

SEQ ID NO: 1146401 - RNA, 13 nt, Human
ccuggccacgccc

SEQ ID NO: 1146402 - RNA, 16 nt, Human
ccuggcuuuucacugc

SEQ ID NO: 1146403 - RNA, 17 nt, Human
ccuggcuuuucacugcu

SEQ ID NO: 1146404 - RNA, 18 nt, Human
ccuggcuuuucacugcug

SEQ ID NO: 1146405 - RNA, 13 nt, Human
ccugggaggcagu

SEQ ID NO: 1146406 - RNA, 19 nt, Human
ccuguaggaagguacugua

SEQ ID NO: 1146407 - RNA, 20 nt, Human
ccuguaggaagguacuguau

SEQ ID NO: 1146408 - RNA, 17 nt, Human
ccugucauacuuuguua

SEQ ID NO: 1146409 - RNA, 18 nt, Human
ccuuccaugucgccucug

SEQ ID NO: 1146410 - RNA, 19 nt, Human
ccuuccaugucgccucugc

SEQ ID NO: 1146411 - RNA, 23 nt, Human
ccuugacauuguagagcuucugg

SEQ ID NO: 1146412 - RNA, 21 nt, Human
ccuuuguaaauugucagaugc

SEQ ID NO: 1146413 - RNA, 23 nt, Human
ccuuuguaaauugucagaugcug

SEQ ID NO: 1146414 - RNA, 13 nt, Human
ccuuugugaaaaa

SEQ ID NO: 1146415 - RNA, 13 nt, Human
cgcagcccugcuu

SEQ ID NO: 1146416 - RNA, 15 nt, Human
cgcagcccugcuuug

SEQ ID NO: 1146417 - RNA, 24 nt, Human
cgcagcccugcuuugggcugcccu

SEQ ID NO: 1146418 - RNA, 18 nt, Human
cgcccaacuaauuuuugu

SEQ ID NO: 1146419 - RNA, 18 nt, Human
cgcccggcuaauuuuugu

SEQ ID NO: 1146420 - RNA, 16 nt, Human
cggacuuagcugggag

SEQ ID NO: 1146421 - RNA, 17 nt, Human
cggacuuagcugggaga

SEQ ID NO: 1146422 - RNA, 20 nt, Human
cguuuguuccccaagacauu

SEQ ID NO: 1146423 - RNA, 20 nt, Human
cuaaacuccaaacauccucu

SEQ ID NO: 1146424 - RNA, 19 nt, Human
cuaaacuccaaacauccuc

SEQ ID NO: 1146425 - RNA, 12 nt, Human
cuaaacugcccc

SEQ ID NO: 1146426 - RNA, 13 nt, Human
cuaaacugccccc

SEQ ID NO: 1146427 - RNA, 21 nt, Human
cuaaacugcccccucugcccu

SEQ ID NO: 1146428 - RNA, 15 nt, Human
cuaacaugaagaccu

SEQ ID NO: 1146429 - RNA, 21 nt, Human
cuaagcuucacuguaaaauaa

SEQ ID NO: 1146430 - RNA, 17 nt, Human
cuaauacagcugagcua

SEQ ID NO: 1146431 - RNA, 14 nt, Human
cuaauaguauaaac

SEQ ID NO: 1146432 - RNA, 21 nt, Human
cuaaucagcauucucacuccu

SEQ ID NO: 1146433 - RNA, 15 nt, Human
cuaaugcgcaggcug

SEQ ID NO: 1146434 - RNA, 16 nt, Human
cuaaugcgcaggcugg

SEQ ID NO: 1146435 - RNA, 19 nt, Human
cuaaugcgcaggcuggccc

SEQ ID NO: 1146436 - RNA, 20 nt, Human
cuaaugcgcaggcuggcccu

SEQ ID NO: 1146437 - RNA, 22 nt, Human
cuaaugcgcaggcuggcccugc

SEQ ID NO: 1146438 - RNA, 23 nt, Human
cuaaugcgcaggcuggcccugcc

SEQ ID NO: 1146439 - RNA, 22 nt, Human
cuaauuauacccccugcaaagc

SEQ ID NO: 1146440 - RNA, 14 nt, Human
cuaauuccacagcu

SEQ ID NO: 1146441 - RNA, 15 nt, Human
cuaauuccacagcug

SEQ ID NO: 1146442 - RNA, 16 nt, Human
cuaauuccacagcugc

SEQ ID NO: 1146443 - RNA, 23 nt, Human
cuacacgagauacagaauuuuau

SEQ ID NO: 1146444 - RNA, 18 nt, Human
cuacagcuaaucagcauu

SEQ ID NO: 1146445 - RNA, 19 nt, Human
cuacagcuaaucagcauuc

SEQ ID NO: 1146446 - RNA, 21 nt, Human
cuacagcuaaucagcauucuc

SEQ ID NO: 1146447 - RNA, 22 nt, Human
cuacagcuaaucagcauucuca

SEQ ID NO: 1146448 - RNA, 18 nt, Human
cuacauuaaacaugacuc

SEQ ID NO: 1146449 - RNA, 16 nt, Human
cuaccaaccuguucaa

SEQ ID NO: 1146450 - RNA, 17 nt, Human
cuaccgagucucuucuc

SEQ ID NO: 1146451 - RNA, 19 nt, Human
cuaccgagucucuucucca

SEQ ID NO: 1146452 - RNA, 21 nt, Human
cuaccgagucucuucuccacu

SEQ ID NO: 1146453 - RNA, 22 nt, Human
cuaccgagucucuucuccacug

SEQ ID NO: 1146454 - RNA, 23 nt, Human
cuaccgagucucuucuccacugg

SEQ ID NO: 1146455 - RNA, 17 nt, Human
cuacuuagcaugucccu

SEQ ID NO: 1146456 - RNA, 22 nt, Human
cuacuuagcaugucccuaccga

SEQ ID NO: 1146457 - RNA, 12 nt, Human
cuauaauuuaaa

SEQ ID NO: 1146458 - RNA, 13 nt, Human
cuauaauuuaaau

SEQ ID NO: 1146459 - RNA, 13 nt, Human
cuaugauguauac

SEQ ID NO: 1146460 - RNA, 14 nt, Human
cuaugauguauacu

SEQ ID NO: 1146461 - RNA, 20 nt, Human
cuaugauguauacugccacu

SEQ ID NO: 1146462 - RNA, 16 nt, Human
cuaugauguauacugc

SEQ ID NO: 1146463 - RNA, 15 nt, Human
cuaugauuuggaaaa

SEQ ID NO: 1146464 - RNA, 19 nt, Human
cuaugauuuggaaaauaaa

SEQ ID NO: 1146465 - RNA, 19 nt, Human
cuaugggggcacugaggac

SEQ ID NO: 1146466 - RNA, 11 nt, Human
cuauugguaaa

SEQ ID NO: 1146467 - RNA, 17 nt, Human
cucacagaacccuugga

SEQ ID NO: 1146468 - RNA, 20 nt, Human
cucacugcauccuccgccuc

SEQ ID NO: 1146469 - RNA, 15 nt, Human
cucagagccaccccu

SEQ ID NO: 1146470 - RNA, 14 nt, Human
cucagcccucccug

SEQ ID NO: 1146471 - RNA, 19 nt, Human
cucagcccucccugccccu

SEQ ID NO: 1146472 - RNA, 20 nt, Human
cucagcccucccugccccuc

SEQ ID NO: 1146473 - RNA, 21 nt, Human
cucagcccucccugccccucc

SEQ ID NO: 1146474 - RNA, 21 nt, Human
cucagcucaucuucacugcac

SEQ ID NO: 1146475 - RNA, 15 nt, Human
cucagcucccaaggc

SEQ ID NO: 1146476 - RNA, 19 nt, Human
cucagcucccaaggcucug

SEQ ID NO: 1146477 - RNA, 20 nt, Human
cucagguaaucgaccugccu

SEQ ID NO: 1146478 - RNA, 22 nt, Human
cucagguaaucgaccugccucg

SEQ ID NO: 1146479 - RNA, 24 nt, Human
cucagguaaucgaccugccucggc

SEQ ID NO: 1146480 - RNA, 14 nt, Human
cuccacugccuucg

SEQ ID NO: 1146481 - RNA, 15 nt, Human
cuccacugccuucga

SEQ ID NO: 1146482 - RNA, 16 nt, Human
cuccacugccuucgau

SEQ ID NO: 1146483 - RNA, 13 nt, Human
cuccacuggaugg

SEQ ID NO: 1146484 - RNA, 14 nt, Human
cuccacuggaugga

SEQ ID NO: 1146485 - RNA, 16 nt, Human
cuccacuggauggagg

SEQ ID NO: 1146486 - RNA, 22 nt, Human
cuccagcuggccgggagccuga

SEQ ID NO: 1146487 - RNA, 23 nt, Human
cuccagcuggccgggagccugau

SEQ ID NO: 1146488 - RNA, 19 nt, Human
cuccagcuggguuggaaaa

SEQ ID NO: 1146489 - RNA, 14 nt, Human
cuccaugcugccuc

SEQ ID NO: 1146490 - RNA, 15 nt, Human
cuccaugcugccucc

SEQ ID NO: 1146491 - RNA, 16 nt, Human
cuccaugcugccucca

SEQ ID NO: 1146492 - RNA, 17 nt, Human
cuccaugcugccuccag

SEQ ID NO: 1146493 - RNA, 18 nt, Human
cuccauuuaaacagaugu

SEQ ID NO: 1146494 - RNA, 16 nt, Human
cucccaaagugcuggg

SEQ ID NO: 1146495 - RNA, 14 nt, Human
cucccacaggcccu

SEQ ID NO: 1146496 - RNA, 19 nt, Human
cucccaggcgccccuuccc

SEQ ID NO: 1146497 - RNA, 20 nt, Human
cucccaggcgccccuucccc

SEQ ID NO: 1146498 - RNA, 22 nt, Human
cucccaggcgccccuucccccu

SEQ ID NO: 1146499 - RNA, 15 nt, Human
cucccauucaagauu

SEQ ID NO: 1146500 - RNA, 21 nt, Human
cucccuucaaccauuccccau

SEQ ID NO: 1146501 - RNA, 22 nt, Human
cucccuucaaccauuccccaug

SEQ ID NO: 1146502 - RNA, 23 nt, Human
cucccuucaaccauuccccaugg

SEQ ID NO: 1146503 - RNA, 20 nt, Human
cugcccugcgggucacagga

SEQ ID NO: 1146504 - RNA, 22 nt, Human
cugcccugcugagucccaggcu

SEQ ID NO: 1146505 - RNA, 21 nt, Human
cugcccuuucugggcaccggg

SEQ ID NO: 1146506 - RNA, 16 nt, Human
cugccucucuuguaau

SEQ ID NO: 1146507 - RNA, 14 nt, Human
cugcucuccucuug

SEQ ID NO: 1146508 - RNA, 20 nt, Human
cugcucuccucuugccacug

SEQ ID NO: 1146509 - RNA, 21 nt, Human
cugcucuccucuugccacugc

SEQ ID NO: 1146510 - RNA, 17 nt, Human
cugcugaaggaauaaau

SEQ ID NO: 1146511 - RNA, 18 nt, Human
cugcugaaggaauaaauu

SEQ ID NO: 1146512 - RNA, 12 nt, Human
cugcugcccagc

SEQ ID NO: 1146513 - RNA, 15 nt, Human
cugcugcccagccuc

SEQ ID NO: 1146514 - RNA, 22 nt, Human
cugcugcccagccuccaagcuc

SEQ ID NO: 1146515 - RNA, 12 nt, Human
cugcuggcugcc

SEQ ID NO: 1146516 - RNA, 14 nt, Human
cuggacuccucugu

SEQ ID NO: 1146517 - RNA, 17 nt, Human
cuggacuccucugucca

SEQ ID NO: 1146518 - RNA, 18 nt, Human
cuggacuccucuguccag

SEQ ID NO: 1146519 - RNA, 19 nt, Human
cuggacuccucuguccagg

SEQ ID NO: 1146520 - RNA, 20 nt, Human
cuggacuccucuguccaggc

SEQ ID NO: 1146521 - RNA, 14 nt, Human
cuggcacuuggaga

SEQ ID NO: 1146522 - RNA, 21 nt, Human
cuggcacuuggagacuuguau

SEQ ID NO: 1146523 - RNA, 18 nt, Human
cuggucacaggacucugc

SEQ ID NO: 1146524 - RNA, 19 nt, Human
cuggucacaggacucugcc

SEQ ID NO: 1146525 - RNA, 12 nt, Human
cuggugcugcca

SEQ ID NO: 1146526 - RNA, 13 nt, Human
cuggugcugccac

SEQ ID NO: 1146527 - RNA, 20 nt, Human
cuggugcugccacacuucag

SEQ ID NO: 1146528 - RNA, 22 nt, Human
cuggugcugccacacuucaggc

SEQ ID NO: 1146529 - RNA, 21 nt, Human
cugguggcccgacagccuggc

SEQ ID NO: 1146530 - RNA, 22 nt, Human
cugguggcccgacagccuggca

SEQ ID NO: 1146531 - RNA, 23 nt, Human
cugguggcccgacagccuggcac

SEQ ID NO: 1146532 - RNA, 12 nt, Human
cugguuccuccc

SEQ ID NO: 1146533 - RNA, 13 nt, Human
cugguuccucccc

SEQ ID NO: 1146534 - RNA, 23 nt, Human
cuguacaaaaaaaucuuccaauu

SEQ ID NO: 1146535 - RNA, 13 nt, Human
cuguaugaucaaa

SEQ ID NO: 1146536 - RNA, 14 nt, Human
cuguaugaucaaau

SEQ ID NO: 1146537 - RNA, 15 nt, Human
cuguaugaucaaaug

SEQ ID NO: 1146538 - RNA, 16 nt, Human
cuguaugaucaaaugu

SEQ ID NO: 1146539 - RNA, 17 nt, Human
cuguaugaucaaauguu

SEQ ID NO: 1146540 - RNA, 18 nt, Human
cuguaugaucaaauguuu

SEQ ID NO: 1146541 - RNA, 23 nt, Human
cuguaugaucaaauguuuaauca

SEQ ID NO: 1146542 - RNA, 19 nt, Human
cuguaugaucaaauguuua

SEQ ID NO: 1146543 - RNA, 21 nt, Human
cuguaugaucaaauguuuaau

SEQ ID NO: 1146544 - RNA, 17 nt, Human
cuguccaggcacugcug

SEQ ID NO: 1146545 - RNA, 18 nt, Human
cuguccgagugugccaca

SEQ ID NO: 1146546 - RNA, 22 nt, Human
cugucucaagagggcacuggug

SEQ ID NO: 1146547 - RNA, 23 nt, Human
cugucucaagagggcacuggugg

SEQ ID NO: 1146548 - RNA, 11 nt, Human
cugugcacagc

SEQ ID NO: 1146549 - RNA, 12 nt, Human
cugugcacagcc

SEQ ID NO: 1146550 - RNA, 13 nt, Human
cugugcacagccc

SEQ ID NO: 1146551 - RNA, 11 nt, Human
cugugccucug

SEQ ID NO: 1146552 - RNA, 13 nt, Human
cugugcuguuguu

SEQ ID NO: 1146553 - RNA, 17 nt, Human
cugugcuguuguuauga

SEQ ID NO: 1146554 - RNA, 19 nt, Human
cugugcuguuguuaugaug

SEQ ID NO: 1146555 - RNA, 21 nt, Human
cugugcuguuguuaugaugug

SEQ ID NO: 1146556 - RNA, 21 nt, Human
cugugggcgugagaccugccc

SEQ ID NO: 1146557 - RNA, 22 nt, Human
cugugggcgugagaccugcccc

SEQ ID NO: 1146558 - RNA, 23 nt, Human
cugugggcgugagaccugccccu

SEQ ID NO: 1146559 - RNA, 18 nt, Human
cuguucccauucuugcau

SEQ ID NO: 1146560 - RNA, 16 nt, Human
cuguucugcacacagc

SEQ ID NO: 1146561 - RNA, 19 nt, Human
cuuagugcaguuauuugcu

SEQ ID NO: 1146562 - RNA, 14 nt, Human
cuuauagacaacau

SEQ ID NO: 1146563 - RNA, 15 nt, Human
cuuauuucaucauuc

SEQ ID NO: 1146564 - RNA, 18 nt, Human
cuuauuucaucauucacu

SEQ ID NO: 1146565 - RNA, 17 nt, Human
cuucaaagcaaaugucu

SEQ ID NO: 1146566 - RNA, 16 nt, Human
cuucaaccauucccca

SEQ ID NO: 1146567 - RNA, 20 nt, Human
cuucaaccauuccccauggg

SEQ ID NO: 1146568 - RNA, 16 nt, Human
cuucaacucccugccc

SEQ ID NO: 1146569 - RNA, 17 nt, Human
cuucaauccuugaaggu

SEQ ID NO: 1146570 - RNA, 15 nt, Human
cuucaauuuauaccu

SEQ ID NO: 1146571 - RNA, 19 nt, Human
cuucaggcucuucuccuuu

SEQ ID NO: 1146572 - RNA, 22 nt, Human
cuucaggcucuucuccuuucac

SEQ ID NO: 1146573 - RNA, 15 nt, Human
cuucagggagugagg

SEQ ID NO: 1146574 - RNA, 19 nt, Human
cuucccgcucagcccuccc

SEQ ID NO: 1146575 - RNA, 23 nt, Human
cuucccgcucagcccucccugcc

SEQ ID NO: 1146576 - RNA, 13 nt, Human
cuuccuaauucca

SEQ ID NO: 1146577 - RNA, 17 nt, Human
cuuccuaauuccacagc

SEQ ID NO: 1146578 - RNA, 18 nt, Human
cuuccuaauuccacagcu

SEQ ID NO: 1146579 - RNA, 19 nt, Human
cuuccuaauuccacagcug

SEQ ID NO: 1146580 - RNA, 13 nt, Human
cuuccucccucau

SEQ ID NO: 1146581 - RNA, 15 nt, Human
cuuccucccucauuc

SEQ ID NO: 1146582 - RNA, 13 nt, Human
cuucuccacugga

SEQ ID NO: 1146583 - RNA, 14 nt, Human
cuucuccacuggau

SEQ ID NO: 1146584 - RNA, 15 nt, Human
cuucuccacuggaug

SEQ ID NO: 1146585 - RNA, 17 nt, Human
cuucuccacuggaugga

SEQ ID NO: 1146586 - RNA, 16 nt, Human
cuucuggguuccuucc

SEQ ID NO: 1146587 - RNA, 17 nt, Human
cuucuggguuccuuccu

SEQ ID NO: 1146588 - RNA, 23 nt, Human
cuucuggguuccuuccucugagc

SEQ ID NO: 1146589 - RNA, 14 nt, Human
cuucugguugaugc

SEQ ID NO: 1146590 - RNA, 13 nt, Human
cuucuguggcuca

SEQ ID NO: 1146591 - RNA, 15 nt, Human
cuucuguggcucaca

SEQ ID NO: 1146592 - RNA, 22 nt, Human
cuucuguggcucacagaacccu

SEQ ID NO: 1146593 - RNA, 15 nt, Human
cuucuguugcugccu

SEQ ID NO: 1146594 - RNA, 13 nt, Human
cuugaacuccuga

SEQ ID NO: 1146595 - RNA, 16 nt, Human
cuugaacuccugaccu

SEQ ID NO: 1146596 - RNA, 18 nt, Human
cuugaacuccugaccuca

SEQ ID NO: 1146597 - RNA, 19 nt, Human
cuugaguuuaaauuguaau

SEQ ID NO: 1146598 - RNA, 17 nt, Human
cuuguacuuuauuuucu

SEQ ID NO: 1146599 - RNA, 23 nt, Human
cuuuauggcagacauugugcuag

SEQ ID NO: 1146600 - RNA, 20 nt, Human
cuuucugggcaccggggccu

SEQ ID NO: 1146601 - RNA, 11 nt, Human
cuuucuuccuc

SEQ ID NO: 1146602 - RNA, 12 nt, Human
cuuucuuccucu

SEQ ID NO: 1146603 - RNA, 13 nt, Human
cuuucuuccucug

SEQ ID NO: 1146604 - RNA, 14 nt, Human
cuuucuuccucugc

SEQ ID NO: 1146605 - RNA, 15 nt, Human
cuuucuuccucugcu

SEQ ID NO: 1146606 - RNA, 17 nt, Human
cuuugcucauauuuccc

SEQ ID NO: 1146607 - RNA, 16 nt, Human
cuuugucacuguuuca

SEQ ID NO: 1146608 - RNA, 13 nt, Human
cuuuuucugcacu

SEQ ID NO: 1146609 - RNA, 14 nt, Human
cuuuuucugcacua

SEQ ID NO: 1146610 - RNA, 16 nt, Human
cuuuuucugcacuaua

SEQ ID NO: 1146611 - RNA, 20 nt, Human
cuuuuucugcacuauaugca

SEQ ID NO: 1146612 - RNA, 22 nt, Human
cuuuuucugcacuauaugcaaa

SEQ ID NO: 1146613 - RNA, 18 nt, Human
gaaaaucuuauaauuuaa

SEQ ID NO: 1146614 - RNA, 23 nt, Human
gaaugcuuaaagaauucaaauuu

SEQ ID NO: 1146615 - RNA, 21 nt, Human
gaaugcuuaaagaauucaaau

SEQ ID NO: 1146616 - RNA, 21 nt, Human
gaauuucuucaacucccugcc

SEQ ID NO: 1146617 - RNA, 16 nt, Human
gacaacagacuucuga

SEQ ID NO: 1146618 - RNA, 16 nt, Human
gacaaggaaaaaauaa

SEQ ID NO: 1146619 - RNA, 22 nt, Human
gacaagaaaggcugcuguacug

SEQ ID NO: 1146620 - RNA, 22 nt, Human
gacaauuagauaaauguccauu

SEQ ID NO: 1146621 - RNA, 13 nt, Human
gaccaccugccca

SEQ ID NO: 1146622 - RNA, 14 nt, Human
gaccaccugcccaa

SEQ ID NO: 1146623 - RNA, 20 nt, Human
gaccagccuccaugcugccu

SEQ ID NO: 1146624 - RNA, 21 nt, Human
gaccagccuccaugcugccuc

SEQ ID NO: 1146625 - RNA, 22 nt, Human
gaccagccuccaugcugccucc

SEQ ID NO: 1146626 - RNA, 12 nt, Human
gacccccaacca

SEQ ID NO: 1146627 - RNA, 21 nt, Human
gacccccaaccaaguggcucc

SEQ ID NO: 1146628 - RNA, 11 nt, Human
gacuccucugu

SEQ ID NO: 1146629 - RNA, 14 nt, Human
gacuccucugucca

SEQ ID NO: 1146630 - RNA, 23 nt, Human
gacuccugcacacgcuccuuccu

SEQ ID NO: 1146631 - RNA, 19 nt, Human
gacuuaaaauauuccugca

SEQ ID NO: 1146632 - RNA, 16 nt, Human
gacuugaagacuuaca

SEQ ID NO: 1146633 - RNA, 22 nt, Human
gagacugucucaagagggcacu

SEQ ID NO: 1146634 - RNA, 19 nt, Human
gagagagcuucuguugcug

SEQ ID NO: 1146635 - RNA, 22 nt, Human
gagagagcuucuguugcugccu

SEQ ID NO: 1146636 - RNA, 16 nt, Human
gagagcccuucauuug

SEQ ID NO: 1146637 - RNA, 16 nt, Human
gagaguggcuccuccc

SEQ ID NO: 1146638 - RNA, 21 nt, Human
gagaguggcuccucccggugc

SEQ ID NO: 1146639 - RNA, 17 nt, Human
gagaugaggccgccaug

SEQ ID NO: 1146640 - RNA, 15 nt, Human
gagcauuagauuucu

SEQ ID NO: 1146641 - RNA, 21 nt, Human
gagcauuagauuucucauuug

SEQ ID NO: 1146642 - RNA, 22 nt, Human
gagcccuguccugccuaaggcu

SEQ ID NO: 1146643 - RNA, 20 nt, Human
gagggagggggaaggcaggg

SEQ ID NO: 1146644 - RNA, 17 nt, Human
gaggggcugugggcgug

SEQ ID NO: 1146645 - RNA, 13 nt, Human
gauaaaucauuuu

SEQ ID NO: 1146646 - RNA, 14 nt, Human
gauaaaucauuuua

SEQ ID NO: 1146647 - RNA, 20 nt, Human
gauaaaucauuuuaugucaa

SEQ ID NO: 1146648 - RNA, 16 nt, Human
gaugccccgucccccu

SEQ ID NO: 1146649 - RNA, 21 nt, Human
gaugccccgucccccucuggc

SEQ ID NO: 1146650 - RNA, 17 nt, Human
gaugcugacuguacucc

SEQ ID NO: 1146651 - RNA, 20 nt, Human
gaugcugacuguacuccucc

SEQ ID NO: 1146652 - RNA, 13 nt, Human
gaugguuccccug

SEQ ID NO: 1146653 - RNA, 18 nt, Human
gaugguuccccuguucac

SEQ ID NO: 1146654 - RNA, 21 nt, Human
gaugguuccccuguucacucu

SEQ ID NO: 1146655 - RNA, 14 nt, Human
gauguggugaaaag

SEQ ID NO: 1146656 - RNA, 17 nt, Human
gauguuacuccaaaacu

SEQ ID NO: 1146657 - RNA, 20 nt, Human
gauuacaggcgugagccacc

SEQ ID NO: 1146658 - RNA, 17 nt, Human
gauuacaggcuccugcc

SEQ ID NO: 1146659 - RNA, 18 nt, Human
gauuacaggcuccugcca

SEQ ID NO: 1146660 - RNA, 21 nt, Human
gauuacaggcuccugccacca

SEQ ID NO: 1146661 - RNA, 16 nt, Human
gauucaauuugaugug

SEQ ID NO: 1146662 - RNA, 16 nt, Human
gauucucaugccucag

SEQ ID NO: 1146663 - RNA, 16 nt, Human
gauuugagcucagccc

SEQ ID NO: 1146664 - RNA, 15 nt, Human
gcaaauguggcuccu

SEQ ID NO: 1146665 - RNA, 14 nt, Human
gcaaauuggagaaa

SEQ ID NO: 1146666 - RNA, 15 nt, Human
gcaaauuggagaaaa

SEQ ID NO: 1146667 - RNA, 14 nt, Human
gcaauucuccugcc

SEQ ID NO: 1146668 - RNA, 15 nt, Human
gcaauucuccugccu

SEQ ID NO: 1146669 - RNA, 16 nt, Human
gcaauucuccugccuc

SEQ ID NO: 1146670 - RNA, 17 nt, Human
gcaauucuccugccuca

SEQ ID NO: 1146671 - RNA, 18 nt, Human
gcaauucuccugccucag

SEQ ID NO: 1146672 - RNA, 19 nt, Human
gcaauucuccugccucagc

SEQ ID NO: 1146673 - RNA, 20 nt, Human
gcaauucuccugccucagcc

SEQ ID NO: 1146674 - RNA, 13 nt, Human
gcacagugcaucu

SEQ ID NO: 1146675 - RNA, 15 nt, Human
gcacagugcaucuca

SEQ ID NO: 1146676 - RNA, 18 nt, Human
gcacagugcaucucagcc

SEQ ID NO: 1146677 - RNA, 19 nt, Human
gcacagugcaucucagccc

SEQ ID NO: 1146678 - RNA, 22 nt, Human
gcaccaguugcugcuucaauuu

SEQ ID NO: 1146679 - RNA, 14 nt, Human
gcacugcugcccag

SEQ ID NO: 1146680 - RNA, 15 nt, Human
gcacugcugcccagc

SEQ ID NO: 1146681 - RNA, 18 nt, Human
gcacugcugcccagccuc

SEQ ID NO: 1146682 - RNA, 20 nt, Human
gcacugcugcccagccucca

SEQ ID NO: 1146683 - RNA, 14 nt, Human
gcacugguggcccg

SEQ ID NO: 1146684 - RNA, 19 nt, Human
gcacugguggcccgacagc

SEQ ID NO: 1146685 - RNA, 12 nt, Human
gccccucccuuc

SEQ ID NO: 1146686 - RNA, 14 nt, Human
gccccucccuucaa

SEQ ID NO: 1146687 - RNA, 15 nt, Human
gccccucccuucaac

SEQ ID NO: 1146688 - RNA, 18 nt, Human
gccccuccucucugcccu

SEQ ID NO: 1146689 - RNA, 19 nt, Human
gccccuccucucugcccua

SEQ ID NO: 1146690 - RNA, 12 nt, Human
gccccuuccccc

SEQ ID NO: 1146691 - RNA, 17 nt, Human
gccccuucccccuccaa

SEQ ID NO: 1146692 - RNA, 17 nt, Human
gcccgacagccuggcac

SEQ ID NO: 1146693 - RNA, 19 nt, Human
gcccgacagccuggcacag

SEQ ID NO: 1146694 - RNA, 20 nt, Human
gcccugcuuugggcugcccu

SEQ ID NO: 1146695 - RNA, 21 nt, Human
gcccugcuuugggcugcccug

SEQ ID NO: 1146696 - RNA, 22 nt, Human
gcccugcuuugggcugcccugg

SEQ ID NO: 1146697 - RNA, 23 nt, Human
gcccugcuuugggcugcccuggu

SEQ ID NO: 1146698 - RNA, 15 nt, Human
gcccuggcucccaca

SEQ ID NO: 1146699 - RNA, 19 nt, Human
gcccuggcucccacaggcc

SEQ ID NO: 1146700 - RNA, 20 nt, Human
gcccuggcucccacaggccc

SEQ ID NO: 1146701 - RNA, 11 nt, Human
gcccugggagg

SEQ ID NO: 1146702 - RNA, 14 nt, Human
gcccugggaggcag

SEQ ID NO: 1146703 - RNA, 16 nt, Human
gcccugggaggcagug

SEQ ID NO: 1146704 - RNA, 15 nt, Human
gcccuggugcugcca

SEQ ID NO: 1146705 - RNA, 16 nt, Human
gcccuggugcugccac

SEQ ID NO: 1146706 - RNA, 17 nt, Human
gcccuggugcugccaca

SEQ ID NO: 1146707 - RNA, 21 nt, Human
gcccuggugcugccacacuuc

SEQ ID NO: 1146708 - RNA, 14 nt, Human
gcccugguuuccug

SEQ ID NO: 1146709 - RNA, 15 nt, Human
gcccugguuuccugc

SEQ ID NO: 1146710 - RNA, 17 nt, Human
gcccugguuuccugccc

SEQ ID NO: 1146711 - RNA, 18 nt, Human
gcccugguuuccugcccu

SEQ ID NO: 1146712 - RNA, 19 nt, Human
gcccugguuuccugcccug

SEQ ID NO: 1146713 - RNA, 20 nt, Human
gcccugguuuccugcccugg

SEQ ID NO: 1146714 - RNA, 21 nt, Human
gcccugguuuccugcccuggg

SEQ ID NO: 1146715 - RNA, 23 nt, Human
gcccugguuuccugcccugggag

SEQ ID NO: 1146716 - RNA, 17 nt, Human
gcccuuccucuccacug

SEQ ID NO: 1146717 - RNA, 18 nt, Human
gcccuuccucuccacugc

SEQ ID NO: 1146718 - RNA, 19 nt, Human
gcccuuccucuccacugcc

SEQ ID NO: 1146719 - RNA, 21 nt, Human
gcccuuccucuccacugccuu

SEQ ID NO: 1146720 - RNA, 20 nt, Human
gcccuuccucuccacugccu

SEQ ID NO: 1146721 - RNA, 16 nt, Human
gccuaaggcugaacuu

SEQ ID NO: 1146722 - RNA, 14 nt, Human
gccucagccucccg

SEQ ID NO: 1146723 - RNA, 15 nt, Human
gccucagucucccuc

SEQ ID NO: 1146724 - RNA, 18 nt, Human
gccucagucucccucccu

SEQ ID NO: 1146725 - RNA, 21 nt, Human
gccucggacuuagcugggaga

SEQ ID NO: 1146726 - RNA, 12 nt, Human
gccucugccugu

SEQ ID NO: 1146727 - RNA, 13 nt, Human
gccucugccuguc

SEQ ID NO: 1146728 - RNA, 18 nt, Human
gccucugcugauccuccc

SEQ ID NO: 1146729 - RNA, 19 nt, Human
gccucugcugauccuccca

SEQ ID NO: 1146730 - RNA, 13 nt, Human
gccuggccacgcc

SEQ ID NO: 1146731 - RNA, 17 nt, Human
gccugugaacugaacuc

SEQ ID NO: 1146732 - RNA, 15 nt, Human
gcgugagaccugccc

SEQ ID NO: 1146733 - RNA, 13 nt, Human
gcuaacaugaaga

SEQ ID NO: 1146734 - RNA, 22 nt, Human
gcuaacaugaagaccuuuuucu

SEQ ID NO: 1146735 - RNA, 16 nt, Human
gcuccaaaugcagcuu

SEQ ID NO: 1146736 - RNA, 17 nt, Human
gcuccagcuggccggga

SEQ ID NO: 1146737 - RNA, 23 nt, Human
gcuccagcuggccgggagccuga

SEQ ID NO: 1146738 - RNA, 14 nt, Human
gcuccaucuccacu

SEQ ID NO: 1146739 - RNA, 16 nt, Human
gcuccauuuaaacaga

SEQ ID NO: 1146740 - RNA, 23 nt, Human
gcuccauuuaaacagauguccau

SEQ ID NO: 1146741 - RNA, 20 nt, Human
gcuccauuuuuagugaaaua

SEQ ID NO: 1146742 - RNA, 19 nt, Human
gcuccauuuaaacagaugu

SEQ ID NO: 1146743 - RNA, 15 nt, Human
gcucuccucuugcca

SEQ ID NO: 1146744 - RNA, 19 nt, Human
gcucuccucuugccacugc

SEQ ID NO: 1146745 - RNA, 22 nt, Human
gcucuccucuugccacugccuc

SEQ ID NO: 1146746 - RNA, 13 nt, Human
gcucuucuccuuu

SEQ ID NO: 1146747 - RNA, 17 nt, Human
gcucuucuccuuucaca

SEQ ID NO: 1146748 - RNA, 21 nt, Human
gcucuucuccuuucacaaccu

SEQ ID NO: 1146749 - RNA, 23 nt, Human
gcucuucuccuuucacaaccuuc

SEQ ID NO: 1146750 - RNA, 17 nt, Human
gcugacagacagcccuc

SEQ ID NO: 1146751 - RNA, 18 nt, Human
gcugacuguacuccuccc

SEQ ID NO: 1146752 - RNA, 19 nt, Human
gcugacuguacuccuccca

SEQ ID NO: 1146753 - RNA, 21 nt, Human
gcugacuguacuccucccagg

SEQ ID NO: 1146754 - RNA, 21 nt, Human
gcugagucccaggcugagccu

SEQ ID NO: 1146755 - RNA, 22 nt, Human
gcugagucccaggcugagccuc

SEQ ID NO: 1146756 - RNA, 20 nt, Human
gcugugggcgugagaccugc

SEQ ID NO: 1146757 - RNA, 21 nt, Human
gcugugggcgugagaccugcc

SEQ ID NO: 1146758 - RNA, 22 nt, Human
gcugugggcgugagaccugccc

SEQ ID NO: 1146759 - RNA, 15 nt, Human
gcuuuguaugcacuu

SEQ ID NO: 1146760 - RNA, 13 nt, Human
gcuuuucacugcu

SEQ ID NO: 1146761 - RNA, 14 nt, Human
gcuuuucacugcug

SEQ ID NO: 1146762 - RNA, 18 nt, Human
gcuuuucacugcuggcug

SEQ ID NO: 1146763 - RNA, 22 nt, Human
gcuuuucacugcuggcugccuu

SEQ ID NO: 1146764 - RNA, 23 nt, Human
gcuuuucacugcuggcugccuua

SEQ ID NO: 1146765 - RNA, 21 nt, Human
ggaaaaccaagccguggcuuc

SEQ ID NO: 1146766 - RNA, 13 nt, Human
ggaaccugacccc

SEQ ID NO: 1146767 - RNA, 14 nt, Human
ggaaggcagggagg

SEQ ID NO: 1146768 - RNA, 17 nt, Human
ggaaggcugagaggaga

SEQ ID NO: 1146769 - RNA, 19 nt, Human
ggaagguacuguaugauca

SEQ ID NO: 1146770 - RNA, 13 nt, Human
ggaaguaguuauc

SEQ ID NO: 1146771 - RNA, 16 nt, Human
ggaaguaguuaucaug

SEQ ID NO: 1146772 - RNA, 19 nt, Human
ggaaguaguuaucauguua

SEQ ID NO: 1146773 - RNA, 11 nt, Human
ggacaaaauga

SEQ ID NO: 1146774 - RNA, 11 nt, Human
ggacaaacugc

SEQ ID NO: 1146775 - RNA, 18 nt, Human
ggacuggccucugcugau

SEQ ID NO: 1146776 - RNA, 22 nt, Human
ggaucaaaccccgaccaccugc

SEQ ID NO: 1146777 - RNA, 19 nt, Human
ggauuacaggcuccugcca

SEQ ID NO: 1146778 - RNA, 18 nt, Human
ggcaccggggccucggac

SEQ ID NO: 1146779 - RNA, 17 nt, Human
ggcauggccagguggcc

SEQ ID NO: 1146780 - RNA, 18 nt, Human
ggcauggccagguggcca

SEQ ID NO: 1146781 - RNA, 17 nt, Human
ggccacuccagaccccu

SEQ ID NO: 1146782 - RNA, 11 nt, Human
ggccaggcugc

SEQ ID NO: 1146783 - RNA, 14 nt, Human
ggccaggcugcucu

SEQ ID NO: 1146784 - RNA, 15 nt, Human
ggccaggcugcucuu

SEQ ID NO: 1146785 - RNA, 16 nt, Human
ggccaggcugcucuug

SEQ ID NO: 1146786 - RNA, 11 nt, Human
ggcccugcccu

SEQ ID NO: 1146787 - RNA, 12 nt, Human
ggcccugcccug

SEQ ID NO: 1146788 - RNA, 13 nt, Human
ggcccugcccugg

SEQ ID NO: 1146789 - RNA, 20 nt, Human
ggcccugcccugguuuccug

SEQ ID NO: 1146790 - RNA, 22 nt, Human
ggcccugcccugguuuccugcc

SEQ ID NO: 1146791 - RNA, 13 nt, Human
ggcccuggcuccc

SEQ ID NO: 1146792 - RNA, 22 nt, Human
ggcccuggcucccacaggcccu

SEQ ID NO: 1146793 - RNA, 20 nt, Human
ggccucggacuuagcuggga

SEQ ID NO: 1146794 - RNA, 22 nt, Human
ggccucggacuuagcugggaga

SEQ ID NO: 1146795 - RNA, 19 nt, Human
ggcuaugggggcacugagg

SEQ ID NO: 1146796 - RNA, 12 nt, Human
ggcuccagcugg

SEQ ID NO: 1146797 - RNA, 17 nt, Human
ggcucccacaggcccuu

SEQ ID NO: 1146798 - RNA, 18 nt, Human
ggcucccacaggcccuuc

SEQ ID NO: 1146799 - RNA, 19 nt, Human
ggcucccacaggcccuucc

SEQ ID NO: 1146800 - RNA, 20 nt, Human
ggcucccacaggcccuuccu

SEQ ID NO: 1146801 - RNA, 21 nt, Human
ggcucccacaggcccuuccuc

SEQ ID NO: 1146802 - RNA, 10 nt, Human
gggccuggca

SEQ ID NO: 1146803 - RNA, 22 nt, Human
gggccuggcagccgugccuuca

SEQ ID NO: 1146804 - RNA, 16 nt, Human
ggggcagcagcagugg

SEQ ID NO: 1146805 - RNA, 20 nt, Human
gggguucuuucuuccucugc

SEQ ID NO: 1146806 - RNA, 22 nt, Human
gggguucuuucuuccucugcug

SEQ ID NO: 1146807 - RNA, 22 nt, Human
ggguuccagcaauucuccugcc

SEQ ID NO: 1146808 - RNA, 16 nt, Human
ggguucuuucuuccuc

SEQ ID NO: 1146809 - RNA, 14 nt, Human
ggguucuuucuucc

SEQ ID NO: 1146810 - RNA, 20 nt, Human
ggguuucaccauguuggcca

SEQ ID NO: 1146811 - RNA, 17 nt, Human
gguacuguaugaucaaa

SEQ ID NO: 1146812 - RNA, 18 nt, Human
gguacuguaugaucaaau

SEQ ID NO: 1146813 - RNA, 20 nt, Human
gguacuguaugaucaaaugu

SEQ ID NO: 1146814 - RNA, 21 nt, Human
gguacuguaugaucaaauguu

SEQ ID NO: 1146815 - RNA, 19 nt, Human
ggucucgaacuccugaccu

SEQ ID NO: 1146816 - RNA, 20 nt, Human
ggucucgaacuccugaccuu

SEQ ID NO: 1146817 - RNA, 22 nt, Human
ggugauagguauaaguggugug

SEQ ID NO: 1146818 - RNA, 17 nt, Human
ggugccuaguauugaca

SEQ ID NO: 1146819 - RNA, 19 nt, Human
ggugccuaguauugacaaa

SEQ ID NO: 1146820 - RNA, 16 nt, Human
gguggcccgacagccu

SEQ ID NO: 1146821 - RNA, 17 nt, Human
gguggcccgacagccug

SEQ ID NO: 1146822 - RNA, 18 nt, Human
gguggcccgacagccugg

SEQ ID NO: 1146823 - RNA, 19 nt, Human
gguggcccgacagccuggc

SEQ ID NO: 1146824 - RNA, 20 nt, Human
gguggcccgacagccuggca

SEQ ID NO: 1146825 - RNA, 18 nt, Human
gguucuuucuuccucugc

SEQ ID NO: 1146826 - RNA, 14 nt, Human
gguuuuuauuuccu

SEQ ID NO: 1146827 - RNA, 13 nt, Human
guaaaaauaaaau

SEQ ID NO: 1146828 - RNA, 14 nt, Human
guaaaaauaaaauu

SEQ ID NO: 1146829 - RNA, 19 nt, Human
guaaaacaaacaauaccug

SEQ ID NO: 1146830 - RNA, 19 nt, Human
guaaaugucucacugagca

SEQ ID NO: 1146831 - RNA, 17 nt, Human
guaaaugucucacugag

SEQ ID NO: 1146832 - RNA, 15 nt, Human
guaaucguguccccu

SEQ ID NO: 1146833 - RNA, 14 nt, Human
guaaugaauaccuu

SEQ ID NO: 1146834 - RNA, 18 nt, Human
guaaugaugucguuugaa

SEQ ID NO: 1146835 - RNA, 16 nt, Human
guaaugcgccaauaaa

SEQ ID NO: 1146836 - RNA, 17 nt, Human
guaaugcgccaauaaac

SEQ ID NO: 1146837 - RNA, 22 nt, Human
guacauagugcuaacaugaaga

SEQ ID NO: 1146838 - RNA, 23 nt, Human
guacuuuauuuucuauaauuuaa

SEQ ID NO: 1146839 - RNA, 19 nt, Human
guauuuauuuaguauuuau

SEQ ID NO: 1146840 - RNA, 15 nt, Human
gucaagauucagcua

SEQ ID NO: 1146841 - RNA, 16 nt, Human
gucaagauucagcuag

SEQ ID NO: 1146842 - RNA, 19 nt, Human
gucaagauucagcuagugg

SEQ ID NO: 1146843 - RNA, 16 nt, Human
gucaucucagcuggau

SEQ ID NO: 1146844 - RNA, 19 nt, Human
guccuggggaaccugaccc

SEQ ID NO: 1146845 - RNA, 20 nt, Human
guccuggggaaccugacccc

SEQ ID NO: 1146846 - RNA, 22 nt, Human
gucuacauaacuaauacagcug

SEQ ID NO: 1146847 - RNA, 15 nt, Human
gucuaccaauuauaa

SEQ ID NO: 1146848 - RNA, 14 nt, Human
gucucuucuccacu

SEQ ID NO: 1146849 - RNA, 15 nt, Human
gucucuucuccacug

SEQ ID NO: 1146850 - RNA, 16 nt, Human
gucucuucuccacugg

SEQ ID NO: 1146851 - RNA, 17 nt, Human
gucucuucuccacugga

SEQ ID NO: 1146852 - RNA, 16 nt, Human
gugaaaaugugugugu

SEQ ID NO: 1146853 - RNA, 19 nt, Human
gugaaagaaaauaacaaua

SEQ ID NO: 1146854 - RNA, 14 nt, Human
gugaaucagagcac

SEQ ID NO: 1146855 - RNA, 16 nt, Human
gugaccucagcuuuga

SEQ ID NO: 1146856 - RNA, 15 nt, Human
gugagccaccacgcc

SEQ ID NO: 1146857 - RNA, 16 nt, Human
gugagccaccacgccc

SEQ ID NO: 1146858 - RNA, 15 nt, Human
gugagccaccgugcc

SEQ ID NO: 1146859 - RNA, 17 nt, Human
gugagccaccgugccug

SEQ ID NO: 1146860 - RNA, 21 nt, Human
gugagccaccgugccuggcca

SEQ ID NO: 1146861 - RNA, 22 nt, Human
gugagccaccgugccuggccac

SEQ ID NO: 1146862 - RNA, 23 nt, Human
gugaggauuaaauaauguaaaua

SEQ ID NO: 1146863 - RNA, 20 nt, Human
gugauucucaugccucagcc

SEQ ID NO: 1146864 - RNA, 22 nt, Human
gugcaaaguucccuacuuccug

SEQ ID NO: 1146865 - RNA, 15 nt, Human
gugcaucucagccca

SEQ ID NO: 1146866 - RNA, 18 nt, Human
gugcaucucagcccacau

SEQ ID NO: 1146867 - RNA, 18 nt, Human
gugcaugcagcaucuaag

SEQ ID NO: 1146868 - RNA, 12 nt, Human
gugcugccacac

SEQ ID NO: 1146869 - RNA, 21 nt, Human
gugcugccacacuucaggcuc

SEQ ID NO: 1146870 - RNA, 14 nt, Human
gugcuguuguuaug

SEQ ID NO: 1146871 - RNA, 15 nt, Human
gugcuguuguuauga

SEQ ID NO: 1146872 - RNA, 17 nt, Human
gugcuguuguuaugaug

SEQ ID NO: 1146873 - RNA, 19 nt, Human
gugcuguuguuaugaugug

SEQ ID NO: 1146874 - RNA, 20 nt, Human
gugcuguuguuaugaugugc

SEQ ID NO: 1146875 - RNA, 22 nt, Human
gugcuguuguuaugaugugcuu

SEQ ID NO: 1146876 - RNA, 18 nt, Human
gugcuuauguaugaggua

SEQ ID NO: 1146877 - RNA, 13 nt, Human
guggacuuuuauu

SEQ ID NO: 1146878 - RNA, 18 nt, Human
guggagaggcccggccuc

SEQ ID NO: 1146879 - RNA, 21 nt, Human
guggccacuccagaccccugg

SEQ ID NO: 1146880 - RNA, 17 nt, Human
uaggccguuccuucaaa

SEQ ID NO: 1146881 - RNA, 20 nt, Human
uagguauaaguggugugugu

SEQ ID NO: 1146882 - RNA, 16 nt, Human
uaggucagugcaaaua

SEQ ID NO: 1146883 - RNA, 21 nt, Human
uaggugauccacucgccuuca

SEQ ID NO: 1146884 - RNA, 16 nt, Human
uagugcaguuauuugc

SEQ ID NO: 1146885 - RNA, 15 nt, Human
uagugcuaacaugaa

SEQ ID NO: 1146886 - RNA, 16 nt, Human
uaucugccucucuugu

SEQ ID NO: 1146887 - RNA, 20 nt, Human
uaucugccucucuuguaauu

SEQ ID NO: 1146888 - RNA, 21 nt, Human
uaucugccucucuuguaauuu

SEQ ID NO: 1146889 - RNA, 19 nt, Human
uaucuguuugagaaaguca

SEQ ID NO: 1146890 - RNA, 15 nt, Human
uaucuguuugagaaa

SEQ ID NO: 1146891 - RNA, 16 nt, Human
uaucuguuugagaaag

SEQ ID NO: 1146892 - RNA, 18 nt, Human
uaugaauaaagacaccua

SEQ ID NO: 1146893 - RNA, 15 nt, Human
uaugacaguaauugu

SEQ ID NO: 1146894 - RNA, 17 nt, Human
uaugacaguaauugugu

SEQ ID NO: 1146895 - RNA, 18 nt, Human
uaugacaguaauuguguu

SEQ ID NO: 1146896 - RNA, 22 nt, Human
uaugacaguaauuguguuuaca

SEQ ID NO: 1146897 - RNA, 23 nt, Human
uaugacaguaauuguguuuacau

SEQ ID NO: 1146898 - RNA, 14 nt, Human
uaugaccacacucc

SEQ ID NO: 1146899 - RNA, 19 nt, Human
uaugaccacacuccagcug

SEQ ID NO: 1146900 - RNA, 21 nt, Human
uaugauuagcuuugucacugu

SEQ ID NO: 1146901 - RNA, 15 nt, Human
uaugauuuggaaaau

SEQ ID NO: 1146902 - RNA, 17 nt, Human
uaugauuuggaaaauaa

SEQ ID NO: 1146903 - RNA, 18 nt, Human
uaugauuuggaaaauaaa

SEQ ID NO: 1146904 - RNA, 16 nt, Human
uaugcaaacaggguaa

SEQ ID NO: 1146905 - RNA, 18 nt, Human
uaugcagagguccacaac

SEQ ID NO: 1146906 - RNA, 20 nt, Human
uaugcuuauauuguucacuu

SEQ ID NO: 1146907 - RNA, 17 nt, Human
uauguugaagccuuugu

SEQ ID NO: 1146908 - RNA, 17 nt, Human
uauuauauuuacaaaug

SEQ ID NO: 1146909 - RNA, 14 nt, Human
uauuaugauuagcu

SEQ ID NO: 1146910 - RNA, 20 nt, Human
uauugcaaagucaggaauca

SEQ ID NO: 1146911 - RNA, 14 nt, Human
uauugcaaagucag

SEQ ID NO: 1146912 - RNA, 19 nt, Human
uauuugagaagcugcucaa

SEQ ID NO: 1146913 - RNA, 19 nt, Human
ucaaaccccgaccaccugc

SEQ ID NO: 1146914 - RNA, 20 nt, Human
ucaaaccccgaccaccugcc

SEQ ID NO: 1146915 - RNA, 23 nt, Human
ucaaaccccgaccaccugcccaa

SEQ ID NO: 1146916 - RNA, 12 nt, Human
ucaaauguuuaa

SEQ ID NO: 1146917 - RNA, 14 nt, Human
ucaaauguuuaauc

SEQ ID NO: 1146918 - RNA, 15 nt, Human
ucaaauguuuaauca

SEQ ID NO: 1146919 - RNA, 17 nt, Human
ucaaauguuuaaucaua

SEQ ID NO: 1146920 - RNA, 18 nt, Human
ucaaauguuuaaucauau

SEQ ID NO: 1146921 - RNA, 20 nt, Human
ucaaauguuuaaucauauaa

SEQ ID NO: 1146922 - RNA, 21 nt, Human
ucaaauguuuaaucauauaaa

SEQ ID NO: 1146923 - RNA, 14 nt, Human
ucaacucccugccc

SEQ ID NO: 1146924 - RNA, 15 nt, Human
ucaacucccugcccc

SEQ ID NO: 1146925 - RNA, 21 nt, Human
ucaacucccugccccccagcc

SEQ ID NO: 1146926 - RNA, 22 nt, Human
ucaacucccugccccccagccc

SEQ ID NO: 1146927 - RNA, 19 nt, Human
ucaacucuugaguuuuuca

SEQ ID NO: 1146928 - RNA, 18 nt, Human
ucaacugaccagccucca

SEQ ID NO: 1146929 - RNA, 24 nt, Human
ucaacugaccagccuccaugcugc

SEQ ID NO: 1146930 - RNA, 17 nt, Human
ucacaggacucugccuc

SEQ ID NO: 1146931 - RNA, 18 nt, Human
ucacaggacucugccucc

SEQ ID NO: 1146932 - RNA, 19 nt, Human
ucacaggacucugccuccu

SEQ ID NO: 1146933 - RNA, 23 nt, Human
ucacaggacucugccuccucuuc

SEQ ID NO: 1146934 - RNA, 19 nt, Human
ucacaggagggagggggaa

SEQ ID NO: 1146935 - RNA, 12 nt, Human
ucacauuuaaau

SEQ ID NO: 1146936 - RNA, 20 nt, Human
ucacccuggggcuaggaaau

SEQ ID NO: 1146937 - RNA, 22 nt, Human
ucaggaaucaucaggaacguuu

SEQ ID NO: 1146938 - RNA, 20 nt, Human
ucaggaucaaaccccgacca

SEQ ID NO: 1146939 - RNA, 16 nt, Human
ucaggcucuucuccuu

SEQ ID NO: 1146940 - RNA, 21 nt, Human
ucaggcucuucuccuuucaca

SEQ ID NO: 1146941 - RNA, 12 nt, Human
ucaggucccugc

SEQ ID NO: 1146942 - RNA, 16 nt, Human
ucagucucccucccuu

SEQ ID NO: 1146943 - RNA, 17 nt, Human
ucaucauucacuucacu

SEQ ID NO: 1146944 - RNA, 19 nt, Human
ucaucauucacuucacugu

SEQ ID NO: 1146945 - RNA, 21 nt, Human
ucaucauucacuucacugugc

SEQ ID NO: 1146946 - RNA, 22 nt, Human
ucaucauucacuucacugugcu

SEQ ID NO: 1146947 - RNA, 23 nt, Human
ucaucauucacuucacugugcug

SEQ ID NO: 1146948 - RNA, 14 nt, Human
uccaaacauccucu

SEQ ID NO: 1146949 - RNA, 19 nt, Human
uccaaacuaccuuccaguu

SEQ ID NO: 1146950 - RNA, 22 nt, Human
uccagcaauucuccugccucag

SEQ ID NO: 1146951 - RNA, 19 nt, Human
uccaguucuucgacuguug

SEQ ID NO: 1146952 - RNA, 23 nt, Human
uccaguucuucgacuguuguuau

SEQ ID NO: 1146953 - RNA, 21 nt, Human
uccaguucuucgacuguuguu

SEQ ID NO: 1146954 - RNA, 22 nt, Human
uccauaaucuggacuccucugu

SEQ ID NO: 1146955 - RNA, 21 nt, Human
uccauaaucuggacuccucug

SEQ ID NO: 1146956 - RNA, 17 nt, Human
uccauagaccuuuucau

SEQ ID NO: 1146957 - RNA, 16 nt, Human
uccaucagaugacaag

SEQ ID NO: 1146958 - RNA, 14 nt, Human
uccaucaggccacu

SEQ ID NO: 1146959 - RNA, 14 nt, Human
uccaugcugccucc

SEQ ID NO: 1146960 - RNA, 15 nt, Human
uccaugcugccucca

SEQ ID NO: 1146961 - RNA, 20 nt, Human
uccaugggccauaugaaaag

SEQ ID NO: 1146962 - RNA, 18 nt, Human
ucccaggcgccccuuccc

SEQ ID NO: 1146963 - RNA, 16 nt, Human
ucccaggcgccccuuc

SEQ ID NO: 1146964 - RNA, 17 nt, Human
uccuaucagaaguuucu

SEQ ID NO: 1146965 - RNA, 11 nt, Human
uccugccacca

SEQ ID NO: 1146966 - RNA, 16 nt, Human
uccugccaccacgccc

SEQ ID NO: 1146967 - RNA, 10 nt, Human
uccugcccug

SEQ ID NO: 1146968 - RNA, 11 nt, Human
uccugcccugg

SEQ ID NO: 1146969 - RNA, 12 nt, Human
uccugcccuggg

SEQ ID NO: 1146970 - RNA, 14 nt, Human
uccugcccugggag

SEQ ID NO: 1146971 - RNA, 15 nt, Human
uccugcccugggagg

SEQ ID NO: 1146972 - RNA, 21 nt, Human
uccugcccugggaggcaguga

SEQ ID NO: 1146973 - RNA, 16 nt, Human
uccugccuaaggcuga

SEQ ID NO: 1146974 - RNA, 19 nt, Human
uccugccuaaggcugaacu

SEQ ID NO: 1146975 - RNA, 17 nt, Human
uccuggagguuccccag

SEQ ID NO: 1146976 - RNA, 19 nt, Human
uccuggagguuccccagcc

SEQ ID NO: 1146977 - RNA, 22 nt, Human
uccuggagguuccccagcccca

SEQ ID NO: 1146978 - RNA, 15 nt, Human
ucggcacuguacaaa

SEQ ID NO: 1146979 - RNA, 16 nt, Human
ucguguccccuauccu

SEQ ID NO: 1146980 - RNA, 14 nt, Human
ucuaucaccaagga

SEQ ID NO: 1146981 - RNA, 13 nt, Human
ucucaugccucag

SEQ ID NO: 1146982 - RNA, 16 nt, Human
ucucaugccucagccu

SEQ ID NO: 1146983 - RNA, 19 nt, Human
ucucaugccucagccuccu

SEQ ID NO: 1146984 - RNA, 20 nt, Human
ucucaugccucagccuccug

SEQ ID NO: 1146985 - RNA, 13 nt, Human
ucuccacuccaga

SEQ ID NO: 1146986 - RNA, 14 nt, Human
ucuccacugccuuc

SEQ ID NO: 1146987 - RNA, 14 nt, Human
ucucccucccuugg

SEQ ID NO: 1146988 - RNA, 13 nt, Human
ucuccucuugcca

SEQ ID NO: 1146989 - RNA, 16 nt, Human
ucuccucuugccacug

SEQ ID NO: 1146990 - RNA, 22 nt, Human
ucuccucuugccacugccucuu

SEQ ID NO: 1146991 - RNA, 17 nt, Human
ucuccucuugccacugc

SEQ ID NO: 1146992 - RNA, 20 nt, Human
ucuugcaguaucggcacugu

SEQ ID NO: 1146993 - RNA, 21 nt, Human
ucuugcaguaucggcacugua

SEQ ID NO: 1146994 - RNA, 12 nt, Human
ucuuugccaagu

SEQ ID NO: 1146995 - RNA, 22 nt, Human
ugaaaagcagguugauaaauca

SEQ ID NO: 1146996 - RNA, 18 nt, Human
ugaaaagcagguugauaa

SEQ ID NO: 1146997 - RNA, 19 nt, Human
ugaaaagcagguugauaaa

SEQ ID NO: 1146998 - RNA, 20 nt, Human
ugaaaagcuccauuuuuagu

SEQ ID NO: 1146999 - RNA, 19 nt, Human
ugaaagauggcugugccuc

SEQ ID NO: 1147000 - RNA, 18 nt, Human
ugaaagauggcugugccu

SEQ ID NO: 1147001 - RNA, 16 nt, Human
ugaaaucaguuacucu

SEQ ID NO: 1147002 - RNA, 17 nt, Human
ugaaaucaguuacucuu

SEQ ID NO: 1147003 - RNA, 15 nt, Human
ugaaauuccauuugu

SEQ ID NO: 1147004 - RNA, 16 nt, Human
ugaaauuccauuugua

SEQ ID NO: 1147005 - RNA, 16 nt, Human
ugaacucugacaacag

SEQ ID NO: 1147006 - RNA, 20 nt, Human
ugaaggaauaaauugcuccu

SEQ ID NO: 1147007 - RNA, 16 nt, Human
ugaaggagagcccuuc

SEQ ID NO: 1147008 - RNA, 20 nt, Human
ugaaggagagcccuucauuu

SEQ ID NO: 1147009 - RNA, 14 nt, Human
ugaauaaagacacc

SEQ ID NO: 1147010 - RNA, 15 nt, Human
ugaauaaagacaccu

SEQ ID NO: 1147011 - RNA, 22 nt, Human
ugacaagaaaggcugcuguacu

SEQ ID NO: 1147012 - RNA, 23 nt, Human
ugacaagaaaggcugcuguacug

SEQ ID NO: 1147013 - RNA, 21 nt, Human
ugacaagcuccauuuaaacag

SEQ ID NO: 1147014 - RNA, 18 nt, Human
ugacaagcuccauuuaaa

SEQ ID NO: 1147015 - RNA, 16 nt, Human
ugacagacagcccucc

SEQ ID NO: 1147016 - RNA, 22 nt, Human
ugaccucagcuuugauauuuca

SEQ ID NO: 1147017 - RNA, 16 nt, Human
ugagcaguguuagcuu

SEQ ID NO: 1147018 - RNA, 18 nt, Human
ugagcccuguccugccua

SEQ ID NO: 1147019 - RNA, 14 nt, Human
ugagccucagucuc

SEQ ID NO: 1147020 - RNA, 23 nt, Human
ugaggcaucgcaauguaagacuc

SEQ ID NO: 1147021 - RNA, 15 nt, Human
ugagucccaggcuga

SEQ ID NO: 1147022 - RNA, 19 nt, Human
ugagucccaggcugagccu

SEQ ID NO: 1147023 - RNA, 22 nt, Human
ugaguuugggccccagaggcug

SEQ ID NO: 1147024 - RNA, 23 nt, Human
ugaguuugggccccagaggcugg

SEQ ID NO: 1147025 - RNA, 15 nt, Human
ugaucugugggcaca

SEQ ID NO: 1147026 - RNA, 15 nt, Human
ugaugccugugaacu

SEQ ID NO: 1147027 - RNA, 20 nt, Human
ugaugccugugaacugaacu

SEQ ID NO: 1147028 - RNA, 20 nt, Human
ugaugcuacaggauuugaaa

SEQ ID NO: 1147029 - RNA, 23 nt, Human
ugaugcuacaggauuugaaauug

SEQ ID NO: 1147030 - RNA, 21 nt, Human
ugaugccugugaacugaacuc

SEQ ID NO: 1147031 - RNA, 14 nt, Human
ugaugguuccccug

SEQ ID NO: 1147032 - RNA, 19 nt, Human
ugaugucccaacuuguaaa

SEQ ID NO: 1147033 - RNA, 16 nt, Human
ugauguggugaaaagc

SEQ ID NO: 1147034 - RNA, 19 nt, Human
ugauuagcuuugucacugu

SEQ ID NO: 1147035 - RNA, 22 nt, Human
ugauuagugaaaggaagauaaa

SEQ ID NO: 1147036 - RNA, 13 nt, Human
ugauuauauguca

SEQ ID NO: 1147037 - RNA, 14 nt, Human
ugauucaauuugau

SEQ ID NO: 1147038 - RNA, 16 nt, Human
ugauucaauuugaugu

SEQ ID NO: 1147039 - RNA, 19 nt, Human
ugauucaauuugauguggu

SEQ ID NO: 1147040 - RNA, 12 nt, Human
ugauucacagug

SEQ ID NO: 1147041 - RNA, 21 nt, Human
ugauugaccguguuggucugu

SEQ ID NO: 1147042 - RNA, 20 nt, Human
ugauuggcaggaguuggaag

SEQ ID NO: 1147043 - RNA, 14 nt, Human
ugcaguuauuugcu

SEQ ID NO: 1147044 - RNA, 15 nt, Human
ugccccucccuucaa

SEQ ID NO: 1147045 - RNA, 16 nt, Human
ugccccucccuucaac

SEQ ID NO: 1147046 - RNA, 17 nt, Human
ugccccuccucucugcc

SEQ ID NO: 1147047 - RNA, 18 nt, Human
ugccccuccucucugccc

SEQ ID NO: 1147048 - RNA, 19 nt, Human
ugccccuccucucugcccu

SEQ ID NO: 1147049 - RNA, 20 nt, Human
ugccccuccucucugcccua

SEQ ID NO: 1147050 - RNA, 13 nt, Human
ugcccugggaggc

SEQ ID NO: 1147051 - RNA, 15 nt, Human
ugcccugggaggcag

SEQ ID NO: 1147052 - RNA, 17 nt, Human
ugcccugggaggcagug

SEQ ID NO: 1147053 - RNA, 18 nt, Human
ugcccugggaggcaguga

SEQ ID NO: 1147054 - RNA, 12 nt, Human
ugcccuggugcu

SEQ ID NO: 1147055 - RNA, 14 nt, Human
ugcccuggugcugc

SEQ ID NO: 1147056 - RNA, 16 nt, Human
ugcccuggugcugcca

SEQ ID NO: 1147057 - RNA, 17 nt, Human
ugcccuggugcugccac

SEQ ID NO: 1147058 - RNA, 18 nt, Human
ugcccuggugcugccaca

SEQ ID NO: 1147059 - RNA, 17 nt, Human
ugcccugguuuccugcc

SEQ ID NO: 1147060 - RNA, 18 nt, Human
ugcccugguuuccugccc

SEQ ID NO: 1147061 - RNA, 19 nt, Human
ugcccugguuuccugcccu

SEQ ID NO: 1147062 - RNA, 20 nt, Human
ugcccugguuuccugcccug

SEQ ID NO: 1147063 - RNA, 23 nt, Human
ugcccugguuuccugcccuggga

SEQ ID NO: 1147064 - RNA, 17 nt, Human
ugccuaguauugacaaa

SEQ ID NO: 1147065 - RNA, 18 nt, Human
ugccuaguauugacaaaa

SEQ ID NO: 1147066 - RNA, 22 nt, Human
ugccuaguauugacaaaauguu

SEQ ID NO: 1147067 - RNA, 21 nt, Human
ugccuaguauugacaaaaugu

SEQ ID NO: 1147068 - RNA, 14 nt, Human
ugccuccucuucaa

SEQ ID NO: 1147069 - RNA, 16 nt, Human
ugccuccucuucaacu

SEQ ID NO: 1147070 - RNA, 21 nt, Human
ugcgcaggcuggcccugcccu

SEQ ID NO: 1147071 - RNA, 22 nt, Human
ugcgcaggcuggcccugcccug

SEQ ID NO: 1147072 - RNA, 23 nt, Human
ugcgcaggcuggcccugcccugg

SEQ ID NO: 1147073 - RNA, 19 nt, Human
ugcuaacaugaagaccuuu

SEQ ID NO: 1147074 - RNA, 22 nt, Human
ugcuaagacucaguggggaggg

SEQ ID NO: 1147075 - RNA, 14 nt, Human
ugcucauauuuccc

SEQ ID NO: 1147076 - RNA, 15 nt, Human
ugcucauauuuccca

SEQ ID NO: 1147077 - RNA, 22 nt, Human
ugcucauauuucccaugauuuc

SEQ ID NO: 1147078 - RNA, 24 nt, Human
ugcucauauuucccaugauuucau

SEQ ID NO: 1147079 - RNA, 12 nt, Human
ugcucuccucuu

SEQ ID NO: 1147080 - RNA, 14 nt, Human
ugcucuccucuugc

SEQ ID NO: 1147081 - RNA, 13 nt, Human
ugcugcuucaauu

SEQ ID NO: 1147082 - RNA, 14 nt, Human
ugcugcuucaauuu

SEQ ID NO: 1147083 - RNA, 15 nt, Human
ugcuguuguuaugau

SEQ ID NO: 1147084 - RNA, 16 nt, Human
ugcuguuguuaugaug

SEQ ID NO: 1147085 - RNA, 17 nt, Human
ugcuguuguuaugaugu

SEQ ID NO: 1147086 - RNA, 18 nt, Human
ugcuguuguuaugaugug

SEQ ID NO: 1147087 - RNA, 19 nt, Human
ugcuguuguuaugaugugc

SEQ ID NO: 1147088 - RNA, 20 nt, Human
ugcuguuguuaugaugugcu

SEQ ID NO: 1147089 - RNA, 22 nt, Human
ugcuguuguuaugaugugcuua

SEQ ID NO: 1147090 - RNA, 23 nt, Human
ugcuguuguuaugaugugcuuaa

SEQ ID NO: 1147091 - RNA, 13 nt, Human
uggacuccucugu

SEQ ID NO: 1147092 - RNA, 14 nt, Human
uggacuccucuguc

SEQ ID NO: 1147093 - RNA, 14 nt, Human
uggagacugucuca

SEQ ID NO: 1147094 - RNA, 17 nt, Human
uggagacugucucaaga

SEQ ID NO: 1147095 - RNA, 19 nt, Human
uggaucucuucuuaaugua

SEQ ID NO: 1147096 - RNA, 20 nt, Human
uggaucucuucuuaauguac

SEQ ID NO: 1147097 - RNA, 21 nt, Human
uggaucucuucuuaauguaca

SEQ ID NO: 1147098 - RNA, 23 nt, Human
uggaucucuucuuaauguacaua

SEQ ID NO: 1147099 - RNA, 22 nt, Human
uggaucucuucuuaauguacau

SEQ ID NO: 1147100 - RNA, 12 nt, Human
uggcagaggagg

SEQ ID NO: 1147101 - RNA, 16 nt, Human
uggccaggcugcucuu

SEQ ID NO: 1147102 - RNA, 17 nt, Human
uggccaggcugcucuug

SEQ ID NO: 1147103 - RNA, 20 nt, Human
uggccaggcugcucuugaac

SEQ ID NO: 1147104 - RNA, 14 nt, Human
uggcucccacaggc

SEQ ID NO: 1147105 - RNA, 17 nt, Human
uggcucccacaggcccu

SEQ ID NO: 1147106 - RNA, 20 nt, Human
uggcucccacaggcccuucc

SEQ ID NO: 1147107 - RNA, 14 nt, Human
uggcuccucccggu

SEQ ID NO: 1147108 - RNA, 16 nt, Human
uggcuccucccggugc

SEQ ID NO: 1147109 - RNA, 18 nt, Human
uggcuccucccggugccc

SEQ ID NO: 1147110 - RNA, 19 nt, Human
uggcuccucccggugccca

SEQ ID NO: 1147111 - RNA, 17 nt, Human
ugggauuacaggcguga

SEQ ID NO: 1147112 - RNA, 18 nt, Human
ugggauuacaggcuccug

SEQ ID NO: 1147113 - RNA, 11 nt, Human
ugggccuucag

SEQ ID NO: 1147114 - RNA, 15 nt, Human
ugggccuucagggag

SEQ ID NO: 1147115 - RNA, 12 nt, Human
ugggccuucagg

SEQ ID NO: 1147116 - RNA, 15 nt, Human
uggggguucuuucuu

SEQ ID NO: 1147117 - RNA, 19 nt, Human
uggggguucuuucuuccuc

SEQ ID NO: 1147118 - RNA, 20 nt, Human
uggggguucuuucuuccucu

SEQ ID NO: 1147119 - RNA, 22 nt, Human
uggggguucuuucuuccucugc

SEQ ID NO: 1147120 - RNA, 18 nt, Human
uggucacaggacucugcc

SEQ ID NO: 1147121 - RNA, 20 nt, Human
uggucacaggacucugccuc

SEQ ID NO: 1147122 - RNA, 19 nt, Human
uggucacaggacucugccu

SEQ ID NO: 1147123 - RNA, 17 nt, Human
uguuucacuacucagca

SEQ ID NO: 1147124 - RNA, 17 nt, Human
uguuuuguuuggagaca

SEQ ID NO: 1147125 - RNA, 18 nt, Human
uguuuuuuuuuuccacuu

SEQ ID NO: 1147126 - RNA, 19 nt, Human
uguuuuuuuuuuccacuua

SEQ ID NO: 1147127 - RNA, 14 nt, Human
uuaaagaauucaaa

SEQ ID NO: 1147128 - RNA, 20 nt, Human
uuaaagaauucaaauuuuau

SEQ ID NO: 1147129 - RNA, 15 nt, Human
uuaaagaauucaaau

SEQ ID NO: 1147130 - RNA, 17 nt, Human
uuaaagaauucaaauuu

SEQ ID NO: 1147131 - RNA, 19 nt, Human
uuaaagaauucaaauuuua

SEQ ID NO: 1147132 - RNA, 20 nt, Human
uuaacugacaagcuccauuu

SEQ ID NO: 1147133 - RNA, 15 nt, Human
uuaagccuuuggaaa

SEQ ID NO: 1147134 - RNA, 16 nt, Human
uuaagccuuuggaaac

SEQ ID NO: 1147135 - RNA, 17 nt, Human
uuaauguacauagugcu

SEQ ID NO: 1147136 - RNA, 18 nt, Human
uuaauguacauagugcua

SEQ ID NO: 1147137 - RNA, 22 nt, Human
uuaaugucaauucuugccaaau

SEQ ID NO: 1147138 - RNA, 19 nt, Human
uuacuaucaugucaaacgu

SEQ ID NO: 1147139 - RNA, 21 nt, Human
uuacuaucaugucaaacguga

SEQ ID NO: 1147140 - RNA, 13 nt, Human
uuacuuaguauug

SEQ ID NO: 1147141 - RNA, 15 nt, Human
uuacuuaguauugca

SEQ ID NO: 1147142 - RNA, 19 nt, Human
uuacuuaguauugcaaagu

SEQ ID NO: 1147143 - RNA, 12 nt, Human
uuagcugacaaa

SEQ ID NO: 1147144 - RNA, 18 nt, Human
uuagcugacaaaauacuu

SEQ ID NO: 1147145 - RNA, 15 nt, Human
uuagcugacaaaaua

SEQ ID NO: 1147146 - RNA, 12 nt, Human
uuagcugggaga

SEQ ID NO: 1147147 - RNA, 17 nt, Human
uuagcuuauguuaacug

SEQ ID NO: 1147148 - RNA, 16 nt, Human
uuagcuuugucacugu

SEQ ID NO: 1147149 - RNA, 12 nt, Human
uuagcuuuguca

SEQ ID NO: 1147150 - RNA, 11 nt, Human
uuaguauugca

SEQ ID NO: 1147151 - RNA, 13 nt, Human
uuaguauugcaaa

SEQ ID NO: 1147152 - RNA, 17 nt, Human
uuaguauugcaaaguca

SEQ ID NO: 1147153 - RNA, 12 nt, Human
uuaguuccugug

SEQ ID NO: 1147154 - RNA, 15 nt, Human
uuaguuccugugcac

SEQ ID NO: 1147155 - RNA, 18 nt, Human
uuaguuccugugcacagc

SEQ ID NO: 1147156 - RNA, 21 nt, Human
uuaucugccucucuuguaauu

SEQ ID NO: 1147157 - RNA, 18 nt, Human
uuaucugccucucuugua

SEQ ID NO: 1147158 - RNA, 16 nt, Human
uucaacgcagcccugc

SEQ ID NO: 1147159 - RNA, 19 nt, Human
uucaacgcagcccugcuuu

SEQ ID NO: 1147160 - RNA, 20 nt, Human
uucaacgcagcccugcuuug

SEQ ID NO: 1147161 - RNA, 17 nt, Human
uucaacugaccagccuc

SEQ ID NO: 1147162 - RNA, 16 nt, Human
uucaauuuauaccuca

SEQ ID NO: 1147163 - RNA, 15 nt, Human
uucaauuuauaccuc

SEQ ID NO: 1147164 - RNA, 15 nt, Human
uucaauuugaugugg

SEQ ID NO: 1147165 - RNA, 22 nt, Human
uucaauuugauguggugaaaag

SEQ ID NO: 1147166 - RNA, 16 nt, Human
uucaauuugauguggu

SEQ ID NO: 1147167 - RNA, 14 nt, Human
uucacuacucagca

SEQ ID NO: 1147168 - RNA, 15 nt, Human
uucacuacucagcau

SEQ ID NO: 1147169 - RNA, 17 nt, Human
uuccagagaguggcucc

SEQ ID NO: 1147170 - RNA, 18 nt, Human
uuccagagaguggcuccu

SEQ ID NO: 1147171 - RNA, 19 nt, Human
uuccagagaguggcuccuc

SEQ ID NO: 1147172 - RNA, 20 nt, Human
uuccagagaguggcuccucc

SEQ ID NO: 1147173 - RNA, 21 nt, Human
uuccagagaguggcuccuccc

SEQ ID NO: 1147174 - RNA, 20 nt, Human
uuccagcaauucuccugccu

SEQ ID NO: 1147175 - RNA, 21 nt, Human
uuccagcaauucuccugccuc

SEQ ID NO: 1147176 - RNA, 22 nt, Human
uuccagcaauucuccugccuca

SEQ ID NO: 1147177 - RNA, 23 nt, Human
uuccagcaauucuccugccucag

SEQ ID NO: 1147178 - RNA, 13 nt, Human
uucccaugauuuc

SEQ ID NO: 1147179 - RNA, 18 nt, Human
uucccaugauuucaugua

SEQ ID NO: 1147180 - RNA, 20 nt, Human
uucccaugauuucauguacu

SEQ ID NO: 1147181 - RNA, 21 nt, Human
uucccaugauuucauguacug

SEQ ID NO: 1147182 - RNA, 22 nt, Human
uucccaugauuucauguacugc

SEQ ID NO: 1147183 - RNA, 14 nt, Human
uucccauucuugca

SEQ ID NO: 1147184 - RNA, 14 nt, Human
uuccccagccccac

SEQ ID NO: 1147185 - RNA, 15 nt, Human
uuccccagccccacu

SEQ ID NO: 1147186 - RNA, 11 nt, Human
uuccccauggg

SEQ ID NO: 1147187 - RNA, 19 nt, Human
uuccccaugucucgacuca

SEQ ID NO: 1147188 - RNA, 19 nt, Human
uucccccuccaaucccacc

SEQ ID NO: 1147189 - RNA, 14 nt, Human
uuccuaugauguau

SEQ ID NO: 1147190 - RNA, 21 nt, Human
uuccuaugauguauacugcca

SEQ ID NO: 1147191 - RNA, 18 nt, Human
uuccuaugauguauacug

SEQ ID NO: 1147192 - RNA, 18 nt, Human
uuccucccauucaagauu

SEQ ID NO: 1147193 - RNA, 16 nt, Human
uuccugcauuugugaa

SEQ ID NO: 1147194 - RNA, 18 nt, Human
uuccugcauuugugaaau

SEQ ID NO: 1147195 - RNA, 16 nt, Human
uucguuuaaugaaugc

SEQ ID NO: 1147196 - RNA, 17 nt, Human
uucuuauguugcccagu

SEQ ID NO: 1147197 - RNA, 21 nt, Human
uugaaaaucuuauaauuuaaa

SEQ ID NO: 1147198 - RNA, 13 nt, Human
uugagcucagccc

SEQ ID NO: 1147199 - RNA, 22 nt, Human
uugauauuuucaacgcagcccu

SEQ ID NO: 1147200 - RNA, 13 nt, Human
uuggacaaaauga

SEQ ID NO: 1147201 - RNA, 14 nt, Human
uuggucuguacuga

SEQ ID NO: 1147202 - RNA, 16 nt, Human
uuggucuguacugauu

SEQ ID NO: 1147203 - RNA, 20 nt, Human
uuggucuguacugauucaau

SEQ ID NO: 1147204 - RNA, 22 nt, Human
uuguaugaaagauggcugugcc

SEQ ID NO: 1147205 - RNA, 20 nt, Human
uuguaugauccuaaugaaug

SEQ ID NO: 1147206 - RNA, 17 nt, Human
uugucugaagucacugc

SEQ ID NO: 1147207 - RNA, 20 nt, Human
uugucugaagucacugcaca

SEQ ID NO: 1147208 - RNA, 18 nt, Human
uugucugaagucacugca

SEQ ID NO: 1147209 - RNA, 15 nt, Human
uuguuuuacugucuu

SEQ ID NO: 1147210 - RNA, 12 nt, Human
uuuaaaaugucu

SEQ ID NO: 1147211 - RNA, 23 nt, Human
uuuaaacagauguccaucagaug

SEQ ID NO: 1147212 - RNA, 14 nt, Human
uuuaaacagauguc

SEQ ID NO: 1147213 - RNA, 12 nt, Human
uuuaaucauaua

SEQ ID NO: 1147214 - RNA, 13 nt, Human
uuuaaucauauaa

SEQ ID NO: 1147215 - RNA, 13 nt, Human
uuuacagcugccu

SEQ ID NO: 1147216 - RNA, 12 nt, Human
uuuaguuccugu

SEQ ID NO: 1147217 - RNA, 19 nt, Human
uuuaguuccugugcacagc

SEQ ID NO: 1147218 - RNA, 13 nt, Human
uuuaguuccugug

SEQ ID NO: 1147219 - RNA, 22 nt, Human
uuuauaccucaauuuucacugu

SEQ ID NO: 1147220 - RNA, 14 nt, Human
uuuaucugccucuc

SEQ ID NO: 1147221 - RNA, 19 nt, Human
uuuaucugccucucuugua

SEQ ID NO: 1147222 - RNA, 21 nt, Human
uuuaucugccucucuuguaau

SEQ ID NO: 1147223 - RNA, 20 nt, Human
uuuaucugccucucuuguaa

SEQ ID NO: 1147224 - RNA, 14 nt, Human
uuuaugacaguaau

SEQ ID NO: 1147225 - RNA, 15 nt, Human
uuuaugacaguaauu

SEQ ID NO: 1147226 - RNA, 16 nt, Human
uuuaugacaguaauug

SEQ ID NO: 1147227 - RNA, 19 nt, Human
uuuaugacaguaauugugu

SEQ ID NO: 1147228 - RNA, 15 nt, Human
uuuccacuucuucau

SEQ ID NO: 1147229 - RNA, 16 nt, Human
uuuccacuucuucauu

SEQ ID NO: 1147230 - RNA, 22 nt, Human
uuuccucuuagucgagccaagu

SEQ ID NO: 1147231 - RNA, 23 nt, Human
uuucugaucugaugcaagcaaga

SEQ ID NO: 1147232 - RNA, 21 nt, Human
uuugaaauuguauuacaaauc

SEQ ID NO: 1147233 - RNA, 19 nt, Human
uuugcuuucgguuccaguu

SEQ ID NO: 1147234 - RNA, 20 nt, Human
uuuguggguuuuuauuuccu

SEQ ID NO: 1147235 - RNA, 23 nt, Human
accucagguaaucgaccugccuc

SEQ ID NO: 1147236 - RNA, 22 nt, Human
accucagguaaucgaccugccu

SEQ ID NO: 1147237 - RNA, 21 nt, Human
acccuuaaacaguugcacagc

SEQ ID NO: 1147238 - RNA, 23 nt, Human
acccuuaaacaguugcacagcau

SEQ ID NO: 1147239 - RNA, 23 nt, Human
accugccccuccucucugcccua

SEQ ID NO: 1147240 - RNA, 13 nt, Human
accugcccaaccu

SEQ ID NO: 1147241 - RNA, 22 nt, Human
acuaaccuuccaaaaauuacuu

SEQ ID NO: 1147242 - RNA, 14 nt, Human
acuaacuaaaacaa

SEQ ID NO: 1147243 - RNA, 15 nt, Human
acuaacuaaaacaaa

SEQ ID NO: 1147244 - RNA, 22 nt, Human
acuaacuaaaacaaagccacuu

SEQ ID NO: 1147245 - RNA, 18 nt, Human
acugccagucccccugcc

SEQ ID NO: 1147246 - RNA, 19 nt, Human
acugccagucccccugccc

SEQ ID NO: 1147247 - RNA, 20 nt, Human
acucuacuuagcaugucccu

SEQ ID NO: 1147248 - RNA, 21 nt, Human
acucuacuuagcaugucccua

SEQ ID NO: 1147249 - RNA, 14 nt, Human
acugauucaauuug

SEQ ID NO: 1147250 - RNA, 13 nt, Human
acugaccagccuc

SEQ ID NO: 1147251 - RNA, 15 nt, Human
acugaccagccucca

SEQ ID NO: 1147252 - RNA, 20 nt, Human
acugaccagccuccaugcug

SEQ ID NO: 1147253 - RNA, 23 nt, Human
acugaccagccuccaugcugccu

SEQ ID NO: 1147254 - RNA, 11 nt, Human
acuuucaaucu

SEQ ID NO: 1147255 - RNA, 20 nt, Human
acuuucaaucuucaauccuu

SEQ ID NO: 1147256 - RNA, 22 nt, Human
acuuucaggccacauggcuaaa

SEQ ID NO: 1147257 - RNA, 22 nt, Human
acuuaaaauauuccugcauuug

SEQ ID NO: 1147258 - RNA, 13 nt, Human
acuucagcucugu

SEQ ID NO: 1147259 - RNA, 13 nt, Human
acagugcaucuca

SEQ ID NO: 1147260 - RNA, 12 nt, Human
acagcugccugc

SEQ ID NO: 1147261 - RNA, 16 nt, Human
acagcugccugcagua

SEQ ID NO: 1147262 - RNA, 20 nt, Human
acauaauucaggaagcagcu

SEQ ID NO: 1147263 - RNA, 15 nt, Human
acauccuacaagaca

SEQ ID NO: 1147264 - RNA, 16 nt, Human
acauccucuuccauau

SEQ ID NO: 1147265 - RNA, 16 nt, Human
accauacuaauuauac

SEQ ID NO: 1147266 - RNA, 21 nt, Human
accauacuaauuauacccccu

SEQ ID NO: 1147267 - RNA, 17 nt, Human
accauaggucaccuuua

SEQ ID NO: 1147268 - RNA, 12 nt, Human
accaccugccca

SEQ ID NO: 1147269 - RNA, 14 nt, Human
aauuuucacugugu

SEQ ID NO: 1147270 - RNA, 18 nt, Human
acaaccuucuguggcuca

SEQ ID NO: 1147271 - RNA, 15 nt, Human
aaugcgcaggcuggc

SEQ ID NO: 1147272 - RNA, 17 nt, Human
aaugcgcaggcuggccc

SEQ ID NO: 1147273 - RNA, 18 nt, Human
aaugcgcaggcuggcccu

SEQ ID NO: 1147274 - RNA, 19 nt, Human
aaugcgcaggcuggcccug

SEQ ID NO: 1147275 - RNA, 20 nt, Human
aaugcgcaggcuggcccugc

SEQ ID NO: 1147276 - RNA, 21 nt, Human
aaugcgcaggcuggcccugcc

SEQ ID NO: 1147277 - RNA, 14 nt, Human
aaugcucuuauuuc

SEQ ID NO: 1147278 - RNA, 16 nt, Human
aaugcucuuauuucau

SEQ ID NO: 1147279 - RNA, 13 nt, Human
aaucauuuuaugu

SEQ ID NO: 1147280 - RNA, 23 nt, Human
aaugauguauguugaagccuuug

SEQ ID NO: 1147281 - RNA, 23 nt, Human
aaucucgcucugucgcccaggcu

SEQ ID NO: 1147282 - RNA, 18 nt, Human
aaucucggcucacugcau

SEQ ID NO: 1147283 - RNA, 15 nt, Human
aaucuggacuccucu

SEQ ID NO: 1147284 - RNA, 16 nt, Human
aaucuggacuccucug

SEQ ID NO: 1147285 - RNA, 17 nt, Human
aaucuggacuccucugu

SEQ ID NO: 1147286 - RNA, 18 nt, Human
aaucuggacuccucuguc

SEQ ID NO: 1147287 - RNA, 20 nt, Human
aaucuggacuccucugucca

SEQ ID NO: 1147288 - RNA, 19 nt, Human
aauaccuuagugcaguuau

SEQ ID NO: 1147289 - RNA, 21 nt, Human
aauaugcuuauauuguucacu

SEQ ID NO: 1147290 - RNA, 13 nt, Human
aaguaguuaucau

SEQ ID NO: 1147291 - RNA, 15 nt, Human
aaguaguuaucaugu

SEQ ID NO: 1147292 - RNA, 17 nt, Human
aaguaguuaucauguua

SEQ ID NO: 1147293 - RNA, 19 nt, Human
aaguaguuaucauguuagu

SEQ ID NO: 1147294 - RNA, 18 nt, Human
aaguaguuaucauguuag

SEQ ID NO: 1147295 - RNA, 15 nt, Human
aaguggggacagagc

SEQ ID NO: 1147296 - RNA, 20 nt, Human
aaguggggcagcagcagugg

SEQ ID NO: 1147297 - RNA, 18 nt, Human
aaguugauggugaugaaa

SEQ ID NO: 1147298 - RNA, 18 nt, Human
aagggcaaauuggagaaa

SEQ ID NO: 1147299 - RNA, 19 nt, Human
aagggcagcuuugcucaua

SEQ ID NO: 1147300 - RNA, 20 nt, Human
aagggcagcuuugcucauau

SEQ ID NO: 1147301 - RNA, 22 nt, Human
aaggacccggaggggccuggca

SEQ ID NO: 1147302 - RNA, 13 nt, Human
aaggacuaggguc

SEQ ID NO: 1147303 - RNA, 15 nt, Human
aaggacuaggguccu

SEQ ID NO: 1147304 - RNA, 17 nt, Human
aagauucaaucccagga

SEQ ID NO: 1147305 - RNA, 13 nt, Human
aagauucagcuag

SEQ ID NO: 1147306 - RNA, 14 nt, Human
aagauucagcuagu

SEQ ID NO: 1147307 - RNA, 15 nt, Human
aagauucagcuagug

SEQ ID NO: 1147308 - RNA, 23 nt, Human
aagacagugaaagaaaauaacaa

SEQ ID NO: 1147309 - RNA, 20 nt, Human
aaaccccaccccaaaauuag

SEQ ID NO: 1147310 - RNA, 15 nt, Human
aaagucaggaaucau

SEQ ID NO: 1147311 - RNA, 18 nt, Human
aaagucagauucuugcau

SEQ ID NO: 1147312 - RNA, 23 nt, Human
aaaauuaaucugggccagaauuu

SEQ ID NO: 1147313 - RNA, 21 nt, Human
aaaauuacuuaguauugcaaa

SEQ ID NO: 1147314 - RNA, 23 nt, Human
aaaauuacuuaguauugcaaagu

SEQ ID NO: 1147315 - RNA, 22 nt, Human
aaaauuacuuaguauugcaaag

SEQ ID NO: 1147316 - RNA, 21 nt, Human
aaaauuagccaguaauccugu

SEQ ID NO: 1147317 - RNA, 19 nt, Human
aaaauuaggauuucaugau

SEQ ID NO: 1147318 - RNA, 17 nt, Human
aaaauuagccaguaauc

SEQ ID NO: 1147319 - RNA, 19 nt, Human
aaaauuagccaguaauccu

SEQ ID NO: 1147320 - RNA, 15 nt, Human
aaaauuauagcucua

SEQ ID NO: 1147321 - RNA, 19 nt, Human
aaaauuauagcucuaaugu

SEQ ID NO: 1147322 - RNA, 24 nt, Human
aaaauuauagcucuaauguuugca

SEQ ID NO: 1147323 - RNA, 22 nt, Human
aacccuuaaacaguugcacagc

SEQ ID NO: 1147324 - RNA, 18 nt, Human
aacccuuaaacaguugca

SEQ ID NO: 1147325 - RNA, 23 nt, Human
aacccuuaaacaguugcacagca

SEQ ID NO: 1147326 - RNA, 15 nt, Human
aacauccuacaagac

SEQ ID NO: 1147327 - RNA, 22 nt, Human
aacauccuacaagacacaguga

SEQ ID NO: 1147328 - RNA, 15 nt, Human
aacaaacaauaccug

SEQ ID NO: 1147329 - RNA, 12 nt, Human
aacaaaugaaga

SEQ ID NO: 1147330 - RNA, 14 nt, Human
aacaaaugaagaca

SEQ ID NO: 1147331 - RNA, 19 nt, Human
aaaugcucuuauuucauca

SEQ ID NO: 1147332 - RNA, 23 nt, Human
aaaugcucuuauuucaucauuca

SEQ ID NO: 1147333 - RNA, 19 nt, Human
agugggacagggcauggcc

SEQ ID NO: 1147334 - RNA, 21 nt, Human
agugggacagggcauggccag

SEQ ID NO: 1147335 - RNA, 20 nt, Human
agugauggguuaguggaugg

SEQ ID NO: 1147336 - RNA, 21 nt, Human
agugauucucaugccucagcc

SEQ ID NO: 1147337 - RNA, 22 nt, Human
agugacuaaaccauugugcauu

SEQ ID NO: 1147338 - RNA, 16 nt, Human
agugacuaaaccauug

SEQ ID NO: 1147339 - RNA, 17 nt, Human
agugacuaaaccauugu

SEQ ID NO: 1147340 - RNA, 18 nt, Human
agugaccucagcuuugau

SEQ ID NO: 1147341 - RNA, 17 nt, Human
agugaccucagcuuuga

SEQ ID NO: 1147342 - RNA, 19 nt, Human
agucaugcguuuaaucaca

SEQ ID NO: 1147343 - RNA, 15 nt, Human
aguaucggcacugua

SEQ ID NO: 1147344 - RNA, 16 nt, Human
aguaucggcacuguac

SEQ ID NO: 1147345 - RNA, 19 nt, Human
aguaucggcacuguacaaa

SEQ ID NO: 1147346 - RNA, 13 nt, Human
auaguaaaaauaa

SEQ ID NO: 1147347 - RNA, 14 nt, Human
auaguaaaaauaaa

SEQ ID NO: 1147348 - RNA, 13 nt, Human
auacuugucuguu

SEQ ID NO: 1147349 - RNA, 16 nt, Human
auacuugucuguuuua

SEQ ID NO: 1147350 - RNA, 18 nt, Human
auauuucccaugauuuca

SEQ ID NO: 1147351 - RNA, 22 nt, Human
auauuucccaugauuucaugua

SEQ ID NO: 1147352 - RNA, 12 nt, Human
auaagggaagua

SEQ ID NO: 1147353 - RNA, 22 nt, Human
auaagggaaguaguuaucaugu

SEQ ID NO: 1147354 - RNA, 23 nt, Human
auaagggaaguaguuaucauguu

SEQ ID NO: 1147355 - RNA, 19 nt, Human
auaagggcaaauuggagaa

SEQ ID NO: 1147356 - RNA, 15 nt, Human
auaauguaaauaaag

SEQ ID NO: 1147357 - RNA, 20 nt, Human
auacccccugcaaagcccag

SEQ ID NO: 1147358 - RNA, 21 nt, Human
auacccccugcaaagcccagc

SEQ ID NO: 1147359 - RNA, 17 nt, Human
auacccccugcaaagcc

SEQ ID NO: 1147360 - RNA, 19 nt, Human
auacccccugcaaagccca

SEQ ID NO: 1147361 - RNA, 14 nt, Human
auaacaaugaaagu

SEQ ID NO: 1147362 - RNA, 23 nt, Human
augauguauguugaagccuuugu

SEQ ID NO: 1147363 - RNA, 18 nt, Human
augauguauacugccacu

SEQ ID NO: 1147364 - RNA, 19 nt, Human
augcugacuguacuccucc

SEQ ID NO: 1147365 - RNA, 20 nt, Human
augcugacuguacuccuccc

SEQ ID NO: 1147366 - RNA, 21 nt, Human
augcugacuguacuccuccca

SEQ ID NO: 1147367 - RNA, 12 nt, Human
augcugccucca

SEQ ID NO: 1147368 - RNA, 15 nt, Human
augcugccuccagaa

SEQ ID NO: 1147369 - RNA, 18 nt, Human
augcuuuaggauguacag

SEQ ID NO: 1147370 - RNA, 21 nt, Human
augcuuuaggauguacaguua

SEQ ID NO: 1147371 - RNA, 22 nt, Human
auggauccacuggcuggacaaa

SEQ ID NO: 1147372 - RNA, 15 nt, Human
auggcugugccucug

SEQ ID NO: 1147373 - RNA, 16 nt, Human
auggcugugccucugc

SEQ ID NO: 1147374 - RNA, 17 nt, Human
auggcugugccucugcc

SEQ ID NO: 1147375 - RNA, 18 nt, Human
auggcugugccucugccu

SEQ ID NO: 1147376 - RNA, 15 nt, Human
aucaaaaugcucuua

SEQ ID NO: 1147377 - RNA, 19 nt, Human
aucaaaaugcucuuauuuc

SEQ ID NO: 1147378 - RNA, 19 nt, Human
auauuucccaugauuucau

SEQ ID NO: 1147379 - RNA, 21 nt, Human
auauuucccaugauuucaugu

SEQ ID NO: 1147380 - RNA, 20 nt, Human
aucaaaaugcucuuauuuca

SEQ ID NO: 1147381 - RNA, 21 nt, Human
aucaaaaugcucuuauuucau

SEQ ID NO: 1147382 - RNA, 23 nt, Human
aucaaaaugcucuuauuucauca

SEQ ID NO: 1147383 - RNA, 13 nt, Human
aucaggaacguuu

SEQ ID NO: 1147384 - RNA, 23 nt, Human
aucaggaacguuuagcugacaaa

SEQ ID NO: 1147385 - RNA, 13 nt, Human
auccacucgccuu

SEQ ID NO: 1147386 - RNA, 18 nt, Human
auccccaagccuggcaag

SEQ ID NO: 1147387 - RNA, 19 nt, Human
auccucaguuuuugugaaa

SEQ ID NO: 1147388 - RNA, 16 nt, Human
auccuugaagguauau

SEQ ID NO: 1147389 - RNA, 23 nt, Human
auccuugaagguauaucuagguu

SEQ ID NO: 1147390 - RNA, 16 nt, Human
aucucugcuuuggaaa

SEQ ID NO: 1147391 - RNA, 17 nt, Human
aucucugcuuuggaaau

SEQ ID NO: 1147392 - RNA, 14 nt, Human
aucuucaauccuug

SEQ ID NO: 1147393 - RNA, 14 nt, Human
aucuagguuuauga

SEQ ID NO: 1147394 - RNA, 15 nt, Human
aucuagguuuaugac

SEQ ID NO: 1147395 - RNA, 18 nt, Human
aucuagguuuaugacagu

SEQ ID NO: 1147396 - RNA, 21 nt, Human
aucuagguuuaugacaguaau

SEQ ID NO: 1147397 - RNA, 22 nt, Human
aucuagguuuaugacaguaauu

SEQ ID NO: 1147398 - RNA, 23 nt, Human
aucuagguuuaugacaguaauug

SEQ ID NO: 1147399 - RNA, 17 nt, Human
aucuaguuccccuguuu

SEQ ID NO: 1147400 - RNA, 23 nt, Human
aucuaguuccccuguuuauucau

SEQ ID NO: 1147401 - RNA, 19 nt, Human
aucuaguuccccuguuuau

SEQ ID NO: 1147402 - RNA, 20 nt, Human
aucuaguuccccuguuuauu

SEQ ID NO: 1147403 - RNA, 22 nt, Human
aucuaguuccccuguuuauuca

SEQ ID NO: 1147404 - RNA, 18 nt, Human
augaccacacuccagcug

SEQ ID NO: 1147405 - RNA, 15 nt, Human
agcccucccugcccc

SEQ ID NO: 1147406 - RNA, 16 nt, Human
agcccucccugccccu

SEQ ID NO: 1147407 - RNA, 17 nt, Human
agcccucccugccccuc

SEQ ID NO: 1147408 - RNA, 19 nt, Human
agcccucccugccccuccc

SEQ ID NO: 1147409 - RNA, 22 nt, Human
agcccucccugccccucccuuc

SEQ ID NO: 1147410 - RNA, 23 nt, Human
agcccucccugccccucccuuca

SEQ ID NO: 1147411 - RNA, 16 nt, Human
agcuaaucagcauucu

SEQ ID NO: 1147412 - RNA, 21 nt, Human
agcuaaucagcauucucacuc

SEQ ID NO: 1147413 - RNA, 12 nt, Human
agcuacaaaugc

SEQ ID NO: 1147414 - RNA, 18 nt, Human
agcuucacuguaaaauaa

SEQ ID NO: 1147415 - RNA, 16 nt, Human
agcuuuuaaacccuau

SEQ ID NO: 1147416 - RNA, 22 nt, Human
aggaaggcugagaggagagaga

SEQ ID NO: 1147417 - RNA, 19 nt, Human
aggaauaaauugcuccuug

SEQ ID NO: 1147418 - RNA, 20 nt, Human
aggaauaaauugcuccuuga

SEQ ID NO: 1147419 - RNA, 21 nt, Human
aggacccggaggggccuggca

SEQ ID NO: 1147420 - RNA, 22 nt, Human
aggacccggaggggccuggcag

SEQ ID NO: 1147421 - RNA, 18 nt, Human
aggacccggaggggccug

SEQ ID NO: 1147422 - RNA, 20 nt, Human
aggacccggaggggccuggc

SEQ ID NO: 1147423 - RNA, 20 nt, Human
aggaaucaucaggaacguuu

SEQ ID NO: 1147424 - RNA, 22 nt, Human
aggcccuuccucuccacugccu

SEQ ID NO: 1147425 - RNA, 11 nt, Human
aggcugagccu

SEQ ID NO: 1147426 - RNA, 23 nt, Human
aggcuggucucgaacuccugacc

SEQ ID NO: 1147427 - RNA, 23 nt, Human
agggacugccagucccccugccc

SEQ ID NO: 1147428 - RNA, 11 nt, Human
agguacuguau

SEQ ID NO: 1147429 - RNA, 17 nt, Human
agggcaaauuggagaaa

SEQ ID NO: 1147430 - RNA, 12 nt, Human
aggggccuggca

SEQ ID NO: 1147431 - RNA, 13 nt, Human
aggggccuggcag

SEQ ID NO: 1147432 - RNA, 15 nt, Human
aggggccuggcagcc

SEQ ID NO: 1147433 - RNA, 23 nt, Human
agaggagggagcaucagugcccu

SEQ ID NO: 1147434 - RNA, 21 nt, Human
acuuuccucuuagucgagcca

SEQ ID NO: 1147435 - RNA, 18 nt, Human
agaagguuucagaaagaa

SEQ ID NO: 1147436 - RNA, 23 nt, Human
agcccuccaucuaaacugccccc

SEQ ID NO: 1147437 - RNA, 12 nt, Human
agcccucccugc

SEQ ID NO: 1147438 - RNA, 13 nt, Human
agcccucccugcc

SEQ ID NO: 1147439 - RNA, 17 nt, Human
agaugaaauuccauuug

SEQ ID NO: 1147440 - RNA, 18 nt, Human
agaugaaauuccauuugu

SEQ ID NO: 1147441 - RNA, 12 nt, Human
agauucuugcau

SEQ ID NO: 1147442 - RNA, 17 nt, Human
agcaaaugucuuccugg

SEQ ID NO: 1147443 - RNA, 20 nt, Human
agcaaaugucuuccuggauu

SEQ ID NO: 1147444 - RNA, 16 nt, Human
agcaaauguggcuccu

SEQ ID NO: 1147445 - RNA, 21 nt, Human
agcacaaguguaaugaauacc

SEQ ID NO: 1147446 - RNA, 22 nt, Human
agcacuguuuucuaguguauca

SEQ ID NO: 1147447 - RNA, 20 nt, Human
agcacuguuuucuaguguau

SEQ ID NO: 1147448 - RNA, 12 nt, Human
cauagcccucac

SEQ ID NO: 1147449 - RNA, 15 nt, Human
cauagcccucacccu

SEQ ID NO: 1147450 - RNA, 19 nt, Human
cauagcccucacccugggg

SEQ ID NO: 1147451 - RNA, 12 nt, Human
caguuugcuuug

SEQ ID NO: 1147452 - RNA, 14 nt, Human
caguuugcuuugua

SEQ ID NO: 1147453 - RNA, 21 nt, Human
caguuugcuuuguaugcacuu

SEQ ID NO: 1147454 - RNA, 20 nt, Human
cauaaucuggacuccucugu

SEQ ID NO: 1147455 - RNA, 21 nt, Human
cauaaucuggacuccucuguc

SEQ ID NO: 1147456 - RNA, 22 nt, Human
cauaaucuggacuccucugucc

SEQ ID NO: 1147457 - RNA, 23 nt, Human
cauaaucuggacuccucugucca

SEQ ID NO: 1147458 - RNA, 12 nt, Human
caugcugccucc

SEQ ID NO: 1147459 - RNA, 14 nt, Human
caugcugccuccag

SEQ ID NO: 1147460 - RNA, 12 nt, Human
caucgcaaugua

SEQ ID NO: 1147461 - RNA, 18 nt, Human
cauuucauuugugccaga

SEQ ID NO: 1147462 - RNA, 18 nt, Human
cauuuuugaauacaggca

SEQ ID NO: 1147463 - RNA, 20 nt, Human
cauuuuugaauacaggcaua

SEQ ID NO: 1147464 - RNA, 22 nt, Human
ccaaaaauuacuuaguauugca

SEQ ID NO: 1147465 - RNA, 13 nt, Human
cauuaugaugugu

SEQ ID NO: 1147466 - RNA, 16 nt, Human
cauucucacuccuacc

SEQ ID NO: 1147467 - RNA, 17 nt, Human
cauucucacuccuaccu

SEQ ID NO: 1147468 - RNA, 19 nt, Human
ccaaagugcugggauuaca

SEQ ID NO: 1147469 - RNA, 22 nt, Human
ccaaagugcugggauuacaggc

SEQ ID NO: 1147470 - RNA, 22 nt, Human
ccaaagugcugggauuacaggu

SEQ ID NO: 1147471 - RNA, 12 nt, Human
ccaaaugcagcu

SEQ ID NO: 1147472 - RNA, 11 nt, Human
ccaacuuguaa

SEQ ID NO: 1147473 - RNA, 23 nt, Human
ccaccgggcugggagcucugcag

SEQ ID NO: 1147474 - RNA, 13 nt, Human
cagguugauaaau

SEQ ID NO: 1147475 - RNA, 18 nt, Human
cagguugauaaaucauuu

SEQ ID NO: 1147476 - RNA, 15 nt, Human
cagguugauaaauca

SEQ ID NO: 1147477 - RNA, 18 nt, Human
cagggagggccugggccc

SEQ ID NO: 1147478 - RNA, 18 nt, Human
caggacaggcugcggccc

SEQ ID NO: 1147479 - RNA, 22 nt, Human
caggacaggcugcggccccucc

SEQ ID NO: 1147480 - RNA, 23 nt, Human
caggacaggcugcggccccuccc

SEQ ID NO: 1147481 - RNA, 16 nt, Human
caggcacugcugccca

SEQ ID NO: 1147482 - RNA, 17 nt, Human
caggcacugcugcccag

SEQ ID NO: 1147483 - RNA, 23 nt, Human
caggcacugcugcccagccucca

SEQ ID NO: 1147484 - RNA, 13 nt, Human
cagccccugcaca

SEQ ID NO: 1147485 - RNA, 13 nt, Human
cagauuugagcuc

SEQ ID NO: 1147486 - RNA, 14 nt, Human
cagauuugagcuca

SEQ ID NO: 1147487 - RNA, 16 nt, Human
cagauuugagcucagc

SEQ ID NO: 1147488 - RNA, 19 nt, Human
caagcucuaucaccaagga

SEQ ID NO: 1147489 - RNA, 16 nt, Human
caaguaugaauaaaga

SEQ ID NO: 1147490 - RNA, 19 nt, Human
caaguaugaauaaagacac

SEQ ID NO: 1147491 - RNA, 21 nt, Human
caaguaugaauaaagacaccu

SEQ ID NO: 1147492 - RNA, 20 nt, Human
caauggagacugucucaaga

SEQ ID NO: 1147493 - RNA, 15 nt, Human
caauucuugccaaau

SEQ ID NO: 1147494 - RNA, 17 nt, Human
caauuuaguuguuguag

SEQ ID NO: 1147495 - RNA, 20 nt, Human
caauuuaguuguuguagaga

SEQ ID NO: 1147496 - RNA, 13 nt, Human
caauuuauaccuc

SEQ ID NO: 1147497 - RNA, 14 nt, Human
caauuuauaccuca

SEQ ID NO: 1147498 - RNA, 22 nt, Human
caauuuauaccucaauuuucac

SEQ ID NO: 1147499 - RNA, 23 nt, Human
cacaggcccuuccucuccacugc

SEQ ID NO: 1147500 - RNA, 14 nt, Human
cacugcauccuccg

SEQ ID NO: 1147501 - RNA, 16 nt, Human
cacugcauccuccgcc

SEQ ID NO: 1147502 - RNA, 18 nt, Human
cacugcauccuccgccuc

SEQ ID NO: 1147503 - RNA, 23 nt, Human
cacugguggcccgacagccuggc

SEQ ID NO: 1147504 - RNA, 23 nt, Human
cacuuaggaacguaaucgugucc

SEQ ID NO: 1147505 - RNA, 14 nt, Human
cacuaggcuucugg

SEQ ID NO: 1147506 - RNA, 11 nt, Human
cacuccagcug

SEQ ID NO: 1147507 - RNA, 12 nt, Human
cacuccagcugg

SEQ ID NO: 1147508 - RNA, 15 nt, Human
cacuccagcugggau

SEQ ID NO: 1147509 - RNA, 20 nt, Human
auuuuuuuuuuuuuccuguc

SEQ ID NO: 1147510 - RNA, 13 nt, Human
auuuggaaaauaa

SEQ ID NO: 1147511 - RNA, 12 nt, Human
auuuggaaaaua

SEQ ID NO: 1147512 - RNA, 14 nt, Human
auuugugccagaau

SEQ ID NO: 1147513 - RNA, 22 nt, Human
auuuguggguuuuuauuuccua

SEQ ID NO: 1147514 - RNA, 21 nt, Human
auuuguggguuuuuauuuccu

SEQ ID NO: 1147515 - RNA, 19 nt, Human
auuuuauagcuacuaauuu

SEQ ID NO: 1147516 - RNA, 17 nt, Human
auuugcauacauucuuc

SEQ ID NO: 1147517 - RNA, 15 nt, Human
auuugccaauaauaa

SEQ ID NO: 1147518 - RNA, 16 nt, Human
auuugccaauaauaau

SEQ ID NO: 1147519 - RNA, 13 nt, Human
auuagcuuauguu

SEQ ID NO: 1147520 - RNA, 21 nt, Human
auuagcuuauguuaacugaca

SEQ ID NO: 1147521 - RNA, 22 nt, Human
auuagcuuauguuaacugacaa

SEQ ID NO: 1147522 - RNA, 15 nt, Human
auuaugauuagcuuu

SEQ ID NO: 1147523 - RNA, 23 nt, Human
auguuugggagacugcugaguca

SEQ ID NO: 1147524 - RNA, 23 nt, Human
auuagauuucucauuugccaaua

SEQ ID NO: 1147525 - RNA, 17 nt, Human
auuagcaguuugcuuug

SEQ ID NO: 1147526 - RNA, 12 nt, Human
auuagccaguaa

SEQ ID NO: 1147527 - RNA, 14 nt, Human
auuagccaguaauc

SEQ ID NO: 1147528 - RNA, 16 nt, Human
auuagccaguaauccu

SEQ ID NO: 1147529 - RNA, 17 nt, Human
auuagccaguaauccug

SEQ ID NO: 1147530 - RNA, 18 nt, Human
auuagccaguaauccugu

SEQ ID NO: 1147531 - RNA, 19 nt, Human
auuagccaguaauccugua

SEQ ID NO: 1147532 - RNA, 23 nt, Human
auuagccaguaauccuguaggaa

SEQ ID NO: 1147533 - RNA, 12 nt, Human
auugcuccuuga

SEQ ID NO: 1147534 - RNA, 16 nt, Human
ccuggcacagggcagu

SEQ ID NO: 1147535 - RNA, 17 nt, Human
ccuggcacagggcagug

SEQ ID NO: 1147536 - RNA, 18 nt, Human
ccuggcacagggcagugg

SEQ ID NO: 1147537 - RNA, 16 nt, Human
ccuggagguuccccag

SEQ ID NO: 1147538 - RNA, 17 nt, Human
ccuggagguuccccagc

SEQ ID NO: 1147539 - RNA, 21 nt, Human
ccuggauccaucaggccacuu

SEQ ID NO: 1147540 - RNA, 21 nt, Human
ccugaguagcugggauuacag

SEQ ID NO: 1147541 - RNA, 14 nt, Human
ccucuugccacugc

SEQ ID NO: 1147542 - RNA, 12 nt, Human
ccucucugcccu

SEQ ID NO: 1147543 - RNA, 12 nt, Human
ccucugccuguc

SEQ ID NO: 1147544 - RNA, 15 nt, Human
ccucugcugauccuc

SEQ ID NO: 1147545 - RNA, 18 nt, Human
ccucugcugauccuccca

SEQ ID NO: 1147546 - RNA, 14 nt, Human
ccucccaggcgccc

SEQ ID NO: 1147547 - RNA, 20 nt, Human
ccucccaggcgccccuuccc

SEQ ID NO: 1147548 - RNA, 13 nt, Human
ccucagccuccug

SEQ ID NO: 1147549 - RNA, 21 nt, Human
ccuccaagcuccaucuccacu

SEQ ID NO: 1147550 - RNA, 22 nt, Human
ccuccaagcuccaucuccacuc

SEQ ID NO: 1147551 - RNA, 22 nt, Human
ccuccaaucccaccaacccuca

SEQ ID NO: 1147552 - RNA, 19 nt, Human
ccggcuaauuuuuguauuu

SEQ ID NO: 1147553 - RNA, 17 nt, Human
ccggcuaugggggcacu

SEQ ID NO: 1147554 - RNA, 22 nt, Human
ccggcuaugggggcacugagga

SEQ ID NO: 1147555 - RNA, 23 nt, Human
ccggcuaugggggcacugaggac

SEQ ID NO: 1147556 - RNA, 16 nt, Human
ccguagguuauuuuca

SEQ ID NO: 1147557 - RNA, 18 nt, Human
ccgucucugguuccuccc

SEQ ID NO: 1147558 - RNA, 17 nt, Human
cccuggcuuuucacugc

SEQ ID NO: 1147559 - RNA, 13 nt, Human
cccuggcuuuuca

SEQ ID NO: 1147560 - RNA, 17 nt, Human
cccuggcucccacaggc

SEQ ID NO: 1147561 - RNA, 19 nt, Human
cccuggcucccacaggccc

SEQ ID NO: 1147562 - RNA, 15 nt, Human
cccucacccuggggc

SEQ ID NO: 1147563 - RNA, 19 nt, Human
ccccucuggcuccagcugg

SEQ ID NO: 1147564 - RNA, 17 nt, Human
cccuauugguaaagaau

SEQ ID NO: 1147565 - RNA, 13 nt, Human
ccccaaaauuagc

SEQ ID NO: 1147566 - RNA, 13 nt, Human
ccccagaggcugg

SEQ ID NO: 1147567 - RNA, 18 nt, Human
cccacuagacccacugga

SEQ ID NO: 1147568 - RNA, 15 nt, Human
cccagcuugaaaccu

SEQ ID NO: 1147569 - RNA, 15 nt, Human
ccaugucaagauuca

SEQ ID NO: 1147570 - RNA, 19 nt, Human
ccaugucaagauucagcua

SEQ ID NO: 1147571 - RNA, 17 nt, Human
ccaugucaagauucagc

SEQ ID NO: 1147572 - RNA, 16 nt, Human
ccaggcacugcugccc

SEQ ID NO: 1147573 - RNA, 18 nt, Human
ccaggcacugcugcccag

SEQ ID NO: 1147574 - RNA, 14 nt, Human
ccuuuuucugcacu

SEQ ID NO: 1147575 - RNA, 15 nt, Human
ccuuuuucugcacua

SEQ ID NO: 1147576 - RNA, 17 nt, Human
ccuuuuucugcacuaua

SEQ ID NO: 1147577 - RNA, 21 nt, Human
ccuuuuucugcacuauaugca

SEQ ID NO: 1147578 - RNA, 18 nt, Human
ccuuuuucugcacuauau

SEQ ID NO: 1147579 - RNA, 12 nt, Human
cgaccaccugcc

SEQ ID NO: 1147580 - RNA, 14 nt, Human
cgaccaccugccca

SEQ ID NO: 1147581 - RNA, 18 nt, Human
cggaggggccuggcagcc

SEQ ID NO: 1147582 - RNA, 17 nt, Human
cggcucacugcauccuc

SEQ ID NO: 1147583 - RNA, 21 nt, Human
cggcucacugcauccuccgcc

SEQ ID NO: 1147584 - RNA, 13 nt, Human
cgccucugcauuc

SEQ ID NO: 1147585 - RNA, 17 nt, Human
cgccuccgggaccccca

SEQ ID NO: 1147586 - RNA, 19 nt, Human
cgccuccgggacccccagg

SEQ ID NO: 1147587 - RNA, 20 nt, Human
cgccuccgggacccccagga

SEQ ID NO: 1147588 - RNA, 22 nt, Human
cgccuccgggacccccaggaca

SEQ ID NO: 1147589 - RNA, 16 nt, Human
cgaccugccucggccu

SEQ ID NO: 1147590 - RNA, 14 nt, Human
cgcaggcuggcccu

SEQ ID NO: 1147591 - RNA, 15 nt, Human
cgcaggcuggcccug

SEQ ID NO: 1147592 - RNA, 17 nt, Human
cgcaggcuggcccugcc

SEQ ID NO: 1147593 - RNA, 18 nt, Human
cgcaggcuggcccugccc

SEQ ID NO: 1147594 - RNA, 19 nt, Human
cgcaggcuggcccugcccu

SEQ ID NO: 1147595 - RNA, 20 nt, Human
cgcaggcuggcccugcccug

SEQ ID NO: 1147596 - RNA, 21 nt, Human
cgcaggcuggcccugcccugg

SEQ ID NO: 1147597 - RNA, 21 nt, Human
cgccgccuccgggacccccag

SEQ ID NO: 1147598 - RNA, 16 nt, Human
cuaguuccccuguuua

SEQ ID NO: 1147599 - RNA, 18 nt, Human
cuaguuccccuguuuauu

SEQ ID NO: 1147600 - RNA, 20 nt, Human
cuaguuccccuguuuauuca

SEQ ID NO: 1147601 - RNA, 15 nt, Human
cuacaagacacagug

SEQ ID NO: 1147602 - RNA, 19 nt, Human
cuacauaacuaauacagcu

SEQ ID NO: 1147603 - RNA, 13 nt, Human
cgugagaccugcc

SEQ ID NO: 1147604 - RNA, 14 nt, Human
cgugagaccugccc

SEQ ID NO: 1147605 - RNA, 16 nt, Human
cgugagaccugccccu

SEQ ID NO: 1147606 - RNA, 23 nt, Human
cgugagccaccgugccuggccac

SEQ ID NO: 1147607 - RNA, 22 nt, Human
cuaaacugcccccucugcccug

SEQ ID NO: 1147608 - RNA, 23 nt, Human
cuaaacugcccccucugcccugc

SEQ ID NO: 1147609 - RNA, 14 nt, Human
cuccagaccccugg

SEQ ID NO: 1147610 - RNA, 18 nt, Human
cucaugccucagccuccu

SEQ ID NO: 1147611 - RNA, 20 nt, Human
cucaugccucagccuccuga

SEQ ID NO: 1147612 - RNA, 15 nt, Human
cuaucccggcugccc

SEQ ID NO: 1147613 - RNA, 16 nt, Human
cuaucccggcugcccu

SEQ ID NO: 1147614 - RNA, 17 nt, Human
cuaucccggcugcccuu

SEQ ID NO: 1147615 - RNA, 12 nt, Human
cucagccuccug

SEQ ID NO: 1147616 - RNA, 13 nt, Human
cucagccuccuga

SEQ ID NO: 1147617 - RNA, 14 nt, Human
cucagcgaaugaau

SEQ ID NO: 1147618 - RNA, 20 nt, Human
cucgggauuaguacacacuu

SEQ ID NO: 1147619 - RNA, 17 nt, Human
cucucaauaaaauuaua

SEQ ID NO: 1147620 - RNA, 14 nt, Human
cucugguuccuccc

SEQ ID NO: 1147621 - RNA, 13 nt, Human
cucuguagccuaa

SEQ ID NO: 1147622 - RNA, 16 nt, Human
cucuugccacugccuc

SEQ ID NO: 1147623 - RNA, 17 nt, Human
cucuugccacugccucu

SEQ ID NO: 1147624 - RNA, 18 nt, Human
cucuugccacugccucuu

SEQ ID NO: 1147625 - RNA, 19 nt, Human
cucuugccacugccucuuc

SEQ ID NO: 1147626 - RNA, 20 nt, Human
cucuugccacugccucuucc

SEQ ID NO: 1147627 - RNA, 22 nt, Human
cucuugccacugccucuuccuc

SEQ ID NO: 1147628 - RNA, 22 nt, Human
cugaaggaauaaauugcuccuu

SEQ ID NO: 1147629 - RNA, 22 nt, Human
cugaaggggaaggaaauagcuu

SEQ ID NO: 1147630 - RNA, 17 nt, Human
cugcauuauuugagaag

SEQ ID NO: 1147631 - RNA, 24 nt, Human
cugcauuauuugagaagcugcuca

SEQ ID NO: 1147632 - RNA, 20 nt, Human
cugcauucaggaucaaaccc

SEQ ID NO: 1147633 - RNA, 13 nt, Human
cugcauuugugaa

SEQ ID NO: 1147634 - RNA, 14 nt, Human
cugcauuugugaaa

SEQ ID NO: 1147635 - RNA, 15 nt, Human
cugcauuugugaaau

SEQ ID NO: 1147636 - RNA, 17 nt, Human
cugcauuugugaaauga

SEQ ID NO: 1147637 - RNA, 22 nt, Human
cugcauuugugaaaugauggug

SEQ ID NO: 1147638 - RNA, 19 nt, Human
cugccccagggcucccggc

SEQ ID NO: 1147639 - RNA, 14 nt, Human
cugcccccucugcc

SEQ ID NO: 1147640 - RNA, 15 nt, Human
cugcccccucugccc

SEQ ID NO: 1147641 - RNA, 16 nt, Human
cugcccccucugcccu

SEQ ID NO: 1147642 - RNA, 17 nt, Human
cugcccccucugcccug

SEQ ID NO: 1147643 - RNA, 18 nt, Human
cugcccccucugcccugc

SEQ ID NO: 1147644 - RNA, 19 nt, Human
cugcccccucugcccugcg

SEQ ID NO: 1147645 - RNA, 13 nt, Human
cugccccucccuu

SEQ ID NO: 1147646 - RNA, 17 nt, Human
cugcccuggugcugcca

SEQ ID NO: 1147647 - RNA, 18 nt, Human
cugcccuggugcugccac

SEQ ID NO: 1147648 - RNA, 19 nt, Human
cugcccuggugcugccaca

SEQ ID NO: 1147649 - RNA, 20 nt, Human
cugcccuggugcugccacac

SEQ ID NO: 1147650 - RNA, 21 nt, Human
cugcccuggugcugccacacu

SEQ ID NO: 1147651 - RNA, 22 nt, Human
cugcccugguuuccugcccugg

SEQ ID NO: 1147652 - RNA, 23 nt, Human
cugcccugguuuccugcccuggg

SEQ ID NO: 1147653 - RNA, 23 nt, Human
cugcccuggugcugccacacuuc

SEQ ID NO: 1147654 - RNA, 13 nt, Human
cuggcuccagcug

SEQ ID NO: 1147655 - RNA, 14 nt, Human
cuggcuccagcugg

SEQ ID NO: 1147656 - RNA, 18 nt, Human
cuggcuccagcuggccgg

SEQ ID NO: 1147657 - RNA, 20 nt, Human
cuggcuccagcuggccggga

SEQ ID NO: 1147658 - RNA, 15 nt, Human
cuggcucccacaggc

SEQ ID NO: 1147659 - RNA, 18 nt, Human
cuggcucccacaggcccu

SEQ ID NO: 1147660 - RNA, 15 nt, Human
cuggggaaccugacc

SEQ ID NO: 1147661 - RNA, 16 nt, Human
cuggggaaccugaccc

SEQ ID NO: 1147662 - RNA, 17 nt, Human
cuggggaaccugacccc

SEQ ID NO: 1147663 - RNA, 18 nt, Human
cuggguuccuuccucuga

SEQ ID NO: 1147664 - RNA, 22 nt, Human
cuggguuccuuccucugagccu

SEQ ID NO: 1147665 - RNA, 23 nt, Human
cuggguuccuuccucugagccuu

SEQ ID NO: 1147666 - RNA, 18 nt, Human
cugguuuccugcccuggg

SEQ ID NO: 1147667 - RNA, 21 nt, Human
cugguuuccugcccugggagg

SEQ ID NO: 1147668 - RNA, 22 nt, Human
cugguuuccugcccugggaggc

SEQ ID NO: 1147669 - RNA, 12 nt, Human
cuguccugccua

SEQ ID NO: 1147670 - RNA, 16 nt, Human
cugucgcccaggcugg

SEQ ID NO: 1147671 - RNA, 15 nt, Human
cuucacuguaaaaua

SEQ ID NO: 1147672 - RNA, 11 nt, Human
cuuccauaauc

SEQ ID NO: 1147673 - RNA, 21 nt, Human
cuuccauaaucuggacuccuc

SEQ ID NO: 1147674 - RNA, 13 nt, Human
cuucuagaaccag

SEQ ID NO: 1147675 - RNA, 17 nt, Human
cuucuagaaccaggcaa

SEQ ID NO: 1147676 - RNA, 17 nt, Human
cuucuguugcugccuca

SEQ ID NO: 1147677 - RNA, 18 nt, Human
cuucuguugcugccucau

SEQ ID NO: 1147678 - RNA, 19 nt, Human
cuucuguugcugccucaug

SEQ ID NO: 1147679 - RNA, 20 nt, Human
cuucuguugcugccucaugc

SEQ ID NO: 1147680 - RNA, 21 nt, Human
cuucuguugcugccucaugcu

SEQ ID NO: 1147681 - RNA, 14 nt, Human
cuuucacaaccuuc

SEQ ID NO: 1147682 - RNA, 16 nt, Human
cuuucacaaccuucug

SEQ ID NO: 1147683 - RNA, 22 nt, Human
cuuugauauuuucaacgcagcc

SEQ ID NO: 1147684 - RNA, 14 nt, Human
cuuugggcugcccu

SEQ ID NO: 1147685 - RNA, 15 nt, Human
cuuugggcugcccug

SEQ ID NO: 1147686 - RNA, 19 nt, Human
cuuugggcugcccuggugc

SEQ ID NO: 1147687 - RNA, 20 nt, Human
cuuugggcugcccuggugcu

SEQ ID NO: 1147688 - RNA, 21 nt, Human
cuuugggcugcccuggugcug

SEQ ID NO: 1147689 - RNA, 15 nt, Human
cuuuguaaauuguca

SEQ ID NO: 1147690 - RNA, 15 nt, Human
cuuuuaguuccugug

SEQ ID NO: 1147691 - RNA, 22 nt, Human
cuuuuaguuccugugcacagcc

SEQ ID NO: 1147692 - RNA, 21 nt, Human
cuuuuaguuccugugcacagc

SEQ ID NO: 1147693 - RNA, 13 nt, Human
cuuuugccauuga

SEQ ID NO: 1147694 - RNA, 13 nt, Human
cuuuuggagucag

SEQ ID NO: 1147695 - RNA, 18 nt, Human
cuuuuggauuggacaaaa

SEQ ID NO: 1147696 - RNA, 19 nt, Human
cuuuuggauuggacaaaau

SEQ ID NO: 1147697 - RNA, 21 nt, Human
cuuuuggauuggacaaaauga

SEQ ID NO: 1147698 - RNA, 23 nt, Human
cuuuuggauuggacaaaaugacu

SEQ ID NO: 1147699 - RNA, 20 nt, Human
cuuuuuuuuuuuugagacag

SEQ ID NO: 1147700 - RNA, 21 nt, Human
cuuuuuuuuuuuugagacaga

SEQ ID NO: 1147701 - RNA, 23 nt, Human
gaaaaugcuguauuagucacaga

SEQ ID NO: 1147702 - RNA, 18 nt, Human
gaaaggcugcuguacuga

SEQ ID NO: 1147703 - RNA, 19 nt, Human
gaaaggcugcuguacugaa

SEQ ID NO: 1147704 - RNA, 20 nt, Human
gaaaggcugcuguacugaag

SEQ ID NO: 1147705 - RNA, 23 nt, Human
gaaaggcugcuguacugaaguaa

SEQ ID NO: 1147706 - RNA, 13 nt, Human
gaaauccagggug

SEQ ID NO: 1147707 - RNA, 18 nt, Human
gaaauccagggugguggu

SEQ ID NO: 1147708 - RNA, 14 nt, Human
gaagcugcucaacu

SEQ ID NO: 1147709 - RNA, 20 nt, Human
gaagcugcucaacuugcaaa

SEQ ID NO: 1147710 - RNA, 15 nt, Human
gaaguggggacagag

SEQ ID NO: 1147711 - RNA, 21 nt, Human
gaauuuuauuuuuugggaaaa

SEQ ID NO: 1147712 - RNA, 22 nt, Human
gacaaaauacuugucuguuuua

SEQ ID NO: 1147713 - RNA, 12 nt, Human
gacaaaauguua

SEQ ID NO: 1147714 - RNA, 16 nt, Human
gacaaaauguuauuuc

SEQ ID NO: 1147715 - RNA, 13 nt, Human
gacaaaauguuau

SEQ ID NO: 1147716 - RNA, 13 nt, Human
gacagcccuccau

SEQ ID NO: 1147717 - RNA, 19 nt, Human
gacagccuggcacagggca

SEQ ID NO: 1147718 - RNA, 14 nt, Human
gacagugaaagaaa

SEQ ID NO: 1147719 - RNA, 15 nt, Human
gacuaggguccuggg

SEQ ID NO: 1147720 - RNA, 16 nt, Human
gacuaggguccugggg

SEQ ID NO: 1147721 - RNA, 18 nt, Human
gacuaggguccuggggaa

SEQ ID NO: 1147722 - RNA, 11 nt, Human
gacuuuccucu

SEQ ID NO: 1147723 - RNA, 20 nt, Human
gagaaggacccggaggggcc

SEQ ID NO: 1147724 - RNA, 22 nt, Human
gagaaggacccggaggggccug

SEQ ID NO: 1147725 - RNA, 23 nt, Human
gagaaggacccggaggggccugg

SEQ ID NO: 1147726 - RNA, 11 nt, Human
gagaccugccc

SEQ ID NO: 1147727 - RNA, 12 nt, Human
gagaccugcccc

SEQ ID NO: 1147728 - RNA, 13 nt, Human
gagaccugccccu

SEQ ID NO: 1147729 - RNA, 16 nt, Human
gagaugcagugccagg

SEQ ID NO: 1147730 - RNA, 19 nt, Human
gaucucuucuuaauguaca

SEQ ID NO: 1147731 - RNA, 21 nt, Human
gaucucuucuuaauguacaua

SEQ ID NO: 1147732 - RNA, 20 nt, Human
gauuacaggugugagccacc

SEQ ID NO: 1147733 - RNA, 19 nt, Human
gauuagcuuugucacuguu

SEQ ID NO: 1147734 - RNA, 21 nt, Human
gcacaaucucggcucacugca

SEQ ID NO: 1147735 - RNA, 22 nt, Human
gcacaaucucggcucacugcau

SEQ ID NO: 1147736 - RNA, 14 nt, Human
gcagaacaaaugaa

SEQ ID NO: 1147737 - RNA, 15 nt, Human
gcagaacaaaugaag

SEQ ID NO: 1147738 - RNA, 15 nt, Human
gcaggcuggcccugc

SEQ ID NO: 1147739 - RNA, 16 nt, Human
gcaggcuggcccugcc

SEQ ID NO: 1147740 - RNA, 17 nt, Human
gcaggcuggcccugccc

SEQ ID NO: 1147741 - RNA, 18 nt, Human
gcaggcuggcccugcccu

SEQ ID NO: 1147742 - RNA, 19 nt, Human
gcaggcuggcccugcccug

SEQ ID NO: 1147743 - RNA, 20 nt, Human
gcaggcuggcccugcccugg

SEQ ID NO: 1147744 - RNA, 21 nt, Human
gcaggcuggcccugcccuggu

SEQ ID NO: 1147745 - RNA, 10 nt, Human
gcagggaggg

SEQ ID NO: 1147746 - RNA, 13 nt, Human
gcagggagggccu

SEQ ID NO: 1147747 - RNA, 16 nt, Human
gcagguugauaaauca

SEQ ID NO: 1147748 - RNA, 17 nt, Human
gcagguugauaaaucau

SEQ ID NO: 1147749 - RNA, 19 nt, Human
gcagguugauaaaucauuu

SEQ ID NO: 1147750 - RNA, 20 nt, Human
gcaguaucggcacuguacaa

SEQ ID NO: 1147751 - RNA, 22 nt, Human
gcaguaucggcacuguacaaaa

SEQ ID NO: 1147752 - RNA, 16 nt, Human
gccauaugaaaaggcu

SEQ ID NO: 1147753 - RNA, 16 nt, Human
gcccucacccuggggc

SEQ ID NO: 1147754 - RNA, 17 nt, Human
gcccucacccuggggcu

SEQ ID NO: 1147755 - RNA, 17 nt, Human
gccuccaagcuccaucu

SEQ ID NO: 1147756 - RNA, 11 nt, Human
gccuccaugcu

SEQ ID NO: 1147757 - RNA, 13 nt, Human
gccucggacuuag

SEQ ID NO: 1147758 - RNA, 20 nt, Human
gccucggacuuagcugggag

SEQ ID NO: 1147759 - RNA, 14 nt, Human
gcggccccuccccc

SEQ ID NO: 1147760 - RNA, 17 nt, Human
gcggccccucccccguc

SEQ ID NO: 1147761 - RNA, 19 nt, Human
gcuccucccggugcccaag

SEQ ID NO: 1147762 - RNA, 18 nt, Human
gcugaaacgcaucuaguu

SEQ ID NO: 1147763 - RNA, 20 nt, Human
gcugaacuuguuuucuggga

SEQ ID NO: 1147764 - RNA, 12 nt, Human
gcugagccucag

SEQ ID NO: 1147765 - RNA, 16 nt, Human
gcugagccucagucuc

SEQ ID NO: 1147766 - RNA, 17 nt, Human
gcugagucccaggcuga

SEQ ID NO: 1147767 - RNA, 16 nt, Human
gcugcuguacugaagu

SEQ ID NO: 1147768 - RNA, 20 nt, Human
gcuguacugaaguaaaacaa

SEQ ID NO: 1147769 - RNA, 19 nt, Human
gcuguacugaaguaaaaca

SEQ ID NO: 1147770 - RNA, 12 nt, Human
gcugugccucug

SEQ ID NO: 1147771 - RNA, 21 nt, Human
gcuuuccccaugucucgacuc

SEQ ID NO: 1147772 - RNA, 22 nt, Human
gcuuuccccaugucucgacuca

SEQ ID NO: 1147773 - RNA, 16 nt, Human
gcuuuccucuuccuga

SEQ ID NO: 1147774 - RNA, 17 nt, Human
ggaaaugucaacaagua

SEQ ID NO: 1147775 - RNA, 17 nt, Human
ggaacaccauaggucac

SEQ ID NO: 1147776 - RNA, 16 nt, Human
ggagcaucagugcccu

SEQ ID NO: 1147777 - RNA, 16 nt, Human
ggagccaauggagacu

SEQ ID NO: 1147778 - RNA, 21 nt, Human
ggaguuggaagugugugaucu

SEQ ID NO: 1147779 - RNA, 21 nt, Human
ggauguacaaggacagccccu

SEQ ID NO: 1147780 - RNA, 22 nt, Human
ggcacaaucucggcucacugca

SEQ ID NO: 1147781 - RNA, 16 nt, Human
ggcacagggcaguggg

SEQ ID NO: 1147782 - RNA, 15 nt, Human
ggcccgacagccugg

SEQ ID NO: 1147783 - RNA, 13 nt, Human
ggcccuuccucuc

SEQ ID NO: 1147784 - RNA, 15 nt, Human
ggcccuuccucucca

SEQ ID NO: 1147785 - RNA, 18 nt, Human
ggcccuuccucuccacug

SEQ ID NO: 1147786 - RNA, 17 nt, Human
ggcccuuccucuccacu

SEQ ID NO: 1147787 - RNA, 16 nt, Human
ggcucacugcauccuc

SEQ ID NO: 1147788 - RNA, 19 nt, Human
ggcucacugcauccuccgc

SEQ ID NO: 1147789 - RNA, 21 nt, Human
aaaaauaugaccacacuccag

SEQ ID NO: 1147790 - RNA, 23 nt, Human
aaaaauaugaccacacuccagcu

SEQ ID NO: 1147791 - RNA, 18 nt, Human
aaaagcagguugauaaau

SEQ ID NO: 1147792 - RNA, 22 nt, Human
aaaagcagguugauaaaucauu

SEQ ID NO: 1147793 - RNA, 14 nt, Human
gggauuacaggcgu

SEQ ID NO: 1147794 - RNA, 13 nt, Human
gggauuacaggcu

SEQ ID NO: 1147795 - RNA, 16 nt, Human
gggauuacaggcuccu

SEQ ID NO: 1147796 - RNA, 21 nt, Human
gggauuacaggcuccugccac

SEQ ID NO: 1147797 - RNA, 12 nt, Human
gggauuacaggu

SEQ ID NO: 1147798 - RNA, 16 nt, Human
gggcaaauuggagaaa

SEQ ID NO: 1147799 - RNA, 17 nt, Human
aaaaugcucuuauuuca

SEQ ID NO: 1147800 - RNA, 20 nt, Human
aaaaugcucuuauuucauca

SEQ ID NO: 1147801 - RNA, 18 nt, Human
aaaaugcucuuauuucau

SEQ ID NO: 1147802 - RNA, 21 nt, Human
aaaaugcuguauuagucacag

SEQ ID NO: 1147803 - RNA, 22 nt, Human
gggccucggacuuagcugggag

SEQ ID NO: 1147804 - RNA, 23 nt, Human
gggcuacaccuuagccugcccuc

SEQ ID NO: 1147805 - RNA, 13 nt, Human
gggcugcccuggu

SEQ ID NO: 1147806 - RNA, 14 nt, Human
gggcugcccuggug

SEQ ID NO: 1147807 - RNA, 15 nt, Human
gggcugcccuggugc

SEQ ID NO: 1147808 - RNA, 21 nt, Human
gggcugcccuggugcugccac

SEQ ID NO: 1147809 - RNA, 16 nt, Human
gggcugggagcucugc

SEQ ID NO: 1147810 - RNA, 18 nt, Human
gggcugggagcucugcag

SEQ ID NO: 1147811 - RNA, 12 nt, Human
aaaaugugugug

SEQ ID NO: 1147812 - RNA, 20 nt, Human
aaacaagcacuaaacaaaga

SEQ ID NO: 1147813 - RNA, 15 nt, Human
aaacaguugcacagc

SEQ ID NO: 1147814 - RNA, 16 nt, Human
aaacaguugcacagca

SEQ ID NO: 1147815 - RNA, 17 nt, Human
aaacaguugcacagcau

SEQ ID NO: 1147816 - RNA, 18 nt, Human
aaacaguugcacagcauc

SEQ ID NO: 1147817 - RNA, 19 nt, Human
aaacaguugcacagcaucu

SEQ ID NO: 1147818 - RNA, 21 nt, Human
aaacaguugcacagcaucuca

SEQ ID NO: 1147819 - RNA, 18 nt, Human
aaacauccuacaagacac

SEQ ID NO: 1147820 - RNA, 22 nt, Human
aaacauccuacaagacacagug

SEQ ID NO: 1147821 - RNA, 17 nt, Human
aaacauccucuuccaua

SEQ ID NO: 1147822 - RNA, 16 nt, Human
aaacaugcagaacaaa

SEQ ID NO: 1147823 - RNA, 20 nt, Human
aaacaugcagaacaaaugaa

SEQ ID NO: 1147824 - RNA, 11 nt, Human
ggggccuggca

SEQ ID NO: 1147825 - RNA, 12 nt, Human
ggggccuggcag

SEQ ID NO: 1147826 - RNA, 14 nt, Human
gguaaucgaccugc

SEQ ID NO: 1147827 - RNA, 17 nt, Human
gguaaucgaccugccuc

SEQ ID NO: 1147828 - RNA, 18 nt, Human
gguaaucgaccugccucg

SEQ ID NO: 1147829 - RNA, 23 nt, Human
gguacaaccuguucugcuuuccu

SEQ ID NO: 1147830 - RNA, 24 nt, Human
gguacaaccuguucugcuuuccuc

SEQ ID NO: 1147831 - RNA, 14 nt, Human
gguagcuuuucccu

SEQ ID NO: 1147832 - RNA, 16 nt, Human
gguccacaacacacag

SEQ ID NO: 1147833 - RNA, 18 nt, Human
aaagaaguggggacagag

SEQ ID NO: 1147834 - RNA, 13 nt, Human
aaagacaccuacu

SEQ ID NO: 1147835 - RNA, 19 nt, Human
aaagacaccuacugagugg

SEQ ID NO: 1147836 - RNA, 13 nt, Human
aaagcaaaugucu

SEQ ID NO: 1147837 - RNA, 22 nt, Human
ggucgggcagcacaaguguaau

SEQ ID NO: 1147838 - RNA, 23 nt, Human
gguuccagcaauucuccugccuc

SEQ ID NO: 1147839 - RNA, 24 nt, Human
gguuccagcaauucuccugccuca

SEQ ID NO: 1147840 - RNA, 15 nt, Human
gguuccccuguucac

SEQ ID NO: 1147841 - RNA, 16 nt, Human
gguuccuccccuccuc

SEQ ID NO: 1147842 - RNA, 19 nt, Human
gguuccuuccucugagccu

SEQ ID NO: 1147843 - RNA, 20 nt, Human
gguuccuuccucugagccuu

SEQ ID NO: 1147844 - RNA, 21 nt, Human
gguuuaugacaguaauugugu

SEQ ID NO: 1147845 - RNA, 21 nt, Human
aaaguucccuacuuccuguga

SEQ ID NO: 1147846 - RNA, 23 nt, Human
aaaguucccuacuuccugugacu

SEQ ID NO: 1147847 - RNA, 19 nt, Human
aaauaaaaaaaaaaaagag

SEQ ID NO: 1147848 - RNA, 15 nt, Human
guauaaguggugugu

SEQ ID NO: 1147849 - RNA, 13 nt, Human
guaucaaaaugcu

SEQ ID NO: 1147850 - RNA, 14 nt, Human
guaucaaaaugcuc

SEQ ID NO: 1147851 - RNA, 22 nt, Human
guaucaaaaugcucuuauuuca

SEQ ID NO: 1147852 - RNA, 15 nt, Human
guaugcgugugugug

SEQ ID NO: 1147853 - RNA, 12 nt, Human
aaaugugugugu

SEQ ID NO: 1147854 - RNA, 14 nt, Human
gucaaacgugaaaa

SEQ ID NO: 1147855 - RNA, 15 nt, Human
gucaaacgugaaaau

SEQ ID NO: 1147856 - RNA, 17 nt, Human
gucaaacgugaaaaugc

SEQ ID NO: 1147857 - RNA, 21 nt, Human
gucaacaaguaugaauaaaga

SEQ ID NO: 1147858 - RNA, 23 nt, Human
aaauuuuaucugccucucuugua

SEQ ID NO: 1147859 - RNA, 17 nt, Human
aacaagaugaaauucca

SEQ ID NO: 1147860 - RNA, 21 nt, Human
aacaagccuccuuuuaaagua

SEQ ID NO: 1147861 - RNA, 12 nt, Human
aacaauaaaaga

SEQ ID NO: 1147862 - RNA, 19 nt, Human
aacaauaaaaguguccauu

SEQ ID NO: 1147863 - RNA, 14 nt, Human
aacaguugcacagc

SEQ ID NO: 1147864 - RNA, 15 nt, Human
aacaguugcacagca

SEQ ID NO: 1147865 - RNA, 17 nt, Human
aacaguugcacagcauc

SEQ ID NO: 1147866 - RNA, 18 nt, Human
aacaguugcacagcaucu

SEQ ID NO: 1147867 - RNA, 20 nt, Human
aacaguugcacagcaucuca

SEQ ID NO: 1147868 - RNA, 22 nt, Human
aacaguugcacagcaucucagc

SEQ ID NO: 1147869 - RNA, 13 nt, Human
gucucgaacuccu

SEQ ID NO: 1147870 - RNA, 18 nt, Human
gucucgaacuccugaccu

SEQ ID NO: 1147871 - RNA, 19 nt, Human
gucucgaacuccugaccuu

SEQ ID NO: 1147872 - RNA, 18 nt, Human
aaccaagccguggcuucc

SEQ ID NO: 1147873 - RNA, 16 nt, Human
aaccauugugcauucu

SEQ ID NO: 1147874 - RNA, 13 nt, Human
aaccauugugcau

SEQ ID NO: 1147875 - RNA, 13 nt, Human
aacccaauaguug

SEQ ID NO: 1147876 - RNA, 11 nt, Human
aaccugacccc

SEQ ID NO: 1147877 - RNA, 16 nt, Human
gucuguacugauucaa

SEQ ID NO: 1147878 - RNA, 16 nt, Human
gucuuucacauuuaaa

SEQ ID NO: 1147879 - RNA, 17 nt, Human
aacuaccaccugacauu

SEQ ID NO: 1147880 - RNA, 23 nt, Human
aacuagacucccaagcuggacua

SEQ ID NO: 1147881 - RNA, 16 nt, Human
aacuaugauuuggaaa

SEQ ID NO: 1147882 - RNA, 21 nt, Human
aacuaugauuuggaaaauaaa

SEQ ID NO: 1147883 - RNA, 20 nt, Human
aacucugacaacagacuucu

SEQ ID NO: 1147884 - RNA, 22 nt, Human
aacucugacaacagacuucuga

SEQ ID NO: 1147885 - RNA, 23 nt, Human
aacucugacaacagacuucugaa

SEQ ID NO: 1147886 - RNA, 20 nt, Human
aacugcaauacaaguuucau

SEQ ID NO: 1147887 - RNA, 20 nt, Human
aacugcaccaguugcugcuu

SEQ ID NO: 1147888 - RNA, 14 nt, Human
gugaugguuccccu

SEQ ID NO: 1147889 - RNA, 16 nt, Human
gugaugguuccccugu

SEQ ID NO: 1147890 - RNA, 22 nt, Human
gugaugguuccccuguucacuc

SEQ ID NO: 1147891 - RNA, 11 nt, Human
gugcacagccc

SEQ ID NO: 1147892 - RNA, 14 nt, Human
gugcacagccccua

SEQ ID NO: 1147893 - RNA, 12 nt, Human
gugccucugccu

SEQ ID NO: 1147894 - RNA, 14 nt, Human
aacuugcaaaauca

SEQ ID NO: 1147895 - RNA, 17 nt, Human
aacuugcaaaaucaguu

SEQ ID NO: 1147896 - RNA, 18 nt, Human
aacuugcaaaaucaguuu

SEQ ID NO: 1147897 - RNA, 19 nt, Human
aacuugcaaaaucaguuuu

SEQ ID NO: 1147898 - RNA, 15 nt, Human
aagaccuuuuucugc

SEQ ID NO: 1147899 - RNA, 16 nt, Human
aagaccuuuuucugca

SEQ ID NO: 1147900 - RNA, 20 nt, Human
aagaccuuuuucugcacuau

SEQ ID NO: 1147901 - RNA, 18 nt, Human
aagaccuuuuucugcacu

SEQ ID NO: 1147902 - RNA, 17 nt, Human
gugggaagggcuacacc

SEQ ID NO: 1147903 - RNA, 20 nt, Human
aagauggcugugccucugcc

SEQ ID NO: 1147904 - RNA, 21 nt, Human
aagauggcugugccucugccu

SEQ ID NO: 1147905 - RNA, 23 nt, Human
aagauggcugugccucugccugu

SEQ ID NO: 1147906 - RNA, 20 nt, Human
gugugugaaaaugugugugu

SEQ ID NO: 1147907 - RNA, 14 nt, Human
aagcagguugauaa

SEQ ID NO: 1147908 - RNA, 15 nt, Human
aagcagguugauaaa

SEQ ID NO: 1147909 - RNA, 19 nt, Human
aagcagguugauaaaucau

SEQ ID NO: 1147910 - RNA, 15 nt, Human
aagcccuuccauguc

SEQ ID NO: 1147911 - RNA, 20 nt, Human
aagcccuuccaugucgccuc

SEQ ID NO: 1147912 - RNA, 23 nt, Human
aagcccuuccaugucgccucugc

SEQ ID NO: 1147913 - RNA, 18 nt, Human
guuauuaugauuagcuuu

SEQ ID NO: 1147914 - RNA, 14 nt, Human
aagcuccaucucca

SEQ ID NO: 1147915 - RNA, 20 nt, Human
aagcuccaucuccacuccag

SEQ ID NO: 1147916 - RNA, 21 nt, Human
aaggaauaaauugcuccuuga

SEQ ID NO: 1147917 - RNA, 17 nt, Human
guuuaaucauauaaaua

SEQ ID NO: 1147918 - RNA, 19 nt, Human
guuuaaucauauaaauaga

SEQ ID NO: 1147919 - RNA, 18 nt, Human
guuuaaugaaugcuuaaa

SEQ ID NO: 1147920 - RNA, 15 nt, Human
guuuaaugaaugcuu

SEQ ID NO: 1147921 - RNA, 23 nt, Human
aaggcucugagcaaauguggcuc

SEQ ID NO: 1147922 - RNA, 23 nt, Human
aaggcucuguuccacauauauuu

SEQ ID NO: 1147923 - RNA, 13 nt, Human
aaguaagcaaaga

SEQ ID NO: 1147924 - RNA, 21 nt, Human
aagucaugcguuuaaucacau

SEQ ID NO: 1147925 - RNA, 16 nt, Human
aagucuuucacauuua

SEQ ID NO: 1147926 - RNA, 22 nt, Human
uaaaaccuuccaugucaagauu

SEQ ID NO: 1147927 - RNA, 20 nt, Human
uaaaagacagugaaagaaaa

SEQ ID NO: 1147928 - RNA, 18 nt, Human
uaaaaguguccauugaaa

SEQ ID NO: 1147929 - RNA, 16 nt, Human
uaaaaguguccauuga

SEQ ID NO: 1147930 - RNA, 13 nt, Human
uaaaauauuccug

SEQ ID NO: 1147931 - RNA, 22 nt, Human
uaaaauauuccugcauuuguga

SEQ ID NO: 1147932 - RNA, 20 nt, Human
aagugauucucaugccucag

SEQ ID NO: 1147933 - RNA, 21 nt, Human
aagugauucucaugccucagc

SEQ ID NO: 1147934 - RNA, 13 nt, Human
uaaaugugguaaa

SEQ ID NO: 1147935 - RNA, 15 nt, Human
aauaccucuaauagu

SEQ ID NO: 1147936 - RNA, 17 nt, Human
aauaccugaaugcucug

SEQ ID NO: 1147937 - RNA, 18 nt, Human
aauaccugaaugcucugu

SEQ ID NO: 1147938 - RNA, 17 nt, Human
uaacuaaaacaaagcca

SEQ ID NO: 1147939 - RNA, 20 nt, Human
uaacuaaaacaaagccacuu

SEQ ID NO: 1147940 - RNA, 16 nt, Human
uaacuauguugauaaa

SEQ ID NO: 1147941 - RNA, 15 nt, Human
aauauuuauagguca

SEQ ID NO: 1147942 - RNA, 18 nt, Human
aaucagcauucucacucc

SEQ ID NO: 1147943 - RNA, 19 nt, Human
aaucagcauucucacuccu

SEQ ID NO: 1147944 - RNA, 14 nt, Human
aaucaguuuuccuc

SEQ ID NO: 1147945 - RNA, 12 nt, Human
aaucccaggaug

SEQ ID NO: 1147946 - RNA, 24 nt, Human
aaugauuucagcucacugcaaccu

SEQ ID NO: 1147947 - RNA, 22 nt, Human
uaauuccguagguuauuuucag

SEQ ID NO: 1147948 - RNA, 15 nt, Human
uaauuuuuguauuuu

SEQ ID NO: 1147949 - RNA, 21 nt, Human
uaauuuuuguauuuuuaguag

SEQ ID NO: 1147950 - RNA, 22 nt, Human
uaauuuuuuuuuuccuuuuaaa

SEQ ID NO: 1147951 - RNA, 12 nt, Human
aauguaaauaaa

SEQ ID NO: 1147952 - RNA, 15 nt, Human
uacaccgggccugga

SEQ ID NO: 1147953 - RNA, 17 nt, Human
uacaccgggccuggaga

SEQ ID NO: 1147954 - RNA, 14 nt, Human
aauguuauuucccu

SEQ ID NO: 1147955 - RNA, 15 nt, Human
uacccccugcaaagc

SEQ ID NO: 1147956 - RNA, 19 nt, Human
uacccccugcaaagcccag

SEQ ID NO: 1147957 - RNA, 23 nt, Human
uacccccugcaaagcccagcuug

SEQ ID NO: 1147958 - RNA, 14 nt, Human
uaccugaaugcucu

SEQ ID NO: 1147959 - RNA, 16 nt, Human
uaccugaaugcucugu

SEQ ID NO: 1147960 - RNA, 17 nt, Human
aauuacuuaguauugca

SEQ ID NO: 1147961 - RNA, 13 nt, Human
aauuacuuaguau

SEQ ID NO: 1147962 - RNA, 12 nt, Human
aauuccacagcu

SEQ ID NO: 1147963 - RNA, 13 nt, Human
aauuccacagcug

SEQ ID NO: 1147964 - RNA, 14 nt, Human
aauuccacagcugc

SEQ ID NO: 1147965 - RNA, 22 nt, Human
aauuuggaucucuucuuaaugu

SEQ ID NO: 1147966 - RNA, 23 nt, Human
aauuuggaucucuucuuaaugua

SEQ ID NO: 1147967 - RNA, 16 nt, Human
uagcgcacucuucaug

SEQ ID NO: 1147968 - RNA, 13 nt, Human
uagcuuuucccuu

SEQ ID NO: 1147969 - RNA, 19 nt, Human
uagggauggggcugugggg

SEQ ID NO: 1147970 - RNA, 13 nt, Human
uaggguccugggg

SEQ ID NO: 1147971 - RNA, 15 nt, Human
uagggugggccuuca

SEQ ID NO: 1147972 - RNA, 23 nt, Human
acacacagauuugagcucagccc

SEQ ID NO: 1147973 - RNA, 13 nt, Human
uaguaaaaauaaa

SEQ ID NO: 1147974 - RNA, 16 nt, Human
uaguaaaaauaaaauu

SEQ ID NO: 1147975 - RNA, 13 nt, Human
uaguagagacggg

SEQ ID NO: 1147976 - RNA, 23 nt, Human
uauagcucuaauguuugcauaua

SEQ ID NO: 1147977 - RNA, 15 nt, Human
uauaggcaccuacca

SEQ ID NO: 1147978 - RNA, 22 nt, Human
uauaucuagguuuaugacagua

SEQ ID NO: 1147979 - RNA, 18 nt, Human
uauaucuagguuuaugac

SEQ ID NO: 1147980 - RNA, 15 nt, Human
acacuucaggcucuu

SEQ ID NO: 1147981 - RNA, 19 nt, Human
acacuucaggcucuucucc

SEQ ID NO: 1147982 - RNA, 22 nt, Human
acacuucaggcucuucuccuuu

SEQ ID NO: 1147983 - RNA, 14 nt, Human
acacuuccauaauc

SEQ ID NO: 1147984 - RNA, 15 nt, Human
uaucccggcugcccu

SEQ ID NO: 1147985 - RNA, 22 nt, Human
acagauuugagcucagcccugg

SEQ ID NO: 1147986 - RNA, 19 nt, Human
acagcacgggggccaagga

SEQ ID NO: 1147987 - RNA, 17 nt, Human
acagcagccccugcaca

SEQ ID NO: 1147988 - RNA, 14 nt, Human
acagccccuccucc

SEQ ID NO: 1147989 - RNA, 16 nt, Human
acagccccuccuccau

SEQ ID NO: 1147990 - RNA, 12 nt, Human
uaugaucaaaug

SEQ ID NO: 1147991 - RNA, 13 nt, Human
uaugaucaaaugu

SEQ ID NO: 1147992 - RNA, 14 nt, Human
uaugaucaaauguu

SEQ ID NO: 1147993 - RNA, 15 nt, Human
uaugaucaaauguuu

SEQ ID NO: 1147994 - RNA, 16 nt, Human
uaugaucaaauguuua

SEQ ID NO: 1147995 - RNA, 18 nt, Human
uaugaucaaauguuuaau

SEQ ID NO: 1147996 - RNA, 20 nt, Human
uaugaucaaauguuuaauca

SEQ ID NO: 1147997 - RNA, 22 nt, Human
uaugaucaaauguuuaaucaua

SEQ ID NO: 1147998 - RNA, 17 nt, Human
uauggugccuaguauug

SEQ ID NO: 1147999 - RNA, 19 nt, Human
uauggugccuaguauugac

SEQ ID NO: 1148000 - RNA, 18 nt, Human
uauggugccuaguauuga

SEQ ID NO: 1148001 - RNA, 16 nt, Human
acaggacucugccucc

SEQ ID NO: 1148002 - RNA, 13 nt, Human
acaggcccuuccu

SEQ ID NO: 1148003 - RNA, 15 nt, Human
acaggcccuuccucu

SEQ ID NO: 1148004 - RNA, 22 nt, Human
acaggcccuuccucuccacugc

SEQ ID NO: 1148005 - RNA, 15 nt, Human
ucaaagcaaaugucu

SEQ ID NO: 1148006 - RNA, 23 nt, Human
ucaaagcaaaugucuuccuggau

SEQ ID NO: 1148007 - RNA, 20 nt, Human
acaugacuccauagaccuuu

SEQ ID NO: 1148008 - RNA, 18 nt, Human
acaugacuccauagaccu

SEQ ID NO: 1148009 - RNA, 20 nt, Human
ucaagagggcacugguggcc

SEQ ID NO: 1148010 - RNA, 21 nt, Human
ucaagagggcacugguggccc

SEQ ID NO: 1148011 - RNA, 18 nt, Human
ucaagagugguaucuugc

SEQ ID NO: 1148012 - RNA, 21 nt, Human
ucaagugauucucaugccuca

SEQ ID NO: 1148013 - RNA, 22 nt, Human
ucaagugauucucaugccucag

SEQ ID NO: 1148014 - RNA, 20 nt, Human
acauuuuauggugccuagua

SEQ ID NO: 1148015 - RNA, 15 nt, Human
accaacccucagagc

SEQ ID NO: 1148016 - RNA, 21 nt, Human
ucacagaacccuuggagccaa

SEQ ID NO: 1148017 - RNA, 19 nt, Human
ucaauuuauaccucaauuu

SEQ ID NO: 1148018 - RNA, 14 nt, Human
ucacugagcacugu

SEQ ID NO: 1148019 - RNA, 15 nt, Human
ucacugagcacuguu

SEQ ID NO: 1148020 - RNA, 16 nt, Human
ucacugagcacuguuu

SEQ ID NO: 1148021 - RNA, 18 nt, Human
ucacugagcacuguuuuc

SEQ ID NO: 1148022 - RNA, 22 nt, Human
ucacugagcacuguuuucuagu

SEQ ID NO: 1148023 - RNA, 19 nt, Human
ucacugagcacuguuuucu

SEQ ID NO: 1148024 - RNA, 21 nt, Human
ucacugcaaccuucgccaccu

SEQ ID NO: 1148025 - RNA, 15 nt, Human
ucacugcacagugca

SEQ ID NO: 1148026 - RNA, 12 nt, Human
ucacuucacugu

SEQ ID NO: 1148027 - RNA, 14 nt, Human
ucacuucacugugc

SEQ ID NO: 1148028 - RNA, 15 nt, Human
ucacuucacugugcu

SEQ ID NO: 1148029 - RNA, 21 nt, Human
ucacuucacugugcuguuguu

SEQ ID NO: 1148030 - RNA, 18 nt, Human
accauguuggccaggcug

SEQ ID NO: 1148031 - RNA, 14 nt, Human
acccacuggacuca

SEQ ID NO: 1148032 - RNA, 17 nt, Human
acccacuggacucaccu

SEQ ID NO: 1148033 - RNA, 21 nt, Human
acccacuggacucaccucccc

SEQ ID NO: 1148034 - RNA, 21 nt, Human
ucagagccaccccuaaagaga

SEQ ID NO: 1148035 - RNA, 21 nt, Human
ucagaugcugugcaaauguua

SEQ ID NO: 1148036 - RNA, 13 nt, Human
ucagauucuugca

SEQ ID NO: 1148037 - RNA, 14 nt, Human
ucagauucuugcau

SEQ ID NO: 1148038 - RNA, 13 nt, Human
ucaggccacuuga

SEQ ID NO: 1148039 - RNA, 18 nt, Human
ucagguaaucgaccugcc

SEQ ID NO: 1148040 - RNA, 19 nt, Human
ucagguaaucgaccugccu

SEQ ID NO: 1148041 - RNA, 20 nt, Human
ucagguaaucgaccugccuc

SEQ ID NO: 1148042 - RNA, 21 nt, Human
ucagguaaucgaccugccucg

SEQ ID NO: 1148043 - RNA, 15 nt, Human
acccggaggggccug

SEQ ID NO: 1148044 - RNA, 22 nt, Human
ucagguugucugaagucacugc

SEQ ID NO: 1148045 - RNA, 15 nt, Human
ucagugcuucgcaga

SEQ ID NO: 1148046 - RNA, 16 nt, Human
ucauaauaaguugcau

SEQ ID NO: 1148047 - RNA, 17 nt, Human
accugaccccugacccc

SEQ ID NO: 1148048 - RNA, 17 nt, Human
accugccucggccuccc

SEQ ID NO: 1148049 - RNA, 12 nt, Human
accugcucuccu

SEQ ID NO: 1148050 - RNA, 17 nt, Human
accugcucuccucuugc

SEQ ID NO: 1148051 - RNA, 14 nt, Human
ucauuuuugaauac

SEQ ID NO: 1148052 - RNA, 19 nt, Human
uccaaaugcagcuuuaaaa

SEQ ID NO: 1148053 - RNA, 17 nt, Human
uccaauuagcuuauguu

SEQ ID NO: 1148054 - RNA, 20 nt, Human
uccaauuagcuuauguuaac

SEQ ID NO: 1148055 - RNA, 17 nt, Human
accuucccaugcccugg

SEQ ID NO: 1148056 - RNA, 15 nt, Human
accuucgccaccugg

SEQ ID NO: 1148057 - RNA, 17 nt, Human
accuucgccaccugggu

SEQ ID NO: 1148058 - RNA, 14 nt, Human
acgagaaaacaaua

SEQ ID NO: 1148059 - RNA, 13 nt, Human
uccauuuaaacag

SEQ ID NO: 1148060 - RNA, 14 nt, Human
uccauuuaaacaga

SEQ ID NO: 1148061 - RNA, 15 nt, Human
uccauuuaaacagau

SEQ ID NO: 1148062 - RNA, 18 nt, Human
uccauuuaaacagauguc

SEQ ID NO: 1148063 - RNA, 21 nt, Human
uccauuuaaacagauguccau

SEQ ID NO: 1148064 - RNA, 20 nt, Human
ucccaaagugcugggauuac

SEQ ID NO: 1148065 - RNA, 15 nt, Human
ucccacaggcccuuc

SEQ ID NO: 1148066 - RNA, 17 nt, Human
ucccacaggcccuuccu

SEQ ID NO: 1148067 - RNA, 21 nt, Human
ucccacaggcccuuccucucc

SEQ ID NO: 1148068 - RNA, 22 nt, Human
ucccacaggcccuuccucucca

SEQ ID NO: 1148069 - RNA, 19 nt, Human
ucccaccaacccucagagc

SEQ ID NO: 1148070 - RNA, 15 nt, Human
acuaugauuuggaaa

SEQ ID NO: 1148071 - RNA, 16 nt, Human
acuaugauuuggaaaa

SEQ ID NO: 1148072 - RNA, 13 nt, Human
acuauguugauaa

SEQ ID NO: 1148073 - RNA, 19 nt, Human
acucaccucccccaucucu

SEQ ID NO: 1148074 - RNA, 20 nt, Human
acucaccucccccaucucuu

SEQ ID NO: 1148075 - RNA, 14 nt, Human
acucguauaugucu

SEQ ID NO: 1148076 - RNA, 17 nt, Human
acucugacaacagacuu

SEQ ID NO: 1148077 - RNA, 18 nt, Human
acucugacaacagacuuc

SEQ ID NO: 1148078 - RNA, 20 nt, Human
acucugacaacagacuucug

SEQ ID NO: 1148079 - RNA, 22 nt, Human
acucugacaacagacuucugaa

SEQ ID NO: 1148080 - RNA, 23 nt, Human
acucugacaacagacuucugaaa

SEQ ID NO: 1148081 - RNA, 20 nt, Human
acucuucaguuaagccuuug

SEQ ID NO: 1148082 - RNA, 21 nt, Human
acucuucaguuaagccuuugg

SEQ ID NO: 1148083 - RNA, 17 nt, Human
uccucuccacugccuuc

SEQ ID NO: 1148084 - RNA, 18 nt, Human
uccucuccacugccuucg

SEQ ID NO: 1148085 - RNA, 12 nt, Human
uccucucugccc

SEQ ID NO: 1148086 - RNA, 13 nt, Human
uccucucugcccu

SEQ ID NO: 1148087 - RNA, 14 nt, Human
uccucucugcccua

SEQ ID NO: 1148088 - RNA, 15 nt, Human
uccucucugcccuaa

SEQ ID NO: 1148089 - RNA, 12 nt, Human
uccucugagccu

SEQ ID NO: 1148090 - RNA, 13 nt, Human
uccucugagccuu

SEQ ID NO: 1148091 - RNA, 17 nt, Human
uccucugagccuuggga

SEQ ID NO: 1148092 - RNA, 14 nt, Human
uccucugaggcuga

SEQ ID NO: 1148093 - RNA, 19 nt, Human
uccucuugccacugccucu

SEQ ID NO: 1148094 - RNA, 20 nt, Human
acuguacuccucccaggcgc

SEQ ID NO: 1148095 - RNA, 13 nt, Human
acuguaugaucaa

SEQ ID NO: 1148096 - RNA, 14 nt, Human
acuguaugaucaaa

SEQ ID NO: 1148097 - RNA, 15 nt, Human
acuguaugaucaaau

SEQ ID NO: 1148098 - RNA, 16 nt, Human
acuguaugaucaaaug

SEQ ID NO: 1148099 - RNA, 17 nt, Human
acuguaugaucaaaugu

SEQ ID NO: 1148100 - RNA, 18 nt, Human
acuguaugaucaaauguu

SEQ ID NO: 1148101 - RNA, 19 nt, Human
acuguaugaucaaauguuu

SEQ ID NO: 1148102 - RNA, 20 nt, Human
acuguaugaucaaauguuua

SEQ ID NO: 1148103 - RNA, 21 nt, Human
acuguaugaucaaauguuuaa

SEQ ID NO: 1148104 - RNA, 24 nt, Human
acuguaugaucaaauguuuaauca

SEQ ID NO: 1148105 - RNA, 22 nt, Human
acuguaugaucaaauguuuaau

SEQ ID NO: 1148106 - RNA, 19 nt, Human
ucggggagaggcugaggac

SEQ ID NO: 1148107 - RNA, 14 nt, Human
ucguuuaaugaaug

SEQ ID NO: 1148108 - RNA, 18 nt, Human
ucguuuaaugaaugcuua

SEQ ID NO: 1148109 - RNA, 20 nt, Human
ucguuuaaugaaugcuuaaa

SEQ ID NO: 1148110 - RNA, 13 nt, Human
ucuaaacugcccc

SEQ ID NO: 1148111 - RNA, 16 nt, Human
ucuaaacugcccccuc

SEQ ID NO: 1148112 - RNA, 22 nt, Human
ucuaaacugcccccucugcccu

SEQ ID NO: 1148113 - RNA, 23 nt, Human
ucuaaacugcccccucugcccug

SEQ ID NO: 1148114 - RNA, 20 nt, Human
acuuagcauuuucugcaucu

SEQ ID NO: 1148115 - RNA, 22 nt, Human
acuuagcauuuucugcaucucc

SEQ ID NO: 1148116 - RNA, 21 nt, Human
acuuagcauuuucugcaucuc

SEQ ID NO: 1148117 - RNA, 17 nt, Human
acuucaggcucuucucc

SEQ ID NO: 1148118 - RNA, 18 nt, Human
acuucaggcucuucuccu

SEQ ID NO: 1148119 - RNA, 20 nt, Human
acuucaggcucuucuccuuu

SEQ ID NO: 1148120 - RNA, 17 nt, Human
acuuccauaaucuggac

SEQ ID NO: 1148121 - RNA, 12 nt, Human
ucuaguguauca

SEQ ID NO: 1148122 - RNA, 13 nt, Human
ucuaguguaucaa

SEQ ID NO: 1148123 - RNA, 14 nt, Human
ucuaguguaucaaa

SEQ ID NO: 1148124 - RNA, 16 nt, Human
ucuaguguaucaaaau

SEQ ID NO: 1148125 - RNA, 22 nt, Human
ucuaguguaucaaaaugcucuu

SEQ ID NO: 1148126 - RNA, 19 nt, Human
ucuaguguaucaaaaugcu

SEQ ID NO: 1148127 - RNA, 21 nt, Human
ucuaguuccccuguuuauuca

SEQ ID NO: 1148128 - RNA, 17 nt, Human
ucuaguuccccuguuua

SEQ ID NO: 1148129 - RNA, 13 nt, Human
ucuauaauuuaaa

SEQ ID NO: 1148130 - RNA, 13 nt, Human
ucucacuccuacc

SEQ ID NO: 1148131 - RNA, 16 nt, Human
ucucacuccuaccugg

SEQ ID NO: 1148132 - RNA, 17 nt, Human
ucucacuccuaccuggu

SEQ ID NO: 1148133 - RNA, 18 nt, Human
ucucacuccuaccuggua

SEQ ID NO: 1148134 - RNA, 14 nt, Human
acuuguaugaaaga

SEQ ID NO: 1148135 - RNA, 13 nt, Human
acuugucuguuuu

SEQ ID NO: 1148136 - RNA, 12 nt, Human
acuugucuguuu

SEQ ID NO: 1148137 - RNA, 16 nt, Human
acuuguuuucugggaa

SEQ ID NO: 1148138 - RNA, 17 nt, Human
ucucgaacuccugaccu

SEQ ID NO: 1148139 - RNA, 20 nt, Human
ucucgcuauugucaccaggg

SEQ ID NO: 1148140 - RNA, 15 nt, Human
ucucggcucacugca

SEQ ID NO: 1148141 - RNA, 18 nt, Human
ucucuuguaauuuggauc

SEQ ID NO: 1148142 - RNA, 13 nt, Human
agaaaucuauuuc

SEQ ID NO: 1148143 - RNA, 12 nt, Human
ucugccugucuc

SEQ ID NO: 1148144 - RNA, 14 nt, Human
ucugccugucuccc

SEQ ID NO: 1148145 - RNA, 23 nt, Human
agaagcucccugaaguaagcaaa

SEQ ID NO: 1148146 - RNA, 15 nt, Human
ucuucaacucccugc

SEQ ID NO: 1148147 - RNA, 16 nt, Human
ucuucaacugaccagc

SEQ ID NO: 1148148 - RNA, 19 nt, Human
ucuucaacugaccagccuc

SEQ ID NO: 1148149 - RNA, 16 nt, Human
ucuucaagaucccauu

SEQ ID NO: 1148150 - RNA, 11 nt, Human
ucuuccucugc

SEQ ID NO: 1148151 - RNA, 12 nt, Human
ucuuccucugcu

SEQ ID NO: 1148152 - RNA, 14 nt, Human
ucuuccucugcuga

SEQ ID NO: 1148153 - RNA, 18 nt, Human
ucuucuggguuccuuccu

SEQ ID NO: 1148154 - RNA, 14 nt, Human
agaccccuggcuuu

SEQ ID NO: 1148155 - RNA, 18 nt, Human
ucuuucuaaugugugaau

SEQ ID NO: 1148156 - RNA, 19 nt, Human
ucuuucuaaugugugaauc

SEQ ID NO: 1148157 - RNA, 20 nt, Human
ugaaaaucuuauaauuuaaa

SEQ ID NO: 1148158 - RNA, 15 nt, Human
ugaaacgcaucuagu

SEQ ID NO: 1148159 - RNA, 16 nt, Human
agagacuccagcuggg

SEQ ID NO: 1148160 - RNA, 12 nt, Human
ugaagccuuugu

SEQ ID NO: 1148161 - RNA, 15 nt, Human
ugaagguauaucuag

SEQ ID NO: 1148162 - RNA, 14 nt, Human
ugaagucacugcac

SEQ ID NO: 1148163 - RNA, 15 nt, Human
ugaagucacugcaca

SEQ ID NO: 1148164 - RNA, 16 nt, Human
ugaagucacugcacag

SEQ ID NO: 1148165 - RNA, 21 nt, Human
ugaagucacugcacagugcau

SEQ ID NO: 1148166 - RNA, 16 nt, Human
ugaauaaagacaccua

SEQ ID NO: 1148167 - RNA, 16 nt, Human
ugaauaccuuagugca

SEQ ID NO: 1148168 - RNA, 21 nt, Human
ugaauaccuuagugcaguuau

SEQ ID NO: 1148169 - RNA, 22 nt, Human
ugaauaccuuagugcaguuauu

SEQ ID NO: 1148170 - RNA, 15 nt, Human
ugaauacuuuauaaa

SEQ ID NO: 1148171 - RNA, 22 nt, Human
ugacaaaauacuugucuguuuu

SEQ ID NO: 1148172 - RNA, 12 nt, Human
ugacaaaauguu

SEQ ID NO: 1148173 - RNA, 13 nt, Human
ugacaaaauguua

SEQ ID NO: 1148174 - RNA, 14 nt, Human
ugacaaaauguuau

SEQ ID NO: 1148175 - RNA, 15 nt, Human
ugacaaaauguuauu

SEQ ID NO: 1148176 - RNA, 20 nt, Human
ugacaaaauguuauuucccu

SEQ ID NO: 1148177 - RNA, 15 nt, Human
agaugcagugccagg

SEQ ID NO: 1148178 - RNA, 20 nt, Human
agaugcugacuguacuccuc

SEQ ID NO: 1148179 - RNA, 23 nt, Human
agaugcugacuguacuccuccca

SEQ ID NO: 1148180 - RNA, 20 nt, Human
agauuaaccuucucuguccg

SEQ ID NO: 1148181 - RNA, 21 nt, Human
ugacuccauagaccuuuucau

SEQ ID NO: 1148182 - RNA, 17 nt, Human
ugacuccauagaccuuu

SEQ ID NO: 1148183 - RNA, 18 nt, Human
agauuccagagaguggcu

SEQ ID NO: 1148184 - RNA, 19 nt, Human
agauuccagagaguggcuc

SEQ ID NO: 1148185 - RNA, 20 nt, Human
agauuucucauuugccaaua

SEQ ID NO: 1148186 - RNA, 22 nt, Human
ugaguaacugauuuguaacaag

SEQ ID NO: 1148187 - RNA, 13 nt, Human
ugaguagcuggga

SEQ ID NO: 1148188 - RNA, 19 nt, Human
ugauauuuucaacgcagcc

SEQ ID NO: 1148189 - RNA, 21 nt, Human
ugauauuuucaacgcagcccu

SEQ ID NO: 1148190 - RNA, 22 nt, Human
ugauauuuucaacgcagcccug

SEQ ID NO: 1148191 - RNA, 23 nt, Human
ugauauuuucaacgcagcccugc

SEQ ID NO: 1148192 - RNA, 13 nt, Human
ugaucaaauguuu

SEQ ID NO: 1148193 - RNA, 14 nt, Human
ugaucaaauguuua

SEQ ID NO: 1148194 - RNA, 15 nt, Human
ugaucaaauguuuaa

SEQ ID NO: 1148195 - RNA, 16 nt, Human
ugaucaaauguuuaau

SEQ ID NO: 1148196 - RNA, 17 nt, Human
ugaucaaauguuuaauc

SEQ ID NO: 1148197 - RNA, 18 nt, Human
ugaucaaauguuuaauca

SEQ ID NO: 1148198 - RNA, 22 nt, Human
ugaucaaauguuuaaucauaua

SEQ ID NO: 1148199 - RNA, 19 nt, Human
ugaucaaauguuuaaucau

SEQ ID NO: 1148200 - RNA, 20 nt, Human
agcaucacaugaacuuguaa

SEQ ID NO: 1148201 - RNA, 17 nt, Human
agcaugucgucaaagcu

SEQ ID NO: 1148202 - RNA, 20 nt, Human
agcaugucgucaaagcugaa

SEQ ID NO: 1148203 - RNA, 18 nt, Human
agccaccgugccuggcca

SEQ ID NO: 1148204 - RNA, 18 nt, Human
ugauccuuuuggagucag

SEQ ID NO: 1148205 - RNA, 13 nt, Human
ugaugaagaggag

SEQ ID NO: 1148206 - RNA, 14 nt, Human
ugaugaagaggagu

SEQ ID NO: 1148207 - RNA, 13 nt, Human
ugaugauccauua

SEQ ID NO: 1148208 - RNA, 23 nt, Human
agccacuuucaaucuucaauccu

SEQ ID NO: 1148209 - RNA, 20 nt, Human
agccacuuucaaucuucaau

SEQ ID NO: 1148210 - RNA, 13 nt, Human
agccaguaauccu

SEQ ID NO: 1148211 - RNA, 14 nt, Human
agccaguaauccug

SEQ ID NO: 1148212 - RNA, 15 nt, Human
agccaguaauccugu

SEQ ID NO: 1148213 - RNA, 22 nt, Human
agccccuaagucaacuuagcau

SEQ ID NO: 1148214 - RNA, 21 nt, Human
agcccugcuuugggcugcccu

SEQ ID NO: 1148215 - RNA, 22 nt, Human
agcccugcuuugggcugcccug

SEQ ID NO: 1148216 - RNA, 23 nt, Human
agcccugcuuugggcugcccugg

SEQ ID NO: 1148217 - RNA, 12 nt, Human
ugcacacagcac

SEQ ID NO: 1148218 - RNA, 24 nt, Human
ugcacacagcacgggggccaagga

SEQ ID NO: 1148219 - RNA, 12 nt, Human
ugcacuauaugc

SEQ ID NO: 1148220 - RNA, 14 nt, Human
ugcacuauaugcaa

SEQ ID NO: 1148221 - RNA, 15 nt, Human
ugcacuauaugcaaa

SEQ ID NO: 1148222 - RNA, 16 nt, Human
ugcacuauaugcaaac

SEQ ID NO: 1148223 - RNA, 17 nt, Human
ugcacuauaugcaaaca

SEQ ID NO: 1148224 - RNA, 18 nt, Human
ugcacuauaugcaaacag

SEQ ID NO: 1148225 - RNA, 20 nt, Human
ugcacuauaugcaaacaggg

SEQ ID NO: 1148226 - RNA, 14 nt, Human
agccguggcuuccc

SEQ ID NO: 1148227 - RNA, 21 nt, Human
agccguggcuucccgcucagc

SEQ ID NO: 1148228 - RNA, 22 nt, Human
agccguggcuucccgcucagcc

SEQ ID NO: 1148229 - RNA, 23 nt, Human
agccguggcuucccgcucagccc

SEQ ID NO: 1148230 - RNA, 19 nt, Human
agccguuuguuccccaaga

SEQ ID NO: 1148231 - RNA, 18 nt, Human
agccuccaugcugccucc

SEQ ID NO: 1148232 - RNA, 20 nt, Human
agccuccaugcugccuccag

SEQ ID NO: 1148233 - RNA, 18 nt, Human
ugcaguacuuuaccuccu

SEQ ID NO: 1148234 - RNA, 20 nt, Human
ugcauacauucuucaagauc

SEQ ID NO: 1148235 - RNA, 21 nt, Human
ugccaauaauaauaccucccu

SEQ ID NO: 1148236 - RNA, 22 nt, Human
ugccaauaauaauaccucccuu

SEQ ID NO: 1148237 - RNA, 13 nt, Human
ugccacacuucag

SEQ ID NO: 1148238 - RNA, 14 nt, Human
ugccacacuucagg

SEQ ID NO: 1148239 - RNA, 15 nt, Human
ugccacacuucaggc

SEQ ID NO: 1148240 - RNA, 16 nt, Human
ugccacacuucaggcu

SEQ ID NO: 1148241 - RNA, 22 nt, Human
ugccacacuucaggcucuucuc

SEQ ID NO: 1148242 - RNA, 23 nt, Human
ugccacacuucaggcucuucucc

SEQ ID NO: 1148243 - RNA, 19 nt, Human
agcuacuaauuuuaaaaug

SEQ ID NO: 1148244 - RNA, 16 nt, Human
agcucaucuucacugc

SEQ ID NO: 1148245 - RNA, 17 nt, Human
agcucaucuucacugca

SEQ ID NO: 1148246 - RNA, 21 nt, Human
ugcccaagaauagaugcugac

SEQ ID NO: 1148247 - RNA, 22 nt, Human
ugcccaagaauagaugcugacu

SEQ ID NO: 1148248 - RNA, 23 nt, Human
ugcccaagaauagaugcugacug

SEQ ID NO: 1148249 - RNA, 16 nt, Human
ugccuuuuaguuccug

SEQ ID NO: 1148250 - RNA, 18 nt, Human
ugccuuuuaguuccugug

SEQ ID NO: 1148251 - RNA, 13 nt, Human
ugcggccccuccc

SEQ ID NO: 1148252 - RNA, 15 nt, Human
ugcggccccuccccc

SEQ ID NO: 1148253 - RNA, 16 nt, Human
ugcggccccucccccg

SEQ ID NO: 1148254 - RNA, 18 nt, Human
ugcggccccucccccguc

SEQ ID NO: 1148255 - RNA, 14 nt, Human
ugcgggucacagga

SEQ ID NO: 1148256 - RNA, 16 nt, Human
ugcgggucacaggagg

SEQ ID NO: 1148257 - RNA, 17 nt, Human
ugcgggucacaggaggg

SEQ ID NO: 1148258 - RNA, 16 nt, Human
ugcugacuguacuccu

SEQ ID NO: 1148259 - RNA, 19 nt, Human
ugcugacuguacuccuccc

SEQ ID NO: 1148260 - RNA, 21 nt, Human
ugcugacuguacuccucccag

SEQ ID NO: 1148261 - RNA, 22 nt, Human
ugcugacuguacuccucccagg

SEQ ID NO: 1148262 - RNA, 14 nt, Human
aggaaauccagggu

SEQ ID NO: 1148263 - RNA, 15 nt, Human
aggaaauccagggug

SEQ ID NO: 1148264 - RNA, 13 nt, Human
ugcuggcugccuu

SEQ ID NO: 1148265 - RNA, 14 nt, Human
ugcuggcugccuua

SEQ ID NO: 1148266 - RNA, 20 nt, Human
ugcugggauuacagguguga

SEQ ID NO: 1148267 - RNA, 13 nt, Human
ugcugugcaaaug

SEQ ID NO: 1148268 - RNA, 17 nt, Human
aggacagccccuccucc

SEQ ID NO: 1148269 - RNA, 23 nt, Human
uggaaggggacacgugacagccg

SEQ ID NO: 1148270 - RNA, 14 nt, Human
uggagaacuagaga

SEQ ID NO: 1148271 - RNA, 21 nt, Human
uggagaagcucccugaaguaa

SEQ ID NO: 1148272 - RNA, 20 nt, Human
aggcaccuaccaccacgccc

SEQ ID NO: 1148273 - RNA, 15 nt, Human
uggauggaaggggcu

SEQ ID NO: 1148274 - RNA, 18 nt, Human
uggcacagggcaguggga

SEQ ID NO: 1148275 - RNA, 15 nt, Human
uggccagguggccac

SEQ ID NO: 1148276 - RNA, 16 nt, Human
uggccagguggccacu

SEQ ID NO: 1148277 - RNA, 17 nt, Human
uggccagguggccacuc

SEQ ID NO: 1148278 - RNA, 19 nt, Human
uggccagguggccacucca

SEQ ID NO: 1148279 - RNA, 14 nt, Human
uggcccugcccugg

SEQ ID NO: 1148280 - RNA, 14 nt, Human
ugggaguacaaaag

SEQ ID NO: 1148281 - RNA, 17 nt, Human
ugggccagaauuucaaa

SEQ ID NO: 1148282 - RNA, 18 nt, Human
ugggccagaauuucaaac

SEQ ID NO: 1148283 - RNA, 17 nt, Human
ugggcugcccuggugcu

SEQ ID NO: 1148284 - RNA, 19 nt, Human
ugggcugcccuggugcugc

SEQ ID NO: 1148285 - RNA, 20 nt, Human
ugggcugcccuggugcugcc

SEQ ID NO: 1148286 - RNA, 21 nt, Human
ugggcugcccuggugcugcca

SEQ ID NO: 1148287 - RNA, 17 nt, Human
uggggacagagcagaac

SEQ ID NO: 1148288 - RNA, 23 nt, Human
uggggcuaggaaauccagggugg

SEQ ID NO: 1148289 - RNA, 18 nt, Human
aggggccuggcagccgug

SEQ ID NO: 1148290 - RNA, 23 nt, Human
aggggccuggcagccgugccuuc

SEQ ID NO: 1148291 - RNA, 20 nt, Human
ugguagcuuuucccuucuuu

SEQ ID NO: 1148292 - RNA, 21 nt, Human
ugguagcuuuucccuucuuuu

SEQ ID NO: 1148293 - RNA, 22 nt, Human
uggucacaggacucugccuccu

SEQ ID NO: 1148294 - RNA, 23 nt, Human
uggucacaggacucugccuccuc

SEQ ID NO: 1148295 - RNA, 19 nt, Human
uggucuaucuuugagcgcc

SEQ ID NO: 1148296 - RNA, 15 nt, Human
uggucucgaacuccu

SEQ ID NO: 1148297 - RNA, 15 nt, Human
agguacuguaugauc

SEQ ID NO: 1148298 - RNA, 19 nt, Human
agguacuguaugaucaaau

SEQ ID NO: 1148299 - RNA, 21 nt, Human
agguacuguaugaucaaaugu

SEQ ID NO: 1148300 - RNA, 23 nt, Human
agguacuguaugaucaaauguuu

SEQ ID NO: 1148301 - RNA, 22 nt, Human
agguacuguaugaucaaauguu

SEQ ID NO: 1148302 - RNA, 19 nt, Human
agguauaaguggugugugu

SEQ ID NO: 1148303 - RNA, 20 nt, Human
agguauaaguggugugugua

SEQ ID NO: 1148304 - RNA, 18 nt, Human
aggucaccuuuauucugg

SEQ ID NO: 1148305 - RNA, 19 nt, Human
aggucaccuuuauucuggc

SEQ ID NO: 1148306 - RNA, 14 nt, Human
agguggccacucca

SEQ ID NO: 1148307 - RNA, 17 nt, Human
agguggccacuccagac

SEQ ID NO: 1148308 - RNA, 12 nt, Human
agguugauaaau

SEQ ID NO: 1148309 - RNA, 22 nt, Human
agguugauaaaucauuuuaugu

SEQ ID NO: 1148310 - RNA, 20 nt, Human
agguugauaaaucauuuuau

SEQ ID NO: 1148311 - RNA, 18 nt, Human
uguaccaaccauccaauu

SEQ ID NO: 1148312 - RNA, 12 nt, Human
aguaaaaauaaa

SEQ ID NO: 1148313 - RNA, 15 nt, Human
aguaaaaauaaaauu

SEQ ID NO: 1148314 - RNA, 16 nt, Human
aguaaaacaaacaaua

SEQ ID NO: 1148315 - RNA, 20 nt, Human
aguaaaacaaacaauaccug

SEQ ID NO: 1148316 - RNA, 19 nt, Human
aguaaaacaaacaauaccu

SEQ ID NO: 1148317 - RNA, 22 nt, Human
uguagguuauuaugauuagcuu

SEQ ID NO: 1148318 - RNA, 15 nt, Human
ugucaagauucagcu

SEQ ID NO: 1148319 - RNA, 16 nt, Human
ugucaagauucagcua

SEQ ID NO: 1148320 - RNA, 12 nt, Human
aguaguuaucau

SEQ ID NO: 1148321 - RNA, 13 nt, Human
aguaguuaucaug

SEQ ID NO: 1148322 - RNA, 14 nt, Human
aguaguuaucaugu

SEQ ID NO: 1148323 - RNA, 15 nt, Human
aguaguuaucauguu

SEQ ID NO: 1148324 - RNA, 16 nt, Human
aguaguuaucauguua

SEQ ID NO: 1148325 - RNA, 17 nt, Human
aguaguuaucauguuag

SEQ ID NO: 1148326 - RNA, 23 nt, Human
aguaguuaucauguuaguaauac

SEQ ID NO: 1148327 - RNA, 13 nt, Human
agucacugcacag

SEQ ID NO: 1148328 - RNA, 15 nt, Human
ugucgcccaggcugg

SEQ ID NO: 1148329 - RNA, 16 nt, Human
ugucgcccaggcugga

SEQ ID NO: 1148330 - RNA, 13 nt, Human
ugucgccucugca

SEQ ID NO: 1148331 - RNA, 16 nt, Human
agucagacagaugugg

SEQ ID NO: 1148332 - RNA, 12 nt, Human
ugugccucugcc

SEQ ID NO: 1148333 - RNA, 13 nt, Human
ugugccucugccu

SEQ ID NO: 1148334 - RNA, 15 nt, Human
agugcaucucagccc

SEQ ID NO: 1148335 - RNA, 16 nt, Human
agugcaucucagccca

SEQ ID NO: 1148336 - RNA, 17 nt, Human
agugcaucucagcccac

SEQ ID NO: 1148337 - RNA, 20 nt, Human
agugcugggauuacaggcgu

SEQ ID NO: 1148338 - RNA, 20 nt, Human
agugcugggauuacaggugu

SEQ ID NO: 1148339 - RNA, 17 nt, Human
uguggugaaaagcaggu

SEQ ID NO: 1148340 - RNA, 14 nt, Human
uguuaucuguuuga

SEQ ID NO: 1148341 - RNA, 17 nt, Human
uguuaucuguuugagaa

SEQ ID NO: 1148342 - RNA, 19 nt, Human
uguuaucuguuugagaaag

SEQ ID NO: 1148343 - RNA, 18 nt, Human
uguuaucuguuugagaaa

SEQ ID NO: 1148344 - RNA, 20 nt, Human
uguuauuucccuacauuaaa

SEQ ID NO: 1148345 - RNA, 21 nt, Human
uguuauuucccuacauuaaac

SEQ ID NO: 1148346 - RNA, 23 nt, Human
uguuauuucccuacauuaaacau

SEQ ID NO: 1148347 - RNA, 21 nt, Human
aguuacucuucaguuaagccu

SEQ ID NO: 1148348 - RNA, 12 nt, Human
aguuaucauguu

SEQ ID NO: 1148349 - RNA, 13 nt, Human
aguuaucauguua

SEQ ID NO: 1148350 - RNA, 14 nt, Human
aguuaucauguuag

SEQ ID NO: 1148351 - RNA, 15 nt, Human
aguuaucauguuagu

SEQ ID NO: 1148352 - RNA, 17 nt, Human
aguuaucauguuaguaa

SEQ ID NO: 1148353 - RNA, 18 nt, Human
aguuaucauguuaguaau

SEQ ID NO: 1148354 - RNA, 22 nt, Human
aguuaucauguuaguaauaccu

SEQ ID NO: 1148355 - RNA, 19 nt, Human
aguuaucauguuaguaaua

SEQ ID NO: 1148356 - RNA, 15 nt, Human
aguucccuacuuccu

SEQ ID NO: 1148357 - RNA, 18 nt, Human
aguuccccuguuuauuca

SEQ ID NO: 1148358 - RNA, 19 nt, Human
aguuccccuguuuauucau

SEQ ID NO: 1148359 - RNA, 20 nt, Human
aguuccccuguuuauucaua

SEQ ID NO: 1148360 - RNA, 19 nt, Human
aguucggugagcuacaaau

SEQ ID NO: 1148361 - RNA, 20 nt, Human
aguucggugagcuacaaaug

SEQ ID NO: 1148362 - RNA, 14 nt, Human
uguuggucuguacu

SEQ ID NO: 1148363 - RNA, 15 nt, Human
uguuggucuguacug

SEQ ID NO: 1148364 - RNA, 16 nt, Human
uguuggucuguacuga

SEQ ID NO: 1148365 - RNA, 21 nt, Human
uguuguuaucuguuugagaaa

SEQ ID NO: 1148366 - RNA, 14 nt, Human
uguuguuaugaugu

SEQ ID NO: 1148367 - RNA, 15 nt, Human
uguuguuaugaugug

SEQ ID NO: 1148368 - RNA, 19 nt, Human
uguuguuaugaugugcuua

SEQ ID NO: 1148369 - RNA, 17 nt, Human
uguuguuaugaugugcu

SEQ ID NO: 1148370 - RNA, 13 nt, Human
uguuuauucauau

SEQ ID NO: 1148371 - RNA, 16 nt, Human
uguuuauucauaugca

SEQ ID NO: 1148372 - RNA, 17 nt, Human
uguuuauucauaugcau

SEQ ID NO: 1148373 - RNA, 18 nt, Human
uguuuauucauaugcaua

SEQ ID NO: 1148374 - RNA, 19 nt, Human
uguuuauucauaugcauau

SEQ ID NO: 1148375 - RNA, 14 nt, Human
aguuuaaauuguaa

SEQ ID NO: 1148376 - RNA, 17 nt, Human
aguuuaaauuguaauag

SEQ ID NO: 1148377 - RNA, 16 nt, Human
uuaaacagauguccau

SEQ ID NO: 1148378 - RNA, 13 nt, Human
uuaaacaguugca

SEQ ID NO: 1148379 - RNA, 17 nt, Human
uuaaacaguugcacagc

SEQ ID NO: 1148380 - RNA, 18 nt, Human
uuaaacaguugcacagca

SEQ ID NO: 1148381 - RNA, 19 nt, Human
uuaaacaguugcacagcau

SEQ ID NO: 1148382 - RNA, 23 nt, Human
uuaaacaguugcacagcaucuca

SEQ ID NO: 1148383 - RNA, 21 nt, Human
uuaaacaguugcacagcaucu

SEQ ID NO: 1148384 - RNA, 22 nt, Human
uuaauauuuauaggucacuuug

SEQ ID NO: 1148385 - RNA, 21 nt, Human
uuaaucugggccagaauuuca

SEQ ID NO: 1148386 - RNA, 13 nt, Human
auaaauaaaaaua

SEQ ID NO: 1148387 - RNA, 14 nt, Human
auaaauaaaaauaa

SEQ ID NO: 1148388 - RNA, 14 nt, Human
auaaaucauuuuau

SEQ ID NO: 1148389 - RNA, 15 nt, Human
auaaaucauuuuaug

SEQ ID NO: 1148390 - RNA, 16 nt, Human
auaaaucauuuuaugu

SEQ ID NO: 1148391 - RNA, 18 nt, Human
auaaaucauuuuauguca

SEQ ID NO: 1148392 - RNA, 19 nt, Human
auaaaucauuuuaugucaa

SEQ ID NO: 1148393 - RNA, 22 nt, Human
auaacgauaaaagacagugaaa

SEQ ID NO: 1148394 - RNA, 24 nt, Human
uuacaggcgugagccaccgugccu

SEQ ID NO: 1148395 - RNA, 16 nt, Human
uuacaggcuccugcca

SEQ ID NO: 1148396 - RNA, 18 nt, Human
uuacaggcuccugccacc

SEQ ID NO: 1148397 - RNA, 19 nt, Human
uuacccauuuguucauauu

SEQ ID NO: 1148398 - RNA, 17 nt, Human
uuacccauuuguucaua

SEQ ID NO: 1148399 - RNA, 23 nt, Human
uuacucuucaguuaagccuuugg

SEQ ID NO: 1148400 - RNA, 17 nt, Human
uuagaaauugcauuucc

SEQ ID NO: 1148401 - RNA, 18 nt, Human
auaauccuaaacauauga

SEQ ID NO: 1148402 - RNA, 18 nt, Human
auaaucuggacuccucug

SEQ ID NO: 1148403 - RNA, 19 nt, Human
auaaucuggacuccucugu

SEQ ID NO: 1148404 - RNA, 20 nt, Human
auaaucuggacuccucuguc

SEQ ID NO: 1148405 - RNA, 22 nt, Human
auaaucuggacuccucugucca

SEQ ID NO: 1148406 - RNA, 12 nt, Human
uuagcaccaggg

SEQ ID NO: 1148407 - RNA, 20 nt, Human
uuagcauuuucugcaucucc

SEQ ID NO: 1148408 - RNA, 15 nt, Human
uuagccaguaauccu

SEQ ID NO: 1148409 - RNA, 23 nt, Human
uuauuuuuuaaagaaaucuauuu

SEQ ID NO: 1148410 - RNA, 17 nt, Human
uucaagaucccauuuga

SEQ ID NO: 1148411 - RNA, 11 nt, Human
uucaagauucc

SEQ ID NO: 1148412 - RNA, 20 nt, Human
uucaagucuaccaauuauaa

SEQ ID NO: 1148413 - RNA, 17 nt, Human
uucaagugauucucaug

SEQ ID NO: 1148414 - RNA, 17 nt, Human
auaggcguaacuaauuu

SEQ ID NO: 1148415 - RNA, 21 nt, Human
auagugaggcaucgcaaugua

SEQ ID NO: 1148416 - RNA, 14 nt, Human
auagugcuaacaug

SEQ ID NO: 1148417 - RNA, 19 nt, Human
auagugcuaacaugaagac

SEQ ID NO: 1148418 - RNA, 22 nt, Human
auagugcuaacaugaagaccuu

SEQ ID NO: 1148419 - RNA, 21 nt, Human
auagugcuaacaugaagaccu

SEQ ID NO: 1148420 - RNA, 15 nt, Human
auauaaauagaaugu

SEQ ID NO: 1148421 - RNA, 19 nt, Human
auauaaauagaauguaaau

SEQ ID NO: 1148422 - RNA, 21 nt, Human
auauaaauagaauguaaaugu

SEQ ID NO: 1148423 - RNA, 22 nt, Human
auauaaauagaauguaaauguc

SEQ ID NO: 1148424 - RNA, 12 nt, Human
uucacugugcug

SEQ ID NO: 1148425 - RNA, 18 nt, Human
uucacugugcuguuguua

SEQ ID NO: 1148426 - RNA, 15 nt, Human
uucacuuacagcacc

SEQ ID NO: 1148427 - RNA, 13 nt, Human
uucacugugcugu

SEQ ID NO: 1148428 - RNA, 12 nt, Human
uucacuucacug

SEQ ID NO: 1148429 - RNA, 14 nt, Human
uucacuucacugug

SEQ ID NO: 1148430 - RNA, 15 nt, Human
uucacuucacugugc

SEQ ID NO: 1148431 - RNA, 16 nt, Human
uucauauuaagaauga

SEQ ID NO: 1148432 - RNA, 22 nt, Human
uucauauuaagaaugaucugau

SEQ ID NO: 1148433 - RNA, 17 nt, Human
auaucuagguuuaugac

SEQ ID NO: 1148434 - RNA, 18 nt, Human
auaucuagguuuaugaca

SEQ ID NO: 1148435 - RNA, 19 nt, Human
auaucuagguuuaugacag

SEQ ID NO: 1148436 - RNA, 21 nt, Human
auaucuagguuuaugacagua

SEQ ID NO: 1148437 - RNA, 23 nt, Human
auaucuagguuuaugacaguaau

SEQ ID NO: 1148438 - RNA, 22 nt, Human
auaucuagguuuaugacaguaa

SEQ ID NO: 1148439 - RNA, 17 nt, Human
uuccaguucuucgacug

SEQ ID NO: 1148440 - RNA, 19 nt, Human
uuccauaaucuggacuccu

SEQ ID NO: 1148441 - RNA, 22 nt, Human
uuccauaaucuggacuccucug

SEQ ID NO: 1148442 - RNA, 23 nt, Human
uuccauaaucuggacuccucugu

SEQ ID NO: 1148443 - RNA, 14 nt, Human
uuccccuguucacu

SEQ ID NO: 1148444 - RNA, 17 nt, Human
uuccccuguucacucua

SEQ ID NO: 1148445 - RNA, 18 nt, Human
uuccccuguuuauucaua

SEQ ID NO: 1148446 - RNA, 19 nt, Human
uuccccuguuuauucauau

SEQ ID NO: 1148447 - RNA, 22 nt, Human
uuccccuuccuaauuccacagc

SEQ ID NO: 1148448 - RNA, 14 nt, Human
uucccuacuuccug

SEQ ID NO: 1148449 - RNA, 16 nt, Human
uucccuacuuccugug

SEQ ID NO: 1148450 - RNA, 17 nt, Human
uucccuacuuccuguga

SEQ ID NO: 1148451 - RNA, 12 nt, Human
uuccucuccacu

SEQ ID NO: 1148452 - RNA, 13 nt, Human
uuccucuccacug

SEQ ID NO: 1148453 - RNA, 14 nt, Human
uuccucuccacugc

SEQ ID NO: 1148454 - RNA, 15 nt, Human
uuccucuccacugcc

SEQ ID NO: 1148455 - RNA, 16 nt, Human
uuccucuccacugccu

SEQ ID NO: 1148456 - RNA, 20 nt, Human
uuccuucaaagcaaaugucu

SEQ ID NO: 1148457 - RNA, 12 nt, Human
aucaaauguuua

SEQ ID NO: 1148458 - RNA, 13 nt, Human
aucaaauguuuaa

SEQ ID NO: 1148459 - RNA, 14 nt, Human
aucaaauguuuaau

SEQ ID NO: 1148460 - RNA, 15 nt, Human
aucaaauguuuaauc

SEQ ID NO: 1148461 - RNA, 16 nt, Human
aucaaauguuuaauca

SEQ ID NO: 1148462 - RNA, 17 nt, Human
aucaaauguuuaaucau

SEQ ID NO: 1148463 - RNA, 21 nt, Human
aucaaauguuuaaucauauaa

SEQ ID NO: 1148464 - RNA, 18 nt, Human
aucaaauguuuaaucaua

SEQ ID NO: 1148465 - RNA, 22 nt, Human
aucaaguuggcuucuaaucaaa

SEQ ID NO: 1148466 - RNA, 23 nt, Human
aucaaguuggcuucuaaucaaag

SEQ ID NO: 1148467 - RNA, 16 nt, Human
uucgacuguuguuauc

SEQ ID NO: 1148468 - RNA, 21 nt, Human
uucgacuguuguuaucuguuu

SEQ ID NO: 1148469 - RNA, 20 nt, Human
uucgauacaccgggccugga

SEQ ID NO: 1148470 - RNA, 13 nt, Human
uucuauaauuuaa

SEQ ID NO: 1148471 - RNA, 14 nt, Human
uucuauaauuuaaa

SEQ ID NO: 1148472 - RNA, 13 nt, Human
uucucagcuccca

SEQ ID NO: 1148473 - RNA, 12 nt, Human
uucuccugccuc

SEQ ID NO: 1148474 - RNA, 13 nt, Human
uucuccugccuca

SEQ ID NO: 1148475 - RNA, 14 nt, Human
uucuccugccucag

SEQ ID NO: 1148476 - RNA, 15 nt, Human
uucugcacacagcac

SEQ ID NO: 1148477 - RNA, 16 nt, Human
uucugcacuauaugca

SEQ ID NO: 1148478 - RNA, 22 nt, Human
uucugguugaugccugugaacu

SEQ ID NO: 1148479 - RNA, 15 nt, Human
aucccaccaacccuc

SEQ ID NO: 1148480 - RNA, 15 nt, Human
uucuguugcugccuc

SEQ ID NO: 1148481 - RNA, 16 nt, Human
uucuguugcugccuca

SEQ ID NO: 1148482 - RNA, 17 nt, Human
uucuguugcugccucau

SEQ ID NO: 1148483 - RNA, 21 nt, Human
uucuuaauguacauagugcua

SEQ ID NO: 1148484 - RNA, 14 nt, Human
uucuuaauguacau

SEQ ID NO: 1148485 - RNA, 15 nt, Human
uucuuaauguacaua

SEQ ID NO: 1148486 - RNA, 11 nt, Human
uucuuccucug

SEQ ID NO: 1148487 - RNA, 12 nt, Human
uucuuccucugc

SEQ ID NO: 1148488 - RNA, 13 nt, Human
uucuuccucugcu

SEQ ID NO: 1148489 - RNA, 16 nt, Human
uucuucgacuguuguu

SEQ ID NO: 1148490 - RNA, 19 nt, Human
uucuucgacuguuguuauc

SEQ ID NO: 1148491 - RNA, 13 nt, Human
uucuuucuuccuc

SEQ ID NO: 1148492 - RNA, 15 nt, Human
uucuuucuuccucug

SEQ ID NO: 1148493 - RNA, 22 nt, Human
uucuuuuuacccauuuguucau

SEQ ID NO: 1148494 - RNA, 16 nt, Human
uugaaaguuuacagga

SEQ ID NO: 1148495 - RNA, 12 nt, Human
auccuaaugaau

SEQ ID NO: 1148496 - RNA, 13 nt, Human
auccuaaugaaug

SEQ ID NO: 1148497 - RNA, 19 nt, Human
auccuaaugaaugcauaaa

SEQ ID NO: 1148498 - RNA, 14 nt, Human
auccuacaagacac

SEQ ID NO: 1148499 - RNA, 11 nt, Human
aucucagccca

SEQ ID NO: 1148500 - RNA, 16 nt, Human
aucucagcucaucuuc

SEQ ID NO: 1148501 - RNA, 12 nt, Human
aucucagcucau

SEQ ID NO: 1148502 - RNA, 19 nt, Human
aucucuucuggguuccuuc

SEQ ID NO: 1148503 - RNA, 23 nt, Human
uugauggugaugaaauguaaaua

SEQ ID NO: 1148504 - RNA, 21 nt, Human
uugauguggugaaaagcaggu

SEQ ID NO: 1148505 - RNA, 15 nt, Human
uugcacagcaucuca

SEQ ID NO: 1148506 - RNA, 18 nt, Human
uugcacagcaucucagcu

SEQ ID NO: 1148507 - RNA, 19 nt, Human
uugcacagcaucucagcuc

SEQ ID NO: 1148508 - RNA, 18 nt, Human
aucugaugcaagcaagaa

SEQ ID NO: 1148509 - RNA, 23 nt, Human
uuggaucucuucuuaauguacau

SEQ ID NO: 1148510 - RNA, 12 nt, Human
augaaugcuuaa

SEQ ID NO: 1148511 - RNA, 15 nt, Human
augaaugcuuaaaga

SEQ ID NO: 1148512 - RNA, 18 nt, Human
uugggccccagaggcugg

SEQ ID NO: 1148513 - RNA, 15 nt, Human
augaccacacuccag

SEQ ID NO: 1148514 - RNA, 18 nt, Human
uuguggguuuuuauuucc

SEQ ID NO: 1148515 - RNA, 20 nt, Human
uuguggguuuuuauuuccua

SEQ ID NO: 1148516 - RNA, 18 nt, Human
uuguuguagagaaaacau

SEQ ID NO: 1148517 - RNA, 17 nt, Human
augauuucagcucacug

SEQ ID NO: 1148518 - RNA, 19 nt, Human
augauuucagcucacugca

SEQ ID NO: 1148519 - RNA, 13 nt, Human
augauuucaugua

SEQ ID NO: 1148520 - RNA, 16 nt, Human
augauuucauguacug

SEQ ID NO: 1148521 - RNA, 14 nt, Human
augauuucauguac

SEQ ID NO: 1148522 - RNA, 16 nt, Human
uuuaaugaaugcuuaa

SEQ ID NO: 1148523 - RNA, 22 nt, Human
uuuaaugaaugcuuaaagaauu

SEQ ID NO: 1148524 - RNA, 13 nt, Human
augcagugccagg

SEQ ID NO: 1148525 - RNA, 18 nt, Human
augccccgucccccucug

SEQ ID NO: 1148526 - RNA, 24 nt, Human
uuuauggugccuaguauugacaaa

SEQ ID NO: 1148527 - RNA, 19 nt, Human
uuuauggugccuaguauug

SEQ ID NO: 1148528 - RNA, 14 nt, Human
uuucacugcuggcu

SEQ ID NO: 1148529 - RNA, 17 nt, Human
uuucacugcuggcugcc

SEQ ID NO: 1148530 - RNA, 18 nt, Human
uuucacugcuggcugccu

SEQ ID NO: 1148531 - RNA, 20 nt, Human
uuucacugcuggcugccuua

SEQ ID NO: 1148532 - RNA, 22 nt, Human
uuucacugcuggcugccuuaga

SEQ ID NO: 1148533 - RNA, 24 nt, Human
uuucacugcuggcugccuuagaac

SEQ ID NO: 1148534 - RNA, 20 nt, Human
uuucaucauucacuucacug

SEQ ID NO: 1148535 - RNA, 21 nt, Human
uuucaucauucacuucacugu

SEQ ID NO: 1148536 - RNA, 22 nt, Human
uuucaucauucacuucacugug

SEQ ID NO: 1148537 - RNA, 24 nt, Human
uuucaucauucacuucacugugcu

SEQ ID NO: 1148538 - RNA, 16 nt, Human
uuucauguacugcauu

SEQ ID NO: 1148539 - RNA, 20 nt, Human
uuucauguacugcauuauuu

SEQ ID NO: 1148540 - RNA, 22 nt, Human
uuucauguacugcauuauuuga

SEQ ID NO: 1148541 - RNA, 15 nt, Human
uuucccaugauuuca

SEQ ID NO: 1148542 - RNA, 18 nt, Human
uuucccaugauuucaugu

SEQ ID NO: 1148543 - RNA, 21 nt, Human
uuucccaugauuucauguacu

SEQ ID NO: 1148544 - RNA, 19 nt, Human
auggcaaggacugcaggga

SEQ ID NO: 1148545 - RNA, 22 nt, Human
auggcacaaucucggcucacug

SEQ ID NO: 1148546 - RNA, 16 nt, Human
auggccagguggccac

SEQ ID NO: 1148547 - RNA, 22 nt, Human
auggccagguggccacuccaga

SEQ ID NO: 1148548 - RNA, 13 nt, Human
uuugcucauauuu

SEQ ID NO: 1148549 - RNA, 16 nt, Human
uuugcucauauuuccc

SEQ ID NO: 1148550 - RNA, 17 nt, Human
uuugcucauauuuccca

SEQ ID NO: 1148551 - RNA, 20 nt, Human
auguaguaugcuaugauuaa

SEQ ID NO: 1148552 - RNA, 20 nt, Human
augucccaacuuguaaaaau

SEQ ID NO: 1148553 - RNA, 18 nt, Human
auguccaucagaugacaa

SEQ ID NO: 1148554 - RNA, 24 nt, Human
augucccuaccgagucucuucucc

SEQ ID NO: 1148555 - RNA, 13 nt, Human
uuuguaaauuguc

SEQ ID NO: 1148556 - RNA, 16 nt, Human
uuugugagcaggcugu

SEQ ID NO: 1148557 - RNA, 16 nt, Human
uuuuaaaacacuucca

SEQ ID NO: 1148558 - RNA, 22 nt, Human
uuuuaaaacacuuccauaaucu

SEQ ID NO: 1148559 - RNA, 20 nt, Human
uuuuaaggguuuguggaaaa

SEQ ID NO: 1148560 - RNA, 23 nt, Human
uuuuaaggguuuguggaaaauga

SEQ ID NO: 1148561 - RNA, 15 nt, Human
auguuaguaauaccu

SEQ ID NO: 1148562 - RNA, 16 nt, Human
auguuaguaauaccuc

SEQ ID NO: 1148563 - RNA, 21 nt, Human
auguuaguaauaccucuaaua

SEQ ID NO: 1148564 - RNA, 20 nt, Human
auguuaguaauaccucuaau

SEQ ID NO: 1148565 - RNA, 16 nt, Human
auguugaagccuuugu

SEQ ID NO: 1148566 - RNA, 16 nt, Human
auguuggccaggcugc

SEQ ID NO: 1148567 - RNA, 16 nt, Human
auguuggccaggcugg

SEQ ID NO: 1148568 - RNA, 18 nt, Human
uuuuauggugccuaguau

SEQ ID NO: 1148569 - RNA, 23 nt, Human
uuuuauggugccuaguauugaca

SEQ ID NO: 1148570 - RNA, 23 nt, Human
auuaagaaugaucugauugaccg

SEQ ID NO: 1148571 - RNA, 14 nt, Human
auuaagaaugaucu

SEQ ID NO: 1148572 - RNA, 15 nt, Human
auuaagaaugaucug

SEQ ID NO: 1148573 - RNA, 16 nt, Human
auuaagaaugaucuga

SEQ ID NO: 1148574 - RNA, 23 nt, Human
auuauaagggcaaauuggagaaa

SEQ ID NO: 1148575 - RNA, 18 nt, Human
auuauaagggcaaauugg

SEQ ID NO: 1148576 - RNA, 12 nt, Human
auuauagcucua

SEQ ID NO: 1148577 - RNA, 13 nt, Human
auuauagcucuaa

SEQ ID NO: 1148578 - RNA, 15 nt, Human
auuauagcucuaaug

SEQ ID NO: 1148579 - RNA, 16 nt, Human
auuauagcucuaaugu

SEQ ID NO: 1148580 - RNA, 17 nt, Human
auuauagcucuaauguu

SEQ ID NO: 1148581 - RNA, 18 nt, Human
auuauagcucuaauguuu

SEQ ID NO: 1148582 - RNA, 19 nt, Human
auuauagcucuaauguuug

SEQ ID NO: 1148583 - RNA, 21 nt, Human
auuauagcucuaauguuugca

SEQ ID NO: 1148584 - RNA, 22 nt, Human
auuauagcucuaauguuugcau

SEQ ID NO: 1148585 - RNA, 23 nt, Human
auuauagcucuaauguuugcaua

SEQ ID NO: 1148586 - RNA, 16 nt, Human
auuauauuuacaaaug

SEQ ID NO: 1148587 - RNA, 17 nt, Human
auuauauuuacaaaugg

SEQ ID NO: 1148588 - RNA, 16 nt, Human
auucaaaaugauguau

SEQ ID NO: 1148589 - RNA, 21 nt, Human
auugaccguguuggucuguac

SEQ ID NO: 1148590 - RNA, 17 nt, Human
auugcauuuccugacag

SEQ ID NO: 1148591 - RNA, 14 nt, Human
auuguauuacaaau

SEQ ID NO: 1148592 - RNA, 15 nt, Human
auuguauuacaaauc

SEQ ID NO: 1148593 - RNA, 13 nt, Human
auugugcuagugc

SEQ ID NO: 1148594 - RNA, 11 nt, Human
auuuaaacaga

SEQ ID NO: 1148595 - RNA, 12 nt, Human
auuuaaacagau

SEQ ID NO: 1148596 - RNA, 18 nt, Human
auuuaaacagauguccau

SEQ ID NO: 1148597 - RNA, 16 nt, Human
auuuacaaaugggaaa

SEQ ID NO: 1148598 - RNA, 19 nt, Human
auuuacccaacucuguaca

SEQ ID NO: 1148599 - RNA, 21 nt, Human
caaaauacuugucuguuuuaa

SEQ ID NO: 1148600 - RNA, 20 nt, Human
caaaauacuugucuguuuua

SEQ ID NO: 1148601 - RNA, 16 nt, Human
caaaaucaguuuuccu

SEQ ID NO: 1148602 - RNA, 12 nt, Human
caaaaucaguuu

SEQ ID NO: 1148603 - RNA, 21 nt, Human
caaaaugagcccuguccugcc

SEQ ID NO: 1148604 - RNA, 13 nt, Human
caaacaauaccug

SEQ ID NO: 1148605 - RNA, 15 nt, Human
caaacaauaccugaa

SEQ ID NO: 1148606 - RNA, 22 nt, Human
caaacaauaccugaaugcucug

SEQ ID NO: 1148607 - RNA, 18 nt, Human
caaagugcugggauuaca

SEQ ID NO: 1148608 - RNA, 20 nt, Human
caaaguucccuacuuccugu

SEQ ID NO: 1148609 - RNA, 21 nt, Human
caaaguucccuacuuccugug

SEQ ID NO: 1148610 - RNA, 15 nt, Human
caaauuuuaucugcc

SEQ ID NO: 1148611 - RNA, 18 nt, Human
caaccugcucuccucuug

SEQ ID NO: 1148612 - RNA, 21 nt, Human
caaccugcucuccucuugcca

SEQ ID NO: 1148613 - RNA, 23 nt, Human
caaccugcucuccucuugccacu

SEQ ID NO: 1148614 - RNA, 16 nt, Human
caaccuggucacagga

SEQ ID NO: 1148615 - RNA, 17 nt, Human
caaccuucuguggcuca

SEQ ID NO: 1148616 - RNA, 19 nt, Human
caaccuucuguggcucaca

SEQ ID NO: 1148617 - RNA, 20 nt, Human
caaccuucuguggcucacag

SEQ ID NO: 1148618 - RNA, 12 nt, Human
caacuugggaac

SEQ ID NO: 1148619 - RNA, 16 nt, Human
caacuuguaaaugugg

SEQ ID NO: 1148620 - RNA, 17 nt, Human
caagagcuuaacagugu

SEQ ID NO: 1148621 - RNA, 23 nt, Human
caagggaauuucuucaacucccu

SEQ ID NO: 1148622 - RNA, 18 nt, Human
caaggaaaaaauaacaau

SEQ ID NO: 1148623 - RNA, 20 nt, Human
caaggaaaaaauaacaauga

SEQ ID NO: 1148624 - RNA, 14 nt, Human
caaggagccaaaca

SEQ ID NO: 1148625 - RNA, 18 nt, Human
caauaauaauaccucccu

SEQ ID NO: 1148626 - RNA, 19 nt, Human
caauaccugaaugcucugu

SEQ ID NO: 1148627 - RNA, 17 nt, Human
caauaccugaaugcucu

SEQ ID NO: 1148628 - RNA, 16 nt, Human
caauuagcuuauguua

SEQ ID NO: 1148629 - RNA, 15 nt, Human
cacaaguguaaugaa

SEQ ID NO: 1148630 - RNA, 17 nt, Human
cacaaguguaaugaaua

SEQ ID NO: 1148631 - RNA, 14 nt, Human
cacacuccagcugg

SEQ ID NO: 1148632 - RNA, 16 nt, Human
cacagauuugagcuca

SEQ ID NO: 1148633 - RNA, 17 nt, Human
cacagauuugagcucag

SEQ ID NO: 1148634 - RNA, 18 nt, Human
cacagauuugagcucagc

SEQ ID NO: 1148635 - RNA, 22 nt, Human
cacagauuugagcucagcccug

SEQ ID NO: 1148636 - RNA, 12 nt, Human
cacagcugcuca

SEQ ID NO: 1148637 - RNA, 22 nt, Human
cacagcugcucaauaaaguaca

SEQ ID NO: 1148638 - RNA, 16 nt, Human
cacaggcccuuccucu

SEQ ID NO: 1148639 - RNA, 17 nt, Human
cacaggcccuuccucuc

SEQ ID NO: 1148640 - RNA, 18 nt, Human
cacaggcccuuccucucc

SEQ ID NO: 1148641 - RNA, 19 nt, Human
cacaggcccuuccucucca

SEQ ID NO: 1148642 - RNA, 21 nt, Human
cacaggcccuuccucuccacu

SEQ ID NO: 1148643 - RNA, 22 nt, Human
cacaggcccuuccucuccacug

SEQ ID NO: 1148644 - RNA, 18 nt, Human
cacagugcaucucagccc

SEQ ID NO: 1148645 - RNA, 19 nt, Human
cacagugcaucucagccca

SEQ ID NO: 1148646 - RNA, 11 nt, Human
cagugggaacu

SEQ ID NO: 1148647 - RNA, 16 nt, Human
cagugggacagggcau

SEQ ID NO: 1148648 - RNA, 14 nt, Human
caguguuagcuuag

SEQ ID NO: 1148649 - RNA, 13 nt, Human
caguguuagcuua

SEQ ID NO: 1148650 - RNA, 14 nt, Human
caguuaagccuuug

SEQ ID NO: 1148651 - RNA, 15 nt, Human
caguuaagccuuugg

SEQ ID NO: 1148652 - RNA, 17 nt, Human
caguuaagccuuuggaa

SEQ ID NO: 1148653 - RNA, 20 nt, Human
caguuaagccuuuggaaaca

SEQ ID NO: 1148654 - RNA, 12 nt, Human
caguuacacaug

SEQ ID NO: 1148655 - RNA, 22 nt, Human
caguucggugagcuacaaaugc

SEQ ID NO: 1148656 - RNA, 18 nt, Human
caguucuucgacuguugu

SEQ ID NO: 1148657 - RNA, 19 nt, Human
caguucuucgacuguuguu

SEQ ID NO: 1148658 - RNA, 12 nt, Human
caguugcacagc

SEQ ID NO: 1148659 - RNA, 13 nt, Human
caguugcacagca

SEQ ID NO: 1148660 - RNA, 15 nt, Human
caguugcacagcauc

SEQ ID NO: 1148661 - RNA, 16 nt, Human
caguugcacagcaucu

SEQ ID NO: 1148662 - RNA, 17 nt, Human
caguugcacagcaucuc

SEQ ID NO: 1148663 - RNA, 18 nt, Human
caguugcacagcaucuca

SEQ ID NO: 1148664 - RNA, 21 nt, Human
caguugcacagcaucucagcu

SEQ ID NO: 1148665 - RNA, 22 nt, Human
caguugcacagcaucucagcuc

SEQ ID NO: 1148666 - RNA, 19 nt, Human
caguugcugcuucaauuua

SEQ ID NO: 1148667 - RNA, 18 nt, Human
caguugcugcuucaauuu

SEQ ID NO: 1148668 - RNA, 17 nt, Human
cauaacuaauacagcug

SEQ ID NO: 1148669 - RNA, 22 nt, Human
cauaacuaauacagcugagcua

SEQ ID NO: 1148670 - RNA, 19 nt, Human
cauaaucuggacuccucug

SEQ ID NO: 1148671 - RNA, 18 nt, Human
cauacauucuucaagauc

SEQ ID NO: 1148672 - RNA, 21 nt, Human
cauacauucuucaagauccca

SEQ ID NO: 1148673 - RNA, 17 nt, Human
cauacauuuuguaccaa

SEQ ID NO: 1148674 - RNA, 18 nt, Human
cauaccauggaggaaggc

SEQ ID NO: 1148675 - RNA, 20 nt, Human
cauacuaauuauacccccug

SEQ ID NO: 1148676 - RNA, 19 nt, Human
cauacuuuguuaggaaggg

SEQ ID NO: 1148677 - RNA, 17 nt, Human
cauagaccuuuucauuu

SEQ ID NO: 1148678 - RNA, 18 nt, Human
cauagugcuaacaugaag

SEQ ID NO: 1148679 - RNA, 19 nt, Human
cauagugcuaacaugaaga

SEQ ID NO: 1148680 - RNA, 20 nt, Human
cauagugcuaacaugaagac

SEQ ID NO: 1148681 - RNA, 13 nt, Human
cauauaaauagaa

SEQ ID NO: 1148682 - RNA, 15 nt, Human
cauauaaauagaaug

SEQ ID NO: 1148683 - RNA, 16 nt, Human
cauauaaauagaaugu

SEQ ID NO: 1148684 - RNA, 17 nt, Human
cauauaaauagaaugua

SEQ ID NO: 1148685 - RNA, 20 nt, Human
cauaugcauauuuuuuuucu

SEQ ID NO: 1148686 - RNA, 22 nt, Human
cauauuucccaugauuucaugu

SEQ ID NO: 1148687 - RNA, 22 nt, Human
caucaagucuuucacauuuaaa

SEQ ID NO: 1148688 - RNA, 16 nt, Human
cauccaauuagcuuau

SEQ ID NO: 1148689 - RNA, 17 nt, Human
cauccuacaagacacag

SEQ ID NO: 1148690 - RNA, 14 nt, Human
cauccuaacuccau

SEQ ID NO: 1148691 - RNA, 21 nt, Human
cauccuaacuccaugucucug

SEQ ID NO: 1148692 - RNA, 16 nt, Human
cauccuacaagacaca

SEQ ID NO: 1148693 - RNA, 20 nt, Human
cauccuccgccucccggguu

SEQ ID NO: 1148694 - RNA, 20 nt, Human
caucuaguuccccuguuuau

SEQ ID NO: 1148695 - RNA, 23 nt, Human
caucuaguuccccuguuuauuca

SEQ ID NO: 1148696 - RNA, 21 nt, Human
caucuaguuccccuguuuauu

SEQ ID NO: 1148697 - RNA, 13 nt, Human
caucucagcccac

SEQ ID NO: 1148698 - RNA, 21 nt, Human
caucucagcucaucuucacug

SEQ ID NO: 1148699 - RNA, 14 nt, Human
caucuccacuccag

SEQ ID NO: 1148700 - RNA, 22 nt, Human
caucucuucuggguuccuuccu

SEQ ID NO: 1148701 - RNA, 14 nt, Human
caugucgccucugc

SEQ ID NO: 1148702 - RNA, 15 nt, Human
caugucgccucugca

SEQ ID NO: 1148703 - RNA, 18 nt, Human
caugucgccucugcauuc

SEQ ID NO: 1148704 - RNA, 20 nt, Human
caugucgccucugcauucag

SEQ ID NO: 1148705 - RNA, 17 nt, Human
cauuagcaguuugcuuu

SEQ ID NO: 1148706 - RNA, 18 nt, Human
cauuagcaguuugcuuug

SEQ ID NO: 1148707 - RNA, 14 nt, Human
cauuauuugagaag

SEQ ID NO: 1148708 - RNA, 20 nt, Human
cauuauuugagaagcugcuc

SEQ ID NO: 1148709 - RNA, 22 nt, Human
cauuauuugagaagcugcucaa

SEQ ID NO: 1148710 - RNA, 13 nt, Human
cauuuaaacagau

SEQ ID NO: 1148711 - RNA, 21 nt, Human
cauuuaaacagauguccauca

SEQ ID NO: 1148712 - RNA, 14 nt, Human
cauuuaaacagaug

SEQ ID NO: 1148713 - RNA, 16 nt, Human
cauuuaaacagauguc

SEQ ID NO: 1148714 - RNA, 19 nt, Human
cauuuaaacagauguccau

SEQ ID NO: 1148715 - RNA, 12 nt, Human
cauuuuauggug

SEQ ID NO: 1148716 - RNA, 17 nt, Human
cauuuuauggugccuag

SEQ ID NO: 1148717 - RNA, 14 nt, Human
cauuuuauggugcc

SEQ ID NO: 1148718 - RNA, 18 nt, Human
ccaacccuggcacccagg

SEQ ID NO: 1148719 - RNA, 18 nt, Human
ccaaccuguucaagucua

SEQ ID NO: 1148720 - RNA, 15 nt, Human
ccaagccguggcuuc

SEQ ID NO: 1148721 - RNA, 16 nt, Human
ccaagccguggcuucc

SEQ ID NO: 1148722 - RNA, 17 nt, Human
ccaagccguggcuuccc

SEQ ID NO: 1148723 - RNA, 21 nt, Human
ccaagccguggcuucccgcuc

SEQ ID NO: 1148724 - RNA, 23 nt, Human
ccaagccguggcuucccgcucag

SEQ ID NO: 1148725 - RNA, 22 nt, Human
ccaagccuacuuuugccauuga

SEQ ID NO: 1148726 - RNA, 14 nt, Human
ccaagcuccaucuc

SEQ ID NO: 1148727 - RNA, 16 nt, Human
ccaaggcucugagcaa

SEQ ID NO: 1148728 - RNA, 13 nt, Human
ccaaguggcuccc

SEQ ID NO: 1148729 - RNA, 16 nt, Human
ccaaguggcucccaca

SEQ ID NO: 1148730 - RNA, 13 nt, Human
ccacaacacacag

SEQ ID NO: 1148731 - RNA, 12 nt, Human
ccagcuggccgg

SEQ ID NO: 1148732 - RNA, 14 nt, Human
ccagcuggccggga

SEQ ID NO: 1148733 - RNA, 20 nt, Human
ccagcuggccgggagccuga

SEQ ID NO: 1148734 - RNA, 16 nt, Human
ccagcuggguuggaaa

SEQ ID NO: 1148735 - RNA, 17 nt, Human
ccagcuggguuggaaaa

SEQ ID NO: 1148736 - RNA, 12 nt, Human
ccaggccugccu

SEQ ID NO: 1148737 - RNA, 16 nt, Human
ccaucgcugucaucuc

SEQ ID NO: 1148738 - RNA, 14 nt, Human
ccaugcugccucca

SEQ ID NO: 1148739 - RNA, 23 nt, Human
ccauggaggaaggcucuguucca

SEQ ID NO: 1148740 - RNA, 16 nt, Human
ccauguuggccaggcu

SEQ ID NO: 1148741 - RNA, 16 nt, Human
cccagaggcuggguga

SEQ ID NO: 1148742 - RNA, 13 nt, Human
cccagccccacuu

SEQ ID NO: 1148743 - RNA, 16 nt, Human
cccagccccacuuacc

SEQ ID NO: 1148744 - RNA, 23 nt, Human
cccagcccuccuuaucaaaggac

SEQ ID NO: 1148745 - RNA, 18 nt, Human
cccagccuccaagcucca

SEQ ID NO: 1148746 - RNA, 20 nt, Human
cccagccuccaagcuccauc

SEQ ID NO: 1148747 - RNA, 19 nt, Human
cccagggugggaagggcua

SEQ ID NO: 1148748 - RNA, 16 nt, Human
cccaugucucgacuca

SEQ ID NO: 1148749 - RNA, 17 nt, Human
cccaugucucgacucau

SEQ ID NO: 1148750 - RNA, 19 nt, Human
ccccagcccuccuuaucaa

SEQ ID NO: 1148751 - RNA, 23 nt, Human
ccccuggcuuuucacugcuggcu

SEQ ID NO: 1148752 - RNA, 19 nt, Human
ccccuguuuauucauaugc

SEQ ID NO: 1148753 - RNA, 14 nt, Human
ccccuuaccacugc

SEQ ID NO: 1148754 - RNA, 12 nt, Human
ccccuucccccu

SEQ ID NO: 1148755 - RNA, 20 nt, Human
ccccuuccuaauuccacagc

SEQ ID NO: 1148756 - RNA, 21 nt, Human
ccccuuccuaauuccacagcu

SEQ ID NO: 1148757 - RNA, 22 nt, Human
ccccuuccuaauuccacagcug

SEQ ID NO: 1148758 - RNA, 19 nt, Human
cccgcucagcccucccugc

SEQ ID NO: 1148759 - RNA, 23 nt, Human
cccgcucagcccucccugccccu

SEQ ID NO: 1148760 - RNA, 17 nt, Human
cccggaggggccuggca

SEQ ID NO: 1148761 - RNA, 18 nt, Human
cccggaggggccuggcag

SEQ ID NO: 1148762 - RNA, 13 nt, Human
cccucauagcccu

SEQ ID NO: 1148763 - RNA, 15 nt, Human
cccucauagcccuca

SEQ ID NO: 1148764 - RNA, 19 nt, Human
cccucauagcccucacccu

SEQ ID NO: 1148765 - RNA, 22 nt, Human
cccucauuccaccuucccaugc

SEQ ID NO: 1148766 - RNA, 19 nt, Human
cccuccaucuaaacugccc

SEQ ID NO: 1148767 - RNA, 14 nt, Human
cccucccuucaacc

SEQ ID NO: 1148768 - RNA, 23 nt, Human
cccugcacaaagcccuuccaugu

SEQ ID NO: 1148769 - RNA, 23 nt, Human
cccugcuuugggcugcccuggug

SEQ ID NO: 1148770 - RNA, 17 nt, Human
cccuggugcugccacac

SEQ ID NO: 1148771 - RNA, 21 nt, Human
cccuggugcugccacacuuca

SEQ ID NO: 1148772 - RNA, 13 nt, Human
cccuguucacucu

SEQ ID NO: 1148773 - RNA, 14 nt, Human
cccuguucacucua

SEQ ID NO: 1148774 - RNA, 22 nt, Human
cccuguucacucuacuuagcau

SEQ ID NO: 1148775 - RNA, 11 nt, Human
cccuucauuug

SEQ ID NO: 1148776 - RNA, 13 nt, Human
cccuuccuaauuc

SEQ ID NO: 1148777 - RNA, 14 nt, Human
cccuuccuaauucc

SEQ ID NO: 1148778 - RNA, 19 nt, Human
cccuuccuaauuccacagc

SEQ ID NO: 1148779 - RNA, 20 nt, Human
cccuuccuaauuccacagcu

SEQ ID NO: 1148780 - RNA, 21 nt, Human
cccuuccuaauuccacagcug

SEQ ID NO: 1148781 - RNA, 11 nt, Human
cccuucuuuuu

SEQ ID NO: 1148782 - RNA, 19 nt, Human
cccuucuuuuucuucuuuu

SEQ ID NO: 1148783 - RNA, 21 nt, Human
ccggaggggccuggcagccgu

SEQ ID NO: 1148784 - RNA, 16 nt, Human
ccgggagccugaucac

SEQ ID NO: 1148785 - RNA, 23 nt, Human
ccgggagccugaucaccugcccu

SEQ ID NO: 1148786 - RNA, 19 nt, Human
ccguguuggucuguacuga

SEQ ID NO: 1148787 - RNA, 18 nt, Human
ccguguuggucuguacug

SEQ ID NO: 1148788 - RNA, 13 nt, Human
ccuaaacauauga

SEQ ID NO: 1148789 - RNA, 13 nt, Human
ccuacuuccccuu

SEQ ID NO: 1148790 - RNA, 16 nt, Human
ccuacuuccccuuccu

SEQ ID NO: 1148791 - RNA, 21 nt, Human
ccuacuuccccuuccuaauuc

SEQ ID NO: 1148792 - RNA, 14 nt, Human
ccucacccuggggc

SEQ ID NO: 1148793 - RNA, 16 nt, Human
ccucagagccaccccu

SEQ ID NO: 1148794 - RNA, 19 nt, Human
ccuccaugcugccuccaga

SEQ ID NO: 1148795 - RNA, 18 nt, Human
ccucccccguccuggagg

SEQ ID NO: 1148796 - RNA, 15 nt, Human
ccuccccuccuccug

SEQ ID NO: 1148797 - RNA, 13 nt, Human
ccuccucucugcc

SEQ ID NO: 1148798 - RNA, 15 nt, Human
ccuccucucugcccu

SEQ ID NO: 1148799 - RNA, 16 nt, Human
ccuccucucugcccua

SEQ ID NO: 1148800 - RNA, 11 nt, Human
ccucugagccu

SEQ ID NO: 1148801 - RNA, 12 nt, Human
ccucugagccuu

SEQ ID NO: 1148802 - RNA, 13 nt, Human
ccucugaggcuga

SEQ ID NO: 1148803 - RNA, 13 nt, Human
cgccccuuccccc

SEQ ID NO: 1148804 - RNA, 12 nt, Human
cgcucagcccuc

SEQ ID NO: 1148805 - RNA, 16 nt, Human
cgcucagcccucccug

SEQ ID NO: 1148806 - RNA, 21 nt, Human
cgcucagcccucccugccccu

SEQ ID NO: 1148807 - RNA, 11 nt, Human
cggcugcccuu

SEQ ID NO: 1148808 - RNA, 12 nt, Human
cggcugcccuuu

SEQ ID NO: 1148809 - RNA, 21 nt, Human
cgggagccugaucaccugccc

SEQ ID NO: 1148810 - RNA, 17 nt, Human
cgggauuaguacacacu

SEQ ID NO: 1148811 - RNA, 11 nt, Human
cgggucacagg

SEQ ID NO: 1148812 - RNA, 19 nt, Human
cgggucacaggagggaggg

SEQ ID NO: 1148813 - RNA, 17 nt, Human
cggugagcuacaaaugc

SEQ ID NO: 1148814 - RNA, 20 nt, Human
cguccuggagguuccccagc

SEQ ID NO: 1148815 - RNA, 18 nt, Human
cguggcuucccgcucagc

SEQ ID NO: 1148816 - RNA, 19 nt, Human
cguggcuucccgcucagcc

SEQ ID NO: 1148817 - RNA, 20 nt, Human
cguggcuucccgcucagccc

SEQ ID NO: 1148818 - RNA, 21 nt, Human
cguggcuucccgcucagcccu

SEQ ID NO: 1148819 - RNA, 17 nt, Human
cguuggcuagauuaacc

SEQ ID NO: 1148820 - RNA, 18 nt, Human
cguuuaaugaaugcuuaa

SEQ ID NO: 1148821 - RNA, 13 nt, Human
cguuuaaugaaug

SEQ ID NO: 1148822 - RNA, 14 nt, Human
cguuuaaugaaugc

SEQ ID NO: 1148823 - RNA, 23 nt, Human
cuaaaaccuuccaugucaagauu

SEQ ID NO: 1148824 - RNA, 15 nt, Human
cuaaaccauugugca

SEQ ID NO: 1148825 - RNA, 16 nt, Human
cuaacaugaagaccuu

SEQ ID NO: 1148826 - RNA, 14 nt, Human
cuaaggcugaacuu

SEQ ID NO: 1148827 - RNA, 17 nt, Human
cuaaucagcauucucac

SEQ ID NO: 1148828 - RNA, 19 nt, Human
cuaaucagcauucucacuc

SEQ ID NO: 1148829 - RNA, 20 nt, Human
cuaaucagcauucucacucc

SEQ ID NO: 1148830 - RNA, 16 nt, Human
cuaauccucuuuuucu

SEQ ID NO: 1148831 - RNA, 19 nt, Human
cuaaugaaugcauaaaaug

SEQ ID NO: 1148832 - RNA, 22 nt, Human
cuaaugaaugcauaaaauguua

SEQ ID NO: 1148833 - RNA, 15 nt, Human
cuaauguuugcauau

SEQ ID NO: 1148834 - RNA, 16 nt, Human
cuaauguuugcauaua

SEQ ID NO: 1148835 - RNA, 18 nt, Human
cuaauguuugcauauaag

SEQ ID NO: 1148836 - RNA, 17 nt, Human
cuaauguuugcauauaa

SEQ ID NO: 1148837 - RNA, 14 nt, Human
cuacuuccccuucc

SEQ ID NO: 1148838 - RNA, 15 nt, Human
cuacuuccccuuccu

SEQ ID NO: 1148839 - RNA, 20 nt, Human
cuacuuccccuuccuaauuc

SEQ ID NO: 1148840 - RNA, 20 nt, Human
cuacuuccugugacuucagc

SEQ ID NO: 1148841 - RNA, 18 nt, Human
cuagacucccaagcugga

SEQ ID NO: 1148842 - RNA, 16 nt, Human
cuaggaaauccagggu

SEQ ID NO: 1148843 - RNA, 17 nt, Human
cuaggaaauccagggug

SEQ ID NO: 1148844 - RNA, 14 nt, Human
cuaguauugacaaa

SEQ ID NO: 1148845 - RNA, 15 nt, Human
cuaguauugacaaaa

SEQ ID NO: 1148846 - RNA, 17 nt, Human
cuaguauugacaaaaug

SEQ ID NO: 1148847 - RNA, 18 nt, Human
cuaguauugacaaaaugu

SEQ ID NO: 1148848 - RNA, 20 nt, Human
cuaguauugacaaaauguua

SEQ ID NO: 1148849 - RNA, 19 nt, Human
cuaguauugacaaaauguu

SEQ ID NO: 1148850 - RNA, 15 nt, Human
cuaguguaucaaaau

SEQ ID NO: 1148851 - RNA, 18 nt, Human
cuaguguaucaaaaugcu

SEQ ID NO: 1148852 - RNA, 17 nt, Human
cucaagagggcacuggu

SEQ ID NO: 1148853 - RNA, 19 nt, Human
cucaagagggcacuggugg

SEQ ID NO: 1148854 - RNA, 21 nt, Human
cucaagagggcacugguggcc

SEQ ID NO: 1148855 - RNA, 13 nt, Human
cucacauuuauau

SEQ ID NO: 1148856 - RNA, 13 nt, Human
cucacuaggcuuc

SEQ ID NO: 1148857 - RNA, 16 nt, Human
cucacuaggcuucugg

SEQ ID NO: 1148858 - RNA, 20 nt, Human
cucacuaggcuucugguuga

SEQ ID NO: 1148859 - RNA, 20 nt, Human
cucacuaucccggcugcccu

SEQ ID NO: 1148860 - RNA, 21 nt, Human
cucacuaucccggcugcccuu

SEQ ID NO: 1148861 - RNA, 16 nt, Human
cuccaucuccacucca

SEQ ID NO: 1148862 - RNA, 13 nt, Human
cuccaugcugccu

SEQ ID NO: 1148863 - RNA, 13 nt, Human
cuccaugucucug

SEQ ID NO: 1148864 - RNA, 22 nt, Human
cuccaugucucugagcauuaga

SEQ ID NO: 1148865 - RNA, 17 nt, Human
cucccaaagugcuggga

SEQ ID NO: 1148866 - RNA, 18 nt, Human
cucccaaagugcugggau

SEQ ID NO: 1148867 - RNA, 22 nt, Human
cucccaaagugcugggauuaca

SEQ ID NO: 1148868 - RNA, 20 nt, Human
cucccggcuaugggggcacu

SEQ ID NO: 1148869 - RNA, 13 nt, Human
cucccucauucca

SEQ ID NO: 1148870 - RNA, 15 nt, Human
cuccgccucccgggu

SEQ ID NO: 1148871 - RNA, 14 nt, Human
cuccucccggugcc

SEQ ID NO: 1148872 - RNA, 15 nt, Human
cuccucccggugccc

SEQ ID NO: 1148873 - RNA, 17 nt, Human
cuccucccggugcccaa

SEQ ID NO: 1148874 - RNA, 16 nt, Human
cuccugccucagccuc

SEQ ID NO: 1148875 - RNA, 17 nt, Human
cucggcucacugcaucc

SEQ ID NO: 1148876 - RNA, 18 nt, Human
cucggcucacugcauccu

SEQ ID NO: 1148877 - RNA, 21 nt, Human
cucuacagcuaaucagcauuc

SEQ ID NO: 1148878 - RNA, 16 nt, Human
cucuacuuagcauguc

SEQ ID NO: 1148879 - RNA, 17 nt, Human
cucuacuuagcaugucc

SEQ ID NO: 1148880 - RNA, 19 nt, Human
cucuacuuagcaugucccu

SEQ ID NO: 1148881 - RNA, 20 nt, Human
cucuacuuagcaugucccua

SEQ ID NO: 1148882 - RNA, 11 nt, Human
cucuccacugc

SEQ ID NO: 1148883 - RNA, 12 nt, Human
cucuccacugcc

SEQ ID NO: 1148884 - RNA, 14 nt, Human
cucuccacugccuu

SEQ ID NO: 1148885 - RNA, 15 nt, Human
cucuccacugccuuc

SEQ ID NO: 1148886 - RNA, 14 nt, Human
cucuccucuugcca

SEQ ID NO: 1148887 - RNA, 15 nt, Human
cucuccucuugccac

SEQ ID NO: 1148888 - RNA, 16 nt, Human
cucuccucuugccacu

SEQ ID NO: 1148889 - RNA, 17 nt, Human
cucuccucuugccacug

SEQ ID NO: 1148890 - RNA, 19 nt, Human
cucuccucuugccacugcc

SEQ ID NO: 1148891 - RNA, 22 nt, Human
cucuccucuugccacugccucu

SEQ ID NO: 1148892 - RNA, 15 nt, Human
cucuggcuccagcug

SEQ ID NO: 1148893 - RNA, 16 nt, Human
cucuggcuccagcugg

SEQ ID NO: 1148894 - RNA, 22 nt, Human
cucuggcuccagcuggccggga

SEQ ID NO: 1148895 - RNA, 13 nt, Human
cucuucuuaaugu

SEQ ID NO: 1148896 - RNA, 18 nt, Human
cucuucuuaauguacaua

SEQ ID NO: 1148897 - RNA, 22 nt, Human
cucuucuuaauguacauagugc

SEQ ID NO: 1148898 - RNA, 24 nt, Human
cucuucuuaauguacauagugcua

SEQ ID NO: 1148899 - RNA, 23 nt, Human
cucuucuuaauguacauagugcu

SEQ ID NO: 1148900 - RNA, 15 nt, Human
cucuugaacuccuga

SEQ ID NO: 1148901 - RNA, 18 nt, Human
cucuugaacuccugaccu

SEQ ID NO: 1148902 - RNA, 22 nt, Human
cugaaauagacccacaagaggc

SEQ ID NO: 1148903 - RNA, 16 nt, Human
cugaacucugacaaca

SEQ ID NO: 1148904 - RNA, 17 nt, Human
cugaacucugacaacag

SEQ ID NO: 1148905 - RNA, 16 nt, Human
cugagccucagucucc

SEQ ID NO: 1148906 - RNA, 21 nt, Human
cugagccucagucucccuccc

SEQ ID NO: 1148907 - RNA, 22 nt, Human
cugagccucagucucccucccu

SEQ ID NO: 1148908 - RNA, 16 nt, Human
cugagcuauguaguau

SEQ ID NO: 1148909 - RNA, 20 nt, Human
cugcacccuggauuugcaua

SEQ ID NO: 1148910 - RNA, 17 nt, Human
cugcccaggccugccug

SEQ ID NO: 1148911 - RNA, 20 nt, Human
cugcccuaaugcgcaggcug

SEQ ID NO: 1148912 - RNA, 21 nt, Human
cugcccuaaugcgcaggcugg

SEQ ID NO: 1148913 - RNA, 22 nt, Human
cugcccuaaugcgcaggcuggc

SEQ ID NO: 1148914 - RNA, 20 nt, Human
cugccugcaguacuuuaccu

SEQ ID NO: 1148915 - RNA, 21 nt, Human
cugccugcaguacuuuaccuc

SEQ ID NO: 1148916 - RNA, 15 nt, Human
cugcgggucacagga

SEQ ID NO: 1148917 - RNA, 21 nt, Human
cugcgggucacaggagggagg

SEQ ID NO: 1148918 - RNA, 22 nt, Human
cugcgggucacaggagggaggg

SEQ ID NO: 1148919 - RNA, 23 nt, Human
cugcgggucacaggagggagggg

SEQ ID NO: 1148920 - RNA, 16 nt, Human
cugcucuugaacuccu

SEQ ID NO: 1148921 - RNA, 18 nt, Human
cugcucuugaacuccuga

SEQ ID NO: 1148922 - RNA, 19 nt, Human
cugcucuugaacuccugac

SEQ ID NO: 1148923 - RNA, 13 nt, Human
cugcuggcugccu

SEQ ID NO: 1148924 - RNA, 14 nt, Human
cugcuggcugccuu

SEQ ID NO: 1148925 - RNA, 15 nt, Human
cugcuggcugccuua

SEQ ID NO: 1148926 - RNA, 12 nt, Human
cugcuguacuga

SEQ ID NO: 1148927 - RNA, 13 nt, Human
cugcuguacugaa

SEQ ID NO: 1148928 - RNA, 15 nt, Human
cugcuguacugaagu

SEQ ID NO: 1148929 - RNA, 14 nt, Human
cugcuguacugaag

SEQ ID NO: 1148930 - RNA, 13 nt, Human
cugcuuuggaaau

SEQ ID NO: 1148931 - RNA, 16 nt, Human
cugcuuugggcugccc

SEQ ID NO: 1148932 - RNA, 17 nt, Human
cugcuuugggcugcccu

SEQ ID NO: 1148933 - RNA, 15 nt, Human
cuggcacagggcagu

SEQ ID NO: 1148934 - RNA, 16 nt, Human
cuggcacagggcagug

SEQ ID NO: 1148935 - RNA, 23 nt, Human
cuggcuuuucacugcuggcugcc

SEQ ID NO: 1148936 - RNA, 15 nt, Human
cuggcuuuucacugc

SEQ ID NO: 1148937 - RNA, 14 nt, Human
cugggaggcaguga

SEQ ID NO: 1148938 - RNA, 16 nt, Human
cugggauuacaggugu

SEQ ID NO: 1148939 - RNA, 18 nt, Human
cugggauuacagguguga

SEQ ID NO: 1148940 - RNA, 15 nt, Human
cugggccccaguugu

SEQ ID NO: 1148941 - RNA, 19 nt, Human
cugggccccaguuguauuu

SEQ ID NO: 1148942 - RNA, 20 nt, Human
cuggucacaggacucugccu

SEQ ID NO: 1148943 - RNA, 21 nt, Human
cuggucacaggacucugccuc

SEQ ID NO: 1148944 - RNA, 22 nt, Human
cuggucacaggacucugccucc

SEQ ID NO: 1148945 - RNA, 23 nt, Human
cuggucacaggacucugccuccu

SEQ ID NO: 1148946 - RNA, 16 nt, Human
cuggucucgaacuccu

SEQ ID NO: 1148947 - RNA, 21 nt, Human
cuggucucgaacuccugaccu

SEQ ID NO: 1148948 - RNA, 23 nt, Human
cugguuaauauuuauaggucacu

SEQ ID NO: 1148949 - RNA, 18 nt, Human
cuguccaggcacugcugc

SEQ ID NO: 1148950 - RNA, 19 nt, Human
cuguccaggcacugcugcc

SEQ ID NO: 1148951 - RNA, 20 nt, Human
cuguccaggcacugcugccc

SEQ ID NO: 1148952 - RNA, 21 nt, Human
cuguccaggcacugcugccca

SEQ ID NO: 1148953 - RNA, 22 nt, Human
cuguccaggcacugcugcccag

SEQ ID NO: 1148954 - RNA, 23 nt, Human
cuguccaggcacugcugcccagc

SEQ ID NO: 1148955 - RNA, 18 nt, Human
cugucucaagagggcacu

SEQ ID NO: 1148956 - RNA, 19 nt, Human
cugucucaagagggcacug

SEQ ID NO: 1148957 - RNA, 20 nt, Human
cugucucaagagggcacugg

SEQ ID NO: 1148958 - RNA, 21 nt, Human
cugucucaagagggcacuggu

SEQ ID NO: 1148959 - RNA, 17 nt, Human
cuucuuuuuuugugaug

SEQ ID NO: 1148960 - RNA, 18 nt, Human
cuugcaguaucggcacug

SEQ ID NO: 1148961 - RNA, 20 nt, Human
cuugcaguaucggcacugua

SEQ ID NO: 1148962 - RNA, 19 nt, Human
cuugcaguaucggcacugu

SEQ ID NO: 1148963 - RNA, 17 nt, Human
cuugccaaauauaaaua

SEQ ID NO: 1148964 - RNA, 15 nt, Human
cuuggggccuaugca

SEQ ID NO: 1148965 - RNA, 18 nt, Human
cuuguaaaaauuaaaagu

SEQ ID NO: 1148966 - RNA, 18 nt, Human
cuuguaaaggaauuuaaa

SEQ ID NO: 1148967 - RNA, 21 nt, Human
cuuguaugaaagauggcugug

SEQ ID NO: 1148968 - RNA, 15 nt, Human
cuuuccccaugucuc

SEQ ID NO: 1148969 - RNA, 20 nt, Human
cuuuccccaugucucgacuc

SEQ ID NO: 1148970 - RNA, 21 nt, Human
cuuuccccaugucucgacuca

SEQ ID NO: 1148971 - RNA, 21 nt, Human
cuuuccgguguuuaagacauu

SEQ ID NO: 1148972 - RNA, 18 nt, Human
cuuuuaaaacacuuccau

SEQ ID NO: 1148973 - RNA, 12 nt, Human
cuuuucacugcu

SEQ ID NO: 1148974 - RNA, 16 nt, Human
cuuuucacugcuggcu

SEQ ID NO: 1148975 - RNA, 13 nt, Human
cuuuucauuugug

SEQ ID NO: 1148976 - RNA, 22 nt, Human
cuuuuuacccauuuguucauau

SEQ ID NO: 1148977 - RNA, 22 nt, Human
gaaagauggcugugccucugcc

SEQ ID NO: 1148978 - RNA, 23 nt, Human
gaaagauggcugugccucugccu

SEQ ID NO: 1148979 - RNA, 19 nt, Human
gaaagucagauucuugcau

SEQ ID NO: 1148980 - RNA, 15 nt, Human
gaaagugagcagugu

SEQ ID NO: 1148981 - RNA, 16 nt, Human
gaaagugagcaguguu

SEQ ID NO: 1148982 - RNA, 22 nt, Human
gaaagugagcaguguuagcuua

SEQ ID NO: 1148983 - RNA, 14 nt, Human
gaaaguuuacagga

SEQ ID NO: 1148984 - RNA, 16 nt, Human
gaaaguuuacaggaaa

SEQ ID NO: 1148985 - RNA, 15 nt, Human
gaacuccuaaaucaa

SEQ ID NO: 1148986 - RNA, 16 nt, Human
gaacuccuaaaucaag

SEQ ID NO: 1148987 - RNA, 13 nt, Human
gaacuccugaccu

SEQ ID NO: 1148988 - RNA, 14 nt, Human
gaacuccugaccuc

SEQ ID NO: 1148989 - RNA, 15 nt, Human
gaacuuguuuucugg

SEQ ID NO: 1148990 - RNA, 15 nt, Human
gaagauaaacgugga

SEQ ID NO: 1148991 - RNA, 21 nt, Human
gaagauaaacguggauguuac

SEQ ID NO: 1148992 - RNA, 22 nt, Human
gaaggaauaaauugcuccuuga

SEQ ID NO: 1148993 - RNA, 22 nt, Human
gaaggacccggaggggccuggc

SEQ ID NO: 1148994 - RNA, 23 nt, Human
gaaggacccggaggggccuggca

SEQ ID NO: 1148995 - RNA, 20 nt, Human
gaaggcagggagggccuggg

SEQ ID NO: 1148996 - RNA, 22 nt, Human
gaaggcagggagggccugggcc

SEQ ID NO: 1148997 - RNA, 23 nt, Human
gaaggcagggagggccugggccc

SEQ ID NO: 1148998 - RNA, 20 nt, Human
gaagguauaucuagguuuau

SEQ ID NO: 1148999 - RNA, 15 nt, Human
gaagucacugcacag

SEQ ID NO: 1149000 - RNA, 17 nt, Human
gacacagugaccauacu

SEQ ID NO: 1149001 - RNA, 17 nt, Human
gacaccuacugaguggc

SEQ ID NO: 1149002 - RNA, 19 nt, Human
gacagaucucugcuuugga

SEQ ID NO: 1149003 - RNA, 21 nt, Human
gacagaucucugcuuuggaaa

SEQ ID NO: 1149004 - RNA, 23 nt, Human
gacagaucucugcuuuggaaauc

SEQ ID NO: 1149005 - RNA, 15 nt, Human
gacaggcugcggccc

SEQ ID NO: 1149006 - RNA, 18 nt, Human
gacaggcugcggccccuc

SEQ ID NO: 1149007 - RNA, 22 nt, Human
gacaggcugcggccccuccccc

SEQ ID NO: 1149008 - RNA, 23 nt, Human
gacaggcugcggccccucccccg

SEQ ID NO: 1149009 - RNA, 22 nt, Human
gaccccucauagcccucacccu

SEQ ID NO: 1149010 - RNA, 23 nt, Human
gaccccucauagcccucacccug

SEQ ID NO: 1149011 - RNA, 23 nt, Human
gaccugauuucugagcauuuaau

SEQ ID NO: 1149012 - RNA, 21 nt, Human
gaccugccccuccucucugcc

SEQ ID NO: 1149013 - RNA, 15 nt, Human
gaccugccucggccu

SEQ ID NO: 1149014 - RNA, 19 nt, Human
gaccugccucggccuccca

SEQ ID NO: 1149015 - RNA, 17 nt, Human
gaccuuuuucugcacua

SEQ ID NO: 1149016 - RNA, 17 nt, Human
gacgggguuucaccaug

SEQ ID NO: 1149017 - RNA, 15 nt, Human
gacucagguugucug

SEQ ID NO: 1149018 - RNA, 15 nt, Human
gacucaguggggagg

SEQ ID NO: 1149019 - RNA, 23 nt, Human
gagacugucucaagagggcacug

SEQ ID NO: 1149020 - RNA, 13 nt, Human
gagacuuguauga

SEQ ID NO: 1149021 - RNA, 13 nt, Human
gagaguggcuccu

SEQ ID NO: 1149022 - RNA, 17 nt, Human
gagauacagaauuuuau

SEQ ID NO: 1149023 - RNA, 19 nt, Human
gagccucagucucccuccc

SEQ ID NO: 1149024 - RNA, 20 nt, Human
gaggaaaaccaagccguggc

SEQ ID NO: 1149025 - RNA, 21 nt, Human
gaggaaaaccaagccguggcu

SEQ ID NO: 1149026 - RNA, 23 nt, Human
gaggaaaaccaagccguggcuuc

SEQ ID NO: 1149027 - RNA, 19 nt, Human
gauacaccgggccuggaga

SEQ ID NO: 1149028 - RNA, 20 nt, Human
gauccccaagccuggcaagg

SEQ ID NO: 1149029 - RNA, 22 nt, Human
gaugacaagaaaggcugcugua

SEQ ID NO: 1149030 - RNA, 13 nt, Human
gauggcugugccu

SEQ ID NO: 1149031 - RNA, 17 nt, Human
gauggcugugccucugc

SEQ ID NO: 1149032 - RNA, 18 nt, Human
gauggcugugccucugcc

SEQ ID NO: 1149033 - RNA, 19 nt, Human
gauggcugugccucugccu

SEQ ID NO: 1149034 - RNA, 20 nt, Human
gauggcugugccucugccug

SEQ ID NO: 1149035 - RNA, 19 nt, Human
gauuccagagaguggcucc

SEQ ID NO: 1149036 - RNA, 20 nt, Human
gauuccagagaguggcuccu

SEQ ID NO: 1149037 - RNA, 22 nt, Human
gauuccagagaguggcuccucc

SEQ ID NO: 1149038 - RNA, 13 nt, Human
gcaaagcccagcu

SEQ ID NO: 1149039 - RNA, 21 nt, Human
gcaaagcccagcuugaaaccu

SEQ ID NO: 1149040 - RNA, 17 nt, Human
gcaaauccuuugugaaa

SEQ ID NO: 1149041 - RNA, 18 nt, Human
gcaaauccuuugugaaaa

SEQ ID NO: 1149042 - RNA, 12 nt, Human
gcacugcugccc

SEQ ID NO: 1149043 - RNA, 22 nt, Human
gcacugguggcccgacagccug

SEQ ID NO: 1149044 - RNA, 23 nt, Human
gcacugguggcccgacagccugg

SEQ ID NO: 1149045 - RNA, 24 nt, Human
gcacugguggcccgacagccuggc

SEQ ID NO: 1149046 - RNA, 21 nt, Human
gcacuguacaaaaaaaucuuc

SEQ ID NO: 1149047 - RNA, 18 nt, Human
gcagcacaaguguaauga

SEQ ID NO: 1149048 - RNA, 13 nt, Human
gcagcccugcuuu

SEQ ID NO: 1149049 - RNA, 14 nt, Human
gcagcccugcuuug

SEQ ID NO: 1149050 - RNA, 13 nt, Human
gcagcuuugcuca

SEQ ID NO: 1149051 - RNA, 14 nt, Human
gcagcuuugcucau

SEQ ID NO: 1149052 - RNA, 15 nt, Human
gcagcuuugcucaua

SEQ ID NO: 1149053 - RNA, 20 nt, Human
gcaggaaggcugagaggaga

SEQ ID NO: 1149054 - RNA, 12 nt, Human
gcaguuauuugc

SEQ ID NO: 1149055 - RNA, 13 nt, Human
gcauagaaguaaa

SEQ ID NO: 1149056 - RNA, 17 nt, Human
gcauagguuuaauaauu

SEQ ID NO: 1149057 - RNA, 15 nt, Human
gcauauuuuuuuucu

SEQ ID NO: 1149058 - RNA, 20 nt, Human
gcauggcaaggacugcaggg

SEQ ID NO: 1149059 - RNA, 11 nt, Human
gcauuauuuga

SEQ ID NO: 1149060 - RNA, 15 nt, Human
gcauuauuugagaag

SEQ ID NO: 1149061 - RNA, 21 nt, Human
gcauuauuugagaagcugcuc

SEQ ID NO: 1149062 - RNA, 21 nt, Human
gccacuccagaccccuggcuu

SEQ ID NO: 1149063 - RNA, 22 nt, Human
gccacuccagaccccuggcuuu

SEQ ID NO: 1149064 - RNA, 14 nt, Human
gccaguaauccugu

SEQ ID NO: 1149065 - RNA, 19 nt, Human
gccaguaauccuguaggaa

SEQ ID NO: 1149066 - RNA, 24 nt, Human
gcccaaccugcucuccucuugcca

SEQ ID NO: 1149067 - RNA, 21 nt, Human
gcccaagaauagaugcugacu

SEQ ID NO: 1149068 - RNA, 22 nt, Human
gcccaagaauagaugcugacug

SEQ ID NO: 1149069 - RNA, 20 nt, Human
gcccacauagugaugguucc

SEQ ID NO: 1149070 - RNA, 20 nt, Human
gcccaggcuggagugcaaug

SEQ ID NO: 1149071 - RNA, 14 nt, Human
gccccacuuaccgc

SEQ ID NO: 1149072 - RNA, 19 nt, Human
gccccaguuguauuuauuu

SEQ ID NO: 1149073 - RNA, 21 nt, Human
gccccauaauuuuuuuuuucc

SEQ ID NO: 1149074 - RNA, 12 nt, Human
gccccucccccg

SEQ ID NO: 1149075 - RNA, 19 nt, Human
gccccucccccguccugga

SEQ ID NO: 1149076 - RNA, 22 nt, Human
gccccucccccguccuggaggu

SEQ ID NO: 1149077 - RNA, 12 nt, Human
gcccgacagccu

SEQ ID NO: 1149078 - RNA, 14 nt, Human
gcccgacagccugg

SEQ ID NO: 1149079 - RNA, 15 nt, Human
gcccgacagccuggc

SEQ ID NO: 1149080 - RNA, 16 nt, Human
gcccgacagccuggca

SEQ ID NO: 1149081 - RNA, 20 nt, Human
gcccuccaucuaaacugccc

SEQ ID NO: 1149082 - RNA, 21 nt, Human
gcccuccaucuaaacugcccc

SEQ ID NO: 1149083 - RNA, 16 nt, Human
gcccugcuuugggcug

SEQ ID NO: 1149084 - RNA, 18 nt, Human
gcccugcuuugggcugcc

SEQ ID NO: 1149085 - RNA, 19 nt, Human
gcccugcuuugggcugccc

SEQ ID NO: 1149086 - RNA, 14 nt, Human
gccgugccuucagc

SEQ ID NO: 1149087 - RNA, 15 nt, Human
gccgugccuucagcu

SEQ ID NO: 1149088 - RNA, 17 nt, Human
gccgugccuucagcucu

SEQ ID NO: 1149089 - RNA, 19 nt, Human
gccgugccuucagcucuac

SEQ ID NO: 1149090 - RNA, 19 nt, Human
gccguggcuucccgcucag

SEQ ID NO: 1149091 - RNA, 21 nt, Human
gccguggcuucccgcucagcc

SEQ ID NO: 1149092 - RNA, 22 nt, Human
gccguggcuucccgcucagccc

SEQ ID NO: 1149093 - RNA, 22 nt, Human
gccuaugugcaugcagcaucua

SEQ ID NO: 1149094 - RNA, 15 nt, Human
gccuccgggaccccc

SEQ ID NO: 1149095 - RNA, 16 nt, Human
gccuccgggaccccca

SEQ ID NO: 1149096 - RNA, 17 nt, Human
gccuccgggacccccag

SEQ ID NO: 1149097 - RNA, 18 nt, Human
gccuccgggacccccagg

SEQ ID NO: 1149098 - RNA, 19 nt, Human
gccuccgggacccccagga

SEQ ID NO: 1149099 - RNA, 20 nt, Human
gccuccgggacccccaggac

SEQ ID NO: 1149100 - RNA, 13 nt, Human
gccuucagggagu

SEQ ID NO: 1149101 - RNA, 21 nt, Human
gccuucagggagugagggauu

SEQ ID NO: 1149102 - RNA, 13 nt, Human
gccuucaucuccc

SEQ ID NO: 1149103 - RNA, 18 nt, Human
gccuucgauacaccgggc

SEQ ID NO: 1149104 - RNA, 22 nt, Human
gccuucgauacaccgggccugg

SEQ ID NO: 1149105 - RNA, 23 nt, Human
gccuucgauacaccgggccugga

SEQ ID NO: 1149106 - RNA, 22 nt, Human
gccuuuggaaacagcucgacuu

SEQ ID NO: 1149107 - RNA, 13 nt, Human
gcgggucacagga

SEQ ID NO: 1149108 - RNA, 15 nt, Human
gcgggucacaggagg

SEQ ID NO: 1149109 - RNA, 19 nt, Human
gcgggucacaggagggagg

SEQ ID NO: 1149110 - RNA, 20 nt, Human
gcgggucacaggagggaggg

SEQ ID NO: 1149111 - RNA, 19 nt, Human
gcuaggaaauccagggugg

SEQ ID NO: 1149112 - RNA, 22 nt, Human
gcuaggaaauccaggguggugg

SEQ ID NO: 1149113 - RNA, 14 nt, Human
guagggugggccuu

SEQ ID NO: 1149114 - RNA, 17 nt, Human
guagggugggccuucag

SEQ ID NO: 1149115 - RNA, 22 nt, Human
guagggugggccuucagggagu

SEQ ID NO: 1149116 - RNA, 21 nt, Human
guagguuauuaugauuagcuu

SEQ ID NO: 1149117 - RNA, 19 nt, Human
guauaucuagguuuaugac

SEQ ID NO: 1149118 - RNA, 20 nt, Human
guauaucuagguuuaugaca

SEQ ID NO: 1149119 - RNA, 23 nt, Human
guauaucuagguuuaugacagua

SEQ ID NO: 1149120 - RNA, 13 nt, Human
guauaugucucag

SEQ ID NO: 1149121 - RNA, 15 nt, Human
guauaugucucaggu

SEQ ID NO: 1149122 - RNA, 21 nt, Human
guauaugucucaggucccugc

SEQ ID NO: 1149123 - RNA, 16 nt, Human
guauauguugggugca

SEQ ID NO: 1149124 - RNA, 13 nt, Human
guaucggcacugu

SEQ ID NO: 1149125 - RNA, 15 nt, Human
guaucggcacuguac

SEQ ID NO: 1149126 - RNA, 16 nt, Human
guaucggcacuguaca

SEQ ID NO: 1149127 - RNA, 18 nt, Human
guaucggcacuguacaaa

SEQ ID NO: 1149128 - RNA, 14 nt, Human
guaucuugcaguau

SEQ ID NO: 1149129 - RNA, 22 nt, Human
guaucuugcaguaucggcacug

SEQ ID NO: 1149130 - RNA, 22 nt, Human
guaugaaagauggcugugccuc

SEQ ID NO: 1149131 - RNA, 23 nt, Human
guaugaaagauggcugugccucu

SEQ ID NO: 1149132 - RNA, 18 nt, Human
guaugaauaaagacaccu

SEQ ID NO: 1149133 - RNA, 19 nt, Human
guaugaauaaagacaccua

SEQ ID NO: 1149134 - RNA, 13 nt, Human
guaugaucaaaug

SEQ ID NO: 1149135 - RNA, 14 nt, Human
guaugaucaaaugu

SEQ ID NO: 1149136 - RNA, 15 nt, Human
guaugaucaaauguu

SEQ ID NO: 1149137 - RNA, 16 nt, Human
guaugaucaaauguuu

SEQ ID NO: 1149138 - RNA, 17 nt, Human
guaugaucaaauguuua

SEQ ID NO: 1149139 - RNA, 22 nt, Human
guaugaucaaauguuuaaucau

SEQ ID NO: 1149140 - RNA, 17 nt, Human
guauguugaagccuuug

SEQ ID NO: 1149141 - RNA, 21 nt, Human
gucaagggcagcuuugcucau

SEQ ID NO: 1149142 - RNA, 22 nt, Human
gucagaugcugugcaaauguua

SEQ ID NO: 1149143 - RNA, 15 nt, Human
gucagauucuugcau

SEQ ID NO: 1149144 - RNA, 17 nt, Human
gucagauucuugcaucc

SEQ ID NO: 1149145 - RNA, 16 nt, Human
gucagauucuugcauc

SEQ ID NO: 1149146 - RNA, 15 nt, Human
gucccaggcugagcc

SEQ ID NO: 1149147 - RNA, 16 nt, Human
gucccaggcugagccu

SEQ ID NO: 1149148 - RNA, 17 nt, Human
gucccaggcugagccuc

SEQ ID NO: 1149149 - RNA, 18 nt, Human
gucccaggcugagccuca

SEQ ID NO: 1149150 - RNA, 19 nt, Human
gucccaggcugagccucag

SEQ ID NO: 1149151 - RNA, 21 nt, Human
gucccaggcugagccucaguc

SEQ ID NO: 1149152 - RNA, 21 nt, Human
gucccuaccgagucucuucuc

SEQ ID NO: 1149153 - RNA, 22 nt, Human
gucccuaccgagucucuucucc

SEQ ID NO: 1149154 - RNA, 23 nt, Human
gucccuaccgagucucuucucca

SEQ ID NO: 1149155 - RNA, 18 nt, Human
gucgucaaagcugaaaug

SEQ ID NO: 1149156 - RNA, 16 nt, Human
gucucacugagcacug

SEQ ID NO: 1149157 - RNA, 22 nt, Human
gucucacugagcacuguuuucu

SEQ ID NO: 1149158 - RNA, 13 nt, Human
gucucugagcauu

SEQ ID NO: 1149159 - RNA, 16 nt, Human
gucucugguuccuccc

SEQ ID NO: 1149160 - RNA, 17 nt, Human
gucucugguuccucccc

SEQ ID NO: 1149161 - RNA, 18 nt, Human
gucucuucuccacuggau

SEQ ID NO: 1149162 - RNA, 20 nt, Human
gucuguuuuaaaaaccuguu

SEQ ID NO: 1149163 - RNA, 14 nt, Human
gugagcuacaaaug

SEQ ID NO: 1149164 - RNA, 14 nt, Human
gugauccacucgcc

SEQ ID NO: 1149165 - RNA, 23 nt, Human
gugauuuuuuuuuuuuuccuguc

SEQ ID NO: 1149166 - RNA, 16 nt, Human
gugcaguuauuugcuu

SEQ ID NO: 1149167 - RNA, 13 nt, Human
gugcaucucagcc

SEQ ID NO: 1149168 - RNA, 14 nt, Human
gugcaucucagccc

SEQ ID NO: 1149169 - RNA, 20 nt, Human
gugcccaagaauagaugcug

SEQ ID NO: 1149170 - RNA, 23 nt, Human
gugcccaagaauagaugcugacu

SEQ ID NO: 1149171 - RNA, 15 nt, Human
gugccuucagcucua

SEQ ID NO: 1149172 - RNA, 13 nt, Human
guggcuccucccg

SEQ ID NO: 1149173 - RNA, 20 nt, Human
guggcuccucccggugccca

SEQ ID NO: 1149174 - RNA, 18 nt, Human
guggcuucccgcucagcc

SEQ ID NO: 1149175 - RNA, 19 nt, Human
guggcuucccgcucagccc

SEQ ID NO: 1149176 - RNA, 20 nt, Human
guggcuucccgcucagcccu

SEQ ID NO: 1149177 - RNA, 19 nt, Human
gugggccuucagggaguga

SEQ ID NO: 1149178 - RNA, 18 nt, Human
gugggcgugagaccugcc

SEQ ID NO: 1149179 - RNA, 21 nt, Human
gugggcgugagaccugccccu

SEQ ID NO: 1149180 - RNA, 22 nt, Human
gugggcgugagaccugccccuc

SEQ ID NO: 1149181 - RNA, 13 nt, Human
guggggaggggcu

SEQ ID NO: 1149182 - RNA, 17 nt, Human
guggguuuuuauuuccu

SEQ ID NO: 1149183 - RNA, 14 nt, Human
gugguaucuugcag

SEQ ID NO: 1149184 - RNA, 23 nt, Human
guggugaaaagcagguugauaaa

SEQ ID NO: 1149185 - RNA, 16 nt, Human
guguaaugaauaccuu

SEQ ID NO: 1149186 - RNA, 15 nt, Human
guguaucaaaaugcu

SEQ ID NO: 1149187 - RNA, 15 nt, Human
guguguuucugaucu

SEQ ID NO: 1149188 - RNA, 18 nt, Human
guuaacugagugccuuuu

SEQ ID NO: 1149189 - RNA, 21 nt, Human
guuacuccaaaacuucguuua

SEQ ID NO: 1149190 - RNA, 11 nt, Human
guuaucauguu

SEQ ID NO: 1149191 - RNA, 12 nt, Human
guuaucauguua

SEQ ID NO: 1149192 - RNA, 23 nt, Human
guuaucauguuaguaauaccucu

SEQ ID NO: 1149193 - RNA, 22 nt, Human
guuaucauguuaguaauaccuc

SEQ ID NO: 1149194 - RNA, 17 nt, Human
guuaucuguuugagaaa

SEQ ID NO: 1149195 - RNA, 14 nt, Human
guuaugaugugcuu

SEQ ID NO: 1149196 - RNA, 16 nt, Human
guuaugaugugcuuaa

SEQ ID NO: 1149197 - RNA, 17 nt, Human
guuaugaugugcuuaac

SEQ ID NO: 1149198 - RNA, 22 nt, Human
guuaugaugugcuuaacaggga

SEQ ID NO: 1149199 - RNA, 17 nt, Human
guuauuauauuuacaaa

SEQ ID NO: 1149200 - RNA, 23 nt, Human
guucaagugauucucaugccuca

SEQ ID NO: 1149201 - RNA, 24 nt, Human
guucacucuacuuagcaugucccu

SEQ ID NO: 1149202 - RNA, 18 nt, Human
guucauauuaagaaugau

SEQ ID NO: 1149203 - RNA, 20 nt, Human
guuccagcaauucuccugcc

SEQ ID NO: 1149204 - RNA, 21 nt, Human
guuccagcaauucuccugccu

SEQ ID NO: 1149205 - RNA, 23 nt, Human
guuccagcaauucuccugccuca

SEQ ID NO: 1149206 - RNA, 23 nt, Human
guuccuccccuccuccuggacuc

SEQ ID NO: 1149207 - RNA, 15 nt, Human
guuccugugcacagc

SEQ ID NO: 1149208 - RNA, 16 nt, Human
guuccugugcacagcc

SEQ ID NO: 1149209 - RNA, 17 nt, Human
guuccuuccucugagcc

SEQ ID NO: 1149210 - RNA, 18 nt, Human
guuccuuccucugagccu

SEQ ID NO: 1149211 - RNA, 19 nt, Human
guuccuuccucugagccuu

SEQ ID NO: 1149212 - RNA, 15 nt, Human
guucugcacacagca

SEQ ID NO: 1149213 - RNA, 16 nt, Human
guucugcacacagcac

SEQ ID NO: 1149214 - RNA, 14 nt, Human
guucuuucuuccuc

SEQ ID NO: 1149215 - RNA, 15 nt, Human
guucuuucuuccucu

SEQ ID NO: 1149216 - RNA, 16 nt, Human
guucuuucuuccucug

SEQ ID NO: 1149217 - RNA, 17 nt, Human
guucuuucuuccucugc

SEQ ID NO: 1149218 - RNA, 18 nt, Human
guucuuucuuccucugcu

SEQ ID NO: 1149219 - RNA, 19 nt, Human
guucuuucuuccucugcug

SEQ ID NO: 1149220 - RNA, 13 nt, Human
guugaagccuuug

SEQ ID NO: 1149221 - RNA, 14 nt, Human
guugaagccuuugu

SEQ ID NO: 1149222 - RNA, 10 nt, Human
guugcacagc

SEQ ID NO: 1149223 - RNA, 11 nt, Human
guugcacagca

SEQ ID NO: 1149224 - RNA, 16 nt, Human
guugcacagcaucuca

SEQ ID NO: 1149225 - RNA, 19 nt, Human
guugcacagcaucucagcu

SEQ ID NO: 1149226 - RNA, 14 nt, Human
guuggccaggcugc

SEQ ID NO: 1149227 - RNA, 14 nt, Human
guuggccaggcugg

SEQ ID NO: 1149228 - RNA, 15 nt, Human
guuggccaggcuggu

SEQ ID NO: 1149229 - RNA, 19 nt, Human
guuggccaggcugcucuug

SEQ ID NO: 1149230 - RNA, 18 nt, Human
guuggccaggcuggucuc

SEQ ID NO: 1149231 - RNA, 15 nt, Human
guuggcuagauuaac

SEQ ID NO: 1149232 - RNA, 19 nt, Human
guugucugaagucacugca

SEQ ID NO: 1149233 - RNA, 22 nt, Human
guugucugaagucacugcacag

SEQ ID NO: 1149234 - RNA, 14 nt, Human
guuguuaucuguuu

SEQ ID NO: 1149235 - RNA, 17 nt, Human
guuguuaucuguuugag

SEQ ID NO: 1149236 - RNA, 13 nt, Human
guuguuaugaugu

SEQ ID NO: 1149237 - RNA, 14 nt, Human
guuguuaugaugug

SEQ ID NO: 1149238 - RNA, 23 nt, Human
guuguuaugaugugcuuaacagg

SEQ ID NO: 1149239 - RNA, 15 nt, Human
guuguuaugaugugc

SEQ ID NO: 1149240 - RNA, 22 nt, Human
guuuacauuuuauggugccuag

SEQ ID NO: 1149241 - RNA, 15 nt, Human
guuuacauuuuaugg

SEQ ID NO: 1149242 - RNA, 18 nt, Human
guuuguuccccaagacau

SEQ ID NO: 1149243 - RNA, 17 nt, Human
guuuuaaaaaccuguuc

SEQ ID NO: 1149244 - RNA, 17 nt, Human
guuuuccucucaauaaa

SEQ ID NO: 1149245 - RNA, 21 nt, Human
guuuuuaaggguuuguggaaa

SEQ ID NO: 1149246 - RNA, 18 nt, Human
uaaaacaaacaauaccug

SEQ ID NO: 1149247 - RNA, 14 nt, Human
uaaaacaaagccac

SEQ ID NO: 1149248 - RNA, 22 nt, Human
uaaaacaaagccacuuucaauc

SEQ ID NO: 1149249 - RNA, 22 nt, Human
uaaaacaagcacuaaacaaaga

SEQ ID NO: 1149250 - RNA, 19 nt, Human
uaaaacacuuccauaaucu

SEQ ID NO: 1149251 - RNA, 16 nt, Human
uaaaaucuugaaaaug

SEQ ID NO: 1149252 - RNA, 22 nt, Human
uaaacaugacuccauagaccuu

SEQ ID NO: 1149253 - RNA, 18 nt, Human
uaaacaugacuccauaga

SEQ ID NO: 1149254 - RNA, 14 nt, Human
uaaaggaauuuaaa

SEQ ID NO: 1149255 - RNA, 14 nt, Human
uaaaguguuugaaa

SEQ ID NO: 1149256 - RNA, 15 nt, Human
uaaauguccauucuu

SEQ ID NO: 1149257 - RNA, 15 nt, Human
uaaaugucucacuga

SEQ ID NO: 1149258 - RNA, 17 nt, Human
uaaaugucucacugagc

SEQ ID NO: 1149259 - RNA, 11 nt, Human
uaacugacaag

SEQ ID NO: 1149260 - RNA, 21 nt, Human
uaacugacaagcuccauuuaa

SEQ ID NO: 1149261 - RNA, 22 nt, Human
uaacugacaagcuccauuuaaa

SEQ ID NO: 1149262 - RNA, 19 nt, Human
uaagggaaguaguuaucau

SEQ ID NO: 1149263 - RNA, 22 nt, Human
uaagggaaguaguuaucauguu

SEQ ID NO: 1149264 - RNA, 16 nt, Human
uaagucaacuuagcau

SEQ ID NO: 1149265 - RNA, 15 nt, Human
uaaguggugugugua

SEQ ID NO: 1149266 - RNA, 16 nt, Human
uaagugguguguguau

SEQ ID NO: 1149267 - RNA, 15 nt, Human
uaaucuggacuccuc

SEQ ID NO: 1149268 - RNA, 17 nt, Human
uaaucuggacuccucug

SEQ ID NO: 1149269 - RNA, 18 nt, Human
uaaucuggacuccucugu

SEQ ID NO: 1149270 - RNA, 19 nt, Human
uaaucuggacuccucuguc

SEQ ID NO: 1149271 - RNA, 20 nt, Human
uaaucuggacuccucugucc

SEQ ID NO: 1149272 - RNA, 21 nt, Human
uaaucuggacuccucugucca

SEQ ID NO: 1149273 - RNA, 22 nt, Human
uaaucuggacuccucuguccag

SEQ ID NO: 1149274 - RNA, 18 nt, Human
uaaucugggccagaauuu

SEQ ID NO: 1149275 - RNA, 23 nt, Human
uaaucugggccagaauuucaaac

SEQ ID NO: 1149276 - RNA, 14 nt, Human
uaauguuugcauau

SEQ ID NO: 1149277 - RNA, 15 nt, Human
uaauguuugcauaua

SEQ ID NO: 1149278 - RNA, 16 nt, Human
uaauguuugcauauaa

SEQ ID NO: 1149279 - RNA, 16 nt, Human
uacagcuaaucagcau

SEQ ID NO: 1149280 - RNA, 18 nt, Human
uacagcuaaucagcauuc

SEQ ID NO: 1149281 - RNA, 15 nt, Human
uacagcugagcuaug

SEQ ID NO: 1149282 - RNA, 13 nt, Human
uacagcugccugc

SEQ ID NO: 1149283 - RNA, 14 nt, Human
uacagcugccugca

SEQ ID NO: 1149284 - RNA, 14 nt, Human
uacaggauuugaaa

SEQ ID NO: 1149285 - RNA, 23 nt, Human
uacaguucggugagcuacaaaug

SEQ ID NO: 1149286 - RNA, 17 nt, Human
uaccgagucucuucucc

SEQ ID NO: 1149287 - RNA, 18 nt, Human
uaccgagucucuucucca

SEQ ID NO: 1149288 - RNA, 21 nt, Human
uaccgagucucuucuccacug

SEQ ID NO: 1149289 - RNA, 22 nt, Human
uaccgagucucuucuccacugg

SEQ ID NO: 1149290 - RNA, 17 nt, Human
uaccgcguaaugcgcca

SEQ ID NO: 1149291 - RNA, 21 nt, Human
uaccgcguaaugcgccaauaa

SEQ ID NO: 1149292 - RNA, 23 nt, Human
uaccgcguaaugcgccaauaaac

SEQ ID NO: 1149293 - RNA, 18 nt, Human
uaccucaauuuucacugu

SEQ ID NO: 1149294 - RNA, 20 nt, Human
uaccucaauuuucacugugu

SEQ ID NO: 1149295 - RNA, 21 nt, Human
uaccucaauuuucacuguguc

SEQ ID NO: 1149296 - RNA, 16 nt, Human
uaccucuaauaguaua

SEQ ID NO: 1149297 - RNA, 17 nt, Human
uaccucuaauaguauaa

SEQ ID NO: 1149298 - RNA, 18 nt, Human
uaccucuaauaguauaaa

SEQ ID NO: 1149299 - RNA, 19 nt, Human
uaccucuaauaguauaaac

SEQ ID NO: 1149300 - RNA, 14 nt, Human
uaccuuagugcagu

SEQ ID NO: 1149301 - RNA, 16 nt, Human
uaccuuagugcaguua

SEQ ID NO: 1149302 - RNA, 17 nt, Human
uaccuuagugcaguuau

SEQ ID NO: 1149303 - RNA, 18 nt, Human
uaccuuagugcaguuauu

SEQ ID NO: 1149304 - RNA, 19 nt, Human
uaccuuagugcaguuauuu

SEQ ID NO: 1149305 - RNA, 20 nt, Human
uaccuuagugcaguuauuug

SEQ ID NO: 1149306 - RNA, 22 nt, Human
uaccuuagugcaguuauuugcu

SEQ ID NO: 1149307 - RNA, 19 nt, Human
uacuccaaaacuucguuua

SEQ ID NO: 1149308 - RNA, 22 nt, Human
uacuccaaaacuucguuuaaug

SEQ ID NO: 1149309 - RNA, 12 nt, Human
uacuccucccag

SEQ ID NO: 1149310 - RNA, 16 nt, Human
uacugcauuauuugag

SEQ ID NO: 1149311 - RNA, 19 nt, Human
uacugcccaggccugccug

SEQ ID NO: 1149312 - RNA, 20 nt, Human
uacugcccaggccugccugu

SEQ ID NO: 1149313 - RNA, 21 nt, Human
uacugcccaggccugccuguu

SEQ ID NO: 1149314 - RNA, 22 nt, Human
uacugcccaggccugccuguuc

SEQ ID NO: 1149315 - RNA, 13 nt, Human
uacuugucuguuu

SEQ ID NO: 1149316 - RNA, 14 nt, Human
uacuugucuguuuu

SEQ ID NO: 1149317 - RNA, 15 nt, Human
uacuugucuguuuua

SEQ ID NO: 1149318 - RNA, 20 nt, Human
uacuugucuguuuuaaaaac

SEQ ID NO: 1149319 - RNA, 14 nt, Human
uagaauguaaaugu

SEQ ID NO: 1149320 - RNA, 15 nt, Human
uagaauguaaauguc

SEQ ID NO: 1149321 - RNA, 16 nt, Human
uagaauguaaaugucu

SEQ ID NO: 1149322 - RNA, 18 nt, Human
uagaauguaaaugucuca

SEQ ID NO: 1149323 - RNA, 17 nt, Human
uagaauguaaaugucuc

SEQ ID NO: 1149324 - RNA, 20 nt, Human
uagacccacuggacucaccu

SEQ ID NO: 1149325 - RNA, 17 nt, Human
uagaccuuuucauuugu

SEQ ID NO: 1149326 - RNA, 13 nt, Human
uagagaaggaccc

SEQ ID NO: 1149327 - RNA, 22 nt, Human
uagagaaggacccggaggggcc

SEQ ID NO: 1149328 - RNA, 15 nt, Human
uagccaguaauccug

SEQ ID NO: 1149329 - RNA, 16 nt, Human
uagccaguaauccugu

SEQ ID NO: 1149330 - RNA, 17 nt, Human
uagccaguaauccugua

SEQ ID NO: 1149331 - RNA, 18 nt, Human
uagccaguaauccuguag

SEQ ID NO: 1149332 - RNA, 22 nt, Human
uagccaguaauccuguaggaag

SEQ ID NO: 1149333 - RNA, 18 nt, Human
uagcugacaaaauacuug

SEQ ID NO: 1149334 - RNA, 20 nt, Human
uagguuauuaugauuagcuu

SEQ ID NO: 1149335 - RNA, 22 nt, Human
uagguuauuaugauuagcuuug

SEQ ID NO: 1149336 - RNA, 13 nt, Human
uaguauugacaaa

SEQ ID NO: 1149337 - RNA, 14 nt, Human
uaguauugacaaaa

SEQ ID NO: 1149338 - RNA, 17 nt, Human
uaguauugacaaaaugu

SEQ ID NO: 1149339 - RNA, 18 nt, Human
uaguauugacaaaauguu

SEQ ID NO: 1149340 - RNA, 19 nt, Human
uaguauugacaaaauguua

SEQ ID NO: 1149341 - RNA, 21 nt, Human
uaguauugacaaaauguuauu

SEQ ID NO: 1149342 - RNA, 22 nt, Human
uaguauugacaaaauguuauuu

SEQ ID NO: 1149343 - RNA, 16 nt, Human
uaguauugcaaaguca

SEQ ID NO: 1149344 - RNA, 17 nt, Human
uaguuguuguagagaaa

SEQ ID NO: 1149345 - RNA, 14 nt, Human
uauaaauagaaugu

SEQ ID NO: 1149346 - RNA, 16 nt, Human
uauaaauagaauguaa

SEQ ID NO: 1149347 - RNA, 19 nt, Human
uauaaauagaauguaaaug

SEQ ID NO: 1149348 - RNA, 20 nt, Human
uauaaauagaauguaaaugu

SEQ ID NO: 1149349 - RNA, 22 nt, Human
uauaaauagaauguaaaugucu

SEQ ID NO: 1149350 - RNA, 14 nt, Human
uauauuuugccugu

SEQ ID NO: 1149351 - RNA, 14 nt, Human
uaucaaaaugcucu

SEQ ID NO: 1149352 - RNA, 22 nt, Human
uaucaaaaugcucuuauuucau

SEQ ID NO: 1149353 - RNA, 16 nt, Human
uaucauguuaguaaua

SEQ ID NO: 1149354 - RNA, 19 nt, Human
uaucauguuaguaauaccu

SEQ ID NO: 1149355 - RNA, 21 nt, Human
uaucauguuaguaauaccucu

SEQ ID NO: 1149356 - RNA, 20 nt, Human
uaucauguuaguaauaccuc

SEQ ID NO: 1149357 - RNA, 18 nt, Human
ucaguccccgugaaggag

SEQ ID NO: 1149358 - RNA, 16 nt, Human
ucaguuaagccuuugg

SEQ ID NO: 1149359 - RNA, 17 nt, Human
ucaguuaagccuuugga

SEQ ID NO: 1149360 - RNA, 19 nt, Human
ucauguacugcauuauuug

SEQ ID NO: 1149361 - RNA, 16 nt, Human
ucauguacugcauuau

SEQ ID NO: 1149362 - RNA, 21 nt, Human
uccacuuagaaauugcauuuc

SEQ ID NO: 1149363 - RNA, 23 nt, Human
uccacuuagaaauugcauuuccu

SEQ ID NO: 1149364 - RNA, 22 nt, Human
uccagagaguggcuccucccgg

SEQ ID NO: 1149365 - RNA, 22 nt, Human
uccagauuuuuuacagcugccu

SEQ ID NO: 1149366 - RNA, 18 nt, Human
uccagcaauucuccugcc

SEQ ID NO: 1149367 - RNA, 19 nt, Human
uccagcaauucuccugccu

SEQ ID NO: 1149368 - RNA, 20 nt, Human
uccagcaauucuccugccuc

SEQ ID NO: 1149369 - RNA, 21 nt, Human
uccagcaauucuccugccuca

SEQ ID NO: 1149370 - RNA, 15 nt, Human
uccagcuggccggga

SEQ ID NO: 1149371 - RNA, 21 nt, Human
uccagcuggccgggagccuga

SEQ ID NO: 1149372 - RNA, 22 nt, Human
uccagcuggccgggagccugau

SEQ ID NO: 1149373 - RNA, 19 nt, Human
uccagcuggguuggaaaac

SEQ ID NO: 1149374 - RNA, 23 nt, Human
uccauaaucuggacuccucuguc

SEQ ID NO: 1149375 - RNA, 16 nt, Human
uccauauggauccacu

SEQ ID NO: 1149376 - RNA, 21 nt, Human
uccauauggauccacuggcug

SEQ ID NO: 1149377 - RNA, 19 nt, Human
uccauauggauccacuggc

SEQ ID NO: 1149378 - RNA, 16 nt, Human
uccaugucgccucugc

SEQ ID NO: 1149379 - RNA, 17 nt, Human
uccaugucgccucugca

SEQ ID NO: 1149380 - RNA, 18 nt, Human
uccaugucgccucugcau

SEQ ID NO: 1149381 - RNA, 19 nt, Human
uccaugucgccucugcauu

SEQ ID NO: 1149382 - RNA, 14 nt, Human
ucccaacuuguaaa

SEQ ID NO: 1149383 - RNA, 19 nt, Human
ucccaggcugagccucagu

SEQ ID NO: 1149384 - RNA, 13 nt, Human
ucccaugauuuca

SEQ ID NO: 1149385 - RNA, 14 nt, Human
ucccaugauuucau

SEQ ID NO: 1149386 - RNA, 16 nt, Human
ucccaugauuucaugu

SEQ ID NO: 1149387 - RNA, 19 nt, Human
ucccaugauuucauguacu

SEQ ID NO: 1149388 - RNA, 22 nt, Human
ucccaugauuucauguacugca

SEQ ID NO: 1149389 - RNA, 12 nt, Human
ucccaugcccug

SEQ ID NO: 1149390 - RNA, 19 nt, Human
ucccuaccgagucucuucu

SEQ ID NO: 1149391 - RNA, 21 nt, Human
ucccuaccgagucucuucucc

SEQ ID NO: 1149392 - RNA, 22 nt, Human
ucccuaccgagucucuucucca

SEQ ID NO: 1149393 - RNA, 23 nt, Human
ucccuaccgagucucuucuccac

SEQ ID NO: 1149394 - RNA, 13 nt, Human
ucccucccuuggg

SEQ ID NO: 1149395 - RNA, 14 nt, Human
ucccucccuugggg

SEQ ID NO: 1149396 - RNA, 16 nt, Human
ucccugccccccagcc

SEQ ID NO: 1149397 - RNA, 14 nt, Human
ucccugccccuccc

SEQ ID NO: 1149398 - RNA, 18 nt, Human
ucccugccccucccuuca

SEQ ID NO: 1149399 - RNA, 19 nt, Human
ucccugccccucccuucaa

SEQ ID NO: 1149400 - RNA, 17 nt, Human
ucccuucuuuuucuucu

SEQ ID NO: 1149401 - RNA, 12 nt, Human
uccuaugaugua

SEQ ID NO: 1149402 - RNA, 15 nt, Human
uccuaugauguauac

SEQ ID NO: 1149403 - RNA, 22 nt, Human
uccuaugauguauacugccacu

SEQ ID NO: 1149404 - RNA, 16 nt, Human
uccuaugauguauacu

SEQ ID NO: 1149405 - RNA, 13 nt, Human
uccuccuggacuc

SEQ ID NO: 1149406 - RNA, 13 nt, Human
uccucucaauaaa

SEQ ID NO: 1149407 - RNA, 17 nt, Human
uccucuguccaggcacu

SEQ ID NO: 1149408 - RNA, 22 nt, Human
uccucuguccaggcacugcugc

SEQ ID NO: 1149409 - RNA, 14 nt, Human
uccuuaucaaagga

SEQ ID NO: 1149410 - RNA, 15 nt, Human
uccuuaucaaaggac

SEQ ID NO: 1149411 - RNA, 17 nt, Human
uccuuaucaaaggacac

SEQ ID NO: 1149412 - RNA, 23 nt, Human
uccuugcugaaacgcaucuaguu

SEQ ID NO: 1149413 - RNA, 14 nt, Human
uccuuugugaaaaa

SEQ ID NO: 1149414 - RNA, 14 nt, Human
ucuacuauuuaugu

SEQ ID NO: 1149415 - RNA, 17 nt, Human
ucuagguuuaugacagu

SEQ ID NO: 1149416 - RNA, 22 nt, Human
ucuaucuuugagcgcccacuag

SEQ ID NO: 1149417 - RNA, 11 nt, Human
ucucacugagc

SEQ ID NO: 1149418 - RNA, 16 nt, Human
ucucacugagcacugu

SEQ ID NO: 1149419 - RNA, 18 nt, Human
ucucacugagcacuguuu

SEQ ID NO: 1149420 - RNA, 17 nt, Human
ucucacugagcacuguu

SEQ ID NO: 1149421 - RNA, 18 nt, Human
ucugcacuauaugcaaac

SEQ ID NO: 1149422 - RNA, 15 nt, Human
ucugccuccucuuca

SEQ ID NO: 1149423 - RNA, 15 nt, Human
ucugccucucuugua

SEQ ID NO: 1149424 - RNA, 13 nt, Human
ucugcugaaggaa

SEQ ID NO: 1149425 - RNA, 15 nt, Human
ucuggacuccucugu

SEQ ID NO: 1149426 - RNA, 16 nt, Human
ucuggacuccucuguc

SEQ ID NO: 1149427 - RNA, 18 nt, Human
ucuggacuccucugucca

SEQ ID NO: 1149428 - RNA, 22 nt, Human
ucuggacuccucuguccaggca

SEQ ID NO: 1149429 - RNA, 14 nt, Human
ucuuauaauuuaaa

SEQ ID NO: 1149430 - RNA, 20 nt, Human
ucuucaguuaagccuuugga

SEQ ID NO: 1149431 - RNA, 22 nt, Human
ucuucaguuaagccuuuggaaa

SEQ ID NO: 1149432 - RNA, 17 nt, Human
ucuucauggugacacuc

SEQ ID NO: 1149433 - RNA, 16 nt, Human
ucuucauggugacacu

SEQ ID NO: 1149434 - RNA, 22 nt, Human
ucuucgacuguuguuaucuguu

SEQ ID NO: 1149435 - RNA, 14 nt, Human
ucuucgacuguugu

SEQ ID NO: 1149436 - RNA, 15 nt, Human
ucuucgacuguuguu

SEQ ID NO: 1149437 - RNA, 17 nt, Human
ucuucgacuguuguuau

SEQ ID NO: 1149438 - RNA, 19 nt, Human
ucuugccaaauauaaauaa

SEQ ID NO: 1149439 - RNA, 23 nt, Human
ucuugcauggcaaggacugcagg

SEQ ID NO: 1149440 - RNA, 16 nt, Human
ucuugccacugccucu

SEQ ID NO: 1149441 - RNA, 17 nt, Human
ucuugccacugccucuu

SEQ ID NO: 1149442 - RNA, 16 nt, Human
ucuuguaauuuggauc

SEQ ID NO: 1149443 - RNA, 21 nt, Human
ucuuuuuacccauuuguucau

SEQ ID NO: 1149444 - RNA, 20 nt, Human
ugaaaauuaggauuucauga

SEQ ID NO: 1149445 - RNA, 19 nt, Human
ugaagaccuuuuucugcac

SEQ ID NO: 1149446 - RNA, 21 nt, Human
ugaagaccuuuuucugcacua

SEQ ID NO: 1149447 - RNA, 22 nt, Human
ugaagaccuuuuucugcacuau

SEQ ID NO: 1149448 - RNA, 23 nt, Human
ugaagaccuuuuucugcacuaua

SEQ ID NO: 1149449 - RNA, 16 nt, Human
ugaaucuuggugucua

SEQ ID NO: 1149450 - RNA, 14 nt, Human
ugaaugcauaaaau

SEQ ID NO: 1149451 - RNA, 15 nt, Human
ugacaacagacuucu

SEQ ID NO: 1149452 - RNA, 18 nt, Human
ugacaacagacuucugaa

SEQ ID NO: 1149453 - RNA, 19 nt, Human
ugacaacagacuucugaaa

SEQ ID NO: 1149454 - RNA, 15 nt, Human
ugacauauuuuugcu

SEQ ID NO: 1149455 - RNA, 19 nt, Human
ugacauguguuggcagccu

SEQ ID NO: 1149456 - RNA, 21 nt, Human
ugaccagccuccaugcugccu

SEQ ID NO: 1149457 - RNA, 22 nt, Human
ugaccagccuccaugcugccuc

SEQ ID NO: 1149458 - RNA, 23 nt, Human
ugaccagccuccaugcugccucc

SEQ ID NO: 1149459 - RNA, 15 nt, Human
ugacuaaaccauugu

SEQ ID NO: 1149460 - RNA, 19 nt, Human
ugacuaaaccauugugcau

SEQ ID NO: 1149461 - RNA, 20 nt, Human
ugagaaagucagauucuugc

SEQ ID NO: 1149462 - RNA, 21 nt, Human
ugagaaagucagauucuugca

SEQ ID NO: 1149463 - RNA, 12 nt, Human
ugagaccugccc

SEQ ID NO: 1149464 - RNA, 13 nt, Human
ugagaccugcccc

SEQ ID NO: 1149465 - RNA, 14 nt, Human
ugagaccugccccu

SEQ ID NO: 1149466 - RNA, 15 nt, Human
ugagaccugccccuc

SEQ ID NO: 1149467 - RNA, 22 nt, Human
ugagaccugccccuccucucug

SEQ ID NO: 1149468 - RNA, 11 nt, Human
ugagcucagcc

SEQ ID NO: 1149469 - RNA, 12 nt, Human
ugagcucagccc

SEQ ID NO: 1149470 - RNA, 20 nt, Human
ugagcucagcccuggugggc

SEQ ID NO: 1149471 - RNA, 23 nt, Human
ugagcuuaagaauuuugagcagg

SEQ ID NO: 1149472 - RNA, 20 nt, Human
ugagucccaggcugagccuc

SEQ ID NO: 1149473 - RNA, 21 nt, Human
ugagucccaggcugagccuca

SEQ ID NO: 1149474 - RNA, 21 nt, Human
ugcagagcaggaaacaugacu

SEQ ID NO: 1149475 - RNA, 21 nt, Human
ugcauauaagggaaguaguua

SEQ ID NO: 1149476 - RNA, 22 nt, Human
ugcauauaagggaaguaguuau

SEQ ID NO: 1149477 - RNA, 23 nt, Human
ugcauauaagggaaguaguuauc

SEQ ID NO: 1149478 - RNA, 17 nt, Human
ugccaaauauaaauaaa

SEQ ID NO: 1149479 - RNA, 18 nt, Human
ugccaaauauaaauaaaa

SEQ ID NO: 1149480 - RNA, 19 nt, Human
ugccaaauauaaauaaaaa

SEQ ID NO: 1149481 - RNA, 22 nt, Human
ugccaaauauaaauaaaaauaa

SEQ ID NO: 1149482 - RNA, 19 nt, Human
ugccacuaaccuuccaaaa

SEQ ID NO: 1149483 - RNA, 15 nt, Human
ugccccagggcuccc

SEQ ID NO: 1149484 - RNA, 13 nt, Human
ugccccucccuuc

SEQ ID NO: 1149485 - RNA, 14 nt, Human
ugccugugaacuga

SEQ ID NO: 1149486 - RNA, 17 nt, Human
ugccugugaacugaacu

SEQ ID NO: 1149487 - RNA, 18 nt, Human
ugccugugaacugaacuc

SEQ ID NO: 1149488 - RNA, 21 nt, Human
ugccugugaacugaacucuga

SEQ ID NO: 1149489 - RNA, 17 nt, Human
ugcuaacaugaagaccu

SEQ ID NO: 1149490 - RNA, 16 nt, Human
ugcucuccucuugcca

SEQ ID NO: 1149491 - RNA, 18 nt, Human
ugcucuccucuugccacu

SEQ ID NO: 1149492 - RNA, 21 nt, Human
ugcucuccucuugccacugcc

SEQ ID NO: 1149493 - RNA, 22 nt, Human
ugcucuccucuugccacugccu

SEQ ID NO: 1149494 - RNA, 20 nt, Human
ugcugaaacgcaucuaguuc

SEQ ID NO: 1149495 - RNA, 23 nt, Human
ugcugaaggaauaaauugcuccu

SEQ ID NO: 1149496 - RNA, 13 nt, Human
uggaaacaagaug

SEQ ID NO: 1149497 - RNA, 17 nt, Human
uggaaacagcucgacuu

SEQ ID NO: 1149498 - RNA, 22 nt, Human
uggaaacagcucgacuuuaaaa

SEQ ID NO: 1149499 - RNA, 22 nt, Human
uggaauaauccuaaacauauga

SEQ ID NO: 1149500 - RNA, 18 nt, Human
uggacucaccucccccau

SEQ ID NO: 1149501 - RNA, 20 nt, Human
uggacucaccucccccaucu

SEQ ID NO: 1149502 - RNA, 15 nt, Human
uggacuccucugucc

SEQ ID NO: 1149503 - RNA, 15 nt, Human
uggacuccugcacac

SEQ ID NO: 1149504 - RNA, 21 nt, Human
uggauccacuggcuggacaaa

SEQ ID NO: 1149505 - RNA, 19 nt, Human
uggcaggaguuggaagugu

SEQ ID NO: 1149506 - RNA, 17 nt, Human
uggccacuccagacccc

SEQ ID NO: 1149507 - RNA, 20 nt, Human
uggccacuccagaccccugg

SEQ ID NO: 1149508 - RNA, 14 nt, Human
uggcuggacaaacu

SEQ ID NO: 1149509 - RNA, 21 nt, Human
uggcuugaguuuaaauuguaa

SEQ ID NO: 1149510 - RNA, 12 nt, Human
ugggacaauuag

SEQ ID NO: 1149511 - RNA, 22 nt, Human
ugggacaauuagauaaaugucc

SEQ ID NO: 1149512 - RNA, 17 nt, Human
ugggauuacagguguga

SEQ ID NO: 1149513 - RNA, 14 nt, Human
uggguuaguggaug

SEQ ID NO: 1149514 - RNA, 16 nt, Human
uguacaaggacagccc

SEQ ID NO: 1149515 - RNA, 20 nt, Human
uguacaaggacagccccucc

SEQ ID NO: 1149516 - RNA, 23 nt, Human
uguacaaggacagccccuccucc

SEQ ID NO: 1149517 - RNA, 13 nt, Human
uguaugaucaaau

SEQ ID NO: 1149518 - RNA, 14 nt, Human
uguaugaucaaaug

SEQ ID NO: 1149519 - RNA, 15 nt, Human
uguaugaucaaaugu

SEQ ID NO: 1149520 - RNA, 16 nt, Human
uguaugaucaaauguu

SEQ ID NO: 1149521 - RNA, 18 nt, Human
uguaugaucaaauguuua

SEQ ID NO: 1149522 - RNA, 19 nt, Human
uguaugaucaaauguuuaa

SEQ ID NO: 1149523 - RNA, 20 nt, Human
uguaugaucaaauguuuaau

SEQ ID NO: 1149524 - RNA, 23 nt, Human
uguaugaucaaauguuuaaucau

SEQ ID NO: 1149525 - RNA, 20 nt, Human
uguauuuauuuaguauuuau

SEQ ID NO: 1149526 - RNA, 14 nt, Human
uguccaucagauga

SEQ ID NO: 1149527 - RNA, 16 nt, Human
uguccaucagaugaca

SEQ ID NO: 1149528 - RNA, 17 nt, Human
uguccaucagaugacaa

SEQ ID NO: 1149529 - RNA, 18 nt, Human
uguccaucagaugacaag

SEQ ID NO: 1149530 - RNA, 16 nt, Human
ugucccaacuuguaaa

SEQ ID NO: 1149531 - RNA, 16 nt, Human
ugucugaagucacugc

SEQ ID NO: 1149532 - RNA, 17 nt, Human
ugucugaagucacugca

SEQ ID NO: 1149533 - RNA, 18 nt, Human
ugucugaagucacugcac

SEQ ID NO: 1149534 - RNA, 19 nt, Human
ugucugaagucacugcaca

SEQ ID NO: 1149535 - RNA, 20 nt, Human
ugucugaagucacugcacag

SEQ ID NO: 1149536 - RNA, 16 nt, Human
ugugaaaaugugugug

SEQ ID NO: 1149537 - RNA, 17 nt, Human
ugugaaaaugugugugu

SEQ ID NO: 1149538 - RNA, 14 nt, Human
ugugcuuguuaacu

SEQ ID NO: 1149539 - RNA, 10 nt, Human
uguggcucac

SEQ ID NO: 1149540 - RNA, 20 nt, Human
ugugggcgugagaccugccc

SEQ ID NO: 1149541 - RNA, 21 nt, Human
ugugggcgugagaccugcccc

SEQ ID NO: 1149542 - RNA, 22 nt, Human
ugugggcgugagaccugccccu

SEQ ID NO: 1149543 - RNA, 18 nt, Human
uguguaugcgugugugug

SEQ ID NO: 1149544 - RNA, 15 nt, Human
ugugugcuuauguau

SEQ ID NO: 1149545 - RNA, 17 nt, Human
ugugugugaaaaugugu

SEQ ID NO: 1149546 - RNA, 20 nt, Human
ugugugugcuuauguaugag

SEQ ID NO: 1149547 - RNA, 19 nt, Human
ugugugugcuuauguauga

SEQ ID NO: 1149548 - RNA, 17 nt, Human
uguuagccccauaauuu

SEQ ID NO: 1149549 - RNA, 14 nt, Human
uguuaguaauaccu

SEQ ID NO: 1149550 - RNA, 15 nt, Human
uguuaguaauaccuc

SEQ ID NO: 1149551 - RNA, 16 nt, Human
uguuaguaauaccucu

SEQ ID NO: 1149552 - RNA, 17 nt, Human
uguucauauuaagaaug

SEQ ID NO: 1149553 - RNA, 18 nt, Human
uguucauauuaagaauga

SEQ ID NO: 1149554 - RNA, 23 nt, Human
uguucauauuaagaaugaucuga

SEQ ID NO: 1149555 - RNA, 15 nt, Human
uguucugcuuuccuc

SEQ ID NO: 1149556 - RNA, 14 nt, Human
uguuggcagccucu

SEQ ID NO: 1149557 - RNA, 20 nt, Human
uguuuacauuuuauggugcc

SEQ ID NO: 1149558 - RNA, 13 nt, Human
uuaaugaaugcuu

SEQ ID NO: 1149559 - RNA, 15 nt, Human
uuaaugaaugcuuaa

SEQ ID NO: 1149560 - RNA, 17 nt, Human
uuaaugaaugcuuaaag

SEQ ID NO: 1149561 - RNA, 21 nt, Human
uuaaugaaugcuuaaagaauu

SEQ ID NO: 1149562 - RNA, 20 nt, Human
uuaaugaaugcuuaaagaau

SEQ ID NO: 1149563 - RNA, 14 nt, Human
uuacauuuuauggu

SEQ ID NO: 1149564 - RNA, 23 nt, Human
uuacauuuuauggugccuaguau

SEQ ID NO: 1149565 - RNA, 12 nt, Human
uuuccugcccug

SEQ ID NO: 1149566 - RNA, 13 nt, Human
uuuccugcccugg

SEQ ID NO: 1149567 - RNA, 23 nt, Human
uuuccugccuuuuaguuccugug

SEQ ID NO: 1149568 - RNA, 22 nt, Human
uuuccugccuuuuaguuccugu

SEQ ID NO: 1149569 - RNA, 11 nt, Human
uuucuuccucu

SEQ ID NO: 1149570 - RNA, 13 nt, Human
uuucuuccucugc

SEQ ID NO: 1149571 - RNA, 14 nt, Human
uuucuuccucugcu

SEQ ID NO: 1149572 - RNA, 16 nt, Human
uuucuuccucugcuga

SEQ ID NO: 1149573 - RNA, 18 nt, Human
uuugaaucaucaagucuu

SEQ ID NO: 1149574 - RNA, 20 nt, Human
uuuggagucagacagaugug

SEQ ID NO: 1149575 - RNA, 16 nt, Human
uuuguaugcacuuugu

SEQ ID NO: 1149576 - RNA, 16 nt, Human
uuuuggauuggacaaa

SEQ ID NO: 1149577 - RNA, 11 nt, Human
uuuuuccuguc

SEQ ID NO: 1149578 - RNA, 11 nt, Human
uuuuuccuuuu

SEQ ID NO: 1149579 - RNA, 15 nt, Human
uuuuugaagcuguau

SEQ ID NO: 1149580 - RNA, 16 nt, Human
aacgcagcccugcuuu

SEQ ID NO: 1149581 - RNA, 23 nt, Human
aacgcaucuaguuccccuguuua

SEQ ID NO: 1149582 - RNA, 22 nt, Human
aacgcaucuaguuccccuguuu

SEQ ID NO: 1149583 - RNA, 14 nt, Human
aagaacuagcauaa

SEQ ID NO: 1149584 - RNA, 21 nt, Human
aagacaaggaaaaaauaacaa

SEQ ID NO: 1149585 - RNA, 19 nt, Human
aaggcagggagggccuggg

SEQ ID NO: 1149586 - RNA, 22 nt, Human
aaggcagggagggccugggccc

SEQ ID NO: 1149587 - RNA, 10 nt, Human
aagccuuugu

SEQ ID NO: 1149588 - RNA, 19 nt, Human
aauaaaccaaugaacgaag

SEQ ID NO: 1149589 - RNA, 22 nt, Human
aaucaaugcuauaacuauguug

SEQ ID NO: 1149590 - RNA, 20 nt, Human
aaugauguauguugaagccu

SEQ ID NO: 1149591 - RNA, 12 nt, Human
aaugaauaccuu

SEQ ID NO: 1149592 - RNA, 13 nt, Human
aaugaauaccuua

SEQ ID NO: 1149593 - RNA, 20 nt, Human
aaugaauacuuuauaaagga

SEQ ID NO: 1149594 - RNA, 14 nt, Human
aacaugaagaccuu

SEQ ID NO: 1149595 - RNA, 23 nt, Human
aacaugaagaccuuuuucugcac

SEQ ID NO: 1149596 - RNA, 18 nt, Human
aacaugaagaccuuuuuc

SEQ ID NO: 1149597 - RNA, 22 nt, Human
aacaugaagaccuuuuucugca

SEQ ID NO: 1149598 - RNA, 20 nt, Human
aacaugacuccauagaccuu

SEQ ID NO: 1149599 - RNA, 19 nt, Human
aacccucagagccaccccu

SEQ ID NO: 1149600 - RNA, 16 nt, Human
aaaagaaaagucaagg

SEQ ID NO: 1149601 - RNA, 20 nt, Human
aaaagacaaggaaaaaauaa

SEQ ID NO: 1149602 - RNA, 15 nt, Human
acucccaagcuggac

SEQ ID NO: 1149603 - RNA, 18 nt, Human
acucccugccccccagcc

SEQ ID NO: 1149604 - RNA, 20 nt, Human
acugacaagcuccauuuaaa

SEQ ID NO: 1149605 - RNA, 17 nt, Human
acugacaagcuccauuu

SEQ ID NO: 1149606 - RNA, 20 nt, Human
acugguggcccgacagccug

SEQ ID NO: 1149607 - RNA, 19 nt, Human
acugcccaggccugccugu

SEQ ID NO: 1149608 - RNA, 12 nt, Human
acugguggcccg

SEQ ID NO: 1149609 - RNA, 17 nt, Human
acuguaaaauaauaacu

SEQ ID NO: 1149610 - RNA, 20 nt, Human
acuguuucacuacucagcau

SEQ ID NO: 1149611 - RNA, 20 nt, Human
acuuaaaauauuccugcauu

SEQ ID NO: 1149612 - RNA, 12 nt, Human
acgcagcccugc

SEQ ID NO: 1149613 - RNA, 22 nt, Human
acgcagcccugcuuugggcugc

SEQ ID NO: 1149614 - RNA, 23 nt, Human
acgcagcccugcuuugggcugcc

SEQ ID NO: 1149615 - RNA, 14 nt, Human
acgcuuaaauacag

SEQ ID NO: 1149616 - RNA, 21 nt, Human
accgggcugggagcucugcag

SEQ ID NO: 1149617 - RNA, 23 nt, Human
accgggcugggagcucugcagag

SEQ ID NO: 1149618 - RNA, 19 nt, Human
accgugccuggccacgccc

SEQ ID NO: 1149619 - RNA, 11 nt, Human
acccucagagc

SEQ ID NO: 1149620 - RNA, 18 nt, Human
acccucagagccaccccu

SEQ ID NO: 1149621 - RNA, 18 nt, Human
acccuggcacccagggug

SEQ ID NO: 1149622 - RNA, 15 nt, Human
acagugcaucucagc

SEQ ID NO: 1149623 - RNA, 17 nt, Human
acagugcaucucagccc

SEQ ID NO: 1149624 - RNA, 18 nt, Human
acagugcaucucagccca

SEQ ID NO: 1149625 - RNA, 14 nt, Human
accaagccguggcu

SEQ ID NO: 1149626 - RNA, 15 nt, Human
accaagccguggcuu

SEQ ID NO: 1149627 - RNA, 16 nt, Human
accaagccguggcuuc

SEQ ID NO: 1149628 - RNA, 17 nt, Human
accaagccguggcuucc

SEQ ID NO: 1149629 - RNA, 18 nt, Human
accaagccguggcuuccc

SEQ ID NO: 1149630 - RNA, 17 nt, Human
acauguguuggcagccu

SEQ ID NO: 1149631 - RNA, 19 nt, Human
aauuauacccccugcaaag

SEQ ID NO: 1149632 - RNA, 17 nt, Human
aauuauagcucuaaugu

SEQ ID NO: 1149633 - RNA, 18 nt, Human
aauuauagcucuaauguu

SEQ ID NO: 1149634 - RNA, 19 nt, Human
aauuauagcucuaauguuu

SEQ ID NO: 1149635 - RNA, 20 nt, Human
aauuauagcucuaauguuug

SEQ ID NO: 1149636 - RNA, 22 nt, Human
aauuauagcucuaauguuugca

SEQ ID NO: 1149637 - RNA, 23 nt, Human
aauuauagcucuaauguuugcau

SEQ ID NO: 1149638 - RNA, 22 nt, Human
aauucuagcuuugagcuuaaga

SEQ ID NO: 1149639 - RNA, 14 nt, Human
aauucuccugccuc

SEQ ID NO: 1149640 - RNA, 15 nt, Human
aauucuccugccuca

SEQ ID NO: 1149641 - RNA, 16 nt, Human
aauucuccugccucag

SEQ ID NO: 1149642 - RNA, 11 nt, Human
aauuguaauag

SEQ ID NO: 1149643 - RNA, 14 nt, Human
acaaacaauaccug

SEQ ID NO: 1149644 - RNA, 22 nt, Human
acaaacugcaccaguugcugcu

SEQ ID NO: 1149645 - RNA, 20 nt, Human
acaaguguaaugaauaccuu

SEQ ID NO: 1149646 - RNA, 13 nt, Human
acaaguguaauga

SEQ ID NO: 1149647 - RNA, 16 nt, Human
acaaguguaaugaaua

SEQ ID NO: 1149648 - RNA, 14 nt, Human
aucgaccugccucg

SEQ ID NO: 1149649 - RNA, 15 nt, Human
auccuugaagguaua

SEQ ID NO: 1149650 - RNA, 14 nt, Human
auccuugaagguau

SEQ ID NO: 1149651 - RNA, 22 nt, Human
auauuuuuuuucuuuuuaccca

SEQ ID NO: 1149652 - RNA, 12 nt, Human
aucaaaggacac

SEQ ID NO: 1149653 - RNA, 15 nt, Human
augcucuuauuucau

SEQ ID NO: 1149654 - RNA, 17 nt, Human
augcucuuauuucauca

SEQ ID NO: 1149655 - RNA, 19 nt, Human
augcucuuauuucaucauu

SEQ ID NO: 1149656 - RNA, 18 nt, Human
augcucuuauuucaucau

SEQ ID NO: 1149657 - RNA, 23 nt, Human
augcauauuuuuuuucuuuuuac

SEQ ID NO: 1149658 - RNA, 17 nt, Human
augaauaaagacaccua

SEQ ID NO: 1149659 - RNA, 24 nt, Human
augaauaccuuagugcaguuauuu

SEQ ID NO: 1149660 - RNA, 14 nt, Human
auacaccgggccug

SEQ ID NO: 1149661 - RNA, 18 nt, Human
auacaccgggccuggaga

SEQ ID NO: 1149662 - RNA, 15 nt, Human
auaaguggugugugu

SEQ ID NO: 1149663 - RNA, 16 nt, Human
auaaaagacagugaaa

SEQ ID NO: 1149664 - RNA, 21 nt, Human
aguggccaagagaugcagugc

SEQ ID NO: 1149665 - RNA, 18 nt, Human
aguuacacaugaucauaa

SEQ ID NO: 1149666 - RNA, 16 nt, Human
agugcuaacaugaaga

SEQ ID NO: 1149667 - RNA, 17 nt, Human
agugcuaacaugaagac

SEQ ID NO: 1149668 - RNA, 19 nt, Human
agugcuaacaugaagaccu

SEQ ID NO: 1149669 - RNA, 22 nt, Human
agugcuaacaugaagaccuuuu

SEQ ID NO: 1149670 - RNA, 23 nt, Human
agugcuaacaugaagaccuuuuu

SEQ ID NO: 1149671 - RNA, 23 nt, Human
aguaaacaauaaaaguguccauu

SEQ ID NO: 1149672 - RNA, 16 nt, Human
agaaugaucugauuga

SEQ ID NO: 1149673 - RNA, 14 nt, Human
agaaugaucugauu

SEQ ID NO: 1149674 - RNA, 17 nt, Human
agaaugaucugauugac

SEQ ID NO: 1149675 - RNA, 17 nt, Human
agaaccaggcaacuugg

SEQ ID NO: 1149676 - RNA, 20 nt, Human
agaaccaggcaacuugggaa

SEQ ID NO: 1149677 - RNA, 15 nt, Human
agaacaaaugaagac

SEQ ID NO: 1149678 - RNA, 12 nt, Human
agaacaaaugaa

SEQ ID NO: 1149679 - RNA, 15 nt, Human
agaauuuugagcagg

SEQ ID NO: 1149680 - RNA, 19 nt, Human
agacaaaacauacauuuug

SEQ ID NO: 1149681 - RNA, 19 nt, Human
agacaaggaaaaaauaaca

SEQ ID NO: 1149682 - RNA, 13 nt, Human
agacagcccucca

SEQ ID NO: 1149683 - RNA, 14 nt, Human
agaccuuuuucugc

SEQ ID NO: 1149684 - RNA, 18 nt, Human
agaccuuuuucugcacua

SEQ ID NO: 1149685 - RNA, 20 nt, Human
agaccuuuuucugcacuaua

SEQ ID NO: 1149686 - RNA, 12 nt, Human
agcaaauccuuu

SEQ ID NO: 1149687 - RNA, 20 nt, Human
agcaaauccuuugugaaaaa

SEQ ID NO: 1149688 - RNA, 18 nt, Human
agaucucugcuuuggaaa

SEQ ID NO: 1149689 - RNA, 23 nt, Human
agaucucugcuuuggaaaucaca

SEQ ID NO: 1149690 - RNA, 18 nt, Human
agaugacaagaaaggcug

SEQ ID NO: 1149691 - RNA, 18 nt, Human
agauggcugugccucugc

SEQ ID NO: 1149692 - RNA, 19 nt, Human
agauggcugugccucugcc

SEQ ID NO: 1149693 - RNA, 20 nt, Human
agauggcugugccucugccu

SEQ ID NO: 1149694 - RNA, 21 nt, Human
agauggcugugccucugccug

SEQ ID NO: 1149695 - RNA, 22 nt, Human
agauggcugugccucugccugu

SEQ ID NO: 1149696 - RNA, 12 nt, Human
agaguggcuccu

SEQ ID NO: 1149697 - RNA, 13 nt, Human
agaguggcuccuc

SEQ ID NO: 1149698 - RNA, 14 nt, Human
agaguggcuccucc

SEQ ID NO: 1149699 - RNA, 15 nt, Human
agaguggcuccuccc

SEQ ID NO: 1149700 - RNA, 20 nt, Human
agauagauaggucagugcaa

SEQ ID NO: 1149701 - RNA, 15 nt, Human
agcaauucuccugcc

SEQ ID NO: 1149702 - RNA, 17 nt, Human
agcaauucuccugccuc

SEQ ID NO: 1149703 - RNA, 18 nt, Human
agcaauucuccugccuca

SEQ ID NO: 1149704 - RNA, 19 nt, Human
agcaauucuccugccucag

SEQ ID NO: 1149705 - RNA, 20 nt, Human
agcaauucuccugccucagc

SEQ ID NO: 1149706 - RNA, 15 nt, Human
agcaucucagcucau

SEQ ID NO: 1149707 - RNA, 17 nt, Human
aggcucuguuccacaua

SEQ ID NO: 1149708 - RNA, 13 nt, Human
aggcucuucuccu

SEQ ID NO: 1149709 - RNA, 13 nt, Human
aggcugagccuca

SEQ ID NO: 1149710 - RNA, 14 nt, Human
aggcucuucuccuu

SEQ ID NO: 1149711 - RNA, 11 nt, Human
aggcugaggac

SEQ ID NO: 1149712 - RNA, 13 nt, Human
aggcugaggacuu

SEQ ID NO: 1149713 - RNA, 16 nt, Human
aggagagcccuucauu

SEQ ID NO: 1149714 - RNA, 22 nt, Human
agcuuugucacuguuucacuac

SEQ ID NO: 1149715 - RNA, 18 nt, Human
aggaaaaaauaacaauga

SEQ ID NO: 1149716 - RNA, 19 nt, Human
aggaaaaccaagccguggc

SEQ ID NO: 1149717 - RNA, 20 nt, Human
aggaaaaccaagccguggcu

SEQ ID NO: 1149718 - RNA, 21 nt, Human
aggaaaaccaagccguggcuu

SEQ ID NO: 1149719 - RNA, 22 nt, Human
aggaaaaccaagccguggcuuc

SEQ ID NO: 1149720 - RNA, 23 nt, Human
aggaaaaccaagccguggcuucc

SEQ ID NO: 1149721 - RNA, 14 nt, Human
aggaagguacugua

SEQ ID NO: 1149722 - RNA, 15 nt, Human
aggaagguacuguau

SEQ ID NO: 1149723 - RNA, 17 nt, Human
aggaagguacuguauga

SEQ ID NO: 1149724 - RNA, 18 nt, Human
aggaagguacuguaugau

SEQ ID NO: 1149725 - RNA, 16 nt, Human
agcuggguuggaaaac

SEQ ID NO: 1149726 - RNA, 20 nt, Human
agcuggguuggaaaacagua

SEQ ID NO: 1149727 - RNA, 17 nt, Human
agccuggcacagggcag

SEQ ID NO: 1149728 - RNA, 18 nt, Human
agccuggcacagggcagu

SEQ ID NO: 1149729 - RNA, 20 nt, Human
agccuggcacagggcagugg

SEQ ID NO: 1149730 - RNA, 15 nt, Human
agccuuuggaaacag

SEQ ID NO: 1149731 - RNA, 13 nt, Human
agcuacaaaugca

SEQ ID NO: 1149732 - RNA, 15 nt, Human
cucccacaggcccuu

SEQ ID NO: 1149733 - RNA, 16 nt, Human
cucccacaggcccuuc

SEQ ID NO: 1149734 - RNA, 20 nt, Human
cucccacaggcccuuccucu

SEQ ID NO: 1149735 - RNA, 21 nt, Human
cucccacaggcccuuccucuc

SEQ ID NO: 1149736 - RNA, 20 nt, Human
cucccugaaguaagcaaaga

SEQ ID NO: 1149737 - RNA, 17 nt, Human
cucccccguccuggagg

SEQ ID NO: 1149738 - RNA, 13 nt, Human
cuccuaccuggua

SEQ ID NO: 1149739 - RNA, 12 nt, Human
cuccucugucca

SEQ ID NO: 1149740 - RNA, 15 nt, Human
cuccucuguccaggc

SEQ ID NO: 1149741 - RNA, 12 nt, Human
cuccucuugcca

SEQ ID NO: 1149742 - RNA, 15 nt, Human
cuccucuugccacug

SEQ ID NO: 1149743 - RNA, 16 nt, Human
cuccucuugccacugc

SEQ ID NO: 1149744 - RNA, 18 nt, Human
cuccucuugccacugccu

SEQ ID NO: 1149745 - RNA, 14 nt, Human
cuccuggggguucu

SEQ ID NO: 1149746 - RNA, 13 nt, Human
cuccuuucacaac

SEQ ID NO: 1149747 - RNA, 16 nt, Human
cuccuuucacaaccuu

SEQ ID NO: 1149748 - RNA, 17 nt, Human
cuccuuucacaaccuuc

SEQ ID NO: 1149749 - RNA, 20 nt, Human
cuccuuucacaaccuucugu

SEQ ID NO: 1149750 - RNA, 22 nt, Human
cucagguugucugaagucacug

SEQ ID NO: 1149751 - RNA, 14 nt, Human
cucagguugucuga

SEQ ID NO: 1149752 - RNA, 18 nt, Human
cuaucaugucaaacguga

SEQ ID NO: 1149753 - RNA, 17 nt, Human
cuauccuacuuccccuu

SEQ ID NO: 1149754 - RNA, 15 nt, Human
cucaauaaaauuaua

SEQ ID NO: 1149755 - RNA, 21 nt, Human
ccuguucacucuacuuagcau

SEQ ID NO: 1149756 - RNA, 12 nt, Human
ccuguucccauu

SEQ ID NO: 1149757 - RNA, 16 nt, Human
ccuguucugcuuuccu

SEQ ID NO: 1149758 - RNA, 20 nt, Human
ccuuaggugauccacucgcc

SEQ ID NO: 1149759 - RNA, 15 nt, Human
ccuuagugcaguuau

SEQ ID NO: 1149760 - RNA, 20 nt, Human
ccuuagugcaguuauuugcu

SEQ ID NO: 1149761 - RNA, 13 nt, Human
ccuuaucaaagga

SEQ ID NO: 1149762 - RNA, 14 nt, Human
ccuuaucaaaggac

SEQ ID NO: 1149763 - RNA, 18 nt, Human
ccuuaucaaaggacacca

SEQ ID NO: 1149764 - RNA, 15 nt, Human
ccuucccaugcccug

SEQ ID NO: 1149765 - RNA, 19 nt, Human
ccuucccccuccaauccca

SEQ ID NO: 1149766 - RNA, 18 nt, Human
ccuuccuaauuccacagc

SEQ ID NO: 1149767 - RNA, 19 nt, Human
ccuuccuaauuccacagcu

SEQ ID NO: 1149768 - RNA, 20 nt, Human
ccuuccuaauuccacagcug

SEQ ID NO: 1149769 - RNA, 21 nt, Human
ccuuccuaauuccacagcugc

SEQ ID NO: 1149770 - RNA, 14 nt, Human
ccuuccucuccacu

SEQ ID NO: 1149771 - RNA, 15 nt, Human
ccuuccucuccacug

SEQ ID NO: 1149772 - RNA, 16 nt, Human
ccuuccucuccacugc

SEQ ID NO: 1149773 - RNA, 17 nt, Human
ccuuccucuccacugcc

SEQ ID NO: 1149774 - RNA, 20 nt, Human
ccuuccucuccacugccuuc

SEQ ID NO: 1149775 - RNA, 21 nt, Human
ccuuccucuccacugccuucg

SEQ ID NO: 1149776 - RNA, 14 nt, Human
ccuuuauucuggca

SEQ ID NO: 1149777 - RNA, 13 nt, Human
cuaacuaaaacaa

SEQ ID NO: 1149778 - RNA, 20 nt, Human
cuaacuaaaacaaagccacu

SEQ ID NO: 1149779 - RNA, 17 nt, Human
cuaagucaacuuagcau

SEQ ID NO: 1149780 - RNA, 17 nt, Human
cgagucucuucuccacu

SEQ ID NO: 1149781 - RNA, 18 nt, Human
cgagucucuucuccacug

SEQ ID NO: 1149782 - RNA, 20 nt, Human
cgagucucuucuccacugga

SEQ ID NO: 1149783 - RNA, 21 nt, Human
cgagucucuucuccacuggau

SEQ ID NO: 1149784 - RNA, 22 nt, Human
cgcaggcuggcccugcccuggu

SEQ ID NO: 1149785 - RNA, 16 nt, Human
cgccaauaaaccaaug

SEQ ID NO: 1149786 - RNA, 23 nt, Human
cgccaauaaaccaaugaacgaag

SEQ ID NO: 1149787 - RNA, 20 nt, Human
cgcucugucgcccaggcugg

SEQ ID NO: 1149788 - RNA, 21 nt, Human
cgcucuuggcagguacucagc

SEQ ID NO: 1149789 - RNA, 16 nt, Human
cgggccuggagaacua

SEQ ID NO: 1149790 - RNA, 20 nt, Human
cgggccuggagaacuagaga

SEQ ID NO: 1149791 - RNA, 16 nt, Human
cgggcugggagcucug

SEQ ID NO: 1149792 - RNA, 20 nt, Human
cgggcugggagcucugcaga

SEQ ID NO: 1149793 - RNA, 16 nt, Human
cggaggggccuggcag

SEQ ID NO: 1149794 - RNA, 15 nt, Human
cggaggggccuggca

SEQ ID NO: 1149795 - RNA, 18 nt, Human
cggcuaauuuuuguauuu

SEQ ID NO: 1149796 - RNA, 18 nt, Human
ccucagccuccugaguag

SEQ ID NO: 1149797 - RNA, 13 nt, Human
ccuccgccucccg

SEQ ID NO: 1149798 - RNA, 16 nt, Human
ccuccgccucccgggu

SEQ ID NO: 1149799 - RNA, 15 nt, Human
ccuccgggaccccca

SEQ ID NO: 1149800 - RNA, 18 nt, Human
ccuccgggacccccagga

SEQ ID NO: 1149801 - RNA, 19 nt, Human
ccuccgggacccccaggac

SEQ ID NO: 1149802 - RNA, 11 nt, Human
ccucugcccug

SEQ ID NO: 1149803 - RNA, 12 nt, Human
ccucugcccugc

SEQ ID NO: 1149804 - RNA, 13 nt, Human
ccucugcccugcg

SEQ ID NO: 1149805 - RNA, 14 nt, Human
ccucugcccugcgg

SEQ ID NO: 1149806 - RNA, 15 nt, Human
ccucugccugucucc

SEQ ID NO: 1149807 - RNA, 19 nt, Human
ccucugccugucuccccca

SEQ ID NO: 1149808 - RNA, 15 nt, Human
ccgaccaccugccca

SEQ ID NO: 1149809 - RNA, 20 nt, Human
ccguccuggagguuccccag

SEQ ID NO: 1149810 - RNA, 23 nt, Human
ccguccuggagguuccccagccc

SEQ ID NO: 1149811 - RNA, 20 nt, Human
ccuaaugcgcaggcuggccc

SEQ ID NO: 1149812 - RNA, 20 nt, Human
cccuggcucccacaggcccu

SEQ ID NO: 1149813 - RNA, 11 nt, Human
cccugcccugg

SEQ ID NO: 1149814 - RNA, 12 nt, Human
cccugcccuggu

SEQ ID NO: 1149815 - RNA, 22 nt, Human
cccugcccugguuuccugcccu

SEQ ID NO: 1149816 - RNA, 23 nt, Human
cccugcccugguuuccugcccug

SEQ ID NO: 1149817 - RNA, 19 nt, Human
cccuggauccaucaggcca

SEQ ID NO: 1149818 - RNA, 14 nt, Human
cccugccccccagc

SEQ ID NO: 1149819 - RNA, 15 nt, Human
cccugccccccagcc

SEQ ID NO: 1149820 - RNA, 20 nt, Human
cccugccccccagcccuccu

SEQ ID NO: 1149821 - RNA, 17 nt, Human
cccugccccucccuuca

SEQ ID NO: 1149822 - RNA, 18 nt, Human
cccugccccucccuucaa

SEQ ID NO: 1149823 - RNA, 19 nt, Human
cccugccccucccuucaac

SEQ ID NO: 1149824 - RNA, 23 nt, Human
cccugccccucccuucaaccauu

SEQ ID NO: 1149825 - RNA, 11 nt, Human
cccuccuccug

SEQ ID NO: 1149826 - RNA, 16 nt, Human
cccuccuccuggacuc

SEQ ID NO: 1149827 - RNA, 18 nt, Human
cccuccuccuggacuccu

SEQ ID NO: 1149828 - RNA, 14 nt, Human
cccuccucucugcc

SEQ ID NO: 1149829 - RNA, 15 nt, Human
cccuccucucugccc

SEQ ID NO: 1149830 - RNA, 13 nt, Human
ccccagccccacu

SEQ ID NO: 1149831 - RNA, 14 nt, Human
ccccagccccacuu

SEQ ID NO: 1149832 - RNA, 15 nt, Human
ccccagccccacuua

SEQ ID NO: 1149833 - RNA, 14 nt, Human
ccaugucucgacuc

SEQ ID NO: 1149834 - RNA, 15 nt, Human
ccaugucucgacuca

SEQ ID NO: 1149835 - RNA, 20 nt, Human
ccaugucucugagcauuaga

SEQ ID NO: 1149836 - RNA, 12 nt, Human
ccauugugcauu

SEQ ID NO: 1149837 - RNA, 17 nt, Human
ccauugugcauucuaga

SEQ ID NO: 1149838 - RNA, 14 nt, Human
cccaaccugcucuc

SEQ ID NO: 1149839 - RNA, 20 nt, Human
ccauuuaaacagauguccau

SEQ ID NO: 1149840 - RNA, 21 nt, Human
cccaaccugcucuccucuugc

SEQ ID NO: 1149841 - RNA, 23 nt, Human
cccaaccugcucuccucuugcca

SEQ ID NO: 1149842 - RNA, 20 nt, Human
cccaacuaauuuuuguauuu

SEQ ID NO: 1149843 - RNA, 20 nt, Human
cccaagaauagaugcugacu

SEQ ID NO: 1149844 - RNA, 21 nt, Human
cccaagaauagaugcugacug

SEQ ID NO: 1149845 - RNA, 23 nt, Human
cccaagccuacuuuugccauuga

SEQ ID NO: 1149846 - RNA, 16 nt, Human
cccaagccuggcaagg

SEQ ID NO: 1149847 - RNA, 13 nt, Human
ccaggcugagccu

SEQ ID NO: 1149848 - RNA, 14 nt, Human
ccaggcugagccuc

SEQ ID NO: 1149849 - RNA, 16 nt, Human
ccaggcugagccucag

SEQ ID NO: 1149850 - RNA, 17 nt, Human
ccaggcugagccucagu

SEQ ID NO: 1149851 - RNA, 19 nt, Human
ccaggcugagccucagucu

SEQ ID NO: 1149852 - RNA, 22 nt, Human
ccaggcugagccucagucuccc

SEQ ID NO: 1149853 - RNA, 12 nt, Human
ccacuuggcauu

SEQ ID NO: 1149854 - RNA, 24 nt, Human
ccacuuucaaucuucaauccuuga

SEQ ID NO: 1149855 - RNA, 22 nt, Human
caguuauuauauuuacaaaugg

SEQ ID NO: 1149856 - RNA, 17 nt, Human
caguuauuauauuuaca

SEQ ID NO: 1149857 - RNA, 21 nt, Human
caguuauuauauuuacaaaug

SEQ ID NO: 1149858 - RNA, 20 nt, Human
cauccucuuccauauggauc

SEQ ID NO: 1149859 - RNA, 15 nt, Human
caucuaaacugcccc

SEQ ID NO: 1149860 - RNA, 21 nt, Human
caucuaaacugcccccucugc

SEQ ID NO: 1149861 - RNA, 16 nt, Human
cauagguuuaauaauu

SEQ ID NO: 1149862 - RNA, 13 nt, Human
cauuuguagguag

SEQ ID NO: 1149863 - RNA, 13 nt, Human
cauuuguucauau

SEQ ID NO: 1149864 - RNA, 14 nt, Human
cauuuguucauauu

SEQ ID NO: 1149865 - RNA, 18 nt, Human
cauuuguucauauuaaga

SEQ ID NO: 1149866 - RNA, 20 nt, Human
cauuuguucauauuaagaau

SEQ ID NO: 1149867 - RNA, 19 nt, Human
cauuuguucauauuaagaa

SEQ ID NO: 1149868 - RNA, 21 nt, Human
ccaauggagacugucucaaga

SEQ ID NO: 1149869 - RNA, 18 nt, Human
cauguuggccaggcuggu

SEQ ID NO: 1149870 - RNA, 20 nt, Human
caugggaaaugucaacaagu

SEQ ID NO: 1149871 - RNA, 14 nt, Human
cauggccgugaacu

SEQ ID NO: 1149872 - RNA, 15 nt, Human
cauggccagguggcc

SEQ ID NO: 1149873 - RNA, 21 nt, Human
caggcgugagccaccgugccu

SEQ ID NO: 1149874 - RNA, 14 nt, Human
cagacagcccucca

SEQ ID NO: 1149875 - RNA, 18 nt, Human
cagcacgggggccaagga

SEQ ID NO: 1149876 - RNA, 14 nt, Human
cagauccccaagcc

SEQ ID NO: 1149877 - RNA, 15 nt, Human
cagauccccaagccu

SEQ ID NO: 1149878 - RNA, 13 nt, Human
auucauaugcaua

SEQ ID NO: 1149879 - RNA, 14 nt, Human
auucauaugcauau

SEQ ID NO: 1149880 - RNA, 15 nt, Human
auucauaugcauauu

SEQ ID NO: 1149881 - RNA, 18 nt, Human
auucauaugcauauuuuu

SEQ ID NO: 1149882 - RNA, 16 nt, Human
auucauaugcauauuu

SEQ ID NO: 1149883 - RNA, 18 nt, Human
auuagauaaauguccauu

SEQ ID NO: 1149884 - RNA, 15 nt, Human
auuaauggaaauguu

SEQ ID NO: 1149885 - RNA, 15 nt, Human
auuacaggcuccugc

SEQ ID NO: 1149886 - RNA, 16 nt, Human
auuacaggcuccugcc

SEQ ID NO: 1149887 - RNA, 17 nt, Human
auuacaggcuccugcca

SEQ ID NO: 1149888 - RNA, 19 nt, Human
auuacaggcuccugccacc

SEQ ID NO: 1149889 - RNA, 13 nt, Human
auuacagguguga

SEQ ID NO: 1149890 - RNA, 13 nt, Human
auuuguucauauu

SEQ ID NO: 1149891 - RNA, 17 nt, Human
auuuucuauaauuuaaa

SEQ ID NO: 1149892 - RNA, 18 nt, Human
auuuucuauaauuuaaau

SEQ ID NO: 1149893 - RNA, 19 nt, Human
auuuucuauaauuuaaaua

SEQ ID NO: 1149894 - RNA, 15 nt, Human
auuuucugcaucucc

SEQ ID NO: 1149895 - RNA, 16 nt, Human
auuuucugcaucucca

SEQ ID NO: 1149896 - RNA, 19 nt, Human
auuuucugcaucuccacuu

SEQ ID NO: 1149897 - RNA, 20 nt, Human
auuuuuaucaguuacacaug

SEQ ID NO: 1149898 - RNA, 19 nt, Human
caaacauccucuuccauau

SEQ ID NO: 1149899 - RNA, 17 nt, Human
cacuccagaccccuggc

SEQ ID NO: 1149900 - RNA, 16 nt, Human
cacuagacccacugga

SEQ ID NO: 1149901 - RNA, 14 nt, Human
cacuccagaccccu

SEQ ID NO: 1149902 - RNA, 16 nt, Human
cacuccagaccccugg

SEQ ID NO: 1149903 - RNA, 15 nt, Human
cacccuggauuugca

SEQ ID NO: 1149904 - RNA, 21 nt, Human
caagcuccaucuccacuccag

SEQ ID NO: 1149905 - RNA, 17 nt, Human
caagcuccaucuccacu

SEQ ID NO: 1149906 - RNA, 18 nt, Human
caagcaccuagccucgcu

SEQ ID NO: 1149907 - RNA, 13 nt, Human
caagaucccauuu

SEQ ID NO: 1149908 - RNA, 15 nt, Human
caagaucccauuuga

SEQ ID NO: 1149909 - RNA, 18 nt, Human
caagaugaaauuccauuu

SEQ ID NO: 1149910 - RNA, 20 nt, Human
caagaugaaauuccauuugu

SEQ ID NO: 1149911 - RNA, 13 nt, Human
caagcaagaaaca

SEQ ID NO: 1149912 - RNA, 18 nt, Human
caagcaagaaacacuggg

SEQ ID NO: 1149913 - RNA, 19 nt, Human
caacucccugccccccagc

SEQ ID NO: 1149914 - RNA, 20 nt, Human
caacucccugccccccagcc

SEQ ID NO: 1149915 - RNA, 21 nt, Human
caacucccugccccccagccc

SEQ ID NO: 1149916 - RNA, 18 nt, Human
caagaauagaugcugacu

SEQ ID NO: 1149917 - RNA, 18 nt, Human
cugcaaagcccagcuuga

SEQ ID NO: 1149918 - RNA, 17 nt, Human
cugcaaccuucgccacc

SEQ ID NO: 1149919 - RNA, 19 nt, Human
cugcaaccuucgccaccug

SEQ ID NO: 1149920 - RNA, 20 nt, Human
cugcaaccuucgccaccugg

SEQ ID NO: 1149921 - RNA, 22 nt, Human
cugcaaccuucgccaccugggu

SEQ ID NO: 1149922 - RNA, 18 nt, Human
cugcaacuuguaaaugug

SEQ ID NO: 1149923 - RNA, 19 nt, Human
cugcaacuuguaaaugugg

SEQ ID NO: 1149924 - RNA, 14 nt, Human
cugcacuauaugca

SEQ ID NO: 1149925 - RNA, 17 nt, Human
cugccagucccccugcc

SEQ ID NO: 1149926 - RNA, 20 nt, Human
cugccagucccccugcccca

SEQ ID NO: 1149927 - RNA, 21 nt, Human
cugccagucccccugccccag

SEQ ID NO: 1149928 - RNA, 22 nt, Human
cugccagucccccugccccagg

SEQ ID NO: 1149929 - RNA, 13 nt, Human
cugccccccagcc

SEQ ID NO: 1149930 - RNA, 14 nt, Human
cugccccucccuuc

SEQ ID NO: 1149931 - RNA, 17 nt, Human
cugccccucccuucaac

SEQ ID NO: 1149932 - RNA, 17 nt, Human
cugccccuccucucugc

SEQ ID NO: 1149933 - RNA, 18 nt, Human
cugccccuccucucugcc

SEQ ID NO: 1149934 - RNA, 20 nt, Human
cugccccuccucucugcccu

SEQ ID NO: 1149935 - RNA, 19 nt, Human
cugccccuccucucugccc

SEQ ID NO: 1149936 - RNA, 19 nt, Human
cugcugagucccaggcuga

SEQ ID NO: 1149937 - RNA, 23 nt, Human
cugcugagucccaggcugagccu

SEQ ID NO: 1149938 - RNA, 17 nt, Human
cugugacuucagcucug

SEQ ID NO: 1149939 - RNA, 22 nt, Human
cugugacuucagcucuguuuua

SEQ ID NO: 1149940 - RNA, 15 nt, Human
cuguucacucuacuu

SEQ ID NO: 1149941 - RNA, 15 nt, Human
cuguugcugccucau

SEQ ID NO: 1149942 - RNA, 16 nt, Human
cuguugcugccucaug

SEQ ID NO: 1149943 - RNA, 17 nt, Human
cuguugcugccucaugc

SEQ ID NO: 1149944 - RNA, 18 nt, Human
cuuaaaauauuccugcau

SEQ ID NO: 1149945 - RNA, 20 nt, Human
cuuaaaauauuccugcauuu

SEQ ID NO: 1149946 - RNA, 16 nt, Human
cuuacagcaaauccuu

SEQ ID NO: 1149947 - RNA, 18 nt, Human
cuuacagcaaauccuuug

SEQ ID NO: 1149948 - RNA, 22 nt, Human
cuuaccgcguaaugcgccaaua

SEQ ID NO: 1149949 - RNA, 14 nt, Human
cuucacugugcugu

SEQ ID NO: 1149950 - RNA, 13 nt, Human
cuucacugugcug

SEQ ID NO: 1149951 - RNA, 17 nt, Human
cuucaguuaagccuuug

SEQ ID NO: 1149952 - RNA, 18 nt, Human
cuucaguuaagccuuugg

SEQ ID NO: 1149953 - RNA, 22 nt, Human
cuucaucucccaaagugcuggg

SEQ ID NO: 1149954 - RNA, 15 nt, Human
cuuccaugucgccuc

SEQ ID NO: 1149955 - RNA, 16 nt, Human
cuuccaugucgccucu

SEQ ID NO: 1149956 - RNA, 17 nt, Human
cuuccaugucgccucug

SEQ ID NO: 1149957 - RNA, 18 nt, Human
cuuccaugucgccucugc

SEQ ID NO: 1149958 - RNA, 19 nt, Human
cuuccaugucgccucugca

SEQ ID NO: 1149959 - RNA, 20 nt, Human
cuuccaugucgccucugcau

SEQ ID NO: 1149960 - RNA, 22 nt, Human
cuuucggggagaggcugaggac

SEQ ID NO: 1149961 - RNA, 17 nt, Human
cuuucuaaugugugaau

SEQ ID NO: 1149962 - RNA, 16 nt, Human
cuuugagcuuaagaau

SEQ ID NO: 1149963 - RNA, 19 nt, Human
cuuuuauuuagcaccaggg

SEQ ID NO: 1149964 - RNA, 23 nt, Human
gaacccuuaaacaguugcacagc

SEQ ID NO: 1149965 - RNA, 20 nt, Human
gaacucugacaacagacuuc

SEQ ID NO: 1149966 - RNA, 19 nt, Human
gaagacaaaacauacauuu

SEQ ID NO: 1149967 - RNA, 23 nt, Human
gaagacaaaacauacauuuugua

SEQ ID NO: 1149968 - RNA, 20 nt, Human
gaauauuagugaccucagcu

SEQ ID NO: 1149969 - RNA, 16 nt, Human
gacauuccuugcugaa

SEQ ID NO: 1149970 - RNA, 13 nt, Human
gaccauacuaauu

SEQ ID NO: 1149971 - RNA, 15 nt, Human
gacucaccuccccca

SEQ ID NO: 1149972 - RNA, 22 nt, Human
gacucaccucccccaucucuuc

SEQ ID NO: 1149973 - RNA, 12 nt, Human
gacucugccucc

SEQ ID NO: 1149974 - RNA, 16 nt, Human
gacucugccuccucuu

SEQ ID NO: 1149975 - RNA, 23 nt, Human
gacuguacuccucccaggcgccc

SEQ ID NO: 1149976 - RNA, 14 nt, Human
gacuguuguuaucu

SEQ ID NO: 1149977 - RNA, 19 nt, Human
gacuguuguuaucuguuug

SEQ ID NO: 1149978 - RNA, 20 nt, Human
gacuguuguuaucuguuuga

SEQ ID NO: 1149979 - RNA, 21 nt, Human
gacuguuguuaucuguuugag

SEQ ID NO: 1149980 - RNA, 21 nt, Human
gagcgcccacuagacccacug

SEQ ID NO: 1149981 - RNA, 17 nt, Human
gaggcaucgcaauguaa

SEQ ID NO: 1149982 - RNA, 16 nt, Human
gaguuuaaauuguaau

SEQ ID NO: 1149983 - RNA, 20 nt, Human
gauguauguugaagccuuug

SEQ ID NO: 1149984 - RNA, 21 nt, Human
gauguauguugaagccuuugu

SEQ ID NO: 1149985 - RNA, 20 nt, Human
gauuauaggcaccuaccacc

SEQ ID NO: 1149986 - RNA, 20 nt, Human
gauuuuuuacagcugccugc

SEQ ID NO: 1149987 - RNA, 14 nt, Human
gcacaaguguaaug

SEQ ID NO: 1149988 - RNA, 17 nt, Human
gcacaaguguaaugaau

SEQ ID NO: 1149989 - RNA, 19 nt, Human
gcacaaguguaaugaauac

SEQ ID NO: 1149990 - RNA, 21 nt, Human
gcacaaguguaaugaauaccu

SEQ ID NO: 1149991 - RNA, 20 nt, Human
gcacagugcaucucagccca

SEQ ID NO: 1149992 - RNA, 21 nt, Human
gcacagugcaucucagcccac

SEQ ID NO: 1149993 - RNA, 21 nt, Human
gcaccuaccaccacgcccggc

SEQ ID NO: 1149994 - RNA, 22 nt, Human
gcaccuaccaccacgcccggcu

SEQ ID NO: 1149995 - RNA, 18 nt, Human
gcacuuggagacuuguau

SEQ ID NO: 1149996 - RNA, 13 nt, Human
gccaccacgcccg

SEQ ID NO: 1149997 - RNA, 14 nt, Human
gccaccacgcccgg

SEQ ID NO: 1149998 - RNA, 12 nt, Human
gccacugccucu

SEQ ID NO: 1149999 - RNA, 13 nt, Human
gccacugccucuu

SEQ ID NO: 1150000 - RNA, 16 nt, Human
gccacugccucuuccu

SEQ ID NO: 1150001 - RNA, 17 nt, Human
gccacugccucuuccuc

SEQ ID NO: 1150002 - RNA, 21 nt, Human
gccacuugaugacccccaacc

SEQ ID NO: 1150003 - RNA, 15 nt, Human
gccagaauuucaaac

SEQ ID NO: 1150004 - RNA, 17 nt, Human
gccauuccccgucucug

SEQ ID NO: 1150005 - RNA, 18 nt, Human
gccauuccccgucucugg

SEQ ID NO: 1150006 - RNA, 17 nt, Human
gcccacuagacccacug

SEQ ID NO: 1150007 - RNA, 23 nt, Human
gcccacuagacccacuggacuca

SEQ ID NO: 1150008 - RNA, 14 nt, Human
gcccccucugcccu

SEQ ID NO: 1150009 - RNA, 16 nt, Human
gcccugcugaguccca

SEQ ID NO: 1150010 - RNA, 21 nt, Human
gcccugcugagucccaggcug

SEQ ID NO: 1150011 - RNA, 22 nt, Human
gcccugcugagucccaggcuga

SEQ ID NO: 1150012 - RNA, 23 nt, Human
gcccugcugagucccaggcugag

SEQ ID NO: 1150013 - RNA, 18 nt, Human
gccgccuccgggaccccc

SEQ ID NO: 1150014 - RNA, 19 nt, Human
gccgccuccgggaccccca

SEQ ID NO: 1150015 - RNA, 22 nt, Human
gccgccuccgggacccccagga

SEQ ID NO: 1150016 - RNA, 23 nt, Human
gccgccuccgggacccccaggac

SEQ ID NO: 1150017 - RNA, 22 nt, Human
gccucuuccucccucauuccac

SEQ ID NO: 1150018 - RNA, 17 nt, Human
gccugccuguucccauu

SEQ ID NO: 1150019 - RNA, 19 nt, Human
gccuguucccauucuugca

SEQ ID NO: 1150020 - RNA, 16 nt, Human
gcuauugucaccaggg

SEQ ID NO: 1150021 - RNA, 20 nt, Human
gcuauugucaccagggcugg

SEQ ID NO: 1150022 - RNA, 21 nt, Human
gcuauugucaccagggcugga

SEQ ID NO: 1150023 - RNA, 22 nt, Human
gcuccugccaccacgcccggcu

SEQ ID NO: 1150024 - RNA, 15 nt, Human
gcucuaauguuugca

SEQ ID NO: 1150025 - RNA, 16 nt, Human
gcucuaauguuugcau

SEQ ID NO: 1150026 - RNA, 17 nt, Human
gcucuaauguuugcaua

SEQ ID NO: 1150027 - RNA, 18 nt, Human
gcucuaauguuugcauau

SEQ ID NO: 1150028 - RNA, 20 nt, Human
gcucuacagcuaaucagcau

SEQ ID NO: 1150029 - RNA, 22 nt, Human
gcucuacagcuaaucagcauuc

SEQ ID NO: 1150030 - RNA, 19 nt, Human
gcucuaauguuugcauaua

SEQ ID NO: 1150031 - RNA, 20 nt, Human
gcucugagcaaauguggcuc

SEQ ID NO: 1150032 - RNA, 21 nt, Human
gcucugagcaaauguggcucc

SEQ ID NO: 1150033 - RNA, 19 nt, Human
gcucugucgcccaggcugg

SEQ ID NO: 1150034 - RNA, 23 nt, Human
gcucugucgcccaggcuggagug

SEQ ID NO: 1150035 - RNA, 13 nt, Human
gcucuuauuucau

SEQ ID NO: 1150036 - RNA, 14 nt, Human
gcucuuauuucauc

SEQ ID NO: 1150037 - RNA, 15 nt, Human
gcucuuauuucauca

SEQ ID NO: 1150038 - RNA, 22 nt, Human
gcugggauuacaggcuccugcc

SEQ ID NO: 1150039 - RNA, 23 nt, Human
gcugggauuacaggcuccugcca

SEQ ID NO: 1150040 - RNA, 17 nt, Human
gcugggauuacaggugu

SEQ ID NO: 1150041 - RNA, 18 nt, Human
gcugggauuacaggugug

SEQ ID NO: 1150042 - RNA, 19 nt, Human
gcuguauuagucacagaga

SEQ ID NO: 1150043 - RNA, 18 nt, Human
gcuuaaagaauucaaauu

SEQ ID NO: 1150044 - RNA, 19 nt, Human
gcuuaacagggaacgugau

SEQ ID NO: 1150045 - RNA, 15 nt, Human
gcuucaauuuauacc

SEQ ID NO: 1150046 - RNA, 15 nt, Human
gcuucccgcucagcc

SEQ ID NO: 1150047 - RNA, 16 nt, Human
gcuucccgcucagccc

SEQ ID NO: 1150048 - RNA, 17 nt, Human
gcuucccgcucagcccu

SEQ ID NO: 1150049 - RNA, 18 nt, Human
gcuucccgcucagcccuc

SEQ ID NO: 1150050 - RNA, 23 nt, Human
gcuucccgcucagcccucccugc

SEQ ID NO: 1150051 - RNA, 19 nt, Human
ggacccccaggacaggcug

SEQ ID NO: 1150052 - RNA, 20 nt, Human
ggacccggaggggccuggca

SEQ ID NO: 1150053 - RNA, 21 nt, Human
ggacccggaggggccuggcag

SEQ ID NO: 1150054 - RNA, 16 nt, Human
ggacuaggguccuggg

SEQ ID NO: 1150055 - RNA, 17 nt, Human
ggacuuagcugggagaa

SEQ ID NO: 1150056 - RNA, 18 nt, Human
ggacuuuuauuuccagug

SEQ ID NO: 1150057 - RNA, 13 nt, Human
ggagaacuagaga

SEQ ID NO: 1150058 - RNA, 16 nt, Human
ggagacugucucaaga

SEQ ID NO: 1150059 - RNA, 14 nt, Human
ggagagagacucca

SEQ ID NO: 1150060 - RNA, 20 nt, Human
ggaggaaaaccaagccgugg

SEQ ID NO: 1150061 - RNA, 21 nt, Human
ggaggaaaaccaagccguggc

SEQ ID NO: 1150062 - RNA, 22 nt, Human
ggaggaaaaccaagccguggcu

SEQ ID NO: 1150063 - RNA, 9 nt, Human
ggagguucc

SEQ ID NO: 1150064 - RNA, 19 nt, Human
ggcagccgugccuucagcu

SEQ ID NO: 1150065 - RNA, 21 nt, Human
ggcagccgugccuucagcucu

SEQ ID NO: 1150066 - RNA, 22 nt, Human
ggcagccgugccuucagcucua

SEQ ID NO: 1150067 - RNA, 21 nt, Human
ggccaaggaugccccgucccc

SEQ ID NO: 1150068 - RNA, 19 nt, Human
ggccagguggccacuccag

SEQ ID NO: 1150069 - RNA, 16 nt, Human
ggcccgacagccuggc

SEQ ID NO: 1150070 - RNA, 17 nt, Human
ggcccgacagccuggca

SEQ ID NO: 1150071 - RNA, 19 nt, Human
ggcccuuccucuccacugc

SEQ ID NO: 1150072 - RNA, 22 nt, Human
ggcccuuccucuccacugccuu

SEQ ID NO: 1150073 - RNA, 23 nt, Human
ggcccuuccucuccacugccuuc

SEQ ID NO: 1150074 - RNA, 17 nt, Human
ggcuccucccggugccc

SEQ ID NO: 1150075 - RNA, 12 nt, Human
ggcuccugccac

SEQ ID NO: 1150076 - RNA, 13 nt, Human
ggcuccugccacc

SEQ ID NO: 1150077 - RNA, 13 nt, Human
ggcuggcccugcc

SEQ ID NO: 1150078 - RNA, 14 nt, Human
ggcuggcccugccc

SEQ ID NO: 1150079 - RNA, 15 nt, Human
ggcuggcccugcccu

SEQ ID NO: 1150080 - RNA, 16 nt, Human
ggcuggcccugcccug

SEQ ID NO: 1150081 - RNA, 17 nt, Human
ggcuggcccugcccugg

SEQ ID NO: 1150082 - RNA, 20 nt, Human
aaaaagcuccaaaugcagcu

SEQ ID NO: 1150083 - RNA, 14 nt, Human
ggcuucccgcucag

SEQ ID NO: 1150084 - RNA, 17 nt, Human
aaaaaucuuccaauuua

SEQ ID NO: 1150085 - RNA, 16 nt, Human
aaaaauuacuuaguau

SEQ ID NO: 1150086 - RNA, 19 nt, Human
aaaaccaagccguggcuuc

SEQ ID NO: 1150087 - RNA, 22 nt, Human
aaaagcuccauuuuuagugaaa

SEQ ID NO: 1150088 - RNA, 13 nt, Human
gggagggccuggg

SEQ ID NO: 1150089 - RNA, 14 nt, Human
aaaccaagccgugg

SEQ ID NO: 1150090 - RNA, 16 nt, Human
aaaccaagccguggcu

SEQ ID NO: 1150091 - RNA, 23 nt, Human
aaacggccucacuaggcuucugg

SEQ ID NO: 1150092 - RNA, 12 nt, Human
aaacgugaaaau

SEQ ID NO: 1150093 - RNA, 12 nt, Human
aaacugcccccu

SEQ ID NO: 1150094 - RNA, 13 nt, Human
aaacugcccccuc

SEQ ID NO: 1150095 - RNA, 17 nt, Human
aaacugcccccucugcc

SEQ ID NO: 1150096 - RNA, 19 nt, Human
aaacugcccccucugcccu

SEQ ID NO: 1150097 - RNA, 20 nt, Human
aaacugcccccucugcccug

SEQ ID NO: 1150098 - RNA, 21 nt, Human
aaacugcccccucugcccugc

SEQ ID NO: 1150099 - RNA, 18 nt, Human
gguauaaguggugugugu

SEQ ID NO: 1150100 - RNA, 17 nt, Human
aaagaauggaaggugga

SEQ ID NO: 1150101 - RNA, 16 nt, Human
aaagaauucaaauuuu

SEQ ID NO: 1150102 - RNA, 15 nt, Human
aaagaauucaaauuu

SEQ ID NO: 1150103 - RNA, 21 nt, Human
ggugauccacucgccuucauc

SEQ ID NO: 1150104 - RNA, 18 nt, Human
ggugcaaaguucccuacu

SEQ ID NO: 1150105 - RNA, 13 nt, Human
aaaggaauuuaaa

SEQ ID NO: 1150106 - RNA, 18 nt, Human
guagcugggauuacaggc

SEQ ID NO: 1150107 - RNA, 17 nt, Human
guaggaagguacuguau

SEQ ID NO: 1150108 - RNA, 19 nt, Human
guaggaagguacuguauga

SEQ ID NO: 1150109 - RNA, 22 nt, Human
guaggaagguacuguaugauca

SEQ ID NO: 1150110 - RNA, 15 nt, Human
aaauccuuugugaaa

SEQ ID NO: 1150111 - RNA, 11 nt, Human
aaaugaaaauu

SEQ ID NO: 1150112 - RNA, 14 nt, Human
aaaugcauuucuaa

SEQ ID NO: 1150113 - RNA, 12 nt, Human
guaguuaucaug

SEQ ID NO: 1150114 - RNA, 13 nt, Human
guaguuaucaugu

SEQ ID NO: 1150115 - RNA, 14 nt, Human
guaguuaucauguu

SEQ ID NO: 1150116 - RNA, 16 nt, Human
guaguuaucauguuag

SEQ ID NO: 1150117 - RNA, 15 nt, Human
guaguuaucauguua

SEQ ID NO: 1150118 - RNA, 16 nt, Human
guaugggacuggccuc

SEQ ID NO: 1150119 - RNA, 20 nt, Human
guauugacaaaauguuauuu

SEQ ID NO: 1150120 - RNA, 20 nt, Human
aaauguuaaguugaugguga

SEQ ID NO: 1150121 - RNA, 14 nt, Human
aaauguuauuuccc

SEQ ID NO: 1150122 - RNA, 22 nt, Human
aaauguuauuucccuacauuaa

SEQ ID NO: 1150123 - RNA, 18 nt, Human
aaauuacuuaguauugca

SEQ ID NO: 1150124 - RNA, 18 nt, Human
aaauuagccaguaauccu

SEQ ID NO: 1150125 - RNA, 15 nt, Human
aaauuauagcucuaa

SEQ ID NO: 1150126 - RNA, 21 nt, Human
aaauuauagcucuaauguuug

SEQ ID NO: 1150127 - RNA, 18 nt, Human
aaauuauagcucuaaugu

SEQ ID NO: 1150128 - RNA, 17 nt, Human
aaauuucagcagcugca

SEQ ID NO: 1150129 - RNA, 18 nt, Human
aaauuucagcagcugcag

SEQ ID NO: 1150130 - RNA, 12 nt, Human
aacaauaccuga

SEQ ID NO: 1150131 - RNA, 21 nt, Human
aacaauaccugaaugcucugu

SEQ ID NO: 1150132 - RNA, 20 nt, Human
aacaauaccugaaugcucug

SEQ ID NO: 1150133 - RNA, 11 nt, Human
aacacuuccau

SEQ ID NO: 1150134 - RNA, 15 nt, Human
guccacaacacacag

SEQ ID NO: 1150135 - RNA, 15 nt, Human
gucccaacuuguaaa

SEQ ID NO: 1150136 - RNA, 16 nt, Human
aacauacauuuuguac

SEQ ID NO: 1150137 - RNA, 19 nt, Human
aacauacauuuuguaccaa

SEQ ID NO: 1150138 - RNA, 16 nt, Human
gucucccucccuuggg

SEQ ID NO: 1150139 - RNA, 15 nt, Human
aaccaaugaacgaag

SEQ ID NO: 1150140 - RNA, 15 nt, Human
gucuggcuucacaga

SEQ ID NO: 1150141 - RNA, 19 nt, Human
gucuuauauauuguagaua

SEQ ID NO: 1150142 - RNA, 11 nt, Human
aaccugcucuc

SEQ ID NO: 1150143 - RNA, 15 nt, Human
aaccugcucuccucu

SEQ ID NO: 1150144 - RNA, 20 nt, Human
aaccugcucuccucuugcca

SEQ ID NO: 1150145 - RNA, 13 nt, Human
aacucccugcccc

SEQ ID NO: 1150146 - RNA, 19 nt, Human
aacucccugccccccagcc

SEQ ID NO: 1150147 - RNA, 14 nt, Human
gugccuaguauuga

SEQ ID NO: 1150148 - RNA, 16 nt, Human
gugccuaguauugaca

SEQ ID NO: 1150149 - RNA, 18 nt, Human
gugccuaguauugacaaa

SEQ ID NO: 1150150 - RNA, 20 nt, Human
gugccuaguauugacaaaau

SEQ ID NO: 1150151 - RNA, 13 nt, Human
gugccucugccug

SEQ ID NO: 1150152 - RNA, 15 nt, Human
gugccucugccuguc

SEQ ID NO: 1150153 - RNA, 12 nt, Human
aacuugggaacu

SEQ ID NO: 1150154 - RNA, 18 nt, Human
aagaaguggggcagcagc

SEQ ID NO: 1150155 - RNA, 19 nt, Human
aagaaguggggcagcagca

SEQ ID NO: 1150156 - RNA, 20 nt, Human
gugcugggauuacaggcgug

SEQ ID NO: 1150157 - RNA, 21 nt, Human
guggauggaaggggcugacag

SEQ ID NO: 1150158 - RNA, 12 nt, Human
guggauguuacu

SEQ ID NO: 1150159 - RNA, 19 nt, Human
aagaaugaucugauugacc

SEQ ID NO: 1150160 - RNA, 21 nt, Human
aagacaaaacauacauuuugu

SEQ ID NO: 1150161 - RNA, 16 nt, Human
aagagcuuaacagugu

SEQ ID NO: 1150162 - RNA, 18 nt, Human
guggcccgacagccuggc

SEQ ID NO: 1150163 - RNA, 19 nt, Human
guggcccgacagccuggca

SEQ ID NO: 1150164 - RNA, 22 nt, Human
aagcaaagacuuuccucuuagu

SEQ ID NO: 1150165 - RNA, 17 nt, Human
gugugaaaaugugugug

SEQ ID NO: 1150166 - RNA, 18 nt, Human
guguguaugcgugugugu

SEQ ID NO: 1150167 - RNA, 14 nt, Human
guguuggucuguac

SEQ ID NO: 1150168 - RNA, 12 nt, Human
guuaagccuuug

SEQ ID NO: 1150169 - RNA, 13 nt, Human
guuaagccuuugg

SEQ ID NO: 1150170 - RNA, 16 nt, Human
guuaagccuuuggaaa

SEQ ID NO: 1150171 - RNA, 22 nt, Human
guuaaguugauggugaugaaau

SEQ ID NO: 1150172 - RNA, 14 nt, Human
guuaguaauaccuc

SEQ ID NO: 1150173 - RNA, 23 nt, Human
guuauuucccuacauuaaacaug

SEQ ID NO: 1150174 - RNA, 21 nt, Human
guuauuucccuacauuaaaca

SEQ ID NO: 1150175 - RNA, 15 nt, Human
guuccccaagacauu

SEQ ID NO: 1150176 - RNA, 20 nt, Human
guucccuacuuccugugacu

SEQ ID NO: 1150177 - RNA, 21 nt, Human
guugaugccugugaacugaac

SEQ ID NO: 1150178 - RNA, 19 nt, Human
aaggaugccccgucccccu

SEQ ID NO: 1150179 - RNA, 16 nt, Human
guugcugcuucaauuu

SEQ ID NO: 1150180 - RNA, 15 nt, Human
guuggucuguacuga

SEQ ID NO: 1150181 - RNA, 16 nt, Human
guuggucuguacugau

SEQ ID NO: 1150182 - RNA, 20 nt, Human
guuguagagaaaacaugcag

SEQ ID NO: 1150183 - RNA, 20 nt, Human
guuuaagacauuuuuggaag

SEQ ID NO: 1150184 - RNA, 14 nt, Human
aagguacuguauga

SEQ ID NO: 1150185 - RNA, 15 nt, Human
aagguacuguaugau

SEQ ID NO: 1150186 - RNA, 17 nt, Human
aagguacuguaugauca

SEQ ID NO: 1150187 - RNA, 19 nt, Human
aagguacuguaugaucaaa

SEQ ID NO: 1150188 - RNA, 20 nt, Human
aagguacuguaugaucaaau

SEQ ID NO: 1150189 - RNA, 21 nt, Human
aagguacuguaugaucaaaug

SEQ ID NO: 1150190 - RNA, 22 nt, Human
aagguacuguaugaucaaaugu

SEQ ID NO: 1150191 - RNA, 20 nt, Human
guuugggccccagaggcugg

SEQ ID NO: 1150192 - RNA, 23 nt, Human
guuuuacaauaaaaucuugaaaa

SEQ ID NO: 1150193 - RNA, 16 nt, Human
aauaaauugcuccuug

SEQ ID NO: 1150194 - RNA, 20 nt, Human
aauaaauugcuccuugacau

SEQ ID NO: 1150195 - RNA, 21 nt, Human
aauaacaaugaaaguugauaa

SEQ ID NO: 1150196 - RNA, 15 nt, Human
aauaacgauaaaaga

SEQ ID NO: 1150197 - RNA, 13 nt, Human
uaaauagaaugua

SEQ ID NO: 1150198 - RNA, 16 nt, Human
uaaauagaauguaaau

SEQ ID NO: 1150199 - RNA, 18 nt, Human
uaaauagaauguaaaugu

SEQ ID NO: 1150200 - RNA, 20 nt, Human
uaaauagaauguaaaugucu

SEQ ID NO: 1150201 - RNA, 18 nt, Human
aauagacccacaagaggc

SEQ ID NO: 1150202 - RNA, 16 nt, Human
aauagaugcugacugu

SEQ ID NO: 1150203 - RNA, 18 nt, Human
aauaggcguaacuaauuu

SEQ ID NO: 1150204 - RNA, 16 nt, Human
uaacuaacuaaaacaa

SEQ ID NO: 1150205 - RNA, 20 nt, Human
uaacuaauacagcugagcua

SEQ ID NO: 1150206 - RNA, 13 nt, Human
uaagaaugaucug

SEQ ID NO: 1150207 - RNA, 17 nt, Human
uaagacauuuuuggaag

SEQ ID NO: 1150208 - RNA, 12 nt, Human
aaucagcauucu

SEQ ID NO: 1150209 - RNA, 15 nt, Human
aaucaucaagucuuu

SEQ ID NO: 1150210 - RNA, 20 nt, Human
aauccucaguuuuugugaaa

SEQ ID NO: 1150211 - RNA, 15 nt, Human
aauccuugaagguau

SEQ ID NO: 1150212 - RNA, 20 nt, Human
aauccuugaagguauaucua

SEQ ID NO: 1150213 - RNA, 14 nt, Human
aaucuuauaauuua

SEQ ID NO: 1150214 - RNA, 16 nt, Human
aaucuuauaauuuaaa

SEQ ID NO: 1150215 - RNA, 15 nt, Human
aaucuuccaauuuag

SEQ ID NO: 1150216 - RNA, 23 nt, Human
aaucuuccaauuuaguuguugua

SEQ ID NO: 1150217 - RNA, 14 nt, Human
uaauaguauaaacc

SEQ ID NO: 1150218 - RNA, 12 nt, Human
uaaucauauaaa

SEQ ID NO: 1150219 - RNA, 13 nt, Human
uaaucauauaaau

SEQ ID NO: 1150220 - RNA, 17 nt, Human
uaaucauauaaauagaa

SEQ ID NO: 1150221 - RNA, 19 nt, Human
uaaucauauaaauagaaug

SEQ ID NO: 1150222 - RNA, 20 nt, Human
uaaucauauaaauagaaugu

SEQ ID NO: 1150223 - RNA, 21 nt, Human
uaaucauauaaauagaaugua

SEQ ID NO: 1150224 - RNA, 13 nt, Human
uaauuccacagcu

SEQ ID NO: 1150225 - RNA, 14 nt, Human
uaauuccacagcug

SEQ ID NO: 1150226 - RNA, 17 nt, Human
uaauuccacagcugcuc

SEQ ID NO: 1150227 - RNA, 14 nt, Human
uacaaggacagccc

SEQ ID NO: 1150228 - RNA, 13 nt, Human
aaugcauaaaaug

SEQ ID NO: 1150229 - RNA, 16 nt, Human
aaugcauaaaauguua

SEQ ID NO: 1150230 - RNA, 19 nt, Human
aauggacuuuuguacauag

SEQ ID NO: 1150231 - RNA, 22 nt, Human
uacaggcgugagccaccgugcc

SEQ ID NO: 1150232 - RNA, 14 nt, Human
uacaggcuccugcc

SEQ ID NO: 1150233 - RNA, 15 nt, Human
uacaggcuccugcca

SEQ ID NO: 1150234 - RNA, 17 nt, Human
uacaggcuccugccacc

SEQ ID NO: 1150235 - RNA, 16 nt, Human
uacauagugcuaacau

SEQ ID NO: 1150236 - RNA, 21 nt, Human
uacauagugcuaacaugaaga

SEQ ID NO: 1150237 - RNA, 22 nt, Human
uacauagugcuaacaugaagac

SEQ ID NO: 1150238 - RNA, 23 nt, Human
uacauagugcuaacaugaagacc

SEQ ID NO: 1150239 - RNA, 14 nt, Human
aauguggcuccugg

SEQ ID NO: 1150240 - RNA, 12 nt, Human
aauugcauuucc

SEQ ID NO: 1150241 - RNA, 16 nt, Human
aauuuaguuguuguag

SEQ ID NO: 1150242 - RNA, 18 nt, Human
aauuuauaccucaauuuu

SEQ ID NO: 1150243 - RNA, 20 nt, Human
aauuuauaccucaauuuuca

SEQ ID NO: 1150244 - RNA, 21 nt, Human
aauuuauaccucaauuuucac

SEQ ID NO: 1150245 - RNA, 15 nt, Human
uacuuaguauugcaa

SEQ ID NO: 1150246 - RNA, 20 nt, Human
uacuuaguauugcaaaguca

SEQ ID NO: 1150247 - RNA, 17 nt, Human
uacuuaguauugcaaag

SEQ ID NO: 1150248 - RNA, 14 nt, Human
uacuuccccuuccu

SEQ ID NO: 1150249 - RNA, 15 nt, Human
uacuuccccuuccua

SEQ ID NO: 1150250 - RNA, 18 nt, Human
uacuuccccuuccuaauu

SEQ ID NO: 1150251 - RNA, 20 nt, Human
uacuuccccuuccuaauucc

SEQ ID NO: 1150252 - RNA, 23 nt, Human
uacuuccugugacuucagcucug

SEQ ID NO: 1150253 - RNA, 23 nt, Human
uacuuugauauuuucaacgcagc

SEQ ID NO: 1150254 - RNA, 18 nt, Human
acaaagccacuuucaauc

SEQ ID NO: 1150255 - RNA, 18 nt, Human
acaaagcccuuccauguc

SEQ ID NO: 1150256 - RNA, 22 nt, Human
uagauaggucagugcaaauacu

SEQ ID NO: 1150257 - RNA, 14 nt, Human
uagaugcugacugu

SEQ ID NO: 1150258 - RNA, 14 nt, Human
acaagacacaguga

SEQ ID NO: 1150259 - RNA, 18 nt, Human
acaagagcuuaacagugu

SEQ ID NO: 1150260 - RNA, 19 nt, Human
acaagagcuuaacagugug

SEQ ID NO: 1150261 - RNA, 17 nt, Human
acaagcuccauuuaaac

SEQ ID NO: 1150262 - RNA, 18 nt, Human
acaagcuccauuuaaaca

SEQ ID NO: 1150263 - RNA, 22 nt, Human
acaauaaaaguguccauugaaa

SEQ ID NO: 1150264 - RNA, 18 nt, Human
acaaucucggcucacugc

SEQ ID NO: 1150265 - RNA, 20 nt, Human
acaaucucggcucacugcau

SEQ ID NO: 1150266 - RNA, 16 nt, Human
uagcuacuaauuuuaa

SEQ ID NO: 1150267 - RNA, 14 nt, Human
uagcuuauguuaac

SEQ ID NO: 1150268 - RNA, 17 nt, Human
acacagugaccauacua

SEQ ID NO: 1150269 - RNA, 17 nt, Human
uagguuuaugacaguaa

SEQ ID NO: 1150270 - RNA, 19 nt, Human
uagguuuaugacaguaauu

SEQ ID NO: 1150271 - RNA, 20 nt, Human
uagguuuaugacaguaauug

SEQ ID NO: 1150272 - RNA, 21 nt, Human
uagguuuaugacaguaauugu

SEQ ID NO: 1150273 - RNA, 12 nt, Human
uaguaauaccuc

SEQ ID NO: 1150274 - RNA, 13 nt, Human
uaguaauaccucu

SEQ ID NO: 1150275 - RNA, 15 nt, Human
uaguaauaccucuaa

SEQ ID NO: 1150276 - RNA, 14 nt, Human
uaguagagacaggg

SEQ ID NO: 1150277 - RNA, 11 nt, Human
uaguuaucaug

SEQ ID NO: 1150278 - RNA, 12 nt, Human
uaguuaucaugu

SEQ ID NO: 1150279 - RNA, 13 nt, Human
uaguuaucauguu

SEQ ID NO: 1150280 - RNA, 14 nt, Human
uaguuaucauguua

SEQ ID NO: 1150281 - RNA, 15 nt, Human
uaguuaucauguuag

SEQ ID NO: 1150282 - RNA, 16 nt, Human
uaguuaucauguuagu

SEQ ID NO: 1150283 - RNA, 23 nt, Human
uaguuaucauguuaguaauaccu

SEQ ID NO: 1150284 - RNA, 18 nt, Human
uaguuuugucacaauuau

SEQ ID NO: 1150285 - RNA, 19 nt, Human
uauaacuauguugauaaaa

SEQ ID NO: 1150286 - RNA, 21 nt, Human
uauaagggaaguaguuaucau

SEQ ID NO: 1150287 - RNA, 24 nt, Human
uauaagggaaguaguuaucauguu

SEQ ID NO: 1150288 - RNA, 22 nt, Human
uauaagggcaaauuggagaaaa

SEQ ID NO: 1150289 - RNA, 20 nt, Human
acacuuguugauuaauggaa

SEQ ID NO: 1150290 - RNA, 23 nt, Human
acacuuguugauuaauggaaaug

SEQ ID NO: 1150291 - RNA, 12 nt, Human
uauauuuacaaa

SEQ ID NO: 1150292 - RNA, 14 nt, Human
uauauuuacaaaug

SEQ ID NO: 1150293 - RNA, 16 nt, Human
uaucccggcugcccuu

SEQ ID NO: 1150294 - RNA, 14 nt, Human
uauccuacuucccc

SEQ ID NO: 1150295 - RNA, 17 nt, Human
uauccuacuuccccuuc

SEQ ID NO: 1150296 - RNA, 14 nt, Human
acagauguccauca

SEQ ID NO: 1150297 - RNA, 16 nt, Human
acagauguccaucaga

SEQ ID NO: 1150298 - RNA, 22 nt, Human
acagauguccaucagaugacaa

SEQ ID NO: 1150299 - RNA, 21 nt, Human
acagauguccaucagaugaca

SEQ ID NO: 1150300 - RNA, 23 nt, Human
acagcccuccaucuaaacugccc

SEQ ID NO: 1150301 - RNA, 20 nt, Human
uaugaaagauggcugugccu

SEQ ID NO: 1150302 - RNA, 22 nt, Human
uaugaaagauggcugugccucu

SEQ ID NO: 1150303 - RNA, 23 nt, Human
uaugaaagauggcugugccucug

SEQ ID NO: 1150304 - RNA, 13 nt, Human
uauuuccacuucu

SEQ ID NO: 1150305 - RNA, 15 nt, Human
uauuucccaugauuu

SEQ ID NO: 1150306 - RNA, 16 nt, Human
uauuucccaugauuuc

SEQ ID NO: 1150307 - RNA, 18 nt, Human
uauuucccaugauuucau

SEQ ID NO: 1150308 - RNA, 21 nt, Human
uauuucccaugauuucaugua

SEQ ID NO: 1150309 - RNA, 15 nt, Human
uauuucccuacauua

SEQ ID NO: 1150310 - RNA, 16 nt, Human
uauuucccuacauuaa

SEQ ID NO: 1150311 - RNA, 17 nt, Human
uauuucccuacauuaaa

SEQ ID NO: 1150312 - RNA, 22 nt, Human
uauuucccuacauuaaacauga

SEQ ID NO: 1150313 - RNA, 15 nt, Human
uauuuccuaugaugu

SEQ ID NO: 1150314 - RNA, 16 nt, Human
uauuuccuaugaugua

SEQ ID NO: 1150315 - RNA, 17 nt, Human
uauuuccuaugauguau

SEQ ID NO: 1150316 - RNA, 13 nt, Human
acaguugcacagc

SEQ ID NO: 1150317 - RNA, 14 nt, Human
acaguugcacagca

SEQ ID NO: 1150318 - RNA, 15 nt, Human
acaguugcacagcau

SEQ ID NO: 1150319 - RNA, 19 nt, Human
acaguugcacagcaucuca

SEQ ID NO: 1150320 - RNA, 23 nt, Human
acaguugcacagcaucucagcuc

SEQ ID NO: 1150321 - RNA, 20 nt, Human
acaguugcacagcaucucag

SEQ ID NO: 1150322 - RNA, 14 nt, Human
acauacauuuugua

SEQ ID NO: 1150323 - RNA, 16 nt, Human
acauagugaugguucc

SEQ ID NO: 1150324 - RNA, 21 nt, Human
acauagugaugguuccccugu

SEQ ID NO: 1150325 - RNA, 20 nt, Human
acauagugcuaacaugaaga

SEQ ID NO: 1150326 - RNA, 21 nt, Human
uauuuuuaucaguuacacaug

SEQ ID NO: 1150327 - RNA, 14 nt, Human
ucaaaaugcucuua

SEQ ID NO: 1150328 - RNA, 16 nt, Human
ucaaaaugcucuuauu

SEQ ID NO: 1150329 - RNA, 19 nt, Human
ucaaaaugcucuuauuuca

SEQ ID NO: 1150330 - RNA, 20 nt, Human
ucaaaaugcucuuauuucau

SEQ ID NO: 1150331 - RNA, 22 nt, Human
ucaaaaugcucuuauuucauca

SEQ ID NO: 1150332 - RNA, 21 nt, Human
ucaaaaugcucuuauuucauc

SEQ ID NO: 1150333 - RNA, 14 nt, Human
ucaaagcugaaaug

SEQ ID NO: 1150334 - RNA, 13 nt, Human
acaugaagaccuu

SEQ ID NO: 1150335 - RNA, 14 nt, Human
acaugaagaccuuu

SEQ ID NO: 1150336 - RNA, 20 nt, Human
acaugaagaccuuuuucugc

SEQ ID NO: 1150337 - RNA, 21 nt, Human
acaugaagaccuuuuucugca

SEQ ID NO: 1150338 - RNA, 18 nt, Human
acauuagcaguuugcuuu

SEQ ID NO: 1150339 - RNA, 22 nt, Human
acauuagcaguuugcuuuguau

SEQ ID NO: 1150340 - RNA, 13 nt, Human
ucaagauucagcu

SEQ ID NO: 1150341 - RNA, 14 nt, Human
ucaagauucagcua

SEQ ID NO: 1150342 - RNA, 15 nt, Human
ucaagauucagcuag

SEQ ID NO: 1150343 - RNA, 19 nt, Human
ucaagggcagcuuugcuca

SEQ ID NO: 1150344 - RNA, 20 nt, Human
ucaagggcagcuuugcucau

SEQ ID NO: 1150345 - RNA, 21 nt, Human
ucaagggcagcuuugcucaua

SEQ ID NO: 1150346 - RNA, 23 nt, Human
ucaagggcagcuuugcucauauu

SEQ ID NO: 1150347 - RNA, 17 nt, Human
ucaagugauucucaugc

SEQ ID NO: 1150348 - RNA, 20 nt, Human
ucaagugauucucaugccuc

SEQ ID NO: 1150349 - RNA, 23 nt, Human
accaauuauaagggcaaauugga

SEQ ID NO: 1150350 - RNA, 14 nt, Human
accacacuccagcu

SEQ ID NO: 1150351 - RNA, 15 nt, Human
ucaauucuugccaaa

SEQ ID NO: 1150352 - RNA, 15 nt, Human
ucaauuuucacugug

SEQ ID NO: 1150353 - RNA, 16 nt, Human
ucaauuuucacugugu

SEQ ID NO: 1150354 - RNA, 16 nt, Human
ucacaacaaccugguc

SEQ ID NO: 1150355 - RNA, 22 nt, Human
ucacacgucuggcuucacagau

SEQ ID NO: 1150356 - RNA, 17 nt, Human
accacugcucugaugaa

SEQ ID NO: 1150357 - RNA, 23 nt, Human
accacugcucugaugaagaggag

SEQ ID NO: 1150358 - RNA, 14 nt, Human
accagccuccaugc

SEQ ID NO: 1150359 - RNA, 19 nt, Human
accagccuccaugcugccu

SEQ ID NO: 1150360 - RNA, 20 nt, Human
accagccuccaugcugccuc

SEQ ID NO: 1150361 - RNA, 21 nt, Human
accagccuccaugcugccucc

SEQ ID NO: 1150362 - RNA, 15 nt, Human
ucacuacucagcaug

SEQ ID NO: 1150363 - RNA, 14 nt, Human
ucacuacucagcau

SEQ ID NO: 1150364 - RNA, 15 nt, Human
ucacuccuaccuggu

SEQ ID NO: 1150365 - RNA, 12 nt, Human
accauuccccau

SEQ ID NO: 1150366 - RNA, 23 nt, Human
accauuucuugagguaaaagcau

SEQ ID NO: 1150367 - RNA, 19 nt, Human
ucagaaguuucucagcucc

SEQ ID NO: 1150368 - RNA, 13 nt, Human
ucagcucacugca

SEQ ID NO: 1150369 - RNA, 16 nt, Human
ucagcucacugcaacc

SEQ ID NO: 1150370 - RNA, 16 nt, Human
accgcguaaugcgcca

SEQ ID NO: 1150371 - RNA, 16 nt, Human
accuaccaccacgccc

SEQ ID NO: 1150372 - RNA, 20 nt, Human
accuaccaccacgcccggcu

SEQ ID NO: 1150373 - RNA, 18 nt, Human
uccaaucccaccaacccu

SEQ ID NO: 1150374 - RNA, 21 nt, Human
accuggucacaggacucugcc

SEQ ID NO: 1150375 - RNA, 22 nt, Human
accuggucacaggacucugccu

SEQ ID NO: 1150376 - RNA, 16 nt, Human
uccaccuucccaugcc

SEQ ID NO: 1150377 - RNA, 18 nt, Human
uccaccuucccaugcccu

SEQ ID NO: 1150378 - RNA, 19 nt, Human
uccaccuucccaugcccug

SEQ ID NO: 1150379 - RNA, 13 nt, Human
uccacugccuucg

SEQ ID NO: 1150380 - RNA, 15 nt, Human
uccacugccuucgau

SEQ ID NO: 1150381 - RNA, 22 nt, Human
uccacugccuucgauacaccgg

SEQ ID NO: 1150382 - RNA, 15 nt, Human
uccagagaguggcuc

SEQ ID NO: 1150383 - RNA, 16 nt, Human
uccagagaguggcucc

SEQ ID NO: 1150384 - RNA, 17 nt, Human
uccagagaguggcuccu

SEQ ID NO: 1150385 - RNA, 19 nt, Human
uccagagaguggcuccucc

SEQ ID NO: 1150386 - RNA, 21 nt, Human
acgagaaccugaaggggaagg

SEQ ID NO: 1150387 - RNA, 16 nt, Human
uccaucuaaacugccc

SEQ ID NO: 1150388 - RNA, 18 nt, Human
uccaucuaaacugccccc

SEQ ID NO: 1150389 - RNA, 17 nt, Human
uccccaugucucgacuc

SEQ ID NO: 1150390 - RNA, 12 nt, Human
acuacucagcau

SEQ ID NO: 1150391 - RNA, 13 nt, Human
acuacucagcaug

SEQ ID NO: 1150392 - RNA, 17 nt, Human
acuacucagcauggaaa

SEQ ID NO: 1150393 - RNA, 20 nt, Human
ucccgaguagcugagauuau

SEQ ID NO: 1150394 - RNA, 13 nt, Human
ucccggcugcccu

SEQ ID NO: 1150395 - RNA, 14 nt, Human
ucccggcugcccuu

SEQ ID NO: 1150396 - RNA, 15 nt, Human
ucccggcugcccuuu

SEQ ID NO: 1150397 - RNA, 18 nt, Human
ucccggcugcccuuucug

SEQ ID NO: 1150398 - RNA, 22 nt, Human
ucccggcugcccuuucugggca

SEQ ID NO: 1150399 - RNA, 13 nt, Human
acuccagaccccu

SEQ ID NO: 1150400 - RNA, 13 nt, Human
acuccucugucca

SEQ ID NO: 1150401 - RNA, 14 nt, Human
acuccucuguccag

SEQ ID NO: 1150402 - RNA, 13 nt, Human
uccgggaccccca

SEQ ID NO: 1150403 - RNA, 16 nt, Human
uccgggacccccagga

SEQ ID NO: 1150404 - RNA, 18 nt, Human
uccgggacccccaggaca

SEQ ID NO: 1150405 - RNA, 14 nt, Human
uccuacuuccccuu

SEQ ID NO: 1150406 - RNA, 17 nt, Human
acugcauccuccgccuc

SEQ ID NO: 1150407 - RNA, 20 nt, Human
acugcauccuccgccucccg

SEQ ID NO: 1150408 - RNA, 23 nt, Human
acugcauccuccgccucccgggu

SEQ ID NO: 1150409 - RNA, 14 nt, Human
acugcauuauuuga

SEQ ID NO: 1150410 - RNA, 17 nt, Human
acugcauuauuugagaa

SEQ ID NO: 1150411 - RNA, 14 nt, Human
acugccucuuccuc

SEQ ID NO: 1150412 - RNA, 15 nt, Human
acugccucuuccucc

SEQ ID NO: 1150413 - RNA, 15 nt, Human
acugcuggcugccuu

SEQ ID NO: 1150414 - RNA, 14 nt, Human
acuggccucugcug

SEQ ID NO: 1150415 - RNA, 16 nt, Human
acuggccucugcugau

SEQ ID NO: 1150416 - RNA, 14 nt, Human
ucgacuguuguuau

SEQ ID NO: 1150417 - RNA, 17 nt, Human
ucgacuguuguuaucug

SEQ ID NO: 1150418 - RNA, 15 nt, Human
ucgacuguuguuauc

SEQ ID NO: 1150419 - RNA, 18 nt, Human
ucgcuauugucaccaggg

SEQ ID NO: 1150420 - RNA, 13 nt, Human
acugugcuguugu

SEQ ID NO: 1150421 - RNA, 14 nt, Human
acugugcuguuguu

SEQ ID NO: 1150422 - RNA, 18 nt, Human
acugugcuguuguuauga

SEQ ID NO: 1150423 - RNA, 23 nt, Human
acugugcuguuguuaugaugugc

SEQ ID NO: 1150424 - RNA, 22 nt, Human
acugugcuguuguuaugaugug

SEQ ID NO: 1150425 - RNA, 21 nt, Human
acuguguccaggugguacuuu

SEQ ID NO: 1150426 - RNA, 18 nt, Human
ucggcucacugcauccuc

SEQ ID NO: 1150427 - RNA, 22 nt, Human
ucgggcagcacaaguguaauga

SEQ ID NO: 1150428 - RNA, 21 nt, Human
ucgggcagcacaaguguaaug

SEQ ID NO: 1150429 - RNA, 17 nt, Human
ucguuugaaucacagua

SEQ ID NO: 1150430 - RNA, 20 nt, Human
ucuaaagccauuguaguccu

SEQ ID NO: 1150431 - RNA, 17 nt, Human
ucuaccaaccuguucaa

SEQ ID NO: 1150432 - RNA, 20 nt, Human
acuuaccgcguaaugcgcca

SEQ ID NO: 1150433 - RNA, 16 nt, Human
acuuagaaauugcauu

SEQ ID NO: 1150434 - RNA, 19 nt, Human
acuuaguauugcaaaguca

SEQ ID NO: 1150435 - RNA, 20 nt, Human
acuuaguauugcaaagucag

SEQ ID NO: 1150436 - RNA, 14 nt, Human
acuucagcucuguu

SEQ ID NO: 1150437 - RNA, 14 nt, Human
acuucaggcucuuc

SEQ ID NO: 1150438 - RNA, 16 nt, Human
acuucaggcucuucuc

SEQ ID NO: 1150439 - RNA, 16 nt, Human
ucuauuucauaccaug

SEQ ID NO: 1150440 - RNA, 15 nt, Human
acuuccugugacuuc

SEQ ID NO: 1150441 - RNA, 17 nt, Human
acuucguuuaaugaaug

SEQ ID NO: 1150442 - RNA, 20 nt, Human
acuucguuuaaugaaugcuu

SEQ ID NO: 1150443 - RNA, 18 nt, Human
acuucguuuaaugaaugc

SEQ ID NO: 1150444 - RNA, 16 nt, Human
ucucagcucaucuuca

SEQ ID NO: 1150445 - RNA, 20 nt, Human
ucucagcucaucuucacugc

SEQ ID NO: 1150446 - RNA, 15 nt, Human
ucugaagucacugca

SEQ ID NO: 1150447 - RNA, 16 nt, Human
ucugaagucacugcac

SEQ ID NO: 1150448 - RNA, 18 nt, Human
ucugaagucacugcacag

SEQ ID NO: 1150449 - RNA, 15 nt, Human
ucugacaacagacuu

SEQ ID NO: 1150450 - RNA, 16 nt, Human
ucugacaacagacuuc

SEQ ID NO: 1150451 - RNA, 22 nt, Human
ucuggguuccuuccucugagcc

SEQ ID NO: 1150452 - RNA, 23 nt, Human
ucuggguuccuuccucugagccu

SEQ ID NO: 1150453 - RNA, 15 nt, Human
ucuguacugauucaa

SEQ ID NO: 1150454 - RNA, 16 nt, Human
ucuguacugauucaau

SEQ ID NO: 1150455 - RNA, 17 nt, Human
ucuguacugauucaauu

SEQ ID NO: 1150456 - RNA, 23 nt, Human
ucuguacugauucaauuugaugu

SEQ ID NO: 1150457 - RNA, 17 nt, Human
ucuguucugcacacagc

SEQ ID NO: 1150458 - RNA, 18 nt, Human
ucuguucugcacacagca

SEQ ID NO: 1150459 - RNA, 19 nt, Human
ucuguucugcacacagcac

SEQ ID NO: 1150460 - RNA, 13 nt, Human
ucuuaauguacau

SEQ ID NO: 1150461 - RNA, 14 nt, Human
ucuuaauguacaua

SEQ ID NO: 1150462 - RNA, 19 nt, Human
ucuuaauguacauagugcu

SEQ ID NO: 1150463 - RNA, 16 nt, Human
ucuucuuaauguacau

SEQ ID NO: 1150464 - RNA, 24 nt, Human
ucuucuuaauguacauagugcuaa

SEQ ID NO: 1150465 - RNA, 17 nt, Human
ucuucuuaauguacaua

SEQ ID NO: 1150466 - RNA, 15 nt, Human
agaccccuggcuuuu

SEQ ID NO: 1150467 - RNA, 21 nt, Human
agaccccuggcuuuucacugc

SEQ ID NO: 1150468 - RNA, 16 nt, Human
agaccugccccuccuc

SEQ ID NO: 1150469 - RNA, 22 nt, Human
agaccugccccuccucucugcc

SEQ ID NO: 1150470 - RNA, 23 nt, Human
agaccugccccuccucucugccc

SEQ ID NO: 1150471 - RNA, 21 nt, Human
agacucaguggggaggggcug

SEQ ID NO: 1150472 - RNA, 18 nt, Human
ucuugaguuuuucaggua

SEQ ID NO: 1150473 - RNA, 14 nt, Human
ucuuucuuccucug

SEQ ID NO: 1150474 - RNA, 15 nt, Human
ucuuucuuccucugc

SEQ ID NO: 1150475 - RNA, 16 nt, Human
ucuuucuuccucugcu

SEQ ID NO: 1150476 - RNA, 17 nt, Human
ucuuucuuccucugcug

SEQ ID NO: 1150477 - RNA, 14 nt, Human
agacugucucaaga

SEQ ID NO: 1150478 - RNA, 15 nt, Human
agacuuacagcaaau

SEQ ID NO: 1150479 - RNA, 18 nt, Human
agacuuacagcaaauccu

SEQ ID NO: 1150480 - RNA, 20 nt, Human
agacuuacagcaaauccuuu

SEQ ID NO: 1150481 - RNA, 18 nt, Human
agacuuguaugaaagaug

SEQ ID NO: 1150482 - RNA, 19 nt, Human
agacuuuuuuuaaauagua

SEQ ID NO: 1150483 - RNA, 15 nt, Human
ugaaauuguauuaca

SEQ ID NO: 1150484 - RNA, 15 nt, Human
agagcuuaacagugu

SEQ ID NO: 1150485 - RNA, 13 nt, Human
agaggcugaggac

SEQ ID NO: 1150486 - RNA, 19 nt, Human
agagguccacaacacacag

SEQ ID NO: 1150487 - RNA, 15 nt, Human
agcaggcugugaguu

SEQ ID NO: 1150488 - RNA, 18 nt, Human
agcagguugauaaaucau

SEQ ID NO: 1150489 - RNA, 14 nt, Human
agcaguuugcuuug

SEQ ID NO: 1150490 - RNA, 14 nt, Human
ugaucaccugcccu

SEQ ID NO: 1150491 - RNA, 17 nt, Human
agcauuagauuucucau

SEQ ID NO: 1150492 - RNA, 18 nt, Human
agcauucucacuccuacc

SEQ ID NO: 1150493 - RNA, 20 nt, Human
agcauucucacuccuaccug

SEQ ID NO: 1150494 - RNA, 22 nt, Human
agcauucucacuccuaccuggu

SEQ ID NO: 1150495 - RNA, 15 nt, Human
agcauuuucugcauc

SEQ ID NO: 1150496 - RNA, 18 nt, Human
agcauuuucugcaucucc

SEQ ID NO: 1150497 - RNA, 19 nt, Human
agcauuuucugcaucucca

SEQ ID NO: 1150498 - RNA, 20 nt, Human
agcauuuucugcaucuccac

SEQ ID NO: 1150499 - RNA, 18 nt, Human
agccaaacauccuacaag

SEQ ID NO: 1150500 - RNA, 13 nt, Human
agccaccacgccc

SEQ ID NO: 1150501 - RNA, 18 nt, Human
ugauccacucgccuucau

SEQ ID NO: 1150502 - RNA, 22 nt, Human
ugauccuaaugaaugcauaaaa

SEQ ID NO: 1150503 - RNA, 18 nt, Human
ugaugaaauguaaauacu

SEQ ID NO: 1150504 - RNA, 19 nt, Human
ugauggguuaguggaugga

SEQ ID NO: 1150505 - RNA, 23 nt, Human
ugauggguuaguggauggaaggg

SEQ ID NO: 1150506 - RNA, 12 nt, Human
ugauuuggaaaa

SEQ ID NO: 1150507 - RNA, 14 nt, Human
ugcaaagcccagcu

SEQ ID NO: 1150508 - RNA, 15 nt, Human
ugcaaagcccagcuu

SEQ ID NO: 1150509 - RNA, 17 nt, Human
ugcaaagcccagcuuga

SEQ ID NO: 1150510 - RNA, 18 nt, Human
ugcaaagucaggaaucau

SEQ ID NO: 1150511 - RNA, 17 nt, Human
ugcaaagucaggaauca

SEQ ID NO: 1150512 - RNA, 23 nt, Human
ugcaaaguucccuacuuccugug

SEQ ID NO: 1150513 - RNA, 21 nt, Human
ugcaguaucggcacuguacaa

SEQ ID NO: 1150514 - RNA, 20 nt, Human
ugcaguaucggcacuguaca

SEQ ID NO: 1150515 - RNA, 13 nt, Human
ugcaucucagccc

SEQ ID NO: 1150516 - RNA, 14 nt, Human
ugcaucucagccca

SEQ ID NO: 1150517 - RNA, 15 nt, Human
ugcaucucagcccac

SEQ ID NO: 1150518 - RNA, 16 nt, Human
agccuugggaccccug

SEQ ID NO: 1150519 - RNA, 13 nt, Human
agcuccaucucca

SEQ ID NO: 1150520 - RNA, 15 nt, Human
agcuccaucuccacu

SEQ ID NO: 1150521 - RNA, 16 nt, Human
agcuccaucuccacuc

SEQ ID NO: 1150522 - RNA, 21 nt, Human
agcuccaucuccacuccagau

SEQ ID NO: 1150523 - RNA, 12 nt, Human
ugccucugccug

SEQ ID NO: 1150524 - RNA, 18 nt, Human
agcuggccgggagccuga

SEQ ID NO: 1150525 - RNA, 19 nt, Human
agcuggccgggagccugau

SEQ ID NO: 1150526 - RNA, 14 nt, Human
ugccuguucccauu

SEQ ID NO: 1150527 - RNA, 13 nt, Human
agcuuaacagugu

SEQ ID NO: 1150528 - RNA, 22 nt, Human
agcuuuccccaugucucgacuc

SEQ ID NO: 1150529 - RNA, 13 nt, Human
agcuuugcucaua

SEQ ID NO: 1150530 - RNA, 19 nt, Human
agcuuugcucauauuuccc

SEQ ID NO: 1150531 - RNA, 20 nt, Human
agcuuugcucauauuuccca

SEQ ID NO: 1150532 - RNA, 21 nt, Human
agcuuugcucauauuucccau

SEQ ID NO: 1150533 - RNA, 13 nt, Human
ugcucaacuugca

SEQ ID NO: 1150534 - RNA, 16 nt, Human
ugcucaacuugcaaaa

SEQ ID NO: 1150535 - RNA, 20 nt, Human
ugcucaacuugcaaaaucag

SEQ ID NO: 1150536 - RNA, 17 nt, Human
ugcucaacuugcaaaau

SEQ ID NO: 1150537 - RNA, 13 nt, Human
ugcucuuauuuca

SEQ ID NO: 1150538 - RNA, 14 nt, Human
ugcucuuauuucau

SEQ ID NO: 1150539 - RNA, 15 nt, Human
ugcucuugaacuccu

SEQ ID NO: 1150540 - RNA, 20 nt, Human
ugcucuugaacuccugaccu

SEQ ID NO: 1150541 - RNA, 22 nt, Human
ugcucuugaacuccugaccuca

SEQ ID NO: 1150542 - RNA, 18 nt, Human
aggaagcagcuuucccca

SEQ ID NO: 1150543 - RNA, 15 nt, Human
aggaaggcugagagg

SEQ ID NO: 1150544 - RNA, 15 nt, Human
aggacuaggguccug

SEQ ID NO: 1150545 - RNA, 16 nt, Human
aggacuaggguccugg

SEQ ID NO: 1150546 - RNA, 18 nt, Human
aggacuaggguccugggg

SEQ ID NO: 1150547 - RNA, 19 nt, Human
aggacuaggguccugggga

SEQ ID NO: 1150548 - RNA, 12 nt, Human
aggacucugccu

SEQ ID NO: 1150549 - RNA, 13 nt, Human
aggacucugccuc

SEQ ID NO: 1150550 - RNA, 14 nt, Human
aggacucugccucc

SEQ ID NO: 1150551 - RNA, 16 nt, Human
aggacucugccuccuc

SEQ ID NO: 1150552 - RNA, 17 nt, Human
aggacucugccuccucu

SEQ ID NO: 1150553 - RNA, 18 nt, Human
aggacucugccuccucuu

SEQ ID NO: 1150554 - RNA, 19 nt, Human
aggacucugccuccucuuc

SEQ ID NO: 1150555 - RNA, 14 nt, Human
ugcuuugggcugcc

SEQ ID NO: 1150556 - RNA, 15 nt, Human
ugcuuugggcugccc

SEQ ID NO: 1150557 - RNA, 16 nt, Human
ugcuuugggcugcccu

SEQ ID NO: 1150558 - RNA, 17 nt, Human
ugcuuugggcugcccug

SEQ ID NO: 1150559 - RNA, 17 nt, Human
uggagccaauggagacu

SEQ ID NO: 1150560 - RNA, 14 nt, Human
uggaguugaaaauc

SEQ ID NO: 1150561 - RNA, 13 nt, Human
uggauggaagggg

SEQ ID NO: 1150562 - RNA, 20 nt, Human
uggauuggacaaaaugacuu

SEQ ID NO: 1150563 - RNA, 13 nt, Human
uggauuggacaaa

SEQ ID NO: 1150564 - RNA, 15 nt, Human
uggauuggacaaaau

SEQ ID NO: 1150565 - RNA, 19 nt, Human
uggauuggacaaaaugacu

SEQ ID NO: 1150566 - RNA, 13 nt, Human
aggcccggccucu

SEQ ID NO: 1150567 - RNA, 14 nt, Human
aggcccggccucuc

SEQ ID NO: 1150568 - RNA, 15 nt, Human
aggcccggccucuca

SEQ ID NO: 1150569 - RNA, 18 nt, Human
agggaacgugauuaguga

SEQ ID NO: 1150570 - RNA, 13 nt, Human
agggaaggggaca

SEQ ID NO: 1150571 - RNA, 22 nt, Human
agggaaggggacaaggacuagg

SEQ ID NO: 1150572 - RNA, 15 nt, Human
agggaaguaguuauc

SEQ ID NO: 1150573 - RNA, 17 nt, Human
agggaaguaguuaucau

SEQ ID NO: 1150574 - RNA, 20 nt, Human
agggaaguaguuaucauguu

SEQ ID NO: 1150575 - RNA, 21 nt, Human
agggaauuucuucaacucccu

SEQ ID NO: 1150576 - RNA, 13 nt, Human
ugggacuggccuc

SEQ ID NO: 1150577 - RNA, 18 nt, Human
ugggagacugcugaguca

SEQ ID NO: 1150578 - RNA, 18 nt, Human
ugggccccaguuguauuu

SEQ ID NO: 1150579 - RNA, 22 nt, Human
ugggccccaguuguauuuauuu

SEQ ID NO: 1150580 - RNA, 14 nt, Human
agggcacugguggc

SEQ ID NO: 1150581 - RNA, 16 nt, Human
agggcacugguggccc

SEQ ID NO: 1150582 - RNA, 17 nt, Human
agggcacugguggcccg

SEQ ID NO: 1150583 - RNA, 17 nt, Human
agggcagcuuugcucau

SEQ ID NO: 1150584 - RNA, 16 nt, Human
agggcagcuuugcuca

SEQ ID NO: 1150585 - RNA, 17 nt, Human
agggcauggccaggugg

SEQ ID NO: 1150586 - RNA, 15 nt, Human
uggggaggggcugug

SEQ ID NO: 1150587 - RNA, 21 nt, Human
aggggaauaaacuguugaguc

SEQ ID NO: 1150588 - RNA, 18 nt, Human
aggguaacuaacuaaaac

SEQ ID NO: 1150589 - RNA, 17 nt, Human
ugguagcuuuucccuuc

SEQ ID NO: 1150590 - RNA, 15 nt, Human
uggugccuaguauug

SEQ ID NO: 1150591 - RNA, 19 nt, Human
uggugccuaguauugacaa

SEQ ID NO: 1150592 - RNA, 22 nt, Human
uggugccuaguauugacaaaau

SEQ ID NO: 1150593 - RNA, 24 nt, Human
uggugccuaguauugacaaaaugu

SEQ ID NO: 1150594 - RNA, 13 nt, Human
uggugcugccaca

SEQ ID NO: 1150595 - RNA, 18 nt, Human
uggugcugccacacuuca

SEQ ID NO: 1150596 - RNA, 21 nt, Human
ugguggagaggcccggccucu

SEQ ID NO: 1150597 - RNA, 12 nt, Human
ugguuuccugcc

SEQ ID NO: 1150598 - RNA, 13 nt, Human
ugguuuccugccc

SEQ ID NO: 1150599 - RNA, 14 nt, Human
ugguuuccugcccu

SEQ ID NO: 1150600 - RNA, 15 nt, Human
ugguuuccugcccug

SEQ ID NO: 1150601 - RNA, 20 nt, Human
ugguuuccugcccugggagg

SEQ ID NO: 1150602 - RNA, 19 nt, Human
uguaaauaaagaacuagca

SEQ ID NO: 1150603 - RNA, 12 nt, Human
agguuuaugaca

SEQ ID NO: 1150604 - RNA, 16 nt, Human
agguuuaugacaguaa

SEQ ID NO: 1150605 - RNA, 14 nt, Human
agguuuaugacagu

SEQ ID NO: 1150606 - RNA, 14 nt, Human
uguagagcuucugg

SEQ ID NO: 1150607 - RNA, 13 nt, Human
aguaaaauccaca

SEQ ID NO: 1150608 - RNA, 12 nt, Human
aguagagacagg

SEQ ID NO: 1150609 - RNA, 13 nt, Human
uguaucaaaaugc

SEQ ID NO: 1150610 - RNA, 14 nt, Human
uguaucaaaaugcu

SEQ ID NO: 1150611 - RNA, 15 nt, Human
uguaucaaaaugcuc

SEQ ID NO: 1150612 - RNA, 18 nt, Human
uguaucaaaaugcucuua

SEQ ID NO: 1150613 - RNA, 23 nt, Human
uguaucaaaaugcucuuauuuca

SEQ ID NO: 1150614 - RNA, 13 nt, Human
uguauuacaaauc

SEQ ID NO: 1150615 - RNA, 22 nt, Human
uguauuacaaauccaaugaaau

SEQ ID NO: 1150616 - RNA, 21 nt, Human
ugucaagggcagcuuugcuca

SEQ ID NO: 1150617 - RNA, 22 nt, Human
ugucaagggcagcuuugcucau

SEQ ID NO: 1150618 - RNA, 23 nt, Human
ugucaagggcagcuuugcucaua

SEQ ID NO: 1150619 - RNA, 12 nt, Human
aguauugacaaa

SEQ ID NO: 1150620 - RNA, 13 nt, Human
aguauugacaaaa

SEQ ID NO: 1150621 - RNA, 14 nt, Human
aguauugacaaaau

SEQ ID NO: 1150622 - RNA, 15 nt, Human
aguauugacaaaaug

SEQ ID NO: 1150623 - RNA, 16 nt, Human
aguauugacaaaaugu

SEQ ID NO: 1150624 - RNA, 17 nt, Human
aguauugacaaaauguu

SEQ ID NO: 1150625 - RNA, 18 nt, Human
aguauugacaaaauguua

SEQ ID NO: 1150626 - RNA, 21 nt, Human
aguauugacaaaauguuauuu

SEQ ID NO: 1150627 - RNA, 19 nt, Human
aguauugacaaaauguuau

SEQ ID NO: 1150628 - RNA, 20 nt, Human
aguauugacaaaauguuauu

SEQ ID NO: 1150629 - RNA, 13 nt, Human
agucucuucucca

SEQ ID NO: 1150630 - RNA, 14 nt, Human
agucucuucuccac

SEQ ID NO: 1150631 - RNA, 15 nt, Human
agucucuucuccacu

SEQ ID NO: 1150632 - RNA, 16 nt, Human
agucucuucuccacug

SEQ ID NO: 1150633 - RNA, 18 nt, Human
agucucuucuccacugga

SEQ ID NO: 1150634 - RNA, 17 nt, Human
agucucuucuccacugg

SEQ ID NO: 1150635 - RNA, 15 nt, Human
agugaaagaaaauaa

SEQ ID NO: 1150636 - RNA, 17 nt, Human
agugaaagaaaauaaca

SEQ ID NO: 1150637 - RNA, 20 nt, Human
agugaaaggaagauaaacgu

SEQ ID NO: 1150638 - RNA, 14 nt, Human
agugagggauuauc

SEQ ID NO: 1150639 - RNA, 15 nt, Human
uguggguuuuuauuu

SEQ ID NO: 1150640 - RNA, 11 nt, Human
ugugugugugc

SEQ ID NO: 1150641 - RNA, 13 nt, Human
uguuuggagacag

SEQ ID NO: 1150642 - RNA, 15 nt, Human
aguucuucgacuguu

SEQ ID NO: 1150643 - RNA, 17 nt, Human
aguucuucgacuguugu

SEQ ID NO: 1150644 - RNA, 18 nt, Human
aguucuucgacuguuguu

SEQ ID NO: 1150645 - RNA, 19 nt, Human
aguucuucgacuguuguua

SEQ ID NO: 1150646 - RNA, 22 nt, Human
aguugcauagguuuaauaauuu

SEQ ID NO: 1150647 - RNA, 23 nt, Human
aguugcugcuucaauuuauaccu

SEQ ID NO: 1150648 - RNA, 13 nt, Human
aguuggcuucuaa

SEQ ID NO: 1150649 - RNA, 21 nt, Human
uuaaaaaccuguucaagucua

SEQ ID NO: 1150650 - RNA, 18 nt, Human
uuaaaaaccuguucaagu

SEQ ID NO: 1150651 - RNA, 16 nt, Human
auaaaauuaaagcuga

SEQ ID NO: 1150652 - RNA, 12 nt, Human
auaaaauuauag

SEQ ID NO: 1150653 - RNA, 17 nt, Human
auaaaauuauagcucua

SEQ ID NO: 1150654 - RNA, 21 nt, Human
auaaaauuauagcucuaaugu

SEQ ID NO: 1150655 - RNA, 19 nt, Human
auaaaauuauagcucuaau

SEQ ID NO: 1150656 - RNA, 14 nt, Human
auaaauagaaugua

SEQ ID NO: 1150657 - RNA, 16 nt, Human
auaaauagaauguaaa

SEQ ID NO: 1150658 - RNA, 20 nt, Human
auaaauagaauguaaauguc

SEQ ID NO: 1150659 - RNA, 19 nt, Human
auaaauagaauguaaaugu

SEQ ID NO: 1150660 - RNA, 13 nt, Human
uuacagcugccug

SEQ ID NO: 1150661 - RNA, 14 nt, Human
uuacagcugccugc

SEQ ID NO: 1150662 - RNA, 13 nt, Human
uuagaaccuuucu

SEQ ID NO: 1150663 - RNA, 14 nt, Human
auagcuacuaauuu

SEQ ID NO: 1150664 - RNA, 17 nt, Human
auagcuacuaauuuuaa

SEQ ID NO: 1150665 - RNA, 18 nt, Human
auagcuacuaauuuuaaa

SEQ ID NO: 1150666 - RNA, 15 nt, Human
auagcucuaauguuu

SEQ ID NO: 1150667 - RNA, 16 nt, Human
auagcucuaauguuug

SEQ ID NO: 1150668 - RNA, 17 nt, Human
auagcucuaauguuugc

SEQ ID NO: 1150669 - RNA, 18 nt, Human
auagcucuaauguuugca

SEQ ID NO: 1150670 - RNA, 19 nt, Human
auagcucuaauguuugcau

SEQ ID NO: 1150671 - RNA, 20 nt, Human
auagcucuaauguuugcaua

SEQ ID NO: 1150672 - RNA, 21 nt, Human
auagcucuaauguuugcauau

SEQ ID NO: 1150673 - RNA, 22 nt, Human
auagcucuaauguuugcauaua

SEQ ID NO: 1150674 - RNA, 17 nt, Human
uuauuuagcaccaggga

SEQ ID NO: 1150675 - RNA, 15 nt, Human
uuauuuaguauuuau

SEQ ID NO: 1150676 - RNA, 19 nt, Human
uuauuucccuacauuaaac

SEQ ID NO: 1150677 - RNA, 22 nt, Human
uuauuucccuacauuaaacaug

SEQ ID NO: 1150678 - RNA, 11 nt, Human
uuauuuccuau

SEQ ID NO: 1150679 - RNA, 17 nt, Human
uuauuuccuaugaugua

SEQ ID NO: 1150680 - RNA, 22 nt, Human
uuauuuccuaugauguauacug

SEQ ID NO: 1150681 - RNA, 20 nt, Human
uuauuuccuaugauguauac

SEQ ID NO: 1150682 - RNA, 20 nt, Human
uucaagugauucucaugccu

SEQ ID NO: 1150683 - RNA, 22 nt, Human
uucaagugauucucaugccuca

SEQ ID NO: 1150684 - RNA, 22 nt, Human
uucaccauguuggccaggcugc

SEQ ID NO: 1150685 - RNA, 22 nt, Human
uucaccauguuggccaggcugg

SEQ ID NO: 1150686 - RNA, 22 nt, Human
auaggcaccuaccaccacgccc

SEQ ID NO: 1150687 - RNA, 23 nt, Human
auauaagggaaguaguuaucaug

SEQ ID NO: 1150688 - RNA, 14 nt, Human
auauaagggaagua

SEQ ID NO: 1150689 - RNA, 22 nt, Human
auauaagggaaguaguuaucau

SEQ ID NO: 1150690 - RNA, 19 nt, Human
auauauacucaagaguggu

SEQ ID NO: 1150691 - RNA, 13 nt, Human
uucacugcuggcu

SEQ ID NO: 1150692 - RNA, 15 nt, Human
uucacugcuggcugc

SEQ ID NO: 1150693 - RNA, 16 nt, Human
uucacugcuggcugcc

SEQ ID NO: 1150694 - RNA, 17 nt, Human
uucacugcuggcugccu

SEQ ID NO: 1150695 - RNA, 18 nt, Human
uucacugcuggcugccuu

SEQ ID NO: 1150696 - RNA, 19 nt, Human
uucacugcuggcugccuua

SEQ ID NO: 1150697 - RNA, 15 nt, Human
uucagaaagaagugg

SEQ ID NO: 1150698 - RNA, 20 nt, Human
uucaucauucacuucacugu

SEQ ID NO: 1150699 - RNA, 19 nt, Human
uucaucauucacuucacug

SEQ ID NO: 1150700 - RNA, 16 nt, Human
auaucuagguuuauga

SEQ ID NO: 1150701 - RNA, 13 nt, Human
auauuaagaauga

SEQ ID NO: 1150702 - RNA, 14 nt, Human
auauuaagaaugau

SEQ ID NO: 1150703 - RNA, 17 nt, Human
auauuaagaaugaucug

SEQ ID NO: 1150704 - RNA, 21 nt, Human
auauuccugcauuugugaaau

SEQ ID NO: 1150705 - RNA, 18 nt, Human
auauugcugaaugcaaga

SEQ ID NO: 1150706 - RNA, 19 nt, Human
auauuuucaacgcagcccu

SEQ ID NO: 1150707 - RNA, 20 nt, Human
auauuuucaacgcagcccug

SEQ ID NO: 1150708 - RNA, 20 nt, Human
uuccuuuuaaaacacuucca

SEQ ID NO: 1150709 - RNA, 21 nt, Human
uuccuuuuaaaacacuuccau

SEQ ID NO: 1150710 - RNA, 22 nt, Human
uuccuuuuaaaacacuuccaua

SEQ ID NO: 1150711 - RNA, 12 nt, Human
aucagaugacaa

SEQ ID NO: 1150712 - RNA, 17 nt, Human
aucauucacuucacugu

SEQ ID NO: 1150713 - RNA, 19 nt, Human
aucauucacuucacugugc

SEQ ID NO: 1150714 - RNA, 22 nt, Human
aucauucacuucacugugcugu

SEQ ID NO: 1150715 - RNA, 21 nt, Human
aucauucacuucacugugcug

SEQ ID NO: 1150716 - RNA, 16 nt, Human
uucugcaucuccacuu

SEQ ID NO: 1150717 - RNA, 17 nt, Human
auccaggguggugguga

SEQ ID NO: 1150718 - RNA, 17 nt, Human
aucccaggauguacaag

SEQ ID NO: 1150719 - RNA, 19 nt, Human
aucccuggcugggauccac

SEQ ID NO: 1150720 - RNA, 17 nt, Human
uugagaaagucagauuc

SEQ ID NO: 1150721 - RNA, 10 nt, Human
uugagacaga

SEQ ID NO: 1150722 - RNA, 15 nt, Human
aucuuauaauuuaaa

SEQ ID NO: 1150723 - RNA, 16 nt, Human
aucuuauaauuuaaaa

SEQ ID NO: 1150724 - RNA, 13 nt, Human
uugcuuuguaugc

SEQ ID NO: 1150725 - RNA, 16 nt, Human
uugcuuuguaugcacu

SEQ ID NO: 1150726 - RNA, 12 nt, Human
uuggaaaauaaa

SEQ ID NO: 1150727 - RNA, 15 nt, Human
uuggaaaauaaauca

SEQ ID NO: 1150728 - RNA, 21 nt, Human
augagguacaaccuguucugc

SEQ ID NO: 1150729 - RNA, 18 nt, Human
uugugaugucccaacuug

SEQ ID NO: 1150730 - RNA, 22 nt, Human
uugugaugucccaacuuguaaa

SEQ ID NO: 1150731 - RNA, 15 nt, Human
augcagaacaaauga

SEQ ID NO: 1150732 - RNA, 18 nt, Human
augcagaacaaaugaaga

SEQ ID NO: 1150733 - RNA, 19 nt, Human
augcagaacaaaugaagac

SEQ ID NO: 1150734 - RNA, 17 nt, Human
augcagagguccacaac

SEQ ID NO: 1150735 - RNA, 18 nt, Human
augcagagguccacaaca

SEQ ID NO: 1150736 - RNA, 18 nt, Human
uuuaaaaaaauuccaagu

SEQ ID NO: 1150737 - RNA, 21 nt, Human
uuuaaauauaugcuaagucuu

SEQ ID NO: 1150738 - RNA, 17 nt, Human
uuuaaggguuuguggaa

SEQ ID NO: 1150739 - RNA, 20 nt, Human
uuuaaggguuuguggaaaau

SEQ ID NO: 1150740 - RNA, 22 nt, Human
uuuaaggguuuguggaaaauga

SEQ ID NO: 1150741 - RNA, 21 nt, Human
augccccgucccccucuggcu

SEQ ID NO: 1150742 - RNA, 13 nt, Human
augcgcaggcugg

SEQ ID NO: 1150743 - RNA, 14 nt, Human
augcgcaggcuggc

SEQ ID NO: 1150744 - RNA, 18 nt, Human
augcgcaggcuggcccug

SEQ ID NO: 1150745 - RNA, 20 nt, Human
augcgcaggcuggcccugcc

SEQ ID NO: 1150746 - RNA, 22 nt, Human
augcgcaggcuggcccugcccu

SEQ ID NO: 1150747 - RNA, 23 nt, Human
augcgcaggcuggcccugcccug

SEQ ID NO: 1150748 - RNA, 12 nt, Human
augcgugugugu

SEQ ID NO: 1150749 - RNA, 16 nt, Human
augcgugugugugugu

SEQ ID NO: 1150750 - RNA, 23 nt, Human
uuuagugacuaaaccauugugca

SEQ ID NO: 1150751 - RNA, 12 nt, Human
uuuagugacuaa

SEQ ID NO: 1150752 - RNA, 18 nt, Human
augcuuaaagaauucaaa

SEQ ID NO: 1150753 - RNA, 19 nt, Human
augcuuaaagaauucaaau

SEQ ID NO: 1150754 - RNA, 21 nt, Human
augcuuaaagaauucaaauuu

SEQ ID NO: 1150755 - RNA, 20 nt, Human
augcuuaaagaauucaaauu

SEQ ID NO: 1150756 - RNA, 14 nt, Human
auggaaggggcuga

SEQ ID NO: 1150757 - RNA, 16 nt, Human
uuucacuacucagcau

SEQ ID NO: 1150758 - RNA, 21 nt, Human
uuucagaaagaaguggggaca

SEQ ID NO: 1150759 - RNA, 11 nt, Human
uuucauguacu

SEQ ID NO: 1150760 - RNA, 12 nt, Human
uuucauguacug

SEQ ID NO: 1150761 - RNA, 15 nt, Human
uuucauguacugcau

SEQ ID NO: 1150762 - RNA, 13 nt, Human
uuugagaaaguca

SEQ ID NO: 1150763 - RNA, 22 nt, Human
uuuggauuggacaaaaugacuu

SEQ ID NO: 1150764 - RNA, 14 nt, Human
uuugggcugcccug

SEQ ID NO: 1150765 - RNA, 15 nt, Human
auguauacugccacu

SEQ ID NO: 1150766 - RNA, 21 nt, Human
auguauacugccacuaaccuu

SEQ ID NO: 1150767 - RNA, 23 nt, Human
augucgucaaagcugaaauggac

SEQ ID NO: 1150768 - RNA, 18 nt, Human
augugauccuuuuggagu

SEQ ID NO: 1150769 - RNA, 16 nt, Human
augugcuuaacaggga

SEQ ID NO: 1150770 - RNA, 21 nt, Human
augugcuuaacagggaacgug

SEQ ID NO: 1150771 - RNA, 23 nt, Human
auguuaacugacaagcuccauuu

SEQ ID NO: 1150772 - RNA, 12 nt, Human
auguuauuuccc

SEQ ID NO: 1150773 - RNA, 15 nt, Human
auguugaagccuuug

SEQ ID NO: 1150774 - RNA, 18 nt, Human
uuuuaguuccugugcaca

SEQ ID NO: 1150775 - RNA, 20 nt, Human
uuuuaguuccugugcacagc

SEQ ID NO: 1150776 - RNA, 12 nt, Human
uuuucuagugua

SEQ ID NO: 1150777 - RNA, 13 nt, Human
uuuucuaguguau

SEQ ID NO: 1150778 - RNA, 17 nt, Human
uuuucuaguguaucaaa

SEQ ID NO: 1150779 - RNA, 22 nt, Human
uuuucuaguguaucaaaaugcu

SEQ ID NO: 1150780 - RNA, 16 nt, Human
uuuucuauaauuuaaa

SEQ ID NO: 1150781 - RNA, 20 nt, Human
uuuucuaguguaucaaaaug

SEQ ID NO: 1150782 - RNA, 12 nt, Human
uuuucugcacua

SEQ ID NO: 1150783 - RNA, 13 nt, Human
uuuucugcacuau

SEQ ID NO: 1150784 - RNA, 19 nt, Human
uuuucugcacuauaugcaa

SEQ ID NO: 1150785 - RNA, 17 nt, Human
auguuggccaggcuggu

SEQ ID NO: 1150786 - RNA, 14 nt, Human
auguuuaaucauau

SEQ ID NO: 1150787 - RNA, 15 nt, Human
auguuuaaucauaua

SEQ ID NO: 1150788 - RNA, 17 nt, Human
auguuuaaucauauaaa

SEQ ID NO: 1150789 - RNA, 16 nt, Human
auguuuaaucauauaa

SEQ ID NO: 1150790 - RNA, 14 nt, Human
auuaaacaugacuc

SEQ ID NO: 1150791 - RNA, 19 nt, Human
uuuuuauuuccuaugaugu

SEQ ID NO: 1150792 - RNA, 22 nt, Human
uuuuugggaaaagaaaagucaa

SEQ ID NO: 1150793 - RNA, 11 nt, Human
uuuuuguauuu

SEQ ID NO: 1150794 - RNA, 20 nt, Human
auuauauggcuugaguuuaa

SEQ ID NO: 1150795 - RNA, 15 nt, Human
auucacuucacugug

SEQ ID NO: 1150796 - RNA, 16 nt, Human
auucacuucacugugc

SEQ ID NO: 1150797 - RNA, 17 nt, Human
auucacuucacugugcu

SEQ ID NO: 1150798 - RNA, 23 nt, Human
auucacuucacugugcuguuguu

SEQ ID NO: 1150799 - RNA, 18 nt, Human
auucacuucacugugcug

SEQ ID NO: 1150800 - RNA, 20 nt, Human
auucacuucacugugcuguu

SEQ ID NO: 1150801 - RNA, 17 nt, Human
auuccaagugauugaaa

SEQ ID NO: 1150802 - RNA, 12 nt, Human
auuccacagcug

SEQ ID NO: 1150803 - RNA, 13 nt, Human
auuccacagcugc

SEQ ID NO: 1150804 - RNA, 18 nt, Human
auuccagagaguggcucc

SEQ ID NO: 1150805 - RNA, 19 nt, Human
auuccagagaguggcuccu

SEQ ID NO: 1150806 - RNA, 13 nt, Human
auugacaaaaugu

SEQ ID NO: 1150807 - RNA, 14 nt, Human
auugacaaaauguu

SEQ ID NO: 1150808 - RNA, 15 nt, Human
auugacaaaauguua

SEQ ID NO: 1150809 - RNA, 16 nt, Human
auugacaaaauguuau

SEQ ID NO: 1150810 - RNA, 17 nt, Human
auugacaaaauguuauu

SEQ ID NO: 1150811 - RNA, 22 nt, Human
auugacaaaauguuauuucccu

SEQ ID NO: 1150812 - RNA, 19 nt, Human
auugacaaaauguuauuuc

SEQ ID NO: 1150813 - RNA, 16 nt, Human
auugcauuuccugaca

SEQ ID NO: 1150814 - RNA, 16 nt, Human
auuguaguccuguaau

SEQ ID NO: 1150815 - RNA, 15 nt, Human
auuuaguuguuguag

SEQ ID NO: 1150816 - RNA, 18 nt, Human
auuuaguuguuguagaga

SEQ ID NO: 1150817 - RNA, 19 nt, Human
auuuaguuguuguagagaa

SEQ ID NO: 1150818 - RNA, 20 nt, Human
auuuaguuguuguagagaaa

SEQ ID NO: 1150819 - RNA, 12 nt, Human
auuucauguacu

SEQ ID NO: 1150820 - RNA, 16 nt, Human
auuucauguacugcau

SEQ ID NO: 1150821 - RNA, 21 nt, Human
auuucauguacugcauuauuu

SEQ ID NO: 1150822 - RNA, 20 nt, Human
auuucauguacugcauuauu

SEQ ID NO: 1150823 - RNA, 14 nt, Human
auuuccuaugaugu

SEQ ID NO: 1150824 - RNA, 15 nt, Human
auuuccuaugaugua

SEQ ID NO: 1150825 - RNA, 16 nt, Human
auuuccuaugauguau

SEQ ID NO: 1150826 - RNA, 21 nt, Human
auuuccuaugauguauacugc

SEQ ID NO: 1150827 - RNA, 20 nt, Human
auuuccuaugauguauacug

SEQ ID NO: 1150828 - RNA, 18 nt, Human
auuugagaagcugcucaa

SEQ ID NO: 1150829 - RNA, 20 nt, Human
auuugagaagcugcucaacu

SEQ ID NO: 1150830 - RNA, 20 nt, Human
auuugauguggugaaaagca

SEQ ID NO: 1150831 - RNA, 20 nt, Human
auuuggaucucuucuuaaug

SEQ ID NO: 1150832 - RNA, 13 nt, Human
caaagcccagcuu

SEQ ID NO: 1150833 - RNA, 18 nt, Human
caaagcccuuccaugucg

SEQ ID NO: 1150834 - RNA, 22 nt, Human
caaaguucccuacuuccuguga

SEQ ID NO: 1150835 - RNA, 17 nt, Human
caaauguuuaaucauau

SEQ ID NO: 1150836 - RNA, 19 nt, Human
caaauguuuaaucauauaa

SEQ ID NO: 1150837 - RNA, 20 nt, Human
caaauguuuaaucauauaaa

SEQ ID NO: 1150838 - RNA, 22 nt, Human
caaauguuuaaucauauaaaua

SEQ ID NO: 1150839 - RNA, 13 nt, Human
caaauuggagaaa

SEQ ID NO: 1150840 - RNA, 12 nt, Human
caacuugcaaaa

SEQ ID NO: 1150841 - RNA, 15 nt, Human
caacuugcaaaauca

SEQ ID NO: 1150842 - RNA, 18 nt, Human
caacuugcaaaaucaguu

SEQ ID NO: 1150843 - RNA, 19 nt, Human
caacuugcaaaaucaguuu

SEQ ID NO: 1150844 - RNA, 20 nt, Human
caacuugcaaaaucaguuuu

SEQ ID NO: 1150845 - RNA, 18 nt, Human
caagagggcacugguggc

SEQ ID NO: 1150846 - RNA, 19 nt, Human
caagagggcacugguggcc

SEQ ID NO: 1150847 - RNA, 20 nt, Human
caagagggcacugguggccc

SEQ ID NO: 1150848 - RNA, 16 nt, Human
caaggacuaggguccu

SEQ ID NO: 1150849 - RNA, 18 nt, Human
caaggacuaggguccugg

SEQ ID NO: 1150850 - RNA, 19 nt, Human
caaggacuaggguccuggg

SEQ ID NO: 1150851 - RNA, 20 nt, Human
caaggacuaggguccugggg

SEQ ID NO: 1150852 - RNA, 21 nt, Human
caaggacuaggguccugggga

SEQ ID NO: 1150853 - RNA, 11 nt, Human
caagggcagcu

SEQ ID NO: 1150854 - RNA, 14 nt, Human
caagggcagcuuug

SEQ ID NO: 1150855 - RNA, 18 nt, Human
caagggcagcuuugcuca

SEQ ID NO: 1150856 - RNA, 18 nt, Human
caaucucggcucacugca

SEQ ID NO: 1150857 - RNA, 14 nt, Human
caaucuucaauccu

SEQ ID NO: 1150858 - RNA, 15 nt, Human
caaucuucaauccuu

SEQ ID NO: 1150859 - RNA, 18 nt, Human
caaucuucaauccuugaa

SEQ ID NO: 1150860 - RNA, 19 nt, Human
cacaaucucggcucacugc

SEQ ID NO: 1150861 - RNA, 20 nt, Human
cacaaucucggcucacugca

SEQ ID NO: 1150862 - RNA, 22 nt, Human
cacaaucucggcucacugcauc

SEQ ID NO: 1150863 - RNA, 23 nt, Human
cacaaucucggcucacugcaucc

SEQ ID NO: 1150864 - RNA, 24 nt, Human
cacaaucucggcucacugcauccu

SEQ ID NO: 1150865 - RNA, 18 nt, Human
cacacagauuugagcuca

SEQ ID NO: 1150866 - RNA, 20 nt, Human
cacacagauuugagcucagc

SEQ ID NO: 1150867 - RNA, 22 nt, Human
cacacagauuugagcucagccc

SEQ ID NO: 1150868 - RNA, 15 nt, Human
cacaggacucugccu

SEQ ID NO: 1150869 - RNA, 16 nt, Human
cacaggacucugccuc

SEQ ID NO: 1150870 - RNA, 14 nt, Human
caccacgcccggcu

SEQ ID NO: 1150871 - RNA, 15 nt, Human
caccacgcccggcua

SEQ ID NO: 1150872 - RNA, 15 nt, Human
caccaguugcugcuu

SEQ ID NO: 1150873 - RNA, 18 nt, Human
caccauaggucaccuuua

SEQ ID NO: 1150874 - RNA, 19 nt, Human
caccauguuggccaggcug

SEQ ID NO: 1150875 - RNA, 20 nt, Human
caccauguuggccaggcugc

SEQ ID NO: 1150876 - RNA, 20 nt, Human
caccauguuggccaggcugg

SEQ ID NO: 1150877 - RNA, 15 nt, Human
cauuguagagcuucu

SEQ ID NO: 1150878 - RNA, 16 nt, Human
cauuguagagcuucug

SEQ ID NO: 1150879 - RNA, 17 nt, Human
cauuguagagcuucugg

SEQ ID NO: 1150880 - RNA, 19 nt, Human
cauuguagagcuucuggca

SEQ ID NO: 1150881 - RNA, 21 nt, Human
cauuguagagcuucuggcacu

SEQ ID NO: 1150882 - RNA, 16 nt, Human
cauugugcauucuaga

SEQ ID NO: 1150883 - RNA, 13 nt, Human
cauuuccugacag

SEQ ID NO: 1150884 - RNA, 20 nt, Human
cauuuccugacagaaggacu

SEQ ID NO: 1150885 - RNA, 22 nt, Human
cauuuuguaccaaccauccaau

SEQ ID NO: 1150886 - RNA, 12 nt, Human
cauuuuguacca

SEQ ID NO: 1150887 - RNA, 19 nt, Human
ccaaacauccuacaagaca

SEQ ID NO: 1150888 - RNA, 20 nt, Human
ccaaacauccuacaagacac

SEQ ID NO: 1150889 - RNA, 20 nt, Human
ccaaacauccucuuccauau

SEQ ID NO: 1150890 - RNA, 20 nt, Human
ccaaccaaguggcucccaca

SEQ ID NO: 1150891 - RNA, 14 nt, Human
ccaacccucagagc

SEQ ID NO: 1150892 - RNA, 15 nt, Human
ccaacccucagagcc

SEQ ID NO: 1150893 - RNA, 19 nt, Human
ccaagaauagaugcugacu

SEQ ID NO: 1150894 - RNA, 20 nt, Human
ccaagaauagaugcugacug

SEQ ID NO: 1150895 - RNA, 13 nt, Human
ccaagccguggcu

SEQ ID NO: 1150896 - RNA, 14 nt, Human
ccaagccguggcuu

SEQ ID NO: 1150897 - RNA, 15 nt, Human
ccaagccuggcaagg

SEQ ID NO: 1150898 - RNA, 20 nt, Human
ccaauaaaccaaugaacgaa

SEQ ID NO: 1150899 - RNA, 22 nt, Human
ccaauaguuguugauuggcagg

SEQ ID NO: 1150900 - RNA, 17 nt, Human
ccacacgagaaccugaa

SEQ ID NO: 1150901 - RNA, 12 nt, Human
ccacacuccagc

SEQ ID NO: 1150902 - RNA, 13 nt, Human
ccacacuccagcu

SEQ ID NO: 1150903 - RNA, 15 nt, Human
ccacaggcccuuccu

SEQ ID NO: 1150904 - RNA, 16 nt, Human
ccacaggcccuuccuc

SEQ ID NO: 1150905 - RNA, 17 nt, Human
ccacaggcccuuccucu

SEQ ID NO: 1150906 - RNA, 18 nt, Human
ccacaggcccuuccucuc

SEQ ID NO: 1150907 - RNA, 19 nt, Human
ccacaggcccuuccucucc

SEQ ID NO: 1150908 - RNA, 22 nt, Human
ccacaggcccuuccucuccacu

SEQ ID NO: 1150909 - RNA, 23 nt, Human
ccacaggcccuuccucuccacug

SEQ ID NO: 1150910 - RNA, 15 nt, Human
ccaccaacccucaga

SEQ ID NO: 1150911 - RNA, 15 nt, Human
ccacuagacccacug

SEQ ID NO: 1150912 - RNA, 17 nt, Human
ccacuagacccacugga

SEQ ID NO: 1150913 - RNA, 21 nt, Human
ccacuccagaccccuggcuuu

SEQ ID NO: 1150914 - RNA, 22 nt, Human
ccacuccagaccccuggcuuuu

SEQ ID NO: 1150915 - RNA, 19 nt, Human
ccacuuagaaauugcauuu

SEQ ID NO: 1150916 - RNA, 21 nt, Human
ccacuuagaaauugcauuucc

SEQ ID NO: 1150917 - RNA, 16 nt, Human
ccagaaugcuuuagga

SEQ ID NO: 1150918 - RNA, 23 nt, Human
ccagaauggucuuucuaaugugu

SEQ ID NO: 1150919 - RNA, 13 nt, Human
ccagaauuucaaa

SEQ ID NO: 1150920 - RNA, 14 nt, Human
ccagaccccuggcu

SEQ ID NO: 1150921 - RNA, 15 nt, Human
ccagaccccuggcuu

SEQ ID NO: 1150922 - RNA, 16 nt, Human
ccagaccccuggcuuu

SEQ ID NO: 1150923 - RNA, 17 nt, Human
ccagaccccuggcuuuu

SEQ ID NO: 1150924 - RNA, 18 nt, Human
ccagaccccuggcuuuuc

SEQ ID NO: 1150925 - RNA, 13 nt, Human
ccaggacaggcug

SEQ ID NO: 1150926 - RNA, 20 nt, Human
ccaggacaggcugcggcccc

SEQ ID NO: 1150927 - RNA, 21 nt, Human
ccaggcuggucucgaacuccu

SEQ ID NO: 1150928 - RNA, 12 nt, Human
ccagggaagggg

SEQ ID NO: 1150929 - RNA, 14 nt, Human
ccaguaauccugua

SEQ ID NO: 1150930 - RNA, 20 nt, Human
ccagugaaaucaguuacucu

SEQ ID NO: 1150931 - RNA, 12 nt, Human
ccauacuaauua

SEQ ID NO: 1150932 - RNA, 13 nt, Human
ccauacuaauuau

SEQ ID NO: 1150933 - RNA, 23 nt, Human
ccauacuaauuauacccccugca

SEQ ID NO: 1150934 - RNA, 12 nt, Human
ccaucagaugac

SEQ ID NO: 1150935 - RNA, 15 nt, Human
ccaugauuucaugua

SEQ ID NO: 1150936 - RNA, 18 nt, Human
ccaugauuucauguacug

SEQ ID NO: 1150937 - RNA, 21 nt, Human
ccaugauuucauguacugcau

SEQ ID NO: 1150938 - RNA, 22 nt, Human
ccaugauuucauguacugcauu

SEQ ID NO: 1150939 - RNA, 20 nt, Human
cccaaaauuagccaguaauc

SEQ ID NO: 1150940 - RNA, 15 nt, Human
cccaggccugccugu

SEQ ID NO: 1150941 - RNA, 16 nt, Human
cccaggccugccuguu

SEQ ID NO: 1150942 - RNA, 18 nt, Human
cccaggcgccccuucccc

SEQ ID NO: 1150943 - RNA, 14 nt, Human
cccaggcugagccu

SEQ ID NO: 1150944 - RNA, 15 nt, Human
cccaggcugagccuc

SEQ ID NO: 1150945 - RNA, 13 nt, Human
ccccaagccuggc

SEQ ID NO: 1150946 - RNA, 14 nt, Human
ccccaagccuggca

SEQ ID NO: 1150947 - RNA, 13 nt, Human
ccccaggacaggc

SEQ ID NO: 1150948 - RNA, 14 nt, Human
ccccaggacaggcu

SEQ ID NO: 1150949 - RNA, 15 nt, Human
ccccaggacaggcug

SEQ ID NO: 1150950 - RNA, 23 nt, Human
cccccaaccaaguggcucccaca

SEQ ID NO: 1150951 - RNA, 14 nt, Human
cccccaggacaggc

SEQ ID NO: 1150952 - RNA, 21 nt, Human
cccccaggacaggcugcggcc

SEQ ID NO: 1150953 - RNA, 16 nt, Human
cccccaucucuucugg

SEQ ID NO: 1150954 - RNA, 13 nt, Human
cccccucugcccu

SEQ ID NO: 1150955 - RNA, 14 nt, Human
cccccucugcccug

SEQ ID NO: 1150956 - RNA, 16 nt, Human
cccccucugcccugcg

SEQ ID NO: 1150957 - RNA, 16 nt, Human
ccccgucccccucugg

SEQ ID NO: 1150958 - RNA, 20 nt, Human
ccccgucccccucuggcucc

SEQ ID NO: 1150959 - RNA, 23 nt, Human
ccccguccuggagguuccccagc

SEQ ID NO: 1150960 - RNA, 21 nt, Human
ccccgucucugguuccucccc

SEQ ID NO: 1150961 - RNA, 15 nt, Human
ccccucccccguccu

SEQ ID NO: 1150962 - RNA, 20 nt, Human
ccccucccccguccuggagg

SEQ ID NO: 1150963 - RNA, 21 nt, Human
cccugguuuccugcccuggga

SEQ ID NO: 1150964 - RNA, 22 nt, Human
cccugguuuccugcccugggag

SEQ ID NO: 1150965 - RNA, 23 nt, Human
cccugguuuccugcccugggagg

SEQ ID NO: 1150966 - RNA, 17 nt, Human
cccuuaccacugcucug

SEQ ID NO: 1150967 - RNA, 21 nt, Human
cccuuaccacugcucugauga

SEQ ID NO: 1150968 - RNA, 13 nt, Human
cccuuccucucca

SEQ ID NO: 1150969 - RNA, 16 nt, Human
cccuuccucuccacug

SEQ ID NO: 1150970 - RNA, 17 nt, Human
cccuuccucuccacugc

SEQ ID NO: 1150971 - RNA, 21 nt, Human
cccuuccucuccacugccuuc

SEQ ID NO: 1150972 - RNA, 20 nt, Human
cccuuccucuccacugccuu

SEQ ID NO: 1150973 - RNA, 22 nt, Human
cccuuucugggcaccggggccu

SEQ ID NO: 1150974 - RNA, 22 nt, Human
ccgagucucuucuccacuggau

SEQ ID NO: 1150975 - RNA, 12 nt, Human
ccggcugcccuu

SEQ ID NO: 1150976 - RNA, 19 nt, Human
ccgggccuggagaacuaga

SEQ ID NO: 1150977 - RNA, 14 nt, Human
ccgugccuucagcu

SEQ ID NO: 1150978 - RNA, 15 nt, Human
ccgugccuucagcuc

SEQ ID NO: 1150979 - RNA, 16 nt, Human
ccgugccuucagcucu

SEQ ID NO: 1150980 - RNA, 17 nt, Human
ccgugccuucagcucua

SEQ ID NO: 1150981 - RNA, 15 nt, Human
ccguggcuucccgcu

SEQ ID NO: 1150982 - RNA, 21 nt, Human
ccguggcuucccgcucagccc

SEQ ID NO: 1150983 - RNA, 23 nt, Human
ccguggcuucccgcucagcccuc

SEQ ID NO: 1150984 - RNA, 12 nt, Human
ccuaaagagaua

SEQ ID NO: 1150985 - RNA, 14 nt, Human
ccuaauuccacagc

SEQ ID NO: 1150986 - RNA, 15 nt, Human
ccuaauuccacagcu

SEQ ID NO: 1150987 - RNA, 16 nt, Human
ccuaauuccacagcug

SEQ ID NO: 1150988 - RNA, 17 nt, Human
ccuaauuccacagcugc

SEQ ID NO: 1150989 - RNA, 12 nt, Human
ccuaccugguaa

SEQ ID NO: 1150990 - RNA, 17 nt, Human
ccuaucagaaguuucuc

SEQ ID NO: 1150991 - RNA, 16 nt, Human
ccucaauuuucacugu

SEQ ID NO: 1150992 - RNA, 17 nt, Human
ccucaauuuucacugug

SEQ ID NO: 1150993 - RNA, 21 nt, Human
ccucacuaggcuucugguuga

SEQ ID NO: 1150994 - RNA, 21 nt, Human
ccucacuaucccggcugcccu

SEQ ID NO: 1150995 - RNA, 22 nt, Human
ccucacuaucccggcugcccuu

SEQ ID NO: 1150996 - RNA, 21 nt, Human
ccucagguaaucgaccugccu

SEQ ID NO: 1150997 - RNA, 22 nt, Human
ccucagguaaucgaccugccuc

SEQ ID NO: 1150998 - RNA, 23 nt, Human
ccucagguaaucgaccugccucg

SEQ ID NO: 1150999 - RNA, 14 nt, Human
ccucagucucccuc

SEQ ID NO: 1151000 - RNA, 13 nt, Human
ccucccggugccc

SEQ ID NO: 1151001 - RNA, 16 nt, Human
ccucccggugcccaag

SEQ ID NO: 1151002 - RNA, 13 nt, Human
ccucccugccccu

SEQ ID NO: 1151003 - RNA, 14 nt, Human
ccuccuccuggacu

SEQ ID NO: 1151004 - RNA, 13 nt, Human
ccuccuggacucc

SEQ ID NO: 1151005 - RNA, 18 nt, Human
ccuccuuaucaaaggaca

SEQ ID NO: 1151006 - RNA, 20 nt, Human
ccuccuuaucaaaggacacc

SEQ ID NO: 1151007 - RNA, 12 nt, Human
ccucuccacugc

SEQ ID NO: 1151008 - RNA, 13 nt, Human
ccucuccacugcc

SEQ ID NO: 1151009 - RNA, 14 nt, Human
ccucuccacugccu

SEQ ID NO: 1151010 - RNA, 16 nt, Human
ccucuccacugccuuc

SEQ ID NO: 1151011 - RNA, 19 nt, Human
ccucuccacugccuucgau

SEQ ID NO: 1151012 - RNA, 13 nt, Human
ccucucugcccua

SEQ ID NO: 1151013 - RNA, 16 nt, Human
ccucuggcuccagcug

SEQ ID NO: 1151014 - RNA, 17 nt, Human
ccucuggcuccagcugg

SEQ ID NO: 1151015 - RNA, 17 nt, Human
ccucuguccaggcacug

SEQ ID NO: 1151016 - RNA, 21 nt, Human
ccucuguucugcacacagcac

SEQ ID NO: 1151017 - RNA, 15 nt, Human
ccucuuccucccuca

SEQ ID NO: 1151018 - RNA, 16 nt, Human
ccucuuccucccucau

SEQ ID NO: 1151019 - RNA, 19 nt, Human
ccucuuccucccucauucc

SEQ ID NO: 1151020 - RNA, 16 nt, Human
ccugaaugcucuguag

SEQ ID NO: 1151021 - RNA, 15 nt, Human
ccugaaugcucugua

SEQ ID NO: 1151022 - RNA, 17 nt, Human
ccugcuuugggcugccc

SEQ ID NO: 1151023 - RNA, 18 nt, Human
ccugcuuugggcugcccu

SEQ ID NO: 1151024 - RNA, 19 nt, Human
ccugcuuugggcugcccug

SEQ ID NO: 1151025 - RNA, 21 nt, Human
ccuggcagccgugccuucagc

SEQ ID NO: 1151026 - RNA, 14 nt, Human
ccuggacuccugca

SEQ ID NO: 1151027 - RNA, 12 nt, Human
ccuggcagccgu

SEQ ID NO: 1151028 - RNA, 18 nt, Human
ccuggcagccgugccuuc

SEQ ID NO: 1151029 - RNA, 19 nt, Human
ccuggcagccgugccuuca

SEQ ID NO: 1151030 - RNA, 15 nt, Human
ccuggugcugccaca

SEQ ID NO: 1151031 - RNA, 18 nt, Human
ccuggugcugccacacuu

SEQ ID NO: 1151032 - RNA, 21 nt, Human
ccuggugcugccacacuucag

SEQ ID NO: 1151033 - RNA, 12 nt, Human
ccugugcacagc

SEQ ID NO: 1151034 - RNA, 13 nt, Human
ccugugcacagcc

SEQ ID NO: 1151035 - RNA, 14 nt, Human
ccuuagaaccuuuc

SEQ ID NO: 1151036 - RNA, 15 nt, Human
ccuuagaaccuuucu

SEQ ID NO: 1151037 - RNA, 16 nt, Human
ccuuagaaccuuucuu

SEQ ID NO: 1151038 - RNA, 18 nt, Human
ccuuagaaccuuucuuac

SEQ ID NO: 1151039 - RNA, 15 nt, Human
ccuucaaagcaaaug

SEQ ID NO: 1151040 - RNA, 19 nt, Human
ccuucaaagcaaaugucuu

SEQ ID NO: 1151041 - RNA, 14 nt, Human
ccuucaaccauucc

SEQ ID NO: 1151042 - RNA, 20 nt, Human
ccuuccaugucgccucugca

SEQ ID NO: 1151043 - RNA, 21 nt, Human
ccuuccaugucgccucugcau

SEQ ID NO: 1151044 - RNA, 23 nt, Human
ccuuccaugucgccucugcauuc

SEQ ID NO: 1151045 - RNA, 20 nt, Human
ccuucgauacaccgggccug

SEQ ID NO: 1151046 - RNA, 22 nt, Human
ccuucgauacaccgggccugga

SEQ ID NO: 1151047 - RNA, 23 nt, Human
ccuucgauacaccgggccuggag

SEQ ID NO: 1151048 - RNA, 13 nt, Human
ccuucgccaccug

SEQ ID NO: 1151049 - RNA, 14 nt, Human
ccuucuuuuucuuc

SEQ ID NO: 1151050 - RNA, 16 nt, Human
ccuucuuuuucuucuu

SEQ ID NO: 1151051 - RNA, 12 nt, Human
cgcccaggcugg

SEQ ID NO: 1151052 - RNA, 19 nt, Human
cgcccaggcuggagugcaa

SEQ ID NO: 1151053 - RNA, 20 nt, Human
cgcccaggcuggagugcaau

SEQ ID NO: 1151054 - RNA, 17 nt, Human
cgcuauugucaccaggg

SEQ ID NO: 1151055 - RNA, 22 nt, Human
cgggagccugaucaccugcccu

SEQ ID NO: 1151056 - RNA, 22 nt, Human
cguauaugucucaggucccugc

SEQ ID NO: 1151057 - RNA, 14 nt, Human
cgucccccucuggc

SEQ ID NO: 1151058 - RNA, 21 nt, Human
cgucccccucuggcuccagcu

SEQ ID NO: 1151059 - RNA, 22 nt, Human
cgucccccucuggcuccagcug

SEQ ID NO: 1151060 - RNA, 12 nt, Human
cgugccuggcca

SEQ ID NO: 1151061 - RNA, 16 nt, Human
cgugccuggccacgcc

SEQ ID NO: 1151062 - RNA, 13 nt, Human
cgugccuucagcu

SEQ ID NO: 1151063 - RNA, 15 nt, Human
cgugccuucagcucu

SEQ ID NO: 1151064 - RNA, 16 nt, Human
cgugccuucagcucua

SEQ ID NO: 1151065 - RNA, 18 nt, Human
cgugccuucagcucuaca

SEQ ID NO: 1151066 - RNA, 22 nt, Human
cguuccuucaaagcaaaugucu

SEQ ID NO: 1151067 - RNA, 18 nt, Human
cguuuagcugacaaaaua

SEQ ID NO: 1151068 - RNA, 16 nt, Human
cguuuagcugacaaaa

SEQ ID NO: 1151069 - RNA, 17 nt, Human
cucaggucccugcaggg

SEQ ID NO: 1151070 - RNA, 18 nt, Human
cucaggucccugcagggc

SEQ ID NO: 1151071 - RNA, 12 nt, Human
cucauauuuccc

SEQ ID NO: 1151072 - RNA, 18 nt, Human
cucauuccaccuucccau

SEQ ID NO: 1151073 - RNA, 21 nt, Human
cucauuccaccuucccaugcc

SEQ ID NO: 1151074 - RNA, 18 nt, Human
cucauucccuccccagaa

SEQ ID NO: 1151075 - RNA, 11 nt, Human
cuccacugccu

SEQ ID NO: 1151076 - RNA, 13 nt, Human
cuccacugccuuc

SEQ ID NO: 1151077 - RNA, 15 nt, Human
cuccagaccccuggc

SEQ ID NO: 1151078 - RNA, 17 nt, Human
cuccagaccccuggcuu

SEQ ID NO: 1151079 - RNA, 18 nt, Human
cuccagaccccuggcuuu

SEQ ID NO: 1151080 - RNA, 19 nt, Human
cuccagaccccuggcuuuu

SEQ ID NO: 1151081 - RNA, 20 nt, Human
cuccagaccccuggcuuuuc

SEQ ID NO: 1151082 - RNA, 21 nt, Human
cuccagaccccuggcuuuuca

SEQ ID NO: 1151083 - RNA, 20 nt, Human
cuccaucgcugucaucucag

SEQ ID NO: 1151084 - RNA, 17 nt, Human
cuccaucuaaacugccc

SEQ ID NO: 1151085 - RNA, 18 nt, Human
cuccaucuaaacugcccc

SEQ ID NO: 1151086 - RNA, 13 nt, Human
cuccaucuccacu

SEQ ID NO: 1151087 - RNA, 14 nt, Human
cuccaucuccacuc

SEQ ID NO: 1151088 - RNA, 14 nt, Human
cucccaggcgcccc

SEQ ID NO: 1151089 - RNA, 17 nt, Human
cucccaggcgccccuuc

SEQ ID NO: 1151090 - RNA, 12 nt, Human
cucccuucaacc

SEQ ID NO: 1151091 - RNA, 18 nt, Human
cucccuucaaccauuccc

SEQ ID NO: 1151092 - RNA, 19 nt, Human
cucccuucaaccauucccc

SEQ ID NO: 1151093 - RNA, 20 nt, Human
cucccuucaaccauucccca

SEQ ID NO: 1151094 - RNA, 22 nt, Human
cuccuaucagaaguuucucagc

SEQ ID NO: 1151095 - RNA, 19 nt, Human
cuccucuugccacugccuc

SEQ ID NO: 1151096 - RNA, 14 nt, Human
cuccugaccucagg

SEQ ID NO: 1151097 - RNA, 14 nt, Human
cuccugaccuuagg

SEQ ID NO: 1151098 - RNA, 17 nt, Human
cuccugaguagcuggga

SEQ ID NO: 1151099 - RNA, 22 nt, Human
cuccugaguagcugggauuaca

SEQ ID NO: 1151100 - RNA, 11 nt, Human
cuccugccacc

SEQ ID NO: 1151101 - RNA, 21 nt, Human
cucgaggucgggcagcacaag

SEQ ID NO: 1151102 - RNA, 19 nt, Human
cucgcuauugucaccaggg

SEQ ID NO: 1151103 - RNA, 22 nt, Human
cucgcuauugucaccagggcug

SEQ ID NO: 1151104 - RNA, 21 nt, Human
cucgcuauugucaccagggcu

SEQ ID NO: 1151105 - RNA, 18 nt, Human
cucggacuuagcugggag

SEQ ID NO: 1151106 - RNA, 19 nt, Human
cucggacuuagcugggaga

SEQ ID NO: 1151107 - RNA, 22 nt, Human
cucggccucccaaagugcuggg

SEQ ID NO: 1151108 - RNA, 23 nt, Human
cucggccucccaaagugcuggga

SEQ ID NO: 1151109 - RNA, 14 nt, Human
cucggcucacugca

SEQ ID NO: 1151110 - RNA, 15 nt, Human
cucuaauguuugcau

SEQ ID NO: 1151111 - RNA, 17 nt, Human
cucuaauguuugcauau

SEQ ID NO: 1151112 - RNA, 18 nt, Human
cucuaauguuugcauaua

SEQ ID NO: 1151113 - RNA, 16 nt, Human
cucuccacugccuucg

SEQ ID NO: 1151114 - RNA, 12 nt, Human
cucucugcccua

SEQ ID NO: 1151115 - RNA, 13 nt, Human
cucucugcccuaa

SEQ ID NO: 1151116 - RNA, 21 nt, Human
cucucugcccuaaugcgcagg

SEQ ID NO: 1151117 - RNA, 16 nt, Human
cucugagcaaaugugg

SEQ ID NO: 1151118 - RNA, 15 nt, Human
cucugagccuuggga

SEQ ID NO: 1151119 - RNA, 17 nt, Human
cucugaugaagaggagu

SEQ ID NO: 1151120 - RNA, 23 nt, Human
cucugcccuaaugcgcaggcugg

SEQ ID NO: 1151121 - RNA, 11 nt, Human
cucugcccugc

SEQ ID NO: 1151122 - RNA, 12 nt, Human
cucugcccugcg

SEQ ID NO: 1151123 - RNA, 14 nt, Human
cucugccuccucuu

SEQ ID NO: 1151124 - RNA, 15 nt, Human
cucugccuccucuuc

SEQ ID NO: 1151125 - RNA, 16 nt, Human
cucugccuccucuuca

SEQ ID NO: 1151126 - RNA, 15 nt, Human
cucugcuuuggaaau

SEQ ID NO: 1151127 - RNA, 19 nt, Human
cucuguucugcacacagca

SEQ ID NO: 1151128 - RNA, 20 nt, Human
cucuguucugcacacagcac

SEQ ID NO: 1151129 - RNA, 21 nt, Human
cucuguucugcacacagcacg

SEQ ID NO: 1151130 - RNA, 19 nt, Human
cucuucaguuaagccuuug

SEQ ID NO: 1151131 - RNA, 20 nt, Human
cucuucaguuaagccuuugg

SEQ ID NO: 1151132 - RNA, 23 nt, Human
cucuucaguuaagccuuuggaaa

SEQ ID NO: 1151133 - RNA, 14 nt, Human
cucuucuccacugg

SEQ ID NO: 1151134 - RNA, 15 nt, Human
cucuucuccacugga

SEQ ID NO: 1151135 - RNA, 17 nt, Human
cucuucuccacuggaug

SEQ ID NO: 1151136 - RNA, 19 nt, Human
cucuucuccacuggaugga

SEQ ID NO: 1151137 - RNA, 13 nt, Human
cucuucuccuuuc

SEQ ID NO: 1151138 - RNA, 15 nt, Human
cucuucuccuuucac

SEQ ID NO: 1151139 - RNA, 16 nt, Human
cucuucuccuuucaca

SEQ ID NO: 1151140 - RNA, 18 nt, Human
cucuucuggguuccuucc

SEQ ID NO: 1151141 - RNA, 21 nt, Human
cugaaguaaaacaaacaauac

SEQ ID NO: 1151142 - RNA, 17 nt, Human
cugaagucacugcacag

SEQ ID NO: 1151143 - RNA, 22 nt, Human
cugaagucacugcacagugcau

SEQ ID NO: 1151144 - RNA, 17 nt, Human
cugacagacagcccucc

SEQ ID NO: 1151145 - RNA, 19 nt, Human
cugacagacagcccuccau

SEQ ID NO: 1151146 - RNA, 18 nt, Human
cugacauuccuugcugaa

SEQ ID NO: 1151147 - RNA, 16 nt, Human
cugacauuccuugcug

SEQ ID NO: 1151148 - RNA, 14 nt, Human
cugagugccuuuug

SEQ ID NO: 1151149 - RNA, 15 nt, Human
cugagugccuuuugg

SEQ ID NO: 1151150 - RNA, 16 nt, Human
cugagugccuuuuggu

SEQ ID NO: 1151151 - RNA, 16 nt, Human
cugauucaauuugaug

SEQ ID NO: 1151152 - RNA, 17 nt, Human
cugauucaauuugaugu

SEQ ID NO: 1151153 - RNA, 23 nt, Human
cugauugaccguguuggucugua

SEQ ID NO: 1151154 - RNA, 13 nt, Human
cugcacaaagccc

SEQ ID NO: 1151155 - RNA, 18 nt, Human
cugcacaaagcccuucca

SEQ ID NO: 1151156 - RNA, 20 nt, Human
cugcacaaagcccuuccaug

SEQ ID NO: 1151157 - RNA, 21 nt, Human
cugcacaaagcccuuccaugu

SEQ ID NO: 1151158 - RNA, 18 nt, Human
cugcacagugcaucucag

SEQ ID NO: 1151159 - RNA, 21 nt, Human
cugcacagugcaucucagccc

SEQ ID NO: 1151160 - RNA, 22 nt, Human
cugcacagugcaucucagccca

SEQ ID NO: 1151161 - RNA, 17 nt, Human
cugcaccaguugcugcu

SEQ ID NO: 1151162 - RNA, 20 nt, Human
cugcagagcaggaaacauga

SEQ ID NO: 1151163 - RNA, 15 nt, Human
cugcagggacugcca

SEQ ID NO: 1151164 - RNA, 17 nt, Human
cugcagggacugccagu

SEQ ID NO: 1151165 - RNA, 16 nt, Human
cugcagggccaagcac

SEQ ID NO: 1151166 - RNA, 13 nt, Human
cugccacacuuca

SEQ ID NO: 1151167 - RNA, 17 nt, Human
cugccacacuucaggcu

SEQ ID NO: 1151168 - RNA, 22 nt, Human
cugccacacuucaggcucuucu

SEQ ID NO: 1151169 - RNA, 19 nt, Human
cugccaccacgcccggcua

SEQ ID NO: 1151170 - RNA, 17 nt, Human
cugcccaaccugcucuc

SEQ ID NO: 1151171 - RNA, 19 nt, Human
cugcccaaccugcucuccu

SEQ ID NO: 1151172 - RNA, 18 nt, Human
cugcccaggccugccugu

SEQ ID NO: 1151173 - RNA, 19 nt, Human
cugcccaggccugccuguu

SEQ ID NO: 1151174 - RNA, 11 nt, Human
cugcccuggga

SEQ ID NO: 1151175 - RNA, 12 nt, Human
cugcccugggag

SEQ ID NO: 1151176 - RNA, 13 nt, Human
cugcccugggagg

SEQ ID NO: 1151177 - RNA, 15 nt, Human
cugcccugggaggca

SEQ ID NO: 1151178 - RNA, 22 nt, Human
cugcccugggaggcagugaugg

SEQ ID NO: 1151179 - RNA, 12 nt, Human
cugccucuuccu

SEQ ID NO: 1151180 - RNA, 12 nt, Human
cugcucugauga

SEQ ID NO: 1151181 - RNA, 20 nt, Human
cugcucugaugaagaggagu

SEQ ID NO: 1151182 - RNA, 18 nt, Human
cugcuuugggcugcccug

SEQ ID NO: 1151183 - RNA, 19 nt, Human
cugcuuugggcugcccugg

SEQ ID NO: 1151184 - RNA, 20 nt, Human
cugcuuugggcugcccuggu

SEQ ID NO: 1151185 - RNA, 21 nt, Human
cugcuuugggcugcccuggug

SEQ ID NO: 1151186 - RNA, 22 nt, Human
cugcuuugggcugcccuggugc

SEQ ID NO: 1151187 - RNA, 23 nt, Human
cugcuuugggcugcccuggugcu

SEQ ID NO: 1151188 - RNA, 23 nt, Human
cuggaauaauccuaaacauauga

SEQ ID NO: 1151189 - RNA, 16 nt, Human
cuggacucaccucccc

SEQ ID NO: 1151190 - RNA, 21 nt, Human
cuggauggaggaaaaccaagc

SEQ ID NO: 1151191 - RNA, 23 nt, Human
cuggauuauucaaaaugauguau

SEQ ID NO: 1151192 - RNA, 17 nt, Human
cuggcacagggcagugg

SEQ ID NO: 1151193 - RNA, 14 nt, Human
cuggcugccuuaga

SEQ ID NO: 1151194 - RNA, 19 nt, Human
cuggcugccuuagaaccuu

SEQ ID NO: 1151195 - RNA, 14 nt, Human
cuggcuucacagau

SEQ ID NO: 1151196 - RNA, 16 nt, Human
cuggcuuuucacugcu

SEQ ID NO: 1151197 - RNA, 17 nt, Human
cuggcuuuucacugcug

SEQ ID NO: 1151198 - RNA, 19 nt, Human
cuggcuuuucacugcuggc

SEQ ID NO: 1151199 - RNA, 20 nt, Human
cuggcuuuucacugcuggcu

SEQ ID NO: 1151200 - RNA, 22 nt, Human
cuggcuuuucacugcuggcugc

SEQ ID NO: 1151201 - RNA, 19 nt, Human
cugggaacaccauagguca

SEQ ID NO: 1151202 - RNA, 13 nt, Human
cugggagcucugc

SEQ ID NO: 1151203 - RNA, 14 nt, Human
cugggagcucugca

SEQ ID NO: 1151204 - RNA, 15 nt, Human
cugggagcucugcag

SEQ ID NO: 1151205 - RNA, 16 nt, Human
cugggaggcagugaug

SEQ ID NO: 1151206 - RNA, 21 nt, Human
cugggauuacaggcgugagcc

SEQ ID NO: 1151207 - RNA, 19 nt, Human
cugggauuacaggcuccug

SEQ ID NO: 1151208 - RNA, 20 nt, Human
cugggauuacaggcuccugc

SEQ ID NO: 1151209 - RNA, 21 nt, Human
cugggauuacaggcuccugcc

SEQ ID NO: 1151210 - RNA, 22 nt, Human
cugggauuacaggcuccugcca

SEQ ID NO: 1151211 - RNA, 23 nt, Human
cugggauuacaggcuccugccac

SEQ ID NO: 1151212 - RNA, 20 nt, Human
cugggaucacauguggacuu

SEQ ID NO: 1151213 - RNA, 20 nt, Human
cugggcaccggggccucgga

SEQ ID NO: 1151214 - RNA, 13 nt, Human
cuggguuggaaaa

SEQ ID NO: 1151215 - RNA, 18 nt, Human
cuggguuggaaaacagua

SEQ ID NO: 1151216 - RNA, 20 nt, Human
cugguggcccgacagccugg

SEQ ID NO: 1151217 - RNA, 17 nt, Human
cugguugaugccuguga

SEQ ID NO: 1151218 - RNA, 16 nt, Human
cuguuuauucauaugc

SEQ ID NO: 1151219 - RNA, 17 nt, Human
cuguuuauucauaugca

SEQ ID NO: 1151220 - RNA, 20 nt, Human
cuguuuauucauaugcauau

SEQ ID NO: 1151221 - RNA, 21 nt, Human
cuguuuauucauaugcauauu

SEQ ID NO: 1151222 - RNA, 16 nt, Human
cuguuuuaaaaaccug

SEQ ID NO: 1151223 - RNA, 16 nt, Human
cuuaaguuuauacucu

SEQ ID NO: 1151224 - RNA, 13 nt, Human
cuuaauguacaua

SEQ ID NO: 1151225 - RNA, 15 nt, Human
cuuaauguacauagu

SEQ ID NO: 1151226 - RNA, 17 nt, Human
cuuagaaauugcauuuc

SEQ ID NO: 1151227 - RNA, 15 nt, Human
cuuagaaccuuucuu

SEQ ID NO: 1151228 - RNA, 20 nt, Human
cuuaggugauccacucgccu

SEQ ID NO: 1151229 - RNA, 13 nt, Human
cuuauaauuuaaa

SEQ ID NO: 1151230 - RNA, 14 nt, Human
cuuauaauuuaaaa

SEQ ID NO: 1151231 - RNA, 16 nt, Human
cuuauauuguucacuu

SEQ ID NO: 1151232 - RNA, 14 nt, Human
cuuauauuguucac

SEQ ID NO: 1151233 - RNA, 14 nt, Human
cuuaucaaaggaca

SEQ ID NO: 1151234 - RNA, 16 nt, Human
cuuaucaaaggacacc

SEQ ID NO: 1151235 - RNA, 14 nt, Human
cuucaggcucuucu

SEQ ID NO: 1151236 - RNA, 15 nt, Human
cuucaggcucuucuc

SEQ ID NO: 1151237 - RNA, 16 nt, Human
cuucaggcucuucucc

SEQ ID NO: 1151238 - RNA, 17 nt, Human
cuucaggcucuucuccu

SEQ ID NO: 1151239 - RNA, 18 nt, Human
cuucaggcucuucuccuu

SEQ ID NO: 1151240 - RNA, 13 nt, Human
cuucauuuggaga

SEQ ID NO: 1151241 - RNA, 14 nt, Human
cuucauuuggagau

SEQ ID NO: 1151242 - RNA, 15 nt, Human
cuucccgcucagccc

SEQ ID NO: 1151243 - RNA, 16 nt, Human
cuucccgcucagcccu

SEQ ID NO: 1151244 - RNA, 17 nt, Human
cuucccgcucagcccuc

SEQ ID NO: 1151245 - RNA, 18 nt, Human
cuucccgcucagcccucc

SEQ ID NO: 1151246 - RNA, 14 nt, Human
cuucgacuguuguu

SEQ ID NO: 1151247 - RNA, 22 nt, Human
cuucgacuguuguuaucuguuu

SEQ ID NO: 1151248 - RNA, 23 nt, Human
cuucgacuguuguuaucuguuug

SEQ ID NO: 1151249 - RNA, 16 nt, Human
cuucgauacaccgggc

SEQ ID NO: 1151250 - RNA, 15 nt, Human
cuucguuuaaugaau

SEQ ID NO: 1151251 - RNA, 14 nt, Human
cuucuccuuucaca

SEQ ID NO: 1151252 - RNA, 17 nt, Human
cuucuccuuucacaacc

SEQ ID NO: 1151253 - RNA, 20 nt, Human
cuucuccuuucacaaccuuc

SEQ ID NO: 1151254 - RNA, 22 nt, Human
cuucuccuuucacaaccuucug

SEQ ID NO: 1151255 - RNA, 17 nt, Human
cuucuggcacuuggaga

SEQ ID NO: 1151256 - RNA, 13 nt, Human
cuugccacugccu

SEQ ID NO: 1151257 - RNA, 22 nt, Human
cuugcugaaacgcaucuaguuc

SEQ ID NO: 1151258 - RNA, 21 nt, Human
cuugcugaaacgcaucuaguu

SEQ ID NO: 1151259 - RNA, 20 nt, Human
cuugcuugauuguauggugg

SEQ ID NO: 1151260 - RNA, 22 nt, Human
cuuggagccaauggagacuguc

SEQ ID NO: 1151261 - RNA, 22 nt, Human
cuuuaaaaaauuaaucugggcc

SEQ ID NO: 1151262 - RNA, 21 nt, Human
cuuuaaaaagcuccaaaugca

SEQ ID NO: 1151263 - RNA, 16 nt, Human
cuuucuuccucugcug

SEQ ID NO: 1151264 - RNA, 19 nt, Human
cuuucuuuuuuuuuuuuga

SEQ ID NO: 1151265 - RNA, 17 nt, Human
cuuuguuuuacugucuu

SEQ ID NO: 1151266 - RNA, 22 nt, Human
gaaaagucaaggguaggguggg

SEQ ID NO: 1151267 - RNA, 19 nt, Human
gaaaauaacaauaaaagac

SEQ ID NO: 1151268 - RNA, 23 nt, Human
gaaaauaaaucaaugcuauaacu

SEQ ID NO: 1151269 - RNA, 16 nt, Human
gaaauuguauuacaaa

SEQ ID NO: 1151270 - RNA, 18 nt, Human
gaaauuguauuacaaauc

SEQ ID NO: 1151271 - RNA, 21 nt, Human
gaagacuuacagcaaauccuu

SEQ ID NO: 1151272 - RNA, 20 nt, Human
gaagacuuacagcaaauccu

SEQ ID NO: 1151273 - RNA, 13 nt, Human
gaaguaguuauca

SEQ ID NO: 1151274 - RNA, 14 nt, Human
gaaguaguuaucau

SEQ ID NO: 1151275 - RNA, 15 nt, Human
gaaguaguuaucaug

SEQ ID NO: 1151276 - RNA, 16 nt, Human
gaaguaguuaucaugu

SEQ ID NO: 1151277 - RNA, 17 nt, Human
gaaguaguuaucauguu

SEQ ID NO: 1151278 - RNA, 18 nt, Human
gaaguaguuaucauguua

SEQ ID NO: 1151279 - RNA, 21 nt, Human
gaaguaguuaucauguuagua

SEQ ID NO: 1151280 - RNA, 19 nt, Human
gaaguaguuaucauguuag

SEQ ID NO: 1151281 - RNA, 20 nt, Human
gaauaauccuaaacauauga

SEQ ID NO: 1151282 - RNA, 17 nt, Human
gaauaccuuagugcagu

SEQ ID NO: 1151283 - RNA, 20 nt, Human
gaauaccuuagugcaguuau

SEQ ID NO: 1151284 - RNA, 21 nt, Human
gaauaccuuagugcaguuauu

SEQ ID NO: 1151285 - RNA, 14 nt, Human
gaaugcauaaaaug

SEQ ID NO: 1151286 - RNA, 13 nt, Human
gaaugcuuuagga

SEQ ID NO: 1151287 - RNA, 13 nt, Human
gaauguaaauguc

SEQ ID NO: 1151288 - RNA, 14 nt, Human
gaauguaaaugucu

SEQ ID NO: 1151289 - RNA, 16 nt, Human
gaauguaaaugucuca

SEQ ID NO: 1151290 - RNA, 16 nt, Human
gaauucaaauuuuauc

SEQ ID NO: 1151291 - RNA, 18 nt, Human
gaauucaaauuuuaucug

SEQ ID NO: 1151292 - RNA, 16 nt, Human
gacagacagcccucca

SEQ ID NO: 1151293 - RNA, 14 nt, Human
gacagggcauggcc

SEQ ID NO: 1151294 - RNA, 15 nt, Human
gacagggcauggcca

SEQ ID NO: 1151295 - RNA, 20 nt, Human
gacagggcauggccaggugg

SEQ ID NO: 1151296 - RNA, 22 nt, Human
gacagggcauggccagguggcc

SEQ ID NO: 1151297 - RNA, 14 nt, Human
gaccacacuccagc

SEQ ID NO: 1151298 - RNA, 16 nt, Human
gaccacacuccagcug

SEQ ID NO: 1151299 - RNA, 22 nt, Human
gaccacacuccagcugggauca

SEQ ID NO: 1151300 - RNA, 19 nt, Human
gacccacuggacucaccuc

SEQ ID NO: 1151301 - RNA, 12 nt, Human
gacccccaggac

SEQ ID NO: 1151302 - RNA, 13 nt, Human
gacccccaggaca

SEQ ID NO: 1151303 - RNA, 18 nt, Human
gacuaaaccauugugcau

SEQ ID NO: 1151304 - RNA, 19 nt, Human
gacuaaaccauugugcauu

SEQ ID NO: 1151305 - RNA, 22 nt, Human
gacuaaaccauugugcauucua

SEQ ID NO: 1151306 - RNA, 20 nt, Human
gacugccagucccccugccc

SEQ ID NO: 1151307 - RNA, 18 nt, Human
gacuuacagcaaauccuu

SEQ ID NO: 1151308 - RNA, 15 nt, Human
gacuuagcugggaga

SEQ ID NO: 1151309 - RNA, 14 nt, Human
gacuucagcucugu

SEQ ID NO: 1151310 - RNA, 18 nt, Human
gauaauucuagcuuugag

SEQ ID NO: 1151311 - RNA, 17 nt, Human
gauaggucagugcaaau

SEQ ID NO: 1151312 - RNA, 16 nt, Human
gaucacauguggacuu

SEQ ID NO: 1151313 - RNA, 23 nt, Human
gauccuaaugaaugcauaaaaug

SEQ ID NO: 1151314 - RNA, 16 nt, Human
gauccucccaggcuuc

SEQ ID NO: 1151315 - RNA, 16 nt, Human
gaugaaauguaaauac

SEQ ID NO: 1151316 - RNA, 17 nt, Human
gaugaaauuccauuugu

SEQ ID NO: 1151317 - RNA, 20 nt, Human
gaugccugugaacugaacuc

SEQ ID NO: 1151318 - RNA, 22 nt, Human
gaugcagugccaggaacccuua

SEQ ID NO: 1151319 - RNA, 12 nt, Human
gauuucauguac

SEQ ID NO: 1151320 - RNA, 13 nt, Human
gauuucauguacu

SEQ ID NO: 1151321 - RNA, 16 nt, Human
gauuucauguacugca

SEQ ID NO: 1151322 - RNA, 19 nt, Human
gauuucauguacugcauua

SEQ ID NO: 1151323 - RNA, 20 nt, Human
gauuucauguacugcauuau

SEQ ID NO: 1151324 - RNA, 21 nt, Human
gauuucauguacugcauuauu

SEQ ID NO: 1151325 - RNA, 23 nt, Human
gcaaaguucccuacuuccuguga

SEQ ID NO: 1151326 - RNA, 18 nt, Human
gcaagcaagaaacacugg

SEQ ID NO: 1151327 - RNA, 21 nt, Human
gcaagggaauuucuucaacuc

SEQ ID NO: 1151328 - RNA, 17 nt, Human
gcacugaggaccagcca

SEQ ID NO: 1151329 - RNA, 15 nt, Human
gcagccgugccuuca

SEQ ID NO: 1151330 - RNA, 17 nt, Human
gcagccgugccuucagc

SEQ ID NO: 1151331 - RNA, 18 nt, Human
gcagccgugccuucagcu

SEQ ID NO: 1151332 - RNA, 14 nt, Human
gcagggagggccug

SEQ ID NO: 1151333 - RNA, 17 nt, Human
gcagggagggccugggc

SEQ ID NO: 1151334 - RNA, 18 nt, Human
gcagggagggccugggcc

SEQ ID NO: 1151335 - RNA, 22 nt, Human
gcagggagggccugggccccag

SEQ ID NO: 1151336 - RNA, 14 nt, Human
gcaguguuagcuua

SEQ ID NO: 1151337 - RNA, 13 nt, Human
gcaguguuagcuu

SEQ ID NO: 1151338 - RNA, 23 nt, Human
gcauauaagggaaguaguuauca

SEQ ID NO: 1151339 - RNA, 15 nt, Human
gcauauaagggaagu

SEQ ID NO: 1151340 - RNA, 20 nt, Human
gcauuagauuucucauuugc

SEQ ID NO: 1151341 - RNA, 15 nt, Human
gcauuagcuaaaacc

SEQ ID NO: 1151342 - RNA, 13 nt, Human
gcauucucacucc

SEQ ID NO: 1151343 - RNA, 15 nt, Human
gcauucucacuccua

SEQ ID NO: 1151344 - RNA, 18 nt, Human
gcauucucacuccuaccu

SEQ ID NO: 1151345 - RNA, 17 nt, Human
gcauuuucugcaucucc

SEQ ID NO: 1151346 - RNA, 18 nt, Human
gcauuuucugcaucucca

SEQ ID NO: 1151347 - RNA, 16 nt, Human
gccacuccagaccccu

SEQ ID NO: 1151348 - RNA, 18 nt, Human
gccacuccagaccccugg

SEQ ID NO: 1151349 - RNA, 19 nt, Human
gccacuccagaccccuggc

SEQ ID NO: 1151350 - RNA, 20 nt, Human
gccacuccagaccccuggcu

SEQ ID NO: 1151351 - RNA, 18 nt, Human
gccagguggccacuccag

SEQ ID NO: 1151352 - RNA, 17 nt, Human
gcccaggccugccuguu

SEQ ID NO: 1151353 - RNA, 17 nt, Human
gccccgucccccucugg

SEQ ID NO: 1151354 - RNA, 21 nt, Human
gccccgucccccucuggcucc

SEQ ID NO: 1151355 - RNA, 13 nt, Human
gccccugcacaaa

SEQ ID NO: 1151356 - RNA, 15 nt, Human
gcccucccugccccu

SEQ ID NO: 1151357 - RNA, 21 nt, Human
gcccucccugccccucccuuc

SEQ ID NO: 1151358 - RNA, 22 nt, Human
gcccuuccucuccacugccuuc

SEQ ID NO: 1151359 - RNA, 11 nt, Human
gccguggcuuc

SEQ ID NO: 1151360 - RNA, 12 nt, Human
gccguggcuucc

SEQ ID NO: 1151361 - RNA, 13 nt, Human
gccguggcuuccc

SEQ ID NO: 1151362 - RNA, 15 nt, Human
gccguggcuucccgc

SEQ ID NO: 1151363 - RNA, 14 nt, Human
gccuaaggcugaac

SEQ ID NO: 1151364 - RNA, 23 nt, Human
gccucucuuguaauuuggaucuc

SEQ ID NO: 1151365 - RNA, 12 nt, Human
gccucugcauuc

SEQ ID NO: 1151366 - RNA, 15 nt, Human
gccucugcauucagg

SEQ ID NO: 1151367 - RNA, 16 nt, Human
gccuuagaaccuuucu

SEQ ID NO: 1151368 - RNA, 17 nt, Human
gccuuagaaccuuucuu

SEQ ID NO: 1151369 - RNA, 13 nt, Human
gccuucagcucua

SEQ ID NO: 1151370 - RNA, 16 nt, Human
gccuucagcucuacag

SEQ ID NO: 1151371 - RNA, 16 nt, Human
gccuuuuaguuccugu

SEQ ID NO: 1151372 - RNA, 20 nt, Human
gccuuuuaguuccugugcac

SEQ ID NO: 1151373 - RNA, 17 nt, Human
gccuuuuaguuccugug

SEQ ID NO: 1151374 - RNA, 16 nt, Human
gcgugagaccugcccc

SEQ ID NO: 1151375 - RNA, 19 nt, Human
gcugcccuggugcugccac

SEQ ID NO: 1151376 - RNA, 20 nt, Human
gcugcccuggugcugccaca

SEQ ID NO: 1151377 - RNA, 22 nt, Human
gcugcccuggugcugccacacu

SEQ ID NO: 1151378 - RNA, 23 nt, Human
gcugcccuggugcugccacacuu

SEQ ID NO: 1151379 - RNA, 17 nt, Human
gcugcccuuucugggca

SEQ ID NO: 1151380 - RNA, 12 nt, Human
gcuggcccugcc

SEQ ID NO: 1151381 - RNA, 13 nt, Human
gcuggcccugccc

SEQ ID NO: 1151382 - RNA, 17 nt, Human
gcuggccgggagccuga

SEQ ID NO: 1151383 - RNA, 15 nt, Human
gcugggagcucugca

SEQ ID NO: 1151384 - RNA, 16 nt, Human
gcugggagcucugcag

SEQ ID NO: 1151385 - RNA, 17 nt, Human
gcugggauuacaggcgu

SEQ ID NO: 1151386 - RNA, 18 nt, Human
gcugggauuacaggcgug

SEQ ID NO: 1151387 - RNA, 19 nt, Human
gcugggauuacaggcuccu

SEQ ID NO: 1151388 - RNA, 20 nt, Human
gcugggauuacaggcuccug

SEQ ID NO: 1151389 - RNA, 21 nt, Human
gcugggauuacaggcuccugc

SEQ ID NO: 1151390 - RNA, 16 nt, Human
gcuucuguugcugccu

SEQ ID NO: 1151391 - RNA, 22 nt, Human
gcuugcagagaugaggccgcca

SEQ ID NO: 1151392 - RNA, 14 nt, Human
gcuuugggcugccc

SEQ ID NO: 1151393 - RNA, 15 nt, Human
gcuuugggcugcccu

SEQ ID NO: 1151394 - RNA, 16 nt, Human
gcuuugggcugcccug

SEQ ID NO: 1151395 - RNA, 18 nt, Human
gcuuugggcugcccuggu

SEQ ID NO: 1151396 - RNA, 20 nt, Human
ggaaaaaauaacaaugaaag

SEQ ID NO: 1151397 - RNA, 22 nt, Human
ggaaaaccaagccguggcuucc

SEQ ID NO: 1151398 - RNA, 17 nt, Human
ggaacggaucagauguc

SEQ ID NO: 1151399 - RNA, 23 nt, Human
ggaacuagacucccaagcuggac

SEQ ID NO: 1151400 - RNA, 14 nt, Human
ggaacgugauuagu

SEQ ID NO: 1151401 - RNA, 13 nt, Human
ggaagcagcuuuc

SEQ ID NO: 1151402 - RNA, 14 nt, Human
ggacuccucugucc

SEQ ID NO: 1151403 - RNA, 15 nt, Human
ggacuccucugucca

SEQ ID NO: 1151404 - RNA, 11 nt, Human
ggacucugccu

SEQ ID NO: 1151405 - RNA, 21 nt, Human
ggacugccagucccccugccc

SEQ ID NO: 1151406 - RNA, 20 nt, Human
ggauccacgacgcuuaaaua

SEQ ID NO: 1151407 - RNA, 18 nt, Human
ggcaacuugggaacuaga

SEQ ID NO: 1151408 - RNA, 23 nt, Human
ggcaacuugggaacuagacuccc

SEQ ID NO: 1151409 - RNA, 22 nt, Human
ggcagcacaaguguaaugaaua

SEQ ID NO: 1151410 - RNA, 14 nt, Human
ggcagcuuugcuca

SEQ ID NO: 1151411 - RNA, 15 nt, Human
ggcagcuuugcucau

SEQ ID NO: 1151412 - RNA, 14 nt, Human
ggcaggaaggcuga

SEQ ID NO: 1151413 - RNA, 24 nt, Human
ggcauuagcuaaaaccuuccaugu

SEQ ID NO: 1151414 - RNA, 11 nt, Human
ggccaggcugg

SEQ ID NO: 1151415 - RNA, 12 nt, Human
ggccaggcuggu

SEQ ID NO: 1151416 - RNA, 13 nt, Human
ggccccucccccg

SEQ ID NO: 1151417 - RNA, 17 nt, Human
ggccccucccccguccu

SEQ ID NO: 1151418 - RNA, 15 nt, Human
ggcugggagcucugc

SEQ ID NO: 1151419 - RNA, 12 nt, Human
ggcuucacagau

SEQ ID NO: 1151420 - RNA, 22 nt, Human
ggcuugaguuuaaauuguaaua

SEQ ID NO: 1151421 - RNA, 14 nt, Human
ggcuuuucacugcu

SEQ ID NO: 1151422 - RNA, 15 nt, Human
ggcuuuucacugcug

SEQ ID NO: 1151423 - RNA, 17 nt, Human
ggcuuuucacugcuggc

SEQ ID NO: 1151424 - RNA, 19 nt, Human
ggcuuuucacugcuggcug

SEQ ID NO: 1151425 - RNA, 22 nt, Human
ggcuuuucacugcuggcugccu

SEQ ID NO: 1151426 - RNA, 22 nt, Human
gggaaggcagggagggccuggg

SEQ ID NO: 1151427 - RNA, 18 nt, Human
gggaaguaguuaucaugu

SEQ ID NO: 1151428 - RNA, 22 nt, Human
gggaaguaguuaucauguuagu

SEQ ID NO: 1151429 - RNA, 20 nt, Human
gggaaguaguuaucauguua

SEQ ID NO: 1151430 - RNA, 17 nt, Human
gggaauuucuucaacuc

SEQ ID NO: 1151431 - RNA, 23 nt, Human
gggacaaggacuaggguccuggg

SEQ ID NO: 1151432 - RNA, 14 nt, Human
gggaccccugagcu

SEQ ID NO: 1151433 - RNA, 14 nt, Human
gggcaccggggccu

SEQ ID NO: 1151434 - RNA, 13 nt, Human
gggcacugguggc

SEQ ID NO: 1151435 - RNA, 16 nt, Human
gggcacugguggcccg

SEQ ID NO: 1151436 - RNA, 15 nt, Human
gggcauggccaggug

SEQ ID NO: 1151437 - RNA, 17 nt, Human
gggcauggccagguggc

SEQ ID NO: 1151438 - RNA, 20 nt, Human
gggcauggccagguggccac

SEQ ID NO: 1151439 - RNA, 14 nt, Human
gggccccagaggcu

SEQ ID NO: 1151440 - RNA, 11 nt, Human
gggccugggcc

SEQ ID NO: 1151441 - RNA, 18 nt, Human
ggggaggggcugugggcg

SEQ ID NO: 1151442 - RNA, 19 nt, Human
ggguaacuaacuaaaacaa

SEQ ID NO: 1151443 - RNA, 19 nt, Human
ggguuccuuccucugagcc

SEQ ID NO: 1151444 - RNA, 20 nt, Human
ggguuccuuccucugagccu

SEQ ID NO: 1151445 - RNA, 21 nt, Human
ggguuccuuccucugagccuu

SEQ ID NO: 1151446 - RNA, 17 nt, Human
ggguucuuucuuccucu

SEQ ID NO: 1151447 - RNA, 19 nt, Human
ggguucuuucuuccucugc

SEQ ID NO: 1151448 - RNA, 16 nt, Human
ggucacaggacucugc

SEQ ID NO: 1151449 - RNA, 18 nt, Human
ggucacaggacucugccu

SEQ ID NO: 1151450 - RNA, 16 nt, Human
ggugagaauagaaucu

SEQ ID NO: 1151451 - RNA, 20 nt, Human
gguggccacuccagaccccu

SEQ ID NO: 1151452 - RNA, 21 nt, Human
gguggccacuccagaccccug

SEQ ID NO: 1151453 - RNA, 22 nt, Human
gguggccacuccagaccccugg

SEQ ID NO: 1151454 - RNA, 23 nt, Human
gguggccacuccagaccccuggc

SEQ ID NO: 1151455 - RNA, 21 nt, Human
gguuaguggauggaaggggcu

SEQ ID NO: 1151456 - RNA, 22 nt, Human
gguuaguggauggaaggggcug

SEQ ID NO: 1151457 - RNA, 14 nt, Human
gguucuuucuuccu

SEQ ID NO: 1151458 - RNA, 16 nt, Human
gguucuuucuuccucu

SEQ ID NO: 1151459 - RNA, 17 nt, Human
gguucuuucuuccucug

SEQ ID NO: 1151460 - RNA, 21 nt, Human
gguugauaaaucauuuuaugu

SEQ ID NO: 1151461 - RNA, 14 nt, Human
guuuagcugacaaa

SEQ ID NO: 1151462 - RNA, 15 nt, Human
guuuagcugacaaaa

SEQ ID NO: 1151463 - RNA, 17 nt, Human
guuuagcugacaaaaua

SEQ ID NO: 1151464 - RNA, 20 nt, Human
guuuagcugacaaaauacuu

SEQ ID NO: 1151465 - RNA, 13 nt, Human
guuuccugcccug

SEQ ID NO: 1151466 - RNA, 17 nt, Human
guuuccugcccugggag

SEQ ID NO: 1151467 - RNA, 22 nt, Human
guuuccugcccugggaggcagu

SEQ ID NO: 1151468 - RNA, 19 nt, Human
guuuguggaaaaugaaaau

SEQ ID NO: 1151469 - RNA, 16 nt, Human
guuuguugugaggauu

SEQ ID NO: 1151470 - RNA, 14 nt, Human
guuuucuaguguau

SEQ ID NO: 1151471 - RNA, 23 nt, Human
guuuucuaguguaucaaaaugcu

SEQ ID NO: 1151472 - RNA, 14 nt, Human
guuuuuauuuccua

SEQ ID NO: 1151473 - RNA, 16 nt, Human
guuuuuauuuccuaug

SEQ ID NO: 1151474 - RNA, 19 nt, Human
guuuuuauuuccuaugaug

SEQ ID NO: 1151475 - RNA, 20 nt, Human
guuuuuauuuccuaugaugu

SEQ ID NO: 1151476 - RNA, 21 nt, Human
guuuuuauuuccuaugaugua

SEQ ID NO: 1151477 - RNA, 23 nt, Human
guuuuucagguauauaccuccau

SEQ ID NO: 1151478 - RNA, 15 nt, Human
uaaaaaccuguucaa

SEQ ID NO: 1151479 - RNA, 16 nt, Human
uaaacagauguccauc

SEQ ID NO: 1151480 - RNA, 21 nt, Human
uaaacagauguccaucagaug

SEQ ID NO: 1151481 - RNA, 22 nt, Human
uaaacagauguccaucagauga

SEQ ID NO: 1151482 - RNA, 23 nt, Human
uaaacagauguccaucagaugac

SEQ ID NO: 1151483 - RNA, 16 nt, Human
uaaacaguugcacagc

SEQ ID NO: 1151484 - RNA, 17 nt, Human
uaaacaguugcacagca

SEQ ID NO: 1151485 - RNA, 18 nt, Human
uaaacaguugcacagcau

SEQ ID NO: 1151486 - RNA, 19 nt, Human
uaaacaguugcacagcauc

SEQ ID NO: 1151487 - RNA, 22 nt, Human
uaaacaguugcacagcaucuca

SEQ ID NO: 1151488 - RNA, 20 nt, Human
uaaacugcccccucugcccu

SEQ ID NO: 1151489 - RNA, 21 nt, Human
uaaacugcccccucugcccug

SEQ ID NO: 1151490 - RNA, 22 nt, Human
uaaacugcccccucugcccugc

SEQ ID NO: 1151491 - RNA, 23 nt, Human
uaaacugcccccucugcccugcg

SEQ ID NO: 1151492 - RNA, 14 nt, Human
uaaagcugaaaacu

SEQ ID NO: 1151493 - RNA, 17 nt, Human
uaaauaaaaauaauccu

SEQ ID NO: 1151494 - RNA, 18 nt, Human
uaaauauaugcuaagucu

SEQ ID NO: 1151495 - RNA, 19 nt, Human
uaaaucaaguuggcuucua

SEQ ID NO: 1151496 - RNA, 12 nt, Human
uaaaucauuuua

SEQ ID NO: 1151497 - RNA, 13 nt, Human
uaaaucauuuuau

SEQ ID NO: 1151498 - RNA, 15 nt, Human
uaaaucauuuuaugu

SEQ ID NO: 1151499 - RNA, 19 nt, Human
uaaaucauuuuaugucaag

SEQ ID NO: 1151500 - RNA, 15 nt, Human
uaaauugcuccuuga

SEQ ID NO: 1151501 - RNA, 15 nt, Human
uaacagggaacguga

SEQ ID NO: 1151502 - RNA, 22 nt, Human
uaacagggaacgugauuaguga

SEQ ID NO: 1151503 - RNA, 23 nt, Human
uaacagggaacgugauuagugaa

SEQ ID NO: 1151504 - RNA, 16 nt, Human
uaacugagugccuuuu

SEQ ID NO: 1151505 - RNA, 17 nt, Human
uaacugagugccuuuug

SEQ ID NO: 1151506 - RNA, 14 nt, Human
uaagccuuuggaaa

SEQ ID NO: 1151507 - RNA, 17 nt, Human
uaagccuuuggaaacag

SEQ ID NO: 1151508 - RNA, 21 nt, Human
uaagccuuuggaaacagcucg

SEQ ID NO: 1151509 - RNA, 14 nt, Human
uaauccuguaggaa

SEQ ID NO: 1151510 - RNA, 18 nt, Human
uaauccuguaggaaggua

SEQ ID NO: 1151511 - RNA, 23 nt, Human
uaauccuguaggaagguacugua

SEQ ID NO: 1151512 - RNA, 22 nt, Human
uaauccuguaggaagguacugu

SEQ ID NO: 1151513 - RNA, 13 nt, Human
uaaucgaccugcc

SEQ ID NO: 1151514 - RNA, 14 nt, Human
uaaucgaccugccu

SEQ ID NO: 1151515 - RNA, 16 nt, Human
uaaucgaccugccucg

SEQ ID NO: 1151516 - RNA, 16 nt, Human
uaaucguguccccuau

SEQ ID NO: 1151517 - RNA, 17 nt, Human
uaaugaugucguuugaa

SEQ ID NO: 1151518 - RNA, 23 nt, Human
uaaugaugucguuugaaucacag

SEQ ID NO: 1151519 - RNA, 19 nt, Human
uaaugcgcaggcuggcccu

SEQ ID NO: 1151520 - RNA, 22 nt, Human
uaaugcgcaggcuggcccugcc

SEQ ID NO: 1151521 - RNA, 17 nt, Human
uaaugcgccaauaaacc

SEQ ID NO: 1151522 - RNA, 23 nt, Human
uaaugcgcaggcuggcccugccc

SEQ ID NO: 1151523 - RNA, 13 nt, Human
uaauuguguuuac

SEQ ID NO: 1151524 - RNA, 14 nt, Human
uaauuguguuuaca

SEQ ID NO: 1151525 - RNA, 16 nt, Human
uaauuguguuuacauu

SEQ ID NO: 1151526 - RNA, 17 nt, Human
uaauuguguuuacauuu

SEQ ID NO: 1151527 - RNA, 18 nt, Human
uaauuguguuuacauuuu

SEQ ID NO: 1151528 - RNA, 19 nt, Human
uaauuguguuuacauuuua

SEQ ID NO: 1151529 - RNA, 20 nt, Human
uaauuguguuuacauuuuau

SEQ ID NO: 1151530 - RNA, 22 nt, Human
uaauuguguuuacauuuuaugg

SEQ ID NO: 1151531 - RNA, 21 nt, Human
uaauuguguuuacauuuuaug

SEQ ID NO: 1151532 - RNA, 23 nt, Human
uaauuuggaucucuucuuaaugu

SEQ ID NO: 1151533 - RNA, 15 nt, Human
uacaagacacaguga

SEQ ID NO: 1151534 - RNA, 19 nt, Human
uacaagagcuuaacagugu

SEQ ID NO: 1151535 - RNA, 13 nt, Human
uacagaauuuuau

SEQ ID NO: 1151536 - RNA, 15 nt, Human
uacaggcauagaguu

SEQ ID NO: 1151537 - RNA, 12 nt, Human
uacauuuuaugg

SEQ ID NO: 1151538 - RNA, 17 nt, Human
uacauuuuguaccaacc

SEQ ID NO: 1151539 - RNA, 14 nt, Human
uacauuuuguacca

SEQ ID NO: 1151540 - RNA, 16 nt, Human
uacauuuuguaccaac

SEQ ID NO: 1151541 - RNA, 15 nt, Human
uaccaccacgcccgg

SEQ ID NO: 1151542 - RNA, 14 nt, Human
uacccauuuguuca

SEQ ID NO: 1151543 - RNA, 15 nt, Human
uacccauuuguucau

SEQ ID NO: 1151544 - RNA, 22 nt, Human
uacccauuuguucauauuaaga

SEQ ID NO: 1151545 - RNA, 14 nt, Human
uacugauucaauuu

SEQ ID NO: 1151546 - RNA, 17 nt, Human
uacugauucaauuugau

SEQ ID NO: 1151547 - RNA, 20 nt, Human
uacugauucaauuugaugug

SEQ ID NO: 1151548 - RNA, 11 nt, Human
uacuguaugau

SEQ ID NO: 1151549 - RNA, 13 nt, Human
uacuguaugauca

SEQ ID NO: 1151550 - RNA, 14 nt, Human
uacuguaugaucaa

SEQ ID NO: 1151551 - RNA, 15 nt, Human
uacuguaugaucaaa

SEQ ID NO: 1151552 - RNA, 16 nt, Human
uacuguaugaucaaau

SEQ ID NO: 1151553 - RNA, 17 nt, Human
uacuguaugaucaaaug

SEQ ID NO: 1151554 - RNA, 18 nt, Human
uacuguaugaucaaaugu

SEQ ID NO: 1151555 - RNA, 19 nt, Human
uacuguaugaucaaauguu

SEQ ID NO: 1151556 - RNA, 21 nt, Human
uacuguaugaucaaauguuua

SEQ ID NO: 1151557 - RNA, 22 nt, Human
uacuguaugaucaaauguuuaa

SEQ ID NO: 1151558 - RNA, 12 nt, Human
uagaaccaggca

SEQ ID NO: 1151559 - RNA, 23 nt, Human
uagaaccaggcaacuugggaacu

SEQ ID NO: 1151560 - RNA, 19 nt, Human
uagagaaaacaugcagaac

SEQ ID NO: 1151561 - RNA, 13 nt, Human
uagccccauaauu

SEQ ID NO: 1151562 - RNA, 18 nt, Human
uagcccucacccuggggc

SEQ ID NO: 1151563 - RNA, 17 nt, Human
uagcucuaauguuugca

SEQ ID NO: 1151564 - RNA, 18 nt, Human
uagcucuaauguuugcau

SEQ ID NO: 1151565 - RNA, 19 nt, Human
uagcucuaauguuugcaua

SEQ ID NO: 1151566 - RNA, 20 nt, Human
uagcucuaauguuugcauau

SEQ ID NO: 1151567 - RNA, 21 nt, Human
uagcucuaauguuugcauaua

SEQ ID NO: 1151568 - RNA, 22 nt, Human
uagcugggagaaagagagagcu

SEQ ID NO: 1151569 - RNA, 14 nt, Human
uaggaagguacugu

SEQ ID NO: 1151570 - RNA, 15 nt, Human
uaggaagguacugua

SEQ ID NO: 1151571 - RNA, 16 nt, Human
uaggaagguacuguau

SEQ ID NO: 1151572 - RNA, 18 nt, Human
uaggaagguacuguauga

SEQ ID NO: 1151573 - RNA, 24 nt, Human
uaggaagguacuguaugaucaaau

SEQ ID NO: 1151574 - RNA, 14 nt, Human
uagugaugguuccc

SEQ ID NO: 1151575 - RNA, 18 nt, Human
uagugaugguuccccugu

SEQ ID NO: 1151576 - RNA, 15 nt, Human
uaguggauggaaggg

SEQ ID NO: 1151577 - RNA, 18 nt, Human
uaguggauggaaggggcu

SEQ ID NO: 1151578 - RNA, 12 nt, Human
uaguguaucaaa

SEQ ID NO: 1151579 - RNA, 14 nt, Human
uaguguaucaaaau

SEQ ID NO: 1151580 - RNA, 17 nt, Human
uaguguaucaaaaugcu

SEQ ID NO: 1151581 - RNA, 19 nt, Human
uaguguaucaaaaugcucu

SEQ ID NO: 1151582 - RNA, 17 nt, Human
uauacccccugcaaagc

SEQ ID NO: 1151583 - RNA, 21 nt, Human
uauaccucaauuuucacugug

SEQ ID NO: 1151584 - RNA, 22 nt, Human
uauaccucaauuuucacugugu

SEQ ID NO: 1151585 - RNA, 20 nt, Human
uauacucuuauagacaacau

SEQ ID NO: 1151586 - RNA, 20 nt, Human
uauauacucaagagugguau

SEQ ID NO: 1151587 - RNA, 16 nt, Human
uauauuuccacuucuu

SEQ ID NO: 1151588 - RNA, 15 nt, Human
uaucaguuacacaug

SEQ ID NO: 1151589 - RNA, 16 nt, Human
uaucaugucaaacgug

SEQ ID NO: 1151590 - RNA, 21 nt, Human
uaucaugucaaacgugaaaau

SEQ ID NO: 1151591 - RNA, 13 nt, Human
uaucggcacugua

SEQ ID NO: 1151592 - RNA, 17 nt, Human
uaucggcacuguacaaa

SEQ ID NO: 1151593 - RNA, 21 nt, Human
uauuuucaacgcagcccugcu

SEQ ID NO: 1151594 - RNA, 23 nt, Human
ucaaacggccucacuaggcuucu

SEQ ID NO: 1151595 - RNA, 15 nt, Human
ucaaacgugaaaaug

SEQ ID NO: 1151596 - RNA, 16 nt, Human
ucaaacgugaaaaugc

SEQ ID NO: 1151597 - RNA, 17 nt, Human
ucaaugcuauaacuaug

SEQ ID NO: 1151598 - RNA, 16 nt, Human
ucacaggacucugccu

SEQ ID NO: 1151599 - RNA, 13 nt, Human
ucaccuuuauucu

SEQ ID NO: 1151600 - RNA, 18 nt, Human
ucacuccuaccugguaau

SEQ ID NO: 1151601 - RNA, 19 nt, Human
ucacucuacuuagcauguc

SEQ ID NO: 1151602 - RNA, 20 nt, Human
ucacucuacuuagcaugucc

SEQ ID NO: 1151603 - RNA, 12 nt, Human
ucacuuuuauuu

SEQ ID NO: 1151604 - RNA, 22 nt, Human
ucacuuuuauuuagcaccaggg

SEQ ID NO: 1151605 - RNA, 21 nt, Human
ucagaggggaauaaacuguug

SEQ ID NO: 1151606 - RNA, 15 nt, Human
ucaguuacucuucag

SEQ ID NO: 1151607 - RNA, 16 nt, Human
ucauucacuucacugu

SEQ ID NO: 1151608 - RNA, 17 nt, Human
ucauucacuucacugug

SEQ ID NO: 1151609 - RNA, 19 nt, Human
ucauucacuucacugugcu

SEQ ID NO: 1151610 - RNA, 20 nt, Human
ucauucacuucacugugcug

SEQ ID NO: 1151611 - RNA, 14 nt, Human
uccacaacacacag

SEQ ID NO: 1151612 - RNA, 16 nt, Human
uccauccaggccauuc

SEQ ID NO: 1151613 - RNA, 23 nt, Human
uccaugucaagauucagcuagug

SEQ ID NO: 1151614 - RNA, 14 nt, Human
uccaugucaagauu

SEQ ID NO: 1151615 - RNA, 16 nt, Human
uccaugucaagauuca

SEQ ID NO: 1151616 - RNA, 20 nt, Human
uccaugucaagauucagcua

SEQ ID NO: 1151617 - RNA, 18 nt, Human
ucccaaggcucugagcaa

SEQ ID NO: 1151618 - RNA, 22 nt, Human
ucccaaggcucugagcaaaugu

SEQ ID NO: 1151619 - RNA, 16 nt, Human
ucccaggauguacaag

SEQ ID NO: 1151620 - RNA, 20 nt, Human
ucccaggcgccccuuccccc

SEQ ID NO: 1151621 - RNA, 21 nt, Human
ucccaggcgccccuucccccu

SEQ ID NO: 1151622 - RNA, 15 nt, Human
ucccaggcugagccu

SEQ ID NO: 1151623 - RNA, 16 nt, Human
ucccaggcugagccuc

SEQ ID NO: 1151624 - RNA, 18 nt, Human
ucccaggcugagccucag

SEQ ID NO: 1151625 - RNA, 14 nt, Human
ucccauucaagauu

SEQ ID NO: 1151626 - RNA, 16 nt, Human
ucccauucaagauucc

SEQ ID NO: 1151627 - RNA, 17 nt, Human
uccccagaauggaggca

SEQ ID NO: 1151628 - RNA, 17 nt, Human
ucccccaucucuucugg

SEQ ID NO: 1151629 - RNA, 13 nt, Human
ucccccucuggcu

SEQ ID NO: 1151630 - RNA, 13 nt, Human
ucccccugcccca

SEQ ID NO: 1151631 - RNA, 15 nt, Human
uccccuguucacucu

SEQ ID NO: 1151632 - RNA, 15 nt, Human
uccccuguuuauuca

SEQ ID NO: 1151633 - RNA, 21 nt, Human
uccccuuccuaauuccacagc

SEQ ID NO: 1151634 - RNA, 22 nt, Human
uccccuuccuaauuccacagcu

SEQ ID NO: 1151635 - RNA, 15 nt, Human
ucccuacuuccugug

SEQ ID NO: 1151636 - RNA, 16 nt, Human
ucccuacuuccuguga

SEQ ID NO: 1151637 - RNA, 17 nt, Human
ucccuacuuccugugac

SEQ ID NO: 1151638 - RNA, 20 nt, Human
uccuguaggaagguacugua

SEQ ID NO: 1151639 - RNA, 22 nt, Human
uccuguaggaagguacuguaug

SEQ ID NO: 1151640 - RNA, 21 nt, Human
uccuguaggaagguacuguau

SEQ ID NO: 1151641 - RNA, 16 nt, Human
uccuucaaagcaaaug

SEQ ID NO: 1151642 - RNA, 14 nt, Human
uccuuuuggaguca

SEQ ID NO: 1151643 - RNA, 23 nt, Human
uccuuuuggagucagacagaugu

SEQ ID NO: 1151644 - RNA, 17 nt, Human
ucgcaauguaagacucg

SEQ ID NO: 1151645 - RNA, 12 nt, Human
ucgcccaggcug

SEQ ID NO: 1151646 - RNA, 14 nt, Human
ucgcccaggcugga

SEQ ID NO: 1151647 - RNA, 19 nt, Human
ucgcccaggcuggagugca

SEQ ID NO: 1151648 - RNA, 18 nt, Human
ucggacuuagcugggaga

SEQ ID NO: 1151649 - RNA, 15 nt, Human
ucucaggucccugca

SEQ ID NO: 1151650 - RNA, 12 nt, Human
ucuccugccuca

SEQ ID NO: 1151651 - RNA, 11 nt, Human
ucucuucucca

SEQ ID NO: 1151652 - RNA, 13 nt, Human
ucucuucuccacu

SEQ ID NO: 1151653 - RNA, 14 nt, Human
ucucuucuccacug

SEQ ID NO: 1151654 - RNA, 15 nt, Human
ucucuucuccacugg

SEQ ID NO: 1151655 - RNA, 16 nt, Human
ucucuucuccacugga

SEQ ID NO: 1151656 - RNA, 20 nt, Human
ucugagcauuagauuucuca

SEQ ID NO: 1151657 - RNA, 22 nt, Human
ucugagcauuagauuucucauu

SEQ ID NO: 1151658 - RNA, 14 nt, Human
ucugcacacagcac

SEQ ID NO: 1151659 - RNA, 15 nt, Human
ucuguccgagugugc

SEQ ID NO: 1151660 - RNA, 17 nt, Human
ucuguccgagugugcca

SEQ ID NO: 1151661 - RNA, 13 nt, Human
ucuuauaauuuaa

SEQ ID NO: 1151662 - RNA, 19 nt, Human
ucuucaguuaagccuuugg

SEQ ID NO: 1151663 - RNA, 21 nt, Human
ucuuccaauuuaguuguugua

SEQ ID NO: 1151664 - RNA, 13 nt, Human
ucuucuccacugg

SEQ ID NO: 1151665 - RNA, 16 nt, Human
ucuucuccacuggaug

SEQ ID NO: 1151666 - RNA, 18 nt, Human
ucuuguuuuuuuuuucca

SEQ ID NO: 1151667 - RNA, 21 nt, Human
ucuuguuuuuuuuuuccacuu

SEQ ID NO: 1151668 - RNA, 17 nt, Human
ucuuucacauuuaaaua

SEQ ID NO: 1151669 - RNA, 21 nt, Human
ugaaagauggcugugccucug

SEQ ID NO: 1151670 - RNA, 22 nt, Human
ugaaagauggcugugccucugc

SEQ ID NO: 1151671 - RNA, 23 nt, Human
ugaaagauggcugugccucugcc

SEQ ID NO: 1151672 - RNA, 19 nt, Human
ugaaaggaagauaaacgug

SEQ ID NO: 1151673 - RNA, 19 nt, Human
ugaaauggacuuuuguaca

SEQ ID NO: 1151674 - RNA, 14 nt, Human
ugaacugaacucug

SEQ ID NO: 1151675 - RNA, 17 nt, Human
ugaacugaacucugaca

SEQ ID NO: 1151676 - RNA, 19 nt, Human
ugaacugaacucugacaac

SEQ ID NO: 1151677 - RNA, 22 nt, Human
ugaacuuguaaaggaauuuaaa

SEQ ID NO: 1151678 - RNA, 18 nt, Human
ugaagaccuuuuucugca

SEQ ID NO: 1151679 - RNA, 23 nt, Human
ugaagacuuacagcaaauccuuu

SEQ ID NO: 1151680 - RNA, 15 nt, Human
ugaagaccuuuuucu

SEQ ID NO: 1151681 - RNA, 15 nt, Human
ugcacagcaucucag

SEQ ID NO: 1151682 - RNA, 24 nt, Human
ugcacagccccuaagucaacuuag

SEQ ID NO: 1151683 - RNA, 14 nt, Human
ugcacagcaucuca

SEQ ID NO: 1151684 - RNA, 19 nt, Human
ugcacagugcaucucagcc

SEQ ID NO: 1151685 - RNA, 20 nt, Human
ugcacagugcaucucagccc

SEQ ID NO: 1151686 - RNA, 13 nt, Human
ugcagcuuuaaaa

SEQ ID NO: 1151687 - RNA, 22 nt, Human
ugcagcuuuaaaaaauuaaucu

SEQ ID NO: 1151688 - RNA, 18 nt, Human
ugcauccuccgccucccg

SEQ ID NO: 1151689 - RNA, 21 nt, Human
ugcauccuccgccucccgggu

SEQ ID NO: 1151690 - RNA, 19 nt, Human
ugccuaaggcugaacuugu

SEQ ID NO: 1151691 - RNA, 15 nt, Human
ugccuaguauugaca

SEQ ID NO: 1151692 - RNA, 16 nt, Human
ugccuaguauugacaa

SEQ ID NO: 1151693 - RNA, 13 nt, Human
ugccuucagcucu

SEQ ID NO: 1151694 - RNA, 17 nt, Human
ugccuucagcucuacag

SEQ ID NO: 1151695 - RNA, 18 nt, Human
ugccuucagcucuacagc

SEQ ID NO: 1151696 - RNA, 13 nt, Human
ugcgcaggcuggc

SEQ ID NO: 1151697 - RNA, 16 nt, Human
ugcgcaggcuggcccu

SEQ ID NO: 1151698 - RNA, 17 nt, Human
ugcgcaggcuggcccug

SEQ ID NO: 1151699 - RNA, 19 nt, Human
ugcgcaggcuggcccugcc

SEQ ID NO: 1151700 - RNA, 13 nt, Human
ugcugccucaugc

SEQ ID NO: 1151701 - RNA, 14 nt, Human
ugcugccuccagaa

SEQ ID NO: 1151702 - RNA, 18 nt, Human
ugcuuguuaacugagugc

SEQ ID NO: 1151703 - RNA, 11 nt, Human
uggaaaauaaa

SEQ ID NO: 1151704 - RNA, 15 nt, Human
uggaaaauaaaucaa

SEQ ID NO: 1151705 - RNA, 21 nt, Human
uggaagugugugaucuguggg

SEQ ID NO: 1151706 - RNA, 20 nt, Human
uggagaggcccggccucuca

SEQ ID NO: 1151707 - RNA, 22 nt, Human
uggccacuccagaccccuggcu

SEQ ID NO: 1151708 - RNA, 19 nt, Human
uggcucguuggcuagauua

SEQ ID NO: 1151709 - RNA, 15 nt, Human
uggcuuuucacugcu

SEQ ID NO: 1151710 - RNA, 14 nt, Human
uggcuuuucacugc

SEQ ID NO: 1151711 - RNA, 16 nt, Human
ugggacagggcauggc

SEQ ID NO: 1151712 - RNA, 18 nt, Human
ugggccuucagggaguga

SEQ ID NO: 1151713 - RNA, 17 nt, Human
ugggcgugagaccugcc

SEQ ID NO: 1151714 - RNA, 18 nt, Human
ugggcgugagaccugccc

SEQ ID NO: 1151715 - RNA, 19 nt, Human
ugggcgugagaccugcccc

SEQ ID NO: 1151716 - RNA, 20 nt, Human
ugggcgugagaccugccccu

SEQ ID NO: 1151717 - RNA, 21 nt, Human
uggguuccagcaauucuccug

SEQ ID NO: 1151718 - RNA, 21 nt, Human
uggguuccuuccucugagccu

SEQ ID NO: 1151719 - RNA, 22 nt, Human
uggguuccuuccucugagccuu

SEQ ID NO: 1151720 - RNA, 17 nt, Human
uggguuggaaaacagua

SEQ ID NO: 1151721 - RNA, 16 nt, Human
uguaaaugucucacug

SEQ ID NO: 1151722 - RNA, 17 nt, Human
uguaaaugucucacuga

SEQ ID NO: 1151723 - RNA, 22 nt, Human
uguaaaugucucacugagcacu

SEQ ID NO: 1151724 - RNA, 20 nt, Human
uguaaaugucucacugagca

SEQ ID NO: 1151725 - RNA, 11 nt, Human
uguaaugaaua

SEQ ID NO: 1151726 - RNA, 14 nt, Human
uguaaugaauaccu

SEQ ID NO: 1151727 - RNA, 15 nt, Human
uguaaugaauaccuu

SEQ ID NO: 1151728 - RNA, 12 nt, Human
uguacuccuccc

SEQ ID NO: 1151729 - RNA, 13 nt, Human
uguacuccuccca

SEQ ID NO: 1151730 - RNA, 14 nt, Human
uguacugaaguaaa

SEQ ID NO: 1151731 - RNA, 18 nt, Human
uguacugaaguaaaacaa

SEQ ID NO: 1151732 - RNA, 15 nt, Human
uguacugauucaauu

SEQ ID NO: 1151733 - RNA, 16 nt, Human
uguacugauucaauuu

SEQ ID NO: 1151734 - RNA, 17 nt, Human
uguacugauucaauuug

SEQ ID NO: 1151735 - RNA, 17 nt, Human
uguagauaauacaguuc

SEQ ID NO: 1151736 - RNA, 15 nt, Human
uguauacugccacua

SEQ ID NO: 1151737 - RNA, 14 nt, Human
uguaugcacuuugu

SEQ ID NO: 1151738 - RNA, 20 nt, Human
ugucucaagagggcacuggu

SEQ ID NO: 1151739 - RNA, 21 nt, Human
ugucucaagagggcacuggug

SEQ ID NO: 1151740 - RNA, 23 nt, Human
ugucucaagagggcacugguggc

SEQ ID NO: 1151741 - RNA, 17 nt, Human
ugucucaggucccugca

SEQ ID NO: 1151742 - RNA, 14 nt, Human
ugugccucugccug

SEQ ID NO: 1151743 - RNA, 15 nt, Human
ugugccucugccugu

SEQ ID NO: 1151744 - RNA, 14 nt, Human
ugugcuguuguuau

SEQ ID NO: 1151745 - RNA, 16 nt, Human
ugugcuguuguuauga

SEQ ID NO: 1151746 - RNA, 19 nt, Human
ugugcuguuguuaugaugu

SEQ ID NO: 1151747 - RNA, 20 nt, Human
ugugcuguuguuaugaugug

SEQ ID NO: 1151748 - RNA, 23 nt, Human
ugugcuguuguuaugaugugcuu

SEQ ID NO: 1151749 - RNA, 22 nt, Human
ugugcuuauguaugagguacaa

SEQ ID NO: 1151750 - RNA, 15 nt, Human
ugugcuuaacaggga

SEQ ID NO: 1151751 - RNA, 19 nt, Human
ugugcuuaacagggaacgu

SEQ ID NO: 1151752 - RNA, 17 nt, Human
uguggaaaaugaaaauu

SEQ ID NO: 1151753 - RNA, 21 nt, Human
uguggcuccuggggguucuuu

SEQ ID NO: 1151754 - RNA, 21 nt, Human
uguguuuacauuuuauggugc

SEQ ID NO: 1151755 - RNA, 17 nt, Human
uguucugcacacagcac

SEQ ID NO: 1151756 - RNA, 15 nt, Human
uguugaagccuuugu

SEQ ID NO: 1151757 - RNA, 13 nt, Human
uguugcugccuca

SEQ ID NO: 1151758 - RNA, 14 nt, Human
uguugcugccucau

SEQ ID NO: 1151759 - RNA, 13 nt, Human
uguuggccaggcu

SEQ ID NO: 1151760 - RNA, 18 nt, Human
uguuggccaggcugcucu

SEQ ID NO: 1151761 - RNA, 14 nt, Human
uguuuaaucauaua

SEQ ID NO: 1151762 - RNA, 15 nt, Human
uguuuaaucauauaa

SEQ ID NO: 1151763 - RNA, 16 nt, Human
uguuuaaucauauaaa

SEQ ID NO: 1151764 - RNA, 20 nt, Human
uguuuaaucauauaaauaga

SEQ ID NO: 1151765 - RNA, 23 nt, Human
uguuuaaucauauaaauagaaug

SEQ ID NO: 1151766 - RNA, 24 nt, Human
uguuuaaucauauaaauagaaugu

SEQ ID NO: 1151767 - RNA, 17 nt, Human
uguuuacagauccccaa

SEQ ID NO: 1151768 - RNA, 17 nt, Human
uguuuuaaaaaccuguu

SEQ ID NO: 1151769 - RNA, 18 nt, Human
uuaaauaguaaaaauaaa

SEQ ID NO: 1151770 - RNA, 14 nt, Human
uuaauggaaauguu

SEQ ID NO: 1151771 - RNA, 23 nt, Human
uuacaauaaaaucuugaaaaugc

SEQ ID NO: 1151772 - RNA, 15 nt, Human
uuacagcaaauccuu

SEQ ID NO: 1151773 - RNA, 15 nt, Human
uucaaagcaaauguc

SEQ ID NO: 1151774 - RNA, 17 nt, Human
uucaaauuuuaucugcc

SEQ ID NO: 1151775 - RNA, 17 nt, Human
uucaaccauuccccaug

SEQ ID NO: 1151776 - RNA, 20 nt, Human
uucaaccauuccccauggga

SEQ ID NO: 1151777 - RNA, 13 nt, Human
uucaacgcagccc

SEQ ID NO: 1151778 - RNA, 14 nt, Human
uucaacgcagcccu

SEQ ID NO: 1151779 - RNA, 15 nt, Human
uucaacgcagcccug

SEQ ID NO: 1151780 - RNA, 16 nt, Human
uucaaucccaggaugu

SEQ ID NO: 1151781 - RNA, 22 nt, Human
uucaauccuugaagguauaucu

SEQ ID NO: 1151782 - RNA, 20 nt, Human
uucaaucuucaauccuugaa

SEQ ID NO: 1151783 - RNA, 15 nt, Human
uucaggcucuucucc

SEQ ID NO: 1151784 - RNA, 16 nt, Human
uucaggcucuucuccu

SEQ ID NO: 1151785 - RNA, 21 nt, Human
uuccacuuagaaauugcauuu

SEQ ID NO: 1151786 - RNA, 17 nt, Human
uuccaugucgccucugc

SEQ ID NO: 1151787 - RNA, 18 nt, Human
uuccaugucgccucugca

SEQ ID NO: 1151788 - RNA, 19 nt, Human
uuccaugucgccucugcau

SEQ ID NO: 1151789 - RNA, 20 nt, Human
uuccaugucgccucugcauu

SEQ ID NO: 1151790 - RNA, 21 nt, Human
uuccaugucgccucugcauuc

SEQ ID NO: 1151791 - RNA, 14 nt, Human
uuccccaagacauu

SEQ ID NO: 1151792 - RNA, 11 nt, Human
uuccugcccug

SEQ ID NO: 1151793 - RNA, 13 nt, Human
uuccugcccuggg

SEQ ID NO: 1151794 - RNA, 16 nt, Human
uuccugcccugggagg

SEQ ID NO: 1151795 - RNA, 22 nt, Human
uuccugcccugggaggcaguga

SEQ ID NO: 1151796 - RNA, 13 nt, Human
uuccuuccucuga

SEQ ID NO: 1151797 - RNA, 17 nt, Human
uuccuuccucugagccu

SEQ ID NO: 1151798 - RNA, 11 nt, Human
uucucaugccu

SEQ ID NO: 1151799 - RNA, 12 nt, Human
uucucaugccuc

SEQ ID NO: 1151800 - RNA, 14 nt, Human
uucucaugccucag

SEQ ID NO: 1151801 - RNA, 21 nt, Human
uucucaugccucagccuccug

SEQ ID NO: 1151802 - RNA, 14 nt, Human
uucugagcauuuaa

SEQ ID NO: 1151803 - RNA, 12 nt, Human
uucuguggcuca

SEQ ID NO: 1151804 - RNA, 16 nt, Human
uucuguggcucacaga

SEQ ID NO: 1151805 - RNA, 14 nt, Human
uucuucaacucccu

SEQ ID NO: 1151806 - RNA, 12 nt, Human
uucuucaagauc

SEQ ID NO: 1151807 - RNA, 17 nt, Human
uucuucaagaucccauu

SEQ ID NO: 1151808 - RNA, 18 nt, Human
uucuucaagaucccauuu

SEQ ID NO: 1151809 - RNA, 22 nt, Human
uugaccguguuggucuguacug

SEQ ID NO: 1151810 - RNA, 15 nt, Human
uugcaaaaucaguuu

SEQ ID NO: 1151811 - RNA, 21 nt, Human
uugcaaaaucaguuuuccucu

SEQ ID NO: 1151812 - RNA, 16 nt, Human
uugcaaaaucaguuuu

SEQ ID NO: 1151813 - RNA, 23 nt, Human
uugcaguaucggcacuguacaaa

SEQ ID NO: 1151814 - RNA, 22 nt, Human
uugcauacauucuucaagaucc

SEQ ID NO: 1151815 - RNA, 14 nt, Human
uugccacugccucu

SEQ ID NO: 1151816 - RNA, 15 nt, Human
uugccacugccucuu

SEQ ID NO: 1151817 - RNA, 18 nt, Human
uugccacugccucuuccu

SEQ ID NO: 1151818 - RNA, 11 nt, Human
uugcugccuca

SEQ ID NO: 1151819 - RNA, 12 nt, Human
uugcugccucau

SEQ ID NO: 1151820 - RNA, 15 nt, Human
uugcugccucaugcu

SEQ ID NO: 1151821 - RNA, 17 nt, Human
uuggauuggacaaaaug

SEQ ID NO: 1151822 - RNA, 21 nt, Human
uuggauuggacaaaaugacuu

SEQ ID NO: 1151823 - RNA, 14 nt, Human
uuggccaggcuggu

SEQ ID NO: 1151824 - RNA, 16 nt, Human
uuguaaaggaauuuaa

SEQ ID NO: 1151825 - RNA, 16 nt, Human
uuguaaaugugguaaa

SEQ ID NO: 1151826 - RNA, 21 nt, Human
uuguagagaaaacaugcagaa

SEQ ID NO: 1151827 - RNA, 15 nt, Human
uuguauuuauuuagu

SEQ ID NO: 1151828 - RNA, 14 nt, Human
uuuaaucauauaaa

SEQ ID NO: 1151829 - RNA, 18 nt, Human
uuuaaucauauaaauaga

SEQ ID NO: 1151830 - RNA, 23 nt, Human
uuuaaucauauaaauagaaugua

SEQ ID NO: 1151831 - RNA, 22 nt, Human
uuuaaucauauaaauagaaugu

SEQ ID NO: 1151832 - RNA, 14 nt, Human
uuuauucauaugca

SEQ ID NO: 1151833 - RNA, 15 nt, Human
uuuauucauaugcau

SEQ ID NO: 1151834 - RNA, 16 nt, Human
uuuauucauaugcaua

SEQ ID NO: 1151835 - RNA, 13 nt, Human
uuuauuuccagug

SEQ ID NO: 1151836 - RNA, 17 nt, Human
uuuauuuccuaugaugu

SEQ ID NO: 1151837 - RNA, 13 nt, Human
uuucaaucuucaa

SEQ ID NO: 1151838 - RNA, 15 nt, Human
uuucaaucuucaauc

SEQ ID NO: 1151839 - RNA, 18 nt, Human
uuuccuaugauguauacu

SEQ ID NO: 1151840 - RNA, 14 nt, Human
uuuccuaugaugua

SEQ ID NO: 1151841 - RNA, 23 nt, Human
uuuccugacagaaggacucaggu

SEQ ID NO: 1151842 - RNA, 15 nt, Human
uuucuaaugugugaa

SEQ ID NO: 1151843 - RNA, 14 nt, Human
uuugagcucagccc

SEQ ID NO: 1151844 - RNA, 18 nt, Human
uuugcauacauucuucaa

SEQ ID NO: 1151845 - RNA, 15 nt, Human
uuugccagugggaac

SEQ ID NO: 1151846 - RNA, 16 nt, Human
uuugccagugggaacu

SEQ ID NO: 1151847 - RNA, 17 nt, Human
uuugcauacauucuuca

SEQ ID NO: 1151848 - RNA, 14 nt, Human
uuuguucauauuaa

SEQ ID NO: 1151849 - RNA, 15 nt, Human
uuuguucauauuaag

SEQ ID NO: 1151850 - RNA, 20 nt, Human
uuuuacccauuuguucauau

SEQ ID NO: 1151851 - RNA, 17 nt, Human
uuuucaacgcagcccug

SEQ ID NO: 1151852 - RNA, 21 nt, Human
uuuucaacgcagcccugcuuu

SEQ ID NO: 1151853 - RNA, 22 nt, Human
uuuucaacgcagcccugcuuug

SEQ ID NO: 1151854 - RNA, 19 nt, Human
uuuucacugcuggcugccu

SEQ ID NO: 1151855 - RNA, 20 nt, Human
uuuucacugcuggcugccuu

SEQ ID NO: 1151856 - RNA, 19 nt, Human
uuuuccucucaauaaaauu

SEQ ID NO: 1151857 - RNA, 13 nt, Human
uuuuucugcacua

SEQ ID NO: 1151858 - RNA, 22 nt, Human
uuuuucugcacuauaugcaaac

SEQ ID NO: 1151859 - RNA, 18 nt, Human
uuuuucugcacuauaugc

SEQ ID NO: 1151860 - RNA, 22 nt, Human
aggaacguuuagcugacaaaau

SEQ ID NO: 1151861 - RNA, 14 nt, Human
aguauugacaaaau

SEQ ID NO: 1151862 - RNA, 18 nt, Human
ggauguuacuccaaaacu

SEQ ID NO: 1151863 - RNA, 14 nt, Human
ggauuggacaaaau

SEQ ID NO: 1151864 - RNA, 14 nt, Human
augaagacaaaaca

SEQ ID NO: 1151865 - RNA, 14 nt, Human
cacugcuggcugcc

SEQ ID NO: 1151866 - RNA, 19 nt, Human
aaaccaagccguggcuucc

SEQ ID NO: 1151867 - RNA, 16 nt, Barmah Forest virus
ucauuagacccaaaga

SEQ ID NO: 1151868 - RNA, 21 nt, Barmah Forest virus
gacgauggccaagaugaagac

SEQ ID NO: 1151869 - RNA, 14 nt, Barmah Forest virus
acgauggagaccag

SEQ ID NO: 1151870 - RNA, 18 nt, Barmah Forest virus
aguauccauuguaguaug

SEQ ID NO: 1151871 - RNA, 19 nt, Barmah Forest virus
guagccauagugcugggag

SEQ ID NO: 1151872 - RNA, 18 nt, Barmah Forest virus
caaagacgaagaccauca

SEQ ID NO: 1151873 - RNA, 23 nt, Barmah Forest virus
gagcuaugaugaagucuggaaug

SEQ ID NO: 1151874 - RNA, 16 nt, Barmah Forest virus
cacucaucagaacuag

SEQ ID NO: 1151875 - RNA, 13 nt, Barmah Forest virus
acaacagcaccau

SEQ ID NO: 1151876 - RNA, 22 nt, Barmah Forest virus
cuggaccaucacaguacuagcg

SEQ ID NO: 1151877 - RNA, 16 nt, Barmah Forest virus
gagacuguaaaagaag

SEQ ID NO: 1151878 - RNA, 13 nt, Barmah Forest virus
acuugcccacagg

SEQ ID NO: 1151879 - RNA, 22 nt, Barmah Forest virus
cauccaucucuacuacagcuug

SEQ ID NO: 1151880 - RNA, 19 nt, Barmah Forest virus
cgagcauuuccuacacauc

SEQ ID NO: 1151881 - RNA, 14 nt, Barmah Forest virus
ucauaguuagugua

SEQ ID NO: 1151882 - RNA, 20 nt, Barmah Forest virus
cgaagaccaucaaguacaaa

SEQ ID NO: 1151883 - RNA, 14 nt, Barmah Forest virus
agauagaugugcca

SEQ ID NO: 1151884 - RNA, 14 nt, Barmah Forest virus
accauggggcagug

SEQ ID NO: 1151885 - RNA, 15 nt, Barmah Forest virus
gugccaaaacagcug

SEQ ID NO: 1151886 - RNA, 14 nt, Barmah Forest virus
gagagaagagauua

SEQ ID NO: 1151887 - RNA, 21 nt, Barmah Forest virus
accaaaguuggauaaaaccaa

SEQ ID NO: 1151888 - RNA, 21 nt, Barmah Forest virus
gcagagccacuagccacugcc

SEQ ID NO: 1151889 - RNA, 22 nt, Barmah Forest virus
uggauauugcggacgcgcacuu

SEQ ID NO: 1151890 - RNA, 14 nt, Barmah Forest virus
ugacauucaagaaa

SEQ ID NO: 1151891 - RNA, 14 nt, Barmah Forest virus
gguagauaugaaga

SEQ ID NO: 1151892 - RNA, 22 nt, Barmah Forest virus
ccugcaaaacuuacucccauca

SEQ ID NO: 1151893 - RNA, 16 nt, Barmah Forest virus
agcaccaguccagaga

SEQ ID NO: 1151894 - RNA, 15 nt, Barmah Forest virus
gacccaaagacgaag

SEQ ID NO: 1151895 - RNA, 17 nt, Barmah Forest virus
auugauggcagauagau

SEQ ID NO: 1151896 - RNA, 14 nt, Barmah Forest virus
ggcguacugaagau

SEQ ID NO: 1151897 - RNA, 18 nt, Barmah Forest virus
ucccaucagacagacuua

SEQ ID NO: 1151898 - RNA, 12 nt, Barmah Forest virus
caacagcaccau

SEQ ID NO: 1151899 - RNA, 23 nt, Barmah Forest virus
accaugcuguuacgaaaaagacc

SEQ ID NO: 1151900 - RNA, 14 nt, Barmah Forest virus
auuuagaaaaacuu

SEQ ID NO: 1151901 - RNA, 23 nt, Barmah Forest virus
caaauuuggagcuaugaugaagu

SEQ ID NO: 1151902 - RNA, 13 nt, Barmah Forest virus
ccucggaaaggau

SEQ ID NO: 1151903 - RNA, 13 nt, Barmah Forest virus
aaacaaaaaagag

SEQ ID NO: 1151904 - RNA, 22 nt, Barmah Forest virus
cacccaugagaaaccagaagga

SEQ ID NO: 1151905 - RNA, 14 nt, Barmah Forest virus
aggauguccaggaa

SEQ ID NO: 1151906 - RNA, 20 nt, Barmah Forest virus
augucacacagaugagagaa

SEQ ID NO: 1151907 - RNA, 15 nt, Barmah Forest virus
guaacugcaugaaga

SEQ ID NO: 1151908 - RNA, 13 nt, Barmah Forest virus
auaugaaagcaga

SEQ ID NO: 1151909 - RNA, 14 nt, Barmah Forest virus
cugggcaccgagca

SEQ ID NO: 1151910 - RNA, 16 nt, Barmah Forest virus
ccaucaaguacaaaug

SEQ ID NO: 1151911 - RNA, 16 nt, Barmah Forest virus
ugagcaagacaaucca

SEQ ID NO: 1151912 - RNA, 20 nt, Barmah Forest virus
ugcaccaccaugugcaccau

SEQ ID NO: 1151913 - RNA, 17 nt, Barmah Forest virus
acucccaauacgugccc

SEQ ID NO: 1151914 - RNA, 18 nt, Barmah Forest virus
uggcaccauggggcagug

SEQ ID NO: 1151915 - RNA, 16 nt, Barmah Forest virus
uaagaaaccaacccaa

SEQ ID NO: 1151916 - RNA, 16 nt, Barmah Forest virus
gagcacgucuggagug

SEQ ID NO: 1151917 - RNA, 20 nt, Barmah Forest virus
ucugaagcaaacaaaagcag

SEQ ID NO: 1151918 - RNA, 13 nt, Barmah Forest virus
ggugcaaaugaag

SEQ ID NO: 1151919 - RNA, 15 nt, Barmah Forest virus
cagucagaugaguga

SEQ ID NO: 1151920 - RNA, 15 nt, Barmah Forest virus
ccuuacaaaauguau

SEQ ID NO: 1151921 - RNA, 19 nt, Barmah Forest virus
gaacuguagccgaacucua

SEQ ID NO: 1151922 - RNA, 16 nt, Barmah Forest virus
uaacugcaugaagauc

SEQ ID NO: 1151923 - RNA, 23 nt, Barmah Forest virus
gguagacgauggagaccagcacc

SEQ ID NO: 1151924 - RNA, 23 nt, Barmah Forest virus
guccaggccaccuacagcagaga

SEQ ID NO: 1151925 - RNA, 13 nt, Barmah Forest virus
guacaacucccaa

SEQ ID NO: 1151926 - RNA, 23 nt, Barmah Forest virus
auuccaaaacaccuuacaaaaug

SEQ ID NO: 1151927 - RNA, 20 nt, Barmah Forest virus
ccguuuauguggggaggcgc

SEQ ID NO: 1151928 - RNA, 22 nt, Barmah Forest virus
ucaagugccgguaugcaugaaa

SEQ ID NO: 1151929 - RNA, 19 nt, Barmah Forest virus
aauaaaaauuuagaaaaac

SEQ ID NO: 1151930 - RNA, 16 nt, Barmah Forest virus
gaaagcagagaucgua

SEQ ID NO: 1151931 - RNA, 17 nt, Barmah Forest virus
gcacagaagaagcccaa

SEQ ID NO: 1151932 - RNA, 12 nt, Barmah Forest virus
auuacaaugcau

SEQ ID NO: 1151933 - RNA, 18 nt, Barmah Forest virus
ggccauauaaccccugaa

SEQ ID NO: 1151934 - RNA, 17 nt, Barmah Forest virus
auauuaccccugaauag

SEQ ID NO: 1151935 - RNA, 17 nt, Barmah Forest virus
ccagcaccaguccagag

SEQ ID NO: 1151936 - RNA, 15 nt, Barmah Forest virus
gccaccaaaagaaac

SEQ ID NO: 1151937 - RNA, 23 nt, Barmah Forest virus
aacuaguuuuauuggcacugacu

SEQ ID NO: 1151938 - RNA, 19 nt, Barmah Forest virus
acaccugaagaaucagugg

SEQ ID NO: 1151939 - RNA, 14 nt, Barmah Forest virus
aagugaaaaccugg

SEQ ID NO: 1151940 - RNA, 17 nt, Barmah Forest virus
ccaagaagacaccacca

SEQ ID NO: 1151941 - RNA, 23 nt, Barmah Forest virus
ugcuuagugggggauaaagucau

SEQ ID NO: 1151942 - RNA, 23 nt, Barmah Forest virus
cacacagaugagagaacuaccaa

SEQ ID NO: 1151943 - RNA, 15 nt, Barmah Forest virus
uccguuuuacaaaau

SEQ ID NO: 1151944 - RNA, 14 nt, Barmah Forest virus
ucaugcgaggcuga

SEQ ID NO: 1151945 - RNA, 20 nt, Barmah Forest virus
agggccauauuaccccugaa

SEQ ID NO: 1151946 - RNA, 14 nt, Barmah Forest virus
gccaaguugaaagg

SEQ ID NO: 1151947 - RNA, 22 nt, Barmah Forest virus
guacccuuacuggaccaucaca

SEQ ID NO: 1151948 - RNA, 17 nt, Barmah Forest virus
caacuagugaccucaga

SEQ ID NO: 1151949 - RNA, 16 nt, Barmah Forest virus
gaaaauaugaaagcag

SEQ ID NO: 1151950 - RNA, 14 nt, Barmah Forest virus
cccaucagacagac

SEQ ID NO: 1151951 - RNA, 14 nt, Barmah Forest virus
gcaccgagcaucca

SEQ ID NO: 1151952 - RNA, 23 nt, Barmah Forest virus
caaaaccaaaaaagacccagaag

SEQ ID NO: 1151953 - RNA, 21 nt, Barmah Forest virus
cacccuauguaccccacccuc

SEQ ID NO: 1151954 - RNA, 21 nt, Barmah Forest virus
gaagccuaagaaaccaaccca

SEQ ID NO: 1151955 - RNA, 19 nt, Barmah Forest virus
uaccgucaccauuccaaaa

SEQ ID NO: 1151956 - RNA, 14 nt, Barmah Forest virus
caaguugaaaggac

SEQ ID NO: 1151957 - RNA, 20 nt, Barmah Forest virus
gaaggcgugugaagugcagu

SEQ ID NO: 1151958 - RNA, 18 nt, Barmah Forest virus
accaaaaccaaaaaagac

SEQ ID NO: 1151959 - RNA, 23 nt, Barmah Forest virus
caagacaauccaaguuggggcag

SEQ ID NO: 1151960 - RNA, 23 nt, Barmah Forest virus
cagcaucgcuuaaggcacaagua

SEQ ID NO: 1151961 - RNA, 20 nt, Barmah Forest virus
ugcuuucauaggagaugaca

SEQ ID NO: 1151962 - RNA, 17 nt, Barmah Forest virus
gcacccaccgggcacaa

SEQ ID NO: 1151963 - RNA, 21 nt, Barmah Forest virus
cuguuagagcuugcaaugcau

SEQ ID NO: 1151964 - RNA, 15 nt, Barmah Forest virus
aguucaaagggccau

SEQ ID NO: 1151965 - RNA, 13 nt, Barmah Forest virus
gcccacaaggaag

SEQ ID NO: 1151966 - RNA, 17 nt, Barmah Forest virus
gcccaagaagacaccac

SEQ ID NO: 1151967 - RNA, 18 nt, Barmah Forest virus
cccucugaccgacagcac

SEQ ID NO: 1151968 - RNA, 22 nt, Barmah Forest virus
uggcagauagaugugccaccug

SEQ ID NO: 1151969 - RNA, 20 nt, Barmah Forest virus
gaguggucggcggccgcacu

SEQ ID NO: 1151970 - RNA, 19 nt, Barmah Forest virus
aaucagacgcauccaaguu

SEQ ID NO: 1151971 - RNA, 13 nt, Barmah Forest virus
gggcccggacagc

SEQ ID NO: 1151972 - RNA, 19 nt, Barmah Forest virus
gaaaccaacccaaaagaag

SEQ ID NO: 1151973 - RNA, 14 nt, Barmah Forest virus
aguucaaagggcca

SEQ ID NO: 1151974 - RNA, 23 nt, Barmah Forest virus
gaauaguaacaaaagagaaaaac

SEQ ID NO: 1151975 - RNA, 16 nt, Barmah Forest virus
ucuagugccaaaacag

SEQ ID NO: 1151976 - RNA, 15 nt, Barmah Forest virus
cguaacugcaugaag

SEQ ID NO: 1151977 - RNA, 13 nt, Barmah Forest virus
agauccaugugcc

SEQ ID NO: 1151978 - RNA, 13 nt, Barmah Forest virus
ugccauccacagc

SEQ ID NO: 1151979 - RNA, 22 nt, Barmah Forest virus
cucaagugccgguaugcaugaa

SEQ ID NO: 1151980 - RNA, 19 nt, Barmah Forest virus
cgaaaacagucagaugagu

SEQ ID NO: 1151981 - RNA, 12 nt, Barmah Forest virus
ccgaaaauguca

SEQ ID NO: 1151982 - RNA, 15 nt, Barmah Forest virus
cgauggagaccagca

SEQ ID NO: 1151983 - RNA, 19 nt, Barmah Forest virus
uccaauacagguaagucgu

SEQ ID NO: 1151984 - RNA, 17 nt, Barmah Forest virus
  misc_feature (3)..(3): n is a, c, g, or u
ugnauauaacagcacua

SEQ ID NO: 1151985 - RNA, 17 nt, Barmah Forest virus
acccuuacuggaccauc

SEQ ID NO: 1151986 - RNA, 19 nt, Barmah Forest virus
accaacccaaaagaagaag

SEQ ID NO: 1151987 - RNA, 18 nt, Barmah Forest virus
gaucgacaauccagaacu

SEQ ID NO: 1151988 - RNA, 11 nt, Barmah Forest virus
caaagggccau

SEQ ID NO: 1151989 - RNA, 13 nt, Barmah Forest virus
aguccccagcacc

SEQ ID NO: 1151990 - RNA, 22 nt, Barmah Forest virus
aaacuaaauaaaaauuuagaaa

SEQ ID NO: 1151991 - RNA, 15 nt, Barmah Forest virus
caaccaccagcgccu

SEQ ID NO: 1151992 - RNA, 11 nt, Barmah Forest virus
cugaagaucca

SEQ ID NO: 1151993 - RNA, 15 nt, Barmah Forest virus
ccagaacuagccaaa

SEQ ID NO: 1151994 - RNA, 14 nt, Barmah Forest virus
cauuccaaaacacc

SEQ ID NO: 1151995 - RNA, 17 nt, Barmah Forest virus
uacgacuaugggcacag

SEQ ID NO: 1151996 - RNA, 17 nt, Barmah Forest virus
aacauggaggucaagau

SEQ ID NO: 1151997 - RNA, 13 nt, Barmah Forest virus
caagugacauaca

SEQ ID NO: 1151998 - RNA, 13 nt, Barmah Forest virus
accuggagacagu

SEQ ID NO: 1151999 - RNA, 16 nt, Barmah Forest virus
aaguaugaucuagaau

SEQ ID NO: 1152000 - RNA, 22 nt, Barmah Forest virus
uaugcaguggauaacacagugu

SEQ ID NO: 1152001 - RNA, 12 nt, Barmah Forest virus
aguagaccaaaa

SEQ ID NO: 1152002 - RNA, 19 nt, Barmah Forest virus
gcucuggcaaaccuggaga

SEQ ID NO: 1152003 - RNA, 20 nt, Barmah Forest virus
acgaaccggcaaaacuagaa

SEQ ID NO: 1152004 - RNA, 23 nt, Barmah Forest virus
gugcgguaccgucaccauuccaa

SEQ ID NO: 1152005 - RNA, 15 nt, Barmah Forest virus
accaacccaaaagaa

SEQ ID NO: 1152006 - RNA, 13 nt, Barmah Forest virus
auaaccccugaau

SEQ ID NO: 1152007 - RNA, 15 nt, Barmah Forest virus
caugugcaccaugcu

SEQ ID NO: 1152008 - RNA, 21 nt, Barmah Forest virus
agacgauggagaccagcacca

SEQ ID NO: 1152009 - RNA, 20 nt, Barmah Forest virus
agaaaccaacccaaaagaag

SEQ ID NO: 1152010 - RNA, 22 nt, Barmah Forest virus
cacucauacuuggacccacaga

SEQ ID NO: 1152011 - RNA, 23 nt, Barmah Forest virus
cuuggcccgcugccgacccggca

SEQ ID NO: 1152012 - RNA, 23 nt, Barmah Forest virus
cauaccccaaccccaaccaccag

SEQ ID NO: 1152013 - RNA, 18 nt, Barmah Forest virus
aaaucuagcaaguaugau

SEQ ID NO: 1152014 - RNA, 21 nt, Barmah Forest virus
aguguauuacauaugcagugg

SEQ ID NO: 1152015 - RNA, 14 nt, Barmah Forest virus
uaacaccugaagaa

SEQ ID NO: 1152016 - RNA, 17 nt, Barmah Forest virus
ccaaguguccaugcaga

SEQ ID NO: 1152017 - RNA, 13 nt, Barmah Forest virus
gcaguccugcacu

SEQ ID NO: 1152018 - RNA, 18 nt, Barmah Forest virus
cgaacucuacggagaugu

SEQ ID NO: 1152019 - RNA, 16 nt, Barmah Forest virus
ccugggaguagaccaa

SEQ ID NO: 1152020 - RNA, 18 nt, Barmah Forest virus
cagucagcguagcaccug

SEQ ID NO: 1152021 - RNA, 22 nt, Barmah Forest virus
ugacgauggccaagaugaagac

SEQ ID NO: 1152022 - RNA, 17 nt, Barmah Forest virus
cugucuggacagauccu

SEQ ID NO: 1152023 - RNA, 22 nt, Barmah Forest virus
aguugaaaggaccgaaagcugc

SEQ ID NO: 1152024 - RNA, 13 nt, Barmah Forest virus
ccaccaaaaccaa

SEQ ID NO: 1152025 - RNA, 22 nt, Barmah Forest virus
gccgaacucuacggagauguag

SEQ ID NO: 1152026 - RNA, 19 nt, Barmah Forest virus
cauucaagaaaucuagcaa

SEQ ID NO: 1152027 - RNA, 12 nt, Barmah Forest virus
auacggccaccu

SEQ ID NO: 1152028 - RNA, 11 nt, Barmah Forest virus
ugguccaagug

SEQ ID NO: 1152029 - RNA, 18 nt, Barmah Forest virus
ucugaccacuacuaccac

SEQ ID NO: 1152030 - RNA, 14 nt, Barmah Forest virus
agaaauaguucaaa

SEQ ID NO: 1152031 - RNA, 12 nt, Barmah Forest virus
cucggaaaggau

SEQ ID NO: 1152032 - RNA, 19 nt, Barmah Forest virus
guggcaguacaacucccaa

SEQ ID NO: 1152033 - RNA, 18 nt, Barmah Forest virus
cgauggagaccagcacca

SEQ ID NO: 1152034 - RNA, 23 nt, Barmah Forest virus
aaacuguaaugucacacagauga

SEQ ID NO: 1152035 - RNA, 18 nt, Barmah Forest virus
acagcacgugugcaguca

SEQ ID NO: 1152036 - RNA, 22 nt, Barmah Forest virus
caaugguuggcacacaccaccu

SEQ ID NO: 1152037 - RNA, 14 nt, Barmah Forest virus
gagcuaugaugaag

SEQ ID NO: 1152038 - RNA, 24 nt, Barmah Forest virus
uuguuauguaaguauguaguagua

SEQ ID NO: 1152039 - RNA, 13 nt, Barmah Forest virus
gacccagaagccu

SEQ ID NO: 1152040 - RNA, 19 nt, Barmah Forest virus
auccaaguguccaugcaga

SEQ ID NO: 1152041 - RNA, 13 nt, Barmah Forest virus
cucuuuugacaaa

SEQ ID NO: 1152042 - RNA, 21 nt, Barmah Forest virus
gcaccugaaccgcaagugaca

SEQ ID NO: 1152043 - RNA, 21 nt, Barmah Forest virus
uugccacgcaggccuacgagc

SEQ ID NO: 1152044 - RNA, 14 nt, Barmah Forest virus
ccaagaugaagaca

SEQ ID NO: 1152045 - RNA, 14 nt, Barmah Forest virus
aaccaaaaaagacc

SEQ ID NO: 1152046 - RNA, 17 nt, Barmah Forest virus
caugagaaaccagaagg

SEQ ID NO: 1152047 - RNA, 14 nt, Barmah Forest virus
cgguagauaugaag

SEQ ID NO: 1152048 - RNA, 12 nt, Barmah Forest virus
cauaugcagugg

SEQ ID NO: 1152049 - RNA, 20 nt, Barmah Forest virus
aauuuuuaaauugaacugua

SEQ ID NO: 1152050 - RNA, 20 nt, Barmah Forest virus
acugcuacgaacaaaaucac

SEQ ID NO: 1152051 - RNA, 21 nt, Barmah Forest virus
guguuugucaacggagacagu

SEQ ID NO: 1152052 - RNA, 15 nt, Barmah Forest virus
uguaaguauguagua

SEQ ID NO: 1152053 - RNA, 20 nt, Barmah Forest virus
guaagccauugccacuugac

SEQ ID NO: 1152054 - RNA, 18 nt, Barmah Forest virus
guaagugugccauccaca

SEQ ID NO: 1152055 - RNA, 23 nt, Barmah Forest virus
gaagacgugcauuacaugaugaa

SEQ ID NO: 1152056 - RNA, 13 nt, Barmah Forest virus
gaaaaaagagaag

SEQ ID NO: 1152057 - RNA, 23 nt, Barmah Forest virus
agcugucuggacagauccuccuu

SEQ ID NO: 1152058 - RNA, 23 nt, Barmah Forest virus
acggcguacugaagauccaagug

SEQ ID NO: 1152059 - RNA, 14 nt, Barmah Forest virus
uauggugacccgca

SEQ ID NO: 1152060 - RNA, 14 nt, Barmah Forest virus
cauauaaccccuga

SEQ ID NO: 1152061 - RNA, 23 nt, Barmah Forest virus
aagacaccaccaccaaaaccaaa

SEQ ID NO: 1152062 - RNA, 19 nt, Barmah Forest virus
guagggcugcgacacagag

SEQ ID NO: 1152063 - RNA, 14 nt, Barmah Forest virus
gcagacccacugaa

SEQ ID NO: 1152064 - RNA, 17 nt, Barmah Forest virus
uagccgaacucuacgga

SEQ ID NO: 1152065 - RNA, 17 nt, Barmah Forest virus
caagaagacaccaccac

SEQ ID NO: 1152066 - RNA, 10 nt, Barmah Forest virus
ucagggccac

SEQ ID NO: 1152067 - RNA, 23 nt, Barmah Forest virus
uucacgguagauaugaagagaga

SEQ ID NO: 1152068 - RNA, 23 nt, Barmah Forest virus
ggcagguucggagacauccaaag

SEQ ID NO: 1152069 - RNA, 21 nt, Barmah Forest virus
gaaaccaacccaaaagaagaa

SEQ ID NO: 1152070 - RNA, 14 nt, Barmah Forest virus
caaaccuggagaca

SEQ ID NO: 1152071 - RNA, 16 nt, Barmah Forest virus
gacaauccagaacuag

SEQ ID NO: 1152072 - RNA, 18 nt, Barmah Forest virus
aggugcaaaugaaggggc

SEQ ID NO: 1152073 - RNA, 23 nt, Barmah Forest virus
uaaugucacacagaugagagaac

SEQ ID NO: 1152074 - RNA, 13 nt, Barmah Forest virus
gagcacagaagaa

SEQ ID NO: 1152075 - RNA, 14 nt, Barmah Forest virus
gaagccuaagaaac

SEQ ID NO: 1152076 - RNA, 21 nt, Barmah Forest virus
caacauaugauucugcagugc

SEQ ID NO: 1152077 - RNA, 17 nt, Barmah Forest virus
ccaagcagaaacaaaaa

SEQ ID NO: 1152078 - RNA, 17 nt, Barmah Forest virus
gucuaauuuguuuuuua

SEQ ID NO: 1152079 - RNA, 15 nt, Barmah Forest virus
cguccacucaucaga

SEQ ID NO: 1152080 - RNA, 17 nt, Barmah Forest virus
cuugacucgacgaugca

SEQ ID NO: 1152081 - RNA, 19 nt, Barmah Forest virus
ggcaccauggggcagugca

SEQ ID NO: 1152082 - RNA, 21 nt, Barmah Forest virus
cugaauaguaacaaaagagaa

SEQ ID NO: 1152083 - RNA, 20 nt, Barmah Forest virus
cagaacuagccaaauugaca

SEQ ID NO: 1152084 - RNA, 13 nt, Barmah Forest virus
uccaggccaccua

SEQ ID NO: 1152085 - RNA, 23 nt, Barmah Forest virus
agguacugcuacgaacaaaauca

SEQ ID NO: 1152086 - RNA, 21 nt, Barmah Forest virus
cagcccuauccguggucaccu

SEQ ID NO: 1152087 - RNA, 16 nt, Barmah Forest virus
auuugauagaggcugc

SEQ ID NO: 1152088 - RNA, 21 nt, Barmah Forest virus
ucugcagugcuaaauguagag

SEQ ID NO: 1152089 - RNA, 22 nt, Barmah Forest virus
agcucaugugaagggcacgauc

SEQ ID NO: 1152090 - RNA, 13 nt, Barmah Forest virus
guacaaaugcacu

SEQ ID NO: 1152091 - RNA, 12 nt, Barmah Forest virus
acagucaagaau

SEQ ID NO: 1152092 - RNA, 20 nt, Barmah Forest virus
caugcgaggcugaccaugcc

SEQ ID NO: 1152093 - RNA, 20 nt, Barmah Forest virus
ccugaagaaucaguggagug

SEQ ID NO: 1152094 - RNA, 22 nt, Barmah Forest virus
acgaugaaggauucugugcagg

SEQ ID NO: 1152095 - RNA, 15 nt, Barmah Forest virus
accccaaguauuaug

SEQ ID NO: 1152096 - RNA, 16 nt, Barmah Forest virus
gugccaccuggaugaa

SEQ ID NO: 1152097 - RNA, 13 nt, Barmah Forest virus
agagagaccaaag

SEQ ID NO: 1152098 - RNA, 19 nt, Barmah Forest virus
guuggaauacggccaccuu

SEQ ID NO: 1152099 - RNA, 15 nt, Barmah Forest virus
aagcaccgauccaaa

SEQ ID NO: 1152100 - RNA, 14 nt, Barmah Forest virus
gaugagagaacuac

SEQ ID NO: 1152101 - RNA, 23 nt, Barmah Forest virus
agucacgcccggaaccaagcaca

SEQ ID NO: 1152102 - RNA, 18 nt, Barmah Forest virus
auccuauugcuguagaaa

SEQ ID NO: 1152103 - RNA, 17 nt, Barmah Forest virus
cgguagauaugaagaga

SEQ ID NO: 1152104 - RNA, 14 nt, Barmah Forest virus
auuaguauagucau

SEQ ID NO: 1152105 - RNA, 12 nt, Barmah Forest virus
gaaaaugucacc

SEQ ID NO: 1152106 - RNA, 22 nt, Barmah Forest virus
aauucaugcaccaaaguuggau

SEQ ID NO: 1152107 - RNA, 12 nt, Barmah Forest virus
augucuggggaa

SEQ ID NO: 1152108 - RNA, 21 nt, Barmah Forest virus
gacgugcauuacaugaugaag

SEQ ID NO: 1152109 - RNA, 13 nt, Barmah Forest virus
aguucaaagggcc

SEQ ID NO: 1152110 - RNA, 17 nt, Barmah Forest virus
auaaccaccgaaaaugu

SEQ ID NO: 1152111 - RNA, 22 nt, Barmah Forest virus
gugcucgguguucacaggcgug

SEQ ID NO: 1152112 - RNA, 22 nt, Barmah Forest virus
uagcaaguaugaucuagaaugu

SEQ ID NO: 1152113 - RNA, 15 nt, Barmah Forest virus
cacacagaugagaga

SEQ ID NO: 1152114 - RNA, 17 nt, Barmah Forest virus
cacagagugugugaagc

SEQ ID NO: 1152115 - RNA, 15 nt, Barmah Forest virus
guguccuccagaacu

SEQ ID NO: 1152116 - RNA, 20 nt, Barmah Forest virus
gaaaacagucagaugaguga

SEQ ID NO: 1152117 - RNA, 19 nt, Barmah Forest virus
cgagagaagagauuacaau

SEQ ID NO: 1152118 - RNA, 23 nt, Barmah Forest virus
gacgauggccaagaugaagacag

SEQ ID NO: 1152119 - RNA, 19 nt, Barmah Forest virus
acacagaugagagaacuac

SEQ ID NO: 1152120 - RNA, 17 nt, Barmah Forest virus
ugaugucuaugccaaca

SEQ ID NO: 1152121 - RNA, 12 nt, Barmah Forest virus
aaggacauuaca

SEQ ID NO: 1152122 - RNA, 14 nt, Barmah Forest virus
aguauaguauuaua

SEQ ID NO: 1152123 - RNA, 18 nt, Barmah Forest virus
auccguuuuacaaaauug

SEQ ID NO: 1152124 - RNA, 20 nt, Barmah Forest virus
gaagaccguuaugccgucca

SEQ ID NO: 1152125 - RNA, 14 nt, Barmah Forest virus
acacagaugagaga

SEQ ID NO: 1152126 - RNA, 18 nt, Barmah Forest virus
gcguacugaagauccaag

SEQ ID NO: 1152127 - RNA, 21 nt, Barmah Forest virus
acucuacggagauguaggcau

SEQ ID NO: 1152128 - RNA, 15 nt, Barmah Forest virus
agaaacaaaaaagag

SEQ ID NO: 1152129 - RNA, 16 nt, Barmah Forest virus
aacaaaagagaaaaac

SEQ ID NO: 1152130 - RNA, 21 nt, Barmah Forest virus
ugcugggaggugcaaaugaag

SEQ ID NO: 1152131 - RNA, 21 nt, Barmah Forest virus
gccgaacucuacggagaugua

SEQ ID NO: 1152132 - RNA, 11 nt, Barmah Forest virus
cacagaagaag

SEQ ID NO: 1152133 - RNA, 13 nt, Barmah Forest virus
uuacgaaaaagac

SEQ ID NO: 1152134 - RNA, 16 nt, Barmah Forest virus
cacgccguaggagagg

SEQ ID NO: 1152135 - RNA, 12 nt, Barmah Forest virus
gagagaagagau

SEQ ID NO: 1152136 - RNA, 18 nt, Barmah Forest virus
uuuuaaauugaacuguag

SEQ ID NO: 1152137 - RNA, 18 nt, Barmah Forest virus
ccuaagauugcugucuga

SEQ ID NO: 1152138 - RNA, 16 nt, Barmah Forest virus
gaaggauucugugcag

SEQ ID NO: 1152139 - RNA, 21 nt, Barmah Forest virus
ggagaccagcaccaguccaga

SEQ ID NO: 1152140 - RNA, 14 nt, Barmah Forest virus
cgaccaugggccau

SEQ ID NO: 1152141 - RNA, 19 nt, Barmah Forest virus
uccuauggacaaauucacg

SEQ ID NO: 1152142 - RNA, 14 nt, Barmah Forest virus
guucaaagggccau

SEQ ID NO: 1152143 - RNA, 21 nt, Barmah Forest virus
cagacuuaacgagagaagaga

SEQ ID NO: 1152144 - RNA, 22 nt, Barmah Forest virus
aaguguauuacauaugcagugg

SEQ ID NO: 1152145 - RNA, 22 nt, Barmah Forest virus
augccguacaccauucucccac

SEQ ID NO: 1152146 - RNA, 14 nt, Barmah Forest virus
aucucaacuccaac

SEQ ID NO: 1152147 - RNA, 17 nt, Barmah Forest virus
gcaggccuacgagcacu

SEQ ID NO: 1152148 - RNA, 17 nt, Barmah Forest virus
aaggauucugugcagga

SEQ ID NO: 1152149 - RNA, 15 nt, Barmah Forest virus
cugcauucggggaaa

SEQ ID NO: 1152150 - RNA, 23 nt, Barmah Forest virus
cgaaguuacggaggugaaaggaa

SEQ ID NO: 1152151 - RNA, 13 nt, Barmah Forest virus
cccacugaagaga

SEQ ID NO: 1152152 - RNA, 17 nt, Barmah Forest virus
auaugaaagcagagauc

SEQ ID NO: 1152153 - RNA, 22 nt, Barmah Forest virus
uuccauccaucucuacuacagc

SEQ ID NO: 1152154 - RNA, 17 nt, Barmah Forest virus
ugccaaaacagcuguua

SEQ ID NO: 1152155 - RNA, 20 nt, Barmah Forest virus
acucauacuuggacccacag

SEQ ID NO: 1152156 - RNA, 18 nt, Barmah Forest virus
agaacuaccaacauauga

SEQ ID NO: 1152157 - RNA, 19 nt, Barmah Forest virus
cgauggagaccagcaccag

SEQ ID NO: 1152158 - RNA, 17 nt, Barmah Forest virus
aucacuaagcaccgauc

SEQ ID NO: 1152159 - RNA, 16 nt, Barmah Forest virus
gcuaguguccaauaca

SEQ ID NO: 1152160 - RNA, 17 nt, Barmah Forest virus
ucugucuagugccaaaa

SEQ ID NO: 1152161 - RNA, 20 nt, Barmah Forest virus
agggccauauaaccccugaa

SEQ ID NO: 1152162 - RNA, 18 nt, Barmah Forest virus
agcuaauuuuccaucagu

SEQ ID NO: 1152163 - RNA, 22 nt, Barmah Forest virus
agcaccaguccagagauacaua

SEQ ID NO: 1152164 - RNA, 12 nt, Barmah Forest virus
gaggugaaagga

SEQ ID NO: 1152165 - RNA, 15 nt, Barmah Forest virus
auucaugcaccaaag

SEQ ID NO: 1152166 - RNA, 15 nt, Barmah Forest virus
agagcacagaagaag

SEQ ID NO: 1152167 - RNA, 13 nt, Barmah Forest virus
cuacucugucuaa

SEQ ID NO: 1152168 - RNA, 15 nt, Barmah Forest virus
cagcuuggcaauggu

SEQ ID NO: 1152169 - RNA, 14 nt, Barmah Forest virus
agcucuacaaccca

SEQ ID NO: 1152170 - RNA, 13 nt, Barmah Forest virus
uuguuguaguauc

SEQ ID NO: 1152171 - RNA, 21 nt, Barmah Forest virus
cacgguagauaugaagagaga

SEQ ID NO: 1152172 - RNA, 22 nt, Barmah Forest virus
aucgacaauccagaacuagcca

SEQ ID NO: 1152173 - RNA, 20 nt, Barmah Forest virus
cauagucucacauuacuaug

SEQ ID NO: 1152174 - RNA, 23 nt, Barmah Forest virus
gcaaugaaaaguccccagcaccc

SEQ ID NO: 1152175 - RNA, 22 nt, Barmah Forest virus
auuguucaagcuagguaagcca

SEQ ID NO: 1152176 - RNA, 13 nt, Barmah Forest virus
caucaaguacaaa

SEQ ID NO: 1152177 - RNA, 23 nt, Barmah Forest virus
cgucugaagcaaacaaaagcagg

SEQ ID NO: 1152178 - RNA, 12 nt, Barmah Forest virus
cuuggacccaca

SEQ ID NO: 1152179 - RNA, 13 nt, Barmah Forest virus
gagaccagcacca

SEQ ID NO: 1152180 - RNA, 17 nt, Barmah Forest virus
cagaggucugucuagug

SEQ ID NO: 1152181 - RNA, 21 nt, Barmah Forest virus
acauaugcaguggauaacaca

SEQ ID NO: 1152182 - RNA, 13 nt, Barmah Forest virus
gcccaagaagaca

SEQ ID NO: 1152183 - RNA, 18 nt, Barmah Forest virus
agucaugaaaccagcuca

SEQ ID NO: 1152184 - RNA, 12 nt, Barmah Forest virus
uggaaaaaagag

SEQ ID NO: 1152185 - RNA, 20 nt, Barmah Forest virus
agucacuucauauaaaauua

SEQ ID NO: 1152186 - RNA, 17 nt, Barmah Forest virus
caccaccucagggccac

SEQ ID NO: 1152187 - RNA, 19 nt, Barmah Forest virus
acuuccacccuauguaccc

SEQ ID NO: 1152188 - RNA, 18 nt, Barmah Forest virus
guucacacaaaaaugaag

SEQ ID NO: 1152189 - RNA, 15 nt, Barmah Forest virus
uauaaccccugaaua

SEQ ID NO: 1152190 - RNA, 15 nt, Barmah Forest virus
ccauauuaccccuga

SEQ ID NO: 1152191 - RNA, 16 nt, Barmah Forest virus
aacauaccgaucagua

SEQ ID NO: 1152192 - RNA, 16 nt, Barmah Forest virus
gugugaagccaucgaa

SEQ ID NO: 1152193 - RNA, 19 nt, Barmah Forest virus
auacgacgcauaccuagau

SEQ ID NO: 1152194 - RNA, 18 nt, Barmah Forest virus
caauggaguacaggaggc

SEQ ID NO: 1152195 - RNA, 13 nt, Barmah Forest virus
uaaccccugaaua

SEQ ID NO: 1152196 - RNA, 22 nt, Barmah Forest virus
aagguacugcuacgaacaaaau

SEQ ID NO: 1152197 - RNA, 12 nt, Barmah Forest virus
cuacagcagaga

SEQ ID NO: 1152198 - RNA, 15 nt, Barmah Forest virus
uccacaacagcacca

SEQ ID NO: 1152199 - RNA, 18 nt, Barmah Forest virus
ggccauauuaccccugaa

SEQ ID NO: 1152200 - RNA, 14 nt, Barmah Forest virus
cacuugcccacagg

SEQ ID NO: 1152201 - RNA, 12 nt, Barmah Forest virus
cagcggccacca

SEQ ID NO: 1152202 - RNA, 19 nt, Barmah Forest virus
gccucggaaaggauccgag

SEQ ID NO: 1152203 - RNA, 22 nt, Barmah Forest virus
aaaacuaaauaaaaauuuagaa

SEQ ID NO: 1152204 - RNA, 13 nt, Barmah Forest virus
aagggccauauua

SEQ ID NO: 1152205 - RNA, 14 nt, Barmah Forest virus
cggaggugaaagga

SEQ ID NO: 1152206 - RNA, 19 nt, Barmah Forest virus
cagacaaauugauggcaga

SEQ ID NO: 1152207 - RNA, 17 nt, Barmah Forest virus
cuaucaauuagcaccag

SEQ ID NO: 1152208 - RNA, 13 nt, Barmah Forest virus
augguaaguguga

SEQ ID NO: 1152209 - RNA, 18 nt, Barmah Forest virus
cgugugaugcaccaccau

SEQ ID NO: 1152210 - RNA, 15 nt, Barmah Forest virus
ggcauccgaacucua

SEQ ID NO: 1152211 - RNA, 15 nt, Barmah Forest virus
cagcucaugugaagg

SEQ ID NO: 1152212 - RNA, 17 nt, Barmah Forest virus
agacccacugaagagau

SEQ ID NO: 1152213 - RNA, 15 nt, Barmah Forest virus
gacauucaagaaauc

SEQ ID NO: 1152214 - RNA, 13 nt, Barmah Forest virus
cacaacagcacca

SEQ ID NO: 1152215 - RNA, 18 nt, Barmah Forest virus
ggagacaguccagccaga

SEQ ID NO: 1152216 - RNA, 23 nt, Barmah Forest virus
cacagagugugugaagccaucga

SEQ ID NO: 1152217 - RNA, 17 nt, Barmah Forest virus
acgaucgacaauccaga

SEQ ID NO: 1152218 - RNA, 21 nt, Barmah Forest virus
cauaagagggaaaccaauaca

SEQ ID NO: 1152219 - RNA, 21 nt, Barmah Forest virus
ucccucugaccgacagcacgu

SEQ ID NO: 1152220 - RNA, 15 nt, Barmah Forest virus
agcuaaaagcaauac

SEQ ID NO: 1152221 - RNA, 14 nt, Barmah Forest virus
agcuugcaaugcau

SEQ ID NO: 1152222 - RNA, 23 nt, Barmah Forest virus
cacgaucgacaauccagaacuag

SEQ ID NO: 1152223 - RNA, 12 nt, Barmah Forest virus
aagacaauccaa

SEQ ID NO: 1152224 - RNA, 20 nt, Barmah Forest virus
gacagacuuaacgagagaag

SEQ ID NO: 1152225 - RNA, 18 nt, Barmah Forest virus
acaccauucucccacaag

SEQ ID NO: 1152226 - RNA, 20 nt, Barmah Forest virus
ggccauauuaccccugaaua

SEQ ID NO: 1152227 - RNA, 12 nt, Barmah Forest virus
aagggccauaua

SEQ ID NO: 1152228 - RNA, 12 nt, Barmah Forest virus
acaaaagagaaa

SEQ ID NO: 1152229 - RNA, 19 nt, Barmah Forest virus
cacccaugagcaagacaau

SEQ ID NO: 1152230 - RNA, 23 nt, Barmah Forest virus
acugcaugaagaucgagaaugac

SEQ ID NO: 1152231 - RNA, 18 nt, Barmah Forest virus
ccaaguucacccaugaga

SEQ ID NO: 1152232 - RNA, 15 nt, Barmah Forest virus
acuucuguggaggau

SEQ ID NO: 1152233 - RNA, 18 nt, Barmah Forest virus
ggccaccaaaagaaacug

SEQ ID NO: 1152234 - RNA, 18 nt, Barmah Forest virus
guaugcguaacugcauga

SEQ ID NO: 1152235 - RNA, 19 nt, Barmah Forest virus
agacccgaauucccugcaa

SEQ ID NO: 1152236 - RNA, 13 nt, Barmah Forest virus
gauucugcagugc

SEQ ID NO: 1152237 - RNA, 16 nt, Barmah Forest virus
uauguaugauaguaua

SEQ ID NO: 1152238 - RNA, 19 nt, Barmah Forest virus
aacguaugcguaacugcau

SEQ ID NO: 1152239 - RNA, 20 nt, Barmah Forest virus
cagugcaauuuagcaauggu

SEQ ID NO: 1152240 - RNA, 15 nt, Barmah Forest virus
cacucaccauacuug

SEQ ID NO: 1152241 - RNA, 13 nt, Barmah Forest virus
augaugaagugaa

SEQ ID NO: 1152242 - RNA, 20 nt, Barmah Forest virus
gcagaucgguauagcuaaaa

SEQ ID NO: 1152243 - RNA, 17 nt, Barmah Forest virus
cugggggaaguggaguu

SEQ ID NO: 1152244 - RNA, 17 nt, Barmah Forest virus
cagucagcguagcaccu

SEQ ID NO: 1152245 - RNA, 21 nt, Barmah Forest virus
ugaacuguagccgaacucuac

SEQ ID NO: 1152246 - RNA, 15 nt, Barmah Forest virus
uacaacuggcaccau

SEQ ID NO: 1152247 - RNA, 17 nt, Barmah Forest virus
aauuuagaaaaacuuaa

SEQ ID NO: 1152248 - RNA, 17 nt, Barmah Forest virus
uacggaggugaaaggaa

SEQ ID NO: 1152249 - RNA, 14 nt, Barmah Forest virus
aaaguucauacuug

SEQ ID NO: 1152250 - RNA, 22 nt, Barmah Forest virus
gucauaguuaguguagaaauag

SEQ ID NO: 1152251 - RNA, 21 nt, Barmah Forest virus
ccaaguucacccaugagaaac

SEQ ID NO: 1152252 - RNA, 17 nt, Barmah Forest virus
caagcacaccgaagaga

SEQ ID NO: 1152253 - RNA, 23 nt, Barmah Forest virus
ugcaugaaaucagacgcauccaa

SEQ ID NO: 1152254 - RNA, 19 nt, Barmah Forest virus
augcuguuacgaaaaagac

SEQ ID NO: 1152255 - RNA, 23 nt, Barmah Forest virus
augguauaauaucagacaaauug

SEQ ID NO: 1152256 - RNA, 17 nt, Barmah Forest virus
gggaugaguacagggau

SEQ ID NO: 1152257 - RNA, 15 nt, Barmah Forest virus
gaaaccaacccaaaa

SEQ ID NO: 1152258 - RNA, 18 nt, Barmah Forest virus
ucauaguuaguguagaaa

SEQ ID NO: 1152259 - RNA, 18 nt, Barmah Forest virus
ggccaccuacagcagaga

SEQ ID NO: 1152260 - RNA, 20 nt, Barmah Forest virus
cuuaaggagcaaguaccaaa

SEQ ID NO: 1152261 - RNA, 21 nt, Barmah Forest virus
gacacggguccaggccaccua

SEQ ID NO: 1152262 - RNA, 15 nt, Barmah Forest virus
uaacagguacagccu

SEQ ID NO: 1152263 - RNA, 20 nt, Barmah Forest virus
ccgucugaagcaaacaaaag

SEQ ID NO: 1152264 - RNA, 14 nt, Barmah Forest virus
cugaagcaaacaaa

SEQ ID NO: 1152265 - RNA, 17 nt, Barmah Forest virus
aacaacccgguacgacu

SEQ ID NO: 1152266 - RNA, 16 nt, Barmah Forest virus
agagcuugcaaugcau

SEQ ID NO: 1152267 - RNA, 21 nt, Barmah Forest virus
aaauuuagaaaaacuuaauau

SEQ ID NO: 1152268 - RNA, 15 nt, Barmah Forest virus
cucuacggagaugua

SEQ ID NO: 1152269 - RNA, 15 nt, Barmah Forest virus
cauuacaugaugaag

SEQ ID NO: 1152270 - RNA, 14 nt, Barmah Forest virus
ccccugugagcauc

SEQ ID NO: 1152271 - RNA, 18 nt, Barmah Forest virus
cacagaagaagcccaaga

SEQ ID NO: 1152272 - RNA, 14 nt, Barmah Forest virus
cagagugugugaag

SEQ ID NO: 1152273 - RNA, 23 nt, Barmah Forest virus
caauccaaguuggggcagaaggc

SEQ ID NO: 1152274 - RNA, 18 nt, Barmah Forest virus
gugacaccgccccaaagu

SEQ ID NO: 1152275 - RNA, 22 nt, Barmah Forest virus
gcauccaaguucacccaugaga

SEQ ID NO: 1152276 - RNA, 15 nt, Barmah Forest virus
uaacaccugaagaau

SEQ ID NO: 1152277 - RNA, 17 nt, Barmah Forest virus
auccguuuuacaaaauu

SEQ ID NO: 1152278 - RNA, 18 nt, Barmah Forest virus
auuugaagcuuaaaagac

SEQ ID NO: 1152279 - RNA, 17 nt, Barmah Forest virus
ccccaaccccaaccacc

SEQ ID NO: 1152280 - RNA, 14 nt, Barmah Forest virus
uggggaaacaacaa

SEQ ID NO: 1152281 - RNA, 18 nt, Barmah Forest virus
gacaaaagucaagaugau

SEQ ID NO: 1152282 - RNA, 21 nt, Barmah Forest virus
aguaacaaaaaucaaaaacua

SEQ ID NO: 1152283 - RNA, 21 nt, Barmah Forest virus
cauccaaguucacccaugaga

SEQ ID NO: 1152284 - RNA, 23 nt, Barmah Forest virus
agaucgguauagcuaaaagcaau

SEQ ID NO: 1152285 - RNA, 22 nt, Barmah Forest virus
agugacauacagacugggggaa

SEQ ID NO: 1152286 - RNA, 17 nt, Barmah Forest virus
cauaguuaguguagaaa

SEQ ID NO: 1152287 - RNA, 22 nt, Barmah Forest virus
gucaacggagacaguccagcca

SEQ ID NO: 1152288 - RNA, 19 nt, Barmah Forest virus
acccugcagggacccuaag

SEQ ID NO: 1152289 - RNA, 20 nt, Barmah Forest virus
acguaugggaugaguacagg

SEQ ID NO: 1152290 - RNA, 22 nt, Barmah Forest virus
gcccagguuuauuggcaaugaa

SEQ ID NO: 1152291 - RNA, 17 nt, Barmah Forest virus
gcagacccacugaagag

SEQ ID NO: 1152292 - RNA, 15 nt, Barmah Forest virus
cccagcacccaccgg

SEQ ID NO: 1152293 - RNA, 11 nt, Barmah Forest virus
cccagaagccu

SEQ ID NO: 1152294 - RNA, 13 nt, Barmah Forest virus
gaaaccagaagga

SEQ ID NO: 1152295 - RNA, 13 nt, Barmah Forest virus
uucaaagggccau

SEQ ID NO: 1152296 - RNA, 18 nt, Barmah Forest virus
caggaaauaugcgugcaa

SEQ ID NO: 1152297 - RNA, 13 nt, Barmah Forest virus
uggaucagagagc

SEQ ID NO: 1152298 - RNA, 12 nt, Barmah Forest virus
caaaauugcacg

SEQ ID NO: 1152299 - RNA, 17 nt, Barmah Forest virus
ccaagggcuagugucca

SEQ ID NO: 1152300 - RNA, 12 nt, Barmah Forest virus
augcaccaaagu

SEQ ID NO: 1152301 - RNA, 19 nt, Barmah Forest virus
uaccucugcggaauucacc

SEQ ID NO: 1152302 - RNA, 21 nt, Barmah Forest virus
aguaacaaaagagaaaaacac

SEQ ID NO: 1152303 - RNA, 15 nt, Barmah Forest virus
ccaauggaguacagg

SEQ ID NO: 1152304 - RNA, 13 nt, Barmah Forest virus
uguccgcagagga

SEQ ID NO: 1152305 - RNA, 13 nt, Barmah Forest virus
ugcaaaaacacau

SEQ ID NO: 1152306 - RNA, 18 nt, Barmah Forest virus
auaauaucagacaaauug

SEQ ID NO: 1152307 - RNA, 17 nt, Barmah Forest virus
ccauauuaccccugaau

SEQ ID NO: 1152308 - RNA, 21 nt, Barmah Forest virus
gcaugaaaucagacgcaucca

SEQ ID NO: 1152309 - RNA, 19 nt, Barmah Forest virus
ugcagucagcguagcaccu

SEQ ID NO: 1152310 - RNA, 21 nt, Barmah Forest virus
acuccaacagcuuguggcugc

SEQ ID NO: 1152311 - RNA, 15 nt, Barmah Forest virus
agaugacaacauaau

SEQ ID NO: 1152312 - RNA, 12 nt, Barmah Forest virus
uacggccaccuu

SEQ ID NO: 1152313 - RNA, 19 nt, Barmah Forest virus
uauuaccccugaauaguaa

SEQ ID NO: 1152314 - RNA, 15 nt, Barmah Forest virus
ugaagcuuaaaagac

SEQ ID NO: 1152315 - RNA, 14 nt, Barmah Forest virus
uacucccaucagac

SEQ ID NO: 1152316 - RNA, 17 nt, Barmah Forest virus
cccaugagcaagacaau

SEQ ID NO: 1152317 - RNA, 16 nt, Barmah Forest virus
aagcuagguaagccau

SEQ ID NO: 1152318 - RNA, 14 nt, Barmah Forest virus
cgaucgacaaucca

SEQ ID NO: 1152319 - RNA, 22 nt, Barmah Forest virus
  misc_feature (10)..(10): n is a, c, g, or u
gccgcacugnauauaacagcac

SEQ ID NO: 1152320 - RNA, 12 nt, Barmah Forest virus
gccgaaccccag

SEQ ID NO: 1152321 - RNA, 20 nt, Barmah Forest virus
uuuguuauguaaguauguag

SEQ ID NO: 1152322 - RNA, 13 nt, Barmah Forest virus
acacaaaaaugaa

SEQ ID NO: 1152323 - RNA, 21 nt, Barmah Forest virus
acaccauucucccacaagccc

SEQ ID NO: 1152324 - RNA, 16 nt, Barmah Forest virus
guaacugcaugaagau

SEQ ID NO: 1152325 - RNA, 15 nt, Barmah Forest virus
accaugugcaccaug

SEQ ID NO: 1152326 - RNA, 14 nt, Barmah Forest virus
agauuacaaugcau

SEQ ID NO: 1152327 - RNA, 22 nt, Barmah Forest virus
auaaccaccgaaaaugucacca

SEQ ID NO: 1152328 - RNA, 17 nt, Barmah Forest virus
gaaacuguaaugucaca

SEQ ID NO: 1152329 - RNA, 18 nt, Barmah Forest virus
auaaaauuacugaugaau

SEQ ID NO: 1152330 - RNA, 15 nt, Barmah Forest virus
uaaguauguaguauu

SEQ ID NO: 1152331 - RNA, 20 nt, Barmah Forest virus
acauuacaacuggcaccaug

SEQ ID NO: 1152332 - RNA, 18 nt, Barmah Forest virus
cagacugggggaagugga

SEQ ID NO: 1152333 - RNA, 15 nt, Barmah Forest virus
aggacauuacaacug

SEQ ID NO: 1152334 - RNA, 14 nt, Barmah Forest virus
acagcaccauguga

SEQ ID NO: 1152335 - RNA, 20 nt, Barmah Forest virus
uaagauuaguuuguuaugua

SEQ ID NO: 1152336 - RNA, 12 nt, Barmah Forest virus
aguguuggagga

SEQ ID NO: 1152337 - RNA, 20 nt, Barmah Forest virus
caagaugauuccauggcacu

SEQ ID NO: 1152338 - RNA, 15 nt, Barmah Forest virus
gcacgugugcaguca

SEQ ID NO: 1152339 - RNA, 22 nt, Barmah Forest virus
cacaaaaaugaagcggacuaua

SEQ ID NO: 1152340 - RNA, 22 nt, Barmah Forest virus
caaaugaaaccgucugaagcaa

SEQ ID NO: 1152341 - RNA, 23 nt, Barmah Forest virus
cgagucuaggcuugcuaauagug

SEQ ID NO: 1152342 - RNA, 12 nt, Barmah Forest virus
cacugcccacaa

SEQ ID NO: 1152343 - RNA, 18 nt, Barmah Forest virus
agggccauauaaccccug

SEQ ID NO: 1152344 - RNA, 19 nt, Barmah Forest virus
guccacucaucagaacuag

SEQ ID NO: 1152345 - RNA, 18 nt, Barmah Forest virus
cuuguuugcaaaaacaca

SEQ ID NO: 1152346 - RNA, 22 nt, Barmah Forest virus
ggcgcacuagcucuacaaccca

SEQ ID NO: 1152347 - RNA, 22 nt, Barmah Forest virus
cggaggugaaaggaaagaucca

SEQ ID NO: 1152348 - RNA, 19 nt, Barmah Forest virus
cuccuuuugaucacaaggu

SEQ ID NO: 1152349 - RNA, 21 nt, Barmah Forest virus
cagcacccaccgggcacaaga

SEQ ID NO: 1152350 - RNA, 15 nt, Barmah Forest virus
aguacaggaggcuga

SEQ ID NO: 1152351 - RNA, 16 nt, Barmah Forest virus
acagucagaugaguga

SEQ ID NO: 1152352 - RNA, 15 nt, Barmah Forest virus
guagauaugaagaga

SEQ ID NO: 1152353 - RNA, 16 nt, Barmah Forest virus
gacaccaccaccaaaa

SEQ ID NO: 1152354 - RNA, 13 nt, Barmah Forest virus
guaaaagaaggua

SEQ ID NO: 1152355 - RNA, 13 nt, Barmah Forest virus
gaugugccaccug

SEQ ID NO: 1152356 - RNA, 12 nt, Barmah Forest virus
uaccaaaugaaa

SEQ ID NO: 1152357 - RNA, 24 nt, Barmah Forest virus
augagagaacuaccaacauaugau

SEQ ID NO: 1152358 - RNA, 22 nt, Barmah Forest virus
ccuucagaaacauaagagggaa

SEQ ID NO: 1152359 - RNA, 12 nt, Barmah Forest virus
aauaguaacaaa

SEQ ID NO: 1152360 - RNA, 21 nt, Barmah Forest virus
gcagucagcguagcaccugaa

SEQ ID NO: 1152361 - RNA, 11 nt, Barmah Forest virus
acagcaccaug

SEQ ID NO: 1152362 - RNA, 20 nt, Barmah Forest virus
gguaagugugccauccacag

SEQ ID NO: 1152363 - RNA, 19 nt, Barmah Forest virus
ccaaaguguauuacauaug

SEQ ID NO: 1152364 - RNA, 23 nt, Barmah Forest virus
gaagauccaaguguccaugcaga

SEQ ID NO: 1152365 - RNA, 14 nt, Barmah Forest virus
gcaaacaaaagcag

SEQ ID NO: 1152366 - RNA, 15 nt, Barmah Forest virus
cgcacuucacaagga

SEQ ID NO: 1152367 - RNA, 20 nt, Barmah Forest virus
aaggcgugugaagugcaguc

SEQ ID NO: 1152368 - RNA, 19 nt, Barmah Forest virus
ugacauacagacuggggga

SEQ ID NO: 1152369 - RNA, 20 nt, Barmah Forest virus
caccgaagagagaccaaagg

SEQ ID NO: 1152370 - RNA, 22 nt, Barmah Forest virus
cgguaccgucaccauuccaaaa

SEQ ID NO: 1152371 - RNA, 19 nt, Barmah Forest virus
gacagcacgugugcaguca

SEQ ID NO: 1152372 - RNA, 14 nt, Barmah Forest virus
aaugugcucaagug

SEQ ID NO: 1152373 - RNA, 15 nt, Barmah Forest virus
cacugcccacaagga

SEQ ID NO: 1152374 - RNA, 15 nt, Barmah Forest virus
uagaaaaacuuaaua

SEQ ID NO: 1152375 - RNA, 19 nt, Barmah Forest virus
auaagguagguaagugugc

SEQ ID NO: 1152376 - RNA, 15 nt, Barmah Forest virus
gcacgucuggaguga

SEQ ID NO: 1152377 - RNA, 22 nt, Barmah Forest virus
gcaaugaaaaguccccagcacc

SEQ ID NO: 1152378 - RNA, 16 nt, Barmah Forest virus
gcggaggcgcugagug

SEQ ID NO: 1152379 - RNA, 19 nt, Barmah Forest virus
uuauaagauuaguuuguua

SEQ ID NO: 1152380 - RNA, 22 nt, Barmah Forest virus
cuuccacccuauguaccccacc

SEQ ID NO: 1152381 - RNA, 22 nt, Barmah Forest virus
caaauuuggagcuaugaugaag

SEQ ID NO: 1152382 - RNA, 21 nt, Barmah Forest virus
accugaagaaucaguggagug

SEQ ID NO: 1152383 - RNA, 18 nt, Barmah Forest virus
ugagagaacuaccaacau

SEQ ID NO: 1152384 - RNA, 14 nt, Barmah Forest virus
uccuaccuguggac

SEQ ID NO: 1152385 - RNA, 15 nt, Barmah Forest virus
ccgaagagagaccaa

SEQ ID NO: 1152386 - RNA, 16 nt, Barmah Forest virus
cauauuaccccugaau

SEQ ID NO: 1152387 - RNA, 14 nt, Barmah Forest virus
uagaaaaaauucau

SEQ ID NO: 1152388 - RNA, 21 nt, Barmah Forest virus
ucaaaguucauacuugggccg

SEQ ID NO: 1152389 - RNA, 13 nt, Barmah Forest virus
agaccagcaccag

SEQ ID NO: 1152390 - RNA, 17 nt, Barmah Forest virus
acuucauauaaaauuac

SEQ ID NO: 1152391 - RNA, 14 nt, Barmah Forest virus
aguacaacucccaa

SEQ ID NO: 1152392 - RNA, 21 nt, Barmah Forest virus
ccgaacucuacggagauguag

SEQ ID NO: 1152393 - RNA, 20 nt, Barmah Forest virus
auagccucuuuugacaaaag

SEQ ID NO: 1152394 - RNA, 23 nt, Barmah Forest virus
guuaugccguccacucaucagaa

SEQ ID NO: 1152395 - RNA, 14 nt, Barmah Forest virus
gcacaccgaagaga

SEQ ID NO: 1152396 - RNA, 16 nt, Barmah Forest virus
auaugaagagagaugu

SEQ ID NO: 1152397 - RNA, 22 nt, Barmah Forest virus
gccuaagaaaccaacccaaaag

SEQ ID NO: 1152398 - RNA, 14 nt, Barmah Forest virus
gcaaaccuggagac

SEQ ID NO: 1152399 - RNA, 12 nt, Barmah Forest virus
gccaccaaaaga

SEQ ID NO: 1152400 - RNA, 13 nt, Barmah Forest virus
ccccagcacccac

SEQ ID NO: 1152401 - RNA, 14 nt, Barmah Forest virus
aaaauuacugauga

SEQ ID NO: 1152402 - RNA, 17 nt, Barmah Forest virus
auauaaccccugaauag

SEQ ID NO: 1152403 - RNA, 18 nt, Barmah Forest virus
auaguuggaauacggcca

SEQ ID NO: 1152404 - RNA, 14 nt, Barmah Forest virus
uaacugcaugaaga

SEQ ID NO: 1152405 - RNA, 22 nt, Barmah Forest virus
gaaccaagcacaccgaagagag

SEQ ID NO: 1152406 - RNA, 14 nt, Barmah Forest virus
gcucuacaacccaa

SEQ ID NO: 1152407 - RNA, 22 nt, Barmah Forest virus
auaguauuacaggaauuaguau

SEQ ID NO: 1152408 - RNA, 18 nt, Barmah Forest virus
gaaggauucugugcagga

SEQ ID NO: 1152409 - RNA, 15 nt, Barmah Forest virus
aagacaauccaaguu

SEQ ID NO: 1152410 - RNA, 14 nt, Barmah Forest virus
uaugaaagcagaga

SEQ ID NO: 1152411 - RNA, 13 nt, Barmah Forest virus
aggaaauaugcgu

SEQ ID NO: 1152412 - RNA, 13 nt, Barmah Forest virus
ugaugcaccacca

SEQ ID NO: 1152413 - RNA, 16 nt, Barmah Forest virus
accgaagagagaccaa

SEQ ID NO: 1152414 - RNA, 20 nt, Barmah Forest virus
aaccgcaagugacauacaga

SEQ ID NO: 1152415 - RNA, 15 nt, Barmah Forest virus
ugcuacgaacaaaau

SEQ ID NO: 1152416 - RNA, 15 nt, Barmah Forest virus
agggccacucaccau

SEQ ID NO: 1152417 - RNA, 13 nt, Barmah Forest virus
ccguuuuacaaaa

SEQ ID NO: 1152418 - RNA, 14 nt, Barmah Forest virus
caugagaaaccaga

SEQ ID NO: 1152419 - RNA, 22 nt, Barmah Forest virus
acagcacuauguguccuccaga

SEQ ID NO: 1152420 - RNA, 23 nt, Barmah Forest virus
aaguguauccacaacagcaccau

SEQ ID NO: 1152421 - RNA, 19 nt, Barmah Forest virus
agaaaucuagcaaguauga

SEQ ID NO: 1152422 - RNA, 12 nt, Barmah Forest virus
uccccagcaccc

SEQ ID NO: 1152423 - RNA, 21 nt, Barmah Forest virus
agauccaaguguccaugcaga

SEQ ID NO: 1152424 - RNA, 13 nt, Barmah Forest virus
caccuuacaaaau

SEQ ID NO: 1152425 - RNA, 22 nt, Barmah Forest virus
caaugaaaaguccccagcaccc

SEQ ID NO: 1152426 - RNA, 21 nt, Barmah Forest virus
ucuacgaaccggcaaaacuag

SEQ ID NO: 1152427 - RNA, 10 nt, Barmah Forest virus
cgaagagaga

SEQ ID NO: 1152428 - RNA, 18 nt, Barmah Forest virus
gccagacguaugggauga

SEQ ID NO: 1152429 - RNA, 14 nt, Barmah Forest virus
gccacgcaggccua

SEQ ID NO: 1152430 - RNA, 17 nt, Barmah Forest virus
guuacgaaaaagacccu

SEQ ID NO: 1152431 - RNA, 16 nt, Barmah Forest virus
gcaagugacauacaga

SEQ ID NO: 1152432 - RNA, 20 nt, Barmah Forest virus
gauacauaccccaaccccaa

SEQ ID NO: 1152433 - RNA, 15 nt, Barmah Forest virus
gacccacugaagaga

SEQ ID NO: 1152434 - RNA, 12 nt, Barmah Forest virus
gauaugaagaga

SEQ ID NO: 1152435 - RNA, 13 nt, Barmah Forest virus
accuuacaaaaug

SEQ ID NO: 1152436 - RNA, 12 nt, Barmah Forest virus
agucaaguugaa

SEQ ID NO: 1152437 - RNA, 13 nt, Barmah Forest virus
auaguaguucaaa

SEQ ID NO: 1152438 - RNA, 23 nt, Barmah Forest virus
cagggccacucaccauacuugug

SEQ ID NO: 1152439 - RNA, 23 nt, Barmah Forest virus
auuaccccugaauaguaacaaaa

SEQ ID NO: 1152440 - RNA, 18 nt, Barmah Forest virus
uaguucaaagggccauau

SEQ ID NO: 1152441 - RNA, 19 nt, Barmah Forest virus
ggccaagaugaagacagaa

SEQ ID NO: 1152442 - RNA, 15 nt, Barmah Forest virus
ugaagacagaagacg

SEQ ID NO: 1152443 - RNA, 17 nt, Barmah Forest virus
augcaccaccaugugca

SEQ ID NO: 1152444 - RNA, 21 nt, Barmah Forest virus
accgacagcacgugugcaguc

SEQ ID NO: 1152445 - RNA, 17 nt, Barmah Forest virus
augacaacauaauccau

SEQ ID NO: 1152446 - RNA, 23 nt, Barmah Forest virus
gacgcauaccuagauaugguaga

SEQ ID NO: 1152447 - RNA, 15 nt, Barmah Forest virus
uguaguaguaaguau

SEQ ID NO: 1152448 - RNA, 13 nt, Barmah Forest virus
uuaccccugaaua

SEQ ID NO: 1152449 - RNA, 12 nt, Barmah Forest virus
auccaaagcugc

SEQ ID NO: 1152450 - RNA, 23 nt, Barmah Forest virus
ggaggcugaacgcucuacccuaa

SEQ ID NO: 1152451 - RNA, 12 nt, Barmah Forest virus
ugaagugaaaac

SEQ ID NO: 1152452 - RNA, 15 nt, Barmah Forest virus
gcacagaagaagccc

SEQ ID NO: 1152453 - RNA, 20 nt, Barmah Forest virus
ccacaaggaaggagaccuaa

SEQ ID NO: 1152454 - RNA, 19 nt, Barmah Forest virus
ccuucagaaacauaagagg

SEQ ID NO: 1152455 - RNA, 16 nt, Barmah Forest virus
acgucgccaaguugaa

SEQ ID NO: 1152456 - RNA, 23 nt, Barmah Forest virus
guuggggcagaaggcguggagua

SEQ ID NO: 1152457 - RNA, 21 nt, Barmah Forest virus
ccaaaagaaacuguaauguca

SEQ ID NO: 1152458 - RNA, 13 nt, Barmah Forest virus
cucccaucagaca

SEQ ID NO: 1152459 - RNA, 15 nt, Barmah Forest virus
ucacuaagcaccgau

SEQ ID NO: 1152460 - RNA, 17 nt, Barmah Forest virus
uucacacaaaaaugaag

SEQ ID NO: 1152461 - RNA, 22 nt, Barmah Forest virus
gaacuucgugguccaagugugu

SEQ ID NO: 1152462 - RNA, 18 nt, Barmah Forest virus
aaaggaaagauccaugug

SEQ ID NO: 1152463 - RNA, 13 nt, Barmah Forest virus
caccgaagagaga

SEQ ID NO: 1152464 - RNA, 14 nt, Barmah Forest virus
cguaacugcaugaa

SEQ ID NO: 1152465 - RNA, 18 nt, Barmah Forest virus
uggaguacaggaggcuga

SEQ ID NO: 1152466 - RNA, 20 nt, Barmah Forest virus
ccaugguauaauaucagaca

SEQ ID NO: 1152467 - RNA, 21 nt, Barmah Forest virus
gaacucuacggagauguagga

SEQ ID NO: 1152468 - RNA, 13 nt, Barmah Forest virus
gaggaccugggag

SEQ ID NO: 1152469 - RNA, 15 nt, Barmah Forest virus
auuauauuaccugca

SEQ ID NO: 1152470 - RNA, 22 nt, Barmah Forest virus
agaugacaacauaauccauggu

SEQ ID NO: 1152471 - RNA, 22 nt, Barmah Forest virus
ucagggccacucaccauacuug

SEQ ID NO: 1152472 - RNA, 15 nt, Barmah Forest virus
cuuuccaaaaacaca

SEQ ID NO: 1152473 - RNA, 18 nt, Barmah Forest virus
aggggcccggacagcccu

SEQ ID NO: 1152474 - RNA, 15 nt, Barmah Forest virus
cguagcuuuccaaaa

SEQ ID NO: 1152475 - RNA, 23 nt, Barmah Forest virus
uccacgccguaggagaggaccau

SEQ ID NO: 1152476 - RNA, 16 nt, Barmah Forest virus
ggcauccgaacucuac

SEQ ID NO: 1152477 - RNA, 13 nt, Barmah Forest virus
aggauucugugca

SEQ ID NO: 1152478 - RNA, 17 nt, Barmah Forest virus
gagcacgucuggaguga

SEQ ID NO: 1152479 - RNA, 17 nt, Barmah Forest virus
gaugcaccaccaugugc

SEQ ID NO: 1152480 - RNA, 20 nt, Barmah Forest virus
ccaaaguuggauaaaaccaa

SEQ ID NO: 1152481 - RNA, 19 nt, Barmah Forest virus
caauccagaacuagccaaa

SEQ ID NO: 1152482 - RNA, 14 nt, Barmah Forest virus
ggucaccuggaaua

SEQ ID NO: 1152483 - RNA, 12 nt, Barmah Forest virus
ggagacauccaa

SEQ ID NO: 1152484 - RNA, 21 nt, Barmah Forest virus
acacagagugugugaagccau

SEQ ID NO: 1152485 - RNA, 17 nt, Barmah Forest virus
ccccugaauaguaacaa

SEQ ID NO: 1152486 - RNA, 15 nt, Barmah Forest virus
ugaagccaucgaaga

SEQ ID NO: 1152487 - RNA, 16 nt, Barmah Forest virus
uggacggacuggggga

SEQ ID NO: 1152488 - RNA, 14 nt, Barmah Forest virus
aguccccagcaccc

SEQ ID NO: 1152489 - RNA, 15 nt, Barmah Forest virus
cuauugcuguagaaa

SEQ ID NO: 1152490 - RNA, 15 nt, Barmah Forest virus
gcauuacaugaugaa

SEQ ID NO: 1152491 - RNA, 19 nt, Barmah Forest virus
aagcacggugaccaugugu

SEQ ID NO: 1152492 - RNA, 14 nt, Barmah Forest virus
aaaccaaaaaagac

SEQ ID NO: 1152493 - RNA, 18 nt, Barmah Forest virus
aauaucagacaaauugau

SEQ ID NO: 1152494 - RNA, 22 nt, Barmah Forest virus
uaacugcaugaagaucgagaau

SEQ ID NO: 1152495 - RNA, 19 nt, Barmah Forest virus
agaccaucaaguacaaaug

SEQ ID NO: 1152496 - RNA, 13 nt, Barmah Forest virus
cuuguuugcaaaa

SEQ ID NO: 1152497 - RNA, 21 nt, Barmah Forest virus
uaggcauccgaacucuacgga

SEQ ID NO: 1152498 - RNA, 18 nt, Barmah Forest virus
ucgccaaguugaaaggac

SEQ ID NO: 1152499 - RNA, 13 nt, Barmah Forest virus
aaagagcacagaa

SEQ ID NO: 1152500 - RNA, 22 nt, Barmah Forest virus
gcacuauguguccuccagaacu

SEQ ID NO: 1152501 - RNA, 16 nt, Barmah Forest virus
uauuaccccugaauag

SEQ ID NO: 1152502 - RNA, 19 nt, Barmah Forest virus
cacaguguggcaguacaac

SEQ ID NO: 1152503 - RNA, 20 nt, Barmah Forest virus
agggauaauccgauuugcau

SEQ ID NO: 1152504 - RNA, 21 nt, Barmah Forest virus
guucccgugugaugcaccacc

SEQ ID NO: 1152505 - RNA, 16 nt, Barmah Forest virus
agaagcccaagaagac

SEQ ID NO: 1152506 - RNA, 23 nt, Barmah Forest virus
acgggcucuggcaaaccuggaga

SEQ ID NO: 1152507 - RNA, 21 nt, Barmah Forest virus
gguacgacuaugggcacagaa

SEQ ID NO: 1152508 - RNA, 22 nt, Barmah Forest virus
uagacccaaagacgaagaccau

SEQ ID NO: 1152509 - RNA, 19 nt, Barmah Forest virus
ucauaggagaugacaacau

SEQ ID NO: 1152510 - RNA, 17 nt, Barmah Forest virus
ucaacuccaacagcuug

SEQ ID NO: 1152511 - RNA, 18 nt, Barmah Forest virus
ugcaaaacuuacucccau

SEQ ID NO: 1152512 - RNA, 13 nt, Barmah Forest virus
caugagcaagaca

SEQ ID NO: 1152513 - RNA, 19 nt, Barmah Forest virus
uauaaccccugaauaguaa

SEQ ID NO: 1152514 - RNA, 16 nt, Barmah Forest virus
uaccccugaauaguaa

SEQ ID NO: 1152515 - RNA, 15 nt, Barmah Forest virus
agaagcccaagaaga

SEQ ID NO: 1152516 - RNA, 13 nt, Barmah Forest virus
caaguugaaagga

SEQ ID NO: 1152517 - RNA, 17 nt, Barmah Forest virus
gacaaauugauggcaga

SEQ ID NO: 1152518 - RNA, 17 nt, Barmah Forest virus
ccauauaaccccugaau

SEQ ID NO: 1152519 - RNA, 16 nt, Barmah Forest virus
agagauuacaaugcau

SEQ ID NO: 1152520 - RNA, 15 nt, Barmah Forest virus
aaagucaauccagua

SEQ ID NO: 1152521 - RNA, 13 nt, Barmah Forest virus
agaaugacugcau

SEQ ID NO: 1152522 - RNA, 19 nt, Barmah Forest virus
cugaagauccaagugucca

SEQ ID NO: 1152523 - RNA, 19 nt, Barmah Forest virus
uauaguauuauaggaauua

SEQ ID NO: 1152524 - RNA, 18 nt, Barmah Forest virus
guauccacaacagcacca

SEQ ID NO: 1152525 - RNA, 16 nt, Barmah Forest virus
acgcagccaaacacaa

SEQ ID NO: 1152526 - RNA, 17 nt, Barmah Forest virus
ugcguagcuuuccaaaa

SEQ ID NO: 1152527 - RNA, 13 nt, Barmah Forest virus
gaagagagauguc

SEQ ID NO: 1152528 - RNA, 16 nt, Barmah Forest virus
gaaacauaagagggaa

SEQ ID NO: 1152529 - RNA, 23 nt, Barmah Forest virus
aagguacugcuacgaacaaaauc

SEQ ID NO: 1152530 - RNA, 14 nt, Barmah Forest virus
cccaaaagaagaag

SEQ ID NO: 1152531 - RNA, 18 nt, Barmah Forest virus
gcccaagaagacaccacc

SEQ ID NO: 1152532 - RNA, 17 nt, Barmah Forest virus
cagacccacugaagaga

SEQ ID NO: 1152533 - RNA, 12 nt, Barmah Forest virus
gcccggacagcc

SEQ ID NO: 1152534 - RNA, 15 nt, Barmah Forest virus
ucauauaaaauuacu

SEQ ID NO: 1152535 - RNA, 19 nt, Barmah Forest virus
uauaguauuacaggaauua

SEQ ID NO: 1152536 - RNA, 23 nt, Barmah Forest virus
uacacccuaucaauuagcaccag

SEQ ID NO: 1152537 - RNA, 17 nt, Barmah Forest virus
agagcucaucgagcagc

SEQ ID NO: 1152538 - RNA, 21 nt, Barmah Forest virus
aucuacgaaccggcaaaacua

SEQ ID NO: 1152539 - RNA, 21 nt, Barmah Forest virus
agagaacuaccaacauaugau

SEQ ID NO: 1152540 - RNA, 16 nt, Barmah Forest virus
gggaaacaacaacccg

SEQ ID NO: 1152541 - RNA, 23 nt, Barmah Forest virus
ccaccaaaaccaaaaaagaccca

SEQ ID NO: 1152542 - RNA, 20 nt, Barmah Forest virus
caaaauugcacggcagaaug

SEQ ID NO: 1152543 - RNA, 13 nt, Barmah Forest virus
uuaguauagucau

SEQ ID NO: 1152544 - RNA, 15 nt, Barmah Forest virus
cuauuuuugacaaua

SEQ ID NO: 1152545 - RNA, 12 nt, Barmah Forest virus
agcaccauguga

SEQ ID NO: 1152546 - RNA, 14 nt, Barmah Forest virus
uguuaacagcacug

SEQ ID NO: 1152547 - RNA, 20 nt, Barmah Forest virus
agauuacaaugcauguaccg

SEQ ID NO: 1152548 - RNA, 16 nt, Barmah Forest virus
aagucaugaaaccagc

SEQ ID NO: 1152549 - RNA, 20 nt, Barmah Forest virus
uucugcagugcuaaauguag

SEQ ID NO: 1152550 - RNA, 14 nt, Barmah Forest virus
gaagauccaagugu

SEQ ID NO: 1152551 - RNA, 19 nt, Barmah Forest virus
ccaagaugaagacagaaga

SEQ ID NO: 1152552 - RNA, 18 nt, Barmah Forest virus
agagcacagaagaagccc

SEQ ID NO: 1152553 - RNA, 21 nt, Barmah Forest virus
caaauuuggagcuaugaugaa

SEQ ID NO: 1152554 - RNA, 23 nt, Barmah Forest virus
gacccgcauaacaccugaagaau

SEQ ID NO: 1152555 - RNA, 22 nt, Barmah Forest virus
cagacacggguccaggccaccu

SEQ ID NO: 1152556 - RNA, 18 nt, Barmah Forest virus
aguguauuacauaugcag

SEQ ID NO: 1152557 - RNA, 15 nt, Barmah Forest virus
uguaguauuaaguau

SEQ ID NO: 1152558 - RNA, 14 nt, Barmah Forest virus
aaagauccaugugc

SEQ ID NO: 1152559 - RNA, 12 nt, Barmah Forest virus
aauugacauuca

SEQ ID NO: 1152560 - RNA, 22 nt, Barmah Forest virus
auaaccugauaccacuacacca

SEQ ID NO: 1152561 - RNA, 22 nt, Barmah Forest virus
cagaacuaguuuuauuggcacu

SEQ ID NO: 1152562 - RNA, 17 nt, Barmah Forest virus
ucccaucagacagacuu

SEQ ID NO: 1152563 - RNA, 21 nt, Barmah Forest virus
ccaagcacaccgaagagagac

SEQ ID NO: 1152564 - RNA, 17 nt, Barmah Forest virus
auucccugcaaaacuua

SEQ ID NO: 1152565 - RNA, 18 nt, Barmah Forest virus
aaacaccuuacaaaaugu

SEQ ID NO: 1152566 - RNA, 20 nt, Barmah Forest virus
agacgauggagaccagcacc

SEQ ID NO: 1152567 - RNA, 13 nt, Barmah Forest virus
cgacaauccagaa

SEQ ID NO: 1152568 - RNA, 16 nt, Barmah Forest virus
cuaugccguacaccau

SEQ ID NO: 1152569 - RNA, 17 nt, Barmah Forest virus
caucacaguacuagcga

SEQ ID NO: 1152570 - RNA, 13 nt, Barmah Forest virus
ggcacaagacccg

SEQ ID NO: 1152571 - RNA, 15 nt, Barmah Forest virus
cuaagaacuugaagu

SEQ ID NO: 1152572 - RNA, 19 nt, Barmah Forest virus
ccaaaagaagaaguccaaa

SEQ ID NO: 1152573 - RNA, 11 nt, Barmah Forest virus
gcuaaauguag

SEQ ID NO: 1152574 - RNA, 21 nt, Barmah Forest virus
acuguaaaagaagguacugcu

SEQ ID NO: 1152575 - RNA, 20 nt, Barmah Forest virus
ggccauauaaccccugaaua

SEQ ID NO: 1152576 - RNA, 23 nt, Barmah Forest virus
gcggaucacuugccaugguaagu

SEQ ID NO: 1152577 - RNA, 17 nt, Barmah Forest virus
ccggcuucaggcaaugu

SEQ ID NO: 1152578 - RNA, 16 nt, Barmah Forest virus
auauaaaauuacugau

SEQ ID NO: 1152579 - RNA, 17 nt, Barmah Forest virus
aagagauuacaaugcau

SEQ ID NO: 1152580 - RNA, 17 nt, Barmah Forest virus
cauagucucacauuacu

SEQ ID NO: 1152581 - RNA, 12 nt, Barmah Forest virus
agacccugcagg

SEQ ID NO: 1152582 - RNA, 19 nt, Barmah Forest virus
gccuaagaaaccaacccaa

SEQ ID NO: 1152583 - RNA, 16 nt, Barmah Forest virus
aagaaaccaacccaaa

SEQ ID NO: 1152584 - RNA, 14 nt, Barmah Forest virus
cuacagcagagauc

SEQ ID NO: 1152585 - RNA, 23 nt, Barmah Forest virus
aguaccauugaaucgaaacgccc

SEQ ID NO: 1152586 - RNA, 21 nt, Barmah Forest virus
aguagaacuguuaacagcacu

SEQ ID NO: 1152587 - RNA, 14 nt, Barmah Forest virus
uuuuaaauugaacu

SEQ ID NO: 1152588 - RNA, 18 nt, Barmah Forest virus
gaacucuacggagaugua

SEQ ID NO: 1152589 - RNA, 22 nt, Barmah Forest virus
aaguauuaugaauuacuugacu

SEQ ID NO: 1152590 - RNA, 14 nt, Barmah Forest virus
gcauaacaccugaa

SEQ ID NO: 1152591 - RNA, 18 nt, Barmah Forest virus
aaggagcaaguaccaaau

SEQ ID NO: 1152592 - RNA, 12 nt, Barmah Forest virus
aaguugaaagga

SEQ ID NO: 1152593 - RNA, 17 nt, Barmah Forest virus
uaccaaucuagaaaagu

SEQ ID NO: 1152594 - RNA, 15 nt, Barmah Forest virus
ucgcagacccacuga

SEQ ID NO: 1152595 - RNA, 16 nt, Barmah Forest virus
ugucacacagaugaga

SEQ ID NO: 1152596 - RNA, 16 nt, Barmah Forest virus
uauaaccccugaauag

SEQ ID NO: 1152597 - RNA, 12 nt, Barmah Forest virus
acucccaucaga

SEQ ID NO: 1152598 - RNA, 15 nt, Barmah Forest virus
aagagagaccaaagg

SEQ ID NO: 1152599 - RNA, 20 nt, Barmah Forest virus
gcccagguuuauuggcaaug

SEQ ID NO: 1152600 - RNA, 14 nt, Barmah Forest virus
gccgguaugcauga

SEQ ID NO: 1152601 - RNA, 14 nt, Barmah Forest virus
aaaagucaagauga

SEQ ID NO: 1152602 - RNA, 19 nt, Barmah Forest virus
ucauacuuggacccacaga

SEQ ID NO: 1152603 - RNA, 17 nt, Barmah Forest virus
ccaaaagaagaagucca

SEQ ID NO: 1152604 - RNA, 13 nt, Barmah Forest virus
uaaguauguagua

SEQ ID NO: 1152605 - RNA, 16 nt, Barmah Forest virus
acuggaaaaaagagaa

SEQ ID NO: 1152606 - RNA, 10 nt, Barmah Forest virus
gcggaggcgc

SEQ ID NO: 1152607 - RNA, 18 nt, Barmah Forest virus
gaugagguguacaaugaa

SEQ ID NO: 1152608 - RNA, 17 nt, Barmah Forest virus
ucaaguacaaaugcacu

SEQ ID NO: 1152609 - RNA, 19 nt, Barmah Forest virus
cgguagauaugaagagaga

SEQ ID NO: 1152610 - RNA, 22 nt, Barmah Forest virus
cagaugagagaacuaccaacau

SEQ ID NO: 1152611 - RNA, 23 nt, Barmah Forest virus
gauaucuuaaggagcaaguacca

SEQ ID NO: 1152612 - RNA, 17 nt, Barmah Forest virus
cuacaacccaagcagaa

SEQ ID NO: 1152613 - RNA, 22 nt, Barmah Forest virus
gaagcccaagaagacaccacca

SEQ ID NO: 1152614 - RNA, 17 nt, Barmah Forest virus
ccucagaggucugucua

SEQ ID NO: 1152615 - RNA, 22 nt, Barmah Forest virus
ccgaaguuacggaggugaaagg

SEQ ID NO: 1152616 - RNA, 13 nt, Barmah Forest virus
caguccagagaua

SEQ ID NO: 1152617 - RNA, 15 nt, Barmah Forest virus
gcacugcccacaagg

SEQ ID NO: 1152618 - RNA, 20 nt, Barmah Forest virus
guauuggcagcggccaccaa

SEQ ID NO: 1152619 - RNA, 22 nt, Barmah Forest virus
acaaaauugcacggcagaaugu

SEQ ID NO: 1152620 - RNA, 21 nt, Barmah Forest virus
cuaugguagacgauggagacc

SEQ ID NO: 1152621 - RNA, 16 nt, Barmah Forest virus
ggauguccccauccaa

SEQ ID NO: 1152622 - RNA, 21 nt, Barmah Forest virus
ccagcaccaguccagagauac

SEQ ID NO: 1152623 - RNA, 18 nt, Barmah Forest virus
gaccacuacuaccacccc

SEQ ID NO: 1152624 - RNA, 17 nt, Barmah Forest virus
aaccuaaugaauuugau

SEQ ID NO: 1152625 - RNA, 17 nt, Barmah Forest virus
uccccucauuaguucag

SEQ ID NO: 1152626 - RNA, 20 nt, Barmah Forest virus
gaccagguuacgcaggccuc

SEQ ID NO: 1152627 - RNA, 24 nt, Barmah Forest virus
caagcuagguaagccauugccacu

SEQ ID NO: 1152628 - RNA, 15 nt, Barmah Forest virus
uaucagaucccaaaa

SEQ ID NO: 1152629 - RNA, 17 nt, Barmah Forest virus
cagcacgugugcaguca

SEQ ID NO: 1152630 - RNA, 16 nt, Barmah Forest virus
caaguacaaaugcacu

SEQ ID NO: 1152631 - RNA, 12 nt, Barmah Forest virus
ugauuaagucag

SEQ ID NO: 1152632 - RNA, 20 nt, Barmah Forest virus
cacaguacuagcgagucuag

SEQ ID NO: 1152633 - RNA, 20 nt, Barmah Forest virus
uagucucacauuacuaugac

SEQ ID NO: 1152634 - RNA, 22 nt, Human
cugagcuugcagagaugaggcc

SEQ ID NO: 1152635 - RNA, 21 nt, Human
cugaccccucauagcccucac

SEQ ID NO: 1152636 - RNA, 20 nt, Human
cugaccccucauagcccuca

SEQ ID NO: 1152637 - RNA, 17 nt, Human
cugaccccucauagccc

SEQ ID NO: 1152638 - RNA, 20 nt, Human
cucguauaugucucaggucc

SEQ ID NO: 1152639 - RNA, 18 nt, Human
cucguauaugucucaggu

SEQ ID NO: 1152640 - RNA, 17 nt, Human
cucgaacuccugaccuu

SEQ ID NO: 1152641 - RNA, 16 nt, Human
cucgaacuccugaccu

SEQ ID NO: 1152642 - RNA, 13 nt, Human
cucgaacuccuga

SEQ ID NO: 1152643 - RNA, 21 nt, Human
cuaaagaagguuucagaaaga

SEQ ID NO: 1152644 - RNA, 14 nt, Human
cguuaccaggcagg

SEQ ID NO: 1152645 - RNA, 22 nt, Human
cguguccccuauccuacuuccc

SEQ ID NO: 1152646 - RNA, 21 nt, Human
cgauacaccgggccuggagaa

SEQ ID NO: 1152647 - RNA, 20 nt, Human
cgauacaccgggccuggaga

SEQ ID NO: 1152648 - RNA, 18 nt, Human
cgauacaccgggccugga

SEQ ID NO: 1152649 - RNA, 19 nt, Human
cgaguagcugagauuauag

SEQ ID NO: 1152650 - RNA, 18 nt, Human
cgcuggccgggaccccga

SEQ ID NO: 1152651 - RNA, 23 nt, Human
cgcuggccgggaccccgagccug

SEQ ID NO: 1152652 - RNA, 16 nt, Human
cucaccucccccaucu

SEQ ID NO: 1152653 - RNA, 14 nt, Human
cucacccuggggcu

SEQ ID NO: 1152654 - RNA, 18 nt, Human
cuaccuuccaguuccuca

SEQ ID NO: 1152655 - RNA, 15 nt, Human
cuaggguccugggga

SEQ ID NO: 1152656 - RNA, 14 nt, Human
cuaggguccugggg

SEQ ID NO: 1152657 - RNA, 13 nt, Human
cuaggguccuggg

SEQ ID NO: 1152658 - RNA, 21 nt, Human
cuagacccacuggacucaccu

SEQ ID NO: 1152659 - RNA, 13 nt, Human
ccuaauuccacag

SEQ ID NO: 1152660 - RNA, 21 nt, Human
ccuaaugcgcaggcuggcccu

SEQ ID NO: 1152661 - RNA, 14 nt, Human
ccgucccccucugg

SEQ ID NO: 1152662 - RNA, 22 nt, Human
ccgacagccuggcacagggcag

SEQ ID NO: 1152663 - RNA, 15 nt, Human
ccgacagccuggcac

SEQ ID NO: 1152664 - RNA, 14 nt, Human
ccgacagccuggca

SEQ ID NO: 1152665 - RNA, 13 nt, Human
ccgacagccuggc

SEQ ID NO: 1152666 - RNA, 12 nt, Human
ccgacagccugg

SEQ ID NO: 1152667 - RNA, 20 nt, Human
ccucggacuuagcugggaga

SEQ ID NO: 1152668 - RNA, 19 nt, Human
ccucggacuuagcugggag

SEQ ID NO: 1152669 - RNA, 19 nt, Human
ccuccuaucagaaguuucu

SEQ ID NO: 1152670 - RNA, 20 nt, Human
ccucccuuggggccuaugca

SEQ ID NO: 1152671 - RNA, 21 nt, Human
ccucauuccaccuucccaugc

SEQ ID NO: 1152672 - RNA, 22 nt, Human
ccugguuuccugcccugggagg

SEQ ID NO: 1152673 - RNA, 21 nt, Human
ccugguuuccugcccugggag

SEQ ID NO: 1152674 - RNA, 20 nt, Human
ccugguuuccugcccuggga

SEQ ID NO: 1152675 - RNA, 19 nt, Human
ccugguuuccugcccuggg

SEQ ID NO: 1152676 - RNA, 18 nt, Human
ccugguuuccugcccugg

SEQ ID NO: 1152677 - RNA, 18 nt, Human
ccuggggaaccugacccc

SEQ ID NO: 1152678 - RNA, 22 nt, Human
ccucuugccacugccucuuccu

SEQ ID NO: 1152679 - RNA, 23 nt, Human
ccucuugccacugccucuuccuc

SEQ ID NO: 1152680 - RNA, 18 nt, Human
ccugaccccucauagccc

SEQ ID NO: 1152681 - RNA, 20 nt, Human
ccugcugagucccaggcuga

SEQ ID NO: 1152682 - RNA, 19 nt, Human
ccugcugagucccaggcug

SEQ ID NO: 1152683 - RNA, 18 nt, Human
ccugcugagucccaggcu

SEQ ID NO: 1152684 - RNA, 17 nt, Human
ccugccucagccucccg

SEQ ID NO: 1152685 - RNA, 18 nt, Human
ccagucccccugccccag

SEQ ID NO: 1152686 - RNA, 21 nt, Human
ccaggcugcucuugaacuccu

SEQ ID NO: 1152687 - RNA, 22 nt, Human
ccauuucauuugugccagaaug

SEQ ID NO: 1152688 - RNA, 21 nt, Human
ccauuucauuugugccagaau

SEQ ID NO: 1152689 - RNA, 21 nt, Human
ccauaaucuggacuccucugu

SEQ ID NO: 1152690 - RNA, 14 nt, Human
ccauaaucuggacu

SEQ ID NO: 1152691 - RNA, 19 nt, Human
ccaugucgccucugcauuc

SEQ ID NO: 1152692 - RNA, 17 nt, Human
ccaugucgccucugcau

SEQ ID NO: 1152693 - RNA, 16 nt, Human
ccaugucgccucugca

SEQ ID NO: 1152694 - RNA, 15 nt, Human
ccaugucgccucugc

SEQ ID NO: 1152695 - RNA, 12 nt, Human
ccaugucgccuc

SEQ ID NO: 1152696 - RNA, 21 nt, Human
ccccugcaaagcccagcuuga

SEQ ID NO: 1152697 - RNA, 20 nt, Human
ccccugcaaagcccagcuug

SEQ ID NO: 1152698 - RNA, 18 nt, Human
ccccugcaaagcccagcu

SEQ ID NO: 1152699 - RNA, 18 nt, Human
ccccucuggcuccagcug

SEQ ID NO: 1152700 - RNA, 16 nt, Human
ccccucuggcuccagc

SEQ ID NO: 1152701 - RNA, 20 nt, Human
ccccucugcccugcggguca

SEQ ID NO: 1152702 - RNA, 15 nt, Human
ccccucugcccugcg

SEQ ID NO: 1152703 - RNA, 23 nt, Human
ccccucugcccugcgggucacag

SEQ ID NO: 1152704 - RNA, 20 nt, Human
cccggcuaauuuuuguauuu

SEQ ID NO: 1152705 - RNA, 16 nt, Human
cccucacccuggggcu

SEQ ID NO: 1152706 - RNA, 16 nt, Human
cccuccucucugcccu

SEQ ID NO: 1152707 - RNA, 17 nt, Human
ccccagaggcuggguga

SEQ ID NO: 1152708 - RNA, 13 nt, Human
cccaggcuggagu

SEQ ID NO: 1152709 - RNA, 18 nt, Human
cccaggcugagccucagu

SEQ ID NO: 1152710 - RNA, 17 nt, Human
cccaggcugagccucag

SEQ ID NO: 1152711 - RNA, 16 nt, Human
cccaggcugagccuca

SEQ ID NO: 1152712 - RNA, 16 nt, Human
cccacuggacucaccu

SEQ ID NO: 1152713 - RNA, 21 nt, Human
caaaccccgaccaccugccca

SEQ ID NO: 1152714 - RNA, 18 nt, Human
caaaccccgaccaccugc

SEQ ID NO: 1152715 - RNA, 22 nt, Human
caacacacagauuugagcucag

SEQ ID NO: 1152716 - RNA, 21 nt, Human
caacacacagauuugagcuca

SEQ ID NO: 1152717 - RNA, 18 nt, Human
caacuaauuuuuguauuu

SEQ ID NO: 1152718 - RNA, 16 nt, Human
auuaggauuucaugau

SEQ ID NO: 1152719 - RNA, 14 nt, Human
auuaggauuucaug

SEQ ID NO: 1152720 - RNA, 18 nt, Human
auuccugcauuugugaaa

SEQ ID NO: 1152721 - RNA, 15 nt, Human
auuccugcauuugug

SEQ ID NO: 1152722 - RNA, 19 nt, Human
cacuuguugauuaauggaa

SEQ ID NO: 1152723 - RNA, 13 nt, Human
cacugggcuucua

SEQ ID NO: 1152724 - RNA, 19 nt, Human
cagaaguuucucagcuccc

SEQ ID NO: 1152725 - RNA, 23 nt, Human
caccuuuauucuggcagaggagg

SEQ ID NO: 1152726 - RNA, 19 nt, Human
caccugcccaaccugcucu

SEQ ID NO: 1152727 - RNA, 18 nt, Human
caccugcccaaccugcuc

SEQ ID NO: 1152728 - RNA, 13 nt, Human
caccugcccaacc

SEQ ID NO: 1152729 - RNA, 12 nt, Human
caccuacugagu

SEQ ID NO: 1152730 - RNA, 15 nt, Human
caaggcucugagcaa

SEQ ID NO: 1152731 - RNA, 20 nt, Human
caauaaaaucuugaaaaugc

SEQ ID NO: 1152732 - RNA, 23 nt, Human
caaucccaccaacccucagagcc

SEQ ID NO: 1152733 - RNA, 22 nt, Human
caaucccaccaacccucagagc

SEQ ID NO: 1152734 - RNA, 17 nt, Human
caaucccaccaacccuc

SEQ ID NO: 1152735 - RNA, 16 nt, Human
caaucccaccaacccu

SEQ ID NO: 1152736 - RNA, 13 nt, Human
cacagaacccuug

SEQ ID NO: 1152737 - RNA, 13 nt, Human
caccaacccucag

SEQ ID NO: 1152738 - RNA, 21 nt, Human
caccagggaaggggacaagga

SEQ ID NO: 1152739 - RNA, 18 nt, Human
caccagggaaggggacaa

SEQ ID NO: 1152740 - RNA, 13 nt, Human
caccagggaaggg

SEQ ID NO: 1152741 - RNA, 12 nt, Human
cagcugccugca

SEQ ID NO: 1152742 - RNA, 21 nt, Human
cagcucccaaggcucugagca

SEQ ID NO: 1152743 - RNA, 19 nt, Human
cagugggacagggcauggc

SEQ ID NO: 1152744 - RNA, 14 nt, Human
cagucucccucccu

SEQ ID NO: 1152745 - RNA, 23 nt, Human
caggagggagggggaaggcaggg

SEQ ID NO: 1152746 - RNA, 15 nt, Human
caggagggaggggga

SEQ ID NO: 1152747 - RNA, 13 nt, Human
cagggagggccug

SEQ ID NO: 1152748 - RNA, 12 nt, Human
cagggagggccu

SEQ ID NO: 1152749 - RNA, 20 nt, Human
caggcuggcccugcccuggu

SEQ ID NO: 1152750 - RNA, 19 nt, Human
caggcuggcccugcccugg

SEQ ID NO: 1152751 - RNA, 18 nt, Human
caggcuggcccugcccug

SEQ ID NO: 1152752 - RNA, 17 nt, Human
caggcgccccuuccccc

SEQ ID NO: 1152753 - RNA, 15 nt, Human
caggcgccccuuccc

SEQ ID NO: 1152754 - RNA, 20 nt, Human
caggccugccuguucccauu

SEQ ID NO: 1152755 - RNA, 17 nt, Human
cagggagggccugggcc

SEQ ID NO: 1152756 - RNA, 16 nt, Human
cagggagggccugggc

SEQ ID NO: 1152757 - RNA, 14 nt, Human
cagggagggccugg

SEQ ID NO: 1152758 - RNA, 13 nt, Human
cauggccaggugg

SEQ ID NO: 1152759 - RNA, 14 nt, Human
cauggccagguggc

SEQ ID NO: 1152760 - RNA, 13 nt, Human
cauucucacuccu

SEQ ID NO: 1152761 - RNA, 18 nt, Human
cauucuagguuugcaaga

SEQ ID NO: 1152762 - RNA, 14 nt, Human
cauucucacuccua

SEQ ID NO: 1152763 - RNA, 18 nt, Human
ccaaggaugccccguccc

SEQ ID NO: 1152764 - RNA, 18 nt, Human
ccaaaugcagcuuuaaaa

SEQ ID NO: 1152765 - RNA, 15 nt, Human
ccaaaugcagcuuua

SEQ ID NO: 1152766 - RNA, 13 nt, Human
ccaaaugcagcuu

SEQ ID NO: 1152767 - RNA, 16 nt, Human
cauuugugaaaugaug

SEQ ID NO: 1152768 - RNA, 14 nt, Human
cauuugugaaauga

SEQ ID NO: 1152769 - RNA, 15 nt, Human
ccaccacgcccggcu

SEQ ID NO: 1152770 - RNA, 22 nt, Human
ccacacuucaggcucuucuccu

SEQ ID NO: 1152771 - RNA, 21 nt, Human
ccacacuucaggcucuucucc

SEQ ID NO: 1152772 - RNA, 20 nt, Human
ccacacuucaggcucuucuc

SEQ ID NO: 1152773 - RNA, 16 nt, Human
ccacacuucaggcucu

SEQ ID NO: 1152774 - RNA, 22 nt, Human
ccaccgggcugggagcucugca

SEQ ID NO: 1152775 - RNA, 19 nt, Human
ccaccgggcugggagcucu

SEQ ID NO: 1152776 - RNA, 20 nt, Human
cugaucugaugcaagcaaga

SEQ ID NO: 1152777 - RNA, 24 nt, Human
cugccuccucuucaacugaccagc

SEQ ID NO: 1152778 - RNA, 15 nt, Human
cugccuccucuucaa

SEQ ID NO: 1152779 - RNA, 14 nt, Human
cugccuccucuuca

SEQ ID NO: 1152780 - RNA, 13 nt, Human
cugccuccucuuc

SEQ ID NO: 1152781 - RNA, 22 nt, Human
cuggcagccgugccuucagcuc

SEQ ID NO: 1152782 - RNA, 21 nt, Human
cuggcagccgugccuucagcu

SEQ ID NO: 1152783 - RNA, 20 nt, Human
cuggcagccgugccuucagc

SEQ ID NO: 1152784 - RNA, 14 nt, Human
cuggcagaggaggg

SEQ ID NO: 1152785 - RNA, 16 nt, Human
cuggccgggagccuga

SEQ ID NO: 1152786 - RNA, 15 nt, Human
cuggcccugcccugg

SEQ ID NO: 1152787 - RNA, 14 nt, Human
cuggcccugcccug

SEQ ID NO: 1152788 - RNA, 13 nt, Human
cuggcccugcccu

SEQ ID NO: 1152789 - RNA, 11 nt, Human
cuggcccugcc

SEQ ID NO: 1152790 - RNA, 22 nt, Human
cuggguuccagcaauucuccug

SEQ ID NO: 1152791 - RNA, 14 nt, Human
cugggccagaauuu

SEQ ID NO: 1152792 - RNA, 12 nt, Human
cugggccagaau

SEQ ID NO: 1152793 - RNA, 16 nt, Human
cugguuuccugcccug

SEQ ID NO: 1152794 - RNA, 14 nt, Human
cugguuuccugccc

SEQ ID NO: 1152795 - RNA, 13 nt, Human
cugguuuccugcc

SEQ ID NO: 1152796 - RNA, 22 nt, Human
cuuacauuagcaguuugcuuug

SEQ ID NO: 1152797 - RNA, 21 nt, Human
cuuacauuagcaguuugcuuu

SEQ ID NO: 1152798 - RNA, 13 nt, Human
cuuagcugggaga

SEQ ID NO: 1152799 - RNA, 22 nt, Human
cuuccucugaggcugaaauuca

SEQ ID NO: 1152800 - RNA, 16 nt, Human
cuuccucugaggcuga

SEQ ID NO: 1152801 - RNA, 15 nt, Human
cuuccucugagccuu

SEQ ID NO: 1152802 - RNA, 14 nt, Human
cuuccucugagccu

SEQ ID NO: 1152803 - RNA, 15 nt, Human
cuuccucuccacugc

SEQ ID NO: 1152804 - RNA, 14 nt, Human
cuuccucuccacug

SEQ ID NO: 1152805 - RNA, 13 nt, Human
cuuccucuccacu

SEQ ID NO: 1152806 - RNA, 12 nt, Human
cuuuguaugcac

SEQ ID NO: 1152807 - RNA, 15 nt, Human
gaaaaugugugugug

SEQ ID NO: 1152808 - RNA, 12 nt, Human
gaaaaugugugu

SEQ ID NO: 1152809 - RNA, 20 nt, Human
gaacacauaauucaggaagc

SEQ ID NO: 1152810 - RNA, 17 nt, Human
gaacacauaauucagga

SEQ ID NO: 1152811 - RNA, 12 nt, Human
gaagcagcucuu

SEQ ID NO: 1152812 - RNA, 13 nt, Human
gacagccuggcac

SEQ ID NO: 1152813 - RNA, 12 nt, Human
gacagccuggca

SEQ ID NO: 1152814 - RNA, 11 nt, Human
gacagccuggc

SEQ ID NO: 1152815 - RNA, 17 nt, Human
gacaggguuucaccaug

SEQ ID NO: 1152816 - RNA, 22 nt, Human
gaccccuggcuuuucacugcug

SEQ ID NO: 1152817 - RNA, 21 nt, Human
gaccccuggcuuuucacugcu

SEQ ID NO: 1152818 - RNA, 13 nt, Human
gaccccuggcuuu

SEQ ID NO: 1152819 - RNA, 23 nt, Human
gacugucucaagagggcacuggu

SEQ ID NO: 1152820 - RNA, 22 nt, Human
gacugucucaagagggcacugg

SEQ ID NO: 1152821 - RNA, 21 nt, Human
gacugucucaagagggcacug

SEQ ID NO: 1152822 - RNA, 18 nt, Human
gacuguacuccucccagg

SEQ ID NO: 1152823 - RNA, 17 nt, Human
gacuguacuccucccag

SEQ ID NO: 1152824 - RNA, 16 nt, Human
gacuguacuccuccca

SEQ ID NO: 1152825 - RNA, 18 nt, Human
gaugucccaacuuguaaa

SEQ ID NO: 1152826 - RNA, 17 nt, Human
gaugucccaacuuguaa

SEQ ID NO: 1152827 - RNA, 23 nt, Human
gauggaggaaaaccaagccgugg

SEQ ID NO: 1152828 - RNA, 20 nt, Human
gauuucagcucacugcaacc

SEQ ID NO: 1152829 - RNA, 17 nt, Human
gauuucagcucacugca

SEQ ID NO: 1152830 - RNA, 15 nt, Human
gauuucagcucacug

SEQ ID NO: 1152831 - RNA, 18 nt, Human
gcaccuaccaccacgccc

SEQ ID NO: 1152832 - RNA, 17 nt, Human
gcaccuaccaccacgcc

SEQ ID NO: 1152833 - RNA, 23 nt, Human
gcacacagcacgggggccaagga

SEQ ID NO: 1152834 - RNA, 11 nt, Human
gcacacagcac

SEQ ID NO: 1152835 - RNA, 14 nt, Human
gcaggcuggcccug

SEQ ID NO: 1152836 - RNA, 13 nt, Human
gcaggcuggcccu

SEQ ID NO: 1152837 - RNA, 17 nt, Human
gcauggccagguggcca

SEQ ID NO: 1152838 - RNA, 14 nt, Human
gcauggccaggugg

SEQ ID NO: 1152839 - RNA, 13 nt, Human
gcauggccaggug

SEQ ID NO: 1152840 - RNA, 13 nt, Human
gcaucgcaaugua

SEQ ID NO: 1152841 - RNA, 23 nt, Human
gcaugucccuaccgagucucuuc

SEQ ID NO: 1152842 - RNA, 22 nt, Human
gccaagcaccuagccucgcucu

SEQ ID NO: 1152843 - RNA, 15 nt, Human
gcccucacccugggg

SEQ ID NO: 1152844 - RNA, 23 nt, Human
gcccuaaugcgcaggcuggcccu

SEQ ID NO: 1152845 - RNA, 20 nt, Human
gcccuaaugcgcaggcuggc

SEQ ID NO: 1152846 - RNA, 19 nt, Human
gcccuaaugcgcaggcugg

SEQ ID NO: 1152847 - RNA, 17 nt, Human
gcccuaaugcgcaggcu

SEQ ID NO: 1152848 - RNA, 16 nt, Human
gcccuaaugcgcaggc

SEQ ID NO: 1152849 - RNA, 22 nt, Human
gcccuguccugccuaaggcuga

SEQ ID NO: 1152850 - RNA, 18 nt, Human
gcccugcccugguuuccu

SEQ ID NO: 1152851 - RNA, 16 nt, Human
gcccugcccugguuuc

SEQ ID NO: 1152852 - RNA, 12 nt, Human
gcccugcccugg

SEQ ID NO: 1152853 - RNA, 11 nt, Human
gcccugcccug

SEQ ID NO: 1152854 - RNA, 12 nt, Human
gccucuuccucc

SEQ ID NO: 1152855 - RNA, 23 nt, Human
gccuguucccauucuugcauggc

SEQ ID NO: 1152856 - RNA, 19 nt, Human
gccuguucccauucuugca

SEQ ID NO: 1152857 - RNA, 23 nt, Human
gccuggcuccaaacccucgaggc

SEQ ID NO: 1152858 - RNA, 22 nt, Human
gcuaaucagcauucucacuccu

SEQ ID NO: 1152859 - RNA, 17 nt, Human
gcuaaucagcauucuca

SEQ ID NO: 1152860 - RNA, 16 nt, Human
gcuaaucagcauucuc

SEQ ID NO: 1152861 - RNA, 14 nt, Human
gcuaaucagcauuc

SEQ ID NO: 1152862 - RNA, 20 nt, Human
gcucacugcauccuccgccu

SEQ ID NO: 1152863 - RNA, 16 nt, Human
gcucacugcauccucc

SEQ ID NO: 1152864 - RNA, 21 nt, Human
gcuccugccaccacgcccggc

SEQ ID NO: 1152865 - RNA, 18 nt, Human
gcuccugccaccacgccc

SEQ ID NO: 1152866 - RNA, 12 nt, Human
gcuccugccacc

SEQ ID NO: 1152867 - RNA, 22 nt, Human
gcucccacaggcccuuccucuc

SEQ ID NO: 1152868 - RNA, 21 nt, Human
gcucccacaggcccuuccucu

SEQ ID NO: 1152869 - RNA, 20 nt, Human
gcucccacaggcccuuccuc

SEQ ID NO: 1152870 - RNA, 17 nt, Human
gcucccacaggcccuuc

SEQ ID NO: 1152871 - RNA, 16 nt, Human
gcucccacaggcccuu

SEQ ID NO: 1152872 - RNA, 19 nt, Human
ggacaaggacuaggguccu

SEQ ID NO: 1152873 - RNA, 15 nt, Human
ggaccccgagccugg

SEQ ID NO: 1152874 - RNA, 18 nt, Human
ggaccccgagccuggcuc

SEQ ID NO: 1152875 - RNA, 12 nt, Human
ggacuccucugu

SEQ ID NO: 1152876 - RNA, 22 nt, Human
ggagacugcugagucaacccaa

SEQ ID NO: 1152877 - RNA, 15 nt, Human
ggcacugguggcccg

SEQ ID NO: 1152878 - RNA, 19 nt, Human
ggccucacuaggcuucugg

SEQ ID NO: 1152879 - RNA, 17 nt, Human
ggcuccaaacccucgag

SEQ ID NO: 1152880 - RNA, 13 nt, Human
ggcucuucuccuu

SEQ ID NO: 1152881 - RNA, 12 nt, Human
ggcucuucuccu

SEQ ID NO: 1152882 - RNA, 16 nt, Human
ggcugccuuagaaccu

SEQ ID NO: 1152883 - RNA, 22 nt, Human
ggcugcccuggugcugccacac

SEQ ID NO: 1152884 - RNA, 19 nt, Human
ggcugcccuggugcugcca

SEQ ID NO: 1152885 - RNA, 16 nt, Human
ggcugcccuggugcug

SEQ ID NO: 1152886 - RNA, 15 nt, Human
ggcugcccuggugcu

SEQ ID NO: 1152887 - RNA, 14 nt, Human
ggcugcccuggugc

SEQ ID NO: 1152888 - RNA, 13 nt, Human
ggcugcccuggug

SEQ ID NO: 1152889 - RNA, 22 nt, Human
ggcugacagacagcccuccauc

SEQ ID NO: 1152890 - RNA, 16 nt, Human
ggcucuucuccuuuca

SEQ ID NO: 1152891 - RNA, 23 nt, Human
ggcucuucuccuuucacaaccuu

SEQ ID NO: 1152892 - RNA, 15 nt, Human
ggcucuucuccuuuc

SEQ ID NO: 1152893 - RNA, 14 nt, Human
ggcucuucuccuuu

SEQ ID NO: 1152894 - RNA, 13 nt, Human
gggacagagcaga

SEQ ID NO: 1152895 - RNA, 13 nt, Human
gggaaccugaccc

SEQ ID NO: 1152896 - RNA, 22 nt, Human
ggcuucccgcucagcccucccu

SEQ ID NO: 1152897 - RNA, 21 nt, Human
ggcuucccgcucagcccuccc

SEQ ID NO: 1152898 - RNA, 19 nt, Human
ggcuucccgcucagcccuc

SEQ ID NO: 1152899 - RNA, 18 nt, Human
ggcuucccgcucagcccu

SEQ ID NO: 1152900 - RNA, 17 nt, Human
ggcuucccgcucagccc

SEQ ID NO: 1152901 - RNA, 16 nt, Human
ggcuucccgcucagcc

SEQ ID NO: 1152902 - RNA, 15 nt, Human
ggcuucccgcucagc

SEQ ID NO: 1152903 - RNA, 14 nt, Human
ggcuucccgcucag

SEQ ID NO: 1152904 - RNA, 11 nt, Human
guagagacagg

SEQ ID NO: 1152905 - RNA, 14 nt, Human
guacuccucccagg

SEQ ID NO: 1152906 - RNA, 15 nt, Human
aaauauuccugcauu

SEQ ID NO: 1152907 - RNA, 12 nt, Human
aaagcugaaaac

SEQ ID NO: 1152908 - RNA, 15 nt, Human
aaagcugaaaacugc

SEQ ID NO: 1152909 - RNA, 23 nt, Human
aaagauggcugugccucugccug

SEQ ID NO: 1152910 - RNA, 22 nt, Human
aaagauggcugugccucugccu

SEQ ID NO: 1152911 - RNA, 21 nt, Human
aaagauggcugugccucugcc

SEQ ID NO: 1152912 - RNA, 22 nt, Human
aaacugcccccucugcccugcg

SEQ ID NO: 1152913 - RNA, 15 nt, Human
aaacauuaugaugug

SEQ ID NO: 1152914 - RNA, 13 nt, Human
ggggaaggcaggg

SEQ ID NO: 1152915 - RNA, 19 nt, Human
auuuuuuacagcugccugc

SEQ ID NO: 1152916 - RNA, 18 nt, Human
auuuuuuaaauugaauuc

SEQ ID NO: 1152917 - RNA, 18 nt, Human
auuuugccagugggaacu

SEQ ID NO: 1152918 - RNA, 23 nt, Human
auuugugaaaugauggugaaagu

SEQ ID NO: 1152919 - RNA, 18 nt, Human
auugguaaagaauggaag

SEQ ID NO: 1152920 - RNA, 11 nt, Human
auugacuucuu

SEQ ID NO: 1152921 - RNA, 22 nt, Human
auucucaugccucagccuccug

SEQ ID NO: 1152922 - RNA, 15 nt, Human
auucuagcuuugagc

SEQ ID NO: 1152923 - RNA, 23 nt, Human
auuccccgucucugguuccuccc

SEQ ID NO: 1152924 - RNA, 21 nt, Human
auuccagagaguggcuccucc

SEQ ID NO: 1152925 - RNA, 22 nt, Human
auucaggaagcagcuuucccca

SEQ ID NO: 1152926 - RNA, 19 nt, Human
auuauacccccugcaaagc

SEQ ID NO: 1152927 - RNA, 11 nt, Human
uuuguggaaaa

SEQ ID NO: 1152928 - RNA, 22 nt, Human
uuugugaaaugauggugaaagu

SEQ ID NO: 1152929 - RNA, 17 nt, Human
augucucugagcauuag

SEQ ID NO: 1152930 - RNA, 22 nt, Human
augucucaggucccugcagggc

SEQ ID NO: 1152931 - RNA, 17 nt, Human
augucucaggucccugc

SEQ ID NO: 1152932 - RNA, 15 nt, Human
augucgccucugcau

SEQ ID NO: 1152933 - RNA, 14 nt, Human
augucgccucugca

SEQ ID NO: 1152934 - RNA, 13 nt, Human
augucgccucugc

SEQ ID NO: 1152935 - RNA, 18 nt, Human
auguaugagguacaaccu

SEQ ID NO: 1152936 - RNA, 20 nt, Human
augguuccccuguucacucu

SEQ ID NO: 1152937 - RNA, 19 nt, Human
augguuccccuguucacuc

SEQ ID NO: 1152938 - RNA, 17 nt, Human
auggugaugaaauguaa

SEQ ID NO: 1152939 - RNA, 16 nt, Human
auggugaugaaaugua

SEQ ID NO: 1152940 - RNA, 14 nt, Human
auggugaugaaaug

SEQ ID NO: 1152941 - RNA, 17 nt, Human
augggggcacugaggac

SEQ ID NO: 1152942 - RNA, 23 nt, Human
uuucugggcaccggggccucgga

SEQ ID NO: 1152943 - RNA, 18 nt, Human
auggagacugucucaaga

SEQ ID NO: 1152944 - RNA, 16 nt, Human
augcuaagacucagug

SEQ ID NO: 1152945 - RNA, 16 nt, Human
augccucagccuccug

SEQ ID NO: 1152946 - RNA, 14 nt, Human
augcccuggaucca

SEQ ID NO: 1152947 - RNA, 17 nt, Human
augcagcaucuaaguaa

SEQ ID NO: 1152948 - RNA, 11 nt, Human
augaagaggag

SEQ ID NO: 1152949 - RNA, 11 nt, Human
uuggagacaga

SEQ ID NO: 1152950 - RNA, 12 nt, Human
uugcuccuugac

SEQ ID NO: 1152951 - RNA, 21 nt, Human
aucucuucuggguuccuuccu

SEQ ID NO: 1152952 - RNA, 15 nt, Human
aucuccacuccagau

SEQ ID NO: 1152953 - RNA, 13 nt, Human
uugaaucacagua

SEQ ID NO: 1152954 - RNA, 13 nt, Human
uugaagccuuugu

SEQ ID NO: 1152955 - RNA, 19 nt, Human
auccuacaagacacaguga

SEQ ID NO: 1152956 - RNA, 18 nt, Human
auccuacaagacacagug

SEQ ID NO: 1152957 - RNA, 14 nt, Human
uucuuuuuuuguga

SEQ ID NO: 1152958 - RNA, 13 nt, Human
auccaucaggcca

SEQ ID NO: 1152959 - RNA, 17 nt, Human
uucuccuuucacaaccu

SEQ ID NO: 1152960 - RNA, 18 nt, Human
aucagaaguuucucagcu

SEQ ID NO: 1152961 - RNA, 18 nt, Human
uucucacuccuaccuggu

SEQ ID NO: 1152962 - RNA, 16 nt, Human
uucucacuccuaccug

SEQ ID NO: 1152963 - RNA, 21 nt, Human
uuccucugaggcugaaauuca

SEQ ID NO: 1152964 - RNA, 17 nt, Human
uuccucugagccuuggg

SEQ ID NO: 1152965 - RNA, 14 nt, Human
uuccucugagccuu

SEQ ID NO: 1152966 - RNA, 18 nt, Human
uuccuaauuccacagcug

SEQ ID NO: 1152967 - RNA, 17 nt, Human
uuccuaauuccacagcu

SEQ ID NO: 1152968 - RNA, 16 nt, Human
uuccuaauuccacagc

SEQ ID NO: 1152969 - RNA, 22 nt, Human
uucccgcucagcccucccugcc

SEQ ID NO: 1152970 - RNA, 21 nt, Human
uucccgcucagcccucccugc

SEQ ID NO: 1152971 - RNA, 18 nt, Human
uucccgcucagcccuccc

SEQ ID NO: 1152972 - RNA, 16 nt, Human
uucccgcucagcccuc

SEQ ID NO: 1152973 - RNA, 18 nt, Human
auagacccacaagaggca

SEQ ID NO: 1152974 - RNA, 18 nt, Human
auacucuuauagacaaca

SEQ ID NO: 1152975 - RNA, 20 nt, Human
uuauucacuuuuauuuagca

SEQ ID NO: 1152976 - RNA, 17 nt, Human
uuaguagagacaggguu

SEQ ID NO: 1152977 - RNA, 20 nt, Human
auaauucaggaagcagcuuu

SEQ ID NO: 1152978 - RNA, 15 nt, Human
auaacuauguugaua

SEQ ID NO: 1152979 - RNA, 18 nt, Human
auaaauugcuccuugaca

SEQ ID NO: 1152980 - RNA, 16 nt, Human
auaaauugcuccuuga

SEQ ID NO: 1152981 - RNA, 13 nt, Human
auaaauugcuccu

SEQ ID NO: 1152982 - RNA, 23 nt, Human
uuaagacauuuuuggaaggggac

SEQ ID NO: 1152983 - RNA, 18 nt, Human
uuaagacauuuuuggaag

SEQ ID NO: 1152984 - RNA, 15 nt, Human
aguuucucagcuccc

SEQ ID NO: 1152985 - RNA, 13 nt, Human
aguuucucagcuc

SEQ ID NO: 1152986 - RNA, 23 nt, Human
aguuacuaucaugucaaacguga

SEQ ID NO: 1152987 - RNA, 14 nt, Human
aguggggaggggcu

SEQ ID NO: 1152988 - RNA, 15 nt, Human
aguggggacagagca

SEQ ID NO: 1152989 - RNA, 17 nt, Human
aguggauggaaggggcu

SEQ ID NO: 1152990 - RNA, 22 nt, Human
uguuaaguugauggugaugaaa

SEQ ID NO: 1152991 - RNA, 22 nt, Human
uguuaacugagugccuuuuggu

SEQ ID NO: 1152992 - RNA, 16 nt, Human
uguuaacugagugccu

SEQ ID NO: 1152993 - RNA, 16 nt, Human
agugcccuccaggaua

SEQ ID NO: 1152994 - RNA, 14 nt, Human
agugcaucucagcc

SEQ ID NO: 1152995 - RNA, 21 nt, Human
agucucuucuccacuggaugg

SEQ ID NO: 1152996 - RNA, 19 nt, Human
agucucuucuccacuggau

SEQ ID NO: 1152997 - RNA, 19 nt, Human
ugugacuucagcucuguuu

SEQ ID NO: 1152998 - RNA, 18 nt, Human
ugugacuucagcucuguu

SEQ ID NO: 1152999 - RNA, 16 nt, Human
agucccccugccccag

SEQ ID NO: 1153000 - RNA, 20 nt, Human
agucccaggcugagccucag

SEQ ID NO: 1153001 - RNA, 19 nt, Human
agucccaggcugagccuca

SEQ ID NO: 1153002 - RNA, 18 nt, Human
agucccaggcugagccuc

SEQ ID NO: 1153003 - RNA, 17 nt, Human
agucccaggcugagccu

SEQ ID NO: 1153004 - RNA, 14 nt, Human
ugucgccucugcau

SEQ ID NO: 1153005 - RNA, 16 nt, Human
ugggcugcccuggugc

SEQ ID NO: 1153006 - RNA, 15 nt, Human
ugggcugcccuggug

SEQ ID NO: 1153007 - RNA, 14 nt, Human
ugggcugcccuggu

SEQ ID NO: 1153008 - RNA, 13 nt, Human
ugggcugcccugg

SEQ ID NO: 1153009 - RNA, 15 nt, Human
agggagggccugggc

SEQ ID NO: 1153010 - RNA, 13 nt, Human
agggagggccugg

SEQ ID NO: 1153011 - RNA, 17 nt, Human
agggcacugguggcccg

SEQ ID NO: 1153012 - RNA, 16 nt, Human
ugggacuggccucugc

SEQ ID NO: 1153013 - RNA, 14 nt, Human
ugggacuggccucu

SEQ ID NO: 1153014 - RNA, 18 nt, Human
agggagcaucagugcccu

SEQ ID NO: 1153015 - RNA, 23 nt, Human
aggcuucugguugaugccuguga

SEQ ID NO: 1153016 - RNA, 20 nt, Human
ugggaacaccauaggucacc

SEQ ID NO: 1153017 - RNA, 22 nt, Human
uggcugugccucugccugucuc

SEQ ID NO: 1153018 - RNA, 19 nt, Human
uggcugugccucugccugu

SEQ ID NO: 1153019 - RNA, 18 nt, Human
uggcugugccucugccug

SEQ ID NO: 1153020 - RNA, 17 nt, Human
uggcugugccucugccu

SEQ ID NO: 1153021 - RNA, 16 nt, Human
uggcugugccucugcc

SEQ ID NO: 1153022 - RNA, 15 nt, Human
uggcugugccucugc

SEQ ID NO: 1153023 - RNA, 14 nt, Human
uggcugugccucug

SEQ ID NO: 1153024 - RNA, 13 nt, Human
aggcuccugccac

SEQ ID NO: 1153025 - RNA, 14 nt, Human
aggcgccccuuccc

SEQ ID NO: 1153026 - RNA, 21 nt, Human
uggccucugcugauccuccca

SEQ ID NO: 1153027 - RNA, 13 nt, Human
uggcccugcccug

SEQ ID NO: 1153028 - RNA, 12 nt, Human
uggcccugcccu

SEQ ID NO: 1153029 - RNA, 20 nt, Human
aggccauuccccgucucugg

SEQ ID NO: 1153030 - RNA, 22 nt, Human
uggcagccgugccuucagcucu

SEQ ID NO: 1153031 - RNA, 21 nt, Human
uggcagccgugccuucagcuc

SEQ ID NO: 1153032 - RNA, 20 nt, Human
uggcagccgugccuucagcu

SEQ ID NO: 1153033 - RNA, 19 nt, Human
uggcagccgugccuucagc

SEQ ID NO: 1153034 - RNA, 18 nt, Human
uggcagccgugccuucag

SEQ ID NO: 1153035 - RNA, 17 nt, Human
uggcagccgugccuuca

SEQ ID NO: 1153036 - RNA, 16 nt, Human
uggcacagggcagugg

SEQ ID NO: 1153037 - RNA, 15 nt, Human
uggcacagggcagug

SEQ ID NO: 1153038 - RNA, 16 nt, Human
aggcagggagggccug

SEQ ID NO: 1153039 - RNA, 23 nt, Human
uggaggaaaaccaagccguggcu

SEQ ID NO: 1153040 - RNA, 21 nt, Human
uggaggaaaaccaagccgugg

SEQ ID NO: 1153041 - RNA, 16 nt, Human
aggcaacuugggaacu

SEQ ID NO: 1153042 - RNA, 16 nt, Human
ugcugcccagccucca

SEQ ID NO: 1153043 - RNA, 14 nt, Human
ugcugcccagccuc

SEQ ID NO: 1153044 - RNA, 22 nt, Human
ugcugccacacuucaggcucuu

SEQ ID NO: 1153045 - RNA, 19 nt, Human
ugcugccacacuucaggcu

SEQ ID NO: 1153046 - RNA, 16 nt, Human
ugcugccacacuucag

SEQ ID NO: 1153047 - RNA, 15 nt, Human
ugcugccacacuuca

SEQ ID NO: 1153048 - RNA, 22 nt, Human
ugcugagucccaggcugagccu

SEQ ID NO: 1153049 - RNA, 18 nt, Human
ugcugagucccaggcuga

SEQ ID NO: 1153050 - RNA, 15 nt, Human
ugcugagucccaggc

SEQ ID NO: 1153051 - RNA, 19 nt, Human
ugcucugaugaagaggagu

SEQ ID NO: 1153052 - RNA, 18 nt, Human
ugcucugaugaagaggag

SEQ ID NO: 1153053 - RNA, 21 nt, Human
ugcuauaacuauguugauaaa

SEQ ID NO: 1153054 - RNA, 21 nt, Human
ugccuuagaaccuuucuuaca

SEQ ID NO: 1153055 - RNA, 17 nt, Human
ugccuuagaaccuuucu

SEQ ID NO: 1153056 - RNA, 14 nt, Human
ugccuuagaaccuu

SEQ ID NO: 1153057 - RNA, 23 nt, Human
agcugggauuacaggcuccugcc

SEQ ID NO: 1153058 - RNA, 22 nt, Human
agcugggauuacaggcuccugc

SEQ ID NO: 1153059 - RNA, 21 nt, Human
agcugggauuacaggcuccug

SEQ ID NO: 1153060 - RNA, 18 nt, Human
agcugggauuacaggcuc

SEQ ID NO: 1153061 - RNA, 22 nt, Human
agcugggaucacauguggacuu

SEQ ID NO: 1153062 - RNA, 15 nt, Human
ugcccuuucugggca

SEQ ID NO: 1153063 - RNA, 22 nt, Human
agcucuaucaccaaggagccaa

SEQ ID NO: 1153064 - RNA, 18 nt, Human
ugccccgucccccucugg

SEQ ID NO: 1153065 - RNA, 16 nt, Human
ugccccgucccccucu

SEQ ID NO: 1153066 - RNA, 12 nt, Human
ugccccccagcc

SEQ ID NO: 1153067 - RNA, 17 nt, Human
ugcccaggccugccugu

SEQ ID NO: 1153068 - RNA, 15 nt, Human
ugcccaggccugccu

SEQ ID NO: 1153069 - RNA, 24 nt, Human
ugcccaaccugcucuccucuugcc

SEQ ID NO: 1153070 - RNA, 23 nt, Human
ugcccaaccugcucuccucuugc

SEQ ID NO: 1153071 - RNA, 22 nt, Human
ugcccaaccugcucuccucuug

SEQ ID NO: 1153072 - RNA, 18 nt, Human
ugcccaaccugcucuccu

SEQ ID NO: 1153073 - RNA, 20 nt, Human
ugccagucccccugccccag

SEQ ID NO: 1153074 - RNA, 19 nt, Human
ugccagucccccugcccca

SEQ ID NO: 1153075 - RNA, 17 nt, Human
ugccagucccccugccc

SEQ ID NO: 1153076 - RNA, 12 nt, Human
ugccacacuuca

SEQ ID NO: 1153077 - RNA, 23 nt, Human
ugccacugccucuuccucccuca

SEQ ID NO: 1153078 - RNA, 14 nt, Human
ugcauuuccugaca

SEQ ID NO: 1153079 - RNA, 20 nt, Human
agcgcccacuagacccacug

SEQ ID NO: 1153080 - RNA, 12 nt, Human
agccugcccucc

SEQ ID NO: 1153081 - RNA, 19 nt, Human
agccugaucaccugcccug

SEQ ID NO: 1153082 - RNA, 18 nt, Human
agccugaucaccugcccu

SEQ ID NO: 1153083 - RNA, 11 nt, Human
ugcauaaaaug

SEQ ID NO: 1153084 - RNA, 23 nt, Human
agccguuuguuccccaagacauu

SEQ ID NO: 1153085 - RNA, 23 nt, Human
agcccuuccaugucgccucugca

SEQ ID NO: 1153086 - RNA, 22 nt, Human
agcccuuccaugucgccucugc

SEQ ID NO: 1153087 - RNA, 19 nt, Human
agcccuuccaugucgccuc

SEQ ID NO: 1153088 - RNA, 14 nt, Human
agcccuucauuugg

SEQ ID NO: 1153089 - RNA, 13 nt, Human
agcccuucauuug

SEQ ID NO: 1153090 - RNA, 19 nt, Human
ugagguacaaccuguucug

SEQ ID NO: 1153091 - RNA, 15 nt, Human
ugagggauuaucuuu

SEQ ID NO: 1153092 - RNA, 13 nt, Human
agcaccagggaag

SEQ ID NO: 1153093 - RNA, 12 nt, Human
agcaccagggaa

SEQ ID NO: 1153094 - RNA, 10 nt, Human
agcaccaggg

SEQ ID NO: 1153095 - RNA, 21 nt, Human
agcacagcagccccugcacaa

SEQ ID NO: 1153096 - RNA, 21 nt, Human
ugagccaccgugccuggccac

SEQ ID NO: 1153097 - RNA, 20 nt, Human
ugagccaccgugccuggcca

SEQ ID NO: 1153098 - RNA, 19 nt, Human
ugagccaccgugccuggcc

SEQ ID NO: 1153099 - RNA, 18 nt, Human
ugagccaccgugccuggc

SEQ ID NO: 1153100 - RNA, 14 nt, Human
ugagccaccgugcc

SEQ ID NO: 1153101 - RNA, 15 nt, Human
ugagccaccacgccc

SEQ ID NO: 1153102 - RNA, 19 nt, Human
ugagcaaauguggcuccug

SEQ ID NO: 1153103 - RNA, 18 nt, Human
ugagcaaauguggcuccu

SEQ ID NO: 1153104 - RNA, 16 nt, Human
ugagcaaauguggcuc

SEQ ID NO: 1153105 - RNA, 16 nt, Human
agauucaaucccagga

SEQ ID NO: 1153106 - RNA, 20 nt, Human
agauuauaggcaccuaccac

SEQ ID NO: 1153107 - RNA, 23 nt, Human
ugaccccucauagcccucacccu

SEQ ID NO: 1153108 - RNA, 20 nt, Human
ugaccccucauagcccucac

SEQ ID NO: 1153109 - RNA, 19 nt, Human
ugaccccucauagcccuca

SEQ ID NO: 1153110 - RNA, 17 nt, Human
ugaccccucauagcccu

SEQ ID NO: 1153111 - RNA, 22 nt, Human
ugacccccaaccaaguggcucc

SEQ ID NO: 1153112 - RNA, 20 nt, Human
ugaccacacuccagcuggga

SEQ ID NO: 1153113 - RNA, 19 nt, Human
ugaccacacuccagcuggg

SEQ ID NO: 1153114 - RNA, 17 nt, Human
ugaccacacuccagcug

SEQ ID NO: 1153115 - RNA, 12 nt, Human
ugaccacacucc

SEQ ID NO: 1153116 - RNA, 22 nt, Human
ugacauuguagagcuucuggca

SEQ ID NO: 1153117 - RNA, 18 nt, Human
ugacauuguagagcuucu

SEQ ID NO: 1153118 - RNA, 18 nt, Human
agauaauucuagcuuuga

SEQ ID NO: 1153119 - RNA, 16 nt, Human
ugaaugcauaaaaugu

SEQ ID NO: 1153120 - RNA, 15 nt, Human
ugaaugcauaaaaug

SEQ ID NO: 1153121 - RNA, 22 nt, Human
agagcuucuguugcugccucau

SEQ ID NO: 1153122 - RNA, 21 nt, Human
agagcuucuguugcugccuca

SEQ ID NO: 1153123 - RNA, 20 nt, Human
agagcuucuguugcugccuc

SEQ ID NO: 1153124 - RNA, 19 nt, Human
agagcuucuguugcugccu

SEQ ID NO: 1153125 - RNA, 15 nt, Human
agagcuucuggcacu

SEQ ID NO: 1153126 - RNA, 12 nt, Human
agaccugccccu

SEQ ID NO: 1153127 - RNA, 13 nt, Human
agaccugccccuc

SEQ ID NO: 1153128 - RNA, 17 nt, Human
ucuucaaaaugagcccu

SEQ ID NO: 1153129 - RNA, 22 nt, Human
agacagaaucucgcucugucgc

SEQ ID NO: 1153130 - RNA, 18 nt, Human
agacagaaucucgcucug

SEQ ID NO: 1153131 - RNA, 24 nt, Human
ucuguccaggcacugcugcccagc

SEQ ID NO: 1153132 - RNA, 16 nt, Human
ucuggguuccuuccuc

SEQ ID NO: 1153133 - RNA, 12 nt, Human
ucugcagagcag

SEQ ID NO: 1153134 - RNA, 19 nt, Human
agaaaaauaugaccacacu

SEQ ID NO: 1153135 - RNA, 21 nt, Human
ucucuucuggguuccuuccuc

SEQ ID NO: 1153136 - RNA, 20 nt, Human
ucucuucuggguuccuuccu

SEQ ID NO: 1153137 - RNA, 19 nt, Human
ucucuucuggguuccuucc

SEQ ID NO: 1153138 - RNA, 18 nt, Human
ucucuucuggguuccuuc

SEQ ID NO: 1153139 - RNA, 22 nt, Human
ucucugcccuaaugcgcaggcu

SEQ ID NO: 1153140 - RNA, 11 nt, Human
ucucugcccua

SEQ ID NO: 1153141 - RNA, 21 nt, Human
acuuguugauuaauggaaaug

SEQ ID NO: 1153142 - RNA, 19 nt, Human
acuuguugauuaauggaaa

SEQ ID NO: 1153143 - RNA, 18 nt, Human
ucucccaaagugcuggga

SEQ ID NO: 1153144 - RNA, 15 nt, Human
acuguacuccuccca

SEQ ID NO: 1153145 - RNA, 14 nt, Human
acuguacuccuccc

SEQ ID NO: 1153146 - RNA, 13 nt, Human
acuguacuccucc

SEQ ID NO: 1153147 - RNA, 13 nt, Human
ucgaccugccucg

SEQ ID NO: 1153148 - RNA, 20 nt, Human
uccuuucacaaccuucugug

SEQ ID NO: 1153149 - RNA, 19 nt, Human
uccuuucacaaccuucugu

SEQ ID NO: 1153150 - RNA, 18 nt, Human
uccuuucacaaccuucug

SEQ ID NO: 1153151 - RNA, 16 nt, Human
uccuuucacaaccuuc

SEQ ID NO: 1153152 - RNA, 16 nt, Human
uccuuccucugaggcu

SEQ ID NO: 1153153 - RNA, 17 nt, Human
uccuuccucugagccuu

SEQ ID NO: 1153154 - RNA, 16 nt, Human
uccuuccucugagccu

SEQ ID NO: 1153155 - RNA, 23 nt, Human
acuggccucugcugauccuccca

SEQ ID NO: 1153156 - RNA, 14 nt, Human
acugcuggcugccu

SEQ ID NO: 1153157 - RNA, 13 nt, Human
acugcuggcugcc

SEQ ID NO: 1153158 - RNA, 12 nt, Human
acugcuggcugc

SEQ ID NO: 1153159 - RNA, 21 nt, Human
acugcugcccagccuccaagc

SEQ ID NO: 1153160 - RNA, 18 nt, Human
acugcugcccagccucca

SEQ ID NO: 1153161 - RNA, 16 nt, Human
acugcugcccagccuc

SEQ ID NO: 1153162 - RNA, 12 nt, Human
acugcucugaug

SEQ ID NO: 1153163 - RNA, 18 nt, Human
acugcagggacugccagu

SEQ ID NO: 1153164 - RNA, 17 nt, Human
acugcagggacugccag

SEQ ID NO: 1153165 - RNA, 16 nt, Human
acugcagggacugcca

SEQ ID NO: 1153166 - RNA, 18 nt, Human
uccugugacuucagcucu

SEQ ID NO: 1153167 - RNA, 23 nt, Human
uccuggggguucuuucuuccucu

SEQ ID NO: 1153168 - RNA, 22 nt, Human
uccuggggguucuuucuuccuc

SEQ ID NO: 1153169 - RNA, 21 nt, Human
uccuggggguucuuucuuccu

SEQ ID NO: 1153170 - RNA, 19 nt, Human
uccuggggaaccugacccc

SEQ ID NO: 1153171 - RNA, 18 nt, Human
uccuggggaaccugaccc

SEQ ID NO: 1153172 - RNA, 20 nt, Human
uccugaguagcugggauuac

SEQ ID NO: 1153173 - RNA, 22 nt, Human
acugcacagugcaucucagccc

SEQ ID NO: 1153174 - RNA, 18 nt, Human
acugcacagugcaucuca

SEQ ID NO: 1153175 - RNA, 16 nt, Human
acugcacagugcaucu

SEQ ID NO: 1153176 - RNA, 23 nt, Human
acugcaaccuucgccaccugggu

SEQ ID NO: 1153177 - RNA, 20 nt, Human
acugcaaccuucgccaccug

SEQ ID NO: 1153178 - RNA, 16 nt, Human
acugagugccuuuugg

SEQ ID NO: 1153179 - RNA, 15 nt, Human
acugaggaccagcca

SEQ ID NO: 1153180 - RNA, 16 nt, Human
uccucuccacugccuu

SEQ ID NO: 1153181 - RNA, 15 nt, Human
uccucuccacugccu

SEQ ID NO: 1153182 - RNA, 14 nt, Human
uccucuccacugcc

SEQ ID NO: 1153183 - RNA, 13 nt, Human
uccucuccacugc

SEQ ID NO: 1153184 - RNA, 12 nt, Human
uccucuccacug

SEQ ID NO: 1153185 - RNA, 22 nt, Human
uccuccccuccuccuggacucc

SEQ ID NO: 1153186 - RNA, 20 nt, Human
uccuccccuccuccuggacu

SEQ ID NO: 1153187 - RNA, 18 nt, Human
uccuccccuccuccugga

SEQ ID NO: 1153188 - RNA, 16 nt, Human
uccuccccuccuccug

SEQ ID NO: 1153189 - RNA, 13 nt, Human
acucugacaacag

SEQ ID NO: 1153190 - RNA, 22 nt, Human
ucccuucaaccauuccccaugg

SEQ ID NO: 1153191 - RNA, 21 nt, Human
ucccuucaaccauuccccaug

SEQ ID NO: 1153192 - RNA, 11 nt, Human
ucccuucaacc

SEQ ID NO: 1153193 - RNA, 23 nt, Human
acuccugcacacgcuccuuccuc

SEQ ID NO: 1153194 - RNA, 14 nt, Human
acuccuaccuggua

SEQ ID NO: 1153195 - RNA, 20 nt, Human
acuccagcuggguuggaaaa

SEQ ID NO: 1153196 - RNA, 23 nt, Human
ucccucauuccaccuucccaugc

SEQ ID NO: 1153197 - RNA, 20 nt, Human
ucccgcucagcccucccugc

SEQ ID NO: 1153198 - RNA, 16 nt, Human
ucccgcucagcccucc

SEQ ID NO: 1153199 - RNA, 15 nt, Human
ucccgcucagcccuc

SEQ ID NO: 1153200 - RNA, 14 nt, Human
ucccgcucagcccu

SEQ ID NO: 1153201 - RNA, 13 nt, Human
ucccgcucagccc

SEQ ID NO: 1153202 - RNA, 18 nt, Human
acuaucccggcugcccuu

SEQ ID NO: 1153203 - RNA, 17 nt, Human
acuaucccggcugcccu

SEQ ID NO: 1153204 - RNA, 16 nt, Human
acuaucccggcugccc

SEQ ID NO: 1153205 - RNA, 22 nt, Human
acuaucaugucaaacgugaaaa

SEQ ID NO: 1153206 - RNA, 15 nt, Human
uccccaagccuggca

SEQ ID NO: 1153207 - RNA, 23 nt, Human
uccagaccccuggcuuuucacug

SEQ ID NO: 1153208 - RNA, 18 nt, Human
uccagaccccuggcuuuu

SEQ ID NO: 1153209 - RNA, 17 nt, Human
uccagaccccuggcuuu

SEQ ID NO: 1153210 - RNA, 16 nt, Human
uccagaccccuggcuu

SEQ ID NO: 1153211 - RNA, 15 nt, Human
uccagaccccuggcu

SEQ ID NO: 1153212 - RNA, 16 nt, Human
accuucuguggcucac

SEQ ID NO: 1153213 - RNA, 15 nt, Human
accuucuguggcuca

SEQ ID NO: 1153214 - RNA, 13 nt, Human
accuucuguggcu

SEQ ID NO: 1153215 - RNA, 12 nt, Human
accuucuguggc

SEQ ID NO: 1153216 - RNA, 14 nt, Human
accuuagccugccc

SEQ ID NO: 1153217 - RNA, 23 nt, Human
accuggucacaggacucugccuc

SEQ ID NO: 1153218 - RNA, 22 nt, Human
accuggucacaggacucugccu

SEQ ID NO: 1153219 - RNA, 18 nt, Human
uccaagcuccaucuccac

SEQ ID NO: 1153220 - RNA, 15 nt, Human
uccaaaugcagcuuu

SEQ ID NO: 1153221 - RNA, 14 nt, Human
uccaaaugcagcuu

SEQ ID NO: 1153222 - RNA, 18 nt, Human
ucauuugugccagaaugc

SEQ ID NO: 1153223 - RNA, 19 nt, Human
accugcucuccucuugcca

SEQ ID NO: 1153224 - RNA, 18 nt, Human
accugcucuccucuugcc

SEQ ID NO: 1153225 - RNA, 24 nt, Human
accgagucucuucuccacuggaug

SEQ ID NO: 1153226 - RNA, 21 nt, Human
accgagucucuucuccacugg

SEQ ID NO: 1153227 - RNA, 20 nt, Human
accgagucucuucuccacug

SEQ ID NO: 1153228 - RNA, 17 nt, Human
accccuggcuuuucacu

SEQ ID NO: 1153229 - RNA, 15 nt, Human
accccuggcuuuuca

SEQ ID NO: 1153230 - RNA, 12 nt, Human
accccuggcuuu

SEQ ID NO: 1153231 - RNA, 19 nt, Human
ucagcccucccugccccuc

SEQ ID NO: 1153232 - RNA, 18 nt, Human
ucagcccucccugccccu

SEQ ID NO: 1153233 - RNA, 15 nt, Human
accauuccccauggg

SEQ ID NO: 1153234 - RNA, 24 nt, Human
ucacugcacagugcaucucagccc

SEQ ID NO: 1153235 - RNA, 22 nt, Human
ucacugcacagugcaucucagc

SEQ ID NO: 1153236 - RNA, 20 nt, Human
ucacugcacagugcaucuca

SEQ ID NO: 1153237 - RNA, 15 nt, Human
ucaccucccccaucu

SEQ ID NO: 1153238 - RNA, 13 nt, Human
ucaccucccccau

SEQ ID NO: 1153239 - RNA, 19 nt, Human
accaggcaacuugggaacu

SEQ ID NO: 1153240 - RNA, 14 nt, Human
uauuuauuuaguau

SEQ ID NO: 1153241 - RNA, 20 nt, Human
uauuuagcaccagggaaggg

SEQ ID NO: 1153242 - RNA, 22 nt, Human
acagcuaaucagcauucucacu

SEQ ID NO: 1153243 - RNA, 20 nt, Human
acagcuaaucagcauucuca

SEQ ID NO: 1153244 - RNA, 15 nt, Human
acagccuggcacagg

SEQ ID NO: 1153245 - RNA, 14 nt, Human
acagccuggcacag

SEQ ID NO: 1153246 - RNA, 18 nt, Human
acagcagccccugcacaa

SEQ ID NO: 1153247 - RNA, 14 nt, Human
acagacuucugaaa

SEQ ID NO: 1153248 - RNA, 13 nt, Human
acagacuucugaa

SEQ ID NO: 1153249 - RNA, 15 nt, Human
acagacagcccucca

SEQ ID NO: 1153250 - RNA, 13 nt, Human
acagacagcccuc

SEQ ID NO: 1153251 - RNA, 13 nt, Human
uagugaugguucc

SEQ ID NO: 1153252 - RNA, 21 nt, Human
acaaggacagccccuccucca

SEQ ID NO: 1153253 - RNA, 13 nt, Human
acaagacacagug

SEQ ID NO: 1153254 - RNA, 15 nt, Human
acaacaaccugguca

SEQ ID NO: 1153255 - RNA, 16 nt, Human
uagcaccagggaaggg

SEQ ID NO: 1153256 - RNA, 14 nt, Human
uagcaccagggaag

SEQ ID NO: 1153257 - RNA, 13 nt, Human
uagcaccagggaa

SEQ ID NO: 1153258 - RNA, 15 nt, Human
uagagcuucuggcac

SEQ ID NO: 1153259 - RNA, 14 nt, Human
aauuuuuguauuuu

SEQ ID NO: 1153260 - RNA, 12 nt, Human
aauugcuccuug

SEQ ID NO: 1153261 - RNA, 22 nt, Human
uacucuucaguuaagccuuugg

SEQ ID NO: 1153262 - RNA, 18 nt, Human
uacucuuauagacaacau

SEQ ID NO: 1153263 - RNA, 14 nt, Human
uacguuaccaggca

SEQ ID NO: 1153264 - RNA, 20 nt, Human
uacauuagcaguuugcuuug

SEQ ID NO: 1153265 - RNA, 19 nt, Human
uacauuagcaguuugcuuu

SEQ ID NO: 1153266 - RNA, 20 nt, Human
uacaauaaaaucuugaaaau

SEQ ID NO: 1153267 - RNA, 20 nt, Human
uaauuauacccccugcaaag

SEQ ID NO: 1153268 - RNA, 13 nt, Human
aaucuugaaaaug

SEQ ID NO: 1153269 - RNA, 13 nt, Human
uaauaccucccuu

SEQ ID NO: 1153270 - RNA, 22 nt, Human
uaacaacuaugauuuggaaaau

SEQ ID NO: 1153271 - RNA, 21 nt, Human
uaacaacuaugauuuggaaaa

SEQ ID NO: 1153272 - RNA, 16 nt, Human
uaacaacuaugauuug

SEQ ID NO: 1153273 - RNA, 20 nt, Human
uaaauaguaaaaauaaaauu

SEQ ID NO: 1153274 - RNA, 19 nt, Human
uaaauaguaaaaauaaaau

SEQ ID NO: 1153275 - RNA, 16 nt, Human
aauaaaguacaagagc

SEQ ID NO: 1153276 - RNA, 16 nt, Human
aauaaaaucuugaaaa

SEQ ID NO: 1153277 - RNA, 18 nt, Human
uaaagaguuaguuugagu

SEQ ID NO: 1153278 - RNA, 15 nt, Human
uaaagacaccuacug

SEQ ID NO: 1153279 - RNA, 14 nt, Human
uaaagaagguuuca

SEQ ID NO: 1153280 - RNA, 12 nt, Human
uaaacugccccc

SEQ ID NO: 1153281 - RNA, 19 nt, Human
uaaaauuaaagcugaaaac

SEQ ID NO: 1153282 - RNA, 18 nt, Human
uaaaauuaaagcugaaaa

SEQ ID NO: 1153283 - RNA, 16 nt, Human
uaaaauuaaagcugaa

SEQ ID NO: 1153284 - RNA, 14 nt, Human
aagucacugcacag

SEQ ID NO: 1153285 - RNA, 12 nt, Human
aagucacugcac

SEQ ID NO: 1153286 - RNA, 19 nt, Human
aagucaaggguaggguggg

SEQ ID NO: 1153287 - RNA, 14 nt, Human
guuucucagcuccc

SEQ ID NO: 1153288 - RNA, 19 nt, Human
aaggcugagaggagagaga

SEQ ID NO: 1153289 - RNA, 12 nt, Human
guugcugccuca

SEQ ID NO: 1153290 - RNA, 18 nt, Human
guuccccuguucacucua

SEQ ID NO: 1153291 - RNA, 17 nt, Human
guuccccuguucacucu

SEQ ID NO: 1153292 - RNA, 15 nt, Human
guuccccuguucacu

SEQ ID NO: 1153293 - RNA, 22 nt, Human
guguuuaagacauuuuuggaag

SEQ ID NO: 1153294 - RNA, 14 nt, Human
guguuuaagacauu

SEQ ID NO: 1153295 - RNA, 13 nt, Human
guguuuaagacau

SEQ ID NO: 1153296 - RNA, 19 nt, Human
guguguguaugcgugugug

SEQ ID NO: 1153297 - RNA, 12 nt, Human
aagcaaaugucu

SEQ ID NO: 1153298 - RNA, 21 nt, Human
guggcuucccgcucagcccuc

SEQ ID NO: 1153299 - RNA, 17 nt, Human
guggcccgacagccugg

SEQ ID NO: 1153300 - RNA, 16 nt, Human
guggcccgacagccug

SEQ ID NO: 1153301 - RNA, 23 nt, Human
aagaccccuuaccacugcucuga

SEQ ID NO: 1153302 - RNA, 12 nt, Human
aagaccagucca

SEQ ID NO: 1153303 - RNA, 23 nt, Human
aagaagguuucagaaagaagugg

SEQ ID NO: 1153304 - RNA, 13 nt, Human
aacuuguuuucug

SEQ ID NO: 1153305 - RNA, 15 nt, Human
aacuuguaaaugugg

SEQ ID NO: 1153306 - RNA, 16 nt, Human
gugccuggccacgccc

SEQ ID NO: 1153307 - RNA, 14 nt, Human
aacugaacucugac

SEQ ID NO: 1153308 - RNA, 17 nt, Human
gugagcaggcugugagu

SEQ ID NO: 1153309 - RNA, 15 nt, Human
gugagcaggcuguga

SEQ ID NO: 1153310 - RNA, 20 nt, Human
aacuagacucccaagcugga

SEQ ID NO: 1153311 - RNA, 17 nt, Human
aaccuguucugcuuucc

SEQ ID NO: 1153312 - RNA, 13 nt, Human
aaccuguucugcu

SEQ ID NO: 1153313 - RNA, 19 nt, Human
gucugaagucacugcacag

SEQ ID NO: 1153314 - RNA, 17 nt, Human
gucugaagucacugcac

SEQ ID NO: 1153315 - RNA, 16 nt, Human
gucugaagucacugca

SEQ ID NO: 1153316 - RNA, 16 nt, Human
aaccaagccguggcuu

SEQ ID NO: 1153317 - RNA, 16 nt, Human
gucucaggucccugca

SEQ ID NO: 1153318 - RNA, 15 nt, Human
gucucaggucccugc

SEQ ID NO: 1153319 - RNA, 22 nt, Human
gucucaagagggcacugguggc

SEQ ID NO: 1153320 - RNA, 20 nt, Human
gucucaagagggcacuggug

SEQ ID NO: 1153321 - RNA, 17 nt, Human
gucucaagagggcacug

SEQ ID NO: 1153322 - RNA, 15 nt, Human
gucucaagagggcac

SEQ ID NO: 1153323 - RNA, 20 nt, Human
gucgcccaggcuggagugca

SEQ ID NO: 1153324 - RNA, 15 nt, Human
gucgcccaggcugga

SEQ ID NO: 1153325 - RNA, 14 nt, Human
gucgcccaggcugg

SEQ ID NO: 1153326 - RNA, 14 nt, Human
gucccccucuggcu

SEQ ID NO: 1153327 - RNA, 12 nt, Human
gucccccucugg

SEQ ID NO: 1153328 - RNA, 21 nt, Human
auagguauaaguggugugugu

SEQ ID NO: 1153329 - RNA, 12 nt, Human
auaaagacaccu

SEQ ID NO: 1153330 - RNA, 13 nt, Human
aguuaagccuuug

SEQ ID NO: 1153331 - RNA, 14 nt, Human
aguuaagccuuugg

SEQ ID NO: 1153332 - RNA, 21 nt, Human
aguggcuccucccggugccca

SEQ ID NO: 1153333 - RNA, 17 nt, Human
aguggcuccucccggug

SEQ ID NO: 1153334 - RNA, 13 nt, Human
aguggcuccuccc

SEQ ID NO: 1153335 - RNA, 16 nt, Human
aguaugaauaaagaca

SEQ ID NO: 1153336 - RNA, 20 nt, Human
aguaugggacuggccucugc

SEQ ID NO: 1153337 - RNA, 17 nt, Human
aguaugggacuggccuc

SEQ ID NO: 1153338 - RNA, 18 nt, Human
agugaccauacuaauuau

SEQ ID NO: 1153339 - RNA, 22 nt, Human
aucuggacuccucuguccaggc

SEQ ID NO: 1153340 - RNA, 19 nt, Human
aucuggacuccucugucca

SEQ ID NO: 1153341 - RNA, 18 nt, Human
aucuggacuccucugucc

SEQ ID NO: 1153342 - RNA, 17 nt, Human
aucuggacuccucuguc

SEQ ID NO: 1153343 - RNA, 16 nt, Human
aucuggacuccucugu

SEQ ID NO: 1153344 - RNA, 15 nt, Human
aucuggacuccucug

SEQ ID NO: 1153345 - RNA, 16 nt, Human
aucucggcucacugca

SEQ ID NO: 1153346 - RNA, 15 nt, Human
aucucggcucacugc

SEQ ID NO: 1153347 - RNA, 14 nt, Human
aucucggcucacug

SEQ ID NO: 1153348 - RNA, 15 nt, Human
aucacauguggacuu

SEQ ID NO: 1153349 - RNA, 16 nt, Human
auccccaagccuggca

SEQ ID NO: 1153350 - RNA, 13 nt, Human
auccccaagccug

SEQ ID NO: 1153351 - RNA, 12 nt, Human
auccucccaggc

SEQ ID NO: 1153352 - RNA, 22 nt, Human
auggaggaaaaccaagccgugg

SEQ ID NO: 1153353 - RNA, 20 nt, Human
auggcugugccucugccugu

SEQ ID NO: 1153354 - RNA, 19 nt, Human
auggcugugccucugccug

SEQ ID NO: 1153355 - RNA, 13 nt, Human
augucuuccugga

SEQ ID NO: 1153356 - RNA, 13 nt, Human
agccguggcuucc

SEQ ID NO: 1153357 - RNA, 17 nt, Human
agccgugccuucagcuc

SEQ ID NO: 1153358 - RNA, 16 nt, Human
agccgugccuucagcu

SEQ ID NO: 1153359 - RNA, 15 nt, Human
agccgugccuucagc

SEQ ID NO: 1153360 - RNA, 21 nt, Human
agcccuccaucuaaacugccc

SEQ ID NO: 1153361 - RNA, 17 nt, Human
agcccucacccuggggc

SEQ ID NO: 1153362 - RNA, 23 nt, Human
agaguggcuccucccggugccca

SEQ ID NO: 1153363 - RNA, 19 nt, Human
agaguggcuccucccggug

SEQ ID NO: 1153364 - RNA, 17 nt, Human
agauggcugugccucug

SEQ ID NO: 1153365 - RNA, 14 nt, Human
agauggcugugccu

SEQ ID NO: 1153366 - RNA, 20 nt, Human
agcuucuguugcugccucau

SEQ ID NO: 1153367 - RNA, 22 nt, Human
aggauguacaaggacagccccu

SEQ ID NO: 1153368 - RNA, 20 nt, Human
aggauuaaauaauguaaaua

SEQ ID NO: 1153369 - RNA, 14 nt, Human
aggauuaaauaaug

SEQ ID NO: 1153370 - RNA, 19 nt, Human
agcuucuguugcugccuca

SEQ ID NO: 1153371 - RNA, 23 nt, Human
agcugagauuauaggcaccuacc

SEQ ID NO: 1153372 - RNA, 18 nt, Human
aggcccuuccucuccacu

SEQ ID NO: 1153373 - RNA, 17 nt, Human
aggcccuuccucuccac

SEQ ID NO: 1153374 - RNA, 15 nt, Human
aggcccuuccucucc

SEQ ID NO: 1153375 - RNA, 13 nt, Human
aggcccuuccucu

SEQ ID NO: 1153376 - RNA, 19 nt, Human
aggcccuuccucuccacug

SEQ ID NO: 1153377 - RNA, 21 nt, Human
aggcgugagccaccgugccug

SEQ ID NO: 1153378 - RNA, 17 nt, Human
agguacaaccuguucug

SEQ ID NO: 1153379 - RNA, 21 nt, Human
agguaaucgaccugccucggc

SEQ ID NO: 1153380 - RNA, 15 nt, Human
aggguccuggggaac

SEQ ID NO: 1153381 - RNA, 12 nt, Human
aggguccugggg

SEQ ID NO: 1153382 - RNA, 23 nt, Human
aggguccuggggaaccugacccc

SEQ ID NO: 1153383 - RNA, 21 nt, Human
aggguccuggggaaccugacc

SEQ ID NO: 1153384 - RNA, 22 nt, Human
acccccugcaaagcccagcuug

SEQ ID NO: 1153385 - RNA, 20 nt, Human
acccccugcaaagcccagcu

SEQ ID NO: 1153386 - RNA, 18 nt, Human
acccccugcaaagcccag

SEQ ID NO: 1153387 - RNA, 17 nt, Human
acccccugcaaagccca

SEQ ID NO: 1153388 - RNA, 14 nt, Human
acccccugcaaagc

SEQ ID NO: 1153389 - RNA, 17 nt, Human
accccucauagcccuca

SEQ ID NO: 1153390 - RNA, 17 nt, Human
acacagauuugagcuca

SEQ ID NO: 1153391 - RNA, 14 nt, Human
acacgcuccuuccu

SEQ ID NO: 1153392 - RNA, 16 nt, Human
acacgcuccuuccucu

SEQ ID NO: 1153393 - RNA, 20 nt, Human
accugcccugcugaguccca

SEQ ID NO: 1153394 - RNA, 23 nt, Human
acugucucaagagggcacuggug

SEQ ID NO: 1153395 - RNA, 21 nt, Human
acugucucaagagggcacugg

SEQ ID NO: 1153396 - RNA, 20 nt, Human
acugucucaagagggcacug

SEQ ID NO: 1153397 - RNA, 18 nt, Human
acugcccccucugcccug

SEQ ID NO: 1153398 - RNA, 17 nt, Human
acugcccccucugcccu

SEQ ID NO: 1153399 - RNA, 16 nt, Human
acugcccccucugccc

SEQ ID NO: 1153400 - RNA, 15 nt, Human
acugcccccucugcc

SEQ ID NO: 1153401 - RNA, 14 nt, Human
acugcccccucugc

SEQ ID NO: 1153402 - RNA, 23 nt, Human
acuuuuauuuccagugaaaucag

SEQ ID NO: 1153403 - RNA, 19 nt, Human
aaggacagccccuccucca

SEQ ID NO: 1153404 - RNA, 13 nt, Human
aaggacagccccu

SEQ ID NO: 1153405 - RNA, 12 nt, Human
aaggcagggagg

SEQ ID NO: 1153406 - RNA, 21 nt, Human
aauauuagugaccucagcuuu

SEQ ID NO: 1153407 - RNA, 19 nt, Human
aaucacauucgaguguuuc

SEQ ID NO: 1153408 - RNA, 23 nt, Human
aaucaaguuggcuucuaaucaaa

SEQ ID NO: 1153409 - RNA, 22 nt, Human
aauguuuacagauccccaagcc

SEQ ID NO: 1153410 - RNA, 23 nt, Human
aaugcuauaacuauguugauaaa

SEQ ID NO: 1153411 - RNA, 22 nt, Human
aaugcgcaggcuggcccugccc

SEQ ID NO: 1153412 - RNA, 14 nt, Human
aaugcgcaggcugg

SEQ ID NO: 1153413 - RNA, 12 nt, Human
aacgcagcccug

SEQ ID NO: 1153414 - RNA, 11 nt, Human
aacgcagcccu

SEQ ID NO: 1153415 - RNA, 16 nt, Human
aacugagugccuuuug

SEQ ID NO: 1153416 - RNA, 14 nt, Human
aaauugcuccuuga

SEQ ID NO: 1153417 - RNA, 13 nt, Human
aaauugcuccuug

SEQ ID NO: 1153418 - RNA, 17 nt, Human
aaauuaaagcugaaaac

SEQ ID NO: 1153419 - RNA, 13 nt, Human
aaauuaaagcuga

SEQ ID NO: 1153420 - RNA, 21 nt, Human
aacccuuggagccaauggaga

SEQ ID NO: 1153421 - RNA, 12 nt, Human
aacccucagagc

SEQ ID NO: 1153422 - RNA, 15 nt, Human
aacccuauugguaaa

SEQ ID NO: 1153423 - RNA, 20 nt, Human
aaagaagguuucagaaagaa

SEQ ID NO: 1153424 - RNA, 16 nt, Human
aaacccuauugguaaa

SEQ ID NO: 1153425 - RNA, 13 nt, Human
aaacccucgaggc

SEQ ID NO: 1153426 - RNA, 24 nt, Human
aaacccucgaggcggaucuuugga

SEQ ID NO: 1153427 - RNA, 19 nt, Human
aaaauaaaauuaaagcuga

SEQ ID NO: 1153428 - RNA, 23 nt, Human
aaagcccuuccaugucgccucug

SEQ ID NO: 1153429 - RNA, 22 nt, Human
aaagcccuuccaugucgccucu

SEQ ID NO: 1153430 - RNA, 19 nt, Human
aaaucaaugcuauaacuau

SEQ ID NO: 1153431 - RNA, 14 nt, Human
caccccuaaagaga

SEQ ID NO: 1153432 - RNA, 15 nt, Human
caccccuaaagagau

SEQ ID NO: 1153433 - RNA, 13 nt, Human
cacauguggacuu

SEQ ID NO: 1153434 - RNA, 22 nt, Human
cacauaauucaggaagcagcuu

SEQ ID NO: 1153435 - RNA, 15 nt, Human
cacaggcccuuccuc

SEQ ID NO: 1153436 - RNA, 16 nt, Human
cacagcagccccugca

SEQ ID NO: 1153437 - RNA, 20 nt, Human
cacagcacgggggccaagga

SEQ ID NO: 1153438 - RNA, 22 nt, Human
cacacuucaggcucuucuccuu

SEQ ID NO: 1153439 - RNA, 21 nt, Human
cacacuucaggcucuucuccu

SEQ ID NO: 1153440 - RNA, 20 nt, Human
cacacuucaggcucuucucc

SEQ ID NO: 1153441 - RNA, 18 nt, Human
cacacuucaggcucuucu

SEQ ID NO: 1153442 - RNA, 17 nt, Human
cacacuucaggcucuuc

SEQ ID NO: 1153443 - RNA, 14 nt, Human
cacacuucaggcuc

SEQ ID NO: 1153444 - RNA, 14 nt, Human
cacacccuguuuua

SEQ ID NO: 1153445 - RNA, 23 nt, Human
cacaaccuucuguggcucacaga

SEQ ID NO: 1153446 - RNA, 19 nt, Human
cacaaccuucuguggcuca

SEQ ID NO: 1153447 - RNA, 18 nt, Human
cacaaccuucuguggcuc

SEQ ID NO: 1153448 - RNA, 17 nt, Human
cacaaccuucuguggcu

SEQ ID NO: 1153449 - RNA, 22 nt, Human
cacaacacacagauuugagcuc

SEQ ID NO: 1153450 - RNA, 18 nt, Human
cacaaagcccuuccaugu

SEQ ID NO: 1153451 - RNA, 22 nt, Human
caagugauucucaugccucagc

SEQ ID NO: 1153452 - RNA, 19 nt, Human
caaggaugccccguccccc

SEQ ID NO: 1153453 - RNA, 14 nt, Human
caaggacuaggguc

SEQ ID NO: 1153454 - RNA, 17 nt, Human
caagccguggcuucccg

SEQ ID NO: 1153455 - RNA, 16 nt, Human
caagccguggcuuccc

SEQ ID NO: 1153456 - RNA, 15 nt, Human
caagccguggcuucc

SEQ ID NO: 1153457 - RNA, 14 nt, Human
caagccguggcuuc

SEQ ID NO: 1153458 - RNA, 18 nt, Human
caacgcagcccugcuuug

SEQ ID NO: 1153459 - RNA, 15 nt, Human
caacgcagcccugcu

SEQ ID NO: 1153460 - RNA, 13 nt, Human
caacgcagcccug

SEQ ID NO: 1153461 - RNA, 12 nt, Human
caacgcagcccu

SEQ ID NO: 1153462 - RNA, 21 nt, Human
caacccucagagccaccccua

SEQ ID NO: 1153463 - RNA, 14 nt, Human
caaauguggcuccu

SEQ ID NO: 1153464 - RNA, 18 nt, Human
caaaugucuuccuggauu

SEQ ID NO: 1153465 - RNA, 16 nt, Human
uuuguaugcacuuugu

SEQ ID NO: 1153466 - RNA, 23 nt, Human
uuucugaucugaugcaagcaaga

SEQ ID NO: 1153467 - RNA, 22 nt, Human
uuuccucuuagucgagccaagu

SEQ ID NO: 1153468 - RNA, 13 nt, Human
uuuacagcugccu

SEQ ID NO: 1153469 - RNA, 15 nt, Human
uuguuuuacugucuu

SEQ ID NO: 1153470 - RNA, 18 nt, Human
uugucugaagucacugca

SEQ ID NO: 1153471 - RNA, 20 nt, Human
uugucugaagucacugcaca

SEQ ID NO: 1153472 - RNA, 17 nt, Human
uugucugaagucacugc

SEQ ID NO: 1153473 - RNA, 20 nt, Human
uuguaugauccuaaugaaug

SEQ ID NO: 1153474 - RNA, 22 nt, Human
uuguaugaaagauggcugugcc

SEQ ID NO: 1153475 - RNA, 16 nt, Human
uuggacagaagcagcu

SEQ ID NO: 1153476 - RNA, 19 nt, Human
uuggacagaagcagcucuu

SEQ ID NO: 1153477 - RNA, 22 nt, Human
uugauauuuucaacgcagcccu

SEQ ID NO: 1153478 - RNA, 13 nt, Human
uugagcucagccc

SEQ ID NO: 1153479 - RNA, 17 nt, Human
uucuuauguugcccagu

SEQ ID NO: 1153480 - RNA, 18 nt, Human
uuccugcauuugugaaau

SEQ ID NO: 1153481 - RNA, 16 nt, Human
uuccugcauuugugaa

SEQ ID NO: 1153482 - RNA, 19 nt, Human
uucccccuccaaucccacc

SEQ ID NO: 1153483 - RNA, 19 nt, Human
uuccccaugucucgacuca

SEQ ID NO: 1153484 - RNA, 11 nt, Human
uuccccauggg

SEQ ID NO: 1153485 - RNA, 14 nt, Human
uucccauucuugca

SEQ ID NO: 1153486 - RNA, 23 nt, Human
uuccagcaauucuccugccucag

SEQ ID NO: 1153487 - RNA, 22 nt, Human
uuccagcaauucuccugccuca

SEQ ID NO: 1153488 - RNA, 21 nt, Human
uuccagcaauucuccugccuc

SEQ ID NO: 1153489 - RNA, 20 nt, Human
uuccagcaauucuccugccu

SEQ ID NO: 1153490 - RNA, 21 nt, Human
uuccagagaguggcuccuccc

SEQ ID NO: 1153491 - RNA, 20 nt, Human
uuccagagaguggcuccucc

SEQ ID NO: 1153492 - RNA, 19 nt, Human
uuccagagaguggcuccuc

SEQ ID NO: 1153493 - RNA, 18 nt, Human
uuccagagaguggcuccu

SEQ ID NO: 1153494 - RNA, 17 nt, Human
uuccagagaguggcucc

SEQ ID NO: 1153495 - RNA, 17 nt, Human
uucaacugaccagccuc

SEQ ID NO: 1153496 - RNA, 20 nt, Human
uucaacgcagcccugcuuug

SEQ ID NO: 1153497 - RNA, 19 nt, Human
uucaacgcagcccugcuuu

SEQ ID NO: 1153498 - RNA, 16 nt, Human
uucaacgcagcccugc

SEQ ID NO: 1153499 - RNA, 12 nt, Human
uuagcugggaga

SEQ ID NO: 1153500 - RNA, 21 nt, Human
uuacuaucaugucaaacguga

SEQ ID NO: 1153501 - RNA, 19 nt, Human
uuacuaucaugucaaacgu

SEQ ID NO: 1153502 - RNA, 16 nt, Human
uuaagccuuuggaaac

SEQ ID NO: 1153503 - RNA, 15 nt, Human
uuaagccuuuggaaa

SEQ ID NO: 1153504 - RNA, 19 nt, Human
uguuuuuuuuuuccacuua

SEQ ID NO: 1153505 - RNA, 18 nt, Human
uguuuuuuuuuuccacuu

SEQ ID NO: 1153506 - RNA, 17 nt, Human
uguuuuguuuggagaca

SEQ ID NO: 1153507 - RNA, 19 nt, Human
uggucacaggacucugccu

SEQ ID NO: 1153508 - RNA, 20 nt, Human
uggucacaggacucugccuc

SEQ ID NO: 1153509 - RNA, 18 nt, Human
uggucacaggacucugcc

SEQ ID NO: 1153510 - RNA, 22 nt, Human
uggggguucuuucuuccucugc

SEQ ID NO: 1153511 - RNA, 20 nt, Human
uggggguucuuucuuccucu

SEQ ID NO: 1153512 - RNA, 19 nt, Human
uggggguucuuucuuccuc

SEQ ID NO: 1153513 - RNA, 15 nt, Human
uggggguucuuucuu

SEQ ID NO: 1153514 - RNA, 12 nt, Human
ugggccuucagg

SEQ ID NO: 1153515 - RNA, 15 nt, Human
ugggccuucagggag

SEQ ID NO: 1153516 - RNA, 11 nt, Human
ugggccuucag

SEQ ID NO: 1153517 - RNA, 18 nt, Human
ugggauuacaggcuccug

SEQ ID NO: 1153518 - RNA, 17 nt, Human
ugggauuacaggcguga

SEQ ID NO: 1153519 - RNA, 19 nt, Human
uggcuccucccggugccca

SEQ ID NO: 1153520 - RNA, 18 nt, Human
uggcuccucccggugccc

SEQ ID NO: 1153521 - RNA, 16 nt, Human
uggcuccucccggugc

SEQ ID NO: 1153522 - RNA, 14 nt, Human
uggcuccucccggu

SEQ ID NO: 1153523 - RNA, 20 nt, Human
uggcucccacaggcccuucc

SEQ ID NO: 1153524 - RNA, 17 nt, Human
uggcucccacaggcccu

SEQ ID NO: 1153525 - RNA, 14 nt, Human
uggcucccacaggc

SEQ ID NO: 1153526 - RNA, 20 nt, Human
uggccaggcugcucuugaac

SEQ ID NO: 1153527 - RNA, 17 nt, Human
uggccaggcugcucuug

SEQ ID NO: 1153528 - RNA, 16 nt, Human
uggccaggcugcucuu

SEQ ID NO: 1153529 - RNA, 12 nt, Human
uggcagaggagg

SEQ ID NO: 1153530 - RNA, 17 nt, Human
uggagacugucucaaga

SEQ ID NO: 1153531 - RNA, 14 nt, Human
uggagacugucuca

SEQ ID NO: 1153532 - RNA, 14 nt, Human
uggacuccucuguc

SEQ ID NO: 1153533 - RNA, 13 nt, Human
uggacuccucugu

SEQ ID NO: 1153534 - RNA, 21 nt, Human
uggagaagcucccugaaguaa

SEQ ID NO: 1153535 - RNA, 14 nt, Human
ugcucuccucuugc

SEQ ID NO: 1153536 - RNA, 12 nt, Human
ugcucuccucuu

SEQ ID NO: 1153537 - RNA, 22 nt, Human
ugcuaagacucaguggggaggg

SEQ ID NO: 1153538 - RNA, 23 nt, Human
ugcgcaggcuggcccugcccugg

SEQ ID NO: 1153539 - RNA, 22 nt, Human
ugcgcaggcuggcccugcccug

SEQ ID NO: 1153540 - RNA, 21 nt, Human
ugcgcaggcuggcccugcccu

SEQ ID NO: 1153541 - RNA, 16 nt, Human
ugccuccucuucaacu

SEQ ID NO: 1153542 - RNA, 14 nt, Human
ugccuccucuucaa

SEQ ID NO: 1153543 - RNA, 23 nt, Human
ugcccugguuuccugcccuggga

SEQ ID NO: 1153544 - RNA, 20 nt, Human
ugcccugguuuccugcccug

SEQ ID NO: 1153545 - RNA, 19 nt, Human
ugcccugguuuccugcccu

SEQ ID NO: 1153546 - RNA, 18 nt, Human
ugcccugguuuccugccc

SEQ ID NO: 1153547 - RNA, 17 nt, Human
ugcccugguuuccugcc

SEQ ID NO: 1153548 - RNA, 18 nt, Human
ugcccuggugcugccaca

SEQ ID NO: 1153549 - RNA, 17 nt, Human
ugcccuggugcugccac

SEQ ID NO: 1153550 - RNA, 16 nt, Human
ugcccuggugcugcca

SEQ ID NO: 1153551 - RNA, 14 nt, Human
ugcccuggugcugc

SEQ ID NO: 1153552 - RNA, 12 nt, Human
ugcccuggugcu

SEQ ID NO: 1153553 - RNA, 18 nt, Human
ugcccugggaggcaguga

SEQ ID NO: 1153554 - RNA, 17 nt, Human
ugcccugggaggcagug

SEQ ID NO: 1153555 - RNA, 15 nt, Human
ugcccugggaggcag

SEQ ID NO: 1153556 - RNA, 13 nt, Human
ugcccugggaggc

SEQ ID NO: 1153557 - RNA, 20 nt, Human
ugccccuccucucugcccua

SEQ ID NO: 1153558 - RNA, 19 nt, Human
ugccccuccucucugcccu

SEQ ID NO: 1153559 - RNA, 18 nt, Human
ugccccuccucucugccc

SEQ ID NO: 1153560 - RNA, 17 nt, Human
ugccccuccucucugcc

SEQ ID NO: 1153561 - RNA, 16 nt, Human
ugccccucccuucaac

SEQ ID NO: 1153562 - RNA, 15 nt, Human
ugccccucccuucaa

SEQ ID NO: 1153563 - RNA, 20 nt, Human
ugauuggcaggaguuggaag

SEQ ID NO: 1153564 - RNA, 12 nt, Human
ugauucacagug

SEQ ID NO: 1153565 - RNA, 19 nt, Human
ugaugucccaacuuguaaa

SEQ ID NO: 1153566 - RNA, 14 nt, Human
ugaugguuccccug

SEQ ID NO: 1153567 - RNA, 21 nt, Human
ugaugccugugaacugaacuc

SEQ ID NO: 1153568 - RNA, 20 nt, Human
ugaugccugugaacugaacu

SEQ ID NO: 1153569 - RNA, 15 nt, Human
ugaugccugugaacu

SEQ ID NO: 1153570 - RNA, 15 nt, Human
ugaucugugggcaca

SEQ ID NO: 1153571 - RNA, 23 nt, Human
ugaguuugggccccagaggcugg

SEQ ID NO: 1153572 - RNA, 22 nt, Human
ugaguuugggccccagaggcug

SEQ ID NO: 1153573 - RNA, 19 nt, Human
ugagucccaggcugagccu

SEQ ID NO: 1153574 - RNA, 15 nt, Human
ugagucccaggcuga

SEQ ID NO: 1153575 - RNA, 23 nt, Human
ugaggcaucgcaauguaagacuc

SEQ ID NO: 1153576 - RNA, 14 nt, Human
ugagccucagucuc

SEQ ID NO: 1153577 - RNA, 18 nt, Human
ugagcccuguccugccua

SEQ ID NO: 1153578 - RNA, 22 nt, Human
ugaccucagcuuugauauuuca

SEQ ID NO: 1153579 - RNA, 16 nt, Human
ugacagacagcccucc

SEQ ID NO: 1153580 - RNA, 15 nt, Human
ugaauaaagacaccu

SEQ ID NO: 1153581 - RNA, 14 nt, Human
ugaauaaagacacc

SEQ ID NO: 1153582 - RNA, 20 nt, Human
ugaaggagagcccuucauuu

SEQ ID NO: 1153583 - RNA, 16 nt, Human
ugaaggagagcccuuc

SEQ ID NO: 1153584 - RNA, 20 nt, Human
ugaaggaauaaauugcuccu

SEQ ID NO: 1153585 - RNA, 16 nt, Human
ugaacucugacaacag

SEQ ID NO: 1153586 - RNA, 17 nt, Human
ugaaaucaguuacucuu

SEQ ID NO: 1153587 - RNA, 16 nt, Human
ugaaaucaguuacucu

SEQ ID NO: 1153588 - RNA, 18 nt, Human
ugaaagauggcugugccu

SEQ ID NO: 1153589 - RNA, 19 nt, Human
ugaaagauggcugugccuc

SEQ ID NO: 1153590 - RNA, 19 nt, Human
ucuuuggacagaagcagcu

SEQ ID NO: 1153591 - RNA, 21 nt, Human
ucuuuggacagaagcagcucu

SEQ ID NO: 1153592 - RNA, 22 nt, Human
ucuuuggacagaagcagcucuu

SEQ ID NO: 1153593 - RNA, 17 nt, Human
ucuccucuugccacugc

SEQ ID NO: 1153594 - RNA, 22 nt, Human
ucuccucuugccacugccucuu

SEQ ID NO: 1153595 - RNA, 16 nt, Human
ucuccucuugccacug

SEQ ID NO: 1153596 - RNA, 13 nt, Human
ucuccucuugcca

SEQ ID NO: 1153597 - RNA, 14 nt, Human
ucucccucccuugg

SEQ ID NO: 1153598 - RNA, 14 nt, Human
ucuccacugccuuc

SEQ ID NO: 1153599 - RNA, 13 nt, Human
ucuccacuccaga

SEQ ID NO: 1153600 - RNA, 20 nt, Human
ucucaugccucagccuccug

SEQ ID NO: 1153601 - RNA, 19 nt, Human
ucucaugccucagccuccu

SEQ ID NO: 1153602 - RNA, 16 nt, Human
ucucaugccucagccu

SEQ ID NO: 1153603 - RNA, 13 nt, Human
ucucaugccucag

SEQ ID NO: 1153604 - RNA, 14 nt, Human
ucuaucaccaagga

SEQ ID NO: 1153605 - RNA, 16 nt, Human
ucguguccccuauccu

SEQ ID NO: 1153606 - RNA, 19 nt, Human
uccugccuaaggcugaacu

SEQ ID NO: 1153607 - RNA, 16 nt, Human
uccugccuaaggcuga

SEQ ID NO: 1153608 - RNA, 21 nt, Human
uccugcccugggaggcaguga

SEQ ID NO: 1153609 - RNA, 15 nt, Human
uccugcccugggagg

SEQ ID NO: 1153610 - RNA, 14 nt, Human
uccugcccugggag

SEQ ID NO: 1153611 - RNA, 12 nt, Human
uccugcccuggg

SEQ ID NO: 1153612 - RNA, 11 nt, Human
uccugcccugg

SEQ ID NO: 1153613 - RNA, 10 nt, Human
uccugcccug

SEQ ID NO: 1153614 - RNA, 16 nt, Human
uccugccaccacgccc

SEQ ID NO: 1153615 - RNA, 11 nt, Human
uccugccacca

SEQ ID NO: 1153616 - RNA, 16 nt, Human
uccugcauuugugaaa

SEQ ID NO: 1153617 - RNA, 17 nt, Human
uccuaucagaaguuucu

SEQ ID NO: 1153618 - RNA, 16 nt, Human
ucccaggcgccccuuc

SEQ ID NO: 1153619 - RNA, 18 nt, Human
ucccaggcgccccuuccc

SEQ ID NO: 1153620 - RNA, 15 nt, Human
uccaugcugccucca

SEQ ID NO: 1153621 - RNA, 14 nt, Human
uccaugcugccucc

SEQ ID NO: 1153622 - RNA, 14 nt, Human
uccaucaggccacu

SEQ ID NO: 1153623 - RNA, 21 nt, Human
uccauaaucuggacuccucug

SEQ ID NO: 1153624 - RNA, 22 nt, Human
uccauaaucuggacuccucugu

SEQ ID NO: 1153625 - RNA, 22 nt, Human
uccagcaauucuccugccucag

SEQ ID NO: 1153626 - RNA, 19 nt, Human
uccaaacuaccuuccaguu

SEQ ID NO: 1153627 - RNA, 16 nt, Human
ucagucucccucccuu

SEQ ID NO: 1153628 - RNA, 12 nt, Human
ucaggucccugc

SEQ ID NO: 1153629 - RNA, 21 nt, Human
ucaggcucuucuccuuucaca

SEQ ID NO: 1153630 - RNA, 16 nt, Human
ucaggcucuucuccuu

SEQ ID NO: 1153631 - RNA, 20 nt, Human
ucaggaucaaaccccgacca

SEQ ID NO: 1153632 - RNA, 20 nt, Human
ucacccuggggcuaggaaau

SEQ ID NO: 1153633 - RNA, 19 nt, Human
ucacaggagggagggggaa

SEQ ID NO: 1153634 - RNA, 23 nt, Human
ucacaggacucugccuccucuuc

SEQ ID NO: 1153635 - RNA, 19 nt, Human
ucacaggacucugccuccu

SEQ ID NO: 1153636 - RNA, 18 nt, Human
ucacaggacucugccucc

SEQ ID NO: 1153637 - RNA, 17 nt, Human
ucacaggacucugccuc

SEQ ID NO: 1153638 - RNA, 24 nt, Human
ucaacugaccagccuccaugcugc

SEQ ID NO: 1153639 - RNA, 18 nt, Human
ucaacugaccagccucca

SEQ ID NO: 1153640 - RNA, 22 nt, Human
ucaacucccugccccccagccc

SEQ ID NO: 1153641 - RNA, 21 nt, Human
ucaacucccugccccccagcc

SEQ ID NO: 1153642 - RNA, 15 nt, Human
ucaacucccugcccc

SEQ ID NO: 1153643 - RNA, 14 nt, Human
ucaacucccugccc

SEQ ID NO: 1153644 - RNA, 23 nt, Human
ucaaaccccgaccaccugcccaa

SEQ ID NO: 1153645 - RNA, 20 nt, Human
ucaaaccccgaccaccugcc

SEQ ID NO: 1153646 - RNA, 19 nt, Human
ucaaaccccgaccaccugc

SEQ ID NO: 1153647 - RNA, 17 nt, Human
uauguugaagccuuugu

SEQ ID NO: 1153648 - RNA, 18 nt, Human
uaugcagagguccacaac

SEQ ID NO: 1153649 - RNA, 18 nt, Human
uaugauuuggaaaauaaa

SEQ ID NO: 1153650 - RNA, 17 nt, Human
uaugauuuggaaaauaa

SEQ ID NO: 1153651 - RNA, 15 nt, Human
uaugauuuggaaaau

SEQ ID NO: 1153652 - RNA, 19 nt, Human
uaugaccacacuccagcug

SEQ ID NO: 1153653 - RNA, 14 nt, Human
uaugaccacacucc

SEQ ID NO: 1153654 - RNA, 18 nt, Human
uaugaauaaagacaccua

SEQ ID NO: 1153655 - RNA, 21 nt, Human
uaggugauccacucgccuuca

SEQ ID NO: 1153656 - RNA, 20 nt, Human
uagguauaaguggugugugu

SEQ ID NO: 1153657 - RNA, 17 nt, Human
uaggccguuccuucaaa

SEQ ID NO: 1153658 - RNA, 21 nt, Human
guggccacuccagaccccugg

SEQ ID NO: 1153659 - RNA, 18 nt, Human
guggagaggcccggccuc

SEQ ID NO: 1153660 - RNA, 13 nt, Human
guggacuuuuauu

SEQ ID NO: 1153661 - RNA, 18 nt, Human
gugcuuauguaugaggua

SEQ ID NO: 1153662 - RNA, 21 nt, Human
gugcugccacacuucaggcuc

SEQ ID NO: 1153663 - RNA, 12 nt, Human
gugcugccacac

SEQ ID NO: 1153664 - RNA, 18 nt, Human
gugcaugcagcaucuaag

SEQ ID NO: 1153665 - RNA, 18 nt, Human
gugcaucucagcccacau

SEQ ID NO: 1153666 - RNA, 15 nt, Human
gugcaucucagccca

SEQ ID NO: 1153667 - RNA, 22 nt, Human
gugcaaaguucccuacuuccug

SEQ ID NO: 1153668 - RNA, 20 nt, Human
gugauucucaugccucagcc

SEQ ID NO: 1153669 - RNA, 23 nt, Human
gugaggauuaaauaauguaaaua

SEQ ID NO: 1153670 - RNA, 22 nt, Human
gugagccaccgugccuggccac

SEQ ID NO: 1153671 - RNA, 21 nt, Human
gugagccaccgugccuggcca

SEQ ID NO: 1153672 - RNA, 17 nt, Human
gugagccaccgugccug

SEQ ID NO: 1153673 - RNA, 15 nt, Human
gugagccaccgugcc

SEQ ID NO: 1153674 - RNA, 16 nt, Human
gugagccaccacgccc

SEQ ID NO: 1153675 - RNA, 15 nt, Human
gugagccaccacgcc

SEQ ID NO: 1153676 - RNA, 16 nt, Human
gugaccucagcuuuga

SEQ ID NO: 1153677 - RNA, 14 nt, Human
gugaaucagagcac

SEQ ID NO: 1153678 - RNA, 16 nt, Human
gugaaaaugugugugu

SEQ ID NO: 1153679 - RNA, 17 nt, Human
gucucuucuccacugga

SEQ ID NO: 1153680 - RNA, 16 nt, Human
gucucuucuccacugg

SEQ ID NO: 1153681 - RNA, 15 nt, Human
gucucuucuccacug

SEQ ID NO: 1153682 - RNA, 14 nt, Human
gucucuucuccacu

SEQ ID NO: 1153683 - RNA, 20 nt, Human
guccuggggaaccugacccc

SEQ ID NO: 1153684 - RNA, 19 nt, Human
guccuggggaaccugaccc

SEQ ID NO: 1153685 - RNA, 16 nt, Human
gucaucucagcuggau

SEQ ID NO: 1153686 - RNA, 19 nt, Human
guauuuauuuaguauuuau

SEQ ID NO: 1153687 - RNA, 18 nt, Human
guaaugaugucguuugaa

SEQ ID NO: 1153688 - RNA, 15 nt, Human
guaaucguguccccu

SEQ ID NO: 1153689 - RNA, 14 nt, Human
guaaaaauaaaauu

SEQ ID NO: 1153690 - RNA, 13 nt, Human
guaaaaauaaaau

SEQ ID NO: 1153691 - RNA, 18 nt, Human
gguucuuucuuccucugc

SEQ ID NO: 1153692 - RNA, 20 nt, Human
gguggcccgacagccuggca

SEQ ID NO: 1153693 - RNA, 19 nt, Human
gguggcccgacagccuggc

SEQ ID NO: 1153694 - RNA, 18 nt, Human
gguggcccgacagccugg

SEQ ID NO: 1153695 - RNA, 17 nt, Human
gguggcccgacagccug

SEQ ID NO: 1153696 - RNA, 16 nt, Human
gguggcccgacagccu

SEQ ID NO: 1153697 - RNA, 22 nt, Human
ggugauagguauaaguggugug

SEQ ID NO: 1153698 - RNA, 20 nt, Human
ggucucgaacuccugaccuu

SEQ ID NO: 1153699 - RNA, 19 nt, Human
ggucucgaacuccugaccu

SEQ ID NO: 1153700 - RNA, 20 nt, Human
ggguuucaccauguuggcca

SEQ ID NO: 1153701 - RNA, 14 nt, Human
ggguucuuucuucc

SEQ ID NO: 1153702 - RNA, 16 nt, Human
ggguucuuucuuccuc

SEQ ID NO: 1153703 - RNA, 22 nt, Human
ggguuccagcaauucuccugcc

SEQ ID NO: 1153704 - RNA, 22 nt, Human
gggguucuuucuuccucugcug

SEQ ID NO: 1153705 - RNA, 20 nt, Human
gggguucuuucuuccucugc

SEQ ID NO: 1153706 - RNA, 22 nt, Human
gggccuggcagccgugccuuca

SEQ ID NO: 1153707 - RNA, 10 nt, Human
gggccuggca

SEQ ID NO: 1153708 - RNA, 21 nt, Human
ggcucccacaggcccuuccuc

SEQ ID NO: 1153709 - RNA, 20 nt, Human
ggcucccacaggcccuuccu

SEQ ID NO: 1153710 - RNA, 19 nt, Human
ggcucccacaggcccuucc

SEQ ID NO: 1153711 - RNA, 18 nt, Human
ggcucccacaggcccuuc

SEQ ID NO: 1153712 - RNA, 17 nt, Human
ggcucccacaggcccuu

SEQ ID NO: 1153713 - RNA, 12 nt, Human
ggcuccagcugg

SEQ ID NO: 1153714 - RNA, 19 nt, Human
ggcuaugggggcacugagg

SEQ ID NO: 1153715 - RNA, 22 nt, Human
ggccucggacuuagcugggaga

SEQ ID NO: 1153716 - RNA, 20 nt, Human
ggccucggacuuagcuggga

SEQ ID NO: 1153717 - RNA, 22 nt, Human
ggcccuggcucccacaggcccu

SEQ ID NO: 1153718 - RNA, 13 nt, Human
ggcccuggcuccc

SEQ ID NO: 1153719 - RNA, 22 nt, Human
ggcccugcccugguuuccugcc

SEQ ID NO: 1153720 - RNA, 20 nt, Human
ggcccugcccugguuuccug

SEQ ID NO: 1153721 - RNA, 13 nt, Human
ggcccugcccugg

SEQ ID NO: 1153722 - RNA, 12 nt, Human
ggcccugcccug

SEQ ID NO: 1153723 - RNA, 11 nt, Human
ggcccugcccu

SEQ ID NO: 1153724 - RNA, 16 nt, Human
ggccaggcugcucuug

SEQ ID NO: 1153725 - RNA, 15 nt, Human
ggccaggcugcucuu

SEQ ID NO: 1153726 - RNA, 14 nt, Human
ggccaggcugcucu

SEQ ID NO: 1153727 - RNA, 11 nt, Human
ggccaggcugc

SEQ ID NO: 1153728 - RNA, 17 nt, Human
ggccacuccagaccccu

SEQ ID NO: 1153729 - RNA, 18 nt, Human
ggcauggccagguggcca

SEQ ID NO: 1153730 - RNA, 17 nt, Human
ggcauggccagguggcc

SEQ ID NO: 1153731 - RNA, 18 nt, Human
ggcaccggggccucggac

SEQ ID NO: 1153732 - RNA, 19 nt, Human
ggauuacaggcuccugcca

SEQ ID NO: 1153733 - RNA, 22 nt, Human
ggaucaaaccccgaccaccugc

SEQ ID NO: 1153734 - RNA, 18 nt, Human
ggacuggccucugcugau

SEQ ID NO: 1153735 - RNA, 17 nt, Human
ggaaggcugagaggaga

SEQ ID NO: 1153736 - RNA, 14 nt, Human
ggaaggcagggagg

SEQ ID NO: 1153737 - RNA, 13 nt, Human
ggaaccugacccc

SEQ ID NO: 1153738 - RNA, 21 nt, Human
ggaaaaccaagccguggcuuc

SEQ ID NO: 1153739 - RNA, 23 nt, Human
gcuuuucacugcuggcugccuua

SEQ ID NO: 1153740 - RNA, 22 nt, Human
gcuuuucacugcuggcugccuu

SEQ ID NO: 1153741 - RNA, 18 nt, Human
gcuuuucacugcuggcug

SEQ ID NO: 1153742 - RNA, 14 nt, Human
gcuuuucacugcug

SEQ ID NO: 1153743 - RNA, 13 nt, Human
gcuuuucacugcu

SEQ ID NO: 1153744 - RNA, 15 nt, Human
gcuuuguaugcacuu

SEQ ID NO: 1153745 - RNA, 22 nt, Human
gcugugggcgugagaccugccc

SEQ ID NO: 1153746 - RNA, 21 nt, Human
gcugugggcgugagaccugcc

SEQ ID NO: 1153747 - RNA, 20 nt, Human
gcugugggcgugagaccugc

SEQ ID NO: 1153748 - RNA, 22 nt, Human
gcugagucccaggcugagccuc

SEQ ID NO: 1153749 - RNA, 21 nt, Human
gcugagucccaggcugagccu

SEQ ID NO: 1153750 - RNA, 21 nt, Human
gcugacuguacuccucccagg

SEQ ID NO: 1153751 - RNA, 19 nt, Human
gcugacuguacuccuccca

SEQ ID NO: 1153752 - RNA, 18 nt, Human
gcugacuguacuccuccc

SEQ ID NO: 1153753 - RNA, 17 nt, Human
gcugacagacagcccuc

SEQ ID NO: 1153754 - RNA, 23 nt, Human
gcucuucuccuuucacaaccuuc

SEQ ID NO: 1153755 - RNA, 21 nt, Human
gcucuucuccuuucacaaccu

SEQ ID NO: 1153756 - RNA, 17 nt, Human
gcucuucuccuuucaca

SEQ ID NO: 1153757 - RNA, 13 nt, Human
gcucuucuccuuu

SEQ ID NO: 1153758 - RNA, 22 nt, Human
gcucuccucuugccacugccuc

SEQ ID NO: 1153759 - RNA, 19 nt, Human
gcucuccucuugccacugc

SEQ ID NO: 1153760 - RNA, 15 nt, Human
gcucuccucuugcca

SEQ ID NO: 1153761 - RNA, 14 nt, Human
gcuccaucuccacu

SEQ ID NO: 1153762 - RNA, 23 nt, Human
gcuccagcuggccgggagccuga

SEQ ID NO: 1153763 - RNA, 17 nt, Human
gcuccagcuggccggga

SEQ ID NO: 1153764 - RNA, 16 nt, Human
gcuccaaaugcagcuu

SEQ ID NO: 1153765 - RNA, 19 nt, Human
gcuccaaacccucgaggcg

SEQ ID NO: 1153766 - RNA, 16 nt, Human
gcuccaaacccucgag

SEQ ID NO: 1153767 - RNA, 17 nt, Human
gcuccaaacccucgagg

SEQ ID NO: 1153768 - RNA, 18 nt, Human
gcuccaaacccucgaggc

SEQ ID NO: 1153769 - RNA, 15 nt, Human
gcgugagaccugccc

SEQ ID NO: 1153770 - RNA, 17 nt, Human
gccugugaacugaacuc

SEQ ID NO: 1153771 - RNA, 13 nt, Human
gccuggccacgcc

SEQ ID NO: 1153772 - RNA, 19 nt, Human
gccucugcugauccuccca

SEQ ID NO: 1153773 - RNA, 18 nt, Human
gccucugcugauccuccc

SEQ ID NO: 1153774 - RNA, 13 nt, Human
gccucugccuguc

SEQ ID NO: 1153775 - RNA, 12 nt, Human
gccucugccugu

SEQ ID NO: 1153776 - RNA, 21 nt, Human
gccucggacuuagcugggaga

SEQ ID NO: 1153777 - RNA, 20 nt, Human
gccucggacuuagcugggag

SEQ ID NO: 1153778 - RNA, 18 nt, Human
gccucagucucccucccu

SEQ ID NO: 1153779 - RNA, 15 nt, Human
gccucagucucccuc

SEQ ID NO: 1153780 - RNA, 14 nt, Human
gccucagccucccg

SEQ ID NO: 1153781 - RNA, 16 nt, Human
gccuaaggcugaacuu

SEQ ID NO: 1153782 - RNA, 20 nt, Human
gcccuuccucuccacugccu

SEQ ID NO: 1153783 - RNA, 21 nt, Human
gcccuuccucuccacugccuu

SEQ ID NO: 1153784 - RNA, 19 nt, Human
gcccuuccucuccacugcc

SEQ ID NO: 1153785 - RNA, 18 nt, Human
gcccuuccucuccacugc

SEQ ID NO: 1153786 - RNA, 17 nt, Human
gcccuuccucuccacug

SEQ ID NO: 1153787 - RNA, 23 nt, Human
gcccugguuuccugcccugggag

SEQ ID NO: 1153788 - RNA, 21 nt, Human
gcccugguuuccugcccuggg

SEQ ID NO: 1153789 - RNA, 20 nt, Human
gcccugguuuccugcccugg

SEQ ID NO: 1153790 - RNA, 19 nt, Human
gcccugguuuccugcccug

SEQ ID NO: 1153791 - RNA, 18 nt, Human
gcccugguuuccugcccu

SEQ ID NO: 1153792 - RNA, 17 nt, Human
gcccugguuuccugccc

SEQ ID NO: 1153793 - RNA, 15 nt, Human
gcccugguuuccugc

SEQ ID NO: 1153794 - RNA, 14 nt, Human
gcccugguuuccug

SEQ ID NO: 1153795 - RNA, 21 nt, Human
gcccuggugcugccacacuuc

SEQ ID NO: 1153796 - RNA, 17 nt, Human
gcccuggugcugccaca

SEQ ID NO: 1153797 - RNA, 16 nt, Human
gcccuggugcugccac

SEQ ID NO: 1153798 - RNA, 15 nt, Human
gcccuggugcugcca

SEQ ID NO: 1153799 - RNA, 16 nt, Human
gcccugggaggcagug

SEQ ID NO: 1153800 - RNA, 14 nt, Human
gcccugggaggcag

SEQ ID NO: 1153801 - RNA, 11 nt, Human
gcccugggagg

SEQ ID NO: 1153802 - RNA, 20 nt, Human
gcccuggcucccacaggccc

SEQ ID NO: 1153803 - RNA, 19 nt, Human
gcccuggcucccacaggcc

SEQ ID NO: 1153804 - RNA, 15 nt, Human
gcccuggcucccaca

SEQ ID NO: 1153805 - RNA, 23 nt, Human
gcccugcuuugggcugcccuggu

SEQ ID NO: 1153806 - RNA, 22 nt, Human
gcccugcuuugggcugcccugg

SEQ ID NO: 1153807 - RNA, 21 nt, Human
gcccugcuuugggcugcccug

SEQ ID NO: 1153808 - RNA, 20 nt, Human
gcccugcuuugggcugcccu

SEQ ID NO: 1153809 - RNA, 19 nt, Human
gcccgacagccuggcacag

SEQ ID NO: 1153810 - RNA, 17 nt, Human
gcccgacagccuggcac

SEQ ID NO: 1153811 - RNA, 17 nt, Human
gccccuucccccuccaa

SEQ ID NO: 1153812 - RNA, 12 nt, Human
gccccuuccccc

SEQ ID NO: 1153813 - RNA, 19 nt, Human
gccccuccucucugcccua

SEQ ID NO: 1153814 - RNA, 18 nt, Human
gccccuccucucugcccu

SEQ ID NO: 1153815 - RNA, 15 nt, Human
gccccucccuucaac

SEQ ID NO: 1153816 - RNA, 14 nt, Human
gccccucccuucaa

SEQ ID NO: 1153817 - RNA, 12 nt, Human
gccccucccuuc

SEQ ID NO: 1153818 - RNA, 19 nt, Human
gcacugguggcccgacagc

SEQ ID NO: 1153819 - RNA, 14 nt, Human
gcacugguggcccg

SEQ ID NO: 1153820 - RNA, 20 nt, Human
gcacugcugcccagccucca

SEQ ID NO: 1153821 - RNA, 18 nt, Human
gcacugcugcccagccuc

SEQ ID NO: 1153822 - RNA, 15 nt, Human
gcacugcugcccagc

SEQ ID NO: 1153823 - RNA, 14 nt, Human
gcacugcugcccag

SEQ ID NO: 1153824 - RNA, 19 nt, Human
gcacagugcaucucagccc

SEQ ID NO: 1153825 - RNA, 18 nt, Human
gcacagugcaucucagcc

SEQ ID NO: 1153826 - RNA, 15 nt, Human
gcacagugcaucuca

SEQ ID NO: 1153827 - RNA, 13 nt, Human
gcacagugcaucu

SEQ ID NO: 1153828 - RNA, 20 nt, Human
gcaauucuccugccucagcc

SEQ ID NO: 1153829 - RNA, 19 nt, Human
gcaauucuccugccucagc

SEQ ID NO: 1153830 - RNA, 18 nt, Human
gcaauucuccugccucag

SEQ ID NO: 1153831 - RNA, 17 nt, Human
gcaauucuccugccuca

SEQ ID NO: 1153832 - RNA, 16 nt, Human
gcaauucuccugccuc

SEQ ID NO: 1153833 - RNA, 15 nt, Human
gcaauucuccugccu

SEQ ID NO: 1153834 - RNA, 14 nt, Human
gcaauucuccugcc

SEQ ID NO: 1153835 - RNA, 15 nt, Human
gcaaauguggcuccu

SEQ ID NO: 1153836 - RNA, 16 nt, Human
gauuugagcucagccc

SEQ ID NO: 1153837 - RNA, 16 nt, Human
gauucucaugccucag

SEQ ID NO: 1153838 - RNA, 21 nt, Human
gauuacaggcuccugccacca

SEQ ID NO: 1153839 - RNA, 18 nt, Human
gauuacaggcuccugcca

SEQ ID NO: 1153840 - RNA, 17 nt, Human
gauuacaggcuccugcc

SEQ ID NO: 1153841 - RNA, 20 nt, Human
gauuacaggcgugagccacc

SEQ ID NO: 1153842 - RNA, 21 nt, Human
gaugguuccccuguucacucu

SEQ ID NO: 1153843 - RNA, 18 nt, Human
gaugguuccccuguucac

SEQ ID NO: 1153844 - RNA, 13 nt, Human
gaugguuccccug

SEQ ID NO: 1153845 - RNA, 20 nt, Human
gaugcugacuguacuccucc

SEQ ID NO: 1153846 - RNA, 17 nt, Human
gaugcugacuguacucc

SEQ ID NO: 1153847 - RNA, 21 nt, Human
gaugccccgucccccucuggc

SEQ ID NO: 1153848 - RNA, 16 nt, Human
gaugccccgucccccu

SEQ ID NO: 1153849 - RNA, 17 nt, Human
gaggggcugugggcgug

SEQ ID NO: 1153850 - RNA, 20 nt, Human
gagggagggggaaggcaggg

SEQ ID NO: 1153851 - RNA, 22 nt, Human
gagcccuguccugccuaaggcu

SEQ ID NO: 1153852 - RNA, 21 nt, Human
gagcauuagauuucucauuug

SEQ ID NO: 1153853 - RNA, 15 nt, Human
gagcauuagauuucu

SEQ ID NO: 1153854 - RNA, 17 nt, Human
gagaugaggccgccaug

SEQ ID NO: 1153855 - RNA, 21 nt, Human
gagaguggcuccucccggugc

SEQ ID NO: 1153856 - RNA, 16 nt, Human
gagaguggcuccuccc

SEQ ID NO: 1153857 - RNA, 16 nt, Human
gagagcccuucauuug

SEQ ID NO: 1153858 - RNA, 22 nt, Human
gagagagcuucuguugcugccu

SEQ ID NO: 1153859 - RNA, 19 nt, Human
gagagagcuucuguugcug

SEQ ID NO: 1153860 - RNA, 19 nt, Human
gacuuaaaauauuccugca

SEQ ID NO: 1153861 - RNA, 23 nt, Human
gacuccugcacacgcuccuuccu

SEQ ID NO: 1153862 - RNA, 14 nt, Human
gacuccucugucca

SEQ ID NO: 1153863 - RNA, 11 nt, Human
gacuccucugu

SEQ ID NO: 1153864 - RNA, 21 nt, Human
gacccccaaccaaguggcucc

SEQ ID NO: 1153865 - RNA, 12 nt, Human
gacccccaacca

SEQ ID NO: 1153866 - RNA, 22 nt, Human
gaccagccuccaugcugccucc

SEQ ID NO: 1153867 - RNA, 21 nt, Human
gaccagccuccaugcugccuc

SEQ ID NO: 1153868 - RNA, 20 nt, Human
gaccagccuccaugcugccu

SEQ ID NO: 1153869 - RNA, 14 nt, Human
gaccaccugcccaa

SEQ ID NO: 1153870 - RNA, 13 nt, Human
gaccaccugccca

SEQ ID NO: 1153871 - RNA, 16 nt, Human
gacaacagacuucuga

SEQ ID NO: 1153872 - RNA, 21 nt, Human
gaauuucuucaacucccugcc

SEQ ID NO: 1153873 - RNA, 15 nt, Human
gaaugcuguauaugu

SEQ ID NO: 1153874 - RNA, 15 nt, Human
cuuucuuccucugcu

SEQ ID NO: 1153875 - RNA, 14 nt, Human
cuuucuuccucugc

SEQ ID NO: 1153876 - RNA, 13 nt, Human
cuuucuuccucug

SEQ ID NO: 1153877 - RNA, 12 nt, Human
cuuucuuccucu

SEQ ID NO: 1153878 - RNA, 11 nt, Human
cuuucuuccuc

SEQ ID NO: 1153879 - RNA, 20 nt, Human
cuuucugggcaccggggccu

SEQ ID NO: 1153880 - RNA, 18 nt, Human
cuugaacuccugaccuca

SEQ ID NO: 1153881 - RNA, 16 nt, Human
cuugaacuccugaccu

SEQ ID NO: 1153882 - RNA, 13 nt, Human
cuugaacuccuga

SEQ ID NO: 1153883 - RNA, 15 nt, Human
cuucuguugcugccu

SEQ ID NO: 1153884 - RNA, 22 nt, Human
cuucuguggcucacagaacccu

SEQ ID NO: 1153885 - RNA, 15 nt, Human
cuucuguggcucaca

SEQ ID NO: 1153886 - RNA, 13 nt, Human
cuucuguggcuca

SEQ ID NO: 1153887 - RNA, 14 nt, Human
cuucugguugaugc

SEQ ID NO: 1153888 - RNA, 23 nt, Human
cuucuggguuccuuccucugagc

SEQ ID NO: 1153889 - RNA, 17 nt, Human
cuucuggguuccuuccu

SEQ ID NO: 1153890 - RNA, 16 nt, Human
cuucuggguuccuucc

SEQ ID NO: 1153891 - RNA, 17 nt, Human
cuucuccacuggaugga

SEQ ID NO: 1153892 - RNA, 15 nt, Human
cuucuccacuggaug

SEQ ID NO: 1153893 - RNA, 14 nt, Human
cuucuccacuggau

SEQ ID NO: 1153894 - RNA, 13 nt, Human
cuucuccacugga

SEQ ID NO: 1153895 - RNA, 15 nt, Human
cuuccucccucauuc

SEQ ID NO: 1153896 - RNA, 13 nt, Human
cuuccucccucau

SEQ ID NO: 1153897 - RNA, 19 nt, Human
cuuccuaauuccacagcug

SEQ ID NO: 1153898 - RNA, 18 nt, Human
cuuccuaauuccacagcu

SEQ ID NO: 1153899 - RNA, 17 nt, Human
cuuccuaauuccacagc

SEQ ID NO: 1153900 - RNA, 13 nt, Human
cuuccuaauucca

SEQ ID NO: 1153901 - RNA, 23 nt, Human
cuucccgcucagcccucccugcc

SEQ ID NO: 1153902 - RNA, 19 nt, Human
cuucccgcucagcccuccc

SEQ ID NO: 1153903 - RNA, 15 nt, Human
cuucagggagugagg

SEQ ID NO: 1153904 - RNA, 22 nt, Human
cuucaggcucuucuccuuucac

SEQ ID NO: 1153905 - RNA, 19 nt, Human
cuucaggcucuucuccuuu

SEQ ID NO: 1153906 - RNA, 16 nt, Human
cuucaacucccugccc

SEQ ID NO: 1153907 - RNA, 20 nt, Human
cuucaaccauuccccauggg

SEQ ID NO: 1153908 - RNA, 16 nt, Human
cuucaaccauucccca

SEQ ID NO: 1153909 - RNA, 17 nt, Human
cuucaaagcaaaugucu

SEQ ID NO: 1153910 - RNA, 14 nt, Human
cuuauagacaacau

SEQ ID NO: 1153911 - RNA, 16 nt, Human
cuguucugcacacagc

SEQ ID NO: 1153912 - RNA, 18 nt, Human
cuguucccauucuugcau

SEQ ID NO: 1153913 - RNA, 23 nt, Human
cugugggcgugagaccugccccu

SEQ ID NO: 1153914 - RNA, 22 nt, Human
cugugggcgugagaccugcccc

SEQ ID NO: 1153915 - RNA, 21 nt, Human
cugugggcgugagaccugccc

SEQ ID NO: 1153916 - RNA, 11 nt, Human
cugugccucug

SEQ ID NO: 1153917 - RNA, 23 nt, Human
cugucucaagagggcacuggugg

SEQ ID NO: 1153918 - RNA, 22 nt, Human
cugucucaagagggcacuggug

SEQ ID NO: 1153919 - RNA, 17 nt, Human
cuguccaggcacugcug

SEQ ID NO: 1153920 - RNA, 13 nt, Human
cugguuccucccc

SEQ ID NO: 1153921 - RNA, 12 nt, Human
cugguuccuccc

SEQ ID NO: 1153922 - RNA, 23 nt, Human
cugguggcccgacagccuggcac

SEQ ID NO: 1153923 - RNA, 22 nt, Human
cugguggcccgacagccuggca

SEQ ID NO: 1153924 - RNA, 21 nt, Human
cugguggcccgacagccuggc

SEQ ID NO: 1153925 - RNA, 22 nt, Human
cuggugcugccacacuucaggc

SEQ ID NO: 1153926 - RNA, 20 nt, Human
cuggugcugccacacuucag

SEQ ID NO: 1153927 - RNA, 13 nt, Human
cuggugcugccac

SEQ ID NO: 1153928 - RNA, 12 nt, Human
cuggugcugcca

SEQ ID NO: 1153929 - RNA, 19 nt, Human
cuggucacaggacucugcc

SEQ ID NO: 1153930 - RNA, 18 nt, Human
cuggucacaggacucugc

SEQ ID NO: 1153931 - RNA, 21 nt, Human
cuggcacuuggagacuuguau

SEQ ID NO: 1153932 - RNA, 14 nt, Human
cuggcacuuggaga

SEQ ID NO: 1153933 - RNA, 20 nt, Human
cuggacuccucuguccaggc

SEQ ID NO: 1153934 - RNA, 19 nt, Human
cuggacuccucuguccagg

SEQ ID NO: 1153935 - RNA, 18 nt, Human
cuggacuccucuguccag

SEQ ID NO: 1153936 - RNA, 17 nt, Human
cuggacuccucugucca

SEQ ID NO: 1153937 - RNA, 14 nt, Human
cuggacuccucugu

SEQ ID NO: 1153938 - RNA, 12 nt, Human
cugcuggcugcc

SEQ ID NO: 1153939 - RNA, 22 nt, Human
cugcugcccagccuccaagcuc

SEQ ID NO: 1153940 - RNA, 15 nt, Human
cugcugcccagccuc

SEQ ID NO: 1153941 - RNA, 12 nt, Human
cugcugcccagc

SEQ ID NO: 1153942 - RNA, 18 nt, Human
cugcugaaggaauaaauu

SEQ ID NO: 1153943 - RNA, 17 nt, Human
cugcugaaggaauaaau

SEQ ID NO: 1153944 - RNA, 21 nt, Human
cugcucuccucuugccacugc

SEQ ID NO: 1153945 - RNA, 20 nt, Human
cugcucuccucuugccacug

SEQ ID NO: 1153946 - RNA, 14 nt, Human
cugcucuccucuug

SEQ ID NO: 1153947 - RNA, 21 nt, Human
cugcccuuucugggcaccggg

SEQ ID NO: 1153948 - RNA, 22 nt, Human
cugcccugcugagucccaggcu

SEQ ID NO: 1153949 - RNA, 20 nt, Human
cugcccugcgggucacagga

SEQ ID NO: 1153950 - RNA, 23 nt, Human
cucccuucaaccauuccccaugg

SEQ ID NO: 1153951 - RNA, 22 nt, Human
cucccuucaaccauuccccaug

SEQ ID NO: 1153952 - RNA, 21 nt, Human
cucccuucaaccauuccccau

SEQ ID NO: 1153953 - RNA, 22 nt, Human
cucccaggcgccccuucccccu

SEQ ID NO: 1153954 - RNA, 20 nt, Human
cucccaggcgccccuucccc

SEQ ID NO: 1153955 - RNA, 19 nt, Human
cucccaggcgccccuuccc

SEQ ID NO: 1153956 - RNA, 14 nt, Human
cucccacaggcccu

SEQ ID NO: 1153957 - RNA, 16 nt, Human
cucccaaagugcuggg

SEQ ID NO: 1153958 - RNA, 17 nt, Human
cuccaugcugccuccag

SEQ ID NO: 1153959 - RNA, 16 nt, Human
cuccaugcugccucca

SEQ ID NO: 1153960 - RNA, 15 nt, Human
cuccaugcugccucc

SEQ ID NO: 1153961 - RNA, 14 nt, Human
cuccaugcugccuc

SEQ ID NO: 1153962 - RNA, 19 nt, Human
cuccagcuggguuggaaaa

SEQ ID NO: 1153963 - RNA, 23 nt, Human
cuccagcuggccgggagccugau

SEQ ID NO: 1153964 - RNA, 22 nt, Human
cuccagcuggccgggagccuga

SEQ ID NO: 1153965 - RNA, 16 nt, Human
cuccacuggauggagg

SEQ ID NO: 1153966 - RNA, 14 nt, Human
cuccacuggaugga

SEQ ID NO: 1153967 - RNA, 13 nt, Human
cuccacuggaugg

SEQ ID NO: 1153968 - RNA, 16 nt, Human
cuccacugccuucgau

SEQ ID NO: 1153969 - RNA, 15 nt, Human
cuccacugccuucga

SEQ ID NO: 1153970 - RNA, 14 nt, Human
cuccacugccuucg

SEQ ID NO: 1153971 - RNA, 15 nt, Human
cuccaaacccucgag

SEQ ID NO: 1153972 - RNA, 17 nt, Human
cuccaaacccucgaggc

SEQ ID NO: 1153973 - RNA, 21 nt, Human
cuccaaacccucgaggcggau

SEQ ID NO: 1153974 - RNA, 24 nt, Human
cucagguaaucgaccugccucggc

SEQ ID NO: 1153975 - RNA, 22 nt, Human
cucagguaaucgaccugccucg

SEQ ID NO: 1153976 - RNA, 20 nt, Human
cucagguaaucgaccugccu

SEQ ID NO: 1153977 - RNA, 19 nt, Human
cucagcucccaaggcucug

SEQ ID NO: 1153978 - RNA, 15 nt, Human
cucagcucccaaggc

SEQ ID NO: 1153979 - RNA, 21 nt, Human
cucagcccucccugccccucc

SEQ ID NO: 1153980 - RNA, 20 nt, Human
cucagcccucccugccccuc

SEQ ID NO: 1153981 - RNA, 19 nt, Human
cucagcccucccugccccu

SEQ ID NO: 1153982 - RNA, 14 nt, Human
cucagcccucccug

SEQ ID NO: 1153983 - RNA, 15 nt, Human
cucagagccaccccu

SEQ ID NO: 1153984 - RNA, 20 nt, Human
cucacugcauccuccgccuc

SEQ ID NO: 1153985 - RNA, 17 nt, Human
cucacagaacccuugga

SEQ ID NO: 1153986 - RNA, 11 nt, Human
cuauugguaaa

SEQ ID NO: 1153987 - RNA, 19 nt, Human
cuaugggggcacugaggac

SEQ ID NO: 1153988 - RNA, 19 nt, Human
cuaugauuuggaaaauaaa

SEQ ID NO: 1153989 - RNA, 15 nt, Human
cuaugauuuggaaaa

SEQ ID NO: 1153990 - RNA, 22 nt, Human
cuacuuagcaugucccuaccga

SEQ ID NO: 1153991 - RNA, 17 nt, Human
cuacuuagcaugucccu

SEQ ID NO: 1153992 - RNA, 23 nt, Human
cuaccgagucucuucuccacugg

SEQ ID NO: 1153993 - RNA, 22 nt, Human
cuaccgagucucuucuccacug

SEQ ID NO: 1153994 - RNA, 21 nt, Human
cuaccgagucucuucuccacu

SEQ ID NO: 1153995 - RNA, 19 nt, Human
cuaccgagucucuucucca

SEQ ID NO: 1153996 - RNA, 17 nt, Human
cuaccgagucucuucuc

SEQ ID NO: 1153997 - RNA, 22 nt, Human
cuacagcuaaucagcauucuca

SEQ ID NO: 1153998 - RNA, 21 nt, Human
cuacagcuaaucagcauucuc

SEQ ID NO: 1153999 - RNA, 19 nt, Human
cuacagcuaaucagcauuc

SEQ ID NO: 1154000 - RNA, 18 nt, Human
cuacagcuaaucagcauu

SEQ ID NO: 1154001 - RNA, 16 nt, Human
cuaauuccacagcugc

SEQ ID NO: 1154002 - RNA, 15 nt, Human
cuaauuccacagcug

SEQ ID NO: 1154003 - RNA, 14 nt, Human
cuaauuccacagcu

SEQ ID NO: 1154004 - RNA, 22 nt, Human
cuaauuauacccccugcaaagc

SEQ ID NO: 1154005 - RNA, 23 nt, Human
cuaaugcgcaggcuggcccugcc

SEQ ID NO: 1154006 - RNA, 22 nt, Human
cuaaugcgcaggcuggcccugc

SEQ ID NO: 1154007 - RNA, 20 nt, Human
cuaaugcgcaggcuggcccu

SEQ ID NO: 1154008 - RNA, 19 nt, Human
cuaaugcgcaggcuggccc

SEQ ID NO: 1154009 - RNA, 16 nt, Human
cuaaugcgcaggcugg

SEQ ID NO: 1154010 - RNA, 15 nt, Human
cuaaugcgcaggcug

SEQ ID NO: 1154011 - RNA, 21 nt, Human
cuaaucagcauucucacuccu

SEQ ID NO: 1154012 - RNA, 21 nt, Human
cuaaacugcccccucugcccu

SEQ ID NO: 1154013 - RNA, 13 nt, Human
cuaaacugccccc

SEQ ID NO: 1154014 - RNA, 12 nt, Human
cuaaacugcccc

SEQ ID NO: 1154015 - RNA, 20 nt, Human
cguuuguuccccaagacauu

SEQ ID NO: 1154016 - RNA, 23 nt, Human
cgggaccccgagccuggcuccaa

SEQ ID NO: 1154017 - RNA, 17 nt, Human
cggacuuagcugggaga

SEQ ID NO: 1154018 - RNA, 16 nt, Human
cggacuuagcugggag

SEQ ID NO: 1154019 - RNA, 18 nt, Human
cgcccggcuaauuuuugu

SEQ ID NO: 1154020 - RNA, 18 nt, Human
cgcccaacuaauuuuugu

SEQ ID NO: 1154021 - RNA, 24 nt, Human
cgcagcccugcuuugggcugcccu

SEQ ID NO: 1154022 - RNA, 15 nt, Human
cgcagcccugcuuug

SEQ ID NO: 1154023 - RNA, 13 nt, Human
cgcagcccugcuu

SEQ ID NO: 1154024 - RNA, 13 nt, Human
cgagccuggcucc

SEQ ID NO: 1154025 - RNA, 23 nt, Human
ccuuuguaaauugucagaugcug

SEQ ID NO: 1154026 - RNA, 21 nt, Human
ccuuuguaaauugucagaugc

SEQ ID NO: 1154027 - RNA, 23 nt, Human
ccuugacauuguagagcuucugg

SEQ ID NO: 1154028 - RNA, 18 nt, Human
ccuuccaugucgccucug

SEQ ID NO: 1154029 - RNA, 18 nt, Human
ccuggcuuuucacugcug

SEQ ID NO: 1154030 - RNA, 17 nt, Human
ccuggcuuuucacugcu

SEQ ID NO: 1154031 - RNA, 16 nt, Human
ccuggcuuuucacugc

SEQ ID NO: 1154032 - RNA, 13 nt, Human
ccuggccacgccc

SEQ ID NO: 1154033 - RNA, 16 nt, Human
ccuggagaacuagaga

SEQ ID NO: 1154034 - RNA, 13 nt, Human
ccuggagaacuag

SEQ ID NO: 1154035 - RNA, 12 nt, Human
ccuggagaacua

SEQ ID NO: 1154036 - RNA, 22 nt, Human
ccugccuguucccauucuugca

SEQ ID NO: 1154037 - RNA, 12 nt, Human
ccugccucagcc

SEQ ID NO: 1154038 - RNA, 23 nt, Human
ccugcccugguuuccugcccugg

SEQ ID NO: 1154039 - RNA, 22 nt, Human
ccugcccugguuuccugcccug

SEQ ID NO: 1154040 - RNA, 21 nt, Human
ccugcccugguuuccugcccu

SEQ ID NO: 1154041 - RNA, 20 nt, Human
ccugcccugguuuccugccc

SEQ ID NO: 1154042 - RNA, 19 nt, Human
ccugcccugguuuccugcc

SEQ ID NO: 1154043 - RNA, 14 nt, Human
ccugcccugguuuc

SEQ ID NO: 1154044 - RNA, 22 nt, Human
ccugcccugggaggcagugaug

SEQ ID NO: 1154045 - RNA, 20 nt, Human
ccugcccugggaggcaguga

SEQ ID NO: 1154046 - RNA, 15 nt, Human
ccugcccugggaggc

SEQ ID NO: 1154047 - RNA, 14 nt, Human
ccugcccugggagg

SEQ ID NO: 1154048 - RNA, 12 nt, Human
ccugcccuggga

SEQ ID NO: 1154049 - RNA, 10 nt, Human
ccugcccugg

SEQ ID NO: 1154050 - RNA, 22 nt, Human
ccugccccuccucucugcccua

SEQ ID NO: 1154051 - RNA, 21 nt, Human
ccugccccuccucucugcccu

SEQ ID NO: 1154052 - RNA, 20 nt, Human
ccugccccuccucucugccc

SEQ ID NO: 1154053 - RNA, 19 nt, Human
ccugccccuccucucugcc

SEQ ID NO: 1154054 - RNA, 18 nt, Human
ccugccccuccucucugc

SEQ ID NO: 1154055 - RNA, 18 nt, Human
ccugccccucccuucaac

SEQ ID NO: 1154056 - RNA, 16 nt, Human
ccugccccucccuuca

SEQ ID NO: 1154057 - RNA, 15 nt, Human
ccugccccucccuuc

SEQ ID NO: 1154058 - RNA, 14 nt, Human
ccugccccucccuu

SEQ ID NO: 1154059 - RNA, 19 nt, Human
ccugccaccacgcccggcu

SEQ ID NO: 1154060 - RNA, 15 nt, Human
ccugccaccacgccc

SEQ ID NO: 1154061 - RNA, 23 nt, Human
ccugcauuugugaaaugauggug

SEQ ID NO: 1154062 - RNA, 21 nt, Human
ccugcacacgcuccuuccucu

SEQ ID NO: 1154063 - RNA, 19 nt, Human
ccugcaaagcccagcuuga

SEQ ID NO: 1154064 - RNA, 23 nt, Human
ccugcacaaagcccuuccauguc

SEQ ID NO: 1154065 - RNA, 22 nt, Human
ccugcacaaagcccuuccaugu

SEQ ID NO: 1154066 - RNA, 18 nt, Human
ccugcaaagcccagcuug

SEQ ID NO: 1154067 - RNA, 17 nt, Human
ccugcaaagcccagcuu

SEQ ID NO: 1154068 - RNA, 16 nt, Human
ccugcaaagcccagcu

SEQ ID NO: 1154069 - RNA, 15 nt, Human
ccugcaaagcccagc

SEQ ID NO: 1154070 - RNA, 14 nt, Human
ccugcaaagcccag

SEQ ID NO: 1154071 - RNA, 19 nt, Human
ccugaaguaagcaaagacu

SEQ ID NO: 1154072 - RNA, 11 nt, Human
ccucuuccuga

SEQ ID NO: 1154073 - RNA, 21 nt, Human
ccuaccgagucucuucuccac

SEQ ID NO: 1154074 - RNA, 20 nt, Human
ccuaccgagucucuucucca

SEQ ID NO: 1154075 - RNA, 19 nt, Human
ccuaccgagucucuucucc

SEQ ID NO: 1154076 - RNA, 17 nt, Human
ccuaccgagucucuucu

SEQ ID NO: 1154077 - RNA, 16 nt, Human
ccuaccgagucucuuc

SEQ ID NO: 1154078 - RNA, 11 nt, Human
ccguggcuucc

SEQ ID NO: 1154079 - RNA, 14 nt, Human
ccguggcuucccgc

SEQ ID NO: 1154080 - RNA, 17 nt, Human
ccggaggggccuggcag

SEQ ID NO: 1154081 - RNA, 16 nt, Human
ccggaggggccuggca

SEQ ID NO: 1154082 - RNA, 15 nt, Human
ccggaggggccuggc

SEQ ID NO: 1154083 - RNA, 14 nt, Human
ccggaggggccugg

SEQ ID NO: 1154084 - RNA, 21 nt, Human
ccgagucucuucuccacugga

SEQ ID NO: 1154085 - RNA, 20 nt, Human
ccgagucucuucuccacugg

SEQ ID NO: 1154086 - RNA, 19 nt, Human
ccgagucucuucuccacug

SEQ ID NO: 1154087 - RNA, 18 nt, Human
ccgagucucuucuccacu

SEQ ID NO: 1154088 - RNA, 16 nt, Human
ccgagucucuucucca

SEQ ID NO: 1154089 - RNA, 14 nt, Human
ccgagucucuucuc

SEQ ID NO: 1154090 - RNA, 20 nt, Human
ccgaguagcugagauuauag

SEQ ID NO: 1154091 - RNA, 20 nt, Human
cccuuccaugucgccucugc

SEQ ID NO: 1154092 - RNA, 18 nt, Human
cccuucaaccauucccca

SEQ ID NO: 1154093 - RNA, 14 nt, Human
cccuucaaccauuc

SEQ ID NO: 1154094 - RNA, 20 nt, Human
cccuuagaaguuuguuguga

SEQ ID NO: 1154095 - RNA, 15 nt, Human
cccuggugcugccac

SEQ ID NO: 1154096 - RNA, 14 nt, Human
cccuggugcugcca

SEQ ID NO: 1154097 - RNA, 13 nt, Human
cccuggugcugcc

SEQ ID NO: 1154098 - RNA, 16 nt, Human
cccuggugcugccaca

SEQ ID NO: 1154099 - RNA, 23 nt, Human
cccugcugagucccaggcugagc

SEQ ID NO: 1154100 - RNA, 21 nt, Human
cccugcugagucccaggcuga

SEQ ID NO: 1154101 - RNA, 21 nt, Human
cccugcgggucacaggaggga

SEQ ID NO: 1154102 - RNA, 19 nt, Human
cccugcgggucacaggagg

SEQ ID NO: 1154103 - RNA, 21 nt, Human
cccucuguucugcacacagca

SEQ ID NO: 1154104 - RNA, 20 nt, Human
cccucuguucugcacacagc

SEQ ID NO: 1154105 - RNA, 22 nt, Human
cccucuggcuccagcuggccgg

SEQ ID NO: 1154106 - RNA, 17 nt, Human
cccucuggcuccagcug

SEQ ID NO: 1154107 - RNA, 16 nt, Human
cccucuggcuccagcu

SEQ ID NO: 1154108 - RNA, 12 nt, Human
cccucuggcucc

SEQ ID NO: 1154109 - RNA, 14 nt, Human
cccucugcccugcg

SEQ ID NO: 1154110 - RNA, 13 nt, Human
cccucugcccugc

SEQ ID NO: 1154111 - RNA, 12 nt, Human
cccucugcccug

SEQ ID NO: 1154112 - RNA, 14 nt, Human
cccucccugccccu

SEQ ID NO: 1154113 - RNA, 14 nt, Human
cccgcucagcccuc

SEQ ID NO: 1154114 - RNA, 12 nt, Human
cccucccacagc

SEQ ID NO: 1154115 - RNA, 13 nt, Human
cccgcucagcccu

SEQ ID NO: 1154116 - RNA, 12 nt, Human
cccgcucagccc

SEQ ID NO: 1154117 - RNA, 14 nt, Human
cccucccacagcgc

SEQ ID NO: 1154118 - RNA, 15 nt, Human
cccgcucagcccucc

SEQ ID NO: 1154119 - RNA, 18 nt, Human
cccgacagccuggcacag

SEQ ID NO: 1154120 - RNA, 15 nt, Human
cccgacagccuggca

SEQ ID NO: 1154121 - RNA, 13 nt, Human
cccgagccuggcu

SEQ ID NO: 1154122 - RNA, 15 nt, Human
cccgagccuggcucc

SEQ ID NO: 1154123 - RNA, 14 nt, Human
cccgacagccuggc

SEQ ID NO: 1154124 - RNA, 15 nt, Human
ccccuguucacucua

SEQ ID NO: 1154125 - RNA, 22 nt, Human
ccccuggcuuuucacugcuggc

SEQ ID NO: 1154126 - RNA, 20 nt, Human
ccccuggcuuuucacugcug

SEQ ID NO: 1154127 - RNA, 18 nt, Human
ccccuggcuuuucacugc

SEQ ID NO: 1154128 - RNA, 14 nt, Human
ccccucugcccugc

SEQ ID NO: 1154129 - RNA, 13 nt, Human
ccccucugcccug

SEQ ID NO: 1154130 - RNA, 12 nt, Human
ccccucugcccu

SEQ ID NO: 1154131 - RNA, 17 nt, Human
ccccuccucucugcccu

SEQ ID NO: 1154132 - RNA, 15 nt, Human
ccccuccucucugcc

SEQ ID NO: 1154133 - RNA, 22 nt, Human
ccccuccuccuggacuccugca

SEQ ID NO: 1154134 - RNA, 18 nt, Human
ccccuccuccuggacucc

SEQ ID NO: 1154135 - RNA, 15 nt, Human
ccccucccuucaacc

SEQ ID NO: 1154136 - RNA, 23 nt, Human
ccccuccaaucccaccaacccuc

SEQ ID NO: 1154137 - RNA, 20 nt, Human
ccccucauagcccucacccu

SEQ ID NO: 1154138 - RNA, 21 nt, Human
cccccugcaaagcccagcuug

SEQ ID NO: 1154139 - RNA, 19 nt, Human
cccccugcaaagcccagcu

SEQ ID NO: 1154140 - RNA, 18 nt, Human
cccccugcaaagcccagc

SEQ ID NO: 1154141 - RNA, 21 nt, Human
cccccucuggcuccagcuggc

SEQ ID NO: 1154142 - RNA, 19 nt, Human
cccccucuggcuccagcug

SEQ ID NO: 1154143 - RNA, 12 nt, Human
cccccucuggcu

SEQ ID NO: 1154144 - RNA, 22 nt, Human
ccccauaauuuuuuuuuuccuu

SEQ ID NO: 1154145 - RNA, 14 nt, Human
cccaucucuucugg

SEQ ID NO: 1154146 - RNA, 13 nt, Human
cccaguuguauuu

SEQ ID NO: 1154147 - RNA, 19 nt, Human
cccacauagugaugguucc

SEQ ID NO: 1154148 - RNA, 18 nt, Human
cccacaggcccuuccucu

SEQ ID NO: 1154149 - RNA, 16 nt, Human
cccacaggcccuuccu

SEQ ID NO: 1154150 - RNA, 13 nt, Human
cccacagcgcugg

SEQ ID NO: 1154151 - RNA, 21 nt, Human
ccagguggccacuccagaccc

SEQ ID NO: 1154152 - RNA, 16 nt, Human
ccagguggccacucca

SEQ ID NO: 1154153 - RNA, 24 nt, Human
ccagauuuuuuacagcugccugca

SEQ ID NO: 1154154 - RNA, 22 nt, Human
ccagagaguggcuccucccggu

SEQ ID NO: 1154155 - RNA, 18 nt, Human
ccagagaguggcuccucc

SEQ ID NO: 1154156 - RNA, 16 nt, Human
ccagagaguggcuccu

SEQ ID NO: 1154157 - RNA, 15 nt, Human
ccagagaguggcucc

SEQ ID NO: 1154158 - RNA, 14 nt, Human
ccagagaguggcuc

SEQ ID NO: 1154159 - RNA, 24 nt, Human
ccagaccccuggcuuuucacugcu

SEQ ID NO: 1154160 - RNA, 21 nt, Human
ccacugccuucgauacaccgg

SEQ ID NO: 1154161 - RNA, 16 nt, Human
ccacugccucuuccuc

SEQ ID NO: 1154162 - RNA, 13 nt, Human
ccacugccucuuc

SEQ ID NO: 1154163 - RNA, 14 nt, Human
ccaccuucccaugc

SEQ ID NO: 1154164 - RNA, 16 nt, Human
agcuuuucccuucuuu

SEQ ID NO: 1154165 - RNA, 13 nt, Human
agcuuuucccuuc

SEQ ID NO: 1154166 - RNA, 23 nt, Human
agcuucuguugcugccucaugcu

SEQ ID NO: 1154167 - RNA, 22 nt, Human
aggaacguaaucguguccccua

SEQ ID NO: 1154168 - RNA, 17 nt, Human
aggaaauccaggguggu

SEQ ID NO: 1154169 - RNA, 22 nt, Human
agcuucuguugcugccucaugc

SEQ ID NO: 1154170 - RNA, 21 nt, Human
agcuucuguugcugccucaug

SEQ ID NO: 1154171 - RNA, 14 nt, Human
agcuggguuggaaa

SEQ ID NO: 1154172 - RNA, 22 nt, Human
aggcacugcugcccagccucca

SEQ ID NO: 1154173 - RNA, 16 nt, Human
aggcacugcugcccag

SEQ ID NO: 1154174 - RNA, 14 nt, Human
aggcacugcugccc

SEQ ID NO: 1154175 - RNA, 17 nt, Human
aggacccggaggggccu

SEQ ID NO: 1154176 - RNA, 21 nt, Human
aggcugaacuuguuuucuggg

SEQ ID NO: 1154177 - RNA, 20 nt, Human
aggcugaacuuguuuucugg

SEQ ID NO: 1154178 - RNA, 19 nt, Human
agguaaucgaccugccucg

SEQ ID NO: 1154179 - RNA, 18 nt, Human
agguaaucgaccugccuc

SEQ ID NO: 1154180 - RNA, 17 nt, Human
agguaaucgaccugccu

SEQ ID NO: 1154181 - RNA, 23 nt, Human
agagagcuucuguugcugccuca

SEQ ID NO: 1154182 - RNA, 20 nt, Human
agagagcuucuguugcugcc

SEQ ID NO: 1154183 - RNA, 16 nt, Human
agagagcuucuguugc

SEQ ID NO: 1154184 - RNA, 16 nt, Human
agagaguggcuccucc

SEQ ID NO: 1154185 - RNA, 14 nt, Human
agagaguggcuccu

SEQ ID NO: 1154186 - RNA, 15 nt, Human
agagcccuucauuug

SEQ ID NO: 1154187 - RNA, 23 nt, Human
agauggcugugccucugccuguc

SEQ ID NO: 1154188 - RNA, 23 nt, Human
agccccauaauuuuuuuuuuccu

SEQ ID NO: 1154189 - RNA, 17 nt, Human
aucugggccagaauuuc

SEQ ID NO: 1154190 - RNA, 15 nt, Human
aucugggccagaauu

SEQ ID NO: 1154191 - RNA, 13 nt, Human
aucaccugcccug

SEQ ID NO: 1154192 - RNA, 12 nt, Human
aucaccugcccu

SEQ ID NO: 1154193 - RNA, 14 nt, Human
aucccggcugcccu

SEQ ID NO: 1154194 - RNA, 16 nt, Human
auggaggaaaaccaag

SEQ ID NO: 1154195 - RNA, 13 nt, Human
auggaaauguuua

SEQ ID NO: 1154196 - RNA, 16 nt, Human
augaugugugaaaacu

SEQ ID NO: 1154197 - RNA, 23 nt, Human
augauguauguugaagccuuugu

SEQ ID NO: 1154198 - RNA, 18 nt, Human
agucaaggguaggguggg

SEQ ID NO: 1154199 - RNA, 19 nt, Human
agugauucucaugccucag

SEQ ID NO: 1154200 - RNA, 18 nt, Human
agugauucucaugccuca

SEQ ID NO: 1154201 - RNA, 22 nt, Human
auacccccugcaaagcccagcu

SEQ ID NO: 1154202 - RNA, 19 nt, Human
aacugaccagccuccaugc

SEQ ID NO: 1154203 - RNA, 14 nt, Human
aacugaccagccuc

SEQ ID NO: 1154204 - RNA, 23 nt, Human
aacugaacucugacaacagacuu

SEQ ID NO: 1154205 - RNA, 20 nt, Human
aacugaacucugacaacaga

SEQ ID NO: 1154206 - RNA, 19 nt, Human
aacugaacucugacaacag

SEQ ID NO: 1154207 - RNA, 16 nt, Human
aacugaacucugacaa

SEQ ID NO: 1154208 - RNA, 13 nt, Human
aacagcucgacuu

SEQ ID NO: 1154209 - RNA, 18 nt, Human
aaauugcauuuccugaca

SEQ ID NO: 1154210 - RNA, 16 nt, Human
aaauaguaaaaauaaa

SEQ ID NO: 1154211 - RNA, 13 nt, Human
aaauaguaaaaau

SEQ ID NO: 1154212 - RNA, 22 nt, Human
aaauacuguuuuuaacaacuau

SEQ ID NO: 1154213 - RNA, 22 nt, Human
aaauaaaauuaaagcugaaaac

SEQ ID NO: 1154214 - RNA, 11 nt, Human
aaacugccccc

SEQ ID NO: 1154215 - RNA, 20 nt, Human
aaggacuaggguccugggga

SEQ ID NO: 1154216 - RNA, 18 nt, Human
aaggacuaggguccuggg

SEQ ID NO: 1154217 - RNA, 21 nt, Human
aaggacccggaggggccuggc

SEQ ID NO: 1154218 - RNA, 18 nt, Human
aaggacccggaggggccu

SEQ ID NO: 1154219 - RNA, 11 nt, Human
aagcagcucuu

SEQ ID NO: 1154220 - RNA, 23 nt, Human
aauaaaauuaaagcugaaaacug

SEQ ID NO: 1154221 - RNA, 22 nt, Human
aauggucuuucuaaugugugaa

SEQ ID NO: 1154222 - RNA, 18 nt, Human
aauccaggguggugguga

SEQ ID NO: 1154223 - RNA, 18 nt, Human
acuuguaaaugugguaaa

SEQ ID NO: 1154224 - RNA, 20 nt, Human
acuuguaaaugugguaaaga

SEQ ID NO: 1154225 - RNA, 20 nt, Human
acugcccccucugcccugcg

SEQ ID NO: 1154226 - RNA, 19 nt, Human
acugcccccucugcccugc

SEQ ID NO: 1154227 - RNA, 19 nt, Human
acugucucaagagggcacu

SEQ ID NO: 1154228 - RNA, 23 nt, Human
acugguggcccgacagccuggca

SEQ ID NO: 1154229 - RNA, 22 nt, Human
acugguggcccgacagccuggc

SEQ ID NO: 1154230 - RNA, 21 nt, Human
acugguggcccgacagccugg

SEQ ID NO: 1154231 - RNA, 18 nt, Human
accugccccuccucucug

SEQ ID NO: 1154232 - RNA, 14 nt, Human
accugccccuccuc

SEQ ID NO: 1154233 - RNA, 21 nt, Human
accugcccaaccugcucuccu

SEQ ID NO: 1154234 - RNA, 13 nt, Human
accuuuauucugg

SEQ ID NO: 1154235 - RNA, 12 nt, Human
accuuuauucug

SEQ ID NO: 1154236 - RNA, 22 nt, Human
accugccccuccucucugcccu

SEQ ID NO: 1154237 - RNA, 20 nt, Human
accugccccuccucucugcc

SEQ ID NO: 1154238 - RNA, 14 nt, Human
acucaguggggagg

SEQ ID NO: 1154239 - RNA, 16 nt, Human
acuaggguccugggga

SEQ ID NO: 1154240 - RNA, 15 nt, Human
acuaggguccugggg

SEQ ID NO: 1154241 - RNA, 22 nt, Human
acaggugugagccaccacgccc

SEQ ID NO: 1154242 - RNA, 21 nt, Human
acaggugugagccaccacgcc

SEQ ID NO: 1154243 - RNA, 21 nt, Human
acagcugcucaauaaaguaca

SEQ ID NO: 1154244 - RNA, 21 nt, Human
acagaacacauaauucaggaa

SEQ ID NO: 1154245 - RNA, 15 nt, Human
acagaagcagcucuu

SEQ ID NO: 1154246 - RNA, 12 nt, Human
acagaagcagcu

SEQ ID NO: 1154247 - RNA, 13 nt, Human
acagaagcagcuc

SEQ ID NO: 1154248 - RNA, 14 nt, Human
acagaagcagcucu

SEQ ID NO: 1154249 - RNA, 19 nt, Human
acacgcuccuuccucugag

SEQ ID NO: 1154250 - RNA, 17 nt, Human
acacgcuccuuccucug

SEQ ID NO: 1154251 - RNA, 18 nt, Human
acaacuaugauuuggaaa

SEQ ID NO: 1154252 - RNA, 23 nt, Human
acaaguaugaauaaagacaccua

SEQ ID NO: 1154253 - RNA, 21 nt, Human
acaaguaugaauaaagacacc

SEQ ID NO: 1154254 - RNA, 22 nt, Human
accccuaaagagauacuuugau

SEQ ID NO: 1154255 - RNA, 18 nt, Human
accccgaccaccugccca

SEQ ID NO: 1154256 - RNA, 20 nt, Human
accacgcccggcuaauuuuu

SEQ ID NO: 1154257 - RNA, 14 nt, Human
accacgcccggcua

SEQ ID NO: 1154258 - RNA, 20 nt, Human
cugcccugguuuccugcccu

SEQ ID NO: 1154259 - RNA, 21 nt, Human
cugcccugguuuccugcccug

SEQ ID NO: 1154260 - RNA, 19 nt, Human
cugcccugguuuccugccc

SEQ ID NO: 1154261 - RNA, 18 nt, Human
cugcccugguuuccugcc

SEQ ID NO: 1154262 - RNA, 17 nt, Human
cugcccugguuuccugc

SEQ ID NO: 1154263 - RNA, 23 nt, Human
cugcccuggugcugccacacuuc

SEQ ID NO: 1154264 - RNA, 16 nt, Human
cugcccuggugcugcc

SEQ ID NO: 1154265 - RNA, 15 nt, Human
cugcccuggugcugc

SEQ ID NO: 1154266 - RNA, 14 nt, Human
cugcccuggugcug

SEQ ID NO: 1154267 - RNA, 13 nt, Human
cugcccuggugcu

SEQ ID NO: 1154268 - RNA, 12 nt, Human
cugcccuggugc

SEQ ID NO: 1154269 - RNA, 19 nt, Human
cugccuguucccauucuug

SEQ ID NO: 1154270 - RNA, 15 nt, Human
cugccuguucccauu

SEQ ID NO: 1154271 - RNA, 17 nt, Human
cuggauccaucaggcca

SEQ ID NO: 1154272 - RNA, 15 nt, Human
cuggagaacuagaga

SEQ ID NO: 1154273 - RNA, 14 nt, Human
cuggagaacuagag

SEQ ID NO: 1154274 - RNA, 23 nt, Human
cuggacuccucuguccaggcacu

SEQ ID NO: 1154275 - RNA, 22 nt, Human
cuggacuccucuguccaggcac

SEQ ID NO: 1154276 - RNA, 20 nt, Human
cuggaucuccauucucucag

SEQ ID NO: 1154277 - RNA, 19 nt, Human
cuggauccaucaggccacu

SEQ ID NO: 1154278 - RNA, 13 nt, Human
cuggcagccgugc

SEQ ID NO: 1154279 - RNA, 22 nt, Human
cuggcucccacaggcccuuccu

SEQ ID NO: 1154280 - RNA, 22 nt, Human
cuggccgggaccccgagccugg

SEQ ID NO: 1154281 - RNA, 19 nt, Human
cuggcucccacaggcccuu

SEQ ID NO: 1154282 - RNA, 19 nt, Human
cuggcagccgugccuucag

SEQ ID NO: 1154283 - RNA, 18 nt, Human
cuggcagccgugccuuca

SEQ ID NO: 1154284 - RNA, 17 nt, Human
cuggcagccgugccuuc

SEQ ID NO: 1154285 - RNA, 16 nt, Human
cugugaacugaacucu

SEQ ID NO: 1154286 - RNA, 15 nt, Human
cugugaacugaacuc

SEQ ID NO: 1154287 - RNA, 13 nt, Human
cugugaacugaac

SEQ ID NO: 1154288 - RNA, 13 nt, Human
cuguucacucuac

SEQ ID NO: 1154289 - RNA, 14 nt, Human
cuguugcugccuca

SEQ ID NO: 1154290 - RNA, 20 nt, Human
cuuacauuagcaguuugcuu

SEQ ID NO: 1154291 - RNA, 13 nt, Human
cuuccucugcuga

SEQ ID NO: 1154292 - RNA, 12 nt, Human
cuuccucugcug

SEQ ID NO: 1154293 - RNA, 11 nt, Human
cuuccucugcu

SEQ ID NO: 1154294 - RNA, 21 nt, Human
cuuccucuccacugccuucga

SEQ ID NO: 1154295 - RNA, 19 nt, Human
cuuccucuccacugccuuc

SEQ ID NO: 1154296 - RNA, 17 nt, Human
cuuccucuccacugccu

SEQ ID NO: 1154297 - RNA, 16 nt, Human
cuuccucuccacugcc

SEQ ID NO: 1154298 - RNA, 22 nt, Human
gaaaauuaggauuucaugauuu

SEQ ID NO: 1154299 - RNA, 18 nt, Human
gaaaauuaggauuucaug

SEQ ID NO: 1154300 - RNA, 19 nt, Human
gaaaacugcaacuuguaaa

SEQ ID NO: 1154301 - RNA, 18 nt, Human
gaaagaaguggggacaga

SEQ ID NO: 1154302 - RNA, 19 nt, Human
gacauuguagagcuucugg

SEQ ID NO: 1154303 - RNA, 20 nt, Human
gacccggaggggccuggcag

SEQ ID NO: 1154304 - RNA, 19 nt, Human
gacccggaggggccuggca

SEQ ID NO: 1154305 - RNA, 18 nt, Human
gacccggaggggccuggc

SEQ ID NO: 1154306 - RNA, 17 nt, Human
gacccggaggggccugg

SEQ ID NO: 1154307 - RNA, 16 nt, Human
gaccccugagcuugca

SEQ ID NO: 1154308 - RNA, 23 nt, Human
gaccucagguaaucgaccugccu

SEQ ID NO: 1154309 - RNA, 22 nt, Human
gaccucagguaaucgaccugcc

SEQ ID NO: 1154310 - RNA, 18 nt, Human
gacuuuuauuuccaguga

SEQ ID NO: 1154311 - RNA, 15 nt, Human
gagauuauguucuuu

SEQ ID NO: 1154312 - RNA, 22 nt, Human
gagagcuucuguugcugccuca

SEQ ID NO: 1154313 - RNA, 12 nt, Human
gagggccugggc

SEQ ID NO: 1154314 - RNA, 22 nt, Human
gaucaaaccccgaccaccugcc

SEQ ID NO: 1154315 - RNA, 23 nt, Human
gauauuuucaacgcagcccugcu

SEQ ID NO: 1154316 - RNA, 22 nt, Human
gauauuuucaacgcagcccugc

SEQ ID NO: 1154317 - RNA, 21 nt, Human
gauauuuucaacgcagcccug

SEQ ID NO: 1154318 - RNA, 19 nt, Human
gauauuuucaacgcagccc

SEQ ID NO: 1154319 - RNA, 18 nt, Human
gauacuuugauauuuuca

SEQ ID NO: 1154320 - RNA, 17 nt, Human
gaucugaugcaagcaag

SEQ ID NO: 1154321 - RNA, 20 nt, Human
gcaaccuucgccaccugggu

SEQ ID NO: 1154322 - RNA, 17 nt, Human
gcauccuccgccucccg

SEQ ID NO: 1154323 - RNA, 17 nt, Human
gccauugacuucuuccc

SEQ ID NO: 1154324 - RNA, 17 nt, Human
gcccccucugcccugcg

SEQ ID NO: 1154325 - RNA, 16 nt, Human
gcccccucugcccugc

SEQ ID NO: 1154326 - RNA, 15 nt, Human
gcccccucugcccug

SEQ ID NO: 1154327 - RNA, 16 nt, Human
gcccuuccucuccacu

SEQ ID NO: 1154328 - RNA, 15 nt, Human
gcccuuccucuccac

SEQ ID NO: 1154329 - RNA, 14 nt, Human
gcccuuccucucca

SEQ ID NO: 1154330 - RNA, 12 nt, Human
gcccuuccucuc

SEQ ID NO: 1154331 - RNA, 22 nt, Human
gcccuuccaugucgccucugca

SEQ ID NO: 1154332 - RNA, 21 nt, Human
gcccuuccaugucgccucugc

SEQ ID NO: 1154333 - RNA, 12 nt, Human
gcccuuccaugu

SEQ ID NO: 1154334 - RNA, 20 nt, Human
gcccugcgggucacaggagg

SEQ ID NO: 1154335 - RNA, 19 nt, Human
gccuccugaguagcuggga

SEQ ID NO: 1154336 - RNA, 19 nt, Human
gccucaugcuaagacucag

SEQ ID NO: 1154337 - RNA, 17 nt, Human
gcgcaggcuggcccugc

SEQ ID NO: 1154338 - RNA, 16 nt, Human
gcgcaggcuggcccug

SEQ ID NO: 1154339 - RNA, 15 nt, Human
gcgcaggcuggcccu

SEQ ID NO: 1154340 - RNA, 14 nt, Human
gcgcaggcuggccc

SEQ ID NO: 1154341 - RNA, 23 nt, Human
gcugcucuugaacuccugaccuc

SEQ ID NO: 1154342 - RNA, 13 nt, Human
gcugccucaugcu

SEQ ID NO: 1154343 - RNA, 20 nt, Human
gcuggcugccuuagaaccuu

SEQ ID NO: 1154344 - RNA, 14 nt, Human
gcuggcugccuuag

SEQ ID NO: 1154345 - RNA, 11 nt, Human
gcuggcugccu

SEQ ID NO: 1154346 - RNA, 16 nt, Human
gcugugccucugccug

SEQ ID NO: 1154347 - RNA, 15 nt, Human
gcugugccucugccu

SEQ ID NO: 1154348 - RNA, 14 nt, Human
gcugugccucugcc

SEQ ID NO: 1154349 - RNA, 16 nt, Human
ggaaauccaggguggu

SEQ ID NO: 1154350 - RNA, 22 nt, Human
ggacagggcauggccagguggc

SEQ ID NO: 1154351 - RNA, 15 nt, Human
ggacagggcauggcc

SEQ ID NO: 1154352 - RNA, 21 nt, Human
ggaucuuuggacagaagcagc

SEQ ID NO: 1154353 - RNA, 22 nt, Human
ggaucuuuggacagaagcagcu

SEQ ID NO: 1154354 - RNA, 20 nt, Human
ggcagggagggccugggccc

SEQ ID NO: 1154355 - RNA, 19 nt, Human
ggcagggagggccugggcc

SEQ ID NO: 1154356 - RNA, 18 nt, Human
ggcagggagggccugggc

SEQ ID NO: 1154357 - RNA, 17 nt, Human
ggcagggagggccuggg

SEQ ID NO: 1154358 - RNA, 10 nt, Human
ggcagggagg

SEQ ID NO: 1154359 - RNA, 16 nt, Human
ggcagccucuucaaaa

SEQ ID NO: 1154360 - RNA, 20 nt, Human
ggcaucgcaauguaagacuc

SEQ ID NO: 1154361 - RNA, 17 nt, Human
ggccuucagggagugag

SEQ ID NO: 1154362 - RNA, 15 nt, Human
ggccuggcagccgug

SEQ ID NO: 1154363 - RNA, 14 nt, Human
ggccuggcagccgu

SEQ ID NO: 1154364 - RNA, 11 nt, Human
ggccugccugu

SEQ ID NO: 1154365 - RNA, 23 nt, Human
ggcuacaccuuagccugcccucc

SEQ ID NO: 1154366 - RNA, 22 nt, Human
ggcuacaccuuagccugcccuc

SEQ ID NO: 1154367 - RNA, 18 nt, Human
ggcuaauuuuuguuuugu

SEQ ID NO: 1154368 - RNA, 18 nt, Human
ggcgugagaccugccccu

SEQ ID NO: 1154369 - RNA, 17 nt, Human
ggcgugagaccugcccc

SEQ ID NO: 1154370 - RNA, 16 nt, Human
ggcgugagaccugccc

SEQ ID NO: 1154371 - RNA, 14 nt, Human
ggcgugagaccugc

SEQ ID NO: 1154372 - RNA, 18 nt, Human
ggcugcccuuucugggca

SEQ ID NO: 1154373 - RNA, 14 nt, Human
ggcugcccuuucug

SEQ ID NO: 1154374 - RNA, 11 nt, Human
ggcugcccuuu

SEQ ID NO: 1154375 - RNA, 10 nt, Human
ggcugcccuu

SEQ ID NO: 1154376 - RNA, 12 nt, Human
ggcugcccuggu

SEQ ID NO: 1154377 - RNA, 20 nt, Human
aaauauuccugcauuuguga

SEQ ID NO: 1154378 - RNA, 22 nt, Human
guacaaccuguucugcuuuccu

SEQ ID NO: 1154379 - RNA, 17 nt, Human
guaaucgaccugccucg

SEQ ID NO: 1154380 - RNA, 15 nt, Human
guaaucgaccugccu

SEQ ID NO: 1154381 - RNA, 19 nt, Human
gguuuccugcccugggagg

SEQ ID NO: 1154382 - RNA, 16 nt, Human
gguuuccugcccuggg

SEQ ID NO: 1154383 - RNA, 15 nt, Human
gguuuccugcccugg

SEQ ID NO: 1154384 - RNA, 13 nt, Human
gguuuccugcccu

SEQ ID NO: 1154385 - RNA, 12 nt, Human
gguuuccugccc

SEQ ID NO: 1154386 - RNA, 23 nt, Human
gguagggugggccuucagggagu

SEQ ID NO: 1154387 - RNA, 11 nt, Human
gguaggguggg

SEQ ID NO: 1154388 - RNA, 15 nt, Human
gggugguggugauag

SEQ ID NO: 1154389 - RNA, 17 nt, Human
aaaccuucacuuaggaa

SEQ ID NO: 1154390 - RNA, 20 nt, Human
gggcuaggaaauccagggug

SEQ ID NO: 1154391 - RNA, 19 nt, Human
gggcgugagaccugccccu

SEQ ID NO: 1154392 - RNA, 18 nt, Human
gggcgugagaccugcccc

SEQ ID NO: 1154393 - RNA, 23 nt, Human
aaaaugcuguauuagucacagag

SEQ ID NO: 1154394 - RNA, 15 nt, Human
aaaauauuccugcau

SEQ ID NO: 1154395 - RNA, 22 nt, Human
aaaauaugaccacacuccagcu

SEQ ID NO: 1154396 - RNA, 20 nt, Human
ccauaauuuuuuuuuuccuu

SEQ ID NO: 1154397 - RNA, 20 nt, Human
ccagcuugaaaccuucacuu

SEQ ID NO: 1154398 - RNA, 18 nt, Human
ccagcuugaaaccuucac

SEQ ID NO: 1154399 - RNA, 17 nt, Human
ccaggcaacuugggaac

SEQ ID NO: 1154400 - RNA, 22 nt, Human
ccaggauguacaaggacagccc

SEQ ID NO: 1154401 - RNA, 14 nt, Human
ccagucccccugcc

SEQ ID NO: 1154402 - RNA, 22 nt, Human
cccauaauuuuuuuuuuccuuu

SEQ ID NO: 1154403 - RNA, 23 nt, Human
cccauaauuuuuuuuuuccuuuu

SEQ ID NO: 1154404 - RNA, 17 nt, Human
ccccugcaaagcccagc

SEQ ID NO: 1154405 - RNA, 16 nt, Human
ccccugcaaagcccag

SEQ ID NO: 1154406 - RNA, 15 nt, Human
ccccugcaaagccca

SEQ ID NO: 1154407 - RNA, 13 nt, Human
cccggcugcccuu

SEQ ID NO: 1154408 - RNA, 12 nt, Human
cccggcugcccu

SEQ ID NO: 1154409 - RNA, 13 nt, Human
cccucagagccac

SEQ ID NO: 1154410 - RNA, 23 nt, Human
ccucauuuuugaauacaggcaua

SEQ ID NO: 1154411 - RNA, 20 nt, Human
ccugggccccaguuguauuu

SEQ ID NO: 1154412 - RNA, 19 nt, Human
ccuguccugccuaaggcug

SEQ ID NO: 1154413 - RNA, 17 nt, Human
ccuguccugccuaaggc

SEQ ID NO: 1154414 - RNA, 15 nt, Human
ccugguuuccugccc

SEQ ID NO: 1154415 - RNA, 16 nt, Human
ccugguuuccugcccu

SEQ ID NO: 1154416 - RNA, 14 nt, Human
ccugguuuccugcc

SEQ ID NO: 1154417 - RNA, 13 nt, Human
ccugguuuccugc

SEQ ID NO: 1154418 - RNA, 17 nt, Human
ccugugaacugaacucu

SEQ ID NO: 1154419 - RNA, 16 nt, Human
ccugugaacugaacuc

SEQ ID NO: 1154420 - RNA, 18 nt, Human
ccugugacuucagcucug

SEQ ID NO: 1154421 - RNA, 17 nt, Human
ccugccccagggcuccc

SEQ ID NO: 1154422 - RNA, 21 nt, Human
ccugaguagcugggauuacag

SEQ ID NO: 1154423 - RNA, 14 nt, Human
cucaauaaaguaca

SEQ ID NO: 1154424 - RNA, 11 nt, Human
cucacaaaaga

SEQ ID NO: 1154425 - RNA, 17 nt, Human
cuacguuaccaggcagg

SEQ ID NO: 1154426 - RNA, 11 nt, Human
cgugugugugu

SEQ ID NO: 1154427 - RNA, 14 nt, Human
cgacagccuggcac

SEQ ID NO: 1154428 - RNA, 13 nt, Human
cgacagccuggca

SEQ ID NO: 1154429 - RNA, 12 nt, Human
cgacagccuggc

SEQ ID NO: 1154430 - RNA, 15 nt, Human
ccuuucacaaccuuc

SEQ ID NO: 1154431 - RNA, 13 nt, Human
cgcaggcuggccc

SEQ ID NO: 1154432 - RNA, 16 nt, Human
cgagucucuucuccac

SEQ ID NO: 1154433 - RNA, 13 nt, Human
cgccucugcauuc

SEQ ID NO: 1154434 - RNA, 23 nt, Human
cgguguuuaagacauuuuuggaa

SEQ ID NO: 1154435 - RNA, 20 nt, Human
cugaguagcugggauuacag

SEQ ID NO: 1154436 - RNA, 15 nt, Human
cugaguagcugggau

SEQ ID NO: 1154437 - RNA, 14 nt, Human
cugaguagcuggga

SEQ ID NO: 1154438 - RNA, 22 nt, Human
cugaggacuuaaaauauuccug

SEQ ID NO: 1154439 - RNA, 14 nt, Human
cugaggaccagcca

SEQ ID NO: 1154440 - RNA, 19 nt, Human
cugacaacagacuucugaa

SEQ ID NO: 1154441 - RNA, 18 nt, Human
cugacaacagacuucuga

SEQ ID NO: 1154442 - RNA, 15 nt, Human
cugacaacagacuuc

SEQ ID NO: 1154443 - RNA, 20 nt, Human
cucuucaacugaccagccuc

SEQ ID NO: 1154444 - RNA, 17 nt, Human
cucuucaacugaccagc

SEQ ID NO: 1154445 - RNA, 16 nt, Human
cucuucaacugaccag

SEQ ID NO: 1154446 - RNA, 12 nt, Human
cucuguccaggc

SEQ ID NO: 1154447 - RNA, 15 nt, Human
cucuaucaccaagga

SEQ ID NO: 1154448 - RNA, 23 nt, Human
cuccuggggguucuuucuuccuc

SEQ ID NO: 1154449 - RNA, 22 nt, Human
cuccuggggguucuuucuuccu

SEQ ID NO: 1154450 - RNA, 20 nt, Human
cuccuggggguucuuucuuc

SEQ ID NO: 1154451 - RNA, 18 nt, Human
cuccuggggguucuuucu

SEQ ID NO: 1154452 - RNA, 15 nt, Human
cuccuggacuccugc

SEQ ID NO: 1154453 - RNA, 23 nt, Human
cuccucuucaacugaccagccuc

SEQ ID NO: 1154454 - RNA, 18 nt, Human
cuccucuucaacugacca

SEQ ID NO: 1154455 - RNA, 19 nt, Human
cuccucucugcccuaaugc

SEQ ID NO: 1154456 - RNA, 15 nt, Human
cuccucucugcccua

SEQ ID NO: 1154457 - RNA, 14 nt, Human
cuccucucugcccu

SEQ ID NO: 1154458 - RNA, 13 nt, Human
cuccucucugccc

SEQ ID NO: 1154459 - RNA, 13 nt, Human
cucccccaucucu

SEQ ID NO: 1154460 - RNA, 19 nt, Human
cuccaagcuccaucuccac

SEQ ID NO: 1154461 - RNA, 18 nt, Human
cuccaagcuccaucucca

SEQ ID NO: 1154462 - RNA, 14 nt, Human
cuccaagcuccauc

SEQ ID NO: 1154463 - RNA, 16 nt, Human
cucaugccucagccuc

SEQ ID NO: 1154464 - RNA, 12 nt, Human
cucaugccucag

SEQ ID NO: 1154465 - RNA, 17 nt, Human
cucagucucccucccuu

SEQ ID NO: 1154466 - RNA, 16 nt, Human
cucagucucccucccu

SEQ ID NO: 1154467 - RNA, 15 nt, Human
cucagucucccuccc

SEQ ID NO: 1154468 - RNA, 13 nt, Human
cucagucucccuc

SEQ ID NO: 1154469 - RNA, 14 nt, Human
ccacagcugcucaa

SEQ ID NO: 1154470 - RNA, 23 nt, Human
ccacagcgcuggccgggaccccg

SEQ ID NO: 1154471 - RNA, 13 nt, Human
ccacgcccggcua

SEQ ID NO: 1154472 - RNA, 20 nt, Human
cauguuggccaggcugcucu

SEQ ID NO: 1154473 - RNA, 23 nt, Human
caugucccuaccgagucucuucu

SEQ ID NO: 1154474 - RNA, 22 nt, Human
caugucccuaccgagucucuuc

SEQ ID NO: 1154475 - RNA, 16 nt, Human
caugucccuaccgagu

SEQ ID NO: 1154476 - RNA, 19 nt, Human
caugucaaacgugaaaaug

SEQ ID NO: 1154477 - RNA, 14 nt, Human
caugucaaacguga

SEQ ID NO: 1154478 - RNA, 20 nt, Human
caguggggaggggcuguggg

SEQ ID NO: 1154479 - RNA, 18 nt, Human
cagugcaucucagcccac

SEQ ID NO: 1154480 - RNA, 17 nt, Human
cagugcaucucagccca

SEQ ID NO: 1154481 - RNA, 16 nt, Human
cagugcaucucagccc

SEQ ID NO: 1154482 - RNA, 15 nt, Human
cagugcaucucagcc

SEQ ID NO: 1154483 - RNA, 12 nt, Human
cagugcaucuca

SEQ ID NO: 1154484 - RNA, 23 nt, Human
cagguugucugaagucacugcac

SEQ ID NO: 1154485 - RNA, 22 nt, Human
cagguugucugaagucacugca

SEQ ID NO: 1154486 - RNA, 15 nt, Human
caggccacuugauga

SEQ ID NO: 1154487 - RNA, 20 nt, Human
cagagguccacaacacacag

SEQ ID NO: 1154488 - RNA, 15 nt, Human
cagagguccacaaca

SEQ ID NO: 1154489 - RNA, 19 nt, Human
cagauccccaagccuggca

SEQ ID NO: 1154490 - RNA, 13 nt, Human
caagacacaguga

SEQ ID NO: 1154491 - RNA, 22 nt, Human
caacuaugauuuggaaaauaaa

SEQ ID NO: 1154492 - RNA, 19 nt, Human
caacuaugauuuggaaaau

SEQ ID NO: 1154493 - RNA, 18 nt, Human
caacuaugauuuggaaaa

SEQ ID NO: 1154494 - RNA, 17 nt, Human
caacuaugauuuggaaa

SEQ ID NO: 1154495 - RNA, 14 nt, Human
caaccauuccccau

SEQ ID NO: 1154496 - RNA, 13 nt, Human
caaaugcagcuuu

SEQ ID NO: 1154497 - RNA, 19 nt, Human
caauucuccugccucagcc

SEQ ID NO: 1154498 - RNA, 17 nt, Human
caauucuccugccucag

SEQ ID NO: 1154499 - RNA, 14 nt, Human
caccuuuauucugg

SEQ ID NO: 1154500 - RNA, 20 nt, Human
caccuaccaccacgcccggc

SEQ ID NO: 1154501 - RNA, 20 nt, Human
cacuuagaaauugcauuucc

SEQ ID NO: 1154502 - RNA, 24 nt, Human
cacuuagaaauugcauuuccugac

SEQ ID NO: 1154503 - RNA, 19 nt, Human
cacuuagaaauugcauuuc

SEQ ID NO: 1154504 - RNA, 17 nt, Human
cacuuagaaauugcauu

SEQ ID NO: 1154505 - RNA, 22 nt, Human
cacugguggcccgacagccugg

SEQ ID NO: 1154506 - RNA, 21 nt, Human
cacugguggcccgacagccug

SEQ ID NO: 1154507 - RNA, 13 nt, Human
cacugguggcccg

SEQ ID NO: 1154508 - RNA, 22 nt, Human
cagaauauuagugaccucagcu

SEQ ID NO: 1154509 - RNA, 15 nt, Human
cagaaguuucucagc

SEQ ID NO: 1154510 - RNA, 15 nt, Human
cagaacacauaauuc

SEQ ID NO: 1154511 - RNA, 20 nt, Human
auuuucaacgcagcccugcu

SEQ ID NO: 1154512 - RNA, 18 nt, Human
auuuucaacgcagcccug

SEQ ID NO: 1154513 - RNA, 20 nt, Human
auuuccagugaaaucaguua

SEQ ID NO: 1154514 - RNA, 22 nt, Human
auuucauuugugccagaaugcu

SEQ ID NO: 1154515 - RNA, 16 nt, Human
auuucaaacggccuca

SEQ ID NO: 1154516 - RNA, 14 nt, Human
auucuccugccuca

SEQ ID NO: 1154517 - RNA, 13 nt, Human
auucuccugccuc

SEQ ID NO: 1154518 - RNA, 12 nt, Human
auucuccugccu

SEQ ID NO: 1154519 - RNA, 21 nt, Human
auucucaugccucagccuccu

SEQ ID NO: 1154520 - RNA, 15 nt, Human
auucucaugccucag

SEQ ID NO: 1154521 - RNA, 14 nt, Human
auucucaugccuca

SEQ ID NO: 1154522 - RNA, 21 nt, Human
uuuugugaugucccaacuugu

SEQ ID NO: 1154523 - RNA, 12 nt, Human
augugugugugc

SEQ ID NO: 1154524 - RNA, 22 nt, Human
uuucucauuugccaauaauaau

SEQ ID NO: 1154525 - RNA, 21 nt, Human
uuuccuuuuaaaacacuucca

SEQ ID NO: 1154526 - RNA, 15 nt, Human
augggacuggccucu

SEQ ID NO: 1154527 - RNA, 16 nt, Human
uuuauuuuuugggaaa

SEQ ID NO: 1154528 - RNA, 13 nt, Human
uuuauuuuuuggg

SEQ ID NO: 1154529 - RNA, 14 nt, Human
augcuguauauguu

SEQ ID NO: 1154530 - RNA, 23 nt, Human
augcgcaggcuggcccugcccug

SEQ ID NO: 1154531 - RNA, 21 nt, Human
uuuaaaaaauuaaucugggcc

SEQ ID NO: 1154532 - RNA, 17 nt, Human
uuuaaaaaauuaaucug

SEQ ID NO: 1154533 - RNA, 19 nt, Human
uuguuuuuuuuuuccacuu

SEQ ID NO: 1154534 - RNA, 18 nt, Human
uuguuuuuuuuuuccacu

SEQ ID NO: 1154535 - RNA, 15 nt, Human
augauccuaaugaau

SEQ ID NO: 1154536 - RNA, 22 nt, Human
uuguaaaaauuaaaaguuaugg

SEQ ID NO: 1154537 - RNA, 23 nt, Human
augaaagauggcugugccucugc

SEQ ID NO: 1154538 - RNA, 20 nt, Human
augaaagauggcugugccuc

SEQ ID NO: 1154539 - RNA, 19 nt, Human
augaaagauggcugugccu

SEQ ID NO: 1154540 - RNA, 15 nt, Human
aucuaaacugccccc

SEQ ID NO: 1154541 - RNA, 22 nt, Human
uucuccuuucacaaccuucugu

SEQ ID NO: 1154542 - RNA, 18 nt, Human
uucuccuuucacaaccuu

SEQ ID NO: 1154543 - RNA, 17 nt, Human
aucagugcccuccagga

SEQ ID NO: 1154544 - RNA, 15 nt, Human
aucagugcccuccag

SEQ ID NO: 1154545 - RNA, 13 nt, Human
aucagugcccucc

SEQ ID NO: 1154546 - RNA, 13 nt, Human
uuccucugagccu

SEQ ID NO: 1154547 - RNA, 19 nt, Human
uuccucuccacugccuucg

SEQ ID NO: 1154548 - RNA, 18 nt, Human
uuccucuccacugccuuc

SEQ ID NO: 1154549 - RNA, 13 nt, Human
uucccuacuuccu

SEQ ID NO: 1154550 - RNA, 15 nt, Human
uucccgcucagcccu

SEQ ID NO: 1154551 - RNA, 14 nt, Human
uucccgcucagccc

SEQ ID NO: 1154552 - RNA, 12 nt, Human
uucccgcucagc

SEQ ID NO: 1154553 - RNA, 21 nt, Human
auauuccugcauuugugaaau

SEQ ID NO: 1154554 - RNA, 22 nt, Human
uuccagugaaaucaguuacucu

SEQ ID NO: 1154555 - RNA, 15 nt, Human
uuccaccuucccaug

SEQ ID NO: 1154556 - RNA, 14 nt, Human
uucagcucacugca

SEQ ID NO: 1154557 - RNA, 18 nt, Human
uuauacccccugcaaagc

SEQ ID NO: 1154558 - RNA, 14 nt, Human
uuagccccauaauu

SEQ ID NO: 1154559 - RNA, 16 nt, Human
uuagcaguuugcuuug

SEQ ID NO: 1154560 - RNA, 16 nt, Human
aguuucucagcuccca

SEQ ID NO: 1154561 - RNA, 19 nt, Human
uuaaaauauuccugcauuu

SEQ ID NO: 1154562 - RNA, 16 nt, Human
uuaaaauauuccugca

SEQ ID NO: 1154563 - RNA, 17 nt, Human
aguucccuacuuccugu

SEQ ID NO: 1154564 - RNA, 16 nt, Human
uguucccauucuugca

SEQ ID NO: 1154565 - RNA, 18 nt, Human
agucucccucccuugggg

SEQ ID NO: 1154566 - RNA, 14 nt, Human
agucucccucccuu

SEQ ID NO: 1154567 - RNA, 23 nt, Human
ugugaacugaacucugacaacag

SEQ ID NO: 1154568 - RNA, 14 nt, Human
ugugaacugaacuc

SEQ ID NO: 1154569 - RNA, 22 nt, Human
ugucccuaccgagucucuucuc

SEQ ID NO: 1154570 - RNA, 21 nt, Human
ugucccuaccgagucucuucu

SEQ ID NO: 1154571 - RNA, 20 nt, Human
ugucccuaccgagucucuuc

SEQ ID NO: 1154572 - RNA, 21 nt, Human
uguccaggcacugcugcccag

SEQ ID NO: 1154573 - RNA, 20 nt, Human
uguccaggcacugcugccca

SEQ ID NO: 1154574 - RNA, 19 nt, Human
uguccaggcacugcugccc

SEQ ID NO: 1154575 - RNA, 22 nt, Human
agucacagagauaauucuagcu

SEQ ID NO: 1154576 - RNA, 15 nt, Human
uguauuagucacaga

SEQ ID NO: 1154577 - RNA, 20 nt, Human
agguugucugaagucacugc

SEQ ID NO: 1154578 - RNA, 16 nt, Human
agguugucugaaguca

SEQ ID NO: 1154579 - RNA, 20 nt, Human
aggugugagccaccacgccc

SEQ ID NO: 1154580 - RNA, 22 nt, Human
aggugauccacucgccuucauc

SEQ ID NO: 1154581 - RNA, 21 nt, Human
uguaaauacuguuuuuaacaa

SEQ ID NO: 1154582 - RNA, 15 nt, Human
ugguguguguaugcg

SEQ ID NO: 1154583 - RNA, 19 nt, Human
agguccacaacacacagau

SEQ ID NO: 1154584 - RNA, 17 nt, Human
agguccacaacacacag

SEQ ID NO: 1154585 - RNA, 21 nt, Human
uggucucgaacuccugaccuu

SEQ ID NO: 1154586 - RNA, 20 nt, Human
uggucucgaacuccugaccu

SEQ ID NO: 1154587 - RNA, 19 nt, Human
uggucucgaacuccugacc

SEQ ID NO: 1154588 - RNA, 22 nt, Human
ugguaauuuaagauuccagaga

SEQ ID NO: 1154589 - RNA, 22 nt, Human
ugggucuuguuuuuuuuuucca

SEQ ID NO: 1154590 - RNA, 12 nt, Human
aggguagggugg

SEQ ID NO: 1154591 - RNA, 15 nt, Human
agggggaaggcaggg

SEQ ID NO: 1154592 - RNA, 13 nt, Human
ugggaacuagacu

SEQ ID NO: 1154593 - RNA, 17 nt, Human
uggcuucccgcucagcc

SEQ ID NO: 1154594 - RNA, 18 nt, Human
uggcuucccgcucagccc

SEQ ID NO: 1154595 - RNA, 16 nt, Human
uggcuucccgcucagc

SEQ ID NO: 1154596 - RNA, 15 nt, Human
uggcuucccgcucag

SEQ ID NO: 1154597 - RNA, 19 nt, Human
aggcuggcccugcccuggu

SEQ ID NO: 1154598 - RNA, 18 nt, Human
aggcuggcccugcccugg

SEQ ID NO: 1154599 - RNA, 17 nt, Human
aggcuggcccugcccug

SEQ ID NO: 1154600 - RNA, 16 nt, Human
aggcuggcccugcccu

SEQ ID NO: 1154601 - RNA, 15 nt, Human
aggcuggcccugccc

SEQ ID NO: 1154602 - RNA, 14 nt, Human
aggcuggcccugcc

SEQ ID NO: 1154603 - RNA, 12 nt, Human
aggcuggcccug

SEQ ID NO: 1154604 - RNA, 23 nt, Human
aggcugcucuugaacuccugacc

SEQ ID NO: 1154605 - RNA, 20 nt, Human
aggcuccugccaccacgccc

SEQ ID NO: 1154606 - RNA, 14 nt, Human
aggcuccugccacc

SEQ ID NO: 1154607 - RNA, 15 nt, Human
uggccgggagccuga

SEQ ID NO: 1154608 - RNA, 23 nt, Human
uggccgggaccccgagccuggcu

SEQ ID NO: 1154609 - RNA, 15 nt, Human
uggccgggaccccga

SEQ ID NO: 1154610 - RNA, 17 nt, Human
uggccgggaccccgagc

SEQ ID NO: 1154611 - RNA, 19 nt, Human
uggcccgacagccuggcac

SEQ ID NO: 1154612 - RNA, 18 nt, Human
uggcccgacagccuggca

SEQ ID NO: 1154613 - RNA, 17 nt, Human
uggcccgacagccuggc

SEQ ID NO: 1154614 - RNA, 16 nt, Human
uggcccgacagccugg

SEQ ID NO: 1154615 - RNA, 15 nt, Human
uggcccgacagccug

SEQ ID NO: 1154616 - RNA, 14 nt, Human
uggcccgacagccu

SEQ ID NO: 1154617 - RNA, 20 nt, Human
uggccaggcuggucucgaac

SEQ ID NO: 1154618 - RNA, 13 nt, Human
aggccugccuguu

SEQ ID NO: 1154619 - RNA, 16 nt, Human
uggcagccucuucaaa

SEQ ID NO: 1154620 - RNA, 15 nt, Human
uggcagccucuucaa

SEQ ID NO: 1154621 - RNA, 23 nt, Human
uggcagccgugccuucagcucua

SEQ ID NO: 1154622 - RNA, 16 nt, Human
uggcagccgugccuuc

SEQ ID NO: 1154623 - RNA, 19 nt, Human
uggagucagacagaugugg

SEQ ID NO: 1154624 - RNA, 17 nt, Human
aggaugccccguccccc

SEQ ID NO: 1154625 - RNA, 14 nt, Human
aggagggaggggga

SEQ ID NO: 1154626 - RNA, 21 nt, Human
aggagggagcaucagugcccu

SEQ ID NO: 1154627 - RNA, 21 nt, Human
ugcuuugggcugcccuggugc

SEQ ID NO: 1154628 - RNA, 20 nt, Human
ugcuuugggcugcccuggug

SEQ ID NO: 1154629 - RNA, 19 nt, Human
ugcuuugggcugcccuggu

SEQ ID NO: 1154630 - RNA, 18 nt, Human
ugcuuugggcugcccugg

SEQ ID NO: 1154631 - RNA, 21 nt, Human
ugcuggcugccuuagaaccuu

SEQ ID NO: 1154632 - RNA, 15 nt, Human
ugcuggcugccuuag

SEQ ID NO: 1154633 - RNA, 14 nt, Human
ugcugacuguacuc

SEQ ID NO: 1154634 - RNA, 22 nt, Human
agcuggaucuccauucucucag

SEQ ID NO: 1154635 - RNA, 11 nt, Human
ugccucugccu

SEQ ID NO: 1154636 - RNA, 15 nt, Human
ugccucagccuccug

SEQ ID NO: 1154637 - RNA, 15 nt, Human
ugccucagccucccg

SEQ ID NO: 1154638 - RNA, 21 nt, Human
agcucugcagagcaggaaaca

SEQ ID NO: 1154639 - RNA, 17 nt, Human
agcucuaucaccaagga

SEQ ID NO: 1154640 - RNA, 23 nt, Human
ugcccuaaugcgcaggcuggccc

SEQ ID NO: 1154641 - RNA, 20 nt, Human
ugcccuaaugcgcaggcugg

SEQ ID NO: 1154642 - RNA, 18 nt, Human
ugcccccucugcccugcg

SEQ ID NO: 1154643 - RNA, 17 nt, Human
ugcccccucugcccugc

SEQ ID NO: 1154644 - RNA, 16 nt, Human
ugcccccucugcccug

SEQ ID NO: 1154645 - RNA, 15 nt, Human
ugcccccucugcccu

SEQ ID NO: 1154646 - RNA, 14 nt, Human
ugcccccucugccc

SEQ ID NO: 1154647 - RNA, 20 nt, Human
ugccacugccucuuccuccc

SEQ ID NO: 1154648 - RNA, 19 nt, Human
ugccacugccucuuccucc

SEQ ID NO: 1154649 - RNA, 18 nt, Human
ugccacugccucuuccuc

SEQ ID NO: 1154650 - RNA, 17 nt, Human
ugccacugccucuuccu

SEQ ID NO: 1154651 - RNA, 13 nt, Human
ugccacugccucu

SEQ ID NO: 1154652 - RNA, 13 nt, Human
ugcauuuccugac

SEQ ID NO: 1154653 - RNA, 22 nt, Human
agcgcuggccgggaccccgagc

SEQ ID NO: 1154654 - RNA, 16 nt, Human
agcgcuggccgggacc

SEQ ID NO: 1154655 - RNA, 17 nt, Human
agccuccaugcugccuc

SEQ ID NO: 1154656 - RNA, 21 nt, Human
agccuccaagcuccaucucca

SEQ ID NO: 1154657 - RNA, 22 nt, Human
agccucagucucccucccuugg

SEQ ID NO: 1154658 - RNA, 20 nt, Human
agccucagucucccucccuu

SEQ ID NO: 1154659 - RNA, 19 nt, Human
agccucagucucccucccu

SEQ ID NO: 1154660 - RNA, 16 nt, Human
agccucagucucccuc

SEQ ID NO: 1154661 - RNA, 13 nt, Human
agccucagucucc

SEQ ID NO: 1154662 - RNA, 20 nt, Human
agcccugcuuugggcugccc

SEQ ID NO: 1154663 - RNA, 19 nt, Human
agcccugcuuugggcugcc

SEQ ID NO: 1154664 - RNA, 17 nt, Human
agcccugcuuugggcug

SEQ ID NO: 1154665 - RNA, 17 nt, Human
ugauuucagcucacugc

SEQ ID NO: 1154666 - RNA, 16 nt, Human
ugauucucaugccuca

SEQ ID NO: 1154667 - RNA, 15 nt, Human
ugauucucaugccuc

SEQ ID NO: 1154668 - RNA, 14 nt, Human
ugauucucaugccu

SEQ ID NO: 1154669 - RNA, 13 nt, Human
ugauucucaugcc

SEQ ID NO: 1154670 - RNA, 23 nt, Human
agcccagcuugaaaccuucacuu

SEQ ID NO: 1154671 - RNA, 17 nt, Human
ugauuaauggaaauguu

SEQ ID NO: 1154672 - RNA, 17 nt, Human
ugauggugaugaaaugu

SEQ ID NO: 1154673 - RNA, 16 nt, Human
ugauggugaugaaaug

SEQ ID NO: 1154674 - RNA, 15 nt, Human
ugauggugaugaaau

SEQ ID NO: 1154675 - RNA, 17 nt, Human
agcaccuagccucgcuc

SEQ ID NO: 1154676 - RNA, 16 nt, Human
ugagcauuagauuucu

SEQ ID NO: 1154677 - RNA, 14 nt, Human
ugagcauuagauuu

SEQ ID NO: 1154678 - RNA, 15 nt, Human
ugagcaaauguggcu

SEQ ID NO: 1154679 - RNA, 20 nt, Human
ugagacagaaucucgcucug

SEQ ID NO: 1154680 - RNA, 22 nt, Human
agauuccagagaguggcuccuc

SEQ ID NO: 1154681 - RNA, 21 nt, Human
agauuccagagaguggcuccu

SEQ ID NO: 1154682 - RNA, 21 nt, Human
ugacucguauaugucucaggu

SEQ ID NO: 1154683 - RNA, 18 nt, Human
agauccccaagccuggca

SEQ ID NO: 1154684 - RNA, 15 nt, Human
ugaaguaagcaaaga

SEQ ID NO: 1154685 - RNA, 14 nt, Human
ugaaguaagcaaag

SEQ ID NO: 1154686 - RNA, 13 nt, Human
ugaaguaagcaaa

SEQ ID NO: 1154687 - RNA, 15 nt, Human
ugaacuccugaccuc

SEQ ID NO: 1154688 - RNA, 23 nt, Human
ugaaauagacccacaagaggcag

SEQ ID NO: 1154689 - RNA, 16 nt, Human
ucuuuuuuugugaugu

SEQ ID NO: 1154690 - RNA, 14 nt, Human
ucuuuuuuugugau

SEQ ID NO: 1154691 - RNA, 17 nt, Human
agagaguggcuccuccc

SEQ ID NO: 1154692 - RNA, 16 nt, Human
agacucccaagcugga

SEQ ID NO: 1154693 - RNA, 21 nt, Human
agacuccagcuggguuggaaa

SEQ ID NO: 1154694 - RNA, 15 nt, Human
ucuguugcugccuca

SEQ ID NO: 1154695 - RNA, 15 nt, Human
ucugggccagaauuu

SEQ ID NO: 1154696 - RNA, 14 nt, Human
ucugggccagaauu

SEQ ID NO: 1154697 - RNA, 16 nt, Human
agaauagaugcugacu

SEQ ID NO: 1154698 - RNA, 20 nt, Human
agaaguggggacagagcaga

SEQ ID NO: 1154699 - RNA, 18 nt, Human
ucugcuuuccucuuccug

SEQ ID NO: 1154700 - RNA, 13 nt, Human
ucugcuuuccucu

SEQ ID NO: 1154701 - RNA, 12 nt, Human
ucugcuuuccuc

SEQ ID NO: 1154702 - RNA, 22 nt, Human
ucugcccugcgggucacaggag

SEQ ID NO: 1154703 - RNA, 12 nt, Human
ucugcccugcgg

SEQ ID NO: 1154704 - RNA, 11 nt, Human
ucugcccugcg

SEQ ID NO: 1154705 - RNA, 10 nt, Human
ucugcccugc

SEQ ID NO: 1154706 - RNA, 20 nt, Human
agaaauugcauuuccugaca

SEQ ID NO: 1154707 - RNA, 17 nt, Human
agaaauugcauuuccug

SEQ ID NO: 1154708 - RNA, 21 nt, Human
ucugaugcaagcaagaaacac

SEQ ID NO: 1154709 - RNA, 16 nt, Human
ucugaugcaagcaaga

SEQ ID NO: 1154710 - RNA, 16 nt, Human
ucuccuuucacaaccu

SEQ ID NO: 1154711 - RNA, 19 nt, Human
ucucauuugccaauaauaa

SEQ ID NO: 1154712 - RNA, 21 nt, Human
ucucaugccucagccuccuga

SEQ ID NO: 1154713 - RNA, 19 nt, Human
acuuccccuuccuaauucc

SEQ ID NO: 1154714 - RNA, 13 nt, Human
acuuccccuuccu

SEQ ID NO: 1154715 - RNA, 14 nt, Human
acuuagcugggaga

SEQ ID NO: 1154716 - RNA, 23 nt, Human
ucuacagcuaaucagcauucuca

SEQ ID NO: 1154717 - RNA, 20 nt, Human
ucuacagcuaaucagcauuc

SEQ ID NO: 1154718 - RNA, 22 nt, Human
uccugcacacgcuccuuccucu

SEQ ID NO: 1154719 - RNA, 21 nt, Human
uccugcacacgcuccuuccuc

SEQ ID NO: 1154720 - RNA, 14 nt, Human
uccugcacacgcuc

SEQ ID NO: 1154721 - RNA, 23 nt, Human
acugcacagugcaucucagccca

SEQ ID NO: 1154722 - RNA, 20 nt, Human
acugcaacuuguaaaugugg

SEQ ID NO: 1154723 - RNA, 20 nt, Human
acugaacucugacaacagac

SEQ ID NO: 1154724 - RNA, 21 nt, Human
uccugaauuuuauuuuuuggg

SEQ ID NO: 1154725 - RNA, 21 nt, Human
uccucccaggcgccccuuccc

SEQ ID NO: 1154726 - RNA, 19 nt, Human
uccucccaggcgccccuuc

SEQ ID NO: 1154727 - RNA, 13 nt, Human
uccucccaggcgc

SEQ ID NO: 1154728 - RNA, 16 nt, Human
acucugccuccucuuc

SEQ ID NO: 1154729 - RNA, 12 nt, Human
acucugccuccu

SEQ ID NO: 1154730 - RNA, 18 nt, Human
uccgguguuuaagacauu

SEQ ID NO: 1154731 - RNA, 12 nt, Human
acuccucccagg

SEQ ID NO: 1154732 - RNA, 21 nt, Human
acuccagaccccuggcuuuuc

SEQ ID NO: 1154733 - RNA, 19 nt, Human
acuccagaccccuggcuuu

SEQ ID NO: 1154734 - RNA, 18 nt, Human
acuccagaccccuggcuu

SEQ ID NO: 1154735 - RNA, 15 nt, Human
acuccagaccccugg

SEQ ID NO: 1154736 - RNA, 19 nt, Human
acuagacucccaagcugga

SEQ ID NO: 1154737 - RNA, 15 nt, Human
acguuaccaggcagg

SEQ ID NO: 1154738 - RNA, 15 nt, Human
acgcuccuuccucug

SEQ ID NO: 1154739 - RNA, 14 nt, Human
acgcuccuuccucu

SEQ ID NO: 1154740 - RNA, 13 nt, Human
uccagaccccugg

SEQ ID NO: 1154741 - RNA, 18 nt, Human
uccagaauggucuuucua

SEQ ID NO: 1154742 - RNA, 11 nt, Human
ucaugauuuuu

SEQ ID NO: 1154743 - RNA, 13 nt, Human
ucauccauccagg

SEQ ID NO: 1154744 - RNA, 18 nt, Human
accgagucucuucuccac

SEQ ID NO: 1154745 - RNA, 17 nt, Human
accgagucucuucucca

SEQ ID NO: 1154746 - RNA, 16 nt, Human
accgagucucuucucc

SEQ ID NO: 1154747 - RNA, 20 nt, Human
ucaguggggcccauggaugu

SEQ ID NO: 1154748 - RNA, 16 nt, Human
ucaguggggaggggcu

SEQ ID NO: 1154749 - RNA, 20 nt, Human
ucagugcccuccaggauaga

SEQ ID NO: 1154750 - RNA, 21 nt, Human
acccggaggggccuggcagcc

SEQ ID NO: 1154751 - RNA, 18 nt, Human
acccggaggggccuggca

SEQ ID NO: 1154752 - RNA, 19 nt, Human
acccucgaggcggaucuuu

SEQ ID NO: 1154753 - RNA, 21 nt, Human
accccuggcuuuucacugcug

SEQ ID NO: 1154754 - RNA, 20 nt, Human
accccuggcuuuucacugcu

SEQ ID NO: 1154755 - RNA, 19 nt, Human
accccuggcuuuucacugc

SEQ ID NO: 1154756 - RNA, 18 nt, Human
accccuggcuuuucacug

SEQ ID NO: 1154757 - RNA, 15 nt, Human
accccugagcuugca

SEQ ID NO: 1154758 - RNA, 17 nt, Human
ucagcccucccugcccc

SEQ ID NO: 1154759 - RNA, 16 nt, Human
ucagcccucccugccc

SEQ ID NO: 1154760 - RNA, 15 nt, Human
ucagcccucccugcc

SEQ ID NO: 1154761 - RNA, 14 nt, Human
ucagcccucccugc

SEQ ID NO: 1154762 - RNA, 13 nt, Human
ucagcccucccug

SEQ ID NO: 1154763 - RNA, 13 nt, Human
ucacugcauccuc

SEQ ID NO: 1154764 - RNA, 20 nt, Human
ucacuaucccggcugcccuu

SEQ ID NO: 1154765 - RNA, 19 nt, Human
ucacuaucccggcugcccu

SEQ ID NO: 1154766 - RNA, 16 nt, Human
ucacuaggcuucuggu

SEQ ID NO: 1154767 - RNA, 22 nt, Human
ucaccauguuggccaggcuggu

SEQ ID NO: 1154768 - RNA, 23 nt, Human
ucacagaugugugauucacagug

SEQ ID NO: 1154769 - RNA, 21 nt, Human
ucacagaugugugauucacag

SEQ ID NO: 1154770 - RNA, 14 nt, Human
ucacaaccuucugu

SEQ ID NO: 1154771 - RNA, 18 nt, Human
ucaaccauuccccauggg

SEQ ID NO: 1154772 - RNA, 15 nt, Human
ucaaccauuccccau

SEQ ID NO: 1154773 - RNA, 22 nt, Human
acaggcuccugccaccacgccc

SEQ ID NO: 1154774 - RNA, 21 nt, Human
acaggcuccugccaccacgcc

SEQ ID NO: 1154775 - RNA, 15 nt, Human
acaggcuccugccac

SEQ ID NO: 1154776 - RNA, 13 nt, Human
acaggcuccugcc

SEQ ID NO: 1154777 - RNA, 12 nt, Human
acaggcuccugc

SEQ ID NO: 1154778 - RNA, 22 nt, Human
acaggcgugagccaccgugccu

SEQ ID NO: 1154779 - RNA, 21 nt, Human
uauuagugaccucagcuuuga

SEQ ID NO: 1154780 - RNA, 19 nt, Human
uauuagugaccucagcuuu

SEQ ID NO: 1154781 - RNA, 15 nt, Human
acaggacucugccuc

SEQ ID NO: 1154782 - RNA, 14 nt, Human
acaggacucugccu

SEQ ID NO: 1154783 - RNA, 11 nt, Human
acagccuggca

SEQ ID NO: 1154784 - RNA, 12 nt, Human
acagccuggcac

SEQ ID NO: 1154785 - RNA, 18 nt, Human
acagccguuuguucccca

SEQ ID NO: 1154786 - RNA, 15 nt, Human
acagauuugagcuca

SEQ ID NO: 1154787 - RNA, 14 nt, Human
acagauuugagcuc

SEQ ID NO: 1154788 - RNA, 22 nt, Human
acagaucucugcuuuggaaauc

SEQ ID NO: 1154789 - RNA, 18 nt, Human
acagauccccaagccugg

SEQ ID NO: 1154790 - RNA, 17 nt, Human
acagauccccaagccug

SEQ ID NO: 1154791 - RNA, 21 nt, Human
acaccuuagccugcccuccuu

SEQ ID NO: 1154792 - RNA, 16 nt, Human
acaccgggccuggaga

SEQ ID NO: 1154793 - RNA, 14 nt, Human
acaccgggccugga

SEQ ID NO: 1154794 - RNA, 16 nt, Human
uaggaaauccagggug

SEQ ID NO: 1154795 - RNA, 19 nt, Human
acaaggacuaggguccugg

SEQ ID NO: 1154796 - RNA, 18 nt, Human
acaaggacuaggguccug

SEQ ID NO: 1154797 - RNA, 22 nt, Human
acaaggacagccccuccuccau

SEQ ID NO: 1154798 - RNA, 23 nt, Human
uagaugcugacuguacuccuccc

SEQ ID NO: 1154799 - RNA, 20 nt, Human
uacuaucaugucaaacguga

SEQ ID NO: 1154800 - RNA, 24 nt, Human
uacgcuccaucgcugucaucucag

SEQ ID NO: 1154801 - RNA, 22 nt, Human
aauuaaucugggccagaauuuc

SEQ ID NO: 1154802 - RNA, 11 nt, Human
aaugugugugu

SEQ ID NO: 1154803 - RNA, 20 nt, Human
uacagauccccaagccuggc

SEQ ID NO: 1154804 - RNA, 23 nt, Human
aauggcacaaucucggcucacug

SEQ ID NO: 1154805 - RNA, 22 nt, Human
aaugcuguauuagucacagaga

SEQ ID NO: 1154806 - RNA, 17 nt, Human
aaugaaugcauaaaaug

SEQ ID NO: 1154807 - RNA, 15 nt, Human
uaaugaaugcauaaa

SEQ ID NO: 1154808 - RNA, 18 nt, Human
aaucugggccagaauuuc

SEQ ID NO: 1154809 - RNA, 17 nt, Human
aaucugggccagaauuu

SEQ ID NO: 1154810 - RNA, 16 nt, Human
aaucugggccagaauu

SEQ ID NO: 1154811 - RNA, 15 nt, Human
aaucgaccugccucg

SEQ ID NO: 1154812 - RNA, 21 nt, Human
uaagauuccagagaguggcuc

SEQ ID NO: 1154813 - RNA, 14 nt, Human
uaagauuccagaga

SEQ ID NO: 1154814 - RNA, 15 nt, Human
aauauuccugcauuu

SEQ ID NO: 1154815 - RNA, 14 nt, Human
aauaguuguugauu

SEQ ID NO: 1154816 - RNA, 20 nt, Human
aaguucccuacuuccuguga

SEQ ID NO: 1154817 - RNA, 17 nt, Human
aaguucccuacuuccug

SEQ ID NO: 1154818 - RNA, 14 nt, Human
aaguucccuacuuc

SEQ ID NO: 1154819 - RNA, 23 nt, Human
aaguuaagaauguucuuauguug

SEQ ID NO: 1154820 - RNA, 11 nt, Human
aaguuaagaau

SEQ ID NO: 1154821 - RNA, 17 nt, Human
aagugauucucaugccu

SEQ ID NO: 1154822 - RNA, 19 nt, Human
aagugauucucaugccuca

SEQ ID NO: 1154823 - RNA, 16 nt, Human
aagugauucucaugcc

SEQ ID NO: 1154824 - RNA, 13 nt, Human
aagugauucucau

SEQ ID NO: 1154825 - RNA, 22 nt, Human
uaaaaagcuccaaaugcagcuu

SEQ ID NO: 1154826 - RNA, 22 nt, Human
aagucacugcacagugcaucuc

SEQ ID NO: 1154827 - RNA, 13 nt, Human
guuuggagacaga

SEQ ID NO: 1154828 - RNA, 20 nt, Human
guuugcuuuguaugcacuuu

SEQ ID NO: 1154829 - RNA, 23 nt, Human
aagguuucagaaagaagugggga

SEQ ID NO: 1154830 - RNA, 15 nt, Human
aagccguggcuuccc

SEQ ID NO: 1154831 - RNA, 14 nt, Human
aagccguggcuucc

SEQ ID NO: 1154832 - RNA, 13 nt, Human
aagccguggcuuc

SEQ ID NO: 1154833 - RNA, 23 nt, Human
guuacucuucaguuaagccuuug

SEQ ID NO: 1154834 - RNA, 19 nt, Human
guuaauauuuauaggucac

SEQ ID NO: 1154835 - RNA, 13 nt, Human
aagcccagcuuga

SEQ ID NO: 1154836 - RNA, 18 nt, Human
aagauggcugugccucug

SEQ ID NO: 1154837 - RNA, 16 nt, Human
aagauggcugugccuc

SEQ ID NO: 1154838 - RNA, 20 nt, Human
gugauucacagugugaaucu

SEQ ID NO: 1154839 - RNA, 23 nt, Human
gugaugguuccccuguucacucu

SEQ ID NO: 1154840 - RNA, 21 nt, Human
aacugcccccucugcccugcg

SEQ ID NO: 1154841 - RNA, 20 nt, Human
aacugcccccucugcccugc

SEQ ID NO: 1154842 - RNA, 19 nt, Human
aacugcccccucugcccug

SEQ ID NO: 1154843 - RNA, 18 nt, Human
aacugcccccucugcccu

SEQ ID NO: 1154844 - RNA, 17 nt, Human
aacugcccccucugccc

SEQ ID NO: 1154845 - RNA, 16 nt, Human
aacugcccccucugcc

SEQ ID NO: 1154846 - RNA, 16 nt, Human
aacucugacaacagac

SEQ ID NO: 1154847 - RNA, 23 nt, Human
gugagaccugccccuccucucug

SEQ ID NO: 1154848 - RNA, 16 nt, Human
gugagaccugccccuc

SEQ ID NO: 1154849 - RNA, 15 nt, Human
gugagaccugccccu

SEQ ID NO: 1154850 - RNA, 14 nt, Human
gugagaccugcccc

SEQ ID NO: 1154851 - RNA, 13 nt, Human
gugagaccugccc

SEQ ID NO: 1154852 - RNA, 16 nt, Human
gugacuucagcucugu

SEQ ID NO: 1154853 - RNA, 22 nt, Human
gugacauguguuggcagccucu

SEQ ID NO: 1154854 - RNA, 14 nt, Human
aacuccugaccuca

SEQ ID NO: 1154855 - RNA, 12 nt, Human
aacuccugaccu

SEQ ID NO: 1154856 - RNA, 15 nt, Human
aacuauguugauaaa

SEQ ID NO: 1154857 - RNA, 12 nt, Human
aacgugaaaaug

SEQ ID NO: 1154858 - RNA, 21 nt, Human
aaccuucgccaccuggguucc

SEQ ID NO: 1154859 - RNA, 23 nt, Human
aaccuggucacaggacucugccu

SEQ ID NO: 1154860 - RNA, 22 nt, Human
gucuuguuuuuuuuuuccacuu

SEQ ID NO: 1154861 - RNA, 12 nt, Human
gucgccucugca

SEQ ID NO: 1154862 - RNA, 17 nt, Human
gucacuuuguuuuacug

SEQ ID NO: 1154863 - RNA, 23 nt, Human
gucacugcacagugcaucucagc

SEQ ID NO: 1154864 - RNA, 20 nt, Human
gucacugcacagugcaucuc

SEQ ID NO: 1154865 - RNA, 16 nt, Human
gucacaggagggaggg

SEQ ID NO: 1154866 - RNA, 19 nt, Human
gucacaggacucugccucc

SEQ ID NO: 1154867 - RNA, 18 nt, Human
gucacaggacucugccuc

SEQ ID NO: 1154868 - RNA, 17 nt, Human
gucacaggacucugccu

SEQ ID NO: 1154869 - RNA, 18 nt, Human
aaauugucagaugcugug

SEQ ID NO: 1154870 - RNA, 19 nt, Human
aaauuaggauuucaugauu

SEQ ID NO: 1154871 - RNA, 18 nt, Human
aaauuaggauuucaugau

SEQ ID NO: 1154872 - RNA, 14 nt, Human
aaauuaaucugggc

SEQ ID NO: 1154873 - RNA, 15 nt, Human
aaauguggcuccugg

SEQ ID NO: 1154874 - RNA, 14 nt, Human
aaaugucuuccugg

SEQ ID NO: 1154875 - RNA, 11 nt, Human
guauuuauuca

SEQ ID NO: 1154876 - RNA, 21 nt, Human
cacauagugaugguuccccug

SEQ ID NO: 1154877 - RNA, 17 nt, Human
cacagugcaucucagcc

SEQ ID NO: 1154878 - RNA, 14 nt, Human
cacagugcaucuca

SEQ ID NO: 1154879 - RNA, 21 nt, Human
cacaggagggagggggaaggc

SEQ ID NO: 1154880 - RNA, 19 nt, Human
cacaggagggagggggaag

SEQ ID NO: 1154881 - RNA, 14 nt, Human
cacaggagggaggg

SEQ ID NO: 1154882 - RNA, 16 nt, Human
caauucuccugccuca

SEQ ID NO: 1154883 - RNA, 15 nt, Human
caauucuccugccuc

SEQ ID NO: 1154884 - RNA, 14 nt, Human
caauucuccugccu

SEQ ID NO: 1154885 - RNA, 13 nt, Human
caauucuccugcc

SEQ ID NO: 1154886 - RNA, 19 nt, Human
caaguggcucccacacccu

SEQ ID NO: 1154887 - RNA, 21 nt, Human
caagugauucucaugccucag

SEQ ID NO: 1154888 - RNA, 20 nt, Human
caagugauucucaugccuca

SEQ ID NO: 1154889 - RNA, 18 nt, Human
caagugauucucaugccu

SEQ ID NO: 1154890 - RNA, 17 nt, Human
caagugauucucaugcc

SEQ ID NO: 1154891 - RNA, 19 nt, Human
caaggguagggugggccuu

SEQ ID NO: 1154892 - RNA, 18 nt, Human
caaggguagggugggccu

SEQ ID NO: 1154893 - RNA, 22 nt, Human
caaggacugcagggacugccag

SEQ ID NO: 1154894 - RNA, 15 nt, Human
caaggacugcaggga

SEQ ID NO: 1154895 - RNA, 18 nt, Human
caaggacagccccuccuc

SEQ ID NO: 1154896 - RNA, 14 nt, Human
caagccuggcaagg

SEQ ID NO: 1154897 - RNA, 18 nt, Human
caagccguggcuucccgc

SEQ ID NO: 1154898 - RNA, 17 nt, Human
caagagggcacuggugg

SEQ ID NO: 1154899 - RNA, 15 nt, Human
caagagggcacuggu

SEQ ID NO: 1154900 - RNA, 14 nt, Human
caagagggcacugg

SEQ ID NO: 1154901 - RNA, 13 nt, Human
caagagggcacug

SEQ ID NO: 1154902 - RNA, 19 nt, Human
caacugaccagccuccaug

SEQ ID NO: 1154903 - RNA, 17 nt, Human
caacugaccagccucca

SEQ ID NO: 1154904 - RNA, 15 nt, Human
caacugaccagccuc

SEQ ID NO: 1154905 - RNA, 16 nt, Human
caaccuucuguggcuc

SEQ ID NO: 1154906 - RNA, 19 nt, Human
caaccuucgccaccugggu

SEQ ID NO: 1154907 - RNA, 20 nt, Human
caaccuguucugcuuuccuc

SEQ ID NO: 1154908 - RNA, 17 nt, Human
caacccuggcacccagg

SEQ ID NO: 1154909 - RNA, 18 nt, Human
caacccucagagccaccc

SEQ ID NO: 1154910 - RNA, 13 nt, Human
caacccucagagc

SEQ ID NO: 1154911 - RNA, 15 nt, Human
caaaugucuuccugg

SEQ ID NO: 1154912 - RNA, 19 nt, Human
caaagugcugggauuacag

SEQ ID NO: 1154913 - RNA, 13 nt, Human
uuuuuuccacuua

SEQ ID NO: 1154914 - RNA, 17 nt, Human
uuuuacaauaaaaucuu

SEQ ID NO: 1154915 - RNA, 19 nt, Human
uuuuacaaaaaagaaaaga

SEQ ID NO: 1154916 - RNA, 20 nt, Human
uuuuaaacccuauugguaaa

SEQ ID NO: 1154917 - RNA, 14 nt, Human
uuuguauuuuuagu

SEQ ID NO: 1154918 - RNA, 22 nt, Human
uuucacaaccuucuguggcuca

SEQ ID NO: 1154919 - RNA, 16 nt, Human
uuucacaaccuucugu

SEQ ID NO: 1154920 - RNA, 21 nt, Human
uuucaacgcagcccugcuuug

SEQ ID NO: 1154921 - RNA, 20 nt, Human
uuucaacgcagcccugcuuu

SEQ ID NO: 1154922 - RNA, 16 nt, Human
uuucaacgcagcccug

SEQ ID NO: 1154923 - RNA, 15 nt, Human
uuucaacgcagcccu

SEQ ID NO: 1154924 - RNA, 16 nt, Human
uuuacagcugccugca

SEQ ID NO: 1154925 - RNA, 15 nt, Human
uuuacagcugccugc

SEQ ID NO: 1154926 - RNA, 19 nt, Human
uuuaagacauuuuuggaag

SEQ ID NO: 1154927 - RNA, 23 nt, Human
uuuaacaacuaugauuuggaaaa

SEQ ID NO: 1154928 - RNA, 18 nt, Human
uuguuuggagacagaguc

SEQ ID NO: 1154929 - RNA, 21 nt, Human
uuguggaaaaugaaaauuagg

SEQ ID NO: 1154930 - RNA, 21 nt, Human
uugugccagaaugcuuuagga

SEQ ID NO: 1154931 - RNA, 16 nt, Human
uugugccagaaugcuu

SEQ ID NO: 1154932 - RNA, 14 nt, Human
uugugaaaugaugg

SEQ ID NO: 1154933 - RNA, 21 nt, Human
uugucugaagucacugcacag

SEQ ID NO: 1154934 - RNA, 13 nt, Human
uuguaaauuguca

SEQ ID NO: 1154935 - RNA, 21 nt, Human
uuguaaaugugguaaagaguu

SEQ ID NO: 1154936 - RNA, 16 nt, Human
uuguaaaugugguaaa

SEQ ID NO: 1154937 - RNA, 17 nt, Human
uugaugacccccaacca

SEQ ID NO: 1154938 - RNA, 17 nt, Human
uugaacuccugaccuca

SEQ ID NO: 1154939 - RNA, 15 nt, Human
uucuggcagaggagg

SEQ ID NO: 1154940 - RNA, 18 nt, Human
uucugcuuuccucuuccu

SEQ ID NO: 1154941 - RNA, 12 nt, Human
uucuccacugga

SEQ ID NO: 1154942 - RNA, 20 nt, Human
uucucauuugccaauaauaa

SEQ ID NO: 1154943 - RNA, 13 nt, Human
uucuacuauuuau

SEQ ID NO: 1154944 - RNA, 23 nt, Human
uucuaaugugugaaucagagcac

SEQ ID NO: 1154945 - RNA, 15 nt, Human
uuccugcauuuguga

SEQ ID NO: 1154946 - RNA, 16 nt, Human
uuccaugucgccucug

SEQ ID NO: 1154947 - RNA, 21 nt, Human
uucacaaccuucuguggcuca

SEQ ID NO: 1154948 - RNA, 15 nt, Human
uucaaccauucccca

SEQ ID NO: 1154949 - RNA, 19 nt, Human
uuagugaccucagcuuuga

SEQ ID NO: 1154950 - RNA, 16 nt, Human
ugucucaggucccugc

SEQ ID NO: 1154951 - RNA, 19 nt, Human
ugucucaagagggcacugg

SEQ ID NO: 1154952 - RNA, 18 nt, Human
ugucucaagagggcacug

SEQ ID NO: 1154953 - RNA, 17 nt, Human
ugucucaagagggcacu

SEQ ID NO: 1154954 - RNA, 22 nt, Human
uguccugccuaaggcugaacuu

SEQ ID NO: 1154955 - RNA, 13 nt, Human
uguccccuauccu

SEQ ID NO: 1154956 - RNA, 13 nt, Human
ugucaucucagcu

SEQ ID NO: 1154957 - RNA, 13 nt, Human
uguaugcgugugu

SEQ ID NO: 1154958 - RNA, 22 nt, Human
uguaugaaagauggcugugccu

SEQ ID NO: 1154959 - RNA, 13 nt, Human
ugguugcauccua

SEQ ID NO: 1154960 - RNA, 23 nt, Human
ugguuccuccccuccuccuggac

SEQ ID NO: 1154961 - RNA, 18 nt, Human
ugguuccuccccuccucc

SEQ ID NO: 1154962 - RNA, 12 nt, Human
ugguuccucccc

SEQ ID NO: 1154963 - RNA, 23 nt, Human
ugguuccccuguucacucuacuu

SEQ ID NO: 1154964 - RNA, 20 nt, Human
ugguuccccuguucacucua

SEQ ID NO: 1154965 - RNA, 19 nt, Human
ugguuccccuguucacucu

SEQ ID NO: 1154966 - RNA, 18 nt, Human
ugguuccccuguucacuc

SEQ ID NO: 1154967 - RNA, 11 nt, Human
ugguuccccug

SEQ ID NO: 1154968 - RNA, 21 nt, Human
ugguggcccgacagccuggca

SEQ ID NO: 1154969 - RNA, 19 nt, Human
ugguggcccgacagccugg

SEQ ID NO: 1154970 - RNA, 19 nt, Human
ugggaucacauguggacuu

SEQ ID NO: 1154971 - RNA, 22 nt, Human
uggcuuuucacugcuggcugcc

SEQ ID NO: 1154972 - RNA, 21 nt, Human
uggcuuuucacugcuggcugc

SEQ ID NO: 1154973 - RNA, 19 nt, Human
uggcuuuucacugcuggcu

SEQ ID NO: 1154974 - RNA, 18 nt, Human
uggcuuuucacugcuggc

SEQ ID NO: 1154975 - RNA, 16 nt, Human
uggcuuuucacugcug

SEQ ID NO: 1154976 - RNA, 22 nt, Human
uggcuucccgcucagcccuccc

SEQ ID NO: 1154977 - RNA, 21 nt, Human
uggcuucccgcucagcccucc

SEQ ID NO: 1154978 - RNA, 20 nt, Human
uggcuucccgcucagcccuc

SEQ ID NO: 1154979 - RNA, 19 nt, Human
uggcuucccgcucagcccu

SEQ ID NO: 1154980 - RNA, 17 nt, Human
uggcuccagcuggccgg

SEQ ID NO: 1154981 - RNA, 13 nt, Human
ugcuuuggaaauc

SEQ ID NO: 1154982 - RNA, 16 nt, Human
ugcuuguuaacugagu

SEQ ID NO: 1154983 - RNA, 14 nt, Human
ugcuuguuaacuga

SEQ ID NO: 1154984 - RNA, 13 nt, Human
ugccucuuccucc

SEQ ID NO: 1154985 - RNA, 18 nt, Human
ugccucugccugucuccc

SEQ ID NO: 1154986 - RNA, 14 nt, Human
ugccucugccuguc

SEQ ID NO: 1154987 - RNA, 13 nt, Human
ugccucugccugu

SEQ ID NO: 1154988 - RNA, 15 nt, Human
ugcccugguuuccug

SEQ ID NO: 1154989 - RNA, 21 nt, Human
ugcccuggugcugccacacuu

SEQ ID NO: 1154990 - RNA, 20 nt, Human
ugcccuggugcugccacacu

SEQ ID NO: 1154991 - RNA, 18 nt, Human
ugcccuggauccaucagg

SEQ ID NO: 1154992 - RNA, 23 nt, Human
ugcccugcugagucccaggcuga

SEQ ID NO: 1154993 - RNA, 22 nt, Human
ugcccugcugagucccaggcug

SEQ ID NO: 1154994 - RNA, 18 nt, Human
ugcccugcugagucccag

SEQ ID NO: 1154995 - RNA, 19 nt, Human
ugcccugcgggucacagga

SEQ ID NO: 1154996 - RNA, 15 nt, Human
ugccaccacgcccgg

SEQ ID NO: 1154997 - RNA, 15 nt, Human
ugcauccuccgccuc

SEQ ID NO: 1154998 - RNA, 14 nt, Human
ugcauccuccgccu

SEQ ID NO: 1154999 - RNA, 19 nt, Human
ugcagagguccacaacaca

SEQ ID NO: 1155000 - RNA, 18 nt, Human
ugcacagugcaucucagc

SEQ ID NO: 1155001 - RNA, 17 nt, Human
ugcacagugcaucucag

SEQ ID NO: 1155002 - RNA, 16 nt, Human
ugcacagugcaucuca

SEQ ID NO: 1155003 - RNA, 15 nt, Human
ugcacagugcaucuc

SEQ ID NO: 1155004 - RNA, 17 nt, Human
ugcacaaagcccuucca

SEQ ID NO: 1155005 - RNA, 15 nt, Human
ugcacaaagcccuuc

SEQ ID NO: 1155006 - RNA, 18 nt, Human
ugcaacuuguaaaugugg

SEQ ID NO: 1155007 - RNA, 16 nt, Human
ugcaacuuguaaaugu

SEQ ID NO: 1155008 - RNA, 21 nt, Human
ugcaaccuucgccaccugggu

SEQ ID NO: 1155009 - RNA, 18 nt, Human
ugcaaccuucgccaccug

SEQ ID NO: 1155010 - RNA, 16 nt, Human
ugauuuuuuuuuuuca

SEQ ID NO: 1155011 - RNA, 13 nt, Human
ugauuuuuuucca

SEQ ID NO: 1155012 - RNA, 21 nt, Human
ugaucugaugcaagcaagaaa

SEQ ID NO: 1155013 - RNA, 20 nt, Human
ugaucugaugcaagcaagaa

SEQ ID NO: 1155014 - RNA, 14 nt, Human
ugauccacucgccu

SEQ ID NO: 1155015 - RNA, 18 nt, Human
ugauagguauaaguggug

SEQ ID NO: 1155016 - RNA, 23 nt, Human
ugaggacuuaaaauauuccugca

SEQ ID NO: 1155017 - RNA, 22 nt, Human
ugacuguacuccucccaggcgc

SEQ ID NO: 1155018 - RNA, 18 nt, Human
ugacuguacuccucccag

SEQ ID NO: 1155019 - RNA, 17 nt, Human
ugacuguacuccuccca

SEQ ID NO: 1155020 - RNA, 16 nt, Human
ugacuguacuccuccc

SEQ ID NO: 1155021 - RNA, 16 nt, Human
ugaccucagcuuugau

SEQ ID NO: 1155022 - RNA, 19 nt, Human
ucuugaacuccugaccuca

SEQ ID NO: 1155023 - RNA, 17 nt, Human
ucuugaacuccugaccu

SEQ ID NO: 1155024 - RNA, 18 nt, Human
ucuucuuuuuuugugaug

SEQ ID NO: 1155025 - RNA, 17 nt, Human
ucuucuuuuuuugugau

SEQ ID NO: 1155026 - RNA, 16 nt, Human
ucuucuuuuuuuguga

SEQ ID NO: 1155027 - RNA, 14 nt, Human
ucuucuccuuucac

SEQ ID NO: 1155028 - RNA, 13 nt, Human
ucuucuccuuuca

SEQ ID NO: 1155029 - RNA, 12 nt, Human
ucuucuccacug

SEQ ID NO: 1155030 - RNA, 17 nt, Human
ucuuccuggauuauuca

SEQ ID NO: 1155031 - RNA, 21 nt, Human
ucugguuccuccccuccuccu

SEQ ID NO: 1155032 - RNA, 20 nt, Human
ucugguuccuccccuccucc

SEQ ID NO: 1155033 - RNA, 13 nt, Human
ucugguuccuccc

SEQ ID NO: 1155034 - RNA, 15 nt, Human
ucuggcuccagcugg

SEQ ID NO: 1155035 - RNA, 22 nt, Human
ucugcugauccucccaggcuuc

SEQ ID NO: 1155036 - RNA, 17 nt, Human
ucugcauucaggaucaa

SEQ ID NO: 1155037 - RNA, 23 nt, Human
ucugaggcugaaauucagaauau

SEQ ID NO: 1155038 - RNA, 11 nt, Human
ucugaggcuga

SEQ ID NO: 1155039 - RNA, 19 nt, Human
ucuccugccucagccuccc

SEQ ID NO: 1155040 - RNA, 17 nt, Human
ucuccugccucagccuc

SEQ ID NO: 1155041 - RNA, 19 nt, Human
ucucaagagggcacuggug

SEQ ID NO: 1155042 - RNA, 18 nt, Human
ucucaagagggcacuggu

SEQ ID NO: 1155043 - RNA, 17 nt, Human
ucucaagagggcacugg

SEQ ID NO: 1155044 - RNA, 14 nt, Human
ucuaaugugugaau

SEQ ID NO: 1155045 - RNA, 22 nt, Human
ucggccucccaaagugcuggga

SEQ ID NO: 1155046 - RNA, 15 nt, Human
ucgaacuccugaccu

SEQ ID NO: 1155047 - RNA, 17 nt, Human
ucgaggcggaucuuugg

SEQ ID NO: 1155048 - RNA, 22 nt, Human
ucgaggcggaucuuuggacaga

SEQ ID NO: 1155049 - RNA, 19 nt, Human
uccuuuuaaaacacuucca

SEQ ID NO: 1155050 - RNA, 14 nt, Human
uccugccucagccu

SEQ ID NO: 1155051 - RNA, 21 nt, Human
uccucuuccugaauuuuauuu

SEQ ID NO: 1155052 - RNA, 15 nt, Human
uccuacaagacacag

SEQ ID NO: 1155053 - RNA, 18 nt, Human
uccuaauuccacagcugc

SEQ ID NO: 1155054 - RNA, 17 nt, Human
uccuaauuccacagcug

SEQ ID NO: 1155055 - RNA, 16 nt, Human
uccuaauuccacagcu

SEQ ID NO: 1155056 - RNA, 15 nt, Human
uccuaauuccacagc

SEQ ID NO: 1155057 - RNA, 22 nt, Human
uccuaaugaaugcauaaaaugu

SEQ ID NO: 1155058 - RNA, 20 nt, Human
ucccugccccucccuucaac

SEQ ID NO: 1155059 - RNA, 11 nt, Human
uccaggguggu

SEQ ID NO: 1155060 - RNA, 15 nt, Human
uccaccuucccaugc

SEQ ID NO: 1155061 - RNA, 23 nt, Human
ucauuccaccuucccaugcccug

SEQ ID NO: 1155062 - RNA, 21 nt, Human
ucauagcccucacccuggggc

SEQ ID NO: 1155063 - RNA, 15 nt, Human
ucaggcucuucuccu

SEQ ID NO: 1155064 - RNA, 22 nt, Human
ucagccuccugaguagcuggga

SEQ ID NO: 1155065 - RNA, 20 nt, Human
ucagccuccugaguagcugg

SEQ ID NO: 1155066 - RNA, 23 nt, Human
ucagcauucucacuccuaccugg

SEQ ID NO: 1155067 - RNA, 20 nt, Human
ucagcauucucacuccuacc

SEQ ID NO: 1155068 - RNA, 17 nt, Human
ucagcauucucacuccu

SEQ ID NO: 1155069 - RNA, 22 nt, Human
ucacugcuggcugccuuagaac

SEQ ID NO: 1155070 - RNA, 18 nt, Human
ucacugcuggcugccuua

SEQ ID NO: 1155071 - RNA, 17 nt, Human
ucacugcuggcugccuu

SEQ ID NO: 1155072 - RNA, 16 nt, Human
ucacugcuggcugccu

SEQ ID NO: 1155073 - RNA, 15 nt, Human
ucacugcuggcugcc

SEQ ID NO: 1155074 - RNA, 14 nt, Human
ucacugcuggcugc

SEQ ID NO: 1155075 - RNA, 13 nt, Human
ucacugcuggcug

SEQ ID NO: 1155076 - RNA, 12 nt, Human
ucacugcuggcu

SEQ ID NO: 1155077 - RNA, 19 nt, Human
ucacugcauccuccgccuc

SEQ ID NO: 1155078 - RNA, 18 nt, Human
ucacugcauccuccgccu

SEQ ID NO: 1155079 - RNA, 18 nt, Human
ucaacgcagcccugcuuu

SEQ ID NO: 1155080 - RNA, 15 nt, Human
ucaacgcagcccugc

SEQ ID NO: 1155081 - RNA, 14 nt, Human
ucaacgcagcccug

SEQ ID NO: 1155082 - RNA, 19 nt, Human
uauuuucaacgcagcccug

SEQ ID NO: 1155083 - RNA, 21 nt, Human
uauuccugcauuugugaaaug

SEQ ID NO: 1155084 - RNA, 20 nt, Human
uauuccugcauuugugaaau

SEQ ID NO: 1155085 - RNA, 19 nt, Human
uauuccugcauuugugaaa

SEQ ID NO: 1155086 - RNA, 17 nt, Human
uauuccugcauuuguga

SEQ ID NO: 1155087 - RNA, 14 nt, Human
uauguugauaaaag

SEQ ID NO: 1155088 - RNA, 12 nt, Human
gggagcucugca

SEQ ID NO: 1155089 - RNA, 21 nt, Human
gggagccugaucaccugcccu

SEQ ID NO: 1155090 - RNA, 23 nt, Human
gggacugccagucccccugcccc

SEQ ID NO: 1155091 - RNA, 16 nt, Human
gggaccccgagccugg

SEQ ID NO: 1155092 - RNA, 13 nt, Human
ggcuuuucacugc

SEQ ID NO: 1155093 - RNA, 11 nt, Human
ggcuugcugcc

SEQ ID NO: 1155094 - RNA, 16 nt, Human
ggcugugccucugccu

SEQ ID NO: 1155095 - RNA, 13 nt, Human
ggcugugccucug

SEQ ID NO: 1155096 - RNA, 15 nt, Human
ggcugggagcucugc

SEQ ID NO: 1155097 - RNA, 11 nt, Human
ggccugggccc

SEQ ID NO: 1155098 - RNA, 17 nt, Human
ggccucggacuuagcug

SEQ ID NO: 1155099 - RNA, 15 nt, Human
ggccgggagccugau

SEQ ID NO: 1155100 - RNA, 22 nt, Human
ggccgggaccccgagccuggcu

SEQ ID NO: 1155101 - RNA, 23 nt, Human
ggccgggaccccgagccuggcuc

SEQ ID NO: 1155102 - RNA, 21 nt, Human
ggcagugggacagggcauggc

SEQ ID NO: 1155103 - RNA, 17 nt, Human
ggaugccccgucccccu

SEQ ID NO: 1155104 - RNA, 21 nt, Human
ggaggggccuggcagccgugc

SEQ ID NO: 1155105 - RNA, 18 nt, Human
ggaggggccuggcagccg

SEQ ID NO: 1155106 - RNA, 14 nt, Human
ggaggggccuggca

SEQ ID NO: 1155107 - RNA, 13 nt, Human
ggaggggccuggc

SEQ ID NO: 1155108 - RNA, 13 nt, Human
ggagggccugggc

SEQ ID NO: 1155109 - RNA, 16 nt, Human
ggacagccccuccucc

SEQ ID NO: 1155110 - RNA, 15 nt, Human
ggacagccccuccuc

SEQ ID NO: 1155111 - RNA, 12 nt, Human
gcuuuucacugc

SEQ ID NO: 1155112 - RNA, 14 nt, Human
ggacagaagcagcu

SEQ ID NO: 1155113 - RNA, 15 nt, Human
ggacagaagcagcuc

SEQ ID NO: 1155114 - RNA, 16 nt, Human
ggacagaagcagcucu

SEQ ID NO: 1155115 - RNA, 17 nt, Human
ggacagaagcagcucuu

SEQ ID NO: 1155116 - RNA, 19 nt, Human
gcuuugggcugcccuggug

SEQ ID NO: 1155117 - RNA, 19 nt, Human
gcuucuguugcugccucau

SEQ ID NO: 1155118 - RNA, 18 nt, Human
gcuucuguugcugccuca

SEQ ID NO: 1155119 - RNA, 17 nt, Human
gcuucuguugcugccuc

SEQ ID NO: 1155120 - RNA, 13 nt, Human
gcugucaucucag

SEQ ID NO: 1155121 - RNA, 23 nt, Human
gcuggucucgaacuccugaccuu

SEQ ID NO: 1155122 - RNA, 22 nt, Human
gcuggucucgaacuccugaccu

SEQ ID NO: 1155123 - RNA, 19 nt, Human
gcuggucucgaacuccuga

SEQ ID NO: 1155124 - RNA, 19 nt, Human
gcuggcccuggcucccaca

SEQ ID NO: 1155125 - RNA, 16 nt, Human
gcuggcccugcccugg

SEQ ID NO: 1155126 - RNA, 15 nt, Human
gcuggcccugcccug

SEQ ID NO: 1155127 - RNA, 14 nt, Human
gcuggcccugcccu

SEQ ID NO: 1155128 - RNA, 23 nt, Human
gcuggaaugauuucagcucacug

SEQ ID NO: 1155129 - RNA, 20 nt, Human
gcugccuuagaaccuuucuu

SEQ ID NO: 1155130 - RNA, 15 nt, Human
gcugccuuagaaccu

SEQ ID NO: 1155131 - RNA, 17 nt, Human
gcugcccuggugcugcc

SEQ ID NO: 1155132 - RNA, 18 nt, Human
gcugcccuggugcugcca

SEQ ID NO: 1155133 - RNA, 15 nt, Human
gcugcccuggugcug

SEQ ID NO: 1155134 - RNA, 14 nt, Human
gcugcccuggugcu

SEQ ID NO: 1155135 - RNA, 13 nt, Human
gcugcccuggugc

SEQ ID NO: 1155136 - RNA, 12 nt, Human
gcugcccuggug

SEQ ID NO: 1155137 - RNA, 23 nt, Human
gcugccacacuucaggcucuucu

SEQ ID NO: 1155138 - RNA, 22 nt, Human
gcugccacacuucaggcucuuc

SEQ ID NO: 1155139 - RNA, 21 nt, Human
gcugccacacuucaggcucuu

SEQ ID NO: 1155140 - RNA, 18 nt, Human
gcugccacacuucaggcu

SEQ ID NO: 1155141 - RNA, 17 nt, Human
gcugccacacuucaggc

SEQ ID NO: 1155142 - RNA, 15 nt, Human
gcugccacacuucag

SEQ ID NO: 1155143 - RNA, 16 nt, Human
gcugagaggagagaga

SEQ ID NO: 1155144 - RNA, 19 nt, Human
gcucuuggcagguacucag

SEQ ID NO: 1155145 - RNA, 21 nt, Human
gcucuugaacuccugaccuca

SEQ ID NO: 1155146 - RNA, 19 nt, Human
gcucuugaacuccugaccu

SEQ ID NO: 1155147 - RNA, 16 nt, Human
gcucuugaacuccuga

SEQ ID NO: 1155148 - RNA, 14 nt, Human
gcucuugaacuccu

SEQ ID NO: 1155149 - RNA, 22 nt, Human
gcuccuuccucugaggcugaaa

SEQ ID NO: 1155150 - RNA, 20 nt, Human
gcuccuuccucugaggcuga

SEQ ID NO: 1155151 - RNA, 18 nt, Human
gcuccuuccucugaggcu

SEQ ID NO: 1155152 - RNA, 16 nt, Human
gcuccucccggugccc

SEQ ID NO: 1155153 - RNA, 14 nt, Human
gcuccucccggugc

SEQ ID NO: 1155154 - RNA, 23 nt, Human
gcuccuggggguucuuucuuccu

SEQ ID NO: 1155155 - RNA, 15 nt, Human
gcucccacaggcccu

SEQ ID NO: 1155156 - RNA, 13 nt, Human
gcuccaaacccuc

SEQ ID NO: 1155157 - RNA, 21 nt, Human
gcucagcccucccugccccuc

SEQ ID NO: 1155158 - RNA, 19 nt, Human
gcucagcccucccugcccc

SEQ ID NO: 1155159 - RNA, 18 nt, Human
gcucagcccucccugccc

SEQ ID NO: 1155160 - RNA, 17 nt, Human
gcucagcccucccugcc

SEQ ID NO: 1155161 - RNA, 16 nt, Human
gcucagcccucccugc

SEQ ID NO: 1155162 - RNA, 15 nt, Human
gcucagcccucccug

SEQ ID NO: 1155163 - RNA, 12 nt, Human
gcucagcccucc

SEQ ID NO: 1155164 - RNA, 22 nt, Human
gcucacagaacccuuggagcca

SEQ ID NO: 1155165 - RNA, 20 nt, Human
gcuauaacuauguugauaaa

SEQ ID NO: 1155166 - RNA, 13 nt, Human
gcgccccuucccc

SEQ ID NO: 1155167 - RNA, 22 nt, Human
gcgcaggcuggcccugcccugg

SEQ ID NO: 1155168 - RNA, 21 nt, Human
gcgcaggcuggcccugcccug

SEQ ID NO: 1155169 - RNA, 20 nt, Human
gcgcaggcuggcccugcccu

SEQ ID NO: 1155170 - RNA, 19 nt, Human
gcgcaggcuggcccugccc

SEQ ID NO: 1155171 - RNA, 18 nt, Human
gcgcaggcuggcccugcc

SEQ ID NO: 1155172 - RNA, 22 nt, Human
gccuggcagccgugccuucagc

SEQ ID NO: 1155173 - RNA, 21 nt, Human
gccuggcagccgugccuucag

SEQ ID NO: 1155174 - RNA, 20 nt, Human
gccuggcagccgugccuuca

SEQ ID NO: 1155175 - RNA, 12 nt, Human
gccuggcagccg

SEQ ID NO: 1155176 - RNA, 19 nt, Human
gccuggcacagggcagugg

SEQ ID NO: 1155177 - RNA, 18 nt, Human
gccuggcacagggcagug

SEQ ID NO: 1155178 - RNA, 14 nt, Human
gccuggcacagggc

SEQ ID NO: 1155179 - RNA, 13 nt, Human
gccuggcacaggg

SEQ ID NO: 1155180 - RNA, 21 nt, Human
gcccagcuugaaaccuucacu

SEQ ID NO: 1155181 - RNA, 14 nt, Human
gcccaaccugcucu

SEQ ID NO: 1155182 - RNA, 22 nt, Human
gccaggcuggucucgaacuccu

SEQ ID NO: 1155183 - RNA, 22 nt, Human
gccaggcugcucuugaacuccu

SEQ ID NO: 1155184 - RNA, 14 nt, Human
gccaggcugcucuu

SEQ ID NO: 1155185 - RNA, 13 nt, Human
gccaggcugcucu

SEQ ID NO: 1155186 - RNA, 20 nt, Human
gccacgcccaacuaauuuuu

SEQ ID NO: 1155187 - RNA, 11 nt, Human
gccaccugggu

SEQ ID NO: 1155188 - RNA, 22 nt, Human
gccaccgugccuggccacgccc

SEQ ID NO: 1155189 - RNA, 17 nt, Human
gccaccgugccuggcca

SEQ ID NO: 1155190 - RNA, 23 nt, Human
gccacacuucaggcucuucuccu

SEQ ID NO: 1155191 - RNA, 22 nt, Human
gccacacuucaggcucuucucc

SEQ ID NO: 1155192 - RNA, 20 nt, Human
gccacacuucaggcucuucu

SEQ ID NO: 1155193 - RNA, 21 nt, Human
gccaauggagacugucucaag

SEQ ID NO: 1155194 - RNA, 19 nt, Human
gccaauggagacugucuca

SEQ ID NO: 1155195 - RNA, 16 nt, Human
gccaauggagacuguc

SEQ ID NO: 1155196 - RNA, 20 nt, Human
gccaauaauaauaccucccu

SEQ ID NO: 1155197 - RNA, 12 nt, Human
gcauuugugaaa

SEQ ID NO: 1155198 - RNA, 15 nt, Human
gcaucucagcccaca

SEQ ID NO: 1155199 - RNA, 14 nt, Human
gcaucucagcccac

SEQ ID NO: 1155200 - RNA, 13 nt, Human
gcaucucagccca

SEQ ID NO: 1155201 - RNA, 12 nt, Human
gcaucucagccc

SEQ ID NO: 1155202 - RNA, 23 nt, Human
gcaucagugcccuccaggauaga

SEQ ID NO: 1155203 - RNA, 15 nt, Human
gcaucagugcccucc

SEQ ID NO: 1155204 - RNA, 21 nt, Human
gcagugggacagggcauggcc

SEQ ID NO: 1155205 - RNA, 14 nt, Human
gcagccgugccuuc

SEQ ID NO: 1155206 - RNA, 24 nt, Human
gcagcccugcuuugggcugcccug

SEQ ID NO: 1155207 - RNA, 18 nt, Human
gcagauguccuugaugcu

SEQ ID NO: 1155208 - RNA, 21 nt, Human
gcagagguccacaacacacag

SEQ ID NO: 1155209 - RNA, 16 nt, Human
gcacagggcaguggga

SEQ ID NO: 1155210 - RNA, 20 nt, Human
gaugugcuuguuaacugagu

SEQ ID NO: 1155211 - RNA, 19 nt, Human
gaugugcuuguuaacugag

SEQ ID NO: 1155212 - RNA, 17 nt, Human
gauccuuuuggagucag

SEQ ID NO: 1155213 - RNA, 15 nt, Human
gauccuuuuggaguc

SEQ ID NO: 1155214 - RNA, 15 nt, Human
gaguggcuccucccg

SEQ ID NO: 1155215 - RNA, 13 nt, Human
gaguggcuccucc

SEQ ID NO: 1155216 - RNA, 18 nt, Human
gagucucuucuccacugg

SEQ ID NO: 1155217 - RNA, 17 nt, Human
gagucucuucuccacug

SEQ ID NO: 1155218 - RNA, 16 nt, Human
gagucucuucuccacu

SEQ ID NO: 1155219 - RNA, 15 nt, Human
gagucucuucuccac

SEQ ID NO: 1155220 - RNA, 14 nt, Human
gagucucuucucca

SEQ ID NO: 1155221 - RNA, 12 nt, Human
gagucucuucuc

SEQ ID NO: 1155222 - RNA, 23 nt, Human
gagucucgcuauugucaccaggg

SEQ ID NO: 1155223 - RNA, 19 nt, Human
gagucccaggcugagccuc

SEQ ID NO: 1155224 - RNA, 18 nt, Human
gagucccaggcugagccu

SEQ ID NO: 1155225 - RNA, 18 nt, Human
gagguccacaacacacag

SEQ ID NO: 1155226 - RNA, 20 nt, Human
gaggggccuggcagccgugc

SEQ ID NO: 1155227 - RNA, 18 nt, Human
gaggggccuggcagccgu

SEQ ID NO: 1155228 - RNA, 14 nt, Human
gaggggccuggcag

SEQ ID NO: 1155229 - RNA, 13 nt, Human
gaggggccuggca

SEQ ID NO: 1155230 - RNA, 18 nt, Human
gagggcacugguggcccg

SEQ ID NO: 1155231 - RNA, 16 nt, Human
gagggcacugguggcc

SEQ ID NO: 1155232 - RNA, 12 nt, Human
gagggcacuggu

SEQ ID NO: 1155233 - RNA, 13 nt, Human
gaggcccggccuc

SEQ ID NO: 1155234 - RNA, 19 nt, Human
gaggcggaucuuuggacag

SEQ ID NO: 1155235 - RNA, 21 nt, Human
gagcuucuguugcugccucau

SEQ ID NO: 1155236 - RNA, 18 nt, Human
gagcuucuguugcugccu

SEQ ID NO: 1155237 - RNA, 14 nt, Human
gagcuucuggcacu

SEQ ID NO: 1155238 - RNA, 15 nt, Human
gagcuuaacagugug

SEQ ID NO: 1155239 - RNA, 16 nt, Human
gagcucugcagagcag

SEQ ID NO: 1155240 - RNA, 18 nt, Human
gagccucagucucccucc

SEQ ID NO: 1155241 - RNA, 20 nt, Human
gagccaccgugccuggccac

SEQ ID NO: 1155242 - RNA, 14 nt, Human
gagccaccgugccu

SEQ ID NO: 1155243 - RNA, 15 nt, Human
gaauagaugcugacu

SEQ ID NO: 1155244 - RNA, 15 nt, Human
gaauaaauugcuccu

SEQ ID NO: 1155245 - RNA, 14 nt, Human
gaauaaagacaccu

SEQ ID NO: 1155246 - RNA, 14 nt, Human
gaaggcagggaggg

SEQ ID NO: 1155247 - RNA, 13 nt, Human
gaaggcagggagg

SEQ ID NO: 1155248 - RNA, 11 nt, Human
gaagccuuugu

SEQ ID NO: 1155249 - RNA, 10 nt, Human
gaagccuuug

SEQ ID NO: 1155250 - RNA, 12 nt, Human
gaaccugacccc

SEQ ID NO: 1155251 - RNA, 11 nt, Human
gaaccugaccc

SEQ ID NO: 1155252 - RNA, 19 nt, Human
gaaauugcauuuccugaca

SEQ ID NO: 1155253 - RNA, 20 nt, Human
gaaacaugacucguauaugu

SEQ ID NO: 1155254 - RNA, 20 nt, Human
gaaacagcucgacuuuaaaa

SEQ ID NO: 1155255 - RNA, 15 nt, Human
gaaacagcucgacuu

SEQ ID NO: 1155256 - RNA, 22 nt, Human
gaaacacugggcuucuagaacc

SEQ ID NO: 1155257 - RNA, 21 nt, Human
gaaaaccaagccguggcuucc

SEQ ID NO: 1155258 - RNA, 19 nt, Human
gaaaaccaagccguggcuu

SEQ ID NO: 1155259 - RNA, 18 nt, Human
gaaaaccaagccguggcu

SEQ ID NO: 1155260 - RNA, 14 nt, Human
cuuuucccuucuuu

SEQ ID NO: 1155261 - RNA, 20 nt, Human
cuuuucacugcuggcugccu

SEQ ID NO: 1155262 - RNA, 18 nt, Human
cuuuucacugcuggcugc

SEQ ID NO: 1155263 - RNA, 17 nt, Human
cuuuucacugcuggcug

SEQ ID NO: 1155264 - RNA, 18 nt, Human
cuuuggacagaagcagcu

SEQ ID NO: 1155265 - RNA, 19 nt, Human
cuuuggacagaagcagcuc

SEQ ID NO: 1155266 - RNA, 20 nt, Human
cuuuggacagaagcagcucu

SEQ ID NO: 1155267 - RNA, 21 nt, Human
cuuuggacagaagcagcucuu

SEQ ID NO: 1155268 - RNA, 20 nt, Human
cuuuauucuggcagaggagg

SEQ ID NO: 1155269 - RNA, 21 nt, Human
cuuguuuuuuuuuuccacuua

SEQ ID NO: 1155270 - RNA, 20 nt, Human
cuuguuuuuuuuuuccacuu

SEQ ID NO: 1155271 - RNA, 19 nt, Human
cuuguuuuuuuuuuccacu

SEQ ID NO: 1155272 - RNA, 14 nt, Human
cuuguuuucuggga

SEQ ID NO: 1155273 - RNA, 15 nt, Human
cuugccacugccucu

SEQ ID NO: 1155274 - RNA, 14 nt, Human
cuugccacugccuc

SEQ ID NO: 1155275 - RNA, 15 nt, Human
cuucgccaccugggu

SEQ ID NO: 1155276 - RNA, 14 nt, Human
cuucgccaccuggg

SEQ ID NO: 1155277 - RNA, 21 nt, Human
cuucgauacaccgggccugga

SEQ ID NO: 1155278 - RNA, 16 nt, Human
cuuccugugacuucag

SEQ ID NO: 1155279 - RNA, 13 nt, Human
cuuccugugacuu

SEQ ID NO: 1155280 - RNA, 15 nt, Human
cuucccccuccaauc

SEQ ID NO: 1155281 - RNA, 12 nt, Human
cuucccccucca

SEQ ID NO: 1155282 - RNA, 23 nt, Human
cuucaacugaccagccuccaugc

SEQ ID NO: 1155283 - RNA, 20 nt, Human
cuucaacugaccagccucca

SEQ ID NO: 1155284 - RNA, 17 nt, Human
cuucaacugaccagccu

SEQ ID NO: 1155285 - RNA, 18 nt, Human
cuuagaaguuuguuguga

SEQ ID NO: 1155286 - RNA, 16 nt, Human
cuuagaaauugcauuu

SEQ ID NO: 1155287 - RNA, 18 nt, Human
cuuaagaauuuugagcag

SEQ ID NO: 1155288 - RNA, 22 nt, Human
cuguuuuacaaaaaagaaaaga

SEQ ID NO: 1155289 - RNA, 17 nt, Human
cugugccucugccuguc

SEQ ID NO: 1155290 - RNA, 16 nt, Human
cugugccucugccugu

SEQ ID NO: 1155291 - RNA, 15 nt, Human
cugugccucugccug

SEQ ID NO: 1155292 - RNA, 14 nt, Human
cugugccucugccu

SEQ ID NO: 1155293 - RNA, 13 nt, Human
cugugccucugcc

SEQ ID NO: 1155294 - RNA, 12 nt, Human
cugugccucugc

SEQ ID NO: 1155295 - RNA, 19 nt, Human
cuguauuagucacagagau

SEQ ID NO: 1155296 - RNA, 17 nt, Human
cuguauuagucacagag

SEQ ID NO: 1155297 - RNA, 21 nt, Human
cuguacuccucccaggcgccc

SEQ ID NO: 1155298 - RNA, 19 nt, Human
cuguacuccucccaggcgc

SEQ ID NO: 1155299 - RNA, 16 nt, Human
cuguacuccucccagg

SEQ ID NO: 1155300 - RNA, 15 nt, Human
cuguacuccucccag

SEQ ID NO: 1155301 - RNA, 14 nt, Human
cuguacuccuccca

SEQ ID NO: 1155302 - RNA, 23 nt, Human
cuggggguucuuucuuccucugc

SEQ ID NO: 1155303 - RNA, 20 nt, Human
cuggggguucuuucuuccuc

SEQ ID NO: 1155304 - RNA, 18 nt, Human
cugggauuacaggcguga

SEQ ID NO: 1155305 - RNA, 22 nt, Human
cugccuccagaauggucuuucu

SEQ ID NO: 1155306 - RNA, 14 nt, Human
cugccuccagaaug

SEQ ID NO: 1155307 - RNA, 17 nt, Human
cugccucagccucccga

SEQ ID NO: 1155308 - RNA, 21 nt, Human
cugccccuccucucugcccua

SEQ ID NO: 1155309 - RNA, 17 nt, Human
cugcccagccuccaagc

SEQ ID NO: 1155310 - RNA, 20 nt, Human
cugcauccuccgccucccgg

SEQ ID NO: 1155311 - RNA, 19 nt, Human
cugcauccuccgccucccg

SEQ ID NO: 1155312 - RNA, 22 nt, Human
cugcacacgcuccuuccucuga

SEQ ID NO: 1155313 - RNA, 20 nt, Human
cugcacacgcuccuuccucu

SEQ ID NO: 1155314 - RNA, 14 nt, Human
cugcacacagcacg

SEQ ID NO: 1155315 - RNA, 13 nt, Human
cugcacacagcac

SEQ ID NO: 1155316 - RNA, 17 nt, Human
cugcaaagcccagcuug

SEQ ID NO: 1155317 - RNA, 15 nt, Human
cugcaaagcccagcu

SEQ ID NO: 1155318 - RNA, 13 nt, Human
cugcaaagcccag

SEQ ID NO: 1155319 - RNA, 15 nt, Human
cugaucaccugcccu

SEQ ID NO: 1155320 - RNA, 20 nt, Human
cugagucccaggcugagccu

SEQ ID NO: 1155321 - RNA, 21 nt, Human
cugagcaaauguggcuccugg

SEQ ID NO: 1155322 - RNA, 20 nt, Human
cugagcaaauguggcuccug

SEQ ID NO: 1155323 - RNA, 17 nt, Human
cugagcaaauguggcuc

SEQ ID NO: 1155324 - RNA, 15 nt, Human
cugagcaaauguggc

SEQ ID NO: 1155325 - RNA, 23 nt, Human
cugagauuauaggcaccuaccac

SEQ ID NO: 1155326 - RNA, 17 nt, Human
cugacuguacuccuccc

SEQ ID NO: 1155327 - RNA, 23 nt, Human
cugaccagccuccaugcugccuc

SEQ ID NO: 1155328 - RNA, 21 nt, Human
cugaccagccuccaugcugcc

SEQ ID NO: 1155329 - RNA, 17 nt, Human
cugaccagccuccaugc

SEQ ID NO: 1155330 - RNA, 16 nt, Human
cugaagucacugcaca

SEQ ID NO: 1155331 - RNA, 15 nt, Human
cugaagucacugcac

SEQ ID NO: 1155332 - RNA, 14 nt, Human
cugaagucacugca

SEQ ID NO: 1155333 - RNA, 13 nt, Human
cugaagucacugc

SEQ ID NO: 1155334 - RNA, 13 nt, Human
cucuucuccacug

SEQ ID NO: 1155335 - RNA, 12 nt, Human
cucuucuccacu

SEQ ID NO: 1155336 - RNA, 22 nt, Human
cucugucgcccaggcuggagug

SEQ ID NO: 1155337 - RNA, 18 nt, Human
cucugucgcccaggcugg

SEQ ID NO: 1155338 - RNA, 15 nt, Human
cucugucgcccaggc

SEQ ID NO: 1155339 - RNA, 22 nt, Human
cucugcccuaaugcgcaggcug

SEQ ID NO: 1155340 - RNA, 20 nt, Human
cucugcccuaaugcgcaggc

SEQ ID NO: 1155341 - RNA, 22 nt, Human
cucugacaacagacuucugaaa

SEQ ID NO: 1155342 - RNA, 21 nt, Human
cucugacaacagacuucugaa

SEQ ID NO: 1155343 - RNA, 16 nt, Human
cucugacaacagacuu

SEQ ID NO: 1155344 - RNA, 23 nt, Human
cucgcucugucgcccaggcugga

SEQ ID NO: 1155345 - RNA, 15 nt, Human
cucgccuucaucucc

SEQ ID NO: 1155346 - RNA, 22 nt, Human
cuccuuaucaaaggacaccauu

SEQ ID NO: 1155347 - RNA, 17 nt, Human
cuccuuaucaaaggaca

SEQ ID NO: 1155348 - RNA, 12 nt, Human
cuccuggacucc

SEQ ID NO: 1155349 - RNA, 11 nt, Human
cuccuggacuc

SEQ ID NO: 1155350 - RNA, 19 nt, Human
cuccugccucagccucccg

SEQ ID NO: 1155351 - RNA, 13 nt, Human
cuccugccucagc

SEQ ID NO: 1155352 - RNA, 12 nt, Human
cuccugccucag

SEQ ID NO: 1155353 - RNA, 11 nt, Human
cuccugccuca

SEQ ID NO: 1155354 - RNA, 19 nt, Human
cuccuccuggacuccugca

SEQ ID NO: 1155355 - RNA, 15 nt, Human
cuccuccuggacucc

SEQ ID NO: 1155356 - RNA, 14 nt, Human
cuccuccuggacuc

SEQ ID NO: 1155357 - RNA, 23 nt, Human
cuccucccaggcgccccuucccc

SEQ ID NO: 1155358 - RNA, 22 nt, Human
cuccucccaggcgccccuuccc

SEQ ID NO: 1155359 - RNA, 17 nt, Human
cuccucccaggcgcccc

SEQ ID NO: 1155360 - RNA, 19 nt, Human
cucccuuggggccuaugca

SEQ ID NO: 1155361 - RNA, 21 nt, Human
cucccugccccucccuucaac

SEQ ID NO: 1155362 - RNA, 20 nt, Human
cucccugccccucccuucaa

SEQ ID NO: 1155363 - RNA, 18 nt, Human
cucccugccccucccuuc

SEQ ID NO: 1155364 - RNA, 17 nt, Human
cucccugccccucccuu

SEQ ID NO: 1155365 - RNA, 14 nt, Human
cucccugccccucc

SEQ ID NO: 1155366 - RNA, 13 nt, Human
cucccugccccuc

SEQ ID NO: 1155367 - RNA, 23 nt, Human
cucccugccccccagcccuccuu

SEQ ID NO: 1155368 - RNA, 17 nt, Human
cucccugccccccagcc

SEQ ID NO: 1155369 - RNA, 21 nt, Human
cucccggugcccaagaauaga

SEQ ID NO: 1155370 - RNA, 15 nt, Human
cucccggugcccaag

SEQ ID NO: 1155371 - RNA, 20 nt, Human
cuccccuccuccuggacucc

SEQ ID NO: 1155372 - RNA, 12 nt, Human
cuccccuccucc

SEQ ID NO: 1155373 - RNA, 22 nt, Human
cuccaaucccaccaacccucag

SEQ ID NO: 1155374 - RNA, 21 nt, Human
cucauagcccucacccugggg

SEQ ID NO: 1155375 - RNA, 20 nt, Human
cucauagcccucacccuggg

SEQ ID NO: 1155376 - RNA, 17 nt, Human
cucauagcccucacccu

SEQ ID NO: 1155377 - RNA, 13 nt, Human
cucauagcccuca

SEQ ID NO: 1155378 - RNA, 21 nt, Human
cucagcccacauagugauggu

SEQ ID NO: 1155379 - RNA, 19 nt, Human
cucagcccacauagugaug

SEQ ID NO: 1155380 - RNA, 19 nt, Human
cucacuccuaccugguaau

SEQ ID NO: 1155381 - RNA, 17 nt, Human
cucacuccuaccuggua

SEQ ID NO: 1155382 - RNA, 16 nt, Human
cucacuccuaccuggu

SEQ ID NO: 1155383 - RNA, 15 nt, Human
cucacuccuaccugg

SEQ ID NO: 1155384 - RNA, 13 nt, Human
cucacuccuaccu

SEQ ID NO: 1155385 - RNA, 22 nt, Human
cuauuuaugugauccuuuugga

SEQ ID NO: 1155386 - RNA, 19 nt, Human
cuauugucaccagggcugg

SEQ ID NO: 1155387 - RNA, 20 nt, Human
cuaugcagagguccacaaca

SEQ ID NO: 1155388 - RNA, 10 nt, Human
cgcagcccug

SEQ ID NO: 1155389 - RNA, 14 nt, Human
cgaacuccugaccu

SEQ ID NO: 1155390 - RNA, 12 nt, Human
ccuugggacccc

SEQ ID NO: 1155391 - RNA, 21 nt, Human
ccuucuguggcucacagaacc

SEQ ID NO: 1155392 - RNA, 14 nt, Human
ccuucuguggcuca

SEQ ID NO: 1155393 - RNA, 15 nt, Human
ccuucgauacaccgg

SEQ ID NO: 1155394 - RNA, 14 nt, Human
ccuuccucugaggc

SEQ ID NO: 1155395 - RNA, 13 nt, Human
ccuuccucugagg

SEQ ID NO: 1155396 - RNA, 20 nt, Human
ccuuccucugagccuuggga

SEQ ID NO: 1155397 - RNA, 16 nt, Human
ccuuccucugagccuu

SEQ ID NO: 1155398 - RNA, 15 nt, Human
ccuuccucugagccu

SEQ ID NO: 1155399 - RNA, 14 nt, Human
ccuucacuuaggaa

SEQ ID NO: 1155400 - RNA, 20 nt, Human
ccuuaccacugcucugauga

SEQ ID NO: 1155401 - RNA, 17 nt, Human
ccuuaccacugcucuga

SEQ ID NO: 1155402 - RNA, 23 nt, Human
ccuggucacaggacucugccucc

SEQ ID NO: 1155403 - RNA, 22 nt, Human
ccuggucacaggacucugccuc

SEQ ID NO: 1155404 - RNA, 21 nt, Human
ccuggucacaggacucugccu

SEQ ID NO: 1155405 - RNA, 23 nt, Human
ccuggggguucuuucuuccucug

SEQ ID NO: 1155406 - RNA, 22 nt, Human
ccuggggguucuuucuuccucu

SEQ ID NO: 1155407 - RNA, 21 nt, Human
ccuggggguucuuucuuccuc

SEQ ID NO: 1155408 - RNA, 18 nt, Human
ccuggggguucuuucuuc

SEQ ID NO: 1155409 - RNA, 24 nt, Human
ccuggcuuuucacugcuggcugcc

SEQ ID NO: 1155410 - RNA, 23 nt, Human
ccuggcuuuucacugcuggcugc

SEQ ID NO: 1155411 - RNA, 22 nt, Human
ccuggcuuuucacugcuggcug

SEQ ID NO: 1155412 - RNA, 21 nt, Human
ccuggcuuuucacugcuggcu

SEQ ID NO: 1155413 - RNA, 20 nt, Human
ccuggcuuuucacugcuggc

SEQ ID NO: 1155414 - RNA, 23 nt, Human
ccuggcucccacaggcccuuccu

SEQ ID NO: 1155415 - RNA, 17 nt, Human
ccuggcucccacaggcc

SEQ ID NO: 1155416 - RNA, 22 nt, Human
ccuggcuccaaacccucgaggc

SEQ ID NO: 1155417 - RNA, 22 nt, Human
ccuggcagccgugccuucagcu

SEQ ID NO: 1155418 - RNA, 23 nt, Human
ccugcuuugggcugcccuggugc

SEQ ID NO: 1155419 - RNA, 22 nt, Human
ccugcuuugggcugcccuggug

SEQ ID NO: 1155420 - RNA, 21 nt, Human
ccugcuuugggcugcccuggu

SEQ ID NO: 1155421 - RNA, 20 nt, Human
ccugcuuugggcugcccugg

SEQ ID NO: 1155422 - RNA, 15 nt, Human
ccugcugagucccag

SEQ ID NO: 1155423 - RNA, 22 nt, Human
ccugcucuccucuugccacugc

SEQ ID NO: 1155424 - RNA, 21 nt, Human
ccugcucuccucuugccacug

SEQ ID NO: 1155425 - RNA, 19 nt, Human
ccugcucuccucuugccac

SEQ ID NO: 1155426 - RNA, 18 nt, Human
ccugcucuccucuugcca

SEQ ID NO: 1155427 - RNA, 16 nt, Human
ccugcucuccucuugc

SEQ ID NO: 1155428 - RNA, 22 nt, Human
ccugcgggucacaggagggagg

SEQ ID NO: 1155429 - RNA, 18 nt, Human
ccugcgggucacaggagg

SEQ ID NO: 1155430 - RNA, 14 nt, Human
ccugccccccagcc

SEQ ID NO: 1155431 - RNA, 20 nt, Human
ccugcaguacuuuaccuccu

SEQ ID NO: 1155432 - RNA, 18 nt, Human
ccugcaguacuuuaccuc

SEQ ID NO: 1155433 - RNA, 15 nt, Human
ccugcagggccaagc

SEQ ID NO: 1155434 - RNA, 20 nt, Human
ccugcacaaagcccuuccau

SEQ ID NO: 1155435 - RNA, 16 nt, Human
ccugacagaaggacuc

SEQ ID NO: 1155436 - RNA, 24 nt, Human
ccucccugccccucccuucaacca

SEQ ID NO: 1155437 - RNA, 22 nt, Human
ccucccugccccucccuucaac

SEQ ID NO: 1155438 - RNA, 21 nt, Human
ccucccugccccucccuucaa

SEQ ID NO: 1155439 - RNA, 18 nt, Human
ccucccugccccucccuu

SEQ ID NO: 1155440 - RNA, 16 nt, Human
ccuccaugcugccucc

SEQ ID NO: 1155441 - RNA, 15 nt, Human
ccuccaugcugccuc

SEQ ID NO: 1155442 - RNA, 14 nt, Human
ccuccaugcugccu

SEQ ID NO: 1155443 - RNA, 18 nt, Human
ccuccaucuaaacugccc

SEQ ID NO: 1155444 - RNA, 23 nt, Human
ccuccaaucccaccaacccucag

SEQ ID NO: 1155445 - RNA, 22 nt, Human
ccucauagcccucacccugggg

SEQ ID NO: 1155446 - RNA, 21 nt, Human
ccucauagcccucacccuggg

SEQ ID NO: 1155447 - RNA, 18 nt, Human
ccucauagcccucacccu

SEQ ID NO: 1155448 - RNA, 17 nt, Human
ccucauagcccucaccc

SEQ ID NO: 1155449 - RNA, 19 nt, Human
ccuaugcagagguccacaa

SEQ ID NO: 1155450 - RNA, 15 nt, Human
ccuacuuccugugac

SEQ ID NO: 1155451 - RNA, 13 nt, Human
ccuacuuccugug

SEQ ID NO: 1155452 - RNA, 23 nt, Human
ccuaccgagucucuucuccacug

SEQ ID NO: 1155453 - RNA, 22 nt, Human
ccuaccgagucucuucuccacu

SEQ ID NO: 1155454 - RNA, 15 nt, Human
ccuacaagacacagu

SEQ ID NO: 1155455 - RNA, 19 nt, Human
ccgggcugggagcucugca

SEQ ID NO: 1155456 - RNA, 18 nt, Human
ccgggcugggagcucugc

SEQ ID NO: 1155457 - RNA, 13 nt, Human
ccgggcugggagc

SEQ ID NO: 1155458 - RNA, 18 nt, Human
ccgggaccccgagccugg

SEQ ID NO: 1155459 - RNA, 17 nt, Human
ccgggaccccgagccug

SEQ ID NO: 1155460 - RNA, 22 nt, Human
ccgcucagcccucccugccccu

SEQ ID NO: 1155461 - RNA, 21 nt, Human
ccgcucagcccucccugcccc

SEQ ID NO: 1155462 - RNA, 19 nt, Human
ccgcucagcccucccugcc

SEQ ID NO: 1155463 - RNA, 15 nt, Human
ccgcucagcccuccc

SEQ ID NO: 1155464 - RNA, 13 nt, Human
ccgcucagcccuc

SEQ ID NO: 1155465 - RNA, 12 nt, Human
ccgcucagcccu

SEQ ID NO: 1155466 - RNA, 11 nt, Human
ccgcucagccc

SEQ ID NO: 1155467 - RNA, 19 nt, Human
cccugguuuccugcccugg

SEQ ID NO: 1155468 - RNA, 18 nt, Human
cccugguuuccugcccug

SEQ ID NO: 1155469 - RNA, 17 nt, Human
cccugguuuccugcccu

SEQ ID NO: 1155470 - RNA, 16 nt, Human
cccugguuuccugccc

SEQ ID NO: 1155471 - RNA, 18 nt, Human
cccugggaggcagugaug

SEQ ID NO: 1155472 - RNA, 22 nt, Human
cccuggcuuuucacugcuggcu

SEQ ID NO: 1155473 - RNA, 19 nt, Human
cccuggcuuuucacugcug

SEQ ID NO: 1155474 - RNA, 18 nt, Human
cccuggcuuuucacugcu

SEQ ID NO: 1155475 - RNA, 22 nt, Human
cccugcuuugggcugcccuggu

SEQ ID NO: 1155476 - RNA, 20 nt, Human
cccugcuuugggcugcccug

SEQ ID NO: 1155477 - RNA, 19 nt, Human
cccugcuuugggcugcccu

SEQ ID NO: 1155478 - RNA, 18 nt, Human
cccugcuuugggcugccc

SEQ ID NO: 1155479 - RNA, 17 nt, Human
cccugcuuugggcugcc

SEQ ID NO: 1155480 - RNA, 20 nt, Human
cccugcaaagcccagcuuga

SEQ ID NO: 1155481 - RNA, 19 nt, Human
cccugcaaagcccagcuug

SEQ ID NO: 1155482 - RNA, 17 nt, Human
cccugcaaagcccagcu

SEQ ID NO: 1155483 - RNA, 16 nt, Human
cccugcaaagcccagc

SEQ ID NO: 1155484 - RNA, 15 nt, Human
cccugcaaagcccag

SEQ ID NO: 1155485 - RNA, 22 nt, Human
cccuauccuacuuccccuuccu

SEQ ID NO: 1155486 - RNA, 21 nt, Human
cccuaccgagucucuucucca

SEQ ID NO: 1155487 - RNA, 18 nt, Human
cccuaccgagucucuucu

SEQ ID NO: 1155488 - RNA, 23 nt, Human
cccuaaugcgcaggcuggcccug

SEQ ID NO: 1155489 - RNA, 22 nt, Human
cccuaaugcgcaggcuggcccu

SEQ ID NO: 1155490 - RNA, 21 nt, Human
cccuaaugcgcaggcuggccc

SEQ ID NO: 1155491 - RNA, 17 nt, Human
cccuaaugcgcaggcug

SEQ ID NO: 1155492 - RNA, 22 nt, Human
cccgucucugguuccuccccuc

SEQ ID NO: 1155493 - RNA, 18 nt, Human
cccggugcccaagaauag

SEQ ID NO: 1155494 - RNA, 23 nt, Human
cccaccgggcugggagcucugca

SEQ ID NO: 1155495 - RNA, 19 nt, Human
cccacagcgcuggccggga

SEQ ID NO: 1155496 - RNA, 17 nt, Human
cccaaggcucugagcaa

SEQ ID NO: 1155497 - RNA, 13 nt, Human
cccaaccugcucu

SEQ ID NO: 1155498 - RNA, 15 nt, Human
cccaacccuggcacc

SEQ ID NO: 1155499 - RNA, 18 nt, Human
ccauguuggccaggcugg

SEQ ID NO: 1155500 - RNA, 21 nt, Human
ccauguuggccaggcugcucu

SEQ ID NO: 1155501 - RNA, 18 nt, Human
ccauguuggccaggcugc

SEQ ID NO: 1155502 - RNA, 21 nt, Human
ccaugggaaaugucaacaagu

SEQ ID NO: 1155503 - RNA, 16 nt, Human
ccaucuaaacugcccc

SEQ ID NO: 1155504 - RNA, 15 nt, Human
ccaucuaaacugccc

SEQ ID NO: 1155505 - RNA, 14 nt, Human
ccaucuaaacugcc

SEQ ID NO: 1155506 - RNA, 21 nt, Human
ccauaguaugggacuggccuc

SEQ ID NO: 1155507 - RNA, 12 nt, Human
ccauaggucacc

SEQ ID NO: 1155508 - RNA, 21 nt, Human
ccagggcuggaaugauuucag

SEQ ID NO: 1155509 - RNA, 19 nt, Human
ccaggcgccccuucccccu

SEQ ID NO: 1155510 - RNA, 18 nt, Human
ccaggcgccccuuccccc

SEQ ID NO: 1155511 - RNA, 16 nt, Human
ccagccuccaugcugc

SEQ ID NO: 1155512 - RNA, 15 nt, Human
ccagccuccaugcug

SEQ ID NO: 1155513 - RNA, 21 nt, Human
ccagccuccaagcuccaucuc

SEQ ID NO: 1155514 - RNA, 21 nt, Human
ccagcccuccuuaucaaagga

SEQ ID NO: 1155515 - RNA, 21 nt, Human
ccagcaauucuccugccucag

SEQ ID NO: 1155516 - RNA, 20 nt, Human
ccagcaauucuccugccuca

SEQ ID NO: 1155517 - RNA, 19 nt, Human
ccagcaauucuccugccuc

SEQ ID NO: 1155518 - RNA, 18 nt, Human
ccagcaauucuccugccu

SEQ ID NO: 1155519 - RNA, 16 nt, Human
ccagcaauucuccugc

SEQ ID NO: 1155520 - RNA, 11 nt, Human
ccacugccucu

SEQ ID NO: 1155521 - RNA, 20 nt, Human
ccacuccagaccccuggcuu

SEQ ID NO: 1155522 - RNA, 19 nt, Human
ccacuccagaccccuggcu

SEQ ID NO: 1155523 - RNA, 17 nt, Human
ccacuccagaccccugg

SEQ ID NO: 1155524 - RNA, 14 nt, Human
ccaccugcccaacc

SEQ ID NO: 1155525 - RNA, 23 nt, Human
ccacauagugaugguuccccugu

SEQ ID NO: 1155526 - RNA, 22 nt, Human
ccacauagugaugguuccccug

SEQ ID NO: 1155527 - RNA, 21 nt, Human
ccacauagugaugguuccccu

SEQ ID NO: 1155528 - RNA, 19 nt, Human
ccacauagugaugguuccc

SEQ ID NO: 1155529 - RNA, 17 nt, Human
ccacacuccagcuggga

SEQ ID NO: 1155530 - RNA, 14 nt, Human
ccacacuccagcug

SEQ ID NO: 1155531 - RNA, 17 nt, Human
cauuccccgucucuggu

SEQ ID NO: 1155532 - RNA, 13 nt, Human
cauuccccauggg

SEQ ID NO: 1155533 - RNA, 22 nt, Human
cauuccaccuucccaugcccug

SEQ ID NO: 1155534 - RNA, 17 nt, Human
cauuccaccuucccaug

SEQ ID NO: 1155535 - RNA, 18 nt, Human
cauguguuggcagccucu

SEQ ID NO: 1155536 - RNA, 14 nt, Human
caugucucgacuca

SEQ ID NO: 1155537 - RNA, 14 nt, Human
caugcagcaucuaa

SEQ ID NO: 1155538 - RNA, 23 nt, Human
caugacucguauaugucucaggu

SEQ ID NO: 1155539 - RNA, 20 nt, Human
caugacucguauaugucuca

SEQ ID NO: 1155540 - RNA, 19 nt, Human
cauccuacaagacacagug

SEQ ID NO: 1155541 - RNA, 18 nt, Human
cauccuacaagacacagu

SEQ ID NO: 1155542 - RNA, 12 nt, Human
cauccauccagg

SEQ ID NO: 1155543 - RNA, 22 nt, Human
cauagugaugguuccccuguuc

SEQ ID NO: 1155544 - RNA, 19 nt, Human
cauagugaugguuccccug

SEQ ID NO: 1155545 - RNA, 18 nt, Human
cauagugaugguuccccu

SEQ ID NO: 1155546 - RNA, 15 nt, Human
cagugcccuccagga

SEQ ID NO: 1155547 - RNA, 17 nt, Human
cagucccccugccccag

SEQ ID NO: 1155548 - RNA, 16 nt, Human
cagucccccugcccca

SEQ ID NO: 1155549 - RNA, 23 nt, Human
caguccccgugaaggagagcccu

SEQ ID NO: 1155550 - RNA, 21 nt, Human
caggugugagccaccacgccc

SEQ ID NO: 1155551 - RNA, 18 nt, Human
caggugugagccaccacg

SEQ ID NO: 1155552 - RNA, 21 nt, Human
cagguggccacuccagacccc

SEQ ID NO: 1155553 - RNA, 19 nt, Human
cagguggccacuccagacc

SEQ ID NO: 1155554 - RNA, 16 nt, Human
cagguggccacuccag

SEQ ID NO: 1155555 - RNA, 15 nt, Human
cagguggccacucca

SEQ ID NO: 1155556 - RNA, 20 nt, Human
cagguaaucgaccugccucg

SEQ ID NO: 1155557 - RNA, 19 nt, Human
cagguaaucgaccugccuc

SEQ ID NO: 1155558 - RNA, 18 nt, Human
cagguaaucgaccugccu

SEQ ID NO: 1155559 - RNA, 17 nt, Human
cagguaaucgaccugcc

SEQ ID NO: 1155560 - RNA, 20 nt, Human
cagggcauggccagguggcc

SEQ ID NO: 1155561 - RNA, 17 nt, Human
cagggaaggggacaagg

SEQ ID NO: 1155562 - RNA, 15 nt, Human
cagggaaggggacaa

SEQ ID NO: 1155563 - RNA, 14 nt, Human
caggcugugaguuu

SEQ ID NO: 1155564 - RNA, 23 nt, Human
caggcuggucucgaacuccugac

SEQ ID NO: 1155565 - RNA, 22 nt, Human
caggcuggucucgaacuccuga

SEQ ID NO: 1155566 - RNA, 20 nt, Human
caggcuggucucgaacuccu

SEQ ID NO: 1155567 - RNA, 17 nt, Human
caggcuggcccugcccu

SEQ ID NO: 1155568 - RNA, 16 nt, Human
caggcuggcccugccc

SEQ ID NO: 1155569 - RNA, 15 nt, Human
caggcuggcccugcc

SEQ ID NO: 1155570 - RNA, 14 nt, Human
caggcuggcccugc

SEQ ID NO: 1155571 - RNA, 12 nt, Human
caggcuggcccu

SEQ ID NO: 1155572 - RNA, 23 nt, Human
caggcugcucuugaacuccugac

SEQ ID NO: 1155573 - RNA, 20 nt, Human
caggcugcucuugaacuccu

SEQ ID NO: 1155574 - RNA, 12 nt, Human
caggcugcucuu

SEQ ID NO: 1155575 - RNA, 21 nt, Human
caggcugagccucagucuccc

SEQ ID NO: 1155576 - RNA, 17 nt, Human
caggcugagccucaguc

SEQ ID NO: 1155577 - RNA, 16 nt, Human
caggcugagccucagu

SEQ ID NO: 1155578 - RNA, 15 nt, Human
caggcugagccucag

SEQ ID NO: 1155579 - RNA, 14 nt, Human
caggcugagccuca

SEQ ID NO: 1155580 - RNA, 13 nt, Human
caggcugagccuc

SEQ ID NO: 1155581 - RNA, 12 nt, Human
caggcugagccu

SEQ ID NO: 1155582 - RNA, 22 nt, Human
caggcucuucuccuuucacaac

SEQ ID NO: 1155583 - RNA, 18 nt, Human
caggcucuucuccuuuca

SEQ ID NO: 1155584 - RNA, 15 nt, Human
caggcucuucuccuu

SEQ ID NO: 1155585 - RNA, 14 nt, Human
caggcucuucuccu

SEQ ID NO: 1155586 - RNA, 12 nt, Human
caggcucuucuc

SEQ ID NO: 1155587 - RNA, 18 nt, Human
caggcuccugccaccacg

SEQ ID NO: 1155588 - RNA, 16 nt, Human
caggcuccugccacca

SEQ ID NO: 1155589 - RNA, 15 nt, Human
caggcuccugccacc

SEQ ID NO: 1155590 - RNA, 14 nt, Human
caggcuccugccac

SEQ ID NO: 1155591 - RNA, 13 nt, Human
caggcuccugcca

SEQ ID NO: 1155592 - RNA, 23 nt, Human
caggcccuuccucuccacugccu

SEQ ID NO: 1155593 - RNA, 21 nt, Human
caggcccuuccucuccacugc

SEQ ID NO: 1155594 - RNA, 20 nt, Human
caggcccuuccucuccacug

SEQ ID NO: 1155595 - RNA, 19 nt, Human
caggcccuuccucuccacu

SEQ ID NO: 1155596 - RNA, 17 nt, Human
caggcccuuccucucca

SEQ ID NO: 1155597 - RNA, 16 nt, Human
caggcccuuccucucc

SEQ ID NO: 1155598 - RNA, 15 nt, Human
caggcccuuccucuc

SEQ ID NO: 1155599 - RNA, 21 nt, Human
caggccauuccccgucucugg

SEQ ID NO: 1155600 - RNA, 18 nt, Human
caggccauuccccgucuc

SEQ ID NO: 1155601 - RNA, 20 nt, Human
caggcaggaaggcugagagg

SEQ ID NO: 1155602 - RNA, 19 nt, Human
caggauguacaaggacagc

SEQ ID NO: 1155603 - RNA, 13 nt, Human
caggauagacuuu

SEQ ID NO: 1155604 - RNA, 16 nt, Human
caggaguuggaagugu

SEQ ID NO: 1155605 - RNA, 16 nt, Human
caggacucugccuccu

SEQ ID NO: 1155606 - RNA, 15 nt, Human
caggacucugccucc

SEQ ID NO: 1155607 - RNA, 13 nt, Human
caggacucugccu

SEQ ID NO: 1155608 - RNA, 12 nt, Human
caggacucugcc

SEQ ID NO: 1155609 - RNA, 19 nt, Human
caggaaggcugagaggaga

SEQ ID NO: 1155610 - RNA, 14 nt, Human
caggaagcagcuuu

SEQ ID NO: 1155611 - RNA, 14 nt, Human
cagcuuugauauuu

SEQ ID NO: 1155612 - RNA, 23 nt, Human
cagcuuuccccaugucucgacuc

SEQ ID NO: 1155613 - RNA, 22 nt, Human
cagcuuuaaaaaauuaaucugg

SEQ ID NO: 1155614 - RNA, 17 nt, Human
cagcuggguuggaaaac

SEQ ID NO: 1155615 - RNA, 16 nt, Human
cagcuggguuggaaaa

SEQ ID NO: 1155616 - RNA, 23 nt, Human
cagcugggaucacauguggacuu

SEQ ID NO: 1155617 - RNA, 19 nt, Human
cagcuggccgggagccuga

SEQ ID NO: 1155618 - RNA, 21 nt, Human
cagcugcucaauaaaguacaa

SEQ ID NO: 1155619 - RNA, 21 nt, Human
cagcucacugcaaccuucgcc

SEQ ID NO: 1155620 - RNA, 15 nt, Human
cagcucacugcaacc

SEQ ID NO: 1155621 - RNA, 14 nt, Human
cagcucacugcaac

SEQ ID NO: 1155622 - RNA, 12 nt, Human
cagcucacugca

SEQ ID NO: 1155623 - RNA, 19 nt, Human
cagcuaaucagcauucuca

SEQ ID NO: 1155624 - RNA, 21 nt, Human
cagccuggcacagggcagugg

SEQ ID NO: 1155625 - RNA, 20 nt, Human
cagccuggcacagggcagug

SEQ ID NO: 1155626 - RNA, 13 nt, Human
cagccuggcacag

SEQ ID NO: 1155627 - RNA, 10 nt, Human
cagccuggca

SEQ ID NO: 1155628 - RNA, 15 nt, Human
cagccuccugaguag

SEQ ID NO: 1155629 - RNA, 20 nt, Human
cagccuccaugcugccucca

SEQ ID NO: 1155630 - RNA, 17 nt, Human
cagccuccaugcugccu

SEQ ID NO: 1155631 - RNA, 15 nt, Human
cagccuccaugcugc

SEQ ID NO: 1155632 - RNA, 14 nt, Human
cagccuccaugcug

SEQ ID NO: 1155633 - RNA, 20 nt, Human
cagccuccaagcuccaucuc

SEQ ID NO: 1155634 - RNA, 14 nt, Human
cagccuccaagcuc

SEQ ID NO: 1155635 - RNA, 20 nt, Human
cagccgugccuucagcucua

SEQ ID NO: 1155636 - RNA, 18 nt, Human
cagccgugccuucagcuc

SEQ ID NO: 1155637 - RNA, 16 nt, Human
cagccgugccuucagc

SEQ ID NO: 1155638 - RNA, 14 nt, Human
cagccgugccuuca

SEQ ID NO: 1155639 - RNA, 9 nt, Human
cagccgugc

SEQ ID NO: 1155640 - RNA, 23 nt, Human
cagcccugcuuugggcugcccug

SEQ ID NO: 1155641 - RNA, 22 nt, Human
cagcccugcuuugggcugcccu

SEQ ID NO: 1155642 - RNA, 21 nt, Human
cagcccugcuuugggcugccc

SEQ ID NO: 1155643 - RNA, 20 nt, Human
cagcccugcuuugggcugcc

SEQ ID NO: 1155644 - RNA, 19 nt, Human
cagcccugcuuugggcugc

SEQ ID NO: 1155645 - RNA, 13 nt, Human
cagcccugcuuug

SEQ ID NO: 1155646 - RNA, 11 nt, Human
cagcccugcuu

SEQ ID NO: 1155647 - RNA, 22 nt, Human
cagcccucccugccccucccuu

SEQ ID NO: 1155648 - RNA, 18 nt, Human
cagcccucccugccccuc

SEQ ID NO: 1155649 - RNA, 17 nt, Human
cagcccucccugccccu

SEQ ID NO: 1155650 - RNA, 16 nt, Human
cagcccucccugcccc

SEQ ID NO: 1155651 - RNA, 15 nt, Human
cagcccucccugccc

SEQ ID NO: 1155652 - RNA, 13 nt, Human
cagcccucccugc

SEQ ID NO: 1155653 - RNA, 23 nt, Human
cagcccuccaucuaaacugcccc

SEQ ID NO: 1155654 - RNA, 22 nt, Human
cagcccuccaucuaaacugccc

SEQ ID NO: 1155655 - RNA, 18 nt, Human
cagccuccaugcugccuc

SEQ ID NO: 1155656 - RNA, 19 nt, Human
cagcccacauagugauggu

SEQ ID NO: 1155657 - RNA, 15 nt, Human
cagcauucucacucc

SEQ ID NO: 1155658 - RNA, 14 nt, Human
cagcauucucacuc

SEQ ID NO: 1155659 - RNA, 23 nt, Human
cagcagccccugcacaaagcccu

SEQ ID NO: 1155660 - RNA, 16 nt, Human
cagcagccccugcaca

SEQ ID NO: 1155661 - RNA, 13 nt, Human
cagcagccccugc

SEQ ID NO: 1155662 - RNA, 20 nt, Human
cagcaauucuccugccucag

SEQ ID NO: 1155663 - RNA, 19 nt, Human
cagcaauucuccugccuca

SEQ ID NO: 1155664 - RNA, 18 nt, Human
cagcaauucuccugccuc

SEQ ID NO: 1155665 - RNA, 17 nt, Human
cagcaauucuccugccu

SEQ ID NO: 1155666 - RNA, 16 nt, Human
cagcaauucuccugcc

SEQ ID NO: 1155667 - RNA, 15 nt, Human
cagcaauucuccugc

SEQ ID NO: 1155668 - RNA, 22 nt, Human
cagauuuuuuacagcugccugc

SEQ ID NO: 1155669 - RNA, 19 nt, Human
cagauuuuuuacagcugcc

SEQ ID NO: 1155670 - RNA, 15 nt, Human
cagaugcugugcaaa

SEQ ID NO: 1155671 - RNA, 22 nt, Human
cagagccaccccuaaagagaua

SEQ ID NO: 1155672 - RNA, 18 nt, Human
cagagcacagcagccccu

SEQ ID NO: 1155673 - RNA, 18 nt, Human
cagagaguggcuccuccc

SEQ ID NO: 1155674 - RNA, 15 nt, Human
cagagaguggcuccu

SEQ ID NO: 1155675 - RNA, 14 nt, Human
cagagaguggcucc

SEQ ID NO: 1155676 - RNA, 13 nt, Human
cagagaguggcuc

SEQ ID NO: 1155677 - RNA, 20 nt, Human
cagacuuuuuuuaaauagua

SEQ ID NO: 1155678 - RNA, 23 nt, Human
cagaccccuggcuuuucacugcu

SEQ ID NO: 1155679 - RNA, 22 nt, Human
cagaccccuggcuuuucacugc

SEQ ID NO: 1155680 - RNA, 21 nt, Human
cagaccccuggcuuuucacug

SEQ ID NO: 1155681 - RNA, 18 nt, Human
cagaccccuggcuuuuca

SEQ ID NO: 1155682 - RNA, 16 nt, Human
cagaccccuggcuuuu

SEQ ID NO: 1155683 - RNA, 15 nt, Human
cagaccccuggcuuu

SEQ ID NO: 1155684 - RNA, 14 nt, Human
cagaccccuggcuu

SEQ ID NO: 1155685 - RNA, 13 nt, Human
cagaccccuggcu

SEQ ID NO: 1155686 - RNA, 15 nt, Human
cagaaucucgcucug

SEQ ID NO: 1155687 - RNA, 22 nt, Human
cagaacccuuggagccaaugga

SEQ ID NO: 1155688 - RNA, 13 nt, Human
cagaagcagcucu

SEQ ID NO: 1155689 - RNA, 14 nt, Human
cagaagcagcucuu

SEQ ID NO: 1155690 - RNA, 24 nt, Human
cagaaagaaguggggacagagcag

SEQ ID NO: 1155691 - RNA, 18 nt, Human
cacuuuuauuuagcacca

SEQ ID NO: 1155692 - RNA, 19 nt, Human
cacuugaugacccccaacc

SEQ ID NO: 1155693 - RNA, 20 nt, Human
cacuuccauaaucuggacuc

SEQ ID NO: 1155694 - RNA, 23 nt, Human
cacuucaggcucuucuccuuuca

SEQ ID NO: 1155695 - RNA, 20 nt, Human
cacuucaggcucuucuccuu

SEQ ID NO: 1155696 - RNA, 16 nt, Human
cacuucaggcucuucu

SEQ ID NO: 1155697 - RNA, 15 nt, Human
cacuucaggcucuuc

SEQ ID NO: 1155698 - RNA, 14 nt, Human
cacuucaggcucuu

SEQ ID NO: 1155699 - RNA, 18 nt, Human
cacuggacucaccucccc

SEQ ID NO: 1155700 - RNA, 15 nt, Human
cacuggacucaccuc

SEQ ID NO: 1155701 - RNA, 21 nt, Human
cacugcuggcugccuuagaac

SEQ ID NO: 1155702 - RNA, 16 nt, Human
cacugcuggcugccuu

SEQ ID NO: 1155703 - RNA, 15 nt, Human
cacugcuggcugccu

SEQ ID NO: 1155704 - RNA, 14 nt, Human
cacugcuggcugcc

SEQ ID NO: 1155705 - RNA, 13 nt, Human
cacugcuggcugc

SEQ ID NO: 1155706 - RNA, 12 nt, Human
cacugcuggcug

SEQ ID NO: 1155707 - RNA, 17 nt, Human
cacugcugcccagccuc

SEQ ID NO: 1155708 - RNA, 15 nt, Human
cacugcugcccagcc

SEQ ID NO: 1155709 - RNA, 20 nt, Human
cacugcucugaugaagagga

SEQ ID NO: 1155710 - RNA, 22 nt, Human
cacugccuucgauacaccgggc

SEQ ID NO: 1155711 - RNA, 20 nt, Human
cacugccuucgauacaccgg

SEQ ID NO: 1155712 - RNA, 16 nt, Human
cacugccucuuccucc

SEQ ID NO: 1155713 - RNA, 23 nt, Human
cacugcacagugcaucucagccc

SEQ ID NO: 1155714 - RNA, 22 nt, Human
cacugcacagugcaucucagcc

SEQ ID NO: 1155715 - RNA, 21 nt, Human
cacugcacagugcaucucagc

SEQ ID NO: 1155716 - RNA, 19 nt, Human
cacugcacagugcaucuca

SEQ ID NO: 1155717 - RNA, 18 nt, Human
cacugcacagugcaucuc

SEQ ID NO: 1155718 - RNA, 23 nt, Human
cacugcaaccuucgccaccuggg

SEQ ID NO: 1155719 - RNA, 22 nt, Human
cacugcaaccuucgccaccugg

SEQ ID NO: 1155720 - RNA, 14 nt, Human
cacugcaaccuucg

SEQ ID NO: 1155721 - RNA, 14 nt, Human
cacucuacuuagca

SEQ ID NO: 1155722 - RNA, 14 nt, Human
cacuccuaccuggu

SEQ ID NO: 1155723 - RNA, 13 nt, Human
cacuccuaccugg

SEQ ID NO: 1155724 - RNA, 19 nt, Human
cacuaucccggcugcccuu

SEQ ID NO: 1155725 - RNA, 18 nt, Human
cacuaucccggcugcccu

SEQ ID NO: 1155726 - RNA, 13 nt, Human
cacgugacagccg

SEQ ID NO: 1155727 - RNA, 15 nt, Human
cacgggggccaagga

SEQ ID NO: 1155728 - RNA, 14 nt, Human
cacgcuccuuccuc

SEQ ID NO: 1155729 - RNA, 14 nt, Human
caccuucccaugcc

SEQ ID NO: 1155730 - RNA, 13 nt, Human
caccuucccaugc

SEQ ID NO: 1155731 - RNA, 22 nt, Human
caccuuagccugcccuccuuuc

SEQ ID NO: 1155732 - RNA, 21 nt, Human
caccucccccaucucuucugg

SEQ ID NO: 1155733 - RNA, 14 nt, Human
caccucccccaucu

SEQ ID NO: 1155734 - RNA, 20 nt, Human
caccgugccuggccacgccc

SEQ ID NO: 1155735 - RNA, 15 nt, Human
caccgugccuggcca

SEQ ID NO: 1155736 - RNA, 15 nt, Human
caccggggccucgga

SEQ ID NO: 1155737 - RNA, 13 nt, Human
caccgggccugga

SEQ ID NO: 1155738 - RNA, 16 nt, Human
agcaaauguggcuccu

SEQ ID NO: 1155739 - RNA, 20 nt, Human
agcaaaugucuuccuggauu

SEQ ID NO: 1155740 - RNA, 17 nt, Human
agcaaaugucuuccugg

SEQ ID NO: 1155741 - RNA, 13 nt, Human
agcccucccugcc

SEQ ID NO: 1155742 - RNA, 12 nt, Human
agcccucccugc

SEQ ID NO: 1155743 - RNA, 23 nt, Human
agcccuccaucuaaacugccccc

SEQ ID NO: 1155744 - RNA, 18 nt, Human
agaagguuucagaaagaa

SEQ ID NO: 1155745 - RNA, 21 nt, Human
acuuuccucuuagucgagcca

SEQ ID NO: 1155746 - RNA, 23 nt, Human
agaggagggagcaucagugcccu

SEQ ID NO: 1155747 - RNA, 15 nt, Human
aggggccuggcagcc

SEQ ID NO: 1155748 - RNA, 13 nt, Human
aggggccuggcag

SEQ ID NO: 1155749 - RNA, 12 nt, Human
aggggccuggca

SEQ ID NO: 1155750 - RNA, 23 nt, Human
agggacugccagucccccugccc

SEQ ID NO: 1155751 - RNA, 23 nt, Human
aggcuggucucgaacuccugacc

SEQ ID NO: 1155752 - RNA, 11 nt, Human
aggcugagccu

SEQ ID NO: 1155753 - RNA, 22 nt, Human
aggcccuuccucuccacugccu

SEQ ID NO: 1155754 - RNA, 20 nt, Human
aggacccggaggggccuggc

SEQ ID NO: 1155755 - RNA, 18 nt, Human
aggacccggaggggccug

SEQ ID NO: 1155756 - RNA, 22 nt, Human
aggacccggaggggccuggcag

SEQ ID NO: 1155757 - RNA, 21 nt, Human
aggacccggaggggccuggca

SEQ ID NO: 1155758 - RNA, 20 nt, Human
aggaauaaauugcuccuuga

SEQ ID NO: 1155759 - RNA, 19 nt, Human
aggaauaaauugcuccuug

SEQ ID NO: 1155760 - RNA, 22 nt, Human
aggaaggcugagaggagagaga

SEQ ID NO: 1155761 - RNA, 16 nt, Human
agcuuuuaaacccuau

SEQ ID NO: 1155762 - RNA, 21 nt, Human
agcuaaucagcauucucacuc

SEQ ID NO: 1155763 - RNA, 16 nt, Human
agcuaaucagcauucu

SEQ ID NO: 1155764 - RNA, 23 nt, Human
agcccucccugccccucccuuca

SEQ ID NO: 1155765 - RNA, 22 nt, Human
agcccucccugccccucccuuc

SEQ ID NO: 1155766 - RNA, 20 nt, Human
agccuggcuccaaacccucg

SEQ ID NO: 1155767 - RNA, 19 nt, Human
agcccucccugccccuccc

SEQ ID NO: 1155768 - RNA, 17 nt, Human
agcccucccugccccuc

SEQ ID NO: 1155769 - RNA, 16 nt, Human
agcccucccugccccu

SEQ ID NO: 1155770 - RNA, 15 nt, Human
agcccucccugcccc

SEQ ID NO: 1155771 - RNA, 22 nt, Human
agccuggcuccaaacccucgag

SEQ ID NO: 1155772 - RNA, 15 nt, Human
agccuuuggaaacag

SEQ ID NO: 1155773 - RNA, 18 nt, Human
augaccacacuccagcug

SEQ ID NO: 1155774 - RNA, 17 nt, Human
aucucugcuuuggaaau

SEQ ID NO: 1155775 - RNA, 16 nt, Human
aucucugcuuuggaaa

SEQ ID NO: 1155776 - RNA, 15 nt, Human
aucccggcugcccuu

SEQ ID NO: 1155777 - RNA, 18 nt, Human
auccccaagccuggcaag

SEQ ID NO: 1155778 - RNA, 13 nt, Human
auccacucgccuu

SEQ ID NO: 1155779 - RNA, 18 nt, Human
auggcugugccucugccu

SEQ ID NO: 1155780 - RNA, 17 nt, Human
auggcugugccucugcc

SEQ ID NO: 1155781 - RNA, 16 nt, Human
auggcugugccucugc

SEQ ID NO: 1155782 - RNA, 15 nt, Human
auggcugugccucug

SEQ ID NO: 1155783 - RNA, 21 nt, Human
augcuuuaggauguacaguua

SEQ ID NO: 1155784 - RNA, 18 nt, Human
augcuuuaggauguacag

SEQ ID NO: 1155785 - RNA, 15 nt, Human
augcugccuccagaa

SEQ ID NO: 1155786 - RNA, 12 nt, Human
augcugccucca

SEQ ID NO: 1155787 - RNA, 21 nt, Human
augcugacuguacuccuccca

SEQ ID NO: 1155788 - RNA, 20 nt, Human
augcugacuguacuccuccc

SEQ ID NO: 1155789 - RNA, 19 nt, Human
augcugacuguacuccucc

SEQ ID NO: 1155790 - RNA, 19 nt, Human
auacccccugcaaagccca

SEQ ID NO: 1155791 - RNA, 17 nt, Human
auacccccugcaaagcc

SEQ ID NO: 1155792 - RNA, 21 nt, Human
auacccccugcaaagcccagc

SEQ ID NO: 1155793 - RNA, 20 nt, Human
auacccccugcaaagcccag

SEQ ID NO: 1155794 - RNA, 15 nt, Human
auaauguaaauaaag

SEQ ID NO: 1155795 - RNA, 14 nt, Human
auaguaaaaauaaa

SEQ ID NO: 1155796 - RNA, 13 nt, Human
auaguaaaaauaa

SEQ ID NO: 1155797 - RNA, 19 nt, Human
agucaugcguuuaaucaca

SEQ ID NO: 1155798 - RNA, 17 nt, Human
agugaccucagcuuuga

SEQ ID NO: 1155799 - RNA, 18 nt, Human
agugaccucagcuuugau

SEQ ID NO: 1155800 - RNA, 21 nt, Human
agugauucucaugccucagcc

SEQ ID NO: 1155801 - RNA, 20 nt, Human
agugauggguuaguggaugg

SEQ ID NO: 1155802 - RNA, 21 nt, Human
agugggacagggcauggccag

SEQ ID NO: 1155803 - RNA, 19 nt, Human
agugggacagggcauggcc

SEQ ID NO: 1155804 - RNA, 22 nt, Human
aacauccuacaagacacaguga

SEQ ID NO: 1155805 - RNA, 15 nt, Human
aacauccuacaagac

SEQ ID NO: 1155806 - RNA, 19 nt, Human
aaaauuaggauuucaugau

SEQ ID NO: 1155807 - RNA, 23 nt, Human
aaaauuaaucugggccagaauuu

SEQ ID NO: 1155808 - RNA, 17 nt, Human
aagauucaaucccagga

SEQ ID NO: 1155809 - RNA, 15 nt, Human
aaggacuaggguccu

SEQ ID NO: 1155810 - RNA, 13 nt, Human
aaggacuaggguc

SEQ ID NO: 1155811 - RNA, 22 nt, Human
aaggacccggaggggccuggca

SEQ ID NO: 1155812 - RNA, 18 nt, Human
aaguugauggugaugaaa

SEQ ID NO: 1155813 - RNA, 15 nt, Human
aaguggggacagagc

SEQ ID NO: 1155814 - RNA, 20 nt, Human
aaucuggacuccucugucca

SEQ ID NO: 1155815 - RNA, 18 nt, Human
aaucuggacuccucuguc

SEQ ID NO: 1155816 - RNA, 17 nt, Human
aaucuggacuccucugu

SEQ ID NO: 1155817 - RNA, 16 nt, Human
aaucuggacuccucug

SEQ ID NO: 1155818 - RNA, 15 nt, Human
aaucuggacuccucu

SEQ ID NO: 1155819 - RNA, 18 nt, Human
aaucucggcucacugcau

SEQ ID NO: 1155820 - RNA, 23 nt, Human
aaucucgcucugucgcccaggcu

SEQ ID NO: 1155821 - RNA, 23 nt, Human
aaugauguauguugaagccuuug

SEQ ID NO: 1155822 - RNA, 21 nt, Human
aaugcgcaggcuggcccugcc

SEQ ID NO: 1155823 - RNA, 20 nt, Human
aaugcgcaggcuggcccugc

SEQ ID NO: 1155824 - RNA, 19 nt, Human
aaugcgcaggcuggcccug

SEQ ID NO: 1155825 - RNA, 18 nt, Human
aaugcgcaggcuggcccu

SEQ ID NO: 1155826 - RNA, 17 nt, Human
aaugcgcaggcuggccc

SEQ ID NO: 1155827 - RNA, 15 nt, Human
aaugcgcaggcuggc

SEQ ID NO: 1155828 - RNA, 18 nt, Human
acaaccuucuguggcuca

SEQ ID NO: 1155829 - RNA, 12 nt, Human
accaccugccca

SEQ ID NO: 1155830 - RNA, 17 nt, Human
accauaggucaccuuua

SEQ ID NO: 1155831 - RNA, 21 nt, Human
accauacuaauuauacccccu

SEQ ID NO: 1155832 - RNA, 16 nt, Human
accauacuaauuauac

SEQ ID NO: 1155833 - RNA, 13 nt, Human
accauacuaauua

SEQ ID NO: 1155834 - RNA, 15 nt, Human
acauccuacaagaca

SEQ ID NO: 1155835 - RNA, 20 nt, Human
acauaauucaggaagcagcu

SEQ ID NO: 1155836 - RNA, 16 nt, Human
acagcugccugcagua

SEQ ID NO: 1155837 - RNA, 12 nt, Human
acagcugccugc

SEQ ID NO: 1155838 - RNA, 13 nt, Human
acagugcaucuca

SEQ ID NO: 1155839 - RNA, 13 nt, Human
acuucagcucugu

SEQ ID NO: 1155840 - RNA, 22 nt, Human
acuuaaaauauuccugcauuug

SEQ ID NO: 1155841 - RNA, 22 nt, Human
acuuucaggccacauggcuaaa

SEQ ID NO: 1155842 - RNA, 23 nt, Human
acugaccagccuccaugcugccu

SEQ ID NO: 1155843 - RNA, 20 nt, Human
acugaccagccuccaugcug

SEQ ID NO: 1155844 - RNA, 15 nt, Human
acugaccagccucca

SEQ ID NO: 1155845 - RNA, 13 nt, Human
acugaccagccuc

SEQ ID NO: 1155846 - RNA, 21 nt, Human
acucuacuuagcaugucccua

SEQ ID NO: 1155847 - RNA, 20 nt, Human
acucuacuuagcaugucccu

SEQ ID NO: 1155848 - RNA, 19 nt, Human
acugccagucccccugccc

SEQ ID NO: 1155849 - RNA, 18 nt, Human
acugccagucccccugcc

SEQ ID NO: 1155850 - RNA, 13 nt, Human
accugcccaaccu

SEQ ID NO: 1155851 - RNA, 23 nt, Human
accugccccuccucucugcccua

SEQ ID NO: 1155852 - RNA, 22 nt, Human
accucagguaaucgaccugccu

SEQ ID NO: 1155853 - RNA, 23 nt, Human
accucagguaaucgaccugccuc

SEQ ID NO: 1155854 - RNA, 17 nt, Human
gcccucacccuggggcu

SEQ ID NO: 1155855 - RNA, 16 nt, Human
gcccucacccuggggc

SEQ ID NO: 1155856 - RNA, 11 nt, Human
gccuccaugcu

SEQ ID NO: 1155857 - RNA, 17 nt, Human
gccuccaagcuccaucu

SEQ ID NO: 1155858 - RNA, 13 nt, Human
gccucggacuuag

SEQ ID NO: 1155859 - RNA, 19 nt, Human
gcuccucccggugcccaag

SEQ ID NO: 1155860 - RNA, 16 nt, Human
gcugagccucagucuc

SEQ ID NO: 1155861 - RNA, 12 nt, Human
gcugagccucag

SEQ ID NO: 1155862 - RNA, 20 nt, Human
gcugaacuuguuuucuggga

SEQ ID NO: 1155863 - RNA, 17 nt, Human
gcugagucccaggcuga

SEQ ID NO: 1155864 - RNA, 12 nt, Human
gcugugccucug

SEQ ID NO: 1155865 - RNA, 16 nt, Human
gcuuuccucuuccuga

SEQ ID NO: 1155866 - RNA, 22 nt, Human
gcuuuccccaugucucgacuca

SEQ ID NO: 1155867 - RNA, 21 nt, Human
gcuuuccccaugucucgacuc

SEQ ID NO: 1155868 - RNA, 17 nt, Human
ggaacaccauaggucac

SEQ ID NO: 1155869 - RNA, 17 nt, Human
ggaaaugucaacaagua

SEQ ID NO: 1155870 - RNA, 16 nt, Human
ggagcaucagugcccu

SEQ ID NO: 1155871 - RNA, 16 nt, Human
ggagccaauggagacu

SEQ ID NO: 1155872 - RNA, 21 nt, Human
ggauguacaaggacagccccu

SEQ ID NO: 1155873 - RNA, 21 nt, Human
ggaguuggaagugugugaucu

SEQ ID NO: 1155874 - RNA, 22 nt, Human
ggcacaaucucggcucacugca

SEQ ID NO: 1155875 - RNA, 16 nt, Human
ggcacagggcaguggg

SEQ ID NO: 1155876 - RNA, 17 nt, Human
ggcccuuccucuccacu

SEQ ID NO: 1155877 - RNA, 18 nt, Human
ggcccuuccucuccacug

SEQ ID NO: 1155878 - RNA, 15 nt, Human
ggcccuuccucucca

SEQ ID NO: 1155879 - RNA, 13 nt, Human
ggcccuuccucuc

SEQ ID NO: 1155880 - RNA, 15 nt, Human
ggcccgacagccugg

SEQ ID NO: 1155881 - RNA, 19 nt, Human
ggcucacugcauccuccgc

SEQ ID NO: 1155882 - RNA, 16 nt, Human
ggcucacugcauccuc

SEQ ID NO: 1155883 - RNA, 23 nt, Human
aaaguucccuacuuccugugacu

SEQ ID NO: 1155884 - RNA, 21 nt, Human
aaaguucccuacuuccuguga

SEQ ID NO: 1155885 - RNA, 20 nt, Human
gguuccuuccucugagccuu

SEQ ID NO: 1155886 - RNA, 19 nt, Human
gguuccuuccucugagccu

SEQ ID NO: 1155887 - RNA, 16 nt, Human
gguuccuccccuccuc

SEQ ID NO: 1155888 - RNA, 15 nt, Human
gguuccccuguucac

SEQ ID NO: 1155889 - RNA, 24 nt, Human
gguuccagcaauucuccugccuca

SEQ ID NO: 1155890 - RNA, 23 nt, Human
gguuccagcaauucuccugccuc

SEQ ID NO: 1155891 - RNA, 13 nt, Human
aaagcaaaugucu

SEQ ID NO: 1155892 - RNA, 19 nt, Human
aaagacaccuacugagugg

SEQ ID NO: 1155893 - RNA, 13 nt, Human
aaagacaccuacu

SEQ ID NO: 1155894 - RNA, 18 nt, Human
aaagaaguggggacagag

SEQ ID NO: 1155895 - RNA, 16 nt, Human
gguccacaacacacag

SEQ ID NO: 1155896 - RNA, 14 nt, Human
gguagcuuuucccu

SEQ ID NO: 1155897 - RNA, 24 nt, Human
gguacaaccuguucugcuuuccuc

SEQ ID NO: 1155898 - RNA, 23 nt, Human
gguacaaccuguucugcuuuccu

SEQ ID NO: 1155899 - RNA, 18 nt, Human
gguaaucgaccugccucg

SEQ ID NO: 1155900 - RNA, 17 nt, Human
gguaaucgaccugccuc

SEQ ID NO: 1155901 - RNA, 14 nt, Human
gguaaucgaccugc

SEQ ID NO: 1155902 - RNA, 12 nt, Human
ggggccuggcag

SEQ ID NO: 1155903 - RNA, 11 nt, Human
ggggccuggca

SEQ ID NO: 1155904 - RNA, 22 nt, Human
aaacauccuacaagacacagug

SEQ ID NO: 1155905 - RNA, 18 nt, Human
aaacauccuacaagacac

SEQ ID NO: 1155906 - RNA, 12 nt, Human
aaaaugugugug

SEQ ID NO: 1155907 - RNA, 18 nt, Human
gggcugggagcucugcag

SEQ ID NO: 1155908 - RNA, 16 nt, Human
gggcugggagcucugc

SEQ ID NO: 1155909 - RNA, 21 nt, Human
gggcugcccuggugcugccac

SEQ ID NO: 1155910 - RNA, 15 nt, Human
gggcugcccuggugc

SEQ ID NO: 1155911 - RNA, 14 nt, Human
gggcugcccuggug

SEQ ID NO: 1155912 - RNA, 13 nt, Human
gggcugcccuggu

SEQ ID NO: 1155913 - RNA, 23 nt, Human
gggcuacaccuuagccugcccuc

SEQ ID NO: 1155914 - RNA, 22 nt, Human
gggccucggacuuagcugggag

SEQ ID NO: 1155915 - RNA, 21 nt, Human
aaaaugcuguauuagucacag

SEQ ID NO: 1155916 - RNA, 12 nt, Human
gggauuacaggu

SEQ ID NO: 1155917 - RNA, 21 nt, Human
gggauuacaggcuccugccac

SEQ ID NO: 1155918 - RNA, 16 nt, Human
gggauuacaggcuccu

SEQ ID NO: 1155919 - RNA, 13 nt, Human
gggauuacaggcu

SEQ ID NO: 1155920 - RNA, 14 nt, Human
gggauuacaggcgu

SEQ ID NO: 1155921 - RNA, 23 nt, Human
aaaaauaugaccacacuccagcu

SEQ ID NO: 1155922 - RNA, 21 nt, Human
aaaaauaugaccacacuccag

SEQ ID NO: 1155923 - RNA, 18 nt, Human
gaaauccagggugguggu

SEQ ID NO: 1155924 - RNA, 13 nt, Human
gaaauccagggug

SEQ ID NO: 1155925 - RNA, 15 nt, Human
gaaguggggacagag

SEQ ID NO: 1155926 - RNA, 21 nt, Human
gaauuuuauuuuuugggaaaa

SEQ ID NO: 1155927 - RNA, 19 nt, Human
gacagccuggcacagggca

SEQ ID NO: 1155928 - RNA, 13 nt, Human
gacagcccuccau

SEQ ID NO: 1155929 - RNA, 18 nt, Human
gacuaggguccuggggaa

SEQ ID NO: 1155930 - RNA, 16 nt, Human
gacuaggguccugggg

SEQ ID NO: 1155931 - RNA, 15 nt, Human
gacuaggguccuggg

SEQ ID NO: 1155932 - RNA, 11 nt, Human
gacuuuccucu

SEQ ID NO: 1155933 - RNA, 23 nt, Human
gagaaggacccggaggggccugg

SEQ ID NO: 1155934 - RNA, 22 nt, Human
gagaaggacccggaggggccug

SEQ ID NO: 1155935 - RNA, 20 nt, Human
gagaaggacccggaggggcc

SEQ ID NO: 1155936 - RNA, 13 nt, Human
gagaccugccccu

SEQ ID NO: 1155937 - RNA, 12 nt, Human
gagaccugcccc

SEQ ID NO: 1155938 - RNA, 11 nt, Human
gagaccugccc

SEQ ID NO: 1155939 - RNA, 20 nt, Human
gauuacaggugugagccacc

SEQ ID NO: 1155940 - RNA, 22 nt, Human
gcacaaucucggcucacugcau

SEQ ID NO: 1155941 - RNA, 21 nt, Human
gcacaaucucggcucacugca

SEQ ID NO: 1155942 - RNA, 13 nt, Human
gcagggagggccu

SEQ ID NO: 1155943 - RNA, 10 nt, Human
gcagggaggg

SEQ ID NO: 1155944 - RNA, 21 nt, Human
gcaggcuggcccugcccuggu

SEQ ID NO: 1155945 - RNA, 20 nt, Human
gcaggcuggcccugcccugg

SEQ ID NO: 1155946 - RNA, 19 nt, Human
gcaggcuggcccugcccug

SEQ ID NO: 1155947 - RNA, 18 nt, Human
gcaggcuggcccugcccu

SEQ ID NO: 1155948 - RNA, 17 nt, Human
gcaggcuggcccugccc

SEQ ID NO: 1155949 - RNA, 16 nt, Human
gcaggcuggcccugcc

SEQ ID NO: 1155950 - RNA, 15 nt, Human
gcaggcuggcccugc

SEQ ID NO: 1155951 - RNA, 21 nt, Human
cuuccauaaucuggacuccuc

SEQ ID NO: 1155952 - RNA, 11 nt, Human
cuuccauaauc

SEQ ID NO: 1155953 - RNA, 21 nt, Human
cuucuguugcugccucaugcu

SEQ ID NO: 1155954 - RNA, 20 nt, Human
cuucuguugcugccucaugc

SEQ ID NO: 1155955 - RNA, 19 nt, Human
cuucuguugcugccucaug

SEQ ID NO: 1155956 - RNA, 18 nt, Human
cuucuguugcugccucau

SEQ ID NO: 1155957 - RNA, 17 nt, Human
cuucuguugcugccuca

SEQ ID NO: 1155958 - RNA, 17 nt, Human
cuucuagaaccaggcaa

SEQ ID NO: 1155959 - RNA, 13 nt, Human
cuucuagaaccag

SEQ ID NO: 1155960 - RNA, 16 nt, Human
cuuucacaaccuucug

SEQ ID NO: 1155961 - RNA, 14 nt, Human
cuuucacaaccuuc

SEQ ID NO: 1155962 - RNA, 15 nt, Human
cuuuguaaauuguca

SEQ ID NO: 1155963 - RNA, 21 nt, Human
cuuugggcugcccuggugcug

SEQ ID NO: 1155964 - RNA, 20 nt, Human
cuuugggcugcccuggugcu

SEQ ID NO: 1155965 - RNA, 19 nt, Human
cuuugggcugcccuggugc

SEQ ID NO: 1155966 - RNA, 15 nt, Human
cuuugggcugcccug

SEQ ID NO: 1155967 - RNA, 14 nt, Human
cuuugggcugcccu

SEQ ID NO: 1155968 - RNA, 22 nt, Human
cuuugauauuuucaacgcagcc

SEQ ID NO: 1155969 - RNA, 23 nt, Human
gaaaaugcuguauuagucacaga

SEQ ID NO: 1155970 - RNA, 21 nt, Human
cuuuuuuuuuuuugagacaga

SEQ ID NO: 1155971 - RNA, 20 nt, Human
cuuuuuuuuuuuugagacag

SEQ ID NO: 1155972 - RNA, 13 nt, Human
cuuuuggagucag

SEQ ID NO: 1155973 - RNA, 13 nt, Human
cuuuugccauuga

SEQ ID NO: 1155974 - RNA, 18 nt, Human
cuggcucccacaggcccu

SEQ ID NO: 1155975 - RNA, 15 nt, Human
cuggcucccacaggc

SEQ ID NO: 1155976 - RNA, 20 nt, Human
cuggcuccagcuggccggga

SEQ ID NO: 1155977 - RNA, 18 nt, Human
cuggcuccagcuggccgg

SEQ ID NO: 1155978 - RNA, 14 nt, Human
cuggcuccagcugg

SEQ ID NO: 1155979 - RNA, 13 nt, Human
cuggcuccagcug

SEQ ID NO: 1155980 - RNA, 19 nt, Human
cuggcuccaaacccucgag

SEQ ID NO: 1155981 - RNA, 20 nt, Human
cuggcuccaaacccucgagg

SEQ ID NO: 1155982 - RNA, 17 nt, Human
cuggggaaccugacccc

SEQ ID NO: 1155983 - RNA, 16 nt, Human
cuggggaaccugaccc

SEQ ID NO: 1155984 - RNA, 15 nt, Human
cuggggaaccugacc

SEQ ID NO: 1155985 - RNA, 23 nt, Human
cuggguuccuuccucugagccuu

SEQ ID NO: 1155986 - RNA, 22 nt, Human
cuggguuccuuccucugagccu

SEQ ID NO: 1155987 - RNA, 18 nt, Human
cuggguuccuuccucuga

SEQ ID NO: 1155988 - RNA, 22 nt, Human
cugguuuccugcccugggaggc

SEQ ID NO: 1155989 - RNA, 21 nt, Human
cugguuuccugcccugggagg

SEQ ID NO: 1155990 - RNA, 18 nt, Human
cugguuuccugcccuggg

SEQ ID NO: 1155991 - RNA, 12 nt, Human
cuguccugccua

SEQ ID NO: 1155992 - RNA, 16 nt, Human
cugucgcccaggcugg

SEQ ID NO: 1155993 - RNA, 13 nt, Human
cugcauuugugaa

SEQ ID NO: 1155994 - RNA, 20 nt, Human
cugcauucaggaucaaaccc

SEQ ID NO: 1155995 - RNA, 22 nt, Human
cugcauuugugaaaugauggug

SEQ ID NO: 1155996 - RNA, 17 nt, Human
cugcauuugugaaauga

SEQ ID NO: 1155997 - RNA, 15 nt, Human
cugcauuugugaaau

SEQ ID NO: 1155998 - RNA, 14 nt, Human
cugcauuugugaaa

SEQ ID NO: 1155999 - RNA, 23 nt, Human
cugcccugguuuccugcccuggg

SEQ ID NO: 1156000 - RNA, 22 nt, Human
cugcccugguuuccugcccugg

SEQ ID NO: 1156001 - RNA, 21 nt, Human
cugcccuggugcugccacacu

SEQ ID NO: 1156002 - RNA, 20 nt, Human
cugcccuggugcugccacac

SEQ ID NO: 1156003 - RNA, 19 nt, Human
cugcccuggugcugccaca

SEQ ID NO: 1156004 - RNA, 18 nt, Human
cugcccuggugcugccac

SEQ ID NO: 1156005 - RNA, 17 nt, Human
cugcccuggugcugcca

SEQ ID NO: 1156006 - RNA, 13 nt, Human
cugccccucccuu

SEQ ID NO: 1156007 - RNA, 19 nt, Human
cugcccccucugcccugcg

SEQ ID NO: 1156008 - RNA, 18 nt, Human
cugcccccucugcccugc

SEQ ID NO: 1156009 - RNA, 17 nt, Human
cugcccccucugcccug

SEQ ID NO: 1156010 - RNA, 16 nt, Human
cugcccccucugcccu

SEQ ID NO: 1156011 - RNA, 15 nt, Human
cugcccccucugccc

SEQ ID NO: 1156012 - RNA, 14 nt, Human
cugcccccucugcc

SEQ ID NO: 1156013 - RNA, 19 nt, Human
cugccccagggcucccggc

SEQ ID NO: 1156014 - RNA, 14 nt, Human
cugacagaaggacu

SEQ ID NO: 1156015 - RNA, 22 nt, Human
cugaaggaauaaauugcuccuu

SEQ ID NO: 1156016 - RNA, 22 nt, Human
cucuugccacugccucuuccuc

SEQ ID NO: 1156017 - RNA, 20 nt, Human
cucuugccacugccucuucc

SEQ ID NO: 1156018 - RNA, 19 nt, Human
cucuugccacugccucuuc

SEQ ID NO: 1156019 - RNA, 18 nt, Human
cucuugccacugccucuu

SEQ ID NO: 1156020 - RNA, 17 nt, Human
cucuugccacugccucu

SEQ ID NO: 1156021 - RNA, 16 nt, Human
cucuugccacugccuc

SEQ ID NO: 1156022 - RNA, 14 nt, Human
cucugguuccuccc

SEQ ID NO: 1156023 - RNA, 20 nt, Human
cucgggauuaguacacacuu

SEQ ID NO: 1156024 - RNA, 14 nt, Human
cucagcgaaugaau

SEQ ID NO: 1156025 - RNA, 13 nt, Human
cucagccuccuga

SEQ ID NO: 1156026 - RNA, 12 nt, Human
cucagccuccug

SEQ ID NO: 1156027 - RNA, 17 nt, Human
cuaucccggcugcccuu

SEQ ID NO: 1156028 - RNA, 16 nt, Human
cuaucccggcugcccu

SEQ ID NO: 1156029 - RNA, 15 nt, Human
cuaucccggcugccc

SEQ ID NO: 1156030 - RNA, 20 nt, Human
cucaugccucagccuccuga

SEQ ID NO: 1156031 - RNA, 18 nt, Human
cucaugccucagccuccu

SEQ ID NO: 1156032 - RNA, 14 nt, Human
cuccagaccccugg

SEQ ID NO: 1156033 - RNA, 23 nt, Human
cuaaacugcccccucugcccugc

SEQ ID NO: 1156034 - RNA, 22 nt, Human
cuaaacugcccccucugcccug

SEQ ID NO: 1156035 - RNA, 23 nt, Human
cgugagccaccgugccuggccac

SEQ ID NO: 1156036 - RNA, 16 nt, Human
cgugagaccugccccu

SEQ ID NO: 1156037 - RNA, 14 nt, Human
cgugagaccugccc

SEQ ID NO: 1156038 - RNA, 13 nt, Human
cgugagaccugcc

SEQ ID NO: 1156039 - RNA, 15 nt, Human
cuacaagacacagug

SEQ ID NO: 1156040 - RNA, 21 nt, Human
cgcaggcuggcccugcccugg

SEQ ID NO: 1156041 - RNA, 20 nt, Human
cgcaggcuggcccugcccug

SEQ ID NO: 1156042 - RNA, 19 nt, Human
cgcaggcuggcccugcccu

SEQ ID NO: 1156043 - RNA, 18 nt, Human
cgcaggcuggcccugccc

SEQ ID NO: 1156044 - RNA, 17 nt, Human
cgcaggcuggcccugcc

SEQ ID NO: 1156045 - RNA, 15 nt, Human
cgcaggcuggcccug

SEQ ID NO: 1156046 - RNA, 14 nt, Human
cgcaggcuggcccu

SEQ ID NO: 1156047 - RNA, 16 nt, Human
cgaccugccucggccu

SEQ ID NO: 1156048 - RNA, 21 nt, Human
cggcucacugcauccuccgcc

SEQ ID NO: 1156049 - RNA, 17 nt, Human
cggcucacugcauccuc

SEQ ID NO: 1156050 - RNA, 18 nt, Human
cggaggggccuggcagcc

SEQ ID NO: 1156051 - RNA, 14 nt, Human
cgaccaccugccca

SEQ ID NO: 1156052 - RNA, 12 nt, Human
cgaccaccugcc

SEQ ID NO: 1156053 - RNA, 18 nt, Human
ccaggcacugcugcccag

SEQ ID NO: 1156054 - RNA, 16 nt, Human
ccaggcacugcugccc

SEQ ID NO: 1156055 - RNA, 15 nt, Human
cccagcuugaaaccu

SEQ ID NO: 1156056 - RNA, 18 nt, Human
cccacuagacccacugga

SEQ ID NO: 1156057 - RNA, 13 nt, Human
ccccagaggcugg

SEQ ID NO: 1156058 - RNA, 17 nt, Human
cccuauugguaaagaau

SEQ ID NO: 1156059 - RNA, 19 nt, Human
ccccucuggcuccagcugg

SEQ ID NO: 1156060 - RNA, 15 nt, Human
cccucacccuggggc

SEQ ID NO: 1156061 - RNA, 19 nt, Human
cccuggcucccacaggccc

SEQ ID NO: 1156062 - RNA, 17 nt, Human
cccuggcucccacaggc

SEQ ID NO: 1156063 - RNA, 13 nt, Human
cccuggcuuuuca

SEQ ID NO: 1156064 - RNA, 17 nt, Human
cccuggcuuuucacugc

SEQ ID NO: 1156065 - RNA, 18 nt, Human
ccgucucugguuccuccc

SEQ ID NO: 1156066 - RNA, 23 nt, Human
ccggcuaugggggcacugaggac

SEQ ID NO: 1156067 - RNA, 22 nt, Human
ccggcuaugggggcacugagga

SEQ ID NO: 1156068 - RNA, 17 nt, Human
ccggcuaugggggcacu

SEQ ID NO: 1156069 - RNA, 19 nt, Human
ccggcuaauuuuuguauuu

SEQ ID NO: 1156070 - RNA, 22 nt, Human
ccuccaaucccaccaacccuca

SEQ ID NO: 1156071 - RNA, 22 nt, Human
ccuccaagcuccaucuccacuc

SEQ ID NO: 1156072 - RNA, 21 nt, Human
ccuccaagcuccaucuccacu

SEQ ID NO: 1156073 - RNA, 13 nt, Human
ccucagccuccug

SEQ ID NO: 1156074 - RNA, 20 nt, Human
ccucccaggcgccccuuccc

SEQ ID NO: 1156075 - RNA, 14 nt, Human
ccucccaggcgccc

SEQ ID NO: 1156076 - RNA, 18 nt, Human
ccucugcugauccuccca

SEQ ID NO: 1156077 - RNA, 15 nt, Human
ccucugcugauccuc

SEQ ID NO: 1156078 - RNA, 12 nt, Human
ccucugccuguc

SEQ ID NO: 1156079 - RNA, 12 nt, Human
ccucucugcccu

SEQ ID NO: 1156080 - RNA, 14 nt, Human
ccucuugccacugc

SEQ ID NO: 1156081 - RNA, 21 nt, Human
ccuggauccaucaggccacuu

SEQ ID NO: 1156082 - RNA, 18 nt, Human
ccuggcacagggcagugg

SEQ ID NO: 1156083 - RNA, 17 nt, Human
ccuggcacagggcagug

SEQ ID NO: 1156084 - RNA, 16 nt, Human
ccuggcacagggcagu

SEQ ID NO: 1156085 - RNA, 12 nt, Human
auugcuccuuga

SEQ ID NO: 1156086 - RNA, 17 nt, Human
auuagcaguuugcuuug

SEQ ID NO: 1156087 - RNA, 23 nt, Human
auuagauuucucauuugccaaua

SEQ ID NO: 1156088 - RNA, 23 nt, Human
auguuugggagacugcugaguca

SEQ ID NO: 1156089 - RNA, 16 nt, Human
auuugccaauaauaau

SEQ ID NO: 1156090 - RNA, 15 nt, Human
auuugccaauaauaa

SEQ ID NO: 1156091 - RNA, 14 nt, Human
auuugugccagaau

SEQ ID NO: 1156092 - RNA, 12 nt, Human
auuuggaaaaua

SEQ ID NO: 1156093 - RNA, 13 nt, Human
auuuggaaaauaa

SEQ ID NO: 1156094 - RNA, 15 nt, Human
cacuccagcugggau

SEQ ID NO: 1156095 - RNA, 12 nt, Human
cacuccagcugg

SEQ ID NO: 1156096 - RNA, 11 nt, Human
cacuccagcug

SEQ ID NO: 1156097 - RNA, 14 nt, Human
cacuaggcuucugg

SEQ ID NO: 1156098 - RNA, 23 nt, Human
cacuuaggaacguaaucgugucc

SEQ ID NO: 1156099 - RNA, 23 nt, Human
cacugguggcccgacagccuggc

SEQ ID NO: 1156100 - RNA, 18 nt, Human
cacugcauccuccgccuc

SEQ ID NO: 1156101 - RNA, 16 nt, Human
cacugcauccuccgcc

SEQ ID NO: 1156102 - RNA, 14 nt, Human
cacugcauccuccg

SEQ ID NO: 1156103 - RNA, 23 nt, Human
cacaggcccuuccucuccacugc

SEQ ID NO: 1156104 - RNA, 19 nt, Human
cacagcgcuggccgggacc

SEQ ID NO: 1156105 - RNA, 22 nt, Human
cacagcgcuggccgggaccccg

SEQ ID NO: 1156106 - RNA, 20 nt, Human
caauggagacugucucaaga

SEQ ID NO: 1156107 - RNA, 21 nt, Human
caaguaugaauaaagacaccu

SEQ ID NO: 1156108 - RNA, 19 nt, Human
caaguaugaauaaagacac

SEQ ID NO: 1156109 - RNA, 16 nt, Human
caaguaugaauaaaga

SEQ ID NO: 1156110 - RNA, 19 nt, Human
caagcucuaucaccaagga

SEQ ID NO: 1156111 - RNA, 16 nt, Human
cagauuugagcucagc

SEQ ID NO: 1156112 - RNA, 14 nt, Human
cagauuugagcuca

SEQ ID NO: 1156113 - RNA, 13 nt, Human
cagauuugagcuc

SEQ ID NO: 1156114 - RNA, 13 nt, Human
cagccccugcaca

SEQ ID NO: 1156115 - RNA, 23 nt, Human
caggcacugcugcccagccucca

SEQ ID NO: 1156116 - RNA, 17 nt, Human
caggcacugcugcccag

SEQ ID NO: 1156117 - RNA, 16 nt, Human
caggcacugcugccca

SEQ ID NO: 1156118 - RNA, 18 nt, Human
cagggagggccugggccc

SEQ ID NO: 1156119 - RNA, 23 nt, Human
ccaccgggcugggagcucugcag

SEQ ID NO: 1156120 - RNA, 11 nt, Human
ccaacuuguaa

SEQ ID NO: 1156121 - RNA, 12 nt, Human
ccaaaugcagcu

SEQ ID NO: 1156122 - RNA, 22 nt, Human
ccaaagugcugggauuacaggu

SEQ ID NO: 1156123 - RNA, 22 nt, Human
ccaaagugcugggauuacaggc

SEQ ID NO: 1156124 - RNA, 19 nt, Human
ccaaagugcugggauuaca

SEQ ID NO: 1156125 - RNA, 17 nt, Human
cauucucacuccuaccu

SEQ ID NO: 1156126 - RNA, 16 nt, Human
cauucucacuccuacc

SEQ ID NO: 1156127 - RNA, 13 nt, Human
cauuaugaugugu

SEQ ID NO: 1156128 - RNA, 20 nt, Human
cauuuuugaauacaggcaua

SEQ ID NO: 1156129 - RNA, 18 nt, Human
cauuuuugaauacaggca

SEQ ID NO: 1156130 - RNA, 18 nt, Human
cauuucauuugugccaga

SEQ ID NO: 1156131 - RNA, 12 nt, Human
caucgcaaugua

SEQ ID NO: 1156132 - RNA, 14 nt, Human
caugcugccuccag

SEQ ID NO: 1156133 - RNA, 12 nt, Human
caugcugccucc

SEQ ID NO: 1156134 - RNA, 23 nt, Human
cauaaucuggacuccucugucca

SEQ ID NO: 1156135 - RNA, 22 nt, Human
cauaaucuggacuccucugucc

SEQ ID NO: 1156136 - RNA, 21 nt, Human
cauaaucuggacuccucuguc

SEQ ID NO: 1156137 - RNA, 20 nt, Human
cauaaucuggacuccucugu

SEQ ID NO: 1156138 - RNA, 21 nt, Human
caguuugcuuuguaugcacuu

SEQ ID NO: 1156139 - RNA, 14 nt, Human
caguuugcuuugua

SEQ ID NO: 1156140 - RNA, 12 nt, Human
caguuugcuuug

SEQ ID NO: 1156141 - RNA, 19 nt, Human
cauagcccucacccugggg

SEQ ID NO: 1156142 - RNA, 15 nt, Human
cauagcccucacccu

SEQ ID NO: 1156143 - RNA, 12 nt, Human
cauagcccucac

SEQ ID NO: 1156144 - RNA, 17 nt, Human
auugcauuuccugacag

SEQ ID NO: 1156145 - RNA, 16 nt, Human
auucaaaaugauguau

SEQ ID NO: 1156146 - RNA, 16 nt, Human
auguuggccaggcugg

SEQ ID NO: 1156147 - RNA, 16 nt, Human
auguuggccaggcugc

SEQ ID NO: 1156148 - RNA, 16 nt, Human
auguugaagccuuugu

SEQ ID NO: 1156149 - RNA, 23 nt, Human
uuuuaaggguuuguggaaaauga

SEQ ID NO: 1156150 - RNA, 20 nt, Human
uuuuaaggguuuguggaaaa

SEQ ID NO: 1156151 - RNA, 22 nt, Human
uuuuaaaacacuuccauaaucu

SEQ ID NO: 1156152 - RNA, 16 nt, Human
uuuuaaaacacuucca

SEQ ID NO: 1156153 - RNA, 16 nt, Human
uuugugagcaggcugu

SEQ ID NO: 1156154 - RNA, 13 nt, Human
uuuguaaauuguc

SEQ ID NO: 1156155 - RNA, 24 nt, Human
augucccuaccgagucucuucucc

SEQ ID NO: 1156156 - RNA, 20 nt, Human
augucccaacuuguaaaaau

SEQ ID NO: 1156157 - RNA, 22 nt, Human
auggccagguggccacuccaga

SEQ ID NO: 1156158 - RNA, 16 nt, Human
auggccagguggccac

SEQ ID NO: 1156159 - RNA, 22 nt, Human
auggcacaaucucggcucacug

SEQ ID NO: 1156160 - RNA, 19 nt, Human
auggcaaggacugcaggga

SEQ ID NO: 1156161 - RNA, 24 nt, Human
uuucacugcuggcugccuuagaac

SEQ ID NO: 1156162 - RNA, 22 nt, Human
uuucacugcuggcugccuuaga

SEQ ID NO: 1156163 - RNA, 20 nt, Human
uuucacugcuggcugccuua

SEQ ID NO: 1156164 - RNA, 18 nt, Human
uuucacugcuggcugccu

SEQ ID NO: 1156165 - RNA, 17 nt, Human
uuucacugcuggcugcc

SEQ ID NO: 1156166 - RNA, 14 nt, Human
uuucacugcuggcu

SEQ ID NO: 1156167 - RNA, 18 nt, Human
augccccgucccccucug

SEQ ID NO: 1156168 - RNA, 19 nt, Human
augauuucagcucacugca

SEQ ID NO: 1156169 - RNA, 17 nt, Human
augauuucagcucacug

SEQ ID NO: 1156170 - RNA, 15 nt, Human
augaccacacuccag

SEQ ID NO: 1156171 - RNA, 18 nt, Human
uugggccccagaggcugg

SEQ ID NO: 1156172 - RNA, 22 nt, Human
aucuuuggacagaagcagcucu

SEQ ID NO: 1156173 - RNA, 23 nt, Human
aucuuuggacagaagcagcucuu

SEQ ID NO: 1156174 - RNA, 18 nt, Human
aucugaugcaagcaagaa

SEQ ID NO: 1156175 - RNA, 23 nt, Human
uugauggugaugaaauguaaaua

SEQ ID NO: 1156176 - RNA, 19 nt, Human
aucucuucuggguuccuuc

SEQ ID NO: 1156177 - RNA, 11 nt, Human
aucucagccca

SEQ ID NO: 1156178 - RNA, 14 nt, Human
auccuacaagacac

SEQ ID NO: 1156179 - RNA, 19 nt, Human
auccuaaugaaugcauaaa

SEQ ID NO: 1156180 - RNA, 13 nt, Human
auccuaaugaaug

SEQ ID NO: 1156181 - RNA, 12 nt, Human
auccuaaugaau

SEQ ID NO: 1156182 - RNA, 16 nt, Human
uugaaaguuuacagga

SEQ ID NO: 1156183 - RNA, 15 nt, Human
uucuuucuuccucug

SEQ ID NO: 1156184 - RNA, 13 nt, Human
uucuuucuuccuc

SEQ ID NO: 1156185 - RNA, 13 nt, Human
uucuuccucugcu

SEQ ID NO: 1156186 - RNA, 12 nt, Human
uucuuccucugc

SEQ ID NO: 1156187 - RNA, 11 nt, Human
uucuuccucug

SEQ ID NO: 1156188 - RNA, 17 nt, Human
uucuguugcugccucau

SEQ ID NO: 1156189 - RNA, 16 nt, Human
uucuguugcugccuca

SEQ ID NO: 1156190 - RNA, 15 nt, Human
uucuguugcugccuc

SEQ ID NO: 1156191 - RNA, 15 nt, Human
aucccaccaacccuc

SEQ ID NO: 1156192 - RNA, 22 nt, Human
uucugguugaugccugugaacu

SEQ ID NO: 1156193 - RNA, 15 nt, Human
uucugcacacagcac

SEQ ID NO: 1156194 - RNA, 14 nt, Human
uucuccugccucag

SEQ ID NO: 1156195 - RNA, 13 nt, Human
uucuccugccuca

SEQ ID NO: 1156196 - RNA, 12 nt, Human
uucuccugccuc

SEQ ID NO: 1156197 - RNA, 13 nt, Human
uucucagcuccca

SEQ ID NO: 1156198 - RNA, 20 nt, Human
uucgauacaccgggccugga

SEQ ID NO: 1156199 - RNA, 23 nt, Human
aucaaguuggcuucuaaucaaag

SEQ ID NO: 1156200 - RNA, 22 nt, Human
aucaaguuggcuucuaaucaaa

SEQ ID NO: 1156201 - RNA, 20 nt, Human
uuccuucaaagcaaaugucu

SEQ ID NO: 1156202 - RNA, 16 nt, Human
uuccucuccacugccu

SEQ ID NO: 1156203 - RNA, 15 nt, Human
uuccucuccacugcc

SEQ ID NO: 1156204 - RNA, 14 nt, Human
uuccucuccacugc

SEQ ID NO: 1156205 - RNA, 13 nt, Human
uuccucuccacug

SEQ ID NO: 1156206 - RNA, 12 nt, Human
uuccucuccacu

SEQ ID NO: 1156207 - RNA, 17 nt, Human
uucccuacuuccuguga

SEQ ID NO: 1156208 - RNA, 16 nt, Human
uucccuacuuccugug

SEQ ID NO: 1156209 - RNA, 14 nt, Human
uucccuacuuccug

SEQ ID NO: 1156210 - RNA, 22 nt, Human
uuccccuuccuaauuccacagc

SEQ ID NO: 1156211 - RNA, 17 nt, Human
uuccccuguucacucua

SEQ ID NO: 1156212 - RNA, 14 nt, Human
uuccccuguucacu

SEQ ID NO: 1156213 - RNA, 23 nt, Human
uuccauaaucuggacuccucugu

SEQ ID NO: 1156214 - RNA, 22 nt, Human
uuccauaaucuggacuccucug

SEQ ID NO: 1156215 - RNA, 19 nt, Human
uuccauaaucuggacuccu

SEQ ID NO: 1156216 - RNA, 15 nt, Human
uucacuuacagcacc

SEQ ID NO: 1156217 - RNA, 21 nt, Human
auagugaggcaucgcaaugua

SEQ ID NO: 1156218 - RNA, 17 nt, Human
uucaagugauucucaug

SEQ ID NO: 1156219 - RNA, 12 nt, Human
uuagcaccaggg

SEQ ID NO: 1156220 - RNA, 22 nt, Human
auaaucuggacuccucugucca

SEQ ID NO: 1156221 - RNA, 20 nt, Human
auaaucuggacuccucuguc

SEQ ID NO: 1156222 - RNA, 19 nt, Human
auaaucuggacuccucugu

SEQ ID NO: 1156223 - RNA, 18 nt, Human
auaaucuggacuccucug

SEQ ID NO: 1156224 - RNA, 17 nt, Human
uuagaaauugcauuucc

SEQ ID NO: 1156225 - RNA, 23 nt, Human
uuacucuucaguuaagccuuugg

SEQ ID NO: 1156226 - RNA, 18 nt, Human
uuacaggcuccugccacc

SEQ ID NO: 1156227 - RNA, 16 nt, Human
uuacaggcuccugcca

SEQ ID NO: 1156228 - RNA, 24 nt, Human
uuacaggcgugagccaccgugccu

SEQ ID NO: 1156229 - RNA, 21 nt, Human
uuaaucugggccagaauuuca

SEQ ID NO: 1156230 - RNA, 22 nt, Human
uuaauauuuauaggucacuuug

SEQ ID NO: 1156231 - RNA, 15 nt, Human
aguucccuacuuccu

SEQ ID NO: 1156232 - RNA, 21 nt, Human
aguuacucuucaguuaagccu

SEQ ID NO: 1156233 - RNA, 20 nt, Human
agugcugggauuacaggugu

SEQ ID NO: 1156234 - RNA, 20 nt, Human
agugcugggauuacaggcgu

SEQ ID NO: 1156235 - RNA, 17 nt, Human
agugcaucucagcccac

SEQ ID NO: 1156236 - RNA, 16 nt, Human
agugcaucucagccca

SEQ ID NO: 1156237 - RNA, 15 nt, Human
agugcaucucagccc

SEQ ID NO: 1156238 - RNA, 13 nt, Human
ugugccucugccu

SEQ ID NO: 1156239 - RNA, 12 nt, Human
ugugccucugcc

SEQ ID NO: 1156240 - RNA, 16 nt, Human
agucagacagaugugg

SEQ ID NO: 1156241 - RNA, 13 nt, Human
ugucgccucugca

SEQ ID NO: 1156242 - RNA, 16 nt, Human
ugucgcccaggcugga

SEQ ID NO: 1156243 - RNA, 15 nt, Human
ugucgcccaggcugg

SEQ ID NO: 1156244 - RNA, 13 nt, Human
agucacugcacag

SEQ ID NO: 1156245 - RNA, 15 nt, Human
aguaaaaauaaaauu

SEQ ID NO: 1156246 - RNA, 12 nt, Human
aguaaaaauaaa

SEQ ID NO: 1156247 - RNA, 17 nt, Human
agguggccacuccagac

SEQ ID NO: 1156248 - RNA, 14 nt, Human
agguggccacucca

SEQ ID NO: 1156249 - RNA, 19 nt, Human
aggucaccuuuauucuggc

SEQ ID NO: 1156250 - RNA, 18 nt, Human
aggucaccuuuauucugg

SEQ ID NO: 1156251 - RNA, 20 nt, Human
agguauaaguggugugugua

SEQ ID NO: 1156252 - RNA, 19 nt, Human
agguauaaguggugugugu

SEQ ID NO: 1156253 - RNA, 15 nt, Human
uggucucgaacuccu

SEQ ID NO: 1156254 - RNA, 19 nt, Human
uggucuaucuuugagcgcc

SEQ ID NO: 1156255 - RNA, 23 nt, Human
uggucacaggacucugccuccuc

SEQ ID NO: 1156256 - RNA, 22 nt, Human
uggucacaggacucugccuccu

SEQ ID NO: 1156257 - RNA, 21 nt, Human
ugguagcuuuucccuucuuuu

SEQ ID NO: 1156258 - RNA, 20 nt, Human
ugguagcuuuucccuucuuu

SEQ ID NO: 1156259 - RNA, 23 nt, Human
aggggccuggcagccgugccuuc

SEQ ID NO: 1156260 - RNA, 18 nt, Human
aggggccuggcagccgug

SEQ ID NO: 1156261 - RNA, 23 nt, Human
uggggcuaggaaauccagggugg

SEQ ID NO: 1156262 - RNA, 17 nt, Human
uggggacagagcagaac

SEQ ID NO: 1156263 - RNA, 21 nt, Human
ugggcugcccuggugcugcca

SEQ ID NO: 1156264 - RNA, 20 nt, Human
ugggcugcccuggugcugcc

SEQ ID NO: 1156265 - RNA, 19 nt, Human
ugggcugcccuggugcugc

SEQ ID NO: 1156266 - RNA, 17 nt, Human
ugggcugcccuggugcu

SEQ ID NO: 1156267 - RNA, 18 nt, Human
ugggccagaauuucaaac

SEQ ID NO: 1156268 - RNA, 17 nt, Human
ugggccagaauuucaaa

SEQ ID NO: 1156269 - RNA, 14 nt, Human
uggcccugcccugg

SEQ ID NO: 1156270 - RNA, 19 nt, Human
uggccagguggccacucca

SEQ ID NO: 1156271 - RNA, 17 nt, Human
uggccagguggccacuc

SEQ ID NO: 1156272 - RNA, 16 nt, Human
uggccagguggccacu

SEQ ID NO: 1156273 - RNA, 15 nt, Human
uggccagguggccac

SEQ ID NO: 1156274 - RNA, 11 nt, Human
uggccaggugg

SEQ ID NO: 1156275 - RNA, 18 nt, Human
uggcacagggcaguggga

SEQ ID NO: 1156276 - RNA, 15 nt, Human
uggauggaaggggcu

SEQ ID NO: 1156277 - RNA, 20 nt, Human
aggcaccuaccaccacgccc

SEQ ID NO: 1156278 - RNA, 14 nt, Human
uggagaacuagaga

SEQ ID NO: 1156279 - RNA, 23 nt, Human
uggaaggggacacgugacagccg

SEQ ID NO: 1156280 - RNA, 17 nt, Human
aggacagccccuccucc

SEQ ID NO: 1156281 - RNA, 13 nt, Human
ugcugugcaaaug

SEQ ID NO: 1156282 - RNA, 20 nt, Human
ugcugggauuacagguguga

SEQ ID NO: 1156283 - RNA, 14 nt, Human
ugcuggcugccuua

SEQ ID NO: 1156284 - RNA, 13 nt, Human
ugcuggcugccuu

SEQ ID NO: 1156285 - RNA, 15 nt, Human
aggaaauccagggug

SEQ ID NO: 1156286 - RNA, 14 nt, Human
aggaaauccagggu

SEQ ID NO: 1156287 - RNA, 22 nt, Human
ugcugacuguacuccucccagg

SEQ ID NO: 1156288 - RNA, 21 nt, Human
ugcugacuguacuccucccag

SEQ ID NO: 1156289 - RNA, 19 nt, Human
ugcugacuguacuccuccc

SEQ ID NO: 1156290 - RNA, 16 nt, Human
ugcugacuguacuccu

SEQ ID NO: 1156291 - RNA, 17 nt, Human
ugcgggucacaggaggg

SEQ ID NO: 1156292 - RNA, 16 nt, Human
ugcgggucacaggagg

SEQ ID NO: 1156293 - RNA, 14 nt, Human
ugcgggucacagga

SEQ ID NO: 1156294 - RNA, 23 nt, Human
ugcccaagaauagaugcugacug

SEQ ID NO: 1156295 - RNA, 22 nt, Human
ugcccaagaauagaugcugacu

SEQ ID NO: 1156296 - RNA, 21 nt, Human
ugcccaagaauagaugcugac

SEQ ID NO: 1156297 - RNA, 23 nt, Human
ugccacacuucaggcucuucucc

SEQ ID NO: 1156298 - RNA, 22 nt, Human
ugccacacuucaggcucuucuc

SEQ ID NO: 1156299 - RNA, 16 nt, Human
ugccacacuucaggcu

SEQ ID NO: 1156300 - RNA, 15 nt, Human
ugccacacuucaggc

SEQ ID NO: 1156301 - RNA, 14 nt, Human
ugccacacuucagg

SEQ ID NO: 1156302 - RNA, 13 nt, Human
ugccacacuucag

SEQ ID NO: 1156303 - RNA, 22 nt, Human
ugccaauaauaauaccucccuu

SEQ ID NO: 1156304 - RNA, 21 nt, Human
ugccaauaauaauaccucccu

SEQ ID NO: 1156305 - RNA, 18 nt, Human
ugcaguacuuuaccuccu

SEQ ID NO: 1156306 - RNA, 20 nt, Human
agccuccaugcugccuccag

SEQ ID NO: 1156307 - RNA, 18 nt, Human
agccuccaugcugccucc

SEQ ID NO: 1156308 - RNA, 19 nt, Human
agccguuuguuccccaaga

SEQ ID NO: 1156309 - RNA, 23 nt, Human
agccguggcuucccgcucagccc

SEQ ID NO: 1156310 - RNA, 22 nt, Human
agccguggcuucccgcucagcc

SEQ ID NO: 1156311 - RNA, 21 nt, Human
agccguggcuucccgcucagc

SEQ ID NO: 1156312 - RNA, 14 nt, Human
agccguggcuuccc

SEQ ID NO: 1156313 - RNA, 24 nt, Human
ugcacacagcacgggggccaagga

SEQ ID NO: 1156314 - RNA, 12 nt, Human
ugcacacagcac

SEQ ID NO: 1156315 - RNA, 23 nt, Human
agcccugcuuugggcugcccugg

SEQ ID NO: 1156316 - RNA, 22 nt, Human
agcccugcuuugggcugcccug

SEQ ID NO: 1156317 - RNA, 21 nt, Human
agcccugcuuugggcugcccu

SEQ ID NO: 1156318 - RNA, 14 nt, Human
ugaugaagaggagu

SEQ ID NO: 1156319 - RNA, 13 nt, Human
ugaugaagaggag

SEQ ID NO: 1156320 - RNA, 18 nt, Human
ugauccuuuuggagucag

SEQ ID NO: 1156321 - RNA, 18 nt, Human
agccaccgugccuggcca

SEQ ID NO: 1156322 - RNA, 23 nt, Human
ugauauuuucaacgcagcccugc

SEQ ID NO: 1156323 - RNA, 22 nt, Human
ugauauuuucaacgcagcccug

SEQ ID NO: 1156324 - RNA, 21 nt, Human
ugauauuuucaacgcagcccu

SEQ ID NO: 1156325 - RNA, 19 nt, Human
ugauauuuucaacgcagcc

SEQ ID NO: 1156326 - RNA, 13 nt, Human
ugaguagcuggga

SEQ ID NO: 1156327 - RNA, 20 nt, Human
agauuucucauuugccaaua

SEQ ID NO: 1156328 - RNA, 19 nt, Human
agauuccagagaguggcuc

SEQ ID NO: 1156329 - RNA, 18 nt, Human
agauuccagagaguggcu

SEQ ID NO: 1156330 - RNA, 23 nt, Human
agaugcugacuguacuccuccca

SEQ ID NO: 1156331 - RNA, 20 nt, Human
agaugcugacuguacuccuc

SEQ ID NO: 1156332 - RNA, 16 nt, Human
ugaauaaagacaccua

SEQ ID NO: 1156333 - RNA, 21 nt, Human
ugaagucacugcacagugcau

SEQ ID NO: 1156334 - RNA, 16 nt, Human
ugaagucacugcacag

SEQ ID NO: 1156335 - RNA, 15 nt, Human
ugaagucacugcaca

SEQ ID NO: 1156336 - RNA, 14 nt, Human
ugaagucacugcac

SEQ ID NO: 1156337 - RNA, 12 nt, Human
ugaagccuuugu

SEQ ID NO: 1156338 - RNA, 16 nt, Human
agagacuccagcuggg

SEQ ID NO: 1156339 - RNA, 19 nt, Human
ucuuucuaaugugugaauc

SEQ ID NO: 1156340 - RNA, 18 nt, Human
ucuuucuaaugugugaau

SEQ ID NO: 1156341 - RNA, 14 nt, Human
agaccccuggcuuu

SEQ ID NO: 1156342 - RNA, 18 nt, Human
ucuucuggguuccuuccu

SEQ ID NO: 1156343 - RNA, 14 nt, Human
ucuuccucugcuga

SEQ ID NO: 1156344 - RNA, 12 nt, Human
ucuuccucugcu

SEQ ID NO: 1156345 - RNA, 11 nt, Human
ucuuccucugc

SEQ ID NO: 1156346 - RNA, 19 nt, Human
ucuucaacugaccagccuc

SEQ ID NO: 1156347 - RNA, 16 nt, Human
ucuucaacugaccagc

SEQ ID NO: 1156348 - RNA, 15 nt, Human
ucuucaacucccugc

SEQ ID NO: 1156349 - RNA, 23 nt, Human
agaagcucccugaaguaagcaaa

SEQ ID NO: 1156350 - RNA, 14 nt, Human
ucugccugucuccc

SEQ ID NO: 1156351 - RNA, 12 nt, Human
ucugccugucuc

SEQ ID NO: 1156352 - RNA, 12 nt, Human
agaagcagcucu

SEQ ID NO: 1156353 - RNA, 13 nt, Human
agaagcagcucuu

SEQ ID NO: 1156354 - RNA, 15 nt, Human
ucucggcucacugca

SEQ ID NO: 1156355 - RNA, 20 nt, Human
ucucgcuauugucaccaggg

SEQ ID NO: 1156356 - RNA, 17 nt, Human
ucucgaacuccugaccu

SEQ ID NO: 1156357 - RNA, 16 nt, Human
acuuguuuucugggaa

SEQ ID NO: 1156358 - RNA, 14 nt, Human
acuuguaugaaaga

SEQ ID NO: 1156359 - RNA, 18 nt, Human
ucucacuccuaccuggua

SEQ ID NO: 1156360 - RNA, 17 nt, Human
ucucacuccuaccuggu

SEQ ID NO: 1156361 - RNA, 16 nt, Human
ucucacuccuaccugg

SEQ ID NO: 1156362 - RNA, 13 nt, Human
ucucacuccuacc

SEQ ID NO: 1156363 - RNA, 17 nt, Human
acuuccauaaucuggac

SEQ ID NO: 1156364 - RNA, 20 nt, Human
acuucaggcucuucuccuuu

SEQ ID NO: 1156365 - RNA, 18 nt, Human
acuucaggcucuucuccu

SEQ ID NO: 1156366 - RNA, 17 nt, Human
acuucaggcucuucucc

SEQ ID NO: 1156367 - RNA, 23 nt, Human
ucuaaacugcccccucugcccug

SEQ ID NO: 1156368 - RNA, 22 nt, Human
ucuaaacugcccccucugcccu

SEQ ID NO: 1156369 - RNA, 16 nt, Human
ucuaaacugcccccuc

SEQ ID NO: 1156370 - RNA, 13 nt, Human
ucuaaacugcccc

SEQ ID NO: 1156371 - RNA, 19 nt, Human
ucggggagaggcugaggac

SEQ ID NO: 1156372 - RNA, 20 nt, Human
acuguacuccucccaggcgc

SEQ ID NO: 1156373 - RNA, 19 nt, Human
uccucuugccacugccucu

SEQ ID NO: 1156374 - RNA, 14 nt, Human
uccucugaggcuga

SEQ ID NO: 1156375 - RNA, 17 nt, Human
uccucugagccuuggga

SEQ ID NO: 1156376 - RNA, 13 nt, Human
uccucugagccuu

SEQ ID NO: 1156377 - RNA, 12 nt, Human
uccucugagccu

SEQ ID NO: 1156378 - RNA, 15 nt, Human
uccucucugcccuaa

SEQ ID NO: 1156379 - RNA, 14 nt, Human
uccucucugcccua

SEQ ID NO: 1156380 - RNA, 13 nt, Human
uccucucugcccu

SEQ ID NO: 1156381 - RNA, 12 nt, Human
uccucucugccc

SEQ ID NO: 1156382 - RNA, 18 nt, Human
uccucuccacugccuucg

SEQ ID NO: 1156383 - RNA, 17 nt, Human
uccucuccacugccuuc

SEQ ID NO: 1156384 - RNA, 21 nt, Human
acucuucaguuaagccuuugg

SEQ ID NO: 1156385 - RNA, 20 nt, Human
acucuucaguuaagccuuug

SEQ ID NO: 1156386 - RNA, 23 nt, Human
acucugacaacagacuucugaaa

SEQ ID NO: 1156387 - RNA, 22 nt, Human
acucugacaacagacuucugaa

SEQ ID NO: 1156388 - RNA, 20 nt, Human
acucugacaacagacuucug

SEQ ID NO: 1156389 - RNA, 18 nt, Human
acucugacaacagacuuc

SEQ ID NO: 1156390 - RNA, 17 nt, Human
acucugacaacagacuu

SEQ ID NO: 1156391 - RNA, 14 nt, Human
acucguauaugucu

SEQ ID NO: 1156392 - RNA, 20 nt, Human
acucaccucccccaucucuu

SEQ ID NO: 1156393 - RNA, 19 nt, Human
acucaccucccccaucucu

SEQ ID NO: 1156394 - RNA, 13 nt, Human
acuauguugauaa

SEQ ID NO: 1156395 - RNA, 16 nt, Human
acuaugauuuggaaaa

SEQ ID NO: 1156396 - RNA, 15 nt, Human
acuaugauuuggaaa

SEQ ID NO: 1156397 - RNA, 19 nt, Human
ucccaccaacccucagagc

SEQ ID NO: 1156398 - RNA, 22 nt, Human
ucccacaggcccuuccucucca

SEQ ID NO: 1156399 - RNA, 21 nt, Human
ucccacaggcccuuccucucc

SEQ ID NO: 1156400 - RNA, 17 nt, Human
ucccacaggcccuuccu

SEQ ID NO: 1156401 - RNA, 15 nt, Human
ucccacaggcccuuc

SEQ ID NO: 1156402 - RNA, 20 nt, Human
ucccaaagugcugggauuac

SEQ ID NO: 1156403 - RNA, 17 nt, Human
accuucgccaccugggu

SEQ ID NO: 1156404 - RNA, 15 nt, Human
accuucgccaccugg

SEQ ID NO: 1156405 - RNA, 17 nt, Human
accuucccaugcccugg

SEQ ID NO: 1156406 - RNA, 19 nt, Human
uccaaaugcagcuuuaaaa

SEQ ID NO: 1156407 - RNA, 14 nt, Human
ucauuuuugaauac

SEQ ID NO: 1156408 - RNA, 17 nt, Human
accugcucuccucuugc

SEQ ID NO: 1156409 - RNA, 12 nt, Human
accugcucuccu

SEQ ID NO: 1156410 - RNA, 17 nt, Human
accugccucggccuccc

SEQ ID NO: 1156411 - RNA, 17 nt, Human
accugaccccugacccc

SEQ ID NO: 1156412 - RNA, 15 nt, Human
ucagugcuucgcaga

SEQ ID NO: 1156413 - RNA, 22 nt, Human
ucagguugucugaagucacugc

SEQ ID NO: 1156414 - RNA, 15 nt, Human
acccggaggggccug

SEQ ID NO: 1156415 - RNA, 14 nt, Human
acccucgaggcgga

SEQ ID NO: 1156416 - RNA, 18 nt, Human
acccucgaggcggaucuu

SEQ ID NO: 1156417 - RNA, 21 nt, Human
ucagguaaucgaccugccucg

SEQ ID NO: 1156418 - RNA, 20 nt, Human
ucagguaaucgaccugccuc

SEQ ID NO: 1156419 - RNA, 19 nt, Human
ucagguaaucgaccugccu

SEQ ID NO: 1156420 - RNA, 18 nt, Human
ucagguaaucgaccugcc

SEQ ID NO: 1156421 - RNA, 13 nt, Human
ucaggccacuuga

SEQ ID NO: 1156422 - RNA, 21 nt, Human
ucagaugcugugcaaauguua

SEQ ID NO: 1156423 - RNA, 21 nt, Human
ucagagccaccccuaaagaga

SEQ ID NO: 1156424 - RNA, 21 nt, Human
acccacuggacucaccucccc

SEQ ID NO: 1156425 - RNA, 17 nt, Human
acccacuggacucaccu

SEQ ID NO: 1156426 - RNA, 14 nt, Human
acccacuggacuca

SEQ ID NO: 1156427 - RNA, 18 nt, Human
accauguuggccaggcug

SEQ ID NO: 1156428 - RNA, 15 nt, Human
ucacugcacagugca

SEQ ID NO: 1156429 - RNA, 21 nt, Human
ucacugcaaccuucgccaccu

SEQ ID NO: 1156430 - RNA, 21 nt, Human
ucacagaacccuuggagccaa

SEQ ID NO: 1156431 - RNA, 15 nt, Human
accaacccucagagc

SEQ ID NO: 1156432 - RNA, 22 nt, Human
ucaagugauucucaugccucag

SEQ ID NO: 1156433 - RNA, 21 nt, Human
ucaagugauucucaugccuca

SEQ ID NO: 1156434 - RNA, 21 nt, Human
ucaagagggcacugguggccc

SEQ ID NO: 1156435 - RNA, 20 nt, Human
ucaagagggcacugguggcc

SEQ ID NO: 1156436 - RNA, 23 nt, Human
ucaaagcaaaugucuuccuggau

SEQ ID NO: 1156437 - RNA, 15 nt, Human
ucaaagcaaaugucu

SEQ ID NO: 1156438 - RNA, 22 nt, Human
acaggcccuuccucuccacugc

SEQ ID NO: 1156439 - RNA, 15 nt, Human
acaggcccuuccucu

SEQ ID NO: 1156440 - RNA, 13 nt, Human
acaggcccuuccu

SEQ ID NO: 1156441 - RNA, 16 nt, Human
acaggacucugccucc

SEQ ID NO: 1156442 - RNA, 16 nt, Human
acagccccuccuccau

SEQ ID NO: 1156443 - RNA, 14 nt, Human
acagccccuccucc

SEQ ID NO: 1156444 - RNA, 23 nt, Human
acagcccuccaucuaaacugccc

SEQ ID NO: 1156445 - RNA, 17 nt, Human
acagcagccccugcaca

SEQ ID NO: 1156446 - RNA, 19 nt, Human
acagcacgggggccaagga

SEQ ID NO: 1156447 - RNA, 22 nt, Human
acagauuugagcucagcccugg

SEQ ID NO: 1156448 - RNA, 15 nt, Human
uaucccggcugcccu

SEQ ID NO: 1156449 - RNA, 14 nt, Human
acacuuccauaauc

SEQ ID NO: 1156450 - RNA, 22 nt, Human
acacuucaggcucuucuccuuu

SEQ ID NO: 1156451 - RNA, 19 nt, Human
acacuucaggcucuucucc

SEQ ID NO: 1156452 - RNA, 15 nt, Human
acacuucaggcucuu

SEQ ID NO: 1156453 - RNA, 15 nt, Human
uauaggcaccuacca

SEQ ID NO: 1156454 - RNA, 13 nt, Human
uaguagagacggg

SEQ ID NO: 1156455 - RNA, 16 nt, Human
uaguaaaaauaaaauu

SEQ ID NO: 1156456 - RNA, 13 nt, Human
uaguaaaaauaaa

SEQ ID NO: 1156457 - RNA, 23 nt, Human
acacacagauuugagcucagccc

SEQ ID NO: 1156458 - RNA, 15 nt, Human
uagggugggccuuca

SEQ ID NO: 1156459 - RNA, 13 nt, Human
uaggguccugggg

SEQ ID NO: 1156460 - RNA, 19 nt, Human
uagggauggggcugugggg

SEQ ID NO: 1156461 - RNA, 13 nt, Human
uagcuuuucccuu

SEQ ID NO: 1156462 - RNA, 14 nt, Human
aauuccacagcugc

SEQ ID NO: 1156463 - RNA, 13 nt, Human
aauuccacagcug

SEQ ID NO: 1156464 - RNA, 12 nt, Human
aauuccacagcu

SEQ ID NO: 1156465 - RNA, 23 nt, Human
uacccccugcaaagcccagcuug

SEQ ID NO: 1156466 - RNA, 19 nt, Human
uacccccugcaaagcccag

SEQ ID NO: 1156467 - RNA, 15 nt, Human
uacccccugcaaagc

SEQ ID NO: 1156468 - RNA, 17 nt, Human
uacaccgggccuggaga

SEQ ID NO: 1156469 - RNA, 15 nt, Human
uacaccgggccugga

SEQ ID NO: 1156470 - RNA, 12 nt, Human
aauguaaauaaa

SEQ ID NO: 1156471 - RNA, 22 nt, Human
uaauuuuuuuuuuccuuuuaaa

SEQ ID NO: 1156472 - RNA, 21 nt, Human
uaauuuuuguauuuuuaguag

SEQ ID NO: 1156473 - RNA, 15 nt, Human
uaauuuuuguauuuu

SEQ ID NO: 1156474 - RNA, 24 nt, Human
aaugauuucagcucacugcaaccu

SEQ ID NO: 1156475 - RNA, 12 nt, Human
aaucccaggaug

SEQ ID NO: 1156476 - RNA, 19 nt, Human
aaucagcauucucacuccu

SEQ ID NO: 1156477 - RNA, 18 nt, Human
aaucagcauucucacucc

SEQ ID NO: 1156478 - RNA, 15 nt, Human
aauauuuauagguca

SEQ ID NO: 1156479 - RNA, 16 nt, Human
uaacuauguugauaaa

SEQ ID NO: 1156480 - RNA, 13 nt, Human
uaaaugugguaaa

SEQ ID NO: 1156481 - RNA, 21 nt, Human
aagugauucucaugccucagc

SEQ ID NO: 1156482 - RNA, 20 nt, Human
aagugauucucaugccucag

SEQ ID NO: 1156483 - RNA, 22 nt, Human
uaaaauauuccugcauuuguga

SEQ ID NO: 1156484 - RNA, 13 nt, Human
uaaaauauuccug

SEQ ID NO: 1156485 - RNA, 21 nt, Human
aagucaugcguuuaaucacau

SEQ ID NO: 1156486 - RNA, 13 nt, Human
aaguaagcaaaga

SEQ ID NO: 1156487 - RNA, 23 nt, Human
aaggcucugagcaaauguggcuc

SEQ ID NO: 1156488 - RNA, 21 nt, Human
aaggaauaaauugcuccuuga

SEQ ID NO: 1156489 - RNA, 20 nt, Human
aagcuccaucuccacuccag

SEQ ID NO: 1156490 - RNA, 14 nt, Human
aagcuccaucucca

SEQ ID NO: 1156491 - RNA, 23 nt, Human
aagcccuuccaugucgccucugc

SEQ ID NO: 1156492 - RNA, 20 nt, Human
aagcccuuccaugucgccuc

SEQ ID NO: 1156493 - RNA, 15 nt, Human
aagcccuuccauguc

SEQ ID NO: 1156494 - RNA, 20 nt, Human
gugugugaaaaugugugugu

SEQ ID NO: 1156495 - RNA, 23 nt, Human
aagauggcugugccucugccugu

SEQ ID NO: 1156496 - RNA, 21 nt, Human
aagauggcugugccucugccu

SEQ ID NO: 1156497 - RNA, 20 nt, Human
aagauggcugugccucugcc

SEQ ID NO: 1156498 - RNA, 17 nt, Human
gugggaagggcuacacc

SEQ ID NO: 1156499 - RNA, 12 nt, Human
gugccucugccu

SEQ ID NO: 1156500 - RNA, 22 nt, Human
gugaugguuccccuguucacuc

SEQ ID NO: 1156501 - RNA, 16 nt, Human
gugaugguuccccugu

SEQ ID NO: 1156502 - RNA, 14 nt, Human
gugaugguuccccu

SEQ ID NO: 1156503 - RNA, 23 nt, Human
aacucugacaacagacuucugaa

SEQ ID NO: 1156504 - RNA, 22 nt, Human
aacucugacaacagacuucuga

SEQ ID NO: 1156505 - RNA, 20 nt, Human
aacucugacaacagacuucu

SEQ ID NO: 1156506 - RNA, 21 nt, Human
aacuaugauuuggaaaauaaa

SEQ ID NO: 1156507 - RNA, 16 nt, Human
aacuaugauuuggaaa

SEQ ID NO: 1156508 - RNA, 23 nt, Human
aacuagacucccaagcuggacua

SEQ ID NO: 1156509 - RNA, 11 nt, Human
aaccugacccc

SEQ ID NO: 1156510 - RNA, 13 nt, Human
aacccaauaguug

SEQ ID NO: 1156511 - RNA, 18 nt, Human
aaccaagccguggcuucc

SEQ ID NO: 1156512 - RNA, 19 nt, Human
gucucgaacuccugaccuu

SEQ ID NO: 1156513 - RNA, 18 nt, Human
gucucgaacuccugaccu

SEQ ID NO: 1156514 - RNA, 13 nt, Human
gucucgaacuccu

SEQ ID NO: 1156515 - RNA, 21 nt, Human
gucaacaaguaugaauaaaga

SEQ ID NO: 1156516 - RNA, 17 nt, Human
gucaaacgugaaaaugc

SEQ ID NO: 1156517 - RNA, 15 nt, Human
gucaaacgugaaaau

SEQ ID NO: 1156518 - RNA, 14 nt, Human
gucaaacgugaaaa

SEQ ID NO: 1156519 - RNA, 12 nt, Human
aaaugugugugu

SEQ ID NO: 1156520 - RNA, 15 nt, Human
guaugcgugugugug

SEQ ID NO: 1156521 - RNA, 15 nt, Human
guauaaguggugugu

SEQ ID NO: 1156522 - RNA, 19 nt, Human
cacagugcaucucagccca

SEQ ID NO: 1156523 - RNA, 18 nt, Human
cacagugcaucucagccc

SEQ ID NO: 1156524 - RNA, 22 nt, Human
cacaggcccuuccucuccacug

SEQ ID NO: 1156525 - RNA, 21 nt, Human
cacaggcccuuccucuccacu

SEQ ID NO: 1156526 - RNA, 19 nt, Human
cacaggcccuuccucucca

SEQ ID NO: 1156527 - RNA, 18 nt, Human
cacaggcccuuccucucc

SEQ ID NO: 1156528 - RNA, 17 nt, Human
cacaggcccuuccucuc

SEQ ID NO: 1156529 - RNA, 16 nt, Human
cacaggcccuuccucu

SEQ ID NO: 1156530 - RNA, 22 nt, Human
cacagcugcucaauaaaguaca

SEQ ID NO: 1156531 - RNA, 12 nt, Human
cacagcugcuca

SEQ ID NO: 1156532 - RNA, 22 nt, Human
cacagauuugagcucagcccug

SEQ ID NO: 1156533 - RNA, 18 nt, Human
cacagauuugagcucagc

SEQ ID NO: 1156534 - RNA, 17 nt, Human
cacagauuugagcucag

SEQ ID NO: 1156535 - RNA, 16 nt, Human
cacagauuugagcuca

SEQ ID NO: 1156536 - RNA, 14 nt, Human
cacacuccagcugg

SEQ ID NO: 1156537 - RNA, 18 nt, Human
caauaauaauaccucccu

SEQ ID NO: 1156538 - RNA, 14 nt, Human
caaggagccaaaca

SEQ ID NO: 1156539 - RNA, 23 nt, Human
caagggaauuucuucaacucccu

SEQ ID NO: 1156540 - RNA, 17 nt, Human
caagagcuuaacagugu

SEQ ID NO: 1156541 - RNA, 16 nt, Human
caacuuguaaaugugg

SEQ ID NO: 1156542 - RNA, 12 nt, Human
caacuugggaac

SEQ ID NO: 1156543 - RNA, 20 nt, Human
caaccuucuguggcucacag

SEQ ID NO: 1156544 - RNA, 19 nt, Human
caaccuucuguggcucaca

SEQ ID NO: 1156545 - RNA, 17 nt, Human
caaccuucuguggcuca

SEQ ID NO: 1156546 - RNA, 16 nt, Human
caaccuggucacagga

SEQ ID NO: 1156547 - RNA, 23 nt, Human
caaccugcucuccucuugccacu

SEQ ID NO: 1156548 - RNA, 21 nt, Human
caaccugcucuccucuugcca

SEQ ID NO: 1156549 - RNA, 18 nt, Human
caaccugcucuccucuug

SEQ ID NO: 1156550 - RNA, 21 nt, Human
caaaguucccuacuuccugug

SEQ ID NO: 1156551 - RNA, 20 nt, Human
caaaguucccuacuuccugu

SEQ ID NO: 1156552 - RNA, 18 nt, Human
caaagugcugggauuaca

SEQ ID NO: 1156553 - RNA, 21 nt, Human
caaaaugagcccuguccugcc

SEQ ID NO: 1156554 - RNA, 11 nt, Human
uuuuuccuuuu

SEQ ID NO: 1156555 - RNA, 20 nt, Human
uuuggagucagacagaugug

SEQ ID NO: 1156556 - RNA, 16 nt, Human
uuucuuccucugcuga

SEQ ID NO: 1156557 - RNA, 14 nt, Human
uuucuuccucugcu

SEQ ID NO: 1156558 - RNA, 13 nt, Human
uuucuuccucugc

SEQ ID NO: 1156559 - RNA, 11 nt, Human
uuucuuccucu

SEQ ID NO: 1156560 - RNA, 13 nt, Human
uuuccugcccugg

SEQ ID NO: 1156561 - RNA, 12 nt, Human
uuuccugcccug

SEQ ID NO: 1156562 - RNA, 14 nt, Human
uguuggcagccucu

SEQ ID NO: 1156563 - RNA, 15 nt, Human
uguucugcuuuccuc

SEQ ID NO: 1156564 - RNA, 17 nt, Human
uguuagccccauaauuu

SEQ ID NO: 1156565 - RNA, 19 nt, Human
ugugugugcuuauguauga

SEQ ID NO: 1156566 - RNA, 20 nt, Human
ugugugugcuuauguaugag

SEQ ID NO: 1156567 - RNA, 17 nt, Human
ugugugugaaaaugugu

SEQ ID NO: 1156568 - RNA, 15 nt, Human
ugugugcuuauguau

SEQ ID NO: 1156569 - RNA, 18 nt, Human
uguguaugcgugugugug

SEQ ID NO: 1156570 - RNA, 22 nt, Human
ugugggcgugagaccugccccu

SEQ ID NO: 1156571 - RNA, 21 nt, Human
ugugggcgugagaccugcccc

SEQ ID NO: 1156572 - RNA, 20 nt, Human
ugugggcgugagaccugccc

SEQ ID NO: 1156573 - RNA, 10 nt, Human
uguggcucac

SEQ ID NO: 1156574 - RNA, 14 nt, Human
ugugcuuguuaacu

SEQ ID NO: 1156575 - RNA, 17 nt, Human
ugugaaaaugugugugu

SEQ ID NO: 1156576 - RNA, 16 nt, Human
ugugaaaaugugugug

SEQ ID NO: 1156577 - RNA, 20 nt, Human
ugucugaagucacugcacag

SEQ ID NO: 1156578 - RNA, 19 nt, Human
ugucugaagucacugcaca

SEQ ID NO: 1156579 - RNA, 18 nt, Human
ugucugaagucacugcac

SEQ ID NO: 1156580 - RNA, 17 nt, Human
ugucugaagucacugca

SEQ ID NO: 1156581 - RNA, 16 nt, Human
ugucugaagucacugc

SEQ ID NO: 1156582 - RNA, 16 nt, Human
ugucccaacuuguaaa

SEQ ID NO: 1156583 - RNA, 20 nt, Human
uguauuuauuuaguauuuau

SEQ ID NO: 1156584 - RNA, 23 nt, Human
uguacaaggacagccccuccucc

SEQ ID NO: 1156585 - RNA, 20 nt, Human
uguacaaggacagccccucc

SEQ ID NO: 1156586 - RNA, 16 nt, Human
uguacaaggacagccc

SEQ ID NO: 1156587 - RNA, 14 nt, Human
uggguuaguggaug

SEQ ID NO: 1156588 - RNA, 17 nt, Human
ugggauuacagguguga

SEQ ID NO: 1156589 - RNA, 20 nt, Human
uggccacuccagaccccugg

SEQ ID NO: 1156590 - RNA, 17 nt, Human
uggccacuccagacccc

SEQ ID NO: 1156591 - RNA, 19 nt, Human
uggcaggaguuggaagugu

SEQ ID NO: 1156592 - RNA, 15 nt, Human
uggacuccugcacac

SEQ ID NO: 1156593 - RNA, 15 nt, Human
uggacuccucugucc

SEQ ID NO: 1156594 - RNA, 20 nt, Human
uggacucaccucccccaucu

SEQ ID NO: 1156595 - RNA, 18 nt, Human
uggacucaccucccccau

SEQ ID NO: 1156596 - RNA, 15 nt, Human
uggacagaagcagcu

SEQ ID NO: 1156597 - RNA, 16 nt, Human
uggacagaagcagcuc

SEQ ID NO: 1156598 - RNA, 17 nt, Human
uggacagaagcagcucu

SEQ ID NO: 1156599 - RNA, 18 nt, Human
uggacagaagcagcucuu

SEQ ID NO: 1156600 - RNA, 22 nt, Human
uggaaacagcucgacuuuaaaa

SEQ ID NO: 1156601 - RNA, 17 nt, Human
uggaaacagcucgacuu

SEQ ID NO: 1156602 - RNA, 23 nt, Human
ugcugaaggaauaaauugcuccu

SEQ ID NO: 1156603 - RNA, 22 nt, Human
ugcucuccucuugccacugccu

SEQ ID NO: 1156604 - RNA, 21 nt, Human
ugcucuccucuugccacugcc

SEQ ID NO: 1156605 - RNA, 18 nt, Human
ugcucuccucuugccacu

SEQ ID NO: 1156606 - RNA, 16 nt, Human
ugcucuccucuugcca

SEQ ID NO: 1156607 - RNA, 21 nt, Human
ugccugugaacugaacucuga

SEQ ID NO: 1156608 - RNA, 18 nt, Human
ugccugugaacugaacuc

SEQ ID NO: 1156609 - RNA, 17 nt, Human
ugccugugaacugaacu

SEQ ID NO: 1156610 - RNA, 14 nt, Human
ugccugugaacuga

SEQ ID NO: 1156611 - RNA, 13 nt, Human
ugccccucccuuc

SEQ ID NO: 1156612 - RNA, 15 nt, Human
ugccccagggcuccc

SEQ ID NO: 1156613 - RNA, 21 nt, Human
ugcagagcaggaaacaugacu

SEQ ID NO: 1156614 - RNA, 21 nt, Human
ugagucccaggcugagccuca

SEQ ID NO: 1156615 - RNA, 20 nt, Human
ugagucccaggcugagccuc

SEQ ID NO: 1156616 - RNA, 23 nt, Human
ugagcuuaagaauuuugagcagg

SEQ ID NO: 1156617 - RNA, 20 nt, Human
ugagcucagcccuggugggc

SEQ ID NO: 1156618 - RNA, 12 nt, Human
ugagcucagccc

SEQ ID NO: 1156619 - RNA, 11 nt, Human
ugagcucagcc

SEQ ID NO: 1156620 - RNA, 22 nt, Human
ugagaccugccccuccucucug

SEQ ID NO: 1156621 - RNA, 15 nt, Human
ugagaccugccccuc

SEQ ID NO: 1156622 - RNA, 14 nt, Human
ugagaccugccccu

SEQ ID NO: 1156623 - RNA, 13 nt, Human
ugagaccugcccc

SEQ ID NO: 1156624 - RNA, 12 nt, Human
ugagaccugccc

SEQ ID NO: 1156625 - RNA, 23 nt, Human
ugaccagccuccaugcugccucc

SEQ ID NO: 1156626 - RNA, 22 nt, Human
ugaccagccuccaugcugccuc

SEQ ID NO: 1156627 - RNA, 21 nt, Human
ugaccagccuccaugcugccu

SEQ ID NO: 1156628 - RNA, 19 nt, Human
ugacauguguuggcagccu

SEQ ID NO: 1156629 - RNA, 15 nt, Human
ugacauauuuuugcu

SEQ ID NO: 1156630 - RNA, 19 nt, Human
ugacaacagacuucugaaa

SEQ ID NO: 1156631 - RNA, 18 nt, Human
ugacaacagacuucugaa

SEQ ID NO: 1156632 - RNA, 15 nt, Human
ugacaacagacuucu

SEQ ID NO: 1156633 - RNA, 14 nt, Human
ugaaugcauaaaau

SEQ ID NO: 1156634 - RNA, 16 nt, Human
ugaaucuuggugucua

SEQ ID NO: 1156635 - RNA, 20 nt, Human
ugaaaauuaggauuucauga

SEQ ID NO: 1156636 - RNA, 17 nt, Human
ucuugccacugccucuu

SEQ ID NO: 1156637 - RNA, 16 nt, Human
ucuugccacugccucu

SEQ ID NO: 1156638 - RNA, 23 nt, Human
ucuugcauggcaaggacugcagg

SEQ ID NO: 1156639 - RNA, 22 nt, Human
ucuucaguuaagccuuuggaaa

SEQ ID NO: 1156640 - RNA, 20 nt, Human
ucuucaguuaagccuuugga

SEQ ID NO: 1156641 - RNA, 19 nt, Human
ucuucaguuaagccuuugg

SEQ ID NO: 1156642 - RNA, 22 nt, Human
ucuggacuccucuguccaggca

SEQ ID NO: 1156643 - RNA, 18 nt, Human
ucuggacuccucugucca

SEQ ID NO: 1156644 - RNA, 16 nt, Human
ucuggacuccucuguc

SEQ ID NO: 1156645 - RNA, 15 nt, Human
ucuggacuccucugu

SEQ ID NO: 1156646 - RNA, 13 nt, Human
ucugcugaaggaa

SEQ ID NO: 1156647 - RNA, 15 nt, Human
ucugccuccucuuca

SEQ ID NO: 1156648 - RNA, 22 nt, Human
ucuaucuuugagcgcccacuag

SEQ ID NO: 1156649 - RNA, 14 nt, Human
ucuacuauuuaugu

SEQ ID NO: 1156650 - RNA, 17 nt, Human
uccuuaucaaaggacac

SEQ ID NO: 1156651 - RNA, 15 nt, Human
uccuuaucaaaggac

SEQ ID NO: 1156652 - RNA, 14 nt, Human
uccuuaucaaagga

SEQ ID NO: 1156653 - RNA, 22 nt, Human
uccucuguccaggcacugcugc

SEQ ID NO: 1156654 - RNA, 17 nt, Human
uccucuguccaggcacu

SEQ ID NO: 1156655 - RNA, 13 nt, Human
uccuccuggacuc

SEQ ID NO: 1156656 - RNA, 17 nt, Human
ucccuucuuuuucuucu

SEQ ID NO: 1156657 - RNA, 19 nt, Human
ucccugccccucccuucaa

SEQ ID NO: 1156658 - RNA, 18 nt, Human
ucccugccccucccuuca

SEQ ID NO: 1156659 - RNA, 14 nt, Human
ucccugccccuccc

SEQ ID NO: 1156660 - RNA, 16 nt, Human
ucccugccccccagcc

SEQ ID NO: 1156661 - RNA, 14 nt, Human
ucccucccuugggg

SEQ ID NO: 1156662 - RNA, 13 nt, Human
ucccucccuuggg

SEQ ID NO: 1156663 - RNA, 23 nt, Human
ucccuaccgagucucuucuccac

SEQ ID NO: 1156664 - RNA, 22 nt, Human
ucccuaccgagucucuucucca

SEQ ID NO: 1156665 - RNA, 21 nt, Human
ucccuaccgagucucuucucc

SEQ ID NO: 1156666 - RNA, 19 nt, Human
ucccuaccgagucucuucu

SEQ ID NO: 1156667 - RNA, 12 nt, Human
ucccaugcccug

SEQ ID NO: 1156668 - RNA, 19 nt, Human
ucccaggcugagccucagu

SEQ ID NO: 1156669 - RNA, 14 nt, Human
ucccaacuuguaaa

SEQ ID NO: 1156670 - RNA, 19 nt, Human
uccaugucgccucugcauu

SEQ ID NO: 1156671 - RNA, 18 nt, Human
uccaugucgccucugcau

SEQ ID NO: 1156672 - RNA, 17 nt, Human
uccaugucgccucugca

SEQ ID NO: 1156673 - RNA, 16 nt, Human
uccaugucgccucugc

SEQ ID NO: 1156674 - RNA, 23 nt, Human
uccauaaucuggacuccucuguc

SEQ ID NO: 1156675 - RNA, 19 nt, Human
uccagcuggguuggaaaac

SEQ ID NO: 1156676 - RNA, 22 nt, Human
uccagcuggccgggagccugau

SEQ ID NO: 1156677 - RNA, 21 nt, Human
uccagcuggccgggagccuga

SEQ ID NO: 1156678 - RNA, 15 nt, Human
uccagcuggccggga

SEQ ID NO: 1156679 - RNA, 21 nt, Human
uccagcaauucuccugccuca

SEQ ID NO: 1156680 - RNA, 20 nt, Human
uccagcaauucuccugccuc

SEQ ID NO: 1156681 - RNA, 19 nt, Human
uccagcaauucuccugccu

SEQ ID NO: 1156682 - RNA, 18 nt, Human
uccagcaauucuccugcc

SEQ ID NO: 1156683 - RNA, 22 nt, Human
uccagauuuuuuacagcugccu

SEQ ID NO: 1156684 - RNA, 22 nt, Human
uccagagaguggcuccucccgg

SEQ ID NO: 1156685 - RNA, 23 nt, Human
uccacuuagaaauugcauuuccu

SEQ ID NO: 1156686 - RNA, 21 nt, Human
uccacuuagaaauugcauuuc

SEQ ID NO: 1156687 - RNA, 17 nt, Human
ucaguuaagccuuugga

SEQ ID NO: 1156688 - RNA, 16 nt, Human
ucaguuaagccuuugg

SEQ ID NO: 1156689 - RNA, 18 nt, Human
ucaguccccgugaaggag

SEQ ID NO: 1156690 - RNA, 22 nt, Human
uagagaaggacccggaggggcc

SEQ ID NO: 1156691 - RNA, 13 nt, Human
uagagaaggaccc

SEQ ID NO: 1156692 - RNA, 20 nt, Human
uagacccacuggacucaccu

SEQ ID NO: 1156693 - RNA, 22 nt, Human
uacugcccaggccugccuguuc

SEQ ID NO: 1156694 - RNA, 21 nt, Human
uacugcccaggccugccuguu

SEQ ID NO: 1156695 - RNA, 20 nt, Human
uacugcccaggccugccugu

SEQ ID NO: 1156696 - RNA, 19 nt, Human
uacugcccaggccugccug

SEQ ID NO: 1156697 - RNA, 12 nt, Human
uacuccucccag

SEQ ID NO: 1156698 - RNA, 22 nt, Human
uaccgagucucuucuccacugg

SEQ ID NO: 1156699 - RNA, 21 nt, Human
uaccgagucucuucuccacug

SEQ ID NO: 1156700 - RNA, 18 nt, Human
uaccgagucucuucucca

SEQ ID NO: 1156701 - RNA, 17 nt, Human
uaccgagucucuucucc

SEQ ID NO: 1156702 - RNA, 14 nt, Human
uacagcugccugca

SEQ ID NO: 1156703 - RNA, 13 nt, Human
uacagcugccugc

SEQ ID NO: 1156704 - RNA, 18 nt, Human
uacagcuaaucagcauuc

SEQ ID NO: 1156705 - RNA, 16 nt, Human
uacagcuaaucagcau

SEQ ID NO: 1156706 - RNA, 23 nt, Human
uaaucugggccagaauuucaaac

SEQ ID NO: 1156707 - RNA, 18 nt, Human
uaaucugggccagaauuu

SEQ ID NO: 1156708 - RNA, 22 nt, Human
uaaucuggacuccucuguccag

SEQ ID NO: 1156709 - RNA, 21 nt, Human
uaaucuggacuccucugucca

SEQ ID NO: 1156710 - RNA, 20 nt, Human
uaaucuggacuccucugucc

SEQ ID NO: 1156711 - RNA, 19 nt, Human
uaaucuggacuccucuguc

SEQ ID NO: 1156712 - RNA, 18 nt, Human
uaaucuggacuccucugu

SEQ ID NO: 1156713 - RNA, 17 nt, Human
uaaucuggacuccucug

SEQ ID NO: 1156714 - RNA, 15 nt, Human
uaaucuggacuccuc

SEQ ID NO: 1156715 - RNA, 16 nt, Human
uaagugguguguguau

SEQ ID NO: 1156716 - RNA, 15 nt, Human
uaaguggugugugua

SEQ ID NO: 1156717 - RNA, 16 nt, Human
uaaaaucuugaaaaug

SEQ ID NO: 1156718 - RNA, 19 nt, Human
uaaaacacuuccauaaucu

SEQ ID NO: 1156719 - RNA, 21 nt, Human
guuuuuaaggguuuguggaaa

SEQ ID NO: 1156720 - RNA, 18 nt, Human
guuuguuccccaagacau

SEQ ID NO: 1156721 - RNA, 22 nt, Human
guugucugaagucacugcacag

SEQ ID NO: 1156722 - RNA, 19 nt, Human
guugucugaagucacugca

SEQ ID NO: 1156723 - RNA, 18 nt, Human
guuggccaggcuggucuc

SEQ ID NO: 1156724 - RNA, 19 nt, Human
guuggccaggcugcucuug

SEQ ID NO: 1156725 - RNA, 15 nt, Human
guuggccaggcuggu

SEQ ID NO: 1156726 - RNA, 14 nt, Human
guuggccaggcugg

SEQ ID NO: 1156727 - RNA, 14 nt, Human
guuggccaggcugc

SEQ ID NO: 1156728 - RNA, 14 nt, Human
guugaagccuuugu

SEQ ID NO: 1156729 - RNA, 13 nt, Human
guugaagccuuug

SEQ ID NO: 1156730 - RNA, 19 nt, Human
guucuuucuuccucugcug

SEQ ID NO: 1156731 - RNA, 18 nt, Human
guucuuucuuccucugcu

SEQ ID NO: 1156732 - RNA, 17 nt, Human
guucuuucuuccucugc

SEQ ID NO: 1156733 - RNA, 16 nt, Human
guucuuucuuccucug

SEQ ID NO: 1156734 - RNA, 15 nt, Human
guucuuucuuccucu

SEQ ID NO: 1156735 - RNA, 14 nt, Human
guucuuucuuccuc

SEQ ID NO: 1156736 - RNA, 16 nt, Human
guucugcacacagcac

SEQ ID NO: 1156737 - RNA, 15 nt, Human
guucugcacacagca

SEQ ID NO: 1156738 - RNA, 19 nt, Human
guuccuuccucugagccuu

SEQ ID NO: 1156739 - RNA, 18 nt, Human
guuccuuccucugagccu

SEQ ID NO: 1156740 - RNA, 17 nt, Human
guuccuuccucugagcc

SEQ ID NO: 1156741 - RNA, 23 nt, Human
guuccuccccuccuccuggacuc

SEQ ID NO: 1156742 - RNA, 23 nt, Human
guuccagcaauucuccugccuca

SEQ ID NO: 1156743 - RNA, 21 nt, Human
guuccagcaauucuccugccu

SEQ ID NO: 1156744 - RNA, 20 nt, Human
guuccagcaauucuccugcc

SEQ ID NO: 1156745 - RNA, 24 nt, Human
guucacucuacuuagcaugucccu

SEQ ID NO: 1156746 - RNA, 23 nt, Human
guucaagugauucucaugccuca

SEQ ID NO: 1156747 - RNA, 18 nt, Human
guuaacugagugccuuuu

SEQ ID NO: 1156748 - RNA, 15 nt, Human
guguguuucugaucu

SEQ ID NO: 1156749 - RNA, 13 nt, Human
guggggaggggcu

SEQ ID NO: 1156750 - RNA, 22 nt, Human
gugggcgugagaccugccccuc

SEQ ID NO: 1156751 - RNA, 21 nt, Human
gugggcgugagaccugccccu

SEQ ID NO: 1156752 - RNA, 18 nt, Human
gugggcgugagaccugcc

SEQ ID NO: 1156753 - RNA, 19 nt, Human
gugggccuucagggaguga

SEQ ID NO: 1156754 - RNA, 20 nt, Human
guggcuucccgcucagcccu

SEQ ID NO: 1156755 - RNA, 19 nt, Human
guggcuucccgcucagccc

SEQ ID NO: 1156756 - RNA, 18 nt, Human
guggcuucccgcucagcc

SEQ ID NO: 1156757 - RNA, 20 nt, Human
guggcuccucccggugccca

SEQ ID NO: 1156758 - RNA, 13 nt, Human
guggcuccucccg

SEQ ID NO: 1156759 - RNA, 15 nt, Human
gugccuucagcucua

SEQ ID NO: 1156760 - RNA, 23 nt, Human
gugcccaagaauagaugcugacu

SEQ ID NO: 1156761 - RNA, 20 nt, Human
gugcccaagaauagaugcug

SEQ ID NO: 1156762 - RNA, 14 nt, Human
gugcaucucagccc

SEQ ID NO: 1156763 - RNA, 13 nt, Human
gugcaucucagcc

SEQ ID NO: 1156764 - RNA, 14 nt, Human
gugauccacucgcc

SEQ ID NO: 1156765 - RNA, 18 nt, Human
gucucuucuccacuggau

SEQ ID NO: 1156766 - RNA, 17 nt, Human
gucucugguuccucccc

SEQ ID NO: 1156767 - RNA, 16 nt, Human
gucucugguuccuccc

SEQ ID NO: 1156768 - RNA, 13 nt, Human
gucucugagcauu

SEQ ID NO: 1156769 - RNA, 23 nt, Human
gucccuaccgagucucuucucca

SEQ ID NO: 1156770 - RNA, 22 nt, Human
gucccuaccgagucucuucucc

SEQ ID NO: 1156771 - RNA, 21 nt, Human
gucccuaccgagucucuucuc

SEQ ID NO: 1156772 - RNA, 21 nt, Human
gucccaggcugagccucaguc

SEQ ID NO: 1156773 - RNA, 19 nt, Human
gucccaggcugagccucag

SEQ ID NO: 1156774 - RNA, 18 nt, Human
gucccaggcugagccuca

SEQ ID NO: 1156775 - RNA, 17 nt, Human
gucccaggcugagccuc

SEQ ID NO: 1156776 - RNA, 16 nt, Human
gucccaggcugagccu

SEQ ID NO: 1156777 - RNA, 15 nt, Human
gucccaggcugagcc

SEQ ID NO: 1156778 - RNA, 22 nt, Human
gucagaugcugugcaaauguua

SEQ ID NO: 1156779 - RNA, 17 nt, Human
guauguugaagccuuug

SEQ ID NO: 1156780 - RNA, 19 nt, Human
guaugaauaaagacaccua

SEQ ID NO: 1156781 - RNA, 18 nt, Human
guaugaauaaagacaccu

SEQ ID NO: 1156782 - RNA, 23 nt, Human
guaugaaagauggcugugccucu

SEQ ID NO: 1156783 - RNA, 22 nt, Human
guaugaaagauggcugugccuc

SEQ ID NO: 1156784 - RNA, 16 nt, Human
guauauguugggugca

SEQ ID NO: 1156785 - RNA, 21 nt, Human
guauaugucucaggucccugc

SEQ ID NO: 1156786 - RNA, 15 nt, Human
guauaugucucaggu

SEQ ID NO: 1156787 - RNA, 13 nt, Human
guauaugucucag

SEQ ID NO: 1156788 - RNA, 22 nt, Human
guagggugggccuucagggagu

SEQ ID NO: 1156789 - RNA, 17 nt, Human
guagggugggccuucag

SEQ ID NO: 1156790 - RNA, 14 nt, Human
guagggugggccuu

SEQ ID NO: 1156791 - RNA, 22 nt, Human
gcuaggaaauccaggguggugg

SEQ ID NO: 1156792 - RNA, 19 nt, Human
gcuaggaaauccagggugg

SEQ ID NO: 1156793 - RNA, 20 nt, Human
gcgggucacaggagggaggg

SEQ ID NO: 1156794 - RNA, 19 nt, Human
gcgggucacaggagggagg

SEQ ID NO: 1156795 - RNA, 15 nt, Human
gcgggucacaggagg

SEQ ID NO: 1156796 - RNA, 13 nt, Human
gcgggucacagga

SEQ ID NO: 1156797 - RNA, 22 nt, Human
gccuuuggaaacagcucgacuu

SEQ ID NO: 1156798 - RNA, 23 nt, Human
gccuucgauacaccgggccugga

SEQ ID NO: 1156799 - RNA, 22 nt, Human
gccuucgauacaccgggccugg

SEQ ID NO: 1156800 - RNA, 18 nt, Human
gccuucgauacaccgggc

SEQ ID NO: 1156801 - RNA, 13 nt, Human
gccuucaucuccc

SEQ ID NO: 1156802 - RNA, 21 nt, Human
gccuucagggagugagggauu

SEQ ID NO: 1156803 - RNA, 13 nt, Human
gccuucagggagu

SEQ ID NO: 1156804 - RNA, 22 nt, Human
gccuaugugcaugcagcaucua

SEQ ID NO: 1156805 - RNA, 22 nt, Human
gccguggcuucccgcucagccc

SEQ ID NO: 1156806 - RNA, 21 nt, Human
gccguggcuucccgcucagcc

SEQ ID NO: 1156807 - RNA, 19 nt, Human
gccguggcuucccgcucag

SEQ ID NO: 1156808 - RNA, 19 nt, Human
gccgugccuucagcucuac

SEQ ID NO: 1156809 - RNA, 17 nt, Human
gccgugccuucagcucu

SEQ ID NO: 1156810 - RNA, 15 nt, Human
gccgugccuucagcu

SEQ ID NO: 1156811 - RNA, 14 nt, Human
gccgugccuucagc

SEQ ID NO: 1156812 - RNA, 19 nt, Human
gcccugcuuugggcugccc

SEQ ID NO: 1156813 - RNA, 18 nt, Human
gcccugcuuugggcugcc

SEQ ID NO: 1156814 - RNA, 16 nt, Human
gcccugcuuugggcug

SEQ ID NO: 1156815 - RNA, 18 nt, Human
gccgggaccccgagccug

SEQ ID NO: 1156816 - RNA, 19 nt, Human
gccgggaccccgagccugg

SEQ ID NO: 1156817 - RNA, 23 nt, Human
gccgggaccccgagccuggcucc

SEQ ID NO: 1156818 - RNA, 21 nt, Human
gcccuccaucuaaacugcccc

SEQ ID NO: 1156819 - RNA, 20 nt, Human
gcccuccaucuaaacugccc

SEQ ID NO: 1156820 - RNA, 16 nt, Human
gcccgacagccuggca

SEQ ID NO: 1156821 - RNA, 15 nt, Human
gcccgacagccuggc

SEQ ID NO: 1156822 - RNA, 14 nt, Human
gcccgacagccugg

SEQ ID NO: 1156823 - RNA, 12 nt, Human
gcccgacagccu

SEQ ID NO: 1156824 - RNA, 21 nt, Human
gccccauaauuuuuuuuuucc

SEQ ID NO: 1156825 - RNA, 19 nt, Human
gccccaguuguauuuauuu

SEQ ID NO: 1156826 - RNA, 20 nt, Human
gcccaggcuggagugcaaug

SEQ ID NO: 1156827 - RNA, 20 nt, Human
gcccacauagugaugguucc

SEQ ID NO: 1156828 - RNA, 22 nt, Human
gcccaagaauagaugcugacug

SEQ ID NO: 1156829 - RNA, 21 nt, Human
gcccaagaauagaugcugacu

SEQ ID NO: 1156830 - RNA, 24 nt, Human
gcccaaccugcucuccucuugcca

SEQ ID NO: 1156831 - RNA, 22 nt, Human
gccacuccagaccccuggcuuu

SEQ ID NO: 1156832 - RNA, 21 nt, Human
gccacuccagaccccuggcuu

SEQ ID NO: 1156833 - RNA, 20 nt, Human
gcauggcaaggacugcaggg

SEQ ID NO: 1156834 - RNA, 20 nt, Human
gcaggaaggcugagaggaga

SEQ ID NO: 1156835 - RNA, 14 nt, Human
gcagcccugcuuug

SEQ ID NO: 1156836 - RNA, 13 nt, Human
gcagcccugcuuu

SEQ ID NO: 1156837 - RNA, 24 nt, Human
gcacugguggcccgacagccuggc

SEQ ID NO: 1156838 - RNA, 23 nt, Human
gcacugguggcccgacagccugg

SEQ ID NO: 1156839 - RNA, 22 nt, Human
gcacugguggcccgacagccug

SEQ ID NO: 1156840 - RNA, 12 nt, Human
gcacugcugccc

SEQ ID NO: 1156841 - RNA, 21 nt, Human
gcaaagcccagcuugaaaccu

SEQ ID NO: 1156842 - RNA, 13 nt, Human
gcaaagcccagcu

SEQ ID NO: 1156843 - RNA, 22 nt, Human
gauuccagagaguggcuccucc

SEQ ID NO: 1156844 - RNA, 20 nt, Human
gauuccagagaguggcuccu

SEQ ID NO: 1156845 - RNA, 19 nt, Human
gauuccagagaguggcucc

SEQ ID NO: 1156846 - RNA, 20 nt, Human
gauggcugugccucugccug

SEQ ID NO: 1156847 - RNA, 19 nt, Human
gauggcugugccucugccu

SEQ ID NO: 1156848 - RNA, 18 nt, Human
gauggcugugccucugcc

SEQ ID NO: 1156849 - RNA, 17 nt, Human
gauggcugugccucugc

SEQ ID NO: 1156850 - RNA, 13 nt, Human
gauggcugugccu

SEQ ID NO: 1156851 - RNA, 13 nt, Human
gaucuuuggacag

SEQ ID NO: 1156852 - RNA, 21 nt, Human
gaucuuuggacagaagcagcu

SEQ ID NO: 1156853 - RNA, 20 nt, Human
gauccccaagccuggcaagg

SEQ ID NO: 1156854 - RNA, 19 nt, Human
gauacaccgggccuggaga

SEQ ID NO: 1156855 - RNA, 23 nt, Human
gaggaaaaccaagccguggcuuc

SEQ ID NO: 1156856 - RNA, 21 nt, Human
gaggaaaaccaagccguggcu

SEQ ID NO: 1156857 - RNA, 20 nt, Human
gaggaaaaccaagccguggc

SEQ ID NO: 1156858 - RNA, 19 nt, Human
gagccucagucucccuccc

SEQ ID NO: 1156859 - RNA, 13 nt, Human
gagaguggcuccu

SEQ ID NO: 1156860 - RNA, 13 nt, Human
gagacuuguauga

SEQ ID NO: 1156861 - RNA, 23 nt, Human
gagacugucucaagagggcacug

SEQ ID NO: 1156862 - RNA, 22 nt, Human
gagacugucucaagagggcacu

SEQ ID NO: 1156863 - RNA, 15 nt, Human
gacucaguggggagg

SEQ ID NO: 1156864 - RNA, 15 nt, Human
gacucagguugucug

SEQ ID NO: 1156865 - RNA, 17 nt, Human
gacgggguuucaccaug

SEQ ID NO: 1156866 - RNA, 19 nt, Human
gaccugccucggccuccca

SEQ ID NO: 1156867 - RNA, 15 nt, Human
gaccugccucggccu

SEQ ID NO: 1156868 - RNA, 21 nt, Human
gaccugccccuccucucugcc

SEQ ID NO: 1156869 - RNA, 23 nt, Human
gaccccucauagcccucacccug

SEQ ID NO: 1156870 - RNA, 22 nt, Human
gaccccucauagcccucacccu

SEQ ID NO: 1156871 - RNA, 20 nt, Human
gaccccgagccuggcuccaa

SEQ ID NO: 1156872 - RNA, 23 nt, Human
gacagaucucugcuuuggaaauc

SEQ ID NO: 1156873 - RNA, 21 nt, Human
gacagaucucugcuuuggaaa

SEQ ID NO: 1156874 - RNA, 19 nt, Human
gacagaucucugcuuugga

SEQ ID NO: 1156875 - RNA, 17 nt, Human
gacaccuacugaguggc

SEQ ID NO: 1156876 - RNA, 17 nt, Human
gacacagugaccauacu

SEQ ID NO: 1156877 - RNA, 15 nt, Human
gaagucacugcacag

SEQ ID NO: 1156878 - RNA, 23 nt, Human
gaaggcagggagggccugggccc

SEQ ID NO: 1156879 - RNA, 22 nt, Human
gaaggcagggagggccugggcc

SEQ ID NO: 1156880 - RNA, 20 nt, Human
gaaggcagggagggccuggg

SEQ ID NO: 1156881 - RNA, 18 nt, Human
gaaggcagggagggccug

SEQ ID NO: 1156882 - RNA, 23 nt, Human
gaaggacccggaggggccuggca

SEQ ID NO: 1156883 - RNA, 22 nt, Human
gaaggacccggaggggccuggc

SEQ ID NO: 1156884 - RNA, 22 nt, Human
gaaggaauaaauugcuccuuga

SEQ ID NO: 1156885 - RNA, 15 nt, Human
gaacuuguuuucugg

SEQ ID NO: 1156886 - RNA, 14 nt, Human
gaacuccugaccuc

SEQ ID NO: 1156887 - RNA, 13 nt, Human
gaacuccugaccu

SEQ ID NO: 1156888 - RNA, 16 nt, Human
gaacuccuaaaucaag

SEQ ID NO: 1156889 - RNA, 15 nt, Human
gaacuccuaaaucaa

SEQ ID NO: 1156890 - RNA, 16 nt, Human
gaaaguuuacaggaaa

SEQ ID NO: 1156891 - RNA, 14 nt, Human
gaaaguuuacagga

SEQ ID NO: 1156892 - RNA, 23 nt, Human
gaaagauggcugugccucugccu

SEQ ID NO: 1156893 - RNA, 22 nt, Human
gaaagauggcugugccucugcc

SEQ ID NO: 1156894 - RNA, 16 nt, Human
cuuuucacugcuggcu

SEQ ID NO: 1156895 - RNA, 12 nt, Human
cuuuucacugcu

SEQ ID NO: 1156896 - RNA, 18 nt, Human
cuuuuaaaacacuuccau

SEQ ID NO: 1156897 - RNA, 21 nt, Human
cuuuccgguguuuaagacauu

SEQ ID NO: 1156898 - RNA, 21 nt, Human
cuuuccccaugucucgacuca

SEQ ID NO: 1156899 - RNA, 20 nt, Human
cuuuccccaugucucgacuc

SEQ ID NO: 1156900 - RNA, 15 nt, Human
cuuuccccaugucuc

SEQ ID NO: 1156901 - RNA, 21 nt, Human
cuuguaugaaagauggcugug

SEQ ID NO: 1156902 - RNA, 18 nt, Human
cuuguaaaaauuaaaagu

SEQ ID NO: 1156903 - RNA, 15 nt, Human
cuuggggccuaugca

SEQ ID NO: 1156904 - RNA, 17 nt, Human
cuucuuuuuuugugaug

SEQ ID NO: 1156905 - RNA, 21 nt, Human
cugucucaagagggcacuggu

SEQ ID NO: 1156906 - RNA, 20 nt, Human
cugucucaagagggcacugg

SEQ ID NO: 1156907 - RNA, 19 nt, Human
cugucucaagagggcacug

SEQ ID NO: 1156908 - RNA, 18 nt, Human
cugucucaagagggcacu

SEQ ID NO: 1156909 - RNA, 23 nt, Human
cuguccaggcacugcugcccagc

SEQ ID NO: 1156910 - RNA, 22 nt, Human
cuguccaggcacugcugcccag

SEQ ID NO: 1156911 - RNA, 21 nt, Human
cuguccaggcacugcugccca

SEQ ID NO: 1156912 - RNA, 20 nt, Human
cuguccaggcacugcugccc

SEQ ID NO: 1156913 - RNA, 19 nt, Human
cuguccaggcacugcugcc

SEQ ID NO: 1156914 - RNA, 18 nt, Human
cuguccaggcacugcugc

SEQ ID NO: 1156915 - RNA, 23 nt, Human
cugguuaauauuuauaggucacu

SEQ ID NO: 1156916 - RNA, 21 nt, Human
cuggucucgaacuccugaccu

SEQ ID NO: 1156917 - RNA, 16 nt, Human
cuggucucgaacuccu

SEQ ID NO: 1156918 - RNA, 23 nt, Human
cuggucacaggacucugccuccu

SEQ ID NO: 1156919 - RNA, 22 nt, Human
cuggucacaggacucugccucc

SEQ ID NO: 1156920 - RNA, 21 nt, Human
cuggucacaggacucugccuc

SEQ ID NO: 1156921 - RNA, 20 nt, Human
cuggucacaggacucugccu

SEQ ID NO: 1156922 - RNA, 19 nt, Human
cugggccccaguuguauuu

SEQ ID NO: 1156923 - RNA, 15 nt, Human
cugggccccaguugu

SEQ ID NO: 1156924 - RNA, 18 nt, Human
cugggauuacagguguga

SEQ ID NO: 1156925 - RNA, 16 nt, Human
cugggauuacaggugu

SEQ ID NO: 1156926 - RNA, 14 nt, Human
cugggaggcaguga

SEQ ID NO: 1156927 - RNA, 23 nt, Human
cuggcuuuucacugcuggcugcc

SEQ ID NO: 1156928 - RNA, 16 nt, Human
cuggcacagggcagug

SEQ ID NO: 1156929 - RNA, 15 nt, Human
cuggcacagggcagu

SEQ ID NO: 1156930 - RNA, 17 nt, Human
cugcuuugggcugcccu

SEQ ID NO: 1156931 - RNA, 16 nt, Human
cugcuuugggcugccc

SEQ ID NO: 1156932 - RNA, 13 nt, Human
cugcuuuggaaau

SEQ ID NO: 1156933 - RNA, 15 nt, Human
cugcuggcugccuua

SEQ ID NO: 1156934 - RNA, 14 nt, Human
cugcuggcugccuu

SEQ ID NO: 1156935 - RNA, 13 nt, Human
cugcuggcugccu

SEQ ID NO: 1156936 - RNA, 19 nt, Human
cugcucuugaacuccugac

SEQ ID NO: 1156937 - RNA, 18 nt, Human
cugcucuugaacuccuga

SEQ ID NO: 1156938 - RNA, 16 nt, Human
cugcucuugaacuccu

SEQ ID NO: 1156939 - RNA, 23 nt, Human
cugcgggucacaggagggagggg

SEQ ID NO: 1156940 - RNA, 22 nt, Human
cugcgggucacaggagggaggg

SEQ ID NO: 1156941 - RNA, 21 nt, Human
cugcgggucacaggagggagg

SEQ ID NO: 1156942 - RNA, 15 nt, Human
cugcgggucacagga

SEQ ID NO: 1156943 - RNA, 21 nt, Human
cugccugcaguacuuuaccuc

SEQ ID NO: 1156944 - RNA, 20 nt, Human
cugccugcaguacuuuaccu

SEQ ID NO: 1156945 - RNA, 22 nt, Human
cugcccuaaugcgcaggcuggc

SEQ ID NO: 1156946 - RNA, 21 nt, Human
cugcccuaaugcgcaggcugg

SEQ ID NO: 1156947 - RNA, 20 nt, Human
cugcccuaaugcgcaggcug

SEQ ID NO: 1156948 - RNA, 17 nt, Human
cugcccaggccugccug

SEQ ID NO: 1156949 - RNA, 22 nt, Human
cugagccucagucucccucccu

SEQ ID NO: 1156950 - RNA, 21 nt, Human
cugagccucagucucccuccc

SEQ ID NO: 1156951 - RNA, 16 nt, Human
cugagccucagucucc

SEQ ID NO: 1156952 - RNA, 17 nt, Human
cugaacucugacaacag

SEQ ID NO: 1156953 - RNA, 16 nt, Human
cugaacucugacaaca

SEQ ID NO: 1156954 - RNA, 22 nt, Human
cugaaauagacccacaagaggc

SEQ ID NO: 1156955 - RNA, 15 nt, Human
cucuugaacuccuga

SEQ ID NO: 1156956 - RNA, 22 nt, Human
cucuggcuccagcuggccggga

SEQ ID NO: 1156957 - RNA, 16 nt, Human
cucuggcuccagcugg

SEQ ID NO: 1156958 - RNA, 15 nt, Human
cucuggcuccagcug

SEQ ID NO: 1156959 - RNA, 22 nt, Human
cucuccucuugccacugccucu

SEQ ID NO: 1156960 - RNA, 19 nt, Human
cucuccucuugccacugcc

SEQ ID NO: 1156961 - RNA, 17 nt, Human
cucuccucuugccacug

SEQ ID NO: 1156962 - RNA, 16 nt, Human
cucuccucuugccacu

SEQ ID NO: 1156963 - RNA, 15 nt, Human
cucuccucuugccac

SEQ ID NO: 1156964 - RNA, 14 nt, Human
cucuccucuugcca

SEQ ID NO: 1156965 - RNA, 15 nt, Human
cucuccacugccuuc

SEQ ID NO: 1156966 - RNA, 14 nt, Human
cucuccacugccuu

SEQ ID NO: 1156967 - RNA, 12 nt, Human
cucuccacugcc

SEQ ID NO: 1156968 - RNA, 11 nt, Human
cucuccacugc

SEQ ID NO: 1156969 - RNA, 20 nt, Human
cucuacuuagcaugucccua

SEQ ID NO: 1156970 - RNA, 19 nt, Human
cucuacuuagcaugucccu

SEQ ID NO: 1156971 - RNA, 17 nt, Human
cucuacuuagcaugucc

SEQ ID NO: 1156972 - RNA, 16 nt, Human
cucuacuuagcauguc

SEQ ID NO: 1156973 - RNA, 21 nt, Human
cucuacagcuaaucagcauuc

SEQ ID NO: 1156974 - RNA, 18 nt, Human
cucggcucacugcauccu

SEQ ID NO: 1156975 - RNA, 17 nt, Human
cucggcucacugcaucc

SEQ ID NO: 1156976 - RNA, 16 nt, Human
cuccugccucagccuc

SEQ ID NO: 1156977 - RNA, 17 nt, Human
cuccucccggugcccaa

SEQ ID NO: 1156978 - RNA, 15 nt, Human
cuccucccggugccc

SEQ ID NO: 1156979 - RNA, 14 nt, Human
cuccucccggugcc

SEQ ID NO: 1156980 - RNA, 15 nt, Human
cuccgccucccgggu

SEQ ID NO: 1156981 - RNA, 13 nt, Human
cucccucauucca

SEQ ID NO: 1156982 - RNA, 20 nt, Human
cucccggcuaugggggcacu

SEQ ID NO: 1156983 - RNA, 22 nt, Human
cucccaaagugcugggauuaca

SEQ ID NO: 1156984 - RNA, 18 nt, Human
cucccaaagugcugggau

SEQ ID NO: 1156985 - RNA, 17 nt, Human
cucccaaagugcuggga

SEQ ID NO: 1156986 - RNA, 22 nt, Human
cuccaugucucugagcauuaga

SEQ ID NO: 1156987 - RNA, 13 nt, Human
cuccaugucucug

SEQ ID NO: 1156988 - RNA, 13 nt, Human
cuccaugcugccu

SEQ ID NO: 1156989 - RNA, 16 nt, Human
cuccaucuccacucca

SEQ ID NO: 1156990 - RNA, 21 nt, Human
cucacuaucccggcugcccuu

SEQ ID NO: 1156991 - RNA, 20 nt, Human
cucacuaucccggcugcccu

SEQ ID NO: 1156992 - RNA, 20 nt, Human
cucacuaggcuucugguuga

SEQ ID NO: 1156993 - RNA, 16 nt, Human
cucacuaggcuucugg

SEQ ID NO: 1156994 - RNA, 13 nt, Human
cucacuaggcuuc

SEQ ID NO: 1156995 - RNA, 21 nt, Human
cucaagagggcacugguggcc

SEQ ID NO: 1156996 - RNA, 19 nt, Human
cucaagagggcacuggugg

SEQ ID NO: 1156997 - RNA, 17 nt, Human
cucaagagggcacuggu

SEQ ID NO: 1156998 - RNA, 17 nt, Human
cuaggaaauccagggug

SEQ ID NO: 1156999 - RNA, 16 nt, Human
cuaggaaauccagggu

SEQ ID NO: 1157000 - RNA, 18 nt, Human
cuagacucccaagcugga

SEQ ID NO: 1157001 - RNA, 20 nt, Human
cuacuuccugugacuucagc

SEQ ID NO: 1157002 - RNA, 20 nt, Human
cuacuuccccuuccuaauuc

SEQ ID NO: 1157003 - RNA, 15 nt, Human
cuacuuccccuuccu

SEQ ID NO: 1157004 - RNA, 14 nt, Human
cuacuuccccuucc

SEQ ID NO: 1157005 - RNA, 22 nt, Human
cuaaugaaugcauaaaauguua

SEQ ID NO: 1157006 - RNA, 19 nt, Human
cuaaugaaugcauaaaaug

SEQ ID NO: 1157007 - RNA, 16 nt, Human
cuaauccucuuuuucu

SEQ ID NO: 1157008 - RNA, 20 nt, Human
cuaaucagcauucucacucc

SEQ ID NO: 1157009 - RNA, 19 nt, Human
cuaaucagcauucucacuc

SEQ ID NO: 1157010 - RNA, 17 nt, Human
cuaaucagcauucucac

SEQ ID NO: 1157011 - RNA, 14 nt, Human
cuaaggcugaacuu

SEQ ID NO: 1157012 - RNA, 21 nt, Human
cguggcuucccgcucagcccu

SEQ ID NO: 1157013 - RNA, 20 nt, Human
cguggcuucccgcucagccc

SEQ ID NO: 1157014 - RNA, 19 nt, Human
cguggcuucccgcucagcc

SEQ ID NO: 1157015 - RNA, 18 nt, Human
cguggcuucccgcucagc

SEQ ID NO: 1157016 - RNA, 19 nt, Human
cgggucacaggagggaggg

SEQ ID NO: 1157017 - RNA, 11 nt, Human
cgggucacagg

SEQ ID NO: 1157018 - RNA, 17 nt, Human
cgggauuaguacacacu

SEQ ID NO: 1157019 - RNA, 21 nt, Human
cgggagccugaucaccugccc

SEQ ID NO: 1157020 - RNA, 12 nt, Human
cggcugcccuuu

SEQ ID NO: 1157021 - RNA, 11 nt, Human
cggcugcccuu

SEQ ID NO: 1157022 - RNA, 21 nt, Human
cgcucagcccucccugccccu

SEQ ID NO: 1157023 - RNA, 16 nt, Human
cgcucagcccucccug

SEQ ID NO: 1157024 - RNA, 12 nt, Human
cgcucagcccuc

SEQ ID NO: 1157025 - RNA, 13 nt, Human
cgccccuuccccc

SEQ ID NO: 1157026 - RNA, 19 nt, Human
cgccccucccacagcgcug

SEQ ID NO: 1157027 - RNA, 21 nt, Human
cgccccucccacagcgcuggc

SEQ ID NO: 1157028 - RNA, 13 nt, Human
ccucugaggcuga

SEQ ID NO: 1157029 - RNA, 12 nt, Human
ccucugagccuu

SEQ ID NO: 1157030 - RNA, 11 nt, Human
ccucugagccu

SEQ ID NO: 1157031 - RNA, 16 nt, Human
ccuccucucugcccua

SEQ ID NO: 1157032 - RNA, 15 nt, Human
ccuccucucugcccu

SEQ ID NO: 1157033 - RNA, 13 nt, Human
ccuccucucugcc

SEQ ID NO: 1157034 - RNA, 15 nt, Human
ccuccccuccuccug

SEQ ID NO: 1157035 - RNA, 19 nt, Human
ccuccaugcugccuccaga

SEQ ID NO: 1157036 - RNA, 16 nt, Human
ccucagagccaccccu

SEQ ID NO: 1157037 - RNA, 14 nt, Human
ccucacccuggggc

SEQ ID NO: 1157038 - RNA, 21 nt, Human
ccuacuuccccuuccuaauuc

SEQ ID NO: 1157039 - RNA, 16 nt, Human
ccuacuuccccuuccu

SEQ ID NO: 1157040 - RNA, 13 nt, Human
ccuacuuccccuu

SEQ ID NO: 1157041 - RNA, 23 nt, Human
ccgggagccugaucaccugcccu

SEQ ID NO: 1157042 - RNA, 16 nt, Human
ccgggagccugaucac

SEQ ID NO: 1157043 - RNA, 21 nt, Human
ccggaggggccuggcagccgu

SEQ ID NO: 1157044 - RNA, 19 nt, Human
cccuucuuuuucuucuuuu

SEQ ID NO: 1157045 - RNA, 11 nt, Human
cccuucuuuuu

SEQ ID NO: 1157046 - RNA, 21 nt, Human
cccuuccuaauuccacagcug

SEQ ID NO: 1157047 - RNA, 20 nt, Human
cccuuccuaauuccacagcu

SEQ ID NO: 1157048 - RNA, 19 nt, Human
cccuuccuaauuccacagc

SEQ ID NO: 1157049 - RNA, 14 nt, Human
cccuuccuaauucc

SEQ ID NO: 1157050 - RNA, 13 nt, Human
cccuuccuaauuc

SEQ ID NO: 1157051 - RNA, 11 nt, Human
cccuucauuug

SEQ ID NO: 1157052 - RNA, 22 nt, Human
cccuguucacucuacuuagcau

SEQ ID NO: 1157053 - RNA, 14 nt, Human
cccuguucacucua

SEQ ID NO: 1157054 - RNA, 13 nt, Human
cccuguucacucu

SEQ ID NO: 1157055 - RNA, 21 nt, Human
cccuggugcugccacacuuca

SEQ ID NO: 1157056 - RNA, 17 nt, Human
cccuggugcugccacac

SEQ ID NO: 1157057 - RNA, 23 nt, Human
cccugcuuugggcugcccuggug

SEQ ID NO: 1157058 - RNA, 23 nt, Human
cccugcacaaagcccuuccaugu

SEQ ID NO: 1157059 - RNA, 14 nt, Human
cccucccuucaacc

SEQ ID NO: 1157060 - RNA, 19 nt, Human
cccuccaucuaaacugccc

SEQ ID NO: 1157061 - RNA, 22 nt, Human
cccucauuccaccuucccaugc

SEQ ID NO: 1157062 - RNA, 19 nt, Human
cccucauagcccucacccu

SEQ ID NO: 1157063 - RNA, 15 nt, Human
cccucauagcccuca

SEQ ID NO: 1157064 - RNA, 13 nt, Human
cccucauagcccu

SEQ ID NO: 1157065 - RNA, 18 nt, Human
cccggaggggccuggcag

SEQ ID NO: 1157066 - RNA, 17 nt, Human
cccggaggggccuggca

SEQ ID NO: 1157067 - RNA, 23 nt, Human
cccgcucagcccucccugccccu

SEQ ID NO: 1157068 - RNA, 19 nt, Human
cccgcucagcccucccugc

SEQ ID NO: 1157069 - RNA, 22 nt, Human
ccccuuccuaauuccacagcug

SEQ ID NO: 1157070 - RNA, 21 nt, Human
ccccuuccuaauuccacagcu

SEQ ID NO: 1157071 - RNA, 20 nt, Human
ccccuuccuaauuccacagc

SEQ ID NO: 1157072 - RNA, 12 nt, Human
ccccuucccccu

SEQ ID NO: 1157073 - RNA, 14 nt, Human
ccccuuaccacugc

SEQ ID NO: 1157074 - RNA, 23 nt, Human
ccccuggcuuuucacugcuggcu

SEQ ID NO: 1157075 - RNA, 19 nt, Human
ccccagcccuccuuaucaa

SEQ ID NO: 1157076 - RNA, 17 nt, Human
cccaugucucgacucau

SEQ ID NO: 1157077 - RNA, 16 nt, Human
cccaugucucgacuca

SEQ ID NO: 1157078 - RNA, 19 nt, Human
cccagggugggaagggcua

SEQ ID NO: 1157079 - RNA, 20 nt, Human
cccagccuccaagcuccauc

SEQ ID NO: 1157080 - RNA, 18 nt, Human
cccagccuccaagcucca

SEQ ID NO: 1157081 - RNA, 23 nt, Human
cccagcccuccuuaucaaaggac

SEQ ID NO: 1157082 - RNA, 16 nt, Human
cccagaggcuggguga

SEQ ID NO: 1157083 - RNA, 16 nt, Human
ccauguuggccaggcu

SEQ ID NO: 1157084 - RNA, 14 nt, Human
ccaugcugccucca

SEQ ID NO: 1157085 - RNA, 16 nt, Human
ccaucgcugucaucuc

SEQ ID NO: 1157086 - RNA, 12 nt, Human
ccaggccugccu

SEQ ID NO: 1157087 - RNA, 17 nt, Human
ccagcuggguuggaaaa

SEQ ID NO: 1157088 - RNA, 16 nt, Human
ccagcuggguuggaaa

SEQ ID NO: 1157089 - RNA, 20 nt, Human
ccagcuggccgggagccuga

SEQ ID NO: 1157090 - RNA, 14 nt, Human
ccagcuggccggga

SEQ ID NO: 1157091 - RNA, 12 nt, Human
ccagcuggccgg

SEQ ID NO: 1157092 - RNA, 13 nt, Human
ccacaacacacag

SEQ ID NO: 1157093 - RNA, 16 nt, Human
ccaaguggcucccaca

SEQ ID NO: 1157094 - RNA, 13 nt, Human
ccaaguggcuccc

SEQ ID NO: 1157095 - RNA, 16 nt, Human
ccaaggcucugagcaa

SEQ ID NO: 1157096 - RNA, 14 nt, Human
ccaagcuccaucuc

SEQ ID NO: 1157097 - RNA, 22 nt, Human
ccaagccuacuuuugccauuga

SEQ ID NO: 1157098 - RNA, 23 nt, Human
ccaagccguggcuucccgcucag

SEQ ID NO: 1157099 - RNA, 21 nt, Human
ccaagccguggcuucccgcuc

SEQ ID NO: 1157100 - RNA, 17 nt, Human
ccaagccguggcuuccc

SEQ ID NO: 1157101 - RNA, 16 nt, Human
ccaagccguggcuucc

SEQ ID NO: 1157102 - RNA, 15 nt, Human
ccaagccguggcuuc

SEQ ID NO: 1157103 - RNA, 18 nt, Human
ccaacccuggcacccagg

SEQ ID NO: 1157104 - RNA, 18 nt, Human
cauuagcaguuugcuuug

SEQ ID NO: 1157105 - RNA, 17 nt, Human
cauuagcaguuugcuuu

SEQ ID NO: 1157106 - RNA, 20 nt, Human
caugucgccucugcauucag

SEQ ID NO: 1157107 - RNA, 18 nt, Human
caugucgccucugcauuc

SEQ ID NO: 1157108 - RNA, 15 nt, Human
caugucgccucugca

SEQ ID NO: 1157109 - RNA, 14 nt, Human
caugucgccucugc

SEQ ID NO: 1157110 - RNA, 22 nt, Human
caucucuucuggguuccuuccu

SEQ ID NO: 1157111 - RNA, 14 nt, Human
caucuccacuccag

SEQ ID NO: 1157112 - RNA, 13 nt, Human
caucucagcccac

SEQ ID NO: 1157113 - RNA, 20 nt, Human
cauccuccgccucccggguu

SEQ ID NO: 1157114 - RNA, 16 nt, Human
cauccuacaagacaca

SEQ ID NO: 1157115 - RNA, 21 nt, Human
cauccuaacuccaugucucug

SEQ ID NO: 1157116 - RNA, 14 nt, Human
cauccuaacuccau

SEQ ID NO: 1157117 - RNA, 17 nt, Human
cauccuacaagacacag

SEQ ID NO: 1157118 - RNA, 20 nt, Human
cauacuaauuauacccccug

SEQ ID NO: 1157119 - RNA, 19 nt, Human
cauaaucuggacuccucug

SEQ ID NO: 1157120 - RNA, 20 nt, Human
caguuaagccuuuggaaaca

SEQ ID NO: 1157121 - RNA, 17 nt, Human
caguuaagccuuuggaa

SEQ ID NO: 1157122 - RNA, 15 nt, Human
caguuaagccuuugg

SEQ ID NO: 1157123 - RNA, 14 nt, Human
caguuaagccuuug

SEQ ID NO: 1157124 - RNA, 16 nt, Human
cagugggacagggcau

SEQ ID NO: 1157125 - RNA, 11 nt, Human
cagugggaacu

SEQ ID NO: 1157126 - RNA, 19 nt, Human
cugccccuccucucugccc

SEQ ID NO: 1157127 - RNA, 20 nt, Human
cugccccuccucucugcccu

SEQ ID NO: 1157128 - RNA, 18 nt, Human
cugccccuccucucugcc

SEQ ID NO: 1157129 - RNA, 17 nt, Human
cugccccuccucucugc

SEQ ID NO: 1157130 - RNA, 17 nt, Human
cugccccucccuucaac

SEQ ID NO: 1157131 - RNA, 14 nt, Human
cugccccucccuuc

SEQ ID NO: 1157132 - RNA, 13 nt, Human
cugccccccagcc

SEQ ID NO: 1157133 - RNA, 22 nt, Human
cugccagucccccugccccagg

SEQ ID NO: 1157134 - RNA, 21 nt, Human
cugccagucccccugccccag

SEQ ID NO: 1157135 - RNA, 20 nt, Human
cugccagucccccugcccca

SEQ ID NO: 1157136 - RNA, 17 nt, Human
cugccagucccccugcc

SEQ ID NO: 1157137 - RNA, 19 nt, Human
cugcaacuuguaaaugugg

SEQ ID NO: 1157138 - RNA, 18 nt, Human
cugcaacuuguaaaugug

SEQ ID NO: 1157139 - RNA, 22 nt, Human
cugcaaccuucgccaccugggu

SEQ ID NO: 1157140 - RNA, 20 nt, Human
cugcaaccuucgccaccugg

SEQ ID NO: 1157141 - RNA, 19 nt, Human
cugcaaccuucgccaccug

SEQ ID NO: 1157142 - RNA, 17 nt, Human
cugcaaccuucgccacc

SEQ ID NO: 1157143 - RNA, 18 nt, Human
cugcaaagcccagcuuga

SEQ ID NO: 1157144 - RNA, 23 nt, Human
cugcugagucccaggcugagccu

SEQ ID NO: 1157145 - RNA, 19 nt, Human
cugcugagucccaggcuga

SEQ ID NO: 1157146 - RNA, 22 nt, Human
cugugacuucagcucuguuuua

SEQ ID NO: 1157147 - RNA, 17 nt, Human
cugugacuucagcucug

SEQ ID NO: 1157148 - RNA, 15 nt, Human
cuguucacucuacuu

SEQ ID NO: 1157149 - RNA, 17 nt, Human
cuguugcugccucaugc

SEQ ID NO: 1157150 - RNA, 16 nt, Human
cuguugcugccucaug

SEQ ID NO: 1157151 - RNA, 15 nt, Human
cuguugcugccucau

SEQ ID NO: 1157152 - RNA, 20 nt, Human
cuuaaaauauuccugcauuu

SEQ ID NO: 1157153 - RNA, 18 nt, Human
cuuaaaauauuccugcau

SEQ ID NO: 1157154 - RNA, 20 nt, Human
cuuccaugucgccucugcau

SEQ ID NO: 1157155 - RNA, 19 nt, Human
cuuccaugucgccucugca

SEQ ID NO: 1157156 - RNA, 18 nt, Human
cuuccaugucgccucugc

SEQ ID NO: 1157157 - RNA, 17 nt, Human
cuuccaugucgccucug

SEQ ID NO: 1157158 - RNA, 16 nt, Human
cuuccaugucgccucu

SEQ ID NO: 1157159 - RNA, 15 nt, Human
cuuccaugucgccuc

SEQ ID NO: 1157160 - RNA, 22 nt, Human
cuucaucucccaaagugcuggg

SEQ ID NO: 1157161 - RNA, 18 nt, Human
cuucaguuaagccuuugg

SEQ ID NO: 1157162 - RNA, 17 nt, Human
cuucaguuaagccuuug

SEQ ID NO: 1157163 - RNA, 19 nt, Human
cuuuuauuuagcaccaggg

SEQ ID NO: 1157164 - RNA, 16 nt, Human
cuuugagcuuaagaau

SEQ ID NO: 1157165 - RNA, 17 nt, Human
cuuucuaaugugugaau

SEQ ID NO: 1157166 - RNA, 22 nt, Human
cuuucggggagaggcugaggac

SEQ ID NO: 1157167 - RNA, 20 nt, Human
gaacucugacaacagacuuc

SEQ ID NO: 1157168 - RNA, 20 nt, Human
gaauauuagugaccucagcu

SEQ ID NO: 1157169 - RNA, 15 nt, Human
gacagaagcagcucu

SEQ ID NO: 1157170 - RNA, 13 nt, Human
gaccauacuaauu

SEQ ID NO: 1157171 - RNA, 16 nt, Human
gacagaagcagcucuu

SEQ ID NO: 1157172 - RNA, 23 nt, Human
gacuguacuccucccaggcgccc

SEQ ID NO: 1157173 - RNA, 16 nt, Human
gacucugccuccucuu

SEQ ID NO: 1157174 - RNA, 12 nt, Human
gacucugccucc

SEQ ID NO: 1157175 - RNA, 22 nt, Human
gacucaccucccccaucucuuc

SEQ ID NO: 1157176 - RNA, 15 nt, Human
gacucaccuccccca

SEQ ID NO: 1157177 - RNA, 21 nt, Human
gagcgcccacuagacccacug

SEQ ID NO: 1157178 - RNA, 17 nt, Human
gaggcaucgcaauguaa

SEQ ID NO: 1157179 - RNA, 20 nt, Human
gauuuuuuacagcugccugc

SEQ ID NO: 1157180 - RNA, 20 nt, Human
gauuauaggcaccuaccacc

SEQ ID NO: 1157181 - RNA, 21 nt, Human
gauguauguugaagccuuugu

SEQ ID NO: 1157182 - RNA, 20 nt, Human
gauguauguugaagccuuug

SEQ ID NO: 1157183 - RNA, 21 nt, Human
gcacagugcaucucagcccac

SEQ ID NO: 1157184 - RNA, 20 nt, Human
gcacagugcaucucagccca

SEQ ID NO: 1157185 - RNA, 22 nt, Human
gcaccuaccaccacgcccggcu

SEQ ID NO: 1157186 - RNA, 21 nt, Human
gcaccuaccaccacgcccggc

SEQ ID NO: 1157187 - RNA, 18 nt, Human
gcacuuggagacuuguau

SEQ ID NO: 1157188 - RNA, 14 nt, Human
gccaccacgcccgg

SEQ ID NO: 1157189 - RNA, 13 nt, Human
gccaccacgcccg

SEQ ID NO: 1157190 - RNA, 21 nt, Human
gccacuugaugacccccaacc

SEQ ID NO: 1157191 - RNA, 17 nt, Human
gccacugccucuuccuc

SEQ ID NO: 1157192 - RNA, 16 nt, Human
gccacugccucuuccu

SEQ ID NO: 1157193 - RNA, 13 nt, Human
gccacugccucuu

SEQ ID NO: 1157194 - RNA, 12 nt, Human
gccacugccucu

SEQ ID NO: 1157195 - RNA, 15 nt, Human
gccagaauuucaaac

SEQ ID NO: 1157196 - RNA, 18 nt, Human
gccauuccccgucucugg

SEQ ID NO: 1157197 - RNA, 17 nt, Human
gccauuccccgucucug

SEQ ID NO: 1157198 - RNA, 23 nt, Human
gcccacuagacccacuggacuca

SEQ ID NO: 1157199 - RNA, 17 nt, Human
gcccacuagacccacug

SEQ ID NO: 1157200 - RNA, 14 nt, Human
gcccccucugcccu

SEQ ID NO: 1157201 - RNA, 16 nt, Human
gcccugcugaguccca

SEQ ID NO: 1157202 - RNA, 23 nt, Human
gcccugcugagucccaggcugag

SEQ ID NO: 1157203 - RNA, 22 nt, Human
gcccugcugagucccaggcuga

SEQ ID NO: 1157204 - RNA, 21 nt, Human
gcccugcugagucccaggcug

SEQ ID NO: 1157205 - RNA, 22 nt, Human
gccucuuccucccucauuccac

SEQ ID NO: 1157206 - RNA, 17 nt, Human
gccugccuguucccauu

SEQ ID NO: 1157207 - RNA, 21 nt, Human
gcuauugucaccagggcugga

SEQ ID NO: 1157208 - RNA, 20 nt, Human
gcuauugucaccagggcugg

SEQ ID NO: 1157209 - RNA, 16 nt, Human
gcuauugucaccaggg

SEQ ID NO: 1157210 - RNA, 22 nt, Human
gcucuacagcuaaucagcauuc

SEQ ID NO: 1157211 - RNA, 20 nt, Human
gcucuacagcuaaucagcau

SEQ ID NO: 1157212 - RNA, 22 nt, Human
gcuccugccaccacgcccggcu

SEQ ID NO: 1157213 - RNA, 21 nt, Human
gcucugagcaaauguggcucc

SEQ ID NO: 1157214 - RNA, 20 nt, Human
gcucugagcaaauguggcuc

SEQ ID NO: 1157215 - RNA, 23 nt, Human
gcucugucgcccaggcuggagug

SEQ ID NO: 1157216 - RNA, 19 nt, Human
gcucugucgcccaggcugg

SEQ ID NO: 1157217 - RNA, 18 nt, Human
gcugggauuacaggugug

SEQ ID NO: 1157218 - RNA, 17 nt, Human
gcugggauuacaggugu

SEQ ID NO: 1157219 - RNA, 23 nt, Human
gcugggauuacaggcuccugcca

SEQ ID NO: 1157220 - RNA, 22 nt, Human
gcugggauuacaggcuccugcc

SEQ ID NO: 1157221 - RNA, 19 nt, Human
gcuguauuagucacagaga

SEQ ID NO: 1157222 - RNA, 23 nt, Human
gcuucccgcucagcccucccugc

SEQ ID NO: 1157223 - RNA, 18 nt, Human
gcuucccgcucagcccuc

SEQ ID NO: 1157224 - RNA, 17 nt, Human
gcuucccgcucagcccu

SEQ ID NO: 1157225 - RNA, 16 nt, Human
gcuucccgcucagccc

SEQ ID NO: 1157226 - RNA, 15 nt, Human
gcuucccgcucagcc

SEQ ID NO: 1157227 - RNA, 21 nt, Human
ggacccggaggggccuggcag

SEQ ID NO: 1157228 - RNA, 20 nt, Human
ggacccggaggggccuggca

SEQ ID NO: 1157229 - RNA, 21 nt, Human
ggaccccgagccuggcuccaa

SEQ ID NO: 1157230 - RNA, 14 nt, Human
ggagagagacucca

SEQ ID NO: 1157231 - RNA, 16 nt, Human
ggagacugucucaaga

SEQ ID NO: 1157232 - RNA, 13 nt, Human
ggagaacuagaga

SEQ ID NO: 1157233 - RNA, 18 nt, Human
ggacuuuuauuuccagug

SEQ ID NO: 1157234 - RNA, 17 nt, Human
ggacuuagcugggagaa

SEQ ID NO: 1157235 - RNA, 16 nt, Human
ggacuaggguccuggg

SEQ ID NO: 1157236 - RNA, 22 nt, Human
ggaggaaaaccaagccguggcu

SEQ ID NO: 1157237 - RNA, 21 nt, Human
ggaggaaaaccaagccguggc

SEQ ID NO: 1157238 - RNA, 20 nt, Human
ggaggaaaaccaagccgugg

SEQ ID NO: 1157239 - RNA, 22 nt, Human
ggcagccgugccuucagcucua

SEQ ID NO: 1157240 - RNA, 21 nt, Human
ggcagccgugccuucagcucu

SEQ ID NO: 1157241 - RNA, 19 nt, Human
ggcagccgugccuucagcu

SEQ ID NO: 1157242 - RNA, 18 nt, Human
ggcagccgugccuucagc

SEQ ID NO: 1157243 - RNA, 21 nt, Human
ggccaaggaugccccgucccc

SEQ ID NO: 1157244 - RNA, 19 nt, Human
ggccagguggccacuccag

SEQ ID NO: 1157245 - RNA, 17 nt, Human
ggcccgacagccuggca

SEQ ID NO: 1157246 - RNA, 16 nt, Human
ggcccgacagccuggc

SEQ ID NO: 1157247 - RNA, 23 nt, Human
ggcccuuccucuccacugccuuc

SEQ ID NO: 1157248 - RNA, 22 nt, Human
ggcccuuccucuccacugccuu

SEQ ID NO: 1157249 - RNA, 19 nt, Human
ggcccuuccucuccacugc

SEQ ID NO: 1157250 - RNA, 17 nt, Human
ggcuggcccugcccugg

SEQ ID NO: 1157251 - RNA, 16 nt, Human
ggcuggcccugcccug

SEQ ID NO: 1157252 - RNA, 15 nt, Human
ggcuggcccugcccu

SEQ ID NO: 1157253 - RNA, 14 nt, Human
ggcuggcccugccc

SEQ ID NO: 1157254 - RNA, 13 nt, Human
ggcuggcccugcc

SEQ ID NO: 1157255 - RNA, 13 nt, Human
ggcuccugccacc

SEQ ID NO: 1157256 - RNA, 12 nt, Human
ggcuccugccac

SEQ ID NO: 1157257 - RNA, 17 nt, Human
ggcuccucccggugccc

SEQ ID NO: 1157258 - RNA, 20 nt, Human
aaaaagcuccaaaugcagcu

SEQ ID NO: 1157259 - RNA, 13 nt, Human
gggagggccuggg

SEQ ID NO: 1157260 - RNA, 19 nt, Human
aaaaccaagccguggcuuc

SEQ ID NO: 1157261 - RNA, 18 nt, Human
ggugcaaaguucccuacu

SEQ ID NO: 1157262 - RNA, 21 nt, Human
ggugauccacucgccuucauc

SEQ ID NO: 1157263 - RNA, 17 nt, Human
aaagaauggaaggugga

SEQ ID NO: 1157264 - RNA, 18 nt, Human
gguauaaguggugugugu

SEQ ID NO: 1157265 - RNA, 21 nt, Human
aaacugcccccucugcccugc

SEQ ID NO: 1157266 - RNA, 20 nt, Human
aaacugcccccucugcccug

SEQ ID NO: 1157267 - RNA, 19 nt, Human
aaacugcccccucugcccu

SEQ ID NO: 1157268 - RNA, 17 nt, Human
aaacugcccccucugcc

SEQ ID NO: 1157269 - RNA, 13 nt, Human
aaacugcccccuc

SEQ ID NO: 1157270 - RNA, 12 nt, Human
aaacugcccccu

SEQ ID NO: 1157271 - RNA, 12 nt, Human
aaacgugaaaau

SEQ ID NO: 1157272 - RNA, 23 nt, Human
aaacggccucacuaggcuucugg

SEQ ID NO: 1157273 - RNA, 16 nt, Human
aaaccaagccguggcu

SEQ ID NO: 1157274 - RNA, 14 nt, Human
aaaccaagccgugg

SEQ ID NO: 1157275 - RNA, 18 nt, Human
caagaauagaugcugacu

SEQ ID NO: 1157276 - RNA, 21 nt, Human
caacucccugccccccagccc

SEQ ID NO: 1157277 - RNA, 20 nt, Human
caacucccugccccccagcc

SEQ ID NO: 1157278 - RNA, 19 nt, Human
caacucccugccccccagc

SEQ ID NO: 1157279 - RNA, 18 nt, Human
caagcaagaaacacuggg

SEQ ID NO: 1157280 - RNA, 13 nt, Human
caagcaagaaaca

SEQ ID NO: 1157281 - RNA, 18 nt, Human
caagcaccuagccucgcu

SEQ ID NO: 1157282 - RNA, 17 nt, Human
caagcuccaucuccacu

SEQ ID NO: 1157283 - RNA, 21 nt, Human
caagcuccaucuccacuccag

SEQ ID NO: 1157284 - RNA, 16 nt, Human
cacuccagaccccugg

SEQ ID NO: 1157285 - RNA, 14 nt, Human
cacuccagaccccu

SEQ ID NO: 1157286 - RNA, 16 nt, Human
cacuagacccacugga

SEQ ID NO: 1157287 - RNA, 17 nt, Human
cacuccagaccccuggc

SEQ ID NO: 1157288 - RNA, 13 nt, Human
auuacagguguga

SEQ ID NO: 1157289 - RNA, 19 nt, Human
auuacaggcuccugccacc

SEQ ID NO: 1157290 - RNA, 17 nt, Human
auuacaggcuccugcca

SEQ ID NO: 1157291 - RNA, 16 nt, Human
auuacaggcuccugcc

SEQ ID NO: 1157292 - RNA, 15 nt, Human
auuacaggcuccugc

SEQ ID NO: 1157293 - RNA, 15 nt, Human
auuaauggaaauguu

SEQ ID NO: 1157294 - RNA, 15 nt, Human
cagauccccaagccu

SEQ ID NO: 1157295 - RNA, 14 nt, Human
cagauccccaagcc

SEQ ID NO: 1157296 - RNA, 18 nt, Human
cagcacgggggccaagga

SEQ ID NO: 1157297 - RNA, 14 nt, Human
cagacagcccucca

SEQ ID NO: 1157298 - RNA, 21 nt, Human
caggcgugagccaccgugccu

SEQ ID NO: 1157299 - RNA, 20 nt, Human
cagcgcuggccgggaccccg

SEQ ID NO: 1157300 - RNA, 15 nt, Human
cauggccagguggcc

SEQ ID NO: 1157301 - RNA, 14 nt, Human
cauggccgugaacu

SEQ ID NO: 1157302 - RNA, 20 nt, Human
caugggaaaugucaacaagu

SEQ ID NO: 1157303 - RNA, 18 nt, Human
cauguuggccaggcuggu

SEQ ID NO: 1157304 - RNA, 21 nt, Human
ccaauggagacugucucaaga

SEQ ID NO: 1157305 - RNA, 21 nt, Human
caucuaaacugcccccucugc

SEQ ID NO: 1157306 - RNA, 15 nt, Human
caucuaaacugcccc

SEQ ID NO: 1157307 - RNA, 22 nt, Human
ccaggcugagccucagucuccc

SEQ ID NO: 1157308 - RNA, 19 nt, Human
ccaggcugagccucagucu

SEQ ID NO: 1157309 - RNA, 17 nt, Human
ccaggcugagccucagu

SEQ ID NO: 1157310 - RNA, 16 nt, Human
ccaggcugagccucag

SEQ ID NO: 1157311 - RNA, 14 nt, Human
ccaggcugagccuc

SEQ ID NO: 1157312 - RNA, 13 nt, Human
ccaggcugagccu

SEQ ID NO: 1157313 - RNA, 16 nt, Human
cccaagccuggcaagg

SEQ ID NO: 1157314 - RNA, 23 nt, Human
cccaagccuacuuuugccauuga

SEQ ID NO: 1157315 - RNA, 21 nt, Human
cccaagaauagaugcugacug

SEQ ID NO: 1157316 - RNA, 20 nt, Human
cccaagaauagaugcugacu

SEQ ID NO: 1157317 - RNA, 20 nt, Human
cccaacuaauuuuuguauuu

SEQ ID NO: 1157318 - RNA, 23 nt, Human
cccaaccugcucuccucuugcca

SEQ ID NO: 1157319 - RNA, 21 nt, Human
cccaaccugcucuccucuugc

SEQ ID NO: 1157320 - RNA, 14 nt, Human
cccaaccugcucuc

SEQ ID NO: 1157321 - RNA, 20 nt, Human
ccaugucucugagcauuaga

SEQ ID NO: 1157322 - RNA, 15 nt, Human
ccaugucucgacuca

SEQ ID NO: 1157323 - RNA, 14 nt, Human
ccaugucucgacuc

SEQ ID NO: 1157324 - RNA, 15 nt, Human
cccuccucucugccc

SEQ ID NO: 1157325 - RNA, 22 nt, Human
cccucgaggcggaucuuuggac

SEQ ID NO: 1157326 - RNA, 23 nt, Human
cccucgaggcggaucuuuggaca

SEQ ID NO: 1157327 - RNA, 14 nt, Human
cccuccucucugcc

SEQ ID NO: 1157328 - RNA, 18 nt, Human
cccuccuccuggacuccu

SEQ ID NO: 1157329 - RNA, 16 nt, Human
cccuccuccuggacuc

SEQ ID NO: 1157330 - RNA, 11 nt, Human
cccuccuccug

SEQ ID NO: 1157331 - RNA, 23 nt, Human
cccugccccucccuucaaccauu

SEQ ID NO: 1157332 - RNA, 19 nt, Human
cccugccccucccuucaac

SEQ ID NO: 1157333 - RNA, 18 nt, Human
cccugccccucccuucaa

SEQ ID NO: 1157334 - RNA, 17 nt, Human
cccugccccucccuuca

SEQ ID NO: 1157335 - RNA, 20 nt, Human
cccugccccccagcccuccu

SEQ ID NO: 1157336 - RNA, 15 nt, Human
cccugccccccagcc

SEQ ID NO: 1157337 - RNA, 14 nt, Human
cccugccccccagc

SEQ ID NO: 1157338 - RNA, 19 nt, Human
cccuggauccaucaggcca

SEQ ID NO: 1157339 - RNA, 23 nt, Human
cccugcccugguuuccugcccug

SEQ ID NO: 1157340 - RNA, 22 nt, Human
cccugcccugguuuccugcccu

SEQ ID NO: 1157341 - RNA, 12 nt, Human
cccugcccuggu

SEQ ID NO: 1157342 - RNA, 11 nt, Human
cccugcccugg

SEQ ID NO: 1157343 - RNA, 20 nt, Human
cccuggcucccacaggcccu

SEQ ID NO: 1157344 - RNA, 20 nt, Human
ccuaaugcgcaggcuggccc

SEQ ID NO: 1157345 - RNA, 15 nt, Human
ccgaccaccugccca

SEQ ID NO: 1157346 - RNA, 19 nt, Human
ccucugccugucuccccca

SEQ ID NO: 1157347 - RNA, 15 nt, Human
ccucugccugucucc

SEQ ID NO: 1157348 - RNA, 14 nt, Human
ccucugcccugcgg

SEQ ID NO: 1157349 - RNA, 13 nt, Human
ccucugcccugcg

SEQ ID NO: 1157350 - RNA, 12 nt, Human
ccucugcccugc

SEQ ID NO: 1157351 - RNA, 11 nt, Human
ccucugcccug

SEQ ID NO: 1157352 - RNA, 16 nt, Human
ccuccgccucccgggu

SEQ ID NO: 1157353 - RNA, 13 nt, Human
ccuccgccucccg

SEQ ID NO: 1157354 - RNA, 18 nt, Human
ccucagccuccugaguag

SEQ ID NO: 1157355 - RNA, 18 nt, Human
cggcuaauuuuuguauuu

SEQ ID NO: 1157356 - RNA, 15 nt, Human
cggaggggccuggca

SEQ ID NO: 1157357 - RNA, 16 nt, Human
cggaggggccuggcag

SEQ ID NO: 1157358 - RNA, 20 nt, Human
cgggcugggagcucugcaga

SEQ ID NO: 1157359 - RNA, 16 nt, Human
cgggcugggagcucug

SEQ ID NO: 1157360 - RNA, 20 nt, Human
cgggccuggagaacuagaga

SEQ ID NO: 1157361 - RNA, 16 nt, Human
cgggccuggagaacua

SEQ ID NO: 1157362 - RNA, 21 nt, Human
cgcucuuggcagguacucagc

SEQ ID NO: 1157363 - RNA, 20 nt, Human
cgcucugucgcccaggcugg

SEQ ID NO: 1157364 - RNA, 22 nt, Human
cgcaggcuggcccugcccuggu

SEQ ID NO: 1157365 - RNA, 21 nt, Human
cgagucucuucuccacuggau

SEQ ID NO: 1157366 - RNA, 20 nt, Human
cgagucucuucuccacugga

SEQ ID NO: 1157367 - RNA, 18 nt, Human
cgagucucuucuccacug

SEQ ID NO: 1157368 - RNA, 17 nt, Human
cgagucucuucuccacu

SEQ ID NO: 1157369 - RNA, 14 nt, Human
ccuuuauucuggca

SEQ ID NO: 1157370 - RNA, 21 nt, Human
ccuuccucuccacugccuucg

SEQ ID NO: 1157371 - RNA, 20 nt, Human
ccuuccucuccacugccuuc

SEQ ID NO: 1157372 - RNA, 17 nt, Human
ccuuccucuccacugcc

SEQ ID NO: 1157373 - RNA, 16 nt, Human
ccuuccucuccacugc

SEQ ID NO: 1157374 - RNA, 15 nt, Human
ccuuccucuccacug

SEQ ID NO: 1157375 - RNA, 14 nt, Human
ccuuccucuccacu

SEQ ID NO: 1157376 - RNA, 21 nt, Human
ccuuccuaauuccacagcugc

SEQ ID NO: 1157377 - RNA, 20 nt, Human
ccuuccuaauuccacagcug

SEQ ID NO: 1157378 - RNA, 19 nt, Human
ccuuccuaauuccacagcu

SEQ ID NO: 1157379 - RNA, 18 nt, Human
ccuuccuaauuccacagc

SEQ ID NO: 1157380 - RNA, 19 nt, Human
ccuucccccuccaauccca

SEQ ID NO: 1157381 - RNA, 15 nt, Human
ccuucccaugcccug

SEQ ID NO: 1157382 - RNA, 18 nt, Human
ccuuaucaaaggacacca

SEQ ID NO: 1157383 - RNA, 14 nt, Human
ccuuaucaaaggac

SEQ ID NO: 1157384 - RNA, 13 nt, Human
ccuuaucaaagga

SEQ ID NO: 1157385 - RNA, 20 nt, Human
ccuuaggugauccacucgcc

SEQ ID NO: 1157386 - RNA, 16 nt, Human
ccuguucugcuuuccu

SEQ ID NO: 1157387 - RNA, 12 nt, Human
ccuguucccauu

SEQ ID NO: 1157388 - RNA, 21 nt, Human
ccuguucacucuacuuagcau

SEQ ID NO: 1157389 - RNA, 17 nt, Human
cuauccuacuuccccuu

SEQ ID NO: 1157390 - RNA, 18 nt, Human
cuaucaugucaaacguga

SEQ ID NO: 1157391 - RNA, 14 nt, Human
cucagguugucuga

SEQ ID NO: 1157392 - RNA, 22 nt, Human
cucagguugucugaagucacug

SEQ ID NO: 1157393 - RNA, 20 nt, Human
cuccuuucacaaccuucugu

SEQ ID NO: 1157394 - RNA, 17 nt, Human
cuccuuucacaaccuuc

SEQ ID NO: 1157395 - RNA, 16 nt, Human
cuccuuucacaaccuu

SEQ ID NO: 1157396 - RNA, 13 nt, Human
cuccuuucacaac

SEQ ID NO: 1157397 - RNA, 14 nt, Human
cuccuggggguucu

SEQ ID NO: 1157398 - RNA, 18 nt, Human
cuccucuugccacugccu

SEQ ID NO: 1157399 - RNA, 16 nt, Human
cuccucuugccacugc

SEQ ID NO: 1157400 - RNA, 15 nt, Human
cuccucuugccacug

SEQ ID NO: 1157401 - RNA, 12 nt, Human
cuccucuugcca

SEQ ID NO: 1157402 - RNA, 15 nt, Human
cuccucuguccaggc

SEQ ID NO: 1157403 - RNA, 12 nt, Human
cuccucugucca

SEQ ID NO: 1157404 - RNA, 13 nt, Human
cuccuaccuggua

SEQ ID NO: 1157405 - RNA, 20 nt, Human
cucccugaaguaagcaaaga

SEQ ID NO: 1157406 - RNA, 21 nt, Human
cucccacaggcccuuccucuc

SEQ ID NO: 1157407 - RNA, 20 nt, Human
cucccacaggcccuuccucu

SEQ ID NO: 1157408 - RNA, 16 nt, Human
cucccacaggcccuuc

SEQ ID NO: 1157409 - RNA, 15 nt, Human
cucccacaggcccuu

SEQ ID NO: 1157410 - RNA, 16 nt, Human
auugcauuuccugaca

SEQ ID NO: 1157411 - RNA, 19 nt, Human
auuccagagaguggcuccu

SEQ ID NO: 1157412 - RNA, 18 nt, Human
auuccagagaguggcucc

SEQ ID NO: 1157413 - RNA, 13 nt, Human
auuccacagcugc

SEQ ID NO: 1157414 - RNA, 12 nt, Human
auuccacagcug

SEQ ID NO: 1157415 - RNA, 11 nt, Human
uuuuuguauuu

SEQ ID NO: 1157416 - RNA, 22 nt, Human
uuuuugggaaaagaaaagucaa

SEQ ID NO: 1157417 - RNA, 17 nt, Human
auguuggccaggcuggu

SEQ ID NO: 1157418 - RNA, 15 nt, Human
auguugaagccuuug

SEQ ID NO: 1157419 - RNA, 18 nt, Human
augugauccuuuuggagu

SEQ ID NO: 1157420 - RNA, 14 nt, Human
uuugggcugcccug

SEQ ID NO: 1157421 - RNA, 21 nt, Human
uuucagaaagaaguggggaca

SEQ ID NO: 1157422 - RNA, 14 nt, Human
auggaaggggcuga

SEQ ID NO: 1157423 - RNA, 16 nt, Human
augcgugugugugugu

SEQ ID NO: 1157424 - RNA, 12 nt, Human
augcgugugugu

SEQ ID NO: 1157425 - RNA, 22 nt, Human
augcgcaggcuggcccugcccu

SEQ ID NO: 1157426 - RNA, 20 nt, Human
augcgcaggcuggcccugcc

SEQ ID NO: 1157427 - RNA, 18 nt, Human
augcgcaggcuggcccug

SEQ ID NO: 1157428 - RNA, 14 nt, Human
augcgcaggcuggc

SEQ ID NO: 1157429 - RNA, 13 nt, Human
augcgcaggcugg

SEQ ID NO: 1157430 - RNA, 21 nt, Human
augccccgucccccucuggcu

SEQ ID NO: 1157431 - RNA, 22 nt, Human
uuuaaggguuuguggaaaauga

SEQ ID NO: 1157432 - RNA, 20 nt, Human
uuuaaggguuuguggaaaau

SEQ ID NO: 1157433 - RNA, 17 nt, Human
uuuaaggguuuguggaa

SEQ ID NO: 1157434 - RNA, 18 nt, Human
augcagagguccacaaca

SEQ ID NO: 1157435 - RNA, 17 nt, Human
augcagagguccacaac

SEQ ID NO: 1157436 - RNA, 22 nt, Human
uugugaugucccaacuuguaaa

SEQ ID NO: 1157437 - RNA, 18 nt, Human
uugugaugucccaacuug

SEQ ID NO: 1157438 - RNA, 21 nt, Human
augagguacaaccuguucugc

SEQ ID NO: 1157439 - RNA, 15 nt, Human
uuggaaaauaaauca

SEQ ID NO: 1157440 - RNA, 12 nt, Human
uuggaaaauaaa

SEQ ID NO: 1157441 - RNA, 16 nt, Human
uugcuuuguaugcacu

SEQ ID NO: 1157442 - RNA, 13 nt, Human
uugcuuuguaugc

SEQ ID NO: 1157443 - RNA, 10 nt, Human
uugagacaga

SEQ ID NO: 1157444 - RNA, 17 nt, Human
aucccaggauguacaag

SEQ ID NO: 1157445 - RNA, 17 nt, Human
auccaggguggugguga

SEQ ID NO: 1157446 - RNA, 22 nt, Human
uuccuuuuaaaacacuuccaua

SEQ ID NO: 1157447 - RNA, 21 nt, Human
uuccuuuuaaaacacuuccau

SEQ ID NO: 1157448 - RNA, 20 nt, Human
uuccuuuuaaaacacuucca

SEQ ID NO: 1157449 - RNA, 20 nt, Human
auauuuucaacgcagcccug

SEQ ID NO: 1157450 - RNA, 19 nt, Human
auauuuucaacgcagcccu

SEQ ID NO: 1157451 - RNA, 15 nt, Human
uucagaaagaagugg

SEQ ID NO: 1157452 - RNA, 19 nt, Human
uucacugcuggcugccuua

SEQ ID NO: 1157453 - RNA, 18 nt, Human
uucacugcuggcugccuu

SEQ ID NO: 1157454 - RNA, 17 nt, Human
uucacugcuggcugccu

SEQ ID NO: 1157455 - RNA, 16 nt, Human
uucacugcuggcugcc

SEQ ID NO: 1157456 - RNA, 15 nt, Human
uucacugcuggcugc

SEQ ID NO: 1157457 - RNA, 13 nt, Human
uucacugcuggcu

SEQ ID NO: 1157458 - RNA, 22 nt, Human
auaggcaccuaccaccacgccc

SEQ ID NO: 1157459 - RNA, 22 nt, Human
uucaccauguuggccaggcugg

SEQ ID NO: 1157460 - RNA, 22 nt, Human
uucaccauguuggccaggcugc

SEQ ID NO: 1157461 - RNA, 22 nt, Human
uucaagugauucucaugccuca

SEQ ID NO: 1157462 - RNA, 20 nt, Human
uucaagugauucucaugccu

SEQ ID NO: 1157463 - RNA, 15 nt, Human
uuauuuaguauuuau

SEQ ID NO: 1157464 - RNA, 17 nt, Human
uuauuuagcaccaggga

SEQ ID NO: 1157465 - RNA, 13 nt, Human
uuagaaccuuucu

SEQ ID NO: 1157466 - RNA, 14 nt, Human
uuacagcugccugc

SEQ ID NO: 1157467 - RNA, 13 nt, Human
uuacagcugccug

SEQ ID NO: 1157468 - RNA, 16 nt, Human
auaaaauuaaagcuga

SEQ ID NO: 1157469 - RNA, 13 nt, Human
aguuggcuucuaa

SEQ ID NO: 1157470 - RNA, 13 nt, Human
uguuuggagacag

SEQ ID NO: 1157471 - RNA, 11 nt, Human
ugugugugugc

SEQ ID NO: 1157472 - RNA, 14 nt, Human
agugagggauuauc

SEQ ID NO: 1157473 - RNA, 17 nt, Human
agucucuucuccacugg

SEQ ID NO: 1157474 - RNA, 18 nt, Human
agucucuucuccacugga

SEQ ID NO: 1157475 - RNA, 16 nt, Human
agucucuucuccacug

SEQ ID NO: 1157476 - RNA, 15 nt, Human
agucucuucuccacu

SEQ ID NO: 1157477 - RNA, 14 nt, Human
agucucuucuccac

SEQ ID NO: 1157478 - RNA, 13 nt, Human
agucucuucucca

SEQ ID NO: 1157479 - RNA, 12 nt, Human
aguagagacagg

SEQ ID NO: 1157480 - RNA, 14 nt, Human
uguagagcuucugg

SEQ ID NO: 1157481 - RNA, 19 nt, Human
uguaaauaaagaacuagca

SEQ ID NO: 1157482 - RNA, 20 nt, Human
ugguuuccugcccugggagg

SEQ ID NO: 1157483 - RNA, 15 nt, Human
ugguuuccugcccug

SEQ ID NO: 1157484 - RNA, 14 nt, Human
ugguuuccugcccu

SEQ ID NO: 1157485 - RNA, 13 nt, Human
ugguuuccugccc

SEQ ID NO: 1157486 - RNA, 12 nt, Human
ugguuuccugcc

SEQ ID NO: 1157487 - RNA, 21 nt, Human
ugguggagaggcccggccucu

SEQ ID NO: 1157488 - RNA, 18 nt, Human
uggugcugccacacuuca

SEQ ID NO: 1157489 - RNA, 13 nt, Human
uggugcugccaca

SEQ ID NO: 1157490 - RNA, 17 nt, Human
ugguagcuuuucccuuc

SEQ ID NO: 1157491 - RNA, 21 nt, Human
aggggaauaaacuguugaguc

SEQ ID NO: 1157492 - RNA, 15 nt, Human
uggggaggggcugug

SEQ ID NO: 1157493 - RNA, 17 nt, Human
agggcauggccaggugg

SEQ ID NO: 1157494 - RNA, 16 nt, Human
agggcacugguggccc

SEQ ID NO: 1157495 - RNA, 14 nt, Human
agggcacugguggc

SEQ ID NO: 1157496 - RNA, 22 nt, Human
ugggccccaguuguauuuauuu

SEQ ID NO: 1157497 - RNA, 18 nt, Human
ugggccccaguuguauuu

SEQ ID NO: 1157498 - RNA, 18 nt, Human
ugggagacugcugaguca

SEQ ID NO: 1157499 - RNA, 13 nt, Human
ugggacuggccuc

SEQ ID NO: 1157500 - RNA, 21 nt, Human
agggaauuucuucaacucccu

SEQ ID NO: 1157501 - RNA, 22 nt, Human
agggaaggggacaaggacuagg

SEQ ID NO: 1157502 - RNA, 13 nt, Human
agggaaggggaca

SEQ ID NO: 1157503 - RNA, 15 nt, Human
aggcccggccucuca

SEQ ID NO: 1157504 - RNA, 14 nt, Human
aggcccggccucuc

SEQ ID NO: 1157505 - RNA, 13 nt, Human
aggcccggccucu

SEQ ID NO: 1157506 - RNA, 13 nt, Human
uggauggaagggg

SEQ ID NO: 1157507 - RNA, 17 nt, Human
uggagccaauggagacu

SEQ ID NO: 1157508 - RNA, 17 nt, Human
ugcuuugggcugcccug

SEQ ID NO: 1157509 - RNA, 16 nt, Human
ugcuuugggcugcccu

SEQ ID NO: 1157510 - RNA, 15 nt, Human
ugcuuugggcugccc

SEQ ID NO: 1157511 - RNA, 14 nt, Human
ugcuuugggcugcc

SEQ ID NO: 1157512 - RNA, 19 nt, Human
aggacucugccuccucuuc

SEQ ID NO: 1157513 - RNA, 18 nt, Human
aggacucugccuccucuu

SEQ ID NO: 1157514 - RNA, 17 nt, Human
aggacucugccuccucu

SEQ ID NO: 1157515 - RNA, 16 nt, Human
aggacucugccuccuc

SEQ ID NO: 1157516 - RNA, 14 nt, Human
aggacucugccucc

SEQ ID NO: 1157517 - RNA, 13 nt, Human
aggacucugccuc

SEQ ID NO: 1157518 - RNA, 12 nt, Human
aggacucugccu

SEQ ID NO: 1157519 - RNA, 19 nt, Human
aggacuaggguccugggga

SEQ ID NO: 1157520 - RNA, 18 nt, Human
aggacuaggguccugggg

SEQ ID NO: 1157521 - RNA, 16 nt, Human
aggacuaggguccugg

SEQ ID NO: 1157522 - RNA, 15 nt, Human
aggacuaggguccug

SEQ ID NO: 1157523 - RNA, 15 nt, Human
aggaaggcugagagg

SEQ ID NO: 1157524 - RNA, 18 nt, Human
aggaagcagcuuucccca

SEQ ID NO: 1157525 - RNA, 22 nt, Human
ugcucuugaacuccugaccuca

SEQ ID NO: 1157526 - RNA, 20 nt, Human
ugcucuugaacuccugaccu

SEQ ID NO: 1157527 - RNA, 15 nt, Human
ugcucuugaacuccu

SEQ ID NO: 1157528 - RNA, 22 nt, Human
agcuuuccccaugucucgacuc

SEQ ID NO: 1157529 - RNA, 13 nt, Human
agcuuaacagugu

SEQ ID NO: 1157530 - RNA, 14 nt, Human
ugccuguucccauu

SEQ ID NO: 1157531 - RNA, 19 nt, Human
agcuggccgggagccugau

SEQ ID NO: 1157532 - RNA, 18 nt, Human
agcuggccgggagccuga

SEQ ID NO: 1157533 - RNA, 12 nt, Human
ugccucugccug

SEQ ID NO: 1157534 - RNA, 21 nt, Human
agcuccaucuccacuccagau

SEQ ID NO: 1157535 - RNA, 16 nt, Human
agcuccaucuccacuc

SEQ ID NO: 1157536 - RNA, 15 nt, Human
agcuccaucuccacu

SEQ ID NO: 1157537 - RNA, 13 nt, Human
agcuccaucucca

SEQ ID NO: 1157538 - RNA, 16 nt, Human
agccuugggaccccug

SEQ ID NO: 1157539 - RNA, 15 nt, Human
ugcaucucagcccac

SEQ ID NO: 1157540 - RNA, 14 nt, Human
ugcaucucagccca

SEQ ID NO: 1157541 - RNA, 13 nt, Human
ugcaucucagccc

SEQ ID NO: 1157542 - RNA, 23 nt, Human
ugcaaaguucccuacuuccugug

SEQ ID NO: 1157543 - RNA, 17 nt, Human
ugcaaagcccagcuuga

SEQ ID NO: 1157544 - RNA, 15 nt, Human
ugcaaagcccagcuu

SEQ ID NO: 1157545 - RNA, 14 nt, Human
ugcaaagcccagcu

SEQ ID NO: 1157546 - RNA, 12 nt, Human
ugauuuggaaaa

SEQ ID NO: 1157547 - RNA, 23 nt, Human
ugauggguuaguggauggaaggg

SEQ ID NO: 1157548 - RNA, 19 nt, Human
ugauggguuaguggaugga

SEQ ID NO: 1157549 - RNA, 18 nt, Human
ugaugaaauguaaauacu

SEQ ID NO: 1157550 - RNA, 22 nt, Human
ugauccuaaugaaugcauaaaa

SEQ ID NO: 1157551 - RNA, 18 nt, Human
ugauccacucgccuucau

SEQ ID NO: 1157552 - RNA, 13 nt, Human
agccaccacgccc

SEQ ID NO: 1157553 - RNA, 18 nt, Human
agccaaacauccuacaag

SEQ ID NO: 1157554 - RNA, 22 nt, Human
agcauucucacuccuaccuggu

SEQ ID NO: 1157555 - RNA, 20 nt, Human
agcauucucacuccuaccug

SEQ ID NO: 1157556 - RNA, 18 nt, Human
agcauucucacuccuacc

SEQ ID NO: 1157557 - RNA, 17 nt, Human
agcauuagauuucucau

SEQ ID NO: 1157558 - RNA, 14 nt, Human
ugaucaccugcccu

SEQ ID NO: 1157559 - RNA, 14 nt, Human
agcaguuugcuuug

SEQ ID NO: 1157560 - RNA, 15 nt, Human
agcaggcugugaguu

SEQ ID NO: 1157561 - RNA, 19 nt, Human
agagguccacaacacacag

SEQ ID NO: 1157562 - RNA, 13 nt, Human
agaggcugaggac

SEQ ID NO: 1157563 - RNA, 15 nt, Human
agagcuuaacagugu

SEQ ID NO: 1157564 - RNA, 19 nt, Human
agacuuuuuuuaaauagua

SEQ ID NO: 1157565 - RNA, 18 nt, Human
agacuuguaugaaagaug

SEQ ID NO: 1157566 - RNA, 14 nt, Human
agacugucucaaga

SEQ ID NO: 1157567 - RNA, 17 nt, Human
ucuuucuuccucugcug

SEQ ID NO: 1157568 - RNA, 16 nt, Human
ucuuucuuccucugcu

SEQ ID NO: 1157569 - RNA, 15 nt, Human
ucuuucuuccucugc

SEQ ID NO: 1157570 - RNA, 14 nt, Human
ucuuucuuccucug

SEQ ID NO: 1157571 - RNA, 21 nt, Human
agacucaguggggaggggcug

SEQ ID NO: 1157572 - RNA, 23 nt, Human
agaccugccccuccucucugccc

SEQ ID NO: 1157573 - RNA, 22 nt, Human
agaccugccccuccucucugcc

SEQ ID NO: 1157574 - RNA, 16 nt, Human
agaccugccccuccuc

SEQ ID NO: 1157575 - RNA, 21 nt, Human
agaccccuggcuuuucacugc

SEQ ID NO: 1157576 - RNA, 15 nt, Human
agaccccuggcuuuu

SEQ ID NO: 1157577 - RNA, 19 nt, Human
ucuguucugcacacagcac

SEQ ID NO: 1157578 - RNA, 18 nt, Human
ucuguucugcacacagca

SEQ ID NO: 1157579 - RNA, 17 nt, Human
ucuguucugcacacagc

SEQ ID NO: 1157580 - RNA, 23 nt, Human
ucuggguuccuuccucugagccu

SEQ ID NO: 1157581 - RNA, 22 nt, Human
ucuggguuccuuccucugagcc

SEQ ID NO: 1157582 - RNA, 16 nt, Human
ucugacaacagacuuc

SEQ ID NO: 1157583 - RNA, 15 nt, Human
ucugacaacagacuu

SEQ ID NO: 1157584 - RNA, 18 nt, Human
ucugaagucacugcacag

SEQ ID NO: 1157585 - RNA, 16 nt, Human
ucugaagucacugcac

SEQ ID NO: 1157586 - RNA, 15 nt, Human
ucugaagucacugca

SEQ ID NO: 1157587 - RNA, 23 nt, Human
ucugaugcaagcaagaaacacug

SEQ ID NO: 1157588 - RNA, 15 nt, Human
acuuccugugacuuc

SEQ ID NO: 1157589 - RNA, 16 nt, Human
acuucaggcucuucuc

SEQ ID NO: 1157590 - RNA, 14 nt, Human
acuucaggcucuuc

SEQ ID NO: 1157591 - RNA, 14 nt, Human
acuucagcucuguu

SEQ ID NO: 1157592 - RNA, 16 nt, Human
acuuagaaauugcauu

SEQ ID NO: 1157593 - RNA, 17 nt, Human
ucguuugaaucacagua

SEQ ID NO: 1157594 - RNA, 18 nt, Human
ucggcucacugcauccuc

SEQ ID NO: 1157595 - RNA, 18 nt, Human
ucgcuauugucaccaggg

SEQ ID NO: 1157596 - RNA, 16 nt, Human
acuggccucugcugau

SEQ ID NO: 1157597 - RNA, 14 nt, Human
acuggccucugcug

SEQ ID NO: 1157598 - RNA, 15 nt, Human
acugcuggcugccuu

SEQ ID NO: 1157599 - RNA, 15 nt, Human
acugccucuuccucc

SEQ ID NO: 1157600 - RNA, 14 nt, Human
acugccucuuccuc

SEQ ID NO: 1157601 - RNA, 23 nt, Human
acugcauccuccgccucccgggu

SEQ ID NO: 1157602 - RNA, 20 nt, Human
acugcauccuccgccucccg

SEQ ID NO: 1157603 - RNA, 17 nt, Human
acugcauccuccgccuc

SEQ ID NO: 1157604 - RNA, 14 nt, Human
uccuacuuccccuu

SEQ ID NO: 1157605 - RNA, 14 nt, Human
acuccucuguccag

SEQ ID NO: 1157606 - RNA, 13 nt, Human
acuccucugucca

SEQ ID NO: 1157607 - RNA, 13 nt, Human
acuccagaccccu

SEQ ID NO: 1157608 - RNA, 22 nt, Human
ucccggcugcccuuucugggca

SEQ ID NO: 1157609 - RNA, 18 nt, Human
ucccggcugcccuuucug

SEQ ID NO: 1157610 - RNA, 15 nt, Human
ucccggcugcccuuu

SEQ ID NO: 1157611 - RNA, 14 nt, Human
ucccggcugcccuu

SEQ ID NO: 1157612 - RNA, 13 nt, Human
ucccggcugcccu

SEQ ID NO: 1157613 - RNA, 20 nt, Human
ucccgaguagcugagauuau

SEQ ID NO: 1157614 - RNA, 17 nt, Human
uccccaugucucgacuc

SEQ ID NO: 1157615 - RNA, 18 nt, Human
uccaucuaaacugccccc

SEQ ID NO: 1157616 - RNA, 16 nt, Human
uccaucuaaacugccc

SEQ ID NO: 1157617 - RNA, 13 nt, Human
ucccacagcgcug

SEQ ID NO: 1157618 - RNA, 19 nt, Human
uccagagaguggcuccucc

SEQ ID NO: 1157619 - RNA, 17 nt, Human
uccagagaguggcuccu

SEQ ID NO: 1157620 - RNA, 16 nt, Human
uccagagaguggcucc

SEQ ID NO: 1157621 - RNA, 15 nt, Human
uccagagaguggcuc

SEQ ID NO: 1157622 - RNA, 22 nt, Human
uccacugccuucgauacaccgg

SEQ ID NO: 1157623 - RNA, 15 nt, Human
uccacugccuucgau

SEQ ID NO: 1157624 - RNA, 13 nt, Human
uccacugccuucg

SEQ ID NO: 1157625 - RNA, 19 nt, Human
uccaccuucccaugcccug

SEQ ID NO: 1157626 - RNA, 18 nt, Human
uccaccuucccaugcccu

SEQ ID NO: 1157627 - RNA, 16 nt, Human
uccaccuucccaugcc

SEQ ID NO: 1157628 - RNA, 21 nt, Human
accuggucacaggacucugcc

SEQ ID NO: 1157629 - RNA, 18 nt, Human
uccaaucccaccaacccu

SEQ ID NO: 1157630 - RNA, 20 nt, Human
accuaccaccacgcccggcu

SEQ ID NO: 1157631 - RNA, 16 nt, Human
accuaccaccacgccc

SEQ ID NO: 1157632 - RNA, 16 nt, Human
ucagcucacugcaacc

SEQ ID NO: 1157633 - RNA, 13 nt, Human
ucagcucacugca

SEQ ID NO: 1157634 - RNA, 19 nt, Human
ucagaaguuucucagcucc

SEQ ID NO: 1157635 - RNA, 12 nt, Human
accauuccccau

SEQ ID NO: 1157636 - RNA, 15 nt, Human
ucacuccuaccuggu

SEQ ID NO: 1157637 - RNA, 21 nt, Human
accagccuccaugcugccucc

SEQ ID NO: 1157638 - RNA, 20 nt, Human
accagccuccaugcugccuc

SEQ ID NO: 1157639 - RNA, 19 nt, Human
accagccuccaugcugccu

SEQ ID NO: 1157640 - RNA, 14 nt, Human
accagccuccaugc

SEQ ID NO: 1157641 - RNA, 23 nt, Human
accacugcucugaugaagaggag

SEQ ID NO: 1157642 - RNA, 17 nt, Human
accacugcucugaugaa

SEQ ID NO: 1157643 - RNA, 15 nt, Human
accacugcucugaug

SEQ ID NO: 1157644 - RNA, 22 nt, Human
ucacacgucuggcuucacagau

SEQ ID NO: 1157645 - RNA, 16 nt, Human
ucacaacaaccugguc

SEQ ID NO: 1157646 - RNA, 14 nt, Human
accacacuccagcu

SEQ ID NO: 1157647 - RNA, 20 nt, Human
ucaagugauucucaugccuc

SEQ ID NO: 1157648 - RNA, 17 nt, Human
ucaagugauucucaugc

SEQ ID NO: 1157649 - RNA, 22 nt, Human
acauuagcaguuugcuuuguau

SEQ ID NO: 1157650 - RNA, 18 nt, Human
acauuagcaguuugcuuu

SEQ ID NO: 1157651 - RNA, 21 nt, Human
acauagugaugguuccccugu

SEQ ID NO: 1157652 - RNA, 16 nt, Human
acauagugaugguucc

SEQ ID NO: 1157653 - RNA, 23 nt, Human
uaugaaagauggcugugccucug

SEQ ID NO: 1157654 - RNA, 22 nt, Human
uaugaaagauggcugugccucu

SEQ ID NO: 1157655 - RNA, 20 nt, Human
uaugaaagauggcugugccu

SEQ ID NO: 1157656 - RNA, 17 nt, Human
uauccuacuuccccuuc

SEQ ID NO: 1157657 - RNA, 14 nt, Human
uauccuacuucccc

SEQ ID NO: 1157658 - RNA, 16 nt, Human
uaucccggcugcccuu

SEQ ID NO: 1157659 - RNA, 23 nt, Human
acacuuguugauuaauggaaaug

SEQ ID NO: 1157660 - RNA, 20 nt, Human
acacuuguugauuaauggaa

SEQ ID NO: 1157661 - RNA, 19 nt, Human
uauaacuauguugauaaaa

SEQ ID NO: 1157662 - RNA, 14 nt, Human
uaguagagacaggg

SEQ ID NO: 1157663 - RNA, 17 nt, Human
acacagugaccauacua

SEQ ID NO: 1157664 - RNA, 20 nt, Human
acaaucucggcucacugcau

SEQ ID NO: 1157665 - RNA, 18 nt, Human
acaaucucggcucacugc

SEQ ID NO: 1157666 - RNA, 19 nt, Human
acaagagcuuaacagugug

SEQ ID NO: 1157667 - RNA, 18 nt, Human
acaagagcuuaacagugu

SEQ ID NO: 1157668 - RNA, 14 nt, Human
acaagacacaguga

SEQ ID NO: 1157669 - RNA, 14 nt, Human
uagaugcugacugu

SEQ ID NO: 1157670 - RNA, 18 nt, Human
acaaagcccuuccauguc

SEQ ID NO: 1157671 - RNA, 23 nt, Human
uacuuugauauuuucaacgcagc

SEQ ID NO: 1157672 - RNA, 23 nt, Human
uacuuccugugacuucagcucug

SEQ ID NO: 1157673 - RNA, 20 nt, Human
uacuuccccuuccuaauucc

SEQ ID NO: 1157674 - RNA, 18 nt, Human
uacuuccccuuccuaauu

SEQ ID NO: 1157675 - RNA, 15 nt, Human
uacuuccccuuccua

SEQ ID NO: 1157676 - RNA, 14 nt, Human
uacuuccccuuccu

SEQ ID NO: 1157677 - RNA, 12 nt, Human
aauugcauuucc

SEQ ID NO: 1157678 - RNA, 14 nt, Human
aauguggcuccugg

SEQ ID NO: 1157679 - RNA, 14 nt, Human
aauguauuuuuccu

SEQ ID NO: 1157680 - RNA, 17 nt, Human
uacaggcuccugccacc

SEQ ID NO: 1157681 - RNA, 15 nt, Human
uacaggcuccugcca

SEQ ID NO: 1157682 - RNA, 14 nt, Human
uacaggcuccugcc

SEQ ID NO: 1157683 - RNA, 22 nt, Human
uacaggcgugagccaccgugcc

SEQ ID NO: 1157684 - RNA, 16 nt, Human
aaugcauaaaauguua

SEQ ID NO: 1157685 - RNA, 13 nt, Human
aaugcauaaaaug

SEQ ID NO: 1157686 - RNA, 14 nt, Human
uacaaggacagccc

SEQ ID NO: 1157687 - RNA, 17 nt, Human
uaauuccacagcugcuc

SEQ ID NO: 1157688 - RNA, 14 nt, Human
uaauuccacagcug

SEQ ID NO: 1157689 - RNA, 13 nt, Human
uaauuccacagcu

SEQ ID NO: 1157690 - RNA, 12 nt, Human
aaucagcauucu

SEQ ID NO: 1157691 - RNA, 17 nt, Human
uaagacauuuuuggaag

SEQ ID NO: 1157692 - RNA, 16 nt, Human
aauagaugcugacugu

SEQ ID NO: 1157693 - RNA, 18 nt, Human
aauagacccacaagaggc

SEQ ID NO: 1157694 - RNA, 20 nt, Human
aauaaauugcuccuugacau

SEQ ID NO: 1157695 - RNA, 16 nt, Human
aauaaauugcuccuug

SEQ ID NO: 1157696 - RNA, 23 nt, Human
guuuuacaauaaaaucuugaaaa

SEQ ID NO: 1157697 - RNA, 20 nt, Human
guuugggccccagaggcugg

SEQ ID NO: 1157698 - RNA, 20 nt, Human
guuuaagacauuuuuggaag

SEQ ID NO: 1157699 - RNA, 19 nt, Human
aaggaugccccgucccccu

SEQ ID NO: 1157700 - RNA, 21 nt, Human
guugaugccugugaacugaac

SEQ ID NO: 1157701 - RNA, 20 nt, Human
guucccuacuuccugugacu

SEQ ID NO: 1157702 - RNA, 15 nt, Human
guuccccaagacauu

SEQ ID NO: 1157703 - RNA, 22 nt, Human
guuaaguugauggugaugaaau

SEQ ID NO: 1157704 - RNA, 16 nt, Human
guuaagccuuuggaaa

SEQ ID NO: 1157705 - RNA, 13 nt, Human
guuaagccuuugg

SEQ ID NO: 1157706 - RNA, 12 nt, Human
guuaagccuuug

SEQ ID NO: 1157707 - RNA, 18 nt, Human
guguguaugcgugugugu

SEQ ID NO: 1157708 - RNA, 17 nt, Human
gugugaaaaugugugug

SEQ ID NO: 1157709 - RNA, 22 nt, Human
aagcaaagacuuuccucuuagu

SEQ ID NO: 1157710 - RNA, 19 nt, Human
guggcccgacagccuggca

SEQ ID NO: 1157711 - RNA, 18 nt, Human
guggcccgacagccuggc

SEQ ID NO: 1157712 - RNA, 16 nt, Human
aagagcuuaacagugu

SEQ ID NO: 1157713 - RNA, 21 nt, Human
guggauggaaggggcugacag

SEQ ID NO: 1157714 - RNA, 20 nt, Human
gugcugggauuacaggcgug

SEQ ID NO: 1157715 - RNA, 12 nt, Human
aacuugggaacu

SEQ ID NO: 1157716 - RNA, 15 nt, Human
gugccucugccuguc

SEQ ID NO: 1157717 - RNA, 13 nt, Human
gugccucugccug

SEQ ID NO: 1157718 - RNA, 19 nt, Human
aacucccugccccccagcc

SEQ ID NO: 1157719 - RNA, 13 nt, Human
aacucccugcccc

SEQ ID NO: 1157720 - RNA, 20 nt, Human
aaccugcucuccucuugcca

SEQ ID NO: 1157721 - RNA, 15 nt, Human
aaccugcucuccucu

SEQ ID NO: 1157722 - RNA, 11 nt, Human
aaccugcucuc

SEQ ID NO: 1157723 - RNA, 15 nt, Human
gucuggcuucacaga

SEQ ID NO: 1157724 - RNA, 16 nt, Human
gucucccucccuuggg

SEQ ID NO: 1157725 - RNA, 15 nt, Human
gucccaacuuguaaa

SEQ ID NO: 1157726 - RNA, 15 nt, Human
guccacaacacacag

SEQ ID NO: 1157727 - RNA, 11 nt, Human
aacacuuccau

SEQ ID NO: 1157728 - RNA, 20 nt, Human
aaauguuaaguugaugguga

SEQ ID NO: 1157729 - RNA, 16 nt, Human
guaugggacuggccuc

SEQ ID NO: 1157730 - RNA, 11 nt, Human
aaaugaaaauu

SEQ ID NO: 1157731 - RNA, 18 nt, Human
guagcugggauuacaggc

SEQ ID NO: 1157732 - RNA, 13 nt, Human
agccuggcuccaa

SEQ ID NO: 1157733 - RNA, 20 nt, Human
agccuggcacagggcagugg

SEQ ID NO: 1157734 - RNA, 18 nt, Human
agccuggcacagggcagu

SEQ ID NO: 1157735 - RNA, 17 nt, Human
agccuggcacagggcag

SEQ ID NO: 1157736 - RNA, 20 nt, Human
agcuggguuggaaaacagua

SEQ ID NO: 1157737 - RNA, 16 nt, Human
agcuggguuggaaaac

SEQ ID NO: 1157738 - RNA, 23 nt, Human
aggaaaaccaagccguggcuucc

SEQ ID NO: 1157739 - RNA, 22 nt, Human
aggaaaaccaagccguggcuuc

SEQ ID NO: 1157740 - RNA, 21 nt, Human
aggaaaaccaagccguggcuu

SEQ ID NO: 1157741 - RNA, 20 nt, Human
aggaaaaccaagccguggcu

SEQ ID NO: 1157742 - RNA, 19 nt, Human
aggaaaaccaagccguggc

SEQ ID NO: 1157743 - RNA, 16 nt, Human
aggagagcccuucauu

SEQ ID NO: 1157744 - RNA, 17 nt, Human
aggcaucgcaauguaag

SEQ ID NO: 1157745 - RNA, 13 nt, Human
aggcugaggacuu

SEQ ID NO: 1157746 - RNA, 11 nt, Human
aggcugaggac

SEQ ID NO: 1157747 - RNA, 14 nt, Human
aggcucuucuccuu

SEQ ID NO: 1157748 - RNA, 13 nt, Human
aggcugagccuca

SEQ ID NO: 1157749 - RNA, 13 nt, Human
aggcucuucuccu

SEQ ID NO: 1157750 - RNA, 20 nt, Human
agcaauucuccugccucagc

SEQ ID NO: 1157751 - RNA, 19 nt, Human
agcaauucuccugccucag

SEQ ID NO: 1157752 - RNA, 18 nt, Human
agcaauucuccugccuca

SEQ ID NO: 1157753 - RNA, 17 nt, Human
agcaauucuccugccuc

SEQ ID NO: 1157754 - RNA, 15 nt, Human
agcaauucuccugcc

SEQ ID NO: 1157755 - RNA, 15 nt, Human
agaguggcuccuccc

SEQ ID NO: 1157756 - RNA, 14 nt, Human
agaguggcuccucc

SEQ ID NO: 1157757 - RNA, 13 nt, Human
agaguggcuccuc

SEQ ID NO: 1157758 - RNA, 12 nt, Human
agaguggcuccu

SEQ ID NO: 1157759 - RNA, 22 nt, Human
agauggcugugccucugccugu

SEQ ID NO: 1157760 - RNA, 21 nt, Human
agauggcugugccucugccug

SEQ ID NO: 1157761 - RNA, 20 nt, Human
agauggcugugccucugccu

SEQ ID NO: 1157762 - RNA, 19 nt, Human
agauggcugugccucugcc

SEQ ID NO: 1157763 - RNA, 18 nt, Human
agauggcugugccucugc

SEQ ID NO: 1157764 - RNA, 23 nt, Human
agaucucugcuuuggaaaucaca

SEQ ID NO: 1157765 - RNA, 18 nt, Human
agaucucugcuuuggaaa

SEQ ID NO: 1157766 - RNA, 13 nt, Human
agacagcccucca

SEQ ID NO: 1157767 - RNA, 15 nt, Human
agaauuuugagcagg

SEQ ID NO: 1157768 - RNA, 20 nt, Human
agaaccaggcaacuugggaa

SEQ ID NO: 1157769 - RNA, 17 nt, Human
agaaccaggcaacuugg

SEQ ID NO: 1157770 - RNA, 15 nt, Human
auaaguggugugugu

SEQ ID NO: 1157771 - RNA, 18 nt, Human
auacaccgggccuggaga

SEQ ID NO: 1157772 - RNA, 14 nt, Human
auacaccgggccug

SEQ ID NO: 1157773 - RNA, 17 nt, Human
augaauaaagacaccua

SEQ ID NO: 1157774 - RNA, 12 nt, Human
aucaaaggacac

SEQ ID NO: 1157775 - RNA, 14 nt, Human
aucgaccugccucg

SEQ ID NO: 1157776 - RNA, 16 nt, Human
aauucuccugccucag

SEQ ID NO: 1157777 - RNA, 15 nt, Human
aauucuccugccuca

SEQ ID NO: 1157778 - RNA, 14 nt, Human
aauucuccugccuc

SEQ ID NO: 1157779 - RNA, 22 nt, Human
aauucuagcuuugagcuuaaga

SEQ ID NO: 1157780 - RNA, 19 nt, Human
aauuauacccccugcaaag

SEQ ID NO: 1157781 - RNA, 17 nt, Human
acauguguuggcagccu

SEQ ID NO: 1157782 - RNA, 18 nt, Human
accaagccguggcuuccc

SEQ ID NO: 1157783 - RNA, 17 nt, Human
accaagccguggcuucc

SEQ ID NO: 1157784 - RNA, 16 nt, Human
accaagccguggcuuc

SEQ ID NO: 1157785 - RNA, 15 nt, Human
accaagccguggcuu

SEQ ID NO: 1157786 - RNA, 14 nt, Human
accaagccguggcu

SEQ ID NO: 1157787 - RNA, 18 nt, Human
acagugcaucucagccca

SEQ ID NO: 1157788 - RNA, 17 nt, Human
acagugcaucucagccc

SEQ ID NO: 1157789 - RNA, 15 nt, Human
acagugcaucucagc

SEQ ID NO: 1157790 - RNA, 18 nt, Human
acccuggcacccagggug

SEQ ID NO: 1157791 - RNA, 18 nt, Human
acccucagagccaccccu

SEQ ID NO: 1157792 - RNA, 11 nt, Human
acccucagagc

SEQ ID NO: 1157793 - RNA, 19 nt, Human
accgugccuggccacgccc

SEQ ID NO: 1157794 - RNA, 23 nt, Human
accgggcugggagcucugcagag

SEQ ID NO: 1157795 - RNA, 21 nt, Human
accgggcugggagcucugcag

SEQ ID NO: 1157796 - RNA, 23 nt, Human
acgcagcccugcuuugggcugcc

SEQ ID NO: 1157797 - RNA, 22 nt, Human
acgcagcccugcuuugggcugc

SEQ ID NO: 1157798 - RNA, 12 nt, Human
acgcagcccugc

SEQ ID NO: 1157799 - RNA, 20 nt, Human
acuuaaaauauuccugcauu

SEQ ID NO: 1157800 - RNA, 12 nt, Human
acugguggcccg

SEQ ID NO: 1157801 - RNA, 19 nt, Human
acugcccaggccugccugu

SEQ ID NO: 1157802 - RNA, 20 nt, Human
acugguggcccgacagccug

SEQ ID NO: 1157803 - RNA, 18 nt, Human
acucccugccccccagcc

SEQ ID NO: 1157804 - RNA, 15 nt, Human
acucccaagcuggac

SEQ ID NO: 1157805 - RNA, 16 nt, Human
aaaagaaaagucaagg

SEQ ID NO: 1157806 - RNA, 19 nt, Human
aacccucagagccaccccu

SEQ ID NO: 1157807 - RNA, 20 nt, Human
aaugauguauguugaagccu

SEQ ID NO: 1157808 - RNA, 22 nt, Human
aaucaaugcuauaacuauguug

SEQ ID NO: 1157809 - RNA, 10 nt, Human
aagccuuugu

SEQ ID NO: 1157810 - RNA, 22 nt, Human
aaggcagggagggccugggccc

SEQ ID NO: 1157811 - RNA, 19 nt, Human
aaggcagggagggccuggg

SEQ ID NO: 1157812 - RNA, 14 nt, Human
aagaacuagcauaa

SEQ ID NO: 1157813 - RNA, 16 nt, Human
aacgcagcccugcuuu

SEQ ID NO: 1157814 - RNA, 20 nt, Human
caccauguuggccaggcugg

SEQ ID NO: 1157815 - RNA, 20 nt, Human
caccauguuggccaggcugc

SEQ ID NO: 1157816 - RNA, 19 nt, Human
caccauguuggccaggcug

SEQ ID NO: 1157817 - RNA, 18 nt, Human
caccauaggucaccuuua

SEQ ID NO: 1157818 - RNA, 15 nt, Human
caccacgcccggcua

SEQ ID NO: 1157819 - RNA, 14 nt, Human
caccacgcccggcu

SEQ ID NO: 1157820 - RNA, 16 nt, Human
cacaggacucugccuc

SEQ ID NO: 1157821 - RNA, 15 nt, Human
cacaggacucugccu

SEQ ID NO: 1157822 - RNA, 22 nt, Human
cacacagauuugagcucagccc

SEQ ID NO: 1157823 - RNA, 20 nt, Human
cacacagauuugagcucagc

SEQ ID NO: 1157824 - RNA, 18 nt, Human
cacacagauuugagcuca

SEQ ID NO: 1157825 - RNA, 24 nt, Human
cacaaucucggcucacugcauccu

SEQ ID NO: 1157826 - RNA, 23 nt, Human
cacaaucucggcucacugcaucc

SEQ ID NO: 1157827 - RNA, 22 nt, Human
cacaaucucggcucacugcauc

SEQ ID NO: 1157828 - RNA, 20 nt, Human
cacaaucucggcucacugca

SEQ ID NO: 1157829 - RNA, 19 nt, Human
cacaaucucggcucacugc

SEQ ID NO: 1157830 - RNA, 18 nt, Human
caaucucggcucacugca

SEQ ID NO: 1157831 - RNA, 21 nt, Human
caaggacuaggguccugggga

SEQ ID NO: 1157832 - RNA, 20 nt, Human
caaggacuaggguccugggg

SEQ ID NO: 1157833 - RNA, 19 nt, Human
caaggacuaggguccuggg

SEQ ID NO: 1157834 - RNA, 18 nt, Human
caaggacuaggguccugg

SEQ ID NO: 1157835 - RNA, 16 nt, Human
caaggacuaggguccu

SEQ ID NO: 1157836 - RNA, 20 nt, Human
caagagggcacugguggccc

SEQ ID NO: 1157837 - RNA, 19 nt, Human
caagagggcacugguggcc

SEQ ID NO: 1157838 - RNA, 18 nt, Human
caagagggcacugguggc

SEQ ID NO: 1157839 - RNA, 22 nt, Human
caaaguucccuacuuccuguga

SEQ ID NO: 1157840 - RNA, 18 nt, Human
caaagcccuuccaugucg

SEQ ID NO: 1157841 - RNA, 13 nt, Human
caaagcccagcuu

SEQ ID NO: 1157842 - RNA, 20 nt, Human
uuuucacugcuggcugccuu

SEQ ID NO: 1157843 - RNA, 19 nt, Human
uuuucacugcuggcugccu

SEQ ID NO: 1157844 - RNA, 22 nt, Human
uuuucaacgcagcccugcuuug

SEQ ID NO: 1157845 - RNA, 21 nt, Human
uuuucaacgcagcccugcuuu

SEQ ID NO: 1157846 - RNA, 17 nt, Human
uuuucaacgcagcccug

SEQ ID NO: 1157847 - RNA, 16 nt, Human
uuuuacagcugccugc

SEQ ID NO: 1157848 - RNA, 16 nt, Human
uuugccagugggaacu

SEQ ID NO: 1157849 - RNA, 15 nt, Human
uuugccagugggaac

SEQ ID NO: 1157850 - RNA, 14 nt, Human
uuugagcucagccc

SEQ ID NO: 1157851 - RNA, 15 nt, Human
uuucuaaugugugaa

SEQ ID NO: 1157852 - RNA, 23 nt, Human
uuuccugacagaaggacucaggu

SEQ ID NO: 1157853 - RNA, 13 nt, Human
uuuauuuccagug

SEQ ID NO: 1157854 - RNA, 15 nt, Human
uuguauuuauuuagu

SEQ ID NO: 1157855 - RNA, 14 nt, Human
uuggccaggcuggu

SEQ ID NO: 1157856 - RNA, 15 nt, Human
uugcugccucaugcu

SEQ ID NO: 1157857 - RNA, 12 nt, Human
uugcugccucau

SEQ ID NO: 1157858 - RNA, 11 nt, Human
uugcugccuca

SEQ ID NO: 1157859 - RNA, 18 nt, Human
uugccacugccucuuccu

SEQ ID NO: 1157860 - RNA, 15 nt, Human
uugccacugccucuu

SEQ ID NO: 1157861 - RNA, 14 nt, Human
uugccacugccucu

SEQ ID NO: 1157862 - RNA, 14 nt, Human
uucuucaacucccu

SEQ ID NO: 1157863 - RNA, 16 nt, Human
uucuguggcucacaga

SEQ ID NO: 1157864 - RNA, 12 nt, Human
uucuguggcuca

SEQ ID NO: 1157865 - RNA, 21 nt, Human
uucucaugccucagccuccug

SEQ ID NO: 1157866 - RNA, 14 nt, Human
uucucaugccucag

SEQ ID NO: 1157867 - RNA, 12 nt, Human
uucucaugccuc

SEQ ID NO: 1157868 - RNA, 11 nt, Human
uucucaugccu

SEQ ID NO: 1157869 - RNA, 17 nt, Human
uuccuuccucugagccu

SEQ ID NO: 1157870 - RNA, 13 nt, Human
uuccuuccucuga

SEQ ID NO: 1157871 - RNA, 22 nt, Human
uuccugcccugggaggcaguga

SEQ ID NO: 1157872 - RNA, 16 nt, Human
uuccugcccugggagg

SEQ ID NO: 1157873 - RNA, 13 nt, Human
uuccugcccuggg

SEQ ID NO: 1157874 - RNA, 11 nt, Human
uuccugcccug

SEQ ID NO: 1157875 - RNA, 14 nt, Human
uuccccaagacauu

SEQ ID NO: 1157876 - RNA, 21 nt, Human
uuccaugucgccucugcauuc

SEQ ID NO: 1157877 - RNA, 20 nt, Human
uuccaugucgccucugcauu

SEQ ID NO: 1157878 - RNA, 19 nt, Human
uuccaugucgccucugcau

SEQ ID NO: 1157879 - RNA, 18 nt, Human
uuccaugucgccucugca

SEQ ID NO: 1157880 - RNA, 17 nt, Human
uuccaugucgccucugc

SEQ ID NO: 1157881 - RNA, 21 nt, Human
uuccacuuagaaauugcauuu

SEQ ID NO: 1157882 - RNA, 16 nt, Human
uucaggcucuucuccu

SEQ ID NO: 1157883 - RNA, 15 nt, Human
uucaggcucuucucc

SEQ ID NO: 1157884 - RNA, 16 nt, Human
uucaaucccaggaugu

SEQ ID NO: 1157885 - RNA, 15 nt, Human
uucaacgcagcccug

SEQ ID NO: 1157886 - RNA, 14 nt, Human
uucaacgcagcccu

SEQ ID NO: 1157887 - RNA, 13 nt, Human
uucaacgcagccc

SEQ ID NO: 1157888 - RNA, 20 nt, Human
uucaaccauuccccauggga

SEQ ID NO: 1157889 - RNA, 17 nt, Human
uucaaccauuccccaug

SEQ ID NO: 1157890 - RNA, 15 nt, Human
uucaaagcaaauguc

SEQ ID NO: 1157891 - RNA, 23 nt, Human
uuacaauaaaaucuugaaaaugc

SEQ ID NO: 1157892 - RNA, 14 nt, Human
uuaauggaaauguu

SEQ ID NO: 1157893 - RNA, 18 nt, Human
uuaaauaguaaaaauaaa

SEQ ID NO: 1157894 - RNA, 17 nt, Human
uguuuacagauccccaa

SEQ ID NO: 1157895 - RNA, 18 nt, Human
uguuggccaggcugcucu

SEQ ID NO: 1157896 - RNA, 13 nt, Human
uguuggccaggcu

SEQ ID NO: 1157897 - RNA, 14 nt, Human
uguugcugccucau

SEQ ID NO: 1157898 - RNA, 13 nt, Human
uguugcugccuca

SEQ ID NO: 1157899 - RNA, 15 nt, Human
uguugaagccuuugu

SEQ ID NO: 1157900 - RNA, 17 nt, Human
uguucugcacacagcac

SEQ ID NO: 1157901 - RNA, 21 nt, Human
uguggcuccuggggguucuuu

SEQ ID NO: 1157902 - RNA, 17 nt, Human
uguggaaaaugaaaauu

SEQ ID NO: 1157903 - RNA, 22 nt, Human
ugugcuuauguaugagguacaa

SEQ ID NO: 1157904 - RNA, 15 nt, Human
ugugccucugccugu

SEQ ID NO: 1157905 - RNA, 14 nt, Human
ugugccucugccug

SEQ ID NO: 1157906 - RNA, 17 nt, Human
ugucucaggucccugca

SEQ ID NO: 1157907 - RNA, 23 nt, Human
ugucucaagagggcacugguggc

SEQ ID NO: 1157908 - RNA, 21 nt, Human
ugucucaagagggcacuggug

SEQ ID NO: 1157909 - RNA, 20 nt, Human
ugucucaagagggcacuggu

SEQ ID NO: 1157910 - RNA, 14 nt, Human
uguaugcacuuugu

SEQ ID NO: 1157911 - RNA, 13 nt, Human
uguacuccuccca

SEQ ID NO: 1157912 - RNA, 12 nt, Human
uguacuccuccc

SEQ ID NO: 1157913 - RNA, 17 nt, Human
uggguuggaaaacagua

SEQ ID NO: 1157914 - RNA, 22 nt, Human
uggguuccuuccucugagccuu

SEQ ID NO: 1157915 - RNA, 21 nt, Human
uggguuccuuccucugagccu

SEQ ID NO: 1157916 - RNA, 21 nt, Human
uggguuccagcaauucuccug

SEQ ID NO: 1157917 - RNA, 20 nt, Human
ugggcgugagaccugccccu

SEQ ID NO: 1157918 - RNA, 19 nt, Human
ugggcgugagaccugcccc

SEQ ID NO: 1157919 - RNA, 18 nt, Human
ugggcgugagaccugccc

SEQ ID NO: 1157920 - RNA, 17 nt, Human
ugggcgugagaccugcc

SEQ ID NO: 1157921 - RNA, 18 nt, Human
ugggccuucagggaguga

SEQ ID NO: 1157922 - RNA, 16 nt, Human
ugggacagggcauggc

SEQ ID NO: 1157923 - RNA, 14 nt, Human
uggcuuuucacugc

SEQ ID NO: 1157924 - RNA, 15 nt, Human
uggcuuuucacugcu

SEQ ID NO: 1157925 - RNA, 16 nt, Human
uggcuccaaacccucg

SEQ ID NO: 1157926 - RNA, 18 nt, Human
uggcuccaaacccucgag

SEQ ID NO: 1157927 - RNA, 20 nt, Human
uggcuccaaacccucgaggc

SEQ ID NO: 1157928 - RNA, 22 nt, Human
uggccacuccagaccccuggcu

SEQ ID NO: 1157929 - RNA, 20 nt, Human
uggagaggcccggccucuca

SEQ ID NO: 1157930 - RNA, 21 nt, Human
uggaagugugugaucuguggg

SEQ ID NO: 1157931 - RNA, 15 nt, Human
uggaaaauaaaucaa

SEQ ID NO: 1157932 - RNA, 11 nt, Human
uggaaaauaaa

SEQ ID NO: 1157933 - RNA, 18 nt, Human
ugcuuguuaacugagugc

SEQ ID NO: 1157934 - RNA, 14 nt, Human
ugcugccuccagaa

SEQ ID NO: 1157935 - RNA, 13 nt, Human
ugcugccucaugc

SEQ ID NO: 1157936 - RNA, 19 nt, Human
ugcgcaggcuggcccugcc

SEQ ID NO: 1157937 - RNA, 17 nt, Human
ugcgcaggcuggcccug

SEQ ID NO: 1157938 - RNA, 16 nt, Human
ugcgcaggcuggcccu

SEQ ID NO: 1157939 - RNA, 13 nt, Human
ugcgcaggcuggc

SEQ ID NO: 1157940 - RNA, 18 nt, Human
ugccuucagcucuacagc

SEQ ID NO: 1157941 - RNA, 17 nt, Human
ugccuucagcucuacag

SEQ ID NO: 1157942 - RNA, 13 nt, Human
ugccuucagcucu

SEQ ID NO: 1157943 - RNA, 19 nt, Human
ugccuaaggcugaacuugu

SEQ ID NO: 1157944 - RNA, 21 nt, Human
ugcauccuccgccucccgggu

SEQ ID NO: 1157945 - RNA, 18 nt, Human
ugcauccuccgccucccg

SEQ ID NO: 1157946 - RNA, 22 nt, Human
ugcagcuuuaaaaaauuaaucu

SEQ ID NO: 1157947 - RNA, 13 nt, Human
ugcagcuuuaaaa

SEQ ID NO: 1157948 - RNA, 20 nt, Human
ugcacagugcaucucagccc

SEQ ID NO: 1157949 - RNA, 19 nt, Human
ugcacagugcaucucagcc

SEQ ID NO: 1157950 - RNA, 19 nt, Human
ugaacugaacucugacaac

SEQ ID NO: 1157951 - RNA, 17 nt, Human
ugaacugaacucugaca

SEQ ID NO: 1157952 - RNA, 14 nt, Human
ugaacugaacucug

SEQ ID NO: 1157953 - RNA, 23 nt, Human
ugaaagauggcugugccucugcc

SEQ ID NO: 1157954 - RNA, 22 nt, Human
ugaaagauggcugugccucugc

SEQ ID NO: 1157955 - RNA, 21 nt, Human
ugaaagauggcugugccucug

SEQ ID NO: 1157956 - RNA, 21 nt, Human
ucuuguuuuuuuuuuccacuu

SEQ ID NO: 1157957 - RNA, 18 nt, Human
ucuuguuuuuuuuuucca

SEQ ID NO: 1157958 - RNA, 16 nt, Human
ucuucuccacuggaug

SEQ ID NO: 1157959 - RNA, 13 nt, Human
ucuucuccacugg

SEQ ID NO: 1157960 - RNA, 14 nt, Human
ucugcacacagcac

SEQ ID NO: 1157961 - RNA, 22 nt, Human
ucugagcauuagauuucucauu

SEQ ID NO: 1157962 - RNA, 20 nt, Human
ucugagcauuagauuucuca

SEQ ID NO: 1157963 - RNA, 16 nt, Human
ucucuucuccacugga

SEQ ID NO: 1157964 - RNA, 15 nt, Human
ucucuucuccacugg

SEQ ID NO: 1157965 - RNA, 14 nt, Human
ucucuucuccacug

SEQ ID NO: 1157966 - RNA, 13 nt, Human
ucucuucuccacu

SEQ ID NO: 1157967 - RNA, 11 nt, Human
ucucuucucca

SEQ ID NO: 1157968 - RNA, 12 nt, Human
ucuccugccuca

SEQ ID NO: 1157969 - RNA, 15 nt, Human
ucucaggucccugca

SEQ ID NO: 1157970 - RNA, 18 nt, Human
ucggacuuagcugggaga

SEQ ID NO: 1157971 - RNA, 19 nt, Human
ucgcccaggcuggagugca

SEQ ID NO: 1157972 - RNA, 14 nt, Human
ucgcccaggcugga

SEQ ID NO: 1157973 - RNA, 12 nt, Human
ucgcccaggcug

SEQ ID NO: 1157974 - RNA, 17 nt, Human
ucgcaauguaagacucg

SEQ ID NO: 1157975 - RNA, 23 nt, Human
uccuuuuggagucagacagaugu

SEQ ID NO: 1157976 - RNA, 14 nt, Human
uccuuuuggaguca

SEQ ID NO: 1157977 - RNA, 16 nt, Human
uccuucaaagcaaaug

SEQ ID NO: 1157978 - RNA, 17 nt, Human
ucccuacuuccugugac

SEQ ID NO: 1157979 - RNA, 16 nt, Human
ucccuacuuccuguga

SEQ ID NO: 1157980 - RNA, 15 nt, Human
ucccuacuuccugug

SEQ ID NO: 1157981 - RNA, 22 nt, Human
uccccuuccuaauuccacagcu

SEQ ID NO: 1157982 - RNA, 21 nt, Human
uccccuuccuaauuccacagc

SEQ ID NO: 1157983 - RNA, 15 nt, Human
uccccuguucacucu

SEQ ID NO: 1157984 - RNA, 13 nt, Human
ucccccugcccca

SEQ ID NO: 1157985 - RNA, 13 nt, Human
ucccccucuggcu

SEQ ID NO: 1157986 - RNA, 17 nt, Human
ucccccaucucuucugg

SEQ ID NO: 1157987 - RNA, 18 nt, Human
ucccaggcugagccucag

SEQ ID NO: 1157988 - RNA, 16 nt, Human
ucccaggcugagccuc

SEQ ID NO: 1157989 - RNA, 15 nt, Human
ucccaggcugagccu

SEQ ID NO: 1157990 - RNA, 21 nt, Human
ucccaggcgccccuucccccu

SEQ ID NO: 1157991 - RNA, 20 nt, Human
ucccaggcgccccuuccccc

SEQ ID NO: 1157992 - RNA, 16 nt, Human
ucccaggauguacaag

SEQ ID NO: 1157993 - RNA, 22 nt, Human
ucccaaggcucugagcaaaugu

SEQ ID NO: 1157994 - RNA, 18 nt, Human
ucccaaggcucugagcaa

SEQ ID NO: 1157995 - RNA, 16 nt, Human
uccauccaggccauuc

SEQ ID NO: 1157996 - RNA, 14 nt, Human
uccacaacacacag

SEQ ID NO: 1157997 - RNA, 15 nt, Human
ucaguuacucuucag

SEQ ID NO: 1157998 - RNA, 21 nt, Human
ucagaggggaauaaacuguug

SEQ ID NO: 1157999 - RNA, 22 nt, Human
ucacuuuuauuuagcaccaggg

SEQ ID NO: 1158000 - RNA, 12 nt, Human
ucacuuuuauuu

SEQ ID NO: 1158001 - RNA, 20 nt, Human
ucacucuacuuagcaugucc

SEQ ID NO: 1158002 - RNA, 19 nt, Human
ucacucuacuuagcauguc

SEQ ID NO: 1158003 - RNA, 18 nt, Human
ucacuccuaccugguaau

SEQ ID NO: 1158004 - RNA, 13 nt, Human
ucaccuuuauucu

SEQ ID NO: 1158005 - RNA, 16 nt, Human
ucacaggacucugccu

SEQ ID NO: 1158006 - RNA, 17 nt, Human
ucaaugcuauaacuaug

SEQ ID NO: 1158007 - RNA, 16 nt, Human
ucaaacgugaaaaugc

SEQ ID NO: 1158008 - RNA, 15 nt, Human
ucaaacgugaaaaug

SEQ ID NO: 1158009 - RNA, 23 nt, Human
ucaaacggccucacuaggcuucu

SEQ ID NO: 1158010 - RNA, 21 nt, Human
uauuuucaacgcagcccugcu

SEQ ID NO: 1158011 - RNA, 21 nt, Human
uaucaugucaaacgugaaaau

SEQ ID NO: 1158012 - RNA, 16 nt, Human
uaucaugucaaacgug

SEQ ID NO: 1158013 - RNA, 20 nt, Human
uauacucuuauagacaacau

SEQ ID NO: 1158014 - RNA, 17 nt, Human
uauacccccugcaaagc

SEQ ID NO: 1158015 - RNA, 18 nt, Human
uaguggauggaaggggcu

SEQ ID NO: 1158016 - RNA, 15 nt, Human
uaguggauggaaggg

SEQ ID NO: 1158017 - RNA, 18 nt, Human
uagugaugguuccccugu

SEQ ID NO: 1158018 - RNA, 14 nt, Human
uagugaugguuccc

SEQ ID NO: 1158019 - RNA, 22 nt, Human
uagcugggagaaagagagagcu

SEQ ID NO: 1158020 - RNA, 18 nt, Human
uagcccucacccuggggc

SEQ ID NO: 1158021 - RNA, 13 nt, Human
uagccccauaauu

SEQ ID NO: 1158022 - RNA, 23 nt, Human
uagaaccaggcaacuugggaacu

SEQ ID NO: 1158023 - RNA, 12 nt, Human
uagaaccaggca

SEQ ID NO: 1158024 - RNA, 15 nt, Human
uaccaccacgcccgg

SEQ ID NO: 1158025 - RNA, 15 nt, Human
uacaggcauagaguu

SEQ ID NO: 1158026 - RNA, 19 nt, Human
uacaagagcuuaacagugu

SEQ ID NO: 1158027 - RNA, 15 nt, Human
uacaagacacaguga

SEQ ID NO: 1158028 - RNA, 23 nt, Human
uaaugcgcaggcuggcccugccc

SEQ ID NO: 1158029 - RNA, 22 nt, Human
uaaugcgcaggcuggcccugcc

SEQ ID NO: 1158030 - RNA, 19 nt, Human
uaaugcgcaggcuggcccu

SEQ ID NO: 1158031 - RNA, 23 nt, Human
uaaugaugucguuugaaucacag

SEQ ID NO: 1158032 - RNA, 17 nt, Human
uaaugaugucguuugaa

SEQ ID NO: 1158033 - RNA, 16 nt, Human
uaaucguguccccuau

SEQ ID NO: 1158034 - RNA, 16 nt, Human
uaaucgaccugccucg

SEQ ID NO: 1158035 - RNA, 14 nt, Human
uaaucgaccugccu

SEQ ID NO: 1158036 - RNA, 13 nt, Human
uaaucgaccugcc

SEQ ID NO: 1158037 - RNA, 21 nt, Human
uaagccuuuggaaacagcucg

SEQ ID NO: 1158038 - RNA, 17 nt, Human
uaagccuuuggaaacag

SEQ ID NO: 1158039 - RNA, 14 nt, Human
uaagccuuuggaaa

SEQ ID NO: 1158040 - RNA, 17 nt, Human
uaacugagugccuuuug

SEQ ID NO: 1158041 - RNA, 16 nt, Human
uaacugagugccuuuu

SEQ ID NO: 1158042 - RNA, 15 nt, Human
uaaauugcuccuuga

SEQ ID NO: 1158043 - RNA, 19 nt, Human
uaaaucaaguuggcuucua

SEQ ID NO: 1158044 - RNA, 14 nt, Human
uaaagcugaaaacu

SEQ ID NO: 1158045 - RNA, 23 nt, Human
uaaacugcccccucugcccugcg

SEQ ID NO: 1158046 - RNA, 22 nt, Human
uaaacugcccccucugcccugc

SEQ ID NO: 1158047 - RNA, 21 nt, Human
uaaacugcccccucugcccug

SEQ ID NO: 1158048 - RNA, 20 nt, Human
uaaacugcccccucugcccu

SEQ ID NO: 1158049 - RNA, 16 nt, Human
guuuguugugaggauu

SEQ ID NO: 1158050 - RNA, 19 nt, Human
guuuguggaaaaugaaaau

SEQ ID NO: 1158051 - RNA, 22 nt, Human
guuuccugcccugggaggcagu

SEQ ID NO: 1158052 - RNA, 17 nt, Human
guuuccugcccugggag

SEQ ID NO: 1158053 - RNA, 13 nt, Human
guuuccugcccug

SEQ ID NO: 1158054 - RNA, 17 nt, Human
gguucuuucuuccucug

SEQ ID NO: 1158055 - RNA, 16 nt, Human
gguucuuucuuccucu

SEQ ID NO: 1158056 - RNA, 14 nt, Human
gguucuuucuuccu

SEQ ID NO: 1158057 - RNA, 22 nt, Human
gguuaguggauggaaggggcug

SEQ ID NO: 1158058 - RNA, 21 nt, Human
gguuaguggauggaaggggcu

SEQ ID NO: 1158059 - RNA, 23 nt, Human
gguggccacuccagaccccuggc

SEQ ID NO: 1158060 - RNA, 22 nt, Human
gguggccacuccagaccccugg

SEQ ID NO: 1158061 - RNA, 21 nt, Human
gguggccacuccagaccccug

SEQ ID NO: 1158062 - RNA, 20 nt, Human
gguggccacuccagaccccu

SEQ ID NO: 1158063 - RNA, 18 nt, Human
ggucacaggacucugccu

SEQ ID NO: 1158064 - RNA, 16 nt, Human
ggucacaggacucugc

SEQ ID NO: 1158065 - RNA, 19 nt, Human
ggguucuuucuuccucugc

SEQ ID NO: 1158066 - RNA, 17 nt, Human
ggguucuuucuuccucu

SEQ ID NO: 1158067 - RNA, 21 nt, Human
ggguuccuuccucugagccuu

SEQ ID NO: 1158068 - RNA, 20 nt, Human
ggguuccuuccucugagccu

SEQ ID NO: 1158069 - RNA, 19 nt, Human
ggguuccuuccucugagcc

SEQ ID NO: 1158070 - RNA, 18 nt, Human
ggggaggggcugugggcg

SEQ ID NO: 1158071 - RNA, 11 nt, Human
gggccugggcc

SEQ ID NO: 1158072 - RNA, 14 nt, Human
gggccccagaggcu

SEQ ID NO: 1158073 - RNA, 20 nt, Human
gggcauggccagguggccac

SEQ ID NO: 1158074 - RNA, 17 nt, Human
gggcauggccagguggc

SEQ ID NO: 1158075 - RNA, 15 nt, Human
gggcauggccaggug

SEQ ID NO: 1158076 - RNA, 16 nt, Human
gggcacugguggcccg

SEQ ID NO: 1158077 - RNA, 13 nt, Human
gggcacugguggc

SEQ ID NO: 1158078 - RNA, 14 nt, Human
gggcaccggggccu

SEQ ID NO: 1158079 - RNA, 14 nt, Human
gggaccccugagcu

SEQ ID NO: 1158080 - RNA, 18 nt, Human
gggaccccgagccuggcu

SEQ ID NO: 1158081 - RNA, 20 nt, Human
gggaccccgagccuggcucc

SEQ ID NO: 1158082 - RNA, 23 nt, Human
gggacaaggacuaggguccuggg

SEQ ID NO: 1158083 - RNA, 17 nt, Human
gggaauuucuucaacuc

SEQ ID NO: 1158084 - RNA, 22 nt, Human
gggaaggcagggagggccuggg

SEQ ID NO: 1158085 - RNA, 22 nt, Human
ggcuuuucacugcuggcugccu

SEQ ID NO: 1158086 - RNA, 19 nt, Human
ggcuuuucacugcuggcug

SEQ ID NO: 1158087 - RNA, 17 nt, Human
ggcuuuucacugcuggc

SEQ ID NO: 1158088 - RNA, 15 nt, Human
ggcuuuucacugcug

SEQ ID NO: 1158089 - RNA, 14 nt, Human
ggcuuuucacugcu

SEQ ID NO: 1158090 - RNA, 12 nt, Human
ggcuucacagau

SEQ ID NO: 1158091 - RNA, 12 nt, Human
ggccaggcuggu

SEQ ID NO: 1158092 - RNA, 11 nt, Human
ggccaggcugg

SEQ ID NO: 1158093 - RNA, 14 nt, Human
ggcaggaaggcuga

SEQ ID NO: 1158094 - RNA, 23 nt, Human
ggcaacuugggaacuagacuccc

SEQ ID NO: 1158095 - RNA, 18 nt, Human
ggcaacuugggaacuaga

SEQ ID NO: 1158096 - RNA, 21 nt, Human
ggacugccagucccccugccc

SEQ ID NO: 1158097 - RNA, 11 nt, Human
ggacucugccu

SEQ ID NO: 1158098 - RNA, 15 nt, Human
ggacuccucugucca

SEQ ID NO: 1158099 - RNA, 14 nt, Human
ggacuccucugucc

SEQ ID NO: 1158100 - RNA, 13 nt, Human
ggaagcagcuuuc

SEQ ID NO: 1158101 - RNA, 23 nt, Human
ggaacuagacucccaagcuggac

SEQ ID NO: 1158102 - RNA, 22 nt, Human
ggaaaaccaagccguggcuucc

SEQ ID NO: 1158103 - RNA, 18 nt, Human
gcuuugggcugcccuggu

SEQ ID NO: 1158104 - RNA, 16 nt, Human
gcuuugggcugcccug

SEQ ID NO: 1158105 - RNA, 15 nt, Human
gcuuugggcugcccu

SEQ ID NO: 1158106 - RNA, 14 nt, Human
gcuuugggcugccc

SEQ ID NO: 1158107 - RNA, 22 nt, Human
gcuugcagagaugaggccgcca

SEQ ID NO: 1158108 - RNA, 16 nt, Human
gcuucuguugcugccu

SEQ ID NO: 1158109 - RNA, 21 nt, Human
gcugggauuacaggcuccugc

SEQ ID NO: 1158110 - RNA, 20 nt, Human
gcugggauuacaggcuccug

SEQ ID NO: 1158111 - RNA, 19 nt, Human
gcugggauuacaggcuccu

SEQ ID NO: 1158112 - RNA, 18 nt, Human
gcugggauuacaggcgug

SEQ ID NO: 1158113 - RNA, 17 nt, Human
gcugggauuacaggcgu

SEQ ID NO: 1158114 - RNA, 16 nt, Human
gcugggagcucugcag

SEQ ID NO: 1158115 - RNA, 15 nt, Human
gcugggagcucugca

SEQ ID NO: 1158116 - RNA, 17 nt, Human
gcuggccgggagccuga

SEQ ID NO: 1158117 - RNA, 13 nt, Human
gcuggcccugccc

SEQ ID NO: 1158118 - RNA, 13 nt, Human
gcuggccgggacc

SEQ ID NO: 1158119 - RNA, 12 nt, Human
gcuggcccugcc

SEQ ID NO: 1158120 - RNA, 17 nt, Human
gcugcccuuucugggca

SEQ ID NO: 1158121 - RNA, 23 nt, Human
gcugcccuggugcugccacacuu

SEQ ID NO: 1158122 - RNA, 22 nt, Human
gcugcccuggugcugccacacu

SEQ ID NO: 1158123 - RNA, 20 nt, Human
gcugcccuggugcugccaca

SEQ ID NO: 1158124 - RNA, 19 nt, Human
gcugcccuggugcugccac

SEQ ID NO: 1158125 - RNA, 16 nt, Human
gcgugagaccugcccc

SEQ ID NO: 1158126 - RNA, 19 nt, Human
gcgcuggccgggaccccga

SEQ ID NO: 1158127 - RNA, 16 nt, Human
gccuucagcucuacag

SEQ ID NO: 1158128 - RNA, 13 nt, Human
gccuucagcucua

SEQ ID NO: 1158129 - RNA, 17 nt, Human
gccuuagaaccuuucuu

SEQ ID NO: 1158130 - RNA, 16 nt, Human
gccuuagaaccuuucu

SEQ ID NO: 1158131 - RNA, 15 nt, Human
gccucugcauucagg

SEQ ID NO: 1158132 - RNA, 12 nt, Human
gccucugcauuc

SEQ ID NO: 1158133 - RNA, 14 nt, Human
gccuaaggcugaac

SEQ ID NO: 1158134 - RNA, 15 nt, Human
gccguggcuucccgc

SEQ ID NO: 1158135 - RNA, 13 nt, Human
gccguggcuuccc

SEQ ID NO: 1158136 - RNA, 12 nt, Human
gccguggcuucc

SEQ ID NO: 1158137 - RNA, 11 nt, Human
gccguggcuuc

SEQ ID NO: 1158138 - RNA, 22 nt, Human
gcccuuccucuccacugccuuc

SEQ ID NO: 1158139 - RNA, 21 nt, Human
gcccucccugccccucccuuc

SEQ ID NO: 1158140 - RNA, 15 nt, Human
gcccucccugccccu

SEQ ID NO: 1158141 - RNA, 13 nt, Human
gccccugcacaaa

SEQ ID NO: 1158142 - RNA, 18 nt, Human
gccccucccacagcgcug

SEQ ID NO: 1158143 - RNA, 21 nt, Human
gccccgucccccucuggcucc

SEQ ID NO: 1158144 - RNA, 17 nt, Human
gccccgucccccucugg

SEQ ID NO: 1158145 - RNA, 17 nt, Human
gcccaggccugccuguu

SEQ ID NO: 1158146 - RNA, 18 nt, Human
gccagguggccacuccag

SEQ ID NO: 1158147 - RNA, 20 nt, Human
gccacuccagaccccuggcu

SEQ ID NO: 1158148 - RNA, 19 nt, Human
gccacuccagaccccuggc

SEQ ID NO: 1158149 - RNA, 18 nt, Human
gccacuccagaccccugg

SEQ ID NO: 1158150 - RNA, 16 nt, Human
gccacuccagaccccu

SEQ ID NO: 1158151 - RNA, 18 nt, Human
gcauucucacuccuaccu

SEQ ID NO: 1158152 - RNA, 15 nt, Human
gcauucucacuccua

SEQ ID NO: 1158153 - RNA, 13 nt, Human
gcauucucacucc

SEQ ID NO: 1158154 - RNA, 20 nt, Human
gcauuagauuucucauuugc

SEQ ID NO: 1158155 - RNA, 22 nt, Human
gcagggagggccugggccccag

SEQ ID NO: 1158156 - RNA, 18 nt, Human
gcagggagggccugggcc

SEQ ID NO: 1158157 - RNA, 17 nt, Human
gcagggagggccugggc

SEQ ID NO: 1158158 - RNA, 14 nt, Human
gcagggagggccug

SEQ ID NO: 1158159 - RNA, 18 nt, Human
gcagccgugccuucagcu

SEQ ID NO: 1158160 - RNA, 17 nt, Human
gcagccgugccuucagc

SEQ ID NO: 1158161 - RNA, 15 nt, Human
gcagccgugccuuca

SEQ ID NO: 1158162 - RNA, 17 nt, Human
gcacugaggaccagcca

SEQ ID NO: 1158163 - RNA, 21 nt, Human
gcaagggaauuucuucaacuc

SEQ ID NO: 1158164 - RNA, 18 nt, Human
gcaagcaagaaacacugg

SEQ ID NO: 1158165 - RNA, 23 nt, Human
gcaaaguucccuacuuccuguga

SEQ ID NO: 1158166 - RNA, 20 nt, Human
gaugccugugaacugaacuc

SEQ ID NO: 1158167 - RNA, 16 nt, Human
gaugaaauguaaauac

SEQ ID NO: 1158168 - RNA, 16 nt, Human
gauccucccaggcuuc

SEQ ID NO: 1158169 - RNA, 23 nt, Human
gauccuaaugaaugcauaaaaug

SEQ ID NO: 1158170 - RNA, 16 nt, Human
gaucacauguggacuu

SEQ ID NO: 1158171 - RNA, 18 nt, Human
gauaauucuagcuuugag

SEQ ID NO: 1158172 - RNA, 14 nt, Human
gacuucagcucugu

SEQ ID NO: 1158173 - RNA, 15 nt, Human
gacuuagcugggaga

SEQ ID NO: 1158174 - RNA, 20 nt, Human
gacugccagucccccugccc

SEQ ID NO: 1158175 - RNA, 19 nt, Human
gacccacuggacucaccuc

SEQ ID NO: 1158176 - RNA, 22 nt, Human
gaccacacuccagcugggauca

SEQ ID NO: 1158177 - RNA, 16 nt, Human
gaccacacuccagcug

SEQ ID NO: 1158178 - RNA, 14 nt, Human
gaccacacuccagc

SEQ ID NO: 1158179 - RNA, 22 nt, Human
gacagggcauggccagguggcc

SEQ ID NO: 1158180 - RNA, 20 nt, Human
gacagggcauggccaggugg

SEQ ID NO: 1158181 - RNA, 15 nt, Human
gacagggcauggcca

SEQ ID NO: 1158182 - RNA, 14 nt, Human
gacagggcauggcc

SEQ ID NO: 1158183 - RNA, 16 nt, Human
gacagacagcccucca

SEQ ID NO: 1158184 - RNA, 13 nt, Human
gaaugcuuuagga

SEQ ID NO: 1158185 - RNA, 14 nt, Human
gaaugcauaaaaug

SEQ ID NO: 1158186 - RNA, 23 nt, Human
gaaaauaaaucaaugcuauaacu

SEQ ID NO: 1158187 - RNA, 22 nt, Human
gaaaagucaaggguaggguggg

SEQ ID NO: 1158188 - RNA, 17 nt, Human
cuuuguuuuacugucuu

SEQ ID NO: 1158189 - RNA, 19 nt, Human
cuuucuuuuuuuuuuuuga

SEQ ID NO: 1158190 - RNA, 16 nt, Human
cuuucuuccucugcug

SEQ ID NO: 1158191 - RNA, 21 nt, Human
cuuuaaaaagcuccaaaugca

SEQ ID NO: 1158192 - RNA, 22 nt, Human
cuuuaaaaaauuaaucugggcc

SEQ ID NO: 1158193 - RNA, 22 nt, Human
cuuggagccaauggagacuguc

SEQ ID NO: 1158194 - RNA, 13 nt, Human
cuugccacugccu

SEQ ID NO: 1158195 - RNA, 17 nt, Human
cuucuggcacuuggaga

SEQ ID NO: 1158196 - RNA, 22 nt, Human
cuucuccuuucacaaccuucug

SEQ ID NO: 1158197 - RNA, 20 nt, Human
cuucuccuuucacaaccuuc

SEQ ID NO: 1158198 - RNA, 17 nt, Human
cuucuccuuucacaacc

SEQ ID NO: 1158199 - RNA, 14 nt, Human
cuucuccuuucaca

SEQ ID NO: 1158200 - RNA, 16 nt, Human
cuucgauacaccgggc

SEQ ID NO: 1158201 - RNA, 18 nt, Human
cuucccgcucagcccucc

SEQ ID NO: 1158202 - RNA, 17 nt, Human
cuucccgcucagcccuc

SEQ ID NO: 1158203 - RNA, 16 nt, Human
cuucccgcucagcccu

SEQ ID NO: 1158204 - RNA, 15 nt, Human
cuucccgcucagccc

SEQ ID NO: 1158205 - RNA, 14 nt, Human
cuucauuuggagau

SEQ ID NO: 1158206 - RNA, 13 nt, Human
cuucauuuggaga

SEQ ID NO: 1158207 - RNA, 18 nt, Human
cuucaggcucuucuccuu

SEQ ID NO: 1158208 - RNA, 17 nt, Human
cuucaggcucuucuccu

SEQ ID NO: 1158209 - RNA, 16 nt, Human
cuucaggcucuucucc

SEQ ID NO: 1158210 - RNA, 15 nt, Human
cuucaggcucuucuc

SEQ ID NO: 1158211 - RNA, 14 nt, Human
cuucaggcucuucu

SEQ ID NO: 1158212 - RNA, 16 nt, Human
cuuaucaaaggacacc

SEQ ID NO: 1158213 - RNA, 14 nt, Human
cuuaucaaaggaca

SEQ ID NO: 1158214 - RNA, 20 nt, Human
cuuaggugauccacucgccu

SEQ ID NO: 1158215 - RNA, 15 nt, Human
cuuagaaccuuucuu

SEQ ID NO: 1158216 - RNA, 17 nt, Human
cuuagaaauugcauuuc

SEQ ID NO: 1158217 - RNA, 16 nt, Human
cuuaaguuuauacucu

SEQ ID NO: 1158218 - RNA, 17 nt, Human
cugguugaugccuguga

SEQ ID NO: 1158219 - RNA, 20 nt, Human
cugguggcccgacagccugg

SEQ ID NO: 1158220 - RNA, 18 nt, Human
cuggguuggaaaacagua

SEQ ID NO: 1158221 - RNA, 13 nt, Human
cuggguuggaaaa

SEQ ID NO: 1158222 - RNA, 20 nt, Human
cugggcaccggggccucgga

SEQ ID NO: 1158223 - RNA, 20 nt, Human
cugggaucacauguggacuu

SEQ ID NO: 1158224 - RNA, 23 nt, Human
cugggauuacaggcuccugccac

SEQ ID NO: 1158225 - RNA, 22 nt, Human
cugggauuacaggcuccugcca

SEQ ID NO: 1158226 - RNA, 21 nt, Human
cugggauuacaggcuccugcc

SEQ ID NO: 1158227 - RNA, 20 nt, Human
cugggauuacaggcuccugc

SEQ ID NO: 1158228 - RNA, 19 nt, Human
cugggauuacaggcuccug

SEQ ID NO: 1158229 - RNA, 21 nt, Human
cugggauuacaggcgugagcc

SEQ ID NO: 1158230 - RNA, 16 nt, Human
cugggaggcagugaug

SEQ ID NO: 1158231 - RNA, 15 nt, Human
cugggagcucugcag

SEQ ID NO: 1158232 - RNA, 14 nt, Human
cugggagcucugca

SEQ ID NO: 1158233 - RNA, 13 nt, Human
cugggagcucugc

SEQ ID NO: 1158234 - RNA, 19 nt, Human
cugggaacaccauagguca

SEQ ID NO: 1158235 - RNA, 22 nt, Human
cuggcuuuucacugcuggcugc

SEQ ID NO: 1158236 - RNA, 20 nt, Human
cuggcuuuucacugcuggcu

SEQ ID NO: 1158237 - RNA, 19 nt, Human
cuggcuuuucacugcuggc

SEQ ID NO: 1158238 - RNA, 17 nt, Human
cuggcuuuucacugcug

SEQ ID NO: 1158239 - RNA, 16 nt, Human
cuggcuuuucacugcu

SEQ ID NO: 1158240 - RNA, 15 nt, Human
cuggcuuuucacugc

SEQ ID NO: 1158241 - RNA, 14 nt, Human
cuggcuucacagau

SEQ ID NO: 1158242 - RNA, 19 nt, Human
cuggcugccuuagaaccuu

SEQ ID NO: 1158243 - RNA, 14 nt, Human
cuggcugccuuaga

SEQ ID NO: 1158244 - RNA, 17 nt, Human
cuggcacagggcagugg

SEQ ID NO: 1158245 - RNA, 23 nt, Human
cuggauuauucaaaaugauguau

SEQ ID NO: 1158246 - RNA, 21 nt, Human
cuggauggaggaaaaccaagc

SEQ ID NO: 1158247 - RNA, 16 nt, Human
cuggacucaccucccc

SEQ ID NO: 1158248 - RNA, 23 nt, Human
cugcuuugggcugcccuggugcu

SEQ ID NO: 1158249 - RNA, 22 nt, Human
cugcuuugggcugcccuggugc

SEQ ID NO: 1158250 - RNA, 21 nt, Human
cugcuuugggcugcccuggug

SEQ ID NO: 1158251 - RNA, 20 nt, Human
cugcuuugggcugcccuggu

SEQ ID NO: 1158252 - RNA, 19 nt, Human
cugcuuugggcugcccugg

SEQ ID NO: 1158253 - RNA, 18 nt, Human
cugcuuugggcugcccug

SEQ ID NO: 1158254 - RNA, 20 nt, Human
cugcucugaugaagaggagu

SEQ ID NO: 1158255 - RNA, 12 nt, Human
cugcucugauga

SEQ ID NO: 1158256 - RNA, 12 nt, Human
cugccucuuccu

SEQ ID NO: 1158257 - RNA, 22 nt, Human
cugcccugggaggcagugaugg

SEQ ID NO: 1158258 - RNA, 15 nt, Human
cugcccugggaggca

SEQ ID NO: 1158259 - RNA, 13 nt, Human
cugcccugggagg

SEQ ID NO: 1158260 - RNA, 12 nt, Human
cugcccugggag

SEQ ID NO: 1158261 - RNA, 11 nt, Human
cugcccuggga

SEQ ID NO: 1158262 - RNA, 19 nt, Human
cugcccaggccugccuguu

SEQ ID NO: 1158263 - RNA, 18 nt, Human
cugcccaggccugccugu

SEQ ID NO: 1158264 - RNA, 19 nt, Human
cugcccaaccugcucuccu

SEQ ID NO: 1158265 - RNA, 17 nt, Human
cugcccaaccugcucuc

SEQ ID NO: 1158266 - RNA, 19 nt, Human
cugccaccacgcccggcua

SEQ ID NO: 1158267 - RNA, 22 nt, Human
cugccacacuucaggcucuucu

SEQ ID NO: 1158268 - RNA, 17 nt, Human
cugccacacuucaggcu

SEQ ID NO: 1158269 - RNA, 13 nt, Human
cugccacacuuca

SEQ ID NO: 1158270 - RNA, 16 nt, Human
cugcagggccaagcac

SEQ ID NO: 1158271 - RNA, 17 nt, Human
cugcagggacugccagu

SEQ ID NO: 1158272 - RNA, 15 nt, Human
cugcagggacugcca

SEQ ID NO: 1158273 - RNA, 20 nt, Human
cugcagagcaggaaacauga

SEQ ID NO: 1158274 - RNA, 22 nt, Human
cugcacagugcaucucagccca

SEQ ID NO: 1158275 - RNA, 21 nt, Human
cugcacagugcaucucagccc

SEQ ID NO: 1158276 - RNA, 18 nt, Human
cugcacagugcaucucag

SEQ ID NO: 1158277 - RNA, 21 nt, Human
cugcacaaagcccuuccaugu

SEQ ID NO: 1158278 - RNA, 20 nt, Human
cugcacaaagcccuuccaug

SEQ ID NO: 1158279 - RNA, 18 nt, Human
cugcacaaagcccuucca

SEQ ID NO: 1158280 - RNA, 13 nt, Human
cugcacaaagccc

SEQ ID NO: 1158281 - RNA, 16 nt, Human
cugagugccuuuuggu

SEQ ID NO: 1158282 - RNA, 15 nt, Human
cugagugccuuuugg

SEQ ID NO: 1158283 - RNA, 14 nt, Human
cugagugccuuuug

SEQ ID NO: 1158284 - RNA, 19 nt, Human
cugacagacagcccuccau

SEQ ID NO: 1158285 - RNA, 17 nt, Human
cugacagacagcccucc

SEQ ID NO: 1158286 - RNA, 22 nt, Human
cugaagucacugcacagugcau

SEQ ID NO: 1158287 - RNA, 17 nt, Human
cugaagucacugcacag

SEQ ID NO: 1158288 - RNA, 18 nt, Human
cucuucuggguuccuucc

SEQ ID NO: 1158289 - RNA, 18 nt, Human
cucuugaacuccugaccu

SEQ ID NO: 1158290 - RNA, 16 nt, Human
cucuucuccuuucaca

SEQ ID NO: 1158291 - RNA, 15 nt, Human
cucuucuccuuucac

SEQ ID NO: 1158292 - RNA, 13 nt, Human
cucuucuccuuuc

SEQ ID NO: 1158293 - RNA, 19 nt, Human
cucuucuccacuggaugga

SEQ ID NO: 1158294 - RNA, 17 nt, Human
cucuucuccacuggaug

SEQ ID NO: 1158295 - RNA, 15 nt, Human
cucuucuccacugga

SEQ ID NO: 1158296 - RNA, 14 nt, Human
cucuucuccacugg

SEQ ID NO: 1158297 - RNA, 23 nt, Human
cucuucaguuaagccuuuggaaa

SEQ ID NO: 1158298 - RNA, 20 nt, Human
cucuucaguuaagccuuugg

SEQ ID NO: 1158299 - RNA, 19 nt, Human
cucuucaguuaagccuuug

SEQ ID NO: 1158300 - RNA, 21 nt, Human
cucuguucugcacacagcacg

SEQ ID NO: 1158301 - RNA, 20 nt, Human
cucuguucugcacacagcac

SEQ ID NO: 1158302 - RNA, 19 nt, Human
cucuguucugcacacagca

SEQ ID NO: 1158303 - RNA, 15 nt, Human
cucugcuuuggaaau

SEQ ID NO: 1158304 - RNA, 16 nt, Human
cucugccuccucuuca

SEQ ID NO: 1158305 - RNA, 15 nt, Human
cucugccuccucuuc

SEQ ID NO: 1158306 - RNA, 14 nt, Human
cucugccuccucuu

SEQ ID NO: 1158307 - RNA, 12 nt, Human
cucugcccugcg

SEQ ID NO: 1158308 - RNA, 11 nt, Human
cucugcccugc

SEQ ID NO: 1158309 - RNA, 23 nt, Human
cucugcccuaaugcgcaggcugg

SEQ ID NO: 1158310 - RNA, 17 nt, Human
cucugaugaagaggagu

SEQ ID NO: 1158311 - RNA, 15 nt, Human
cucugagccuuggga

SEQ ID NO: 1158312 - RNA, 16 nt, Human
cucugagcaaaugugg

SEQ ID NO: 1158313 - RNA, 21 nt, Human
cucucugcccuaaugcgcagg

SEQ ID NO: 1158314 - RNA, 13 nt, Human
cucucugcccuaa

SEQ ID NO: 1158315 - RNA, 12 nt, Human
cucucugcccua

SEQ ID NO: 1158316 - RNA, 16 nt, Human
cucuccacugccuucg

SEQ ID NO: 1158317 - RNA, 14 nt, Human
cucggcucacugca

SEQ ID NO: 1158318 - RNA, 23 nt, Human
cucggccucccaaagugcuggga

SEQ ID NO: 1158319 - RNA, 22 nt, Human
cucggccucccaaagugcuggg

SEQ ID NO: 1158320 - RNA, 19 nt, Human
cucggacuuagcugggaga

SEQ ID NO: 1158321 - RNA, 18 nt, Human
cucggacuuagcugggag

SEQ ID NO: 1158322 - RNA, 21 nt, Human
cucgcuauugucaccagggcu

SEQ ID NO: 1158323 - RNA, 22 nt, Human
cucgcuauugucaccagggcug

SEQ ID NO: 1158324 - RNA, 19 nt, Human
cucgcuauugucaccaggg

SEQ ID NO: 1158325 - RNA, 11 nt, Human
cuccugccacc

SEQ ID NO: 1158326 - RNA, 22 nt, Human
cuccugaguagcugggauuaca

SEQ ID NO: 1158327 - RNA, 17 nt, Human
cuccugaguagcuggga

SEQ ID NO: 1158328 - RNA, 14 nt, Human
cuccugaccuuagg

SEQ ID NO: 1158329 - RNA, 14 nt, Human
cuccugaccucagg

SEQ ID NO: 1158330 - RNA, 19 nt, Human
cuccucuugccacugccuc

SEQ ID NO: 1158331 - RNA, 22 nt, Human
cuccuaucagaaguuucucagc

SEQ ID NO: 1158332 - RNA, 20 nt, Human
cucccuucaaccauucccca

SEQ ID NO: 1158333 - RNA, 19 nt, Human
cucccuucaaccauucccc

SEQ ID NO: 1158334 - RNA, 18 nt, Human
cucccuucaaccauuccc

SEQ ID NO: 1158335 - RNA, 12 nt, Human
cucccuucaacc

SEQ ID NO: 1158336 - RNA, 17 nt, Human
cucccaggcgccccuuc

SEQ ID NO: 1158337 - RNA, 14 nt, Human
cucccaggcgcccc

SEQ ID NO: 1158338 - RNA, 14 nt, Human
cuccaucuccacuc

SEQ ID NO: 1158339 - RNA, 13 nt, Human
cuccaucuccacu

SEQ ID NO: 1158340 - RNA, 18 nt, Human
cuccaucuaaacugcccc

SEQ ID NO: 1158341 - RNA, 17 nt, Human
cuccaucuaaacugccc

SEQ ID NO: 1158342 - RNA, 20 nt, Human
cuccaucgcugucaucucag

SEQ ID NO: 1158343 - RNA, 21 nt, Human
cuccagaccccuggcuuuuca

SEQ ID NO: 1158344 - RNA, 20 nt, Human
cuccagaccccuggcuuuuc

SEQ ID NO: 1158345 - RNA, 19 nt, Human
cuccagaccccuggcuuuu

SEQ ID NO: 1158346 - RNA, 18 nt, Human
cuccagaccccuggcuuu

SEQ ID NO: 1158347 - RNA, 17 nt, Human
cuccagaccccuggcuu

SEQ ID NO: 1158348 - RNA, 15 nt, Human
cuccagaccccuggc

SEQ ID NO: 1158349 - RNA, 13 nt, Human
cuccacugccuuc

SEQ ID NO: 1158350 - RNA, 11 nt, Human
cuccacugccu

SEQ ID NO: 1158351 - RNA, 21 nt, Human
cucauuccaccuucccaugcc

SEQ ID NO: 1158352 - RNA, 18 nt, Human
cucauuccaccuucccau

SEQ ID NO: 1158353 - RNA, 18 nt, Human
cucaggucccugcagggc

SEQ ID NO: 1158354 - RNA, 17 nt, Human
cucaggucccugcaggg

SEQ ID NO: 1158355 - RNA, 22 nt, Human
cguuccuucaaagcaaaugucu

SEQ ID NO: 1158356 - RNA, 18 nt, Human
cgugccuucagcucuaca

SEQ ID NO: 1158357 - RNA, 16 nt, Human
cgugccuucagcucua

SEQ ID NO: 1158358 - RNA, 15 nt, Human
cgugccuucagcucu

SEQ ID NO: 1158359 - RNA, 13 nt, Human
cgugccuucagcu

SEQ ID NO: 1158360 - RNA, 16 nt, Human
cgugccuggccacgcc

SEQ ID NO: 1158361 - RNA, 12 nt, Human
cgugccuggcca

SEQ ID NO: 1158362 - RNA, 22 nt, Human
cgucccccucuggcuccagcug

SEQ ID NO: 1158363 - RNA, 21 nt, Human
cgucccccucuggcuccagcu

SEQ ID NO: 1158364 - RNA, 14 nt, Human
cgucccccucuggc

SEQ ID NO: 1158365 - RNA, 22 nt, Human
cguauaugucucaggucccugc

SEQ ID NO: 1158366 - RNA, 22 nt, Human
cgggagccugaucaccugcccu

SEQ ID NO: 1158367 - RNA, 17 nt, Human
cgcuauugucaccaggg

SEQ ID NO: 1158368 - RNA, 16 nt, Human
cggaucuuuggacaga

SEQ ID NO: 1158369 - RNA, 19 nt, Human
cggaucuuuggacagaagc

SEQ ID NO: 1158370 - RNA, 20 nt, Human
cgcccaggcuggagugcaau

SEQ ID NO: 1158371 - RNA, 19 nt, Human
cgcccaggcuggagugcaa

SEQ ID NO: 1158372 - RNA, 12 nt, Human
cgcccaggcugg

SEQ ID NO: 1158373 - RNA, 16 nt, Human
ccuucuuuuucuucuu

SEQ ID NO: 1158374 - RNA, 14 nt, Human
ccuucuuuuucuuc

SEQ ID NO: 1158375 - RNA, 13 nt, Human
ccuucgccaccug

SEQ ID NO: 1158376 - RNA, 23 nt, Human
ccuucgauacaccgggccuggag

SEQ ID NO: 1158377 - RNA, 22 nt, Human
ccuucgauacaccgggccugga

SEQ ID NO: 1158378 - RNA, 20 nt, Human
ccuucgauacaccgggccug

SEQ ID NO: 1158379 - RNA, 23 nt, Human
ccuuccaugucgccucugcauuc

SEQ ID NO: 1158380 - RNA, 21 nt, Human
ccuuccaugucgccucugcau

SEQ ID NO: 1158381 - RNA, 20 nt, Human
ccuuccaugucgccucugca

SEQ ID NO: 1158382 - RNA, 19 nt, Human
ccuuccaugucgccucugc

SEQ ID NO: 1158383 - RNA, 14 nt, Human
ccuucaaccauucc

SEQ ID NO: 1158384 - RNA, 19 nt, Human
ccuucaaagcaaaugucuu

SEQ ID NO: 1158385 - RNA, 15 nt, Human
ccuucaaagcaaaug

SEQ ID NO: 1158386 - RNA, 18 nt, Human
ccuuagaaccuuucuuac

SEQ ID NO: 1158387 - RNA, 16 nt, Human
ccuuagaaccuuucuu

SEQ ID NO: 1158388 - RNA, 15 nt, Human
ccuuagaaccuuucu

SEQ ID NO: 1158389 - RNA, 14 nt, Human
ccuuagaaccuuuc

SEQ ID NO: 1158390 - RNA, 21 nt, Human
ccuggugcugccacacuucag

SEQ ID NO: 1158391 - RNA, 18 nt, Human
ccuggugcugccacacuu

SEQ ID NO: 1158392 - RNA, 15 nt, Human
ccuggugcugccaca

SEQ ID NO: 1158393 - RNA, 19 nt, Human
ccuggcagccgugccuuca

SEQ ID NO: 1158394 - RNA, 18 nt, Human
ccuggcagccgugccuuc

SEQ ID NO: 1158395 - RNA, 12 nt, Human
ccuggcagccgu

SEQ ID NO: 1158396 - RNA, 14 nt, Human
ccuggacuccugca

SEQ ID NO: 1158397 - RNA, 20 nt, Human
ccuggcuccaaacccucgag

SEQ ID NO: 1158398 - RNA, 13 nt, Human
ccugggaggcagu

SEQ ID NO: 1158399 - RNA, 21 nt, Human
ccuggcagccgugccuucagc

SEQ ID NO: 1158400 - RNA, 19 nt, Human
ccugcuuugggcugcccug

SEQ ID NO: 1158401 - RNA, 18 nt, Human
ccugcuuugggcugcccu

SEQ ID NO: 1158402 - RNA, 17 nt, Human
ccugcuuugggcugccc

SEQ ID NO: 1158403 - RNA, 19 nt, Human
ccucuuccucccucauucc

SEQ ID NO: 1158404 - RNA, 16 nt, Human
ccucuuccucccucau

SEQ ID NO: 1158405 - RNA, 15 nt, Human
ccucuuccucccuca

SEQ ID NO: 1158406 - RNA, 21 nt, Human
ccucuguucugcacacagcac

SEQ ID NO: 1158407 - RNA, 17 nt, Human
ccucuguccaggcacug

SEQ ID NO: 1158408 - RNA, 17 nt, Human
ccucuggcuccagcugg

SEQ ID NO: 1158409 - RNA, 16 nt, Human
ccucuggcuccagcug

SEQ ID NO: 1158410 - RNA, 13 nt, Human
ccucucugcccua

SEQ ID NO: 1158411 - RNA, 19 nt, Human
ccucuccacugccuucgau

SEQ ID NO: 1158412 - RNA, 16 nt, Human
ccucuccacugccuuc

SEQ ID NO: 1158413 - RNA, 14 nt, Human
ccucuccacugccu

SEQ ID NO: 1158414 - RNA, 13 nt, Human
ccucuccacugcc

SEQ ID NO: 1158415 - RNA, 12 nt, Human
ccucuccacugc

SEQ ID NO: 1158416 - RNA, 20 nt, Human
ccuccuuaucaaaggacacc

SEQ ID NO: 1158417 - RNA, 18 nt, Human
ccuccuuaucaaaggaca

SEQ ID NO: 1158418 - RNA, 13 nt, Human
ccuccuggacucc

SEQ ID NO: 1158419 - RNA, 14 nt, Human
ccuccuccuggacu

SEQ ID NO: 1158420 - RNA, 13 nt, Human
ccucccugccccu

SEQ ID NO: 1158421 - RNA, 16 nt, Human
ccucccggugcccaag

SEQ ID NO: 1158422 - RNA, 13 nt, Human
ccucccggugccc

SEQ ID NO: 1158423 - RNA, 14 nt, Human
ccucagucucccuc

SEQ ID NO: 1158424 - RNA, 23 nt, Human
ccucagguaaucgaccugccucg

SEQ ID NO: 1158425 - RNA, 22 nt, Human
ccucagguaaucgaccugccuc

SEQ ID NO: 1158426 - RNA, 21 nt, Human
ccucagguaaucgaccugccu

SEQ ID NO: 1158427 - RNA, 22 nt, Human
ccucacuaucccggcugcccuu

SEQ ID NO: 1158428 - RNA, 21 nt, Human
ccucacuaucccggcugcccu

SEQ ID NO: 1158429 - RNA, 21 nt, Human
ccucacuaggcuucugguuga

SEQ ID NO: 1158430 - RNA, 17 nt, Human
ccuaucagaaguuucuc

SEQ ID NO: 1158431 - RNA, 12 nt, Human
ccuaccugguaa

SEQ ID NO: 1158432 - RNA, 17 nt, Human
ccuaauuccacagcugc

SEQ ID NO: 1158433 - RNA, 16 nt, Human
ccuaauuccacagcug

SEQ ID NO: 1158434 - RNA, 15 nt, Human
ccuaauuccacagcu

SEQ ID NO: 1158435 - RNA, 14 nt, Human
ccuaauuccacagc

SEQ ID NO: 1158436 - RNA, 12 nt, Human
ccuaaagagaua

SEQ ID NO: 1158437 - RNA, 23 nt, Human
ccguggcuucccgcucagcccuc

SEQ ID NO: 1158438 - RNA, 21 nt, Human
ccguggcuucccgcucagccc

SEQ ID NO: 1158439 - RNA, 15 nt, Human
ccguggcuucccgcu

SEQ ID NO: 1158440 - RNA, 17 nt, Human
ccgugccuucagcucua

SEQ ID NO: 1158441 - RNA, 16 nt, Human
ccgugccuucagcucu

SEQ ID NO: 1158442 - RNA, 15 nt, Human
ccgugccuucagcuc

SEQ ID NO: 1158443 - RNA, 14 nt, Human
ccgugccuucagcu

SEQ ID NO: 1158444 - RNA, 19 nt, Human
ccgggccuggagaacuaga

SEQ ID NO: 1158445 - RNA, 12 nt, Human
ccggcugcccuu

SEQ ID NO: 1158446 - RNA, 22 nt, Human
ccgagucucuucuccacuggau

SEQ ID NO: 1158447 - RNA, 16 nt, Human
ccgagccuggcuccaa

SEQ ID NO: 1158448 - RNA, 19 nt, Human
ccgagccuggcuccaaacc

SEQ ID NO: 1158449 - RNA, 22 nt, Human
cccuuucugggcaccggggccu

SEQ ID NO: 1158450 - RNA, 20 nt, Human
cccuuccucuccacugccuu

SEQ ID NO: 1158451 - RNA, 21 nt, Human
cccuuccucuccacugccuuc

SEQ ID NO: 1158452 - RNA, 17 nt, Human
cccuuccucuccacugc

SEQ ID NO: 1158453 - RNA, 16 nt, Human
cccuuccucuccacug

SEQ ID NO: 1158454 - RNA, 13 nt, Human
cccuuccucucca

SEQ ID NO: 1158455 - RNA, 21 nt, Human
cccuuaccacugcucugauga

SEQ ID NO: 1158456 - RNA, 17 nt, Human
cccuuaccacugcucug

SEQ ID NO: 1158457 - RNA, 23 nt, Human
cccugguuuccugcccugggagg

SEQ ID NO: 1158458 - RNA, 22 nt, Human
cccugguuuccugcccugggag

SEQ ID NO: 1158459 - RNA, 21 nt, Human
cccugguuuccugcccuggga

SEQ ID NO: 1158460 - RNA, 21 nt, Human
ccccgucucugguuccucccc

SEQ ID NO: 1158461 - RNA, 20 nt, Human
ccccgucccccucuggcucc

SEQ ID NO: 1158462 - RNA, 16 nt, Human
ccccgucccccucugg

SEQ ID NO: 1158463 - RNA, 16 nt, Human
cccccucugcccugcg

SEQ ID NO: 1158464 - RNA, 14 nt, Human
cccccucugcccug

SEQ ID NO: 1158465 - RNA, 13 nt, Human
cccccucugcccu

SEQ ID NO: 1158466 - RNA, 16 nt, Human
cccccaucucuucugg

SEQ ID NO: 1158467 - RNA, 23 nt, Human
cccccaaccaaguggcucccaca

SEQ ID NO: 1158468 - RNA, 14 nt, Human
ccccaagccuggca

SEQ ID NO: 1158469 - RNA, 13 nt, Human
ccccaagccuggc

SEQ ID NO: 1158470 - RNA, 15 nt, Human
cccaggcugagccuc

SEQ ID NO: 1158471 - RNA, 14 nt, Human
cccaggcugagccu

SEQ ID NO: 1158472 - RNA, 18 nt, Human
cccaggcgccccuucccc

SEQ ID NO: 1158473 - RNA, 16 nt, Human
cccaggccugccuguu

SEQ ID NO: 1158474 - RNA, 15 nt, Human
cccaggccugccugu

SEQ ID NO: 1158475 - RNA, 23 nt, Human
ccauacuaauuauacccccugca

SEQ ID NO: 1158476 - RNA, 13 nt, Human
ccauacuaauuau

SEQ ID NO: 1158477 - RNA, 12 nt, Human
ccauacuaauua

SEQ ID NO: 1158478 - RNA, 20 nt, Human
ccagugaaaucaguuacucu

SEQ ID NO: 1158479 - RNA, 12 nt, Human
ccagggaagggg

SEQ ID NO: 1158480 - RNA, 21 nt, Human
ccaggcuggucucgaacuccu

SEQ ID NO: 1158481 - RNA, 18 nt, Human
ccagaccccuggcuuuuc

SEQ ID NO: 1158482 - RNA, 17 nt, Human
ccagaccccuggcuuuu

SEQ ID NO: 1158483 - RNA, 16 nt, Human
ccagaccccuggcuuu

SEQ ID NO: 1158484 - RNA, 15 nt, Human
ccagaccccuggcuu

SEQ ID NO: 1158485 - RNA, 14 nt, Human
ccagaccccuggcu

SEQ ID NO: 1158486 - RNA, 13 nt, Human
ccagaauuucaaa

SEQ ID NO: 1158487 - RNA, 23 nt, Human
ccagaauggucuuucuaaugugu

SEQ ID NO: 1158488 - RNA, 16 nt, Human
ccagaaugcuuuagga

SEQ ID NO: 1158489 - RNA, 21 nt, Human
ccacuuagaaauugcauuucc

SEQ ID NO: 1158490 - RNA, 19 nt, Human
ccacuuagaaauugcauuu

SEQ ID NO: 1158491 - RNA, 22 nt, Human
ccacuccagaccccuggcuuuu

SEQ ID NO: 1158492 - RNA, 21 nt, Human
ccacuccagaccccuggcuuu

SEQ ID NO: 1158493 - RNA, 17 nt, Human
ccacuagacccacugga

SEQ ID NO: 1158494 - RNA, 15 nt, Human
ccacuagacccacug

SEQ ID NO: 1158495 - RNA, 15 nt, Human
ccaccaacccucaga

SEQ ID NO: 1158496 - RNA, 23 nt, Human
ccacaggcccuuccucuccacug

SEQ ID NO: 1158497 - RNA, 22 nt, Human
ccacaggcccuuccucuccacu

SEQ ID NO: 1158498 - RNA, 19 nt, Human
ccacaggcccuuccucucc

SEQ ID NO: 1158499 - RNA, 18 nt, Human
ccacaggcccuuccucuc

SEQ ID NO: 1158500 - RNA, 17 nt, Human
ccacaggcccuuccucu

SEQ ID NO: 1158501 - RNA, 16 nt, Human
ccacaggcccuuccuc

SEQ ID NO: 1158502 - RNA, 15 nt, Human
ccacaggcccuuccu

SEQ ID NO: 1158503 - RNA, 13 nt, Human
ccacacuccagcu

SEQ ID NO: 1158504 - RNA, 12 nt, Human
ccacacuccagc

SEQ ID NO: 1158505 - RNA, 22 nt, Human
ccaauaguuguugauuggcagg

SEQ ID NO: 1158506 - RNA, 15 nt, Human
ccaagccuggcaagg

SEQ ID NO: 1158507 - RNA, 14 nt, Human
ccaagccguggcuu

SEQ ID NO: 1158508 - RNA, 13 nt, Human
ccaagccguggcu

SEQ ID NO: 1158509 - RNA, 20 nt, Human
ccaagaauagaugcugacug

SEQ ID NO: 1158510 - RNA, 19 nt, Human
ccaagaauagaugcugacu

SEQ ID NO: 1158511 - RNA, 15 nt, Human
ccaacccucagagcc

SEQ ID NO: 1158512 - RNA, 14 nt, Human
ccaacccucagagc

SEQ ID NO: 1158513 - RNA, 20 nt, Human
ccaaccaaguggcucccaca

SEQ ID NO: 1158514 - RNA, 20 nt, Human
ccaaacauccuacaagacac

SEQ ID NO: 1158515 - RNA, 19 nt, Human
ccaaacauccuacaagaca

SEQ ID NO: 1158516 - RNA, 20 nt, Human
cauuuccugacagaaggacu

SEQ ID NO: 1158517 - RNA, 13 nt, Human
cauuuccugacag

SEQ ID NO: 1158518 - RNA, 21 nt, Human
cauuguagagcuucuggcacu

SEQ ID NO: 1158519 - RNA, 19 nt, Human
cauuguagagcuucuggca

SEQ ID NO: 1158520 - RNA, 17 nt, Human
cauuguagagcuucugg

SEQ ID NO: 1158521 - RNA, 16 nt, Human
cauuguagagcuucug

SEQ ID NO: 1158522 - RNA, 15 nt, Human
cauuguagagcuucu

SEQ ID NO: 1158523 - RNA, 16 nt, Human
agauaacaaucuguau

SEQ ID NO: 1158524 - RNA, 20 nt, Human
accuuacauuugaaaucuau

SEQ ID NO: 1158525 - RNA, 15 nt, Human
aaaaaauauuuuccu

SEQ ID NO: 1158526 - RNA, 15 nt, Human
aaauauuuauuuuaa

SEQ ID NO: 1158527 - RNA, 20 nt, Human
aaauauuuauuuuaauaaug

SEQ ID NO: 1158528 - RNA, 21 nt, Human
aaauauuuauuuuaauaaugu

SEQ ID NO: 1158529 - RNA, 24 nt, Human
aaauagcucaggugucccugcacu

SEQ ID NO: 1158530 - RNA, 16 nt, Human
aaagccuccuccagcc

SEQ ID NO: 1158531 - RNA, 14 nt, Human
aaagcccugugcuc

SEQ ID NO: 1158532 - RNA, 13 nt, Human
aaagcccugugcu

SEQ ID NO: 1158533 - RNA, 14 nt, Human
aaaggcuaccuuug

SEQ ID NO: 1158534 - RNA, 16 nt, Human
aaaggcuccaggagca

SEQ ID NO: 1158535 - RNA, 14 nt, Human
aaaggcagaagcaa

SEQ ID NO: 1158536 - RNA, 19 nt, Human
aaaggcagaagcaacccaa

SEQ ID NO: 1158537 - RNA, 19 nt, Human
aaaggcuccaggagcagcc

SEQ ID NO: 1158538 - RNA, 20 nt, Human
aaaggcuccaggagcagcca

SEQ ID NO: 1158539 - RNA, 13 nt, Human
aaaguggaaaaau

SEQ ID NO: 1158540 - RNA, 13 nt, Human
aaauaaaacuuuu

SEQ ID NO: 1158541 - RNA, 16 nt, Human
aaauaaaacuuuuuaa

SEQ ID NO: 1158542 - RNA, 19 nt, Human
aaauaaaacuuuuuaaaau

SEQ ID NO: 1158543 - RNA, 17 nt, Human
aaaauaaaacuuuuuaa

SEQ ID NO: 1158544 - RNA, 14 nt, Human
aaaaguuaaaaagu

SEQ ID NO: 1158545 - RNA, 18 nt, Human
aaaaguucugcagauaaa

SEQ ID NO: 1158546 - RNA, 21 nt, Human
aaaaucuacacuccagugaga

SEQ ID NO: 1158547 - RNA, 16 nt, Human
aaaaagaaacauuugg

SEQ ID NO: 1158548 - RNA, 15 nt, Human
aaaaagaaaggaggg

SEQ ID NO: 1158549 - RNA, 19 nt, Human
aaaaucucaaauuucuaaa

SEQ ID NO: 1158550 - RNA, 22 nt, Human
aaaaucucaaauuucuaaaucu

SEQ ID NO: 1158551 - RNA, 16 nt, Human
aaaaucucaauauuuc

SEQ ID NO: 1158552 - RNA, 17 nt, Human
aaaaucucaauauuuca

SEQ ID NO: 1158553 - RNA, 16 nt, Human
aaacacuguucucugc

SEQ ID NO: 1158554 - RNA, 18 nt, Human
aaacucuccucugcugcu

SEQ ID NO: 1158555 - RNA, 18 nt, Human
aaaccaucauugaaaucu

SEQ ID NO: 1158556 - RNA, 19 nt, Human
aaagaguguggcaaaauaa

SEQ ID NO: 1158557 - RNA, 17 nt, Human
aaagauauuuugcuuug

SEQ ID NO: 1158558 - RNA, 20 nt, Human
aaagauauuuugcuuuguga

SEQ ID NO: 1158559 - RNA, 12 nt, Human
aaagauauuuug

SEQ ID NO: 1158560 - RNA, 16 nt, Human
aaagauauuuugcuuu

SEQ ID NO: 1158561 - RNA, 17 nt, Human
aaccuagggugauauua

SEQ ID NO: 1158562 - RNA, 13 nt, Human
aaccacgcuggac

SEQ ID NO: 1158563 - RNA, 15 nt, Human
aaccacuucagcuga

SEQ ID NO: 1158564 - RNA, 21 nt, Human
aaauucuugcaaaguaucccu

SEQ ID NO: 1158565 - RNA, 19 nt, Human
aaauugacacuuaaaaaug

SEQ ID NO: 1158566 - RNA, 22 nt, Human
aaauugacacuuaaaaaugguu

SEQ ID NO: 1158567 - RNA, 17 nt, Human
aaaucuuauaauuuaaa

SEQ ID NO: 1158568 - RNA, 18 nt, Human
aacaaauuuacagagaca

SEQ ID NO: 1158569 - RNA, 14 nt, Human
aacugauaaagaug

SEQ ID NO: 1158570 - RNA, 15 nt, Human
aacugacucuuaaga

SEQ ID NO: 1158571 - RNA, 18 nt, Human
aacugacucuuaagaaga

SEQ ID NO: 1158572 - RNA, 19 nt, Human
aacugacucuuaagaagac

SEQ ID NO: 1158573 - RNA, 20 nt, Human
aacugacucuuaagaagacu

SEQ ID NO: 1158574 - RNA, 15 nt, Human
aacuuaaucuaaaug

SEQ ID NO: 1158575 - RNA, 16 nt, Human
aacuuaaucuaaaugg

SEQ ID NO: 1158576 - RNA, 18 nt, Human
aacuuaaucuaaauggaa

SEQ ID NO: 1158577 - RNA, 21 nt, Human
aacuuuaugcuaagugaaaua

SEQ ID NO: 1158578 - RNA, 20 nt, Human
aacuuuaugcuaagugaaau

SEQ ID NO: 1158579 - RNA, 18 nt, Human
aaugcgugcauaccacuu

SEQ ID NO: 1158580 - RNA, 19 nt, Human
aaugcgugcauaccacuuu

SEQ ID NO: 1158581 - RNA, 21 nt, Human
aaugcgugcauaccacuuuug

SEQ ID NO: 1158582 - RNA, 23 nt, Human
aaugccuuacccucauguucuua

SEQ ID NO: 1158583 - RNA, 21 nt, Human
aaugcuggcuguuggcugggg

SEQ ID NO: 1158584 - RNA, 23 nt, Human
aauguuucaaacauauauaacaa

SEQ ID NO: 1158585 - RNA, 15 nt, Human
aauguuugccucugc

SEQ ID NO: 1158586 - RNA, 16 nt, Human
aauguuugccucugcc

SEQ ID NO: 1158587 - RNA, 15 nt, Human
aaugugaaaagaaaa

SEQ ID NO: 1158588 - RNA, 17 nt, Human
aaugugaaaagaaaaau

SEQ ID NO: 1158589 - RNA, 14 nt, Human
aaucaccgaaaacg

SEQ ID NO: 1158590 - RNA, 15 nt, Human
aaucaccgaaaacgu

SEQ ID NO: 1158591 - RNA, 13 nt, Human
aauagacaauuua

SEQ ID NO: 1158592 - RNA, 18 nt, Human
aauagacaauuuauuaug

SEQ ID NO: 1158593 - RNA, 11 nt, Human
aauauacugua

SEQ ID NO: 1158594 - RNA, 12 nt, Human
aauauacuguaa

SEQ ID NO: 1158595 - RNA, 13 nt, Human
aauauacuguaaa

SEQ ID NO: 1158596 - RNA, 14 nt, Human
aauauacuguaaag

SEQ ID NO: 1158597 - RNA, 15 nt, Human
aauauacuguaaaga

SEQ ID NO: 1158598 - RNA, 16 nt, Human
aauauacuguaaagaa

SEQ ID NO: 1158599 - RNA, 17 nt, Human
aauauacuguaaagaaa

SEQ ID NO: 1158600 - RNA, 18 nt, Human
aauauacuguaaagaaag

SEQ ID NO: 1158601 - RNA, 21 nt, Human
aauauacuguaaagaaagaga

SEQ ID NO: 1158602 - RNA, 22 nt, Human
aauauacuguaaagaaagagag

SEQ ID NO: 1158603 - RNA, 23 nt, Human
aauauacuguaaagaaagagaga

SEQ ID NO: 1158604 - RNA, 20 nt, Human
aauacucuacccucuuagaa

SEQ ID NO: 1158605 - RNA, 22 nt, Human
aauacucuacccucuuagaaaa

SEQ ID NO: 1158606 - RNA, 15 nt, Human
aauccaaugaaauga

SEQ ID NO: 1158607 - RNA, 19 nt, Human
aauccagacccggcugcgu

SEQ ID NO: 1158608 - RNA, 16 nt, Human
aaucucaaauuucuaa

SEQ ID NO: 1158609 - RNA, 17 nt, Human
aaucucaaauuucuaaa

SEQ ID NO: 1158610 - RNA, 18 nt, Human
aaucucaaauuucuaaau

SEQ ID NO: 1158611 - RNA, 21 nt, Human
aaugauuaugaauuacauuug

SEQ ID NO: 1158612 - RNA, 23 nt, Human
aaugauuaugaauuacauuugua

SEQ ID NO: 1158613 - RNA, 15 nt, Human
aaugauuaugaauua

SEQ ID NO: 1158614 - RNA, 15 nt, Human
aaggauguucuagca

SEQ ID NO: 1158615 - RNA, 15 nt, Human
aaggauugcuacugu

SEQ ID NO: 1158616 - RNA, 18 nt, Human
aagcuggucccacucagu

SEQ ID NO: 1158617 - RNA, 21 nt, Human
aagcuggucccacucagucca

SEQ ID NO: 1158618 - RNA, 21 nt, Human
aagcgauucuucugcuucagc

SEQ ID NO: 1158619 - RNA, 12 nt, Human
aagauaaaugug

SEQ ID NO: 1158620 - RNA, 13 nt, Human
aagauaaaugugc

SEQ ID NO: 1158621 - RNA, 14 nt, Human
aagauaaaugugcu

SEQ ID NO: 1158622 - RNA, 20 nt, Human
aagccagcaggcucucaggc

SEQ ID NO: 1158623 - RNA, 23 nt, Human
aagccagcaggcucucaggccag

SEQ ID NO: 1158624 - RNA, 14 nt, Human
aagcagcguuucua

SEQ ID NO: 1158625 - RNA, 17 nt, Human
aagcagcguuucuauga

SEQ ID NO: 1158626 - RNA, 20 nt, Human
aagcagcguuucuaugacac

SEQ ID NO: 1158627 - RNA, 21 nt, Human
aagcagcguuucuaugacaca

SEQ ID NO: 1158628 - RNA, 22 nt, Human
aagcagcguuucuaugacacau

SEQ ID NO: 1158629 - RNA, 22 nt, Human
aaguccucuuuucugagaggac

SEQ ID NO: 1158630 - RNA, 18 nt, Human
aaguccaagcauuuagau

SEQ ID NO: 1158631 - RNA, 18 nt, Human
aaguccucuuuucugaga

SEQ ID NO: 1158632 - RNA, 19 nt, Human
aaguagaagucuuagaugu

SEQ ID NO: 1158633 - RNA, 20 nt, Human
aaguagaagucuuagaugua

SEQ ID NO: 1158634 - RNA, 21 nt, Human
aaguagaagucuuagauguau

SEQ ID NO: 1158635 - RNA, 18 nt, Human
aaguaucccuacuguaau

SEQ ID NO: 1158636 - RNA, 23 nt, Human
aaguaucccuacuguaauuugug

SEQ ID NO: 1158637 - RNA, 18 nt, Human
aagggacgcuacccggga

SEQ ID NO: 1158638 - RNA, 13 nt, Human
aagggcccagaga

SEQ ID NO: 1158639 - RNA, 19 nt, Human
aaggucauuuuuuuuaaga

SEQ ID NO: 1158640 - RNA, 21 nt, Human
aaguggaaaaauagccugccu

SEQ ID NO: 1158641 - RNA, 19 nt, Human
aaguggaaaaauagccugc

SEQ ID NO: 1158642 - RNA, 15 nt, Human
acuuuuauaaacuuu

SEQ ID NO: 1158643 - RNA, 20 nt, Human
acuuuucauaaccuagccuu

SEQ ID NO: 1158644 - RNA, 16 nt, Human
acuuuucuuucagcca

SEQ ID NO: 1158645 - RNA, 14 nt, Human
acuuuucuuugugg

SEQ ID NO: 1158646 - RNA, 19 nt, Human
agaaaauaguggugugauu

SEQ ID NO: 1158647 - RNA, 10 nt, Human
agaaaauaua

SEQ ID NO: 1158648 - RNA, 11 nt, Human
agaaaauauac

SEQ ID NO: 1158649 - RNA, 16 nt, Human
agaaaaucaggcuggc

SEQ ID NO: 1158650 - RNA, 22 nt, Human
acuuuauuuucuauaauuuaaa

SEQ ID NO: 1158651 - RNA, 16 nt, Human
acuuuguucuggcucu

SEQ ID NO: 1158652 - RNA, 17 nt, Human
acuuuguucuggcucuu

SEQ ID NO: 1158653 - RNA, 19 nt, Human
acuuuguucuggcucuucc

SEQ ID NO: 1158654 - RNA, 20 nt, Human
acuuuguucuggcucuucca

SEQ ID NO: 1158655 - RNA, 13 nt, Human
acuuuuauaaacu

SEQ ID NO: 1158656 - RNA, 22 nt, Human
agaaaguacuucuccacccugc

SEQ ID NO: 1158657 - RNA, 23 nt, Human
agaaaguacuucuccacccugcu

SEQ ID NO: 1158658 - RNA, 14 nt, Human
agaaaguucaugcu

SEQ ID NO: 1158659 - RNA, 17 nt, Human
acuggaagcacagcuuc

SEQ ID NO: 1158660 - RNA, 19 nt, Human
acuggaagcacagcuucau

SEQ ID NO: 1158661 - RNA, 15 nt, Human
acuggagaaaaugga

SEQ ID NO: 1158662 - RNA, 18 nt, Human
acugguuccauggccucu

SEQ ID NO: 1158663 - RNA, 19 nt, Human
acuguaagaaaauaucacu

SEQ ID NO: 1158664 - RNA, 22 nt, Human
acuguaagaaaauaucacuugu

SEQ ID NO: 1158665 - RNA, 18 nt, Human
acucugucucaguccaug

SEQ ID NO: 1158666 - RNA, 20 nt, Human
acucugucucaguccaugaa

SEQ ID NO: 1158667 - RNA, 18 nt, Human
acuuguaaaggaauuuaa

SEQ ID NO: 1158668 - RNA, 16 nt, Human
acuugguuuuuaaaaa

SEQ ID NO: 1158669 - RNA, 14 nt, Human
acuugggccacugu

SEQ ID NO: 1158670 - RNA, 15 nt, Human
acuugggccacugug

SEQ ID NO: 1158671 - RNA, 12 nt, Human
acuucagacaua

SEQ ID NO: 1158672 - RNA, 22 nt, Human
acugugcugagucugaaggcug

SEQ ID NO: 1158673 - RNA, 20 nt, Human
acugugcugagucugaaggc

SEQ ID NO: 1158674 - RNA, 12 nt, Human
accugucccccu

SEQ ID NO: 1158675 - RNA, 15 nt, Human
accugucccccugac

SEQ ID NO: 1158676 - RNA, 16 nt, Human
accugucccccugaca

SEQ ID NO: 1158677 - RNA, 13 nt, Human
accuuucccaucu

SEQ ID NO: 1158678 - RNA, 18 nt, Human
accuuucccaucuuccaa

SEQ ID NO: 1158679 - RNA, 15 nt, Human
accuuuaagagaaau

SEQ ID NO: 1158680 - RNA, 17 nt, Human
accuuggcugcagggag

SEQ ID NO: 1158681 - RNA, 18 nt, Human
accuuggcugcagggagu

SEQ ID NO: 1158682 - RNA, 21 nt, Human
accucugcagcaauaaagcag

SEQ ID NO: 1158683 - RNA, 18 nt, Human
accucugcagcaauaaag

SEQ ID NO: 1158684 - RNA, 20 nt, Human
accucugcagcaauaaagca

SEQ ID NO: 1158685 - RNA, 11 nt, Human
acgcugugcug

SEQ ID NO: 1158686 - RNA, 12 nt, Human
acgcugugcugc

SEQ ID NO: 1158687 - RNA, 14 nt, Human
acgcugugcugccc

SEQ ID NO: 1158688 - RNA, 15 nt, Human
acgcugugcugcccu

SEQ ID NO: 1158689 - RNA, 13 nt, Human
acgucugacaggc

SEQ ID NO: 1158690 - RNA, 14 nt, Human
acgucugacaggca

SEQ ID NO: 1158691 - RNA, 15 nt, Human
acgucugacaggcaa

SEQ ID NO: 1158692 - RNA, 15 nt, Human
acuaaguuuuuaugg

SEQ ID NO: 1158693 - RNA, 11 nt, Human
acgugaguccu

SEQ ID NO: 1158694 - RNA, 13 nt, Human
acuaagagagaau

SEQ ID NO: 1158695 - RNA, 15 nt, Human
acuaagagagaauga

SEQ ID NO: 1158696 - RNA, 19 nt, Human
acucaguccauagcagaga

SEQ ID NO: 1158697 - RNA, 20 nt, Human
acuaguauuucuaugaaaua

SEQ ID NO: 1158698 - RNA, 13 nt, Human
acucaaaagcugg

SEQ ID NO: 1158699 - RNA, 18 nt, Human
acucaaaagcugggcagg

SEQ ID NO: 1158700 - RNA, 15 nt, Human
acucuagggaaaaac

SEQ ID NO: 1158701 - RNA, 17 nt, Human
acucuagggaaaaacca

SEQ ID NO: 1158702 - RNA, 23 nt, Human
acucuaucaaguauuauaccuuu

SEQ ID NO: 1158703 - RNA, 17 nt, Human
acucuauguucuaagaa

SEQ ID NO: 1158704 - RNA, 19 nt, Human
acucugucgcccagucugg

SEQ ID NO: 1158705 - RNA, 15 nt, Human
acacgcgugcacaca

SEQ ID NO: 1158706 - RNA, 17 nt, Human
acacgcgugcacacacc

SEQ ID NO: 1158707 - RNA, 20 nt, Human
acacagcucuguccugggag

SEQ ID NO: 1158708 - RNA, 19 nt, Human
acacagaggcugccucucc

SEQ ID NO: 1158709 - RNA, 11 nt, Human
acacagcucuu

SEQ ID NO: 1158710 - RNA, 13 nt, Human
acacagcucuucu

SEQ ID NO: 1158711 - RNA, 22 nt, Human
acacauuuuauuuuauuaugca

SEQ ID NO: 1158712 - RNA, 12 nt, Human
acacauuuuucu

SEQ ID NO: 1158713 - RNA, 20 nt, Human
acacauuuuuuaaaugcacc

SEQ ID NO: 1158714 - RNA, 22 nt, Human
acacauuuuuuaaaugcaccug

SEQ ID NO: 1158715 - RNA, 13 nt, Human
acaagaaaugaaa

SEQ ID NO: 1158716 - RNA, 17 nt, Human
acaaggauugcuacugu

SEQ ID NO: 1158717 - RNA, 12 nt, Human
acaaggcaaggc

SEQ ID NO: 1158718 - RNA, 14 nt, Human
acaaggcaaggcug

SEQ ID NO: 1158719 - RNA, 22 nt, Human
acaaaauguaggguuauaauaa

SEQ ID NO: 1158720 - RNA, 15 nt, Human
acaaggcaaggcugu

SEQ ID NO: 1158721 - RNA, 13 nt, Human
aauuuugugaagc

SEQ ID NO: 1158722 - RNA, 19 nt, Human
acagccacggccaggccag

SEQ ID NO: 1158723 - RNA, 18 nt, Human
acagccacggccaggcca

SEQ ID NO: 1158724 - RNA, 20 nt, Human
acagccacacacacagaaaa

SEQ ID NO: 1158725 - RNA, 21 nt, Human
acagccacacacacagaaaau

SEQ ID NO: 1158726 - RNA, 22 nt, Human
acagccacacacacagaaaaua

SEQ ID NO: 1158727 - RNA, 23 nt, Human
acagccacacacacagaaaauau

SEQ ID NO: 1158728 - RNA, 15 nt, Human
acagccacggccagg

SEQ ID NO: 1158729 - RNA, 16 nt, Human
acagccacggccaggc

SEQ ID NO: 1158730 - RNA, 17 nt, Human
acagccacggccaggcc

SEQ ID NO: 1158731 - RNA, 16 nt, Human
acagcucuucuccagg

SEQ ID NO: 1158732 - RNA, 17 nt, Human
acagcucuucuccaggc

SEQ ID NO: 1158733 - RNA, 18 nt, Human
acagcucuucuccaggcu

SEQ ID NO: 1158734 - RNA, 12 nt, Human
acaggcaagcac

SEQ ID NO: 1158735 - RNA, 15 nt, Human
acaggcaagcaccuc

SEQ ID NO: 1158736 - RNA, 22 nt, Human
acaggaugguucccuugaugaa

SEQ ID NO: 1158737 - RNA, 14 nt, Human
acacugcauguuug

SEQ ID NO: 1158738 - RNA, 15 nt, Human
acacugcauguuugu

SEQ ID NO: 1158739 - RNA, 15 nt, Human
acacuguacugcaau

SEQ ID NO: 1158740 - RNA, 13 nt, Human
acagacaaagcgu

SEQ ID NO: 1158741 - RNA, 13 nt, Human
acagacacaggcc

SEQ ID NO: 1158742 - RNA, 14 nt, Human
acagacacaggccc

SEQ ID NO: 1158743 - RNA, 15 nt, Human
acagaggcagcccca

SEQ ID NO: 1158744 - RNA, 19 nt, Human
acagaggcagccccauucu

SEQ ID NO: 1158745 - RNA, 23 nt, Human
acagaggcagccccauucugccu

SEQ ID NO: 1158746 - RNA, 15 nt, Human
acagacacaggcccg

SEQ ID NO: 1158747 - RNA, 14 nt, Human
acagaggggguggc

SEQ ID NO: 1158748 - RNA, 15 nt, Human
acagagugagacucu

SEQ ID NO: 1158749 - RNA, 19 nt, Human
acagagugagacucugucu

SEQ ID NO: 1158750 - RNA, 21 nt, Human
acagagugagacucugucuca

SEQ ID NO: 1158751 - RNA, 10 nt, Human
acagccacac

SEQ ID NO: 1158752 - RNA, 11 nt, Human
acagccacaca

SEQ ID NO: 1158753 - RNA, 12 nt, Human
acagccacacac

SEQ ID NO: 1158754 - RNA, 13 nt, Human
acagccacacaca

SEQ ID NO: 1158755 - RNA, 14 nt, Human
acagccacacacac

SEQ ID NO: 1158756 - RNA, 15 nt, Human
acagccacacacaca

SEQ ID NO: 1158757 - RNA, 16 nt, Human
acagccacacacacag

SEQ ID NO: 1158758 - RNA, 17 nt, Human
acagccacacacacaga

SEQ ID NO: 1158759 - RNA, 18 nt, Human
acagccacacacacagaa

SEQ ID NO: 1158760 - RNA, 19 nt, Human
acagccacacacacagaaa

SEQ ID NO: 1158761 - RNA, 16 nt, Human
accccuccaugugggc

SEQ ID NO: 1158762 - RNA, 19 nt, Human
accccuccaugugggcuag

SEQ ID NO: 1158763 - RNA, 11 nt, Human
acccccugaau

SEQ ID NO: 1158764 - RNA, 16 nt, Human
acccaccucagccucc

SEQ ID NO: 1158765 - RNA, 20 nt, Human
accauauuaccacagacaua

SEQ ID NO: 1158766 - RNA, 19 nt, Human
acccaagggccuggccuga

SEQ ID NO: 1158767 - RNA, 22 nt, Human
acccaagggccuggccugagcu

SEQ ID NO: 1158768 - RNA, 23 nt, Human
acccaagggccuggccugagcug

SEQ ID NO: 1158769 - RNA, 17 nt, Human
acccacaagaaaugaaa

SEQ ID NO: 1158770 - RNA, 21 nt, Human
acccacaagaaaugaaagcag

SEQ ID NO: 1158771 - RNA, 13 nt, Human
acccaccucagcc

SEQ ID NO: 1158772 - RNA, 14 nt, Human
acccaccucagccu

SEQ ID NO: 1158773 - RNA, 15 nt, Human
acccaccucagccuc

SEQ ID NO: 1158774 - RNA, 14 nt, Human
accauauuaccaca

SEQ ID NO: 1158775 - RNA, 16 nt, Human
accauauuaccacaga

SEQ ID NO: 1158776 - RNA, 15 nt, Human
acaucagcacgauuu

SEQ ID NO: 1158777 - RNA, 17 nt, Human
acaucagcacgauuucu

SEQ ID NO: 1158778 - RNA, 18 nt, Human
acaucagcacgauuucug

SEQ ID NO: 1158779 - RNA, 19 nt, Human
acaucagcacgauuucugu

SEQ ID NO: 1158780 - RNA, 12 nt, Human
acaugcauacac

SEQ ID NO: 1158781 - RNA, 13 nt, Human
acaugcauacaca

SEQ ID NO: 1158782 - RNA, 14 nt, Human
acaugcauacacac

SEQ ID NO: 1158783 - RNA, 15 nt, Human
acaugcauacacaca

SEQ ID NO: 1158784 - RNA, 16 nt, Human
acaugcauacacacac

SEQ ID NO: 1158785 - RNA, 17 nt, Human
acaugcauacacacaca

SEQ ID NO: 1158786 - RNA, 24 nt, Human
acaugcauacacacacacacacag

SEQ ID NO: 1158787 - RNA, 16 nt, Human
acaugugcacaugcac

SEQ ID NO: 1158788 - RNA, 18 nt, Human
acaugugcacaugcacgu

SEQ ID NO: 1158789 - RNA, 19 nt, Human
acaggguuuugccauguug

SEQ ID NO: 1158790 - RNA, 19 nt, Human
acaggcaaugcuggcuguu

SEQ ID NO: 1158791 - RNA, 23 nt, Human
acaggcaaugcuggcuguuggcu

SEQ ID NO: 1158792 - RNA, 14 nt, Human
acaggcacccacca

SEQ ID NO: 1158793 - RNA, 23 nt, Human
acauaaugcgugcauaccacuuu

SEQ ID NO: 1158794 - RNA, 22 nt, Human
acauaaugcgugcauaccacuu

SEQ ID NO: 1158795 - RNA, 15 nt, Human
acauuuauucugcuc

SEQ ID NO: 1158796 - RNA, 12 nt, Human
accaagcccagu

SEQ ID NO: 1158797 - RNA, 13 nt, Human
accagcagaaaug

SEQ ID NO: 1158798 - RNA, 14 nt, Human
accagcagaaaugc

SEQ ID NO: 1158799 - RNA, 17 nt, Human
accagccaguaaauggg

SEQ ID NO: 1158800 - RNA, 12 nt, Human
agggucccuggu

SEQ ID NO: 1158801 - RNA, 11 nt, Human
agggucccugg

SEQ ID NO: 1158802 - RNA, 19 nt, Human
aggggccucuuaugggcug

SEQ ID NO: 1158803 - RNA, 20 nt, Human
aggggccucuuaugggcugg

SEQ ID NO: 1158804 - RNA, 21 nt, Human
aggggccucuuaugggcuggg

SEQ ID NO: 1158805 - RNA, 19 nt, Human
aggguaucaggugcugcca

SEQ ID NO: 1158806 - RNA, 21 nt, Human
aggguaucaggugcugccauc

SEQ ID NO: 1158807 - RNA, 15 nt, Human
aggguaucuggugac

SEQ ID NO: 1158808 - RNA, 20 nt, Human
agguaaaagcaucacaugaa

SEQ ID NO: 1158809 - RNA, 22 nt, Human
aggucuguucuuuccaaaguac

SEQ ID NO: 1158810 - RNA, 23 nt, Human
aggucuguucuuuccaaaguaca

SEQ ID NO: 1158811 - RNA, 14 nt, Human
agguucaaagauau

SEQ ID NO: 1158812 - RNA, 15 nt, Human
agguucaaagauauu

SEQ ID NO: 1158813 - RNA, 22 nt, Human
agguucccuuugacgccauccc

SEQ ID NO: 1158814 - RNA, 23 nt, Human
agguucccuuugacgccauccca

SEQ ID NO: 1158815 - RNA, 19 nt, Human
aggugcuaggaacacuccu

SEQ ID NO: 1158816 - RNA, 22 nt, Human
aggugcuaggaacacuccuuca

SEQ ID NO: 1158817 - RNA, 23 nt, Human
aggugcuaggaacacuccuucac

SEQ ID NO: 1158818 - RNA, 15 nt, Human
agguuaauaaaguaa

SEQ ID NO: 1158819 - RNA, 21 nt, Human
aggcuagaaccaccugccuau

SEQ ID NO: 1158820 - RNA, 22 nt, Human
aggcccuucucuccagccccug

SEQ ID NO: 1158821 - RNA, 23 nt, Human
aggcccuucucuccagccccugg

SEQ ID NO: 1158822 - RNA, 20 nt, Human
aggcccuucucuccagcccc

SEQ ID NO: 1158823 - RNA, 21 nt, Human
aggcccuucucuccagccccu

SEQ ID NO: 1158824 - RNA, 17 nt, Human
agggacgcuacccggga

SEQ ID NO: 1158825 - RNA, 15 nt, Human
aggcuagauguaugu

SEQ ID NO: 1158826 - RNA, 16 nt, Human
aggcuagauguaugua

SEQ ID NO: 1158827 - RNA, 17 nt, Human
aggcuagauguauguac

SEQ ID NO: 1158828 - RNA, 13 nt, Human
aggcuguauccca

SEQ ID NO: 1158829 - RNA, 18 nt, Human
aggcuguaucccaugagc

SEQ ID NO: 1158830 - RNA, 20 nt, Human
aggcugucaauuacaggaag

SEQ ID NO: 1158831 - RNA, 21 nt, Human
aggcugucaauuacaggaagu

SEQ ID NO: 1158832 - RNA, 22 nt, Human
agggacagaggggguggccucc

SEQ ID NO: 1158833 - RNA, 23 nt, Human
agggacagaggggguggccuccc

SEQ ID NO: 1158834 - RNA, 20 nt, Human
agcuccgcuuucuacccagc

SEQ ID NO: 1158835 - RNA, 21 nt, Human
agcuccgcuuucuacccagcg

SEQ ID NO: 1158836 - RNA, 23 nt, Human
agcuccgcuuucuacccagcgag

SEQ ID NO: 1158837 - RNA, 12 nt, Human
agcuccuucugu

SEQ ID NO: 1158838 - RNA, 13 nt, Human
agcuccuucuguc

SEQ ID NO: 1158839 - RNA, 23 nt, Human
agcugcgguccacccaggagccc

SEQ ID NO: 1158840 - RNA, 18 nt, Human
aggauguucugggacaca

SEQ ID NO: 1158841 - RNA, 14 nt, Human
aggauuauuggaaa

SEQ ID NO: 1158842 - RNA, 15 nt, Human
aggauguucugggac

SEQ ID NO: 1158843 - RNA, 16 nt, Human
aggauguucugggaca

SEQ ID NO: 1158844 - RNA, 23 nt, Human
aggaugguucccuugaugaagaa

SEQ ID NO: 1158845 - RNA, 13 nt, Human
aggaccucaggug

SEQ ID NO: 1158846 - RNA, 21 nt, Human
aggaugcuuguacauaaugcg

SEQ ID NO: 1158847 - RNA, 23 nt, Human
aggaugcuuguacauaaugcgug

SEQ ID NO: 1158848 - RNA, 20 nt, Human
aggaauccagacccggcugc

SEQ ID NO: 1158849 - RNA, 21 nt, Human
aggaaucaugugccaagcaga

SEQ ID NO: 1158850 - RNA, 17 nt, Human
aggaauccagacccggc

SEQ ID NO: 1158851 - RNA, 19 nt, Human
agauauaugcucugcaugu

SEQ ID NO: 1158852 - RNA, 23 nt, Human
agaggguggugaccucugccuga

SEQ ID NO: 1158853 - RNA, 11 nt, Human
agagugggagc

SEQ ID NO: 1158854 - RNA, 19 nt, Human
agaguggggauaugauuua

SEQ ID NO: 1158855 - RNA, 14 nt, Human
agagugugccugaa

SEQ ID NO: 1158856 - RNA, 17 nt, Human
agaguguggcaaaauaa

SEQ ID NO: 1158857 - RNA, 12 nt, Human
agagggcacaga

SEQ ID NO: 1158858 - RNA, 20 nt, Human
agaggguggugaccucugcc

SEQ ID NO: 1158859 - RNA, 22 nt, Human
agaggguggugaccucugccug

SEQ ID NO: 1158860 - RNA, 16 nt, Human
agaggaaggagaggag

SEQ ID NO: 1158861 - RNA, 14 nt, Human
agaggacuuuucuu

SEQ ID NO: 1158862 - RNA, 15 nt, Human
agaggagagaggacc

SEQ ID NO: 1158863 - RNA, 16 nt, Human
agaggagagaggaccc

SEQ ID NO: 1158864 - RNA, 15 nt, Human
agagcccaggccucc

SEQ ID NO: 1158865 - RNA, 13 nt, Human
agagcccaggccu

SEQ ID NO: 1158866 - RNA, 14 nt, Human
agagcccaggccuc

SEQ ID NO: 1158867 - RNA, 12 nt, Human
agagaaaauaaa

SEQ ID NO: 1158868 - RNA, 13 nt, Human
agagaaaauaaaa

SEQ ID NO: 1158869 - RNA, 14 nt, Human
agagaaaauaaaaa

SEQ ID NO: 1158870 - RNA, 17 nt, Human
agacuggaagcacagcu

SEQ ID NO: 1158871 - RNA, 19 nt, Human
agacuggaagcacagcuuc

SEQ ID NO: 1158872 - RNA, 23 nt, Human
agagaggguggugaccucugccu

SEQ ID NO: 1158873 - RNA, 22 nt, Human
agagaggguggugaccucugcc

SEQ ID NO: 1158874 - RNA, 20 nt, Human
agagaggguggugaccucug

SEQ ID NO: 1158875 - RNA, 21 nt, Human
agagaggguggugaccucugc

SEQ ID NO: 1158876 - RNA, 19 nt, Human
agagcccaccuuggcucaa

SEQ ID NO: 1158877 - RNA, 13 nt, Human
agagcccacgccc

SEQ ID NO: 1158878 - RNA, 16 nt, Human
agagcccacgccccca

SEQ ID NO: 1158879 - RNA, 17 nt, Human
agagcccacgcccccac

SEQ ID NO: 1158880 - RNA, 15 nt, Human
agagaaaauaaaaag

SEQ ID NO: 1158881 - RNA, 16 nt, Human
agagaaaauaaaaagu

SEQ ID NO: 1158882 - RNA, 17 nt, Human
agagaaaauaaaaaguu

SEQ ID NO: 1158883 - RNA, 18 nt, Human
agagaaaauaaaaaguua

SEQ ID NO: 1158884 - RNA, 17 nt, Human
agagaacuuccagaucc

SEQ ID NO: 1158885 - RNA, 10 nt, Human
agagaagaga

SEQ ID NO: 1158886 - RNA, 14 nt, Human
agacagcccgggcu

SEQ ID NO: 1158887 - RNA, 15 nt, Human
agacagcccgggcuc

SEQ ID NO: 1158888 - RNA, 16 nt, Human
agacagcccgggcucu

SEQ ID NO: 1158889 - RNA, 22 nt, Human
agacgcugugcugcccugccca

SEQ ID NO: 1158890 - RNA, 18 nt, Human
agacggagucccaccuug

SEQ ID NO: 1158891 - RNA, 11 nt, Human
agacagcucuu

SEQ ID NO: 1158892 - RNA, 12 nt, Human
agacagcucuua

SEQ ID NO: 1158893 - RNA, 12 nt, Human
agacagcugccu

SEQ ID NO: 1158894 - RNA, 21 nt, Human
agacgcugugcugcccugccc

SEQ ID NO: 1158895 - RNA, 13 nt, Human
agccccauucugc

SEQ ID NO: 1158896 - RNA, 16 nt, Human
agccccauucugccug

SEQ ID NO: 1158897 - RNA, 17 nt, Human
agccccauucugccugc

SEQ ID NO: 1158898 - RNA, 13 nt, Human
agccccagugccc

SEQ ID NO: 1158899 - RNA, 14 nt, Human
agccccagugccca

SEQ ID NO: 1158900 - RNA, 15 nt, Human
agccccagugcccac

SEQ ID NO: 1158901 - RNA, 18 nt, Human
agccagcaggcucucagg

SEQ ID NO: 1158902 - RNA, 19 nt, Human
agccagcaggcucucaggc

SEQ ID NO: 1158903 - RNA, 20 nt, Human
agccagcaggcucucaggcc

SEQ ID NO: 1158904 - RNA, 21 nt, Human
agccagcaggcucucaggcca

SEQ ID NO: 1158905 - RNA, 21 nt, Human
agccgccaugcuccuggccca

SEQ ID NO: 1158906 - RNA, 13 nt, Human
agccgcuggggcc

SEQ ID NO: 1158907 - RNA, 21 nt, Human
agccgggcgugguggugagug

SEQ ID NO: 1158908 - RNA, 21 nt, Human
agccucccaaagugcugggau

SEQ ID NO: 1158909 - RNA, 22 nt, Human
agccucccacgacugcccggca

SEQ ID NO: 1158910 - RNA, 18 nt, Human
agccucccgaguagcugg

SEQ ID NO: 1158911 - RNA, 19 nt, Human
agccucccgaguagcuggg

SEQ ID NO: 1158912 - RNA, 20 nt, Human
agccucccgaguagcuggga

SEQ ID NO: 1158913 - RNA, 22 nt, Human
agccucccgaguagcugggacu

SEQ ID NO: 1158914 - RNA, 14 nt, Human
agccuccuccagcc

SEQ ID NO: 1158915 - RNA, 22 nt, Human
agcauccuggcacccggccccu

SEQ ID NO: 1158916 - RNA, 23 nt, Human
agcauccuggcacccggccccug

SEQ ID NO: 1158917 - RNA, 23 nt, Human
agcaugccuggauggggcugcac

SEQ ID NO: 1158918 - RNA, 23 nt, Human
agccaagugugguagagugugcc

SEQ ID NO: 1158919 - RNA, 13 nt, Human
agcagcguuucua

SEQ ID NO: 1158920 - RNA, 18 nt, Human
agcagcguuucuaugaca

SEQ ID NO: 1158921 - RNA, 19 nt, Human
agcagugcaugcugucccu

SEQ ID NO: 1158922 - RNA, 20 nt, Human
agcagugcaugcugucccuu

SEQ ID NO: 1158923 - RNA, 23 nt, Human
agcacacuugacaucaacugcau

SEQ ID NO: 1158924 - RNA, 12 nt, Human
agcacagacccu

SEQ ID NO: 1158925 - RNA, 18 nt, Human
agcacagacccugcccug

SEQ ID NO: 1158926 - RNA, 19 nt, Human
agcacagacccugcccugu

SEQ ID NO: 1158927 - RNA, 20 nt, Human
agcacagacccugcccugug

SEQ ID NO: 1158928 - RNA, 14 nt, Human
augucuuuucuugc

SEQ ID NO: 1158929 - RNA, 22 nt, Human
augugaaacuggauuaaacuua

SEQ ID NO: 1158930 - RNA, 19 nt, Human
auggucaccaaaucagcug

SEQ ID NO: 1158931 - RNA, 15 nt, Human
auggucggaaaacau

SEQ ID NO: 1158932 - RNA, 15 nt, Human
auguaauuaaguacu

SEQ ID NO: 1158933 - RNA, 17 nt, Human
auguaauuaaguacuau

SEQ ID NO: 1158934 - RNA, 23 nt, Human
auguaauuaaguacuauguauca

SEQ ID NO: 1158935 - RNA, 13 nt, Human
auguucugggaca

SEQ ID NO: 1158936 - RNA, 19 nt, Human
auguuugccucugccucug

SEQ ID NO: 1158937 - RNA, 22 nt, Human
auguuugccucugccucugaca

SEQ ID NO: 1158938 - RNA, 15 nt, Human
auguuuucaggcuag

SEQ ID NO: 1158939 - RNA, 20 nt, Human
augugggcuaguugggcuuc

SEQ ID NO: 1158940 - RNA, 17 nt, Human
auguucuaagaagugaa

SEQ ID NO: 1158941 - RNA, 16 nt, Human
auguucucucuucucc

SEQ ID NO: 1158942 - RNA, 11 nt, Human
auguucuggga

SEQ ID NO: 1158943 - RNA, 12 nt, Human
auguucugggac

SEQ ID NO: 1158944 - RNA, 15 nt, Human
auggauuuccagcca

SEQ ID NO: 1158945 - RNA, 18 nt, Human
auggauuuccagccaaag

SEQ ID NO: 1158946 - RNA, 15 nt, Human
augcuuguacauaau

SEQ ID NO: 1158947 - RNA, 12 nt, Human
augcugcccugu

SEQ ID NO: 1158948 - RNA, 12 nt, Human
augcuuguacau

SEQ ID NO: 1158949 - RNA, 13 nt, Human
augcuuguacaua

SEQ ID NO: 1158950 - RNA, 14 nt, Human
augcuuguacauaa

SEQ ID NO: 1158951 - RNA, 16 nt, Human
augcucuuuacuucau

SEQ ID NO: 1158952 - RNA, 11 nt, Human
augcugcccug

SEQ ID NO: 1158953 - RNA, 16 nt, Human
augaugccaugaggaa

SEQ ID NO: 1158954 - RNA, 17 nt, Human
augaugccaugaggaac

SEQ ID NO: 1158955 - RNA, 24 nt, Human
augauguuuuccaugaguccccug

SEQ ID NO: 1158956 - RNA, 15 nt, Human
augcacaaacagagg

SEQ ID NO: 1158957 - RNA, 16 nt, Human
augcacaaacagaggc

SEQ ID NO: 1158958 - RNA, 17 nt, Human
augcacaaacagaggcc

SEQ ID NO: 1158959 - RNA, 18 nt, Human
augcacaaacagaggccg

SEQ ID NO: 1158960 - RNA, 16 nt, Human
augcacagaguuguua

SEQ ID NO: 1158961 - RNA, 17 nt, Human
augcacagaguuguuac

SEQ ID NO: 1158962 - RNA, 18 nt, Human
augcacagaguuguuaca

SEQ ID NO: 1158963 - RNA, 16 nt, Human
augcaugaaguaauau

SEQ ID NO: 1158964 - RNA, 20 nt, Human
augcaugaaguaauaugcac

SEQ ID NO: 1158965 - RNA, 19 nt, Human
augccucucucaggccaaa

SEQ ID NO: 1158966 - RNA, 20 nt, Human
auccucccaccucagccucc

SEQ ID NO: 1158967 - RNA, 18 nt, Human
auccucccaccucagccu

SEQ ID NO: 1158968 - RNA, 19 nt, Human
auccucccaccucagccuc

SEQ ID NO: 1158969 - RNA, 15 nt, Human
aucccauuuaaaaaa

SEQ ID NO: 1158970 - RNA, 14 nt, Human
aucccauuuaaaaa

SEQ ID NO: 1158971 - RNA, 15 nt, Human
auccagacccggcug

SEQ ID NO: 1158972 - RNA, 15 nt, Human
auccccuguagagug

SEQ ID NO: 1158973 - RNA, 11 nt, Human
auccuccaggu

SEQ ID NO: 1158974 - RNA, 13 nt, Human
auccuccaggugc

SEQ ID NO: 1158975 - RNA, 15 nt, Human
auccucccaccucag

SEQ ID NO: 1158976 - RNA, 18 nt, Human
aucaccaacgucugugcc

SEQ ID NO: 1158977 - RNA, 19 nt, Human
aucaccaacgucugugcca

SEQ ID NO: 1158978 - RNA, 20 nt, Human
aucaccaacgucugugccau

SEQ ID NO: 1158979 - RNA, 21 nt, Human
aucacagccucugaaaaccaa

SEQ ID NO: 1158980 - RNA, 17 nt, Human
auauuuauuuuaauaau

SEQ ID NO: 1158981 - RNA, 14 nt, Human
auauuuauuuuaau

SEQ ID NO: 1158982 - RNA, 15 nt, Human
auauuuauuuuaaua

SEQ ID NO: 1158983 - RNA, 14 nt, Human
aucaccgaaaacgu

SEQ ID NO: 1158984 - RNA, 19 nt, Human
aucaccgaaaacguggcug

SEQ ID NO: 1158985 - RNA, 21 nt, Human
aucaccgaaaacguggcugcu

SEQ ID NO: 1158986 - RNA, 19 nt, Human
aucagcacgauuucuguuu

SEQ ID NO: 1158987 - RNA, 20 nt, Human
aucagcacgauuucuguuua

SEQ ID NO: 1158988 - RNA, 23 nt, Human
aucagcacgauuucuguuuagau

SEQ ID NO: 1158989 - RNA, 18 nt, Human
aucagccugcuccagcug

SEQ ID NO: 1158990 - RNA, 19 nt, Human
aucagccugcuccagcugu

SEQ ID NO: 1158991 - RNA, 20 nt, Human
aucagccugcuccagcuguu

SEQ ID NO: 1158992 - RNA, 12 nt, Human
aucagcugcuac

SEQ ID NO: 1158993 - RNA, 22 nt, Human
aucugcuuuuuaaagaaugcuc

SEQ ID NO: 1158994 - RNA, 17 nt, Human
aucuugaauuguaagga

SEQ ID NO: 1158995 - RNA, 14 nt, Human
aucuucuuuauaau

SEQ ID NO: 1158996 - RNA, 13 nt, Human
augaggcauuugu

SEQ ID NO: 1158997 - RNA, 21 nt, Human
augaccuuucaauaggaaaaa

SEQ ID NO: 1158998 - RNA, 22 nt, Human
augaccuuucaauaggaaaaac

SEQ ID NO: 1158999 - RNA, 23 nt, Human
augaccuuucaauaggaaaaacu

SEQ ID NO: 1159000 - RNA, 16 nt, Human
augaaagacuguacaa

SEQ ID NO: 1159001 - RNA, 17 nt, Human
augaaagacuguacaaa

SEQ ID NO: 1159002 - RNA, 19 nt, Human
augaaagacuguacaaagu

SEQ ID NO: 1159003 - RNA, 12 nt, Human
aguccuguaaug

SEQ ID NO: 1159004 - RNA, 13 nt, Human
agucugaaggcug

SEQ ID NO: 1159005 - RNA, 15 nt, Human
agucugaaggcuggg

SEQ ID NO: 1159006 - RNA, 16 nt, Human
agucugaaggcugggu

SEQ ID NO: 1159007 - RNA, 17 nt, Human
agucugaaggcuggguu

SEQ ID NO: 1159008 - RNA, 22 nt, Human
aguccuggcaugggaaugaaug

SEQ ID NO: 1159009 - RNA, 20 nt, Human
aguccuggcaugggaaugaa

SEQ ID NO: 1159010 - RNA, 21 nt, Human
aguccuggcaugggaaugaau

SEQ ID NO: 1159011 - RNA, 16 nt, Human
agucugauucccaagc

SEQ ID NO: 1159012 - RNA, 18 nt, Human
agucugauucccaagcuc

SEQ ID NO: 1159013 - RNA, 20 nt, Human
agucugauucccaagcucug

SEQ ID NO: 1159014 - RNA, 17 nt, Human
agucuggaaugcagugg

SEQ ID NO: 1159015 - RNA, 18 nt, Human
agucuggaaugcaguggu

SEQ ID NO: 1159016 - RNA, 14 nt, Human
agugaagacaauga

SEQ ID NO: 1159017 - RNA, 16 nt, Human
agugaagacaaugacu

SEQ ID NO: 1159018 - RNA, 14 nt, Human
aguaugguggcugg

SEQ ID NO: 1159019 - RNA, 13 nt, Human
agucaaauugugu

SEQ ID NO: 1159020 - RNA, 23 nt, Human
agucaaauugugugaaagguacu

SEQ ID NO: 1159021 - RNA, 15 nt, Human
aguaugaggcauuug

SEQ ID NO: 1159022 - RNA, 16 nt, Human
aguaugaggcauuugu

SEQ ID NO: 1159023 - RNA, 17 nt, Human
aguaugaggcauuuguu

SEQ ID NO: 1159024 - RNA, 11 nt, Human
aguaucuugaa

SEQ ID NO: 1159025 - RNA, 12 nt, Human
aguaucuugaag

SEQ ID NO: 1159026 - RNA, 15 nt, Human
aguaucuugaagacu

SEQ ID NO: 1159027 - RNA, 23 nt, Human
aguggcuuaaaacaacacucaca

SEQ ID NO: 1159028 - RNA, 14 nt, Human
agugggagcugccu

SEQ ID NO: 1159029 - RNA, 15 nt, Human
agugggagcugccug

SEQ ID NO: 1159030 - RNA, 16 nt, Human
agugggagcugccugu

SEQ ID NO: 1159031 - RNA, 17 nt, Human
aguguauuuuuuuacua

SEQ ID NO: 1159032 - RNA, 18 nt, Human
aguguauuuuuuuacuaa

SEQ ID NO: 1159033 - RNA, 12 nt, Human
aguuaaauaaau

SEQ ID NO: 1159034 - RNA, 14 nt, Human
aguuacagacaaag

SEQ ID NO: 1159035 - RNA, 16 nt, Human
aguuacagacaaagcg

SEQ ID NO: 1159036 - RNA, 22 nt, Human
aguugaaaaucuuauaauuuaa

SEQ ID NO: 1159037 - RNA, 17 nt, Human
aguuacagacaaagcgu

SEQ ID NO: 1159038 - RNA, 19 nt, Human
aguucagguaacaggcaga

SEQ ID NO: 1159039 - RNA, 20 nt, Human
aguucagguaacaggcagau

SEQ ID NO: 1159040 - RNA, 23 nt, Human
aguugaaaaucuuauaauuuaaa

SEQ ID NO: 1159041 - RNA, 14 nt, Human
aguugaagacagag

SEQ ID NO: 1159042 - RNA, 20 nt, Human
aguuguuugauucagacagc

SEQ ID NO: 1159043 - RNA, 13 nt, Human
auaaagcagcguu

SEQ ID NO: 1159044 - RNA, 14 nt, Human
auaaagcagcguuu

SEQ ID NO: 1159045 - RNA, 18 nt, Human
auaaagcagcguuucuau

SEQ ID NO: 1159046 - RNA, 19 nt, Human
auaaagcagcguuucuaug

SEQ ID NO: 1159047 - RNA, 20 nt, Human
auaaagcagcguuucuauga

SEQ ID NO: 1159048 - RNA, 15 nt, Human
auaaaagacagugaa

SEQ ID NO: 1159049 - RNA, 21 nt, Human
auaaacuuuaccuuuuuuaua

SEQ ID NO: 1159050 - RNA, 17 nt, Human
auaaaacuuuuuaaaau

SEQ ID NO: 1159051 - RNA, 24 nt, Human
auaaacuuuaccuuuuuuauacau

SEQ ID NO: 1159052 - RNA, 10 nt, Human
auaaaaaguu

SEQ ID NO: 1159053 - RNA, 11 nt, Human
auaaaaaguua

SEQ ID NO: 1159054 - RNA, 12 nt, Human
auaaaaaguuaa

SEQ ID NO: 1159055 - RNA, 13 nt, Human
auaaaaaguuaaa

SEQ ID NO: 1159056 - RNA, 18 nt, Human
auaaaaaguuaaaaaguu

SEQ ID NO: 1159057 - RNA, 15 nt, Human
auaaaacuuuuuaaa

SEQ ID NO: 1159058 - RNA, 18 nt, Human
auaaaggauuaaugucaa

SEQ ID NO: 1159059 - RNA, 12 nt, Human
auaacauguaau

SEQ ID NO: 1159060 - RNA, 18 nt, Human
auaccugucccccugaca

SEQ ID NO: 1159061 - RNA, 11 nt, Human
auacccacccc

SEQ ID NO: 1159062 - RNA, 12 nt, Human
auacccaccccc

SEQ ID NO: 1159063 - RNA, 13 nt, Human
auacccaccccca

SEQ ID NO: 1159064 - RNA, 21 nt, Human
auaaugcgugcauaccacuuu

SEQ ID NO: 1159065 - RNA, 15 nt, Human
auaauguaagcucua

SEQ ID NO: 1159066 - RNA, 22 nt, Human
auacacacacacacacagccac

SEQ ID NO: 1159067 - RNA, 23 nt, Human
auacacacacacacacagccaca

SEQ ID NO: 1159068 - RNA, 19 nt, Human
auacaccacuacauucugu

SEQ ID NO: 1159069 - RNA, 20 nt, Human
auacaccacuacauucuguu

SEQ ID NO: 1159070 - RNA, 21 nt, Human
auacaccacuacauucuguua

SEQ ID NO: 1159071 - RNA, 15 nt, Human
auagguuuaauaauu

SEQ ID NO: 1159072 - RNA, 17 nt, Human
auaguaugguggcuggg

SEQ ID NO: 1159073 - RNA, 18 nt, Human
auaguaugguggcugggu

SEQ ID NO: 1159074 - RNA, 15 nt, Human
auagccaaggccaaa

SEQ ID NO: 1159075 - RNA, 21 nt, Human
auagccaaggccaaaggaagc

SEQ ID NO: 1159076 - RNA, 14 nt, Human
auagucaaauugug

SEQ ID NO: 1159077 - RNA, 17 nt, Human
auagucaaauuguguga

SEQ ID NO: 1159078 - RNA, 10 nt, Human
auauacugua

SEQ ID NO: 1159079 - RNA, 11 nt, Human
auauacuguaa

SEQ ID NO: 1159080 - RNA, 12 nt, Human
auauacuguaaa

SEQ ID NO: 1159081 - RNA, 13 nt, Human
auauacuguaaag

SEQ ID NO: 1159082 - RNA, 14 nt, Human
auauacuguaaaga

SEQ ID NO: 1159083 - RNA, 15 nt, Human
auauacuguaaagaa

SEQ ID NO: 1159084 - RNA, 18 nt, Human
auauacuguaaagaaaga

SEQ ID NO: 1159085 - RNA, 19 nt, Human
auauacuguaaagaaagag

SEQ ID NO: 1159086 - RNA, 20 nt, Human
auauacuguaaagaaagaga

SEQ ID NO: 1159087 - RNA, 21 nt, Human
auauacuguaaagaaagagag

SEQ ID NO: 1159088 - RNA, 22 nt, Human
auauacuguaaagaaagagaga

SEQ ID NO: 1159089 - RNA, 23 nt, Human
auauacuguaaagaaagagagaa

SEQ ID NO: 1159090 - RNA, 24 nt, Human
auauacuguaaagaaagagagaaa

SEQ ID NO: 1159091 - RNA, 15 nt, Human
auaucaauuuaaaaa

SEQ ID NO: 1159092 - RNA, 16 nt, Human
auaugcucugcauguu

SEQ ID NO: 1159093 - RNA, 20 nt, Human
auaugcuucuguuuuauaau

SEQ ID NO: 1159094 - RNA, 22 nt, Human
auaugcuucuguuuuauaauuu

SEQ ID NO: 1159095 - RNA, 23 nt, Human
auaugcuucuguuuuauaauuuu

SEQ ID NO: 1159096 - RNA, 22 nt, Human
auauuaccacagacauacuaac

SEQ ID NO: 1159097 - RNA, 19 nt, Human
auauuuacuucuuauacau

SEQ ID NO: 1159098 - RNA, 13 nt, Human
auauuuauuuuaa

SEQ ID NO: 1159099 - RNA, 19 nt, Human
gucccaccuuggcugcagg

SEQ ID NO: 1159100 - RNA, 20 nt, Human
gucccaccuuggcugcaggg

SEQ ID NO: 1159101 - RNA, 18 nt, Human
gucccaccuuggcugcag

SEQ ID NO: 1159102 - RNA, 22 nt, Human
guagcucuaggagggcuggcaa

SEQ ID NO: 1159103 - RNA, 13 nt, Human
gucccccugacaa

SEQ ID NO: 1159104 - RNA, 18 nt, Human
gucccccugacaacacuc

SEQ ID NO: 1159105 - RNA, 15 nt, Human
guccccgcacugggc

SEQ ID NO: 1159106 - RNA, 16 nt, Human
guccccgcacugggcu

SEQ ID NO: 1159107 - RNA, 23 nt, Human
guccccuguuuguuucugaaagg

SEQ ID NO: 1159108 - RNA, 13 nt, Human
gucccuuuuccuu

SEQ ID NO: 1159109 - RNA, 21 nt, Human
guccgaaagggacuuggaagc

SEQ ID NO: 1159110 - RNA, 22 nt, Human
guccgaaagggacuuggaagcu

SEQ ID NO: 1159111 - RNA, 13 nt, Human
guccgagcuuuga

SEQ ID NO: 1159112 - RNA, 19 nt, Human
aacagguuuuccugaagaa

SEQ ID NO: 1159113 - RNA, 13 nt, Human
guccuacccaccc

SEQ ID NO: 1159114 - RNA, 15 nt, Human
guccuacccacccuc

SEQ ID NO: 1159115 - RNA, 16 nt, Human
aacagauaaauaguuu

SEQ ID NO: 1159116 - RNA, 15 nt, Human
aacagugauuaccag

SEQ ID NO: 1159117 - RNA, 18 nt, Human
aacauacucccaucugug

SEQ ID NO: 1159118 - RNA, 20 nt, Human
aacauacucccaucugugaa

SEQ ID NO: 1159119 - RNA, 14 nt, Human
aacaucaacaucuu

SEQ ID NO: 1159120 - RNA, 22 nt, Human
aacauguuuuucuucucccuca

SEQ ID NO: 1159121 - RNA, 16 nt, Human
gucgaggacagggagg

SEQ ID NO: 1159122 - RNA, 13 nt, Human
gucgcccagucug

SEQ ID NO: 1159123 - RNA, 14 nt, Human
gucgcccagucugg

SEQ ID NO: 1159124 - RNA, 14 nt, Human
gucgaggacaggga

SEQ ID NO: 1159125 - RNA, 23 nt, Human
gucgcccagucuggaaugcagug

SEQ ID NO: 1159126 - RNA, 13 nt, Human
guccugcugcagu

SEQ ID NO: 1159127 - RNA, 16 nt, Human
guccugcugcaguugc

SEQ ID NO: 1159128 - RNA, 17 nt, Human
guccugcugcaguugcc

SEQ ID NO: 1159129 - RNA, 14 nt, Human
gucuaugggacuca

SEQ ID NO: 1159130 - RNA, 15 nt, Human
gucuaugggacucaa

SEQ ID NO: 1159131 - RNA, 22 nt, Human
gucucaaacucuugaccucagg

SEQ ID NO: 1159132 - RNA, 23 nt, Human
gucucaguccaugaagauguaga

SEQ ID NO: 1159133 - RNA, 13 nt, Human
aaccacaucuugc

SEQ ID NO: 1159134 - RNA, 18 nt, Human
aaccacaucuugcucugc

SEQ ID NO: 1159135 - RNA, 13 nt, Human
gucuccauguuug

SEQ ID NO: 1159136 - RNA, 16 nt, Human
aacauuuugucauaua

SEQ ID NO: 1159137 - RNA, 19 nt, Human
gucugaaggcuggguucug

SEQ ID NO: 1159138 - RNA, 22 nt, Human
gucucuuuaaugucacaggcag

SEQ ID NO: 1159139 - RNA, 23 nt, Human
gucucuuuaaugucacaggcagg

SEQ ID NO: 1159140 - RNA, 18 nt, Human
gucucuuuaaugucacag

SEQ ID NO: 1159141 - RNA, 19 nt, Human
gucucuuuaaugucacagg

SEQ ID NO: 1159142 - RNA, 20 nt, Human
gucucuuuaaugucacaggc

SEQ ID NO: 1159143 - RNA, 17 nt, Human
gucucuugguccugcug

SEQ ID NO: 1159144 - RNA, 18 nt, Human
gucucuugguccugcugc

SEQ ID NO: 1159145 - RNA, 19 nt, Human
gucucuugguccugcugca

SEQ ID NO: 1159146 - RNA, 20 nt, Human
gucucuugguccugcugcag

SEQ ID NO: 1159147 - RNA, 21 nt, Human
gucugacaggcaaugcuggcu

SEQ ID NO: 1159148 - RNA, 22 nt, Human
gucugacaggcaaugcuggcug

SEQ ID NO: 1159149 - RNA, 23 nt, Human
gucugacaggcaaugcuggcugu

SEQ ID NO: 1159150 - RNA, 13 nt, Human
gucugacccacug

SEQ ID NO: 1159151 - RNA, 18 nt, Human
aaccugauugugucucuu

SEQ ID NO: 1159152 - RNA, 19 nt, Human
aaccugauugugucucuug

SEQ ID NO: 1159153 - RNA, 16 nt, Human
gucuucaguaagccgu

SEQ ID NO: 1159154 - RNA, 15 nt, Human
gucuuuguacagaca

SEQ ID NO: 1159155 - RNA, 16 nt, Human
gucuuuguacagacaa

SEQ ID NO: 1159156 - RNA, 23 nt, Human
aacguggcugcuucaaggauccu

SEQ ID NO: 1159157 - RNA, 20 nt, Human
aacuaucucauuuccaagca

SEQ ID NO: 1159158 - RNA, 23 nt, Human
aacuaucucauuuccaagcaagu

SEQ ID NO: 1159159 - RNA, 23 nt, Human
gugaagacaaugacuuacuguac

SEQ ID NO: 1159160 - RNA, 14 nt, Human
gugaagugaagaca

SEQ ID NO: 1159161 - RNA, 16 nt, Human
gugacagaggcagccc

SEQ ID NO: 1159162 - RNA, 18 nt, Human
gugacagaggcagcccca

SEQ ID NO: 1159163 - RNA, 19 nt, Human
gugacagaggcagccccau

SEQ ID NO: 1159164 - RNA, 23 nt, Human
gugacagaggcagccccauucug

SEQ ID NO: 1159165 - RNA, 14 nt, Human
gugacaugucuuuu

SEQ ID NO: 1159166 - RNA, 17 nt, Human
gugaccaaugaugguca

SEQ ID NO: 1159167 - RNA, 18 nt, Human
gugaccagcaccaucucu

SEQ ID NO: 1159168 - RNA, 21 nt, Human
gugaccagcaccaucucuccu

SEQ ID NO: 1159169 - RNA, 18 nt, Human
gugaccauguuuuguuua

SEQ ID NO: 1159170 - RNA, 17 nt, Human
gugaguacuacaguccu

SEQ ID NO: 1159171 - RNA, 21 nt, Human
gugagcacuaaggugugcucu

SEQ ID NO: 1159172 - RNA, 13 nt, Human
gugagagcugggu

SEQ ID NO: 1159173 - RNA, 16 nt, Human
gugagaggggaacaga

SEQ ID NO: 1159174 - RNA, 12 nt, Human
gugaccccaggu

SEQ ID NO: 1159175 - RNA, 12 nt, Human
gugagagcuggg

SEQ ID NO: 1159176 - RNA, 20 nt, Human
aacugaaaucauacuucuua

SEQ ID NO: 1159177 - RNA, 19 nt, Human
gugaguacuacaguccucc

SEQ ID NO: 1159178 - RNA, 21 nt, Human
gugaguacuacaguccuccca

SEQ ID NO: 1159179 - RNA, 17 nt, Human
gugaguccuggcauggg

SEQ ID NO: 1159180 - RNA, 20 nt, Human
gugaguccuggcaugggaau

SEQ ID NO: 1159181 - RNA, 15 nt, Human
gugagucgaggacag

SEQ ID NO: 1159182 - RNA, 15 nt, Human
gugccucugggacug

SEQ ID NO: 1159183 - RNA, 23 nt, Human
aacuugguucccauuugcuccuu

SEQ ID NO: 1159184 - RNA, 17 nt, Human
aacuuggcgcugccccu

SEQ ID NO: 1159185 - RNA, 14 nt, Human
aacuuggcgcugcc

SEQ ID NO: 1159186 - RNA, 12 nt, Human
gugcacacacca

SEQ ID NO: 1159187 - RNA, 14 nt, Human
gugcacacaccaga

SEQ ID NO: 1159188 - RNA, 17 nt, Human
gugcacacaccagagcc

SEQ ID NO: 1159189 - RNA, 18 nt, Human
gugcacguacacacacau

SEQ ID NO: 1159190 - RNA, 21 nt, Human
gugcauuugaggucuguucuu

SEQ ID NO: 1159191 - RNA, 22 nt, Human
gugcauuugaggucuguucuuu

SEQ ID NO: 1159192 - RNA, 15 nt, Human
gugcauuuggugguu

SEQ ID NO: 1159193 - RNA, 14 nt, Human
gugccaagcagagg

SEQ ID NO: 1159194 - RNA, 20 nt, Human
aagaaaaaggaugcacagag

SEQ ID NO: 1159195 - RNA, 22 nt, Human
aagaaaaaggaugcacagaguu

SEQ ID NO: 1159196 - RNA, 13 nt, Human
aagaaaauaucac

SEQ ID NO: 1159197 - RNA, 16 nt, Human
aagaagcccaggaaag

SEQ ID NO: 1159198 - RNA, 17 nt, Human
aagaagcccaggaaagg

SEQ ID NO: 1159199 - RNA, 14 nt, Human
aagaagcucucucc

SEQ ID NO: 1159200 - RNA, 15 nt, Human
aagaagcucucuccu

SEQ ID NO: 1159201 - RNA, 19 nt, Human
gugcugcccugcccaccug

SEQ ID NO: 1159202 - RNA, 20 nt, Human
gugcugcccugcccaccugg

SEQ ID NO: 1159203 - RNA, 21 nt, Human
gugcugcccugcccaccuggc

SEQ ID NO: 1159204 - RNA, 14 nt, Human
guggacacagcucu

SEQ ID NO: 1159205 - RNA, 15 nt, Human
guggacacagcucuu

SEQ ID NO: 1159206 - RNA, 17 nt, Human
guggacacagcucuucu

SEQ ID NO: 1159207 - RNA, 24 nt, Human
guggacacagcucuucuccaggcu

SEQ ID NO: 1159208 - RNA, 13 nt, Human
aagacccaaaagg

SEQ ID NO: 1159209 - RNA, 17 nt, Human
guggcagcugcggucca

SEQ ID NO: 1159210 - RNA, 19 nt, Human
guggcagcugcgguccacc

SEQ ID NO: 1159211 - RNA, 21 nt, Human
guggauuuaacagaaauguac

SEQ ID NO: 1159212 - RNA, 23 nt, Human
guggauuuaacagaaauguacag

SEQ ID NO: 1159213 - RNA, 13 nt, Human
guggcaccagcag

SEQ ID NO: 1159214 - RNA, 14 nt, Human
guggcaccagcagc

SEQ ID NO: 1159215 - RNA, 18 nt, Human
guggcaccagcagccugg

SEQ ID NO: 1159216 - RNA, 22 nt, Human
guggcagcucaccucucccuug

SEQ ID NO: 1159217 - RNA, 14 nt, Human
guggcagcugcggu

SEQ ID NO: 1159218 - RNA, 21 nt, Human
aagacgcugugcugcccugcc

SEQ ID NO: 1159219 - RNA, 22 nt, Human
aagacgcugugcugcccugccc

SEQ ID NO: 1159220 - RNA, 23 nt, Human
aagacgcugugcugcccugccca

SEQ ID NO: 1159221 - RNA, 17 nt, Human
aagacucauucuucugu

SEQ ID NO: 1159222 - RNA, 16 nt, Human
aagacuguacaaagua

SEQ ID NO: 1159223 - RNA, 16 nt, Human
aagagauugugguuuc

SEQ ID NO: 1159224 - RNA, 19 nt, Human
aagagauugugguuucauu

SEQ ID NO: 1159225 - RNA, 12 nt, Human
aagagcccaggc

SEQ ID NO: 1159226 - RNA, 14 nt, Human
aagagcccaggccu

SEQ ID NO: 1159227 - RNA, 16 nt, Human
aagagcccaggccucc

SEQ ID NO: 1159228 - RNA, 13 nt, Human
guggccucccaac

SEQ ID NO: 1159229 - RNA, 14 nt, Human
guggccucccaacu

SEQ ID NO: 1159230 - RNA, 15 nt, Human
guggccucccaacuc

SEQ ID NO: 1159231 - RNA, 12 nt, Human
gugggagcugag

SEQ ID NO: 1159232 - RNA, 15 nt, Human
gugggauccuccagg

SEQ ID NO: 1159233 - RNA, 18 nt, Human
gugggauccuccaggugc

SEQ ID NO: 1159234 - RNA, 14 nt, Human
gugggagcugccug

SEQ ID NO: 1159235 - RNA, 15 nt, Human
gugguguuuccuggc

SEQ ID NO: 1159236 - RNA, 16 nt, Human
gugguguuuccuggca

SEQ ID NO: 1159237 - RNA, 19 nt, Human
aagcaaaauuuuuucucua

SEQ ID NO: 1159238 - RNA, 22 nt, Human
aagauguagaggagaaacugga

SEQ ID NO: 1159239 - RNA, 17 nt, Human
aagauauuuugcuuugu

SEQ ID NO: 1159240 - RNA, 20 nt, Human
aagauauuuugcuuugugau

SEQ ID NO: 1159241 - RNA, 22 nt, Human
aagauauuuugcuuugugauuu

SEQ ID NO: 1159242 - RNA, 20 nt, Human
aagaguaggaagacuuugga

SEQ ID NO: 1159243 - RNA, 19 nt, Human
gugguguuuccuggcacug

SEQ ID NO: 1159244 - RNA, 18 nt, Human
gugguuauggagagggug

SEQ ID NO: 1159245 - RNA, 16 nt, Human
aagaguaggaagacuu

SEQ ID NO: 1159246 - RNA, 18 nt, Human
aagaguaggaagacuuug

SEQ ID NO: 1159247 - RNA, 19 nt, Human
aagaguaggaagacuuugg

SEQ ID NO: 1159248 - RNA, 19 nt, Human
gugugguguuuccuggcac

SEQ ID NO: 1159249 - RNA, 16 nt, Human
aagcaaguauuagaau

SEQ ID NO: 1159250 - RNA, 20 nt, Human
gugucccaaaaagaaaggag

SEQ ID NO: 1159251 - RNA, 21 nt, Human
gugucuugcaauggcagccuu

SEQ ID NO: 1159252 - RNA, 18 nt, Human
gugucuuuaaaugcugcu

SEQ ID NO: 1159253 - RNA, 19 nt, Human
gugucuuuaaaugcugcuu

SEQ ID NO: 1159254 - RNA, 13 nt, Human
gugugagucacca

SEQ ID NO: 1159255 - RNA, 18 nt, Human
gugugagucaccaagccc

SEQ ID NO: 1159256 - RNA, 20 nt, Human
gugugagucaccaagcccag

SEQ ID NO: 1159257 - RNA, 15 nt, Human
gugugguguuuccug

SEQ ID NO: 1159258 - RNA, 13 nt, Human
guguuuauuguca

SEQ ID NO: 1159259 - RNA, 11 nt, Human
aagcucccagg

SEQ ID NO: 1159260 - RNA, 12 nt, Human
aagcucccaggc

SEQ ID NO: 1159261 - RNA, 22 nt, Human
aagcucccaggcauuccccagg

SEQ ID NO: 1159262 - RNA, 23 nt, Human
aagcucccaggcauuccccagga

SEQ ID NO: 1159263 - RNA, 19 nt, Human
aaggaaaaaauaacaauga

SEQ ID NO: 1159264 - RNA, 16 nt, Human
aaggaaaaaauaacaa

SEQ ID NO: 1159265 - RNA, 13 nt, Human
aagcucugcuccu

SEQ ID NO: 1159266 - RNA, 18 nt, Human
aagcuguuacugucuuca

SEQ ID NO: 1159267 - RNA, 17 nt, Human
aagcucugcuccucucc

SEQ ID NO: 1159268 - RNA, 16 nt, Human
guucucugaggacacu

SEQ ID NO: 1159269 - RNA, 11 nt, Human
guucucugccc

SEQ ID NO: 1159270 - RNA, 12 nt, Human
guucucugcccu

SEQ ID NO: 1159271 - RNA, 13 nt, Human
guucucugcccuc

SEQ ID NO: 1159272 - RNA, 13 nt, Human
guugacaugggac

SEQ ID NO: 1159273 - RNA, 23 nt, Human
guugauagcacagacccugcccu

SEQ ID NO: 1159274 - RNA, 15 nt, Human
guugcccaggcuggc

SEQ ID NO: 1159275 - RNA, 16 nt, Human
guugcccaggcuggcg

SEQ ID NO: 1159276 - RNA, 17 nt, Human
guugcccaggcuggcgu

SEQ ID NO: 1159277 - RNA, 17 nt, Human
guugggcuggugucacc

SEQ ID NO: 1159278 - RNA, 13 nt, Human
guuggguggaugc

SEQ ID NO: 1159279 - RNA, 24 nt, Human
aaggaugcacagaguuguuacauu

SEQ ID NO: 1159280 - RNA, 14 nt, Human
aaggaugcccaaag

SEQ ID NO: 1159281 - RNA, 19 nt, Human
aaggaugcccaaagaugca

SEQ ID NO: 1159282 - RNA, 14 nt, Human
aaggccccgcccag

SEQ ID NO: 1159283 - RNA, 16 nt, Human
aaggccccgcccaggc

SEQ ID NO: 1159284 - RNA, 19 nt, Human
aaggccccgcccaggcuua

SEQ ID NO: 1159285 - RNA, 13 nt, Human
aaggcuaccuuug

SEQ ID NO: 1159286 - RNA, 15 nt, Human
aaggcuaccuuugua

SEQ ID NO: 1159287 - RNA, 13 nt, Human
aaggauaaugaau

SEQ ID NO: 1159288 - RNA, 20 nt, Human
aaggaggaagagaaaaaaua

SEQ ID NO: 1159289 - RNA, 11 nt, Human
aaggauccuga

SEQ ID NO: 1159290 - RNA, 12 nt, Human
aaggauccugag

SEQ ID NO: 1159291 - RNA, 13 nt, Human
aaggauccugagc

SEQ ID NO: 1159292 - RNA, 22 nt, Human
aaggauccugagccagauuuca

SEQ ID NO: 1159293 - RNA, 15 nt, Human
aaggaaacccagcuc

SEQ ID NO: 1159294 - RNA, 16 nt, Human
aaggaaacccagcucu

SEQ ID NO: 1159295 - RNA, 18 nt, Human
aaggagauuuacaacugg

SEQ ID NO: 1159296 - RNA, 15 nt, Human
aagggcccagagagg

SEQ ID NO: 1159297 - RNA, 14 nt, Human
aaggcugggggaag

SEQ ID NO: 1159298 - RNA, 13 nt, Human
aagggccuggccu

SEQ ID NO: 1159299 - RNA, 14 nt, Human
aaggggcaguggug

SEQ ID NO: 1159300 - RNA, 17 nt, Human
aaggggcaguggugguu

SEQ ID NO: 1159301 - RNA, 19 nt, Human
aaggguaucaggugcugcc

SEQ ID NO: 1159302 - RNA, 16 nt, Human
aaggguaucuggugac

SEQ ID NO: 1159303 - RNA, 22 nt, Human
guuucuaugacacaugcaaggu

SEQ ID NO: 1159304 - RNA, 22 nt, Human
guuucugccgcagcccugcaga

SEQ ID NO: 1159305 - RNA, 17 nt, Human
guuugccucugccucug

SEQ ID NO: 1159306 - RNA, 13 nt, Human
guuugcuaaguga

SEQ ID NO: 1159307 - RNA, 14 nt, Human
guuuuaagaggcag

SEQ ID NO: 1159308 - RNA, 16 nt, Human
guuuuaagaggcaggg

SEQ ID NO: 1159309 - RNA, 18 nt, Human
guuuuaaggaugcuugua

SEQ ID NO: 1159310 - RNA, 16 nt, Human
guuuuacugcagcuuu

SEQ ID NO: 1159311 - RNA, 18 nt, Human
guuuuacugcagcuuugu

SEQ ID NO: 1159312 - RNA, 15 nt, Human
guuuuauaauuuugu

SEQ ID NO: 1159313 - RNA, 22 nt, Human
guuuuauaauuuugugaagcaa

SEQ ID NO: 1159314 - RNA, 24 nt, Human
aagucacacaguauuacuucugcu

SEQ ID NO: 1159315 - RNA, 21 nt, Human
aagucaagugaaaaaggagga

SEQ ID NO: 1159316 - RNA, 18 nt, Human
aaguauucuuauuuaaug

SEQ ID NO: 1159317 - RNA, 19 nt, Human
aaguauucuuauuuaauga

SEQ ID NO: 1159318 - RNA, 13 nt, Human
aagucacacagug

SEQ ID NO: 1159319 - RNA, 16 nt, Human
aaguacuauguaucaa

SEQ ID NO: 1159320 - RNA, 15 nt, Human
aaguacuggagaaaa

SEQ ID NO: 1159321 - RNA, 21 nt, Human
aaguacuucuccacccugcuc

SEQ ID NO: 1159322 - RNA, 22 nt, Human
aaguacuucuccacccugcucu

SEQ ID NO: 1159323 - RNA, 23 nt, Human
aaguacuucuccacccugcucuc

SEQ ID NO: 1159324 - RNA, 23 nt, Human
aaguauguuagugcaaauuguca

SEQ ID NO: 1159325 - RNA, 22 nt, Human
aagucuuauauauuguagauaa

SEQ ID NO: 1159326 - RNA, 18 nt, Human
aagucuuagauguauaua

SEQ ID NO: 1159327 - RNA, 19 nt, Human
aagucuuagauguauauau

SEQ ID NO: 1159328 - RNA, 18 nt, Human
guuuuucuaggccugggg

SEQ ID NO: 1159329 - RNA, 16 nt, Human
guuuuugucuuaaaaa

SEQ ID NO: 1159330 - RNA, 23 nt, Human
guuuuuuuuuaaaaaagaaacau

SEQ ID NO: 1159331 - RNA, 12 nt, Human
aaguuaaauaaa

SEQ ID NO: 1159332 - RNA, 14 nt, Human
aaguuaaauaaauc

SEQ ID NO: 1159333 - RNA, 17 nt, Human
aaguucaugcuuuguuc

SEQ ID NO: 1159334 - RNA, 17 nt, Human
aaguucugcagauaaac

SEQ ID NO: 1159335 - RNA, 15 nt, Human
uaaagaaagagagaa

SEQ ID NO: 1159336 - RNA, 16 nt, Human
uaaagaaagagagaaa

SEQ ID NO: 1159337 - RNA, 17 nt, Human
uaaagaaagagagaaaa

SEQ ID NO: 1159338 - RNA, 18 nt, Human
uaaagaaagagagaaaau

SEQ ID NO: 1159339 - RNA, 19 nt, Human
uaaagaaagagagaaaaua

SEQ ID NO: 1159340 - RNA, 20 nt, Human
uaaagaaagagagaaaauaa

SEQ ID NO: 1159341 - RNA, 21 nt, Human
uaaagaaagagagaaaauaaa

SEQ ID NO: 1159342 - RNA, 22 nt, Human
uaaagaaagagagaaaauaaaa

SEQ ID NO: 1159343 - RNA, 23 nt, Human
uaaagaaagagagaaaauaaaaa

SEQ ID NO: 1159344 - RNA, 16 nt, Human
uaaaccgccaaggcug

SEQ ID NO: 1159345 - RNA, 18 nt, Human
uaaaccgccaaggcuggg

SEQ ID NO: 1159346 - RNA, 14 nt, Human
uaaagaguguggca

SEQ ID NO: 1159347 - RNA, 21 nt, Human
uaaaggcuaccuuuguauucu

SEQ ID NO: 1159348 - RNA, 22 nt, Human
aauaaaauccauacauuugugu

SEQ ID NO: 1159349 - RNA, 14 nt, Human
aauaaaguaauuau

SEQ ID NO: 1159350 - RNA, 12 nt, Human
aauaaaaauaau

SEQ ID NO: 1159351 - RNA, 13 nt, Human
uaaagucaggggu

SEQ ID NO: 1159352 - RNA, 14 nt, Human
uaaaguguauuuuu

SEQ ID NO: 1159353 - RNA, 15 nt, Human
uaaaguguauuuuuu

SEQ ID NO: 1159354 - RNA, 19 nt, Human
uaaaguguauuuuuuuacu

SEQ ID NO: 1159355 - RNA, 20 nt, Human
uaaaguguauuuuuuuacua

SEQ ID NO: 1159356 - RNA, 15 nt, Human
aauaacaauaaaaga

SEQ ID NO: 1159357 - RNA, 12 nt, Human
aauaacauguaa

SEQ ID NO: 1159358 - RNA, 19 nt, Human
aauaacauguaauuaagua

SEQ ID NO: 1159359 - RNA, 22 nt, Human
aauaacauguaauuaaguacua

SEQ ID NO: 1159360 - RNA, 12 nt, Human
aauaaauuauuu

SEQ ID NO: 1159361 - RNA, 15 nt, Human
aauaacuaaaaggua

SEQ ID NO: 1159362 - RNA, 19 nt, Human
uaaaucuccaaaauaaaac

SEQ ID NO: 1159363 - RNA, 15 nt, Human
aauacaccacuacau

SEQ ID NO: 1159364 - RNA, 16 nt, Human
aauacaccacuacauu

SEQ ID NO: 1159365 - RNA, 18 nt, Human
aauacaccacuacauucu

SEQ ID NO: 1159366 - RNA, 20 nt, Human
aauacaccacuacauucugu

SEQ ID NO: 1159367 - RNA, 21 nt, Human
aauacaccacuacauucuguu

SEQ ID NO: 1159368 - RNA, 13 nt, Human
uaacaagccaccc

SEQ ID NO: 1159369 - RNA, 15 nt, Human
uaacaaugcuguauu

SEQ ID NO: 1159370 - RNA, 17 nt, Human
uaacaaugcuguauuuu

SEQ ID NO: 1159371 - RNA, 20 nt, Human
uaaaucuccaaaauaaaacu

SEQ ID NO: 1159372 - RNA, 21 nt, Human
uaaaucuccaaaauaaaacuu

SEQ ID NO: 1159373 - RNA, 22 nt, Human
uaaaucuccaaaauaaaacuuu

SEQ ID NO: 1159374 - RNA, 17 nt, Human
uaaaugauuucauucaa

SEQ ID NO: 1159375 - RNA, 19 nt, Human
uaacaaugcuguauuuuaa

SEQ ID NO: 1159376 - RNA, 20 nt, Human
aauacaguaucucagggccu

SEQ ID NO: 1159377 - RNA, 23 nt, Human
aauacaucccuuaccugggaaag

SEQ ID NO: 1159378 - RNA, 22 nt, Human
uaauacaccacuacauucuguu

SEQ ID NO: 1159379 - RNA, 23 nt, Human
uaauacaccacuacauucuguua

SEQ ID NO: 1159380 - RNA, 14 nt, Human
uaauagacaauuua

SEQ ID NO: 1159381 - RNA, 21 nt, Human
uaauauugauaugcuuauaca

SEQ ID NO: 1159382 - RNA, 13 nt, Human
uaaucuuucacag

SEQ ID NO: 1159383 - RNA, 14 nt, Human
aaugaaugaaacau

SEQ ID NO: 1159384 - RNA, 15 nt, Human
aaugaaugaaugaau

SEQ ID NO: 1159385 - RNA, 15 nt, Human
aaugaaugucagugu

SEQ ID NO: 1159386 - RNA, 16 nt, Human
uaauguaagcucuacu

SEQ ID NO: 1159387 - RNA, 17 nt, Human
uaauguaagcucuacug

SEQ ID NO: 1159388 - RNA, 15 nt, Human
uaaugucacaggcag

SEQ ID NO: 1159389 - RNA, 16 nt, Human
uaaugucacaggcagg

SEQ ID NO: 1159390 - RNA, 17 nt, Human
uaaugucacaggcaggu

SEQ ID NO: 1159391 - RNA, 12 nt, Human
uaaugugaaacu

SEQ ID NO: 1159392 - RNA, 20 nt, Human
uaaugugaaacuggauuaaa

SEQ ID NO: 1159393 - RNA, 22 nt, Human
uaaugugaaacuggauuaaacu

SEQ ID NO: 1159394 - RNA, 23 nt, Human
uaaugugaaacuggauuaaacuu

SEQ ID NO: 1159395 - RNA, 23 nt, Human
uaauuaguuccucauuagcauuu

SEQ ID NO: 1159396 - RNA, 19 nt, Human
aaugcacuuuguucuggcu

SEQ ID NO: 1159397 - RNA, 20 nt, Human
aaugcacuuuguucuggcuc

SEQ ID NO: 1159398 - RNA, 19 nt, Human
aaugcacaaacagaggccg

SEQ ID NO: 1159399 - RNA, 20 nt, Human
aaugcacaaacagaggccgc

SEQ ID NO: 1159400 - RNA, 13 nt, Human
aaugcacuuuguu

SEQ ID NO: 1159401 - RNA, 16 nt, Human
aaugcacuuuguucug

SEQ ID NO: 1159402 - RNA, 20 nt, Human
aaugaaugucagugugacug

SEQ ID NO: 1159403 - RNA, 21 nt, Human
aaugaaugucagugugacuga

SEQ ID NO: 1159404 - RNA, 13 nt, Human
aaugaccuuucaa

SEQ ID NO: 1159405 - RNA, 14 nt, Human
aaugaccuuucaau

SEQ ID NO: 1159406 - RNA, 15 nt, Human
aaugaccuuucaaua

SEQ ID NO: 1159407 - RNA, 16 nt, Human
aaugcaaaccaucauu

SEQ ID NO: 1159408 - RNA, 22 nt, Human
aaugcaaaccaucauugaaauc

SEQ ID NO: 1159409 - RNA, 23 nt, Human
aaugcaaaccaucauugaaaucu

SEQ ID NO: 1159410 - RNA, 18 nt, Human
aaugcacaaacagaggcc

SEQ ID NO: 1159411 - RNA, 21 nt, Human
uacaagcgugagccacugcac

SEQ ID NO: 1159412 - RNA, 16 nt, Human
uacaagcgugagccac

SEQ ID NO: 1159413 - RNA, 18 nt, Human
uacaagcgugagccacug

SEQ ID NO: 1159414 - RNA, 19 nt, Human
uacaagcgugagccacugc

SEQ ID NO: 1159415 - RNA, 20 nt, Human
uacaagcgugagccacugca

SEQ ID NO: 1159416 - RNA, 15 nt, Human
uacaaaaagcauaaa

SEQ ID NO: 1159417 - RNA, 17 nt, Human
uaauuuaccugaagucu

SEQ ID NO: 1159418 - RNA, 18 nt, Human
uaauuuaccugaagucuu

SEQ ID NO: 1159419 - RNA, 13 nt, Human
aauuaaguacuau

SEQ ID NO: 1159420 - RNA, 15 nt, Human
aaugucacaggcagg

SEQ ID NO: 1159421 - RNA, 18 nt, Human
aauguugacaugggacau

SEQ ID NO: 1159422 - RNA, 18 nt, Human
aauuaacuuuuauaaacu

SEQ ID NO: 1159423 - RNA, 20 nt, Human
aauuaacuuuuauaaacuuu

SEQ ID NO: 1159424 - RNA, 22 nt, Human
aauuaacuuuuauaaacuuuac

SEQ ID NO: 1159425 - RNA, 17 nt, Human
uaccacuuuuguucuug

SEQ ID NO: 1159426 - RNA, 17 nt, Human
uaccauccccuguagag

SEQ ID NO: 1159427 - RNA, 20 nt, Human
uacccgggaagggggcuggg

SEQ ID NO: 1159428 - RNA, 16 nt, Human
uacccucauguucuua

SEQ ID NO: 1159429 - RNA, 23 nt, Human
uacccgggaagggggcugggaca

SEQ ID NO: 1159430 - RNA, 20 nt, Human
uacccuggcacuauaaugua

SEQ ID NO: 1159431 - RNA, 22 nt, Human
uacccuggcacuauaauguaag

SEQ ID NO: 1159432 - RNA, 17 nt, Human
uacaguccucccaucuc

SEQ ID NO: 1159433 - RNA, 18 nt, Human
uacaguccucccaucuca

SEQ ID NO: 1159434 - RNA, 24 nt, Human
uacagcaaggagauuuacaacugg

SEQ ID NO: 1159435 - RNA, 18 nt, Human
uacaguaucucagggccu

SEQ ID NO: 1159436 - RNA, 12 nt, Human
uacaguccuccc

SEQ ID NO: 1159437 - RNA, 15 nt, Human
uacaguccucccauc

SEQ ID NO: 1159438 - RNA, 15 nt, Human
uacauaaugcgugca

SEQ ID NO: 1159439 - RNA, 13 nt, Human
aaugucacaggca

SEQ ID NO: 1159440 - RNA, 14 nt, Human
aaugucacaggcag

SEQ ID NO: 1159441 - RNA, 22 nt, Human
uacagcaaggagauuuacaacu

SEQ ID NO: 1159442 - RNA, 21 nt, Human
aauguacagcaaggagauuua

SEQ ID NO: 1159443 - RNA, 23 nt, Human
aauguacagcaaggagauuuaca

SEQ ID NO: 1159444 - RNA, 16 nt, Human
aaugguuuaaaugguc

SEQ ID NO: 1159445 - RNA, 17 nt, Human
aaugguuuucuugugug

SEQ ID NO: 1159446 - RNA, 18 nt, Human
aaugguuuucuugugugu

SEQ ID NO: 1159447 - RNA, 22 nt, Human
aaugguuuucuuguguguuuau

SEQ ID NO: 1159448 - RNA, 13 nt, Human
aauguaagcucua

SEQ ID NO: 1159449 - RNA, 15 nt, Human
aauguaagcucuacu

SEQ ID NO: 1159450 - RNA, 14 nt, Human
uacgucugacaggc

SEQ ID NO: 1159451 - RNA, 13 nt, Human
uacguugugcauu

SEQ ID NO: 1159452 - RNA, 14 nt, Human
uacguugugcauuu

SEQ ID NO: 1159453 - RNA, 16 nt, Human
uacuauaauuuaccug

SEQ ID NO: 1159454 - RNA, 16 nt, Human
uacuauguaucaauga

SEQ ID NO: 1159455 - RNA, 12 nt, Human
uacuguaaagaa

SEQ ID NO: 1159456 - RNA, 13 nt, Human
uacuguaaagaaa

SEQ ID NO: 1159457 - RNA, 16 nt, Human
uacuguaaagaaagag

SEQ ID NO: 1159458 - RNA, 17 nt, Human
uacuguaaagaaagaga

SEQ ID NO: 1159459 - RNA, 18 nt, Human
uacuguaaagaaagagag

SEQ ID NO: 1159460 - RNA, 19 nt, Human
uacuguaaagaaagagaga

SEQ ID NO: 1159461 - RNA, 20 nt, Human
uacuguaaagaaagagagaa

SEQ ID NO: 1159462 - RNA, 21 nt, Human
aauucuugccaaauauaaaua

SEQ ID NO: 1159463 - RNA, 14 nt, Human
aauucuugcaaagu

SEQ ID NO: 1159464 - RNA, 20 nt, Human
aauucuugcaaaguaucccu

SEQ ID NO: 1159465 - RNA, 22 nt, Human
aauucuucuccacuuucuagcc

SEQ ID NO: 1159466 - RNA, 16 nt, Human
aauugacccacaagaa

SEQ ID NO: 1159467 - RNA, 19 nt, Human
aauugacccacaagaaaug

SEQ ID NO: 1159468 - RNA, 21 nt, Human
aauugacccacaagaaaugaa

SEQ ID NO: 1159469 - RNA, 15 nt, Human
uacguacacauuuua

SEQ ID NO: 1159470 - RNA, 21 nt, Human
uacuguaaagaaagagagaaa

SEQ ID NO: 1159471 - RNA, 23 nt, Human
uacuguaaagaaagagagaaaau

SEQ ID NO: 1159472 - RNA, 13 nt, Human
uacuguaagaaaa

SEQ ID NO: 1159473 - RNA, 22 nt, Human
aauuguuuggggaugagaaagg

SEQ ID NO: 1159474 - RNA, 13 nt, Human
aauuuaaaagucu

SEQ ID NO: 1159475 - RNA, 19 nt, Human
aauuuacauacucugcuua

SEQ ID NO: 1159476 - RNA, 14 nt, Human
uacuucaaauccuu

SEQ ID NO: 1159477 - RNA, 19 nt, Human
uacuucaaauccuugaaga

SEQ ID NO: 1159478 - RNA, 15 nt, Human
aauuuaccugaaguc

SEQ ID NO: 1159479 - RNA, 17 nt, Human
aauuuagaaauauaauu

SEQ ID NO: 1159480 - RNA, 13 nt, Human
aauuucuaaaucu

SEQ ID NO: 1159481 - RNA, 21 nt, Human
aauuucuaaaucuccaaaaua

SEQ ID NO: 1159482 - RNA, 19 nt, Human
aauuuuuucucuaggaaau

SEQ ID NO: 1159483 - RNA, 22 nt, Human
aauuuuuucucuaggaaauauu

SEQ ID NO: 1159484 - RNA, 17 nt, Human
aauuuuuuugagacaga

SEQ ID NO: 1159485 - RNA, 12 nt, Human
uagacagucccu

SEQ ID NO: 1159486 - RNA, 14 nt, Human
uagacagucccugc

SEQ ID NO: 1159487 - RNA, 16 nt, Human
uagacagucccugcca

SEQ ID NO: 1159488 - RNA, 19 nt, Human
aauuuuuauauuugaaaua

SEQ ID NO: 1159489 - RNA, 17 nt, Human
aauuuuuauuaaauuau

SEQ ID NO: 1159490 - RNA, 18 nt, Human
aauuuuuauuaaauuaug

SEQ ID NO: 1159491 - RNA, 21 nt, Human
uacuucaaauccuugaagauu

SEQ ID NO: 1159492 - RNA, 16 nt, Human
uacuucaugcugucua

SEQ ID NO: 1159493 - RNA, 15 nt, Human
uagaacucccuuuca

SEQ ID NO: 1159494 - RNA, 16 nt, Human
uagaagucacacagua

SEQ ID NO: 1159495 - RNA, 16 nt, Human
uagaagucuuagaugu

SEQ ID NO: 1159496 - RNA, 17 nt, Human
uagaagucuuagaugua

SEQ ID NO: 1159497 - RNA, 18 nt, Human
uagaagucuuagauguau

SEQ ID NO: 1159498 - RNA, 19 nt, Human
uagaagucuuagauguaua

SEQ ID NO: 1159499 - RNA, 20 nt, Human
uagaagucuuagauguauau

SEQ ID NO: 1159500 - RNA, 16 nt, Human
uagacaauuuauuaug

SEQ ID NO: 1159501 - RNA, 18 nt, Human
uagacaauuuauuauggc

SEQ ID NO: 1159502 - RNA, 16 nt, Human
acaaaaagcauaaaaa

SEQ ID NO: 1159503 - RNA, 19 nt, Human
uagaggagaaacuggaacu

SEQ ID NO: 1159504 - RNA, 17 nt, Human
uagaugcaguucugaag

SEQ ID NO: 1159505 - RNA, 19 nt, Human
uagaugcaguucugaagaa

SEQ ID NO: 1159506 - RNA, 21 nt, Human
uagcaugucgucaaagcugaa

SEQ ID NO: 1159507 - RNA, 22 nt, Human
uagauuuuagacccuauugcug

SEQ ID NO: 1159508 - RNA, 20 nt, Human
uagaugcaguucugaagaag

SEQ ID NO: 1159509 - RNA, 17 nt, Human
uagcacagacccugccc

SEQ ID NO: 1159510 - RNA, 18 nt, Human
uagcacagacccugcccu

SEQ ID NO: 1159511 - RNA, 19 nt, Human
uagcacagacccugcccug

SEQ ID NO: 1159512 - RNA, 15 nt, Human
acaacaacaaaauga

SEQ ID NO: 1159513 - RNA, 12 nt, Human
acaacacucaca

SEQ ID NO: 1159514 - RNA, 21 nt, Human
acaacacucauugaccugagg

SEQ ID NO: 1159515 - RNA, 17 nt, Human
acaagagcccaggccuc

SEQ ID NO: 1159516 - RNA, 18 nt, Human
acaagagcccaggccucc

SEQ ID NO: 1159517 - RNA, 18 nt, Human
acaagcacuaaacaaaga

SEQ ID NO: 1159518 - RNA, 12 nt, Human
acaagccacccc

SEQ ID NO: 1159519 - RNA, 20 nt, Human
acaagcgugagccacugcac

SEQ ID NO: 1159520 - RNA, 21 nt, Human
acaagcgugagccacugcacc

SEQ ID NO: 1159521 - RNA, 21 nt, Human
uagucaggugccucaagagaa

SEQ ID NO: 1159522 - RNA, 22 nt, Human
acaagcucacagaccuuugaac

SEQ ID NO: 1159523 - RNA, 19 nt, Human
acaagcugcacccucaggc

SEQ ID NO: 1159524 - RNA, 21 nt, Human
acaagcugcacccucaggcag

SEQ ID NO: 1159525 - RNA, 22 nt, Human
acaagcugcacccucaggcagg

SEQ ID NO: 1159526 - RNA, 23 nt, Human
acaagcugcacccucaggcaggu

SEQ ID NO: 1159527 - RNA, 22 nt, Human
uagugagcagucaggaaagaga

SEQ ID NO: 1159528 - RNA, 20 nt, Human
uaguuccucauuagcauuuu

SEQ ID NO: 1159529 - RNA, 16 nt, Human
uaguuuuauaugcuuc

SEQ ID NO: 1159530 - RNA, 21 nt, Human
uauaaaauaauuuuuauauuu

SEQ ID NO: 1159531 - RNA, 22 nt, Human
uauaaaauaauuuuuauauuug

SEQ ID NO: 1159532 - RNA, 23 nt, Human
uauaaaauaauuuuuauauuuga

SEQ ID NO: 1159533 - RNA, 15 nt, Human
acacaugaaguccaa

SEQ ID NO: 1159534 - RNA, 19 nt, Human
acacaugcaaggucauuuu

SEQ ID NO: 1159535 - RNA, 20 nt, Human
acacaugcaaggucauuuuu

SEQ ID NO: 1159536 - RNA, 21 nt, Human
acacaugcaaggucauuuuuu

SEQ ID NO: 1159537 - RNA, 20 nt, Human
acacccagcccacuucugcc

SEQ ID NO: 1159538 - RNA, 21 nt, Human
acacccagcccacuucugcca

SEQ ID NO: 1159539 - RNA, 11 nt, Human
acacccuguga

SEQ ID NO: 1159540 - RNA, 12 nt, Human
acacccugugau

SEQ ID NO: 1159541 - RNA, 18 nt, Human
acacccugugauggggcc

SEQ ID NO: 1159542 - RNA, 19 nt, Human
acacccugugauggggccc

SEQ ID NO: 1159543 - RNA, 13 nt, Human
uauaggaauugac

SEQ ID NO: 1159544 - RNA, 14 nt, Human
uauaggaauugacc

SEQ ID NO: 1159545 - RNA, 19 nt, Human
uauaggaauugacccacaa

SEQ ID NO: 1159546 - RNA, 20 nt, Human
uauagccuaggugacagagu

SEQ ID NO: 1159547 - RNA, 21 nt, Human
acacucauugaccugaggccc

SEQ ID NO: 1159548 - RNA, 23 nt, Human
acacucauugaccugaggcccuu

SEQ ID NO: 1159549 - RNA, 20 nt, Human
uauaaccaguguuguggauu

SEQ ID NO: 1159550 - RNA, 14 nt, Human
uauaauuuugugaa

SEQ ID NO: 1159551 - RNA, 19 nt, Human
uauaauuuugugaagcaaa

SEQ ID NO: 1159552 - RNA, 21 nt, Human
uauacacuuacacuuuaugca

SEQ ID NO: 1159553 - RNA, 13 nt, Human
uauacauaaacaa

SEQ ID NO: 1159554 - RNA, 14 nt, Human
uauacauaaacaag

SEQ ID NO: 1159555 - RNA, 14 nt, Human
uauacauuugauaa

SEQ ID NO: 1159556 - RNA, 17 nt, Human
acagacccugcccugug

SEQ ID NO: 1159557 - RNA, 11 nt, Human
acacuccuuca

SEQ ID NO: 1159558 - RNA, 13 nt, Human
acacuccuucaca

SEQ ID NO: 1159559 - RNA, 23 nt, Human
acagacacaggcccggcuccagg

SEQ ID NO: 1159560 - RNA, 18 nt, Human
acagacccugcccugugg

SEQ ID NO: 1159561 - RNA, 20 nt, Human
acagacccugcccugugggc

SEQ ID NO: 1159562 - RNA, 14 nt, Human
acagacuggaagca

SEQ ID NO: 1159563 - RNA, 17 nt, Human
acagacuggaagcacag

SEQ ID NO: 1159564 - RNA, 15 nt, Human
uauauuuacaaaugg

SEQ ID NO: 1159565 - RNA, 21 nt, Human
uaucaaguauuauaccuuuuu

SEQ ID NO: 1159566 - RNA, 14 nt, Human
uauauuuacaaaug

SEQ ID NO: 1159567 - RNA, 18 nt, Human
uaucacccagaagaaaau

SEQ ID NO: 1159568 - RNA, 16 nt, Human
acagagcuacacaggg

SEQ ID NO: 1159569 - RNA, 18 nt, Human
acagagcuacacagggga

SEQ ID NO: 1159570 - RNA, 17 nt, Human
uaucucccccagcccca

SEQ ID NO: 1159571 - RNA, 18 nt, Human
uaucucccccagccccau

SEQ ID NO: 1159572 - RNA, 19 nt, Human
uaucuagauacuguaucau

SEQ ID NO: 1159573 - RNA, 10 nt, Human
uaucagaauu

SEQ ID NO: 1159574 - RNA, 15 nt, Human
uaucuagauacugua

SEQ ID NO: 1159575 - RNA, 16 nt, Human
uaucuagauacuguau

SEQ ID NO: 1159576 - RNA, 15 nt, Human
acagaguuguuacau

SEQ ID NO: 1159577 - RNA, 18 nt, Human
acagaguuuucacucuua

SEQ ID NO: 1159578 - RNA, 20 nt, Human
acagaguuuucacucuuauu

SEQ ID NO: 1159579 - RNA, 15 nt, Human
uaucuugaagacuuu

SEQ ID NO: 1159580 - RNA, 13 nt, Human
uaugaggcauuug

SEQ ID NO: 1159581 - RNA, 21 nt, Human
uaugaucacggcucacugcag

SEQ ID NO: 1159582 - RNA, 23 nt, Human
uaugaucacggcucacugcagcc

SEQ ID NO: 1159583 - RNA, 16 nt, Human
uauggcuuuugugcau

SEQ ID NO: 1159584 - RNA, 17 nt, Human
acagcuaacauggaagu

SEQ ID NO: 1159585 - RNA, 14 nt, Human
acagccugugucuu

SEQ ID NO: 1159586 - RNA, 18 nt, Human
acagccugugucuuuaaa

SEQ ID NO: 1159587 - RNA, 23 nt, Human
acagccugugucuuuaaaugcug

SEQ ID NO: 1159588 - RNA, 15 nt, Human
acagcuaacauggaa

SEQ ID NO: 1159589 - RNA, 18 nt, Human
uaugcucugcauguuaca

SEQ ID NO: 1159590 - RNA, 19 nt, Human
uaugcucugcauguuacau

SEQ ID NO: 1159591 - RNA, 18 nt, Human
uauuuacuucuuauacau

SEQ ID NO: 1159592 - RNA, 23 nt, Human
uauuuaauuuuuuugagacagag

SEQ ID NO: 1159593 - RNA, 14 nt, Human
uauuuauuuaaauu

SEQ ID NO: 1159594 - RNA, 13 nt, Human
uauuuauuuaaau

SEQ ID NO: 1159595 - RNA, 14 nt, Human
uauuuauuuuaaua

SEQ ID NO: 1159596 - RNA, 16 nt, Human
uauuuauuuuaauaau

SEQ ID NO: 1159597 - RNA, 18 nt, Human
uauuuauuuuaauaaugu

SEQ ID NO: 1159598 - RNA, 13 nt, Human
uauugucaaagug

SEQ ID NO: 1159599 - RNA, 17 nt, Human
uauugucaaagugguga

SEQ ID NO: 1159600 - RNA, 17 nt, Human
uauugucuagugaaacu

SEQ ID NO: 1159601 - RNA, 15 nt, Human
uauuuaaugaaagac

SEQ ID NO: 1159602 - RNA, 21 nt, Human
uauuuaaugaaagacuguaca

SEQ ID NO: 1159603 - RNA, 23 nt, Human
acaguucggugagcuacaaaugc

SEQ ID NO: 1159604 - RNA, 16 nt, Human
acaguucucuccuucu

SEQ ID NO: 1159605 - RNA, 22 nt, Human
acaguucggugagcuacaaaug

SEQ ID NO: 1159606 - RNA, 19 nt, Human
acaguucggugagcuacaa

SEQ ID NO: 1159607 - RNA, 13 nt, Human
acaguuacucaga

SEQ ID NO: 1159608 - RNA, 20 nt, Human
acaguuacucagaauucucu

SEQ ID NO: 1159609 - RNA, 20 nt, Human
acaguucaauucucauuugu

SEQ ID NO: 1159610 - RNA, 17 nt, Human
acaguucucuccuucuu

SEQ ID NO: 1159611 - RNA, 20 nt, Human
uauucucuccuguaccucuu

SEQ ID NO: 1159612 - RNA, 24 nt, Human
uauucucuccuguaccucuugagc

SEQ ID NO: 1159613 - RNA, 16 nt, Human
uauucuguuggccagu

SEQ ID NO: 1159614 - RNA, 15 nt, Human
uauucuuauuuaaug

SEQ ID NO: 1159615 - RNA, 20 nt, Human
acagugaaagaaaauaacaa

SEQ ID NO: 1159616 - RNA, 21 nt, Human
acaguccuuaccagcagagca

SEQ ID NO: 1159617 - RNA, 22 nt, Human
acaguccuuaccagcagagcac

SEQ ID NO: 1159618 - RNA, 14 nt, Human
acagugagacucug

SEQ ID NO: 1159619 - RNA, 18 nt, Human
acagugagacucugucuc

SEQ ID NO: 1159620 - RNA, 15 nt, Human
acaguuaagagaaau

SEQ ID NO: 1159621 - RNA, 21 nt, Human
acaguuaccucugccucagaa

SEQ ID NO: 1159622 - RNA, 14 nt, Human
acaggcugggcuuc

SEQ ID NO: 1159623 - RNA, 17 nt, Human
acaggcugggcuucagu

SEQ ID NO: 1159624 - RNA, 21 nt, Human
acaggcugggcuucaguggca

SEQ ID NO: 1159625 - RNA, 22 nt, Human
acagggcacaccgggcacucag

SEQ ID NO: 1159626 - RNA, 21 nt, Human
acaguauggcagcuuuccuca

SEQ ID NO: 1159627 - RNA, 15 nt, Human
acaguauuacuucug

SEQ ID NO: 1159628 - RNA, 16 nt, Human
acaguauuacuucugc

SEQ ID NO: 1159629 - RNA, 17 nt, Human
acaguauuacuucugcu

SEQ ID NO: 1159630 - RNA, 19 nt, Human
acaguauuacuucugcuac

SEQ ID NO: 1159631 - RNA, 13 nt, Human
acagucccugcca

SEQ ID NO: 1159632 - RNA, 15 nt, Human
acagucccugccaau

SEQ ID NO: 1159633 - RNA, 13 nt, Human
acaguccucccau

SEQ ID NO: 1159634 - RNA, 14 nt, Human
acaguccucccauc

SEQ ID NO: 1159635 - RNA, 15 nt, Human
acaguccucccaucu

SEQ ID NO: 1159636 - RNA, 17 nt, Human
acaguccucccaucuca

SEQ ID NO: 1159637 - RNA, 18 nt, Human
acaguccuuaccagcaga

SEQ ID NO: 1159638 - RNA, 20 nt, Human
acaguccuuaccagcagagc

SEQ ID NO: 1159639 - RNA, 23 nt, Human
uauucauagcagcuuauucacaa

SEQ ID NO: 1159640 - RNA, 18 nt, Human
uauucaggaagcucaggg

SEQ ID NO: 1159641 - RNA, 22 nt, Human
uauucaggaagcucagggccug

SEQ ID NO: 1159642 - RNA, 16 nt, Human
uauuaccacagacaua

SEQ ID NO: 1159643 - RNA, 12 nt, Human
uauuagagaaga

SEQ ID NO: 1159644 - RNA, 17 nt, Human
uauguuuuaagaggcag

SEQ ID NO: 1159645 - RNA, 19 nt, Human
uauguuuuaagaggcaggg

SEQ ID NO: 1159646 - RNA, 21 nt, Human
uauguuuucaggcuagaugua

SEQ ID NO: 1159647 - RNA, 16 nt, Human
uauuaaaaaucucaaa

SEQ ID NO: 1159648 - RNA, 18 nt, Human
uauuaaaaaucucaaauu

SEQ ID NO: 1159649 - RNA, 20 nt, Human
uauuaaaaaucucaaauuuc

SEQ ID NO: 1159650 - RNA, 22 nt, Human
uauuaaaaaucucaaauuucua

SEQ ID NO: 1159651 - RNA, 23 nt, Human
uauuaaaaaucucaaauuucuaa

SEQ ID NO: 1159652 - RNA, 12 nt, Human
ucaccuccugcu

SEQ ID NO: 1159653 - RNA, 13 nt, Human
ucaccuccugcug

SEQ ID NO: 1159654 - RNA, 14 nt, Human
ucaccuccugcugg

SEQ ID NO: 1159655 - RNA, 15 nt, Human
ucaccuccugcuggg

SEQ ID NO: 1159656 - RNA, 17 nt, Human
ucaccuccugcugggca

SEQ ID NO: 1159657 - RNA, 19 nt, Human
ucaccugaagacucauucu

SEQ ID NO: 1159658 - RNA, 23 nt, Human
ucaccugaagacucauucuucug

SEQ ID NO: 1159659 - RNA, 19 nt, Human
accacuuguguuuugcaag

SEQ ID NO: 1159660 - RNA, 23 nt, Human
accacuuguguuuugcaagccag

SEQ ID NO: 1159661 - RNA, 12 nt, Human
accacuuuuguu

SEQ ID NO: 1159662 - RNA, 22 nt, Human
accagacaccuugacagggcac

SEQ ID NO: 1159663 - RNA, 23 nt, Human
accagacaccuugacagggcaca

SEQ ID NO: 1159664 - RNA, 11 nt, Human
accagacaggu

SEQ ID NO: 1159665 - RNA, 19 nt, Human
accagagcccaccuuggcu

SEQ ID NO: 1159666 - RNA, 22 nt, Human
accagagcccaccuuggcucaa

SEQ ID NO: 1159667 - RNA, 12 nt, Human
accagagcccac

SEQ ID NO: 1159668 - RNA, 12 nt, Human
accagagcugcc

SEQ ID NO: 1159669 - RNA, 15 nt, Human
accacuucagcugac

SEQ ID NO: 1159670 - RNA, 13 nt, Human
accacuucagcug

SEQ ID NO: 1159671 - RNA, 14 nt, Human
accacuucagcuga

SEQ ID NO: 1159672 - RNA, 17 nt, Human
accacugcacuccagcc

SEQ ID NO: 1159673 - RNA, 14 nt, Human
accacugcagaaga

SEQ ID NO: 1159674 - RNA, 19 nt, Human
accacugcagaagacagua

SEQ ID NO: 1159675 - RNA, 16 nt, Human
accacaucuugcucug

SEQ ID NO: 1159676 - RNA, 20 nt, Human
accacaucuugcucugcuga

SEQ ID NO: 1159677 - RNA, 21 nt, Human
accacaucuugcucugcugac

SEQ ID NO: 1159678 - RNA, 24 nt, Human
accacaucuugcucugcugacaga

SEQ ID NO: 1159679 - RNA, 20 nt, Human
accacucuaucaaguauuau

SEQ ID NO: 1159680 - RNA, 21 nt, Human
accacagacauacuaaccagc

SEQ ID NO: 1159681 - RNA, 22 nt, Human
accacagacauacuaaccagca

SEQ ID NO: 1159682 - RNA, 14 nt, Human
accacaucuugcuc

SEQ ID NO: 1159683 - RNA, 12 nt, Human
ucacugcagccu

SEQ ID NO: 1159684 - RNA, 13 nt, Human
ucacugcagccuc

SEQ ID NO: 1159685 - RNA, 16 nt, Human
ucacugagacagcccg

SEQ ID NO: 1159686 - RNA, 13 nt, Human
ucacugagacagc

SEQ ID NO: 1159687 - RNA, 14 nt, Human
ucacugagacagcc

SEQ ID NO: 1159688 - RNA, 15 nt, Human
ucacugagacagccc

SEQ ID NO: 1159689 - RNA, 21 nt, Human
accaguguuguggauuuaaca

SEQ ID NO: 1159690 - RNA, 17 nt, Human
ucacuguugcccaggcu

SEQ ID NO: 1159691 - RNA, 18 nt, Human
ucacuguugcccaggcug

SEQ ID NO: 1159692 - RNA, 19 nt, Human
ucacuguugcccaggcugg

SEQ ID NO: 1159693 - RNA, 23 nt, Human
accaugauuaaccacuucagcug

SEQ ID NO: 1159694 - RNA, 22 nt, Human
accaugauuaaccacuucagcu

SEQ ID NO: 1159695 - RNA, 18 nt, Human
accauucuccaccugcca

SEQ ID NO: 1159696 - RNA, 13 nt, Human
accauucuccacc

SEQ ID NO: 1159697 - RNA, 16 nt, Human
accauucuccaccugc

SEQ ID NO: 1159698 - RNA, 23 nt, Human
accauuuugggguacccacugcu

SEQ ID NO: 1159699 - RNA, 13 nt, Human
acccaaaaggcag

SEQ ID NO: 1159700 - RNA, 15 nt, Human
acccaaaaggcagaa

SEQ ID NO: 1159701 - RNA, 18 nt, Human
acccaaaaggcagaagca

SEQ ID NO: 1159702 - RNA, 21 nt, Human
acccaaauguucaucaaugaa

SEQ ID NO: 1159703 - RNA, 16 nt, Human
acccagaagaaaauag

SEQ ID NO: 1159704 - RNA, 16 nt, Human
acccagcccacuucug

SEQ ID NO: 1159705 - RNA, 17 nt, Human
acccagcccacuucugc

SEQ ID NO: 1159706 - RNA, 18 nt, Human
acccagcccacuucugcc

SEQ ID NO: 1159707 - RNA, 13 nt, Human
acccagcucuggu

SEQ ID NO: 1159708 - RNA, 15 nt, Human
acccagcucuggucc

SEQ ID NO: 1159709 - RNA, 13 nt, Human
ucagaagacacug

SEQ ID NO: 1159710 - RNA, 14 nt, Human
ucagaagacacuga

SEQ ID NO: 1159711 - RNA, 13 nt, Human
ucagaucuucugu

SEQ ID NO: 1159712 - RNA, 10 nt, Human
ucagccuggg

SEQ ID NO: 1159713 - RNA, 12 nt, Human
ucagccugggca

SEQ ID NO: 1159714 - RNA, 15 nt, Human
acccccagccugcua

SEQ ID NO: 1159715 - RNA, 18 nt, Human
ucagcggggacagcuccu

SEQ ID NO: 1159716 - RNA, 16 nt, Human
ucagcggggacagcuc

SEQ ID NO: 1159717 - RNA, 17 nt, Human
ucagcggggacagcucc

SEQ ID NO: 1159718 - RNA, 12 nt, Human
ucaggaagcuca

SEQ ID NO: 1159719 - RNA, 17 nt, Human
ucaggaagcucagggcc

SEQ ID NO: 1159720 - RNA, 19 nt, Human
ucaggaagcucagggccug

SEQ ID NO: 1159721 - RNA, 20 nt, Human
ucaggaagcucagggccugg

SEQ ID NO: 1159722 - RNA, 23 nt, Human
ucaggaagcucagggccuggcuc

SEQ ID NO: 1159723 - RNA, 20 nt, Human
ucaggccaaacucaccugcc

SEQ ID NO: 1159724 - RNA, 23 nt, Human
ucaggccaaacucaccugccccu

SEQ ID NO: 1159725 - RNA, 15 nt, Human
ucaggccagcugcuu

SEQ ID NO: 1159726 - RNA, 20 nt, Human
ucaggccagcugcuugggcu

SEQ ID NO: 1159727 - RNA, 11 nt, Human
ucaggccaggc

SEQ ID NO: 1159728 - RNA, 12 nt, Human
ucaggccaggcc

SEQ ID NO: 1159729 - RNA, 13 nt, Human
ucagggucccugg

SEQ ID NO: 1159730 - RNA, 14 nt, Human
ucagggucccuggu

SEQ ID NO: 1159731 - RNA, 18 nt, Human
ucagggucccugguggca

SEQ ID NO: 1159732 - RNA, 13 nt, Human
ucagguaacaggc

SEQ ID NO: 1159733 - RNA, 15 nt, Human
ucagguaacaggcag

SEQ ID NO: 1159734 - RNA, 16 nt, Human
ucagguaacaggcaga

SEQ ID NO: 1159735 - RNA, 19 nt, Human
accccuucgcuccuguguc

SEQ ID NO: 1159736 - RNA, 20 nt, Human
accccuucgcuccugugucu

SEQ ID NO: 1159737 - RNA, 14 nt, Human
acccucuuagaaaa

SEQ ID NO: 1159738 - RNA, 11 nt, Human
acccugcccug

SEQ ID NO: 1159739 - RNA, 12 nt, Human
acccugcccugu

SEQ ID NO: 1159740 - RNA, 13 nt, Human
acccugcccugug

SEQ ID NO: 1159741 - RNA, 14 nt, Human
acccugcccugugg

SEQ ID NO: 1159742 - RNA, 16 nt, Human
acccuuguggucccac

SEQ ID NO: 1159743 - RNA, 17 nt, Human
acccuuguggucccacc

SEQ ID NO: 1159744 - RNA, 19 nt, Human
acccuuguggucccacccc

SEQ ID NO: 1159745 - RNA, 20 nt, Human
acccuuguggucccacccca

SEQ ID NO: 1159746 - RNA, 20 nt, Human
accgcagacaggaccaggga

SEQ ID NO: 1159747 - RNA, 17 nt, Human
accgccaaggcuggggg

SEQ ID NO: 1159748 - RNA, 10 nt, Human
acccuuuucu

SEQ ID NO: 1159749 - RNA, 20 nt, Human
ucauauuuacuucuuauaca

SEQ ID NO: 1159750 - RNA, 21 nt, Human
ucauauuuacuucuuauacau

SEQ ID NO: 1159751 - RNA, 22 nt, Human
ucauauuuacuucuuauacauu

SEQ ID NO: 1159752 - RNA, 11 nt, Human
accucagccuc

SEQ ID NO: 1159753 - RNA, 20 nt, Human
accuccgccucuuggguuca

SEQ ID NO: 1159754 - RNA, 13 nt, Human
accuagccuuaga

SEQ ID NO: 1159755 - RNA, 13 nt, Human
accucucccuugg

SEQ ID NO: 1159756 - RNA, 14 nt, Human
accucucccuugga

SEQ ID NO: 1159757 - RNA, 15 nt, Human
accucucccuuggau

SEQ ID NO: 1159758 - RNA, 23 nt, Human
accucucccuuggauuguccccg

SEQ ID NO: 1159759 - RNA, 14 nt, Human
accucucucacucc

SEQ ID NO: 1159760 - RNA, 19 nt, Human
accucucucacuccuugaa

SEQ ID NO: 1159761 - RNA, 12 nt, Human
accucugcacaa

SEQ ID NO: 1159762 - RNA, 21 nt, Human
ucauucuccuuguguuacuaa

SEQ ID NO: 1159763 - RNA, 22 nt, Human
ucauugaccugaggcccuucuc

SEQ ID NO: 1159764 - RNA, 17 nt, Human
accucggugccuuccuc

SEQ ID NO: 1159765 - RNA, 13 nt, Human
ucaugucuggcua

SEQ ID NO: 1159766 - RNA, 11 nt, Human
ucauguucuua

SEQ ID NO: 1159767 - RNA, 17 nt, Human
ucauguucuuaauucuu

SEQ ID NO: 1159768 - RNA, 19 nt, Human
ucauccacugugccaugug

SEQ ID NO: 1159769 - RNA, 21 nt, Human
ucauccacugugccaugugcc

SEQ ID NO: 1159770 - RNA, 23 nt, Human
ucauccacugugccaugugccag

SEQ ID NO: 1159771 - RNA, 22 nt, Human
ucaugaauuaguuuuauaugcu

SEQ ID NO: 1159772 - RNA, 19 nt, Human
ucaugacaaagacugagua

SEQ ID NO: 1159773 - RNA, 23 nt, Human
accugcggugcuaucucccccag

SEQ ID NO: 1159774 - RNA, 19 nt, Human
accugcggugcuaucuccc

SEQ ID NO: 1159775 - RNA, 22 nt, Human
accugcggugcuaucuccccca

SEQ ID NO: 1159776 - RNA, 15 nt, Human
accugaagucuuugu

SEQ ID NO: 1159777 - RNA, 22 nt, Human
accugaagucuuuguacagaca

SEQ ID NO: 1159778 - RNA, 14 nt, Human
accuggaauauaua

SEQ ID NO: 1159779 - RNA, 17 nt, Human
accuggaauauauaacc

SEQ ID NO: 1159780 - RNA, 19 nt, Human
ucauuugagcagggcucag

SEQ ID NO: 1159781 - RNA, 21 nt, Human
ucauuugagcagggcucagcg

SEQ ID NO: 1159782 - RNA, 13 nt, Human
ucauuuuuuuuaa

SEQ ID NO: 1159783 - RNA, 17 nt, Human
ucauuuuuuuuaagaaa

SEQ ID NO: 1159784 - RNA, 16 nt, Human
uccaagcucccaggca

SEQ ID NO: 1159785 - RNA, 14 nt, Human
uccaagcucccagg

SEQ ID NO: 1159786 - RNA, 15 nt, Human
uccaagcucccaggc

SEQ ID NO: 1159787 - RNA, 21 nt, Human
uccaacuaucucauuuccaag

SEQ ID NO: 1159788 - RNA, 12 nt, Human
uccaagcuccca

SEQ ID NO: 1159789 - RNA, 13 nt, Human
uccaagcucccag

SEQ ID NO: 1159790 - RNA, 11 nt, Human
uccaagcuggu

SEQ ID NO: 1159791 - RNA, 16 nt, Human
uccaagcuggucccac

SEQ ID NO: 1159792 - RNA, 15 nt, Human
uccaccaucaagcca

SEQ ID NO: 1159793 - RNA, 18 nt, Human
uccaccaucaagccacca

SEQ ID NO: 1159794 - RNA, 17 nt, Human
accuuagacagucccug

SEQ ID NO: 1159795 - RNA, 14 nt, Human
accuucuccuucac

SEQ ID NO: 1159796 - RNA, 13 nt, Human
accuucuccuuca

SEQ ID NO: 1159797 - RNA, 14 nt, Human
accuugacagggca

SEQ ID NO: 1159798 - RNA, 15 nt, Human
accuugacagggcac

SEQ ID NO: 1159799 - RNA, 16 nt, Human
accuugacagggcaca

SEQ ID NO: 1159800 - RNA, 12 nt, Human
accuucuccuuc

SEQ ID NO: 1159801 - RNA, 14 nt, Human
uccagacccggcug

SEQ ID NO: 1159802 - RNA, 15 nt, Human
uccagccccuggaug

SEQ ID NO: 1159803 - RNA, 16 nt, Human
uccagccccuggaugc

SEQ ID NO: 1159804 - RNA, 17 nt, Human
uccagccccuggaugca

SEQ ID NO: 1159805 - RNA, 19 nt, Human
uccagccccuggaugcagc

SEQ ID NO: 1159806 - RNA, 21 nt, Human
uccagccccuggaugcagccu

SEQ ID NO: 1159807 - RNA, 22 nt, Human
uccagccccuggaugcagccuc

SEQ ID NO: 1159808 - RNA, 20 nt, Human
uccagccugagcgacaguga

SEQ ID NO: 1159809 - RNA, 21 nt, Human
uccagccugagcgacagugag

SEQ ID NO: 1159810 - RNA, 15 nt, Human
accuuuguauucucu

SEQ ID NO: 1159811 - RNA, 19 nt, Human
accuuuguauucucuccug

SEQ ID NO: 1159812 - RNA, 23 nt, Human
accuuuguauucucuccuguacc

SEQ ID NO: 1159813 - RNA, 13 nt, Human
accuuugucccca

SEQ ID NO: 1159814 - RNA, 22 nt, Human
uccagaaguuugagaucagccu

SEQ ID NO: 1159815 - RNA, 20 nt, Human
ucccaucucacacaugagca

SEQ ID NO: 1159816 - RNA, 15 nt, Human
ucccauaugccuggg

SEQ ID NO: 1159817 - RNA, 16 nt, Human
ucccauaugccugggc

SEQ ID NO: 1159818 - RNA, 13 nt, Human
ucccaucucacac

SEQ ID NO: 1159819 - RNA, 14 nt, Human
ucccaucucacaca

SEQ ID NO: 1159820 - RNA, 19 nt, Human
ucccaucucacacaugagc

SEQ ID NO: 1159821 - RNA, 16 nt, Human
acuacaguccucccau

SEQ ID NO: 1159822 - RNA, 17 nt, Human
acuacaguccucccauc

SEQ ID NO: 1159823 - RNA, 11 nt, Human
acuacauucug

SEQ ID NO: 1159824 - RNA, 19 nt, Human
ucccagugccgagaaggaa

SEQ ID NO: 1159825 - RNA, 22 nt, Human
ucccagugccgagaaggaagcc

SEQ ID NO: 1159826 - RNA, 13 nt, Human
acuaaccacgcug

SEQ ID NO: 1159827 - RNA, 16 nt, Human
acuaaccagcagaaau

SEQ ID NO: 1159828 - RNA, 17 nt, Human
acuaaccagcagaaaug

SEQ ID NO: 1159829 - RNA, 15 nt, Human
acuacaguccuccca

SEQ ID NO: 1159830 - RNA, 13 nt, Human
acuaaaaauacaa

SEQ ID NO: 1159831 - RNA, 15 nt, Human
acguuucuaaaggcu

SEQ ID NO: 1159832 - RNA, 14 nt, Human
acguuucuaaaggc

SEQ ID NO: 1159833 - RNA, 12 nt, Human
acguuucuaaag

SEQ ID NO: 1159834 - RNA, 14 nt, Human
uccagcucaccagc

SEQ ID NO: 1159835 - RNA, 15 nt, Human
uccagcucaccagcc

SEQ ID NO: 1159836 - RNA, 13 nt, Human
uccagccugggug

SEQ ID NO: 1159837 - RNA, 24 nt, Human
uccagccugggugacagagcaagu

SEQ ID NO: 1159838 - RNA, 16 nt, Human
acuaucuaaauguuga

SEQ ID NO: 1159839 - RNA, 18 nt, Human
acuauguugcccaggcag

SEQ ID NO: 1159840 - RNA, 19 nt, Human
acuauguugcccaggcagg

SEQ ID NO: 1159841 - RNA, 20 nt, Human
acuauguugcccaggcaggu

SEQ ID NO: 1159842 - RNA, 23 nt, Human
acuauguugcccaggcaggucuu

SEQ ID NO: 1159843 - RNA, 17 nt, Human
acuauauuguuugcuaa

SEQ ID NO: 1159844 - RNA, 23 nt, Human
acuauaauuuaccugaagucuuu

SEQ ID NO: 1159845 - RNA, 17 nt, Human
acuauagccuaggugac

SEQ ID NO: 1159846 - RNA, 18 nt, Human
acuauagccuaggugaca

SEQ ID NO: 1159847 - RNA, 24 nt, Human
uccccaccgcagacaggaccaggg

SEQ ID NO: 1159848 - RNA, 18 nt, Human
ucccgaauagcugggacu

SEQ ID NO: 1159849 - RNA, 18 nt, Human
ucccuauuagagaagaga

SEQ ID NO: 1159850 - RNA, 15 nt, Human
ucccgaauagcuggg

SEQ ID NO: 1159851 - RNA, 16 nt, Human
ucccgaauagcuggga

SEQ ID NO: 1159852 - RNA, 21 nt, Human
ucccucagucuggcccuuccu

SEQ ID NO: 1159853 - RNA, 22 nt, Human
ucccucauccucauacccaccc

SEQ ID NO: 1159854 - RNA, 19 nt, Human
acuccagugagacagcucu

SEQ ID NO: 1159855 - RNA, 12 nt, Human
acuccugcaggc

SEQ ID NO: 1159856 - RNA, 18 nt, Human
ucccuuacgugaguccug

SEQ ID NO: 1159857 - RNA, 22 nt, Human
ucccuuacgugaguccuggcau

SEQ ID NO: 1159858 - RNA, 22 nt, Human
ucccuuuccaaaugcccagcuu

SEQ ID NO: 1159859 - RNA, 22 nt, Human
ucccuuugacgccaucccagcc

SEQ ID NO: 1159860 - RNA, 23 nt, Human
ucccuuugacgccaucccagccc

SEQ ID NO: 1159861 - RNA, 18 nt, Human
ucccuuuuaauccuggcu

SEQ ID NO: 1159862 - RNA, 19 nt, Human
ucccuuuuaauccuggcug

SEQ ID NO: 1159863 - RNA, 20 nt, Human
uccuagcacuuugggaggcc

SEQ ID NO: 1159864 - RNA, 18 nt, Human
acucuccucugcugcugg

SEQ ID NO: 1159865 - RNA, 19 nt, Human
acucuccucugcugcuggc

SEQ ID NO: 1159866 - RNA, 21 nt, Human
acucuccucugcugcuggcug

SEQ ID NO: 1159867 - RNA, 19 nt, Human
uccuaggcauuugcugaau

SEQ ID NO: 1159868 - RNA, 18 nt, Human
acucgcgacaaugcaaac

SEQ ID NO: 1159869 - RNA, 20 nt, Human
acucgcgacaaugcaaacca

SEQ ID NO: 1159870 - RNA, 23 nt, Human
acucgcgacaaugcaaaccauca

SEQ ID NO: 1159871 - RNA, 17 nt, Human
acucuccucugcugcug

SEQ ID NO: 1159872 - RNA, 22 nt, Human
uccucauacccacccccaccca

SEQ ID NO: 1159873 - RNA, 14 nt, Human
uccucauacccacc

SEQ ID NO: 1159874 - RNA, 18 nt, Human
uccucauacccaccccca

SEQ ID NO: 1159875 - RNA, 12 nt, Human
uccucuccccag

SEQ ID NO: 1159876 - RNA, 17 nt, Human
uccucccucccucuuuc

SEQ ID NO: 1159877 - RNA, 19 nt, Human
uccucccucccucuuuccc

SEQ ID NO: 1159878 - RNA, 16 nt, Human
acucuuauugcccacg

SEQ ID NO: 1159879 - RNA, 19 nt, Human
acucuuauugcccacgcug

SEQ ID NO: 1159880 - RNA, 20 nt, Human
uccucagaucuucugugggu

SEQ ID NO: 1159881 - RNA, 17 nt, Human
acugaggggaggggagc

SEQ ID NO: 1159882 - RNA, 22 nt, Human
acugaggggaggggagcauggg

SEQ ID NO: 1159883 - RNA, 15 nt, Human
uccucuccccagcaa

SEQ ID NO: 1159884 - RNA, 22 nt, Human
acugaguacguugugcauuugg

SEQ ID NO: 1159885 - RNA, 23 nt, Human
acugaguacguugugcauuuggu

SEQ ID NO: 1159886 - RNA, 18 nt, Human
acugaguacguugugcau

SEQ ID NO: 1159887 - RNA, 19 nt, Human
acugaguacguugugcauu

SEQ ID NO: 1159888 - RNA, 21 nt, Human
acugaguacguugugcauuug

SEQ ID NO: 1159889 - RNA, 16 nt, Human
acugcaaccuccgccu

SEQ ID NO: 1159890 - RNA, 22 nt, Human
acugcaaccuccgccucuuggg

SEQ ID NO: 1159891 - RNA, 13 nt, Human
acugcaaccuccg

SEQ ID NO: 1159892 - RNA, 14 nt, Human
acugcaaccuccgc

SEQ ID NO: 1159893 - RNA, 20 nt, Human
uccugccucgaacuggcugc

SEQ ID NO: 1159894 - RNA, 21 nt, Human
uccugccucgaacuggcugca

SEQ ID NO: 1159895 - RNA, 16 nt, Human
uccugcaggcagccag

SEQ ID NO: 1159896 - RNA, 17 nt, Human
uccugcaggcagccagg

SEQ ID NO: 1159897 - RNA, 19 nt, Human
uccugcaggcagccaggcc

SEQ ID NO: 1159898 - RNA, 20 nt, Human
uccugcaggcagccaggcca

SEQ ID NO: 1159899 - RNA, 22 nt, Human
uccugcaggcagccaggccaca

SEQ ID NO: 1159900 - RNA, 19 nt, Human
uccugccucagccucccaa

SEQ ID NO: 1159901 - RNA, 13 nt, Human
uccugcugcaguu

SEQ ID NO: 1159902 - RNA, 21 nt, Human
uccugcugcaguugccaguca

SEQ ID NO: 1159903 - RNA, 23 nt, Human
acugcagccucaaccuccugggc

SEQ ID NO: 1159904 - RNA, 17 nt, Human
uccuuaaagaguguggc

SEQ ID NO: 1159905 - RNA, 23 nt, Human
uccuuaaagaguguggcaaaaua

SEQ ID NO: 1159906 - RNA, 18 nt, Human
uccuuaaagaguguggca

SEQ ID NO: 1159907 - RNA, 19 nt, Human
acugcagccucaaccuccu

SEQ ID NO: 1159908 - RNA, 21 nt, Human
acugcagccucaaccuccugg

SEQ ID NO: 1159909 - RNA, 22 nt, Human
acugcagccucaaccuccuggg

SEQ ID NO: 1159910 - RNA, 23 nt, Human
uccugugucuugcaauggcagcc

SEQ ID NO: 1159911 - RNA, 24 nt, Human
uccugugucuugcaauggcagccu

SEQ ID NO: 1159912 - RNA, 13 nt, Human
uccugugugugcg

SEQ ID NO: 1159913 - RNA, 14 nt, Human
uccugugugugcgc

SEQ ID NO: 1159914 - RNA, 18 nt, Human
uccugugugugcgccuac

SEQ ID NO: 1159915 - RNA, 19 nt, Human
uccuguucccaugagauga

SEQ ID NO: 1159916 - RNA, 22 nt, Human
acugccuucucaacuccaaacu

SEQ ID NO: 1159917 - RNA, 18 nt, Human
acugcuuccagugaggcu

SEQ ID NO: 1159918 - RNA, 21 nt, Human
acugcuuccagugaggcucug

SEQ ID NO: 1159919 - RNA, 22 nt, Human
acugcuuccagugaggcucugc

SEQ ID NO: 1159920 - RNA, 23 nt, Human
acugcuuccagugaggcucugcc

SEQ ID NO: 1159921 - RNA, 21 nt, Human
acugcuugugaaaggaaagag

SEQ ID NO: 1159922 - RNA, 22 nt, Human
acuggcugcaaaggguaucagg

SEQ ID NO: 1159923 - RNA, 13 nt, Human
uccuucagccuga

SEQ ID NO: 1159924 - RNA, 11 nt, Human
uccuucagugc

SEQ ID NO: 1159925 - RNA, 12 nt, Human
uccuucagugcc

SEQ ID NO: 1159926 - RNA, 13 nt, Human
uccuucagugccu

SEQ ID NO: 1159927 - RNA, 22 nt, Human
uccuucagugccuuauggaaca

SEQ ID NO: 1159928 - RNA, 14 nt, Human
uccuucagugccuu

SEQ ID NO: 1159929 - RNA, 15 nt, Human
uccuuucaccacaug

SEQ ID NO: 1159930 - RNA, 14 nt, Human
ucgaacuggcugca

SEQ ID NO: 1159931 - RNA, 15 nt, Human
ucgaacuggcugcaa

SEQ ID NO: 1159932 - RNA, 14 nt, Human
ucgagcaugccugg

SEQ ID NO: 1159933 - RNA, 15 nt, Human
ucgagcaugccugga

SEQ ID NO: 1159934 - RNA, 14 nt, Human
ucgaggacagggag

SEQ ID NO: 1159935 - RNA, 17 nt, Human
ucgaggacagggaggug

SEQ ID NO: 1159936 - RNA, 13 nt, Human
ucgcgacaaugca

SEQ ID NO: 1159937 - RNA, 14 nt, Human
ucgcgacaaugcaa

SEQ ID NO: 1159938 - RNA, 13 nt, Human
acuguacaugaaa

SEQ ID NO: 1159939 - RNA, 14 nt, Human
acuguacaugaaaa

SEQ ID NO: 1159940 - RNA, 16 nt, Human
acuguacaugaaaaca

SEQ ID NO: 1159941 - RNA, 23 nt, Human
acuguacaugaaaacacauuuuu

SEQ ID NO: 1159942 - RNA, 14 nt, Human
acuguacaaaguag

SEQ ID NO: 1159943 - RNA, 15 nt, Human
acuguacaaaguaga

SEQ ID NO: 1159944 - RNA, 19 nt, Human
acuguaauuugugauacaa

SEQ ID NO: 1159945 - RNA, 13 nt, Human
acuguacaaagua

SEQ ID NO: 1159946 - RNA, 12 nt, Human
ucgcuccugugu

SEQ ID NO: 1159947 - RNA, 13 nt, Human
ucgcuccuguguc

SEQ ID NO: 1159948 - RNA, 14 nt, Human
ucgcuccugugucu

SEQ ID NO: 1159949 - RNA, 19 nt, Human
acuggguacuuguggacac

SEQ ID NO: 1159950 - RNA, 20 nt, Human
acuggguacuuguggacaca

SEQ ID NO: 1159951 - RNA, 23 nt, Human
acuggguacuuguggacacagcu

SEQ ID NO: 1159952 - RNA, 11 nt, Human
ucucccuugga

SEQ ID NO: 1159953 - RNA, 18 nt, Human
ucucccuuggauuguccc

SEQ ID NO: 1159954 - RNA, 13 nt, Human
ucuccucugcugc

SEQ ID NO: 1159955 - RNA, 14 nt, Human
ucuccucugcugcu

SEQ ID NO: 1159956 - RNA, 15 nt, Human
ucuccucugcugcug

SEQ ID NO: 1159957 - RNA, 19 nt, Human
ucucccuuggauugucccc

SEQ ID NO: 1159958 - RNA, 21 nt, Human
ucucccuuggauuguccccga

SEQ ID NO: 1159959 - RNA, 12 nt, Human
ucuccucugcug

SEQ ID NO: 1159960 - RNA, 18 nt, Human
acuuuaccuuuuuuauac

SEQ ID NO: 1159961 - RNA, 19 nt, Human
acuuuaccuuuuuuauaca

SEQ ID NO: 1159962 - RNA, 22 nt, Human
acuuuaccuuuuuuauacauaa

SEQ ID NO: 1159963 - RNA, 23 nt, Human
acuuuaccuuuuuuauacauaaa

SEQ ID NO: 1159964 - RNA, 19 nt, Human
acuuugaccucugcagcaa

SEQ ID NO: 1159965 - RNA, 23 nt, Human
acuuugaccucugcagcaauaaa

SEQ ID NO: 1159966 - RNA, 13 nt, Human
acuuuggaaagac

SEQ ID NO: 1159967 - RNA, 14 nt, Human
acuuuggaaagacu

SEQ ID NO: 1159968 - RNA, 17 nt, Human
acuuuggaaagacuuuu

SEQ ID NO: 1159969 - RNA, 23 nt, Human
acuuuggaaagacuuuuccaacc

SEQ ID NO: 1159970 - RNA, 11 nt, Human
ucucugcccuc

SEQ ID NO: 1159971 - RNA, 16 nt, Human
ucucuggccuucggcc

SEQ ID NO: 1159972 - RNA, 17 nt, Human
ucucuggccuucggccu

SEQ ID NO: 1159973 - RNA, 21 nt, Human
ucucuggccuucggccuccau

SEQ ID NO: 1159974 - RNA, 14 nt, Human
ucucuugagagggu

SEQ ID NO: 1159975 - RNA, 20 nt, Human
ucuccuucaccuuugucccc

SEQ ID NO: 1159976 - RNA, 13 nt, Human
ucucuccagcccc

SEQ ID NO: 1159977 - RNA, 14 nt, Human
ucucuccagccccu

SEQ ID NO: 1159978 - RNA, 15 nt, Human
ucucuccagccccug

SEQ ID NO: 1159979 - RNA, 16 nt, Human
ucucuccagccccugg

SEQ ID NO: 1159980 - RNA, 20 nt, Human
ucucuccuguaccucuugag

SEQ ID NO: 1159981 - RNA, 22 nt, Human
ucucuccuguaccucuugagcc

SEQ ID NO: 1159982 - RNA, 17 nt, Human
agaaaaaugagccuggc

SEQ ID NO: 1159983 - RNA, 19 nt, Human
agaaaacaaggaugaauua

SEQ ID NO: 1159984 - RNA, 22 nt, Human
ucucuuuaaugucacaggcagg

SEQ ID NO: 1159985 - RNA, 17 nt, Human
ucucuugagccugggag

SEQ ID NO: 1159986 - RNA, 15 nt, Human
ucucuugagccuggg

SEQ ID NO: 1159987 - RNA, 13 nt, Human
ucucuugagccug

SEQ ID NO: 1159988 - RNA, 14 nt, Human
ucucuugagccugg

SEQ ID NO: 1159989 - RNA, 13 nt, Human
agaaacuggaacu

SEQ ID NO: 1159990 - RNA, 15 nt, Human
agaaacuggaacucu

SEQ ID NO: 1159991 - RNA, 15 nt, Human
ucugcagauaaacag

SEQ ID NO: 1159992 - RNA, 11 nt, Human
agaaauguguu

SEQ ID NO: 1159993 - RNA, 17 nt, Human
agaaauguacagcaagg

SEQ ID NO: 1159994 - RNA, 14 nt, Human
agaacucccuuuca

SEQ ID NO: 1159995 - RNA, 15 nt, Human
agaacucccuuucaa

SEQ ID NO: 1159996 - RNA, 19 nt, Human
ucugacccugcuucaaaua

SEQ ID NO: 1159997 - RNA, 19 nt, Human
ucugauucccaagcucugc

SEQ ID NO: 1159998 - RNA, 20 nt, Human
ucugauucccaagcucugcu

SEQ ID NO: 1159999 - RNA, 21 nt, Human
ucugauucccaagcucugcuc

SEQ ID NO: 1160000 - RNA, 14 nt, Human
agaagcuccaggua

SEQ ID NO: 1160001 - RNA, 15 nt, Human
agaagcggcuggcag

SEQ ID NO: 1160002 - RNA, 16 nt, Human
agaagcggcuggcagc

SEQ ID NO: 1160003 - RNA, 16 nt, Human
ucuggcagcucagaga

SEQ ID NO: 1160004 - RNA, 14 nt, Human
ucuggcagcucaga

SEQ ID NO: 1160005 - RNA, 15 nt, Human
ucuggcagcucagag

SEQ ID NO: 1160006 - RNA, 14 nt, Human
ucugcccuccaaga

SEQ ID NO: 1160007 - RNA, 18 nt, Human
ucugcccuccaagaccuu

SEQ ID NO: 1160008 - RNA, 16 nt, Human
ucugcucacauaucug

SEQ ID NO: 1160009 - RNA, 17 nt, Human
ucugcucacauaucugu

SEQ ID NO: 1160010 - RNA, 13 nt, Human
ucugcuucagccu

SEQ ID NO: 1160011 - RNA, 18 nt, Human
ucugguccauagagagca

SEQ ID NO: 1160012 - RNA, 11 nt, Human
ucuggggcugu

SEQ ID NO: 1160013 - RNA, 14 nt, Human
ucuggguucacugc

SEQ ID NO: 1160014 - RNA, 16 nt, Human
ucuggguucacugcaa

SEQ ID NO: 1160015 - RNA, 15 nt, Human
ucugucauuugagca

SEQ ID NO: 1160016 - RNA, 20 nt, Human
ucugucauuugagcagggcu

SEQ ID NO: 1160017 - RNA, 23 nt, Human
ucugucauuugagcagggcucag

SEQ ID NO: 1160018 - RNA, 15 nt, Human
ucugugaaaggaaag

SEQ ID NO: 1160019 - RNA, 21 nt, Human
ucugugaaaggaaagagggag

SEQ ID NO: 1160020 - RNA, 22 nt, Human
ucugugaaaggaaagagggagg

SEQ ID NO: 1160021 - RNA, 19 nt, Human
ucuguuggccagugugaca

SEQ ID NO: 1160022 - RNA, 20 nt, Human
ucuguuggccagugugacaa

SEQ ID NO: 1160023 - RNA, 20 nt, Human
ucuguuuuauaauuuuguga

SEQ ID NO: 1160024 - RNA, 18 nt, Human
ucuguuuuauaauuuugu

SEQ ID NO: 1160025 - RNA, 17 nt, Human
agaauuucccaaagcag

SEQ ID NO: 1160026 - RNA, 18 nt, Human
agaauuucccaaagcagu

SEQ ID NO: 1160027 - RNA, 23 nt, Human
agaauuucccaaagcagugcaug

SEQ ID NO: 1160028 - RNA, 15 nt, Human
agacaggaccaggga

SEQ ID NO: 1160029 - RNA, 16 nt, Human
agacaggaccagggau

SEQ ID NO: 1160030 - RNA, 23 nt, Human
agacaggcaagcaccuccugccu

SEQ ID NO: 1160031 - RNA, 21 nt, Human
agacaggguuuugccauguug

SEQ ID NO: 1160032 - RNA, 15 nt, Human
agacagucccugcca

SEQ ID NO: 1160033 - RNA, 16 nt, Human
agacagucccugccaa

SEQ ID NO: 1160034 - RNA, 17 nt, Human
agacagucccugccaau

SEQ ID NO: 1160035 - RNA, 19 nt, Human
agacagucccugccaaugg

SEQ ID NO: 1160036 - RNA, 17 nt, Human
ucuuauuuaaugaaaga

SEQ ID NO: 1160037 - RNA, 22 nt, Human
ucuuccaggcugggagagccuu

SEQ ID NO: 1160038 - RNA, 12 nt, Human
ucuucagagacu

SEQ ID NO: 1160039 - RNA, 22 nt, Human
ucuuagaugcaguucugaagaa

SEQ ID NO: 1160040 - RNA, 14 nt, Human
ucuuaugggcuggg

SEQ ID NO: 1160041 - RNA, 15 nt, Human
ucuuaugggcugggu

SEQ ID NO: 1160042 - RNA, 16 nt, Human
ucuuaugggcuggguu

SEQ ID NO: 1160043 - RNA, 18 nt, Human
ucuuaugggcuggguucu

SEQ ID NO: 1160044 - RNA, 18 nt, Human
ucuuauugcccacgcugg

SEQ ID NO: 1160045 - RNA, 22 nt, Human
ucuuauugcccacgcuggagug

SEQ ID NO: 1160046 - RNA, 19 nt, Human
agacuaucuaaauguugaa

SEQ ID NO: 1160047 - RNA, 17 nt, Human
agacuaucuaaauguug

SEQ ID NO: 1160048 - RNA, 18 nt, Human
agacuaucuaaauguuga

SEQ ID NO: 1160049 - RNA, 17 nt, Human
agacucauucuucugua

SEQ ID NO: 1160050 - RNA, 18 nt, Human
agacucauucuucuguac

SEQ ID NO: 1160051 - RNA, 13 nt, Human
ucuugcaauggca

SEQ ID NO: 1160052 - RNA, 16 nt, Human
ucuugcaauggcagcc

SEQ ID NO: 1160053 - RNA, 17 nt, Human
ucuugcaauggcagccu

SEQ ID NO: 1160054 - RNA, 18 nt, Human
ucuugcaauggcagccuu

SEQ ID NO: 1160055 - RNA, 12 nt, Human
agacccugcccu

SEQ ID NO: 1160056 - RNA, 13 nt, Human
agacccugcccug

SEQ ID NO: 1160057 - RNA, 14 nt, Human
agacccugcccugu

SEQ ID NO: 1160058 - RNA, 16 nt, Human
agacccugcccugugg

SEQ ID NO: 1160059 - RNA, 19 nt, Human
agacccugcccugugggcc

SEQ ID NO: 1160060 - RNA, 21 nt, Human
agacccugcccugugggcccc

SEQ ID NO: 1160061 - RNA, 23 nt, Human
agacccugcccugugggccccca

SEQ ID NO: 1160062 - RNA, 13 nt, Human
agacccuuguggu

SEQ ID NO: 1160063 - RNA, 15 nt, Human
agacccuuguggucc

SEQ ID NO: 1160064 - RNA, 19 nt, Human
agacccuuguggucccacc

SEQ ID NO: 1160065 - RNA, 20 nt, Human
agacccuuguggucccaccc

SEQ ID NO: 1160066 - RNA, 22 nt, Human
agacccuuguggucccacccca

SEQ ID NO: 1160067 - RNA, 23 nt, Human
agacccuuguggucccaccccac

SEQ ID NO: 1160068 - RNA, 15 nt, Human
ucuuuacuucaugga

SEQ ID NO: 1160069 - RNA, 13 nt, Human
ucuuuccugaggc

SEQ ID NO: 1160070 - RNA, 14 nt, Human
ucuuuccugaggcu

SEQ ID NO: 1160071 - RNA, 15 nt, Human
ucuuuccugaggcug

SEQ ID NO: 1160072 - RNA, 16 nt, Human
ucuuuccugaggcugg

SEQ ID NO: 1160073 - RNA, 15 nt, Human
agacuccugcaggca

SEQ ID NO: 1160074 - RNA, 16 nt, Human
agacuccugcaggcag

SEQ ID NO: 1160075 - RNA, 17 nt, Human
agacuccugcaggcagc

SEQ ID NO: 1160076 - RNA, 18 nt, Human
agacuccugcaggcagcc

SEQ ID NO: 1160077 - RNA, 19 nt, Human
agacuccugcaggcagcca

SEQ ID NO: 1160078 - RNA, 20 nt, Human
agacuccugcaggcagccag

SEQ ID NO: 1160079 - RNA, 23 nt, Human
agacuccugcaggcagccaggcc

SEQ ID NO: 1160080 - RNA, 17 nt, Human
agacucuacagaggcca

SEQ ID NO: 1160081 - RNA, 19 nt, Human
agacucuacagaggccaug

SEQ ID NO: 1160082 - RNA, 14 nt, Human
agacuucaucccuc

SEQ ID NO: 1160083 - RNA, 17 nt, Human
agacuucaucccucugg

SEQ ID NO: 1160084 - RNA, 12 nt, Human
agacuuuggaaa

SEQ ID NO: 1160085 - RNA, 14 nt, Human
agacuuuggaaaga

SEQ ID NO: 1160086 - RNA, 18 nt, Human
agagaaugaaagggccca

SEQ ID NO: 1160087 - RNA, 15 nt, Human
agacuuuggaaagac

SEQ ID NO: 1160088 - RNA, 15 nt, Human
agagaaugagagaca

SEQ ID NO: 1160089 - RNA, 17 nt, Human
agagacacacugaagaa

SEQ ID NO: 1160090 - RNA, 18 nt, Human
agagacacacugaagaag

SEQ ID NO: 1160091 - RNA, 20 nt, Human
agagacacacugaagaagca

SEQ ID NO: 1160092 - RNA, 13 nt, Human
agagaccaucccu

SEQ ID NO: 1160093 - RNA, 14 nt, Human
agagaccaucccug

SEQ ID NO: 1160094 - RNA, 15 nt, Human
agagaccaucccuga

SEQ ID NO: 1160095 - RNA, 18 nt, Human
agagaccaucccugaagg

SEQ ID NO: 1160096 - RNA, 21 nt, Human
ugaagacaaugacuuacugua

SEQ ID NO: 1160097 - RNA, 19 nt, Human
agagcugggugucaagagg

SEQ ID NO: 1160098 - RNA, 12 nt, Human
agaggaaagcaa

SEQ ID NO: 1160099 - RNA, 16 nt, Human
agaggaaagcaaagga

SEQ ID NO: 1160100 - RNA, 18 nt, Human
agaggaaagcaaaggaga

SEQ ID NO: 1160101 - RNA, 19 nt, Human
agaggaaagcaaaggagau

SEQ ID NO: 1160102 - RNA, 11 nt, Human
agaggaaauca

SEQ ID NO: 1160103 - RNA, 12 nt, Human
agaggaaaucac

SEQ ID NO: 1160104 - RNA, 21 nt, Human
agaggaaaucaccgaaaacgu

SEQ ID NO: 1160105 - RNA, 18 nt, Human
agaggcaacugcauuggc

SEQ ID NO: 1160106 - RNA, 14 nt, Human
ucuuuggucuacac

SEQ ID NO: 1160107 - RNA, 21 nt, Human
ucuuuggucuacacugugcug

SEQ ID NO: 1160108 - RNA, 11 nt, Human
ugaacuuugac

SEQ ID NO: 1160109 - RNA, 16 nt, Human
ugaacuuugaccucug

SEQ ID NO: 1160110 - RNA, 17 nt, Human
ugaacuuugaccucugc

SEQ ID NO: 1160111 - RNA, 14 nt, Human
ugaagaagauggua

SEQ ID NO: 1160112 - RNA, 20 nt, Human
ugaagaagcaccaaucauga

SEQ ID NO: 1160113 - RNA, 22 nt, Human
ugaagaagcaccaaucaugaau

SEQ ID NO: 1160114 - RNA, 11 nt, Human
ugaagacaaug

SEQ ID NO: 1160115 - RNA, 13 nt, Human
ugaagacaaugac

SEQ ID NO: 1160116 - RNA, 17 nt, Human
ugaagacaaugacuuac

SEQ ID NO: 1160117 - RNA, 17 nt, Human
agaggcuaugugagcac

SEQ ID NO: 1160118 - RNA, 21 nt, Human
agagggagggagggcuccaga

SEQ ID NO: 1160119 - RNA, 22 nt, Human
agagggagggagggcuccagac

SEQ ID NO: 1160120 - RNA, 15 nt, Human
agagggagguaagga

SEQ ID NO: 1160121 - RNA, 18 nt, Human
ugaagauguagaggagaa

SEQ ID NO: 1160122 - RNA, 14 nt, Human
ugaaugucagugug

SEQ ID NO: 1160123 - RNA, 15 nt, Human
ugaaugucaguguga

SEQ ID NO: 1160124 - RNA, 18 nt, Human
ugaaugucagugugacug

SEQ ID NO: 1160125 - RNA, 20 nt, Human
agagucucacuguugcccag

SEQ ID NO: 1160126 - RNA, 22 nt, Human
agagucucacuguugcccaggc

SEQ ID NO: 1160127 - RNA, 22 nt, Human
agagugaacaaauuuacagaga

SEQ ID NO: 1160128 - RNA, 15 nt, Human
agagugagacucugu

SEQ ID NO: 1160129 - RNA, 16 nt, Human
agagugagacucuguc

SEQ ID NO: 1160130 - RNA, 18 nt, Human
agauaauacaccacuaca

SEQ ID NO: 1160131 - RNA, 19 nt, Human
agauaaggguaucugguga

SEQ ID NO: 1160132 - RNA, 19 nt, Human
agagugagacucugucuca

SEQ ID NO: 1160133 - RNA, 19 nt, Human
agauacaggaaaagcugcu

SEQ ID NO: 1160134 - RNA, 19 nt, Human
agaucaaccccuucgcucc

SEQ ID NO: 1160135 - RNA, 21 nt, Human
agaucaaccccuucgcuccug

SEQ ID NO: 1160136 - RNA, 14 nt, Human
ugaccucugccuga

SEQ ID NO: 1160137 - RNA, 12 nt, Human
ugaccugaggcc

SEQ ID NO: 1160138 - RNA, 12 nt, Human
ugacccaugcug

SEQ ID NO: 1160139 - RNA, 23 nt, Human
agaugcuagaacucccuuucaac

SEQ ID NO: 1160140 - RNA, 18 nt, Human
agaugcuucucacugcca

SEQ ID NO: 1160141 - RNA, 14 nt, Human
ugaccugaggcccu

SEQ ID NO: 1160142 - RNA, 15 nt, Human
ugaccugaggcccuu

SEQ ID NO: 1160143 - RNA, 17 nt, Human
ugaccugaggcccuucu

SEQ ID NO: 1160144 - RNA, 17 nt, Human
ugacuccagaauuuccc

SEQ ID NO: 1160145 - RNA, 19 nt, Human
ugacuccagaauuucccaa

SEQ ID NO: 1160146 - RNA, 20 nt, Human
ugacuccagaauuucccaaa

SEQ ID NO: 1160147 - RNA, 23 nt, Human
ugacuccagaauuucccaaagca

SEQ ID NO: 1160148 - RNA, 15 nt, Human
ugacuguuuccauca

SEQ ID NO: 1160149 - RNA, 21 nt, Human
ugacuguuuucucuugagagg

SEQ ID NO: 1160150 - RNA, 16 nt, Human
agauugugccccugca

SEQ ID NO: 1160151 - RNA, 21 nt, Human
agauugugccccugcacucca

SEQ ID NO: 1160152 - RNA, 16 nt, Human
agauuuaccacuugug

SEQ ID NO: 1160153 - RNA, 13 nt, Human
agauuucacucuc

SEQ ID NO: 1160154 - RNA, 14 nt, Human
agauuucacucucc

SEQ ID NO: 1160155 - RNA, 17 nt, Human
agauuucacucuccuug

SEQ ID NO: 1160156 - RNA, 14 nt, Human
agauuuuccugaaa

SEQ ID NO: 1160157 - RNA, 15 nt, Human
ugagcaauccugcaa

SEQ ID NO: 1160158 - RNA, 20 nt, Human
ugagcacuaaggugugcucu

SEQ ID NO: 1160159 - RNA, 21 nt, Human
ugagcacuaaggugugcucug

SEQ ID NO: 1160160 - RNA, 22 nt, Human
ugagcacuaaggugugcucuga

SEQ ID NO: 1160161 - RNA, 23 nt, Human
ugagcacuaaggugugcucugau

SEQ ID NO: 1160162 - RNA, 22 nt, Human
ugagcaucaggccaggcccucu

SEQ ID NO: 1160163 - RNA, 24 nt, Human
ugagcaucaggccaggcccucugc

SEQ ID NO: 1160164 - RNA, 21 nt, Human
ugagccacugcaccgggccac

SEQ ID NO: 1160165 - RNA, 23 nt, Human
ugagccacugcaccgggccacag

SEQ ID NO: 1160166 - RNA, 13 nt, Human
ugagccagauuuc

SEQ ID NO: 1160167 - RNA, 14 nt, Human
ugagccagauuuca

SEQ ID NO: 1160168 - RNA, 16 nt, Human
ugagccagauuucacu

SEQ ID NO: 1160169 - RNA, 14 nt, Human
agcaagugagagcu

SEQ ID NO: 1160170 - RNA, 22 nt, Human
agcaagugagagcuggguguca

SEQ ID NO: 1160171 - RNA, 17 nt, Human
ugagccagauuucacuc

SEQ ID NO: 1160172 - RNA, 22 nt, Human
ugagccagauuucacucuccuu

SEQ ID NO: 1160173 - RNA, 18 nt, Human
ugagccagauuucacucu

SEQ ID NO: 1160174 - RNA, 20 nt, Human
agcaagugagacccugucuc

SEQ ID NO: 1160175 - RNA, 13 nt, Human
agcaagugagagc

SEQ ID NO: 1160176 - RNA, 22 nt, Human
agcacagccucuuagaugcagu

SEQ ID NO: 1160177 - RNA, 16 nt, Human
agcacagcuucauuuc

SEQ ID NO: 1160178 - RNA, 13 nt, Human
agcacaugccucu

SEQ ID NO: 1160179 - RNA, 14 nt, Human
agcacaugccucuc

SEQ ID NO: 1160180 - RNA, 16 nt, Human
agcacaugccucucuc

SEQ ID NO: 1160181 - RNA, 16 nt, Human
agcaccaaucaugaau

SEQ ID NO: 1160182 - RNA, 19 nt, Human
agcaccuuagacagucccu

SEQ ID NO: 1160183 - RNA, 20 nt, Human
agcaccuuagacagucccug

SEQ ID NO: 1160184 - RNA, 21 nt, Human
agcaccuuagacagucccugc

SEQ ID NO: 1160185 - RNA, 22 nt, Human
agcaccuuagacagucccugcc

SEQ ID NO: 1160186 - RNA, 23 nt, Human
agcaccuuagacagucccugcca

SEQ ID NO: 1160187 - RNA, 13 nt, Human
agcacgauuucug

SEQ ID NO: 1160188 - RNA, 14 nt, Human
agcacgauuucugu

SEQ ID NO: 1160189 - RNA, 15 nt, Human
agcacgauuucuguu

SEQ ID NO: 1160190 - RNA, 16 nt, Human
agcacgauuucuguuu

SEQ ID NO: 1160191 - RNA, 17 nt, Human
agcacgauuucuguuua

SEQ ID NO: 1160192 - RNA, 22 nt, Human
agcacuuugggaggccaaggug

SEQ ID NO: 1160193 - RNA, 23 nt, Human
agcacuuugggaggccaaggugg

SEQ ID NO: 1160194 - RNA, 12 nt, Human
agcagaaaugcc

SEQ ID NO: 1160195 - RNA, 13 nt, Human
agcagaaaugccu

SEQ ID NO: 1160196 - RNA, 19 nt, Human
agcagaaaugccuuacccu

SEQ ID NO: 1160197 - RNA, 14 nt, Human
agcagaacagugau

SEQ ID NO: 1160198 - RNA, 21 nt, Human
agcagagaaugaaagggccca

SEQ ID NO: 1160199 - RNA, 22 nt, Human
agcagagaaugaaagggcccag

SEQ ID NO: 1160200 - RNA, 23 nt, Human
agcagagaaugaaagggcccaga

SEQ ID NO: 1160201 - RNA, 14 nt, Human
agcagagaauucuc

SEQ ID NO: 1160202 - RNA, 21 nt, Human
agcagagaauucucuuaucca

SEQ ID NO: 1160203 - RNA, 15 nt, Human
agcagagaccauccc

SEQ ID NO: 1160204 - RNA, 16 nt, Human
agcagagaccaucccu

SEQ ID NO: 1160205 - RNA, 17 nt, Human
agcagagaccaucccug

SEQ ID NO: 1160206 - RNA, 11 nt, Human
ugagccuggca

SEQ ID NO: 1160207 - RNA, 16 nt, Human
ugagccuggcaagaau

SEQ ID NO: 1160208 - RNA, 14 nt, Human
ugagccugggaggu

SEQ ID NO: 1160209 - RNA, 19 nt, Human
ugagccugggaggucaagg

SEQ ID NO: 1160210 - RNA, 22 nt, Human
ugagccugggaggucaaggcug

SEQ ID NO: 1160211 - RNA, 14 nt, Human
ugagccuugaacuu

SEQ ID NO: 1160212 - RNA, 15 nt, Human
ugagccuugaacuuu

SEQ ID NO: 1160213 - RNA, 17 nt, Human
ugagccuugaacuuuga

SEQ ID NO: 1160214 - RNA, 18 nt, Human
ugagccuugaacuuugac

SEQ ID NO: 1160215 - RNA, 19 nt, Human
ugagccuugaacuuugacc

SEQ ID NO: 1160216 - RNA, 13 nt, Human
ugagcgacaguga

SEQ ID NO: 1160217 - RNA, 14 nt, Human
ugagcgacagugag

SEQ ID NO: 1160218 - RNA, 16 nt, Human
ugagcgacagugagac

SEQ ID NO: 1160219 - RNA, 20 nt, Human
ugagcgacagugagacucug

SEQ ID NO: 1160220 - RNA, 19 nt, Human
ugagggauacccaucccau

SEQ ID NO: 1160221 - RNA, 16 nt, Human
ugaggcccuucucucc

SEQ ID NO: 1160222 - RNA, 18 nt, Human
ugaggcccuucucuccag

SEQ ID NO: 1160223 - RNA, 19 nt, Human
ugaggcccuucucuccagc

SEQ ID NO: 1160224 - RNA, 20 nt, Human
ugaggcccuucucuccagcc

SEQ ID NO: 1160225 - RNA, 22 nt, Human
ugaggcccuucucuccagcccc

SEQ ID NO: 1160226 - RNA, 23 nt, Human
ugaggcccuucucuccagccccu

SEQ ID NO: 1160227 - RNA, 24 nt, Human
ugaggcccuucucuccagccccug

SEQ ID NO: 1160228 - RNA, 12 nt, Human
ugaggggccucu

SEQ ID NO: 1160229 - RNA, 13 nt, Human
ugaggggccucuu

SEQ ID NO: 1160230 - RNA, 20 nt, Human
agcagagaccaucccugaag

SEQ ID NO: 1160231 - RNA, 20 nt, Human
agcagagcaccuuagacagu

SEQ ID NO: 1160232 - RNA, 17 nt, Human
ugaggucagagccugca

SEQ ID NO: 1160233 - RNA, 18 nt, Human
agcagagaccaucccuga

SEQ ID NO: 1160234 - RNA, 19 nt, Human
agcagagaccaucccugaa

SEQ ID NO: 1160235 - RNA, 20 nt, Human
ugaggguugggcugguguca

SEQ ID NO: 1160236 - RNA, 17 nt, Human
ugagguacugagaguga

SEQ ID NO: 1160237 - RNA, 22 nt, Human
ugagguacugagagugaacaaa

SEQ ID NO: 1160238 - RNA, 13 nt, Human
ugaggucagagcc

SEQ ID NO: 1160239 - RNA, 14 nt, Human
ugaggucagagccu

SEQ ID NO: 1160240 - RNA, 16 nt, Human
ugaggucagagccugc

SEQ ID NO: 1160241 - RNA, 17 nt, Human
agcagaggaaggagagg

SEQ ID NO: 1160242 - RNA, 19 nt, Human
agcagauggagaccccuug

SEQ ID NO: 1160243 - RNA, 15 nt, Human
ugaggaagcaaaagc

SEQ ID NO: 1160244 - RNA, 22 nt, Human
ugaggaagcaaaagcaucuaug

SEQ ID NO: 1160245 - RNA, 14 nt, Human
ugaggaagccgcug

SEQ ID NO: 1160246 - RNA, 17 nt, Human
ugaggaagccgcugggg

SEQ ID NO: 1160247 - RNA, 18 nt, Human
ugaggaagccgcuggggc

SEQ ID NO: 1160248 - RNA, 19 nt, Human
ugaggaagccgcuggggcc

SEQ ID NO: 1160249 - RNA, 21 nt, Human
ugaggaagccgcuggggccag

SEQ ID NO: 1160250 - RNA, 16 nt, Human
ugagcuacaaaugcau

SEQ ID NO: 1160251 - RNA, 14 nt, Human
ugagcuacaaaugc

SEQ ID NO: 1160252 - RNA, 13 nt, Human
ugagcuacaaaug

SEQ ID NO: 1160253 - RNA, 21 nt, Human
ugaggaauccagacccggcug

SEQ ID NO: 1160254 - RNA, 22 nt, Human
ugaggaauccagacccggcugc

SEQ ID NO: 1160255 - RNA, 21 nt, Human
ugaggacacuaaccacgcugg

SEQ ID NO: 1160256 - RNA, 15 nt, Human
ugaggacacugauau

SEQ ID NO: 1160257 - RNA, 12 nt, Human
ugaggccagaga

SEQ ID NO: 1160258 - RNA, 14 nt, Human
ugaggccagagaca

SEQ ID NO: 1160259 - RNA, 16 nt, Human
ugaggccagagacaca

SEQ ID NO: 1160260 - RNA, 20 nt, Human
ugaggccagagacacaagcc

SEQ ID NO: 1160261 - RNA, 12 nt, Human
ugaggcccagag

SEQ ID NO: 1160262 - RNA, 13 nt, Human
ugaggcccagagg

SEQ ID NO: 1160263 - RNA, 15 nt, Human
ugaggcccagagggc

SEQ ID NO: 1160264 - RNA, 17 nt, Human
ugaggcccagagggccu

SEQ ID NO: 1160265 - RNA, 18 nt, Human
ugaggcccagagggccug

SEQ ID NO: 1160266 - RNA, 20 nt, Human
ugaggcccagagggccugca

SEQ ID NO: 1160267 - RNA, 21 nt, Human
ugaggcccagagggccugcaa

SEQ ID NO: 1160268 - RNA, 22 nt, Human
ugaggcccagagggccugcaag

SEQ ID NO: 1160269 - RNA, 23 nt, Human
ugaggcccagagggccugcaagg

SEQ ID NO: 1160270 - RNA, 22 nt, Human
ugcagacucuacagaggccaug

SEQ ID NO: 1160271 - RNA, 19 nt, Human
ugcagacucuacagaggcc

SEQ ID NO: 1160272 - RNA, 20 nt, Human
ugcagacucuacagaggcca

SEQ ID NO: 1160273 - RNA, 15 nt, Human
ugcacuccccugcug

SEQ ID NO: 1160274 - RNA, 18 nt, Human
agcccuucuuuccacaga

SEQ ID NO: 1160275 - RNA, 19 nt, Human
agcccuucuuuccacagaa

SEQ ID NO: 1160276 - RNA, 15 nt, Human
agccuaggugacaga

SEQ ID NO: 1160277 - RNA, 17 nt, Human
agccuaggugacagagu

SEQ ID NO: 1160278 - RNA, 15 nt, Human
agccucaaccuccug

SEQ ID NO: 1160279 - RNA, 15 nt, Human
ugcacaagcuccaag

SEQ ID NO: 1160280 - RNA, 16 nt, Human
ugcacaagcuccaagc

SEQ ID NO: 1160281 - RNA, 18 nt, Human
ugcacaagcuccaagcuc

SEQ ID NO: 1160282 - RNA, 20 nt, Human
ugcacaagcuccaagcuccc

SEQ ID NO: 1160283 - RNA, 22 nt, Human
ugcacaagcuccaagcucccag

SEQ ID NO: 1160284 - RNA, 23 nt, Human
ugcacaagcuccaagcucccagg

SEQ ID NO: 1160285 - RNA, 14 nt, Human
ugcacaagcugcac

SEQ ID NO: 1160286 - RNA, 15 nt, Human
ugcacacaccagagc

SEQ ID NO: 1160287 - RNA, 17 nt, Human
ugcacacaccagagccc

SEQ ID NO: 1160288 - RNA, 14 nt, Human
ugcaccacugcacu

SEQ ID NO: 1160289 - RNA, 15 nt, Human
ugcaccacugcacuc

SEQ ID NO: 1160290 - RNA, 22 nt, Human
ugcacuauagccuaggugacag

SEQ ID NO: 1160291 - RNA, 12 nt, Human
ugcacuccccug

SEQ ID NO: 1160292 - RNA, 13 nt, Human
ugcacuccccugc

SEQ ID NO: 1160293 - RNA, 19 nt, Human
ugcagugagccgagauugu

SEQ ID NO: 1160294 - RNA, 14 nt, Human
ugcagugagccgag

SEQ ID NO: 1160295 - RNA, 17 nt, Human
agccucaaccuccuggg

SEQ ID NO: 1160296 - RNA, 18 nt, Human
agccucaaccuccugggc

SEQ ID NO: 1160297 - RNA, 13 nt, Human
agccucagcaucc

SEQ ID NO: 1160298 - RNA, 14 nt, Human
agccucagcauccu

SEQ ID NO: 1160299 - RNA, 15 nt, Human
agccucagcauccug

SEQ ID NO: 1160300 - RNA, 16 nt, Human
agccucagcauccugg

SEQ ID NO: 1160301 - RNA, 19 nt, Human
agccucaaccuccugggcu

SEQ ID NO: 1160302 - RNA, 18 nt, Human
agccugagcgacagugag

SEQ ID NO: 1160303 - RNA, 19 nt, Human
agccugagcgacagugaga

SEQ ID NO: 1160304 - RNA, 18 nt, Human
ugcagccucaaccuccug

SEQ ID NO: 1160305 - RNA, 19 nt, Human
ugcagccucaaccuccugg

SEQ ID NO: 1160306 - RNA, 20 nt, Human
ugcagccucaaccuccuggg

SEQ ID NO: 1160307 - RNA, 16 nt, Human
ugcaugcugucccuua

SEQ ID NO: 1160308 - RNA, 16 nt, Human
agccugccucuucucu

SEQ ID NO: 1160309 - RNA, 19 nt, Human
agccugccucuucucuacu

SEQ ID NO: 1160310 - RNA, 23 nt, Human
agccugcaguuauuaacacuaac

SEQ ID NO: 1160311 - RNA, 13 nt, Human
ugcauacacacac

SEQ ID NO: 1160312 - RNA, 13 nt, Human
ugcauacucauua

SEQ ID NO: 1160313 - RNA, 9 nt, Human
ugcauacac

SEQ ID NO: 1160314 - RNA, 10 nt, Human
ugcauacaca

SEQ ID NO: 1160315 - RNA, 11 nt, Human
ugcauacacac

SEQ ID NO: 1160316 - RNA, 22 nt, Human
ugcauaccacuuuuguucuugg

SEQ ID NO: 1160317 - RNA, 12 nt, Human
ugcauacacaca

SEQ ID NO: 1160318 - RNA, 22 nt, Human
ugcaugaaguaauaugcacaca

SEQ ID NO: 1160319 - RNA, 21 nt, Human
ugcaugaggcuaguguggugu

SEQ ID NO: 1160320 - RNA, 13 nt, Human
ugcaugcuguccc

SEQ ID NO: 1160321 - RNA, 14 nt, Human
ugcaugcugucccu

SEQ ID NO: 1160322 - RNA, 15 nt, Human
ugcaugcugucccuu

SEQ ID NO: 1160323 - RNA, 14 nt, Human
agccugcuccagcu

SEQ ID NO: 1160324 - RNA, 14 nt, Human
agcgcccaguuggg

SEQ ID NO: 1160325 - RNA, 22 nt, Human
agcgcccaguuggguggaugcc

SEQ ID NO: 1160326 - RNA, 19 nt, Human
ugcauuugaaaauuuugau

SEQ ID NO: 1160327 - RNA, 23 nt, Human
ugcauuugaaaauuuugauguuu

SEQ ID NO: 1160328 - RNA, 18 nt, Human
ugcauuugaggucuguuc

SEQ ID NO: 1160329 - RNA, 16 nt, Human
ugccagucaccccggc

SEQ ID NO: 1160330 - RNA, 18 nt, Human
ugccagucaccccggcca

SEQ ID NO: 1160331 - RNA, 20 nt, Human
ugccagucaccccggccacc

SEQ ID NO: 1160332 - RNA, 22 nt, Human
ugccagucaccccggccaccug

SEQ ID NO: 1160333 - RNA, 23 nt, Human
ugccagucaccccggccaccugc

SEQ ID NO: 1160334 - RNA, 15 nt, Human
ugccauauucuguug

SEQ ID NO: 1160335 - RNA, 16 nt, Human
ugccauauucuguugg

SEQ ID NO: 1160336 - RNA, 17 nt, Human
ugccauauucuguuggc

SEQ ID NO: 1160337 - RNA, 20 nt, Human
ugccauauucuguuggccag

SEQ ID NO: 1160338 - RNA, 21 nt, Human
ugccauauucuguuggccagu

SEQ ID NO: 1160339 - RNA, 15 nt, Human
agcggggacagcucc

SEQ ID NO: 1160340 - RNA, 16 nt, Human
agcggggacagcuccu

SEQ ID NO: 1160341 - RNA, 17 nt, Human
agcggggacagcuccuu

SEQ ID NO: 1160342 - RNA, 15 nt, Human
agcgugagccacugc

SEQ ID NO: 1160343 - RNA, 16 nt, Human
agcgugagccacugca

SEQ ID NO: 1160344 - RNA, 17 nt, Human
agcgugagccacugcac

SEQ ID NO: 1160345 - RNA, 20 nt, Human
agcgugguggacaugcacag

SEQ ID NO: 1160346 - RNA, 23 nt, Human
agcgugguggacaugcacagcua

SEQ ID NO: 1160347 - RNA, 20 nt, Human
ugccauguuggccaggcugg

SEQ ID NO: 1160348 - RNA, 21 nt, Human
ugccauguuggccaggcuggu

SEQ ID NO: 1160349 - RNA, 18 nt, Human
agcucagggccuggcuca

SEQ ID NO: 1160350 - RNA, 15 nt, Human
agcucagggccuggc

SEQ ID NO: 1160351 - RNA, 16 nt, Human
agcucagggccuggcu

SEQ ID NO: 1160352 - RNA, 17 nt, Human
agcucagggccuggcuc

SEQ ID NO: 1160353 - RNA, 17 nt, Human
ugccauguuggccaggc

SEQ ID NO: 1160354 - RNA, 18 nt, Human
ugccauguuggccaggcu

SEQ ID NO: 1160355 - RNA, 19 nt, Human
ugccauguuggccaggcug

SEQ ID NO: 1160356 - RNA, 19 nt, Human
agcuauggugucauaggcu

SEQ ID NO: 1160357 - RNA, 12 nt, Human
ugcccaggcccc

SEQ ID NO: 1160358 - RNA, 16 nt, Human
ugcccacaggaucagu

SEQ ID NO: 1160359 - RNA, 14 nt, Human
ugcccaggccccug

SEQ ID NO: 1160360 - RNA, 20 nt, Human
ugcccaggccccugccaccc

SEQ ID NO: 1160361 - RNA, 22 nt, Human
ugcccaggccccugccacccug

SEQ ID NO: 1160362 - RNA, 14 nt, Human
ugcccacaggauca

SEQ ID NO: 1160363 - RNA, 15 nt, Human
ugcccaggcaggucu

SEQ ID NO: 1160364 - RNA, 16 nt, Human
ugcccaggcaggucuu

SEQ ID NO: 1160365 - RNA, 17 nt, Human
ugcccaggcaggucuug

SEQ ID NO: 1160366 - RNA, 20 nt, Human
ugcccaggcaggucuugaac

SEQ ID NO: 1160367 - RNA, 11 nt, Human
ugcccaggccc

SEQ ID NO: 1160368 - RNA, 19 nt, Human
ugccccucaacucuccucc

SEQ ID NO: 1160369 - RNA, 19 nt, Human
ugcccuccaagaccuucuc

SEQ ID NO: 1160370 - RNA, 20 nt, Human
ugcccuccaagaccuucucc

SEQ ID NO: 1160371 - RNA, 22 nt, Human
ugcccuccaagaccuucuccuu

SEQ ID NO: 1160372 - RNA, 16 nt, Human
agcucucuccucccuu

SEQ ID NO: 1160373 - RNA, 12 nt, Human
agcucugcuccu

SEQ ID NO: 1160374 - RNA, 22 nt, Human
agcucugcuccucuccccagca

SEQ ID NO: 1160375 - RNA, 12 nt, Human
agcucuguccug

SEQ ID NO: 1160376 - RNA, 14 nt, Human
agcucuguccuggg

SEQ ID NO: 1160377 - RNA, 18 nt, Human
agcucuucuccaggcugu

SEQ ID NO: 1160378 - RNA, 13 nt, Human
agcugcacccuca

SEQ ID NO: 1160379 - RNA, 17 nt, Human
agcugcacccucaggca

SEQ ID NO: 1160380 - RNA, 18 nt, Human
agcugcacccucaggcag

SEQ ID NO: 1160381 - RNA, 19 nt, Human
agcugcacccucaggcagg

SEQ ID NO: 1160382 - RNA, 20 nt, Human
agcugcacccucaggcaggu

SEQ ID NO: 1160383 - RNA, 22 nt, Human
agcugcacccucaggcaggugg

SEQ ID NO: 1160384 - RNA, 13 nt, Human
agcugccaccugc

SEQ ID NO: 1160385 - RNA, 14 nt, Human
agcugccagccgag

SEQ ID NO: 1160386 - RNA, 13 nt, Human
ugccucccaucac

SEQ ID NO: 1160387 - RNA, 14 nt, Human
ugccucccaucacc

SEQ ID NO: 1160388 - RNA, 19 nt, Human
ugccucccaucacccgcua

SEQ ID NO: 1160389 - RNA, 13 nt, Human
ugccucucucagg

SEQ ID NO: 1160390 - RNA, 14 nt, Human
ugccucucucaggc

SEQ ID NO: 1160391 - RNA, 15 nt, Human
ugccucucucaggcc

SEQ ID NO: 1160392 - RNA, 16 nt, Human
ugccucucucaggcca

SEQ ID NO: 1160393 - RNA, 20 nt, Human
ugccucugacacacagcucu

SEQ ID NO: 1160394 - RNA, 21 nt, Human
ugccucugacacacagcucug

SEQ ID NO: 1160395 - RNA, 23 nt, Human
agcugggaugauuggagggggga

SEQ ID NO: 1160396 - RNA, 19 nt, Human
agcugggacuacaggugug

SEQ ID NO: 1160397 - RNA, 14 nt, Human
agcugggcagguug

SEQ ID NO: 1160398 - RNA, 22 nt, Human
ugccucugacacacagcucugu

SEQ ID NO: 1160399 - RNA, 13 nt, Human
agcugccugggau

SEQ ID NO: 1160400 - RNA, 19 nt, Human
agcugccugggaucccuca

SEQ ID NO: 1160401 - RNA, 21 nt, Human
agcugccugggaucccucauc

SEQ ID NO: 1160402 - RNA, 10 nt, Human
agcugccugu

SEQ ID NO: 1160403 - RNA, 15 nt, Human
ugccuguucagcucc

SEQ ID NO: 1160404 - RNA, 16 nt, Human
ugccuguucagcucca

SEQ ID NO: 1160405 - RNA, 17 nt, Human
ugccuguucagcuccag

SEQ ID NO: 1160406 - RNA, 13 nt, Human
ugcgaaaggauga

SEQ ID NO: 1160407 - RNA, 19 nt, Human
ugcgaaaggaugaaaguga

SEQ ID NO: 1160408 - RNA, 18 nt, Human
ugcggacagccacggcca

SEQ ID NO: 1160409 - RNA, 16 nt, Human
ugcuaguaauuggaaa

SEQ ID NO: 1160410 - RNA, 16 nt, Human
aggaaagaggcucugg

SEQ ID NO: 1160411 - RNA, 17 nt, Human
aggaaagcaaaggagau

SEQ ID NO: 1160412 - RNA, 19 nt, Human
aggaaagcaaaggagauug

SEQ ID NO: 1160413 - RNA, 13 nt, Human
aggaaagagaacu

SEQ ID NO: 1160414 - RNA, 19 nt, Human
aggaaagagaacuuccaga

SEQ ID NO: 1160415 - RNA, 12 nt, Human
aggaaagaggcu

SEQ ID NO: 1160416 - RNA, 13 nt, Human
aggaaagaggcuc

SEQ ID NO: 1160417 - RNA, 12 nt, Human
agcuuugaaaau

SEQ ID NO: 1160418 - RNA, 16 nt, Human
agcuuugaaaauucag

SEQ ID NO: 1160419 - RNA, 18 nt, Human
agcuuugaaaauucagug

SEQ ID NO: 1160420 - RNA, 19 nt, Human
agcuuugaaaauucagugg

SEQ ID NO: 1160421 - RNA, 15 nt, Human
aggaaacccagcucu

SEQ ID NO: 1160422 - RNA, 16 nt, Human
aggaaacccagcucug

SEQ ID NO: 1160423 - RNA, 17 nt, Human
aggaaacccagcucugg

SEQ ID NO: 1160424 - RNA, 18 nt, Human
aggaaacccagcucuggu

SEQ ID NO: 1160425 - RNA, 20 nt, Human
aggaaacccagcucuggucc

SEQ ID NO: 1160426 - RNA, 21 nt, Human
aggaaacccagcucuggucca

SEQ ID NO: 1160427 - RNA, 21 nt, Human
agcuuauugucuagugaaacu

SEQ ID NO: 1160428 - RNA, 19 nt, Human
agcuuguaaauagcucagg

SEQ ID NO: 1160429 - RNA, 20 nt, Human
agcuuguaaauagcucaggu

SEQ ID NO: 1160430 - RNA, 21 nt, Human
agcuuguaaauagcucaggug

SEQ ID NO: 1160431 - RNA, 20 nt, Human
ugcggacagccacggccagg

SEQ ID NO: 1160432 - RNA, 21 nt, Human
ugcggacagccacggccaggc

SEQ ID NO: 1160433 - RNA, 20 nt, Human
agcuuaaaggggcuagagug

SEQ ID NO: 1160434 - RNA, 12 nt, Human
agcuuaucucag

SEQ ID NO: 1160435 - RNA, 14 nt, Human
agcuuaucucaggg

SEQ ID NO: 1160436 - RNA, 15 nt, Human
agcuuaucucagggg

SEQ ID NO: 1160437 - RNA, 22 nt, Human
ugcucugaucauccacugugcc

SEQ ID NO: 1160438 - RNA, 17 nt, Human
ugcugacuguuuucucu

SEQ ID NO: 1160439 - RNA, 15 nt, Human
ugcucugcauguuac

SEQ ID NO: 1160440 - RNA, 18 nt, Human
ugcucugcauguuacaua

SEQ ID NO: 1160441 - RNA, 14 nt, Human
ugcugagucugaag

SEQ ID NO: 1160442 - RNA, 21 nt, Human
ugcugacuguuuucucuugag

SEQ ID NO: 1160443 - RNA, 24 nt, Human
ugcugacuguuuucucuugagagg

SEQ ID NO: 1160444 - RNA, 18 nt, Human
aggaaaggcuccaggagc

SEQ ID NO: 1160445 - RNA, 20 nt, Human
aggaaaggcuccaggagcag

SEQ ID NO: 1160446 - RNA, 22 nt, Human
aggaaaggcuccaggagcagcc

SEQ ID NO: 1160447 - RNA, 23 nt, Human
aggaaaggcuccaggagcagcca

SEQ ID NO: 1160448 - RNA, 14 nt, Human
aggaaauauuuauu

SEQ ID NO: 1160449 - RNA, 18 nt, Human
aggaaauauuuauuuuaa

SEQ ID NO: 1160450 - RNA, 11 nt, Human
ugcugccaucc

SEQ ID NO: 1160451 - RNA, 21 nt, Human
ugcugccauccagguucagcu

SEQ ID NO: 1160452 - RNA, 22 nt, Human
ugcugccauccagguucagcuu

SEQ ID NO: 1160453 - RNA, 12 nt, Human
ugcugccaucca

SEQ ID NO: 1160454 - RNA, 13 nt, Human
ugcugccauccag

SEQ ID NO: 1160455 - RNA, 14 nt, Human
ugcugccauccagg

SEQ ID NO: 1160456 - RNA, 15 nt, Human
ugcugccauccaggu

SEQ ID NO: 1160457 - RNA, 15 nt, Human
aggaagacuuuggaa

SEQ ID NO: 1160458 - RNA, 14 nt, Human
aggaagagaaaaaa

SEQ ID NO: 1160459 - RNA, 17 nt, Human
aggaagcucagggccug

SEQ ID NO: 1160460 - RNA, 18 nt, Human
aggaagcucagggccugg

SEQ ID NO: 1160461 - RNA, 22 nt, Human
aggaagcucagggccuggcuca

SEQ ID NO: 1160462 - RNA, 23 nt, Human
aggaauccagacccggcugcgug

SEQ ID NO: 1160463 - RNA, 19 nt, Human
aggaauugacccacaagaa

SEQ ID NO: 1160464 - RNA, 23 nt, Human
aggaauugacccacaagaaauga

SEQ ID NO: 1160465 - RNA, 14 nt, Human
aggcaagcaccucc

SEQ ID NO: 1160466 - RNA, 17 nt, Human
aggcaagcaccuccugc

SEQ ID NO: 1160467 - RNA, 12 nt, Human
aggaucagucug

SEQ ID NO: 1160468 - RNA, 21 nt, Human
aggauccugagccagauuuca

SEQ ID NO: 1160469 - RNA, 12 nt, Human
aggaucucuuga

SEQ ID NO: 1160470 - RNA, 15 nt, Human
aggaugcuuguacau

SEQ ID NO: 1160471 - RNA, 16 nt, Human
aggaugcuuguacaua

SEQ ID NO: 1160472 - RNA, 18 nt, Human
aggaugcuuguacauaau

SEQ ID NO: 1160473 - RNA, 10 nt, Human
ugcugcccug

SEQ ID NO: 1160474 - RNA, 12 nt, Human
ugcugcccugcc

SEQ ID NO: 1160475 - RNA, 12 nt, Human
uggaacacucug

SEQ ID NO: 1160476 - RNA, 14 nt, Human
uggaacacucugag

SEQ ID NO: 1160477 - RNA, 13 nt, Human
uggaagcuccgcu

SEQ ID NO: 1160478 - RNA, 20 nt, Human
uggaaguacuauaauuuacc

SEQ ID NO: 1160479 - RNA, 15 nt, Human
aggaggccagccuug

SEQ ID NO: 1160480 - RNA, 21 nt, Human
aggaguuugagaccaaccugg

SEQ ID NO: 1160481 - RNA, 15 nt, Human
aggcaaugcuggcug

SEQ ID NO: 1160482 - RNA, 16 nt, Human
aggcaaugcuggcugu

SEQ ID NO: 1160483 - RNA, 22 nt, Human
uggacuuuguuaguuucuccaa

SEQ ID NO: 1160484 - RNA, 24 nt, Human
uggacuuuguuaguuucuccaagc

SEQ ID NO: 1160485 - RNA, 14 nt, Human
uggagaaaauggac

SEQ ID NO: 1160486 - RNA, 16 nt, Human
uggagaagaacugaaa

SEQ ID NO: 1160487 - RNA, 12 nt, Human
aggcaggauggc

SEQ ID NO: 1160488 - RNA, 15 nt, Human
aggcacccaccauca

SEQ ID NO: 1160489 - RNA, 20 nt, Human
aggcagccccauucugccug

SEQ ID NO: 1160490 - RNA, 21 nt, Human
aggcagccccauucugccugc

SEQ ID NO: 1160491 - RNA, 22 nt, Human
aggcagccccauucugccugcc

SEQ ID NO: 1160492 - RNA, 20 nt, Human
aggcagcucuaaaugucaau

SEQ ID NO: 1160493 - RNA, 19 nt, Human
aggcagggucucacucugu

SEQ ID NO: 1160494 - RNA, 20 nt, Human
aggcagggucucacucuguc

SEQ ID NO: 1160495 - RNA, 21 nt, Human
aggcagggucucacucugucg

SEQ ID NO: 1160496 - RNA, 22 nt, Human
aggcagggucucacucugucgc

SEQ ID NO: 1160497 - RNA, 14 nt, Human
aggcagguccaggg

SEQ ID NO: 1160498 - RNA, 21 nt, Human
aggcaggucuugaacuccugg

SEQ ID NO: 1160499 - RNA, 22 nt, Human
aggcaggucuugaacuccuggc

SEQ ID NO: 1160500 - RNA, 16 nt, Human
uggcaccagcagccug

SEQ ID NO: 1160501 - RNA, 17 nt, Human
uggcaccagcagccugg

SEQ ID NO: 1160502 - RNA, 18 nt, Human
uggcaccagcagccugga

SEQ ID NO: 1160503 - RNA, 14 nt, Human
uggcagcucagaga

SEQ ID NO: 1160504 - RNA, 15 nt, Human
uggcagcucagagag

SEQ ID NO: 1160505 - RNA, 16 nt, Human
uggcagcucagagagg

SEQ ID NO: 1160506 - RNA, 18 nt, Human
uggcagcucagagagggu

SEQ ID NO: 1160507 - RNA, 13 nt, Human
aggccagagacac

SEQ ID NO: 1160508 - RNA, 18 nt, Human
aggccagagacacaagcc

SEQ ID NO: 1160509 - RNA, 23 nt, Human
aggccagagacacaagccuucgg

SEQ ID NO: 1160510 - RNA, 18 nt, Human
aggccaugggccuccugu

SEQ ID NO: 1160511 - RNA, 16 nt, Human
aggcccagagggccug

SEQ ID NO: 1160512 - RNA, 19 nt, Human
aggcccagagggccugcaa

SEQ ID NO: 1160513 - RNA, 20 nt, Human
aggcccagagggccugcaag

SEQ ID NO: 1160514 - RNA, 13 nt, Human
aggccccugccac

SEQ ID NO: 1160515 - RNA, 15 nt, Human
aggccccugccaccc

SEQ ID NO: 1160516 - RNA, 17 nt, Human
aggccccugccacccug

SEQ ID NO: 1160517 - RNA, 18 nt, Human
aggccccugccacccugg

SEQ ID NO: 1160518 - RNA, 21 nt, Human
aggccccugccacccugggga

SEQ ID NO: 1160519 - RNA, 15 nt, Human
aggcccggcuccagg

SEQ ID NO: 1160520 - RNA, 16 nt, Human
aggcccggcuccaggc

SEQ ID NO: 1160521 - RNA, 17 nt, Human
aggcccggcuccaggcu

SEQ ID NO: 1160522 - RNA, 12 nt, Human
aggccuggccag

SEQ ID NO: 1160523 - RNA, 13 nt, Human
aggccuggccaga

SEQ ID NO: 1160524 - RNA, 15 nt, Human
aggccuggccagaug

SEQ ID NO: 1160525 - RNA, 19 nt, Human
uggcccacgcacuucggga

SEQ ID NO: 1160526 - RNA, 13 nt, Human
uggcccacugcau

SEQ ID NO: 1160527 - RNA, 14 nt, Human
uggcccacugcauc

SEQ ID NO: 1160528 - RNA, 20 nt, Human
uggccucugcacuccccugc

SEQ ID NO: 1160529 - RNA, 19 nt, Human
uggccucugcacuccccug

SEQ ID NO: 1160530 - RNA, 13 nt, Human
uggccucuucaga

SEQ ID NO: 1160531 - RNA, 18 nt, Human
aggccuucucugaaggac

SEQ ID NO: 1160532 - RNA, 11 nt, Human
aggcuccacuu

SEQ ID NO: 1160533 - RNA, 17 nt, Human
aggcuccacuuggucug

SEQ ID NO: 1160534 - RNA, 21 nt, Human
aggcuccacuuggucugugag

SEQ ID NO: 1160535 - RNA, 22 nt, Human
aggcuccacuuggucugugaga

SEQ ID NO: 1160536 - RNA, 13 nt, Human
aggcuccaggagc

SEQ ID NO: 1160537 - RNA, 14 nt, Human
aggcuccaggagca

SEQ ID NO: 1160538 - RNA, 16 nt, Human
aggcuccaggagcagc

SEQ ID NO: 1160539 - RNA, 18 nt, Human
uggcuaagcaaaauguga

SEQ ID NO: 1160540 - RNA, 17 nt, Human
aggcuccaggagcagcc

SEQ ID NO: 1160541 - RNA, 18 nt, Human
aggcuccaggagcagcca

SEQ ID NO: 1160542 - RNA, 19 nt, Human
aggcuccaggagcagccac

SEQ ID NO: 1160543 - RNA, 23 nt, Human
aggcuccaggagcagccacauuc

SEQ ID NO: 1160544 - RNA, 17 nt, Human
uggcuaauguacugcau

SEQ ID NO: 1160545 - RNA, 19 nt, Human
uggcuaauguacugcauau

SEQ ID NO: 1160546 - RNA, 22 nt, Human
uggcuagagguucaaagauauu

SEQ ID NO: 1160547 - RNA, 13 nt, Human
uggcucacgccug

SEQ ID NO: 1160548 - RNA, 16 nt, Human
uggcuguuggcugggg

SEQ ID NO: 1160549 - RNA, 18 nt, Human
uggcuguuggcugggggc

SEQ ID NO: 1160550 - RNA, 23 nt, Human
uggcuguuggcugggggccucag

SEQ ID NO: 1160551 - RNA, 14 nt, Human
uggcuucacggaag

SEQ ID NO: 1160552 - RNA, 18 nt, Human
ugggaaacaaaaggauaa

SEQ ID NO: 1160553 - RNA, 21 nt, Human
uggcuuuugugcauuaucuag

SEQ ID NO: 1160554 - RNA, 17 nt, Human
uggcuucacggaagagc

SEQ ID NO: 1160555 - RNA, 20 nt, Human
uggcuucacggaagagccuu

SEQ ID NO: 1160556 - RNA, 22 nt, Human
uggcuucacggaagagccuugc

SEQ ID NO: 1160557 - RNA, 16 nt, Human
uggcuuuugugcauua

SEQ ID NO: 1160558 - RNA, 22 nt, Human
aggcuuagucacugagacagcc

SEQ ID NO: 1160559 - RNA, 23 nt, Human
aggcuuagucacugagacagccc

SEQ ID NO: 1160560 - RNA, 19 nt, Human
aggcugggagagccuucca

SEQ ID NO: 1160561 - RNA, 20 nt, Human
aggcugggagagccuuccag

SEQ ID NO: 1160562 - RNA, 21 nt, Human
aggcugggagagccuuccagg

SEQ ID NO: 1160563 - RNA, 22 nt, Human
aggcugggagagccuuccaggg

SEQ ID NO: 1160564 - RNA, 13 nt, Human
aggcugggcuccc

SEQ ID NO: 1160565 - RNA, 14 nt, Human
aggcugggcucccu

SEQ ID NO: 1160566 - RNA, 18 nt, Human
aggcugggcucccuuccc

SEQ ID NO: 1160567 - RNA, 21 nt, Human
aggcugggcucccuucccacc

SEQ ID NO: 1160568 - RNA, 23 nt, Human
aggcugggcucccuucccaccuc

SEQ ID NO: 1160569 - RNA, 14 nt, Human
aggcugggcuucag

SEQ ID NO: 1160570 - RNA, 18 nt, Human
aggcugggcuucaguggc

SEQ ID NO: 1160571 - RNA, 19 nt, Human
aggcugggcuucaguggca

SEQ ID NO: 1160572 - RNA, 20 nt, Human
aggcugggcuucaguggcag

SEQ ID NO: 1160573 - RNA, 21 nt, Human
aggcugggcuucaguggcagc

SEQ ID NO: 1160574 - RNA, 22 nt, Human
aggcugggcuucaguggcagcu

SEQ ID NO: 1160575 - RNA, 23 nt, Human
aggcugggcuucaguggcagcug

SEQ ID NO: 1160576 - RNA, 17 nt, Human
aggcugggggaagaagc

SEQ ID NO: 1160577 - RNA, 22 nt, Human
aggcugggggaagaagcucucu

SEQ ID NO: 1160578 - RNA, 14 nt, Human
aggcuggguucuga

SEQ ID NO: 1160579 - RNA, 17 nt, Human
aggcuggguucugaucc

SEQ ID NO: 1160580 - RNA, 18 nt, Human
ugggacuacaggcaccca

SEQ ID NO: 1160581 - RNA, 16 nt, Human
ugggacuacaggugug

SEQ ID NO: 1160582 - RNA, 18 nt, Human
ugggacucaaugcacuga

SEQ ID NO: 1160583 - RNA, 13 nt, Human
agggaaauuucag

SEQ ID NO: 1160584 - RNA, 15 nt, Human
agggacuuggaagcu

SEQ ID NO: 1160585 - RNA, 18 nt, Human
agggacuuggaagcuccg

SEQ ID NO: 1160586 - RNA, 19 nt, Human
agggacuuggaagcuccgc

SEQ ID NO: 1160587 - RNA, 20 nt, Human
agggacuuggaagcuccgcu

SEQ ID NO: 1160588 - RNA, 21 nt, Human
ugggagaaccaaaaagaggcu

SEQ ID NO: 1160589 - RNA, 22 nt, Human
ugggagaaccaaaaagaggcua

SEQ ID NO: 1160590 - RNA, 18 nt, Human
ugggaggauugcuugagc

SEQ ID NO: 1160591 - RNA, 21 nt, Human
ugggaggauugcuugagcuca

SEQ ID NO: 1160592 - RNA, 22 nt, Human
ugggaggauugcuugagcucag

SEQ ID NO: 1160593 - RNA, 19 nt, Human
ugggaggcugagaugggag

SEQ ID NO: 1160594 - RNA, 17 nt, Human
ugggaggucaaggcugc

SEQ ID NO: 1160595 - RNA, 16 nt, Human
ugggcaacccccagcc

SEQ ID NO: 1160596 - RNA, 13 nt, Human
ugggcagaaggaa

SEQ ID NO: 1160597 - RNA, 16 nt, Human
ugggcagaaggaagac

SEQ ID NO: 1160598 - RNA, 20 nt, Human
ugggcagaaggaagacuuca

SEQ ID NO: 1160599 - RNA, 23 nt, Human
ugggcagaaggaagacuucaucc

SEQ ID NO: 1160600 - RNA, 16 nt, Human
agggauacccauccca

SEQ ID NO: 1160601 - RNA, 12 nt, Human
agggcccagaga

SEQ ID NO: 1160602 - RNA, 13 nt, Human
agggcccagagag

SEQ ID NO: 1160603 - RNA, 12 nt, Human
agggagggcucc

SEQ ID NO: 1160604 - RNA, 13 nt, Human
agggagggcucca

SEQ ID NO: 1160605 - RNA, 19 nt, Human
agggagggcuccagacaca

SEQ ID NO: 1160606 - RNA, 22 nt, Human
agggagggcuccagacacaugu

SEQ ID NO: 1160607 - RNA, 15 nt, Human
agggagggcuucugc

SEQ ID NO: 1160608 - RNA, 20 nt, Human
agggaguccgaaagggacuu

SEQ ID NO: 1160609 - RNA, 23 nt, Human
agggaguccgaaagggacuugga

SEQ ID NO: 1160610 - RNA, 20 nt, Human
agggagugaguugauagcac

SEQ ID NO: 1160611 - RNA, 14 nt, Human
agggcccagagagg

SEQ ID NO: 1160612 - RNA, 18 nt, Human
agggcccagagagggugg

SEQ ID NO: 1160613 - RNA, 20 nt, Human
agggcuccagacacaugucc

SEQ ID NO: 1160614 - RNA, 22 nt, Human
agggcuguuauaaucuuucaca

SEQ ID NO: 1160615 - RNA, 14 nt, Human
ugggcucccuuccc

SEQ ID NO: 1160616 - RNA, 15 nt, Human
ugggcucccuuccca

SEQ ID NO: 1160617 - RNA, 12 nt, Human
aggugggaggau

SEQ ID NO: 1160618 - RNA, 16 nt, Human
aggugucccugcacuu

SEQ ID NO: 1160619 - RNA, 20 nt, Human
aggugucccugcacuugcag

SEQ ID NO: 1160620 - RNA, 21 nt, Human
aggugugagucaccaagccca

SEQ ID NO: 1160621 - RNA, 22 nt, Human
aggugugagucaccaagcccag

SEQ ID NO: 1160622 - RNA, 12 nt, Human
aggugugcucug

SEQ ID NO: 1160623 - RNA, 14 nt, Human
agguugaagcacca

SEQ ID NO: 1160624 - RNA, 14 nt, Human
uguacaugaaaaca

SEQ ID NO: 1160625 - RNA, 16 nt, Human
uguacaugaaaacaca

SEQ ID NO: 1160626 - RNA, 20 nt, Human
uguaauuuuuuuaucgucac

SEQ ID NO: 1160627 - RNA, 19 nt, Human
uguacauaaugcgugcaua

SEQ ID NO: 1160628 - RNA, 20 nt, Human
uguacauaaugcgugcauac

SEQ ID NO: 1160629 - RNA, 20 nt, Human
agguuggcaaaaaggcagga

SEQ ID NO: 1160630 - RNA, 18 nt, Human
uguaauuaaguacuaugu

SEQ ID NO: 1160631 - RNA, 19 nt, Human
uguaauuaaguacuaugua

SEQ ID NO: 1160632 - RNA, 21 nt, Human
uguaauuaaguacuauguauc

SEQ ID NO: 1160633 - RNA, 23 nt, Human
uguaauuaaguacuauguaucaa

SEQ ID NO: 1160634 - RNA, 21 nt, Human
aguacacuguuucaaacuuua

SEQ ID NO: 1160635 - RNA, 23 nt, Human
aguacacuguuucaaacuuuacu

SEQ ID NO: 1160636 - RNA, 13 nt, Human
aguaaugauaacu

SEQ ID NO: 1160637 - RNA, 12 nt, Human
aguaauuggaaa

SEQ ID NO: 1160638 - RNA, 13 nt, Human
aguaauuggaaag

SEQ ID NO: 1160639 - RNA, 21 nt, Human
uguacauggaauaacauguaa

SEQ ID NO: 1160640 - RNA, 16 nt, Human
uguaggguuauaauaa

SEQ ID NO: 1160641 - RNA, 17 nt, Human
uguaggguuauaauaau

SEQ ID NO: 1160642 - RNA, 17 nt, Human
uguaguguuggagaaga

SEQ ID NO: 1160643 - RNA, 18 nt, Human
uguaguguuggagaagaa

SEQ ID NO: 1160644 - RNA, 19 nt, Human
uguaguguuggagaagaac

SEQ ID NO: 1160645 - RNA, 18 nt, Human
uguauauauuuccuauau

SEQ ID NO: 1160646 - RNA, 22 nt, Human
uguauauauuuccuauauuguu

SEQ ID NO: 1160647 - RNA, 19 nt, Human
ugucccuuacgugaguccu

SEQ ID NO: 1160648 - RNA, 23 nt, Human
ugucccuuacgugaguccuggca

SEQ ID NO: 1160649 - RNA, 22 nt, Human
agucagaaguuucugccgcagc

SEQ ID NO: 1160650 - RNA, 14 nt, Human
agucaggaaagaga

SEQ ID NO: 1160651 - RNA, 15 nt, Human
agucaggaaagagaa

SEQ ID NO: 1160652 - RNA, 18 nt, Human
agucccaccuuggcugca

SEQ ID NO: 1160653 - RNA, 19 nt, Human
agucccaccuuggcugcag

SEQ ID NO: 1160654 - RNA, 20 nt, Human
agucccaccuuggcugcagg

SEQ ID NO: 1160655 - RNA, 15 nt, Human
agucccaccuuggcu

SEQ ID NO: 1160656 - RNA, 16 nt, Human
agucccaccuuggcug

SEQ ID NO: 1160657 - RNA, 14 nt, Human
aguccucccaucuc

SEQ ID NO: 1160658 - RNA, 16 nt, Human
aguccucccaucucac

SEQ ID NO: 1160659 - RNA, 23 nt, Human
agucucacuguugcccaggcugg

SEQ ID NO: 1160660 - RNA, 15 nt, Human
aguauuacuucugcu

SEQ ID NO: 1160661 - RNA, 19 nt, Human
aguauucuuauuuaaugaa

SEQ ID NO: 1160662 - RNA, 15 nt, Human
agucaccaagcccag

SEQ ID NO: 1160663 - RNA, 17 nt, Human
agucaccccggccaccu

SEQ ID NO: 1160664 - RNA, 17 nt, Human
ugucagguggggcagcu

SEQ ID NO: 1160665 - RNA, 18 nt, Human
ugucagguggggcagcuu

SEQ ID NO: 1160666 - RNA, 20 nt, Human
ugucagguggggcagcuuga

SEQ ID NO: 1160667 - RNA, 20 nt, Human
ugucauuugagcagggcuca

SEQ ID NO: 1160668 - RNA, 21 nt, Human
ugucauuugagcagggcucag

SEQ ID NO: 1160669 - RNA, 22 nt, Human
ugucauuugagcagggcucagc

SEQ ID NO: 1160670 - RNA, 23 nt, Human
ugucauuugcuggagcucugccc

SEQ ID NO: 1160671 - RNA, 14 nt, Human
uguccaagaagccc

SEQ ID NO: 1160672 - RNA, 15 nt, Human
uguccaagaagccca

SEQ ID NO: 1160673 - RNA, 16 nt, Human
uguccaagaagcccag

SEQ ID NO: 1160674 - RNA, 17 nt, Human
uguccaagaagcccagg

SEQ ID NO: 1160675 - RNA, 18 nt, Human
uguccaagaagcccagga

SEQ ID NO: 1160676 - RNA, 22 nt, Human
uguccaagaagcccaggaaagg

SEQ ID NO: 1160677 - RNA, 20 nt, Human
ugucccugcacuugcagacu

SEQ ID NO: 1160678 - RNA, 22 nt, Human
ugucccugcacuugcagacucu

SEQ ID NO: 1160679 - RNA, 23 nt, Human
ugucccugcacuugcagacucua

SEQ ID NO: 1160680 - RNA, 11 nt, Human
ugugaggaagc

SEQ ID NO: 1160681 - RNA, 12 nt, Human
ugugaggaagcc

SEQ ID NO: 1160682 - RNA, 16 nt, Human
agucucuugauucaua

SEQ ID NO: 1160683 - RNA, 17 nt, Human
agucucuugauucauaa

SEQ ID NO: 1160684 - RNA, 12 nt, Human
agucugaaggcu

SEQ ID NO: 1160685 - RNA, 13 nt, Human
agucuuagaugua

SEQ ID NO: 1160686 - RNA, 14 nt, Human
agucuuagauguau

SEQ ID NO: 1160687 - RNA, 16 nt, Human
agucuuagauguauau

SEQ ID NO: 1160688 - RNA, 23 nt, Human
agucuuagauguauauauuuccu

SEQ ID NO: 1160689 - RNA, 18 nt, Human
agucuuucacauuuaaau

SEQ ID NO: 1160690 - RNA, 21 nt, Human
agugaacaaauuuacagagac

SEQ ID NO: 1160691 - RNA, 16 nt, Human
agucuuucacauuuaa

SEQ ID NO: 1160692 - RNA, 22 nt, Human
agugaacaaauuuacagagaca

SEQ ID NO: 1160693 - RNA, 23 nt, Human
agugaacaaauuuacagagacag

SEQ ID NO: 1160694 - RNA, 16 nt, Human
agugaacuugggccac

SEQ ID NO: 1160695 - RNA, 20 nt, Human
agugaacuugggccacugug

SEQ ID NO: 1160696 - RNA, 21 nt, Human
agugacugauggcuaauguac

SEQ ID NO: 1160697 - RNA, 14 nt, Human
agugagcacuaagg

SEQ ID NO: 1160698 - RNA, 22 nt, Human
agugagcacuaaggugugcucu

SEQ ID NO: 1160699 - RNA, 12 nt, Human
agugagcugguu

SEQ ID NO: 1160700 - RNA, 19 nt, Human
ugugaugagaggaaaucac

SEQ ID NO: 1160701 - RNA, 23 nt, Human
agugagcugguuuuuagcggaga

SEQ ID NO: 1160702 - RNA, 22 nt, Human
ugugaugaugaaaugaggucag

SEQ ID NO: 1160703 - RNA, 16 nt, Human
agugcaugcugucccu

SEQ ID NO: 1160704 - RNA, 14 nt, Human
agugccaaaaacaa

SEQ ID NO: 1160705 - RNA, 17 nt, Human
agugcagugagccgaga

SEQ ID NO: 1160706 - RNA, 16 nt, Human
agugaggaugaaaaaa

SEQ ID NO: 1160707 - RNA, 12 nt, Human
agugaggcucug

SEQ ID NO: 1160708 - RNA, 13 nt, Human
agugaggcucugc

SEQ ID NO: 1160709 - RNA, 14 nt, Human
agugaggcucugcc

SEQ ID NO: 1160710 - RNA, 14 nt, Human
agugcaaauuguca

SEQ ID NO: 1160711 - RNA, 12 nt, Human
ugugcucugauc

SEQ ID NO: 1160712 - RNA, 18 nt, Human
ugugcugagucugaaggc

SEQ ID NO: 1160713 - RNA, 19 nt, Human
ugugcugagucugaaggcu

SEQ ID NO: 1160714 - RNA, 12 nt, Human
ugugcugcccug

SEQ ID NO: 1160715 - RNA, 19 nt, Human
ugugcugcccugcccaccu

SEQ ID NO: 1160716 - RNA, 20 nt, Human
ugugcugcccugcccaccug

SEQ ID NO: 1160717 - RNA, 21 nt, Human
ugugcugcccugcccaccugg

SEQ ID NO: 1160718 - RNA, 14 nt, Human
uguggaugauaaaa

SEQ ID NO: 1160719 - RNA, 19 nt, Human
uguggauuuaacagaaaug

SEQ ID NO: 1160720 - RNA, 20 nt, Human
uguggauuuaacagaaaugu

SEQ ID NO: 1160721 - RNA, 22 nt, Human
uguggauuuaacagaaauguac

SEQ ID NO: 1160722 - RNA, 20 nt, Human
uguggucacaggaaguagag

SEQ ID NO: 1160723 - RNA, 20 nt, Human
ugugucuugcaauggcagcc

SEQ ID NO: 1160724 - RNA, 11 nt, Human
uguguguuuau

SEQ ID NO: 1160725 - RNA, 22 nt, Human
uguguuaucacccagaagaaaa

SEQ ID NO: 1160726 - RNA, 23 nt, Human
uguguuaucacccagaagaaaau

SEQ ID NO: 1160727 - RNA, 19 nt, Human
uguuacauaagauaaaugu

SEQ ID NO: 1160728 - RNA, 11 nt, Human
aguggcagcug

SEQ ID NO: 1160729 - RNA, 19 nt, Human
aguguuguggauuuaacag

SEQ ID NO: 1160730 - RNA, 20 nt, Human
aguguuguggauuuaacaga

SEQ ID NO: 1160731 - RNA, 13 nt, Human
aguuacucagaau

SEQ ID NO: 1160732 - RNA, 16 nt, Human
aguguuguggauuuaa

SEQ ID NO: 1160733 - RNA, 15 nt, Human
uguucuaagaaguga

SEQ ID NO: 1160734 - RNA, 22 nt, Human
uguugcccacagcuguaugauu

SEQ ID NO: 1160735 - RNA, 23 nt, Human
uguugcccaggcuggcgugcagu

SEQ ID NO: 1160736 - RNA, 12 nt, Human
uguugcccaggc

SEQ ID NO: 1160737 - RNA, 20 nt, Human
agugugacugaucucucgug

SEQ ID NO: 1160738 - RNA, 21 nt, Human
agugugccugaagucccagau

SEQ ID NO: 1160739 - RNA, 15 nt, Human
aguguggcaaaauaa

SEQ ID NO: 1160740 - RNA, 22 nt, Human
agugugguguuuccuggcacug

SEQ ID NO: 1160741 - RNA, 13 nt, Human
uguuaugacucca

SEQ ID NO: 1160742 - RNA, 17 nt, Human
uguuaugacuccagaau

SEQ ID NO: 1160743 - RNA, 19 nt, Human
uguuccacaaguuaaauaa

SEQ ID NO: 1160744 - RNA, 14 nt, Human
aguuucucuuuuca

SEQ ID NO: 1160745 - RNA, 15 nt, Human
aguuucugccgcagc

SEQ ID NO: 1160746 - RNA, 19 nt, Human
aguuucugccgcagcccug

SEQ ID NO: 1160747 - RNA, 22 nt, Human
aguuuguuaguaugaggcauuu

SEQ ID NO: 1160748 - RNA, 12 nt, Human
uuaacagaaaug

SEQ ID NO: 1160749 - RNA, 13 nt, Human
uuaacagaaaugu

SEQ ID NO: 1160750 - RNA, 14 nt, Human
uuaacagaaaugua

SEQ ID NO: 1160751 - RNA, 16 nt, Human
uuaacagaaauguaca

SEQ ID NO: 1160752 - RNA, 20 nt, Human
aguuuaaauuguaauaggcg

SEQ ID NO: 1160753 - RNA, 17 nt, Human
aguuuaaauuguaauag

SEQ ID NO: 1160754 - RNA, 15 nt, Human
aguuuagcuggaaaa

SEQ ID NO: 1160755 - RNA, 16 nt, Human
aguuuagcuggaaaag

SEQ ID NO: 1160756 - RNA, 19 nt, Human
uuaaaaaucucaaauuucu

SEQ ID NO: 1160757 - RNA, 20 nt, Human
uuaaaaaucucaaauuucua

SEQ ID NO: 1160758 - RNA, 20 nt, Human
uuaaaaaugguuuaaauggu

SEQ ID NO: 1160759 - RNA, 19 nt, Human
uuaagaaaaaggaugcaca

SEQ ID NO: 1160760 - RNA, 22 nt, Human
uuaacuuuuauaaacuuuaccu

SEQ ID NO: 1160761 - RNA, 23 nt, Human
uuaacuuuuauaaacuuuaccuu

SEQ ID NO: 1160762 - RNA, 16 nt, Human
aguuuuauaugcuucu

SEQ ID NO: 1160763 - RNA, 15 nt, Human
uuaaucuaaauggaa

SEQ ID NO: 1160764 - RNA, 14 nt, Human
uuacaggugugaac

SEQ ID NO: 1160765 - RNA, 20 nt, Human
uuacauaagauaaaugugcu

SEQ ID NO: 1160766 - RNA, 19 nt, Human
uuaccagcagagcaccuua

SEQ ID NO: 1160767 - RNA, 15 nt, Human
uuacugcagcuuugu

SEQ ID NO: 1160768 - RNA, 12 nt, Human
uuacuguacaug

SEQ ID NO: 1160769 - RNA, 13 nt, Human
uuacuguacauga

SEQ ID NO: 1160770 - RNA, 14 nt, Human
uuacuguacaugaa

SEQ ID NO: 1160771 - RNA, 22 nt, Human
uuacuguacaugaaaacacauu

SEQ ID NO: 1160772 - RNA, 23 nt, Human
uuacuguacaugaaaacacauuu

SEQ ID NO: 1160773 - RNA, 16 nt, Human
uuagaagucacacagu

SEQ ID NO: 1160774 - RNA, 14 nt, Human
auaagauucauauu

SEQ ID NO: 1160775 - RNA, 14 nt, Human
auaaucuuucacag

SEQ ID NO: 1160776 - RNA, 21 nt, Human
auaaucuuucacaggggacag

SEQ ID NO: 1160777 - RNA, 21 nt, Human
auaagauucauauuuacuucu

SEQ ID NO: 1160778 - RNA, 22 nt, Human
auaagccaaaaaaugcuugcuu

SEQ ID NO: 1160779 - RNA, 14 nt, Human
auaagccagacauc

SEQ ID NO: 1160780 - RNA, 17 nt, Human
uuaguagagacaggguu

SEQ ID NO: 1160781 - RNA, 14 nt, Human
uuaguagagacagg

SEQ ID NO: 1160782 - RNA, 13 nt, Human
uuaguagagacag

SEQ ID NO: 1160783 - RNA, 13 nt, Human
uuauaaacuuuac

SEQ ID NO: 1160784 - RNA, 14 nt, Human
uuaggguuaugauu

SEQ ID NO: 1160785 - RNA, 16 nt, Human
uuaggguuaugauuaa

SEQ ID NO: 1160786 - RNA, 19 nt, Human
uuaggugugggggaagcac

SEQ ID NO: 1160787 - RNA, 15 nt, Human
uuaggugaggaagca

SEQ ID NO: 1160788 - RNA, 18 nt, Human
uuagguuggcaaaaaggc

SEQ ID NO: 1160789 - RNA, 13 nt, Human
uuauuaugcauga

SEQ ID NO: 1160790 - RNA, 15 nt, Human
uuauuauauuuacaa

SEQ ID NO: 1160791 - RNA, 12 nt, Human
uuauuaugcaug

SEQ ID NO: 1160792 - RNA, 14 nt, Human
uuauuauauuuaca

SEQ ID NO: 1160793 - RNA, 19 nt, Human
uuauguuaaaacugggaca

SEQ ID NO: 1160794 - RNA, 16 nt, Human
auacucugcuuagaau

SEQ ID NO: 1160795 - RNA, 14 nt, Human
auacucccaucugu

SEQ ID NO: 1160796 - RNA, 16 nt, Human
auacucauuaggaugg

SEQ ID NO: 1160797 - RNA, 11 nt, Human
auacucccauc

SEQ ID NO: 1160798 - RNA, 12 nt, Human
auacuguaaaga

SEQ ID NO: 1160799 - RNA, 13 nt, Human
auacuguaaagaa

SEQ ID NO: 1160800 - RNA, 14 nt, Human
auacuguaaagaaa

SEQ ID NO: 1160801 - RNA, 15 nt, Human
auacuguaaagaaag

SEQ ID NO: 1160802 - RNA, 14 nt, Human
auagagagagacca

SEQ ID NO: 1160803 - RNA, 18 nt, Human
auagauaggucagugcaa

SEQ ID NO: 1160804 - RNA, 16 nt, Human
auagacaauuuauuau

SEQ ID NO: 1160805 - RNA, 22 nt, Human
auagacaauuuauuauggcaca

SEQ ID NO: 1160806 - RNA, 23 nt, Human
auagacaauuuauuauggcacau

SEQ ID NO: 1160807 - RNA, 17 nt, Human
auagaauuaacacauga

SEQ ID NO: 1160808 - RNA, 13 nt, Human
auagaaguaaaaa

SEQ ID NO: 1160809 - RNA, 16 nt, Human
auacuguaaagaaaga

SEQ ID NO: 1160810 - RNA, 18 nt, Human
auacuguaaagaaagaga

SEQ ID NO: 1160811 - RNA, 19 nt, Human
auacuguaaagaaagagag

SEQ ID NO: 1160812 - RNA, 20 nt, Human
auacuguaaagaaagagaga

SEQ ID NO: 1160813 - RNA, 21 nt, Human
auacuguaaagaaagagagaa

SEQ ID NO: 1160814 - RNA, 22 nt, Human
auacuguaaagaaagagagaaa

SEQ ID NO: 1160815 - RNA, 23 nt, Human
auacuguaaagaaagagagaaaa

SEQ ID NO: 1160816 - RNA, 19 nt, Human
uuaugauuaaguaaugaua

SEQ ID NO: 1160817 - RNA, 22 nt, Human
uuaugauuaaguaaugauaacu

SEQ ID NO: 1160818 - RNA, 19 nt, Human
uuauggcuuuugugcauua

SEQ ID NO: 1160819 - RNA, 13 nt, Human
uuaugggcugggu

SEQ ID NO: 1160820 - RNA, 22 nt, Human
uuaugggcuggguucuacccag

SEQ ID NO: 1160821 - RNA, 21 nt, Human
uuaugaauuacauuuguauaa

SEQ ID NO: 1160822 - RNA, 11 nt, Human
uuaugacucca

SEQ ID NO: 1160823 - RNA, 14 nt, Human
uuaugaauuacauu

SEQ ID NO: 1160824 - RNA, 16 nt, Human
uuaugaauuacauuug

SEQ ID NO: 1160825 - RNA, 17 nt, Human
uuaugaauuacauuugu

SEQ ID NO: 1160826 - RNA, 17 nt, Human
uuaucacccagaagaaa

SEQ ID NO: 1160827 - RNA, 18 nt, Human
uuaucacccagaagaaaa

SEQ ID NO: 1160828 - RNA, 19 nt, Human
uuaucacccagaagaaaau

SEQ ID NO: 1160829 - RNA, 21 nt, Human
uuaucacccagaagaaaauag

SEQ ID NO: 1160830 - RNA, 21 nt, Human
auacaguucggugagcuacaa

SEQ ID NO: 1160831 - RNA, 20 nt, Human
auacaguuacucagaauucu

SEQ ID NO: 1160832 - RNA, 23 nt, Human
auacagauagauauaugcucugc

SEQ ID NO: 1160833 - RNA, 23 nt, Human
auacaggaaaagcugcugacagu

SEQ ID NO: 1160834 - RNA, 18 nt, Human
auacaguuacucagaauu

SEQ ID NO: 1160835 - RNA, 16 nt, Human
auacagaggcaacugc

SEQ ID NO: 1160836 - RNA, 17 nt, Human
auacagaggcaacugca

SEQ ID NO: 1160837 - RNA, 17 nt, Human
uuauaaacuuuaccuuu

SEQ ID NO: 1160838 - RNA, 18 nt, Human
uuauaaacuuuaccuuuu

SEQ ID NO: 1160839 - RNA, 17 nt, Human
auaccacuuuuguucuu

SEQ ID NO: 1160840 - RNA, 18 nt, Human
auaccacuuuuguucuug

SEQ ID NO: 1160841 - RNA, 17 nt, Human
auaccagccaguaaaug

SEQ ID NO: 1160842 - RNA, 14 nt, Human
auaccuuuuuuaga

SEQ ID NO: 1160843 - RNA, 13 nt, Human
auacguacacauu

SEQ ID NO: 1160844 - RNA, 14 nt, Human
auacguacacauuu

SEQ ID NO: 1160845 - RNA, 15 nt, Human
auacguacacauuuu

SEQ ID NO: 1160846 - RNA, 16 nt, Human
auacguacacauuuua

SEQ ID NO: 1160847 - RNA, 13 nt, Human
auacuaaccagca

SEQ ID NO: 1160848 - RNA, 19 nt, Human
auacuaaccagcagaaaug

SEQ ID NO: 1160849 - RNA, 20 nt, Human
auacuaaccagcagaaaugc

SEQ ID NO: 1160850 - RNA, 19 nt, Human
uuauauuugaaauauugac

SEQ ID NO: 1160851 - RNA, 20 nt, Human
uucccucaccuuucccaucu

SEQ ID NO: 1160852 - RNA, 19 nt, Human
uuccguagguuauuuucag

SEQ ID NO: 1160853 - RNA, 14 nt, Human
uuccguuaaaauac

SEQ ID NO: 1160854 - RNA, 16 nt, Human
uuccguuaaaauacca

SEQ ID NO: 1160855 - RNA, 13 nt, Human
uuccucuuuccau

SEQ ID NO: 1160856 - RNA, 17 nt, Human
uuccucuuuccaucuac

SEQ ID NO: 1160857 - RNA, 22 nt, Human
uuccucuuuccaucuacccucc

SEQ ID NO: 1160858 - RNA, 14 nt, Human
uuccugaaccgaug

SEQ ID NO: 1160859 - RNA, 18 nt, Human
uuccugaagaauugaaaa

SEQ ID NO: 1160860 - RNA, 20 nt, Human
auauuuuuuguuaaaugauu

SEQ ID NO: 1160861 - RNA, 18 nt, Human
auauuuuuuguuaaauga

SEQ ID NO: 1160862 - RNA, 14 nt, Human
aucaacagauaaau

SEQ ID NO: 1160863 - RNA, 11 nt, Human
uuccugugucu

SEQ ID NO: 1160864 - RNA, 16 nt, Human
aucaaggguacacugc

SEQ ID NO: 1160865 - RNA, 14 nt, Human
aucaaugaguaaca

SEQ ID NO: 1160866 - RNA, 13 nt, Human
aucacgccacugc

SEQ ID NO: 1160867 - RNA, 14 nt, Human
aucacgccacugca

SEQ ID NO: 1160868 - RNA, 15 nt, Human
aucacggcucacugc

SEQ ID NO: 1160869 - RNA, 18 nt, Human
aucacggcucacugcagc

SEQ ID NO: 1160870 - RNA, 19 nt, Human
aucacggcucacugcagcc

SEQ ID NO: 1160871 - RNA, 21 nt, Human
uucucacugccaugccagcuu

SEQ ID NO: 1160872 - RNA, 11 nt, Human
aucagaauucu

SEQ ID NO: 1160873 - RNA, 22 nt, Human
aucacuugucaauaaaauccau

SEQ ID NO: 1160874 - RNA, 12 nt, Human
aucagaauucuc

SEQ ID NO: 1160875 - RNA, 13 nt, Human
aucagcacgauuu

SEQ ID NO: 1160876 - RNA, 15 nt, Human
aucaggccaggcccu

SEQ ID NO: 1160877 - RNA, 16 nt, Human
aucaggccaggcccuc

SEQ ID NO: 1160878 - RNA, 18 nt, Human
aucaggccaggcccucug

SEQ ID NO: 1160879 - RNA, 15 nt, Human
aucagcacgauuucu

SEQ ID NO: 1160880 - RNA, 20 nt, Human
aucaggccaggcccucugcc

SEQ ID NO: 1160881 - RNA, 17 nt, Human
aucaggguuaguauugu

SEQ ID NO: 1160882 - RNA, 15 nt, Human
uucgcuccugugucu

SEQ ID NO: 1160883 - RNA, 19 nt, Human
uucgcuccugugucuugca

SEQ ID NO: 1160884 - RNA, 14 nt, Human
uucggccuccaucc

SEQ ID NO: 1160885 - RNA, 15 nt, Human
uucggccuccauccu

SEQ ID NO: 1160886 - RNA, 20 nt, Human
uucuaaaggcuaccuuugua

SEQ ID NO: 1160887 - RNA, 21 nt, Human
uucuaaaggcuaccuuuguau

SEQ ID NO: 1160888 - RNA, 21 nt, Human
uucuaaaucuccaaaauaaaa

SEQ ID NO: 1160889 - RNA, 23 nt, Human
uucuaagaagugaaaaucuacac

SEQ ID NO: 1160890 - RNA, 16 nt, Human
uucuagcauggcugcc

SEQ ID NO: 1160891 - RNA, 15 nt, Human
uucucuaguuugauu

SEQ ID NO: 1160892 - RNA, 17 nt, Human
uucucuaguuugauuaa

SEQ ID NO: 1160893 - RNA, 20 nt, Human
uucucuaguuugauuaaauu

SEQ ID NO: 1160894 - RNA, 14 nt, Human
aucaggugcugcca

SEQ ID NO: 1160895 - RNA, 21 nt, Human
uucuccuuguguuacuaaguu

SEQ ID NO: 1160896 - RNA, 19 nt, Human
uucugaacuuggcgcugcc

SEQ ID NO: 1160897 - RNA, 22 nt, Human
uucugaacuuggcgcugccccu

SEQ ID NO: 1160898 - RNA, 23 nt, Human
uucugaacuuggcgcugccccug

SEQ ID NO: 1160899 - RNA, 15 nt, Human
uucugccauauucug

SEQ ID NO: 1160900 - RNA, 18 nt, Human
uucugccugcccaggccc

SEQ ID NO: 1160901 - RNA, 21 nt, Human
uucugccugcccaggccccug

SEQ ID NO: 1160902 - RNA, 16 nt, Human
uucuggcucuuccagg

SEQ ID NO: 1160903 - RNA, 17 nt, Human
uucuggcucuuccaggc

SEQ ID NO: 1160904 - RNA, 21 nt, Human
auccaguaucuugaagacuuu

SEQ ID NO: 1160905 - RNA, 19 nt, Human
aucccaaacccuucagugc

SEQ ID NO: 1160906 - RNA, 20 nt, Human
aucccaaacccuucagugcc

SEQ ID NO: 1160907 - RNA, 18 nt, Human
aucccauaugccugggca

SEQ ID NO: 1160908 - RNA, 18 nt, Human
auccaagcuggucccacu

SEQ ID NO: 1160909 - RNA, 21 nt, Human
auccaagcuggucccacucag

SEQ ID NO: 1160910 - RNA, 13 nt, Human
auccacccaccuc

SEQ ID NO: 1160911 - RNA, 15 nt, Human
auccacccaccucag

SEQ ID NO: 1160912 - RNA, 16 nt, Human
auccacccaccucagc

SEQ ID NO: 1160913 - RNA, 16 nt, Human
auccaguaucuugaag

SEQ ID NO: 1160914 - RNA, 20 nt, Human
uucuucugcuucagccuccc

SEQ ID NO: 1160915 - RNA, 24 nt, Human
aucccauaugccugggcagaagga

SEQ ID NO: 1160916 - RNA, 13 nt, Human
aucccaugagccu

SEQ ID NO: 1160917 - RNA, 14 nt, Human
aucccucauccuca

SEQ ID NO: 1160918 - RNA, 21 nt, Human
aucccucauccucauacccac

SEQ ID NO: 1160919 - RNA, 23 nt, Human
aucccucauccucauacccaccc

SEQ ID NO: 1160920 - RNA, 13 nt, Human
uucuucucccuca

SEQ ID NO: 1160921 - RNA, 14 nt, Human
uucuucucccucag

SEQ ID NO: 1160922 - RNA, 13 nt, Human
uucuucugcuuca

SEQ ID NO: 1160923 - RNA, 15 nt, Human
uucuucugcuucagc

SEQ ID NO: 1160924 - RNA, 21 nt, Human
auccuaagcuauucaguaaua

SEQ ID NO: 1160925 - RNA, 12 nt, Human
auccuaagcuau

SEQ ID NO: 1160926 - RNA, 16 nt, Human
auccuaggcauuugcu

SEQ ID NO: 1160927 - RNA, 16 nt, Human
auccuccucagaucuu

SEQ ID NO: 1160928 - RNA, 21 nt, Human
auccuaggcauuugcugaaua

SEQ ID NO: 1160929 - RNA, 17 nt, Human
uugaaauuguauuacaa

SEQ ID NO: 1160930 - RNA, 19 nt, Human
uugaacccgggaggcagag

SEQ ID NO: 1160931 - RNA, 17 nt, Human
uugaagggaaauuucag

SEQ ID NO: 1160932 - RNA, 16 nt, Human
auccucuguacagagc

SEQ ID NO: 1160933 - RNA, 17 nt, Human
auccucuguacagagcc

SEQ ID NO: 1160934 - RNA, 18 nt, Human
auccucuguacagagccc

SEQ ID NO: 1160935 - RNA, 13 nt, Human
aucuaaauggaac

SEQ ID NO: 1160936 - RNA, 17 nt, Human
aucuaaauggaaccacu

SEQ ID NO: 1160937 - RNA, 18 nt, Human
aucuaaauggaaccacuc

SEQ ID NO: 1160938 - RNA, 19 nt, Human
aucuaaauggaaccacucu

SEQ ID NO: 1160939 - RNA, 16 nt, Human
uugagaucagccuggg

SEQ ID NO: 1160940 - RNA, 20 nt, Human
uugagugaagcugggagaac

SEQ ID NO: 1160941 - RNA, 11 nt, Human
uugagugccuu

SEQ ID NO: 1160942 - RNA, 20 nt, Human
uugaguugauucagcucugc

SEQ ID NO: 1160943 - RNA, 15 nt, Human
uugauacuacaguuu

SEQ ID NO: 1160944 - RNA, 18 nt, Human
aucuaauauguaacaagc

SEQ ID NO: 1160945 - RNA, 20 nt, Human
aucuaauauguaacaagcca

SEQ ID NO: 1160946 - RNA, 18 nt, Human
aucuacacuccagugaga

SEQ ID NO: 1160947 - RNA, 19 nt, Human
aucuacacuccagugagac

SEQ ID NO: 1160948 - RNA, 21 nt, Human
aucucccccagccccauccuc

SEQ ID NO: 1160949 - RNA, 16 nt, Human
aucucccccagcccca

SEQ ID NO: 1160950 - RNA, 17 nt, Human
aucucccccagccccau

SEQ ID NO: 1160951 - RNA, 15 nt, Human
aucucccccagcccc

SEQ ID NO: 1160952 - RNA, 15 nt, Human
aucucuugagccugg

SEQ ID NO: 1160953 - RNA, 18 nt, Human
aucucuugagccugggag

SEQ ID NO: 1160954 - RNA, 14 nt, Human
aucugaaaauguau

SEQ ID NO: 1160955 - RNA, 16 nt, Human
aucugaaaauguaugu

SEQ ID NO: 1160956 - RNA, 19 nt, Human
aucugaaaauguaugugua

SEQ ID NO: 1160957 - RNA, 20 nt, Human
aucugaaaauguauguguaa

SEQ ID NO: 1160958 - RNA, 22 nt, Human
aucugaaaauguauguguaagu

SEQ ID NO: 1160959 - RNA, 16 nt, Human
aucucagggccugguc

SEQ ID NO: 1160960 - RNA, 14 nt, Human
aucucauuuccaag

SEQ ID NO: 1160961 - RNA, 14 nt, Human
aucuccaaaauaaa

SEQ ID NO: 1160962 - RNA, 17 nt, Human
aucuccaaaauaaaacu

SEQ ID NO: 1160963 - RNA, 20 nt, Human
aucuccaaaauaaaacuuuu

SEQ ID NO: 1160964 - RNA, 21 nt, Human
aucuccaaaauaaaacuuuuu

SEQ ID NO: 1160965 - RNA, 16 nt, Human
uugcaauggcagccuu

SEQ ID NO: 1160966 - RNA, 17 nt, Human
uugcaauggcagccuug

SEQ ID NO: 1160967 - RNA, 19 nt, Human
uugcaauggcagccuuggc

SEQ ID NO: 1160968 - RNA, 15 nt, Human
uugcaccacugcacu

SEQ ID NO: 1160969 - RNA, 16 nt, Human
uugcaccacugcacuc

SEQ ID NO: 1160970 - RNA, 18 nt, Human
uugcaccacugcacucca

SEQ ID NO: 1160971 - RNA, 23 nt, Human
aucugaaaauguauguguaagua

SEQ ID NO: 1160972 - RNA, 23 nt, Human
uugauguuuuaaggaugcuugua

SEQ ID NO: 1160973 - RNA, 13 nt, Human
uugauuaaauucu

SEQ ID NO: 1160974 - RNA, 14 nt, Human
uugauuaaauucuu

SEQ ID NO: 1160975 - RNA, 14 nt, Human
aucuuauaauuuaa

SEQ ID NO: 1160976 - RNA, 13 nt, Human
aucuugcucugcu

SEQ ID NO: 1160977 - RNA, 20 nt, Human
aucuuggucagauuugaacu

SEQ ID NO: 1160978 - RNA, 18 nt, Human
aucugugaaaggaaagag

SEQ ID NO: 1160979 - RNA, 23 nt, Human
aucugugaaaggaaagagggagg

SEQ ID NO: 1160980 - RNA, 10 nt, Human
aucuggugac

SEQ ID NO: 1160981 - RNA, 16 nt, Human
aucuggugacuuuccu

SEQ ID NO: 1160982 - RNA, 17 nt, Human
aucuggugacuuuccuc

SEQ ID NO: 1160983 - RNA, 17 nt, Human
aucugugaaaggaaaga

SEQ ID NO: 1160984 - RNA, 16 nt, Human
uuggagggugucccaa

SEQ ID NO: 1160985 - RNA, 18 nt, Human
uuggccccugcccggcug

SEQ ID NO: 1160986 - RNA, 17 nt, Human
aucuuugcagacaggca

SEQ ID NO: 1160987 - RNA, 18 nt, Human
aucuuugcagacaggcaa

SEQ ID NO: 1160988 - RNA, 22 nt, Human
aucuuuucauuuaggugaggaa

SEQ ID NO: 1160989 - RNA, 18 nt, Human
augaaagggcccagagag

SEQ ID NO: 1160990 - RNA, 18 nt, Human
augaacuuguaaaggaau

SEQ ID NO: 1160991 - RNA, 19 nt, Human
augaaagggcccagagagg

SEQ ID NO: 1160992 - RNA, 15 nt, Human
augaauuacauuugu

SEQ ID NO: 1160993 - RNA, 23 nt, Human
augaauggcuaagcaaaauguga

SEQ ID NO: 1160994 - RNA, 16 nt, Human
augaauuacauuugua

SEQ ID NO: 1160995 - RNA, 17 nt, Human
augaauuacauuuguau

SEQ ID NO: 1160996 - RNA, 18 nt, Human
uuggggaccagagcugcc

SEQ ID NO: 1160997 - RNA, 14 nt, Human
uuggggauauuuuu

SEQ ID NO: 1160998 - RNA, 18 nt, Human
augcagccucacaguccu

SEQ ID NO: 1160999 - RNA, 18 nt, Human
uuuaaauauaugcuaagu

SEQ ID NO: 1161000 - RNA, 12 nt, Human
uuuaauucaguu

SEQ ID NO: 1161001 - RNA, 12 nt, Human
augcccagcccc

SEQ ID NO: 1161002 - RNA, 13 nt, Human
augcccagccccu

SEQ ID NO: 1161003 - RNA, 14 nt, Human
augcccagccccuu

SEQ ID NO: 1161004 - RNA, 15 nt, Human
augcccagccccuuc

SEQ ID NO: 1161005 - RNA, 21 nt, Human
augcgggccagugcuccagcc

SEQ ID NO: 1161006 - RNA, 20 nt, Human
augcgugcauaccacuuuug

SEQ ID NO: 1161007 - RNA, 23 nt, Human
augcagugguaugaucacggcuc

SEQ ID NO: 1161008 - RNA, 13 nt, Human
augcaguucugaa

SEQ ID NO: 1161009 - RNA, 15 nt, Human
augcaguucugaaga

SEQ ID NO: 1161010 - RNA, 13 nt, Human
uuguguucaccuu

SEQ ID NO: 1161011 - RNA, 21 nt, Human
uuguuccacaaguuaaauaaa

SEQ ID NO: 1161012 - RNA, 13 nt, Human
uuguguuacuaag

SEQ ID NO: 1161013 - RNA, 15 nt, Human
uuguguuacuaaguu

SEQ ID NO: 1161014 - RNA, 20 nt, Human
uuguguuacuaaguuuuuau

SEQ ID NO: 1161015 - RNA, 15 nt, Human
augauaacuggaaac

SEQ ID NO: 1161016 - RNA, 17 nt, Human
augaucuaggaagacuu

SEQ ID NO: 1161017 - RNA, 20 nt, Human
augaucuaggaagacuuugg

SEQ ID NO: 1161018 - RNA, 18 nt, Human
augauuaaguaaugauaa

SEQ ID NO: 1161019 - RNA, 22 nt, Human
augcaccagcccuuagcaggga

SEQ ID NO: 1161020 - RNA, 13 nt, Human
augcaccuggaau

SEQ ID NO: 1161021 - RNA, 14 nt, Human
augcaccuggaaua

SEQ ID NO: 1161022 - RNA, 17 nt, Human
augcacuuuguucuggc

SEQ ID NO: 1161023 - RNA, 19 nt, Human
augcacuuuguucuggcuc

SEQ ID NO: 1161024 - RNA, 20 nt, Human
augcacuuuguucuggcucu

SEQ ID NO: 1161025 - RNA, 21 nt, Human
augcacuuuguucuggcucuu

SEQ ID NO: 1161026 - RNA, 13 nt, Human
uuuaaagaaugcu

SEQ ID NO: 1161027 - RNA, 13 nt, Human
augcuaagugaaa

SEQ ID NO: 1161028 - RNA, 20 nt, Human
augcuagaacucccuuucaa

SEQ ID NO: 1161029 - RNA, 21 nt, Human
augcuagaacucccuuucaac

SEQ ID NO: 1161030 - RNA, 22 nt, Human
augcuagaacucccuuucaaca

SEQ ID NO: 1161031 - RNA, 13 nt, Human
augcugcuuuuuc

SEQ ID NO: 1161032 - RNA, 13 nt, Human
augcuucucacug

SEQ ID NO: 1161033 - RNA, 16 nt, Human
uuucaaacauauauaa

SEQ ID NO: 1161034 - RNA, 17 nt, Human
uuucaaacauauauaac

SEQ ID NO: 1161035 - RNA, 16 nt, Human
uuucaaacuuuacuau

SEQ ID NO: 1161036 - RNA, 22 nt, Human
uuucaaacuuuacuauggcccu

SEQ ID NO: 1161037 - RNA, 14 nt, Human
auggcacuaguauu

SEQ ID NO: 1161038 - RNA, 16 nt, Human
auggcacuaguauuuc

SEQ ID NO: 1161039 - RNA, 19 nt, Human
auggcuaagcaaaauguga

SEQ ID NO: 1161040 - RNA, 18 nt, Human
auggcuaauguacugcau

SEQ ID NO: 1161041 - RNA, 15 nt, Human
augggagagaagaga

SEQ ID NO: 1161042 - RNA, 19 nt, Human
augggagagaagagaaugc

SEQ ID NO: 1161043 - RNA, 17 nt, Human
uuuccaugaguccccug

SEQ ID NO: 1161044 - RNA, 18 nt, Human
uuuccaugaguccccugu

SEQ ID NO: 1161045 - RNA, 11 nt, Human
auggacuuugu

SEQ ID NO: 1161046 - RNA, 12 nt, Human
auggacuuuguu

SEQ ID NO: 1161047 - RNA, 21 nt, Human
uuucugcagccacuauuguua

SEQ ID NO: 1161048 - RNA, 19 nt, Human
uuucugcagccacuauugu

SEQ ID NO: 1161049 - RNA, 15 nt, Human
uuucuggcuaugcau

SEQ ID NO: 1161050 - RNA, 16 nt, Human
uuucuggcuaugcauu

SEQ ID NO: 1161051 - RNA, 18 nt, Human
uuucuggcuaugcauuug

SEQ ID NO: 1161052 - RNA, 19 nt, Human
uuucuggcuaugcauuuga

SEQ ID NO: 1161053 - RNA, 15 nt, Human
augggauccuggagu

SEQ ID NO: 1161054 - RNA, 18 nt, Human
augggcaacccccagccu

SEQ ID NO: 1161055 - RNA, 14 nt, Human
augggggugcauuu

SEQ ID NO: 1161056 - RNA, 13 nt, Human
auggggcccugcc

SEQ ID NO: 1161057 - RNA, 24 nt, Human
auggggcugcaccggcuggccugg

SEQ ID NO: 1161058 - RNA, 15 nt, Human
augggggugcauuug

SEQ ID NO: 1161059 - RNA, 18 nt, Human
augggccuccugugugug

SEQ ID NO: 1161060 - RNA, 20 nt, Human
augggcuggguucuacccag

SEQ ID NO: 1161061 - RNA, 15 nt, Human
augggugcuuggagg

SEQ ID NO: 1161062 - RNA, 20 nt, Human
auggugagggauacccaucc

SEQ ID NO: 1161063 - RNA, 20 nt, Human
augggugcuuggaggaagga

SEQ ID NO: 1161064 - RNA, 12 nt, Human
auggugcaauga

SEQ ID NO: 1161065 - RNA, 13 nt, Human
auggugcaaugac

SEQ ID NO: 1161066 - RNA, 15 nt, Human
auggugcaaugaccu

SEQ ID NO: 1161067 - RNA, 16 nt, Human
auggugcaaugaccuu

SEQ ID NO: 1161068 - RNA, 17 nt, Human
auggugcaaugaccuuu

SEQ ID NO: 1161069 - RNA, 19 nt, Human
auggugcaaugaccuuuca

SEQ ID NO: 1161070 - RNA, 12 nt, Human
augguggcuggg

SEQ ID NO: 1161071 - RNA, 13 nt, Human
augguggcugggu

SEQ ID NO: 1161072 - RNA, 15 nt, Human
augguggcuggguug

SEQ ID NO: 1161073 - RNA, 17 nt, Human
augguggcuggguugga

SEQ ID NO: 1161074 - RNA, 21 nt, Human
augguucccuugaugaagaag

SEQ ID NO: 1161075 - RNA, 14 nt, Human
augguuuucaaaau

SEQ ID NO: 1161076 - RNA, 15 nt, Human
augguuuucaaaaua

SEQ ID NO: 1161077 - RNA, 16 nt, Human
augguuuucaaaauaa

SEQ ID NO: 1161078 - RNA, 14 nt, Human
augguuuucuugug

SEQ ID NO: 1161079 - RNA, 16 nt, Human
auguauguguaaguau

SEQ ID NO: 1161080 - RNA, 12 nt, Human
augucaguguga

SEQ ID NO: 1161081 - RNA, 13 nt, Human
augucagugugac

SEQ ID NO: 1161082 - RNA, 15 nt, Human
augucagugugacug

SEQ ID NO: 1161083 - RNA, 17 nt, Human
auguccacugguucuuc

SEQ ID NO: 1161084 - RNA, 17 nt, Human
uuugugaagcaaaauuu

SEQ ID NO: 1161085 - RNA, 19 nt, Human
uuuguaguguuggagaaga

SEQ ID NO: 1161086 - RNA, 21 nt, Human
uuuguaguguuggagaagaac

SEQ ID NO: 1161087 - RNA, 23 nt, Human
augucucuuuaaugucacaggca

SEQ ID NO: 1161088 - RNA, 16 nt, Human
augugaugagaggaaa

SEQ ID NO: 1161089 - RNA, 17 nt, Human
augugaugagaggaaau

SEQ ID NO: 1161090 - RNA, 19 nt, Human
augugaugagaggaaauca

SEQ ID NO: 1161091 - RNA, 23 nt, Human
augugcacaugcacgugugugca

SEQ ID NO: 1161092 - RNA, 16 nt, Human
auguacuucaugcugu

SEQ ID NO: 1161093 - RNA, 12 nt, Human
auguagaggaga

SEQ ID NO: 1161094 - RNA, 13 nt, Human
auguagaggagaa

SEQ ID NO: 1161095 - RNA, 17 nt, Human
auguagaggagaaacug

SEQ ID NO: 1161096 - RNA, 19 nt, Human
auguagaggagaaacugga

SEQ ID NO: 1161097 - RNA, 12 nt, Human
uuugaccucugc

SEQ ID NO: 1161098 - RNA, 18 nt, Human
uuugaccucugcagcaau

SEQ ID NO: 1161099 - RNA, 13 nt, Human
uuugacgccaucc

SEQ ID NO: 1161100 - RNA, 14 nt, Human
uuugacgccauccc

SEQ ID NO: 1161101 - RNA, 16 nt, Human
uuugacgccaucccag

SEQ ID NO: 1161102 - RNA, 19 nt, Human
uuugacgccaucccagccc

SEQ ID NO: 1161103 - RNA, 20 nt, Human
uuugacgccaucccagcccc

SEQ ID NO: 1161104 - RNA, 22 nt, Human
uuugauguucuuucacccuuuu

SEQ ID NO: 1161105 - RNA, 13 nt, Human
uuugauuaaauuc

SEQ ID NO: 1161106 - RNA, 18 nt, Human
uuugauuaaauucuugca

SEQ ID NO: 1161107 - RNA, 21 nt, Human
uuugauuaaauucuugcaaag

SEQ ID NO: 1161108 - RNA, 23 nt, Human
uuugauuaaauucuugcaaagua

SEQ ID NO: 1161109 - RNA, 21 nt, Human
uuugauucagacagcugccug

SEQ ID NO: 1161110 - RNA, 22 nt, Human
uuugauucagacagcugccugg

SEQ ID NO: 1161111 - RNA, 14 nt, Human
uuugcaagccagau

SEQ ID NO: 1161112 - RNA, 15 nt, Human
uuugccguuauuaaa

SEQ ID NO: 1161113 - RNA, 13 nt, Human
uuugccucugccu

SEQ ID NO: 1161114 - RNA, 15 nt, Human
auuauauuuacaaau

SEQ ID NO: 1161115 - RNA, 19 nt, Human
auucagacagcugccuggg

SEQ ID NO: 1161116 - RNA, 12 nt, Human
auucaggaagcu

SEQ ID NO: 1161117 - RNA, 18 nt, Human
auucagacagcugccugg

SEQ ID NO: 1161118 - RNA, 14 nt, Human
auucagacagcugc

SEQ ID NO: 1161119 - RNA, 15 nt, Human
auucagacagcugcc

SEQ ID NO: 1161120 - RNA, 16 nt, Human
auucagacagcugccu

SEQ ID NO: 1161121 - RNA, 17 nt, Human
auucagacagcugccug

SEQ ID NO: 1161122 - RNA, 11 nt, Human
auucagacagc

SEQ ID NO: 1161123 - RNA, 12 nt, Human
auucagacagcu

SEQ ID NO: 1161124 - RNA, 13 nt, Human
auucagacagcug

SEQ ID NO: 1161125 - RNA, 13 nt, Human
auucaggaagcuc

SEQ ID NO: 1161126 - RNA, 22 nt, Human
auuccccacccugaaagcccug

SEQ ID NO: 1161127 - RNA, 15 nt, Human
auuauauuuauuacu

SEQ ID NO: 1161128 - RNA, 18 nt, Human
auuauauuuauuacugua

SEQ ID NO: 1161129 - RNA, 14 nt, Human
auuaucuagauacu

SEQ ID NO: 1161130 - RNA, 18 nt, Human
auuaucuagauacuguau

SEQ ID NO: 1161131 - RNA, 17 nt, Human
auucucauuugucacac

SEQ ID NO: 1161132 - RNA, 11 nt, Human
auucugccugc

SEQ ID NO: 1161133 - RNA, 13 nt, Human
auucugccugccc

SEQ ID NO: 1161134 - RNA, 14 nt, Human
auucugccugccca

SEQ ID NO: 1161135 - RNA, 15 nt, Human
auucugccugcccag

SEQ ID NO: 1161136 - RNA, 16 nt, Human
auucugccugcccagg

SEQ ID NO: 1161137 - RNA, 17 nt, Human
auucugccugcccaggc

SEQ ID NO: 1161138 - RNA, 18 nt, Human
auucugccugcccaggcc

SEQ ID NO: 1161139 - RNA, 19 nt, Human
auucugccugcccaggccc

SEQ ID NO: 1161140 - RNA, 20 nt, Human
auucugccugcccaggcccc

SEQ ID NO: 1161141 - RNA, 21 nt, Human
auucugccugcccaggccccu

SEQ ID NO: 1161142 - RNA, 18 nt, Human
auucugcucacauaucug

SEQ ID NO: 1161143 - RNA, 19 nt, Human
auucugcucacauaucugu

SEQ ID NO: 1161144 - RNA, 20 nt, Human
auucugcucacauaucuguc

SEQ ID NO: 1161145 - RNA, 21 nt, Human
auucugcucacauaucuguca

SEQ ID NO: 1161146 - RNA, 22 nt, Human
auucugcucacauaucugucau

SEQ ID NO: 1161147 - RNA, 14 nt, Human
auucuguuggccag

SEQ ID NO: 1161148 - RNA, 19 nt, Human
auucuguuggccaguguga

SEQ ID NO: 1161149 - RNA, 21 nt, Human
auucuguuggccagugugaca

SEQ ID NO: 1161150 - RNA, 19 nt, Human
auugacacuuaaaaauggu

SEQ ID NO: 1161151 - RNA, 20 nt, Human
auugacacuuaaaaaugguu

SEQ ID NO: 1161152 - RNA, 15 nt, Human
auugacacuuaaaaa

SEQ ID NO: 1161153 - RNA, 17 nt, Human
auugacacuuaaaaaug

SEQ ID NO: 1161154 - RNA, 14 nt, Human
auucuuaaauaugu

SEQ ID NO: 1161155 - RNA, 13 nt, Human
auucuuccucccu

SEQ ID NO: 1161156 - RNA, 15 nt, Human
auugaaaaaccauuu

SEQ ID NO: 1161157 - RNA, 17 nt, Human
auugaaaucuuuuugcu

SEQ ID NO: 1161158 - RNA, 18 nt, Human
auugaaaucuuuuugcuu

SEQ ID NO: 1161159 - RNA, 20 nt, Human
auugaaaucuuuuugcuuug

SEQ ID NO: 1161160 - RNA, 19 nt, Human
auuggacaguaaaauccac

SEQ ID NO: 1161161 - RNA, 13 nt, Human
auugacuuuuuau

SEQ ID NO: 1161162 - RNA, 18 nt, Human
auugacuuuuuauggcac

SEQ ID NO: 1161163 - RNA, 21 nt, Human
auugauuuccguuaaaauacc

SEQ ID NO: 1161164 - RNA, 23 nt, Human
auugucaaaguggugagaggcau

SEQ ID NO: 1161165 - RNA, 13 nt, Human
auugucuagugaa

SEQ ID NO: 1161166 - RNA, 13 nt, Human
auugugggaaggg

SEQ ID NO: 1161167 - RNA, 14 nt, Human
auugugggaagggg

SEQ ID NO: 1161168 - RNA, 14 nt, Human
auuuaaaagauaca

SEQ ID NO: 1161169 - RNA, 16 nt, Human
auuuaaaagauacagu

SEQ ID NO: 1161170 - RNA, 17 nt, Human
auuuaaaagauacaguu

SEQ ID NO: 1161171 - RNA, 22 nt, Human
auuuuaaaaauacagauagaua

SEQ ID NO: 1161172 - RNA, 16 nt, Human
auuuuaaaagaaugau

SEQ ID NO: 1161173 - RNA, 17 nt, Human
auuuuaaaagaaugauu

SEQ ID NO: 1161174 - RNA, 23 nt, Human
auuuuaaaagaaugauuaugaau

SEQ ID NO: 1161175 - RNA, 22 nt, Human
auuuguaguguuggagaagaac

SEQ ID NO: 1161176 - RNA, 14 nt, Human
auuuguauaaaaua

SEQ ID NO: 1161177 - RNA, 15 nt, Human
auuuguauaaaauaa

SEQ ID NO: 1161178 - RNA, 20 nt, Human
auuucuugagguaaaagcau

SEQ ID NO: 1161179 - RNA, 16 nt, Human
auuugaaaauuuugau

SEQ ID NO: 1161180 - RNA, 20 nt, Human
auuucuuccacaagagccca

SEQ ID NO: 1161181 - RNA, 23 nt, Human
auuucuuccacaagagcccaggc

SEQ ID NO: 1161182 - RNA, 12 nt, Human
auuuauuuaaau

SEQ ID NO: 1161183 - RNA, 14 nt, Human
auuuauuuaaauuu

SEQ ID NO: 1161184 - RNA, 14 nt, Human
auuuauuuuaauaa

SEQ ID NO: 1161185 - RNA, 17 nt, Human
auuuauuuuaauaaugu

SEQ ID NO: 1161186 - RNA, 19 nt, Human
auuucccaaagcagugcau

SEQ ID NO: 1161187 - RNA, 20 nt, Human
auuuugcuaaaugugaauga

SEQ ID NO: 1161188 - RNA, 21 nt, Human
auuuugcugucccuuuuccuu

SEQ ID NO: 1161189 - RNA, 19 nt, Human
auuuugauccaagcugguc

SEQ ID NO: 1161190 - RNA, 15 nt, Human
auuuugauguuuuaa

SEQ ID NO: 1161191 - RNA, 17 nt, Human
auuuugauguuuuaagg

SEQ ID NO: 1161192 - RNA, 15 nt, Human
auuuucuauaauuua

SEQ ID NO: 1161193 - RNA, 14 nt, Human
auuuucuauaauuu

SEQ ID NO: 1161194 - RNA, 19 nt, Human
auuuucccuauuagagaag

SEQ ID NO: 1161195 - RNA, 16 nt, Human
auuuuccugccaggca

SEQ ID NO: 1161196 - RNA, 12 nt, Human
auuuuaauaaug

SEQ ID NO: 1161197 - RNA, 12 nt, Human
auuuugcuuugu

SEQ ID NO: 1161198 - RNA, 18 nt, Human
auuuugcuuugugauuuu

SEQ ID NO: 1161199 - RNA, 20 nt, Human
auuuugcuuugugauuuuug

SEQ ID NO: 1161200 - RNA, 14 nt, Human
auuuuggaaaauaa

SEQ ID NO: 1161201 - RNA, 19 nt, Human
auuuuggaaaauaaauuau

SEQ ID NO: 1161202 - RNA, 20 nt, Human
auuuuggaaaauaaauuauu

SEQ ID NO: 1161203 - RNA, 23 nt, Human
auuuugucauauaagauucauau

SEQ ID NO: 1161204 - RNA, 19 nt, Human
auuuugugcccccauguaa

SEQ ID NO: 1161205 - RNA, 13 nt, Human
auuuuuuaaaugc

SEQ ID NO: 1161206 - RNA, 14 nt, Human
auuuuuuaaaugca

SEQ ID NO: 1161207 - RNA, 22 nt, Human
auuuuugugauuuugugauuga

SEQ ID NO: 1161208 - RNA, 12 nt, Human
auuuuuguaauu

SEQ ID NO: 1161209 - RNA, 19 nt, Human
auuuuuguagagccagggu

SEQ ID NO: 1161210 - RNA, 20 nt, Human
auuuuuucucuaggaaauau

SEQ ID NO: 1161211 - RNA, 23 nt, Human
auuuuuucucuaggaaauauuua

SEQ ID NO: 1161212 - RNA, 18 nt, Human
auuuuuuguuaaaugauu

SEQ ID NO: 1161213 - RNA, 21 nt, Human
auuuuguuuuugucuuaaaaa

SEQ ID NO: 1161214 - RNA, 21 nt, Human
auuuuucuuagggaaggauac

SEQ ID NO: 1161215 - RNA, 22 nt, Human
auuuuucuuagggaaggauaca

SEQ ID NO: 1161216 - RNA, 18 nt, Human
ggggaauguuugccucug

SEQ ID NO: 1161217 - RNA, 22 nt, Human
ggggaauguuugccucugccuc

SEQ ID NO: 1161218 - RNA, 19 nt, Human
ggggaauugaggacacuga

SEQ ID NO: 1161219 - RNA, 16 nt, Human
ggggaccagagcugcc

SEQ ID NO: 1161220 - RNA, 14 nt, Human
aaacaguagugaua

SEQ ID NO: 1161221 - RNA, 13 nt, Human
ggggaccucaggc

SEQ ID NO: 1161222 - RNA, 11 nt, Human
ggggagaaagu

SEQ ID NO: 1161223 - RNA, 15 nt, Human
ggggccucagugcca

SEQ ID NO: 1161224 - RNA, 12 nt, Human
gggggccucagu

SEQ ID NO: 1161225 - RNA, 15 nt, Human
gggggccucagugcc

SEQ ID NO: 1161226 - RNA, 17 nt, Human
gggggccucagugccac

SEQ ID NO: 1161227 - RNA, 18 nt, Human
gggggccucagugccacu

SEQ ID NO: 1161228 - RNA, 12 nt, Human
aaacacauuuuu

SEQ ID NO: 1161229 - RNA, 11 nt, Human
aaacacauuuu

SEQ ID NO: 1161230 - RNA, 19 nt, Human
aaacacaaacgggcucagc

SEQ ID NO: 1161231 - RNA, 13 nt, Human
gggaugagaaagg

SEQ ID NO: 1161232 - RNA, 19 nt, Human
aaaauuuagaaauauaauu

SEQ ID NO: 1161233 - RNA, 20 nt, Human
aaaauuuugauguuuuaagg

SEQ ID NO: 1161234 - RNA, 23 nt, Human
aaaccaagucaagugaaaaagga

SEQ ID NO: 1161235 - RNA, 15 nt, Human
aaacgggcucagcaa

SEQ ID NO: 1161236 - RNA, 13 nt, Human
aaacucuccucug

SEQ ID NO: 1161237 - RNA, 19 nt, Human
aaacuguuaauaguucagg

SEQ ID NO: 1161238 - RNA, 16 nt, Human
aaacuuaaucuaaaug

SEQ ID NO: 1161239 - RNA, 17 nt, Human
aaacuuaaucuaaaugg

SEQ ID NO: 1161240 - RNA, 18 nt, Human
aaacuuaaucuaaaugga

SEQ ID NO: 1161241 - RNA, 19 nt, Human
aaacuuaaucuaaauggaa

SEQ ID NO: 1161242 - RNA, 15 nt, Human
aaacucguuaauuug

SEQ ID NO: 1161243 - RNA, 11 nt, Human
gguccugcugc

SEQ ID NO: 1161244 - RNA, 12 nt, Human
gguccugcugca

SEQ ID NO: 1161245 - RNA, 14 nt, Human
gguccugcugcagu

SEQ ID NO: 1161246 - RNA, 23 nt, Human
aaagacugaguacguugugcauu

SEQ ID NO: 1161247 - RNA, 13 nt, Human
aaagacuguacaa

SEQ ID NO: 1161248 - RNA, 14 nt, Human
aaagacuguacaaa

SEQ ID NO: 1161249 - RNA, 15 nt, Human
aaagaggaaugaagu

SEQ ID NO: 1161250 - RNA, 17 nt, Human
aaagaugcuucucacug

SEQ ID NO: 1161251 - RNA, 19 nt, Human
aaagaugcuucucacugcc

SEQ ID NO: 1161252 - RNA, 13 nt, Human
aaagacagugaaa

SEQ ID NO: 1161253 - RNA, 14 nt, Human
ggguggccucccaa

SEQ ID NO: 1161254 - RNA, 23 nt, Human
aaacuucagcgguuuauauaagc

SEQ ID NO: 1161255 - RNA, 13 nt, Human
aaagcugcugaca

SEQ ID NO: 1161256 - RNA, 21 nt, Human
aaaggagagcuagcagcaggg

SEQ ID NO: 1161257 - RNA, 17 nt, Human
aaaggagauuggaagga

SEQ ID NO: 1161258 - RNA, 22 nt, Human
aaagggacuuggaagcuccgcu

SEQ ID NO: 1161259 - RNA, 14 nt, Human
aaagguacuucaaa

SEQ ID NO: 1161260 - RNA, 13 nt, Human
ggucgaggcagga

SEQ ID NO: 1161261 - RNA, 13 nt, Human
ggugaacagaaca

SEQ ID NO: 1161262 - RNA, 18 nt, Human
ggugauccacccaccuca

SEQ ID NO: 1161263 - RNA, 23 nt, Human
ggugauccacccaccucagccuc

SEQ ID NO: 1161264 - RNA, 24 nt, Human
ggugauccacccaccucagccucc

SEQ ID NO: 1161265 - RNA, 12 nt, Human
ggugcaaugacc

SEQ ID NO: 1161266 - RNA, 13 nt, Human
ggugcaaugaccu

SEQ ID NO: 1161267 - RNA, 16 nt, Human
ggugcaaugaccuuuc

SEQ ID NO: 1161268 - RNA, 21 nt, Human
ggugcauuugaggucuguucu

SEQ ID NO: 1161269 - RNA, 13 nt, Human
gguggaugccugg

SEQ ID NO: 1161270 - RNA, 12 nt, Human
aaauauacugua

SEQ ID NO: 1161271 - RNA, 13 nt, Human
aaauauacuguaa

SEQ ID NO: 1161272 - RNA, 14 nt, Human
aaauauacuguaaa

SEQ ID NO: 1161273 - RNA, 15 nt, Human
aaauauacuguaaag

SEQ ID NO: 1161274 - RNA, 16 nt, Human
aaauauacuguaaaga

SEQ ID NO: 1161275 - RNA, 17 nt, Human
aaauauacuguaaagaa

SEQ ID NO: 1161276 - RNA, 19 nt, Human
aaauauacuguaaagaaag

SEQ ID NO: 1161277 - RNA, 21 nt, Human
aaauauacuguaaagaaagag

SEQ ID NO: 1161278 - RNA, 23 nt, Human
aaauauacuguaaagaaagagag

SEQ ID NO: 1161279 - RNA, 17 nt, Human
aaauauuauguuaaaac

SEQ ID NO: 1161280 - RNA, 19 nt, Human
aaaucagccguguaaccau

SEQ ID NO: 1161281 - RNA, 12 nt, Human
aaaucagccugc

SEQ ID NO: 1161282 - RNA, 18 nt, Human
aaaucagccugcuccagc

SEQ ID NO: 1161283 - RNA, 12 nt, Human
guacccacugcu

SEQ ID NO: 1161284 - RNA, 15 nt, Human
aaauccauacauuug

SEQ ID NO: 1161285 - RNA, 18 nt, Human
aaauccauacauuugugu

SEQ ID NO: 1161286 - RNA, 14 nt, Human
guacaugaaaacac

SEQ ID NO: 1161287 - RNA, 15 nt, Human
guacaugaaaacaca

SEQ ID NO: 1161288 - RNA, 16 nt, Human
guacaugaaaacacau

SEQ ID NO: 1161289 - RNA, 17 nt, Human
guacaugaaaacacauu

SEQ ID NO: 1161290 - RNA, 18 nt, Human
guacaugaaaacacauuu

SEQ ID NO: 1161291 - RNA, 19 nt, Human
guacaugaaaacacauuuu

SEQ ID NO: 1161292 - RNA, 20 nt, Human
guacaugaaaacacauuuuu

SEQ ID NO: 1161293 - RNA, 19 nt, Human
guacauggaauaacaugua

SEQ ID NO: 1161294 - RNA, 15 nt, Human
guacuauguaucaau

SEQ ID NO: 1161295 - RNA, 17 nt, Human
guacuauguaucaauga

SEQ ID NO: 1161296 - RNA, 13 nt, Human
guacccacugcuc

SEQ ID NO: 1161297 - RNA, 14 nt, Human
guacccacugcucu

SEQ ID NO: 1161298 - RNA, 18 nt, Human
guacuacaguccucccau

SEQ ID NO: 1161299 - RNA, 19 nt, Human
guacuacaguccucccauc

SEQ ID NO: 1161300 - RNA, 13 nt, Human
guacuauguauca

SEQ ID NO: 1161301 - RNA, 21 nt, Human
guacuucaaauccuugaagau

SEQ ID NO: 1161302 - RNA, 22 nt, Human
guacuucaaauccuugaagauu

SEQ ID NO: 1161303 - RNA, 15 nt, Human
guacuucaugcuguc

SEQ ID NO: 1161304 - RNA, 16 nt, Human
guacuggagaaaaugg

SEQ ID NO: 1161305 - RNA, 11 nt, Human
guagagacagg

SEQ ID NO: 1161306 - RNA, 12 nt, Human
guagagacaggg

SEQ ID NO: 1161307 - RNA, 13 nt, Human
guagagacagggu

SEQ ID NO: 1161308 - RNA, 10 nt, Human
guagagccag

SEQ ID NO: 1161309 - RNA, 11 nt, Human
guagagccagg

SEQ ID NO: 1161310 - RNA, 15 nt, Human
guagagccagggucu

SEQ ID NO: 1161311 - RNA, 18 nt, Human
guagagccagggucucac

SEQ ID NO: 1161312 - RNA, 20 nt, Human
guagaaauaucugaaaaugu

SEQ ID NO: 1161313 - RNA, 21 nt, Human
guagaaauaucugaaaaugua

SEQ ID NO: 1161314 - RNA, 23 nt, Human
guagaaauaucugaaaauguaug

SEQ ID NO: 1161315 - RNA, 18 nt, Human
guagaagcccuucuaccu

SEQ ID NO: 1161316 - RNA, 21 nt, Human
guagaagucuuagauguauau

SEQ ID NO: 1161317 - RNA, 14 nt, Human
guaauaugcacaca

SEQ ID NO: 1161318 - RNA, 16 nt, Human
guaauaugcacacauu

SEQ ID NO: 1161319 - RNA, 17 nt, Human
guaauaugcacacauuu

SEQ ID NO: 1161320 - RNA, 18 nt, Human
guaauaugcacacauuuu

SEQ ID NO: 1161321 - RNA, 20 nt, Human
guaauaggcguaacuaauuu

SEQ ID NO: 1161322 - RNA, 14 nt, Human
guaaagaaagagag

SEQ ID NO: 1161323 - RNA, 15 nt, Human
guaaagaaagagaga

SEQ ID NO: 1161324 - RNA, 16 nt, Human
guaaagaaagagagaa

SEQ ID NO: 1161325 - RNA, 17 nt, Human
guaaagaaagagagaaa

SEQ ID NO: 1161326 - RNA, 18 nt, Human
guaaagaaagagagaaaa

SEQ ID NO: 1161327 - RNA, 19 nt, Human
guaaagaaagagagaaaau

SEQ ID NO: 1161328 - RNA, 20 nt, Human
guaaagaaagagagaaaaua

SEQ ID NO: 1161329 - RNA, 21 nt, Human
guaaagaaagagagaaaauaa

SEQ ID NO: 1161330 - RNA, 22 nt, Human
guaaagaaagagagaaaauaaa

SEQ ID NO: 1161331 - RNA, 23 nt, Human
guaaagaaagagagaaaauaaaa

SEQ ID NO: 1161332 - RNA, 21 nt, Human
guaauuuuuuuaucgucacug

SEQ ID NO: 1161333 - RNA, 23 nt, Human
guacacugccuucucaacuccaa

SEQ ID NO: 1161334 - RNA, 22 nt, Human
aaauaauuuuuauauuugaaau

SEQ ID NO: 1161335 - RNA, 23 nt, Human
aaauaauuuuuauauuugaaaua

SEQ ID NO: 1161336 - RNA, 17 nt, Human
aaauacagauagauaua

SEQ ID NO: 1161337 - RNA, 18 nt, Human
aaauaccagccaguaaau

SEQ ID NO: 1161338 - RNA, 20 nt, Human
aaagguauuuuaaucaccaa

SEQ ID NO: 1161339 - RNA, 19 nt, Human
aaaguacuucuccacccug

SEQ ID NO: 1161340 - RNA, 20 nt, Human
aaaguacuucuccacccugc

SEQ ID NO: 1161341 - RNA, 21 nt, Human
aaaguacuucuccacccugcu

SEQ ID NO: 1161342 - RNA, 23 nt, Human
aaaguacuucuccacccugcucu

SEQ ID NO: 1161343 - RNA, 18 nt, Human
aaaguaucccuacuguaa

SEQ ID NO: 1161344 - RNA, 18 nt, Human
aaaguauguuagugcaaa

SEQ ID NO: 1161345 - RNA, 23 nt, Human
aaaguucugcagauaaacaguag

SEQ ID NO: 1161346 - RNA, 10 nt, Human
aaauaaaaag

SEQ ID NO: 1161347 - RNA, 12 nt, Human
aaauaaaaaguu

SEQ ID NO: 1161348 - RNA, 13 nt, Human
aaauaaaaaguua

SEQ ID NO: 1161349 - RNA, 14 nt, Human
aaauaaaaaguuaa

SEQ ID NO: 1161350 - RNA, 15 nt, Human
aaauaaaaaguuaaa

SEQ ID NO: 1161351 - RNA, 19 nt, Human
aaauaaaaaguuaaaaagu

SEQ ID NO: 1161352 - RNA, 15 nt, Human
aaauaauuuuuauau

SEQ ID NO: 1161353 - RNA, 22 nt, Human
ggcuucauccuccucagaucuu

SEQ ID NO: 1161354 - RNA, 18 nt, Human
ggcuucauccuccucaga

SEQ ID NO: 1161355 - RNA, 16 nt, Human
ggcuuccucauaguau

SEQ ID NO: 1161356 - RNA, 22 nt, Human
ggcuggguucuacccaggugcu

SEQ ID NO: 1161357 - RNA, 18 nt, Human
ggcuguaucccaugagcc

SEQ ID NO: 1161358 - RNA, 19 nt, Human
ggcuguaucccaugagccu

SEQ ID NO: 1161359 - RNA, 18 nt, Human
ggcuucaguggcagcugc

SEQ ID NO: 1161360 - RNA, 19 nt, Human
ggcuucaguggcagcugcu

SEQ ID NO: 1161361 - RNA, 20 nt, Human
ggcuucaguggcagcugcuu

SEQ ID NO: 1161362 - RNA, 14 nt, Human
aaaaauaacaauga

SEQ ID NO: 1161363 - RNA, 15 nt, Human
ggcugggggccucag

SEQ ID NO: 1161364 - RNA, 16 nt, Human
ggcugggggccucagu

SEQ ID NO: 1161365 - RNA, 17 nt, Human
ggcugggggccucagug

SEQ ID NO: 1161366 - RNA, 19 nt, Human
ggcugggggccucagugcc

SEQ ID NO: 1161367 - RNA, 19 nt, Human
ggcuggguggcaccagcag

SEQ ID NO: 1161368 - RNA, 19 nt, Human
ggcuggguucuacccaggu

SEQ ID NO: 1161369 - RNA, 21 nt, Human
ggcuggguucuacccaggugc

SEQ ID NO: 1161370 - RNA, 21 nt, Human
ggcuuccuccugguguggaag

SEQ ID NO: 1161371 - RNA, 18 nt, Human
gggaagaagcucucuccu

SEQ ID NO: 1161372 - RNA, 12 nt, Human
gggacagcuccu

SEQ ID NO: 1161373 - RNA, 13 nt, Human
gggacagcuccuu

SEQ ID NO: 1161374 - RNA, 13 nt, Human
gggaagagacuug

SEQ ID NO: 1161375 - RNA, 15 nt, Human
gggacagcuccuucu

SEQ ID NO: 1161376 - RNA, 16 nt, Human
gggacagcuccuucug

SEQ ID NO: 1161377 - RNA, 20 nt, Human
gggacagucaccucauggaa

SEQ ID NO: 1161378 - RNA, 21 nt, Human
gggacagucaccucauggaau

SEQ ID NO: 1161379 - RNA, 22 nt, Human
gggacagucaccucauggaauu

SEQ ID NO: 1161380 - RNA, 22 nt, Human
aaaacuugauguguuaucucuu

SEQ ID NO: 1161381 - RNA, 15 nt, Human
aaaacuucagacaua

SEQ ID NO: 1161382 - RNA, 18 nt, Human
aaaacugauuuuuuuuuc

SEQ ID NO: 1161383 - RNA, 18 nt, Human
aaaacucuccucugcugc

SEQ ID NO: 1161384 - RNA, 14 nt, Human
aaaacguggcugcu

SEQ ID NO: 1161385 - RNA, 15 nt, Human
aaaacaugcuacaca

SEQ ID NO: 1161386 - RNA, 12 nt, Human
aaaacccaagug

SEQ ID NO: 1161387 - RNA, 13 nt, Human
aaaacaugcuaca

SEQ ID NO: 1161388 - RNA, 14 nt, Human
aaaacaugcuacac

SEQ ID NO: 1161389 - RNA, 19 nt, Human
gggacauuugcucauggaa

SEQ ID NO: 1161390 - RNA, 14 nt, Human
gggaccagagcugc

SEQ ID NO: 1161391 - RNA, 20 nt, Human
gggaccagagcugccaccug

SEQ ID NO: 1161392 - RNA, 17 nt, Human
aaaaaugguuuaaaugg

SEQ ID NO: 1161393 - RNA, 15 nt, Human
gggacuuggaagcuc

SEQ ID NO: 1161394 - RNA, 17 nt, Human
gggacuuggaagcuccg

SEQ ID NO: 1161395 - RNA, 18 nt, Human
gggacuuggaagcuccgc

SEQ ID NO: 1161396 - RNA, 23 nt, Human
gggacuuggaagcuccgcuuucu

SEQ ID NO: 1161397 - RNA, 21 nt, Human
gggagaaccaaaaagaggcua

SEQ ID NO: 1161398 - RNA, 15 nt, Human
gggagagccuuccag

SEQ ID NO: 1161399 - RNA, 19 nt, Human
gggagagccuuccaggggu

SEQ ID NO: 1161400 - RNA, 23 nt, Human
gggagcaggcucgggcuccccag

SEQ ID NO: 1161401 - RNA, 15 nt, Human
gggagggagggcucc

SEQ ID NO: 1161402 - RNA, 16 nt, Human
gggagggagggcucca

SEQ ID NO: 1161403 - RNA, 18 nt, Human
gggaggucaaggcugcag

SEQ ID NO: 1161404 - RNA, 15 nt, Human
gggaggucgaggcag

SEQ ID NO: 1161405 - RNA, 19 nt, Human
ggcugccaaugggagcuca

SEQ ID NO: 1161406 - RNA, 20 nt, Human
ggcugccaaugggagcucau

SEQ ID NO: 1161407 - RNA, 21 nt, Human
ggcugccaaugggagcucaug

SEQ ID NO: 1161408 - RNA, 22 nt, Human
ggcugcggaaugaaccacaucu

SEQ ID NO: 1161409 - RNA, 14 nt, Human
ggcucuuccaggcu

SEQ ID NO: 1161410 - RNA, 12 nt, Human
ggcucuuccagg

SEQ ID NO: 1161411 - RNA, 13 nt, Human
ggcucucaggcca

SEQ ID NO: 1161412 - RNA, 14 nt, Human
ggcucucaggccag

SEQ ID NO: 1161413 - RNA, 11 nt, Human
ggcucucaggc

SEQ ID NO: 1161414 - RNA, 18 nt, Human
ggcugggagagccuucca

SEQ ID NO: 1161415 - RNA, 13 nt, Human
ggcugcugaaggc

SEQ ID NO: 1161416 - RNA, 14 nt, Human
ggcugggagagccu

SEQ ID NO: 1161417 - RNA, 15 nt, Human
ggcugggagagccuu

SEQ ID NO: 1161418 - RNA, 16 nt, Human
ggcugggagagccuuc

SEQ ID NO: 1161419 - RNA, 14 nt, Human
ggcuccacuugguc

SEQ ID NO: 1161420 - RNA, 16 nt, Human
ggcuccacuuggucug

SEQ ID NO: 1161421 - RNA, 19 nt, Human
ggcucagcaaaagaugcuu

SEQ ID NO: 1161422 - RNA, 18 nt, Human
ggcucagcggggacagcu

SEQ ID NO: 1161423 - RNA, 19 nt, Human
ggcucagcggggacagcuc

SEQ ID NO: 1161424 - RNA, 20 nt, Human
ggcucagcggggacagcucc

SEQ ID NO: 1161425 - RNA, 19 nt, Human
ggcucagguggggucacuc

SEQ ID NO: 1161426 - RNA, 20 nt, Human
ggcucagguggggucacucu

SEQ ID NO: 1161427 - RNA, 22 nt, Human
ggcccuucucuccagccccugg

SEQ ID NO: 1161428 - RNA, 23 nt, Human
ggcccuucucuccagccccugga

SEQ ID NO: 1161429 - RNA, 14 nt, Human
ggccuccauccuga

SEQ ID NO: 1161430 - RNA, 15 nt, Human
ggccuccauccugag

SEQ ID NO: 1161431 - RNA, 16 nt, Human
ggccuccauccugagg

SEQ ID NO: 1161432 - RNA, 23 nt, Human
ggccccugcugguucaggguugg

SEQ ID NO: 1161433 - RNA, 13 nt, Human
ggcccggcuccag

SEQ ID NO: 1161434 - RNA, 13 nt, Human
ggccccugcuggu

SEQ ID NO: 1161435 - RNA, 14 nt, Human
ggccccugcugguu

SEQ ID NO: 1161436 - RNA, 15 nt, Human
ggcccggcuccaggc

SEQ ID NO: 1161437 - RNA, 20 nt, Human
ggcccuucucuccagccccu

SEQ ID NO: 1161438 - RNA, 21 nt, Human
ggcccuucucuccagccccug

SEQ ID NO: 1161439 - RNA, 20 nt, Human
ggccagugugacaaggauug

SEQ ID NO: 1161440 - RNA, 14 nt, Human
ggccaguugguccc

SEQ ID NO: 1161441 - RNA, 17 nt, Human
ggccaguuggucccccu

SEQ ID NO: 1161442 - RNA, 11 nt, Human
ggcagccccug

SEQ ID NO: 1161443 - RNA, 20 nt, Human
ggcacagaaaauggaagaca

SEQ ID NO: 1161444 - RNA, 21 nt, Human
ggcacagaaaauggaagacag

SEQ ID NO: 1161445 - RNA, 23 nt, Human
ggcacagaaaauggaagacagcu

SEQ ID NO: 1161446 - RNA, 13 nt, Human
ggcacaucagcac

SEQ ID NO: 1161447 - RNA, 18 nt, Human
ggcacaucagcacgauuu

SEQ ID NO: 1161448 - RNA, 23 nt, Human
ggcacucagaagacacugauggg

SEQ ID NO: 1161449 - RNA, 16 nt, Human
ggagagaagagaaugc

SEQ ID NO: 1161450 - RNA, 20 nt, Human
ggcaguggugguuuucuguu

SEQ ID NO: 1161451 - RNA, 21 nt, Human
ggcaguggugguuuucuguuc

SEQ ID NO: 1161452 - RNA, 22 nt, Human
ggcagccccuguucuggcagag

SEQ ID NO: 1161453 - RNA, 14 nt, Human
ggacuuggaagcuc

SEQ ID NO: 1161454 - RNA, 15 nt, Human
ggacuuggaagcucc

SEQ ID NO: 1161455 - RNA, 9 nt, Human
ggacuuugu

SEQ ID NO: 1161456 - RNA, 13 nt, Human
ggagaaacuggaa

SEQ ID NO: 1161457 - RNA, 16 nt, Human
ggagaaaggaagggcu

SEQ ID NO: 1161458 - RNA, 20 nt, Human
ggacuaacuugucuuuggac

SEQ ID NO: 1161459 - RNA, 24 nt, Human
ggacuaacuugucuuuggacccug

SEQ ID NO: 1161460 - RNA, 14 nt, Human
ggacuacaggugug

SEQ ID NO: 1161461 - RNA, 15 nt, Human
ggacucaaugcacug

SEQ ID NO: 1161462 - RNA, 16 nt, Human
ggacucaaugcacuga

SEQ ID NO: 1161463 - RNA, 18 nt, Human
ggacucaaugcacugaca

SEQ ID NO: 1161464 - RNA, 11 nt, Human
ggacccugagg

SEQ ID NO: 1161465 - RNA, 12 nt, Human
ggacccccugaa

SEQ ID NO: 1161466 - RNA, 12 nt, Human
ggacccugaggc

SEQ ID NO: 1161467 - RNA, 13 nt, Human
ggacccugaggcc

SEQ ID NO: 1161468 - RNA, 13 nt, Human
ggaccucaggccu

SEQ ID NO: 1161469 - RNA, 14 nt, Human
ggaccucaggccug

SEQ ID NO: 1161470 - RNA, 15 nt, Human
ggaccucaggccugg

SEQ ID NO: 1161471 - RNA, 20 nt, Human
ggaccucaggccugggggcu

SEQ ID NO: 1161472 - RNA, 20 nt, Human
ggacguguuaugacuccaga

SEQ ID NO: 1161473 - RNA, 23 nt, Human
ggacaggcauguucucugaggac

SEQ ID NO: 1161474 - RNA, 15 nt, Human
ggacacagcucuucu

SEQ ID NO: 1161475 - RNA, 18 nt, Human
ggacacagcucuucucca

SEQ ID NO: 1161476 - RNA, 21 nt, Human
ggacacagcucuucuccaggc

SEQ ID NO: 1161477 - RNA, 17 nt, Human
ggacacuaaccacgcug

SEQ ID NO: 1161478 - RNA, 22 nt, Human
ggacacuaaccacgcuggaccu

SEQ ID NO: 1161479 - RNA, 19 nt, Human
ggacagcuccuucuguccu

SEQ ID NO: 1161480 - RNA, 20 nt, Human
ggacagcuccuucuguccua

SEQ ID NO: 1161481 - RNA, 18 nt, Human
ggaauaacauguaauuaa

SEQ ID NO: 1161482 - RNA, 16 nt, Human
ggaauccagacccggc

SEQ ID NO: 1161483 - RNA, 13 nt, Human
ggacaagagcagg

SEQ ID NO: 1161484 - RNA, 22 nt, Human
ggacaaggaugaucuaggaaga

SEQ ID NO: 1161485 - RNA, 23 nt, Human
ggacaaggaugaucuaggaagac

SEQ ID NO: 1161486 - RNA, 15 nt, Human
ggaagccgcuggggc

SEQ ID NO: 1161487 - RNA, 15 nt, Human
ggaagcucagggccu

SEQ ID NO: 1161488 - RNA, 23 nt, Human
ggaagcucagggccuggcucagg

SEQ ID NO: 1161489 - RNA, 11 nt, Human
ggaagcuccgc

SEQ ID NO: 1161490 - RNA, 16 nt, Human
ggaaggaaacccagcu

SEQ ID NO: 1161491 - RNA, 19 nt, Human
ggaaggaaacccagcucug

SEQ ID NO: 1161492 - RNA, 20 nt, Human
ggaaggaaacccagcucugg

SEQ ID NO: 1161493 - RNA, 12 nt, Human
ggaacacucuga

SEQ ID NO: 1161494 - RNA, 14 nt, Human
ggaacacucugaga

SEQ ID NO: 1161495 - RNA, 15 nt, Human
ggaacacucugagac

SEQ ID NO: 1161496 - RNA, 16 nt, Human
ggaacacucugagacu

SEQ ID NO: 1161497 - RNA, 17 nt, Human
ggaacagacuggaagca

SEQ ID NO: 1161498 - RNA, 13 nt, Human
ggaagacagcucu

SEQ ID NO: 1161499 - RNA, 14 nt, Human
ggaagacagcucuu

SEQ ID NO: 1161500 - RNA, 13 nt, Human
ggaagacuuugga

SEQ ID NO: 1161501 - RNA, 17 nt, Human
ggaagacuuuggaaaga

SEQ ID NO: 1161502 - RNA, 18 nt, Human
ggaagacuuuggaaagag

SEQ ID NO: 1161503 - RNA, 13 nt, Human
ggaagagaaaaaa

SEQ ID NO: 1161504 - RNA, 15 nt, Human
ggaagagaaaaaaua

SEQ ID NO: 1161505 - RNA, 21 nt, Human
gcuggguggcaccagcagccu

SEQ ID NO: 1161506 - RNA, 22 nt, Human
gcuggguggcaccagcagccug

SEQ ID NO: 1161507 - RNA, 23 nt, Human
gcuggguggcaccagcagccugg

SEQ ID NO: 1161508 - RNA, 15 nt, Human
gcuggcuguuggcug

SEQ ID NO: 1161509 - RNA, 16 nt, Human
gcuggcuguuggcugg

SEQ ID NO: 1161510 - RNA, 17 nt, Human
gcuggcuguuggcuggg

SEQ ID NO: 1161511 - RNA, 12 nt, Human
gcugggcucccu

SEQ ID NO: 1161512 - RNA, 18 nt, Human
gcuggagugcagugagcc

SEQ ID NO: 1161513 - RNA, 22 nt, Human
gcuggagugcagugagccgaga

SEQ ID NO: 1161514 - RNA, 20 nt, Human
gcuggccuggccccucaggg

SEQ ID NO: 1161515 - RNA, 13 nt, Human
gcucugcccuugg

SEQ ID NO: 1161516 - RNA, 15 nt, Human
gcucugguccauaga

SEQ ID NO: 1161517 - RNA, 16 nt, Human
gcucugguccauagag

SEQ ID NO: 1161518 - RNA, 23 nt, Human
gcucugguccauagagagcaaga

SEQ ID NO: 1161519 - RNA, 13 nt, Human
gcugcugaaggcu

SEQ ID NO: 1161520 - RNA, 14 nt, Human
gcugcugaaggcuc

SEQ ID NO: 1161521 - RNA, 15 nt, Human
gcugcugaaggcucg

SEQ ID NO: 1161522 - RNA, 18 nt, Human
gcugcugaaggcucgagc

SEQ ID NO: 1161523 - RNA, 13 nt, Human
gcugcuggcuggu

SEQ ID NO: 1161524 - RNA, 22 nt, Human
gcuuccucauaguaugguggcu

SEQ ID NO: 1161525 - RNA, 14 nt, Human
gcuugagcucagga

SEQ ID NO: 1161526 - RNA, 16 nt, Human
gcuugaggguugggcu

SEQ ID NO: 1161527 - RNA, 20 nt, Human
gcuuguaaauagcucaggug

SEQ ID NO: 1161528 - RNA, 12 nt, Human
gcuuguacauaa

SEQ ID NO: 1161529 - RNA, 18 nt, Human
gcuucacggaagagccuu

SEQ ID NO: 1161530 - RNA, 19 nt, Human
gcuucacggaagagccuug

SEQ ID NO: 1161531 - RNA, 12 nt, Human
gcuucagccucc

SEQ ID NO: 1161532 - RNA, 19 nt, Human
gcuucaaggauccugagcc

SEQ ID NO: 1161533 - RNA, 20 nt, Human
gcuucaaggauccugagcca

SEQ ID NO: 1161534 - RNA, 21 nt, Human
gcuucaaggauccugagccag

SEQ ID NO: 1161535 - RNA, 22 nt, Human
gcuucaaggauccugagccaga

SEQ ID NO: 1161536 - RNA, 17 nt, Human
gcuucacggaagagccu

SEQ ID NO: 1161537 - RNA, 20 nt, Human
gcuccagcucaccagcccca

SEQ ID NO: 1161538 - RNA, 21 nt, Human
gcuccagcucaccagccccag

SEQ ID NO: 1161539 - RNA, 18 nt, Human
gcuccacuuggucuguga

SEQ ID NO: 1161540 - RNA, 19 nt, Human
gcuccacuuggucugugag

SEQ ID NO: 1161541 - RNA, 18 nt, Human
gcuccagcucaccagccc

SEQ ID NO: 1161542 - RNA, 17 nt, Human
gcucccaggcauucccc

SEQ ID NO: 1161543 - RNA, 14 nt, Human
gcuccuggcccacu

SEQ ID NO: 1161544 - RNA, 15 nt, Human
gcuccuggcccacug

SEQ ID NO: 1161545 - RNA, 18 nt, Human
gcuccuggcccacugcau

SEQ ID NO: 1161546 - RNA, 19 nt, Human
gcuccuggcccacugcauc

SEQ ID NO: 1161547 - RNA, 20 nt, Human
gcuccuggcccacugcaucg

SEQ ID NO: 1161548 - RNA, 15 nt, Human
gcuccacuuggucug

SEQ ID NO: 1161549 - RNA, 17 nt, Human
gcucugaucauccacug

SEQ ID NO: 1161550 - RNA, 23 nt, Human
gcucugcaagaauugaagcagga

SEQ ID NO: 1161551 - RNA, 11 nt, Human
gcucugcccuu

SEQ ID NO: 1161552 - RNA, 17 nt, Human
gcucacugcagccucaa

SEQ ID NO: 1161553 - RNA, 15 nt, Human
gcucacugcagccuc

SEQ ID NO: 1161554 - RNA, 16 nt, Human
gcucacugcagccuca

SEQ ID NO: 1161555 - RNA, 11 nt, Human
gcucacugcag

SEQ ID NO: 1161556 - RNA, 12 nt, Human
gcucacugcagc

SEQ ID NO: 1161557 - RNA, 13 nt, Human
gcucacugcagcc

SEQ ID NO: 1161558 - RNA, 14 nt, Human
gcucacugcagccu

SEQ ID NO: 1161559 - RNA, 20 nt, Human
gcuauucaguaauaacucua

SEQ ID NO: 1161560 - RNA, 13 nt, Human
gcucagagagggu

SEQ ID NO: 1161561 - RNA, 14 nt, Human
gcucagagagggug

SEQ ID NO: 1161562 - RNA, 14 nt, Human
gcucaggugucccu

SEQ ID NO: 1161563 - RNA, 16 nt, Human
gcucaggugucccugc

SEQ ID NO: 1161564 - RNA, 17 nt, Human
gcucaggugucccugca

SEQ ID NO: 1161565 - RNA, 16 nt, Human
gcuaggccuggccaga

SEQ ID NO: 1161566 - RNA, 17 nt, Human
gcuaggccuggccagau

SEQ ID NO: 1161567 - RNA, 23 nt, Human
gcuaggccuggccagaugcacca

SEQ ID NO: 1161568 - RNA, 21 nt, Human
gcuagugugguguuuccuggc

SEQ ID NO: 1161569 - RNA, 22 nt, Human
gcuagugugguguuuccuggca

SEQ ID NO: 1161570 - RNA, 12 nt, Human
gcuaugcauuug

SEQ ID NO: 1161571 - RNA, 13 nt, Human
gcuaugcauuuga

SEQ ID NO: 1161572 - RNA, 19 nt, Human
gcuauucaguaauaacucu

SEQ ID NO: 1161573 - RNA, 13 nt, Human
gcuaaugggacac

SEQ ID NO: 1161574 - RNA, 15 nt, Human
gcuaaugggacacua

SEQ ID NO: 1161575 - RNA, 20 nt, Human
gcgugcacacaccagagccc

SEQ ID NO: 1161576 - RNA, 21 nt, Human
gcgggaggauguucugggaca

SEQ ID NO: 1161577 - RNA, 22 nt, Human
gcgggaggauguucugggacac

SEQ ID NO: 1161578 - RNA, 23 nt, Human
gcgugcacacaccagagcccacc

SEQ ID NO: 1161579 - RNA, 16 nt, Human
gcuagaacucccuuuc

SEQ ID NO: 1161580 - RNA, 18 nt, Human
gcuagaacucccuuucaa

SEQ ID NO: 1161581 - RNA, 12 nt, Human
gcuagaacuccc

SEQ ID NO: 1161582 - RNA, 13 nt, Human
gcuagaacucccu

SEQ ID NO: 1161583 - RNA, 14 nt, Human
gcuagaacucccuu

SEQ ID NO: 1161584 - RNA, 15 nt, Human
gcuagaacucccuuu

SEQ ID NO: 1161585 - RNA, 13 nt, Human
gccuggcucaggu

SEQ ID NO: 1161586 - RNA, 16 nt, Human
gccugugccucuggga

SEQ ID NO: 1161587 - RNA, 17 nt, Human
gccugugccucugggac

SEQ ID NO: 1161588 - RNA, 18 nt, Human
gccugugccucugggacu

SEQ ID NO: 1161589 - RNA, 19 nt, Human
gccugugccucugggacug

SEQ ID NO: 1161590 - RNA, 14 nt, Human
gccuguugggccag

SEQ ID NO: 1161591 - RNA, 15 nt, Human
gccuguugggccagg

SEQ ID NO: 1161592 - RNA, 16 nt, Human
gccuguugggccagga

SEQ ID NO: 1161593 - RNA, 18 nt, Human
gccuguugggccaggagc

SEQ ID NO: 1161594 - RNA, 20 nt, Human
gccuguugggccaggagccu

SEQ ID NO: 1161595 - RNA, 13 nt, Human
gccuggccugagc

SEQ ID NO: 1161596 - RNA, 14 nt, Human
gccuggccugagcu

SEQ ID NO: 1161597 - RNA, 18 nt, Human
gccuggccugagcuggga

SEQ ID NO: 1161598 - RNA, 20 nt, Human
gccuggccugagcugggaug

SEQ ID NO: 1161599 - RNA, 22 nt, Human
gcgaucuggguucacugcaacc

SEQ ID NO: 1161600 - RNA, 20 nt, Human
gcgcagcauauucaggaagc

SEQ ID NO: 1161601 - RNA, 21 nt, Human
gccuguugggccaggagccuc

SEQ ID NO: 1161602 - RNA, 20 nt, Human
gccuucggccuccauccuga

SEQ ID NO: 1161603 - RNA, 21 nt, Human
gccuucggccuccauccugag

SEQ ID NO: 1161604 - RNA, 23 nt, Human
gccuucggccuccauccugaggc

SEQ ID NO: 1161605 - RNA, 17 nt, Human
gccuugaccauucucca

SEQ ID NO: 1161606 - RNA, 19 nt, Human
gccuugaccauucuccacc

SEQ ID NO: 1161607 - RNA, 20 nt, Human
gccuugaccauucuccaccu

SEQ ID NO: 1161608 - RNA, 21 nt, Human
gccuugaccauucuccaccug

SEQ ID NO: 1161609 - RNA, 17 nt, Human
gcgagcccugguggcag

SEQ ID NO: 1161610 - RNA, 14 nt, Human
gccucuuggguuca

SEQ ID NO: 1161611 - RNA, 21 nt, Human
gccucuuaugggcuggguucu

SEQ ID NO: 1161612 - RNA, 13 nt, Human
gccugcccaggcc

SEQ ID NO: 1161613 - RNA, 14 nt, Human
gccugcccaggccc

SEQ ID NO: 1161614 - RNA, 20 nt, Human
gccucgaacuggcugcaaag

SEQ ID NO: 1161615 - RNA, 22 nt, Human
gccucgaacuggcugcaaaggg

SEQ ID NO: 1161616 - RNA, 15 nt, Human
gccucuuagaugcag

SEQ ID NO: 1161617 - RNA, 16 nt, Human
gccucuuaugggcugg

SEQ ID NO: 1161618 - RNA, 17 nt, Human
gccucuuaugggcuggg

SEQ ID NO: 1161619 - RNA, 18 nt, Human
gccucuuaugggcugggu

SEQ ID NO: 1161620 - RNA, 12 nt, Human
gccuccauccug

SEQ ID NO: 1161621 - RNA, 16 nt, Human
gccucccaaagugcug

SEQ ID NO: 1161622 - RNA, 17 nt, Human
gccucccaaagugcugg

SEQ ID NO: 1161623 - RNA, 18 nt, Human
gccucccaaagugcuggg

SEQ ID NO: 1161624 - RNA, 19 nt, Human
gccuccugugugugcgccu

SEQ ID NO: 1161625 - RNA, 23 nt, Human
gccuccugugugugcgccuacag

SEQ ID NO: 1161626 - RNA, 17 nt, Human
gccucgaacuggcugca

SEQ ID NO: 1161627 - RNA, 15 nt, Human
gccugcccaggcccc

SEQ ID NO: 1161628 - RNA, 17 nt, Human
gccugcccaggccccug

SEQ ID NO: 1161629 - RNA, 22 nt, Human
gccugcccaggccccugccacc

SEQ ID NO: 1161630 - RNA, 11 nt, Human
gcccugccucc

SEQ ID NO: 1161631 - RNA, 17 nt, Human
gcccugcccaccuggcc

SEQ ID NO: 1161632 - RNA, 20 nt, Human
gcccugcccaccuggccucu

SEQ ID NO: 1161633 - RNA, 21 nt, Human
gcccugcccaccuggccucug

SEQ ID NO: 1161634 - RNA, 22 nt, Human
gcccugcccaccuggccucugc

SEQ ID NO: 1161635 - RNA, 18 nt, Human
gcccugcagagggcacag

SEQ ID NO: 1161636 - RNA, 14 nt, Human
gcccugccuccuuu

SEQ ID NO: 1161637 - RNA, 12 nt, Human
gcccugccuccu

SEQ ID NO: 1161638 - RNA, 13 nt, Human
gcccugccuccuu

SEQ ID NO: 1161639 - RNA, 20 nt, Human
gcccuuagcagggaaacagc

SEQ ID NO: 1161640 - RNA, 22 nt, Human
gcccuuagcagggaaacagcua

SEQ ID NO: 1161641 - RNA, 20 nt, Human
gccgcagcccugcagagggc

SEQ ID NO: 1161642 - RNA, 20 nt, Human
gccuaggugacagagugaga

SEQ ID NO: 1161643 - RNA, 20 nt, Human
gccuagcauacguacacauu

SEQ ID NO: 1161644 - RNA, 21 nt, Human
gccuagcauacguacacauuu

SEQ ID NO: 1161645 - RNA, 22 nt, Human
gccuagcauacguacacauuuu

SEQ ID NO: 1161646 - RNA, 23 nt, Human
gccuagcauacguacacauuuua

SEQ ID NO: 1161647 - RNA, 13 nt, Human
gccuaggugacag

SEQ ID NO: 1161648 - RNA, 14 nt, Human
gccuaggugacaga

SEQ ID NO: 1161649 - RNA, 15 nt, Human
gccuaggugacagag

SEQ ID NO: 1161650 - RNA, 23 nt, Human
gcccgggcucugccucccaucac

SEQ ID NO: 1161651 - RNA, 12 nt, Human
gccccugcuggu

SEQ ID NO: 1161652 - RNA, 12 nt, Human
gcccccacuggu

SEQ ID NO: 1161653 - RNA, 17 nt, Human
gccccugccacccuggg

SEQ ID NO: 1161654 - RNA, 11 nt, Human
gccaaggccaa

SEQ ID NO: 1161655 - RNA, 17 nt, Human
gccaaggccaaaggaag

SEQ ID NO: 1161656 - RNA, 19 nt, Human
gccaaggccaaaggaagca

SEQ ID NO: 1161657 - RNA, 17 nt, Human
gcaugugaugagaggaa

SEQ ID NO: 1161658 - RNA, 18 nt, Human
gcaugugaugagaggaaa

SEQ ID NO: 1161659 - RNA, 16 nt, Human
gcaugggaaugaaugu

SEQ ID NO: 1161660 - RNA, 19 nt, Human
gcaugggaaugaaugucag

SEQ ID NO: 1161661 - RNA, 22 nt, Human
gcauccuggcacccggccccug

SEQ ID NO: 1161662 - RNA, 23 nt, Human
gcauccuggcacccggccccugc

SEQ ID NO: 1161663 - RNA, 17 nt, Human
gcauccuggcacccggc

SEQ ID NO: 1161664 - RNA, 21 nt, Human
gcauccuggcacccggccccu

SEQ ID NO: 1161665 - RNA, 12 nt, Human
gcauuuaaaaga

SEQ ID NO: 1161666 - RNA, 15 nt, Human
gcauuuaaaagauac

SEQ ID NO: 1161667 - RNA, 14 nt, Human
gcauuugaaaauuu

SEQ ID NO: 1161668 - RNA, 16 nt, Human
gcauuugaaaauuuug

SEQ ID NO: 1161669 - RNA, 14 nt, Human
gccaagaauucuua

SEQ ID NO: 1161670 - RNA, 18 nt, Human
gccaagaauucuuaaaua

SEQ ID NO: 1161671 - RNA, 22 nt, Human
gcagggaaacagcuaaugggac

SEQ ID NO: 1161672 - RNA, 17 nt, Human
gcaggcucucaggccag

SEQ ID NO: 1161673 - RNA, 18 nt, Human
gcaggcucucaggccagc

SEQ ID NO: 1161674 - RNA, 19 nt, Human
gcagcuugaggguugggcu

SEQ ID NO: 1161675 - RNA, 21 nt, Human
gcagcuugaggguugggcugg

SEQ ID NO: 1161676 - RNA, 22 nt, Human
gcaggcucgggcuccccagccc

SEQ ID NO: 1161677 - RNA, 12 nt, Human
gcaggcucucag

SEQ ID NO: 1161678 - RNA, 13 nt, Human
gcaggcucucagg

SEQ ID NO: 1161679 - RNA, 14 nt, Human
gcaggcucucaggc

SEQ ID NO: 1161680 - RNA, 15 nt, Human
gcaggcucucaggcc

SEQ ID NO: 1161681 - RNA, 16 nt, Human
gcaggcucucaggcca

SEQ ID NO: 1161682 - RNA, 22 nt, Human
gcagcugcgguccacccaggag

SEQ ID NO: 1161683 - RNA, 23 nt, Human
gcagcugcgguccacccaggagc

SEQ ID NO: 1161684 - RNA, 13 nt, Human
gcagcugcuuuug

SEQ ID NO: 1161685 - RNA, 20 nt, Human
gcagcugcuuuugucuaugg

SEQ ID NO: 1161686 - RNA, 15 nt, Human
gcagcuuauucacaa

SEQ ID NO: 1161687 - RNA, 16 nt, Human
gcagcuugaggguugg

SEQ ID NO: 1161688 - RNA, 16 nt, Human
gcacuuuguucuggcu

SEQ ID NO: 1161689 - RNA, 15 nt, Human
gcauaccacuuuugu

SEQ ID NO: 1161690 - RNA, 23 nt, Human
gcauacacacacacacacagcca

SEQ ID NO: 1161691 - RNA, 16 nt, Human
gcauaccacuuuuguu

SEQ ID NO: 1161692 - RNA, 19 nt, Human
gcagggacuugaacccaua

SEQ ID NO: 1161693 - RNA, 14 nt, Human
gcaguugccaguca

SEQ ID NO: 1161694 - RNA, 23 nt, Human
gcaguugccagucaccccggcca

SEQ ID NO: 1161695 - RNA, 15 nt, Human
gcauaaaaauuagcc

SEQ ID NO: 1161696 - RNA, 11 nt, Human
gcauacacaca

SEQ ID NO: 1161697 - RNA, 13 nt, Human
gcauacacacaca

SEQ ID NO: 1161698 - RNA, 14 nt, Human
gcauacacacacac

SEQ ID NO: 1161699 - RNA, 21 nt, Human
gcauacacacacacacacagc

SEQ ID NO: 1161700 - RNA, 22 nt, Human
gcauacacacacacacacagcc

SEQ ID NO: 1161701 - RNA, 20 nt, Human
gcacacaccagagcccaccu

SEQ ID NO: 1161702 - RNA, 11 nt, Human
gcacacauuuu

SEQ ID NO: 1161703 - RNA, 12 nt, Human
gcacacauuuuu

SEQ ID NO: 1161704 - RNA, 14 nt, Human
gcacacauuuuuua

SEQ ID NO: 1161705 - RNA, 15 nt, Human
gcaccggcuggccug

SEQ ID NO: 1161706 - RNA, 16 nt, Human
gcaccggcuggccugg

SEQ ID NO: 1161707 - RNA, 17 nt, Human
gcaccggcuggccuggc

SEQ ID NO: 1161708 - RNA, 18 nt, Human
gcaccggcuggccuggcc

SEQ ID NO: 1161709 - RNA, 12 nt, Human
gcaccuccugcc

SEQ ID NO: 1161710 - RNA, 17 nt, Human
gcacuccagccugggug

SEQ ID NO: 1161711 - RNA, 12 nt, Human
gcacuccccugc

SEQ ID NO: 1161712 - RNA, 22 nt, Human
gcacuauagccuaggugacaga

SEQ ID NO: 1161713 - RNA, 11 nt, Human
gcaauaaagca

SEQ ID NO: 1161714 - RNA, 21 nt, Human
gcaauaaagcagcguuucuau

SEQ ID NO: 1161715 - RNA, 18 nt, Human
gcaauagucaaauugugu

SEQ ID NO: 1161716 - RNA, 22 nt, Human
gcaauagucaaauugugugaaa

SEQ ID NO: 1161717 - RNA, 12 nt, Human
gcacacaccaga

SEQ ID NO: 1161718 - RNA, 14 nt, Human
gcacacaccagagc

SEQ ID NO: 1161719 - RNA, 15 nt, Human
gcacacaccagagcc

SEQ ID NO: 1161720 - RNA, 16 nt, Human
gcacacaccagagccc

SEQ ID NO: 1161721 - RNA, 17 nt, Human
gcacacaccagagccca

SEQ ID NO: 1161722 - RNA, 18 nt, Human
gcacacaccagagcccac

SEQ ID NO: 1161723 - RNA, 19 nt, Human
gcacacaccagagcccacc

SEQ ID NO: 1161724 - RNA, 15 nt, Human
gcaaaagaugcuucu

SEQ ID NO: 1161725 - RNA, 16 nt, Human
gcaaaagaugcuucuc

SEQ ID NO: 1161726 - RNA, 17 nt, Human
gcaaaagaugcuucuca

SEQ ID NO: 1161727 - RNA, 18 nt, Human
gcaacccccagccugcua

SEQ ID NO: 1161728 - RNA, 22 nt, Human
gcaacccuggugaccagcacca

SEQ ID NO: 1161729 - RNA, 18 nt, Human
gcaaccuccgccucuugg

SEQ ID NO: 1161730 - RNA, 19 nt, Human
gcaaccuccgccucuuggg

SEQ ID NO: 1161731 - RNA, 17 nt, Human
gauuucacucuccuugg

SEQ ID NO: 1161732 - RNA, 18 nt, Human
gauuucacucuccuuggu

SEQ ID NO: 1161733 - RNA, 12 nt, Human
gauucuuuccug

SEQ ID NO: 1161734 - RNA, 13 nt, Human
gauuucacucucc

SEQ ID NO: 1161735 - RNA, 16 nt, Human
gauuucacucuccuug

SEQ ID NO: 1161736 - RNA, 22 nt, Human
gauuuuuuuuuccuucagugcc

SEQ ID NO: 1161737 - RNA, 23 nt, Human
gauuuuuuuuuccuucagugccu

SEQ ID NO: 1161738 - RNA, 19 nt, Human
gauucuccugccucagccu

SEQ ID NO: 1161739 - RNA, 20 nt, Human
gauucuccugccucagccuc

SEQ ID NO: 1161740 - RNA, 21 nt, Human
gauucuccugccucagccucc

SEQ ID NO: 1161741 - RNA, 23 nt, Human
gauucuuauggacaaugacccag

SEQ ID NO: 1161742 - RNA, 21 nt, Human
gauucuucugcuucagccucc

SEQ ID NO: 1161743 - RNA, 20 nt, Human
gauuuaacagaaauguacag

SEQ ID NO: 1161744 - RNA, 23 nt, Human
gauuuaacagaaauguacagcaa

SEQ ID NO: 1161745 - RNA, 14 nt, Human
gaugcuuguacaua

SEQ ID NO: 1161746 - RNA, 16 nt, Human
gaugcuuguacauaau

SEQ ID NO: 1161747 - RNA, 17 nt, Human
gauguagaggagaaacu

SEQ ID NO: 1161748 - RNA, 23 nt, Human
gaugcuucucacugccaugccag

SEQ ID NO: 1161749 - RNA, 22 nt, Human
gaguugauagcacagacccugc

SEQ ID NO: 1161750 - RNA, 18 nt, Human
gaucuggguucacugcaa

SEQ ID NO: 1161751 - RNA, 20 nt, Human
gaucuggguucacugcaacc

SEQ ID NO: 1161752 - RNA, 22 nt, Human
gacuguacaaaguagaagucuu

SEQ ID NO: 1161753 - RNA, 14 nt, Human
gacucaaugcacug

SEQ ID NO: 1161754 - RNA, 17 nt, Human
gacucaaugcacugaca

SEQ ID NO: 1161755 - RNA, 16 nt, Human
gacuguuuucucuuga

SEQ ID NO: 1161756 - RNA, 18 nt, Human
gacuguuuucucuugaga

SEQ ID NO: 1161757 - RNA, 14 nt, Human
gacuuuggaaagac

SEQ ID NO: 1161758 - RNA, 14 nt, Human
gacuuuggaaagag

SEQ ID NO: 1161759 - RNA, 22 nt, Human
gacuuuguuaguuucuccaagc

SEQ ID NO: 1161760 - RNA, 21 nt, Human
gacuuuucuguccgagcuuug

SEQ ID NO: 1161761 - RNA, 23 nt, Human
gacuuuucuguccgagcuuugaa

SEQ ID NO: 1161762 - RNA, 17 nt, Human
gagaagcggcuggcagc

SEQ ID NO: 1161763 - RNA, 12 nt, Human
gacgcugugcug

SEQ ID NO: 1161764 - RNA, 13 nt, Human
gacgcugugcugc

SEQ ID NO: 1161765 - RNA, 15 nt, Human
gacgcugugcugccc

SEQ ID NO: 1161766 - RNA, 17 nt, Human
gaccauucuccaccugc

SEQ ID NO: 1161767 - RNA, 16 nt, Human
gaccauucuccaccug

SEQ ID NO: 1161768 - RNA, 16 nt, Human
gaccaucccugaaggc

SEQ ID NO: 1161769 - RNA, 17 nt, Human
gaccaucccugaaggcc

SEQ ID NO: 1161770 - RNA, 18 nt, Human
gaccaucccugaaggccc

SEQ ID NO: 1161771 - RNA, 12 nt, Human
gacccggcugcg

SEQ ID NO: 1161772 - RNA, 13 nt, Human
gacccggcugcgu

SEQ ID NO: 1161773 - RNA, 16 nt, Human
gacccuauugcugcuu

SEQ ID NO: 1161774 - RNA, 15 nt, Human
gaccaucccugaagg

SEQ ID NO: 1161775 - RNA, 20 nt, Human
gacaguauggcagcuuuccu

SEQ ID NO: 1161776 - RNA, 13 nt, Human
gacagcuccuucu

SEQ ID NO: 1161777 - RNA, 14 nt, Human
gacagcuccuucug

SEQ ID NO: 1161778 - RNA, 15 nt, Human
gacagcuccuucugu

SEQ ID NO: 1161779 - RNA, 16 nt, Human
gacagcuccuucuguc

SEQ ID NO: 1161780 - RNA, 14 nt, Human
gacagaaagcagaa

SEQ ID NO: 1161781 - RNA, 20 nt, Human
gacagaaagcagaacaguga

SEQ ID NO: 1161782 - RNA, 21 nt, Human
gacagaaagcagaacagugau

SEQ ID NO: 1161783 - RNA, 21 nt, Human
gacagcccuucuuuccacaga

SEQ ID NO: 1161784 - RNA, 15 nt, Human
gaggugggauccucc

SEQ ID NO: 1161785 - RNA, 16 nt, Human
gaggugggauccucca

SEQ ID NO: 1161786 - RNA, 17 nt, Human
gaggugggauccuccag

SEQ ID NO: 1161787 - RNA, 18 nt, Human
gaggugggauccuccagg

SEQ ID NO: 1161788 - RNA, 14 nt, Human
gagucacuggaaca

SEQ ID NO: 1161789 - RNA, 21 nt, Human
gagucacuggaacacuaauga

SEQ ID NO: 1161790 - RNA, 18 nt, Human
gagucagaaguuucugcc

SEQ ID NO: 1161791 - RNA, 14 nt, Human
gagugagacucugu

SEQ ID NO: 1161792 - RNA, 18 nt, Human
gagugagacucugucuca

SEQ ID NO: 1161793 - RNA, 24 nt, Human
gagugagcacuaaggugugcucug

SEQ ID NO: 1161794 - RNA, 18 nt, Human
gagugcagugagccgaga

SEQ ID NO: 1161795 - RNA, 18 nt, Human
gagugccuuacacaaugg

SEQ ID NO: 1161796 - RNA, 19 nt, Human
gaguugauacuacaguuug

SEQ ID NO: 1161797 - RNA, 22 nt, Human
gaguugauacuacaguuuguua

SEQ ID NO: 1161798 - RNA, 21 nt, Human
gaguugauagcacagacccug

SEQ ID NO: 1161799 - RNA, 20 nt, Human
gaggccagagacacaagccu

SEQ ID NO: 1161800 - RNA, 12 nt, Human
gaggcucugccc

SEQ ID NO: 1161801 - RNA, 13 nt, Human
gaggcucugcccu

SEQ ID NO: 1161802 - RNA, 14 nt, Human
gaggcucugcccuu

SEQ ID NO: 1161803 - RNA, 15 nt, Human
gaggcucugcccuug

SEQ ID NO: 1161804 - RNA, 17 nt, Human
gaggcucugcccuuggu

SEQ ID NO: 1161805 - RNA, 14 nt, Human
gaggcugccucucc

SEQ ID NO: 1161806 - RNA, 12 nt, Human
gagggcuccaga

SEQ ID NO: 1161807 - RNA, 13 nt, Human
gagggcuccagac

SEQ ID NO: 1161808 - RNA, 14 nt, Human
gagggcuccagaca

SEQ ID NO: 1161809 - RNA, 15 nt, Human
gagggcuccagacac

SEQ ID NO: 1161810 - RNA, 12 nt, Human
gaggggaacaga

SEQ ID NO: 1161811 - RNA, 12 nt, Human
gagccuuccagg

SEQ ID NO: 1161812 - RNA, 13 nt, Human
gagccuuccaggg

SEQ ID NO: 1161813 - RNA, 15 nt, Human
gagcgacagugagac

SEQ ID NO: 1161814 - RNA, 17 nt, Human
gagcggagaaaggaagg

SEQ ID NO: 1161815 - RNA, 16 nt, Human
gagcugccuguucagc

SEQ ID NO: 1161816 - RNA, 19 nt, Human
gagcugccuguucagcucc

SEQ ID NO: 1161817 - RNA, 20 nt, Human
gagcugccuguucagcucca

SEQ ID NO: 1161818 - RNA, 20 nt, Human
gagcaucaggccaggcccuc

SEQ ID NO: 1161819 - RNA, 22 nt, Human
gagcaucaggccaggcccucug

SEQ ID NO: 1161820 - RNA, 16 nt, Human
gaagcaccauaacuuu

SEQ ID NO: 1161821 - RNA, 16 nt, Human
gaagacucauucuucu

SEQ ID NO: 1161822 - RNA, 17 nt, Human
gaagacucauucuucug

SEQ ID NO: 1161823 - RNA, 18 nt, Human
gaagacucauucuucugu

SEQ ID NO: 1161824 - RNA, 13 nt, Human
gaagcacagcuuc

SEQ ID NO: 1161825 - RNA, 14 nt, Human
gaagcacagcuuca

SEQ ID NO: 1161826 - RNA, 14 nt, Human
gaagcacaugccuc

SEQ ID NO: 1161827 - RNA, 22 nt, Human
gaagcacaugccucucucaggc

SEQ ID NO: 1161828 - RNA, 14 nt, Human
gaagacagcucuua

SEQ ID NO: 1161829 - RNA, 15 nt, Human
gaagacagcucuuau

SEQ ID NO: 1161830 - RNA, 16 nt, Human
gaagacacugaugggc

SEQ ID NO: 1161831 - RNA, 21 nt, Human
gaagacacugaugggcaaccc

SEQ ID NO: 1161832 - RNA, 13 nt, Human
gaagacagagcua

SEQ ID NO: 1161833 - RNA, 15 nt, Human
gaagacagagcuaca

SEQ ID NO: 1161834 - RNA, 12 nt, Human
gaagacagcucu

SEQ ID NO: 1161835 - RNA, 13 nt, Human
gaagacagcucuu

SEQ ID NO: 1161836 - RNA, 23 nt, Human
gaaccaccacacccagcccacuu

SEQ ID NO: 1161837 - RNA, 22 nt, Human
gaaccauggucggaaaacaugc

SEQ ID NO: 1161838 - RNA, 17 nt, Human
gaacccgggaggcagag

SEQ ID NO: 1161839 - RNA, 19 nt, Human
gaacccgggaggcagaggu

SEQ ID NO: 1161840 - RNA, 13 nt, Human
gaacuccuggccu

SEQ ID NO: 1161841 - RNA, 14 nt, Human
gaacuccuggccuc

SEQ ID NO: 1161842 - RNA, 15 nt, Human
gaacuccuggccuca

SEQ ID NO: 1161843 - RNA, 13 nt, Human
gaacugaaaucau

SEQ ID NO: 1161844 - RNA, 18 nt, Human
gaaccaccacacccagcc

SEQ ID NO: 1161845 - RNA, 20 nt, Human
gaaccaccacacccagccca

SEQ ID NO: 1161846 - RNA, 21 nt, Human
gaaccaccacacccagcccac

SEQ ID NO: 1161847 - RNA, 22 nt, Human
gaaccaccacacccagcccacu

SEQ ID NO: 1161848 - RNA, 17 nt, Human
gaacaaauuuacagaga

SEQ ID NO: 1161849 - RNA, 15 nt, Human
gaaagggcccagaga

SEQ ID NO: 1161850 - RNA, 16 nt, Human
gaaagggcccagagag

SEQ ID NO: 1161851 - RNA, 17 nt, Human
gaaaugaaagcagggac

SEQ ID NO: 1161852 - RNA, 13 nt, Human
gaaacuggauuaa

SEQ ID NO: 1161853 - RNA, 17 nt, Human
gaaacuggauuaaacuu

SEQ ID NO: 1161854 - RNA, 18 nt, Human
gaaagaaaaucaggcugg

SEQ ID NO: 1161855 - RNA, 13 nt, Human
gaaaggcuccagg

SEQ ID NO: 1161856 - RNA, 14 nt, Human
gaaaggcuccagga

SEQ ID NO: 1161857 - RNA, 15 nt, Human
gaaaggcuccaggag

SEQ ID NO: 1161858 - RNA, 16 nt, Human
gaaaggcuccaggagc

SEQ ID NO: 1161859 - RNA, 13 nt, Human
gaaagggcccaga

SEQ ID NO: 1161860 - RNA, 21 nt, Human
gaaaacuuuaugcuaagugaa

SEQ ID NO: 1161861 - RNA, 23 nt, Human
gaaaagaaaaaugagccuggcaa

SEQ ID NO: 1161862 - RNA, 17 nt, Human
cuuuguauucucuccug

SEQ ID NO: 1161863 - RNA, 22 nt, Human
cuuuguauucucuccuguaccu

SEQ ID NO: 1161864 - RNA, 20 nt, Human
cuuuuauaaacuuuaccuuu

SEQ ID NO: 1161865 - RNA, 21 nt, Human
cuuuuauaaacuuuaccuuuu

SEQ ID NO: 1161866 - RNA, 15 nt, Human
cuuucuacccagcga

SEQ ID NO: 1161867 - RNA, 16 nt, Human
cuuucuacccagcgag

SEQ ID NO: 1161868 - RNA, 17 nt, Human
cuuucuacccagcgagc

SEQ ID NO: 1161869 - RNA, 16 nt, Human
cuuugacgccauccca

SEQ ID NO: 1161870 - RNA, 17 nt, Human
cuuugacgccaucccag

SEQ ID NO: 1161871 - RNA, 18 nt, Human
cuuugacgccaucccagc

SEQ ID NO: 1161872 - RNA, 22 nt, Human
cuugguagaagcccuucuaccu

SEQ ID NO: 1161873 - RNA, 14 nt, Human
cuugguccugcugc

SEQ ID NO: 1161874 - RNA, 16 nt, Human
cuuggucugugagaug

SEQ ID NO: 1161875 - RNA, 19 nt, Human
cuuggucugugagaugcua

SEQ ID NO: 1161876 - RNA, 15 nt, Human
cuugguccugcugca

SEQ ID NO: 1161877 - RNA, 19 nt, Human
cuuggugucgggcaugaca

SEQ ID NO: 1161878 - RNA, 20 nt, Human
cuuggugucgggcaugacac

SEQ ID NO: 1161879 - RNA, 13 nt, Human
cuugucuuuggac

SEQ ID NO: 1161880 - RNA, 15 nt, Human
cuugucuuuggaccc

SEQ ID NO: 1161881 - RNA, 18 nt, Human
cuugucuuuggacccuga

SEQ ID NO: 1161882 - RNA, 19 nt, Human
cuugucuuuggacccugag

SEQ ID NO: 1161883 - RNA, 13 nt, Human
cuuguggacacag

SEQ ID NO: 1161884 - RNA, 14 nt, Human
cuuucacccuuuuc

SEQ ID NO: 1161885 - RNA, 15 nt, Human
cuuucacccuuuucu

SEQ ID NO: 1161886 - RNA, 20 nt, Human
cuuucacccuuuucuguuug

SEQ ID NO: 1161887 - RNA, 20 nt, Human
cuuucagccaagaauucuua

SEQ ID NO: 1161888 - RNA, 22 nt, Human
cuuccucuuuccaucuacccuc

SEQ ID NO: 1161889 - RNA, 13 nt, Human
cuuccuccuggug

SEQ ID NO: 1161890 - RNA, 20 nt, Human
cuucucacauuuauauuuuu

SEQ ID NO: 1161891 - RNA, 13 nt, Human
cuucucacauuua

SEQ ID NO: 1161892 - RNA, 13 nt, Human
cuucuucagagac

SEQ ID NO: 1161893 - RNA, 14 nt, Human
cuucuucagagacu

SEQ ID NO: 1161894 - RNA, 18 nt, Human
cuucuucagagacuccug

SEQ ID NO: 1161895 - RNA, 15 nt, Human
cuucugacccaugcu

SEQ ID NO: 1161896 - RNA, 12 nt, Human
cuugauucauaa

SEQ ID NO: 1161897 - RNA, 12 nt, Human
cuugcaaaguau

SEQ ID NO: 1161898 - RNA, 23 nt, Human
cuuggauuguccccgacccuugc

SEQ ID NO: 1161899 - RNA, 24 nt, Human
cuuggauuguccccgacccuugcc

SEQ ID NO: 1161900 - RNA, 18 nt, Human
cuugaauuguaaggaaug

SEQ ID NO: 1161901 - RNA, 16 nt, Human
cuugacaucaacugca

SEQ ID NO: 1161902 - RNA, 22 nt, Human
cuugauauccucuuugagugaa

SEQ ID NO: 1161903 - RNA, 18 nt, Human
cuugauguguuaucucuu

SEQ ID NO: 1161904 - RNA, 23 nt, Human
cuuagcucauucuccuuguguua

SEQ ID NO: 1161905 - RNA, 22 nt, Human
cuuagcucauucuccuuguguu

SEQ ID NO: 1161906 - RNA, 16 nt, Human
cuuaccagcagagcac

SEQ ID NO: 1161907 - RNA, 19 nt, Human
cuuagggaaggauacaaaa

SEQ ID NO: 1161908 - RNA, 21 nt, Human
cuuagggaaggauacaaaagc

SEQ ID NO: 1161909 - RNA, 13 nt, Human
cuuacacaauggu

SEQ ID NO: 1161910 - RNA, 15 nt, Human
cuuaccagcagagca

SEQ ID NO: 1161911 - RNA, 14 nt, Human
cuuaaaacaacacu

SEQ ID NO: 1161912 - RNA, 13 nt, Human
cuuaaauaaugug

SEQ ID NO: 1161913 - RNA, 14 nt, Human
cuguuggcuggggg

SEQ ID NO: 1161914 - RNA, 19 nt, Human
cuguuggcugggggccuca

SEQ ID NO: 1161915 - RNA, 22 nt, Human
cuguuggcugggggccucagug

SEQ ID NO: 1161916 - RNA, 13 nt, Human
cuguaaagaaaga

SEQ ID NO: 1161917 - RNA, 14 nt, Human
cuguaaagaaagag

SEQ ID NO: 1161918 - RNA, 15 nt, Human
cuguaaagaaagaga

SEQ ID NO: 1161919 - RNA, 16 nt, Human
cuguaaagaaagagag

SEQ ID NO: 1161920 - RNA, 17 nt, Human
cuguaaagaaagagaga

SEQ ID NO: 1161921 - RNA, 18 nt, Human
cuguaaagaaagagagaa

SEQ ID NO: 1161922 - RNA, 19 nt, Human
cuguaaagaaagagagaaa

SEQ ID NO: 1161923 - RNA, 20 nt, Human
cuguaaagaaagagagaaaa

SEQ ID NO: 1161924 - RNA, 21 nt, Human
cuguaaagaaagagagaaaau

SEQ ID NO: 1161925 - RNA, 22 nt, Human
cuguaaagaaagagagaaaaua

SEQ ID NO: 1161926 - RNA, 23 nt, Human
cuguaaagaaagagagaaaauaa

SEQ ID NO: 1161927 - RNA, 22 nt, Human
cuggugacaugucuuuucuugc

SEQ ID NO: 1161928 - RNA, 13 nt, Human
cuguagaguggga

SEQ ID NO: 1161929 - RNA, 15 nt, Human
cuguagagugggagc

SEQ ID NO: 1161930 - RNA, 16 nt, Human
cugucgcccagucugg

SEQ ID NO: 1161931 - RNA, 20 nt, Human
cugucaauuacaggaaguac

SEQ ID NO: 1161932 - RNA, 23 nt, Human
cugucaauuacaggaaguacugg

SEQ ID NO: 1161933 - RNA, 12 nt, Human
cugugcugcccu

SEQ ID NO: 1161934 - RNA, 13 nt, Human
cugugcugcccug

SEQ ID NO: 1161935 - RNA, 14 nt, Human
cugugcugcccugc

SEQ ID NO: 1161936 - RNA, 15 nt, Human
cugugcugcccugcc

SEQ ID NO: 1161937 - RNA, 17 nt, Human
cugugcugcccugccca

SEQ ID NO: 1161938 - RNA, 18 nt, Human
cugugcugcccugcccac

SEQ ID NO: 1161939 - RNA, 19 nt, Human
cugugcugcccugcccacc

SEQ ID NO: 1161940 - RNA, 21 nt, Human
cugugcugcccugcccaccug

SEQ ID NO: 1161941 - RNA, 17 nt, Human
cugugucagcauagaag

SEQ ID NO: 1161942 - RNA, 19 nt, Human
cugugucagcauagaagua

SEQ ID NO: 1161943 - RNA, 13 nt, Human
cuguuauaaucuu

SEQ ID NO: 1161944 - RNA, 19 nt, Human
cuguuauaaucuuucacag

SEQ ID NO: 1161945 - RNA, 12 nt, Human
cugggcagaagg

SEQ ID NO: 1161946 - RNA, 15 nt, Human
cugggcagaaggaag

SEQ ID NO: 1161947 - RNA, 16 nt, Human
cugggcagaaggaaga

SEQ ID NO: 1161948 - RNA, 18 nt, Human
cuggguucacugcaaccu

SEQ ID NO: 1161949 - RNA, 20 nt, Human
cuggguucacugcaaccucc

SEQ ID NO: 1161950 - RNA, 22 nt, Human
cuggccccucagggucccuggu

SEQ ID NO: 1161951 - RNA, 14 nt, Human
cuggccuagcauac

SEQ ID NO: 1161952 - RNA, 11 nt, Human
cugggacacag

SEQ ID NO: 1161953 - RNA, 19 nt, Human
cuggcagaguugaagacag

SEQ ID NO: 1161954 - RNA, 11 nt, Human
cuggcagccca

SEQ ID NO: 1161955 - RNA, 12 nt, Human
cuggcagccccu

SEQ ID NO: 1161956 - RNA, 13 nt, Human
cuggcagccccug

SEQ ID NO: 1161957 - RNA, 17 nt, Human
cuggcagaguugaagac

SEQ ID NO: 1161958 - RNA, 18 nt, Human
cuggcagaguugaagaca

SEQ ID NO: 1161959 - RNA, 15 nt, Human
cugccucucccauca

SEQ ID NO: 1161960 - RNA, 22 nt, Human
cugccucucccaucacuucccu

SEQ ID NO: 1161961 - RNA, 23 nt, Human
cugccucucccaucacuucccua

SEQ ID NO: 1161962 - RNA, 17 nt, Human
cugccuguucagcucca

SEQ ID NO: 1161963 - RNA, 18 nt, Human
cugccuguucagcuccag

SEQ ID NO: 1161964 - RNA, 19 nt, Human
cugccuguucagcuccagc

SEQ ID NO: 1161965 - RNA, 21 nt, Human
cugccuguugggccaggagcc

SEQ ID NO: 1161966 - RNA, 22 nt, Human
cugccuguugggccaggagccu

SEQ ID NO: 1161967 - RNA, 23 nt, Human
cugccuguugggccaggagccuc

SEQ ID NO: 1161968 - RNA, 20 nt, Human
cugccuguucagcuccagcu

SEQ ID NO: 1161969 - RNA, 17 nt, Human
cugcuaucaaagagguu

SEQ ID NO: 1161970 - RNA, 18 nt, Human
cugcugacuguuuucucu

SEQ ID NO: 1161971 - RNA, 21 nt, Human
cugcugacuguuuucucuuga

SEQ ID NO: 1161972 - RNA, 21 nt, Human
cugcuuuugucuaugggacuc

SEQ ID NO: 1161973 - RNA, 19 nt, Human
cugcuuuuuaaagaaugcu

SEQ ID NO: 1161974 - RNA, 14 nt, Human
cuggaagcacagcu

SEQ ID NO: 1161975 - RNA, 14 nt, Human
cuggagaaaaugga

SEQ ID NO: 1161976 - RNA, 14 nt, Human
cugcuucaaauauu

SEQ ID NO: 1161977 - RNA, 19 nt, Human
cugcuucaaauauuucccu

SEQ ID NO: 1161978 - RNA, 12 nt, Human
cugcuucaagga

SEQ ID NO: 1161979 - RNA, 13 nt, Human
cugcuucaaggau

SEQ ID NO: 1161980 - RNA, 21 nt, Human
cugcuucaaggauccugagcc

SEQ ID NO: 1161981 - RNA, 22 nt, Human
cugcuucaaggauccugagcca

SEQ ID NO: 1161982 - RNA, 23 nt, Human
cugcuucaaggauccugagccag

SEQ ID NO: 1161983 - RNA, 20 nt, Human
cugcuuuugucuaugggacu

SEQ ID NO: 1161984 - RNA, 18 nt, Human
ccaccaucaugucuggcu

SEQ ID NO: 1161985 - RNA, 19 nt, Human
ccaccaucaugucuggcua

SEQ ID NO: 1161986 - RNA, 12 nt, Human
ccaccuuggcug

SEQ ID NO: 1161987 - RNA, 14 nt, Human
ccaccuuggcugca

SEQ ID NO: 1161988 - RNA, 15 nt, Human
ccaccuuggcugcag

SEQ ID NO: 1161989 - RNA, 16 nt, Human
ccaccuuggcugcagg

SEQ ID NO: 1161990 - RNA, 13 nt, Human
ccacgcuggagug

SEQ ID NO: 1161991 - RNA, 18 nt, Human
ccacgcuggaccuugaac

SEQ ID NO: 1161992 - RNA, 18 nt, Human
ccaccuuggcugcaggga

SEQ ID NO: 1161993 - RNA, 19 nt, Human
ccaccuuggcugcagggag

SEQ ID NO: 1161994 - RNA, 13 nt, Human
ccacgcccccacu

SEQ ID NO: 1161995 - RNA, 16 nt, Human
ccacagaagcuccagg

SEQ ID NO: 1161996 - RNA, 18 nt, Human
ccaccagucugacuguuu

SEQ ID NO: 1161997 - RNA, 18 nt, Human
ccacagaagcuccaggua

SEQ ID NO: 1161998 - RNA, 22 nt, Human
ccacagagaaaguacuucucca

SEQ ID NO: 1161999 - RNA, 17 nt, Human
cauuugucacacacuuu

SEQ ID NO: 1162000 - RNA, 15 nt, Human
cauuuggauuggaug

SEQ ID NO: 1162001 - RNA, 14 nt, Human
cauuuauucugcuc

SEQ ID NO: 1162002 - RNA, 15 nt, Human
cauuuauucugcuca

SEQ ID NO: 1162003 - RNA, 19 nt, Human
cauuuuuuaaaugcaccug

SEQ ID NO: 1162004 - RNA, 15 nt, Human
cauuuuuuaaaugca

SEQ ID NO: 1162005 - RNA, 16 nt, Human
cauuuuuuaaaugcac

SEQ ID NO: 1162006 - RNA, 20 nt, Human
ccaagcuggucccacucagu

SEQ ID NO: 1162007 - RNA, 15 nt, Human
ccaaggccaaaggaa

SEQ ID NO: 1162008 - RNA, 14 nt, Human
ccaagaagcccagg

SEQ ID NO: 1162009 - RNA, 15 nt, Human
ccaagaagcccagga

SEQ ID NO: 1162010 - RNA, 12 nt, Human
ccaagcuggucc

SEQ ID NO: 1162011 - RNA, 19 nt, Human
ccaagcuggucccacucag

SEQ ID NO: 1162012 - RNA, 22 nt, Human
ccaaauggaaaugggcagagca

SEQ ID NO: 1162013 - RNA, 23 nt, Human
ccaaauggaaaugggcagagcag

SEQ ID NO: 1162014 - RNA, 13 nt, Human
ccaacgucugugc

SEQ ID NO: 1162015 - RNA, 15 nt, Human
ccaacgucugugcca

SEQ ID NO: 1162016 - RNA, 16 nt, Human
ccaacgucugugccau

SEQ ID NO: 1162017 - RNA, 13 nt, Human
ccaagaagcccag

SEQ ID NO: 1162018 - RNA, 16 nt, Human
ccaaggccaaaggaag

SEQ ID NO: 1162019 - RNA, 22 nt, Human
cauuaggugugacugaauuucu

SEQ ID NO: 1162020 - RNA, 23 nt, Human
cauuaucuagauacuguaucaug

SEQ ID NO: 1162021 - RNA, 18 nt, Human
cauguccaagaagcccag

SEQ ID NO: 1162022 - RNA, 19 nt, Human
cauguccaagaagcccagg

SEQ ID NO: 1162023 - RNA, 20 nt, Human
cauguccaagaagcccagga

SEQ ID NO: 1162024 - RNA, 12 nt, Human
cauguuggccag

SEQ ID NO: 1162025 - RNA, 13 nt, Human
cauguuggccagg

SEQ ID NO: 1162026 - RNA, 14 nt, Human
caugcugcccugug

SEQ ID NO: 1162027 - RNA, 15 nt, Human
caugcugcccuguga

SEQ ID NO: 1162028 - RNA, 15 nt, Human
caugaaguaauaugc

SEQ ID NO: 1162029 - RNA, 19 nt, Human
caugaaguaauaugcacac

SEQ ID NO: 1162030 - RNA, 22 nt, Human
caugaaguaauaugcacacauu

SEQ ID NO: 1162031 - RNA, 23 nt, Human
caugaaguaauaugcacacauuu

SEQ ID NO: 1162032 - RNA, 23 nt, Human
caugacacgaauauugcugaugg

SEQ ID NO: 1162033 - RNA, 22 nt, Human
caugauuaaccacuucagcuga

SEQ ID NO: 1162034 - RNA, 23 nt, Human
caugauuaaccacuucagcugac

SEQ ID NO: 1162035 - RNA, 24 nt, Human
caugauuaaccacuucagcugacu

SEQ ID NO: 1162036 - RNA, 16 nt, Human
caugcacgugugugca

SEQ ID NO: 1162037 - RNA, 13 nt, Human
caugcuccuggcc

SEQ ID NO: 1162038 - RNA, 12 nt, Human
caugcugcccug

SEQ ID NO: 1162039 - RNA, 13 nt, Human
caugcugcccugu

SEQ ID NO: 1162040 - RNA, 15 nt, Human
cauaugccugggcag

SEQ ID NO: 1162041 - RNA, 20 nt, Human
cauaugccugggcagaagga

SEQ ID NO: 1162042 - RNA, 22 nt, Human
cauaugccugggcagaaggaag

SEQ ID NO: 1162043 - RNA, 14 nt, Human
cauauucaggaagc

SEQ ID NO: 1162044 - RNA, 15 nt, Human
cauauucaggaagcu

SEQ ID NO: 1162045 - RNA, 20 nt, Human
cauauucaggaagcucaggg

SEQ ID NO: 1162046 - RNA, 22 nt, Human
cauauucaggaagcucagggcc

SEQ ID NO: 1162047 - RNA, 15 nt, Human
cagugggagcugccu

SEQ ID NO: 1162048 - RNA, 21 nt, Human
cauacacacacacacacagcc

SEQ ID NO: 1162049 - RNA, 22 nt, Human
cauacacacacacacacagcca

SEQ ID NO: 1162050 - RNA, 23 nt, Human
cauacacacacacacacagccac

SEQ ID NO: 1162051 - RNA, 19 nt, Human
cauagcagagaaugaaagg

SEQ ID NO: 1162052 - RNA, 22 nt, Human
cauagcagagaaugaaagggcc

SEQ ID NO: 1162053 - RNA, 23 nt, Human
cauagcagagaaugaaagggccc

SEQ ID NO: 1162054 - RNA, 15 nt, Human
caucaggccaggccc

SEQ ID NO: 1162055 - RNA, 20 nt, Human
caucaggccaggcccucugc

SEQ ID NO: 1162056 - RNA, 16 nt, Human
caucaggccaggcccu

SEQ ID NO: 1162057 - RNA, 19 nt, Human
caucaggccaggcccucug

SEQ ID NO: 1162058 - RNA, 19 nt, Human
caucccauaugccugggca

SEQ ID NO: 1162059 - RNA, 14 nt, Human
cauccccuguagag

SEQ ID NO: 1162060 - RNA, 21 nt, Human
cauccccuguagagugggagc

SEQ ID NO: 1162061 - RNA, 18 nt, Human
cagggaggugaccccagg

SEQ ID NO: 1162062 - RNA, 22 nt, Human
cagggaguccgaaagggacuug

SEQ ID NO: 1162063 - RNA, 12 nt, Human
caggccuccuac

SEQ ID NO: 1162064 - RNA, 15 nt, Human
caggcuggcgugcag

SEQ ID NO: 1162065 - RNA, 16 nt, Human
caggcugggcuucagu

SEQ ID NO: 1162066 - RNA, 19 nt, Human
cagggaggacgcucucugg

SEQ ID NO: 1162067 - RNA, 17 nt, Human
caggcugggcuucagug

SEQ ID NO: 1162068 - RNA, 19 nt, Human
caggcugggcuucaguggc

SEQ ID NO: 1162069 - RNA, 17 nt, Human
cagggaggacgcucucu

SEQ ID NO: 1162070 - RNA, 18 nt, Human
cagggaggacgcucucug

SEQ ID NO: 1162071 - RNA, 17 nt, Human
caggaggccagccuuga

SEQ ID NO: 1162072 - RNA, 18 nt, Human
caggaggccagccuugac

SEQ ID NO: 1162073 - RNA, 22 nt, Human
caggcacccaccaucaugucug

SEQ ID NO: 1162074 - RNA, 23 nt, Human
caggcacccaccaucaugucugg

SEQ ID NO: 1162075 - RNA, 15 nt, Human
caggaggccagccuu

SEQ ID NO: 1162076 - RNA, 16 nt, Human
caggaggccagccuug

SEQ ID NO: 1162077 - RNA, 23 nt, Human
caggccagagggagugacagagg

SEQ ID NO: 1162078 - RNA, 19 nt, Human
caggccagagggagugaca

SEQ ID NO: 1162079 - RNA, 21 nt, Human
caggccagagggagugacaga

SEQ ID NO: 1162080 - RNA, 12 nt, Human
cagugcccacag

SEQ ID NO: 1162081 - RNA, 11 nt, Human
cagugggagcu

SEQ ID NO: 1162082 - RNA, 15 nt, Human
cagugccaaaaacaa

SEQ ID NO: 1162083 - RNA, 19 nt, Human
cagucugauucccaagcuc

SEQ ID NO: 1162084 - RNA, 20 nt, Human
cagucugauucccaagcucu

SEQ ID NO: 1162085 - RNA, 22 nt, Human
cagugcaugcugucccuuacgu

SEQ ID NO: 1162086 - RNA, 23 nt, Human
cagugcaugcugucccuuacgug

SEQ ID NO: 1162087 - RNA, 21 nt, Human
cagguuggugggggccucggu

SEQ ID NO: 1162088 - RNA, 16 nt, Human
cagguuuaagcuguua

SEQ ID NO: 1162089 - RNA, 18 nt, Human
cagguuuaagcuguuacu

SEQ ID NO: 1162090 - RNA, 20 nt, Human
cagucaccccggccaccugc

SEQ ID NO: 1162091 - RNA, 22 nt, Human
cagucaccccggccaccugcgg

SEQ ID NO: 1162092 - RNA, 15 nt, Human
cagucaccucaugga

SEQ ID NO: 1162093 - RNA, 22 nt, Human
cagggucucacucugucgccca

SEQ ID NO: 1162094 - RNA, 21 nt, Human
cagggucucacucugucgccc

SEQ ID NO: 1162095 - RNA, 18 nt, Human
cagggucucacucugucg

SEQ ID NO: 1162096 - RNA, 12 nt, Human
caggguuggccc

SEQ ID NO: 1162097 - RNA, 14 nt, Human
caggguuggccccu

SEQ ID NO: 1162098 - RNA, 16 nt, Human
caggugauccacccac

SEQ ID NO: 1162099 - RNA, 17 nt, Human
caggugauccacccacc

SEQ ID NO: 1162100 - RNA, 20 nt, Human
caggugauccacccaccuca

SEQ ID NO: 1162101 - RNA, 14 nt, Human
caggugcgaaagga

SEQ ID NO: 1162102 - RNA, 18 nt, Human
caggugcuaggaacacuc

SEQ ID NO: 1162103 - RNA, 20 nt, Human
caggugcuaggaacacuccu

SEQ ID NO: 1162104 - RNA, 14 nt, Human
cagguugguggggg

SEQ ID NO: 1162105 - RNA, 22 nt, Human
cagcuccagcucaccagcccca

SEQ ID NO: 1162106 - RNA, 16 nt, Human
cagcuccagcucacca

SEQ ID NO: 1162107 - RNA, 17 nt, Human
cagcuccagcucaccag

SEQ ID NO: 1162108 - RNA, 18 nt, Human
cagcuccagcucaccagc

SEQ ID NO: 1162109 - RNA, 20 nt, Human
cagcuccagcucaccagccc

SEQ ID NO: 1162110 - RNA, 13 nt, Human
cagcuccagcuca

SEQ ID NO: 1162111 - RNA, 14 nt, Human
cagcuccagcucac

SEQ ID NO: 1162112 - RNA, 15 nt, Human
cagcuccagcucacc

SEQ ID NO: 1162113 - RNA, 18 nt, Human
cagcugugcucuggacag

SEQ ID NO: 1162114 - RNA, 19 nt, Human
cagcugugcucuggacagg

SEQ ID NO: 1162115 - RNA, 15 nt, Human
cagcuucauuuccug

SEQ ID NO: 1162116 - RNA, 18 nt, Human
cagcuucauuuccugugu

SEQ ID NO: 1162117 - RNA, 19 nt, Human
cagcuucauuuccuguguc

SEQ ID NO: 1162118 - RNA, 14 nt, Human
caggaaaggcucca

SEQ ID NO: 1162119 - RNA, 15 nt, Human
caggaaaggcuccag

SEQ ID NO: 1162120 - RNA, 18 nt, Human
cagccugagcgacaguga

SEQ ID NO: 1162121 - RNA, 19 nt, Human
cagccugagcgacagugag

SEQ ID NO: 1162122 - RNA, 22 nt, Human
cagccugagcgacagugagacu

SEQ ID NO: 1162123 - RNA, 15 nt, Human
cagcggggacagcuc

SEQ ID NO: 1162124 - RNA, 16 nt, Human
cagcggggacagcucc

SEQ ID NO: 1162125 - RNA, 17 nt, Human
cagcggggacagcuccu

SEQ ID NO: 1162126 - RNA, 12 nt, Human
cagccccuggau

SEQ ID NO: 1162127 - RNA, 13 nt, Human
cagccccuggaug

SEQ ID NO: 1162128 - RNA, 14 nt, Human
cagccccuggaugc

SEQ ID NO: 1162129 - RNA, 22 nt, Human
cagccccuggaugcagccucac

SEQ ID NO: 1162130 - RNA, 16 nt, Human
cagcccuuagcaggga

SEQ ID NO: 1162131 - RNA, 21 nt, Human
cagcccuuagcagggaaacag

SEQ ID NO: 1162132 - RNA, 17 nt, Human
cagccccuggaugcagc

SEQ ID NO: 1162133 - RNA, 18 nt, Human
cagccccuggaugcagcc

SEQ ID NO: 1162134 - RNA, 19 nt, Human
cagccccuggaugcagccu

SEQ ID NO: 1162135 - RNA, 21 nt, Human
cagccccuggaugcagccuca

SEQ ID NO: 1162136 - RNA, 15 nt, Human
cagcccuucuuucca

SEQ ID NO: 1162137 - RNA, 19 nt, Human
cagcccuucuuuccacaga

SEQ ID NO: 1162138 - RNA, 20 nt, Human
cagcccuucuuuccacagaa

SEQ ID NO: 1162139 - RNA, 21 nt, Human
cagccgagauagccaaggcca

SEQ ID NO: 1162140 - RNA, 22 nt, Human
cagcacagccucuuagaugcag

SEQ ID NO: 1162141 - RNA, 22 nt, Human
cagccaggccacaagacccuug

SEQ ID NO: 1162142 - RNA, 12 nt, Human
cagccaggccac

SEQ ID NO: 1162143 - RNA, 13 nt, Human
cagccaggccaca

SEQ ID NO: 1162144 - RNA, 19 nt, Human
cagcauauucaggaagcuc

SEQ ID NO: 1162145 - RNA, 22 nt, Human
cagcauauucaggaagcucagg

SEQ ID NO: 1162146 - RNA, 23 nt, Human
cagcauauucaggaagcucaggg

SEQ ID NO: 1162147 - RNA, 18 nt, Human
cagaggggguggccuccc

SEQ ID NO: 1162148 - RNA, 19 nt, Human
cagaggggguggccuccca

SEQ ID NO: 1162149 - RNA, 20 nt, Human
cagaggggguggccucccaa

SEQ ID NO: 1162150 - RNA, 22 nt, Human
cagaggggguggccucccaacu

SEQ ID NO: 1162151 - RNA, 20 nt, Human
cagagucagaaguuucugcc

SEQ ID NO: 1162152 - RNA, 19 nt, Human
cagaaguuucugccgcagc

SEQ ID NO: 1162153 - RNA, 20 nt, Human
cagaaguuugagaucagccu

SEQ ID NO: 1162154 - RNA, 22 nt, Human
cagaaguuugagaucagccugg

SEQ ID NO: 1162155 - RNA, 23 nt, Human
cagaaguuugagaucagccuggg

SEQ ID NO: 1162156 - RNA, 18 nt, Human
cagagcugccaccugccu

SEQ ID NO: 1162157 - RNA, 22 nt, Human
cagagggccugcaagggaguga

SEQ ID NO: 1162158 - RNA, 13 nt, Human
caccagccccagu

SEQ ID NO: 1162159 - RNA, 16 nt, Human
caccagccccagugcc

SEQ ID NO: 1162160 - RNA, 18 nt, Human
cacccaccucagccuccc

SEQ ID NO: 1162161 - RNA, 16 nt, Human
cacccaggagccccga

SEQ ID NO: 1162162 - RNA, 14 nt, Human
caccaacgucugug

SEQ ID NO: 1162163 - RNA, 16 nt, Human
caccaacgucugugcc

SEQ ID NO: 1162164 - RNA, 17 nt, Human
caccaacauacucccau

SEQ ID NO: 1162165 - RNA, 19 nt, Human
cacauuuuauuuuauuaug

SEQ ID NO: 1162166 - RNA, 20 nt, Human
cacauuuuauuuuauuaugc

SEQ ID NO: 1162167 - RNA, 21 nt, Human
cacauuuuauuuuauuaugca

SEQ ID NO: 1162168 - RNA, 16 nt, Human
cacagaaaauauacug

SEQ ID NO: 1162169 - RNA, 17 nt, Human
cacagaaaauauacugu

SEQ ID NO: 1162170 - RNA, 18 nt, Human
cacagaaaauauacugua

SEQ ID NO: 1162171 - RNA, 19 nt, Human
cacagaaaauauacuguaa

SEQ ID NO: 1162172 - RNA, 20 nt, Human
cacagaaaauauacuguaaa

SEQ ID NO: 1162173 - RNA, 21 nt, Human
cacagaaaauauacuguaaag

SEQ ID NO: 1162174 - RNA, 23 nt, Human
cacagaaaagaaaguucaugcuu

SEQ ID NO: 1162175 - RNA, 12 nt, Human
cacagaaaauau

SEQ ID NO: 1162176 - RNA, 13 nt, Human
cacagaaaauaua

SEQ ID NO: 1162177 - RNA, 14 nt, Human
cacagaaaauauac

SEQ ID NO: 1162178 - RNA, 15 nt, Human
cacagaaaauauacu

SEQ ID NO: 1162179 - RNA, 10 nt, Human
cacacauuuu

SEQ ID NO: 1162180 - RNA, 11 nt, Human
cacacauuuuu

SEQ ID NO: 1162181 - RNA, 12 nt, Human
cacacauuuuuu

SEQ ID NO: 1162182 - RNA, 16 nt, Human
cacacauuuuuuaaau

SEQ ID NO: 1162183 - RNA, 19 nt, Human
cacacauuuuuuaaaugca

SEQ ID NO: 1162184 - RNA, 20 nt, Human
cacacauuuuuuaaaugcac

SEQ ID NO: 1162185 - RNA, 14 nt, Human
cacagacccugccc

SEQ ID NO: 1162186 - RNA, 16 nt, Human
cacagacccugcccug

SEQ ID NO: 1162187 - RNA, 17 nt, Human
cacagacccugcccugu

SEQ ID NO: 1162188 - RNA, 18 nt, Human
cacagacccugcccugug

SEQ ID NO: 1162189 - RNA, 11 nt, Human
cacagcucugu

SEQ ID NO: 1162190 - RNA, 14 nt, Human
cacagcucuguccu

SEQ ID NO: 1162191 - RNA, 15 nt, Human
cacagcucuguccug

SEQ ID NO: 1162192 - RNA, 16 nt, Human
cacagcucuguccugg

SEQ ID NO: 1162193 - RNA, 18 nt, Human
cacagcucuguccuggga

SEQ ID NO: 1162194 - RNA, 19 nt, Human
cacagcucuguccugggag

SEQ ID NO: 1162195 - RNA, 14 nt, Human
cacagcucuucucc

SEQ ID NO: 1162196 - RNA, 15 nt, Human
cacagcucuucucca

SEQ ID NO: 1162197 - RNA, 17 nt, Human
cacagcucuucuccagg

SEQ ID NO: 1162198 - RNA, 18 nt, Human
cacagcucuucuccaggc

SEQ ID NO: 1162199 - RNA, 13 nt, Human
caaugcuggcugu

SEQ ID NO: 1162200 - RNA, 20 nt, Human
caaugcuggcuguuggcugg

SEQ ID NO: 1162201 - RNA, 21 nt, Human
caaugcuggcuguuggcuggg

SEQ ID NO: 1162202 - RNA, 15 nt, Human
caaugggagcucaug

SEQ ID NO: 1162203 - RNA, 18 nt, Human
cacaagagcccaggccuc

SEQ ID NO: 1162204 - RNA, 19 nt, Human
cacaagagcccaggccucc

SEQ ID NO: 1162205 - RNA, 20 nt, Human
cacaagagcccaggccuccu

SEQ ID NO: 1162206 - RNA, 18 nt, Human
cacaagcuccaagcuccc

SEQ ID NO: 1162207 - RNA, 19 nt, Human
cacaagcuccaagcuccca

SEQ ID NO: 1162208 - RNA, 20 nt, Human
cacaagcuccaagcucccag

SEQ ID NO: 1162209 - RNA, 21 nt, Human
cacaagcuccaagcucccagg

SEQ ID NO: 1162210 - RNA, 20 nt, Human
caauaaaauccauacauuug

SEQ ID NO: 1162211 - RNA, 23 nt, Human
caauaaaauccauacauuugugu

SEQ ID NO: 1162212 - RNA, 17 nt, Human
caaggcaaggcugucaa

SEQ ID NO: 1162213 - RNA, 18 nt, Human
caaggcaaggcugucaau

SEQ ID NO: 1162214 - RNA, 20 nt, Human
caaggccaaaggaagcacau

SEQ ID NO: 1162215 - RNA, 21 nt, Human
caaggccaaaggaagcacaug

SEQ ID NO: 1162216 - RNA, 12 nt, Human
caccucagccuc

SEQ ID NO: 1162217 - RNA, 18 nt, Human
caccuuggcugcagggag

SEQ ID NO: 1162218 - RNA, 15 nt, Human
caccuuggcugcagg

SEQ ID NO: 1162219 - RNA, 16 nt, Human
caccuuggcugcaggg

SEQ ID NO: 1162220 - RNA, 14 nt, Human
caccuuucccaucu

SEQ ID NO: 1162221 - RNA, 14 nt, Human
caccuuugaagaag

SEQ ID NO: 1162222 - RNA, 20 nt, Human
cacucuuauugcccacgcug

SEQ ID NO: 1162223 - RNA, 21 nt, Human
cacucuuauugcccacgcugg

SEQ ID NO: 1162224 - RNA, 22 nt, Human
cacucuuauugcccacgcugga

SEQ ID NO: 1162225 - RNA, 12 nt, Human
cacggccaggcc

SEQ ID NO: 1162226 - RNA, 13 nt, Human
cacggccaggcca

SEQ ID NO: 1162227 - RNA, 14 nt, Human
cacggcucacugca

SEQ ID NO: 1162228 - RNA, 15 nt, Human
cacggcucacugcag

SEQ ID NO: 1162229 - RNA, 21 nt, Human
cacuacauuauaaaugucucu

SEQ ID NO: 1162230 - RNA, 17 nt, Human
cacuacauucuguuaau

SEQ ID NO: 1162231 - RNA, 21 nt, Human
cacuacauucuguuaaucauu

SEQ ID NO: 1162232 - RNA, 13 nt, Human
cacuccagccuga

SEQ ID NO: 1162233 - RNA, 23 nt, Human
cacuccagccugagcgacaguga

SEQ ID NO: 1162234 - RNA, 13 nt, Human
cacuccagccugg

SEQ ID NO: 1162235 - RNA, 14 nt, Human
cacuccagccuggg

SEQ ID NO: 1162236 - RNA, 18 nt, Human
cagaacagugauuaccag

SEQ ID NO: 1162237 - RNA, 14 nt, Human
cagaaguuucugcc

SEQ ID NO: 1162238 - RNA, 16 nt, Human
cagaaguuucugccgc

SEQ ID NO: 1162239 - RNA, 11 nt, Human
cagaacaguga

SEQ ID NO: 1162240 - RNA, 12 nt, Human
cagaacagugau

SEQ ID NO: 1162241 - RNA, 17 nt, Human
cagaacagugauuacca

SEQ ID NO: 1162242 - RNA, 16 nt, Human
cagaaauguacagcaa

SEQ ID NO: 1162243 - RNA, 17 nt, Human
cagaaauguguuaucac

SEQ ID NO: 1162244 - RNA, 20 nt, Human
cacugggcuuggggaccaga

SEQ ID NO: 1162245 - RNA, 15 nt, Human
cacuuaaaaaugguu

SEQ ID NO: 1162246 - RNA, 18 nt, Human
cacuguugcccaggcugg

SEQ ID NO: 1162247 - RNA, 19 nt, Human
cacuguugcccaggcuggc

SEQ ID NO: 1162248 - RNA, 23 nt, Human
cacuguugcccaggcuggcgugc

SEQ ID NO: 1162249 - RNA, 19 nt, Human
cacugcagccucaaccucc

SEQ ID NO: 1162250 - RNA, 20 nt, Human
cacugcagccucaaccuccu

SEQ ID NO: 1162251 - RNA, 21 nt, Human
cacugcagccucaaccuccug

SEQ ID NO: 1162252 - RNA, 22 nt, Human
cacugcagccucaaccuccugg

SEQ ID NO: 1162253 - RNA, 23 nt, Human
cacugcagccucaaccuccuggg

SEQ ID NO: 1162254 - RNA, 17 nt, Human
cacugccaugccagcuu

SEQ ID NO: 1162255 - RNA, 18 nt, Human
cacuuguguuaugaagca

SEQ ID NO: 1162256 - RNA, 17 nt, Human
cacuuguguuuugcaag

SEQ ID NO: 1162257 - RNA, 16 nt, Human
cacuuacacuuuaugc

SEQ ID NO: 1162258 - RNA, 18 nt, Human
cacuuucuagccagagga

SEQ ID NO: 1162259 - RNA, 16 nt, Human
cacuuucuagccagag

SEQ ID NO: 1162260 - RNA, 17 nt, Human
cacuuucuagccagagg

SEQ ID NO: 1162261 - RNA, 13 nt, Human
cacuuucuagcca

SEQ ID NO: 1162262 - RNA, 18 nt, Human
auucuccuuguguuacua

SEQ ID NO: 1162263 - RNA, 19 nt, Human
auucuccuuguguuacuaa

SEQ ID NO: 1162264 - RNA, 21 nt, Human
auucuccuuguguuacuaagu

SEQ ID NO: 1162265 - RNA, 22 nt, Human
auucuccuuguguuacuaaguu

SEQ ID NO: 1162266 - RNA, 17 nt, Human
auucucuaguuugauua

SEQ ID NO: 1162267 - RNA, 18 nt, Human
auucucuaguuugauuaa

SEQ ID NO: 1162268 - RNA, 19 nt, Human
auucucuaguuugauuaaa

SEQ ID NO: 1162269 - RNA, 19 nt, Human
auucuucugcuucagccuc

SEQ ID NO: 1162270 - RNA, 20 nt, Human
auucuucugcuucagccucc

SEQ ID NO: 1162271 - RNA, 22 nt, Human
auucuucuguacgucugacagg

SEQ ID NO: 1162272 - RNA, 17 nt, Human
auucuugccaaauauaa

SEQ ID NO: 1162273 - RNA, 14 nt, Human
auucuugcaaagua

SEQ ID NO: 1162274 - RNA, 15 nt, Human
auucuugcaaaguau

SEQ ID NO: 1162275 - RNA, 16 nt, Human
auucuugcaaaguauc

SEQ ID NO: 1162276 - RNA, 11 nt, Human
auuaaauuaug

SEQ ID NO: 1162277 - RNA, 19 nt, Human
auuaaaugcccagccccuu

SEQ ID NO: 1162278 - RNA, 19 nt, Human
auuaugaauuacauuugua

SEQ ID NO: 1162279 - RNA, 20 nt, Human
auuaugaauuacauuuguau

SEQ ID NO: 1162280 - RNA, 22 nt, Human
auuaugaauuacauuuguauaa

SEQ ID NO: 1162281 - RNA, 18 nt, Human
auucaacagguuuuccug

SEQ ID NO: 1162282 - RNA, 14 nt, Human
auuucuaugaaaua

SEQ ID NO: 1162283 - RNA, 16 nt, Human
auuuaaugaaagacug

SEQ ID NO: 1162284 - RNA, 20 nt, Human
auuuaaugaaagacuguaca

SEQ ID NO: 1162285 - RNA, 21 nt, Human
auuuaaugaaagacuguacaa

SEQ ID NO: 1162286 - RNA, 18 nt, Human
caacucaccccagcccca

SEQ ID NO: 1162287 - RNA, 14 nt, Human
caacucuccuccag

SEQ ID NO: 1162288 - RNA, 22 nt, Human
caagaauugaagcaggacuaaa

SEQ ID NO: 1162289 - RNA, 17 nt, Human
caagaccacguuucuaa

SEQ ID NO: 1162290 - RNA, 18 nt, Human
caagaccacguuucuaaa

SEQ ID NO: 1162291 - RNA, 19 nt, Human
caagacccaaaaggcagaa

SEQ ID NO: 1162292 - RNA, 19 nt, Human
caaaguaucccuacuguaa

SEQ ID NO: 1162293 - RNA, 21 nt, Human
caaaguaucccuacuguaauu

SEQ ID NO: 1162294 - RNA, 14 nt, Human
caaagauauuuugc

SEQ ID NO: 1162295 - RNA, 16 nt, Human
caaagauauuuugcuu

SEQ ID NO: 1162296 - RNA, 18 nt, Human
caaagcagugcaugcugu

SEQ ID NO: 1162297 - RNA, 21 nt, Human
caaagcagugcaugcuguccc

SEQ ID NO: 1162298 - RNA, 22 nt, Human
caaagcagugcaugcugucccu

SEQ ID NO: 1162299 - RNA, 18 nt, Human
caaagauauuuugcuuug

SEQ ID NO: 1162300 - RNA, 14 nt, Human
caaacccuucagug

SEQ ID NO: 1162301 - RNA, 21 nt, Human
caaaaggauaaugaauacuuu

SEQ ID NO: 1162302 - RNA, 17 nt, Human
caaacauauauaacaau

SEQ ID NO: 1162303 - RNA, 15 nt, Human
auuuuuauauuugaa

SEQ ID NO: 1162304 - RNA, 16 nt, Human
auuuuuauauuugaaa

SEQ ID NO: 1162305 - RNA, 16 nt, Human
auuuuuuugagacaga

SEQ ID NO: 1162306 - RNA, 18 nt, Human
auuuuuuuuuccuucagu

SEQ ID NO: 1162307 - RNA, 20 nt, Human
auuuuuuuuuccuucagugc

SEQ ID NO: 1162308 - RNA, 22 nt, Human
auuuuuuuuuccuucagugccu

SEQ ID NO: 1162309 - RNA, 23 nt, Human
auuuuuuuuuccuucagugccuu

SEQ ID NO: 1162310 - RNA, 21 nt, Human
auuuuauaucaauuuaaaaaa

SEQ ID NO: 1162311 - RNA, 19 nt, Human
auuuuuaagugcugcauuu

SEQ ID NO: 1162312 - RNA, 16 nt, Human
auuuuuaagugcugca

SEQ ID NO: 1162313 - RNA, 18 nt, Human
auuuuuaagugcugcauu

SEQ ID NO: 1162314 - RNA, 14 nt, Human
auuuuuagacagag

SEQ ID NO: 1162315 - RNA, 16 nt, Human
cccaggaaaggcucca

SEQ ID NO: 1162316 - RNA, 19 nt, Human
cccaggaaaggcuccagga

SEQ ID NO: 1162317 - RNA, 17 nt, Human
cccaggaaaggcuccag

SEQ ID NO: 1162318 - RNA, 18 nt, Human
cccaggaaaggcuccagg

SEQ ID NO: 1162319 - RNA, 22 nt, Human
cccaggcuuagucacugagaca

SEQ ID NO: 1162320 - RNA, 21 nt, Human
cccauccucuguacagagccc

SEQ ID NO: 1162321 - RNA, 22 nt, Human
cccauccucuguacagagccca

SEQ ID NO: 1162322 - RNA, 15 nt, Human
ccccagauugcaaca

SEQ ID NO: 1162323 - RNA, 20 nt, Human
ccccagauugcaacaggcug

SEQ ID NO: 1162324 - RNA, 21 nt, Human
ccccagauugcaacaggcugg

SEQ ID NO: 1162325 - RNA, 10 nt, Human
ccccagcccc

SEQ ID NO: 1162326 - RNA, 20 nt, Human
cccauucugccugcccaggc

SEQ ID NO: 1162327 - RNA, 19 nt, Human
cccauucugccugcccagg

SEQ ID NO: 1162328 - RNA, 14 nt, Human
cccauucugccugc

SEQ ID NO: 1162329 - RNA, 15 nt, Human
cccauucugccugcc

SEQ ID NO: 1162330 - RNA, 15 nt, Human
cccauuugcuccuuu

SEQ ID NO: 1162331 - RNA, 14 nt, Human
ccccgcacugggcu

SEQ ID NO: 1162332 - RNA, 23 nt, Human
ccccgacccuugccgucuaccug

SEQ ID NO: 1162333 - RNA, 20 nt, Human
cccucaacucuccuccagag

SEQ ID NO: 1162334 - RNA, 16 nt, Human
cccucaacucuccucc

SEQ ID NO: 1162335 - RNA, 18 nt, Human
cccgggaagggggcuggg

SEQ ID NO: 1162336 - RNA, 21 nt, Human
cccgggaagggggcugggaca

SEQ ID NO: 1162337 - RNA, 22 nt, Human
cccgggaagggggcugggacau

SEQ ID NO: 1162338 - RNA, 16 nt, Human
cccucaacaccucugc

SEQ ID NO: 1162339 - RNA, 11 nt, Human
cccggcuccag

SEQ ID NO: 1162340 - RNA, 15 nt, Human
cccgggaagggggcu

SEQ ID NO: 1162341 - RNA, 15 nt, Human
cccggccccugcugg

SEQ ID NO: 1162342 - RNA, 16 nt, Human
cccggccccugcuggu

SEQ ID NO: 1162343 - RNA, 13 nt, Human
ccccuucugaccc

SEQ ID NO: 1162344 - RNA, 14 nt, Human
ccccuucugaccca

SEQ ID NO: 1162345 - RNA, 16 nt, Human
ccccuucugacccaug

SEQ ID NO: 1162346 - RNA, 17 nt, Human
cccgaauagcugggacu

SEQ ID NO: 1162347 - RNA, 18 nt, Human
cccgaauagcugggacua

SEQ ID NO: 1162348 - RNA, 22 nt, Human
cccgaauagcugggacuacagg

SEQ ID NO: 1162349 - RNA, 15 nt, Human
ccccugacaacacuc

SEQ ID NO: 1162350 - RNA, 13 nt, Human
ccccugcacucca

SEQ ID NO: 1162351 - RNA, 14 nt, Human
ccccugccacccug

SEQ ID NO: 1162352 - RNA, 16 nt, Human
ccccugccacccuggg

SEQ ID NO: 1162353 - RNA, 20 nt, Human
ccaugaggaacaaggcaagg

SEQ ID NO: 1162354 - RNA, 23 nt, Human
ccaugaggaacaaggcaaggcug

SEQ ID NO: 1162355 - RNA, 13 nt, Human
ccaugaguccccu

SEQ ID NO: 1162356 - RNA, 19 nt, Human
ccauccagguucagcuugu

SEQ ID NO: 1162357 - RNA, 18 nt, Human
ccaguuggucccccuucc

SEQ ID NO: 1162358 - RNA, 20 nt, Human
ccaguuggucccccuuccau

SEQ ID NO: 1162359 - RNA, 20 nt, Human
ccaucccaaacccuucagug

SEQ ID NO: 1162360 - RNA, 20 nt, Human
ccaucccauaugccugggca

SEQ ID NO: 1162361 - RNA, 21 nt, Human
ccaucccauaugccugggcag

SEQ ID NO: 1162362 - RNA, 13 nt, Human
ccaguuggucccc

SEQ ID NO: 1162363 - RNA, 15 nt, Human
cccaacucaccccag

SEQ ID NO: 1162364 - RNA, 16 nt, Human
cccaacucaccccagc

SEQ ID NO: 1162365 - RNA, 17 nt, Human
cccaacucaccccagcc

SEQ ID NO: 1162366 - RNA, 20 nt, Human
cccaacucaccccagcccca

SEQ ID NO: 1162367 - RNA, 13 nt, Human
cccaacuccagaa

SEQ ID NO: 1162368 - RNA, 13 nt, Human
cccaagcucugcu

SEQ ID NO: 1162369 - RNA, 14 nt, Human
cccaagcucugcuc

SEQ ID NO: 1162370 - RNA, 15 nt, Human
cccaagcucugcucc

SEQ ID NO: 1162371 - RNA, 12 nt, Human
cccacccccacc

SEQ ID NO: 1162372 - RNA, 13 nt, Human
cccacucccugca

SEQ ID NO: 1162373 - RNA, 23 nt, Human
cccacugcuuuuggucuguguga

SEQ ID NO: 1162374 - RNA, 12 nt, Human
ccaggcaggucu

SEQ ID NO: 1162375 - RNA, 14 nt, Human
ccaggcaggucuug

SEQ ID NO: 1162376 - RNA, 23 nt, Human
ccaggcaggucuugaacuccugg

SEQ ID NO: 1162377 - RNA, 12 nt, Human
ccaggcuggcgu

SEQ ID NO: 1162378 - RNA, 16 nt, Human
ccaggcuggcgugcag

SEQ ID NO: 1162379 - RNA, 12 nt, Human
ccagcagaaaug

SEQ ID NO: 1162380 - RNA, 12 nt, Human
ccagcagagcac

SEQ ID NO: 1162381 - RNA, 13 nt, Human
ccagcagagcacc

SEQ ID NO: 1162382 - RNA, 14 nt, Human
ccagcagagcaccu

SEQ ID NO: 1162383 - RNA, 17 nt, Human
ccagccccagugcccac

SEQ ID NO: 1162384 - RNA, 15 nt, Human
ccagccccauccucu

SEQ ID NO: 1162385 - RNA, 17 nt, Human
ccagccccauccucugu

SEQ ID NO: 1162386 - RNA, 18 nt, Human
ccagccccauccucugua

SEQ ID NO: 1162387 - RNA, 23 nt, Human
ccagccccuucugacccaugcug

SEQ ID NO: 1162388 - RNA, 24 nt, Human
ccagccccuucugacccaugcugc

SEQ ID NO: 1162389 - RNA, 18 nt, Human
ccugcccaccuggccucu

SEQ ID NO: 1162390 - RNA, 19 nt, Human
ccugcccaccuggccucug

SEQ ID NO: 1162391 - RNA, 19 nt, Human
ccugcccaggccccugcca

SEQ ID NO: 1162392 - RNA, 21 nt, Human
ccugcccaggccccugccacc

SEQ ID NO: 1162393 - RNA, 22 nt, Human
ccugcccaggccccugccaccc

SEQ ID NO: 1162394 - RNA, 15 nt, Human
ccugccucagccucc

SEQ ID NO: 1162395 - RNA, 16 nt, Human
ccugccucagccuccc

SEQ ID NO: 1162396 - RNA, 17 nt, Human
ccugcccaccuggccuc

SEQ ID NO: 1162397 - RNA, 12 nt, Human
ccugcaggcagc

SEQ ID NO: 1162398 - RNA, 13 nt, Human
ccugcaggcagcc

SEQ ID NO: 1162399 - RNA, 14 nt, Human
ccugcaggcagcca

SEQ ID NO: 1162400 - RNA, 15 nt, Human
ccugcaggcagccag

SEQ ID NO: 1162401 - RNA, 19 nt, Human
ccucuuucccucccuuccu

SEQ ID NO: 1162402 - RNA, 15 nt, Human
ccucuuugagugaag

SEQ ID NO: 1162403 - RNA, 16 nt, Human
ccucuuugagugaagc

SEQ ID NO: 1162404 - RNA, 15 nt, Human
ccuggggagaaagua

SEQ ID NO: 1162405 - RNA, 13 nt, Human
ccugguguggaag

SEQ ID NO: 1162406 - RNA, 18 nt, Human
ccugguggcagugggagc

SEQ ID NO: 1162407 - RNA, 19 nt, Human
ccugguggcagugggagcu

SEQ ID NO: 1162408 - RNA, 20 nt, Human
ccugguggcagugggagcug

SEQ ID NO: 1162409 - RNA, 15 nt, Human
ccuggauggggcugc

SEQ ID NO: 1162410 - RNA, 17 nt, Human
ccuggauggggcugcac

SEQ ID NO: 1162411 - RNA, 18 nt, Human
ccuggauggggcugcacc

SEQ ID NO: 1162412 - RNA, 18 nt, Human
ccuggccccucagggucc

SEQ ID NO: 1162413 - RNA, 20 nt, Human
ccuggccccucagggucccu

SEQ ID NO: 1162414 - RNA, 21 nt, Human
ccuggccccucagggucccug

SEQ ID NO: 1162415 - RNA, 17 nt, Human
ccugucucuacuaaaaa

SEQ ID NO: 1162416 - RNA, 10 nt, Human
ccucaggccu

SEQ ID NO: 1162417 - RNA, 12 nt, Human
ccucaggcaggu

SEQ ID NO: 1162418 - RNA, 18 nt, Human
ccucaggcaggugggaug

SEQ ID NO: 1162419 - RNA, 16 nt, Human
ccucaaccuccugggc

SEQ ID NO: 1162420 - RNA, 20 nt, Human
ccucaagugauucuccugcc

SEQ ID NO: 1162421 - RNA, 23 nt, Human
ccucaagugauucuccugccuca

SEQ ID NO: 1162422 - RNA, 17 nt, Human
ccucccaucacccgcua

SEQ ID NO: 1162423 - RNA, 16 nt, Human
ccuccaagaccuucuc

SEQ ID NO: 1162424 - RNA, 17 nt, Human
ccuccaagaccuucucc

SEQ ID NO: 1162425 - RNA, 19 nt, Human
ccuccaagaccuucuccuu

SEQ ID NO: 1162426 - RNA, 20 nt, Human
ccuccaagaccuucuccuuc

SEQ ID NO: 1162427 - RNA, 12 nt, Human
ccucccaucacc

SEQ ID NO: 1162428 - RNA, 16 nt, Human
ccucaacaccucugca

SEQ ID NO: 1162429 - RNA, 15 nt, Human
ccucaaccuccuggg

SEQ ID NO: 1162430 - RNA, 21 nt, Human
ccucaacucuccuccagaguc

SEQ ID NO: 1162431 - RNA, 23 nt, Human
ccucaacucuccuccagagucag

SEQ ID NO: 1162432 - RNA, 16 nt, Human
ccucccuucucuucac

SEQ ID NO: 1162433 - RNA, 14 nt, Human
ccuccgccucuugg

SEQ ID NO: 1162434 - RNA, 23 nt, Human
ccuccuuugugaggaagccgcug

SEQ ID NO: 1162435 - RNA, 18 nt, Human
ccuccuuuucacaguucu

SEQ ID NO: 1162436 - RNA, 15 nt, Human
ccucgaacuggcugc

SEQ ID NO: 1162437 - RNA, 14 nt, Human
cccuucucuccagc

SEQ ID NO: 1162438 - RNA, 19 nt, Human
cccuucucuccagccccug

SEQ ID NO: 1162439 - RNA, 21 nt, Human
cccuuuuuuggcugcugaagg

SEQ ID NO: 1162440 - RNA, 22 nt, Human
cccuuuuuuggcugcugaaggc

SEQ ID NO: 1162441 - RNA, 23 nt, Human
cccuuuuuuggcugcugaaggcu

SEQ ID NO: 1162442 - RNA, 14 nt, Human
cccuccuuucacca

SEQ ID NO: 1162443 - RNA, 21 nt, Human
cccugugaguacuacaguccu

SEQ ID NO: 1162444 - RNA, 23 nt, Human
cccugugaguacuacaguccucc

SEQ ID NO: 1162445 - RNA, 15 nt, Human
cccugugauggggcc

SEQ ID NO: 1162446 - RNA, 17 nt, Human
cccugugauggggcccu

SEQ ID NO: 1162447 - RNA, 15 nt, Human
cccugugggccccca

SEQ ID NO: 1162448 - RNA, 14 nt, Human
ccgcagcccugcag

SEQ ID NO: 1162449 - RNA, 18 nt, Human
ccgcagcccugcagaggg

SEQ ID NO: 1162450 - RNA, 23 nt, Human
ccgcagcccugcagagggcacag

SEQ ID NO: 1162451 - RNA, 17 nt, Human
ccggccaccugcggugc

SEQ ID NO: 1162452 - RNA, 18 nt, Human
ccggccaccugcggugcu

SEQ ID NO: 1162453 - RNA, 18 nt, Human
ccggcaggguccuagaaa

SEQ ID NO: 1162454 - RNA, 22 nt, Human
ccuagccuuagaagucacacag

SEQ ID NO: 1162455 - RNA, 23 nt, Human
ccuagccugugccucugggacug

SEQ ID NO: 1162456 - RNA, 19 nt, Human
ccuagccuuagaagucaca

SEQ ID NO: 1162457 - RNA, 18 nt, Human
cuagcauacguacacauu

SEQ ID NO: 1162458 - RNA, 19 nt, Human
cuagcauacguacacauuu

SEQ ID NO: 1162459 - RNA, 20 nt, Human
cuagcauacguacacauuuu

SEQ ID NO: 1162460 - RNA, 19 nt, Human
cuagccagaggagagagga

SEQ ID NO: 1162461 - RNA, 13 nt, Human
cuaggccuggcca

SEQ ID NO: 1162462 - RNA, 14 nt, Human
cuaggccuggccag

SEQ ID NO: 1162463 - RNA, 15 nt, Human
cuaggccuggccaga

SEQ ID NO: 1162464 - RNA, 18 nt, Human
cuaggccuggccagaugc

SEQ ID NO: 1162465 - RNA, 19 nt, Human
cuaggccuggccagaugca

SEQ ID NO: 1162466 - RNA, 12 nt, Human
cuaggccugggg

SEQ ID NO: 1162467 - RNA, 13 nt, Human
cuaggccugggga

SEQ ID NO: 1162468 - RNA, 17 nt, Human
cuaguuugauuaaauuc

SEQ ID NO: 1162469 - RNA, 19 nt, Human
cuaguuugauuaaauucuu

SEQ ID NO: 1162470 - RNA, 14 nt, Human
cuagggaagauaau

SEQ ID NO: 1162471 - RNA, 20 nt, Human
cuaguuugauuaaauucuug

SEQ ID NO: 1162472 - RNA, 21 nt, Human
cuaguuugauuaaauucuugc

SEQ ID NO: 1162473 - RNA, 17 nt, Human
cuaccuuuguauucucu

SEQ ID NO: 1162474 - RNA, 16 nt, Human
cuaccugaggggccuc

SEQ ID NO: 1162475 - RNA, 19 nt, Human
cuaccugaggggccucuua

SEQ ID NO: 1162476 - RNA, 23 nt, Human
cuaccugaggggccucuuauggg

SEQ ID NO: 1162477 - RNA, 13 nt, Human
cucaccuccugcu

SEQ ID NO: 1162478 - RNA, 13 nt, Human
cucaccucucccu

SEQ ID NO: 1162479 - RNA, 14 nt, Human
cucaccucucccuu

SEQ ID NO: 1162480 - RNA, 15 nt, Human
cucaccucucccuug

SEQ ID NO: 1162481 - RNA, 16 nt, Human
cucaccucucccuugg

SEQ ID NO: 1162482 - RNA, 17 nt, Human
cucaccucucccuugga

SEQ ID NO: 1162483 - RNA, 14 nt, Human
cucaccuccugcug

SEQ ID NO: 1162484 - RNA, 13 nt, Human
cucaccugccccu

SEQ ID NO: 1162485 - RNA, 14 nt, Human
cucaccugccccuc

SEQ ID NO: 1162486 - RNA, 16 nt, Human
cucaccugccccucaa

SEQ ID NO: 1162487 - RNA, 18 nt, Human
cucaccugccccucaacu

SEQ ID NO: 1162488 - RNA, 19 nt, Human
cucagaaaacaaggaugaa

SEQ ID NO: 1162489 - RNA, 23 nt, Human
cucagaaaacaaggaugaauuaa

SEQ ID NO: 1162490 - RNA, 14 nt, Human
cucacacaugagca

SEQ ID NO: 1162491 - RNA, 21 nt, Human
cucacacaugagcaucaggcc

SEQ ID NO: 1162492 - RNA, 12 nt, Human
cucaaauaacua

SEQ ID NO: 1162493 - RNA, 14 nt, Human
cucacaaaggaugc

SEQ ID NO: 1162494 - RNA, 20 nt, Human
cuaucucccccagccccauc

SEQ ID NO: 1162495 - RNA, 19 nt, Human
cuauguaucaaugaguaac

SEQ ID NO: 1162496 - RNA, 23 nt, Human
cuaugucauuugcuggagcucug

SEQ ID NO: 1162497 - RNA, 22 nt, Human
cuauguguagggcgggaggaug

SEQ ID NO: 1162498 - RNA, 15 nt, Human
cuauguugcccaggc

SEQ ID NO: 1162499 - RNA, 16 nt, Human
cuauguugcccaggca

SEQ ID NO: 1162500 - RNA, 17 nt, Human
cuauguugcccaggcag

SEQ ID NO: 1162501 - RNA, 18 nt, Human
cucaaaaaaagaaaaaga

SEQ ID NO: 1162502 - RNA, 17 nt, Human
cgcuggggccaguuggu

SEQ ID NO: 1162503 - RNA, 20 nt, Human
cgcuggggccaguugguccc

SEQ ID NO: 1162504 - RNA, 16 nt, Human
cgccuuaaggauguuc

SEQ ID NO: 1162505 - RNA, 16 nt, Human
cgcugccccuggcagc

SEQ ID NO: 1162506 - RNA, 17 nt, Human
cgcugccccuggcagcc

SEQ ID NO: 1162507 - RNA, 18 nt, Human
cgcugccccuggcagccc

SEQ ID NO: 1162508 - RNA, 19 nt, Human
cgcugccccuggcagcccc

SEQ ID NO: 1162509 - RNA, 19 nt, Human
cgcuggaccuugaacuggg

SEQ ID NO: 1162510 - RNA, 23 nt, Human
cgcuggaccuugaacuggguacu

SEQ ID NO: 1162511 - RNA, 13 nt, Human
cgaguagcuggga

SEQ ID NO: 1162512 - RNA, 13 nt, Human
cguuaaaauacca

SEQ ID NO: 1162513 - RNA, 14 nt, Human
cuaaagcugccagc

SEQ ID NO: 1162514 - RNA, 15 nt, Human
cuaaagcugccagcc

SEQ ID NO: 1162515 - RNA, 15 nt, Human
cuaaaggcuaccuuu

SEQ ID NO: 1162516 - RNA, 16 nt, Human
cuaaaggcuaccuuug

SEQ ID NO: 1162517 - RNA, 17 nt, Human
cuaaaggcuaccuuugu

SEQ ID NO: 1162518 - RNA, 19 nt, Human
cuaaaggcuaccuuuguau

SEQ ID NO: 1162519 - RNA, 22 nt, Human
cuaaaguguauuuuuuuacuaa

SEQ ID NO: 1162520 - RNA, 13 nt, Human
cguacacauuuua

SEQ ID NO: 1162521 - RNA, 16 nt, Human
cguacacauuuuauuu

SEQ ID NO: 1162522 - RNA, 13 nt, Human
cgguguggagaag

SEQ ID NO: 1162523 - RNA, 15 nt, Human
cgguuuauauaagcu

SEQ ID NO: 1162524 - RNA, 15 nt, Human
cggagacggaguccc

SEQ ID NO: 1162525 - RNA, 24 nt, Human
cuccuuuucacaguucucuccuuc

SEQ ID NO: 1162526 - RNA, 22 nt, Human
cuccuagccugugccucuggga

SEQ ID NO: 1162527 - RNA, 16 nt, Human
cuccuuuagcgcccag

SEQ ID NO: 1162528 - RNA, 17 nt, Human
cuccuuuagcgcccagu

SEQ ID NO: 1162529 - RNA, 22 nt, Human
cuccuuuagcgcccaguugggu

SEQ ID NO: 1162530 - RNA, 11 nt, Human
cucggugccuu

SEQ ID NO: 1162531 - RNA, 13 nt, Human
cucucccuuggau

SEQ ID NO: 1162532 - RNA, 16 nt, Human
cucuccgaccagacac

SEQ ID NO: 1162533 - RNA, 21 nt, Human
cucuccgaccagacaccuuga

SEQ ID NO: 1162534 - RNA, 13 nt, Human
cucuccuccuuuu

SEQ ID NO: 1162535 - RNA, 20 nt, Human
cucuccuccuuuucacaguu

SEQ ID NO: 1162536 - RNA, 10 nt, Human
cucuccucug

SEQ ID NO: 1162537 - RNA, 12 nt, Human
cucuccucugcu

SEQ ID NO: 1162538 - RNA, 19 nt, Human
cucucuggccuucggccuc

SEQ ID NO: 1162539 - RNA, 22 nt, Human
cucucuggccuucggccuccau

SEQ ID NO: 1162540 - RNA, 14 nt, Human
cucccaccucagcc

SEQ ID NO: 1162541 - RNA, 16 nt, Human
cucccaccucagccuc

SEQ ID NO: 1162542 - RNA, 17 nt, Human
cucccaccucagccucc

SEQ ID NO: 1162543 - RNA, 18 nt, Human
cuccaggugcacaagcuc

SEQ ID NO: 1162544 - RNA, 19 nt, Human
cuccaggugcacaagcucc

SEQ ID NO: 1162545 - RNA, 20 nt, Human
cuccaggugcacaagcucca

SEQ ID NO: 1162546 - RNA, 22 nt, Human
cuccaggugcacaagcuccaag

SEQ ID NO: 1162547 - RNA, 23 nt, Human
cuccaggcuguaucccaugagcc

SEQ ID NO: 1162548 - RNA, 16 nt, Human
cuccagacacaugucc

SEQ ID NO: 1162549 - RNA, 22 nt, Human
cuccagaauuucccaaagcagu

SEQ ID NO: 1162550 - RNA, 11 nt, Human
cuccagacaca

SEQ ID NO: 1162551 - RNA, 16 nt, Human
cucagaaucucaaaua

SEQ ID NO: 1162552 - RNA, 17 nt, Human
cucagaaucucaaauaa

SEQ ID NO: 1162553 - RNA, 23 nt, Human
cuccgcuuucuacccagcgagcc

SEQ ID NO: 1162554 - RNA, 22 nt, Human
cuccgcuuucuacccagcgagc

SEQ ID NO: 1162555 - RNA, 21 nt, Human
cuccgcuuucuacccagcgag

SEQ ID NO: 1162556 - RNA, 19 nt, Human
cucccucuuucccucccuu

SEQ ID NO: 1162557 - RNA, 19 nt, Human
cuccccaugauguuuagaa

SEQ ID NO: 1162558 - RNA, 16 nt, Human
cucccucccucuuucc

SEQ ID NO: 1162559 - RNA, 15 nt, Human
cucccucuuucccuc

SEQ ID NO: 1162560 - RNA, 14 nt, Human
cugaaaauguaugu

SEQ ID NO: 1162561 - RNA, 13 nt, Human
cugacacacagcu

SEQ ID NO: 1162562 - RNA, 15 nt, Human
cugacacacagcucu

SEQ ID NO: 1162563 - RNA, 16 nt, Human
cugacacacagcucug

SEQ ID NO: 1162564 - RNA, 17 nt, Human
cugacacacagcucugu

SEQ ID NO: 1162565 - RNA, 18 nt, Human
cugacacacagcucuguc

SEQ ID NO: 1162566 - RNA, 19 nt, Human
cugacacacagcucugucc

SEQ ID NO: 1162567 - RNA, 20 nt, Human
cugacacacagcucuguccu

SEQ ID NO: 1162568 - RNA, 21 nt, Human
cugacacacagcucuguccug

SEQ ID NO: 1162569 - RNA, 22 nt, Human
cugacacacagcucuguccugg

SEQ ID NO: 1162570 - RNA, 23 nt, Human
cugacacacagcucuguccuggg

SEQ ID NO: 1162571 - RNA, 17 nt, Human
cucugcacaagcugcac

SEQ ID NO: 1162572 - RNA, 18 nt, Human
cucugcacaagcugcacc

SEQ ID NO: 1162573 - RNA, 19 nt, Human
cucugcacaagcugcaccc

SEQ ID NO: 1162574 - RNA, 14 nt, Human
cucuugagccuggg

SEQ ID NO: 1162575 - RNA, 15 nt, Human
cucuugagccuggga

SEQ ID NO: 1162576 - RNA, 16 nt, Human
cucuugagccugggag

SEQ ID NO: 1162577 - RNA, 24 nt, Human
cucuugauucauaaugacuuaagc

SEQ ID NO: 1162578 - RNA, 13 nt, Human
cugaaagaggaau

SEQ ID NO: 1162579 - RNA, 17 nt, Human
cugaaagaggaaugaag

SEQ ID NO: 1162580 - RNA, 14 nt, Human
cugaggaauccaga

SEQ ID NO: 1162581 - RNA, 19 nt, Human
cugacccugcuucaaauau

SEQ ID NO: 1162582 - RNA, 23 nt, Human
cugacccugcuucaaauauuucc

SEQ ID NO: 1162583 - RNA, 12 nt, Human
cugagcugggau

SEQ ID NO: 1162584 - RNA, 22 nt, Human
cugagcugggaugauuggaggg

SEQ ID NO: 1162585 - RNA, 23 nt, Human
cugaggaauccagacccggcugc

SEQ ID NO: 1162586 - RNA, 14 nt, Human
cugaggggccucuu

SEQ ID NO: 1162587 - RNA, 13 nt, Human
cugaggugggagg

SEQ ID NO: 1162588 - RNA, 22 nt, Human
cugaggugggaggaucucuuga

SEQ ID NO: 1162589 - RNA, 17 nt, Human
cugaguacguugugcau

SEQ ID NO: 1162590 - RNA, 17 nt, Human
cugaucucucgugauug

SEQ ID NO: 1162591 - RNA, 18 nt, Human
cugaucucucgugauuga

SEQ ID NO: 1162592 - RNA, 17 nt, Human
caaaucagcugcuacua

SEQ ID NO: 1162593 - RNA, 16 nt, Human
caaaucagcugcuacu

SEQ ID NO: 1162594 - RNA, 13 nt, Human
caaaucagcugcu

SEQ ID NO: 1162595 - RNA, 21 nt, Human
caaauguucaucaaugaauga

SEQ ID NO: 1162596 - RNA, 22 nt, Human
caaauucugcuugcuugcuuuu

SEQ ID NO: 1162597 - RNA, 21 nt, Human
caaaggaugcccaaagaugca

SEQ ID NO: 1162598 - RNA, 16 nt, Human
caaaaaaugcuugcuu

SEQ ID NO: 1162599 - RNA, 18 nt, Human
auuuuuuuacuaauagac

SEQ ID NO: 1162600 - RNA, 20 nt, Human
caaagccaaagcuaggccug

SEQ ID NO: 1162601 - RNA, 21 nt, Human
caaagccaaagcuaggccugg

SEQ ID NO: 1162602 - RNA, 22 nt, Human
caaagccaaagcuaggccuggc

SEQ ID NO: 1162603 - RNA, 16 nt, Human
caaagcuaggccuggc

SEQ ID NO: 1162604 - RNA, 17 nt, Human
caaagcuaggccuggcc

SEQ ID NO: 1162605 - RNA, 18 nt, Human
caaagcuaggccuggcca

SEQ ID NO: 1162606 - RNA, 16 nt, Human
caaagcuuguuaagau

SEQ ID NO: 1162607 - RNA, 12 nt, Human
caaaggaagcac

SEQ ID NO: 1162608 - RNA, 22 nt, Human
caaccccuucgcuccugugucu

SEQ ID NO: 1162609 - RNA, 21 nt, Human
caaccccuucgcuccuguguc

SEQ ID NO: 1162610 - RNA, 18 nt, Human
caaccccuucgcuccugu

SEQ ID NO: 1162611 - RNA, 19 nt, Human
caaccccuucgcuccugug

SEQ ID NO: 1162612 - RNA, 14 nt, Human
caaauuuacagaga

SEQ ID NO: 1162613 - RNA, 15 nt, Human
caaauuuacagagac

SEQ ID NO: 1162614 - RNA, 23 nt, Human
caacaggcugggcuucaguggca

SEQ ID NO: 1162615 - RNA, 24 nt, Human
caacaggcugggcuucaguggcag

SEQ ID NO: 1162616 - RNA, 16 nt, Human
caaauuuacagagaca

SEQ ID NO: 1162617 - RNA, 18 nt, Human
caacaggguuuuuuucca

SEQ ID NO: 1162618 - RNA, 15 nt, Human
caacagguuuuccug

SEQ ID NO: 1162619 - RNA, 19 nt, Human
caacagguuuuccugaaga

SEQ ID NO: 1162620 - RNA, 22 nt, Human
caacaucuuggucagauuugaa

SEQ ID NO: 1162621 - RNA, 19 nt, Human
caacucuccuccagaguca

SEQ ID NO: 1162622 - RNA, 16 nt, Human
caaccugauugugucu

SEQ ID NO: 1162623 - RNA, 12 nt, Human
caacccucauca

SEQ ID NO: 1162624 - RNA, 15 nt, Human
caacccucaucacca

SEQ ID NO: 1162625 - RNA, 20 nt, Human
caacucuccuccagagucag

SEQ ID NO: 1162626 - RNA, 22 nt, Human
caagccaccaacauacucccau

SEQ ID NO: 1162627 - RNA, 16 nt, Human
caagcgugagccacug

SEQ ID NO: 1162628 - RNA, 21 nt, Human
caagccaccaacauacuccca

SEQ ID NO: 1162629 - RNA, 17 nt, Human
caagcacuaaacaaaga

SEQ ID NO: 1162630 - RNA, 21 nt, Human
caaggaugaucuaggaagacu

SEQ ID NO: 1162631 - RNA, 13 nt, Human
caaggauccugag

SEQ ID NO: 1162632 - RNA, 17 nt, Human
caagcgugagccacugc

SEQ ID NO: 1162633 - RNA, 18 nt, Human
caagcgugagccacugca

SEQ ID NO: 1162634 - RNA, 19 nt, Human
caagugaaaaaggaggaag

SEQ ID NO: 1162635 - RNA, 16 nt, Human
caagugauucuccugc

SEQ ID NO: 1162636 - RNA, 17 nt, Human
caagugauucuccugcc

SEQ ID NO: 1162637 - RNA, 18 nt, Human
caagugauucuccugccu

SEQ ID NO: 1162638 - RNA, 22 nt, Human
caagugauucuccugccucagc

SEQ ID NO: 1162639 - RNA, 22 nt, Human
caagugugguagagugugccug

SEQ ID NO: 1162640 - RNA, 15 nt, Human
caaggauugcuacug

SEQ ID NO: 1162641 - RNA, 19 nt, Human
caaggauugcuacuguccu

SEQ ID NO: 1162642 - RNA, 19 nt, Human
caagggccuggccugagcu

SEQ ID NO: 1162643 - RNA, 12 nt, Human
caaggugggagg

SEQ ID NO: 1162644 - RNA, 23 nt, Human
caaggugggaggauugcuugagc

SEQ ID NO: 1162645 - RNA, 16 nt, Human
cacaaaaguuucucuu

SEQ ID NO: 1162646 - RNA, 18 nt, Human
cacaaaaguuucucuuuu

SEQ ID NO: 1162647 - RNA, 14 nt, Human
caaguuaaauaaau

SEQ ID NO: 1162648 - RNA, 20 nt, Human
caauaggaaaaacugauuuu

SEQ ID NO: 1162649 - RNA, 21 nt, Human
caauaggaaaaacugauuuuu

SEQ ID NO: 1162650 - RNA, 17 nt, Human
caauagucaaauugugu

SEQ ID NO: 1162651 - RNA, 22 nt, Human
caaugaaugaaugaauggcuaa

SEQ ID NO: 1162652 - RNA, 13 nt, Human
caaugaccuuuca

SEQ ID NO: 1162653 - RNA, 17 nt, Human
caaugcaaaccaucauu

SEQ ID NO: 1162654 - RNA, 18 nt, Human
caaugcaaaccaucauug

SEQ ID NO: 1162655 - RNA, 19 nt, Human
caaugcaaaccaucauuga

SEQ ID NO: 1162656 - RNA, 20 nt, Human
caaugcaaaccaucauugaa

SEQ ID NO: 1162657 - RNA, 23 nt, Human
caaugcacuuuguucuggcucuu

SEQ ID NO: 1162658 - RNA, 19 nt, Human
caaugugaaaagaaaaaug

SEQ ID NO: 1162659 - RNA, 17 nt, Human
cacaccgggcacucaga

SEQ ID NO: 1162660 - RNA, 12 nt, Human
cacaccagagcc

SEQ ID NO: 1162661 - RNA, 13 nt, Human
cacaccagagccc

SEQ ID NO: 1162662 - RNA, 15 nt, Human
cacaccagagcccac

SEQ ID NO: 1162663 - RNA, 13 nt, Human
cacacccagccca

SEQ ID NO: 1162664 - RNA, 13 nt, Human
cacaacuauauug

SEQ ID NO: 1162665 - RNA, 12 nt, Human
cacacacaugca

SEQ ID NO: 1162666 - RNA, 16 nt, Human
cacacacaugcauaca

SEQ ID NO: 1162667 - RNA, 17 nt, Human
cacacacaugcauacac

SEQ ID NO: 1162668 - RNA, 18 nt, Human
cacacacaugcauacaca

SEQ ID NO: 1162669 - RNA, 14 nt, Human
cacacaccagagcc

SEQ ID NO: 1162670 - RNA, 15 nt, Human
cacacaccagagccc

SEQ ID NO: 1162671 - RNA, 20 nt, Human
cacacagaaaauauacugua

SEQ ID NO: 1162672 - RNA, 21 nt, Human
cacacagaaaauauacuguaa

SEQ ID NO: 1162673 - RNA, 22 nt, Human
cacacagaaaauauacuguaaa

SEQ ID NO: 1162674 - RNA, 23 nt, Human
cacacagaaaauauacuguaaag

SEQ ID NO: 1162675 - RNA, 19 nt, Human
cacacagaggcugccucuc

SEQ ID NO: 1162676 - RNA, 21 nt, Human
cacacagaggcugccucuccc

SEQ ID NO: 1162677 - RNA, 11 nt, Human
cacacagccac

SEQ ID NO: 1162678 - RNA, 12 nt, Human
cacacagccaca

SEQ ID NO: 1162679 - RNA, 13 nt, Human
cacacagccacac

SEQ ID NO: 1162680 - RNA, 14 nt, Human
cacacagccacaca

SEQ ID NO: 1162681 - RNA, 15 nt, Human
cacacagccacacac

SEQ ID NO: 1162682 - RNA, 16 nt, Human
cacacagccacacaca

SEQ ID NO: 1162683 - RNA, 17 nt, Human
cacacagccacacacac

SEQ ID NO: 1162684 - RNA, 19 nt, Human
cacacagccacacacacag

SEQ ID NO: 1162685 - RNA, 20 nt, Human
cacacagccacacacacaga

SEQ ID NO: 1162686 - RNA, 21 nt, Human
cacacagccacacacacagaa

SEQ ID NO: 1162687 - RNA, 22 nt, Human
cacacagccacacacacagaaa

SEQ ID NO: 1162688 - RNA, 12 nt, Human
cacacagcucug

SEQ ID NO: 1162689 - RNA, 21 nt, Human
cacacuugacaucaacugcau

SEQ ID NO: 1162690 - RNA, 12 nt, Human
cacagagaaagu

SEQ ID NO: 1162691 - RNA, 16 nt, Human
cacagaguuguuacau

SEQ ID NO: 1162692 - RNA, 17 nt, Human
cacagaguuguuacauu

SEQ ID NO: 1162693 - RNA, 20 nt, Human
cacagaugggugcuuggagg

SEQ ID NO: 1162694 - RNA, 20 nt, Human
cacagaguuguuacauuuuu

SEQ ID NO: 1162695 - RNA, 21 nt, Human
cacagaguuguuacauuuuua

SEQ ID NO: 1162696 - RNA, 14 nt, Human
cacagaugggugcu

SEQ ID NO: 1162697 - RNA, 18 nt, Human
cacagaugggugcuugga

SEQ ID NO: 1162698 - RNA, 10 nt, Human
cacagccaca

SEQ ID NO: 1162699 - RNA, 11 nt, Human
cacagccacac

SEQ ID NO: 1162700 - RNA, 12 nt, Human
cacagccacaca

SEQ ID NO: 1162701 - RNA, 13 nt, Human
cacagccacacac

SEQ ID NO: 1162702 - RNA, 14 nt, Human
cacagccacacaca

SEQ ID NO: 1162703 - RNA, 15 nt, Human
cacagccacacacac

SEQ ID NO: 1162704 - RNA, 23 nt, Human
cacagaugggugcuuggaggaag

SEQ ID NO: 1162705 - RNA, 20 nt, Human
cacaggcccggcuccaggcu

SEQ ID NO: 1162706 - RNA, 23 nt, Human
cacaggcccggcuccaggcuccu

SEQ ID NO: 1162707 - RNA, 19 nt, Human
cacagugagucgaggacag

SEQ ID NO: 1162708 - RNA, 20 nt, Human
cacagugagucgaggacagg

SEQ ID NO: 1162709 - RNA, 17 nt, Human
cacauacacacacacgc

SEQ ID NO: 1162710 - RNA, 11 nt, Human
cacagccucug

SEQ ID NO: 1162711 - RNA, 20 nt, Human
cacaggaaccacaagacugc

SEQ ID NO: 1162712 - RNA, 15 nt, Human
cacaggaaguagagg

SEQ ID NO: 1162713 - RNA, 12 nt, Human
cacaggaucagu

SEQ ID NO: 1162714 - RNA, 15 nt, Human
cacaggaucagucug

SEQ ID NO: 1162715 - RNA, 16 nt, Human
cacaggaucagucuga

SEQ ID NO: 1162716 - RNA, 17 nt, Human
cacaggaucagucugau

SEQ ID NO: 1162717 - RNA, 10 nt, Human
cacaggcagg

SEQ ID NO: 1162718 - RNA, 16 nt, Human
cacaggcccggcucca

SEQ ID NO: 1162719 - RNA, 17 nt, Human
cacaggcccggcuccag

SEQ ID NO: 1162720 - RNA, 18 nt, Human
cacaggcccggcuccagg

SEQ ID NO: 1162721 - RNA, 19 nt, Human
cacaggcccggcuccaggc

SEQ ID NO: 1162722 - RNA, 21 nt, Human
cacagugagucgaggacaggg

SEQ ID NO: 1162723 - RNA, 17 nt, Human
cacaugugcacaugcac

SEQ ID NO: 1162724 - RNA, 14 nt, Human
cacaugugcacaug

SEQ ID NO: 1162725 - RNA, 15 nt, Human
cacaugugcacaugc

SEQ ID NO: 1162726 - RNA, 16 nt, Human
cacauuccugaugcuu

SEQ ID NO: 1162727 - RNA, 12 nt, Human
cacauaucuguc

SEQ ID NO: 1162728 - RNA, 14 nt, Human
cacauaucugucau

SEQ ID NO: 1162729 - RNA, 18 nt, Human
cacaucagcacgauuucu

SEQ ID NO: 1162730 - RNA, 19 nt, Human
cacaucagcacgauuucug

SEQ ID NO: 1162731 - RNA, 17 nt, Human
cacaugccucucucagg

SEQ ID NO: 1162732 - RNA, 18 nt, Human
cacaugccucucucaggc

SEQ ID NO: 1162733 - RNA, 19 nt, Human
cacaugccucucucaggcc

SEQ ID NO: 1162734 - RNA, 13 nt, Human
caccacacccagc

SEQ ID NO: 1162735 - RNA, 15 nt, Human
caccacacccagccc

SEQ ID NO: 1162736 - RNA, 17 nt, Human
caccacacccagcccac

SEQ ID NO: 1162737 - RNA, 15 nt, Human
caccacaugugcaca

SEQ ID NO: 1162738 - RNA, 18 nt, Human
caccacaugugcacaugc

SEQ ID NO: 1162739 - RNA, 19 nt, Human
caccacaugugcacaugca

SEQ ID NO: 1162740 - RNA, 14 nt, Human
caccaccucuuugg

SEQ ID NO: 1162741 - RNA, 16 nt, Human
caccacuacauucugu

SEQ ID NO: 1162742 - RNA, 17 nt, Human
caccacuacauucuguu

SEQ ID NO: 1162743 - RNA, 18 nt, Human
caccacuacauucuguua

SEQ ID NO: 1162744 - RNA, 19 nt, Human
caccacuacauucuguuaa

SEQ ID NO: 1162745 - RNA, 20 nt, Human
caccacuacauucuguuaau

SEQ ID NO: 1162746 - RNA, 14 nt, Human
caccccggccaccu

SEQ ID NO: 1162747 - RNA, 15 nt, Human
caccccggccaccug

SEQ ID NO: 1162748 - RNA, 16 nt, Human
caccccggccaccugc

SEQ ID NO: 1162749 - RNA, 17 nt, Human
caccccggccaccugcg

SEQ ID NO: 1162750 - RNA, 22 nt, Human
cacccccacccaagggccuggc

SEQ ID NO: 1162751 - RNA, 17 nt, Human
cacccaagggccuggcc

SEQ ID NO: 1162752 - RNA, 18 nt, Human
cacccaagggccuggccu

SEQ ID NO: 1162753 - RNA, 19 nt, Human
cacccaagggccuggccug

SEQ ID NO: 1162754 - RNA, 20 nt, Human
cacccaagggccuggccuga

SEQ ID NO: 1162755 - RNA, 21 nt, Human
cacccaagggccuggccugag

SEQ ID NO: 1162756 - RNA, 23 nt, Human
cacccaagggccuggccugagcu

SEQ ID NO: 1162757 - RNA, 20 nt, Human
cacccaccaucaugucuggc

SEQ ID NO: 1162758 - RNA, 22 nt, Human
cacccaccaucaugucuggcua

SEQ ID NO: 1162759 - RNA, 12 nt, Human
cacccaccucag

SEQ ID NO: 1162760 - RNA, 13 nt, Human
cacccaccucagc

SEQ ID NO: 1162761 - RNA, 14 nt, Human
cacccaccucagcc

SEQ ID NO: 1162762 - RNA, 16 nt, Human
cacccaccucagccuc

SEQ ID NO: 1162763 - RNA, 17 nt, Human
cacccaccucagccucc

SEQ ID NO: 1162764 - RNA, 13 nt, Human
caccccagcccca

SEQ ID NO: 1162765 - RNA, 21 nt, Human
ccacugcaucguuucaucuuc

SEQ ID NO: 1162766 - RNA, 23 nt, Human
ccacugcaucguuucaucuucca

SEQ ID NO: 1162767 - RNA, 20 nt, Human
ccacugcuuuuggucugugu

SEQ ID NO: 1162768 - RNA, 22 nt, Human
ccacugcuuuuggucuguguga

SEQ ID NO: 1162769 - RNA, 12 nt, Human
ccacugcucugg

SEQ ID NO: 1162770 - RNA, 13 nt, Human
ccacugcucuggu

SEQ ID NO: 1162771 - RNA, 15 nt, Human
ccacugcucugguua

SEQ ID NO: 1162772 - RNA, 23 nt, Human
ccacuggugacaugucuuuucuu

SEQ ID NO: 1162773 - RNA, 15 nt, Human
ccacugguucuucuu

SEQ ID NO: 1162774 - RNA, 14 nt, Human
ccacugugaagaga

SEQ ID NO: 1162775 - RNA, 15 nt, Human
ccacugugaagagaa

SEQ ID NO: 1162776 - RNA, 15 nt, Human
ccacugugccaugug

SEQ ID NO: 1162777 - RNA, 16 nt, Human
ccacugugccaugugc

SEQ ID NO: 1162778 - RNA, 19 nt, Human
ccacugugccaugugccag

SEQ ID NO: 1162779 - RNA, 22 nt, Human
ccagaagaaaauagugguguga

SEQ ID NO: 1162780 - RNA, 14 nt, Human
ccagacaucaacag

SEQ ID NO: 1162781 - RNA, 17 nt, Human
ccagacacauguccaag

SEQ ID NO: 1162782 - RNA, 20 nt, Human
ccagacacauguccaagaag

SEQ ID NO: 1162783 - RNA, 22 nt, Human
ccagacacauguccaagaagcc

SEQ ID NO: 1162784 - RNA, 16 nt, Human
ccagacccggcugcgu

SEQ ID NO: 1162785 - RNA, 14 nt, Human
ccagacccggcugc

SEQ ID NO: 1162786 - RNA, 15 nt, Human
ccagacccggcugcg

SEQ ID NO: 1162787 - RNA, 19 nt, Human
ccacccccacccaagggcc

SEQ ID NO: 1162788 - RNA, 14 nt, Human
ccacccuccuuuca

SEQ ID NO: 1162789 - RNA, 11 nt, Human
ccacccugcuc

SEQ ID NO: 1162790 - RNA, 12 nt, Human
ccacccugcucu

SEQ ID NO: 1162791 - RNA, 13 nt, Human
ccacccugcucuc

SEQ ID NO: 1162792 - RNA, 14 nt, Human
ccaccucucucacu

SEQ ID NO: 1162793 - RNA, 16 nt, Human
ccaccucucucacucc

SEQ ID NO: 1162794 - RNA, 19 nt, Human
ccaccucucucacuccuug

SEQ ID NO: 1162795 - RNA, 20 nt, Human
ccaccucucucacuccuuga

SEQ ID NO: 1162796 - RNA, 13 nt, Human
ccaccugccaggg

SEQ ID NO: 1162797 - RNA, 14 nt, Human
ccaccugccaggga

SEQ ID NO: 1162798 - RNA, 15 nt, Human
ccaccugccagggac

SEQ ID NO: 1162799 - RNA, 16 nt, Human
ccaccugccagggaca

SEQ ID NO: 1162800 - RNA, 13 nt, Human
ccaccuggccucu

SEQ ID NO: 1162801 - RNA, 20 nt, Human
ccaccuggccucugcacucc

SEQ ID NO: 1162802 - RNA, 14 nt, Human
ccaccuggccucug

SEQ ID NO: 1162803 - RNA, 13 nt, Human
ccaccuuggcuca

SEQ ID NO: 1162804 - RNA, 17 nt, Human
ccagcaccaucucuccu

SEQ ID NO: 1162805 - RNA, 18 nt, Human
ccagcaccaucucuccuc

SEQ ID NO: 1162806 - RNA, 16 nt, Human
ccagcaggcucucagg

SEQ ID NO: 1162807 - RNA, 17 nt, Human
ccagcaggcucucaggc

SEQ ID NO: 1162808 - RNA, 18 nt, Human
ccagcaggcucucaggcc

SEQ ID NO: 1162809 - RNA, 17 nt, Human
ccagcaagugagagcug

SEQ ID NO: 1162810 - RNA, 18 nt, Human
ccagcaagugagagcugg

SEQ ID NO: 1162811 - RNA, 19 nt, Human
ccagcaagugagagcuggg

SEQ ID NO: 1162812 - RNA, 20 nt, Human
ccagcaagugagagcugggu

SEQ ID NO: 1162813 - RNA, 14 nt, Human
ccagagcccaccuu

SEQ ID NO: 1162814 - RNA, 14 nt, Human
ccagauugcaacag

SEQ ID NO: 1162815 - RNA, 16 nt, Human
ccagauugcaacaggc

SEQ ID NO: 1162816 - RNA, 18 nt, Human
ccagauugcaacaggcug

SEQ ID NO: 1162817 - RNA, 22 nt, Human
ccagauugcaacaggcugggcu

SEQ ID NO: 1162818 - RNA, 23 nt, Human
ccagauugcaacaggcugggcuu

SEQ ID NO: 1162819 - RNA, 18 nt, Human
ccagauuucacucuccuu

SEQ ID NO: 1162820 - RNA, 19 nt, Human
ccagauuucacucuccuug

SEQ ID NO: 1162821 - RNA, 19 nt, Human
ccagcaggcucucaggcca

SEQ ID NO: 1162822 - RNA, 20 nt, Human
ccagcaggcucucaggccag

SEQ ID NO: 1162823 - RNA, 21 nt, Human
ccagcaggcucucaggccagc

SEQ ID NO: 1162824 - RNA, 23 nt, Human
ccagcaggcucucaggccagcug

SEQ ID NO: 1162825 - RNA, 16 nt, Human
ccagcccacuucugcc

SEQ ID NO: 1162826 - RNA, 17 nt, Human
ccagcccacuucugcca

SEQ ID NO: 1162827 - RNA, 19 nt, Human
ccagccccaaaacucuccu

SEQ ID NO: 1162828 - RNA, 17 nt, Human
ccagccgagauagccaa

SEQ ID NO: 1162829 - RNA, 20 nt, Human
ccagccgagauagccaaggc

SEQ ID NO: 1162830 - RNA, 22 nt, Human
ccagccgagauagccaaggcca

SEQ ID NO: 1162831 - RNA, 23 nt, Human
ccagccgagauagccaaggccaa

SEQ ID NO: 1162832 - RNA, 13 nt, Human
ccagccuggguga

SEQ ID NO: 1162833 - RNA, 23 nt, Human
ccagccuugaccauucuccaccu

SEQ ID NO: 1162834 - RNA, 13 nt, Human
ccagcgagcccug

SEQ ID NO: 1162835 - RNA, 13 nt, Human
ccagguuuaagcu

SEQ ID NO: 1162836 - RNA, 16 nt, Human
ccagguuucuaugugu

SEQ ID NO: 1162837 - RNA, 20 nt, Human
ccaguaaaugggggugcauu

SEQ ID NO: 1162838 - RNA, 21 nt, Human
ccaguaaaugggggugcauuu

SEQ ID NO: 1162839 - RNA, 22 nt, Human
ccaguaaaugggggugcauuug

SEQ ID NO: 1162840 - RNA, 23 nt, Human
ccaguaaaugggggugcauuuga

SEQ ID NO: 1162841 - RNA, 13 nt, Human
ccagugaggcucu

SEQ ID NO: 1162842 - RNA, 15 nt, Human
ccauaugccugggca

SEQ ID NO: 1162843 - RNA, 14 nt, Human
ccagugugacaagg

SEQ ID NO: 1162844 - RNA, 23 nt, Human
ccagugugacaaggauugcuacu

SEQ ID NO: 1162845 - RNA, 13 nt, Human
ccaucaagccacc

SEQ ID NO: 1162846 - RNA, 14 nt, Human
ccaucaagccacca

SEQ ID NO: 1162847 - RNA, 16 nt, Human
ccaucaagccaccaac

SEQ ID NO: 1162848 - RNA, 19 nt, Human
ccauauuaccacagacaua

SEQ ID NO: 1162849 - RNA, 18 nt, Human
ccaucaaggguacacugc

SEQ ID NO: 1162850 - RNA, 12 nt, Human
ccaucaugucug

SEQ ID NO: 1162851 - RNA, 13 nt, Human
ccaucaugucugg

SEQ ID NO: 1162852 - RNA, 12 nt, Human
ccaucauugaaa

SEQ ID NO: 1162853 - RNA, 14 nt, Human
ccaucauugaaauc

SEQ ID NO: 1162854 - RNA, 16 nt, Human
ccaucauugaaaucuu

SEQ ID NO: 1162855 - RNA, 17 nt, Human
ccaucauugaaaucuuu

SEQ ID NO: 1162856 - RNA, 18 nt, Human
ccauccugaggcuccacu

SEQ ID NO: 1162857 - RNA, 20 nt, Human
ccauccugaggcuccacuug

SEQ ID NO: 1162858 - RNA, 14 nt, Human
ccaucaugucuggc

SEQ ID NO: 1162859 - RNA, 14 nt, Human
ccaucucacacaug

SEQ ID NO: 1162860 - RNA, 15 nt, Human
ccaucucacacauga

SEQ ID NO: 1162861 - RNA, 17 nt, Human
ccaucucacacaugagc

SEQ ID NO: 1162862 - RNA, 18 nt, Human
ccaucucacacaugagca

SEQ ID NO: 1162863 - RNA, 20 nt, Human
ccaucucacacaugagcauc

SEQ ID NO: 1162864 - RNA, 21 nt, Human
ccaucucacacaugagcauca

SEQ ID NO: 1162865 - RNA, 17 nt, Human
ccaucucaccuccugcu

SEQ ID NO: 1162866 - RNA, 15 nt, Human
ccaucucuccuccuu

SEQ ID NO: 1162867 - RNA, 18 nt, Human
ccaucucaccuccugcug

SEQ ID NO: 1162868 - RNA, 15 nt, Human
ccaggaggccagccu

SEQ ID NO: 1162869 - RNA, 18 nt, Human
ccaggaggccagccuuga

SEQ ID NO: 1162870 - RNA, 20 nt, Human
ccaggaggccagccuugacc

SEQ ID NO: 1162871 - RNA, 12 nt, Human
ccaggccagagg

SEQ ID NO: 1162872 - RNA, 14 nt, Human
ccaggccccugcca

SEQ ID NO: 1162873 - RNA, 15 nt, Human
ccaggccccugccac

SEQ ID NO: 1162874 - RNA, 16 nt, Human
ccaggccccugccacc

SEQ ID NO: 1162875 - RNA, 19 nt, Human
ccaggccccugccacccug

SEQ ID NO: 1162876 - RNA, 13 nt, Human
ccaggcccucugc

SEQ ID NO: 1162877 - RNA, 14 nt, Human
ccaggcccucugcc

SEQ ID NO: 1162878 - RNA, 15 nt, Human
ccaggcccucugccc

SEQ ID NO: 1162879 - RNA, 16 nt, Human
ccaggcccucugccca

SEQ ID NO: 1162880 - RNA, 14 nt, Human
ccaggcuggucuca

SEQ ID NO: 1162881 - RNA, 21 nt, Human
ccaggcuuagucacugagaca

SEQ ID NO: 1162882 - RNA, 22 nt, Human
ccaggcuuagucacugagacag

SEQ ID NO: 1162883 - RNA, 23 nt, Human
ccaggcuuagucacugagacagc

SEQ ID NO: 1162884 - RNA, 20 nt, Human
ccagguagaggguguguaag

SEQ ID NO: 1162885 - RNA, 23 nt, Human
ccagugcccacaggaucagucug

SEQ ID NO: 1162886 - RNA, 17 nt, Human
cccacaggaucagucug

SEQ ID NO: 1162887 - RNA, 16 nt, Human
cccaagggccuggccu

SEQ ID NO: 1162888 - RNA, 17 nt, Human
cccaagggccuggccug

SEQ ID NO: 1162889 - RNA, 20 nt, Human
ccauuuugcugucccuuuuc

SEQ ID NO: 1162890 - RNA, 23 nt, Human
ccauuuuggauucuuauggacaa

SEQ ID NO: 1162891 - RNA, 12 nt, Human
cccaagggccug

SEQ ID NO: 1162892 - RNA, 14 nt, Human
cccaagggccuggc

SEQ ID NO: 1162893 - RNA, 12 nt, Human
cccaccucagcc

SEQ ID NO: 1162894 - RNA, 14 nt, Human
cccaccucagccuc

SEQ ID NO: 1162895 - RNA, 15 nt, Human
cccaccucagccucc

SEQ ID NO: 1162896 - RNA, 21 nt, Human
cccaccucagccucccaaagu

SEQ ID NO: 1162897 - RNA, 13 nt, Human
cccaccucucuca

SEQ ID NO: 1162898 - RNA, 14 nt, Human
cccaccucucucac

SEQ ID NO: 1162899 - RNA, 17 nt, Human
cccaccucucucacucc

SEQ ID NO: 1162900 - RNA, 19 nt, Human
cccaccucucucacuccuu

SEQ ID NO: 1162901 - RNA, 17 nt, Human
cccaccucagccucccg

SEQ ID NO: 1162902 - RNA, 12 nt, Human
cccaccuuggcu

SEQ ID NO: 1162903 - RNA, 15 nt, Human
cccaccuuggcucaa

SEQ ID NO: 1162904 - RNA, 22 nt, Human
cccaccuuggcucaaguccucu

SEQ ID NO: 1162905 - RNA, 14 nt, Human
cccaccuuggcugc

SEQ ID NO: 1162906 - RNA, 15 nt, Human
cccaccuuggcugca

SEQ ID NO: 1162907 - RNA, 17 nt, Human
cccacgcccccacuggu

SEQ ID NO: 1162908 - RNA, 19 nt, Human
cccacgcccccacugguga

SEQ ID NO: 1162909 - RNA, 16 nt, Human
cccaccuuggcugcag

SEQ ID NO: 1162910 - RNA, 14 nt, Human
cccacgcuggagug

SEQ ID NO: 1162911 - RNA, 13 nt, Human
ccauuugcuccuu

SEQ ID NO: 1162912 - RNA, 15 nt, Human
ccauucugccugccc

SEQ ID NO: 1162913 - RNA, 16 nt, Human
ccauucugccugccca

SEQ ID NO: 1162914 - RNA, 14 nt, Human
ccauucuccaccug

SEQ ID NO: 1162915 - RNA, 14 nt, Human
cccaguugggugga

SEQ ID NO: 1162916 - RNA, 19 nt, Human
cccaucucuacaaaaagca

SEQ ID NO: 1162917 - RNA, 12 nt, Human
cccaucugugaa

SEQ ID NO: 1162918 - RNA, 14 nt, Human
cccaugagccucag

SEQ ID NO: 1162919 - RNA, 15 nt, Human
cccaugagccucagc

SEQ ID NO: 1162920 - RNA, 15 nt, Human
ccccaccgcagacag

SEQ ID NO: 1162921 - RNA, 19 nt, Human
ccccaccgcagacaggacc

SEQ ID NO: 1162922 - RNA, 11 nt, Human
ccccacacaca

SEQ ID NO: 1162923 - RNA, 12 nt, Human
ccccacacacac

SEQ ID NO: 1162924 - RNA, 14 nt, Human
ccccacacacacac

SEQ ID NO: 1162925 - RNA, 14 nt, Human
ccccagugcccaca

SEQ ID NO: 1162926 - RNA, 15 nt, Human
ccccagugcccacag

SEQ ID NO: 1162927 - RNA, 16 nt, Human
ccccagugcccacagg

SEQ ID NO: 1162928 - RNA, 20 nt, Human
ccccagugcccacaggauca

SEQ ID NO: 1162929 - RNA, 14 nt, Human
ccccauccucugua

SEQ ID NO: 1162930 - RNA, 17 nt, Human
ccccauccucuguacag

SEQ ID NO: 1162931 - RNA, 13 nt, Human
cccccacccaagg

SEQ ID NO: 1162932 - RNA, 24 nt, Human
cccccacccaagggccuggccuga

SEQ ID NO: 1162933 - RNA, 11 nt, Human
cccccacuggu

SEQ ID NO: 1162934 - RNA, 13 nt, Human
cccccacugguga

SEQ ID NO: 1162935 - RNA, 15 nt, Human
cccccacuggugaca

SEQ ID NO: 1162936 - RNA, 17 nt, Human
cccccugacaacacuca

SEQ ID NO: 1162937 - RNA, 19 nt, Human
cccccugacaacacucauu

SEQ ID NO: 1162938 - RNA, 12 nt, Human
cccccagccugc

SEQ ID NO: 1162939 - RNA, 15 nt, Human
ccccucaacaccucu

SEQ ID NO: 1162940 - RNA, 16 nt, Human
ccccucaacaccucug

SEQ ID NO: 1162941 - RNA, 23 nt, Human
ccccucaacucuccuccagaguc

SEQ ID NO: 1162942 - RNA, 16 nt, Human
ccccucagggucccug

SEQ ID NO: 1162943 - RNA, 12 nt, Human
ccccuccaugug

SEQ ID NO: 1162944 - RNA, 17 nt, Human
ccccugcccggcugcgg

SEQ ID NO: 1162945 - RNA, 19 nt, Human
ccccugcccggcugcggaa

SEQ ID NO: 1162946 - RNA, 14 nt, Human
ccccugcugggugu

SEQ ID NO: 1162947 - RNA, 17 nt, Human
ccccugcuggguguggc

SEQ ID NO: 1162948 - RNA, 11 nt, Human
ccccugcuggu

SEQ ID NO: 1162949 - RNA, 13 nt, Human
ccccugcugguuc

SEQ ID NO: 1162950 - RNA, 15 nt, Human
ccccugcugguucag

SEQ ID NO: 1162951 - RNA, 20 nt, Human
ccccugcugguucaggguug

SEQ ID NO: 1162952 - RNA, 15 nt, Human
ccccuggaugcagcc

SEQ ID NO: 1162953 - RNA, 18 nt, Human
ccccuggaugcagccuca

SEQ ID NO: 1162954 - RNA, 19 nt, Human
ccccuggaugcagccucac

SEQ ID NO: 1162955 - RNA, 20 nt, Human
ccccuguucuggcagaguug

SEQ ID NO: 1162956 - RNA, 13 nt, Human
ccccuuccaugga

SEQ ID NO: 1162957 - RNA, 20 nt, Human
ccccuuccauggacuuuguu

SEQ ID NO: 1162958 - RNA, 20 nt, Human
cccgcccaggcuuagucacu

SEQ ID NO: 1162959 - RNA, 22 nt, Human
cccgcccaggcuuagucacuga

SEQ ID NO: 1162960 - RNA, 23 nt, Human
cccgcuaagagggagggagggcu

SEQ ID NO: 1162961 - RNA, 19 nt, Human
cccucugcccacucccugc

SEQ ID NO: 1162962 - RNA, 11 nt, Human
cccucugccca

SEQ ID NO: 1162963 - RNA, 15 nt, Human
cccucugcccacucc

SEQ ID NO: 1162964 - RNA, 18 nt, Human
cccucugcccacucccug

SEQ ID NO: 1162965 - RNA, 12 nt, Human
cccucuggggcu

SEQ ID NO: 1162966 - RNA, 12 nt, Human
cccucuuucccu

SEQ ID NO: 1162967 - RNA, 17 nt, Human
cccucuuucccucccuu

SEQ ID NO: 1162968 - RNA, 20 nt, Human
cccucuuucccucccuuccu

SEQ ID NO: 1162969 - RNA, 13 nt, Human
cccugaggcccag

SEQ ID NO: 1162970 - RNA, 22 nt, Human
cccugcucuccgaccagacacc

SEQ ID NO: 1162971 - RNA, 21 nt, Human
cccugcucuccgaccagacac

SEQ ID NO: 1162972 - RNA, 12 nt, Human
cccugaggccca

SEQ ID NO: 1162973 - RNA, 11 nt, Human
cccugccuccu

SEQ ID NO: 1162974 - RNA, 14 nt, Human
cccugccuccuuug

SEQ ID NO: 1162975 - RNA, 21 nt, Human
cccugguggcagcucaccucu

SEQ ID NO: 1162976 - RNA, 13 nt, Human
cccugguggcagu

SEQ ID NO: 1162977 - RNA, 14 nt, Human
cccugguggcagug

SEQ ID NO: 1162978 - RNA, 15 nt, Human
cccugguggcagugg

SEQ ID NO: 1162979 - RNA, 13 nt, Human
cccuguucuggca

SEQ ID NO: 1162980 - RNA, 14 nt, Human
cccuguucuggcag

SEQ ID NO: 1162981 - RNA, 19 nt, Human
cccuguuuguuucugaaag

SEQ ID NO: 1162982 - RNA, 17 nt, Human
cccuuaccugccaggaa

SEQ ID NO: 1162983 - RNA, 20 nt, Human
cccuuaccugccaggaagcc

SEQ ID NO: 1162984 - RNA, 23 nt, Human
cccuuaccugccaggaagccagc

SEQ ID NO: 1162985 - RNA, 14 nt, Human
cccuuagcagggaa

SEQ ID NO: 1162986 - RNA, 15 nt, Human
cccuuacgugagucc

SEQ ID NO: 1162987 - RNA, 17 nt, Human
cccuuacgugaguccug

SEQ ID NO: 1162988 - RNA, 23 nt, Human
cccuuagcagggaaacagcuaau

SEQ ID NO: 1162989 - RNA, 12 nt, Human
cccuuccaugga

SEQ ID NO: 1162990 - RNA, 15 nt, Human
cccuugaugaagaag

SEQ ID NO: 1162991 - RNA, 14 nt, Human
ccgaguagcuggga

SEQ ID NO: 1162992 - RNA, 16 nt, Human
ccgaguagcugggacu

SEQ ID NO: 1162993 - RNA, 19 nt, Human
ccgagcuuugaaaauucag

SEQ ID NO: 1162994 - RNA, 23 nt, Human
ccgcacugggcuuggggaccaga

SEQ ID NO: 1162995 - RNA, 15 nt, Human
ccgcagacaggacca

SEQ ID NO: 1162996 - RNA, 18 nt, Human
ccgagauagccaaggcca

SEQ ID NO: 1162997 - RNA, 15 nt, Human
ccgagauugcaccac

SEQ ID NO: 1162998 - RNA, 19 nt, Human
ccgagauugcaccacugca

SEQ ID NO: 1162999 - RNA, 21 nt, Human
ccgagauugcaccacugcacu

SEQ ID NO: 1163000 - RNA, 14 nt, Human
ccgcuggggccagu

SEQ ID NO: 1163001 - RNA, 11 nt, Human
ccgcuggggcc

SEQ ID NO: 1163002 - RNA, 16 nt, Human
ccggcuccaggcuccu

SEQ ID NO: 1163003 - RNA, 21 nt, Human
ccggcuccaggcuccuuuagc

SEQ ID NO: 1163004 - RNA, 22 nt, Human
ccgggcacucagaagacacuga

SEQ ID NO: 1163005 - RNA, 13 nt, Human
ccgggccacagag

SEQ ID NO: 1163006 - RNA, 14 nt, Human
ccgggcucugccuc

SEQ ID NO: 1163007 - RNA, 15 nt, Human
ccgggcucugccucc

SEQ ID NO: 1163008 - RNA, 18 nt, Human
ccgggcucugccucccau

SEQ ID NO: 1163009 - RNA, 22 nt, Human
ccgggcucugccucccaucacc

SEQ ID NO: 1163010 - RNA, 18 nt, Human
ccgugaggccagagacac

SEQ ID NO: 1163011 - RNA, 15 nt, Human
ccuaacgaaguaucc

SEQ ID NO: 1163012 - RNA, 21 nt, Human
ccuacaguugaaaaacagcug

SEQ ID NO: 1163013 - RNA, 13 nt, Human
ccugaaagaggaa

SEQ ID NO: 1163014 - RNA, 13 nt, Human
ccugaaagcccug

SEQ ID NO: 1163015 - RNA, 14 nt, Human
ccugaaagcccuga

SEQ ID NO: 1163016 - RNA, 18 nt, Human
ccugaaagcccugagcuu

SEQ ID NO: 1163017 - RNA, 18 nt, Human
ccugaaggccccgcccag

SEQ ID NO: 1163018 - RNA, 19 nt, Human
ccugaaggccccgcccagg

SEQ ID NO: 1163019 - RNA, 20 nt, Human
ccugaaggccccgcccaggc

SEQ ID NO: 1163020 - RNA, 21 nt, Human
ccugaaggccccgcccaggcu

SEQ ID NO: 1163021 - RNA, 22 nt, Human
ccugaaggccccgcccaggcuu

SEQ ID NO: 1163022 - RNA, 15 nt, Human
ccugagcugggauga

SEQ ID NO: 1163023 - RNA, 22 nt, Human
ccugaagucuuuguacagacaa

SEQ ID NO: 1163024 - RNA, 20 nt, Human
ccugaagucacacagugagu

SEQ ID NO: 1163025 - RNA, 15 nt, Human
ccugagccagauuuc

SEQ ID NO: 1163026 - RNA, 16 nt, Human
ccugagccagauuuca

SEQ ID NO: 1163027 - RNA, 18 nt, Human
ccugagccagauuucacu

SEQ ID NO: 1163028 - RNA, 20 nt, Human
ccugagccagauuucacucu

SEQ ID NO: 1163029 - RNA, 12 nt, Human
ccugagcuggga

SEQ ID NO: 1163030 - RNA, 15 nt, Human
ccugaggcccagagg

SEQ ID NO: 1163031 - RNA, 16 nt, Human
ccugaggcccagaggg

SEQ ID NO: 1163032 - RNA, 17 nt, Human
ccugaggcccagagggc

SEQ ID NO: 1163033 - RNA, 18 nt, Human
ccugaggcccagagggcc

SEQ ID NO: 1163034 - RNA, 13 nt, Human
ccugaggcuccac

SEQ ID NO: 1163035 - RNA, 14 nt, Human
ccugaggcuccacu

SEQ ID NO: 1163036 - RNA, 17 nt, Human
ccugaggcuccacuugg

SEQ ID NO: 1163037 - RNA, 13 nt, Human
ccugaggcugggc

SEQ ID NO: 1163038 - RNA, 14 nt, Human
ccugaggcugggcu

SEQ ID NO: 1163039 - RNA, 15 nt, Human
ccugaggcugggcuc

SEQ ID NO: 1163040 - RNA, 16 nt, Human
ccugaggcugggcucc

SEQ ID NO: 1163041 - RNA, 16 nt, Human
ccugcacuugcagacu

SEQ ID NO: 1163042 - RNA, 19 nt, Human
ccugccaauggacuaacuu

SEQ ID NO: 1163043 - RNA, 12 nt, Human
ccugccacccug

SEQ ID NO: 1163044 - RNA, 13 nt, Human
ccugccacccugg

SEQ ID NO: 1163045 - RNA, 14 nt, Human
ccugccacccuggg

SEQ ID NO: 1163046 - RNA, 16 nt, Human
ccugccacccugggga

SEQ ID NO: 1163047 - RNA, 22 nt, Human
ccugccacccuggggagaaagu

SEQ ID NO: 1163048 - RNA, 17 nt, Human
ccugccccugagcccau

SEQ ID NO: 1163049 - RNA, 14 nt, Human
ccugcccggcugcg

SEQ ID NO: 1163050 - RNA, 16 nt, Human
ccugcccggcugcgga

SEQ ID NO: 1163051 - RNA, 12 nt, Human
ccugccaggcau

SEQ ID NO: 1163052 - RNA, 15 nt, Human
ccugccaggcauggu

SEQ ID NO: 1163053 - RNA, 11 nt, Human
ccugcccugug

SEQ ID NO: 1163054 - RNA, 12 nt, Human
ccugcccugugg

SEQ ID NO: 1163055 - RNA, 14 nt, Human
ccugcccugugggc

SEQ ID NO: 1163056 - RNA, 12 nt, Human
ccugccucagcc

SEQ ID NO: 1163057 - RNA, 13 nt, Human
ccugccucagccu

SEQ ID NO: 1163058 - RNA, 14 nt, Human
ccugccucagccuc

SEQ ID NO: 1163059 - RNA, 14 nt, Human
ccugccuguugggc

SEQ ID NO: 1163060 - RNA, 15 nt, Human
ccugcccugugggcc

SEQ ID NO: 1163061 - RNA, 19 nt, Human
ccugcccuuaccugccagg

SEQ ID NO: 1163062 - RNA, 21 nt, Human
ccugcccuuaccugccaggaa

SEQ ID NO: 1163063 - RNA, 22 nt, Human
ccugcccuuaccugccaggaag

SEQ ID NO: 1163064 - RNA, 22 nt, Human
ccugccuguugggccaggagcc

SEQ ID NO: 1163065 - RNA, 19 nt, Human
ccuggcacccggccccugc

SEQ ID NO: 1163066 - RNA, 20 nt, Human
ccuggcacccggccccugcu

SEQ ID NO: 1163067 - RNA, 21 nt, Human
ccuggcacccggccccugcug

SEQ ID NO: 1163068 - RNA, 12 nt, Human
ccuggcacugcu

SEQ ID NO: 1163069 - RNA, 18 nt, Human
ccugccuguugggccagg

SEQ ID NO: 1163070 - RNA, 19 nt, Human
ccugccuguugggccagga

SEQ ID NO: 1163071 - RNA, 20 nt, Human
ccugccuguugggccaggag

SEQ ID NO: 1163072 - RNA, 21 nt, Human
ccugcuaauuccccagauugc

SEQ ID NO: 1163073 - RNA, 13 nt, Human
ccuggcccacugc

SEQ ID NO: 1163074 - RNA, 14 nt, Human
ccuggcccacugca

SEQ ID NO: 1163075 - RNA, 21 nt, Human
ccuggccagaugcaccagccc

SEQ ID NO: 1163076 - RNA, 23 nt, Human
ccuggccagaugcaccagcccuu

SEQ ID NO: 1163077 - RNA, 13 nt, Human
ccuggcacugcuu

SEQ ID NO: 1163078 - RNA, 16 nt, Human
ccuggcacugcuucca

SEQ ID NO: 1163079 - RNA, 17 nt, Human
ccuggcacugcuuccag

SEQ ID NO: 1163080 - RNA, 13 nt, Human
ccuggcaugggaa

SEQ ID NO: 1163081 - RNA, 16 nt, Human
ccuggcccacugcauc

SEQ ID NO: 1163082 - RNA, 18 nt, Human
ccugggagugagcugguu

SEQ ID NO: 1163083 - RNA, 16 nt, Human
ccugggcagaaggaag

SEQ ID NO: 1163084 - RNA, 22 nt, Human
ccugggaggucaaggcugcagu

SEQ ID NO: 1163085 - RNA, 16 nt, Human
ccugggagugagcugg

SEQ ID NO: 1163086 - RNA, 19 nt, Human
ccugggggcugggcagagg

SEQ ID NO: 1163087 - RNA, 20 nt, Human
ccugggggcugggcagagga

SEQ ID NO: 1163088 - RNA, 21 nt, Human
ccugggggcugggcagaggaa

SEQ ID NO: 1163089 - RNA, 14 nt, Human
ccuggcaugggaau

SEQ ID NO: 1163090 - RNA, 12 nt, Human
ccugucccccug

SEQ ID NO: 1163091 - RNA, 13 nt, Human
ccugucccccuga

SEQ ID NO: 1163092 - RNA, 14 nt, Human
ccugucccccugac

SEQ ID NO: 1163093 - RNA, 15 nt, Human
ccugucccccugaca

SEQ ID NO: 1163094 - RNA, 16 nt, Human
ccugucccccugacaa

SEQ ID NO: 1163095 - RNA, 13 nt, Human
ccuguagcccuaa

SEQ ID NO: 1163096 - RNA, 15 nt, Human
ccuguagagugggag

SEQ ID NO: 1163097 - RNA, 16 nt, Human
ccuguagagugggagc

SEQ ID NO: 1163098 - RNA, 19 nt, Human
ccuguagagugggagcuga

SEQ ID NO: 1163099 - RNA, 13 nt, Human
ccugguggcagug

SEQ ID NO: 1163100 - RNA, 14 nt, Human
ccugguggcagugg

SEQ ID NO: 1163101 - RNA, 15 nt, Human
ccugguggcaguggg

SEQ ID NO: 1163102 - RNA, 10 nt, Human
ccuguaccuc

SEQ ID NO: 1163103 - RNA, 12 nt, Human
ccuguaccucuu

SEQ ID NO: 1163104 - RNA, 21 nt, Human
ccugguggcagcucaccucuc

SEQ ID NO: 1163105 - RNA, 22 nt, Human
ccugguggcagcucaccucucc

SEQ ID NO: 1163106 - RNA, 14 nt, Human
ccugguggcagcug

SEQ ID NO: 1163107 - RNA, 15 nt, Human
ccugguggcagcugc

SEQ ID NO: 1163108 - RNA, 16 nt, Human
ccugguggcagcugcg

SEQ ID NO: 1163109 - RNA, 17 nt, Human
ccugguggcagcugcgg

SEQ ID NO: 1163110 - RNA, 18 nt, Human
ccugguggcagcugcggu

SEQ ID NO: 1163111 - RNA, 17 nt, Human
ccuuccauggacuuugu

SEQ ID NO: 1163112 - RNA, 13 nt, Human
ccuuccaggggug

SEQ ID NO: 1163113 - RNA, 17 nt, Human
ccuucggccuccauccu

SEQ ID NO: 1163114 - RNA, 18 nt, Human
ccuucggccuccauccug

SEQ ID NO: 1163115 - RNA, 19 nt, Human
ccuucggccuccauccuga

SEQ ID NO: 1163116 - RNA, 12 nt, Human
ccuucucuccag

SEQ ID NO: 1163117 - RNA, 13 nt, Human
ccuucucuccagc

SEQ ID NO: 1163118 - RNA, 15 nt, Human
ccuucucuccagccc

SEQ ID NO: 1163119 - RNA, 16 nt, Human
ccuucucuccagcccc

SEQ ID NO: 1163120 - RNA, 20 nt, Human
ccugugccucugggacugga

SEQ ID NO: 1163121 - RNA, 20 nt, Human
ccuguggaugauaaaacaca

SEQ ID NO: 1163122 - RNA, 20 nt, Human
ccugugggcccccaaaugga

SEQ ID NO: 1163123 - RNA, 19 nt, Human
ccuucauuuggcauucccc

SEQ ID NO: 1163124 - RNA, 17 nt, Human
ccuucucuccagccccu

SEQ ID NO: 1163125 - RNA, 18 nt, Human
ccuucucuccagccccug

SEQ ID NO: 1163126 - RNA, 18 nt, Human
ccuugacagggcacaccg

SEQ ID NO: 1163127 - RNA, 21 nt, Human
ccuugacagggcacaccgggc

SEQ ID NO: 1163128 - RNA, 15 nt, Human
ccuuggauugucccc

SEQ ID NO: 1163129 - RNA, 19 nt, Human
ccuuggauuguccccgacc

SEQ ID NO: 1163130 - RNA, 22 nt, Human
ccuuggcucaaguccucuuuuc

SEQ ID NO: 1163131 - RNA, 16 nt, Human
ccuuggcugcagggag

SEQ ID NO: 1163132 - RNA, 14 nt, Human
ccuuggggagcagg

SEQ ID NO: 1163133 - RNA, 19 nt, Human
ccuuggugucgggcaugac

SEQ ID NO: 1163134 - RNA, 20 nt, Human
ccuuggugucgggcaugaca

SEQ ID NO: 1163135 - RNA, 21 nt, Human
ccuuggugucgggcaugacac

SEQ ID NO: 1163136 - RNA, 19 nt, Human
ccuucucuccagccccugg

SEQ ID NO: 1163137 - RNA, 24 nt, Human
ccuuuguauucucuccuguaccuc

SEQ ID NO: 1163138 - RNA, 22 nt, Human
ccuuuguauucucuccuguacc

SEQ ID NO: 1163139 - RNA, 23 nt, Human
ccuuuguauucucuccuguaccu

SEQ ID NO: 1163140 - RNA, 14 nt, Human
ccuuuguccccacc

SEQ ID NO: 1163141 - RNA, 16 nt, Human
ccuuuguccccaccgc

SEQ ID NO: 1163142 - RNA, 18 nt, Human
ccuuuguccccaccgcag

SEQ ID NO: 1163143 - RNA, 14 nt, Human
ccuuugugaggaag

SEQ ID NO: 1163144 - RNA, 22 nt, Human
ccuuuguccccaccgcagacag

SEQ ID NO: 1163145 - RNA, 23 nt, Human
ccuuuguccccaccgcagacagg

SEQ ID NO: 1163146 - RNA, 15 nt, Human
ccuuugugaggaagc

SEQ ID NO: 1163147 - RNA, 16 nt, Human
ccuuugugaggaagcc

SEQ ID NO: 1163148 - RNA, 17 nt, Human
ccuuugugaggaagccg

SEQ ID NO: 1163149 - RNA, 23 nt, Human
ccuuugugaggaagccgcugggg

SEQ ID NO: 1163150 - RNA, 15 nt, Human
ccuuuuuuggcugcu

SEQ ID NO: 1163151 - RNA, 17 nt, Human
ccuuuuuuggcugcuga

SEQ ID NO: 1163152 - RNA, 18 nt, Human
ccuuuuuuggcugcugaa

SEQ ID NO: 1163153 - RNA, 20 nt, Human
ccuuuuuuggcugcugaagg

SEQ ID NO: 1163154 - RNA, 22 nt, Human
ccuuuuuuggcugcugaaggcu

SEQ ID NO: 1163155 - RNA, 21 nt, Human
cgaacauguuuuucuucuccc

SEQ ID NO: 1163156 - RNA, 23 nt, Human
cgaacauguuuuucuucucccuc

SEQ ID NO: 1163157 - RNA, 16 nt, Human
cgaauagcugggacua

SEQ ID NO: 1163158 - RNA, 11 nt, Human
cgaauauugcu

SEQ ID NO: 1163159 - RNA, 12 nt, Human
cgaauauugcug

SEQ ID NO: 1163160 - RNA, 14 nt, Human
cgaauauugcugau

SEQ ID NO: 1163161 - RNA, 15 nt, Human
cgaauauugcugaug

SEQ ID NO: 1163162 - RNA, 17 nt, Human
cgaauauugcugauggu

SEQ ID NO: 1163163 - RNA, 16 nt, Human
ccuuguggucccaccc

SEQ ID NO: 1163164 - RNA, 19 nt, Human
cgagcccugguggcagugg

SEQ ID NO: 1163165 - RNA, 16 nt, Human
cgaggacagggaggug

SEQ ID NO: 1163166 - RNA, 13 nt, Human
cgcacugggcuug

SEQ ID NO: 1163167 - RNA, 17 nt, Human
cgcacugggcuugggga

SEQ ID NO: 1163168 - RNA, 23 nt, Human
cgcacuucgggaggucgaggcag

SEQ ID NO: 1163169 - RNA, 19 nt, Human
cgcagcauauucaggaagc

SEQ ID NO: 1163170 - RNA, 20 nt, Human
cgcagcauauucaggaagcu

SEQ ID NO: 1163171 - RNA, 17 nt, Human
cgcagcccugcagaggg

SEQ ID NO: 1163172 - RNA, 18 nt, Human
cgcagcccugcagagggc

SEQ ID NO: 1163173 - RNA, 19 nt, Human
cgcagcccugcagagggca

SEQ ID NO: 1163174 - RNA, 13 nt, Human
cgcccagucugga

SEQ ID NO: 1163175 - RNA, 19 nt, Human
cgcccagucuggaaugcag

SEQ ID NO: 1163176 - RNA, 21 nt, Human
cgcccagucuggaaugcagug

SEQ ID NO: 1163177 - RNA, 14 nt, Human
cgcgacaaugcaaa

SEQ ID NO: 1163178 - RNA, 15 nt, Human
cgcgacaaugcaaac

SEQ ID NO: 1163179 - RNA, 19 nt, Human
cgcgguggcucacgccugu

SEQ ID NO: 1163180 - RNA, 18 nt, Human
cgcuacccgggaaggggg

SEQ ID NO: 1163181 - RNA, 21 nt, Human
cgcuacccgggaagggggcug

SEQ ID NO: 1163182 - RNA, 24 nt, Human
cgcuacccgggaagggggcuggga

SEQ ID NO: 1163183 - RNA, 21 nt, Human
cggacagccacggccaggcca

SEQ ID NO: 1163184 - RNA, 22 nt, Human
cggacagccacggccaggccag

SEQ ID NO: 1163185 - RNA, 15 nt, Human
cggagaaaggaaggg

SEQ ID NO: 1163186 - RNA, 17 nt, Human
cggagaaaggaagggcu

SEQ ID NO: 1163187 - RNA, 14 nt, Human
cgcuuucuacccag

SEQ ID NO: 1163188 - RNA, 16 nt, Human
cgcuuucuacccagcg

SEQ ID NO: 1163189 - RNA, 16 nt, Human
cggaauaguuggcuag

SEQ ID NO: 1163190 - RNA, 17 nt, Human
cggaauaguuggcuagg

SEQ ID NO: 1163191 - RNA, 11 nt, Human
cgcugugcugc

SEQ ID NO: 1163192 - RNA, 13 nt, Human
cgcugugcugccc

SEQ ID NO: 1163193 - RNA, 14 nt, Human
cgcugugcugcccu

SEQ ID NO: 1163194 - RNA, 19 nt, Human
cgcugugcugcccugccca

SEQ ID NO: 1163195 - RNA, 21 nt, Human
cgcugugcugcccugcccacc

SEQ ID NO: 1163196 - RNA, 23 nt, Human
cgcugugcugcccugcccaccug

SEQ ID NO: 1163197 - RNA, 11 nt, Human
cggccaggcca

SEQ ID NO: 1163198 - RNA, 12 nt, Human
cggccaggccag

SEQ ID NO: 1163199 - RNA, 20 nt, Human
cggccaggccagagggagug

SEQ ID NO: 1163200 - RNA, 24 nt, Human
cggccaggccagagggagugacag

SEQ ID NO: 1163201 - RNA, 23 nt, Human
cggcuggcagcccaccccucaac

SEQ ID NO: 1163202 - RNA, 13 nt, Human
cggcuggccuggc

SEQ ID NO: 1163203 - RNA, 14 nt, Human
cggcuggccuggcc

SEQ ID NO: 1163204 - RNA, 16 nt, Human
cgggaagggggcuggg

SEQ ID NO: 1163205 - RNA, 19 nt, Human
cgggaagggggcugggaca

SEQ ID NO: 1163206 - RNA, 20 nt, Human
cgggaagggggcugggacau

SEQ ID NO: 1163207 - RNA, 20 nt, Human
cgggaggcagagguugcagu

SEQ ID NO: 1163208 - RNA, 23 nt, Human
cgggaggauguucugggacacag

SEQ ID NO: 1163209 - RNA, 21 nt, Human
cuaaaucuccaaaauaaaacu

SEQ ID NO: 1163210 - RNA, 22 nt, Human
cuaaaugaaaaucgugacaaca

SEQ ID NO: 1163211 - RNA, 12 nt, Human
cuaaccacgcug

SEQ ID NO: 1163212 - RNA, 14 nt, Human
cuaaccacgcugga

SEQ ID NO: 1163213 - RNA, 19 nt, Human
cuaaauugacacuuaaaaa

SEQ ID NO: 1163214 - RNA, 23 nt, Human
cuaaauugacacuuaaaaauggu

SEQ ID NO: 1163215 - RNA, 14 nt, Human
cuaagagagaauga

SEQ ID NO: 1163216 - RNA, 15 nt, Human
cuaagagagaaugag

SEQ ID NO: 1163217 - RNA, 13 nt, Human
cuaagagggaggg

SEQ ID NO: 1163218 - RNA, 15 nt, Human
cuaagagggagggag

SEQ ID NO: 1163219 - RNA, 22 nt, Human
cuaagagggagggagggcucca

SEQ ID NO: 1163220 - RNA, 23 nt, Human
cuaagagggagggagggcuccag

SEQ ID NO: 1163221 - RNA, 18 nt, Human
cuaauauguaacaagcca

SEQ ID NO: 1163222 - RNA, 12 nt, Human
cuaaugggacac

SEQ ID NO: 1163223 - RNA, 13 nt, Human
cuaaugggacacu

SEQ ID NO: 1163224 - RNA, 21 nt, Human
cuacacaggggaaaagaggag

SEQ ID NO: 1163225 - RNA, 23 nt, Human
cuacacgagauacagaauuuuau

SEQ ID NO: 1163226 - RNA, 14 nt, Human
cuacacuaagagag

SEQ ID NO: 1163227 - RNA, 17 nt, Human
cuaauagacaauuuauu

SEQ ID NO: 1163228 - RNA, 19 nt, Human
cuaauagacaauuuauuau

SEQ ID NO: 1163229 - RNA, 23 nt, Human
cuaauagacaauuuauuauggca

SEQ ID NO: 1163230 - RNA, 21 nt, Human
cuaagcuucacuguaaaauaa

SEQ ID NO: 1163231 - RNA, 19 nt, Human
cuacagcuugaccgugagg

SEQ ID NO: 1163232 - RNA, 22 nt, Human
cuacagcuugaccgugaggcca

SEQ ID NO: 1163233 - RNA, 23 nt, Human
cuacagcuugaccgugaggccag

SEQ ID NO: 1163234 - RNA, 13 nt, Human
cuacacugugcug

SEQ ID NO: 1163235 - RNA, 14 nt, Human
cuacacugugcuga

SEQ ID NO: 1163236 - RNA, 17 nt, Human
cuacacugugcugaguc

SEQ ID NO: 1163237 - RNA, 18 nt, Human
cuacacugugcugagucu

SEQ ID NO: 1163238 - RNA, 18 nt, Human
cuacagaggccaugggcc

SEQ ID NO: 1163239 - RNA, 20 nt, Human
cuacagaggccaugggccuc

SEQ ID NO: 1163240 - RNA, 22 nt, Human
cuacagaggccaugggccuccu

SEQ ID NO: 1163241 - RNA, 14 nt, Human
cuacaggagugagc

SEQ ID NO: 1163242 - RNA, 15 nt, Human
cuacaggagugagca

SEQ ID NO: 1163243 - RNA, 16 nt, Human
cuacaggagugagcac

SEQ ID NO: 1163244 - RNA, 15 nt, Human
cuacaggcacccacc

SEQ ID NO: 1163245 - RNA, 17 nt, Human
cuacaggcacccaccau

SEQ ID NO: 1163246 - RNA, 14 nt, Human
cuacaggugugagu

SEQ ID NO: 1163247 - RNA, 16 nt, Human
cuacaggugugaguca

SEQ ID NO: 1163248 - RNA, 13 nt, Human
cuacaguccuccc

SEQ ID NO: 1163249 - RNA, 18 nt, Human
cuacauggaguauauguc

SEQ ID NO: 1163250 - RNA, 20 nt, Human
cuacauggaguauaugucaa

SEQ ID NO: 1163251 - RNA, 13 nt, Human
cuacauucuguua

SEQ ID NO: 1163252 - RNA, 14 nt, Human
cuacauucuguuaa

SEQ ID NO: 1163253 - RNA, 22 nt, Human
cuacauuauaaaugucucuuua

SEQ ID NO: 1163254 - RNA, 13 nt, Human
cuacccacccucc

SEQ ID NO: 1163255 - RNA, 15 nt, Human
cuacccagcgagccc

SEQ ID NO: 1163256 - RNA, 17 nt, Human
cuacccagcgagcccug

SEQ ID NO: 1163257 - RNA, 18 nt, Human
cuacccagcgagcccugg

SEQ ID NO: 1163258 - RNA, 13 nt, Human
cuacccaggugcu

SEQ ID NO: 1163259 - RNA, 19 nt, Human
cuacccagcgagcccuggu

SEQ ID NO: 1163260 - RNA, 17 nt, Human
cuacccucuuagaaaaa

SEQ ID NO: 1163261 - RNA, 22 nt, Human
cuaggaaauauuuauuuuaaua

SEQ ID NO: 1163262 - RNA, 15 nt, Human
cuacucgaguuacag

SEQ ID NO: 1163263 - RNA, 16 nt, Human
cuacucgaguuacaga

SEQ ID NO: 1163264 - RNA, 19 nt, Human
cuacucgaguuacagacaa

SEQ ID NO: 1163265 - RNA, 12 nt, Human
cuacucuguguc

SEQ ID NO: 1163266 - RNA, 13 nt, Human
cuacucuguguca

SEQ ID NO: 1163267 - RNA, 19 nt, Human
cuacuguccuacccacccu

SEQ ID NO: 1163268 - RNA, 20 nt, Human
cuacuguccuacccacccuc

SEQ ID NO: 1163269 - RNA, 17 nt, Human
cuagagguucaaagaua

SEQ ID NO: 1163270 - RNA, 18 nt, Human
cuagagguucaaagauau

SEQ ID NO: 1163271 - RNA, 21 nt, Human
cuagagguucaaagauauuuu

SEQ ID NO: 1163272 - RNA, 18 nt, Human
cuagaguuuagcuggaaa

SEQ ID NO: 1163273 - RNA, 19 nt, Human
cuagaguuuagcuggaaaa

SEQ ID NO: 1163274 - RNA, 13 nt, Human
cuagauacuguau

SEQ ID NO: 1163275 - RNA, 16 nt, Human
cuagauacuguaucau

SEQ ID NO: 1163276 - RNA, 24 nt, Human
cuagauacuguaucaugacaaaga

SEQ ID NO: 1163277 - RNA, 21 nt, Human
cuagccugugccucugggacu

SEQ ID NO: 1163278 - RNA, 22 nt, Human
cuagccugugccucugggacug

SEQ ID NO: 1163279 - RNA, 21 nt, Human
cuagccuuagaagucacacag

SEQ ID NO: 1163280 - RNA, 22 nt, Human
cuagccuuagaagucacacagu

SEQ ID NO: 1163281 - RNA, 23 nt, Human
cuagccuuagaagucacacagua

SEQ ID NO: 1163282 - RNA, 14 nt, Human
cuaggaaauauuua

SEQ ID NO: 1163283 - RNA, 15 nt, Human
cuaggaaauauuuau

SEQ ID NO: 1163284 - RNA, 19 nt, Human
cuaggaaauauuuauuuua

SEQ ID NO: 1163285 - RNA, 20 nt, Human
cuaggaaauauuuauuuuaa

SEQ ID NO: 1163286 - RNA, 19 nt, Human
cuaugaaauauuauguuaa

SEQ ID NO: 1163287 - RNA, 13 nt, Human
cuauaauuuaaau

SEQ ID NO: 1163288 - RNA, 12 nt, Human
cuauaauuuaaa

SEQ ID NO: 1163289 - RNA, 20 nt, Human
cuaggaacacuccuucacag

SEQ ID NO: 1163290 - RNA, 15 nt, Human
cuaggaagacuuugg

SEQ ID NO: 1163291 - RNA, 17 nt, Human
cuaggaagacuuuggaa

SEQ ID NO: 1163292 - RNA, 19 nt, Human
cuauagccuaggugacaga

SEQ ID NO: 1163293 - RNA, 20 nt, Human
cuauagccuaggugacagag

SEQ ID NO: 1163294 - RNA, 21 nt, Human
cuauagccuaggugacagagu

SEQ ID NO: 1163295 - RNA, 13 nt, Human
cuauguaucaaug

SEQ ID NO: 1163296 - RNA, 16 nt, Human
cuauguaucaaugagu

SEQ ID NO: 1163297 - RNA, 17 nt, Human
cuauucaguaauaacuc

SEQ ID NO: 1163298 - RNA, 23 nt, Human
cuauucaguaauaacucuacccu

SEQ ID NO: 1163299 - RNA, 16 nt, Human
cuauugcugcuugagg

SEQ ID NO: 1163300 - RNA, 14 nt, Human
cucaaguccucuuu

SEQ ID NO: 1163301 - RNA, 23 nt, Human
cucacacggacacucaaaagcug

SEQ ID NO: 1163302 - RNA, 16 nt, Human
cucaacucuccuccag

SEQ ID NO: 1163303 - RNA, 18 nt, Human
cucaacucuccuccagag

SEQ ID NO: 1163304 - RNA, 19 nt, Human
cucaacucuccuccagagu

SEQ ID NO: 1163305 - RNA, 14 nt, Human
cucaaauuucuaaa

SEQ ID NO: 1163306 - RNA, 15 nt, Human
cucaaauuucuaaau

SEQ ID NO: 1163307 - RNA, 17 nt, Human
cucaaauuucuaaaucu

SEQ ID NO: 1163308 - RNA, 14 nt, Human
cucaacucuccucc

SEQ ID NO: 1163309 - RNA, 15 nt, Human
cucacugcagccuca

SEQ ID NO: 1163310 - RNA, 16 nt, Human
cucacugcagccucaa

SEQ ID NO: 1163311 - RNA, 14 nt, Human
cucacuguugccca

SEQ ID NO: 1163312 - RNA, 15 nt, Human
cucacuguugcccag

SEQ ID NO: 1163313 - RNA, 23 nt, Human
cucagagagggugggagugggcc

SEQ ID NO: 1163314 - RNA, 19 nt, Human
cucagagagggugggagug

SEQ ID NO: 1163315 - RNA, 16 nt, Human
cucacuguugcccagg

SEQ ID NO: 1163316 - RNA, 17 nt, Human
cucacuguugcccaggc

SEQ ID NO: 1163317 - RNA, 18 nt, Human
cucacuguugcccaggcu

SEQ ID NO: 1163318 - RNA, 19 nt, Human
cucacuguugcccaggcug

SEQ ID NO: 1163319 - RNA, 15 nt, Human
cucagcauccuggca

SEQ ID NO: 1163320 - RNA, 19 nt, Human
cucagcaaaagaugcuucu

SEQ ID NO: 1163321 - RNA, 20 nt, Human
cucagcaaaagaugcuucuc

SEQ ID NO: 1163322 - RNA, 21 nt, Human
cucagcaaaagaugcuucuca

SEQ ID NO: 1163323 - RNA, 16 nt, Human
cucagcaggggagggu

SEQ ID NO: 1163324 - RNA, 13 nt, Human
cucagcauccugg

SEQ ID NO: 1163325 - RNA, 21 nt, Human
cucagcauccuggcacccggc

SEQ ID NO: 1163326 - RNA, 22 nt, Human
cucagcauccuggcacccggcc

SEQ ID NO: 1163327 - RNA, 23 nt, Human
cucagcggggacagcuccuucug

SEQ ID NO: 1163328 - RNA, 14 nt, Human
cucagcggggacag

SEQ ID NO: 1163329 - RNA, 15 nt, Human
cucagcggggacagc

SEQ ID NO: 1163330 - RNA, 16 nt, Human
cucagcggggacagcu

SEQ ID NO: 1163331 - RNA, 18 nt, Human
cucagcggggacagcucc

SEQ ID NO: 1163332 - RNA, 19 nt, Human
cucagcggggacagcuccu

SEQ ID NO: 1163333 - RNA, 20 nt, Human
cucagcggggacagcuccuu

SEQ ID NO: 1163334 - RNA, 21 nt, Human
cucagcggggacagcuccuuc

SEQ ID NO: 1163335 - RNA, 24 nt, Human
cucagggucccugguggcagcuca

SEQ ID NO: 1163336 - RNA, 14 nt, Human
cucagggccugguc

SEQ ID NO: 1163337 - RNA, 20 nt, Human
cucagggucccugguggcag

SEQ ID NO: 1163338 - RNA, 21 nt, Human
cucagggucccugguggcagc

SEQ ID NO: 1163339 - RNA, 22 nt, Human
cucagggucccugguggcagcu

SEQ ID NO: 1163340 - RNA, 23 nt, Human
cucaggugauccacccaccucag

SEQ ID NO: 1163341 - RNA, 19 nt, Human
cucagguggggucacucug

SEQ ID NO: 1163342 - RNA, 20 nt, Human
cucagguggggucacucugg

SEQ ID NO: 1163343 - RNA, 21 nt, Human
cucagguggggucacucuggc

SEQ ID NO: 1163344 - RNA, 22 nt, Human
cucagguggggucacucuggca

SEQ ID NO: 1163345 - RNA, 15 nt, Human
cucaggcagguggga

SEQ ID NO: 1163346 - RNA, 18 nt, Human
cucaggcaggugggaugg

SEQ ID NO: 1163347 - RNA, 13 nt, Human
cucagggccuggc

SEQ ID NO: 1163348 - RNA, 19 nt, Human
cucagggccuggcucaggu

SEQ ID NO: 1163349 - RNA, 20 nt, Human
cucagggccuggcucaggug

SEQ ID NO: 1163350 - RNA, 12 nt, Human
cucauuuccaag

SEQ ID NO: 1163351 - RNA, 13 nt, Human
cucauuuccaagc

SEQ ID NO: 1163352 - RNA, 14 nt, Human
cucauuuccaagca

SEQ ID NO: 1163353 - RNA, 17 nt, Human
cucauuuccaagcaagu

SEQ ID NO: 1163354 - RNA, 21 nt, Human
cucauuuccaagcaaguauua

SEQ ID NO: 1163355 - RNA, 21 nt, Human
cucauuugucacacacuuugg

SEQ ID NO: 1163356 - RNA, 18 nt, Human
cucauucuccuuguguua

SEQ ID NO: 1163357 - RNA, 22 nt, Human
cucauucuccuuguguuacuaa

SEQ ID NO: 1163358 - RNA, 12 nt, Human
cucauucuucug

SEQ ID NO: 1163359 - RNA, 19 nt, Human
cucauugaccugaggcccu

SEQ ID NO: 1163360 - RNA, 21 nt, Human
cucauugaccugaggcccuuc

SEQ ID NO: 1163361 - RNA, 16 nt, Human
cuccagagucagaagu

SEQ ID NO: 1163362 - RNA, 11 nt, Human
cuccagccccu

SEQ ID NO: 1163363 - RNA, 13 nt, Human
cuccagccccugg

SEQ ID NO: 1163364 - RNA, 14 nt, Human
cuccagccccugga

SEQ ID NO: 1163365 - RNA, 15 nt, Human
cuccagccccuggau

SEQ ID NO: 1163366 - RNA, 15 nt, Human
cuccagcucaccagc

SEQ ID NO: 1163367 - RNA, 16 nt, Human
cuccagcucaccagcc

SEQ ID NO: 1163368 - RNA, 18 nt, Human
cuccagcucaccagcccc

SEQ ID NO: 1163369 - RNA, 19 nt, Human
cuccagcucaccagcccca

SEQ ID NO: 1163370 - RNA, 16 nt, Human
cucccaaagugcuggg

SEQ ID NO: 1163371 - RNA, 14 nt, Human
cucccaacucaccc

SEQ ID NO: 1163372 - RNA, 15 nt, Human
cucccaacucacccc

SEQ ID NO: 1163373 - RNA, 16 nt, Human
cucccaacucacccca

SEQ ID NO: 1163374 - RNA, 15 nt, Human
cucccacaaaggaga

SEQ ID NO: 1163375 - RNA, 16 nt, Human
cucccaucacuucccu

SEQ ID NO: 1163376 - RNA, 15 nt, Human
cucccuucauccuuc

SEQ ID NO: 1163377 - RNA, 18 nt, Human
cucccucagucuggcccu

SEQ ID NO: 1163378 - RNA, 20 nt, Human
cucccgaauagcugggacua

SEQ ID NO: 1163379 - RNA, 23 nt, Human
cucccgaauagcugggacuacag

SEQ ID NO: 1163380 - RNA, 15 nt, Human
cucccgaguagcugg

SEQ ID NO: 1163381 - RNA, 20 nt, Human
cuccccagccccaucccaaa

SEQ ID NO: 1163382 - RNA, 21 nt, Human
cuccccugcuggguguggcgc

SEQ ID NO: 1163383 - RNA, 23 nt, Human
cuccccugcuggguguggcgcag

SEQ ID NO: 1163384 - RNA, 19 nt, Human
cugcccuccaagaccuucu

SEQ ID NO: 1163385 - RNA, 14 nt, Human
cucccuucccaccu

SEQ ID NO: 1163386 - RNA, 15 nt, Human
cucccuucccaccuc

SEQ ID NO: 1163387 - RNA, 16 nt, Human
cucccuucccaccucu

SEQ ID NO: 1163388 - RNA, 17 nt, Human
cucccuucccaccucuc

SEQ ID NO: 1163389 - RNA, 23 nt, Human
cucccuucccaccucucucacuc

SEQ ID NO: 1163390 - RNA, 12 nt, Human
cugcccuccaag

SEQ ID NO: 1163391 - RNA, 15 nt, Human
cugccgcagcccugc

SEQ ID NO: 1163392 - RNA, 17 nt, Human
cugccgcagcccugcag

SEQ ID NO: 1163393 - RNA, 18 nt, Human
cugccgcagcccugcaga

SEQ ID NO: 1163394 - RNA, 19 nt, Human
cugccgcagcccugcagag

SEQ ID NO: 1163395 - RNA, 15 nt, Human
cugccucuucucuac

SEQ ID NO: 1163396 - RNA, 15 nt, Human
cugccugaagucaca

SEQ ID NO: 1163397 - RNA, 16 nt, Human
cugccugaagucacac

SEQ ID NO: 1163398 - RNA, 16 nt, Human
cugccugcccaggccc

SEQ ID NO: 1163399 - RNA, 17 nt, Human
cugccugcccaggcccc

SEQ ID NO: 1163400 - RNA, 20 nt, Human
cugccugcccaggccccugc

SEQ ID NO: 1163401 - RNA, 21 nt, Human
cugccugcccaggccccugcc

SEQ ID NO: 1163402 - RNA, 21 nt, Human
cugccugggaucccucauccu

SEQ ID NO: 1163403 - RNA, 22 nt, Human
cugccugggaucccucauccuc

SEQ ID NO: 1163404 - RNA, 11 nt, Human
cugccucccau

SEQ ID NO: 1163405 - RNA, 12 nt, Human
cugccucccauc

SEQ ID NO: 1163406 - RNA, 14 nt, Human
cugccucccaucac

SEQ ID NO: 1163407 - RNA, 16 nt, Human
cugccucccaucaccc

SEQ ID NO: 1163408 - RNA, 19 nt, Human
cugccucccaucacccgcu

SEQ ID NO: 1163409 - RNA, 15 nt, Human
cugccucugacacac

SEQ ID NO: 1163410 - RNA, 22 nt, Human
cugccucugacacacagcucug

SEQ ID NO: 1163411 - RNA, 23 nt, Human
cugccucugacacacagcucugu

SEQ ID NO: 1163412 - RNA, 19 nt, Human
cugcgaccacaagaaggau

SEQ ID NO: 1163413 - RNA, 19 nt, Human
cugcuccagcuguucagcu

SEQ ID NO: 1163414 - RNA, 20 nt, Human
cugcuccagcuguucagcug

SEQ ID NO: 1163415 - RNA, 11 nt, Human
cugcugaaggc

SEQ ID NO: 1163416 - RNA, 12 nt, Human
cugcugaaggcu

SEQ ID NO: 1163417 - RNA, 13 nt, Human
cugcugguucagg

SEQ ID NO: 1163418 - RNA, 15 nt, Human
cugcugguucagggu

SEQ ID NO: 1163419 - RNA, 23 nt, Human
cugcugguucaggguuggccccu

SEQ ID NO: 1163420 - RNA, 16 nt, Human
cugcuuccagugaggc

SEQ ID NO: 1163421 - RNA, 18 nt, Human
cugcuuccagugaggcuc

SEQ ID NO: 1163422 - RNA, 19 nt, Human
cugcuuccagugaggcucu

SEQ ID NO: 1163423 - RNA, 20 nt, Human
cugcuuccagugaggcucug

SEQ ID NO: 1163424 - RNA, 21 nt, Human
cugcuuccagugaggcucugc

SEQ ID NO: 1163425 - RNA, 23 nt, Human
cugcuuccagugaggcucugccc

SEQ ID NO: 1163426 - RNA, 15 nt, Human
cugcugcuggcuggu

SEQ ID NO: 1163427 - RNA, 17 nt, Human
cuggaccuugaacuggg

SEQ ID NO: 1163428 - RNA, 20 nt, Human
cuggaccuugaacuggguac

SEQ ID NO: 1163429 - RNA, 21 nt, Human
cuggaccuugaacuggguacu

SEQ ID NO: 1163430 - RNA, 15 nt, Human
cuggacccuguggau

SEQ ID NO: 1163431 - RNA, 16 nt, Human
cuggaccuugaacugg

SEQ ID NO: 1163432 - RNA, 17 nt, Human
cuggacaggcauguucu

SEQ ID NO: 1163433 - RNA, 23 nt, Human
cuggacaggcauguucucugagg

SEQ ID NO: 1163434 - RNA, 13 nt, Human
cuggagcucugcc

SEQ ID NO: 1163435 - RNA, 16 nt, Human
cuggagcucugcccau

SEQ ID NO: 1163436 - RNA, 17 nt, Human
cuggagguacgaaaaga

SEQ ID NO: 1163437 - RNA, 22 nt, Human
cuggagguacgaaaagagggga

SEQ ID NO: 1163438 - RNA, 14 nt, Human
cuggagugcaguga

SEQ ID NO: 1163439 - RNA, 15 nt, Human
cuggagugcagugag

SEQ ID NO: 1163440 - RNA, 16 nt, Human
cuggagugcagugagc

SEQ ID NO: 1163441 - RNA, 17 nt, Human
cuggagugcagugagcc

SEQ ID NO: 1163442 - RNA, 22 nt, Human
cuggcacccggccccugcuggu

SEQ ID NO: 1163443 - RNA, 19 nt, Human
cuggcacugcuuccaguga

SEQ ID NO: 1163444 - RNA, 20 nt, Human
cuggcacugcuuccagugag

SEQ ID NO: 1163445 - RNA, 23 nt, Human
cuggcacugcuuccagugaggcu

SEQ ID NO: 1163446 - RNA, 20 nt, Human
cuggagugcagugagccgag

SEQ ID NO: 1163447 - RNA, 20 nt, Human
cuggcacccggccccugcug

SEQ ID NO: 1163448 - RNA, 21 nt, Human
cuggcacccggccccugcugg

SEQ ID NO: 1163449 - RNA, 14 nt, Human
cuggccagaugcac

SEQ ID NO: 1163450 - RNA, 15 nt, Human
cuggcccacugcauc

SEQ ID NO: 1163451 - RNA, 18 nt, Human
cuggccucugcacucccc

SEQ ID NO: 1163452 - RNA, 20 nt, Human
cuggccucugcacuccccug

SEQ ID NO: 1163453 - RNA, 21 nt, Human
cuggccucugcacuccccugc

SEQ ID NO: 1163454 - RNA, 13 nt, Human
cuggccuggcccc

SEQ ID NO: 1163455 - RNA, 24 nt, Human
cuggccuggccccucagggucccu

SEQ ID NO: 1163456 - RNA, 22 nt, Human
cuggccuucggccuccauccug

SEQ ID NO: 1163457 - RNA, 23 nt, Human
cuggccuucggccuccauccuga

SEQ ID NO: 1163458 - RNA, 14 nt, Human
cuggccugugucua

SEQ ID NO: 1163459 - RNA, 14 nt, Human
cuggcgugcagugg

SEQ ID NO: 1163460 - RNA, 15 nt, Human
cuggcgugcaguggu

SEQ ID NO: 1163461 - RNA, 21 nt, Human
cuggcucuuccaggcugggag

SEQ ID NO: 1163462 - RNA, 22 nt, Human
cuggcucuuccaggcugggaga

SEQ ID NO: 1163463 - RNA, 24 nt, Human
cuggcucuuccaggcugggagagc

SEQ ID NO: 1163464 - RNA, 23 nt, Human
cugguggcagcucaccucucccu

SEQ ID NO: 1163465 - RNA, 13 nt, Human
cugguggcagcug

SEQ ID NO: 1163466 - RNA, 14 nt, Human
cugguggcagcugc

SEQ ID NO: 1163467 - RNA, 23 nt, Human
cuguaaucacagcuacuugggag

SEQ ID NO: 1163468 - RNA, 15 nt, Human
cuguacaaaguagaa

SEQ ID NO: 1163469 - RNA, 13 nt, Human
cuguacaaaguag

SEQ ID NO: 1163470 - RNA, 20 nt, Human
cuguaauccuagcacuuugg

SEQ ID NO: 1163471 - RNA, 24 nt, Human
cugggcuucaguggcagcugcuuu

SEQ ID NO: 1163472 - RNA, 13 nt, Human
cugggcuugggga

SEQ ID NO: 1163473 - RNA, 13 nt, Human
cugggggaagaag

SEQ ID NO: 1163474 - RNA, 15 nt, Human
cugggggaagaagcu

SEQ ID NO: 1163475 - RNA, 19 nt, Human
cugggggcugggcagagga

SEQ ID NO: 1163476 - RNA, 22 nt, Human
cugggggggauuguaaaauggu

SEQ ID NO: 1163477 - RNA, 22 nt, Human
cuggguaacuagggaagauaau

SEQ ID NO: 1163478 - RNA, 14 nt, Human
cuggguacuugugg

SEQ ID NO: 1163479 - RNA, 15 nt, Human
cuggguucuacccag

SEQ ID NO: 1163480 - RNA, 16 nt, Human
cuggguucuacccagg

SEQ ID NO: 1163481 - RNA, 17 nt, Human
cuggguucuacccaggu

SEQ ID NO: 1163482 - RNA, 19 nt, Human
cuggguucuacccaggugc

SEQ ID NO: 1163483 - RNA, 13 nt, Human
cugucaauuacag

SEQ ID NO: 1163484 - RNA, 22 nt, Human
cuguauuuuaaaagaaugauua

SEQ ID NO: 1163485 - RNA, 20 nt, Human
cuguauuuuaaaagaaugau

SEQ ID NO: 1163486 - RNA, 23 nt, Human
cuguaucccaugagccucagcau

SEQ ID NO: 1163487 - RNA, 14 nt, Human
cuguaucccaugag

SEQ ID NO: 1163488 - RNA, 13 nt, Human
cuguacagagccc

SEQ ID NO: 1163489 - RNA, 14 nt, Human
cuguacagagccca

SEQ ID NO: 1163490 - RNA, 18 nt, Human
cugucucaaaaaaagaaa

SEQ ID NO: 1163491 - RNA, 23 nt, Human
cugucucaaaaaaacacaaaagu

SEQ ID NO: 1163492 - RNA, 16 nt, Human
cugucucaaaaaaaga

SEQ ID NO: 1163493 - RNA, 22 nt, Human
cugucccuuacgugaguccugg

SEQ ID NO: 1163494 - RNA, 15 nt, Human
cuguccgagcuuuga

SEQ ID NO: 1163495 - RNA, 14 nt, Human
cuguccuacccacc

SEQ ID NO: 1163496 - RNA, 18 nt, Human
cuguccccgcacugggcu

SEQ ID NO: 1163497 - RNA, 19 nt, Human
cuguccccgcacugggcuu

SEQ ID NO: 1163498 - RNA, 22 nt, Human
cuguccccgcacugggcuuggg

SEQ ID NO: 1163499 - RNA, 20 nt, Human
cugucccuuacgugaguccu

SEQ ID NO: 1163500 - RNA, 18 nt, Human
cugucuccauguuugaug

SEQ ID NO: 1163501 - RNA, 20 nt, Human
cugugaguacuacaguccuc

SEQ ID NO: 1163502 - RNA, 21 nt, Human
cugugaguacuacaguccucc

SEQ ID NO: 1163503 - RNA, 23 nt, Human
cugugaguacuacaguccuccca

SEQ ID NO: 1163504 - RNA, 18 nt, Human
cugugauggggcccugcc

SEQ ID NO: 1163505 - RNA, 19 nt, Human
cugugauggggcccugccu

SEQ ID NO: 1163506 - RNA, 20 nt, Human
cugugauggggcccugccuc

SEQ ID NO: 1163507 - RNA, 16 nt, Human
cugugccaugugccag

SEQ ID NO: 1163508 - RNA, 18 nt, Human
cugugccaugugccaggu

SEQ ID NO: 1163509 - RNA, 14 nt, Human
cugugccauuuugu

SEQ ID NO: 1163510 - RNA, 22 nt, Human
cugugccauuuuguauuuuacu

SEQ ID NO: 1163511 - RNA, 14 nt, Human
cugugccucuggga

SEQ ID NO: 1163512 - RNA, 16 nt, Human
cugugccucugggacu

SEQ ID NO: 1163513 - RNA, 17 nt, Human
cugugccucugggacug

SEQ ID NO: 1163514 - RNA, 18 nt, Human
cugugccucugggacugg

SEQ ID NO: 1163515 - RNA, 22 nt, Human
cugugcugcccugcccaccugg

SEQ ID NO: 1163516 - RNA, 17 nt, Human
cuguggaugauaaaaca

SEQ ID NO: 1163517 - RNA, 21 nt, Human
cugugucuugcaauggcagcc

SEQ ID NO: 1163518 - RNA, 22 nt, Human
cugugucuugcaauggcagccu

SEQ ID NO: 1163519 - RNA, 23 nt, Human
cugugucuugcaauggcagccuu

SEQ ID NO: 1163520 - RNA, 20 nt, Human
cugugugugcgccuacagga

SEQ ID NO: 1163521 - RNA, 13 nt, Human
cuguuacugucuu

SEQ ID NO: 1163522 - RNA, 19 nt, Human
cuguucagcugguugaggu

SEQ ID NO: 1163523 - RNA, 21 nt, Human
cuguucagcugguugagguuu

SEQ ID NO: 1163524 - RNA, 13 nt, Human
cuguucucugccc

SEQ ID NO: 1163525 - RNA, 14 nt, Human
cuguucucugcccu

SEQ ID NO: 1163526 - RNA, 15 nt, Human
cuguucucugcccuc

SEQ ID NO: 1163527 - RNA, 16 nt, Human
cuguucucugcccucc

SEQ ID NO: 1163528 - RNA, 17 nt, Human
cuguucucugcccucca

SEQ ID NO: 1163529 - RNA, 18 nt, Human
cuguucucugcccuccaa

SEQ ID NO: 1163530 - RNA, 19 nt, Human
cuguucucugcccuccaag

SEQ ID NO: 1163531 - RNA, 20 nt, Human
cuguucucugcccuccaaga

SEQ ID NO: 1163532 - RNA, 16 nt, Human
cuguucuggcagaguu

SEQ ID NO: 1163533 - RNA, 22 nt, Human
cuuagaugcaguucugaagaag

SEQ ID NO: 1163534 - RNA, 13 nt, Human
cuuagauguauau

SEQ ID NO: 1163535 - RNA, 19 nt, Human
cuuagauguauauauuucc

SEQ ID NO: 1163536 - RNA, 16 nt, Human
cuuagucacugagaca

SEQ ID NO: 1163537 - RNA, 18 nt, Human
cuuagucacugagacagc

SEQ ID NO: 1163538 - RNA, 19 nt, Human
cuuagucacugagacagcc

SEQ ID NO: 1163539 - RNA, 20 nt, Human
cuuagucacugagacagccc

SEQ ID NO: 1163540 - RNA, 19 nt, Human
cuuauaggaauugacccac

SEQ ID NO: 1163541 - RNA, 15 nt, Human
cuucaaauauuuccc

SEQ ID NO: 1163542 - RNA, 18 nt, Human
cuuauuuaaugaaagacu

SEQ ID NO: 1163543 - RNA, 17 nt, Human
cuuauuuaaugaaagac

SEQ ID NO: 1163544 - RNA, 10 nt, Human
cuucaaggau

SEQ ID NO: 1163545 - RNA, 13 nt, Human
cuucaaggauccu

SEQ ID NO: 1163546 - RNA, 15 nt, Human
cuucaaggauccuga

SEQ ID NO: 1163547 - RNA, 16 nt, Human
cuucaaggauccugag

SEQ ID NO: 1163548 - RNA, 23 nt, Human
cuucacagaugggugcuuggagg

SEQ ID NO: 1163549 - RNA, 16 nt, Human
cuucaguaagccguga

SEQ ID NO: 1163550 - RNA, 23 nt, Human
cuucaguaagccgugauuuucau

SEQ ID NO: 1163551 - RNA, 18 nt, Human
cuucagugccuuauggaa

SEQ ID NO: 1163552 - RNA, 22 nt, Human
cuucagugccuuauggaacacu

SEQ ID NO: 1163553 - RNA, 13 nt, Human
cuucaguggcagc

SEQ ID NO: 1163554 - RNA, 14 nt, Human
cuucaguggcagcu

SEQ ID NO: 1163555 - RNA, 15 nt, Human
cuucaguggcagcug

SEQ ID NO: 1163556 - RNA, 16 nt, Human
cuucaguggcagcugc

SEQ ID NO: 1163557 - RNA, 17 nt, Human
cuucaguggcagcugcu

SEQ ID NO: 1163558 - RNA, 17 nt, Human
cuuccacaagagcccag

SEQ ID NO: 1163559 - RNA, 19 nt, Human
cuuccacaagagcccaggc

SEQ ID NO: 1163560 - RNA, 21 nt, Human
cuuccacaagagcccaggccu

SEQ ID NO: 1163561 - RNA, 22 nt, Human
cuuccacaagagcccaggccuc

SEQ ID NO: 1163562 - RNA, 12 nt, Human
cuuccaggcugg

SEQ ID NO: 1163563 - RNA, 14 nt, Human
cuuccaggcuggga

SEQ ID NO: 1163564 - RNA, 17 nt, Human
cuucccuacaguugaaa

SEQ ID NO: 1163565 - RNA, 15 nt, Human
cuuccaggcugggag

SEQ ID NO: 1163566 - RNA, 16 nt, Human
cuuccaggcugggaga

SEQ ID NO: 1163567 - RNA, 19 nt, Human
cuuccaggcugggagagcc

SEQ ID NO: 1163568 - RNA, 14 nt, Human
cuuccagggguggg

SEQ ID NO: 1163569 - RNA, 15 nt, Human
cuuccagggguggga

SEQ ID NO: 1163570 - RNA, 17 nt, Human
cuuccaggggugggaca

SEQ ID NO: 1163571 - RNA, 21 nt, Human
cuuccaggggugggacacccu

SEQ ID NO: 1163572 - RNA, 11 nt, Human
cuucuccacuu

SEQ ID NO: 1163573 - RNA, 20 nt, Human
cuucuccacuuucuagccag

SEQ ID NO: 1163574 - RNA, 12 nt, Human
cuucuccaggcu

SEQ ID NO: 1163575 - RNA, 13 nt, Human
cuucuccaggcug

SEQ ID NO: 1163576 - RNA, 14 nt, Human
cuucuccaggcugu

SEQ ID NO: 1163577 - RNA, 19 nt, Human
cuucuccuucaccuuuguc

SEQ ID NO: 1163578 - RNA, 13 nt, Human
cuucucuccagcc

SEQ ID NO: 1163579 - RNA, 15 nt, Human
cuucucuccagcccc

SEQ ID NO: 1163580 - RNA, 17 nt, Human
cuucucuccagccccug

SEQ ID NO: 1163581 - RNA, 19 nt, Human
cuucucuccagccccugga

SEQ ID NO: 1163582 - RNA, 13 nt, Human
cuucucugaagga

SEQ ID NO: 1163583 - RNA, 13 nt, Human
cuucugcuucagc

SEQ ID NO: 1163584 - RNA, 14 nt, Human
cuucuguacgucug

SEQ ID NO: 1163585 - RNA, 15 nt, Human
cuucuguacgucuga

SEQ ID NO: 1163586 - RNA, 18 nt, Human
cuucuguacgucugacag

SEQ ID NO: 1163587 - RNA, 20 nt, Human
cuucuguacgucugacaggc

SEQ ID NO: 1163588 - RNA, 21 nt, Human
cuucuguacgucugacaggca

SEQ ID NO: 1163589 - RNA, 16 nt, Human
cuucuguccuacucug

SEQ ID NO: 1163590 - RNA, 17 nt, Human
cuucuguccuacucugu

SEQ ID NO: 1163591 - RNA, 18 nt, Human
cuucuguccuacucugug

SEQ ID NO: 1163592 - RNA, 19 nt, Human
cuucuguccuacucugugu

SEQ ID NO: 1163593 - RNA, 21 nt, Human
cuucuguccuacucuguguca

SEQ ID NO: 1163594 - RNA, 13 nt, Human
cuucuguggguuu

SEQ ID NO: 1163595 - RNA, 14 nt, Human
cuucuguggguuuc

SEQ ID NO: 1163596 - RNA, 21 nt, Human
cuucuguggguuucuaaagcu

SEQ ID NO: 1163597 - RNA, 22 nt, Human
cuucuuuauaauucuacuuuga

SEQ ID NO: 1163598 - RNA, 14 nt, Human
cuugaaaacacugu

SEQ ID NO: 1163599 - RNA, 23 nt, Human
cuugaaaacacuguucucugccc

SEQ ID NO: 1163600 - RNA, 13 nt, Human
cuugaacuccugg

SEQ ID NO: 1163601 - RNA, 14 nt, Human
cuugaacccgggag

SEQ ID NO: 1163602 - RNA, 17 nt, Human
cuugaacuuugaccucu

SEQ ID NO: 1163603 - RNA, 21 nt, Human
cuugaacuuugaccucugcag

SEQ ID NO: 1163604 - RNA, 22 nt, Human
cuugaccauucuccaccugcca

SEQ ID NO: 1163605 - RNA, 23 nt, Human
cuugaccauucuccaccugccag

SEQ ID NO: 1163606 - RNA, 16 nt, Human
cuugaagacuuuucuu

SEQ ID NO: 1163607 - RNA, 17 nt, Human
cuugaccgugaggccag

SEQ ID NO: 1163608 - RNA, 18 nt, Human
cuugaccgugaggccaga

SEQ ID NO: 1163609 - RNA, 20 nt, Human
cuugaccgugaggccagaga

SEQ ID NO: 1163610 - RNA, 21 nt, Human
cuugaccgugaggccagagac

SEQ ID NO: 1163611 - RNA, 13 nt, Human
cuugaccucaggu

SEQ ID NO: 1163612 - RNA, 15 nt, Human
cuugagccuugaacu

SEQ ID NO: 1163613 - RNA, 17 nt, Human
cuugagccuugaacuuu

SEQ ID NO: 1163614 - RNA, 18 nt, Human
cuugagccuugaacuuug

SEQ ID NO: 1163615 - RNA, 19 nt, Human
cuugaggguugggcuggug

SEQ ID NO: 1163616 - RNA, 20 nt, Human
cuugaggguugggcuggugu

SEQ ID NO: 1163617 - RNA, 21 nt, Human
cuugaggguugggcugguguc

SEQ ID NO: 1163618 - RNA, 17 nt, Human
cuuucuggcuaugcauu

SEQ ID NO: 1163619 - RNA, 18 nt, Human
cuuucuggcuaugcauuu

SEQ ID NO: 1163620 - RNA, 19 nt, Human
cuuucuggcuaugcauuug

SEQ ID NO: 1163621 - RNA, 20 nt, Human
cuuucuggcuaugcauuuga

SEQ ID NO: 1163622 - RNA, 13 nt, Human
cuuuccugaggcu

SEQ ID NO: 1163623 - RNA, 15 nt, Human
cuuuccugaggcugg

SEQ ID NO: 1163624 - RNA, 16 nt, Human
cuuuccugaggcuggg

SEQ ID NO: 1163625 - RNA, 15 nt, Human
cuuuccaucuacccu

SEQ ID NO: 1163626 - RNA, 11 nt, Human
cuuucccuccc

SEQ ID NO: 1163627 - RNA, 13 nt, Human
cuuucccucccuu

SEQ ID NO: 1163628 - RNA, 14 nt, Human
cuuucccucccuuc

SEQ ID NO: 1163629 - RNA, 16 nt, Human
cuuucccucccuuccu

SEQ ID NO: 1163630 - RNA, 12 nt, Human
cuuuccugaggc

SEQ ID NO: 1163631 - RNA, 14 nt, Human
cuuugaccucugca

SEQ ID NO: 1163632 - RNA, 15 nt, Human
cuuugaccucugcag

SEQ ID NO: 1163633 - RNA, 17 nt, Human
cuuugaccucugcagca

SEQ ID NO: 1163634 - RNA, 18 nt, Human
cuuugaccucugcagcaa

SEQ ID NO: 1163635 - RNA, 20 nt, Human
cuuugaccucugcagcaaua

SEQ ID NO: 1163636 - RNA, 24 nt, Human
cuuugaccucugcagcaauaaagc

SEQ ID NO: 1163637 - RNA, 20 nt, Human
cuuugcagacaggcaagcac

SEQ ID NO: 1163638 - RNA, 15 nt, Human
cuuuguccccaccgc

SEQ ID NO: 1163639 - RNA, 15 nt, Human
cuuugugaggaagcc

SEQ ID NO: 1163640 - RNA, 19 nt, Human
cuuugugaggaagccgcug

SEQ ID NO: 1163641 - RNA, 19 nt, Human
cuuuggcuauuagagauca

SEQ ID NO: 1163642 - RNA, 14 nt, Human
cuuuguccccaccg

SEQ ID NO: 1163643 - RNA, 17 nt, Human
cuuguacuuuauuuucu

SEQ ID NO: 1163644 - RNA, 23 nt, Human
cuugucaauaaaauccauacauu

SEQ ID NO: 1163645 - RNA, 19 nt, Human
cuugaguuuaaauuguaau

SEQ ID NO: 1163646 - RNA, 23 nt, Human
cuuggggggcugaggugggagga

SEQ ID NO: 1163647 - RNA, 17 nt, Human
cuuguaaauagcucagg

SEQ ID NO: 1163648 - RNA, 18 nt, Human
cuuguaaauagcucaggu

SEQ ID NO: 1163649 - RNA, 15 nt, Human
cuuguacauaaugcg

SEQ ID NO: 1163650 - RNA, 19 nt, Human
cuuguacauaaugcgugca

SEQ ID NO: 1163651 - RNA, 21 nt, Human
cuuguacauaaugcgugcaua

SEQ ID NO: 1163652 - RNA, 22 nt, Human
cuuguacauaaugcgugcauac

SEQ ID NO: 1163653 - RNA, 21 nt, Human
cuuguaaauagcucagguguc

SEQ ID NO: 1163654 - RNA, 13 nt, Human
cuuuacuauggcc

SEQ ID NO: 1163655 - RNA, 14 nt, Human
cuuuagcgcccagu

SEQ ID NO: 1163656 - RNA, 15 nt, Human
cuuuagcgcccaguu

SEQ ID NO: 1163657 - RNA, 19 nt, Human
cuuuauaauucuacuuuga

SEQ ID NO: 1163658 - RNA, 15 nt, Human
cuuuaugcacaaaau

SEQ ID NO: 1163659 - RNA, 18 nt, Human
gaaaaucuuauaauuuaa

SEQ ID NO: 1163660 - RNA, 20 nt, Human
gaaaaucagccugcuccagc

SEQ ID NO: 1163661 - RNA, 22 nt, Human
gaaaaucagccugcuccagcug

SEQ ID NO: 1163662 - RNA, 22 nt, Human
gaaaaucuacacuccagugaga

SEQ ID NO: 1163663 - RNA, 11 nt, Human
gaaaauaaaaa

SEQ ID NO: 1163664 - RNA, 12 nt, Human
gaaaauaaaaag

SEQ ID NO: 1163665 - RNA, 13 nt, Human
gaaaauaaaaagu

SEQ ID NO: 1163666 - RNA, 14 nt, Human
gaaaauaaaaaguu

SEQ ID NO: 1163667 - RNA, 24 nt, Human
gaaaacacuguucucugcccucca

SEQ ID NO: 1163668 - RNA, 20 nt, Human
gaaaacguggcugcuucaag

SEQ ID NO: 1163669 - RNA, 22 nt, Human
gaaaacguggcugcuucaagga

SEQ ID NO: 1163670 - RNA, 20 nt, Human
cuuuuguucuugguuuguaa

SEQ ID NO: 1163671 - RNA, 18 nt, Human
cuuuguuaguuucuccaa

SEQ ID NO: 1163672 - RNA, 15 nt, Human
cuuuguucagccugc

SEQ ID NO: 1163673 - RNA, 11 nt, Human
cuuuuguucuu

SEQ ID NO: 1163674 - RNA, 12 nt, Human
cuuuuguucuug

SEQ ID NO: 1163675 - RNA, 17 nt, Human
cuuuuuuggcugcugaa

SEQ ID NO: 1163676 - RNA, 20 nt, Human
cuuuuuuggcugcugaaggc

SEQ ID NO: 1163677 - RNA, 22 nt, Human
cuuuuuuggcugcugaaggcuc

SEQ ID NO: 1163678 - RNA, 23 nt, Human
cuuuuuuggcugcugaaggcucg

SEQ ID NO: 1163679 - RNA, 12 nt, Human
gaaaaaggagga

SEQ ID NO: 1163680 - RNA, 15 nt, Human
gaaaaaggaggaaga

SEQ ID NO: 1163681 - RNA, 17 nt, Human
gaaaaaggaugcacaga

SEQ ID NO: 1163682 - RNA, 18 nt, Human
gaaaacacauuuuucuua

SEQ ID NO: 1163683 - RNA, 19 nt, Human
gaaaacacauuuuucuuag

SEQ ID NO: 1163684 - RNA, 18 nt, Human
gaaaacacuguucucugc

SEQ ID NO: 1163685 - RNA, 16 nt, Human
gaaacacaacuauauu

SEQ ID NO: 1163686 - RNA, 13 nt, Human
gaaacccagcucu

SEQ ID NO: 1163687 - RNA, 14 nt, Human
gaaacccagcucug

SEQ ID NO: 1163688 - RNA, 15 nt, Human
gaaacccagcucugg

SEQ ID NO: 1163689 - RNA, 16 nt, Human
gaaacccagcucuggu

SEQ ID NO: 1163690 - RNA, 18 nt, Human
gaaacccagcucuggucc

SEQ ID NO: 1163691 - RNA, 19 nt, Human
gaaacccagcucuggucca

SEQ ID NO: 1163692 - RNA, 23 nt, Human
gaaacccagcucugguccauaga

SEQ ID NO: 1163693 - RNA, 15 nt, Human
gaaacccccacacac

SEQ ID NO: 1163694 - RNA, 16 nt, Human
gaaacccccacacaca

SEQ ID NO: 1163695 - RNA, 17 nt, Human
gaaacccccacacacac

SEQ ID NO: 1163696 - RNA, 23 nt, Human
gaaacccccacacacacacacau

SEQ ID NO: 1163697 - RNA, 14 nt, Human
gaaacccugucucu

SEQ ID NO: 1163698 - RNA, 23 nt, Human
gaaacucguuaauuuguaguguu

SEQ ID NO: 1163699 - RNA, 19 nt, Human
gaaagacuuuuccaacccu

SEQ ID NO: 1163700 - RNA, 17 nt, Human
gaaagagaacuuccaga

SEQ ID NO: 1163701 - RNA, 21 nt, Human
gaaagaggaaugaaguacuca

SEQ ID NO: 1163702 - RNA, 15 nt, Human
gaaagaguaggaaga

SEQ ID NO: 1163703 - RNA, 16 nt, Human
gaaagaguaggaagac

SEQ ID NO: 1163704 - RNA, 17 nt, Human
gaaagcagaacagugau

SEQ ID NO: 1163705 - RNA, 22 nt, Human
gaaagcagaacagugauuacca

SEQ ID NO: 1163706 - RNA, 14 nt, Human
gaaagcagggacuu

SEQ ID NO: 1163707 - RNA, 17 nt, Human
gaaagcccugagcuuuc

SEQ ID NO: 1163708 - RNA, 21 nt, Human
gaaagcccugagcuuucugcu

SEQ ID NO: 1163709 - RNA, 22 nt, Human
gaaagcccugagcuuucugcua

SEQ ID NO: 1163710 - RNA, 17 nt, Human
gaaagcccugugcucca

SEQ ID NO: 1163711 - RNA, 21 nt, Human
gaaagcuugcccuggugccuc

SEQ ID NO: 1163712 - RNA, 21 nt, Human
gaaugcacaaacagaggccgc

SEQ ID NO: 1163713 - RNA, 18 nt, Human
gaaugaaccacaucuugc

SEQ ID NO: 1163714 - RNA, 11 nt, Human
gaaugcagugg

SEQ ID NO: 1163715 - RNA, 20 nt, Human
gaaugcacaaacagaggccg

SEQ ID NO: 1163716 - RNA, 12 nt, Human
gaaaggcuccag

SEQ ID NO: 1163717 - RNA, 20 nt, Human
gaauccagacccggcugcgu

SEQ ID NO: 1163718 - RNA, 13 nt, Human
gaaugucagugug

SEQ ID NO: 1163719 - RNA, 15 nt, Human
gaauguuugccucug

SEQ ID NO: 1163720 - RNA, 16 nt, Human
gaauugacccacaaga

SEQ ID NO: 1163721 - RNA, 21 nt, Human
gaauugacccacaagaaauga

SEQ ID NO: 1163722 - RNA, 16 nt, Human
gaauuggagcucgugg

SEQ ID NO: 1163723 - RNA, 22 nt, Human
gaauuucuuuugccguuauuaa

SEQ ID NO: 1163724 - RNA, 15 nt, Human
gaauuguaaggaaug

SEQ ID NO: 1163725 - RNA, 22 nt, Human
gacaacacucauugaccugagg

SEQ ID NO: 1163726 - RNA, 23 nt, Human
gacaacacucauugaccugaggc

SEQ ID NO: 1163727 - RNA, 19 nt, Human
gacaaugugaaaagaaaaa

SEQ ID NO: 1163728 - RNA, 20 nt, Human
gacaaugugaaaagaaaaau

SEQ ID NO: 1163729 - RNA, 22 nt, Human
gacaaugcaaaccaucauugaa

SEQ ID NO: 1163730 - RNA, 12 nt, Human
gacaaugugaaa

SEQ ID NO: 1163731 - RNA, 18 nt, Human
gacaaugugaaaagaaaa

SEQ ID NO: 1163732 - RNA, 16 nt, Human
gacaaggaaaaaauaa

SEQ ID NO: 1163733 - RNA, 21 nt, Human
gacaaggaugaucuaggaaga

SEQ ID NO: 1163734 - RNA, 18 nt, Human
gacaaggauugcuacugu

SEQ ID NO: 1163735 - RNA, 19 nt, Human
gacaaggauugcuacuguc

SEQ ID NO: 1163736 - RNA, 21 nt, Human
gacaaggauugcuacuguccu

SEQ ID NO: 1163737 - RNA, 16 nt, Human
gacacaagccuucggc

SEQ ID NO: 1163738 - RNA, 22 nt, Human
gacacaagccuucggcgccuua

SEQ ID NO: 1163739 - RNA, 19 nt, Human
gacacaggcccggcuccag

SEQ ID NO: 1163740 - RNA, 20 nt, Human
gacacaggcccggcuccagg

SEQ ID NO: 1163741 - RNA, 21 nt, Human
gacacaggcccggcuccaggc

SEQ ID NO: 1163742 - RNA, 14 nt, Human
gacacaugcaaggu

SEQ ID NO: 1163743 - RNA, 19 nt, Human
gacacaugcaaggucauuu

SEQ ID NO: 1163744 - RNA, 15 nt, Human
gacacauguccaaga

SEQ ID NO: 1163745 - RNA, 20 nt, Human
gacacauguccaagaagccc

SEQ ID NO: 1163746 - RNA, 23 nt, Human
gacacauguccaagaagcccagg

SEQ ID NO: 1163747 - RNA, 18 nt, Human
gacaugggaaaggggaag

SEQ ID NO: 1163748 - RNA, 16 nt, Human
gacaugggacauuugc

SEQ ID NO: 1163749 - RNA, 17 nt, Human
gacaugggacauuugcu

SEQ ID NO: 1163750 - RNA, 14 nt, Human
gaccacguuucuaa

SEQ ID NO: 1163751 - RNA, 16 nt, Human
gaccacguuucuaaag

SEQ ID NO: 1163752 - RNA, 21 nt, Human
gaccacugcagaagacaguau

SEQ ID NO: 1163753 - RNA, 21 nt, Human
gaccagacaccuugacagggc

SEQ ID NO: 1163754 - RNA, 11 nt, Human
gaccagagcug

SEQ ID NO: 1163755 - RNA, 18 nt, Human
gaccagagcugccaccug

SEQ ID NO: 1163756 - RNA, 19 nt, Human
gaccagagcugccaccugc

SEQ ID NO: 1163757 - RNA, 13 nt, Human
gaccagagcugcc

SEQ ID NO: 1163758 - RNA, 14 nt, Human
gaccagagcugcca

SEQ ID NO: 1163759 - RNA, 15 nt, Human
gaccagagcugccac

SEQ ID NO: 1163760 - RNA, 17 nt, Human
gaccagagcugccaccu

SEQ ID NO: 1163761 - RNA, 19 nt, Human
gaccauucuccaccugcca

SEQ ID NO: 1163762 - RNA, 20 nt, Human
gaccauucuccaccugccag

SEQ ID NO: 1163763 - RNA, 21 nt, Human
gaccauucuccaccugccagg

SEQ ID NO: 1163764 - RNA, 22 nt, Human
gaccauucuccaccugccaggg

SEQ ID NO: 1163765 - RNA, 16 nt, Human
gacccaaaaggcagaa

SEQ ID NO: 1163766 - RNA, 18 nt, Human
gacccaaaaggcagaagc

SEQ ID NO: 1163767 - RNA, 15 nt, Human
gacccacaagaaaug

SEQ ID NO: 1163768 - RNA, 22 nt, Human
gacccacaagaaaugaaagcag

SEQ ID NO: 1163769 - RNA, 14 nt, Human
gaccccuccaugug

SEQ ID NO: 1163770 - RNA, 18 nt, Human
gaccccuccaugugggcu

SEQ ID NO: 1163771 - RNA, 21 nt, Human
gaccccuccaugugggcuagu

SEQ ID NO: 1163772 - RNA, 23 nt, Human
gacccugaggcccagagggccug

SEQ ID NO: 1163773 - RNA, 12 nt, Human
gacccugcccug

SEQ ID NO: 1163774 - RNA, 12 nt, Human
gacccugucuca

SEQ ID NO: 1163775 - RNA, 19 nt, Human
gacccuuguggucccaccc

SEQ ID NO: 1163776 - RNA, 20 nt, Human
gacccuuguggucccacccc

SEQ ID NO: 1163777 - RNA, 21 nt, Human
gacccuuguggucccacccca

SEQ ID NO: 1163778 - RNA, 23 nt, Human
gacccugucucaaaaaaagaaaa

SEQ ID NO: 1163779 - RNA, 16 nt, Human
gaccgugaggccagag

SEQ ID NO: 1163780 - RNA, 17 nt, Human
gaccgugaggccagaga

SEQ ID NO: 1163781 - RNA, 18 nt, Human
gaccgugaggccagagac

SEQ ID NO: 1163782 - RNA, 19 nt, Human
gaccgugaggccagagaca

SEQ ID NO: 1163783 - RNA, 21 nt, Human
gacagagcaagugagacccug

SEQ ID NO: 1163784 - RNA, 14 nt, Human
gacagaggcagccc

SEQ ID NO: 1163785 - RNA, 16 nt, Human
gacagaggcagcccca

SEQ ID NO: 1163786 - RNA, 17 nt, Human
gacagaggcagccccau

SEQ ID NO: 1163787 - RNA, 15 nt, Human
gacagaggggguggc

SEQ ID NO: 1163788 - RNA, 18 nt, Human
gacagaggggguggccuc

SEQ ID NO: 1163789 - RNA, 19 nt, Human
gacagaggggguggccucc

SEQ ID NO: 1163790 - RNA, 21 nt, Human
gacagaggggguggccuccca

SEQ ID NO: 1163791 - RNA, 22 nt, Human
gacagaggggguggccucccaa

SEQ ID NO: 1163792 - RNA, 23 nt, Human
gacagaggggguggccucccaac

SEQ ID NO: 1163793 - RNA, 14 nt, Human
gacagagucucacu

SEQ ID NO: 1163794 - RNA, 20 nt, Human
gacagagugagacucugucu

SEQ ID NO: 1163795 - RNA, 22 nt, Human
gacagagugagacucugucuca

SEQ ID NO: 1163796 - RNA, 23 nt, Human
gacagaggcagccccauucugcc

SEQ ID NO: 1163797 - RNA, 14 nt, Human
gacagccacggcca

SEQ ID NO: 1163798 - RNA, 17 nt, Human
gacagccacggccaggc

SEQ ID NO: 1163799 - RNA, 18 nt, Human
gacagccacggccaggcc

SEQ ID NO: 1163800 - RNA, 19 nt, Human
gacagccacggccaggcca

SEQ ID NO: 1163801 - RNA, 20 nt, Human
gacagccacggccaggccag

SEQ ID NO: 1163802 - RNA, 21 nt, Human
gacagccacggccaggccaga

SEQ ID NO: 1163803 - RNA, 16 nt, Human
gacagcugccugggau

SEQ ID NO: 1163804 - RNA, 17 nt, Human
gacagcugccugggauc

SEQ ID NO: 1163805 - RNA, 18 nt, Human
gacagcugccugggaucc

SEQ ID NO: 1163806 - RNA, 21 nt, Human
gacagcugccugggaucccuc

SEQ ID NO: 1163807 - RNA, 14 nt, Human
gacaggaccaggga

SEQ ID NO: 1163808 - RNA, 15 nt, Human
gacaggaccagggau

SEQ ID NO: 1163809 - RNA, 23 nt, Human
gacaggaccagggauuuccauga

SEQ ID NO: 1163810 - RNA, 17 nt, Human
gacagggaggacgcucu

SEQ ID NO: 1163811 - RNA, 18 nt, Human
gacagggaggacgcucuc

SEQ ID NO: 1163812 - RNA, 16 nt, Human
gacagggaggugaccc

SEQ ID NO: 1163813 - RNA, 23 nt, Human
gacagggcacaccgggcacucag

SEQ ID NO: 1163814 - RNA, 24 nt, Human
gacagggcacaccgggcacucaga

SEQ ID NO: 1163815 - RNA, 14 nt, Human
gacaguuaagagaa

SEQ ID NO: 1163816 - RNA, 22 nt, Human
gacaguuaagagaaaugagcuu

SEQ ID NO: 1163817 - RNA, 20 nt, Human
gacauagaauuaacacauga

SEQ ID NO: 1163818 - RNA, 14 nt, Human
gacaugaucuucuu

SEQ ID NO: 1163819 - RNA, 14 nt, Human
gacaugggaaaggg

SEQ ID NO: 1163820 - RNA, 12 nt, Human
gacuccugcagg

SEQ ID NO: 1163821 - RNA, 14 nt, Human
gacuccugcaggca

SEQ ID NO: 1163822 - RNA, 13 nt, Human
gacuccugcaggc

SEQ ID NO: 1163823 - RNA, 13 nt, Human
gacucgcgacaau

SEQ ID NO: 1163824 - RNA, 18 nt, Human
gacuacaggugugaguca

SEQ ID NO: 1163825 - RNA, 21 nt, Human
gacuacaggugugagucacca

SEQ ID NO: 1163826 - RNA, 15 nt, Human
gacucauucuucugu

SEQ ID NO: 1163827 - RNA, 17 nt, Human
gacucgcgacaaugcaa

SEQ ID NO: 1163828 - RNA, 18 nt, Human
gacucgcgacaaugcaaa

SEQ ID NO: 1163829 - RNA, 21 nt, Human
gacugaguacguugugcauuu

SEQ ID NO: 1163830 - RNA, 22 nt, Human
gacugaguacguugugcauuug

SEQ ID NO: 1163831 - RNA, 23 nt, Human
gacugaguacguugugcauuugg

SEQ ID NO: 1163832 - RNA, 14 nt, Human
gacugcauuauauu

SEQ ID NO: 1163833 - RNA, 16 nt, Human
gacugcauuauauuua

SEQ ID NO: 1163834 - RNA, 24 nt, Human
gacugcauuauauuuauuacugua

SEQ ID NO: 1163835 - RNA, 13 nt, Human
gacugcccggcag

SEQ ID NO: 1163836 - RNA, 15 nt, Human
gacugcccggcaggg

SEQ ID NO: 1163837 - RNA, 14 nt, Human
gacuggaagcacag

SEQ ID NO: 1163838 - RNA, 15 nt, Human
gacuggaagcacagc

SEQ ID NO: 1163839 - RNA, 16 nt, Human
gacuggaagcacagcu

SEQ ID NO: 1163840 - RNA, 18 nt, Human
gacuggaagcacagcuuc

SEQ ID NO: 1163841 - RNA, 19 nt, Human
gacuuaagcacacuugaca

SEQ ID NO: 1163842 - RNA, 13 nt, Human
gacuuggaagcuc

SEQ ID NO: 1163843 - RNA, 11 nt, Human
gagaaaauaaa

SEQ ID NO: 1163844 - RNA, 12 nt, Human
gagaaaauaaaa

SEQ ID NO: 1163845 - RNA, 13 nt, Human
gagaaaauaaaaa

SEQ ID NO: 1163846 - RNA, 14 nt, Human
gagaaaauaaaaag

SEQ ID NO: 1163847 - RNA, 15 nt, Human
gagaaaauaaaaagu

SEQ ID NO: 1163848 - RNA, 16 nt, Human
gagaaaauaaaaaguu

SEQ ID NO: 1163849 - RNA, 17 nt, Human
gagaaaauaaaaaguua

SEQ ID NO: 1163850 - RNA, 16 nt, Human
gagaaagguugaagca

SEQ ID NO: 1163851 - RNA, 22 nt, Human
gagaaaguacuucuccacccug

SEQ ID NO: 1163852 - RNA, 14 nt, Human
gagaaaugagcuug

SEQ ID NO: 1163853 - RNA, 21 nt, Human
gagaaccuagggugauauuaa

SEQ ID NO: 1163854 - RNA, 22 nt, Human
gagaaccuagggugauauuaac

SEQ ID NO: 1163855 - RNA, 22 nt, Human
gagaacuuccagauccuggaaa

SEQ ID NO: 1163856 - RNA, 23 nt, Human
gagaacuuccagauccuggaaau

SEQ ID NO: 1163857 - RNA, 13 nt, Human
gagaagaacugaa

SEQ ID NO: 1163858 - RNA, 14 nt, Human
gagaagagaaugca

SEQ ID NO: 1163859 - RNA, 16 nt, Human
gagaagagaaugcaca

SEQ ID NO: 1163860 - RNA, 16 nt, Human
gagaagcagaggaagg

SEQ ID NO: 1163861 - RNA, 17 nt, Human
gagaaugagagacacac

SEQ ID NO: 1163862 - RNA, 19 nt, Human
gagaggggaacagacugga

SEQ ID NO: 1163863 - RNA, 13 nt, Human
gagaggggcacag

SEQ ID NO: 1163864 - RNA, 14 nt, Human
gagagggugggagu

SEQ ID NO: 1163865 - RNA, 16 nt, Human
gagagggugggagugg

SEQ ID NO: 1163866 - RNA, 20 nt, Human
gagagggugggagugggccc

SEQ ID NO: 1163867 - RNA, 16 nt, Human
gagagaaaauaaaaag

SEQ ID NO: 1163868 - RNA, 17 nt, Human
gagagaaaauaaaaagu

SEQ ID NO: 1163869 - RNA, 18 nt, Human
gagagaaaauaaaaaguu

SEQ ID NO: 1163870 - RNA, 19 nt, Human
gagagaaaauaaaaaguua

SEQ ID NO: 1163871 - RNA, 20 nt, Human
gagagaaaauaaaaaguuaa

SEQ ID NO: 1163872 - RNA, 21 nt, Human
gagagaaaauaaaaaguuaaa

SEQ ID NO: 1163873 - RNA, 19 nt, Human
gagacuccugcaggcagcc

SEQ ID NO: 1163874 - RNA, 20 nt, Human
gagacuccugcaggcagcca

SEQ ID NO: 1163875 - RNA, 21 nt, Human
gagacuccugcaggcagccag

SEQ ID NO: 1163876 - RNA, 20 nt, Human
gagacucgcgacaaugcaaa

SEQ ID NO: 1163877 - RNA, 21 nt, Human
gagacucgcgacaaugcaaac

SEQ ID NO: 1163878 - RNA, 22 nt, Human
gagacuccugcaggcagccagg

SEQ ID NO: 1163879 - RNA, 13 nt, Human
gagacucugucuc

SEQ ID NO: 1163880 - RNA, 20 nt, Human
gagaaugagagacacacuga

SEQ ID NO: 1163881 - RNA, 21 nt, Human
gagaaugagagacacacugaa

SEQ ID NO: 1163882 - RNA, 23 nt, Human
gagaaugcacaaacagaggccgc

SEQ ID NO: 1163883 - RNA, 20 nt, Human
gagacagcucugcauacuca

SEQ ID NO: 1163884 - RNA, 22 nt, Human
gagacaggguuuugccauguug

SEQ ID NO: 1163885 - RNA, 14 nt, Human
gagaccaucccuga

SEQ ID NO: 1163886 - RNA, 18 nt, Human
gagaccaucccugaaggc

SEQ ID NO: 1163887 - RNA, 21 nt, Human
gagaccaucccugaaggcccc

SEQ ID NO: 1163888 - RNA, 14 nt, Human
gagauagccaaggc

SEQ ID NO: 1163889 - RNA, 16 nt, Human
gagauagccaaggcca

SEQ ID NO: 1163890 - RNA, 19 nt, Human
gagauagccaaggccaaag

SEQ ID NO: 1163891 - RNA, 18 nt, Human
gagaucacgccacugcac

SEQ ID NO: 1163892 - RNA, 19 nt, Human
gagaucacgccacugcacu

SEQ ID NO: 1163893 - RNA, 18 nt, Human
gagcaagacgcugugcug

SEQ ID NO: 1163894 - RNA, 20 nt, Human
gagcaccuuagacagucccu

SEQ ID NO: 1163895 - RNA, 21 nt, Human
gagcaccuuagacagucccug

SEQ ID NO: 1163896 - RNA, 22 nt, Human
gagcaccuuagacagucccugc

SEQ ID NO: 1163897 - RNA, 15 nt, Human
gagcacuaaggugug

SEQ ID NO: 1163898 - RNA, 21 nt, Human
gagcacuaaggugugcucuga

SEQ ID NO: 1163899 - RNA, 19 nt, Human
gagccaauuuaaagaaaac

SEQ ID NO: 1163900 - RNA, 16 nt, Human
gagcagagaauucucu

SEQ ID NO: 1163901 - RNA, 12 nt, Human
gagcagagacca

SEQ ID NO: 1163902 - RNA, 16 nt, Human
gagcagagaccauccc

SEQ ID NO: 1163903 - RNA, 23 nt, Human
gagccagauuucacucuccuugg

SEQ ID NO: 1163904 - RNA, 19 nt, Human
gagccagggucucacuaug

SEQ ID NO: 1163905 - RNA, 13 nt, Human
gaggaucucuuga

SEQ ID NO: 1163906 - RNA, 16 nt, Human
gaggaucucuugagcc

SEQ ID NO: 1163907 - RNA, 19 nt, Human
gaggaucucuugagccugg

SEQ ID NO: 1163908 - RNA, 22 nt, Human
gaggaucucuugagccugggag

SEQ ID NO: 1163909 - RNA, 20 nt, Human
gaggauugcuugagcucagg

SEQ ID NO: 1163910 - RNA, 19 nt, Human
gaggcagagguugcaguga

SEQ ID NO: 1163911 - RNA, 19 nt, Human
gaggcagccccauucugcc

SEQ ID NO: 1163912 - RNA, 20 nt, Human
gaggcagccccauucugccu

SEQ ID NO: 1163913 - RNA, 9 nt, Human
gaggcaggg

SEQ ID NO: 1163914 - RNA, 21 nt, Human
gaggcagccccauucugccug

SEQ ID NO: 1163915 - RNA, 14 nt, Human
gaggccaugggccu

SEQ ID NO: 1163916 - RNA, 17 nt, Human
gaggccaugggccuccu

SEQ ID NO: 1163917 - RNA, 18 nt, Human
gaggccaugggccuccug

SEQ ID NO: 1163918 - RNA, 20 nt, Human
gaggccaugggccuccugug

SEQ ID NO: 1163919 - RNA, 21 nt, Human
gaggccaugggccuccugugu

SEQ ID NO: 1163920 - RNA, 23 nt, Human
gaggccaugggccuccugugugu

SEQ ID NO: 1163921 - RNA, 11 nt, Human
gaggcccagag

SEQ ID NO: 1163922 - RNA, 13 nt, Human
gaggcccagaggg

SEQ ID NO: 1163923 - RNA, 14 nt, Human
gaggcccagagggc

SEQ ID NO: 1163924 - RNA, 15 nt, Human
gaggcccagagggcc

SEQ ID NO: 1163925 - RNA, 16 nt, Human
gaggcccagagggccu

SEQ ID NO: 1163926 - RNA, 19 nt, Human
gaggcccagagggccugca

SEQ ID NO: 1163927 - RNA, 15 nt, Human
gaggcccuucucucc

SEQ ID NO: 1163928 - RNA, 20 nt, Human
gaggcccuucucuccagccc

SEQ ID NO: 1163929 - RNA, 21 nt, Human
gaggcccuucucuccagcccc

SEQ ID NO: 1163930 - RNA, 22 nt, Human
gaggcccuucucuccagccccu

SEQ ID NO: 1163931 - RNA, 16 nt, Human
gaggccuucucugaag

SEQ ID NO: 1163932 - RNA, 18 nt, Human
gaggccuucucugaagga

SEQ ID NO: 1163933 - RNA, 19 nt, Human
gaggccuucucugaaggac

SEQ ID NO: 1163934 - RNA, 20 nt, Human
gagggagggcuccagacaca

SEQ ID NO: 1163935 - RNA, 14 nt, Human
gagggagguaagga

SEQ ID NO: 1163936 - RNA, 18 nt, Human
gagggagugacagaggca

SEQ ID NO: 1163937 - RNA, 21 nt, Human
gagggagugacagaggcagcc

SEQ ID NO: 1163938 - RNA, 22 nt, Human
gagggagugacagaggcagccc

SEQ ID NO: 1163939 - RNA, 20 nt, Human
gaggcugggcucccuuccca

SEQ ID NO: 1163940 - RNA, 19 nt, Human
gagggagggcuccagacac

SEQ ID NO: 1163941 - RNA, 14 nt, Human
gagggcacagaaaa

SEQ ID NO: 1163942 - RNA, 17 nt, Human
gaggggguggccuccca

SEQ ID NO: 1163943 - RNA, 13 nt, Human
gaggguaaggcug

SEQ ID NO: 1163944 - RNA, 13 nt, Human
gagggucugagga

SEQ ID NO: 1163945 - RNA, 14 nt, Human
gagggucugaggaa

SEQ ID NO: 1163946 - RNA, 21 nt, Human
gagggugaagugaagacaaug

SEQ ID NO: 1163947 - RNA, 12 nt, Human
gaggguggaaua

SEQ ID NO: 1163948 - RNA, 15 nt, Human
gagggugggaguggg

SEQ ID NO: 1163949 - RNA, 14 nt, Human
gaggguggugaccu

SEQ ID NO: 1163950 - RNA, 21 nt, Human
gaggguggugaccucugccug

SEQ ID NO: 1163951 - RNA, 22 nt, Human
gagggugucccaaaaagaaagg

SEQ ID NO: 1163952 - RNA, 14 nt, Human
gaggguugggcugg

SEQ ID NO: 1163953 - RNA, 15 nt, Human
gaggguugggcuggu

SEQ ID NO: 1163954 - RNA, 21 nt, Human
gagguaaggaauaccuguccc

SEQ ID NO: 1163955 - RNA, 24 nt, Human
gagguaaggaauaccugucccccu

SEQ ID NO: 1163956 - RNA, 17 nt, Human
gaggucaaggcugcagu

SEQ ID NO: 1163957 - RNA, 12 nt, Human
gaggucagagcc

SEQ ID NO: 1163958 - RNA, 13 nt, Human
gaggucagagccu

SEQ ID NO: 1163959 - RNA, 22 nt, Human
gauaaauggcuuccuggcaaua

SEQ ID NO: 1163960 - RNA, 15 nt, Human
gaguugaagacagag

SEQ ID NO: 1163961 - RNA, 17 nt, Human
gaguugaagacagagcu

SEQ ID NO: 1163962 - RNA, 21 nt, Human
gaguugaagacagagcuacac

SEQ ID NO: 1163963 - RNA, 13 nt, Human
gaguuacagacaa

SEQ ID NO: 1163964 - RNA, 15 nt, Human
gaguuacagacaaag

SEQ ID NO: 1163965 - RNA, 14 nt, Human
gaguucaucuugaa

SEQ ID NO: 1163966 - RNA, 19 nt, Human
gaguucaucuugaauugua

SEQ ID NO: 1163967 - RNA, 20 nt, Human
gaguucaucuugaauuguaa

SEQ ID NO: 1163968 - RNA, 17 nt, Human
gagugacagaggcagcc

SEQ ID NO: 1163969 - RNA, 13 nt, Human
gagugggugaaua

SEQ ID NO: 1163970 - RNA, 20 nt, Human
gagugugccugaagucccag

SEQ ID NO: 1163971 - RNA, 12 nt, Human
gaguuacagaca

SEQ ID NO: 1163972 - RNA, 22 nt, Human
gauaagaaccuuuugagugccu

SEQ ID NO: 1163973 - RNA, 20 nt, Human
gauacaggaaaagcugcuga

SEQ ID NO: 1163974 - RNA, 21 nt, Human
gauacaggaaaagcugcugac

SEQ ID NO: 1163975 - RNA, 23 nt, Human
gauacaggaaaagcugcugacag

SEQ ID NO: 1163976 - RNA, 15 nt, Human
gauagcacagacccu

SEQ ID NO: 1163977 - RNA, 16 nt, Human
gauagcacagacccug

SEQ ID NO: 1163978 - RNA, 22 nt, Human
gauagccaaggccaaaggaagc

SEQ ID NO: 1163979 - RNA, 15 nt, Human
gaucacggcucacug

SEQ ID NO: 1163980 - RNA, 16 nt, Human
gaucacggcucacugc

SEQ ID NO: 1163981 - RNA, 18 nt, Human
gaucacggcucacugcag

SEQ ID NO: 1163982 - RNA, 14 nt, Human
gaucacagccucug

SEQ ID NO: 1163983 - RNA, 20 nt, Human
gaucacggcucacugcagcc

SEQ ID NO: 1163984 - RNA, 17 nt, Human
gaggucagagccugcag

SEQ ID NO: 1163985 - RNA, 20 nt, Human
gaggucagagccugcaguua

SEQ ID NO: 1163986 - RNA, 15 nt, Human
gagguugggaggcca

SEQ ID NO: 1163987 - RNA, 17 nt, Human
gagguugggaggccauu

SEQ ID NO: 1163988 - RNA, 16 nt, Human
gagguuucaaaccucc

SEQ ID NO: 1163989 - RNA, 21 nt, Human
gaguacuacaguccucccauc

SEQ ID NO: 1163990 - RNA, 23 nt, Human
gaguacuacaguccucccaucuc

SEQ ID NO: 1163991 - RNA, 22 nt, Human
gaguagcugggacuacaggcac

SEQ ID NO: 1163992 - RNA, 12 nt, Human
gaguaggaagac

SEQ ID NO: 1163993 - RNA, 13 nt, Human
gaguaggaagacu

SEQ ID NO: 1163994 - RNA, 17 nt, Human
gaguaggaagacuuugg

SEQ ID NO: 1163995 - RNA, 18 nt, Human
gaguaggaagacuuugga

SEQ ID NO: 1163996 - RNA, 19 nt, Human
gaguaggaagacuuuggaa

SEQ ID NO: 1163997 - RNA, 11 nt, Human
gaguauauguc

SEQ ID NO: 1163998 - RNA, 19 nt, Human
gaguccgaaagggacuugg

SEQ ID NO: 1163999 - RNA, 14 nt, Human
gagucgaggacagg

SEQ ID NO: 1164000 - RNA, 15 nt, Human
gagucgaggacaggg

SEQ ID NO: 1164001 - RNA, 16 nt, Human
gagucgaggacaggga

SEQ ID NO: 1164002 - RNA, 19 nt, Human
gagucucacuguugcccag

SEQ ID NO: 1164003 - RNA, 12 nt, Human
gagucugaaggc

SEQ ID NO: 1164004 - RNA, 13 nt, Human
gagucugaaggcu

SEQ ID NO: 1164005 - RNA, 14 nt, Human
gagucugaaggcug

SEQ ID NO: 1164006 - RNA, 15 nt, Human
gagucugaaggcugg

SEQ ID NO: 1164007 - RNA, 17 nt, Human
gagugaagcugggagaa

SEQ ID NO: 1164008 - RNA, 14 nt, Human
gagugacagaggca

SEQ ID NO: 1164009 - RNA, 15 nt, Human
gagugacagaggcag

SEQ ID NO: 1164010 - RNA, 16 nt, Human
gagugacagaggcagc

SEQ ID NO: 1164011 - RNA, 20 nt, Human
gaugcuagaacucccuuuca

SEQ ID NO: 1164012 - RNA, 22 nt, Human
gaugcuagaacucccuuucaac

SEQ ID NO: 1164013 - RNA, 19 nt, Human
gaugcccaaagaugcagcc

SEQ ID NO: 1164014 - RNA, 20 nt, Human
gaugcccaaagaugcagccg

SEQ ID NO: 1164015 - RNA, 22 nt, Human
gauggccgggcgcgguggcuca

SEQ ID NO: 1164016 - RNA, 20 nt, Human
gaugggcaacccccagccug

SEQ ID NO: 1164017 - RNA, 21 nt, Human
gaugggcaacccccagccugc

SEQ ID NO: 1164018 - RNA, 22 nt, Human
gaugggcaacccccagccugcu

SEQ ID NO: 1164019 - RNA, 13 nt, Human
gauggggcugcac

SEQ ID NO: 1164020 - RNA, 15 nt, Human
gauggggcugcaccg

SEQ ID NO: 1164021 - RNA, 19 nt, Human
gauggggcugcaccggcug

SEQ ID NO: 1164022 - RNA, 19 nt, Human
gaugggugcuuggaggaag

SEQ ID NO: 1164023 - RNA, 22 nt, Human
gaugguucccuugaugaagaag

SEQ ID NO: 1164024 - RNA, 12 nt, Human
gauggugcaaug

SEQ ID NO: 1164025 - RNA, 14 nt, Human
gauggugcaaugac

SEQ ID NO: 1164026 - RNA, 15 nt, Human
gauggugcaaugacc

SEQ ID NO: 1164027 - RNA, 16 nt, Human
gauggugcaaugaccu

SEQ ID NO: 1164028 - RNA, 17 nt, Human
gauggugcaaugaccuu

SEQ ID NO: 1164029 - RNA, 23 nt, Human
gauuacaagcgugagccacugca

SEQ ID NO: 1164030 - RNA, 15 nt, Human
gauuaaacuuaaucu

SEQ ID NO: 1164031 - RNA, 22 nt, Human
gauuacaagcgugagccacugc

SEQ ID NO: 1164032 - RNA, 20 nt, Human
gauuacaggugugaaccacc

SEQ ID NO: 1164033 - RNA, 14 nt, Human
gauucuccugccuc

SEQ ID NO: 1164034 - RNA, 15 nt, Human
gauugcaacaggcug

SEQ ID NO: 1164035 - RNA, 15 nt, Human
gauuuaacagaaaug

SEQ ID NO: 1164036 - RNA, 22 nt, Human
gauuuccguuaaaauaccagcc

SEQ ID NO: 1164037 - RNA, 16 nt, Human
gauuuaacagaaaugu

SEQ ID NO: 1164038 - RNA, 13 nt, Human
gauuuaacagaaa

SEQ ID NO: 1164039 - RNA, 14 nt, Human
gauuuaacagaaau

SEQ ID NO: 1164040 - RNA, 16 nt, Human
gcaaauugucacagga

SEQ ID NO: 1164041 - RNA, 15 nt, Human
gcaaaccaucauuga

SEQ ID NO: 1164042 - RNA, 21 nt, Human
gauuuugaaauuuuuauuaaa

SEQ ID NO: 1164043 - RNA, 19 nt, Human
gauuuugauccaagcuggu

SEQ ID NO: 1164044 - RNA, 12 nt, Human
gcaaaccaucau

SEQ ID NO: 1164045 - RNA, 14 nt, Human
gcacaaacagaggc

SEQ ID NO: 1164046 - RNA, 15 nt, Human
gcacaaacagaggcc

SEQ ID NO: 1164047 - RNA, 16 nt, Human
gcacaaacagaggccg

SEQ ID NO: 1164048 - RNA, 14 nt, Human
gcaacucaucuuag

SEQ ID NO: 1164049 - RNA, 15 nt, Human
gcaauggcagccuug

SEQ ID NO: 1164050 - RNA, 14 nt, Human
gcaaugugauaaaa

SEQ ID NO: 1164051 - RNA, 15 nt, Human
gcacaagcuccaagc

SEQ ID NO: 1164052 - RNA, 17 nt, Human
gcacaagcuccaagcuc

SEQ ID NO: 1164053 - RNA, 18 nt, Human
gcacaagcuccaagcucc

SEQ ID NO: 1164054 - RNA, 21 nt, Human
gcacaagcuccaagcucccag

SEQ ID NO: 1164055 - RNA, 20 nt, Human
gcacagaaaauggaagacag

SEQ ID NO: 1164056 - RNA, 21 nt, Human
gcacagaaaauggaagacagc

SEQ ID NO: 1164057 - RNA, 22 nt, Human
gcacagaaaauggaagacagcu

SEQ ID NO: 1164058 - RNA, 23 nt, Human
gcacagaaaauggaagacagcuc

SEQ ID NO: 1164059 - RNA, 14 nt, Human
gcacagacccugcc

SEQ ID NO: 1164060 - RNA, 15 nt, Human
gcacagacccugccc

SEQ ID NO: 1164061 - RNA, 16 nt, Human
gcacagacccugcccu

SEQ ID NO: 1164062 - RNA, 17 nt, Human
gcacagacccugcccug

SEQ ID NO: 1164063 - RNA, 18 nt, Human
gcacagacccugcccugu

SEQ ID NO: 1164064 - RNA, 19 nt, Human
gcacagacccugcccugug

SEQ ID NO: 1164065 - RNA, 20 nt, Human
gcacagacccugcccugugg

SEQ ID NO: 1164066 - RNA, 21 nt, Human
gcacagacccugcccuguggg

SEQ ID NO: 1164067 - RNA, 22 nt, Human
gcacagacccugcccugugggc

SEQ ID NO: 1164068 - RNA, 15 nt, Human
gcacagaguuguuac

SEQ ID NO: 1164069 - RNA, 16 nt, Human
gcacagaguuguuaca

SEQ ID NO: 1164070 - RNA, 18 nt, Human
gcacagaguuguuacauu

SEQ ID NO: 1164071 - RNA, 19 nt, Human
gcacagaguuguuacauuu

SEQ ID NO: 1164072 - RNA, 21 nt, Human
gcacagaguuguuacauuuuu

SEQ ID NO: 1164073 - RNA, 22 nt, Human
gcacagaguuguuacauuuuua

SEQ ID NO: 1164074 - RNA, 12 nt, Human
gcaccauaacuu

SEQ ID NO: 1164075 - RNA, 20 nt, Human
gcaccuuagacagucccugc

SEQ ID NO: 1164076 - RNA, 21 nt, Human
gcaccuuagacagucccugcc

SEQ ID NO: 1164077 - RNA, 15 nt, Human
gcacgauuucuguuu

SEQ ID NO: 1164078 - RNA, 16 nt, Human
gcacgauuucuguuua

SEQ ID NO: 1164079 - RNA, 23 nt, Human
gcacugcuuccagugaggcucug

SEQ ID NO: 1164080 - RNA, 19 nt, Human
gcacuguggguagacacac

SEQ ID NO: 1164081 - RNA, 12 nt, Human
gcagacaggcaa

SEQ ID NO: 1164082 - RNA, 13 nt, Human
gcagacaggcaag

SEQ ID NO: 1164083 - RNA, 14 nt, Human
gcagacaggcaagc

SEQ ID NO: 1164084 - RNA, 15 nt, Human
gcagacucuacagag

SEQ ID NO: 1164085 - RNA, 17 nt, Human
gcagacucuacagaggc

SEQ ID NO: 1164086 - RNA, 13 nt, Human
gccccugccaccc

SEQ ID NO: 1164087 - RNA, 14 nt, Human
gccccugccacccu

SEQ ID NO: 1164088 - RNA, 15 nt, Human
gccccugccacccug

SEQ ID NO: 1164089 - RNA, 16 nt, Human
gccccugccacccugg

SEQ ID NO: 1164090 - RNA, 21 nt, Human
gccccuguucuggcagaguug

SEQ ID NO: 1164091 - RNA, 12 nt, Human
gcccggcuccag

SEQ ID NO: 1164092 - RNA, 16 nt, Human
gcccggcuccaggcuc

SEQ ID NO: 1164093 - RNA, 17 nt, Human
gcccggcuccaggcucc

SEQ ID NO: 1164094 - RNA, 18 nt, Human
gcccggcuccaggcuccu

SEQ ID NO: 1164095 - RNA, 12 nt, Human
gcccucugccca

SEQ ID NO: 1164096 - RNA, 16 nt, Human
gcccugagcuuucugc

SEQ ID NO: 1164097 - RNA, 14 nt, Human
gcccugguggcagu

SEQ ID NO: 1164098 - RNA, 17 nt, Human
gcccugguggcaguggg

SEQ ID NO: 1164099 - RNA, 18 nt, Human
gcccugguggcaguggga

SEQ ID NO: 1164100 - RNA, 19 nt, Human
gcccugguggcagugggag

SEQ ID NO: 1164101 - RNA, 20 nt, Human
gcccugguggcagugggagc

SEQ ID NO: 1164102 - RNA, 21 nt, Human
gcccugguggcagugggagcu

SEQ ID NO: 1164103 - RNA, 22 nt, Human
gcccugguggcagugggagcug

SEQ ID NO: 1164104 - RNA, 23 nt, Human
gcccugguggcagugggagcugc

SEQ ID NO: 1164105 - RNA, 19 nt, Human
gcccuucucuccagccccu

SEQ ID NO: 1164106 - RNA, 23 nt, Human
gcccuucucuccagccccuggau

SEQ ID NO: 1164107 - RNA, 21 nt, Human
gcccuucucuccagccccugg

SEQ ID NO: 1164108 - RNA, 22 nt, Human
gcccuucucuccagccccugga

SEQ ID NO: 1164109 - RNA, 16 nt, Human
gccgagaucacgccac

SEQ ID NO: 1164110 - RNA, 18 nt, Human
gccgagaucacgccacug

SEQ ID NO: 1164111 - RNA, 19 nt, Human
gccgagaucacgccacugc

SEQ ID NO: 1164112 - RNA, 18 nt, Human
gccgagauugcaccacug

SEQ ID NO: 1164113 - RNA, 17 nt, Human
gccuaagugcagccccg

SEQ ID NO: 1164114 - RNA, 22 nt, Human
gccuauauuuuuuguuaaauga

SEQ ID NO: 1164115 - RNA, 14 nt, Human
gccucaaccuccug

SEQ ID NO: 1164116 - RNA, 16 nt, Human
gccucaaccuccuggg

SEQ ID NO: 1164117 - RNA, 17 nt, Human
gccucaaccuccugggc

SEQ ID NO: 1164118 - RNA, 19 nt, Human
gccucaagugauucuccug

SEQ ID NO: 1164119 - RNA, 20 nt, Human
gccucaagugauucuccugc

SEQ ID NO: 1164120 - RNA, 21 nt, Human
gccucaagugauucuccugcc

SEQ ID NO: 1164121 - RNA, 23 nt, Human
gccucagccucccaaagugcugg

SEQ ID NO: 1164122 - RNA, 22 nt, Human
gccucaagugauucuccugccu

SEQ ID NO: 1164123 - RNA, 12 nt, Human
gccucagugcca

SEQ ID NO: 1164124 - RNA, 14 nt, Human
gccucagugccacu

SEQ ID NO: 1164125 - RNA, 17 nt, Human
gccucccgaguagcugg

SEQ ID NO: 1164126 - RNA, 23 nt, Human
gccucccgaauagcugggacuac

SEQ ID NO: 1164127 - RNA, 15 nt, Human
gccucccgaguagcu

SEQ ID NO: 1164128 - RNA, 15 nt, Human
gccucagugccacua

SEQ ID NO: 1164129 - RNA, 22 nt, Human
gccucccaacucaccccagccc

SEQ ID NO: 1164130 - RNA, 23 nt, Human
gccucccaacucaccccagcccc

SEQ ID NO: 1164131 - RNA, 14 nt, Human
gccucccacgacug

SEQ ID NO: 1164132 - RNA, 21 nt, Human
gccucccacgacugcccggca

SEQ ID NO: 1164133 - RNA, 22 nt, Human
gccugaagucacacagugaguc

SEQ ID NO: 1164134 - RNA, 15 nt, Human
gccugcuccagcugu

SEQ ID NO: 1164135 - RNA, 16 nt, Human
gccugcuccagcuguu

SEQ ID NO: 1164136 - RNA, 18 nt, Human
gccugcuccagcuguuca

SEQ ID NO: 1164137 - RNA, 16 nt, Human
gccuggauggggcugc

SEQ ID NO: 1164138 - RNA, 14 nt, Human
gccuggauggggcu

SEQ ID NO: 1164139 - RNA, 15 nt, Human
gccuggauggggcug

SEQ ID NO: 1164140 - RNA, 14 nt, Human
gccuggccagaugc

SEQ ID NO: 1164141 - RNA, 15 nt, Human
gccuggccagaugca

SEQ ID NO: 1164142 - RNA, 16 nt, Human
gccuggccagaugcac

SEQ ID NO: 1164143 - RNA, 15 nt, Human
gccugggcagaagga

SEQ ID NO: 1164144 - RNA, 16 nt, Human
gccugggcagaaggaa

SEQ ID NO: 1164145 - RNA, 17 nt, Human
gccugggcagaaggaag

SEQ ID NO: 1164146 - RNA, 18 nt, Human
gccugggcagaaggaaga

SEQ ID NO: 1164147 - RNA, 20 nt, Human
gccugggggcugggcagagg

SEQ ID NO: 1164148 - RNA, 21 nt, Human
gccugggggcugggcagagga

SEQ ID NO: 1164149 - RNA, 15 nt, Human
gcgggcuuccuccug

SEQ ID NO: 1164150 - RNA, 12 nt, Human
gcggggacagcu

SEQ ID NO: 1164151 - RNA, 13 nt, Human
gcggggacagcuc

SEQ ID NO: 1164152 - RNA, 16 nt, Human
gcgguccacccaggag

SEQ ID NO: 1164153 - RNA, 18 nt, Human
gcgguccacccaggagcc

SEQ ID NO: 1164154 - RNA, 19 nt, Human
gcgguccacccaggagccc

SEQ ID NO: 1164155 - RNA, 20 nt, Human
gcgguccacccaggagcccc

SEQ ID NO: 1164156 - RNA, 18 nt, Human
gcgugagccacugcaccg

SEQ ID NO: 1164157 - RNA, 23 nt, Human
gcgugagccacugcaccgggcca

SEQ ID NO: 1164158 - RNA, 13 nt, Human
gcuaaaugugaau

SEQ ID NO: 1164159 - RNA, 16 nt, Human
gcuaaaugugaaugau

SEQ ID NO: 1164160 - RNA, 14 nt, Human
gcuaacauggaagu

SEQ ID NO: 1164161 - RNA, 22 nt, Human
gcuaagagggagggagggcucc

SEQ ID NO: 1164162 - RNA, 14 nt, Human
gcuaagcauuccaa

SEQ ID NO: 1164163 - RNA, 23 nt, Human
gcuaagagggagggagggcucca

SEQ ID NO: 1164164 - RNA, 17 nt, Human
gcuaagcaaaaugugau

SEQ ID NO: 1164165 - RNA, 14 nt, Human
gcuacccgggaagg

SEQ ID NO: 1164166 - RNA, 15 nt, Human
gcuacccgggaaggg

SEQ ID NO: 1164167 - RNA, 21 nt, Human
gcuacccgggaagggggcugg

SEQ ID NO: 1164168 - RNA, 18 nt, Human
gcuagagguucaaagaua

SEQ ID NO: 1164169 - RNA, 19 nt, Human
gcuagagguucaaagauau

SEQ ID NO: 1164170 - RNA, 21 nt, Human
gcuagagguucaaagauauuu

SEQ ID NO: 1164171 - RNA, 16 nt, Human
gcuaucucccccagcc

SEQ ID NO: 1164172 - RNA, 17 nt, Human
gcuaucucccccagccc

SEQ ID NO: 1164173 - RNA, 18 nt, Human
gcuaucucccccagcccc

SEQ ID NO: 1164174 - RNA, 19 nt, Human
gcuaucucccccagcccca

SEQ ID NO: 1164175 - RNA, 20 nt, Human
gcuaucucccccagccccau

SEQ ID NO: 1164176 - RNA, 21 nt, Human
gcuaucucccccagccccauc

SEQ ID NO: 1164177 - RNA, 22 nt, Human
gcuaucucccccagccccaucc

SEQ ID NO: 1164178 - RNA, 23 nt, Human
gcuaucucccccagccccauccu

SEQ ID NO: 1164179 - RNA, 19 nt, Human
gcucaggugucccugcacu

SEQ ID NO: 1164180 - RNA, 15 nt, Human
gcucagcggggacag

SEQ ID NO: 1164181 - RNA, 16 nt, Human
gcucagcggggacagc

SEQ ID NO: 1164182 - RNA, 20 nt, Human
gcucagcggggacagcuccu

SEQ ID NO: 1164183 - RNA, 21 nt, Human
gcucagcggggacagcuccuu

SEQ ID NO: 1164184 - RNA, 22 nt, Human
gcucagcggggacagcuccuuc

SEQ ID NO: 1164185 - RNA, 18 nt, Human
gcucaggugucccugcac

SEQ ID NO: 1164186 - RNA, 19 nt, Human
gcucaccagccccagugcc

SEQ ID NO: 1164187 - RNA, 20 nt, Human
gcucaccagccccagugccc

SEQ ID NO: 1164188 - RNA, 23 nt, Human
gcucaccagccccagugcccaca

SEQ ID NO: 1164189 - RNA, 14 nt, Human
gcucaccucucccu

SEQ ID NO: 1164190 - RNA, 17 nt, Human
gcucagcaaaagaugcu

SEQ ID NO: 1164191 - RNA, 20 nt, Human
gcucagcaaaagaugcuucu

SEQ ID NO: 1164192 - RNA, 22 nt, Human
gcucagcaaaagaugcuucuca

SEQ ID NO: 1164193 - RNA, 23 nt, Human
gcucagcaaaagaugcuucucac

SEQ ID NO: 1164194 - RNA, 13 nt, Human
gcuccaagcuccc

SEQ ID NO: 1164195 - RNA, 14 nt, Human
gcuccaagcuccca

SEQ ID NO: 1164196 - RNA, 15 nt, Human
gcuccaagcucccag

SEQ ID NO: 1164197 - RNA, 21 nt, Human
gcuccaagcucccaggcauuc

SEQ ID NO: 1164198 - RNA, 16 nt, Human
gcuccaagcucccagg

SEQ ID NO: 1164199 - RNA, 17 nt, Human
gcuccaagcucccaggc

SEQ ID NO: 1164200 - RNA, 18 nt, Human
gcuccaagcucccaggca

SEQ ID NO: 1164201 - RNA, 19 nt, Human
gcuccaagcucccaggcau

SEQ ID NO: 1164202 - RNA, 15 nt, Human
gcuccauggcugcca

SEQ ID NO: 1164203 - RNA, 20 nt, Human
gcuccagcuguucagcuggu

SEQ ID NO: 1164204 - RNA, 24 nt, Human
gcuccaggcuccuuuagcgcccag

SEQ ID NO: 1164205 - RNA, 11 nt, Human
gcuccagcugu

SEQ ID NO: 1164206 - RNA, 16 nt, Human
gcuccaggcuccuuua

SEQ ID NO: 1164207 - RNA, 23 nt, Human
gcuccaggcuccuuuagcgccca

SEQ ID NO: 1164208 - RNA, 20 nt, Human
gcuccauuuuuagugaaaua

SEQ ID NO: 1164209 - RNA, 19 nt, Human
gcucuccgaccagacaccu

SEQ ID NO: 1164210 - RNA, 13 nt, Human
gcucuccgaccag

SEQ ID NO: 1164211 - RNA, 17 nt, Human
gcucuccgaccagacac

SEQ ID NO: 1164212 - RNA, 11 nt, Human
gcucucuggcc

SEQ ID NO: 1164213 - RNA, 12 nt, Human
gcucucuggccu

SEQ ID NO: 1164214 - RNA, 13 nt, Human
gcucucuggccuu

SEQ ID NO: 1164215 - RNA, 15 nt, Human
gcucccuucccaccu

SEQ ID NO: 1164216 - RNA, 16 nt, Human
gcucccuucccaccuc

SEQ ID NO: 1164217 - RNA, 18 nt, Human
gcucccuucccaccucuc

SEQ ID NO: 1164218 - RNA, 19 nt, Human
gcucccuucccaccucucu

SEQ ID NO: 1164219 - RNA, 21 nt, Human
gcuccuucuguccuacucugu

SEQ ID NO: 1164220 - RNA, 16 nt, Human
gcucgagcaugccugg

SEQ ID NO: 1164221 - RNA, 17 nt, Human
gcucgagcaugccugga

SEQ ID NO: 1164222 - RNA, 14 nt, Human
gcucucuggccuuc

SEQ ID NO: 1164223 - RNA, 15 nt, Human
gcucucuggccuucg

SEQ ID NO: 1164224 - RNA, 19 nt, Human
gcucucuggccuucggccu

SEQ ID NO: 1164225 - RNA, 20 nt, Human
gcucucuggccuucggccuc

SEQ ID NO: 1164226 - RNA, 14 nt, Human
gcucugcccuuggu

SEQ ID NO: 1164227 - RNA, 23 nt, Human
gcucugcccuugguuaggcauug

SEQ ID NO: 1164228 - RNA, 11 nt, Human
gcucugccucc

SEQ ID NO: 1164229 - RNA, 13 nt, Human
gcucugccuccca

SEQ ID NO: 1164230 - RNA, 14 nt, Human
gcucugccucccau

SEQ ID NO: 1164231 - RNA, 15 nt, Human
gcucugccucccauc

SEQ ID NO: 1164232 - RNA, 22 nt, Human
gcucugccucccaucacccgcu

SEQ ID NO: 1164233 - RNA, 13 nt, Human
gcucugcuccucu

SEQ ID NO: 1164234 - RNA, 14 nt, Human
gcucugcuccucuc

SEQ ID NO: 1164235 - RNA, 19 nt, Human
gcucugcuccucuccccag

SEQ ID NO: 1164236 - RNA, 21 nt, Human
gcucugcuccucuccccagca

SEQ ID NO: 1164237 - RNA, 13 nt, Human
gcucugcugacag

SEQ ID NO: 1164238 - RNA, 14 nt, Human
gcucugcugacaga

SEQ ID NO: 1164239 - RNA, 18 nt, Human
gcucugcugacagacaca

SEQ ID NO: 1164240 - RNA, 19 nt, Human
gcucugcugacagacacag

SEQ ID NO: 1164241 - RNA, 20 nt, Human
gcucugcugacagacacagg

SEQ ID NO: 1164242 - RNA, 23 nt, Human
gcucugcugacagacacaggccc

SEQ ID NO: 1164243 - RNA, 14 nt, Human
gcucuggacaggca

SEQ ID NO: 1164244 - RNA, 15 nt, Human
gcucuggacaggcau

SEQ ID NO: 1164245 - RNA, 16 nt, Human
gcucuggacaggcaug

SEQ ID NO: 1164246 - RNA, 21 nt, Human
gcucuggacaggcauguucuc

SEQ ID NO: 1164247 - RNA, 22 nt, Human
gcucuggacaggcauguucucu

SEQ ID NO: 1164248 - RNA, 14 nt, Human
gcucuucuccaggc

SEQ ID NO: 1164249 - RNA, 16 nt, Human
gcucuucuccaggcug

SEQ ID NO: 1164250 - RNA, 19 nt, Human
gcucuuccaggcugggaga

SEQ ID NO: 1164251 - RNA, 22 nt, Human
gcucuuccaggcugggagagcc

SEQ ID NO: 1164252 - RNA, 12 nt, Human
gcucuucuccag

SEQ ID NO: 1164253 - RNA, 21 nt, Human
gcugacagacacaggcccggc

SEQ ID NO: 1164254 - RNA, 15 nt, Human
gcugagucugaaggc

SEQ ID NO: 1164255 - RNA, 16 nt, Human
gcugagucugaaggcu

SEQ ID NO: 1164256 - RNA, 18 nt, Human
gcugagucugaaggcugg

SEQ ID NO: 1164257 - RNA, 19 nt, Human
gcugagucugaaggcuggg

SEQ ID NO: 1164258 - RNA, 22 nt, Human
gcugagugggggaucacagccu

SEQ ID NO: 1164259 - RNA, 23 nt, Human
gcugagugggggaucacagccuc

SEQ ID NO: 1164260 - RNA, 15 nt, Human
gcugauggugcaaug

SEQ ID NO: 1164261 - RNA, 16 nt, Human
gcugauggugcaauga

SEQ ID NO: 1164262 - RNA, 18 nt, Human
gcugauggugcaaugacc

SEQ ID NO: 1164263 - RNA, 21 nt, Human
gcugauggugcaaugaccuuu

SEQ ID NO: 1164264 - RNA, 18 nt, Human
gcugcaguugccagucac

SEQ ID NO: 1164265 - RNA, 20 nt, Human
gcugcaguugccagucaccc

SEQ ID NO: 1164266 - RNA, 21 nt, Human
gcugcaguugccagucacccc

SEQ ID NO: 1164267 - RNA, 17 nt, Human
gcugcauuuaaaagaua

SEQ ID NO: 1164268 - RNA, 17 nt, Human
gcugucuccauguuuga

SEQ ID NO: 1164269 - RNA, 14 nt, Human
gcuguucagcuggu

SEQ ID NO: 1164270 - RNA, 15 nt, Human
gcugccaaugggagc

SEQ ID NO: 1164271 - RNA, 16 nt, Human
gcugccaaugggagcu

SEQ ID NO: 1164272 - RNA, 19 nt, Human
gcugccaaugggagcucau

SEQ ID NO: 1164273 - RNA, 20 nt, Human
gcugccaaugggagcucaug

SEQ ID NO: 1164274 - RNA, 20 nt, Human
gcugucuacacuaagagaga

SEQ ID NO: 1164275 - RNA, 15 nt, Human
gcuuagucacugaga

SEQ ID NO: 1164276 - RNA, 17 nt, Human
gcuuagucacugagaca

SEQ ID NO: 1164277 - RNA, 19 nt, Human
gcuuagucacugagacagc

SEQ ID NO: 1164278 - RNA, 20 nt, Human
gcuuagucacugagacagcc

SEQ ID NO: 1164279 - RNA, 21 nt, Human
gcuuagucacugagacagccc

SEQ ID NO: 1164280 - RNA, 12 nt, Human
gcuuauacacuu

SEQ ID NO: 1164281 - RNA, 20 nt, Human
gcuuauacacuuacacuuua

SEQ ID NO: 1164282 - RNA, 19 nt, Human
gcuuaucucaggggugugc

SEQ ID NO: 1164283 - RNA, 16 nt, Human
gcuucaguggcagcug

SEQ ID NO: 1164284 - RNA, 17 nt, Human
gcuucaguggcagcugc

SEQ ID NO: 1164285 - RNA, 18 nt, Human
gcuucaguggcagcugcu

SEQ ID NO: 1164286 - RNA, 19 nt, Human
gcuucaguggcagcugcuu

SEQ ID NO: 1164287 - RNA, 12 nt, Human
gcuucauccucc

SEQ ID NO: 1164288 - RNA, 15 nt, Human
gcuucauccuccuca

SEQ ID NO: 1164289 - RNA, 13 nt, Human
gcuucauuuccug

SEQ ID NO: 1164290 - RNA, 16 nt, Human
gcuucauuuccugugu

SEQ ID NO: 1164291 - RNA, 17 nt, Human
gcuucauuuccuguguc

SEQ ID NO: 1164292 - RNA, 21 nt, Human
gcuucauccuccucagaucuu

SEQ ID NO: 1164293 - RNA, 18 nt, Human
gcuucauuuccugugucu

SEQ ID NO: 1164294 - RNA, 15 nt, Human
gcuuccagugaggcu

SEQ ID NO: 1164295 - RNA, 16 nt, Human
gcuuccagugaggcuc

SEQ ID NO: 1164296 - RNA, 18 nt, Human
gcuuccagugaggcucug

SEQ ID NO: 1164297 - RNA, 15 nt, Human
gcuuugugauuuuug

SEQ ID NO: 1164298 - RNA, 18 nt, Human
gcuugaggguugggcugg

SEQ ID NO: 1164299 - RNA, 20 nt, Human
gcuugaggguugggcuggug

SEQ ID NO: 1164300 - RNA, 22 nt, Human
gcuugaggguugggcugguguc

SEQ ID NO: 1164301 - RNA, 21 nt, Human
gcuuuguuuguugucagcuga

SEQ ID NO: 1164302 - RNA, 18 nt, Human
ggaaaacaugcuacacac

SEQ ID NO: 1164303 - RNA, 14 nt, Human
ggaaaagcugcuga

SEQ ID NO: 1164304 - RNA, 18 nt, Human
ggaaaagcugcugacagu

SEQ ID NO: 1164305 - RNA, 20 nt, Human
ggaaaagcugcugacagugu

SEQ ID NO: 1164306 - RNA, 19 nt, Human
ggaaaaucagccugcucca

SEQ ID NO: 1164307 - RNA, 23 nt, Human
ggaaaaucagccugcuccagcug

SEQ ID NO: 1164308 - RNA, 12 nt, Human
ggaaaggcucca

SEQ ID NO: 1164309 - RNA, 13 nt, Human
ggaaaggcuccag

SEQ ID NO: 1164310 - RNA, 14 nt, Human
ggaaaggcuccagg

SEQ ID NO: 1164311 - RNA, 17 nt, Human
ggaaaggcuccaggagc

SEQ ID NO: 1164312 - RNA, 19 nt, Human
ggaaaggcuccaggagcag

SEQ ID NO: 1164313 - RNA, 20 nt, Human
ggaaaggcuccaggagcagc

SEQ ID NO: 1164314 - RNA, 21 nt, Human
ggaaaggcuccaggagcagcc

SEQ ID NO: 1164315 - RNA, 22 nt, Human
ggaaaggcuccaggagcagcca

SEQ ID NO: 1164316 - RNA, 14 nt, Human
ggaaaucaccgaaa

SEQ ID NO: 1164317 - RNA, 21 nt, Human
ggaaaucaccgaaaacguggc

SEQ ID NO: 1164318 - RNA, 23 nt, Human
ggaaaucaccgaaaacguggcug

SEQ ID NO: 1164319 - RNA, 23 nt, Human
ggaaggggagauaaggguaucug

SEQ ID NO: 1164320 - RNA, 20 nt, Human
ggaagugacgguuuaauggg

SEQ ID NO: 1164321 - RNA, 12 nt, Human
ggaaguacugga

SEQ ID NO: 1164322 - RNA, 16 nt, Human
ggaaguacuggagaaa

SEQ ID NO: 1164323 - RNA, 18 nt, Human
ggaaguacuggagaaaau

SEQ ID NO: 1164324 - RNA, 16 nt, Human
ggaauuggagcucgug

SEQ ID NO: 1164325 - RNA, 22 nt, Human
ggaauuggagcucgugggacag

SEQ ID NO: 1164326 - RNA, 24 nt, Human
ggaaugauuaauuaaaacacaaca

SEQ ID NO: 1164327 - RNA, 12 nt, Human
ggaaugcagugg

SEQ ID NO: 1164328 - RNA, 19 nt, Human
ggaauguuugccucugccu

SEQ ID NO: 1164329 - RNA, 13 nt, Human
ggacgcucucugg

SEQ ID NO: 1164330 - RNA, 14 nt, Human
ggacgcucucuggc

SEQ ID NO: 1164331 - RNA, 15 nt, Human
ggacgcucucuggcc

SEQ ID NO: 1164332 - RNA, 17 nt, Human
ggagaagcggcuggcag

SEQ ID NO: 1164333 - RNA, 18 nt, Human
ggagaagcggcuggcagc

SEQ ID NO: 1164334 - RNA, 15 nt, Human
ggagaaucacuugaa

SEQ ID NO: 1164335 - RNA, 19 nt, Human
ggagaaucacuugaacccg

SEQ ID NO: 1164336 - RNA, 17 nt, Human
ggacacucaaaagcugg

SEQ ID NO: 1164337 - RNA, 22 nt, Human
ggacacucaaaagcugggcagg

SEQ ID NO: 1164338 - RNA, 15 nt, Human
ggacagccacggcca

SEQ ID NO: 1164339 - RNA, 19 nt, Human
ggacagccacggccaggcc

SEQ ID NO: 1164340 - RNA, 20 nt, Human
ggacagccacggccaggcca

SEQ ID NO: 1164341 - RNA, 21 nt, Human
ggacagccacggccaggccag

SEQ ID NO: 1164342 - RNA, 22 nt, Human
ggacagccacggccaggccaga

SEQ ID NO: 1164343 - RNA, 20 nt, Human
ggacauugcggacagccacg

SEQ ID NO: 1164344 - RNA, 16 nt, Human
ggacauuugcucaugg

SEQ ID NO: 1164345 - RNA, 13 nt, Human
ggaccagagcugc

SEQ ID NO: 1164346 - RNA, 14 nt, Human
ggaccagagcugcc

SEQ ID NO: 1164347 - RNA, 19 nt, Human
ggaccucaggugagaagca

SEQ ID NO: 1164348 - RNA, 23 nt, Human
ggaccucaggugagaagcagagg

SEQ ID NO: 1164349 - RNA, 15 nt, Human
ggaccuugaacuggg

SEQ ID NO: 1164350 - RNA, 17 nt, Human
ggaccuugaacugggua

SEQ ID NO: 1164351 - RNA, 18 nt, Human
ggaccuugaacuggguac

SEQ ID NO: 1164352 - RNA, 17 nt, Human
ggacgcuacccgggaag

SEQ ID NO: 1164353 - RNA, 19 nt, Human
ggacgcuacccgggaaggg

SEQ ID NO: 1164354 - RNA, 20 nt, Human
ggacgcuacccgggaagggg

SEQ ID NO: 1164355 - RNA, 13 nt, Human
ggaucccucaucc

SEQ ID NO: 1164356 - RNA, 17 nt, Human
ggaucccucauccucau

SEQ ID NO: 1164357 - RNA, 22 nt, Human
ggaucccucauccucauaccca

SEQ ID NO: 1164358 - RNA, 12 nt, Human
ggagugcaguga

SEQ ID NO: 1164359 - RNA, 14 nt, Human
ggagugcagugagc

SEQ ID NO: 1164360 - RNA, 15 nt, Human
ggagugcagugagcc

SEQ ID NO: 1164361 - RNA, 12 nt, Human
ggauccuccagg

SEQ ID NO: 1164362 - RNA, 13 nt, Human
ggauccuccaggu

SEQ ID NO: 1164363 - RNA, 14 nt, Human
ggauccuccaggug

SEQ ID NO: 1164364 - RNA, 21 nt, Human
ggaugauuggaggggggaggu

SEQ ID NO: 1164365 - RNA, 23 nt, Human
ggaugcacagaguuguuacauuu

SEQ ID NO: 1164366 - RNA, 16 nt, Human
ggaugcagccucacag

SEQ ID NO: 1164367 - RNA, 17 nt, Human
ggaugcagccucacagu

SEQ ID NO: 1164368 - RNA, 19 nt, Human
ggaugcagccucacagucc

SEQ ID NO: 1164369 - RNA, 15 nt, Human
ggaugcuuguacaua

SEQ ID NO: 1164370 - RNA, 19 nt, Human
ggauuacaagcgugagcca

SEQ ID NO: 1164371 - RNA, 23 nt, Human
ggauuacaagcgugagccacugc

SEQ ID NO: 1164372 - RNA, 16 nt, Human
ggauucuuauggacaa

SEQ ID NO: 1164373 - RNA, 16 nt, Human
ggauucuuccucccuc

SEQ ID NO: 1164374 - RNA, 17 nt, Human
ggauugcuacuguccua

SEQ ID NO: 1164375 - RNA, 15 nt, Human
ggauuguaaaauggu

SEQ ID NO: 1164376 - RNA, 16 nt, Human
ggcaacccccagccug

SEQ ID NO: 1164377 - RNA, 17 nt, Human
ggcaacccccagccugc

SEQ ID NO: 1164378 - RNA, 22 nt, Human
ggcacccggccccugcugguuc

SEQ ID NO: 1164379 - RNA, 23 nt, Human
ggcacccaccaucaugucuggcu

SEQ ID NO: 1164380 - RNA, 18 nt, Human
ggcaacccccagccugcu

SEQ ID NO: 1164381 - RNA, 19 nt, Human
ggcaacccccagccugcua

SEQ ID NO: 1164382 - RNA, 14 nt, Human
ggcaaugcuggcug

SEQ ID NO: 1164383 - RNA, 15 nt, Human
ggcaaugcuggcugu

SEQ ID NO: 1164384 - RNA, 23 nt, Human
ggcaaugcuggcuguuggcuggg

SEQ ID NO: 1164385 - RNA, 18 nt, Human
ggcaugacacgaauauug

SEQ ID NO: 1164386 - RNA, 22 nt, Human
ggcaugacacgaauauugcuga

SEQ ID NO: 1164387 - RNA, 19 nt, Human
ggcagggucucacucuguc

SEQ ID NO: 1164388 - RNA, 20 nt, Human
ggcagggucucacucugucg

SEQ ID NO: 1164389 - RNA, 13 nt, Human
ggcagugggagcu

SEQ ID NO: 1164390 - RNA, 14 nt, Human
ggcagugggagcug

SEQ ID NO: 1164391 - RNA, 16 nt, Human
ggcagugggagcugcc

SEQ ID NO: 1164392 - RNA, 12 nt, Human
ggcagcucaccu

SEQ ID NO: 1164393 - RNA, 14 nt, Human
ggcagcucaccucu

SEQ ID NO: 1164394 - RNA, 16 nt, Human
ggcagcucaccucucc

SEQ ID NO: 1164395 - RNA, 21 nt, Human
ggcagcucagagaggguggga

SEQ ID NO: 1164396 - RNA, 17 nt, Human
ggcagcuugaggguugg

SEQ ID NO: 1164397 - RNA, 18 nt, Human
ggcaugggaaugaauguc

SEQ ID NO: 1164398 - RNA, 22 nt, Human
ggcaugggaaugaaugucagug

SEQ ID NO: 1164399 - RNA, 17 nt, Human
ggcauuccccaggaggc

SEQ ID NO: 1164400 - RNA, 18 nt, Human
ggcauuccccaggaggcc

SEQ ID NO: 1164401 - RNA, 19 nt, Human
ggcauuccccaggaggcca

SEQ ID NO: 1164402 - RNA, 20 nt, Human
ggccagccuugaccauucuc

SEQ ID NO: 1164403 - RNA, 22 nt, Human
ggccagccuugaccauucucca

SEQ ID NO: 1164404 - RNA, 17 nt, Human
ggccagcugcuugggcu

SEQ ID NO: 1164405 - RNA, 23 nt, Human
ggccagcugcuugggcuucaucc

SEQ ID NO: 1164406 - RNA, 18 nt, Human
ggccaggcccucugccca

SEQ ID NO: 1164407 - RNA, 13 nt, Human
ggcccugccuccu

SEQ ID NO: 1164408 - RNA, 14 nt, Human
ggcccugccuccuu

SEQ ID NO: 1164409 - RNA, 15 nt, Human
ggcccugccuccuuu

SEQ ID NO: 1164410 - RNA, 11 nt, Human
ggcccagagag

SEQ ID NO: 1164411 - RNA, 12 nt, Human
ggcccagagagg

SEQ ID NO: 1164412 - RNA, 13 nt, Human
ggcccucugccca

SEQ ID NO: 1164413 - RNA, 15 nt, Human
ggcccucugcccacu

SEQ ID NO: 1164414 - RNA, 16 nt, Human
ggcccucugcccacuc

SEQ ID NO: 1164415 - RNA, 17 nt, Human
ggcccucugcccacucc

SEQ ID NO: 1164416 - RNA, 19 nt, Human
ggcccucugcccacucccu

SEQ ID NO: 1164417 - RNA, 20 nt, Human
ggcccucugcccacucccug

SEQ ID NO: 1164418 - RNA, 21 nt, Human
ggcccucugcccacucccugc

SEQ ID NO: 1164419 - RNA, 13 nt, Human
ggccucugcacuc

SEQ ID NO: 1164420 - RNA, 14 nt, Human
ggccucugcacucc

SEQ ID NO: 1164421 - RNA, 15 nt, Human
ggccucugcacuccc

SEQ ID NO: 1164422 - RNA, 16 nt, Human
ggccucugcacucccc

SEQ ID NO: 1164423 - RNA, 20 nt, Human
ggccucgguguggagaagcg

SEQ ID NO: 1164424 - RNA, 17 nt, Human
ggccucuuaugggcugg

SEQ ID NO: 1164425 - RNA, 18 nt, Human
ggccucuuaugggcuggg

SEQ ID NO: 1164426 - RNA, 15 nt, Human
ggcuaugcauuugaa

SEQ ID NO: 1164427 - RNA, 15 nt, Human
ggcuaguugggcuuc

SEQ ID NO: 1164428 - RNA, 16 nt, Human
ggcuaguugggcuucc

SEQ ID NO: 1164429 - RNA, 17 nt, Human
ggcuagagguucaaaga

SEQ ID NO: 1164430 - RNA, 22 nt, Human
ggcuagagguucaaagauauuu

SEQ ID NO: 1164431 - RNA, 16 nt, Human
ggcuaggaccccucca

SEQ ID NO: 1164432 - RNA, 22 nt, Human
ggcuaggaccccuccauguggg

SEQ ID NO: 1164433 - RNA, 12 nt, Human
ggcuccaggagc

SEQ ID NO: 1164434 - RNA, 13 nt, Human
ggcuccaggagca

SEQ ID NO: 1164435 - RNA, 19 nt, Human
ggcuccaggagcagccaca

SEQ ID NO: 1164436 - RNA, 15 nt, Human
ggcucaaguccucuu

SEQ ID NO: 1164437 - RNA, 21 nt, Human
ggcucaaguccucuuuucuga

SEQ ID NO: 1164438 - RNA, 16 nt, Human
ggcuccaggcuccuuu

SEQ ID NO: 1164439 - RNA, 11 nt, Human
ggcuccaggcu

SEQ ID NO: 1164440 - RNA, 14 nt, Human
ggccugggggcugg

SEQ ID NO: 1164441 - RNA, 20 nt, Human
ggccugggggcugggcagag

SEQ ID NO: 1164442 - RNA, 22 nt, Human
ggccugggggcugggcagagga

SEQ ID NO: 1164443 - RNA, 19 nt, Human
ggcgcugccccuggcagcc

SEQ ID NO: 1164444 - RNA, 21 nt, Human
ggcgcugccccuggcagcccc

SEQ ID NO: 1164445 - RNA, 23 nt, Human
ggcgcugccccuggcagccccug

SEQ ID NO: 1164446 - RNA, 15 nt, Human
ggcgcgguggcucac

SEQ ID NO: 1164447 - RNA, 12 nt, Human
gggccuggccug

SEQ ID NO: 1164448 - RNA, 12 nt, Human
gggccuggcuca

SEQ ID NO: 1164449 - RNA, 14 nt, Human
gggccuggcucagg

SEQ ID NO: 1164450 - RNA, 16 nt, Human
gggccuggcucaggug

SEQ ID NO: 1164451 - RNA, 18 nt, Human
gggccuggucguuuucaa

SEQ ID NO: 1164452 - RNA, 17 nt, Human
gggccuggcucaggugg

SEQ ID NO: 1164453 - RNA, 16 nt, Human
gggcgcgguggcucac

SEQ ID NO: 1164454 - RNA, 13 nt, Human
gggcucccuuccc

SEQ ID NO: 1164455 - RNA, 14 nt, Human
gggcucccuuccca

SEQ ID NO: 1164456 - RNA, 17 nt, Human
gggcucccuucccaccu

SEQ ID NO: 1164457 - RNA, 18 nt, Human
gggcucccuucccaccuc

SEQ ID NO: 1164458 - RNA, 23 nt, Human
gggcucccuucccaccucucuca

SEQ ID NO: 1164459 - RNA, 13 nt, Human
gggcucugccucc

SEQ ID NO: 1164460 - RNA, 15 nt, Human
gggcucugccuccca

SEQ ID NO: 1164461 - RNA, 16 nt, Human
gggcucugccucccau

SEQ ID NO: 1164462 - RNA, 17 nt, Human
gggcucugccucccauc

SEQ ID NO: 1164463 - RNA, 20 nt, Human
gggcucugccucccaucacc

SEQ ID NO: 1164464 - RNA, 16 nt, Human
gggcugaggugggagg

SEQ ID NO: 1164465 - RNA, 14 nt, Human
gggcugcaccggcu

SEQ ID NO: 1164466 - RNA, 17 nt, Human
gggcugcaccggcuggc

SEQ ID NO: 1164467 - RNA, 14 nt, Human
gggcuucaguggca

SEQ ID NO: 1164468 - RNA, 23 nt, Human
gggguucccuuuuuuggcugcug

SEQ ID NO: 1164469 - RNA, 13 nt, Human
ggguacccacugc

SEQ ID NO: 1164470 - RNA, 15 nt, Human
ggguacccacugcuc

SEQ ID NO: 1164471 - RNA, 18 nt, Human
ggguacccacugcucugg

SEQ ID NO: 1164472 - RNA, 19 nt, Human
ggguacuuguggacacagc

SEQ ID NO: 1164473 - RNA, 22 nt, Human
ggguacuuguggacacagcucu

SEQ ID NO: 1164474 - RNA, 23 nt, Human
ggguacuuguggacacagcucuu

SEQ ID NO: 1164475 - RNA, 23 nt, Human
ggguagagcggagaaaggaaggg

SEQ ID NO: 1164476 - RNA, 13 nt, Human
ggggcugggacau

SEQ ID NO: 1164477 - RNA, 16 nt, Human
ggggcugggcagagga

SEQ ID NO: 1164478 - RNA, 17 nt, Human
ggggcugggcagaggaa

SEQ ID NO: 1164479 - RNA, 17 nt, Human
ggggaucacagccucug

SEQ ID NO: 1164480 - RNA, 21 nt, Human
gggcuuggggaccagagcugc

SEQ ID NO: 1164481 - RNA, 22 nt, Human
gggcuuggggaccagagcugcc

SEQ ID NO: 1164482 - RNA, 13 nt, Human
ggggaguggccac

SEQ ID NO: 1164483 - RNA, 15 nt, Human
gggcuucaguggcag

SEQ ID NO: 1164484 - RNA, 16 nt, Human
gggcuucaguggcagc

SEQ ID NO: 1164485 - RNA, 17 nt, Human
gggcuucaguggcagcu

SEQ ID NO: 1164486 - RNA, 18 nt, Human
gggcuucaguggcagcug

SEQ ID NO: 1164487 - RNA, 19 nt, Human
gggcuucaguggcagcugc

SEQ ID NO: 1164488 - RNA, 20 nt, Human
gggcuucaguggcagcugcu

SEQ ID NO: 1164489 - RNA, 19 nt, Human
gggcuucauccuccucaga

SEQ ID NO: 1164490 - RNA, 20 nt, Human
gggcuucauccuccucagau

SEQ ID NO: 1164491 - RNA, 20 nt, Human
gggcuuggggaccagagcug

SEQ ID NO: 1164492 - RNA, 13 nt, Human
ggguggaugccug

SEQ ID NO: 1164493 - RNA, 19 nt, Human
ggguuggccccugcccggc

SEQ ID NO: 1164494 - RNA, 23 nt, Human
ggguucccuuuuuuggcugcuga

SEQ ID NO: 1164495 - RNA, 22 nt, Human
ggguucuacccaggugcuagga

SEQ ID NO: 1164496 - RNA, 17 nt, Human
gguacccacugcucugg

SEQ ID NO: 1164497 - RNA, 15 nt, Human
ggguugggcuggugu

SEQ ID NO: 1164498 - RNA, 22 nt, Human
gguacuucaaauccuugaagau

SEQ ID NO: 1164499 - RNA, 21 nt, Human
gguacuuguggacacagcucu

SEQ ID NO: 1164500 - RNA, 22 nt, Human
gguacuuguggacacagcucuu

SEQ ID NO: 1164501 - RNA, 15 nt, Human
gguagacacacauga

SEQ ID NO: 1164502 - RNA, 22 nt, Human
gguagacacacaugaaguccaa

SEQ ID NO: 1164503 - RNA, 22 nt, Human
gguagaaauaucugaaaaugua

SEQ ID NO: 1164504 - RNA, 16 nt, Human
ggucacucuggcagcu

SEQ ID NO: 1164505 - RNA, 20 nt, Human
ggucacucuggcagcucaga

SEQ ID NO: 1164506 - RNA, 22 nt, Human
ggucacucuggcagcucagaga

SEQ ID NO: 1164507 - RNA, 12 nt, Human
ggucagagccug

SEQ ID NO: 1164508 - RNA, 13 nt, Human
ggucagagccugc

SEQ ID NO: 1164509 - RNA, 14 nt, Human
ggucagagccugca

SEQ ID NO: 1164510 - RNA, 15 nt, Human
ggucagagccugcag

SEQ ID NO: 1164511 - RNA, 16 nt, Human
ggucagagccugcagu

SEQ ID NO: 1164512 - RNA, 12 nt, Human
ggucccacucag

SEQ ID NO: 1164513 - RNA, 14 nt, Human
ggucccacucaguc

SEQ ID NO: 1164514 - RNA, 22 nt, Human
ggucccacucaguccauagcag

SEQ ID NO: 1164515 - RNA, 13 nt, Human
ggucccccuucca

SEQ ID NO: 1164516 - RNA, 18 nt, Human
ggucccccuuccauggac

SEQ ID NO: 1164517 - RNA, 23 nt, Human
ggucccccuuccauggacuuugu

SEQ ID NO: 1164518 - RNA, 15 nt, Human
ggucugacccacugc

SEQ ID NO: 1164519 - RNA, 16 nt, Human
ggucugacccacugcu

SEQ ID NO: 1164520 - RNA, 12 nt, Human
ggucucacucug

SEQ ID NO: 1164521 - RNA, 16 nt, Human
ggucucacucugucgc

SEQ ID NO: 1164522 - RNA, 19 nt, Human
ggucugaggaauccagacc

SEQ ID NO: 1164523 - RNA, 16 nt, Human
ggugaacuugguuccc

SEQ ID NO: 1164524 - RNA, 18 nt, Human
ggugaagugaagacaaug

SEQ ID NO: 1164525 - RNA, 14 nt, Human
ggucccugguggca

SEQ ID NO: 1164526 - RNA, 22 nt, Human
ggucccugguggcagcucaccu

SEQ ID NO: 1164527 - RNA, 23 nt, Human
gguccuagaaauuccccacccug

SEQ ID NO: 1164528 - RNA, 22 nt, Human
ggucucacuauguugcccaggc

SEQ ID NO: 1164529 - RNA, 21 nt, Human
ggugacagagugagacucugu

SEQ ID NO: 1164530 - RNA, 14 nt, Human
ggugaccucugccu

SEQ ID NO: 1164531 - RNA, 16 nt, Human
ggugaccucugccuga

SEQ ID NO: 1164532 - RNA, 21 nt, Human
ggugaccucugccugaaguca

SEQ ID NO: 1164533 - RNA, 22 nt, Human
ggugcuaucucccccagcccca

SEQ ID NO: 1164534 - RNA, 23 nt, Human
ggugcuaucucccccagccccau

SEQ ID NO: 1164535 - RNA, 11 nt, Human
gguggcagcug

SEQ ID NO: 1164536 - RNA, 12 nt, Human
gguggcagcugc

SEQ ID NO: 1164537 - RNA, 13 nt, Human
gguggcagcugcg

SEQ ID NO: 1164538 - RNA, 15 nt, Human
gguggcagcugcggu

SEQ ID NO: 1164539 - RNA, 23 nt, Human
gguggcagcugcgguccacccag

SEQ ID NO: 1164540 - RNA, 16 nt, Human
gguggcagugggagcu

SEQ ID NO: 1164541 - RNA, 13 nt, Human
gguggccucccaa

SEQ ID NO: 1164542 - RNA, 17 nt, Human
gguggccucccaacuca

SEQ ID NO: 1164543 - RNA, 21 nt, Human
gguucaagcgauucuucugcu

SEQ ID NO: 1164544 - RNA, 14 nt, Human
gguugaagcaccaa

SEQ ID NO: 1164545 - RNA, 12 nt, Human
gguucagcuugu

SEQ ID NO: 1164546 - RNA, 22 nt, Human
gguucaagcgauucuucugcuu

SEQ ID NO: 1164547 - RNA, 23 nt, Human
gguucaagcgauucuucugcuuc

SEQ ID NO: 1164548 - RNA, 18 nt, Human
gguuggcaaaaaggcagg

SEQ ID NO: 1164549 - RNA, 14 nt, Human
gguugggcuggugu

SEQ ID NO: 1164550 - RNA, 13 nt, Human
gguuggugggggc

SEQ ID NO: 1164551 - RNA, 13 nt, Human
gguuuaagcuguu

SEQ ID NO: 1164552 - RNA, 23 nt, Human
gguuuugccauguuggccaggcu

SEQ ID NO: 1164553 - RNA, 16 nt, Human
gguuuagaaagcuugc

SEQ ID NO: 1164554 - RNA, 12 nt, Human
gguuuucuguuc

SEQ ID NO: 1164555 - RNA, 13 nt, Human
gguuuucuguucu

SEQ ID NO: 1164556 - RNA, 15 nt, Human
gguuuucuguucuuu

SEQ ID NO: 1164557 - RNA, 15 nt, Human
guaaauuaacuuuua

SEQ ID NO: 1164558 - RNA, 16 nt, Human
guaaauuaacuuuuau

SEQ ID NO: 1164559 - RNA, 17 nt, Human
guaaauuaacuuuuaua

SEQ ID NO: 1164560 - RNA, 21 nt, Human
guaaauuaacuuuuauaaacu

SEQ ID NO: 1164561 - RNA, 22 nt, Human
guaaauuaacuuuuauaaacuu

SEQ ID NO: 1164562 - RNA, 18 nt, Human
guaaaugggggugcauuu

SEQ ID NO: 1164563 - RNA, 19 nt, Human
guaaaugggggugcauuug

SEQ ID NO: 1164564 - RNA, 20 nt, Human
guaaaugggggugcauuuga

SEQ ID NO: 1164565 - RNA, 23 nt, Human
guaaauuaacuuuuauaaacuuu

SEQ ID NO: 1164566 - RNA, 18 nt, Human
guaaggaauaccuguccc

SEQ ID NO: 1164567 - RNA, 20 nt, Human
guaaggaauaccuguccccc

SEQ ID NO: 1164568 - RNA, 21 nt, Human
guaaggaauaccugucccccu

SEQ ID NO: 1164569 - RNA, 23 nt, Human
guaaggaauaccugucccccuga

SEQ ID NO: 1164570 - RNA, 13 nt, Human
guaaggaaugauu

SEQ ID NO: 1164571 - RNA, 22 nt, Human
guaaguauucuuauuuaaugaa

SEQ ID NO: 1164572 - RNA, 19 nt, Human
guaaugauaacuggaaacu

SEQ ID NO: 1164573 - RNA, 14 nt, Human
guaauuaaguacua

SEQ ID NO: 1164574 - RNA, 17 nt, Human
guaauuaaguacuaugu

SEQ ID NO: 1164575 - RNA, 20 nt, Human
guaauuaaguacuauguauc

SEQ ID NO: 1164576 - RNA, 21 nt, Human
guaauuaaguacuauguauca

SEQ ID NO: 1164577 - RNA, 15 nt, Human
guaauuggaaaggca

SEQ ID NO: 1164578 - RNA, 18 nt, Human
guacacuguuucaaacuu

SEQ ID NO: 1164579 - RNA, 15 nt, Human
guacccacugcucug

SEQ ID NO: 1164580 - RNA, 20 nt, Human
guacauaaugcgugcauacc

SEQ ID NO: 1164581 - RNA, 19 nt, Human
guacacuguuucaaacuuu

SEQ ID NO: 1164582 - RNA, 20 nt, Human
guacacuguuucaaacuuua

SEQ ID NO: 1164583 - RNA, 21 nt, Human
guacacuguuucaaacuuuac

SEQ ID NO: 1164584 - RNA, 16 nt, Human
guacagacaacaaacc

SEQ ID NO: 1164585 - RNA, 12 nt, Human
guacagagccca

SEQ ID NO: 1164586 - RNA, 18 nt, Human
guacagagcccacgcccc

SEQ ID NO: 1164587 - RNA, 22 nt, Human
guacagagcccacgcccccacu

SEQ ID NO: 1164588 - RNA, 20 nt, Human
guacagcaaggagauuuaca

SEQ ID NO: 1164589 - RNA, 23 nt, Human
guacuuuauuuucuauaauuuaa

SEQ ID NO: 1164590 - RNA, 21 nt, Human
guacuuguggacacagcucuu

SEQ ID NO: 1164591 - RNA, 16 nt, Human
guagagcggagaaagg

SEQ ID NO: 1164592 - RNA, 15 nt, Human
guagaggagaaacug

SEQ ID NO: 1164593 - RNA, 16 nt, Human
guacuucuccacccug

SEQ ID NO: 1164594 - RNA, 17 nt, Human
guacuucuccacccugc

SEQ ID NO: 1164595 - RNA, 18 nt, Human
guacuucuccacccugcu

SEQ ID NO: 1164596 - RNA, 19 nt, Human
guacuucuccacccugcuc

SEQ ID NO: 1164597 - RNA, 20 nt, Human
guacuucuccacccugcucu

SEQ ID NO: 1164598 - RNA, 21 nt, Human
guacuucuccacccugcucuc

SEQ ID NO: 1164599 - RNA, 16 nt, Human
guacuuguggacacag

SEQ ID NO: 1164600 - RNA, 20 nt, Human
guacuuguggacacagcucu

SEQ ID NO: 1164601 - RNA, 16 nt, Human
guacccacugcucugg

SEQ ID NO: 1164602 - RNA, 15 nt, Human
guaccgcaaugugac

SEQ ID NO: 1164603 - RNA, 13 nt, Human
guaccucuugagc

SEQ ID NO: 1164604 - RNA, 21 nt, Human
guaccucuugagccuugaacu

SEQ ID NO: 1164605 - RNA, 22 nt, Human
guaccucuugagccuugaacuu

SEQ ID NO: 1164606 - RNA, 14 nt, Human
guacgucugacagg

SEQ ID NO: 1164607 - RNA, 15 nt, Human
guacgucugacaggc

SEQ ID NO: 1164608 - RNA, 17 nt, Human
guacgucugacaggcaa

SEQ ID NO: 1164609 - RNA, 14 nt, Human
guacguugugcauu

SEQ ID NO: 1164610 - RNA, 15 nt, Human
guacguugugcauuu

SEQ ID NO: 1164611 - RNA, 16 nt, Human
guacguugugcauuug

SEQ ID NO: 1164612 - RNA, 17 nt, Human
guacguugugcauuugg

SEQ ID NO: 1164613 - RNA, 15 nt, Human
guacuaaggaaucuu

SEQ ID NO: 1164614 - RNA, 23 nt, Human
guacuaaggaaucuuucugcuuu

SEQ ID NO: 1164615 - RNA, 17 nt, Human
guacuacaguccuccca

SEQ ID NO: 1164616 - RNA, 14 nt, Human
guacuucuccaccc

SEQ ID NO: 1164617 - RNA, 15 nt, Human
guacuucuccacccu

SEQ ID NO: 1164618 - RNA, 17 nt, Human
guauuucuaugaaauau

SEQ ID NO: 1164619 - RNA, 22 nt, Human
guauuucuaugaaauauuaugu

SEQ ID NO: 1164620 - RNA, 13 nt, Human
guagagugggagc

SEQ ID NO: 1164621 - RNA, 15 nt, Human
guagagugggagcug

SEQ ID NO: 1164622 - RNA, 15 nt, Human
guagagugugccuga

SEQ ID NO: 1164623 - RNA, 13 nt, Human
guauuacuucugc

SEQ ID NO: 1164624 - RNA, 14 nt, Human
guauuacuucugcu

SEQ ID NO: 1164625 - RNA, 15 nt, Human
guauuacuucugcua

SEQ ID NO: 1164626 - RNA, 14 nt, Human
guauuauaccuuuu

SEQ ID NO: 1164627 - RNA, 16 nt, Human
gucaagugaaaaagga

SEQ ID NO: 1164628 - RNA, 18 nt, Human
gucaagugaaaaaggagg

SEQ ID NO: 1164629 - RNA, 19 nt, Human
gucaagugaaaaaggagga

SEQ ID NO: 1164630 - RNA, 16 nt, Human
guauuuuaaaagaaug

SEQ ID NO: 1164631 - RNA, 17 nt, Human
guauuuuaaaagaauga

SEQ ID NO: 1164632 - RNA, 18 nt, Human
guauuuuaaaagaaugau

SEQ ID NO: 1164633 - RNA, 18 nt, Human
gucaagagggucugagga

SEQ ID NO: 1164634 - RNA, 19 nt, Human
gucaagagggucugaggaa

SEQ ID NO: 1164635 - RNA, 15 nt, Human
gucaauaaaauccau

SEQ ID NO: 1164636 - RNA, 21 nt, Human
gucaauaaaauccauacauuu

SEQ ID NO: 1164637 - RNA, 22 nt, Human
gucaauaaaauccauacauuug

SEQ ID NO: 1164638 - RNA, 13 nt, Human
gucaauuacagga

SEQ ID NO: 1164639 - RNA, 15 nt, Human
gucaauuacaggaag

SEQ ID NO: 1164640 - RNA, 16 nt, Human
gucaauuacaggaagu

SEQ ID NO: 1164641 - RNA, 13 nt, Human
gucaccccggcca

SEQ ID NO: 1164642 - RNA, 15 nt, Human
gucaccccggccacc

SEQ ID NO: 1164643 - RNA, 14 nt, Human
gucaccucauggaa

SEQ ID NO: 1164644 - RNA, 20 nt, Human
gucaccugaagacucauucu

SEQ ID NO: 1164645 - RNA, 21 nt, Human
gucauauaagauucauauuua

SEQ ID NO: 1164646 - RNA, 14 nt, Human
guccacccaggagc

SEQ ID NO: 1164647 - RNA, 15 nt, Human
guccacccaggagcc

SEQ ID NO: 1164648 - RNA, 16 nt, Human
guccacccaggagccc

SEQ ID NO: 1164649 - RNA, 14 nt, Human
gucccacucagucc

SEQ ID NO: 1164650 - RNA, 15 nt, Human
gucccacucagucca

SEQ ID NO: 1164651 - RNA, 17 nt, Human
gucccagauacuugggg

SEQ ID NO: 1164652 - RNA, 17 nt, Human
guccugggagugagcug

SEQ ID NO: 1164653 - RNA, 18 nt, Human
guccugggagugagcugg

SEQ ID NO: 1164654 - RNA, 19 nt, Human
guccugggagugagcuggu

SEQ ID NO: 1164655 - RNA, 12 nt, Human
guccucccaucu

SEQ ID NO: 1164656 - RNA, 13 nt, Human
guccucccaucuc

SEQ ID NO: 1164657 - RNA, 14 nt, Human
guccucccaucuca

SEQ ID NO: 1164658 - RNA, 23 nt, Human
guccucccaucucacacaugagc

SEQ ID NO: 1164659 - RNA, 15 nt, Human
guccugggagugagc

SEQ ID NO: 1164660 - RNA, 16 nt, Human
guccugggagugagcu

SEQ ID NO: 1164661 - RNA, 12 nt, Human
gucccagugccg

SEQ ID NO: 1164662 - RNA, 16 nt, Human
gucccugguggcagcu

SEQ ID NO: 1164663 - RNA, 17 nt, Human
gucccugguggcagcuc

SEQ ID NO: 1164664 - RNA, 18 nt, Human
gucccugguggcagcuca

SEQ ID NO: 1164665 - RNA, 15 nt, Human
guccuacucuguguc

SEQ ID NO: 1164666 - RNA, 23 nt, Human
guccuacucugugucaggugggg

SEQ ID NO: 1164667 - RNA, 23 nt, Human
guccuagaaauuccccacccuga

SEQ ID NO: 1164668 - RNA, 14 nt, Human
gucugacccacugc

SEQ ID NO: 1164669 - RNA, 15 nt, Human
gucugacccacugcu

SEQ ID NO: 1164670 - RNA, 18 nt, Human
gucugaggaauccagacc

SEQ ID NO: 1164671 - RNA, 19 nt, Human
gucugaggaauccagaccc

SEQ ID NO: 1164672 - RNA, 21 nt, Human
gucugaggaauccagacccgg

SEQ ID NO: 1164673 - RNA, 13 nt, Human
gucugacuguuuc

SEQ ID NO: 1164674 - RNA, 17 nt, Human
gucugauucccaagcuc

SEQ ID NO: 1164675 - RNA, 18 nt, Human
gucugauucccaagcucu

SEQ ID NO: 1164676 - RNA, 19 nt, Human
gucugauucccaagcucug

SEQ ID NO: 1164677 - RNA, 20 nt, Human
gucugauucccaagcucugc

SEQ ID NO: 1164678 - RNA, 21 nt, Human
gucugauucccaagcucugcu

SEQ ID NO: 1164679 - RNA, 23 nt, Human
gucuacacuaagagagaaugaga

SEQ ID NO: 1164680 - RNA, 15 nt, Human
gucuacacugugcug

SEQ ID NO: 1164681 - RNA, 17 nt, Human
gucuacacuaagagaga

SEQ ID NO: 1164682 - RNA, 15 nt, Human
guccuuaccagcaga

SEQ ID NO: 1164683 - RNA, 16 nt, Human
guccuuaccagcagag

SEQ ID NO: 1164684 - RNA, 17 nt, Human
guccuuaccagcagagc

SEQ ID NO: 1164685 - RNA, 18 nt, Human
guccuuaccagcagagca

SEQ ID NO: 1164686 - RNA, 20 nt, Human
gucucacuauguugcccagg

SEQ ID NO: 1164687 - RNA, 21 nt, Human
gucucacuauguugcccaggc

SEQ ID NO: 1164688 - RNA, 23 nt, Human
gucucacuauguugcccaggcag

SEQ ID NO: 1164689 - RNA, 16 nt, Human
gucucacuguugccca

SEQ ID NO: 1164690 - RNA, 17 nt, Human
gucucacuguugcccag

SEQ ID NO: 1164691 - RNA, 18 nt, Human
gucucacuguugcccagg

SEQ ID NO: 1164692 - RNA, 19 nt, Human
gucucacuguugcccaggc

SEQ ID NO: 1164693 - RNA, 20 nt, Human
gucucacuguugcccaggcu

SEQ ID NO: 1164694 - RNA, 21 nt, Human
gucucacuguugcccaggcug

SEQ ID NO: 1164695 - RNA, 22 nt, Human
gucucacuguugcccaggcugg

SEQ ID NO: 1164696 - RNA, 23 nt, Human
gucucacuguugcccaggcuggc

SEQ ID NO: 1164697 - RNA, 13 nt, Human
gucuaccugaggg

SEQ ID NO: 1164698 - RNA, 11 nt, Human
gucucacucug

SEQ ID NO: 1164699 - RNA, 14 nt, Human
gugaaaagaaaaau

SEQ ID NO: 1164700 - RNA, 23 nt, Human
gugaaaagaaaaaugagccuggc

SEQ ID NO: 1164701 - RNA, 19 nt, Human
gugaaagaaaauaacaaua

SEQ ID NO: 1164702 - RNA, 20 nt, Human
gugaaacucguuaauuugua

SEQ ID NO: 1164703 - RNA, 12 nt, Human
gugaaacuggau

SEQ ID NO: 1164704 - RNA, 19 nt, Human
gugaaaggaaagagggagg

SEQ ID NO: 1164705 - RNA, 12 nt, Human
gugaccucugcc

SEQ ID NO: 1164706 - RNA, 16 nt, Human
gugacaacacuugugu

SEQ ID NO: 1164707 - RNA, 16 nt, Human
gugacaagcucacaga

SEQ ID NO: 1164708 - RNA, 15 nt, Human
gugacugaauuucuu

SEQ ID NO: 1164709 - RNA, 16 nt, Human
gugacugaauuucuuu

SEQ ID NO: 1164710 - RNA, 18 nt, Human
gugacugaauuucuuuug

SEQ ID NO: 1164711 - RNA, 13 nt, Human
gugagccacugca

SEQ ID NO: 1164712 - RNA, 17 nt, Human
gugacugaucucucgug

SEQ ID NO: 1164713 - RNA, 16 nt, Human
gugagcagucaggaaa

SEQ ID NO: 1164714 - RNA, 14 nt, Human
gugagccacugcac

SEQ ID NO: 1164715 - RNA, 11 nt, Human
gugaggaagcc

SEQ ID NO: 1164716 - RNA, 16 nt, Human
gugaggaagccgcugg

SEQ ID NO: 1164717 - RNA, 19 nt, Human
gugaggaagccgcuggggc

SEQ ID NO: 1164718 - RNA, 11 nt, Human
gugaggccaga

SEQ ID NO: 1164719 - RNA, 13 nt, Human
gugaggccagaga

SEQ ID NO: 1164720 - RNA, 15 nt, Human
gugauccacccaccu

SEQ ID NO: 1164721 - RNA, 18 nt, Human
gugauccacccaccucag

SEQ ID NO: 1164722 - RNA, 20 nt, Human
gugauccacccaccucagcc

SEQ ID NO: 1164723 - RNA, 22 nt, Human
gugauccacccaccucagccuc

SEQ ID NO: 1164724 - RNA, 14 nt, Human
gugauccucccacc

SEQ ID NO: 1164725 - RNA, 15 nt, Human
gugauccucccaccu

SEQ ID NO: 1164726 - RNA, 18 nt, Human
gugauccucccaccucag

SEQ ID NO: 1164727 - RNA, 20 nt, Human
gugauccucccaccucagcc

SEQ ID NO: 1164728 - RNA, 22 nt, Human
gugauccucccaccucagccuc

SEQ ID NO: 1164729 - RNA, 23 nt, Human
gugauccucccaccucagccucc

SEQ ID NO: 1164730 - RNA, 14 nt, Human
gugauucuccugcc

SEQ ID NO: 1164731 - RNA, 16 nt, Human
gugauucuccugccuc

SEQ ID NO: 1164732 - RNA, 17 nt, Human
gugauucuccugccuca

SEQ ID NO: 1164733 - RNA, 18 nt, Human
gugauucuccugccucag

SEQ ID NO: 1164734 - RNA, 19 nt, Human
gugauucuccugccucagc

SEQ ID NO: 1164735 - RNA, 20 nt, Human
gugauucuccugccucagcc

SEQ ID NO: 1164736 - RNA, 22 nt, Human
gugauucuccugccucagccuc

SEQ ID NO: 1164737 - RNA, 23 nt, Human
gugauucuccugccucagccucc

SEQ ID NO: 1164738 - RNA, 18 nt, Human
gugcaaauugucacagga

SEQ ID NO: 1164739 - RNA, 19 nt, Human
gugcauaaguuaacuucca

SEQ ID NO: 1164740 - RNA, 21 nt, Human
gugcauaccacuuuuguucuu

SEQ ID NO: 1164741 - RNA, 13 nt, Human
gugcauaccacuu

SEQ ID NO: 1164742 - RNA, 14 nt, Human
gugcauaccacuuu

SEQ ID NO: 1164743 - RNA, 22 nt, Human
gugcaugcugucccuuacguga

SEQ ID NO: 1164744 - RNA, 22 nt, Human
gugccagguuuuuggucugacc

SEQ ID NO: 1164745 - RNA, 20 nt, Human
gugcccacaggaucagucug

SEQ ID NO: 1164746 - RNA, 15 nt, Human
gugcugccauccagg

SEQ ID NO: 1164747 - RNA, 18 nt, Human
gugcugccauccagguuc

SEQ ID NO: 1164748 - RNA, 19 nt, Human
gugcugccauccagguuca

SEQ ID NO: 1164749 - RNA, 12 nt, Human
gugcugcauuua

SEQ ID NO: 1164750 - RNA, 19 nt, Human
gugcugcauuuaaaagaua

SEQ ID NO: 1164751 - RNA, 20 nt, Human
gugcugcauuuaaaagauac

SEQ ID NO: 1164752 - RNA, 12 nt, Human
gugcugagucug

SEQ ID NO: 1164753 - RNA, 16 nt, Human
gugcugagucugaagg

SEQ ID NO: 1164754 - RNA, 17 nt, Human
gugcugagucugaaggc

SEQ ID NO: 1164755 - RNA, 18 nt, Human
gugcugagucugaaggcu

SEQ ID NO: 1164756 - RNA, 19 nt, Human
gugcugagucugaaggcug

SEQ ID NO: 1164757 - RNA, 22 nt, Human
gugccgagaaggaagccuccca

SEQ ID NO: 1164758 - RNA, 21 nt, Human
gugccuuggggacaagagcag

SEQ ID NO: 1164759 - RNA, 15 nt, Human
gugcucuggacaggc

SEQ ID NO: 1164760 - RNA, 16 nt, Human
gugcucuggacaggca

SEQ ID NO: 1164761 - RNA, 17 nt, Human
gugcucuggacaggcau

SEQ ID NO: 1164762 - RNA, 18 nt, Human
gugcucuggacaggcaug

SEQ ID NO: 1164763 - RNA, 19 nt, Human
gugcugaaugguuuucaaa

SEQ ID NO: 1164764 - RNA, 20 nt, Human
gugcugaaugguuuucaaaa

SEQ ID NO: 1164765 - RNA, 23 nt, Human
gugcugaaugguuuucaaaauaa

SEQ ID NO: 1164766 - RNA, 22 nt, Human
gugcugccauccagguucagcu

SEQ ID NO: 1164767 - RNA, 11 nt, Human
gugcugcccug

SEQ ID NO: 1164768 - RNA, 12 nt, Human
gugcugcccugc

SEQ ID NO: 1164769 - RNA, 12 nt, Human
gugcuuggagga

SEQ ID NO: 1164770 - RNA, 13 nt, Human
gugcuuggaggaa

SEQ ID NO: 1164771 - RNA, 15 nt, Human
gugcuuggaggaagg

SEQ ID NO: 1164772 - RNA, 18 nt, Human
guggaaaaauagccugcc

SEQ ID NO: 1164773 - RNA, 20 nt, Human
guggagaagcggcuggcagc

SEQ ID NO: 1164774 - RNA, 17 nt, Human
guggaguucaucuugaa

SEQ ID NO: 1164775 - RNA, 16 nt, Human
guggaugccugguggc

SEQ ID NO: 1164776 - RNA, 18 nt, Human
guggaugccugguggcag

SEQ ID NO: 1164777 - RNA, 19 nt, Human
guggcagugggagcugccu

SEQ ID NO: 1164778 - RNA, 21 nt, Human
guggcagugggagcugccugu

SEQ ID NO: 1164779 - RNA, 20 nt, Human
guggaugccugguggcagcu

SEQ ID NO: 1164780 - RNA, 21 nt, Human
guggcagcugcgguccaccca

SEQ ID NO: 1164781 - RNA, 22 nt, Human
guggcagcugcgguccacccag

SEQ ID NO: 1164782 - RNA, 23 nt, Human
guggcagcugcgguccacccagg

SEQ ID NO: 1164783 - RNA, 12 nt, Human
guggcagcugcu

SEQ ID NO: 1164784 - RNA, 13 nt, Human
guggcagcugcuu

SEQ ID NO: 1164785 - RNA, 19 nt, Human
guggcagcugcuuuugucu

SEQ ID NO: 1164786 - RNA, 15 nt, Human
guggcagugggagcu

SEQ ID NO: 1164787 - RNA, 16 nt, Human
guggcagugggagcug

SEQ ID NO: 1164788 - RNA, 17 nt, Human
guggcagugggagcugc

SEQ ID NO: 1164789 - RNA, 18 nt, Human
uaggccuggccagaugca

SEQ ID NO: 1164790 - RNA, 15 nt, Human
uaggccuggccagau

SEQ ID NO: 1164791 - RNA, 18 nt, Human
uaggccaugggacaggga

SEQ ID NO: 1164792 - RNA, 12 nt, Human
uaggaauugacc

SEQ ID NO: 1164793 - RNA, 20 nt, Human
uaggaauugacccacaagaa

SEQ ID NO: 1164794 - RNA, 16 nt, Human
uaggucagugcaaaua

SEQ ID NO: 1164795 - RNA, 19 nt, Human
uagggaaaaaccagcgugu

SEQ ID NO: 1164796 - RNA, 20 nt, Human
uagggaaaaaccagcgugug

SEQ ID NO: 1164797 - RNA, 21 nt, Human
uagggaaaaaccagcguguga

SEQ ID NO: 1164798 - RNA, 23 nt, Human
uaggugacagagugagacucugu

SEQ ID NO: 1164799 - RNA, 13 nt, Human
uaguaucaaaaga

SEQ ID NO: 1164800 - RNA, 18 nt, Human
uaguauuucuaugaaaua

SEQ ID NO: 1164801 - RNA, 19 nt, Human
uaguauuucuaugaaauau

SEQ ID NO: 1164802 - RNA, 15 nt, Human
uaguaugaggcauuu

SEQ ID NO: 1164803 - RNA, 13 nt, Human
uagucaaauugug

SEQ ID NO: 1164804 - RNA, 14 nt, Human
uagucaaauugugu

SEQ ID NO: 1164805 - RNA, 14 nt, Human
uagugcaaauuguc

SEQ ID NO: 1164806 - RNA, 15 nt, Human
uagugcaaauuguca

SEQ ID NO: 1164807 - RNA, 10 nt, Human
uauacuguaa

SEQ ID NO: 1164808 - RNA, 11 nt, Human
uauacuguaaa

SEQ ID NO: 1164809 - RNA, 12 nt, Human
uauacuguaaag

SEQ ID NO: 1164810 - RNA, 13 nt, Human
uauacuguaaaga

SEQ ID NO: 1164811 - RNA, 14 nt, Human
uauacuguaaagaa

SEQ ID NO: 1164812 - RNA, 15 nt, Human
uauacuguaaagaaa

SEQ ID NO: 1164813 - RNA, 16 nt, Human
uauacuguaaagaaag

SEQ ID NO: 1164814 - RNA, 17 nt, Human
uauacuguaaagaaaga

SEQ ID NO: 1164815 - RNA, 19 nt, Human
uauacuguaaagaaagaga

SEQ ID NO: 1164816 - RNA, 20 nt, Human
uauacuguaaagaaagagag

SEQ ID NO: 1164817 - RNA, 22 nt, Human
uauacuguaaagaaagagagaa

SEQ ID NO: 1164818 - RNA, 13 nt, Human
uauauaacaaugc

SEQ ID NO: 1164819 - RNA, 21 nt, Human
uauaugcucugcauguuacau

SEQ ID NO: 1164820 - RNA, 13 nt, Human
uauaugcuucugu

SEQ ID NO: 1164821 - RNA, 14 nt, Human
uauaugcuucuguu

SEQ ID NO: 1164822 - RNA, 14 nt, Human
uaucuugaagacuu

SEQ ID NO: 1164823 - RNA, 20 nt, Human
uaucugucauuugagcaggg

SEQ ID NO: 1164824 - RNA, 21 nt, Human
uaucugucauuugagcagggc

SEQ ID NO: 1164825 - RNA, 23 nt, Human
uaucugucauuugagcagggcuc

SEQ ID NO: 1164826 - RNA, 22 nt, Human
uaugacacaugcaaggucauuu

SEQ ID NO: 1164827 - RNA, 12 nt, Human
uaugacacaugc

SEQ ID NO: 1164828 - RNA, 17 nt, Human
uaugaauuacauuugua

SEQ ID NO: 1164829 - RNA, 23 nt, Human
uaugaauuacauuuguauaaaau

SEQ ID NO: 1164830 - RNA, 16 nt, Human
uaucgucacugcuuaa

SEQ ID NO: 1164831 - RNA, 21 nt, Human
uaucuaauauguaacaagcca

SEQ ID NO: 1164832 - RNA, 19 nt, Human
uauauguuuuaagaggcag

SEQ ID NO: 1164833 - RNA, 15 nt, Human
uauccuucagccuga

SEQ ID NO: 1164834 - RNA, 18 nt, Human
uaugcaaucaaaucugcu

SEQ ID NO: 1164835 - RNA, 13 nt, Human
uaugcacacauuu

SEQ ID NO: 1164836 - RNA, 14 nt, Human
uaugcacacauuuu

SEQ ID NO: 1164837 - RNA, 16 nt, Human
uaugauucccagccag

SEQ ID NO: 1164838 - RNA, 16 nt, Human
uaugacuccagaauuu

SEQ ID NO: 1164839 - RNA, 17 nt, Human
uaugacuccagaauuuc

SEQ ID NO: 1164840 - RNA, 23 nt, Human
uaugacuccagaauuucccaaag

SEQ ID NO: 1164841 - RNA, 13 nt, Human
uaugcaugaagua

SEQ ID NO: 1164842 - RNA, 18 nt, Human
uaugcaugaaguaauaug

SEQ ID NO: 1164843 - RNA, 15 nt, Human
uaugcuucuguuuua

SEQ ID NO: 1164844 - RNA, 16 nt, Human
uaugcuucuguuuuau

SEQ ID NO: 1164845 - RNA, 13 nt, Human
uauggaacacucu

SEQ ID NO: 1164846 - RNA, 16 nt, Human
uauggaacacucugag

SEQ ID NO: 1164847 - RNA, 17 nt, Human
uauggaacacucugaga

SEQ ID NO: 1164848 - RNA, 18 nt, Human
uauggaacacucugagac

SEQ ID NO: 1164849 - RNA, 19 nt, Human
uauggaacacucugagacu

SEQ ID NO: 1164850 - RNA, 17 nt, Human
uauggacaaugacccag

SEQ ID NO: 1164851 - RNA, 21 nt, Human
uauguugcccaggcaggucuu

SEQ ID NO: 1164852 - RNA, 17 nt, Human
uauguucuaagaaguga

SEQ ID NO: 1164853 - RNA, 22 nt, Human
uauguucuuaguggauguucug

SEQ ID NO: 1164854 - RNA, 15 nt, Human
uauuaaaugcccagc

SEQ ID NO: 1164855 - RNA, 17 nt, Human
uauuaaaugcccagccc

SEQ ID NO: 1164856 - RNA, 19 nt, Human
uauuaaaugcccagccccu

SEQ ID NO: 1164857 - RNA, 16 nt, Human
uauuaagaaagacuau

SEQ ID NO: 1164858 - RNA, 12 nt, Human
uauguuaaaacu

SEQ ID NO: 1164859 - RNA, 19 nt, Human
uauguuagugcaaauuguc

SEQ ID NO: 1164860 - RNA, 16 nt, Human
uauuauguuaaaacug

SEQ ID NO: 1164861 - RNA, 17 nt, Human
uauuauauuuacaaaug

SEQ ID NO: 1164862 - RNA, 14 nt, Human
uauuauaccuuuuu

SEQ ID NO: 1164863 - RNA, 24 nt, Human
uauuaagaaagacuaucuaaaugu

SEQ ID NO: 1164864 - RNA, 14 nt, Human
uauuaaggaagaca

SEQ ID NO: 1164865 - RNA, 12 nt, Human
uauuauaccuuu

SEQ ID NO: 1164866 - RNA, 13 nt, Human
uauuauaccuuuu

SEQ ID NO: 1164867 - RNA, 20 nt, Human
uauugauaugcuuauacacu

SEQ ID NO: 1164868 - RNA, 21 nt, Human
uauugauaugcuuauacacuu

SEQ ID NO: 1164869 - RNA, 13 nt, Human
uauugcccacgcu

SEQ ID NO: 1164870 - RNA, 14 nt, Human
uauugcccacgcug

SEQ ID NO: 1164871 - RNA, 15 nt, Human
uauugcccacgcugg

SEQ ID NO: 1164872 - RNA, 23 nt, Human
uauugcugauggugcaaugaccu

SEQ ID NO: 1164873 - RNA, 17 nt, Human
uauuuaugggauccugg

SEQ ID NO: 1164874 - RNA, 22 nt, Human
uauuuauuaaaugcccagcccc

SEQ ID NO: 1164875 - RNA, 14 nt, Human
uauuuauuacugua

SEQ ID NO: 1164876 - RNA, 13 nt, Human
uauuucuaugaaa

SEQ ID NO: 1164877 - RNA, 14 nt, Human
uauuucuaugaaau

SEQ ID NO: 1164878 - RNA, 15 nt, Human
uauuucuaugaaaua

SEQ ID NO: 1164879 - RNA, 21 nt, Human
uauuucuaugaaauauuaugu

SEQ ID NO: 1164880 - RNA, 17 nt, Human
ucaaacauauauaacaa

SEQ ID NO: 1164881 - RNA, 13 nt, Human
ucaaacuuuacua

SEQ ID NO: 1164882 - RNA, 12 nt, Human
ucaaagagguuu

SEQ ID NO: 1164883 - RNA, 23 nt, Human
ucaaagagguuuuaaaaaaaucc

SEQ ID NO: 1164884 - RNA, 16 nt, Human
ucaaauccuugaagau

SEQ ID NO: 1164885 - RNA, 22 nt, Human
ucaacuccaaacugacucuuaa

SEQ ID NO: 1164886 - RNA, 20 nt, Human
ucaacucuccuccagaguca

SEQ ID NO: 1164887 - RNA, 18 nt, Human
ucaaccccuucgcuccug

SEQ ID NO: 1164888 - RNA, 19 nt, Human
ucaaccccuucgcuccugu

SEQ ID NO: 1164889 - RNA, 20 nt, Human
ucaaccccuucgcuccugug

SEQ ID NO: 1164890 - RNA, 15 nt, Human
ucaaccuccugggcu

SEQ ID NO: 1164891 - RNA, 16 nt, Human
ucaaccuccugggcua

SEQ ID NO: 1164892 - RNA, 12 nt, Human
ucaagccaccaa

SEQ ID NO: 1164893 - RNA, 20 nt, Human
ucaagccaccaacauacucc

SEQ ID NO: 1164894 - RNA, 18 nt, Human
ucaagcgauucuucugcu

SEQ ID NO: 1164895 - RNA, 19 nt, Human
ucaagcgauucuucugcuu

SEQ ID NO: 1164896 - RNA, 21 nt, Human
ucaagcgauucuucugcuuca

SEQ ID NO: 1164897 - RNA, 13 nt, Human
ucaaggauccuga

SEQ ID NO: 1164898 - RNA, 14 nt, Human
ucaaggauccugag

SEQ ID NO: 1164899 - RNA, 15 nt, Human
ucaaggauccugagc

SEQ ID NO: 1164900 - RNA, 16 nt, Human
ucaaggauccugagcc

SEQ ID NO: 1164901 - RNA, 17 nt, Human
ucaaggauccugagcca

SEQ ID NO: 1164902 - RNA, 15 nt, Human
ucacacacuuuggcu

SEQ ID NO: 1164903 - RNA, 23 nt, Human
ucacacaugagcaucaggccagg

SEQ ID NO: 1164904 - RNA, 16 nt, Human
ucacagucacauucca

SEQ ID NO: 1164905 - RNA, 14 nt, Human
ucaauaaaauccau

SEQ ID NO: 1164906 - RNA, 22 nt, Human
ucacaagacccaaaaggcagaa

SEQ ID NO: 1164907 - RNA, 12 nt, Human
ucacccuuuucu

SEQ ID NO: 1164908 - RNA, 14 nt, Human
ucaccgaaaacgug

SEQ ID NO: 1164909 - RNA, 19 nt, Human
ucacccgcuaagagggagg

SEQ ID NO: 1164910 - RNA, 15 nt, Human
ucaccgaaaacgugg

SEQ ID NO: 1164911 - RNA, 19 nt, Human
ucaccgaaaacguggcugc

SEQ ID NO: 1164912 - RNA, 20 nt, Human
ucaccgaaaacguggcugcu

SEQ ID NO: 1164913 - RNA, 21 nt, Human
ucaccgaaaacguggcugcuu

SEQ ID NO: 1164914 - RNA, 22 nt, Human
ucaccgaaaacguggcugcuuc

SEQ ID NO: 1164915 - RNA, 23 nt, Human
ucaccgaaaacguggcugcuuca

SEQ ID NO: 1164916 - RNA, 12 nt, Human
ucacauuuaaau

SEQ ID NO: 1164917 - RNA, 14 nt, Human
ucacauuuauucug

SEQ ID NO: 1164918 - RNA, 17 nt, Human
ucaccaacgucugugcc

SEQ ID NO: 1164919 - RNA, 18 nt, Human
ucaccaacgucugugcca

SEQ ID NO: 1164920 - RNA, 13 nt, Human
ucaccaagcccag

SEQ ID NO: 1164921 - RNA, 18 nt, Human
ucacccgcuaagagggag

SEQ ID NO: 1164922 - RNA, 21 nt, Human
ucaggccugggggcugggcag

SEQ ID NO: 1164923 - RNA, 23 nt, Human
ucagcuccagcucaccagcccca

SEQ ID NO: 1164924 - RNA, 24 nt, Human
ucagcuccagcucaccagccccag

SEQ ID NO: 1164925 - RNA, 23 nt, Human
ucagcucugcaagaauugaagca

SEQ ID NO: 1164926 - RNA, 13 nt, Human
ucaggcuagaugu

SEQ ID NO: 1164927 - RNA, 16 nt, Human
ucaggugauccaccca

SEQ ID NO: 1164928 - RNA, 23 nt, Human
ucaggugauccacccaccucagc

SEQ ID NO: 1164929 - RNA, 23 nt, Human
ucaggugccucaagagaaggcaa

SEQ ID NO: 1164930 - RNA, 18 nt, Human
ucagguggggcagcuuga

SEQ ID NO: 1164931 - RNA, 19 nt, Human
ucagguggggcagcuugag

SEQ ID NO: 1164932 - RNA, 20 nt, Human
ucagguggggcagcuugagg

SEQ ID NO: 1164933 - RNA, 21 nt, Human
ucagguggggcagcuugaggg

SEQ ID NO: 1164934 - RNA, 21 nt, Human
ucagucugauucccaagcucu

SEQ ID NO: 1164935 - RNA, 22 nt, Human
ucagucugauucccaagcucug

SEQ ID NO: 1164936 - RNA, 23 nt, Human
ucagucugauucccaagcucugc

SEQ ID NO: 1164937 - RNA, 13 nt, Human
uccaaaguacacu

SEQ ID NO: 1164938 - RNA, 16 nt, Human
ucauuaggauggcuag

SEQ ID NO: 1164939 - RNA, 17 nt, Human
ucaucaaugaaugaaug

SEQ ID NO: 1164940 - RNA, 20 nt, Human
ucaguguacauggaauaaca

SEQ ID NO: 1164941 - RNA, 16 nt, Human
ucagugccaaaaacaa

SEQ ID NO: 1164942 - RNA, 11 nt, Human
ucauagcagcu

SEQ ID NO: 1164943 - RNA, 12 nt, Human
ucauagcagcuu

SEQ ID NO: 1164944 - RNA, 14 nt, Human
ucauccacugugcc

SEQ ID NO: 1164945 - RNA, 17 nt, Human
ucauccacugugccaug

SEQ ID NO: 1164946 - RNA, 18 nt, Human
ucauccacugugccaugu

SEQ ID NO: 1164947 - RNA, 19 nt, Human
ucauggaauuggagcucgu

SEQ ID NO: 1164948 - RNA, 14 nt, Human
uccagauccuggaa

SEQ ID NO: 1164949 - RNA, 12 nt, Human
uccaggagcagc

SEQ ID NO: 1164950 - RNA, 13 nt, Human
uccaggagcagcc

SEQ ID NO: 1164951 - RNA, 14 nt, Human
uccaggagcagcca

SEQ ID NO: 1164952 - RNA, 15 nt, Human
uccaggagcagccac

SEQ ID NO: 1164953 - RNA, 19 nt, Human
uccaggggugggacacccu

SEQ ID NO: 1164954 - RNA, 20 nt, Human
uccaggggugggacacccug

SEQ ID NO: 1164955 - RNA, 14 nt, Human
uccaaaguacacug

SEQ ID NO: 1164956 - RNA, 16 nt, Human
uccaaaguacacuguu

SEQ ID NO: 1164957 - RNA, 21 nt, Human
uccacuuggucugugagaugc

SEQ ID NO: 1164958 - RNA, 23 nt, Human
uccacuuggucugugagaugcua

SEQ ID NO: 1164959 - RNA, 20 nt, Human
uccacuuucuagccagagga

SEQ ID NO: 1164960 - RNA, 21 nt, Human
uccacuuucuagccagaggag

SEQ ID NO: 1164961 - RNA, 22 nt, Human
uccaggggugggacacccugug

SEQ ID NO: 1164962 - RNA, 19 nt, Human
uccagguagagggugugua

SEQ ID NO: 1164963 - RNA, 20 nt, Human
uccagguuuaagcuguuacu

SEQ ID NO: 1164964 - RNA, 15 nt, Human
uccauacauuugugu

SEQ ID NO: 1164965 - RNA, 14 nt, Human
uccauagagagcaa

SEQ ID NO: 1164966 - RNA, 15 nt, Human
uccauagagagcaag

SEQ ID NO: 1164967 - RNA, 13 nt, Human
uccauggacuuug

SEQ ID NO: 1164968 - RNA, 20 nt, Human
uccaugggccauaugaaaag

SEQ ID NO: 1164969 - RNA, 15 nt, Human
ucccaucuuccaagg

SEQ ID NO: 1164970 - RNA, 18 nt, Human
ucccaugagccucagcau

SEQ ID NO: 1164971 - RNA, 19 nt, Human
ucccaugagccucagcauc

SEQ ID NO: 1164972 - RNA, 21 nt, Human
ucccagcugugcucuggacag

SEQ ID NO: 1164973 - RNA, 22 nt, Human
ucccagcugugcucuggacagg

SEQ ID NO: 1164974 - RNA, 23 nt, Human
ucccagcugugcucuggacaggc

SEQ ID NO: 1164975 - RNA, 24 nt, Human
ucccaggcauuccccaggaggcca

SEQ ID NO: 1164976 - RNA, 20 nt, Human
uccaugugggcuaguugggc

SEQ ID NO: 1164977 - RNA, 22 nt, Human
ucccaccucucucacuccuuga

SEQ ID NO: 1164978 - RNA, 13 nt, Human
ucccaccuuggcu

SEQ ID NO: 1164979 - RNA, 16 nt, Human
ucccaccuuggcugca

SEQ ID NO: 1164980 - RNA, 17 nt, Human
ucccaccuuggcugcag

SEQ ID NO: 1164981 - RNA, 18 nt, Human
ucccaccuuggcugcagg

SEQ ID NO: 1164982 - RNA, 20 nt, Human
ucccaugagccucagcaucc

SEQ ID NO: 1164983 - RNA, 13 nt, Human
uccccagauugca

SEQ ID NO: 1164984 - RNA, 18 nt, Human
uccccagauugcaacagg

SEQ ID NO: 1164985 - RNA, 19 nt, Human
uccccagauugcaacaggc

SEQ ID NO: 1164986 - RNA, 20 nt, Human
uccccagauugcaacaggcu

SEQ ID NO: 1164987 - RNA, 22 nt, Human
uccccagauugcaacaggcugg

SEQ ID NO: 1164988 - RNA, 23 nt, Human
uccccagauugcaacaggcuggg

SEQ ID NO: 1164989 - RNA, 20 nt, Human
uccccagcaagugagagcug

SEQ ID NO: 1164990 - RNA, 21 nt, Human
uccccagcaagugagagcugg

SEQ ID NO: 1164991 - RNA, 22 nt, Human
uccccagcaagugagagcuggg

SEQ ID NO: 1164992 - RNA, 14 nt, Human
uccccaggaggcca

SEQ ID NO: 1164993 - RNA, 15 nt, Human
uccccaggaggccag

SEQ ID NO: 1164994 - RNA, 16 nt, Human
uccccaggaggccagc

SEQ ID NO: 1164995 - RNA, 17 nt, Human
uccccaggaggccagcc

SEQ ID NO: 1164996 - RNA, 20 nt, Human
ucccccagccccauccucug

SEQ ID NO: 1164997 - RNA, 21 nt, Human
ucccccagccccauccucugu

SEQ ID NO: 1164998 - RNA, 22 nt, Human
ucccccagccccauccucugua

SEQ ID NO: 1164999 - RNA, 18 nt, Human
uccucauuagcauuuugc

SEQ ID NO: 1165000 - RNA, 10 nt, Human
uccuccaggu

SEQ ID NO: 1165001 - RNA, 12 nt, Human
uccucccaccuc

SEQ ID NO: 1165002 - RNA, 13 nt, Human
uccucccaccuca

SEQ ID NO: 1165003 - RNA, 12 nt, Human
uccuaguuccac

SEQ ID NO: 1165004 - RNA, 23 nt, Human
uccuauauuguuuucaguguaca

SEQ ID NO: 1165005 - RNA, 15 nt, Human
ucccccuuccaugga

SEQ ID NO: 1165006 - RNA, 21 nt, Human
ucccccuuccauggacuuugu

SEQ ID NO: 1165007 - RNA, 15 nt, Human
ucccuuccucuuucc

SEQ ID NO: 1165008 - RNA, 16 nt, Human
ucccuuccucuuucca

SEQ ID NO: 1165009 - RNA, 14 nt, Human
uccgccucuugggu

SEQ ID NO: 1165010 - RNA, 16 nt, Human
uccgcuuucuacccag

SEQ ID NO: 1165011 - RNA, 18 nt, Human
uccgcuuucuacccagcg

SEQ ID NO: 1165012 - RNA, 20 nt, Human
uccgcuuucuacccagcgag

SEQ ID NO: 1165013 - RNA, 20 nt, Human
uccuaagcuauucaguaaua

SEQ ID NO: 1165014 - RNA, 21 nt, Human
uccuaagcuauucaguaauaa

SEQ ID NO: 1165015 - RNA, 21 nt, Human
uccugaggcuccacuuggucu

SEQ ID NO: 1165016 - RNA, 19 nt, Human
uccugaggcuccacuuggu

SEQ ID NO: 1165017 - RNA, 20 nt, Human
uccugaggcuccacuugguc

SEQ ID NO: 1165018 - RNA, 13 nt, Human
uccugccaggcau

SEQ ID NO: 1165019 - RNA, 14 nt, Human
uccugccaggcaug

SEQ ID NO: 1165020 - RNA, 18 nt, Human
uccugccccugagcccau

SEQ ID NO: 1165021 - RNA, 17 nt, Human
uccugccccugagccca

SEQ ID NO: 1165022 - RNA, 17 nt, Human
uccugcccuuaccugcc

SEQ ID NO: 1165023 - RNA, 20 nt, Human
uccugcccuuaccugccagg

SEQ ID NO: 1165024 - RNA, 20 nt, Human
uccugccuaagugcagcccc

SEQ ID NO: 1165025 - RNA, 14 nt, Human
uccuggaguucugg

SEQ ID NO: 1165026 - RNA, 17 nt, Human
uccuggcaauagucaaa

SEQ ID NO: 1165027 - RNA, 23 nt, Human
uccuggcacccggccccugcugg

SEQ ID NO: 1165028 - RNA, 13 nt, Human
uccuggcacugcu

SEQ ID NO: 1165029 - RNA, 16 nt, Human
uccuggcacugcuucc

SEQ ID NO: 1165030 - RNA, 17 nt, Human
uccuggcacugcuucca

SEQ ID NO: 1165031 - RNA, 12 nt, Human
uccuggccucaa

SEQ ID NO: 1165032 - RNA, 11 nt, Human
uccuguagccc

SEQ ID NO: 1165033 - RNA, 13 nt, Human
uccuguagcccua

SEQ ID NO: 1165034 - RNA, 18 nt, Human
ucuaaaggcuaccuuugu

SEQ ID NO: 1165035 - RNA, 19 nt, Human
ucuaaaggcuaccuuugua

SEQ ID NO: 1165036 - RNA, 20 nt, Human
ucuaaaggcuaccuuuguau

SEQ ID NO: 1165037 - RNA, 13 nt, Human
ucgugacaacacu

SEQ ID NO: 1165038 - RNA, 14 nt, Human
ucuaugacacaugc

SEQ ID NO: 1165039 - RNA, 17 nt, Human
ucuaugacacaugcaag

SEQ ID NO: 1165040 - RNA, 15 nt, Human
ucuaggaagacuuug

SEQ ID NO: 1165041 - RNA, 16 nt, Human
ucuaggaagacuuugg

SEQ ID NO: 1165042 - RNA, 19 nt, Human
ucuaggaagacuuuggaaa

SEQ ID NO: 1165043 - RNA, 21 nt, Human
ucuaggaagacuuuggaaaga

SEQ ID NO: 1165044 - RNA, 17 nt, Human
ucuacacuaagagagaa

SEQ ID NO: 1165045 - RNA, 15 nt, Human
ucuacagaggccaug

SEQ ID NO: 1165046 - RNA, 16 nt, Human
ucuacagaggccaugg

SEQ ID NO: 1165047 - RNA, 14 nt, Human
ucuaccuuccugca

SEQ ID NO: 1165048 - RNA, 12 nt, Human
ucuacuaaaaau

SEQ ID NO: 1165049 - RNA, 13 nt, Human
ucuccacccugcu

SEQ ID NO: 1165050 - RNA, 17 nt, Human
ucuccacccugcucucc

SEQ ID NO: 1165051 - RNA, 14 nt, Human
ucuccacccugcuc

SEQ ID NO: 1165052 - RNA, 16 nt, Human
ucuccacccugcucuc

SEQ ID NO: 1165053 - RNA, 22 nt, Human
ucuccaccugccagggacagag

SEQ ID NO: 1165054 - RNA, 17 nt, Human
ucuccaccugccaggga

SEQ ID NO: 1165055 - RNA, 19 nt, Human
ucuccaccugccagggaca

SEQ ID NO: 1165056 - RNA, 14 nt, Human
ucuccaccugccag

SEQ ID NO: 1165057 - RNA, 15 nt, Human
ucuccaccugccagg

SEQ ID NO: 1165058 - RNA, 16 nt, Human
ucuccaccugccaggg

SEQ ID NO: 1165059 - RNA, 12 nt, Human
ucuaugggacuc

SEQ ID NO: 1165060 - RNA, 13 nt, Human
ucuaugggacuca

SEQ ID NO: 1165061 - RNA, 19 nt, Human
ucuaugggacucaaugcac

SEQ ID NO: 1165062 - RNA, 23 nt, Human
ucuaugggacucaaugcacugac

SEQ ID NO: 1165063 - RNA, 23 nt, Human
ucucaguccaugaagauguagag

SEQ ID NO: 1165064 - RNA, 16 nt, Human
ucucauacucaccuca

SEQ ID NO: 1165065 - RNA, 18 nt, Human
ucucauacucaccucacc

SEQ ID NO: 1165066 - RNA, 12 nt, Human
ucuccagccccu

SEQ ID NO: 1165067 - RNA, 13 nt, Human
ucuccagccccug

SEQ ID NO: 1165068 - RNA, 14 nt, Human
ucuccagccccugg

SEQ ID NO: 1165069 - RNA, 15 nt, Human
ucuccagccccugga

SEQ ID NO: 1165070 - RNA, 16 nt, Human
ucuccagccccuggau

SEQ ID NO: 1165071 - RNA, 18 nt, Human
ucuccagccccuggaugc

SEQ ID NO: 1165072 - RNA, 22 nt, Human
ucuccagccccuggaugcagcc

SEQ ID NO: 1165073 - RNA, 18 nt, Human
ucucccucagucuggccc

SEQ ID NO: 1165074 - RNA, 23 nt, Human
ucucccucagucuggcccuuccu

SEQ ID NO: 1165075 - RNA, 11 nt, Human
ucuccaggcug

SEQ ID NO: 1165076 - RNA, 12 nt, Human
ucucccccagcc

SEQ ID NO: 1165077 - RNA, 13 nt, Human
ucucccccagccc

SEQ ID NO: 1165078 - RNA, 16 nt, Human
ucucccuucauccuuc

SEQ ID NO: 1165079 - RNA, 15 nt, Human
ucuugcaugaggcua

SEQ ID NO: 1165080 - RNA, 16 nt, Human
ucuuguguguuuauug

SEQ ID NO: 1165081 - RNA, 21 nt, Human
ucuuguguguuuauugucaaa

SEQ ID NO: 1165082 - RNA, 23 nt, Human
ucuuucacccuuuucuguuugcu

SEQ ID NO: 1165083 - RNA, 17 nt, Human
ucuuuggacacucacac

SEQ ID NO: 1165084 - RNA, 12 nt, Human
ucuuugccaagu

SEQ ID NO: 1165085 - RNA, 16 nt, Human
ucuuucagccaagaau

SEQ ID NO: 1165086 - RNA, 19 nt, Human
ucuuucagccaagaauucu

SEQ ID NO: 1165087 - RNA, 20 nt, Human
ucuuucagccaagaauucuu

SEQ ID NO: 1165088 - RNA, 21 nt, Human
ucuuucagccaagaauucuua

SEQ ID NO: 1165089 - RNA, 13 nt, Human
ucuuuccaaagua

SEQ ID NO: 1165090 - RNA, 14 nt, Human
ucuuuccaaaguac

SEQ ID NO: 1165091 - RNA, 17 nt, Human
ucuuuccaaaguacacu

SEQ ID NO: 1165092 - RNA, 18 nt, Human
ugaaagcccugagcuuuc

SEQ ID NO: 1165093 - RNA, 18 nt, Human
ugaaacccugucucuacu

SEQ ID NO: 1165094 - RNA, 13 nt, Human
ugaaagggcccag

SEQ ID NO: 1165095 - RNA, 15 nt, Human
ugaaagggcccagag

SEQ ID NO: 1165096 - RNA, 15 nt, Human
ugaaagguacuucaa

SEQ ID NO: 1165097 - RNA, 16 nt, Human
ugaaagguacuucaaa

SEQ ID NO: 1165098 - RNA, 20 nt, Human
ugaaaagcuccauuuuuagu

SEQ ID NO: 1165099 - RNA, 13 nt, Human
ugaaaauuuugau

SEQ ID NO: 1165100 - RNA, 19 nt, Human
ugaaaauuuugauguuuua

SEQ ID NO: 1165101 - RNA, 21 nt, Human
ugaaaauuuugauguuuuaag

SEQ ID NO: 1165102 - RNA, 14 nt, Human
ugaaacauuuuguc

SEQ ID NO: 1165103 - RNA, 16 nt, Human
ugaaacccccacacac

SEQ ID NO: 1165104 - RNA, 17 nt, Human
ugaaacccccacacaca

SEQ ID NO: 1165105 - RNA, 18 nt, Human
ugaaacccccacacacac

SEQ ID NO: 1165106 - RNA, 16 nt, Human
ugaaauauugacuuuu

SEQ ID NO: 1165107 - RNA, 22 nt, Human
ugaaccaagaacuuuccaggaa

SEQ ID NO: 1165108 - RNA, 19 nt, Human
ugaaccacaucuugcucug

SEQ ID NO: 1165109 - RNA, 23 nt, Human
ugaaccacaucuugcucugcuga

SEQ ID NO: 1165110 - RNA, 17 nt, Human
ugaaccaccacacccag

SEQ ID NO: 1165111 - RNA, 20 nt, Human
ugaaccaccacacccagccc

SEQ ID NO: 1165112 - RNA, 21 nt, Human
ugaaccaccacacccagccca

SEQ ID NO: 1165113 - RNA, 17 nt, Human
ugaacuccuggccucaa

SEQ ID NO: 1165114 - RNA, 15 nt, Human
ugaaggccccgccca

SEQ ID NO: 1165115 - RNA, 16 nt, Human
ugaaggccccgcccag

SEQ ID NO: 1165116 - RNA, 19 nt, Human
ugaaggacauugcggacag

SEQ ID NO: 1165117 - RNA, 20 nt, Human
ugaaggacauugcggacagc

SEQ ID NO: 1165118 - RNA, 22 nt, Human
ugaaggacauugcggacagcca

SEQ ID NO: 1165119 - RNA, 17 nt, Human
ugaaggccccgcccagg

SEQ ID NO: 1165120 - RNA, 11 nt, Human
ugaaguccaag

SEQ ID NO: 1165121 - RNA, 13 nt, Human
ugaaguccaagca

SEQ ID NO: 1165122 - RNA, 16 nt, Human
ugaaugaaacccccac

SEQ ID NO: 1165123 - RNA, 18 nt, Human
ugaaugaaacccccacac

SEQ ID NO: 1165124 - RNA, 19 nt, Human
ugaaugaaacccccacaca

SEQ ID NO: 1165125 - RNA, 20 nt, Human
ugaaugaaacccccacacac

SEQ ID NO: 1165126 - RNA, 21 nt, Human
ugaaugaaacccccacacaca

SEQ ID NO: 1165127 - RNA, 22 nt, Human
ugaaugaaacccccacacacac

SEQ ID NO: 1165128 - RNA, 23 nt, Human
ugaaugaugauccuaggcauuug

SEQ ID NO: 1165129 - RNA, 15 nt, Human
ugaauuacauuugua

SEQ ID NO: 1165130 - RNA, 16 nt, Human
ugaauuacauuuguau

SEQ ID NO: 1165131 - RNA, 18 nt, Human
ugaauuacauuuguauaa

SEQ ID NO: 1165132 - RNA, 23 nt, Human
ugacagacacaggcccggcucca

SEQ ID NO: 1165133 - RNA, 14 nt, Human
ugacagaggcagcc

SEQ ID NO: 1165134 - RNA, 15 nt, Human
ugacagaggcagccc

SEQ ID NO: 1165135 - RNA, 16 nt, Human
ugacagaggcagcccc

SEQ ID NO: 1165136 - RNA, 17 nt, Human
ugacagaggcagcccca

SEQ ID NO: 1165137 - RNA, 18 nt, Human
ugacagaggcagccccau

SEQ ID NO: 1165138 - RNA, 23 nt, Human
ugacagaggcagccccauucugc

SEQ ID NO: 1165139 - RNA, 14 nt, Human
ugacagagugagac

SEQ ID NO: 1165140 - RNA, 17 nt, Human
ugacagagugagacucu

SEQ ID NO: 1165141 - RNA, 19 nt, Human
ugacagagugagacucugu

SEQ ID NO: 1165142 - RNA, 22 nt, Human
ugacagagugagacucugucuc

SEQ ID NO: 1165143 - RNA, 18 nt, Human
ugacaaggauugcuacug

SEQ ID NO: 1165144 - RNA, 15 nt, Human
ugacaagcucacaga

SEQ ID NO: 1165145 - RNA, 20 nt, Human
ugacaagcucacagaccuuu

SEQ ID NO: 1165146 - RNA, 12 nt, Human
ugacaagcucac

SEQ ID NO: 1165147 - RNA, 17 nt, Human
ugacaugggacauuugc

SEQ ID NO: 1165148 - RNA, 18 nt, Human
ugacaugggacauuugcu

SEQ ID NO: 1165149 - RNA, 13 nt, Human
ugacaugucuuuu

SEQ ID NO: 1165150 - RNA, 15 nt, Human
ugacaugucuuuucu

SEQ ID NO: 1165151 - RNA, 20 nt, Human
ugaccacugcagaagacagu

SEQ ID NO: 1165152 - RNA, 19 nt, Human
ugaccagcaccaucucucc

SEQ ID NO: 1165153 - RNA, 20 nt, Human
ugaccagcaccaucucuccu

SEQ ID NO: 1165154 - RNA, 16 nt, Human
ugaccauucuccaccu

SEQ ID NO: 1165155 - RNA, 17 nt, Human
ugaccauucuccaccug

SEQ ID NO: 1165156 - RNA, 18 nt, Human
ugaccauucuccaccugc

SEQ ID NO: 1165157 - RNA, 19 nt, Human
ugaccauucuccaccugcc

SEQ ID NO: 1165158 - RNA, 13 nt, Human
ugaccgugaggcc

SEQ ID NO: 1165159 - RNA, 14 nt, Human
ugaccgugaggcca

SEQ ID NO: 1165160 - RNA, 16 nt, Human
ugaccgugaggccaga

SEQ ID NO: 1165161 - RNA, 20 nt, Human
ugaccgugaggccagagaca

SEQ ID NO: 1165162 - RNA, 20 nt, Human
ugaccucaggugauccaccc

SEQ ID NO: 1165163 - RNA, 21 nt, Human
ugaccucaggugauccaccca

SEQ ID NO: 1165164 - RNA, 19 nt, Human
ugagacucgcgacaaugca

SEQ ID NO: 1165165 - RNA, 20 nt, Human
ugagacucgcgacaaugcaa

SEQ ID NO: 1165166 - RNA, 21 nt, Human
ugagacucgcgacaaugcaaa

SEQ ID NO: 1165167 - RNA, 22 nt, Human
ugagacucgcgacaaugcaaac

SEQ ID NO: 1165168 - RNA, 23 nt, Human
ugagacucgcgacaaugcaaacc

SEQ ID NO: 1165169 - RNA, 16 nt, Human
ugagagugaacaaauu

SEQ ID NO: 1165170 - RNA, 15 nt, Human
ugagaucaaaacggu

SEQ ID NO: 1165171 - RNA, 14 nt, Human
ugagaucagccugg

SEQ ID NO: 1165172 - RNA, 15 nt, Human
ugagaucagccuggg

SEQ ID NO: 1165173 - RNA, 13 nt, Human
ugagcagggcuca

SEQ ID NO: 1165174 - RNA, 14 nt, Human
ugagcagggcucag

SEQ ID NO: 1165175 - RNA, 15 nt, Human
ugagcagggcucagc

SEQ ID NO: 1165176 - RNA, 19 nt, Human
ugagccgagaucacgccac

SEQ ID NO: 1165177 - RNA, 21 nt, Human
ugagccgagaucacgccacug

SEQ ID NO: 1165178 - RNA, 17 nt, Human
ugagccucagcauccug

SEQ ID NO: 1165179 - RNA, 22 nt, Human
ugagccucagcauccuggcacc

SEQ ID NO: 1165180 - RNA, 18 nt, Human
ugagccucagcauccugg

SEQ ID NO: 1165181 - RNA, 21 nt, Human
ugagccucagcauccuggcac

SEQ ID NO: 1165182 - RNA, 10 nt, Human
ugagccuggc

SEQ ID NO: 1165183 - RNA, 16 nt, Human
ugagcagggcucagcg

SEQ ID NO: 1165184 - RNA, 17 nt, Human
ugagcagggcucagcgg

SEQ ID NO: 1165185 - RNA, 19 nt, Human
ugagcagggcucagcgggg

SEQ ID NO: 1165186 - RNA, 18 nt, Human
ugagcaucaggccaggcc

SEQ ID NO: 1165187 - RNA, 19 nt, Human
ugagcaucaggccaggccc

SEQ ID NO: 1165188 - RNA, 20 nt, Human
ugagcaucaggccaggcccu

SEQ ID NO: 1165189 - RNA, 21 nt, Human
ugagcaucaggccaggcccuc

SEQ ID NO: 1165190 - RNA, 12 nt, Human
ugaggcauuugu

SEQ ID NO: 1165191 - RNA, 19 nt, Human
ugaggcauuuguuugaacu

SEQ ID NO: 1165192 - RNA, 20 nt, Human
ugaggcauuuguuugaacug

SEQ ID NO: 1165193 - RNA, 21 nt, Human
ugaggcauuuguuugaacuga

SEQ ID NO: 1165194 - RNA, 17 nt, Human
ugaggcuaguguggugu

SEQ ID NO: 1165195 - RNA, 23 nt, Human
ugaggcuagugugguguuuccug

SEQ ID NO: 1165196 - RNA, 23 nt, Human
ugaggcauuuguuugaacugaua

SEQ ID NO: 1165197 - RNA, 13 nt, Human
ugagcugggauga

SEQ ID NO: 1165198 - RNA, 18 nt, Human
ugaggcuccacuuggucu

SEQ ID NO: 1165199 - RNA, 20 nt, Human
ugaggcuccacuuggucugu

SEQ ID NO: 1165200 - RNA, 13 nt, Human
ugaggcucugccc

SEQ ID NO: 1165201 - RNA, 14 nt, Human
ugaggcucugcccu

SEQ ID NO: 1165202 - RNA, 15 nt, Human
ugaggcucugcccuu

SEQ ID NO: 1165203 - RNA, 17 nt, Human
ugagggaacagagaggu

SEQ ID NO: 1165204 - RNA, 12 nt, Human
ugaggugggagg

SEQ ID NO: 1165205 - RNA, 13 nt, Human
ugaggugggagga

SEQ ID NO: 1165206 - RNA, 21 nt, Human
ugaggugggaggaucucuuga

SEQ ID NO: 1165207 - RNA, 19 nt, Human
ugaguccagaaguuugaga

SEQ ID NO: 1165208 - RNA, 19 nt, Human
ugagucgaggacagggagg

SEQ ID NO: 1165209 - RNA, 13 nt, Human
ugagucugaaggc

SEQ ID NO: 1165210 - RNA, 15 nt, Human
ugagucugaaggcug

SEQ ID NO: 1165211 - RNA, 17 nt, Human
ugagucugaaggcuggg

SEQ ID NO: 1165212 - RNA, 18 nt, Human
ugagucugaaggcugggu

SEQ ID NO: 1165213 - RNA, 21 nt, Human
ugaguugauagcacagacccu

SEQ ID NO: 1165214 - RNA, 14 nt, Human
ugagugagcaugcc

SEQ ID NO: 1165215 - RNA, 16 nt, Human
ugaguugauagcacag

SEQ ID NO: 1165216 - RNA, 20 nt, Human
ugaguugauagcacagaccc

SEQ ID NO: 1165217 - RNA, 16 nt, Human
ugauaacuggaaacuu

SEQ ID NO: 1165218 - RNA, 20 nt, Human
ugaucuucuuuauaauucua

SEQ ID NO: 1165219 - RNA, 17 nt, Human
ugauccacccaccucag

SEQ ID NO: 1165220 - RNA, 18 nt, Human
ugauccacccaccucagc

SEQ ID NO: 1165221 - RNA, 19 nt, Human
ugauccacccaccucagcc

SEQ ID NO: 1165222 - RNA, 17 nt, Human
ugaucucucgugauuga

SEQ ID NO: 1165223 - RNA, 20 nt, Human
ugauaagaaccuuuugagug

SEQ ID NO: 1165224 - RNA, 13 nt, Human
ugauagcacagac

SEQ ID NO: 1165225 - RNA, 14 nt, Human
ugauagcacagacc

SEQ ID NO: 1165226 - RNA, 17 nt, Human
ugaucagcuuauugucu

SEQ ID NO: 1165227 - RNA, 24 nt, Human
ugaucagcuuauugucuagugaaa

SEQ ID NO: 1165228 - RNA, 13 nt, Human
ugauccaagcugg

SEQ ID NO: 1165229 - RNA, 14 nt, Human
ugauccaagcuggu

SEQ ID NO: 1165230 - RNA, 15 nt, Human
ugauccaagcugguc

SEQ ID NO: 1165231 - RNA, 17 nt, Human
ugauccaagcugguccc

SEQ ID NO: 1165232 - RNA, 20 nt, Human
ugaugcuacaggauuugaaa

SEQ ID NO: 1165233 - RNA, 23 nt, Human
ugaugcgggccagugcuccagcc

SEQ ID NO: 1165234 - RNA, 23 nt, Human
ugaugcuacaggauuugaaauug

SEQ ID NO: 1165235 - RNA, 16 nt, Human
ugaucuuugcagacag

SEQ ID NO: 1165236 - RNA, 18 nt, Human
ugaucuuugcagacaggc

SEQ ID NO: 1165237 - RNA, 16 nt, Human
ugaugcuucuucagag

SEQ ID NO: 1165238 - RNA, 17 nt, Human
ugaugcuucuucagaga

SEQ ID NO: 1165239 - RNA, 18 nt, Human
ugaugcuucuucagagac

SEQ ID NO: 1165240 - RNA, 16 nt, Human
ugauguguuaucucuu

SEQ ID NO: 1165241 - RNA, 13 nt, Human
ugauucagacagc

SEQ ID NO: 1165242 - RNA, 14 nt, Human
ugauucagacagcu

SEQ ID NO: 1165243 - RNA, 15 nt, Human
ugauucagacagcug

SEQ ID NO: 1165244 - RNA, 16 nt, Human
ugauucagacagcugc

SEQ ID NO: 1165245 - RNA, 21 nt, Human
ugauuaugaauuacauuugua

SEQ ID NO: 1165246 - RNA, 22 nt, Human
ugauuaugaauuacauuuguau

SEQ ID NO: 1165247 - RNA, 20 nt, Human
ugauucaacagguuuuccug

SEQ ID NO: 1165248 - RNA, 13 nt, Human
ugauuauauguca

SEQ ID NO: 1165249 - RNA, 17 nt, Human
ugauuaugaauuacauu

SEQ ID NO: 1165250 - RNA, 19 nt, Human
ugauuaugaauuacauuug

SEQ ID NO: 1165251 - RNA, 20 nt, Human
ugauguucuuucacccuuuu

SEQ ID NO: 1165252 - RNA, 22 nt, Human
ugauguuuagaaacacaacuau

SEQ ID NO: 1165253 - RNA, 13 nt, Human
ugauuggaggggg

SEQ ID NO: 1165254 - RNA, 21 nt, Human
ugauuggaggggggagguggg

SEQ ID NO: 1165255 - RNA, 16 nt, Human
ugauugugucucuugg

SEQ ID NO: 1165256 - RNA, 18 nt, Human
ugauucagacagcugccu

SEQ ID NO: 1165257 - RNA, 19 nt, Human
ugauucagacagcugccug

SEQ ID NO: 1165258 - RNA, 20 nt, Human
ugauucagacagcugccugg

SEQ ID NO: 1165259 - RNA, 21 nt, Human
ugauucagacagcugccuggg

SEQ ID NO: 1165260 - RNA, 23 nt, Human
ugauucagacagcugccugggau

SEQ ID NO: 1165261 - RNA, 21 nt, Human
ugauucuccugccucagccuc

SEQ ID NO: 1165262 - RNA, 13 nt, Human
ugauucagcucug

SEQ ID NO: 1165263 - RNA, 16 nt, Human
ugccccuggcagcccc

SEQ ID NO: 1165264 - RNA, 17 nt, Human
ugccccuggcagccccu

SEQ ID NO: 1165265 - RNA, 12 nt, Human
ugcccggcugcg

SEQ ID NO: 1165266 - RNA, 14 nt, Human
ugcccggcugcgga

SEQ ID NO: 1165267 - RNA, 18 nt, Human
ugcccaggcuggcgugca

SEQ ID NO: 1165268 - RNA, 19 nt, Human
ugcccaggcuggcgugcag

SEQ ID NO: 1165269 - RNA, 20 nt, Human
ugcccaggcuggcgugcagu

SEQ ID NO: 1165270 - RNA, 21 nt, Human
ugcccugcccaccuggccucu

SEQ ID NO: 1165271 - RNA, 15 nt, Human
ugcccugcccaccug

SEQ ID NO: 1165272 - RNA, 16 nt, Human
ugcccugcccaccugg

SEQ ID NO: 1165273 - RNA, 20 nt, Human
ugcccugcccaccuggccuc

SEQ ID NO: 1165274 - RNA, 23 nt, Human
ugcccugugaguacuacaguccu

SEQ ID NO: 1165275 - RNA, 14 nt, Human
ugccucaagagaag

SEQ ID NO: 1165276 - RNA, 15 nt, Human
ugccucaagagaagg

SEQ ID NO: 1165277 - RNA, 21 nt, Human
ugcaguuacacuaaaagguga

SEQ ID NO: 1165278 - RNA, 21 nt, Human
ugcaguggugcgaucuggguu

SEQ ID NO: 1165279 - RNA, 13 nt, Human
ugcagggaguccg

SEQ ID NO: 1165280 - RNA, 12 nt, Human
ugcaguucugaa

SEQ ID NO: 1165281 - RNA, 14 nt, Human
ugcaguucugaaga

SEQ ID NO: 1165282 - RNA, 16 nt, Human
ugcaguugccagucac

SEQ ID NO: 1165283 - RNA, 17 nt, Human
ugcaugguuuagaaagc

SEQ ID NO: 1165284 - RNA, 21 nt, Human
ugcauuuggugguuucagaaa

SEQ ID NO: 1165285 - RNA, 23 nt, Human
ugcauuuggugguuucagaaaug

SEQ ID NO: 1165286 - RNA, 16 nt, Human
ugccacuaaauugaca

SEQ ID NO: 1165287 - RNA, 20 nt, Human
ugccaggaagccagcaggcu

SEQ ID NO: 1165288 - RNA, 22 nt, Human
ugccaggaagccagcaggcucu

SEQ ID NO: 1165289 - RNA, 20 nt, Human
ugccacuaaauugacacuua

SEQ ID NO: 1165290 - RNA, 14 nt, Human
ugccaggcauggug

SEQ ID NO: 1165291 - RNA, 21 nt, Human
ugcuacuguccuacccacccu

SEQ ID NO: 1165292 - RNA, 22 nt, Human
ugcuacuguccuacccacccuc

SEQ ID NO: 1165293 - RNA, 17 nt, Human
ugcggacagccacggcc

SEQ ID NO: 1165294 - RNA, 23 nt, Human
ugcucuccgaccagacaccuuga

SEQ ID NO: 1165295 - RNA, 13 nt, Human
ugcuagaacuccc

SEQ ID NO: 1165296 - RNA, 14 nt, Human
ugcuagaacucccu

SEQ ID NO: 1165297 - RNA, 15 nt, Human
ugcuagaacucccuu

SEQ ID NO: 1165298 - RNA, 17 nt, Human
ugcuagaacucccuuuc

SEQ ID NO: 1165299 - RNA, 18 nt, Human
ugcuagaacucccuuuca

SEQ ID NO: 1165300 - RNA, 21 nt, Human
ugcuaggaacacuccuucaca

SEQ ID NO: 1165301 - RNA, 22 nt, Human
ugcuaggaacacuccuucacag

SEQ ID NO: 1165302 - RNA, 12 nt, Human
ugcugcuugagg

SEQ ID NO: 1165303 - RNA, 19 nt, Human
ugcugcuugaggcaacuca

SEQ ID NO: 1165304 - RNA, 17 nt, Human
ugcugcauuuaaaagau

SEQ ID NO: 1165305 - RNA, 18 nt, Human
ugcugcauuuaaaagaua

SEQ ID NO: 1165306 - RNA, 19 nt, Human
ugcugcauuuaaaagauac

SEQ ID NO: 1165307 - RNA, 23 nt, Human
ugcugcauuuaaaagauacaguu

SEQ ID NO: 1165308 - RNA, 17 nt, Human
ugcugggcuugucugua

SEQ ID NO: 1165309 - RNA, 20 nt, Human
ugcugggggggauuguaaaa

SEQ ID NO: 1165310 - RNA, 13 nt, Human
ugcuggguguggc

SEQ ID NO: 1165311 - RNA, 21 nt, Human
uggaggaaggaaacccagcuc

SEQ ID NO: 1165312 - RNA, 23 nt, Human
uggaggaaggaaacccagcucug

SEQ ID NO: 1165313 - RNA, 12 nt, Human
uggcaaaaaggc

SEQ ID NO: 1165314 - RNA, 16 nt, Human
uggcaaaaaggcagga

SEQ ID NO: 1165315 - RNA, 20 nt, Human
uggcaauagucaaauugugu

SEQ ID NO: 1165316 - RNA, 15 nt, Human
uggcacuaguauuuc

SEQ ID NO: 1165317 - RNA, 15 nt, Human
uggcacuauaaugua

SEQ ID NO: 1165318 - RNA, 16 nt, Human
uggcacuauaauguaa

SEQ ID NO: 1165319 - RNA, 21 nt, Human
uggcacuauaauguaagcucu

SEQ ID NO: 1165320 - RNA, 15 nt, Human
uggcagaguugaaga

SEQ ID NO: 1165321 - RNA, 21 nt, Human
uggcagaguggauucuugaac

SEQ ID NO: 1165322 - RNA, 17 nt, Human
uggcagaguugaagaca

SEQ ID NO: 1165323 - RNA, 19 nt, Human
uggcagaguugaagacaga

SEQ ID NO: 1165324 - RNA, 17 nt, Human
uggccagaugcaccagc

SEQ ID NO: 1165325 - RNA, 18 nt, Human
uggccagaugcaccagcc

SEQ ID NO: 1165326 - RNA, 19 nt, Human
uggccagaugcaccagccc

SEQ ID NO: 1165327 - RNA, 20 nt, Human
uggccagaugcaccagcccu

SEQ ID NO: 1165328 - RNA, 15 nt, Human
uggccaggcuggucu

SEQ ID NO: 1165329 - RNA, 13 nt, Human
uggccaggcuggu

SEQ ID NO: 1165330 - RNA, 15 nt, Human
uggccccugcccggc

SEQ ID NO: 1165331 - RNA, 16 nt, Human
uggccccugcccggcu

SEQ ID NO: 1165332 - RNA, 20 nt, Human
uggccccugcccggcugcgg

SEQ ID NO: 1165333 - RNA, 11 nt, Human
uggcugcuuca

SEQ ID NO: 1165334 - RNA, 15 nt, Human
uggcugcuucaagga

SEQ ID NO: 1165335 - RNA, 16 nt, Human
uggcugcuucaaggau

SEQ ID NO: 1165336 - RNA, 22 nt, Human
uggcgcagcauauucaggaagc

SEQ ID NO: 1165337 - RNA, 23 nt, Human
uggcgcagcauauucaggaagcu

SEQ ID NO: 1165338 - RNA, 16 nt, Human
uggcgcugccccuggc

SEQ ID NO: 1165339 - RNA, 23 nt, Human
uggcgcugccccuggcagccccu

SEQ ID NO: 1165340 - RNA, 22 nt, Human
ugggcagagcagagaccauccc

SEQ ID NO: 1165341 - RNA, 22 nt, Human
ugggauuacaagcgugagccac

SEQ ID NO: 1165342 - RNA, 12 nt, Human
ugggauccucca

SEQ ID NO: 1165343 - RNA, 13 nt, Human
ugggauccuccag

SEQ ID NO: 1165344 - RNA, 14 nt, Human
ugggauccuccagg

SEQ ID NO: 1165345 - RNA, 16 nt, Human
uggcugggggccucag

SEQ ID NO: 1165346 - RNA, 17 nt, Human
uggcugggggccucagu

SEQ ID NO: 1165347 - RNA, 20 nt, Human
uggcugggggccucagugcc

SEQ ID NO: 1165348 - RNA, 14 nt, Human
ugggagugggccca

SEQ ID NO: 1165349 - RNA, 16 nt, Human
ugggagugggcccaau

SEQ ID NO: 1165350 - RNA, 23 nt, Human
ugggcagagcagagaccaucccu

SEQ ID NO: 1165351 - RNA, 15 nt, Human
uggggaugagaaagg

SEQ ID NO: 1165352 - RNA, 23 nt, Human
uggggaugagaaagguugaagca

SEQ ID NO: 1165353 - RNA, 20 nt, Human
uggggccaguuggucccccu

SEQ ID NO: 1165354 - RNA, 21 nt, Human
uggggccaguuggucccccuu

SEQ ID NO: 1165355 - RNA, 17 nt, Human
uggguacuuguggacac

SEQ ID NO: 1165356 - RNA, 18 nt, Human
uggguacuuguggacaca

SEQ ID NO: 1165357 - RNA, 20 nt, Human
uggguacuuguggacacagc

SEQ ID NO: 1165358 - RNA, 16 nt, Human
ugggggaguggccaca

SEQ ID NO: 1165359 - RNA, 20 nt, Human
ugggggaucacagccucuga

SEQ ID NO: 1165360 - RNA, 22 nt, Human
uggucacaggaaguagaggagg

SEQ ID NO: 1165361 - RNA, 14 nt, Human
uggucccccuucca

SEQ ID NO: 1165362 - RNA, 13 nt, Human
ugguauguuuuca

SEQ ID NO: 1165363 - RNA, 21 nt, Human
ugguauguuuucaggcuagau

SEQ ID NO: 1165364 - RNA, 15 nt, Human
uggucccccuuccau

SEQ ID NO: 1165365 - RNA, 16 nt, Human
uggucccccuuccaug

SEQ ID NO: 1165366 - RNA, 18 nt, Human
uggucccccuuccaugga

SEQ ID NO: 1165367 - RNA, 23 nt, Human
uggucccccuuccauggacuuug

SEQ ID NO: 1165368 - RNA, 17 nt, Human
ugguccuaaucuucuga

SEQ ID NO: 1165369 - RNA, 19 nt, Human
ugguccuaaucuucugaac

SEQ ID NO: 1165370 - RNA, 13 nt, Human
ugguccugcugca

SEQ ID NO: 1165371 - RNA, 15 nt, Human
ugguccugcugcagu

SEQ ID NO: 1165372 - RNA, 23 nt, Human
ugguccugcugcaguugccaguc

SEQ ID NO: 1165373 - RNA, 14 nt, Human
uggucggaaaacau

SEQ ID NO: 1165374 - RNA, 17 nt, Human
uggucggaaaacaugcu

SEQ ID NO: 1165375 - RNA, 15 nt, Human
uggucuacacugugc

SEQ ID NO: 1165376 - RNA, 16 nt, Human
uggucuacacugugcu

SEQ ID NO: 1165377 - RNA, 17 nt, Human
uggucuacacugugcug

SEQ ID NO: 1165378 - RNA, 18 nt, Human
uggucuacacugugcuga

SEQ ID NO: 1165379 - RNA, 19 nt, Human
uggucuacacugugcugag

SEQ ID NO: 1165380 - RNA, 13 nt, Human
uggugaccucugc

SEQ ID NO: 1165381 - RNA, 14 nt, Human
uggugaccucugcc

SEQ ID NO: 1165382 - RNA, 15 nt, Human
uggugaccucugccu

SEQ ID NO: 1165383 - RNA, 16 nt, Human
uggugaccucugccug

SEQ ID NO: 1165384 - RNA, 17 nt, Human
uggugaccucugccuga

SEQ ID NO: 1165385 - RNA, 22 nt, Human
uggugaccucugccugaaguca

SEQ ID NO: 1165386 - RNA, 19 nt, Human
uggugacuuuccucuuugg

SEQ ID NO: 1165387 - RNA, 21 nt, Human
uggugcaaugaccuuucaaua

SEQ ID NO: 1165388 - RNA, 22 nt, Human
uguuuuaagaggcagggucuca

SEQ ID NO: 1165389 - RNA, 18 nt, Human
uguuuuaaggaugcuugu

SEQ ID NO: 1165390 - RNA, 19 nt, Human
uguuuuaaggaugcuugua

SEQ ID NO: 1165391 - RNA, 14 nt, Human
uuaaaagauacagu

SEQ ID NO: 1165392 - RNA, 17 nt, Human
uuaaaagauacaguuac

SEQ ID NO: 1165393 - RNA, 13 nt, Human
uuaaaagaaugau

SEQ ID NO: 1165394 - RNA, 21 nt, Human
uuaaaauaccagccaguaaau

SEQ ID NO: 1165395 - RNA, 21 nt, Human
uguuucaaacauauauaacaa

SEQ ID NO: 1165396 - RNA, 22 nt, Human
uguuucaaacauauauaacaau

SEQ ID NO: 1165397 - RNA, 15 nt, Human
uguuucaaacuuuac

SEQ ID NO: 1165398 - RNA, 20 nt, Human
uguuuagauaauacaccacu

SEQ ID NO: 1165399 - RNA, 16 nt, Human
uguuuagauaauacac

SEQ ID NO: 1165400 - RNA, 13 nt, Human
uguuugugauuga

SEQ ID NO: 1165401 - RNA, 17 nt, Human
uuaagcuguuacugucu

SEQ ID NO: 1165402 - RNA, 18 nt, Human
uuaauauugauaugcuua

SEQ ID NO: 1165403 - RNA, 22 nt, Human
uuaauauugauaugcuuauaca

SEQ ID NO: 1165404 - RNA, 22 nt, Human
uuaaugucaauucuugccaaau

SEQ ID NO: 1165405 - RNA, 20 nt, Human
uuacaagcgugagccacugc

SEQ ID NO: 1165406 - RNA, 21 nt, Human
uuacaagcgugagccacugca

SEQ ID NO: 1165407 - RNA, 22 nt, Human
uuaauuaaaacacaacaucuuu

SEQ ID NO: 1165408 - RNA, 16 nt, Human
uuaacuucacauauug

SEQ ID NO: 1165409 - RNA, 15 nt, Human
uuaacuuuuauaaac

SEQ ID NO: 1165410 - RNA, 16 nt, Human
uuaacuuuuauaaacu

SEQ ID NO: 1165411 - RNA, 17 nt, Human
uuaacuuuuauaaacuu

SEQ ID NO: 1165412 - RNA, 18 nt, Human
uuaacuuuuauaaacuuu

SEQ ID NO: 1165413 - RNA, 17 nt, Human
uuaaccacuucagcuga

SEQ ID NO: 1165414 - RNA, 17 nt, Human
uuacuaguuucccuugc

SEQ ID NO: 1165415 - RNA, 13 nt, Human
uuacuaaguuuuu

SEQ ID NO: 1165416 - RNA, 14 nt, Human
uuacuaaguuuuua

SEQ ID NO: 1165417 - RNA, 16 nt, Human
uuacuaauagacaauu

SEQ ID NO: 1165418 - RNA, 18 nt, Human
uuacuuagguguggggga

SEQ ID NO: 1165419 - RNA, 11 nt, Human
uuacuucugcu

SEQ ID NO: 1165420 - RNA, 12 nt, Human
uuacuucugcua

SEQ ID NO: 1165421 - RNA, 23 nt, Human
uuacuucuuauacauuugauaaa

SEQ ID NO: 1165422 - RNA, 19 nt, Human
uuacuauggcccuggccua

SEQ ID NO: 1165423 - RNA, 21 nt, Human
uuacuuaaaccgccaaggcug

SEQ ID NO: 1165424 - RNA, 17 nt, Human
uuacuuuaaaaggagcc

SEQ ID NO: 1165425 - RNA, 18 nt, Human
uuacuuuaaaaggagcca

SEQ ID NO: 1165426 - RNA, 14 nt, Human
uuacuuuguguuca

SEQ ID NO: 1165427 - RNA, 19 nt, Human
uuagaaacacaacuauauu

SEQ ID NO: 1165428 - RNA, 15 nt, Human
uuagacagucccugc

SEQ ID NO: 1165429 - RNA, 16 nt, Human
uuagacagucccugcc

SEQ ID NO: 1165430 - RNA, 17 nt, Human
uuagacagucccugcca

SEQ ID NO: 1165431 - RNA, 18 nt, Human
uuagacagucccugccaa

SEQ ID NO: 1165432 - RNA, 12 nt, Human
uuagcuggaaaa

SEQ ID NO: 1165433 - RNA, 13 nt, Human
uuagcuggaaaag

SEQ ID NO: 1165434 - RNA, 14 nt, Human
uuagaguugauacu

SEQ ID NO: 1165435 - RNA, 22 nt, Human
uuagauaauacaccacuacauu

SEQ ID NO: 1165436 - RNA, 20 nt, Human
uuagaugcaguucugaagaa

SEQ ID NO: 1165437 - RNA, 21 nt, Human
uuagaugcaguucugaagaag

SEQ ID NO: 1165438 - RNA, 22 nt, Human
uuagaugcaguucugaagaaga

SEQ ID NO: 1165439 - RNA, 18 nt, Human
uuaguaugaggcauuugu

SEQ ID NO: 1165440 - RNA, 16 nt, Human
uuaguaugaggcauuu

SEQ ID NO: 1165441 - RNA, 18 nt, Human
uuaggauguugaaaaagu

SEQ ID NO: 1165442 - RNA, 17 nt, Human
uucaaauccuugaagau

SEQ ID NO: 1165443 - RNA, 17 nt, Human
uuauuuuaauaauguuu

SEQ ID NO: 1165444 - RNA, 17 nt, Human
uuauugucaaaguggug

SEQ ID NO: 1165445 - RNA, 18 nt, Human
uuauugucaaagugguga

SEQ ID NO: 1165446 - RNA, 15 nt, Human
uuauugucuagugaa

SEQ ID NO: 1165447 - RNA, 15 nt, Human
uuauuuuaauaaugu

SEQ ID NO: 1165448 - RNA, 16 nt, Human
uuauuuuaauaauguu

SEQ ID NO: 1165449 - RNA, 13 nt, Human
uucacucuccuug

SEQ ID NO: 1165450 - RNA, 16 nt, Human
uucagacauagaauua

SEQ ID NO: 1165451 - RNA, 20 nt, Human
uucagacauagaauuaacac

SEQ ID NO: 1165452 - RNA, 20 nt, Human
uucagauaaucacaauacau

SEQ ID NO: 1165453 - RNA, 15 nt, Human
uucacgugguccuaa

SEQ ID NO: 1165454 - RNA, 13 nt, Human
uucaauaggaaaa

SEQ ID NO: 1165455 - RNA, 15 nt, Human
uucaauaggaaaaac

SEQ ID NO: 1165456 - RNA, 18 nt, Human
uucaauaggaaaaacuga

SEQ ID NO: 1165457 - RNA, 20 nt, Human
uucaauaggaaaaacugauu

SEQ ID NO: 1165458 - RNA, 17 nt, Human
uuaucuagauacuguau

SEQ ID NO: 1165459 - RNA, 16 nt, Human
uuaguuccucauuagc

SEQ ID NO: 1165460 - RNA, 14 nt, Human
uuaguuccuugagu

SEQ ID NO: 1165461 - RNA, 16 nt, Human
uuaucuagauacugua

SEQ ID NO: 1165462 - RNA, 16 nt, Human
uuaugcaugaaguaau

SEQ ID NO: 1165463 - RNA, 22 nt, Human
uuaugcaugaaguaauaugcac

SEQ ID NO: 1165464 - RNA, 16 nt, Human
uuauggaacacucuga

SEQ ID NO: 1165465 - RNA, 21 nt, Human
uuauggcacuaguauuucuau

SEQ ID NO: 1165466 - RNA, 17 nt, Human
uuauuacuguaagaaaa

SEQ ID NO: 1165467 - RNA, 18 nt, Human
uuauuacuguaagaaaau

SEQ ID NO: 1165468 - RNA, 11 nt, Human
uuauucugcuc

SEQ ID NO: 1165469 - RNA, 15 nt, Human
uuauugcccacgcug

SEQ ID NO: 1165470 - RNA, 15 nt, Human
uuccaaauucugcuu

SEQ ID NO: 1165471 - RNA, 11 nt, Human
uucaggaagcu

SEQ ID NO: 1165472 - RNA, 13 nt, Human
uucaggaagcuca

SEQ ID NO: 1165473 - RNA, 15 nt, Human
uucaggaagcucagg

SEQ ID NO: 1165474 - RNA, 21 nt, Human
uucaucuugaauuguaaggaa

SEQ ID NO: 1165475 - RNA, 15 nt, Human
uucauuuccuguguc

SEQ ID NO: 1165476 - RNA, 16 nt, Human
uucauuuccugugucu

SEQ ID NO: 1165477 - RNA, 16 nt, Human
uucccauuugcuccuu

SEQ ID NO: 1165478 - RNA, 15 nt, Human
uuccccaggaggcca

SEQ ID NO: 1165479 - RNA, 16 nt, Human
uuccccaggaggccag

SEQ ID NO: 1165480 - RNA, 21 nt, Human
uuccccaggaggccagccuug

SEQ ID NO: 1165481 - RNA, 17 nt, Human
uuccccaggaggccagc

SEQ ID NO: 1165482 - RNA, 18 nt, Human
uuccccaggaggccagcc

SEQ ID NO: 1165483 - RNA, 19 nt, Human
uuccccaggaggccagccu

SEQ ID NO: 1165484 - RNA, 20 nt, Human
uuccccaggaggccagccuu

SEQ ID NO: 1165485 - RNA, 11 nt, Human
uucccucccuu

SEQ ID NO: 1165486 - RNA, 17 nt, Human
uucccucccuuccucuu

SEQ ID NO: 1165487 - RNA, 20 nt, Human
uucccucccuuccucuuucc

SEQ ID NO: 1165488 - RNA, 17 nt, Human
uucccuugaugaagaag

SEQ ID NO: 1165489 - RNA, 18 nt, Human
uucccuugaugaagaagu

SEQ ID NO: 1165490 - RNA, 20 nt, Human
uucccuuugacgccauccca

SEQ ID NO: 1165491 - RNA, 21 nt, Human
uucccuuugacgccaucccag

SEQ ID NO: 1165492 - RNA, 22 nt, Human
uucccuuugacgccaucccagc

SEQ ID NO: 1165493 - RNA, 13 nt, Human
uuccucauuagca

SEQ ID NO: 1165494 - RNA, 23 nt, Human
uuccugaugcuucuucagagacu

SEQ ID NO: 1165495 - RNA, 17 nt, Human
uuccugccaggcauggu

SEQ ID NO: 1165496 - RNA, 15 nt, Human
uuccugaugcuucuu

SEQ ID NO: 1165497 - RNA, 18 nt, Human
uuccugaugcuucuucag

SEQ ID NO: 1165498 - RNA, 19 nt, Human
uuccugaugcuucuucaga

SEQ ID NO: 1165499 - RNA, 14 nt, Human
uuccuggcacugcu

SEQ ID NO: 1165500 - RNA, 19 nt, Human
uuccuggcacugcuuccag

SEQ ID NO: 1165501 - RNA, 20 nt, Human
uuccuugaguugauucagcu

SEQ ID NO: 1165502 - RNA, 13 nt, Human
uucuaaagcugcc

SEQ ID NO: 1165503 - RNA, 17 nt, Human
uucuaaagcugccagcc

SEQ ID NO: 1165504 - RNA, 20 nt, Human
uucgggaggucgaggcagga

SEQ ID NO: 1165505 - RNA, 13 nt, Human
uucuucagagacu

SEQ ID NO: 1165506 - RNA, 17 nt, Human
uucuuagggaaggauac

SEQ ID NO: 1165507 - RNA, 19 nt, Human
uucuuaggguuaugauuaa

SEQ ID NO: 1165508 - RNA, 14 nt, Human
uucuuguguguuua

SEQ ID NO: 1165509 - RNA, 20 nt, Human
uucuggcagaguugaagaca

SEQ ID NO: 1165510 - RNA, 16 nt, Human
uucuggcuaugcauuu

SEQ ID NO: 1165511 - RNA, 21 nt, Human
uugaaaaucuuauaauuuaaa

SEQ ID NO: 1165512 - RNA, 21 nt, Human
uucuuuccugaggcugggcuc

SEQ ID NO: 1165513 - RNA, 15 nt, Human
uugaacuuugaccuc

SEQ ID NO: 1165514 - RNA, 17 nt, Human
uugaacuuugaccucug

SEQ ID NO: 1165515 - RNA, 18 nt, Human
uugaacuuugaccucugc

SEQ ID NO: 1165516 - RNA, 20 nt, Human
uugaacuuugaccucugcag

SEQ ID NO: 1165517 - RNA, 12 nt, Human
uugaaugaugcc

SEQ ID NO: 1165518 - RNA, 16 nt, Human
uugaaugaugccauga

SEQ ID NO: 1165519 - RNA, 19 nt, Human
uugagccuugaacuuugac

SEQ ID NO: 1165520 - RNA, 14 nt, Human
uugaauuguaagga

SEQ ID NO: 1165521 - RNA, 14 nt, Human
uugagccuugaacu

SEQ ID NO: 1165522 - RNA, 15 nt, Human
uugagccuugaacuu

SEQ ID NO: 1165523 - RNA, 16 nt, Human
uugagccuugaacuuu

SEQ ID NO: 1165524 - RNA, 20 nt, Human
uugauaugccuuuucccaac

SEQ ID NO: 1165525 - RNA, 16 nt, Human
uugauaugcuuauaca

SEQ ID NO: 1165526 - RNA, 17 nt, Human
uugauucagacagcugc

SEQ ID NO: 1165527 - RNA, 21 nt, Human
uugauucagacagcugccugg

SEQ ID NO: 1165528 - RNA, 23 nt, Human
uugauucagacagcugccuggga

SEQ ID NO: 1165529 - RNA, 16 nt, Human
uugauucagcucugca

SEQ ID NO: 1165530 - RNA, 13 nt, Human
uugauucauaaug

SEQ ID NO: 1165531 - RNA, 17 nt, Human
uugauucauaaugacuu

SEQ ID NO: 1165532 - RNA, 23 nt, Human
uugcagacaggcaagcaccuccu

SEQ ID NO: 1165533 - RNA, 13 nt, Human
uugccagucaccc

SEQ ID NO: 1165534 - RNA, 16 nt, Human
uugccauguuggccag

SEQ ID NO: 1165535 - RNA, 17 nt, Human
uugccauguuggccagg

SEQ ID NO: 1165536 - RNA, 18 nt, Human
uugccauguuggccaggc

SEQ ID NO: 1165537 - RNA, 19 nt, Human
uugccauguuggccaggcu

SEQ ID NO: 1165538 - RNA, 11 nt, Human
uuggaaggaac

SEQ ID NO: 1165539 - RNA, 19 nt, Human
uuggaagcuccgcuuucua

SEQ ID NO: 1165540 - RNA, 18 nt, Human
uuggacccugaggcccag

SEQ ID NO: 1165541 - RNA, 19 nt, Human
uuggacccugaggcccaga

SEQ ID NO: 1165542 - RNA, 21 nt, Human
uuggacccugaggcccagagg

SEQ ID NO: 1165543 - RNA, 15 nt, Human
uuggauuguccccga

SEQ ID NO: 1165544 - RNA, 20 nt, Human
uugccauguuggccaggcug

SEQ ID NO: 1165545 - RNA, 21 nt, Human
uugccauguuggccaggcugg

SEQ ID NO: 1165546 - RNA, 23 nt, Human
uugcccacgcuggagugcaguga

SEQ ID NO: 1165547 - RNA, 16 nt, Human
uugcuaagcauuccaa

SEQ ID NO: 1165548 - RNA, 18 nt, Human
uugcuaagcauuccaacu

SEQ ID NO: 1165549 - RNA, 14 nt, Human
uugcugcuugaggc

SEQ ID NO: 1165550 - RNA, 16 nt, Human
uugcugcuugaggcaa

SEQ ID NO: 1165551 - RNA, 16 nt, Human
uugcugucccuuuucc

SEQ ID NO: 1165552 - RNA, 18 nt, Human
uugcugucccuuuuccuu

SEQ ID NO: 1165553 - RNA, 22 nt, Human
uugucaaaguggugagaggcau

SEQ ID NO: 1165554 - RNA, 14 nt, Human
uugucuaugggacu

SEQ ID NO: 1165555 - RNA, 20 nt, Human
uugucuaugggacucaaugc

SEQ ID NO: 1165556 - RNA, 20 nt, Human
uuguaaaauggugugaccac

SEQ ID NO: 1165557 - RNA, 16 nt, Human
uuguaccgcaauguga

SEQ ID NO: 1165558 - RNA, 15 nt, Human
uuggucugugagaug

SEQ ID NO: 1165559 - RNA, 12 nt, Human
uuguaaaauggu

SEQ ID NO: 1165560 - RNA, 13 nt, Human
uuguaaaauggug

SEQ ID NO: 1165561 - RNA, 20 nt, Human
uuggucugacccacugcuuu

SEQ ID NO: 1165562 - RNA, 20 nt, Human
uugguaaggggaauugagga

SEQ ID NO: 1165563 - RNA, 23 nt, Human
uuggcuucacggaagagccuugc

SEQ ID NO: 1165564 - RNA, 20 nt, Human
uuguuuggggaugagaaagg

SEQ ID NO: 1165565 - RNA, 15 nt, Human
uugucuuuggacccu

SEQ ID NO: 1165566 - RNA, 20 nt, Human
uugucuuuggacccugaggc

SEQ ID NO: 1165567 - RNA, 24 nt, Human
uugucuuuggacccugaggcccag

SEQ ID NO: 1165568 - RNA, 13 nt, Human
uuuaacagaaaug

SEQ ID NO: 1165569 - RNA, 12 nt, Human
uuuaaaaugucu

SEQ ID NO: 1165570 - RNA, 14 nt, Human
uuuaaaagaaugau

SEQ ID NO: 1165571 - RNA, 17 nt, Human
uuuaaaagaaugauuau

SEQ ID NO: 1165572 - RNA, 13 nt, Human
uuuaaaagauaca

SEQ ID NO: 1165573 - RNA, 14 nt, Human
uuuaacagaaaugu

SEQ ID NO: 1165574 - RNA, 15 nt, Human
uuuaacagaaaugua

SEQ ID NO: 1165575 - RNA, 18 nt, Human
uuuaacagaaauguacag

SEQ ID NO: 1165576 - RNA, 13 nt, Human
uuuaauaaaccau

SEQ ID NO: 1165577 - RNA, 15 nt, Human
uuuaauaauguuuca

SEQ ID NO: 1165578 - RNA, 19 nt, Human
uuuaauaauguuucaaaca

SEQ ID NO: 1165579 - RNA, 16 nt, Human
uuuaucgucacugcuu

SEQ ID NO: 1165580 - RNA, 12 nt, Human
uuuauacauaaa

SEQ ID NO: 1165581 - RNA, 20 nt, Human
uuuauacauaaacaagacca

SEQ ID NO: 1165582 - RNA, 22 nt, Human
uuuagacccuauugcugcuuga

SEQ ID NO: 1165583 - RNA, 19 nt, Human
uuuagacccuauugcugcu

SEQ ID NO: 1165584 - RNA, 23 nt, Human
uuuccuggcacugcuuccaguga

SEQ ID NO: 1165585 - RNA, 19 nt, Human
uuuccuggcacugcuucca

SEQ ID NO: 1165586 - RNA, 19 nt, Human
uuucuaaaucuccaaaaua

SEQ ID NO: 1165587 - RNA, 15 nt, Human
uuucuacccagcgag

SEQ ID NO: 1165588 - RNA, 18 nt, Human
uuucuacccagcgagccc

SEQ ID NO: 1165589 - RNA, 22 nt, Human
uuucuacccagcgagcccuggu

SEQ ID NO: 1165590 - RNA, 23 nt, Human
uuucuacucgaguuacagacaaa

SEQ ID NO: 1165591 - RNA, 12 nt, Human
uuucucuaggaa

SEQ ID NO: 1165592 - RNA, 17 nt, Human
uuuauggcacuaguauu

SEQ ID NO: 1165593 - RNA, 17 nt, Human
uuucagccaagaauucu

SEQ ID NO: 1165594 - RNA, 19 nt, Human
uuucuuguguguuuauugu

SEQ ID NO: 1165595 - RNA, 21 nt, Human
uuugaaauuguauuacaaauc

SEQ ID NO: 1165596 - RNA, 16 nt, Human
uuugagaucagccugg

SEQ ID NO: 1165597 - RNA, 17 nt, Human
uuugagaucagccuggg

SEQ ID NO: 1165598 - RNA, 17 nt, Human
uuugaggucuguucuuu

SEQ ID NO: 1165599 - RNA, 15 nt, Human
uuuguauucucuccu

SEQ ID NO: 1165600 - RNA, 18 nt, Human
uuugguaaggggaauuga

SEQ ID NO: 1165601 - RNA, 15 nt, Human
uuuggacccugaggc

SEQ ID NO: 1165602 - RNA, 19 nt, Human
uuuggacccugaggcccag

SEQ ID NO: 1165603 - RNA, 14 nt, Human
uuugauccaagcug

SEQ ID NO: 1165604 - RNA, 14 nt, Human
aaaaacacaaaagu

SEQ ID NO: 1165605 - RNA, 13 nt, Human
aaaaacugauuuu

SEQ ID NO: 1165606 - RNA, 15 nt, Human
aaaaacugauuuuuu

SEQ ID NO: 1165607 - RNA, 12 nt, Human
aaaaagaggcua

SEQ ID NO: 1165608 - RNA, 14 nt, Human
aaaacaaggaugaa

SEQ ID NO: 1165609 - RNA, 17 nt, Human
aaaacaaggaugaauua

SEQ ID NO: 1165610 - RNA, 12 nt, Human
aaaacacauuuu

SEQ ID NO: 1165611 - RNA, 15 nt, Human
accacguuucuaaag

SEQ ID NO: 1165612 - RNA, 19 nt, Human
accacguuucuaaaggcua

SEQ ID NO: 1165613 - RNA, 14 nt, Human
accacgcuggaccu

SEQ ID NO: 1165614 - RNA, 14 nt, Human
accacuacauucug

SEQ ID NO: 1165615 - RNA, 15 nt, Human
accacuacauucugu

SEQ ID NO: 1165616 - RNA, 14 nt, Human
accagcagccugga

SEQ ID NO: 1165617 - RNA, 17 nt, Human
accagcagccuggaccc

SEQ ID NO: 1165618 - RNA, 18 nt, Human
acauuugcucauggaauu

SEQ ID NO: 1165619 - RNA, 14 nt, Human
acauuuguauaaaa

SEQ ID NO: 1165620 - RNA, 19 nt, Human
acaugcaaggucauuuuuu

SEQ ID NO: 1165621 - RNA, 20 nt, Human
acaugcacagcuaacaugga

SEQ ID NO: 1165622 - RNA, 23 nt, Human
acaugcacagcuaacauggaagu

SEQ ID NO: 1165623 - RNA, 13 nt, Human
acauguuacaaca

SEQ ID NO: 1165624 - RNA, 21 nt, Human
acauguuuuucuucucccuca

SEQ ID NO: 1165625 - RNA, 22 nt, Human
acagguuuuccugaagaauuga

SEQ ID NO: 1165626 - RNA, 23 nt, Human
acauaaacaagaccacguuucua

SEQ ID NO: 1165627 - RNA, 20 nt, Human
acaucagcacgauuucuguu

SEQ ID NO: 1165628 - RNA, 21 nt, Human
acaucagcacgauuucuguuu

SEQ ID NO: 1165629 - RNA, 22 nt, Human
acaucagcacgauuucuguuua

SEQ ID NO: 1165630 - RNA, 15 nt, Human
accccggccaccugc

SEQ ID NO: 1165631 - RNA, 19 nt, Human
acccaugcugcccugugag

SEQ ID NO: 1165632 - RNA, 17 nt, Human
acccaugcugcccugug

SEQ ID NO: 1165633 - RNA, 18 nt, Human
acccaugcugcccuguga

SEQ ID NO: 1165634 - RNA, 15 nt, Human
acccacaagaaauga

SEQ ID NO: 1165635 - RNA, 13 nt, Human
acccaagggccug

SEQ ID NO: 1165636 - RNA, 16 nt, Human
acccaagggccuggcc

SEQ ID NO: 1165637 - RNA, 18 nt, Human
acccaagggccuggccug

SEQ ID NO: 1165638 - RNA, 14 nt, Human
accaucaugucugg

SEQ ID NO: 1165639 - RNA, 21 nt, Human
accaucccugaaggccccgcc

SEQ ID NO: 1165640 - RNA, 22 nt, Human
accaucccugaaggccccgccc

SEQ ID NO: 1165641 - RNA, 16 nt, Human
accaucaugucuggcu

SEQ ID NO: 1165642 - RNA, 17 nt, Human
accaucaugucuggcua

SEQ ID NO: 1165643 - RNA, 12 nt, Human
accaucauugaa

SEQ ID NO: 1165644 - RNA, 18 nt, Human
accaucccugaaggcccc

SEQ ID NO: 1165645 - RNA, 20 nt, Human
accccucaacaccucugcac

SEQ ID NO: 1165646 - RNA, 13 nt, Human
acaacuauauugu

SEQ ID NO: 1165647 - RNA, 13 nt, Human
acaaagacugagu

SEQ ID NO: 1165648 - RNA, 21 nt, Human
acaaaccuguuucugcagcca

SEQ ID NO: 1165649 - RNA, 15 nt, Human
acaaacgggcucagc

SEQ ID NO: 1165650 - RNA, 20 nt, Human
acaaaauguaggguuauaau

SEQ ID NO: 1165651 - RNA, 12 nt, Human
acaccagagccc

SEQ ID NO: 1165652 - RNA, 13 nt, Human
acaccagagccca

SEQ ID NO: 1165653 - RNA, 14 nt, Human
acaccacuacauuc

SEQ ID NO: 1165654 - RNA, 11 nt, Human
acacagcucug

SEQ ID NO: 1165655 - RNA, 12 nt, Human
acacagcucugu

SEQ ID NO: 1165656 - RNA, 14 nt, Human
acacagcucugucc

SEQ ID NO: 1165657 - RNA, 14 nt, Human
acacuaaccacgcu

SEQ ID NO: 1165658 - RNA, 15 nt, Human
acacuaaccacgcug

SEQ ID NO: 1165659 - RNA, 15 nt, Human
acacggacacucaaa

SEQ ID NO: 1165660 - RNA, 16 nt, Human
acaauuuauuauggca

SEQ ID NO: 1165661 - RNA, 15 nt, Human
acaauuuauuauggc

SEQ ID NO: 1165662 - RNA, 18 nt, Human
acacaaacgggcucagca

SEQ ID NO: 1165663 - RNA, 17 nt, Human
acacugugcugagucug

SEQ ID NO: 1165664 - RNA, 17 nt, Human
acagagucucacuguug

SEQ ID NO: 1165665 - RNA, 19 nt, Human
acagagucucacuguugcc

SEQ ID NO: 1165666 - RNA, 23 nt, Human
acagagucucacuguugcccagg

SEQ ID NO: 1165667 - RNA, 22 nt, Human
acagaggggguggccucccaac

SEQ ID NO: 1165668 - RNA, 12 nt, Human
acagagucucac

SEQ ID NO: 1165669 - RNA, 14 nt, Human
acagagucucacug

SEQ ID NO: 1165670 - RNA, 15 nt, Human
acagccaugauucuu

SEQ ID NO: 1165671 - RNA, 19 nt, Human
acaggcaagcaccuccugc

SEQ ID NO: 1165672 - RNA, 18 nt, Human
acaggcaagcaccuccug

SEQ ID NO: 1165673 - RNA, 16 nt, Human
acaggcaagcaccucc

SEQ ID NO: 1165674 - RNA, 22 nt, Human
acaggugugagucaccaagccc

SEQ ID NO: 1165675 - RNA, 20 nt, Human
acaggugugaaccaccacac

SEQ ID NO: 1165676 - RNA, 23 nt, Human
acaggugugaaccaccacaccca

SEQ ID NO: 1165677 - RNA, 12 nt, Human
acagcuccuucu

SEQ ID NO: 1165678 - RNA, 13 nt, Human
acagcuccuucug

SEQ ID NO: 1165679 - RNA, 14 nt, Human
acagcuccuucugu

SEQ ID NO: 1165680 - RNA, 15 nt, Human
acagcuccuucuguc

SEQ ID NO: 1165681 - RNA, 20 nt, Human
acagcucugcauacucauua

SEQ ID NO: 1165682 - RNA, 13 nt, Human
acagcucuguccu

SEQ ID NO: 1165683 - RNA, 14 nt, Human
acagcugccuggga

SEQ ID NO: 1165684 - RNA, 23 nt, Human
acagcugccugggaucccucauc

SEQ ID NO: 1165685 - RNA, 14 nt, Human
acuagcuauggugu

SEQ ID NO: 1165686 - RNA, 14 nt, Human
acucccccaggugg

SEQ ID NO: 1165687 - RNA, 13 nt, Human
acuccccugcugg

SEQ ID NO: 1165688 - RNA, 17 nt, Human
acuccccugcugggugu

SEQ ID NO: 1165689 - RNA, 11 nt, Human
acuauaaugua

SEQ ID NO: 1165690 - RNA, 16 nt, Human
acucaaacucuuaaaa

SEQ ID NO: 1165691 - RNA, 17 nt, Human
acucaaacucuuaaaac

SEQ ID NO: 1165692 - RNA, 18 nt, Human
acucuacccucuuagaaa

SEQ ID NO: 1165693 - RNA, 21 nt, Human
acucuacccucuuagaaaaac

SEQ ID NO: 1165694 - RNA, 14 nt, Human
acucuaucaaguau

SEQ ID NO: 1165695 - RNA, 16 nt, Human
acucuaucaaguauua

SEQ ID NO: 1165696 - RNA, 21 nt, Human
acucuaucaaguauuauaccu

SEQ ID NO: 1165697 - RNA, 16 nt, Human
acucugugucaggugg

SEQ ID NO: 1165698 - RNA, 19 nt, Human
acucugugucagguggggc

SEQ ID NO: 1165699 - RNA, 11 nt, Human
acucuuaaaac

SEQ ID NO: 1165700 - RNA, 18 nt, Human
acucuuaaaacccaagug

SEQ ID NO: 1165701 - RNA, 12 nt, Human
acucccuuucaa

SEQ ID NO: 1165702 - RNA, 13 nt, Human
acucccuuucaac

SEQ ID NO: 1165703 - RNA, 14 nt, Human
accuuggcucaagu

SEQ ID NO: 1165704 - RNA, 12 nt, Human
accuuggcugca

SEQ ID NO: 1165705 - RNA, 16 nt, Human
accuuucaauaggaaa

SEQ ID NO: 1165706 - RNA, 14 nt, Human
accuuggcugcagg

SEQ ID NO: 1165707 - RNA, 17 nt, Human
accuuucaauaggaaaa

SEQ ID NO: 1165708 - RNA, 21 nt, Human
accuuucaauaggaaaaacug

SEQ ID NO: 1165709 - RNA, 23 nt, Human
accuuucaauaggaaaaacugau

SEQ ID NO: 1165710 - RNA, 17 nt, Human
accucuugagccuugaa

SEQ ID NO: 1165711 - RNA, 23 nt, Human
accugccccucaacucuccucca

SEQ ID NO: 1165712 - RNA, 16 nt, Human
accucugcacaagcug

SEQ ID NO: 1165713 - RNA, 18 nt, Human
accucugcacaagcugca

SEQ ID NO: 1165714 - RNA, 15 nt, Human
accucugcagcaaua

SEQ ID NO: 1165715 - RNA, 21 nt, Human
accucugcacaagcugcaccc

SEQ ID NO: 1165716 - RNA, 18 nt, Human
acgcugugcugcccugcc

SEQ ID NO: 1165717 - RNA, 19 nt, Human
acgcugugcugcccugccc

SEQ ID NO: 1165718 - RNA, 17 nt, Human
acgccagauucuuuccu

SEQ ID NO: 1165719 - RNA, 16 nt, Human
acgcugugcugcccug

SEQ ID NO: 1165720 - RNA, 17 nt, Human
acgcugugcugcccugc

SEQ ID NO: 1165721 - RNA, 13 nt, Human
acguggcugcuuc

SEQ ID NO: 1165722 - RNA, 14 nt, Human
acguggcugcuuca

SEQ ID NO: 1165723 - RNA, 15 nt, Human
acguggcugcuucaa

SEQ ID NO: 1165724 - RNA, 17 nt, Human
acguggcugcuucaagg

SEQ ID NO: 1165725 - RNA, 16 nt, Human
acuaagagagaaugag

SEQ ID NO: 1165726 - RNA, 22 nt, Human
acuaaguuuuuauggcuuuugu

SEQ ID NO: 1165727 - RNA, 12 nt, Human
acgauuucuguu

SEQ ID NO: 1165728 - RNA, 13 nt, Human
acgauuucuguuu

SEQ ID NO: 1165729 - RNA, 14 nt, Human
acgauuucuguuua

SEQ ID NO: 1165730 - RNA, 17 nt, Human
acgauuucuguuuagau

SEQ ID NO: 1165731 - RNA, 18 nt, Human
acgccacugcacuauagc

SEQ ID NO: 1165732 - RNA, 19 nt, Human
acgauuucuguuuagauaa

SEQ ID NO: 1165733 - RNA, 16 nt, Human
acugugccaugugcca

SEQ ID NO: 1165734 - RNA, 12 nt, Human
acugucuucagu

SEQ ID NO: 1165735 - RNA, 14 nt, Human
acuggaagcacagc

SEQ ID NO: 1165736 - RNA, 15 nt, Human
acuggaagcacagcu

SEQ ID NO: 1165737 - RNA, 16 nt, Human
acuggaagcacagcuu

SEQ ID NO: 1165738 - RNA, 14 nt, Human
acuggagaaaaugg

SEQ ID NO: 1165739 - RNA, 21 nt, Human
acuuggucugugagaugcuag

SEQ ID NO: 1165740 - RNA, 20 nt, Human
acuuguaaaggaauuuaaaa

SEQ ID NO: 1165741 - RNA, 19 nt, Human
acuuguaaaggaauuuaaa

SEQ ID NO: 1165742 - RNA, 14 nt, Human
acuuggucugugag

SEQ ID NO: 1165743 - RNA, 15 nt, Human
acuuggucugugaga

SEQ ID NO: 1165744 - RNA, 23 nt, Human
acuucacauauugauuuccguua

SEQ ID NO: 1165745 - RNA, 18 nt, Human
acuucugccauauucugu

SEQ ID NO: 1165746 - RNA, 19 nt, Human
acuucugccauauucuguu

SEQ ID NO: 1165747 - RNA, 19 nt, Human
acuucacauauugauuucc

SEQ ID NO: 1165748 - RNA, 13 nt, Human
acuguuucaaacu

SEQ ID NO: 1165749 - RNA, 14 nt, Human
agaaaauaacaaua

SEQ ID NO: 1165750 - RNA, 12 nt, Human
agaaaauauacu

SEQ ID NO: 1165751 - RNA, 13 nt, Human
agaaaauauacug

SEQ ID NO: 1165752 - RNA, 14 nt, Human
agaaaauauacugu

SEQ ID NO: 1165753 - RNA, 15 nt, Human
agaaaauauacugua

SEQ ID NO: 1165754 - RNA, 16 nt, Human
agaaaauauacuguaa

SEQ ID NO: 1165755 - RNA, 17 nt, Human
agaaaauauacuguaaa

SEQ ID NO: 1165756 - RNA, 18 nt, Human
agaaaauauacuguaaag

SEQ ID NO: 1165757 - RNA, 19 nt, Human
agaaaauauacuguaaaga

SEQ ID NO: 1165758 - RNA, 20 nt, Human
agaaaauauacuguaaagaa

SEQ ID NO: 1165759 - RNA, 21 nt, Human
agaaaauauacuguaaagaaa

SEQ ID NO: 1165760 - RNA, 22 nt, Human
agaaaauauacuguaaagaaag

SEQ ID NO: 1165761 - RNA, 23 nt, Human
agaaaauauacuguaaagaaaga

SEQ ID NO: 1165762 - RNA, 23 nt, Human
agaaaauggaagacagcucuuau

SEQ ID NO: 1165763 - RNA, 15 nt, Human
agaaaauggacgugu

SEQ ID NO: 1165764 - RNA, 20 nt, Human
agaaaauggacguguuauga

SEQ ID NO: 1165765 - RNA, 22 nt, Human
agaaaauggacguguuaugacu

SEQ ID NO: 1165766 - RNA, 23 nt, Human
agaaaauggacguguuaugacuc

SEQ ID NO: 1165767 - RNA, 19 nt, Human
acuuuuauaaacuuuaccu

SEQ ID NO: 1165768 - RNA, 22 nt, Human
acuuuuauaaacuuuaccuuuu

SEQ ID NO: 1165769 - RNA, 12 nt, Human
agaaaauaaaaa

SEQ ID NO: 1165770 - RNA, 13 nt, Human
agaaaauaaaaag

SEQ ID NO: 1165771 - RNA, 14 nt, Human
agaaaauaaaaagu

SEQ ID NO: 1165772 - RNA, 15 nt, Human
agaaaauaaaaaguu

SEQ ID NO: 1165773 - RNA, 16 nt, Human
agaaaauaaaaaguua

SEQ ID NO: 1165774 - RNA, 17 nt, Human
agaaaauaaaaaguuaa

SEQ ID NO: 1165775 - RNA, 18 nt, Human
agaaaauaaaaaguuaaa

SEQ ID NO: 1165776 - RNA, 23 nt, Human
acuuuccuucauucaacccaccu

SEQ ID NO: 1165777 - RNA, 16 nt, Human
acuuucuagccagagg

SEQ ID NO: 1165778 - RNA, 23 nt, Human
acuuuguucuggcucuuccaggc

SEQ ID NO: 1165779 - RNA, 20 nt, Human
agaaaggaggggauagagag

SEQ ID NO: 1165780 - RNA, 23 nt, Human
agaaaggaggggauagagagaga

SEQ ID NO: 1165781 - RNA, 15 nt, Human
agaaauaaaguuucu

SEQ ID NO: 1165782 - RNA, 18 nt, Human
agaaauaaaguuucuguu

SEQ ID NO: 1165783 - RNA, 13 nt, Human
aauccauacauuu

SEQ ID NO: 1165784 - RNA, 14 nt, Human
aauccauacauuug

SEQ ID NO: 1165785 - RNA, 13 nt, Human
aaucuccaaaaua

SEQ ID NO: 1165786 - RNA, 14 nt, Human
aaucuccaaaauaa

SEQ ID NO: 1165787 - RNA, 18 nt, Human
aaucuccaaaauaaaacu

SEQ ID NO: 1165788 - RNA, 21 nt, Human
aaugaugauccuaggcauuug

SEQ ID NO: 1165789 - RNA, 20 nt, Human
aaugauaacuggaaacuuca

SEQ ID NO: 1165790 - RNA, 22 nt, Human
aaucugcuuuuuaaagaaugcu

SEQ ID NO: 1165791 - RNA, 16 nt, Human
aaugaaccacaucuug

SEQ ID NO: 1165792 - RNA, 17 nt, Human
aaugaaccacaucuugc

SEQ ID NO: 1165793 - RNA, 23 nt, Human
aaugaaccacaucuugcucugcu

SEQ ID NO: 1165794 - RNA, 19 nt, Human
aaugaugccaugaggaaca

SEQ ID NO: 1165795 - RNA, 13 nt, Human
aaucacaauacau

SEQ ID NO: 1165796 - RNA, 16 nt, Human
aauauuauguuaaaac

SEQ ID NO: 1165797 - RNA, 20 nt, Human
aauauaggaacuuaaauaau

SEQ ID NO: 1165798 - RNA, 21 nt, Human
aauauaggaacuuaaauaaug

SEQ ID NO: 1165799 - RNA, 18 nt, Human
aauauaggaacuuaaaua

SEQ ID NO: 1165800 - RNA, 13 nt, Human
aaugucaguguga

SEQ ID NO: 1165801 - RNA, 15 nt, Human
aaugucagugugacu

SEQ ID NO: 1165802 - RNA, 16 nt, Human
aaugucagugugacug

SEQ ID NO: 1165803 - RNA, 20 nt, Human
aaugucucuuuaaugucaca

SEQ ID NO: 1165804 - RNA, 17 nt, Human
aaugucagugugacuga

SEQ ID NO: 1165805 - RNA, 21 nt, Human
aaugucagugugacugaucuc

SEQ ID NO: 1165806 - RNA, 22 nt, Human
aaugucuaguuguaacaccaug

SEQ ID NO: 1165807 - RNA, 15 nt, Human
aaugggcagagcaga

SEQ ID NO: 1165808 - RNA, 18 nt, Human
aauguuugccucugccuc

SEQ ID NO: 1165809 - RNA, 19 nt, Human
aauguuugccucugccucu

SEQ ID NO: 1165810 - RNA, 18 nt, Human
aauuaaaacacaacaucu

SEQ ID NO: 1165811 - RNA, 14 nt, Human
aauuaguuuuauau

SEQ ID NO: 1165812 - RNA, 17 nt, Human
aauuaguuuuauaugcu

SEQ ID NO: 1165813 - RNA, 20 nt, Human
aauuaguuuuauaugcuucu

SEQ ID NO: 1165814 - RNA, 21 nt, Human
aauaauccuaaacauaugaau

SEQ ID NO: 1165815 - RNA, 16 nt, Human
aauaaugugaaacugg

SEQ ID NO: 1165816 - RNA, 17 nt, Human
aagucuuagauguauau

SEQ ID NO: 1165817 - RNA, 16 nt, Human
aagucuuagauguaua

SEQ ID NO: 1165818 - RNA, 11 nt, Human
aaggugggagg

SEQ ID NO: 1165819 - RNA, 15 nt, Human
aagguuaauaaagua

SEQ ID NO: 1165820 - RNA, 16 nt, Human
aagguuaauaaaguaa

SEQ ID NO: 1165821 - RNA, 20 nt, Human
aagguuaauguucaucaucc

SEQ ID NO: 1165822 - RNA, 11 nt, Human
aaguacuucuu

SEQ ID NO: 1165823 - RNA, 16 nt, Human
aaguaucccuacugua

SEQ ID NO: 1165824 - RNA, 17 nt, Human
aaguaucccuacuguaa

SEQ ID NO: 1165825 - RNA, 21 nt, Human
aagcagaggaaggagaggaga

SEQ ID NO: 1165826 - RNA, 14 nt, Human
aagcagaggaagga

SEQ ID NO: 1165827 - RNA, 15 nt, Human
aagcagggacuugaa

SEQ ID NO: 1165828 - RNA, 13 nt, Human
aagccagauuuuc

SEQ ID NO: 1165829 - RNA, 19 nt, Human
aagccagauuuuccugaaa

SEQ ID NO: 1165830 - RNA, 16 nt, Human
aagauuuaccacuugu

SEQ ID NO: 1165831 - RNA, 14 nt, Human
aagcugcugacagu

SEQ ID NO: 1165832 - RNA, 11 nt, Human
aagcugggcag

SEQ ID NO: 1165833 - RNA, 13 nt, Human
aagcugggcaggu

SEQ ID NO: 1165834 - RNA, 15 nt, Human
aagcugggcagguug

SEQ ID NO: 1165835 - RNA, 18 nt, Human
aaggacauugcggacagc

SEQ ID NO: 1165836 - RNA, 12 nt, Human
aagcguggugga

SEQ ID NO: 1165837 - RNA, 21 nt, Human
aagcugcacccucaggcaggu

SEQ ID NO: 1165838 - RNA, 22 nt, Human
aagcugcacccucaggcaggug

SEQ ID NO: 1165839 - RNA, 17 nt, Human
aaggcaaggcugucaau

SEQ ID NO: 1165840 - RNA, 18 nt, Human
aaggcaaggcugucaauu

SEQ ID NO: 1165841 - RNA, 12 nt, Human
aaagaaagagag

SEQ ID NO: 1165842 - RNA, 13 nt, Human
aaagaaagagaga

SEQ ID NO: 1165843 - RNA, 14 nt, Human
aaagaaagagagaa

SEQ ID NO: 1165844 - RNA, 15 nt, Human
aaagaaagagagaaa

SEQ ID NO: 1165845 - RNA, 16 nt, Human
aaagaaagagagaaaa

SEQ ID NO: 1165846 - RNA, 16 nt, Human
aaacugacucuuaaga

SEQ ID NO: 1165847 - RNA, 16 nt, Human
aaacugaaugaaaccc

SEQ ID NO: 1165848 - RNA, 17 nt, Human
aaacugacucuuaagaa

SEQ ID NO: 1165849 - RNA, 17 nt, Human
aaagaaagagagaaaau

SEQ ID NO: 1165850 - RNA, 18 nt, Human
aaagaaagagagaaaaua

SEQ ID NO: 1165851 - RNA, 14 nt, Human
aaagaguaggaaga

SEQ ID NO: 1165852 - RNA, 19 nt, Human
aaacacuguucucugcccu

SEQ ID NO: 1165853 - RNA, 22 nt, Human
aaacacuguucucugcccucca

SEQ ID NO: 1165854 - RNA, 13 nt, Human
aaaacacauuuuu

SEQ ID NO: 1165855 - RNA, 15 nt, Human
aaaacacauuuuucu

SEQ ID NO: 1165856 - RNA, 13 nt, Human
aaaauucagugga

SEQ ID NO: 1165857 - RNA, 18 nt, Human
aaacacuguucucugccc

SEQ ID NO: 1165858 - RNA, 12 nt, Human
aaauaacaauga

SEQ ID NO: 1165859 - RNA, 11 nt, Human
aaagugcuggg

SEQ ID NO: 1165860 - RNA, 14 nt, Human
aaagugcugggauu

SEQ ID NO: 1165861 - RNA, 19 nt, Human
aaauaguggugugauuugg

SEQ ID NO: 1165862 - RNA, 14 nt, Human
aaauauaauugaca

SEQ ID NO: 1165863 - RNA, 16 nt, Human
aaauggaaaugggcag

SEQ ID NO: 1165864 - RNA, 18 nt, Human
aaauggaagacagcucuu

SEQ ID NO: 1165865 - RNA, 20 nt, Human
aaauggacguguuaugacuc

SEQ ID NO: 1165866 - RNA, 21 nt, Human
aaauggacguguuaugacucc

SEQ ID NO: 1165867 - RNA, 22 nt, Human
aaauggacguguuaugacucca

SEQ ID NO: 1165868 - RNA, 18 nt, Human
aaauggcuuccuggcaau

SEQ ID NO: 1165869 - RNA, 19 nt, Human
aacacauuuuucuuaggga

SEQ ID NO: 1165870 - RNA, 22 nt, Human
aacaugcuacacacugcauguu

SEQ ID NO: 1165871 - RNA, 22 nt, Human
aaccacuggaaaguuuaugguu

SEQ ID NO: 1165872 - RNA, 14 nt, Human
aacauguaauuaag

SEQ ID NO: 1165873 - RNA, 21 nt, Human
aacauguaauuaaguacuaug

SEQ ID NO: 1165874 - RNA, 23 nt, Human
aacauguaauuaaguacuaugua

SEQ ID NO: 1165875 - RNA, 22 nt, Human
aaccacucuaucaaguauuaua

SEQ ID NO: 1165876 - RNA, 17 nt, Human
aaccaguguuguggauu

SEQ ID NO: 1165877 - RNA, 14 nt, Human
aacccuggugacca

SEQ ID NO: 1165878 - RNA, 12 nt, Human
aacucaccccag

SEQ ID NO: 1165879 - RNA, 15 nt, Human
aacucaccccagccc

SEQ ID NO: 1165880 - RNA, 15 nt, Human
aacucaccugccccu

SEQ ID NO: 1165881 - RNA, 16 nt, Human
aacucaccugccccuc

SEQ ID NO: 1165882 - RNA, 17 nt, Human
aacugauuuuuuuuucc

SEQ ID NO: 1165883 - RNA, 19 nt, Human
aacugauuuuuuuuuccuu

SEQ ID NO: 1165884 - RNA, 20 nt, Human
aacugauuuuuuuuuccuuc

SEQ ID NO: 1165885 - RNA, 19 nt, Human
aacuuaaauaaugugaaac

SEQ ID NO: 1165886 - RNA, 17 nt, Human
aacuuaaauaaugugaa

SEQ ID NO: 1165887 - RNA, 13 nt, Human
aacuucacauauu

SEQ ID NO: 1165888 - RNA, 16 nt, Human
aacuuuuauaaacuuu

SEQ ID NO: 1165889 - RNA, 19 nt, Human
aacuuuuauaaacuuuacc

SEQ ID NO: 1165890 - RNA, 13 nt, Human
aacuuugaccucu

SEQ ID NO: 1165891 - RNA, 14 nt, Human
aacuuugaccucug

SEQ ID NO: 1165892 - RNA, 17 nt, Human
aacuuugaccucugcag

SEQ ID NO: 1165893 - RNA, 19 nt, Human
aacuuugaccucugcagca

SEQ ID NO: 1165894 - RNA, 20 nt, Human
aacuuugaccucugcagcaa

SEQ ID NO: 1165895 - RNA, 12 nt, Human
aacuuuuauaaa

SEQ ID NO: 1165896 - RNA, 15 nt, Human
aacuuuuauaaacuu

SEQ ID NO: 1165897 - RNA, 20 nt, Human
auacacacacacacacagcc

SEQ ID NO: 1165898 - RNA, 21 nt, Human
auacacacacacacacagcca

SEQ ID NO: 1165899 - RNA, 11 nt, Human
auacacacaca

SEQ ID NO: 1165900 - RNA, 13 nt, Human
auacacacacaca

SEQ ID NO: 1165901 - RNA, 14 nt, Human
auacacacacacac

SEQ ID NO: 1165902 - RNA, 15 nt, Human
auacacacacacaca

SEQ ID NO: 1165903 - RNA, 18 nt, Human
auacacacacacacacag

SEQ ID NO: 1165904 - RNA, 19 nt, Human
auacacacacacacacagc

SEQ ID NO: 1165905 - RNA, 14 nt, Human
auaauuacuauguc

SEQ ID NO: 1165906 - RNA, 12 nt, Human
auaccugucccc

SEQ ID NO: 1165907 - RNA, 13 nt, Human
auaccuguccccc

SEQ ID NO: 1165908 - RNA, 18 nt, Human
auaaugugaaacuggauu

SEQ ID NO: 1165909 - RNA, 19 nt, Human
auaaugugaaacuggauua

SEQ ID NO: 1165910 - RNA, 21 nt, Human
auaaugugaaacuggauuaaa

SEQ ID NO: 1165911 - RNA, 15 nt, Human
auaguaugguggcug

SEQ ID NO: 1165912 - RNA, 16 nt, Human
auaguaugguggcugg

SEQ ID NO: 1165913 - RNA, 16 nt, Human
auauaggaacuuaaau

SEQ ID NO: 1165914 - RNA, 23 nt, Human
auauuucagauaaucacaauaca

SEQ ID NO: 1165915 - RNA, 13 nt, Human
auauucaggaagc

SEQ ID NO: 1165916 - RNA, 14 nt, Human
auauucaggaagcu

SEQ ID NO: 1165917 - RNA, 16 nt, Human
auauucaggaagcuca

SEQ ID NO: 1165918 - RNA, 17 nt, Human
auauucaggaagcucag

SEQ ID NO: 1165919 - RNA, 14 nt, Human
auauuuauuacugu

SEQ ID NO: 1165920 - RNA, 19 nt, Human
auauuuauuacuguaagaa

SEQ ID NO: 1165921 - RNA, 18 nt, Human
auauuuauuuuaauaaug

SEQ ID NO: 1165922 - RNA, 22 nt, Human
auauuuauuacuguaagaaaau

SEQ ID NO: 1165923 - RNA, 18 nt, Human
auaucacuugucaauaaa

SEQ ID NO: 1165924 - RNA, 22 nt, Human
auaugccugggcagaaggaaga

SEQ ID NO: 1165925 - RNA, 14 nt, Human
auaugcuuauacac

SEQ ID NO: 1165926 - RNA, 16 nt, Human
auaugcuuauacacuu

SEQ ID NO: 1165927 - RNA, 19 nt, Human
auaugcuuauacacuuaca

SEQ ID NO: 1165928 - RNA, 21 nt, Human
auaugcuuauacacuuacacu

SEQ ID NO: 1165929 - RNA, 18 nt, Human
agugauuaccagggacug

SEQ ID NO: 1165930 - RNA, 23 nt, Human
agugugacaaggauugcuacugu

SEQ ID NO: 1165931 - RNA, 13 nt, Human
aguuguuacauuu

SEQ ID NO: 1165932 - RNA, 15 nt, Human
aguuguuacauuuuu

SEQ ID NO: 1165933 - RNA, 16 nt, Human
aguuguuacauuuuua

SEQ ID NO: 1165934 - RNA, 19 nt, Human
aguuguuacauuuuuaagu

SEQ ID NO: 1165935 - RNA, 18 nt, Human
aguuacagacaaagcgug

SEQ ID NO: 1165936 - RNA, 19 nt, Human
aguuguaccgcaaugugac

SEQ ID NO: 1165937 - RNA, 16 nt, Human
agucaagugaaaaagg

SEQ ID NO: 1165938 - RNA, 19 nt, Human
agucaaauugugugaaagg

SEQ ID NO: 1165939 - RNA, 15 nt, Human
agucaaauuguguga

SEQ ID NO: 1165940 - RNA, 17 nt, Human
agucaaauugugugaaa

SEQ ID NO: 1165941 - RNA, 20 nt, Human
agucaagugaaaaaggagga

SEQ ID NO: 1165942 - RNA, 16 nt, Human
aguccaagcauuuaga

SEQ ID NO: 1165943 - RNA, 21 nt, Human
aguccaagcauuuagauguau

SEQ ID NO: 1165944 - RNA, 14 nt, Human
agugacagaggcag

SEQ ID NO: 1165945 - RNA, 13 nt, Human
agugauccuccca

SEQ ID NO: 1165946 - RNA, 17 nt, Human
augcacacauuuuuuaa

SEQ ID NO: 1165947 - RNA, 19 nt, Human
augcacacauuuuuuaaau

SEQ ID NO: 1165948 - RNA, 22 nt, Human
augcacacauuuuuuaaaugca

SEQ ID NO: 1165949 - RNA, 23 nt, Human
augcacacauuuuuuaaaugcac

SEQ ID NO: 1165950 - RNA, 14 nt, Human
augcacagcuaaca

SEQ ID NO: 1165951 - RNA, 21 nt, Human
augcacagcuaacauggaagu

SEQ ID NO: 1165952 - RNA, 23 nt, Human
augcaugaaguaauaugcacaca

SEQ ID NO: 1165953 - RNA, 10 nt, Human
augcauuuga

SEQ ID NO: 1165954 - RNA, 12 nt, Human
augcauuugaaa

SEQ ID NO: 1165955 - RNA, 18 nt, Human
augcauuugaaaauuuug

SEQ ID NO: 1165956 - RNA, 23 nt, Human
augccuggauggggcugcaccgg

SEQ ID NO: 1165957 - RNA, 17 nt, Human
augccugggcagaagga

SEQ ID NO: 1165958 - RNA, 11 nt, Human
augccuggugg

SEQ ID NO: 1165959 - RNA, 15 nt, Human
augccugguggcagc

SEQ ID NO: 1165960 - RNA, 16 nt, Human
augccugguggcagcu

SEQ ID NO: 1165961 - RNA, 17 nt, Human
augccugguggcagcug

SEQ ID NO: 1165962 - RNA, 18 nt, Human
augccugguggcagcugc

SEQ ID NO: 1165963 - RNA, 14 nt, Human
augccuuuucccaa

SEQ ID NO: 1165964 - RNA, 19 nt, Human
auggaaaugggcagagcag

SEQ ID NO: 1165965 - RNA, 20 nt, Human
auggaaaugggcagagcaga

SEQ ID NO: 1165966 - RNA, 11 nt, Human
auggaacacuc

SEQ ID NO: 1165967 - RNA, 21 nt, Human
augggaaugaaugucagugug

SEQ ID NO: 1165968 - RNA, 15 nt, Human
augggaaugaauguc

SEQ ID NO: 1165969 - RNA, 23 nt, Human
auggcugccaaugggagcucaug

SEQ ID NO: 1165970 - RNA, 14 nt, Human
auguuugccucugc

SEQ ID NO: 1165971 - RNA, 16 nt, Human
auguuuuaagaggcag

SEQ ID NO: 1165972 - RNA, 18 nt, Human
auguuuuaagaggcaggg

SEQ ID NO: 1165973 - RNA, 14 nt, Human
auuaaaugcccagc

SEQ ID NO: 1165974 - RNA, 15 nt, Human
auuaaaugcccagcc

SEQ ID NO: 1165975 - RNA, 16 nt, Human
auuaaaugcccagccc

SEQ ID NO: 1165976 - RNA, 17 nt, Human
auuaaaugcccagcccc

SEQ ID NO: 1165977 - RNA, 13 nt, Human
auuaaauucuugc

SEQ ID NO: 1165978 - RNA, 18 nt, Human
auguucucugaggacacu

SEQ ID NO: 1165979 - RNA, 22 nt, Human
auguucugacccugcuucaaau

SEQ ID NO: 1165980 - RNA, 15 nt, Human
auguucuuaauucuu

SEQ ID NO: 1165981 - RNA, 20 nt, Human
auguucuuaguggauguucu

SEQ ID NO: 1165982 - RNA, 20 nt, Human
auguucuuucacccuuuucu

SEQ ID NO: 1165983 - RNA, 16 nt, Human
augucaaucagccuag

SEQ ID NO: 1165984 - RNA, 15 nt, Human
augucacaggcaggu

SEQ ID NO: 1165985 - RNA, 16 nt, Human
augucacaggcagguc

SEQ ID NO: 1165986 - RNA, 17 nt, Human
augucacaggcaggucc

SEQ ID NO: 1165987 - RNA, 17 nt, Human
auguaagcucuacugag

SEQ ID NO: 1165988 - RNA, 13 nt, Human
aucccucauccuc

SEQ ID NO: 1165989 - RNA, 18 nt, Human
auccucauacccaccccc

SEQ ID NO: 1165990 - RNA, 19 nt, Human
auccucauacccaccccca

SEQ ID NO: 1165991 - RNA, 22 nt, Human
auccucauacccacccccaccc

SEQ ID NO: 1165992 - RNA, 18 nt, Human
auccacccaccucagccu

SEQ ID NO: 1165993 - RNA, 20 nt, Human
auccacccaccucagccucc

SEQ ID NO: 1165994 - RNA, 14 nt, Human
auccuccucagauc

SEQ ID NO: 1165995 - RNA, 13 nt, Human
aucgaugcagugc

SEQ ID NO: 1165996 - RNA, 14 nt, Human
auccuccaggugca

SEQ ID NO: 1165997 - RNA, 19 nt, Human
auccuccaggugcacaagc

SEQ ID NO: 1165998 - RNA, 22 nt, Human
auccuccaggugcacaagcucc

SEQ ID NO: 1165999 - RNA, 23 nt, Human
auccucauacccacccccaccca

SEQ ID NO: 1166000 - RNA, 23 nt, Human
auccuccaggugcacaagcucca

SEQ ID NO: 1166001 - RNA, 11 nt, Human
auccuccucag

SEQ ID NO: 1166002 - RNA, 11 nt, Human
aucagccuggg

SEQ ID NO: 1166003 - RNA, 20 nt, Human
aucagccugggcaaugugau

SEQ ID NO: 1166004 - RNA, 21 nt, Human
aucagccugggcaaugugaua

SEQ ID NO: 1166005 - RNA, 17 nt, Human
aucagccugcuccagcu

SEQ ID NO: 1166006 - RNA, 13 nt, Human
aucagcugcuacu

SEQ ID NO: 1166007 - RNA, 23 nt, Human
aucagcugcuacuacuccuguag

SEQ ID NO: 1166008 - RNA, 22 nt, Human
aucuuauaauuuaaaauaugcu

SEQ ID NO: 1166009 - RNA, 19 nt, Human
aucuuccaacucaaacucu

SEQ ID NO: 1166010 - RNA, 22 nt, Human
aucucucgugauugauaagaac

SEQ ID NO: 1166011 - RNA, 17 nt, Human
aucuugaagacuuuucu

SEQ ID NO: 1166012 - RNA, 18 nt, Human
aucuugaagacuuuucuu

SEQ ID NO: 1166013 - RNA, 17 nt, Human
aucuucuuuauaauucu

SEQ ID NO: 1166014 - RNA, 22 nt, Human
aucuucugaacuuggcgcugcc

SEQ ID NO: 1166015 - RNA, 13 nt, Human
augagccuggcaa

SEQ ID NO: 1166016 - RNA, 14 nt, Human
augagccuggcaag

SEQ ID NO: 1166017 - RNA, 15 nt, Human
augaaacccccacac

SEQ ID NO: 1166018 - RNA, 16 nt, Human
augaaacccccacaca

SEQ ID NO: 1166019 - RNA, 17 nt, Human
augaaacccccacacac

SEQ ID NO: 1166020 - RNA, 18 nt, Human
augaaacccccacacaca

SEQ ID NO: 1166021 - RNA, 19 nt, Human
augaaacccccacacacac

SEQ ID NO: 1166022 - RNA, 12 nt, Human
augacccagugg

SEQ ID NO: 1166023 - RNA, 12 nt, Human
augacuccagaa

SEQ ID NO: 1166024 - RNA, 16 nt, Human
augacuccagaauuuc

SEQ ID NO: 1166025 - RNA, 17 nt, Human
augacuccagaauuucc

SEQ ID NO: 1166026 - RNA, 16 nt, Human
agccccagugcccaca

SEQ ID NO: 1166027 - RNA, 20 nt, Human
agccccaucccaaacccuuc

SEQ ID NO: 1166028 - RNA, 11 nt, Human
agccccauccu

SEQ ID NO: 1166029 - RNA, 15 nt, Human
agcccugagcuuucu

SEQ ID NO: 1166030 - RNA, 19 nt, Human
agccgagaucacgccacug

SEQ ID NO: 1166031 - RNA, 20 nt, Human
agccgagaucacgccacugc

SEQ ID NO: 1166032 - RNA, 21 nt, Human
agccgagaucacgccacugca

SEQ ID NO: 1166033 - RNA, 19 nt, Human
agccgagauugcaccacug

SEQ ID NO: 1166034 - RNA, 20 nt, Human
agccgagauugcaccacugc

SEQ ID NO: 1166035 - RNA, 14 nt, Human
agccgcuggggcca

SEQ ID NO: 1166036 - RNA, 22 nt, Human
agccgcuggggccaguuggucc

SEQ ID NO: 1166037 - RNA, 18 nt, Human
agccucccaaagugcugg

SEQ ID NO: 1166038 - RNA, 19 nt, Human
agccucccaaagugcuggg

SEQ ID NO: 1166039 - RNA, 20 nt, Human
agccucccaaagugcuggga

SEQ ID NO: 1166040 - RNA, 18 nt, Human
agccucccgaauagcugg

SEQ ID NO: 1166041 - RNA, 19 nt, Human
agccucccgaauagcuggg

SEQ ID NO: 1166042 - RNA, 20 nt, Human
agccucccgaauagcuggga

SEQ ID NO: 1166043 - RNA, 22 nt, Human
agccucccgaauagcugggacu

SEQ ID NO: 1166044 - RNA, 17 nt, Human
agccucccgaguagcug

SEQ ID NO: 1166045 - RNA, 21 nt, Human
agaugggagaaucacuugaac

SEQ ID NO: 1166046 - RNA, 14 nt, Human
agauguagaggaga

SEQ ID NO: 1166047 - RNA, 16 nt, Human
agauguagaggagaaa

SEQ ID NO: 1166048 - RNA, 19 nt, Human
agcacuaaggugugcucug

SEQ ID NO: 1166049 - RNA, 20 nt, Human
agcacuaaggugugcucuga

SEQ ID NO: 1166050 - RNA, 21 nt, Human
agcagccacauuccugaugcu

SEQ ID NO: 1166051 - RNA, 12 nt, Human
agcaugccugga

SEQ ID NO: 1166052 - RNA, 20 nt, Human
agcaugccuggauggggcug

SEQ ID NO: 1166053 - RNA, 19 nt, Human
agccaaagcuaggccuggc

SEQ ID NO: 1166054 - RNA, 20 nt, Human
agccaaagcuaggccuggcc

SEQ ID NO: 1166055 - RNA, 23 nt, Human
agccaaagcuaggccuggccaga

SEQ ID NO: 1166056 - RNA, 22 nt, Human
agccaaggccaaaggaagcaca

SEQ ID NO: 1166057 - RNA, 23 nt, Human
agccaaggccaaaggaagcacau

SEQ ID NO: 1166058 - RNA, 20 nt, Human
agccagaggagagaggaccc

SEQ ID NO: 1166059 - RNA, 15 nt, Human
agccagauuuuccug

SEQ ID NO: 1166060 - RNA, 19 nt, Human
agccagauuuuccugaaaa

SEQ ID NO: 1166061 - RNA, 14 nt, Human
agaucuucuguggg

SEQ ID NO: 1166062 - RNA, 21 nt, Human
agauaggucagugcaaauacu

SEQ ID NO: 1166063 - RNA, 15 nt, Human
agauagccaaggcca

SEQ ID NO: 1166064 - RNA, 16 nt, Human
agauagccaaggccaa

SEQ ID NO: 1166065 - RNA, 20 nt, Human
agauagccaaggccaaagga

SEQ ID NO: 1166066 - RNA, 13 nt, Human
agaggagaggggc

SEQ ID NO: 1166067 - RNA, 22 nt, Human
agaggggaacagacuggaagca

SEQ ID NO: 1166068 - RNA, 16 nt, Human
agaggggaagagacuu

SEQ ID NO: 1166069 - RNA, 22 nt, Human
agauacuuggggggcugaggug

SEQ ID NO: 1166070 - RNA, 13 nt, Human
agauagccaaggc

SEQ ID NO: 1166071 - RNA, 17 nt, Human
agacugcauuauauuua

SEQ ID NO: 1166072 - RNA, 21 nt, Human
agacugcauuauauuuauuac

SEQ ID NO: 1166073 - RNA, 21 nt, Human
agagaagagauugugguuuca

SEQ ID NO: 1166074 - RNA, 18 nt, Human
agagaaaguacuucucca

SEQ ID NO: 1166075 - RNA, 13 nt, Human
agacaaugacuua

SEQ ID NO: 1166076 - RNA, 17 nt, Human
agacaaugacuuacugu

SEQ ID NO: 1166077 - RNA, 19 nt, Human
agacaaugacuuacuguac

SEQ ID NO: 1166078 - RNA, 15 nt, Human
agacaauuuauuaug

SEQ ID NO: 1166079 - RNA, 21 nt, Human
agacaauuuauuauggcacau

SEQ ID NO: 1166080 - RNA, 19 nt, Human
agacggagucccaccuugg

SEQ ID NO: 1166081 - RNA, 18 nt, Human
agacgggggcagagaggg

SEQ ID NO: 1166082 - RNA, 17 nt, Human
agacagcccgggcucug

SEQ ID NO: 1166083 - RNA, 18 nt, Human
agacagcccgggcucugc

SEQ ID NO: 1166084 - RNA, 20 nt, Human
agacagcccgggcucugccu

SEQ ID NO: 1166085 - RNA, 21 nt, Human
agacagcccgggcucugccuc

SEQ ID NO: 1166086 - RNA, 13 nt, Human
agaccaucccuga

SEQ ID NO: 1166087 - RNA, 14 nt, Human
agaccaucccugaa

SEQ ID NO: 1166088 - RNA, 17 nt, Human
agaccaucccugaaggc

SEQ ID NO: 1166089 - RNA, 18 nt, Human
agaccaucccugaaggcc

SEQ ID NO: 1166090 - RNA, 21 nt, Human
agaccaucccugaaggccccg

SEQ ID NO: 1166091 - RNA, 17 nt, Human
agguaaggaauaccugu

SEQ ID NO: 1166092 - RNA, 22 nt, Human
agguacgaaaagaggggaagag

SEQ ID NO: 1166093 - RNA, 14 nt, Human
aggucgaggcagga

SEQ ID NO: 1166094 - RNA, 16 nt, Human
aggugcugccauccag

SEQ ID NO: 1166095 - RNA, 17 nt, Human
aggugcugccauccagg

SEQ ID NO: 1166096 - RNA, 14 nt, Human
agguuaauguucau

SEQ ID NO: 1166097 - RNA, 17 nt, Human
agguucaaagauauuuu

SEQ ID NO: 1166098 - RNA, 13 nt, Human
agguucagcuugu

SEQ ID NO: 1166099 - RNA, 13 nt, Human
agguucccuuuga

SEQ ID NO: 1166100 - RNA, 21 nt, Human
agggacgcuacccgggaaggg

SEQ ID NO: 1166101 - RNA, 12 nt, Human
agggacagaggg

SEQ ID NO: 1166102 - RNA, 13 nt, Human
agggacagagggg

SEQ ID NO: 1166103 - RNA, 20 nt, Human
agggacagaggggguggccu

SEQ ID NO: 1166104 - RNA, 18 nt, Human
aggcugccucucccauca

SEQ ID NO: 1166105 - RNA, 17 nt, Human
agggcacaccgggcacu

SEQ ID NO: 1166106 - RNA, 20 nt, Human
agggcacaccgggcacucag

SEQ ID NO: 1166107 - RNA, 21 nt, Human
agggcacaccgggcacucaga

SEQ ID NO: 1166108 - RNA, 22 nt, Human
agggcacagaaaauggaagaca

SEQ ID NO: 1166109 - RNA, 15 nt, Human
agggccuggccugag

SEQ ID NO: 1166110 - RNA, 16 nt, Human
agggccuggccugagc

SEQ ID NO: 1166111 - RNA, 17 nt, Human
agggccuggccugagcu

SEQ ID NO: 1166112 - RNA, 18 nt, Human
agggccuggccugagcug

SEQ ID NO: 1166113 - RNA, 19 nt, Human
agggcgggaggauguucug

SEQ ID NO: 1166114 - RNA, 21 nt, Human
aggggauagagagagaccacu

SEQ ID NO: 1166115 - RNA, 15 nt, Human
aggggcacagggucu

SEQ ID NO: 1166116 - RNA, 14 nt, Human
aggaccucagguga

SEQ ID NO: 1166117 - RNA, 20 nt, Human
aggaccucaggugagaagca

SEQ ID NO: 1166118 - RNA, 15 nt, Human
aggagagcuagcagc

SEQ ID NO: 1166119 - RNA, 15 nt, Human
aggagaggagagggg

SEQ ID NO: 1166120 - RNA, 16 nt, Human
aggagaggggcacagg

SEQ ID NO: 1166121 - RNA, 18 nt, Human
aggagaggggcacagggu

SEQ ID NO: 1166122 - RNA, 20 nt, Human
aggaccccuccaugugggcu

SEQ ID NO: 1166123 - RNA, 16 nt, Human
aggauucuuccucccu

SEQ ID NO: 1166124 - RNA, 12 nt, Human
aggauucuuccu

SEQ ID NO: 1166125 - RNA, 17 nt, Human
aggaggggauagagaga

SEQ ID NO: 1166126 - RNA, 20 nt, Human
aggauguucugggacacagu

SEQ ID NO: 1166127 - RNA, 14 nt, Human
aggauguugaaaaa

SEQ ID NO: 1166128 - RNA, 17 nt, Human
aggauguugaaaaaguu

SEQ ID NO: 1166129 - RNA, 21 nt, Human
agcuggucccacucaguccau

SEQ ID NO: 1166130 - RNA, 17 nt, Human
agcugggugucaagagg

SEQ ID NO: 1166131 - RNA, 22 nt, Human
agcugggugucaagagggucug

SEQ ID NO: 1166132 - RNA, 13 nt, Human
aggaaaaacugau

SEQ ID NO: 1166133 - RNA, 15 nt, Human
aggaaaaacugauuu

SEQ ID NO: 1166134 - RNA, 14 nt, Human
agcuguaugauucc

SEQ ID NO: 1166135 - RNA, 21 nt, Human
aaaugucucuuuaaugucaca

SEQ ID NO: 1166136 - RNA, 18 nt, Human
guauucucuccuguaccu

SEQ ID NO: 1166137 - RNA, 21 nt, Human
guauucucuccuguaccucuu

SEQ ID NO: 1166138 - RNA, 17 nt, Human
aaauuguauuacaaauc

SEQ ID NO: 1166139 - RNA, 17 nt, Human
aaauuccaagugauuga

SEQ ID NO: 1166140 - RNA, 16 nt, Human
aaauuccccacccuga

SEQ ID NO: 1166141 - RNA, 20 nt, Human
gucacaggaaguagaggagg

SEQ ID NO: 1166142 - RNA, 12 nt, Human
gucacaggcagg

SEQ ID NO: 1166143 - RNA, 22 nt, Human
gucaccaaaucagcugcuacua

SEQ ID NO: 1166144 - RNA, 22 nt, Human
gucaauuacaggaaguacugga

SEQ ID NO: 1166145 - RNA, 21 nt, Human
gucaauuuuguuauguauauu

SEQ ID NO: 1166146 - RNA, 13 nt, Human
gucacaggaagua

SEQ ID NO: 1166147 - RNA, 15 nt, Human
gucacaggaaguaga

SEQ ID NO: 1166148 - RNA, 10 nt, Human
gucacugcuu

SEQ ID NO: 1166149 - RNA, 17 nt, Human
gucacugagacagcccg

SEQ ID NO: 1166150 - RNA, 18 nt, Human
gucacugagacagcccgg

SEQ ID NO: 1166151 - RNA, 21 nt, Human
gucacugagacagcccgggcu

SEQ ID NO: 1166152 - RNA, 23 nt, Human
gucacugagacagcccgggcucu

SEQ ID NO: 1166153 - RNA, 12 nt, Human
gucaccaagccc

SEQ ID NO: 1166154 - RNA, 15 nt, Human
gucaccaagcccagu

SEQ ID NO: 1166155 - RNA, 23 nt, Human
gucacucuggcagcucagagagg

SEQ ID NO: 1166156 - RNA, 14 nt, Human
gucacugagacagc

SEQ ID NO: 1166157 - RNA, 15 nt, Human
gucacugagacagcc

SEQ ID NO: 1166158 - RNA, 16 nt, Human
gucacugagacagccc

SEQ ID NO: 1166159 - RNA, 21 nt, Human
gucagaaguuucugccgcagc

SEQ ID NO: 1166160 - RNA, 23 nt, Human
gucagaaguuucugccgcagccc

SEQ ID NO: 1166161 - RNA, 14 nt, Human
gucaggaaagagaa

SEQ ID NO: 1166162 - RNA, 15 nt, Human
gucacugcuuaacuu

SEQ ID NO: 1166163 - RNA, 21 nt, Human
gucacugcuuaacuucacaua

SEQ ID NO: 1166164 - RNA, 16 nt, Human
gucagguggggcagcu

SEQ ID NO: 1166165 - RNA, 17 nt, Human
gucagguggggcagcuu

SEQ ID NO: 1166166 - RNA, 18 nt, Human
gucagguggggcagcuug

SEQ ID NO: 1166167 - RNA, 22 nt, Human
gucagguggggcagcuugaggg

SEQ ID NO: 1166168 - RNA, 15 nt, Human
gucagugugacugau

SEQ ID NO: 1166169 - RNA, 13 nt, Human
aaauuucuaaauc

SEQ ID NO: 1166170 - RNA, 15 nt, Human
aaauuucuaaaucuc

SEQ ID NO: 1166171 - RNA, 14 nt, Human
gucuaccugagggg

SEQ ID NO: 1166172 - RNA, 15 nt, Human
gucuaccugaggggc

SEQ ID NO: 1166173 - RNA, 16 nt, Human
gucuaccugaggggcc

SEQ ID NO: 1166174 - RNA, 20 nt, Human
gucuaccugaggggccucuu

SEQ ID NO: 1166175 - RNA, 22 nt, Human
gucuaugggacucaaugcacug

SEQ ID NO: 1166176 - RNA, 17 nt, Human
guccuggcaugggaaug

SEQ ID NO: 1166177 - RNA, 12 nt, Human
gucgaggcagga

SEQ ID NO: 1166178 - RNA, 14 nt, Human
guccucuuuucuga

SEQ ID NO: 1166179 - RNA, 19 nt, Human
guccugcugcaguugccag

SEQ ID NO: 1166180 - RNA, 16 nt, Human
guccuggcaugggaau

SEQ ID NO: 1166181 - RNA, 12 nt, Human
aacauauauaac

SEQ ID NO: 1166182 - RNA, 16 nt, Human
aacauauauaacaaug

SEQ ID NO: 1166183 - RNA, 19 nt, Human
aaauuucuaaaucuccaaa

SEQ ID NO: 1166184 - RNA, 19 nt, Human
aacacaaacgggcucagca

SEQ ID NO: 1166185 - RNA, 21 nt, Human
aacacucacauuuauucugcu

SEQ ID NO: 1166186 - RNA, 17 nt, Human
aacacucauugaccuga

SEQ ID NO: 1166187 - RNA, 17 nt, Human
aacacuguucucugccc

SEQ ID NO: 1166188 - RNA, 18 nt, Human
aacacuguucucugcccu

SEQ ID NO: 1166189 - RNA, 19 nt, Human
aacacuguucucugcccuc

SEQ ID NO: 1166190 - RNA, 17 nt, Human
gucauuugagcagggcu

SEQ ID NO: 1166191 - RNA, 19 nt, Human
gucauuugagcagggcuca

SEQ ID NO: 1166192 - RNA, 22 nt, Human
guccaugaagauguagaggaga

SEQ ID NO: 1166193 - RNA, 23 nt, Human
guccaugaagauguagaggagaa

SEQ ID NO: 1166194 - RNA, 15 nt, Human
gucccaccccacaca

SEQ ID NO: 1166195 - RNA, 20 nt, Human
gucccaccccacacacgcca

SEQ ID NO: 1166196 - RNA, 18 nt, Human
guccccaccgcagacagg

SEQ ID NO: 1166197 - RNA, 22 nt, Human
guccccaccgcagacaggacca

SEQ ID NO: 1166198 - RNA, 18 nt, Human
guccccuguuuguuucug

SEQ ID NO: 1166199 - RNA, 22 nt, Human
guccccuguuuguuucugaaag

SEQ ID NO: 1166200 - RNA, 19 nt, Human
gucccugguggcagcucac

SEQ ID NO: 1166201 - RNA, 18 nt, Human
gucccuuacgugaguccu

SEQ ID NO: 1166202 - RNA, 19 nt, Human
gucccuuacgugaguccug

SEQ ID NO: 1166203 - RNA, 15 nt, Human
gucuuuaaaugcugc

SEQ ID NO: 1166204 - RNA, 15 nt, Human
gucuggaaugcagug

SEQ ID NO: 1166205 - RNA, 16 nt, Human
gucuggaaugcagugg

SEQ ID NO: 1166206 - RNA, 18 nt, Human
gucuggaaugcaguggua

SEQ ID NO: 1166207 - RNA, 14 nt, Human
gucucaaaaaaaca

SEQ ID NO: 1166208 - RNA, 17 nt, Human
gucucaaaaaaagaaaa

SEQ ID NO: 1166209 - RNA, 19 nt, Human
gucucaaaaaaagaaaaag

SEQ ID NO: 1166210 - RNA, 14 nt, Human
gucugaaggcuggg

SEQ ID NO: 1166211 - RNA, 12 nt, Human
gucugacaggca

SEQ ID NO: 1166212 - RNA, 13 nt, Human
gucugacaggcaa

SEQ ID NO: 1166213 - RNA, 14 nt, Human
gucugacaggcaau

SEQ ID NO: 1166214 - RNA, 15 nt, Human
gucugacaggcaaug

SEQ ID NO: 1166215 - RNA, 18 nt, Human
gucugacaggcaaugcug

SEQ ID NO: 1166216 - RNA, 20 nt, Human
gucugacaggcaaugcuggc

SEQ ID NO: 1166217 - RNA, 13 nt, Human
aacuauauuguuu

SEQ ID NO: 1166218 - RNA, 17 nt, Human
aacuagggaagauaaua

SEQ ID NO: 1166219 - RNA, 12 nt, Human
aacguggcugcu

SEQ ID NO: 1166220 - RNA, 13 nt, Human
aacguggcugcuu

SEQ ID NO: 1166221 - RNA, 15 nt, Human
aacguggcugcuuca

SEQ ID NO: 1166222 - RNA, 14 nt, Human
aacuccagaaagug

SEQ ID NO: 1166223 - RNA, 12 nt, Human
aacuccuggccu

SEQ ID NO: 1166224 - RNA, 23 nt, Human
gugaauaauacaguaucucaggg

SEQ ID NO: 1166225 - RNA, 20 nt, Human
gugacagagugagacucugu

SEQ ID NO: 1166226 - RNA, 22 nt, Human
gugacagagugagacucugucu

SEQ ID NO: 1166227 - RNA, 19 nt, Human
gugacaugucuuuucuugc

SEQ ID NO: 1166228 - RNA, 22 nt, Human
gugagacccugucucaaaaaaa

SEQ ID NO: 1166229 - RNA, 14 nt, Human
gugagacucugucu

SEQ ID NO: 1166230 - RNA, 16 nt, Human
gugagacucugucuca

SEQ ID NO: 1166231 - RNA, 22 nt, Human
aacucuccucugcugcuggcug

SEQ ID NO: 1166232 - RNA, 23 nt, Human
aacucuccucugcugcuggcugg

SEQ ID NO: 1166233 - RNA, 21 nt, Human
aacugauuuuuuuuuccuuca

SEQ ID NO: 1166234 - RNA, 22 nt, Human
aacugauuuuuuuuuccuucag

SEQ ID NO: 1166235 - RNA, 23 nt, Human
aacugauuuuuuuuuccuucagu

SEQ ID NO: 1166236 - RNA, 16 nt, Human
aacugcauuggcuuug

SEQ ID NO: 1166237 - RNA, 18 nt, Human
gugagacucugucucaaa

SEQ ID NO: 1166238 - RNA, 12 nt, Human
gugaggcucugc

SEQ ID NO: 1166239 - RNA, 13 nt, Human
gugaggcucugcc

SEQ ID NO: 1166240 - RNA, 14 nt, Human
gugaggcucugccc

SEQ ID NO: 1166241 - RNA, 15 nt, Human
gugaggcucugcccu

SEQ ID NO: 1166242 - RNA, 16 nt, Human
gugaggcucugcccuu

SEQ ID NO: 1166243 - RNA, 17 nt, Human
gugaggcucugcccuug

SEQ ID NO: 1166244 - RNA, 18 nt, Human
gugaggcucugcccuugg

SEQ ID NO: 1166245 - RNA, 23 nt, Human
gugaguacuacaguccucccauc

SEQ ID NO: 1166246 - RNA, 17 nt, Human
gugagucaccaagccca

SEQ ID NO: 1166247 - RNA, 19 nt, Human
gugagucaccaagcccagu

SEQ ID NO: 1166248 - RNA, 19 nt, Human
aacucuccucugcugcugg

SEQ ID NO: 1166249 - RNA, 21 nt, Human
aacucuccucugcugcuggcu

SEQ ID NO: 1166250 - RNA, 14 nt, Human
aacuucacauauug

SEQ ID NO: 1166251 - RNA, 22 nt, Human
aacuucacauauugauuuccgu

SEQ ID NO: 1166252 - RNA, 22 nt, Human
aacuucaccauauuaccacaga

SEQ ID NO: 1166253 - RNA, 13 nt, Human
aacuucagacaua

SEQ ID NO: 1166254 - RNA, 18 nt, Human
aacuucagcgguuuauau

SEQ ID NO: 1166255 - RNA, 21 nt, Human
aacuucagcgguuuauauaag

SEQ ID NO: 1166256 - RNA, 11 nt, Human
gugauuaccag

SEQ ID NO: 1166257 - RNA, 16 nt, Human
gugauuaccagggacu

SEQ ID NO: 1166258 - RNA, 17 nt, Human
gugauuaccagggacug

SEQ ID NO: 1166259 - RNA, 18 nt, Human
gugcaaugaccuuucaau

SEQ ID NO: 1166260 - RNA, 13 nt, Human
gugcacaagcucc

SEQ ID NO: 1166261 - RNA, 16 nt, Human
gugcacaagcuccaag

SEQ ID NO: 1166262 - RNA, 21 nt, Human
gugcacaagcuccaagcuccc

SEQ ID NO: 1166263 - RNA, 23 nt, Human
gugcacaagcuccaagcucccag

SEQ ID NO: 1166264 - RNA, 21 nt, Human
gugcacaugcacgugugugca

SEQ ID NO: 1166265 - RNA, 22 nt, Human
gugcaaugaccuuucaauagga

SEQ ID NO: 1166266 - RNA, 17 nt, Human
gugcauuugaggucugu

SEQ ID NO: 1166267 - RNA, 19 nt, Human
gugcauuugaggucuguuc

SEQ ID NO: 1166268 - RNA, 20 nt, Human
gugcauuugaggucuguucu

SEQ ID NO: 1166269 - RNA, 21 nt, Human
gugcauuuggugguuucagaa

SEQ ID NO: 1166270 - RNA, 23 nt, Human
gugccaaaaacaacaacaaaaug

SEQ ID NO: 1166271 - RNA, 22 nt, Human
aacuuuaccuuuuuuauacaua

SEQ ID NO: 1166272 - RNA, 23 nt, Human
aacuuuaccuuuuuuauacauaa

SEQ ID NO: 1166273 - RNA, 19 nt, Human
aagaaaaaauauuuucccu

SEQ ID NO: 1166274 - RNA, 13 nt, Human
aagaaaaagaaaa

SEQ ID NO: 1166275 - RNA, 18 nt, Human
aagaaaaagaaaaagaaa

SEQ ID NO: 1166276 - RNA, 17 nt, Human
aagaaaaaugagccugg

SEQ ID NO: 1166277 - RNA, 18 nt, Human
aagaaaaaugagccuggc

SEQ ID NO: 1166278 - RNA, 15 nt, Human
aagaaaauaguggug

SEQ ID NO: 1166279 - RNA, 21 nt, Human
aagaaaauaguggugugauuu

SEQ ID NO: 1166280 - RNA, 22 nt, Human
aagaaaauaguggugugauuug

SEQ ID NO: 1166281 - RNA, 11 nt, Human
aagaaacauuu

SEQ ID NO: 1166282 - RNA, 14 nt, Human
aagaaagaaaauca

SEQ ID NO: 1166283 - RNA, 16 nt, Human
aagaaagaaaaucagg

SEQ ID NO: 1166284 - RNA, 12 nt, Human
aagaaagagaga

SEQ ID NO: 1166285 - RNA, 13 nt, Human
aagaaagagagaa

SEQ ID NO: 1166286 - RNA, 14 nt, Human
aagaaagagagaaa

SEQ ID NO: 1166287 - RNA, 15 nt, Human
aagaaagagagaaaa

SEQ ID NO: 1166288 - RNA, 16 nt, Human
aagaaagagagaaaau

SEQ ID NO: 1166289 - RNA, 18 nt, Human
aagaaagagagaaaauaa

SEQ ID NO: 1166290 - RNA, 20 nt, Human
aagaaagagagaaaauaaaa

SEQ ID NO: 1166291 - RNA, 22 nt, Human
aagaagcaccaaucaugaauua

SEQ ID NO: 1166292 - RNA, 17 nt, Human
gugcuaggaacacuccu

SEQ ID NO: 1166293 - RNA, 15 nt, Human
gugcuaucuccccca

SEQ ID NO: 1166294 - RNA, 18 nt, Human
gugcuaucucccccagcc

SEQ ID NO: 1166295 - RNA, 19 nt, Human
gugcuaucucccccagccc

SEQ ID NO: 1166296 - RNA, 18 nt, Human
gugcuccauggcugccau

SEQ ID NO: 1166297 - RNA, 22 nt, Human
gugcuccauggcugccaucuca

SEQ ID NO: 1166298 - RNA, 16 nt, Human
gugcucugaucaucca

SEQ ID NO: 1166299 - RNA, 13 nt, Human
gugcucuggacag

SEQ ID NO: 1166300 - RNA, 14 nt, Human
gugcucuggacagg

SEQ ID NO: 1166301 - RNA, 13 nt, Human
gugcugcccugcc

SEQ ID NO: 1166302 - RNA, 14 nt, Human
gugcugcccugccc

SEQ ID NO: 1166303 - RNA, 15 nt, Human
gugcugcccugccca

SEQ ID NO: 1166304 - RNA, 20 nt, Human
aagaucaaaagguuaauaaa

SEQ ID NO: 1166305 - RNA, 23 nt, Human
aagaucaaaagguuaauaaagua

SEQ ID NO: 1166306 - RNA, 13 nt, Human
aagcaaaauguga

SEQ ID NO: 1166307 - RNA, 17 nt, Human
aagcaacccaaauguuc

SEQ ID NO: 1166308 - RNA, 14 nt, Human
gugucaccugaaga

SEQ ID NO: 1166309 - RNA, 22 nt, Human
gugucaccugaagacucauucu

SEQ ID NO: 1166310 - RNA, 14 nt, Human
gugucagguggggc

SEQ ID NO: 1166311 - RNA, 18 nt, Human
gugucagguggggcagcu

SEQ ID NO: 1166312 - RNA, 19 nt, Human
gugucagguggggcagcuu

SEQ ID NO: 1166313 - RNA, 20 nt, Human
gugucagguggggcagcuug

SEQ ID NO: 1166314 - RNA, 23 nt, Human
gugugaaccaccacacccagccc

SEQ ID NO: 1166315 - RNA, 23 nt, Human
gugcugcccugcccaccuggccu

SEQ ID NO: 1166316 - RNA, 18 nt, Human
gugcugcccugcccaccu

SEQ ID NO: 1166317 - RNA, 15 nt, Human
gugguuucagaaaug

SEQ ID NO: 1166318 - RNA, 16 nt, Human
gugguuucagaaaugu

SEQ ID NO: 1166319 - RNA, 11 nt, Human
aagaggcaggg

SEQ ID NO: 1166320 - RNA, 14 nt, Human
aagaggcagggucu

SEQ ID NO: 1166321 - RNA, 21 nt, Human
aagagggagggagggcuccag

SEQ ID NO: 1166322 - RNA, 22 nt, Human
aagagggagggagggcuccaga

SEQ ID NO: 1166323 - RNA, 16 nt, Human
aagcacuaaacaaaga

SEQ ID NO: 1166324 - RNA, 17 nt, Human
aagcaccuccugccucg

SEQ ID NO: 1166325 - RNA, 21 nt, Human
aagcacaugccucucucaggc

SEQ ID NO: 1166326 - RNA, 13 nt, Human
aagcaccuccugc

SEQ ID NO: 1166327 - RNA, 14 nt, Human
aagcaccuccugcc

SEQ ID NO: 1166328 - RNA, 15 nt, Human
aagcaccuccugccu

SEQ ID NO: 1166329 - RNA, 16 nt, Human
aagcaccuccugccuc

SEQ ID NO: 1166330 - RNA, 16 nt, Human
aagcacacuugacauc

SEQ ID NO: 1166331 - RNA, 14 nt, Human
aagcacaugccucu

SEQ ID NO: 1166332 - RNA, 15 nt, Human
aagcacaugccucuc

SEQ ID NO: 1166333 - RNA, 16 nt, Human
aagcacaugccucucu

SEQ ID NO: 1166334 - RNA, 19 nt, Human
aagcacaugccucucucag

SEQ ID NO: 1166335 - RNA, 20 nt, Human
aagcacaugccucucucagg

SEQ ID NO: 1166336 - RNA, 12 nt, Human
aagcaugugaga

SEQ ID NO: 1166337 - RNA, 16 nt, Human
aagcauuuacuuugug

SEQ ID NO: 1166338 - RNA, 17 nt, Human
aagccaaagcuaggccu

SEQ ID NO: 1166339 - RNA, 18 nt, Human
aagccaaagcuaggccug

SEQ ID NO: 1166340 - RNA, 20 nt, Human
aagccaaagcuaggccuggc

SEQ ID NO: 1166341 - RNA, 14 nt, Human
aagcccaggaaagg

SEQ ID NO: 1166342 - RNA, 18 nt, Human
guuaaucauuagguguga

SEQ ID NO: 1166343 - RNA, 20 nt, Human
guuauuauauuuacaaaugg

SEQ ID NO: 1166344 - RNA, 19 nt, Human
guuauuauauuuacaaaug

SEQ ID NO: 1166345 - RNA, 19 nt, Human
guuagagguucccuuugac

SEQ ID NO: 1166346 - RNA, 21 nt, Human
aagccgugauuuucauugcug

SEQ ID NO: 1166347 - RNA, 17 nt, Human
guucagguaacaggcag

SEQ ID NO: 1166348 - RNA, 18 nt, Human
guucagguaacaggcaga

SEQ ID NO: 1166349 - RNA, 23 nt, Human
guucagcuuguaaauagcucagg

SEQ ID NO: 1166350 - RNA, 21 nt, Human
guucaggguuggccccugccc

SEQ ID NO: 1166351 - RNA, 22 nt, Human
guucaggguuggccccugcccg

SEQ ID NO: 1166352 - RNA, 16 nt, Human
aagccucccacgacug

SEQ ID NO: 1166353 - RNA, 15 nt, Human
aagccuccuccagcc

SEQ ID NO: 1166354 - RNA, 19 nt, Human
aagccuccuccagccgcca

SEQ ID NO: 1166355 - RNA, 21 nt, Human
aagccuuggggcugaugcagu

SEQ ID NO: 1166356 - RNA, 14 nt, Human
guucuugguuugua

SEQ ID NO: 1166357 - RNA, 15 nt, Human
guucuugguuuguaa

SEQ ID NO: 1166358 - RNA, 18 nt, Human
guucuugguuuguaaauu

SEQ ID NO: 1166359 - RNA, 14 nt, Human
guugauagcacaga

SEQ ID NO: 1166360 - RNA, 19 nt, Human
guugauagcacagacccug

SEQ ID NO: 1166361 - RNA, 22 nt, Human
guugauagcacagacccugccc

SEQ ID NO: 1166362 - RNA, 19 nt, Human
guucuagcauggcugccaa

SEQ ID NO: 1166363 - RNA, 15 nt, Human
guucucucuucucca

SEQ ID NO: 1166364 - RNA, 12 nt, Human
guucucugagga

SEQ ID NO: 1166365 - RNA, 14 nt, Human
guucucugaggaca

SEQ ID NO: 1166366 - RNA, 15 nt, Human
guucucugcccucca

SEQ ID NO: 1166367 - RNA, 17 nt, Human
guucucugcccuccaag

SEQ ID NO: 1166368 - RNA, 18 nt, Human
guucucugcccuccaaga

SEQ ID NO: 1166369 - RNA, 13 nt, Human
guucuuaauucuu

SEQ ID NO: 1166370 - RNA, 14 nt, Human
guucuuaauucuua

SEQ ID NO: 1166371 - RNA, 17 nt, Human
guucuuaauucuuagcu

SEQ ID NO: 1166372 - RNA, 23 nt, Human
aagcuuguauuccuuuuucucuc

SEQ ID NO: 1166373 - RNA, 18 nt, Human
guucccuugaugaagaag

SEQ ID NO: 1166374 - RNA, 21 nt, Human
guucccuuuuuuggcugcuga

SEQ ID NO: 1166375 - RNA, 22 nt, Human
guucccuuuuuuggcugcugaa

SEQ ID NO: 1166376 - RNA, 13 nt, Human
aaggggagaguaa

SEQ ID NO: 1166377 - RNA, 12 nt, Human
aagggggcuggg

SEQ ID NO: 1166378 - RNA, 23 nt, Human
aagggggcugggacaugggaaag

SEQ ID NO: 1166379 - RNA, 11 nt, Human
guuucagaaau

SEQ ID NO: 1166380 - RNA, 13 nt, Human
guuucagaaaugu

SEQ ID NO: 1166381 - RNA, 14 nt, Human
guuucagaaaugug

SEQ ID NO: 1166382 - RNA, 16 nt, Human
aaggcugggggaagaa

SEQ ID NO: 1166383 - RNA, 19 nt, Human
aaggcugggggaagaagcu

SEQ ID NO: 1166384 - RNA, 22 nt, Human
aaggcugggggaagaagcucuc

SEQ ID NO: 1166385 - RNA, 20 nt, Human
aaggcugucaauuacaggaa

SEQ ID NO: 1166386 - RNA, 15 nt, Human
aagggcuguuauaau

SEQ ID NO: 1166387 - RNA, 17 nt, Human
aagggcuguuauaaucu

SEQ ID NO: 1166388 - RNA, 14 nt, Human
guuuaugauuccac

SEQ ID NO: 1166389 - RNA, 17 nt, Human
aaggaaacccagcucug

SEQ ID NO: 1166390 - RNA, 22 nt, Human
aaggaaacccagcucuggucca

SEQ ID NO: 1166391 - RNA, 23 nt, Human
guuguuugauucagacagcugcc

SEQ ID NO: 1166392 - RNA, 21 nt, Human
guuuaagugacugauggcuaa

SEQ ID NO: 1166393 - RNA, 18 nt, Human
aaguaauaugcacacauu

SEQ ID NO: 1166394 - RNA, 20 nt, Human
aaguaauaugcacacauuuu

SEQ ID NO: 1166395 - RNA, 21 nt, Human
aaguaauaugcacacauuuuu

SEQ ID NO: 1166396 - RNA, 22 nt, Human
guuuuaaggaugcuuguacaua

SEQ ID NO: 1166397 - RNA, 14 nt, Human
guuuucuguucuuu

SEQ ID NO: 1166398 - RNA, 15 nt, Human
guuuucuguucuuuc

SEQ ID NO: 1166399 - RNA, 16 nt, Human
guuuucuguucuuucu

SEQ ID NO: 1166400 - RNA, 19 nt, Human
guuuucuguucuuucuggc

SEQ ID NO: 1166401 - RNA, 16 nt, Human
aaguauuauaccuuuu

SEQ ID NO: 1166402 - RNA, 19 nt, Human
aaguauuauaccuuuuuua

SEQ ID NO: 1166403 - RNA, 21 nt, Human
aaguauucuuauuuaaugaaa

SEQ ID NO: 1166404 - RNA, 23 nt, Human
aaguauucuuauuuaaugaaaga

SEQ ID NO: 1166405 - RNA, 14 nt, Human
aaguacuauaauuu

SEQ ID NO: 1166406 - RNA, 17 nt, Human
aaguacuauaauuuacc

SEQ ID NO: 1166407 - RNA, 13 nt, Human
aaguacuauguau

SEQ ID NO: 1166408 - RNA, 15 nt, Human
aaguacuauguauca

SEQ ID NO: 1166409 - RNA, 18 nt, Human
aaguacuucuccacccug

SEQ ID NO: 1166410 - RNA, 19 nt, Human
aaguacuucuccacccugc

SEQ ID NO: 1166411 - RNA, 20 nt, Human
aaguacuucuccacccugcu

SEQ ID NO: 1166412 - RNA, 18 nt, Human
aaguauguuagugcaaau

SEQ ID NO: 1166413 - RNA, 19 nt, Human
aaguauguuagugcaaauu

SEQ ID NO: 1166414 - RNA, 21 nt, Human
aaguauguuagugcaaauugu

SEQ ID NO: 1166415 - RNA, 15 nt, Human
aaguauuauaccuuu

SEQ ID NO: 1166416 - RNA, 21 nt, Human
uaaaaaaaaaccugagcccca

SEQ ID NO: 1166417 - RNA, 15 nt, Human
uaaaaaugagguacu

SEQ ID NO: 1166418 - RNA, 22 nt, Human
uaaaaaugagguacucuccugg

SEQ ID NO: 1166419 - RNA, 13 nt, Human
uaaaacccaagug

SEQ ID NO: 1166420 - RNA, 12 nt, Human
uaaaacuuuuua

SEQ ID NO: 1166421 - RNA, 15 nt, Human
uaaaacuuuuuaaaa

SEQ ID NO: 1166422 - RNA, 23 nt, Human
aagugauccucccaccucagccu

SEQ ID NO: 1166423 - RNA, 21 nt, Human
uaaaauaccagccaguaaaug

SEQ ID NO: 1166424 - RNA, 13 nt, Human
aagugauccuccc

SEQ ID NO: 1166425 - RNA, 19 nt, Human
aagugauccucccaccuca

SEQ ID NO: 1166426 - RNA, 20 nt, Human
aagugauccucccaccucag

SEQ ID NO: 1166427 - RNA, 13 nt, Human
uaaaagucuugug

SEQ ID NO: 1166428 - RNA, 22 nt, Human
uaaaauaauuuuuauauuugaa

SEQ ID NO: 1166429 - RNA, 13 nt, Human
aagugugguagag

SEQ ID NO: 1166430 - RNA, 19 nt, Human
aaguuucugccgcagcccu

SEQ ID NO: 1166431 - RNA, 21 nt, Human
aaguuucugccgcagcccugc

SEQ ID NO: 1166432 - RNA, 20 nt, Human
aaguuugagaucagccuggg

SEQ ID NO: 1166433 - RNA, 9 nt, Human
uaaaauggu

SEQ ID NO: 1166434 - RNA, 13 nt, Human
aauaguuggcuag

SEQ ID NO: 1166435 - RNA, 16 nt, Human
aauagucaaauugugu

SEQ ID NO: 1166436 - RNA, 19 nt, Human
aauagucaaauugugugaa

SEQ ID NO: 1166437 - RNA, 22 nt, Human
aauaguggugugauuuggggau

SEQ ID NO: 1166438 - RNA, 18 nt, Human
uaacauggacaugaucuu

SEQ ID NO: 1166439 - RNA, 23 nt, Human
uaacauggacaugaucuucuuua

SEQ ID NO: 1166440 - RNA, 17 nt, Human
uaacauguaauuaagua

SEQ ID NO: 1166441 - RNA, 22 nt, Human
aauaucacuugucaauaaaauc

SEQ ID NO: 1166442 - RNA, 20 nt, Human
uaacgauaaaagacagugaa

SEQ ID NO: 1166443 - RNA, 21 nt, Human
uaacuucacauauugauuucc

SEQ ID NO: 1166444 - RNA, 14 nt, Human
uaacuucaccauau

SEQ ID NO: 1166445 - RNA, 17 nt, Human
uaacuuccaauuuacau

SEQ ID NO: 1166446 - RNA, 21 nt, Human
aauaugccccauucaacaucu

SEQ ID NO: 1166447 - RNA, 24 nt, Human
aauaugccccauucaacaucuagu

SEQ ID NO: 1166448 - RNA, 15 nt, Human
uaagagaaaugagcu

SEQ ID NO: 1166449 - RNA, 16 nt, Human
aauaugcacacauuuu

SEQ ID NO: 1166450 - RNA, 17 nt, Human
aauaugcacacauuuuu

SEQ ID NO: 1166451 - RNA, 22 nt, Human
aauaugcacacauuuuuuaaau

SEQ ID NO: 1166452 - RNA, 17 nt, Human
aauauugauaugcuuau

SEQ ID NO: 1166453 - RNA, 18 nt, Human
aauauuuauuuuaauaau

SEQ ID NO: 1166454 - RNA, 19 nt, Human
aauauuuauuuuaauaaug

SEQ ID NO: 1166455 - RNA, 14 nt, Human
aauauuucagauaa

SEQ ID NO: 1166456 - RNA, 22 nt, Human
aaucaggguuaguauuguccag

SEQ ID NO: 1166457 - RNA, 21 nt, Human
aaucaggguuaguauugucca

SEQ ID NO: 1166458 - RNA, 18 nt, Human
uaagcacacuugacauca

SEQ ID NO: 1166459 - RNA, 22 nt, Human
uaagcuguuacugucuucagua

SEQ ID NO: 1166460 - RNA, 11 nt, Human
aauccuggcug

SEQ ID NO: 1166461 - RNA, 17 nt, Human
aaucaugaauuaguuuu

SEQ ID NO: 1166462 - RNA, 15 nt, Human
aaucauuagguguga

SEQ ID NO: 1166463 - RNA, 17 nt, Human
aaucauuaggugugacu

SEQ ID NO: 1166464 - RNA, 23 nt, Human
aaucauuaggugugacugaauuu

SEQ ID NO: 1166465 - RNA, 19 nt, Human
aaucuacacuccagugaga

SEQ ID NO: 1166466 - RNA, 19 nt, Human
aaucuuauaauuuaaaaua

SEQ ID NO: 1166467 - RNA, 12 nt, Human
aaucaugaauua

SEQ ID NO: 1166468 - RNA, 15 nt, Human
aaucaugaauuaguu

SEQ ID NO: 1166469 - RNA, 16 nt, Human
uaagcuuguauuccuu

SEQ ID NO: 1166470 - RNA, 19 nt, Human
uaaguaaugauaacuggaa

SEQ ID NO: 1166471 - RNA, 13 nt, Human
uaaguacuaugua

SEQ ID NO: 1166472 - RNA, 16 nt, Human
uaaguacuauguauca

SEQ ID NO: 1166473 - RNA, 17 nt, Human
uaaguacuauguaucaa

SEQ ID NO: 1166474 - RNA, 19 nt, Human
uaaguacuauguaucaaug

SEQ ID NO: 1166475 - RNA, 19 nt, Human
uaaguauucuuauuuaaug

SEQ ID NO: 1166476 - RNA, 20 nt, Human
uaaguauucuuauuuaauga

SEQ ID NO: 1166477 - RNA, 21 nt, Human
uaaguauucuuauuuaaugaa

SEQ ID NO: 1166478 - RNA, 13 nt, Human
uaauguacugcau

SEQ ID NO: 1166479 - RNA, 18 nt, Human
uaaugucacaggcagguc

SEQ ID NO: 1166480 - RNA, 20 nt, Human
aaugaaacccccacacacac

SEQ ID NO: 1166481 - RNA, 22 nt, Human
aaugaauggcuaagcaaaaugu

SEQ ID NO: 1166482 - RNA, 18 nt, Human
aaugaaagacuguacaaa

SEQ ID NO: 1166483 - RNA, 14 nt, Human
aaugaaugucagug

SEQ ID NO: 1166484 - RNA, 13 nt, Human
aaugaaugucagu

SEQ ID NO: 1166485 - RNA, 22 nt, Human
aaugaaugucagugugacugau

SEQ ID NO: 1166486 - RNA, 17 nt, Human
aaugaaacauuuuguca

SEQ ID NO: 1166487 - RNA, 14 nt, Human
aaugaaacccccac

SEQ ID NO: 1166488 - RNA, 17 nt, Human
aaugaaaccugugucuc

SEQ ID NO: 1166489 - RNA, 18 nt, Human
aaugaaacccccacacac

SEQ ID NO: 1166490 - RNA, 19 nt, Human
aaugaaacccccacacaca

SEQ ID NO: 1166491 - RNA, 16 nt, Human
aaugaaagacuguaca

SEQ ID NO: 1166492 - RNA, 17 nt, Human
aaugaaagacuguacaa

SEQ ID NO: 1166493 - RNA, 17 nt, Human
uaaugaaugaaacauuu

SEQ ID NO: 1166494 - RNA, 16 nt, Human
uaauacaccacuacau

SEQ ID NO: 1166495 - RNA, 18 nt, Human
uaauacaccacuacauuc

SEQ ID NO: 1166496 - RNA, 19 nt, Human
uaauacaccacuacauucu

SEQ ID NO: 1166497 - RNA, 21 nt, Human
uaauacaccacuacauucugu

SEQ ID NO: 1166498 - RNA, 16 nt, Human
uaauagacaauuuauu

SEQ ID NO: 1166499 - RNA, 18 nt, Human
uaauagacaauuuauuau

SEQ ID NO: 1166500 - RNA, 22 nt, Human
uaauagacaauuuauuauggca

SEQ ID NO: 1166501 - RNA, 20 nt, Human
aaugcuguauuuuaaaagaa

SEQ ID NO: 1166502 - RNA, 16 nt, Human
aaugcuguauuuuaaa

SEQ ID NO: 1166503 - RNA, 11 nt, Human
aaugcccagcc

SEQ ID NO: 1166504 - RNA, 12 nt, Human
aaugcccagccc

SEQ ID NO: 1166505 - RNA, 13 nt, Human
aaugcccagcccc

SEQ ID NO: 1166506 - RNA, 20 nt, Human
aauggaaaugggcagagcag

SEQ ID NO: 1166507 - RNA, 21 nt, Human
aauggaaaugggcagagcaga

SEQ ID NO: 1166508 - RNA, 14 nt, Human
aauggaaccacucu

SEQ ID NO: 1166509 - RNA, 23 nt, Human
aauggacguguuaugacuccaga

SEQ ID NO: 1166510 - RNA, 20 nt, Human
aauggacuaacuugucuuug

SEQ ID NO: 1166511 - RNA, 16 nt, Human
aaugaccuuucaauag

SEQ ID NO: 1166512 - RNA, 17 nt, Human
aaugaccuuucaauagg

SEQ ID NO: 1166513 - RNA, 18 nt, Human
aaugaccuuucaauagga

SEQ ID NO: 1166514 - RNA, 21 nt, Human
uacaaugcugugcccuaaagu

SEQ ID NO: 1166515 - RNA, 20 nt, Human
aaugaccuuucaauaggaaa

SEQ ID NO: 1166516 - RNA, 21 nt, Human
aaugcacuuuguucuggcucu

SEQ ID NO: 1166517 - RNA, 22 nt, Human
aaugcacuuuguucuggcucuu

SEQ ID NO: 1166518 - RNA, 12 nt, Human
aauggcagccuu

SEQ ID NO: 1166519 - RNA, 16 nt, Human
aauggcagccuuggca

SEQ ID NO: 1166520 - RNA, 22 nt, Human
uacagacaacaaaccuguuucu

SEQ ID NO: 1166521 - RNA, 21 nt, Human
uacacauuuuauuuuauuaug

SEQ ID NO: 1166522 - RNA, 22 nt, Human
uacacauuuuauuuuauuaugc

SEQ ID NO: 1166523 - RNA, 23 nt, Human
uacacauuuuauuuuauuaugca

SEQ ID NO: 1166524 - RNA, 15 nt, Human
uacacuaaaagguga

SEQ ID NO: 1166525 - RNA, 14 nt, Human
uacacuaagagaga

SEQ ID NO: 1166526 - RNA, 18 nt, Human
uacacuaagagagaauga

SEQ ID NO: 1166527 - RNA, 21 nt, Human
aaugugcugaaugguuuucaa

SEQ ID NO: 1166528 - RNA, 19 nt, Human
aaugugaaaagaaaaauga

SEQ ID NO: 1166529 - RNA, 14 nt, Human
aaugugaaacugga

SEQ ID NO: 1166530 - RNA, 15 nt, Human
aaugugaaacuggau

SEQ ID NO: 1166531 - RNA, 22 nt, Human
aaugugaaacuggauuaaacuu

SEQ ID NO: 1166532 - RNA, 20 nt, Human
aauguauguguaaguauucu

SEQ ID NO: 1166533 - RNA, 16 nt, Human
uacaggugugagucac

SEQ ID NO: 1166534 - RNA, 23 nt, Human
uacauaaugcgugcauaccacuu

SEQ ID NO: 1166535 - RNA, 24 nt, Human
uacauaaugcgugcauaccacuuu

SEQ ID NO: 1166536 - RNA, 20 nt, Human
uacaucccuuaccugggaaa

SEQ ID NO: 1166537 - RNA, 13 nt, Human
uacauucuguuaa

SEQ ID NO: 1166538 - RNA, 11 nt, Human
aauuaacuuuu

SEQ ID NO: 1166539 - RNA, 12 nt, Human
uacguacacauu

SEQ ID NO: 1166540 - RNA, 13 nt, Human
uacguacacauuu

SEQ ID NO: 1166541 - RNA, 14 nt, Human
uacguacacauuuu

SEQ ID NO: 1166542 - RNA, 15 nt, Human
uacguugugcauuug

SEQ ID NO: 1166543 - RNA, 16 nt, Human
uacguugugcauuugg

SEQ ID NO: 1166544 - RNA, 22 nt, Human
uacgccaggggaaaaucagccu

SEQ ID NO: 1166545 - RNA, 17 nt, Human
uacuacuccuguaggaa

SEQ ID NO: 1166546 - RNA, 23 nt, Human
uacuauggcccuggccuagcaua

SEQ ID NO: 1166547 - RNA, 12 nt, Human
uacuauguauca

SEQ ID NO: 1166548 - RNA, 13 nt, Human
uacuauguaucaa

SEQ ID NO: 1166549 - RNA, 14 nt, Human
uacuauguaucaau

SEQ ID NO: 1166550 - RNA, 22 nt, Human
uacucuccuggaaauauuaaga

SEQ ID NO: 1166551 - RNA, 23 nt, Human
uacucuccuggaaauauuaagaa

SEQ ID NO: 1166552 - RNA, 12 nt, Human
uacucuguguca

SEQ ID NO: 1166553 - RNA, 21 nt, Human
uacucugugucagguggggca

SEQ ID NO: 1166554 - RNA, 16 nt, Human
uacuggagaaaaugga

SEQ ID NO: 1166555 - RNA, 14 nt, Human
uacuguaagaaaau

SEQ ID NO: 1166556 - RNA, 18 nt, Human
uacuguaauuugugauac

SEQ ID NO: 1166557 - RNA, 19 nt, Human
uacuguaauuugugauaca

SEQ ID NO: 1166558 - RNA, 20 nt, Human
uacuguaauuugugauacaa

SEQ ID NO: 1166559 - RNA, 23 nt, Human
uacuguaauuugugauacaaugc

SEQ ID NO: 1166560 - RNA, 21 nt, Human
uacuguacaugaaaacacauu

SEQ ID NO: 1166561 - RNA, 22 nt, Human
uacuguacaugaaaacacauuu

SEQ ID NO: 1166562 - RNA, 22 nt, Human
aauugacccacaagaaaugaaa

SEQ ID NO: 1166563 - RNA, 18 nt, Human
aauuccaagugauugaaa

SEQ ID NO: 1166564 - RNA, 22 nt, Human
aauuccacuuauaggaauugac

SEQ ID NO: 1166565 - RNA, 14 nt, Human
aauuccccacccug

SEQ ID NO: 1166566 - RNA, 12 nt, Human
aauuccccagau

SEQ ID NO: 1166567 - RNA, 15 nt, Human
aauuagccaagugug

SEQ ID NO: 1166568 - RNA, 11 nt, Human
aauuacaggaa

SEQ ID NO: 1166569 - RNA, 18 nt, Human
uaccugccaggaagccag

SEQ ID NO: 1166570 - RNA, 20 nt, Human
uaccugccaggaagccagca

SEQ ID NO: 1166571 - RNA, 23 nt, Human
uaccugccaggaagccagcaggc

SEQ ID NO: 1166572 - RNA, 10 nt, Human
uaccuguccc

SEQ ID NO: 1166573 - RNA, 13 nt, Human
uaccugucccccu

SEQ ID NO: 1166574 - RNA, 14 nt, Human
uaccugucccccug

SEQ ID NO: 1166575 - RNA, 16 nt, Human
uaccugucccccugac

SEQ ID NO: 1166576 - RNA, 17 nt, Human
uaccugucccccugaca

SEQ ID NO: 1166577 - RNA, 16 nt, Human
uagaugcaguucugaa

SEQ ID NO: 1166578 - RNA, 15 nt, Human
uagaugcaguucuga

SEQ ID NO: 1166579 - RNA, 19 nt, Human
uagcauggcugccaauggg

SEQ ID NO: 1166580 - RNA, 16 nt, Human
uagcauuuugcuaaau

SEQ ID NO: 1166581 - RNA, 18 nt, Human
uagcaugucgucaaagcu

SEQ ID NO: 1166582 - RNA, 22 nt, Human
uagcauuuugcuaaaugugaau

SEQ ID NO: 1166583 - RNA, 21 nt, Human
uagccaaggccaaaggaagca

SEQ ID NO: 1166584 - RNA, 11 nt, Human
uagccagagga

SEQ ID NO: 1166585 - RNA, 15 nt, Human
uagccagaggagaga

SEQ ID NO: 1166586 - RNA, 18 nt, Human
acaaauuuacagagacag

SEQ ID NO: 1166587 - RNA, 19 nt, Human
acaaauuuacagagacaga

SEQ ID NO: 1166588 - RNA, 23 nt, Human
acaacacucauugaccugaggcc

SEQ ID NO: 1166589 - RNA, 19 nt, Human
acaagaccacguuucuaaa

SEQ ID NO: 1166590 - RNA, 20 nt, Human
acaagacccaaaaggcagaa

SEQ ID NO: 1166591 - RNA, 19 nt, Human
acaagacccuugugguccc

SEQ ID NO: 1166592 - RNA, 18 nt, Human
acaaaaggauaaugaaua

SEQ ID NO: 1166593 - RNA, 11 nt, Human
acaaaagcaug

SEQ ID NO: 1166594 - RNA, 22 nt, Human
acaaaagcaugugagacugguu

SEQ ID NO: 1166595 - RNA, 22 nt, Human
acaaaggaugcccaaagaugca

SEQ ID NO: 1166596 - RNA, 22 nt, Human
uagaggagaaacuggaacucuc

SEQ ID NO: 1166597 - RNA, 15 nt, Human
uagauauaugcucug

SEQ ID NO: 1166598 - RNA, 19 nt, Human
uagauauaugcucugcaug

SEQ ID NO: 1166599 - RNA, 13 nt, Human
acaagacugcaca

SEQ ID NO: 1166600 - RNA, 14 nt, Human
acaagacugcacau

SEQ ID NO: 1166601 - RNA, 23 nt, Human
acaauacaucccuuaccugggaa

SEQ ID NO: 1166602 - RNA, 12 nt, Human
acaaugacuuac

SEQ ID NO: 1166603 - RNA, 17 nt, Human
acaaugacuuacuguac

SEQ ID NO: 1166604 - RNA, 18 nt, Human
acaaugacuuacuguaca

SEQ ID NO: 1166605 - RNA, 19 nt, Human
acaaugacuuacuguacau

SEQ ID NO: 1166606 - RNA, 19 nt, Human
uaggaaauauuuauuuuaa

SEQ ID NO: 1166607 - RNA, 18 nt, Human
uaggaaauauuuauuuua

SEQ ID NO: 1166608 - RNA, 16 nt, Human
uaggcauuugcugaau

SEQ ID NO: 1166609 - RNA, 20 nt, Human
uaggcauuugcugaauacag

SEQ ID NO: 1166610 - RNA, 16 nt, Human
acaccgggcacucaga

SEQ ID NO: 1166611 - RNA, 21 nt, Human
acaccucugcacaagcugcac

SEQ ID NO: 1166612 - RNA, 12 nt, Human
acacgaauauug

SEQ ID NO: 1166613 - RNA, 13 nt, Human
acacuaagagaga

SEQ ID NO: 1166614 - RNA, 14 nt, Human
acacuaagagagaa

SEQ ID NO: 1166615 - RNA, 15 nt, Human
acacucaaaagcugg

SEQ ID NO: 1166616 - RNA, 20 nt, Human
acacucacauuuauucugcu

SEQ ID NO: 1166617 - RNA, 22 nt, Human
acacucacauuuauucugcuca

SEQ ID NO: 1166618 - RNA, 20 nt, Human
uaguuccaccaucaagccac

SEQ ID NO: 1166619 - RNA, 21 nt, Human
acacaugagcaucaggccagg

SEQ ID NO: 1166620 - RNA, 18 nt, Human
acacaugauccugcaauu

SEQ ID NO: 1166621 - RNA, 18 nt, Human
acacaugcaaggucauuu

SEQ ID NO: 1166622 - RNA, 14 nt, Human
acacauuuuauuuu

SEQ ID NO: 1166623 - RNA, 19 nt, Human
acacauuuuauuuuauuau

SEQ ID NO: 1166624 - RNA, 20 nt, Human
acacauuuuauuuuauuaug

SEQ ID NO: 1166625 - RNA, 21 nt, Human
acacauuuuauuuuauuaugc

SEQ ID NO: 1166626 - RNA, 22 nt, Human
uagugaaacucguuaauuugua

SEQ ID NO: 1166627 - RNA, 23 nt, Human
uaguguuggagaagaacugaaau

SEQ ID NO: 1166628 - RNA, 18 nt, Human
acacaguauuacuucugc

SEQ ID NO: 1166629 - RNA, 19 nt, Human
acacaguauuacuucugcu

SEQ ID NO: 1166630 - RNA, 22 nt, Human
acacaguauuacuucugcuaca

SEQ ID NO: 1166631 - RNA, 22 nt, Human
acaaugcuguauuuuaaaagaa

SEQ ID NO: 1166632 - RNA, 21 nt, Human
acaaugcugugcccuaaagug

SEQ ID NO: 1166633 - RNA, 22 nt, Human
acaaugcugugcccuaaagugu

SEQ ID NO: 1166634 - RNA, 23 nt, Human
acaaugcugugcccuaaagugua

SEQ ID NO: 1166635 - RNA, 24 nt, Human
acaaugcugugcccuaaaguguau

SEQ ID NO: 1166636 - RNA, 17 nt, Human
acaaugugaaaagaaaa

SEQ ID NO: 1166637 - RNA, 19 nt, Human
acaaugugaaaagaaaaau

SEQ ID NO: 1166638 - RNA, 12 nt, Human
acacacacacac

SEQ ID NO: 1166639 - RNA, 13 nt, Human
acacacacacaca

SEQ ID NO: 1166640 - RNA, 14 nt, Human
acacacacacacac

SEQ ID NO: 1166641 - RNA, 16 nt, Human
acacacacacacacag

SEQ ID NO: 1166642 - RNA, 15 nt, Human
acacacacacacaca

SEQ ID NO: 1166643 - RNA, 11 nt, Human
acacacacaug

SEQ ID NO: 1166644 - RNA, 12 nt, Human
acacacacaugc

SEQ ID NO: 1166645 - RNA, 13 nt, Human
acacacacaugca

SEQ ID NO: 1166646 - RNA, 14 nt, Human
acacacacaugcau

SEQ ID NO: 1166647 - RNA, 15 nt, Human
acacacacaugcaua

SEQ ID NO: 1166648 - RNA, 16 nt, Human
acacacacaugcauac

SEQ ID NO: 1166649 - RNA, 22 nt, Human
acacacacgcgugcacacacca

SEQ ID NO: 1166650 - RNA, 14 nt, Human
acacacagcucugu

SEQ ID NO: 1166651 - RNA, 17 nt, Human
acacacagcucuguccu

SEQ ID NO: 1166652 - RNA, 19 nt, Human
acacacagcucuguccugg

SEQ ID NO: 1166653 - RNA, 14 nt, Human
acacaccagagccc

SEQ ID NO: 1166654 - RNA, 15 nt, Human
acacaccagagccca

SEQ ID NO: 1166655 - RNA, 20 nt, Human
acacaccagagcccaccuug

SEQ ID NO: 1166656 - RNA, 21 nt, Human
acacacgcgugcacacaccag

SEQ ID NO: 1166657 - RNA, 21 nt, Human
acacacugcauguuugugauu

SEQ ID NO: 1166658 - RNA, 20 nt, Human
acagagcccacgcccccacu

SEQ ID NO: 1166659 - RNA, 15 nt, Human
acagagcccacgccc

SEQ ID NO: 1166660 - RNA, 18 nt, Human
acagagcccacgccccca

SEQ ID NO: 1166661 - RNA, 19 nt, Human
acagagcccacgcccccac

SEQ ID NO: 1166662 - RNA, 17 nt, Human
acagcaaggagauuuac

SEQ ID NO: 1166663 - RNA, 21 nt, Human
acagcaaggagauuuacaacu

SEQ ID NO: 1166664 - RNA, 17 nt, Human
acagcccgggcucugcc

SEQ ID NO: 1166665 - RNA, 18 nt, Human
acagcccgggcucugccu

SEQ ID NO: 1166666 - RNA, 19 nt, Human
acagcccgggcucugccuc

SEQ ID NO: 1166667 - RNA, 20 nt, Human
acagcccgggcucugccucc

SEQ ID NO: 1166668 - RNA, 16 nt, Human
acagccucuuagaugc

SEQ ID NO: 1166669 - RNA, 23 nt, Human
uauggcuuuugugcauuaucuag

SEQ ID NO: 1166670 - RNA, 15 nt, Human
uaugcuuauacacuu

SEQ ID NO: 1166671 - RNA, 22 nt, Human
uaugcuuauacacuuacacuuu

SEQ ID NO: 1166672 - RNA, 17 nt, Human
uauggcuuuugugcauu

SEQ ID NO: 1166673 - RNA, 18 nt, Human
uauggcuuuugugcauua

SEQ ID NO: 1166674 - RNA, 21 nt, Human
uauggcuuuugugcauuaucu

SEQ ID NO: 1166675 - RNA, 16 nt, Human
uaugauuaaguaauga

SEQ ID NO: 1166676 - RNA, 20 nt, Human
uaugauuaaguaaugauaac

SEQ ID NO: 1166677 - RNA, 21 nt, Human
uaugauuaaguaaugauaacu

SEQ ID NO: 1166678 - RNA, 11 nt, Human
uaugcauuuga

SEQ ID NO: 1166679 - RNA, 23 nt, Human
uaugcauuugaaaauuuugaugu

SEQ ID NO: 1166680 - RNA, 24 nt, Human
uaugcauuugaaaauuuugauguu

SEQ ID NO: 1166681 - RNA, 19 nt, Human
uaugccccauucaacaucu

SEQ ID NO: 1166682 - RNA, 17 nt, Human
uaugccugggcagaagg

SEQ ID NO: 1166683 - RNA, 15 nt, Human
uauauuguuugcuaa

SEQ ID NO: 1166684 - RNA, 13 nt, Human
acagacccugccc

SEQ ID NO: 1166685 - RNA, 14 nt, Human
acagacccugcccu

SEQ ID NO: 1166686 - RNA, 15 nt, Human
acagacccugcccug

SEQ ID NO: 1166687 - RNA, 16 nt, Human
acagacccugcccugu

SEQ ID NO: 1166688 - RNA, 17 nt, Human
acagaaaauauacugua

SEQ ID NO: 1166689 - RNA, 18 nt, Human
acagaaaauauacuguaa

SEQ ID NO: 1166690 - RNA, 19 nt, Human
acagaaaauauacuguaaa

SEQ ID NO: 1166691 - RNA, 20 nt, Human
acagaaaauauacuguaaag

SEQ ID NO: 1166692 - RNA, 21 nt, Human
acagaaaauauacuguaaaga

SEQ ID NO: 1166693 - RNA, 20 nt, Human
acagaaaauggaagacagcu

SEQ ID NO: 1166694 - RNA, 17 nt, Human
acagaaaauucuucucc

SEQ ID NO: 1166695 - RNA, 18 nt, Human
acagaaaauucuucucca

SEQ ID NO: 1166696 - RNA, 14 nt, Human
acagaaauguacag

SEQ ID NO: 1166697 - RNA, 16 nt, Human
acagaaauguacagca

SEQ ID NO: 1166698 - RNA, 17 nt, Human
acagaaauguacagcaa

SEQ ID NO: 1166699 - RNA, 18 nt, Human
uaucaaguauuauaccuu

SEQ ID NO: 1166700 - RNA, 13 nt, Human
uaucucccccagc

SEQ ID NO: 1166701 - RNA, 14 nt, Human
uaucucccccagcc

SEQ ID NO: 1166702 - RNA, 16 nt, Human
uaucucccccagcccc

SEQ ID NO: 1166703 - RNA, 11 nt, Human
acagagaaagu

SEQ ID NO: 1166704 - RNA, 18 nt, Human
acagagaaaguacuucuc

SEQ ID NO: 1166705 - RNA, 13 nt, Human
acagcuaacaugg

SEQ ID NO: 1166706 - RNA, 14 nt, Human
acagcuaacaugga

SEQ ID NO: 1166707 - RNA, 15 nt, Human
acaggaaaagcugcu

SEQ ID NO: 1166708 - RNA, 16 nt, Human
acaggaaaagcugcug

SEQ ID NO: 1166709 - RNA, 17 nt, Human
acaggaaaagcugcuga

SEQ ID NO: 1166710 - RNA, 18 nt, Human
acaggaaaagcugcugac

SEQ ID NO: 1166711 - RNA, 13 nt, Human
acaggaaguacug

SEQ ID NO: 1166712 - RNA, 17 nt, Human
acaggaaguagaggagg

SEQ ID NO: 1166713 - RNA, 23 nt, Human
acaggaccagggauuuccaugau

SEQ ID NO: 1166714 - RNA, 16 nt, Human
acaggagugagcacua

SEQ ID NO: 1166715 - RNA, 14 nt, Human
acaggaucagucug

SEQ ID NO: 1166716 - RNA, 15 nt, Human
acaggaucagucuga

SEQ ID NO: 1166717 - RNA, 14 nt, Human
acaggcagguccag

SEQ ID NO: 1166718 - RNA, 16 nt, Human
acaggcagguccaggg

SEQ ID NO: 1166719 - RNA, 14 nt, Human
acaggcauguucuc

SEQ ID NO: 1166720 - RNA, 15 nt, Human
acaggcauguucucu

SEQ ID NO: 1166721 - RNA, 18 nt, Human
acaggcauguucucugag

SEQ ID NO: 1166722 - RNA, 19 nt, Human
acaggcauguucucugagg

SEQ ID NO: 1166723 - RNA, 20 nt, Human
acaggcauguucucugagga

SEQ ID NO: 1166724 - RNA, 22 nt, Human
acaggcauguucucugaggaca

SEQ ID NO: 1166725 - RNA, 20 nt, Human
uauguggaguucaucuugaa

SEQ ID NO: 1166726 - RNA, 15 nt, Human
uauuagaauaccaca

SEQ ID NO: 1166727 - RNA, 14 nt, Human
uauuacuguaagaa

SEQ ID NO: 1166728 - RNA, 13 nt, Human
uauuacuucugcu

SEQ ID NO: 1166729 - RNA, 14 nt, Human
uauuacuucugcua

SEQ ID NO: 1166730 - RNA, 14 nt, Human
uauucaggaagcuc

SEQ ID NO: 1166731 - RNA, 16 nt, Human
uauucaggaagcucag

SEQ ID NO: 1166732 - RNA, 20 nt, Human
uauucaguaauaacucuacc

SEQ ID NO: 1166733 - RNA, 23 nt, Human
acaggcugggcuucaguggcagc

SEQ ID NO: 1166734 - RNA, 12 nt, Human
acaggcugggcu

SEQ ID NO: 1166735 - RNA, 22 nt, Human
acaggcugggcuucaguggcag

SEQ ID NO: 1166736 - RNA, 20 nt, Human
acagggaggacgcucucugg

SEQ ID NO: 1166737 - RNA, 21 nt, Human
acagggaggacgcucucuggc

SEQ ID NO: 1166738 - RNA, 12 nt, Human
acagggcacacc

SEQ ID NO: 1166739 - RNA, 20 nt, Human
acagggcacaccgggcacuc

SEQ ID NO: 1166740 - RNA, 16 nt, Human
acagucaccucaugga

SEQ ID NO: 1166741 - RNA, 17 nt, Human
acagucaccucauggaa

SEQ ID NO: 1166742 - RNA, 18 nt, Human
acagucaccucauggaau

SEQ ID NO: 1166743 - RNA, 14 nt, Human
ucaaccagcagaug

SEQ ID NO: 1166744 - RNA, 20 nt, Human
ucaacugcaucaagauguga

SEQ ID NO: 1166745 - RNA, 14 nt, Human
ucaaauuucuaaau

SEQ ID NO: 1166746 - RNA, 13 nt, Human
ucaaauuucuaaa

SEQ ID NO: 1166747 - RNA, 14 nt, Human
acauuccugaugcu

SEQ ID NO: 1166748 - RNA, 18 nt, Human
ucaaauugugugaaaggu

SEQ ID NO: 1166749 - RNA, 23 nt, Human
acauguaauuaaguacuauguau

SEQ ID NO: 1166750 - RNA, 15 nt, Human
acauguccaagaagc

SEQ ID NO: 1166751 - RNA, 19 nt, Human
acauguccaagaagcccag

SEQ ID NO: 1166752 - RNA, 12 nt, Human
acagucccugcc

SEQ ID NO: 1166753 - RNA, 20 nt, Human
acaugagguacugagaguga

SEQ ID NO: 1166754 - RNA, 23 nt, Human
acaugagguacugagagugaaca

SEQ ID NO: 1166755 - RNA, 15 nt, Human
acaugcuacacacug

SEQ ID NO: 1166756 - RNA, 21 nt, Human
acaugcuacacacugcauguu

SEQ ID NO: 1166757 - RNA, 22 nt, Human
acaugcuacacacugcauguuu

SEQ ID NO: 1166758 - RNA, 14 nt, Human
acauggaaguacua

SEQ ID NO: 1166759 - RNA, 11 nt, Human
acaugggacau

SEQ ID NO: 1166760 - RNA, 14 nt, Human
acaugggacauuug

SEQ ID NO: 1166761 - RNA, 15 nt, Human
acaugggacauuugc

SEQ ID NO: 1166762 - RNA, 20 nt, Human
acaugggacauuugcucaug

SEQ ID NO: 1166763 - RNA, 21 nt, Human
acaugggacauuugcucaugg

SEQ ID NO: 1166764 - RNA, 15 nt, Human
acauguaauuaagua

SEQ ID NO: 1166765 - RNA, 17 nt, Human
acauguaauuaaguacu

SEQ ID NO: 1166766 - RNA, 19 nt, Human
acauguaauuaaguacuau

SEQ ID NO: 1166767 - RNA, 21 nt, Human
acauguaauuaaguacuaugu

SEQ ID NO: 1166768 - RNA, 22 nt, Human
acauguaauuaaguacuaugua

SEQ ID NO: 1166769 - RNA, 23 nt, Human
ucaaugaaugaaugaauggcuaa

SEQ ID NO: 1166770 - RNA, 15 nt, Human
ucaauauuucagaua

SEQ ID NO: 1166771 - RNA, 19 nt, Human
ucaauauuucagauaauca

SEQ ID NO: 1166772 - RNA, 23 nt, Human
ucaauauuucagauaaucacaau

SEQ ID NO: 1166773 - RNA, 22 nt, Human
ucaauaucuuuuuuuuaauaaa

SEQ ID NO: 1166774 - RNA, 18 nt, Human
acauuuuauuuuauuaug

SEQ ID NO: 1166775 - RNA, 19 nt, Human
acauuuuauuuuauuaugc

SEQ ID NO: 1166776 - RNA, 20 nt, Human
acauuuuauuuuauuaugca

SEQ ID NO: 1166777 - RNA, 21 nt, Human
acauuuuuaagugcugcauuu

SEQ ID NO: 1166778 - RNA, 22 nt, Human
acauuuuuaagugcugcauuua

SEQ ID NO: 1166779 - RNA, 23 nt, Human
acauuuuuaagugcugcauuuaa

SEQ ID NO: 1166780 - RNA, 14 nt, Human
acauuuuuuaaaug

SEQ ID NO: 1166781 - RNA, 16 nt, Human
acauuuuuuaaaugca

SEQ ID NO: 1166782 - RNA, 17 nt, Human
acauuuuuuaaaugcac

SEQ ID NO: 1166783 - RNA, 21 nt, Human
acauuuuuuaaaugcaccugg

SEQ ID NO: 1166784 - RNA, 20 nt, Human
ucacagaugggugcuuggag

SEQ ID NO: 1166785 - RNA, 13 nt, Human
ucacagccucuga

SEQ ID NO: 1166786 - RNA, 20 nt, Human
ucacaguucucuccuucuuc

SEQ ID NO: 1166787 - RNA, 17 nt, Human
ucacaaaggaugcccaa

SEQ ID NO: 1166788 - RNA, 16 nt, Human
ucaauucuugccaaau

SEQ ID NO: 1166789 - RNA, 17 nt, Human
accacaucuugcucugc

SEQ ID NO: 1166790 - RNA, 18 nt, Human
accacaucuugcucugcu

SEQ ID NO: 1166791 - RNA, 19 nt, Human
accacaucuugcucugcug

SEQ ID NO: 1166792 - RNA, 18 nt, Human
accacaugugcacaugca

SEQ ID NO: 1166793 - RNA, 15 nt, Human
accaccacacccagc

SEQ ID NO: 1166794 - RNA, 20 nt, Human
accaccacacccagcccacu

SEQ ID NO: 1166795 - RNA, 12 nt, Human
ucaccucaugga

SEQ ID NO: 1166796 - RNA, 13 nt, Human
ucaccucauggaa

SEQ ID NO: 1166797 - RNA, 14 nt, Human
ucaccucauggaau

SEQ ID NO: 1166798 - RNA, 16 nt, Human
accacuacauucuguu

SEQ ID NO: 1166799 - RNA, 17 nt, Human
accacuacauucuguua

SEQ ID NO: 1166800 - RNA, 22 nt, Human
accagcgugugacuacuccccc

SEQ ID NO: 1166801 - RNA, 17 nt, Human
ucacuauguugcccagg

SEQ ID NO: 1166802 - RNA, 17 nt, Human
ucacugagacagcccgg

SEQ ID NO: 1166803 - RNA, 21 nt, Human
ucacugagacagcccgggcuc

SEQ ID NO: 1166804 - RNA, 22 nt, Human
ucacugagacagcccgggcucu

SEQ ID NO: 1166805 - RNA, 14 nt, Human
ucacugcagccuca

SEQ ID NO: 1166806 - RNA, 15 nt, Human
ucacugcagccucaa

SEQ ID NO: 1166807 - RNA, 23 nt, Human
ucacuguugcccaggcuggcgug

SEQ ID NO: 1166808 - RNA, 23 nt, Human
ucacuugaacccgggaggcagag

SEQ ID NO: 1166809 - RNA, 10 nt, Human
ucacuugagu

SEQ ID NO: 1166810 - RNA, 14 nt, Human
accagucugacugu

SEQ ID NO: 1166811 - RNA, 15 nt, Human
accaguguuguggau

SEQ ID NO: 1166812 - RNA, 17 nt, Human
accaguguuguggauuu

SEQ ID NO: 1166813 - RNA, 23 nt, Human
acccaggagccccgaggccuucu

SEQ ID NO: 1166814 - RNA, 13 nt, Human
accccagccccaa

SEQ ID NO: 1166815 - RNA, 22 nt, Human
accccagccccaaaacucuccu

SEQ ID NO: 1166816 - RNA, 21 nt, Human
ucagauuugaacucuucaauc

SEQ ID NO: 1166817 - RNA, 12 nt, Human
ucagauuugaac

SEQ ID NO: 1166818 - RNA, 18 nt, Human
accaguguuguggauuua

SEQ ID NO: 1166819 - RNA, 15 nt, Human
ucagcaaaagaugcu

SEQ ID NO: 1166820 - RNA, 18 nt, Human
accccaucucuacaaaaa

SEQ ID NO: 1166821 - RNA, 19 nt, Human
ucagcggggacagcuccuu

SEQ ID NO: 1166822 - RNA, 20 nt, Human
ucagcggggacagcuccuuc

SEQ ID NO: 1166823 - RNA, 21 nt, Human
ucagcggggacagcuccuucu

SEQ ID NO: 1166824 - RNA, 23 nt, Human
ucagcggggacagcuccuucugu

SEQ ID NO: 1166825 - RNA, 12 nt, Human
ucagcuccagcu

SEQ ID NO: 1166826 - RNA, 16 nt, Human
acccugaaagcccuga

SEQ ID NO: 1166827 - RNA, 18 nt, Human
acccugaaagcccugagc

SEQ ID NO: 1166828 - RNA, 14 nt, Human
acccugaggcccag

SEQ ID NO: 1166829 - RNA, 15 nt, Human
acccugaggcccaga

SEQ ID NO: 1166830 - RNA, 16 nt, Human
acccugaggcccagag

SEQ ID NO: 1166831 - RNA, 17 nt, Human
acccugaggcccagagg

SEQ ID NO: 1166832 - RNA, 15 nt, Human
acccugcccuguggg

SEQ ID NO: 1166833 - RNA, 17 nt, Human
acccugcccugugggcc

SEQ ID NO: 1166834 - RNA, 22 nt, Human
acccugcccugugggcccccaa

SEQ ID NO: 1166835 - RNA, 17 nt, Human
acccuugccgucuaccu

SEQ ID NO: 1166836 - RNA, 23 nt, Human
acccuuguggucccaccccacac

SEQ ID NO: 1166837 - RNA, 15 nt, Human
accgaaaacguggcu

SEQ ID NO: 1166838 - RNA, 14 nt, Human
acccggccccugcu

SEQ ID NO: 1166839 - RNA, 15 nt, Human
acccggccccugcug

SEQ ID NO: 1166840 - RNA, 16 nt, Human
acccggccccugcugg

SEQ ID NO: 1166841 - RNA, 21 nt, Human
ucagguaacaggcagauacag

SEQ ID NO: 1166842 - RNA, 22 nt, Human
ucagguaacaggcagauacagg

SEQ ID NO: 1166843 - RNA, 23 nt, Human
ucagguaacaggcagauacagga

SEQ ID NO: 1166844 - RNA, 17 nt, Human
ucaggguuggccccugc

SEQ ID NO: 1166845 - RNA, 17 nt, Human
acccggccccugcuggu

SEQ ID NO: 1166846 - RNA, 20 nt, Human
acccggccccugcugguuca

SEQ ID NO: 1166847 - RNA, 22 nt, Human
acccggccccugcugguucagg

SEQ ID NO: 1166848 - RNA, 12 nt, Human
acccgggaaggg

SEQ ID NO: 1166849 - RNA, 13 nt, Human
acccgggaagggg

SEQ ID NO: 1166850 - RNA, 17 nt, Human
acccgggaggcagaggu

SEQ ID NO: 1166851 - RNA, 14 nt, Human
ucagcuccagcuca

SEQ ID NO: 1166852 - RNA, 15 nt, Human
ucagcuccagcucac

SEQ ID NO: 1166853 - RNA, 21 nt, Human
ucagcuuguaaauagcucagg

SEQ ID NO: 1166854 - RNA, 22 nt, Human
ucagcuuguaaauagcucaggu

SEQ ID NO: 1166855 - RNA, 21 nt, Human
ucaggccaggcccucugccca

SEQ ID NO: 1166856 - RNA, 22 nt, Human
ucaggccaggcccucugcccac

SEQ ID NO: 1166857 - RNA, 23 nt, Human
ucaggccaggcccucugcccacu

SEQ ID NO: 1166858 - RNA, 19 nt, Human
ucagggucccugguggcag

SEQ ID NO: 1166859 - RNA, 16 nt, Human
ucaggguuggccccug

SEQ ID NO: 1166860 - RNA, 9 nt, Human
ucagugccu

SEQ ID NO: 1166861 - RNA, 10 nt, Human
ucagugccuu

SEQ ID NO: 1166862 - RNA, 11 nt, Human
ucagugccuua

SEQ ID NO: 1166863 - RNA, 12 nt, Human
ucagugccuuau

SEQ ID NO: 1166864 - RNA, 14 nt, Human
ucagugccuuaugg

SEQ ID NO: 1166865 - RNA, 15 nt, Human
ucagugccuuaugga

SEQ ID NO: 1166866 - RNA, 17 nt, Human
accgaaaacguggcugc

SEQ ID NO: 1166867 - RNA, 19 nt, Human
accgaaaacguggcugcuu

SEQ ID NO: 1166868 - RNA, 20 nt, Human
accgaaaacguggcugcuuc

SEQ ID NO: 1166869 - RNA, 12 nt, Human
ucagugccacua

SEQ ID NO: 1166870 - RNA, 12 nt, Human
ucaguggcagcu

SEQ ID NO: 1166871 - RNA, 13 nt, Human
ucaguggcagcug

SEQ ID NO: 1166872 - RNA, 16 nt, Human
ucagugccuuauggaa

SEQ ID NO: 1166873 - RNA, 18 nt, Human
ucagugccuuauggaaca

SEQ ID NO: 1166874 - RNA, 11 nt, Human
ucaguggcagc

SEQ ID NO: 1166875 - RNA, 15 nt, Human
ucaguuuuugugaaa

SEQ ID NO: 1166876 - RNA, 17 nt, Human
ucaguuuuugugaaaag

SEQ ID NO: 1166877 - RNA, 16 nt, Human
ucauauuuacuucuua

SEQ ID NO: 1166878 - RNA, 15 nt, Human
ucauauuuacuucuu

SEQ ID NO: 1166879 - RNA, 23 nt, Human
ucauauuuacuucuuauacauuu

SEQ ID NO: 1166880 - RNA, 18 nt, Human
ucauauaagauucauauu

SEQ ID NO: 1166881 - RNA, 21 nt, Human
ucauaguaugguggcuggguu

SEQ ID NO: 1166882 - RNA, 14 nt, Human
ucauaaccuagccu

SEQ ID NO: 1166883 - RNA, 15 nt, Human
ucauaguaugguggc

SEQ ID NO: 1166884 - RNA, 18 nt, Human
ucauaguaugguggcugg

SEQ ID NO: 1166885 - RNA, 19 nt, Human
ucauaguaugguggcuggg

SEQ ID NO: 1166886 - RNA, 12 nt, Human
accuccugccuc

SEQ ID NO: 1166887 - RNA, 12 nt, Human
accgcagacagg

SEQ ID NO: 1166888 - RNA, 16 nt, Human
accgcagacaggacca

SEQ ID NO: 1166889 - RNA, 17 nt, Human
accgcagacaggaccag

SEQ ID NO: 1166890 - RNA, 16 nt, Human
accuagggugauauua

SEQ ID NO: 1166891 - RNA, 20 nt, Human
accucccacaaaggagagcu

SEQ ID NO: 1166892 - RNA, 21 nt, Human
uccacugugccaugugccagg

SEQ ID NO: 1166893 - RNA, 22 nt, Human
uccacugguucuucuuggucuc

SEQ ID NO: 1166894 - RNA, 13 nt, Human
accuuuuuuauac

SEQ ID NO: 1166895 - RNA, 14 nt, Human
accuuuuuuauaca

SEQ ID NO: 1166896 - RNA, 19 nt, Human
accuugaaaacuuuaugcu

SEQ ID NO: 1166897 - RNA, 20 nt, Human
accuugaacuggguacuugu

SEQ ID NO: 1166898 - RNA, 15 nt, Human
accuugaaugaugcc

SEQ ID NO: 1166899 - RNA, 18 nt, Human
accuuuguccccaccgca

SEQ ID NO: 1166900 - RNA, 14 nt, Human
uccagaauuuccca

SEQ ID NO: 1166901 - RNA, 15 nt, Human
uccagaauuucccaa

SEQ ID NO: 1166902 - RNA, 16 nt, Human
uccagaauuucccaaa

SEQ ID NO: 1166903 - RNA, 11 nt, Human
uccagccuggg

SEQ ID NO: 1166904 - RNA, 10 nt, Human
uccaggcucc

SEQ ID NO: 1166905 - RNA, 12 nt, Human
uccaggcuccuu

SEQ ID NO: 1166906 - RNA, 22 nt, Human
uccaggcuccuuuagcgcccag

SEQ ID NO: 1166907 - RNA, 20 nt, Human
uccaggcugggagagccuuc

SEQ ID NO: 1166908 - RNA, 21 nt, Human
uccaggcugggagagccuucc

SEQ ID NO: 1166909 - RNA, 23 nt, Human
uccaggcugggagagccuuccag

SEQ ID NO: 1166910 - RNA, 14 nt, Human
uccaggcuguaucc

SEQ ID NO: 1166911 - RNA, 15 nt, Human
acgaauauugcugau

SEQ ID NO: 1166912 - RNA, 18 nt, Human
acgaauauugcugauggu

SEQ ID NO: 1166913 - RNA, 11 nt, Human
acgcucucugg

SEQ ID NO: 1166914 - RNA, 14 nt, Human
acgcucucuggccu

SEQ ID NO: 1166915 - RNA, 13 nt, Human
acgcuggaccuug

SEQ ID NO: 1166916 - RNA, 20 nt, Human
acgcuggaccuugaacuggg

SEQ ID NO: 1166917 - RNA, 23 nt, Human
acgcuggaccuugaacuggguac

SEQ ID NO: 1166918 - RNA, 15 nt, Human
acgcuggagugcagu

SEQ ID NO: 1166919 - RNA, 16 nt, Human
acgcuggagugcagug

SEQ ID NO: 1166920 - RNA, 17 nt, Human
acgcuggagugcaguga

SEQ ID NO: 1166921 - RNA, 18 nt, Human
acgcuggagugcagugag

SEQ ID NO: 1166922 - RNA, 23 nt, Human
acggagucccaccuuggcugcag

SEQ ID NO: 1166923 - RNA, 21 nt, Human
acgaauauugcugauggugca

SEQ ID NO: 1166924 - RNA, 21 nt, Human
acgcuacccgggaagggggcu

SEQ ID NO: 1166925 - RNA, 20 nt, Human
acgcgugcacacaccagagc

SEQ ID NO: 1166926 - RNA, 12 nt, Human
acggccaggcca

SEQ ID NO: 1166927 - RNA, 13 nt, Human
acggccaggccag

SEQ ID NO: 1166928 - RNA, 16 nt, Human
acggcucacugcagcc

SEQ ID NO: 1166929 - RNA, 17 nt, Human
acggcucacugcagccu

SEQ ID NO: 1166930 - RNA, 18 nt, Human
acggcucacugcagccuc

SEQ ID NO: 1166931 - RNA, 18 nt, Human
acggcuuuuacuuaaacc

SEQ ID NO: 1166932 - RNA, 14 nt, Human
uccaguaucuugaa

SEQ ID NO: 1166933 - RNA, 15 nt, Human
uccaguaucuugaag

SEQ ID NO: 1166934 - RNA, 16 nt, Human
uccaguaucuugaaga

SEQ ID NO: 1166935 - RNA, 18 nt, Human
uccaguaucuugaagacu

SEQ ID NO: 1166936 - RNA, 18 nt, Human
uccagugagacagcucug

SEQ ID NO: 1166937 - RNA, 15 nt, Human
uccagugaggcucug

SEQ ID NO: 1166938 - RNA, 16 nt, Human
uccagugaggcucugc

SEQ ID NO: 1166939 - RNA, 17 nt, Human
uccagugaggcucugcc

SEQ ID NO: 1166940 - RNA, 22 nt, Human
uccagugaggcucugcccuugg

SEQ ID NO: 1166941 - RNA, 23 nt, Human
uccagugaggcucugcccuuggu

SEQ ID NO: 1166942 - RNA, 13 nt, Human
acguugugcauuu

SEQ ID NO: 1166943 - RNA, 14 nt, Human
acguugugcauuug

SEQ ID NO: 1166944 - RNA, 15 nt, Human
acguugugcauuugg

SEQ ID NO: 1166945 - RNA, 16 nt, Human
acguuucuaaaggcua

SEQ ID NO: 1166946 - RNA, 18 nt, Human
acguggcugcuucaagga

SEQ ID NO: 1166947 - RNA, 19 nt, Human
acguggcugcuucaaggau

SEQ ID NO: 1166948 - RNA, 21 nt, Human
acguggcugcuucaaggaucc

SEQ ID NO: 1166949 - RNA, 23 nt, Human
acguggcugcuucaaggauccug

SEQ ID NO: 1166950 - RNA, 12 nt, Human
uccauccugagg

SEQ ID NO: 1166951 - RNA, 15 nt, Human
uccauccugaggcuc

SEQ ID NO: 1166952 - RNA, 19 nt, Human
uccauccugaggcuccacu

SEQ ID NO: 1166953 - RNA, 15 nt, Human
acuaauuuuaaaaug

SEQ ID NO: 1166954 - RNA, 22 nt, Human
acguuucuaaaggcuaccuuug

SEQ ID NO: 1166955 - RNA, 16 nt, Human
ucccagauacuugggg

SEQ ID NO: 1166956 - RNA, 18 nt, Human
ucccagauacuugggggg

SEQ ID NO: 1166957 - RNA, 13 nt, Human
ucccccagcccca

SEQ ID NO: 1166958 - RNA, 15 nt, Human
ucccccagccccauc

SEQ ID NO: 1166959 - RNA, 16 nt, Human
ucccccagccccaucc

SEQ ID NO: 1166960 - RNA, 17 nt, Human
ucccccagccccauccu

SEQ ID NO: 1166961 - RNA, 20 nt, Human
uccccaggaggccagccuug

SEQ ID NO: 1166962 - RNA, 21 nt, Human
uccccaggaggccagccuuga

SEQ ID NO: 1166963 - RNA, 23 nt, Human
uccccaggaggccagccuugacc

SEQ ID NO: 1166964 - RNA, 23 nt, Human
uccccacccugaaagcccugagc

SEQ ID NO: 1166965 - RNA, 15 nt, Human
uccccaccgcagaca

SEQ ID NO: 1166966 - RNA, 16 nt, Human
uccccaccgcagacag

SEQ ID NO: 1166967 - RNA, 18 nt, Human
uccccaggaggccagccu

SEQ ID NO: 1166968 - RNA, 20 nt, Human
acuauagccuaggugacaga

SEQ ID NO: 1166969 - RNA, 22 nt, Human
acuauagccuaggugacagagu

SEQ ID NO: 1166970 - RNA, 22 nt, Human
acuauauuguuugcuaagcauu

SEQ ID NO: 1166971 - RNA, 21 nt, Human
acuaucuaaauguugaaagau

SEQ ID NO: 1166972 - RNA, 15 nt, Human
acuaucucauuucca

SEQ ID NO: 1166973 - RNA, 16 nt, Human
acuaucucauuuccaa

SEQ ID NO: 1166974 - RNA, 17 nt, Human
acuaucucauuuccaag

SEQ ID NO: 1166975 - RNA, 22 nt, Human
acuauggcccuggccuagcaua

SEQ ID NO: 1166976 - RNA, 15 nt, Human
acuauguugcccagg

SEQ ID NO: 1166977 - RNA, 16 nt, Human
acuauguugcccaggc

SEQ ID NO: 1166978 - RNA, 17 nt, Human
acuauguugcccaggca

SEQ ID NO: 1166979 - RNA, 16 nt, Human
acucaaugcacugaca

SEQ ID NO: 1166980 - RNA, 16 nt, Human
acucaccccagcccca

SEQ ID NO: 1166981 - RNA, 14 nt, Human
acucaccccagccc

SEQ ID NO: 1166982 - RNA, 15 nt, Human
acucaccccagcccc

SEQ ID NO: 1166983 - RNA, 13 nt, Human
acucaccccagcc

SEQ ID NO: 1166984 - RNA, 14 nt, Human
acuccugcaggcag

SEQ ID NO: 1166985 - RNA, 15 nt, Human
acuccugcaggcagc

SEQ ID NO: 1166986 - RNA, 16 nt, Human
acuccugcaggcagcc

SEQ ID NO: 1166987 - RNA, 22 nt, Human
acuccugcaggcagccaggcca

SEQ ID NO: 1166988 - RNA, 17 nt, Human
acuccugcaggcagcca

SEQ ID NO: 1166989 - RNA, 11 nt, Human
acuccuggccu

SEQ ID NO: 1166990 - RNA, 17 nt, Human
ucccugguggcagcuca

SEQ ID NO: 1166991 - RNA, 18 nt, Human
ucccugguggcagcucac

SEQ ID NO: 1166992 - RNA, 19 nt, Human
ucccugguggcagcucacc

SEQ ID NO: 1166993 - RNA, 20 nt, Human
ucccugguggcagcucaccu

SEQ ID NO: 1166994 - RNA, 21 nt, Human
ucccugguggcagcucaccuc

SEQ ID NO: 1166995 - RNA, 13 nt, Human
uccuacucugugu

SEQ ID NO: 1166996 - RNA, 14 nt, Human
uccuacucuguguc

SEQ ID NO: 1166997 - RNA, 15 nt, Human
uccuacucuguguca

SEQ ID NO: 1166998 - RNA, 13 nt, Human
uccuaggcauuug

SEQ ID NO: 1166999 - RNA, 14 nt, Human
uccuaggcauuugc

SEQ ID NO: 1167000 - RNA, 13 nt, Human
acuccuggccuca

SEQ ID NO: 1167001 - RNA, 14 nt, Human
acuccuggccucaa

SEQ ID NO: 1167002 - RNA, 22 nt, Human
ucccugguggcagcucaccucu

SEQ ID NO: 1167003 - RNA, 23 nt, Human
ucccugguggcagcucaccucuc

SEQ ID NO: 1167004 - RNA, 19 nt, Human
ucccuuggauuguccccga

SEQ ID NO: 1167005 - RNA, 20 nt, Human
ucccuuggauuguccccgac

SEQ ID NO: 1167006 - RNA, 12 nt, Human
acuccuggccuc

SEQ ID NO: 1167007 - RNA, 16 nt, Human
ucccuuugacgccauc

SEQ ID NO: 1167008 - RNA, 18 nt, Human
ucccuuugacgccauccc

SEQ ID NO: 1167009 - RNA, 19 nt, Human
ucccuuugacgccauccca

SEQ ID NO: 1167010 - RNA, 21 nt, Human
ucccuuugacgccaucccagc

SEQ ID NO: 1167011 - RNA, 19 nt, Human
ucccuuuuuuggcugcuga

SEQ ID NO: 1167012 - RNA, 20 nt, Human
ucccuuuuuuggcugcugaa

SEQ ID NO: 1167013 - RNA, 22 nt, Human
ucccuuuuuuggcugcugaagg

SEQ ID NO: 1167014 - RNA, 23 nt, Human
ucccuuuuuuggcugcugaaggc

SEQ ID NO: 1167015 - RNA, 13 nt, Human
acucuggcagcuc

SEQ ID NO: 1167016 - RNA, 15 nt, Human
acucuggcagcucag

SEQ ID NO: 1167017 - RNA, 16 nt, Human
acucuccuuggugucg

SEQ ID NO: 1167018 - RNA, 23 nt, Human
acucuccuuggugucgggcauga

SEQ ID NO: 1167019 - RNA, 22 nt, Human
acucugagacucgcgacaaugc

SEQ ID NO: 1167020 - RNA, 23 nt, Human
acuccuugaaaacacuguucucu

SEQ ID NO: 1167021 - RNA, 24 nt, Human
acuccuugaaaacacuguucucug

SEQ ID NO: 1167022 - RNA, 14 nt, Human
acucuccuccagag

SEQ ID NO: 1167023 - RNA, 17 nt, Human
acucuccuccagaguca

SEQ ID NO: 1167024 - RNA, 12 nt, Human
acucuccucugc

SEQ ID NO: 1167025 - RNA, 13 nt, Human
acucuccucugcu

SEQ ID NO: 1167026 - RNA, 14 nt, Human
acucuccucugcug

SEQ ID NO: 1167027 - RNA, 16 nt, Human
acucuccucugcugcu

SEQ ID NO: 1167028 - RNA, 18 nt, Human
acucuccuggaaauauua

SEQ ID NO: 1167029 - RNA, 15 nt, Human
acucuccuugguguc

SEQ ID NO: 1167030 - RNA, 22 nt, Human
uccucauaguaugguggcuggg

SEQ ID NO: 1167031 - RNA, 23 nt, Human
uccucauacccacccccacccaa

SEQ ID NO: 1167032 - RNA, 21 nt, Human
acucuuaagaagacugcauua

SEQ ID NO: 1167033 - RNA, 16 nt, Human
acucuggcagcucaga

SEQ ID NO: 1167034 - RNA, 14 nt, Human
acucuugaccucag

SEQ ID NO: 1167035 - RNA, 15 nt, Human
acucuugaccucagg

SEQ ID NO: 1167036 - RNA, 16 nt, Human
acucuugaccucaggu

SEQ ID NO: 1167037 - RNA, 22 nt, Human
uccucuuuggucuacacugugc

SEQ ID NO: 1167038 - RNA, 23 nt, Human
uccucuuuggucuacacugugcu

SEQ ID NO: 1167039 - RNA, 11 nt, Human
uccucccuccc

SEQ ID NO: 1167040 - RNA, 14 nt, Human
uccucccucccucu

SEQ ID NO: 1167041 - RNA, 11 nt, Human
uccucuuucca

SEQ ID NO: 1167042 - RNA, 12 nt, Human
uccucuuuccau

SEQ ID NO: 1167043 - RNA, 19 nt, Human
uccucuuuccaucuacccu

SEQ ID NO: 1167044 - RNA, 15 nt, Human
uccucccucccucuu

SEQ ID NO: 1167045 - RNA, 19 nt, Human
uccucuuuggucuacacug

SEQ ID NO: 1167046 - RNA, 21 nt, Human
uccucuuuggucuacacugug

SEQ ID NO: 1167047 - RNA, 19 nt, Human
acucuuucuauuguuucuu

SEQ ID NO: 1167048 - RNA, 22 nt, Human
acugagacagcccgggcucugc

SEQ ID NO: 1167049 - RNA, 23 nt, Human
acugagacagcccgggcucugcc

SEQ ID NO: 1167050 - RNA, 18 nt, Human
acugagagugaacaaauu

SEQ ID NO: 1167051 - RNA, 15 nt, Human
acugagacagcccgg

SEQ ID NO: 1167052 - RNA, 18 nt, Human
acugagacagcccgggcu

SEQ ID NO: 1167053 - RNA, 21 nt, Human
acugagacagcccgggcucug

SEQ ID NO: 1167054 - RNA, 12 nt, Human
acugaagaagca

SEQ ID NO: 1167055 - RNA, 13 nt, Human
acugacucuuaag

SEQ ID NO: 1167056 - RNA, 14 nt, Human
acugacucuuaaga

SEQ ID NO: 1167057 - RNA, 15 nt, Human
acugacucuuaagaa

SEQ ID NO: 1167058 - RNA, 16 nt, Human
acugacucuuaagaag

SEQ ID NO: 1167059 - RNA, 17 nt, Human
acugacucuuaagaaga

SEQ ID NO: 1167060 - RNA, 18 nt, Human
acugacucuuaagaagac

SEQ ID NO: 1167061 - RNA, 20 nt, Human
acugacucuuaagaagacug

SEQ ID NO: 1167062 - RNA, 13 nt, Human
acugauaaagaug

SEQ ID NO: 1167063 - RNA, 21 nt, Human
acugauaaagaugagugagca

SEQ ID NO: 1167064 - RNA, 14 nt, Human
acugcaccgggcca

SEQ ID NO: 1167065 - RNA, 16 nt, Human
acugcaccgggccaca

SEQ ID NO: 1167066 - RNA, 20 nt, Human
acugcacuauagccuaggug

SEQ ID NO: 1167067 - RNA, 13 nt, Human
acugcacuguuuu

SEQ ID NO: 1167068 - RNA, 19 nt, Human
uccugaugcuucuucagag

SEQ ID NO: 1167069 - RNA, 20 nt, Human
uccugaugcuucuucagaga

SEQ ID NO: 1167070 - RNA, 21 nt, Human
uccugaugcuucuucagagac

SEQ ID NO: 1167071 - RNA, 21 nt, Human
acugcacuauagccuagguga

SEQ ID NO: 1167072 - RNA, 14 nt, Human
acugcacuccagcc

SEQ ID NO: 1167073 - RNA, 17 nt, Human
acugcacuccagccugg

SEQ ID NO: 1167074 - RNA, 18 nt, Human
acugcacuccagccuggg

SEQ ID NO: 1167075 - RNA, 19 nt, Human
acugcacuccagccugggu

SEQ ID NO: 1167076 - RNA, 20 nt, Human
acugcacuccagccugggug

SEQ ID NO: 1167077 - RNA, 12 nt, Human
uccugcaggcag

SEQ ID NO: 1167078 - RNA, 13 nt, Human
uccugcaggcagc

SEQ ID NO: 1167079 - RNA, 14 nt, Human
uccugcaggcagcc

SEQ ID NO: 1167080 - RNA, 15 nt, Human
uccugcaggcagcca

SEQ ID NO: 1167081 - RNA, 13 nt, Human
uccugcugggcag

SEQ ID NO: 1167082 - RNA, 15 nt, Human
uccuggaaauauuaa

SEQ ID NO: 1167083 - RNA, 16 nt, Human
uccuggaaaucagggu

SEQ ID NO: 1167084 - RNA, 12 nt, Human
uccugggaguga

SEQ ID NO: 1167085 - RNA, 14 nt, Human
uccugggagugagc

SEQ ID NO: 1167086 - RNA, 17 nt, Human
uccugggagugagcugg

SEQ ID NO: 1167087 - RNA, 19 nt, Human
ucuacccagcgagcccugg

SEQ ID NO: 1167088 - RNA, 21 nt, Human
ucuacagaggccaugggccuc

SEQ ID NO: 1167089 - RNA, 18 nt, Human
uccugggagugagcuggu

SEQ ID NO: 1167090 - RNA, 20 nt, Human
ucuacccagcgagcccuggu

SEQ ID NO: 1167091 - RNA, 14 nt, Human
ucuacccaggugcu

SEQ ID NO: 1167092 - RNA, 19 nt, Human
ucuacccuggcacuauaau

SEQ ID NO: 1167093 - RNA, 21 nt, Human
ucuacccuggcacuauaaugu

SEQ ID NO: 1167094 - RNA, 16 nt, Human
acuguucucugcccuc

SEQ ID NO: 1167095 - RNA, 17 nt, Human
acuguucucugcccucc

SEQ ID NO: 1167096 - RNA, 18 nt, Human
acuguucucugcccucca

SEQ ID NO: 1167097 - RNA, 19 nt, Human
acuguucucugcccuccaa

SEQ ID NO: 1167098 - RNA, 22 nt, Human
acuuacuguacaugaaaacaca

SEQ ID NO: 1167099 - RNA, 17 nt, Human
acuuacacuuuaugcac

SEQ ID NO: 1167100 - RNA, 21 nt, Human
acuuacuguacaugaaaacac

SEQ ID NO: 1167101 - RNA, 15 nt, Human
acuuagguguggggg

SEQ ID NO: 1167102 - RNA, 12 nt, Human
acuguugcccag

SEQ ID NO: 1167103 - RNA, 13 nt, Human
acuuaagcacacu

SEQ ID NO: 1167104 - RNA, 19 nt, Human
acuuaaucuaaauggaacc

SEQ ID NO: 1167105 - RNA, 22 nt, Human
acuuaaucuaaauggaaccacu

SEQ ID NO: 1167106 - RNA, 16 nt, Human
acuuacacuuuaugca

SEQ ID NO: 1167107 - RNA, 16 nt, Human
acuucaucccucuggg

SEQ ID NO: 1167108 - RNA, 13 nt, Human
ucuagauacugua

SEQ ID NO: 1167109 - RNA, 18 nt, Human
ucuagcauggcugccaau

SEQ ID NO: 1167110 - RNA, 13 nt, Human
ucuagccagagga

SEQ ID NO: 1167111 - RNA, 17 nt, Human
ucuaggaaauauuuauu

SEQ ID NO: 1167112 - RNA, 12 nt, Human
ucuaggaagacu

SEQ ID NO: 1167113 - RNA, 22 nt, Human
ucuaguuguuugauucagacag

SEQ ID NO: 1167114 - RNA, 23 nt, Human
ucuaguuguuugauucagacagc

SEQ ID NO: 1167115 - RNA, 21 nt, Human
ucuaguuugauuaaauucuug

SEQ ID NO: 1167116 - RNA, 22 nt, Human
ucuaguuugauuaaauucuugc

SEQ ID NO: 1167117 - RNA, 14 nt, Human
ucucaccuccugcu

SEQ ID NO: 1167118 - RNA, 15 nt, Human
ucucaccuccugcug

SEQ ID NO: 1167119 - RNA, 16 nt, Human
ucucaccuccugcugg

SEQ ID NO: 1167120 - RNA, 17 nt, Human
ucucaccuccugcuggg

SEQ ID NO: 1167121 - RNA, 19 nt, Human
ucucaccuccugcugggca

SEQ ID NO: 1167122 - RNA, 17 nt, Human
ucucacuauguugccca

SEQ ID NO: 1167123 - RNA, 19 nt, Human
ucucacuauguugcccagg

SEQ ID NO: 1167124 - RNA, 17 nt, Human
ucucaggccagcugcuu

SEQ ID NO: 1167125 - RNA, 18 nt, Human
ucucaggccagcugcuug

SEQ ID NO: 1167126 - RNA, 21 nt, Human
ucucaggccagcugcuugggc

SEQ ID NO: 1167127 - RNA, 14 nt, Human
ucucauuugucaca

SEQ ID NO: 1167128 - RNA, 15 nt, Human
ucucauuuccaagca

SEQ ID NO: 1167129 - RNA, 16 nt, Human
ucucauuugucacaca

SEQ ID NO: 1167130 - RNA, 13 nt, Human
ucuccaaaauaaa

SEQ ID NO: 1167131 - RNA, 16 nt, Human
ucuccaagcaggacau

SEQ ID NO: 1167132 - RNA, 10 nt, Human
ucucaggcca

SEQ ID NO: 1167133 - RNA, 12 nt, Human
ucucaggccaaa

SEQ ID NO: 1167134 - RNA, 12 nt, Human
ucucaggccagc

SEQ ID NO: 1167135 - RNA, 13 nt, Human
ucucaggccagcu

SEQ ID NO: 1167136 - RNA, 18 nt, Human
ucucaccuccugcugggc

SEQ ID NO: 1167137 - RNA, 20 nt, Human
ucucacuauguugcccaggc

SEQ ID NO: 1167138 - RNA, 21 nt, Human
ucucacuauguugcccaggca

SEQ ID NO: 1167139 - RNA, 22 nt, Human
ucucacuauguugcccaggcag

SEQ ID NO: 1167140 - RNA, 23 nt, Human
ucucacuauguugcccaggcagg

SEQ ID NO: 1167141 - RNA, 19 nt, Human
acuugcagacucuacagag

SEQ ID NO: 1167142 - RNA, 22 nt, Human
acuugcagacucuacagaggcc

SEQ ID NO: 1167143 - RNA, 23 nt, Human
acuugcagacucuacagaggcca

SEQ ID NO: 1167144 - RNA, 15 nt, Human
acuugucaauaaaau

SEQ ID NO: 1167145 - RNA, 16 nt, Human
acuugucaauaaaauc

SEQ ID NO: 1167146 - RNA, 20 nt, Human
acuugucuuuggacccugag

SEQ ID NO: 1167147 - RNA, 21 nt, Human
acuugucuuuggacccugagg

SEQ ID NO: 1167148 - RNA, 19 nt, Human
acuuguggacacagcucuu

SEQ ID NO: 1167149 - RNA, 22 nt, Human
acuuguggacacagcucuucuc

SEQ ID NO: 1167150 - RNA, 18 nt, Human
ucuccaagcaggacaugg

SEQ ID NO: 1167151 - RNA, 19 nt, Human
ucuccaagcaggacaugga

SEQ ID NO: 1167152 - RNA, 12 nt, Human
ucuccacccugc

SEQ ID NO: 1167153 - RNA, 23 nt, Human
ucuccccagcaagugagagcugg

SEQ ID NO: 1167154 - RNA, 17 nt, Human
ucuccgaccagacaccu

SEQ ID NO: 1167155 - RNA, 23 nt, Human
ucuccgaccagacaccuugacag

SEQ ID NO: 1167156 - RNA, 15 nt, Human
ucuccuccagaguca

SEQ ID NO: 1167157 - RNA, 16 nt, Human
ucuccucugcugcugg

SEQ ID NO: 1167158 - RNA, 17 nt, Human
ucuccucugcugcuggc

SEQ ID NO: 1167159 - RNA, 18 nt, Human
ucuccucugcugcuggcu

SEQ ID NO: 1167160 - RNA, 20 nt, Human
ucuccucugcugcuggcugg

SEQ ID NO: 1167161 - RNA, 12 nt, Human
acuuuaccuuuu

SEQ ID NO: 1167162 - RNA, 12 nt, Human
acuuugaccucu

SEQ ID NO: 1167163 - RNA, 13 nt, Human
acuuugaccucug

SEQ ID NO: 1167164 - RNA, 14 nt, Human
acuuugaccucugc

SEQ ID NO: 1167165 - RNA, 20 nt, Human
acuuuguuaguuucuccaag

SEQ ID NO: 1167166 - RNA, 21 nt, Human
acuuuguuaguuucuccaagc

SEQ ID NO: 1167167 - RNA, 14 nt, Human
acuuuguucuggcu

SEQ ID NO: 1167168 - RNA, 12 nt, Human
acuuuuguucuu

SEQ ID NO: 1167169 - RNA, 13 nt, Human
acuuuuguucuug

SEQ ID NO: 1167170 - RNA, 15 nt, Human
acuuuuguucuuggu

SEQ ID NO: 1167171 - RNA, 23 nt, Human
acuuuuguucuugguuuguaaau

SEQ ID NO: 1167172 - RNA, 22 nt, Human
acuuuuuauggcacuaguauuu

SEQ ID NO: 1167173 - RNA, 17 nt, Human
agaaaaaauauuuuccc

SEQ ID NO: 1167174 - RNA, 14 nt, Human
ucuccuucaccuuu

SEQ ID NO: 1167175 - RNA, 15 nt, Human
ucuccuucaccuuug

SEQ ID NO: 1167176 - RNA, 16 nt, Human
ucuccuucaccuuugu

SEQ ID NO: 1167177 - RNA, 19 nt, Human
agaaaaaauauuuucccua

SEQ ID NO: 1167178 - RNA, 18 nt, Human
ucuccuucaccuuugucc

SEQ ID NO: 1167179 - RNA, 13 nt, Human
ucuccuuguguua

SEQ ID NO: 1167180 - RNA, 21 nt, Human
ucuccuuguguuacuaaguuu

SEQ ID NO: 1167181 - RNA, 15 nt, Human
agaaaugccuuaccc

SEQ ID NO: 1167182 - RNA, 21 nt, Human
ucugaaggacauugcggacag

SEQ ID NO: 1167183 - RNA, 22 nt, Human
ucugaaggacauugcggacagc

SEQ ID NO: 1167184 - RNA, 13 nt, Human
ucugacacacagc

SEQ ID NO: 1167185 - RNA, 14 nt, Human
ucugacacacagcu

SEQ ID NO: 1167186 - RNA, 15 nt, Human
ucugacacacagcuc

SEQ ID NO: 1167187 - RNA, 16 nt, Human
ucugacacacagcucu

SEQ ID NO: 1167188 - RNA, 17 nt, Human
ucugaucauccacugug

SEQ ID NO: 1167189 - RNA, 21 nt, Human
ucugaucauccacugugccau

SEQ ID NO: 1167190 - RNA, 21 nt, Human
ucugacuguuuccaucaaggg

SEQ ID NO: 1167191 - RNA, 21 nt, Human
ucugagacucgcgacaaugca

SEQ ID NO: 1167192 - RNA, 22 nt, Human
ucugagacucgcgacaaugcaa

SEQ ID NO: 1167193 - RNA, 17 nt, Human
ucugcacuccccugcug

SEQ ID NO: 1167194 - RNA, 16 nt, Human
ucugcacuccccugcu

SEQ ID NO: 1167195 - RNA, 14 nt, Human
ucugcacuccccug

SEQ ID NO: 1167196 - RNA, 15 nt, Human
ucugcacuccccugc

SEQ ID NO: 1167197 - RNA, 18 nt, Human
ucugcagcaauaaagcag

SEQ ID NO: 1167198 - RNA, 17 nt, Human
ucugcagcaauaaagca

SEQ ID NO: 1167199 - RNA, 18 nt, Human
ucugcagauaaacaguag

SEQ ID NO: 1167200 - RNA, 14 nt, Human
agaaauguacagca

SEQ ID NO: 1167201 - RNA, 15 nt, Human
agaaauguacagcaa

SEQ ID NO: 1167202 - RNA, 16 nt, Human
agaaauguacagcaag

SEQ ID NO: 1167203 - RNA, 13 nt, Human
agaagaacugaaa

SEQ ID NO: 1167204 - RNA, 14 nt, Human
agaagaacugaaau

SEQ ID NO: 1167205 - RNA, 21 nt, Human
agaagaacugaaaucauacuu

SEQ ID NO: 1167206 - RNA, 18 nt, Human
agaagaugguaccaccag

SEQ ID NO: 1167207 - RNA, 18 nt, Human
agaagauuuugaaauuuu

SEQ ID NO: 1167208 - RNA, 19 nt, Human
agaagcaacccaaauguuc

SEQ ID NO: 1167209 - RNA, 12 nt, Human
agaagcccagga

SEQ ID NO: 1167210 - RNA, 16 nt, Human
agaagcccaggaaagg

SEQ ID NO: 1167211 - RNA, 18 nt, Human
agaagcccaggaaaggcu

SEQ ID NO: 1167212 - RNA, 20 nt, Human
agaagcccaggaaaggcucc

SEQ ID NO: 1167213 - RNA, 21 nt, Human
agaagcccaggaaaggcucca

SEQ ID NO: 1167214 - RNA, 22 nt, Human
agaagcccaggaaaggcuccag

SEQ ID NO: 1167215 - RNA, 23 nt, Human
agaagcccaggaaaggcuccagg

SEQ ID NO: 1167216 - RNA, 17 nt, Human
ucugcccacucccugca

SEQ ID NO: 1167217 - RNA, 14 nt, Human
ucugccgcagcccu

SEQ ID NO: 1167218 - RNA, 15 nt, Human
ucugccgcagcccug

SEQ ID NO: 1167219 - RNA, 18 nt, Human
ucugcccacucccugcaa

SEQ ID NO: 1167220 - RNA, 21 nt, Human
ucugcccacucccugcaaccu

SEQ ID NO: 1167221 - RNA, 23 nt, Human
ucugcccacucccugcaaccuga

SEQ ID NO: 1167222 - RNA, 19 nt, Human
ucugcccuccaagaccuuc

SEQ ID NO: 1167223 - RNA, 23 nt, Human
ucugccgcagcccugcagagggc

SEQ ID NO: 1167224 - RNA, 22 nt, Human
ucugccgcagcccugcagaggg

SEQ ID NO: 1167225 - RNA, 22 nt, Human
ucugccugcccaggccccugcc

SEQ ID NO: 1167226 - RNA, 19 nt, Human
ucugcucacauaucuguca

SEQ ID NO: 1167227 - RNA, 20 nt, Human
ucugcucacauaucugucau

SEQ ID NO: 1167228 - RNA, 14 nt, Human
ucugcuucagccuc

SEQ ID NO: 1167229 - RNA, 15 nt, Human
ucugcuucagccucc

SEQ ID NO: 1167230 - RNA, 21 nt, Human
agaaguuucugccgcagcccu

SEQ ID NO: 1167231 - RNA, 22 nt, Human
agaaguuucugccgcagcccug

SEQ ID NO: 1167232 - RNA, 23 nt, Human
agaaguuucugccgcagcccugc

SEQ ID NO: 1167233 - RNA, 15 nt, Human
agaauuaacacauga

SEQ ID NO: 1167234 - RNA, 23 nt, Human
agaauuaacacaugauccugcaa

SEQ ID NO: 1167235 - RNA, 14 nt, Human
ucugugagaugcua

SEQ ID NO: 1167236 - RNA, 17 nt, Human
ucugugagaugcuagaa

SEQ ID NO: 1167237 - RNA, 22 nt, Human
ucugugagaugcuagaacuccc

SEQ ID NO: 1167238 - RNA, 23 nt, Human
ucugugagaugcuagaacucccu

SEQ ID NO: 1167239 - RNA, 12 nt, Human
ucuguuggccag

SEQ ID NO: 1167240 - RNA, 17 nt, Human
ucuguuggccaguguga

SEQ ID NO: 1167241 - RNA, 13 nt, Human
ucuguucuuucca

SEQ ID NO: 1167242 - RNA, 22 nt, Human
ucuguucuuuccaaaguacacu

SEQ ID NO: 1167243 - RNA, 18 nt, Human
ucuguuggccagugugac

SEQ ID NO: 1167244 - RNA, 13 nt, Human
ucuguuuagauaa

SEQ ID NO: 1167245 - RNA, 12 nt, Human
agacacacauga

SEQ ID NO: 1167246 - RNA, 15 nt, Human
agacacacaugaagu

SEQ ID NO: 1167247 - RNA, 12 nt, Human
agacacaggccc

SEQ ID NO: 1167248 - RNA, 13 nt, Human
agacacaggcccg

SEQ ID NO: 1167249 - RNA, 16 nt, Human
agacacaggcccggcu

SEQ ID NO: 1167250 - RNA, 16 nt, Human
agacacauguccaaga

SEQ ID NO: 1167251 - RNA, 20 nt, Human
agacacauguccaagaagcc

SEQ ID NO: 1167252 - RNA, 17 nt, Human
agacaccuugacagggc

SEQ ID NO: 1167253 - RNA, 18 nt, Human
agacaccuugacagggca

SEQ ID NO: 1167254 - RNA, 19 nt, Human
agacaccuugacagggcac

SEQ ID NO: 1167255 - RNA, 13 nt, Human
agacagagcuaca

SEQ ID NO: 1167256 - RNA, 13 nt, Human
agacuccugcagg

SEQ ID NO: 1167257 - RNA, 14 nt, Human
agacuccugcaggc

SEQ ID NO: 1167258 - RNA, 13 nt, Human
agacucugucuca

SEQ ID NO: 1167259 - RNA, 20 nt, Human
agacaggcaagcaccuccug

SEQ ID NO: 1167260 - RNA, 22 nt, Human
agacaggcaagcaccuccugcc

SEQ ID NO: 1167261 - RNA, 15 nt, Human
ucuuuaaugucacag

SEQ ID NO: 1167262 - RNA, 18 nt, Human
ucuuuaaugucacaggca

SEQ ID NO: 1167263 - RNA, 19 nt, Human
ucuuuaaugucacaggcag

SEQ ID NO: 1167264 - RNA, 12 nt, Human
ucuuuccugagg

SEQ ID NO: 1167265 - RNA, 20 nt, Human
agacugguuccauggccucu

SEQ ID NO: 1167266 - RNA, 14 nt, Human
agacuguacaaagu

SEQ ID NO: 1167267 - RNA, 17 nt, Human
agacuuuggaaagacuu

SEQ ID NO: 1167268 - RNA, 15 nt, Human
agacuuuggaaagag

SEQ ID NO: 1167269 - RNA, 19 nt, Human
agacuuuggaaagaguagg

SEQ ID NO: 1167270 - RNA, 15 nt, Human
agacuuuuccaaccc

SEQ ID NO: 1167271 - RNA, 19 nt, Human
agacuuuucuuucagccaa

SEQ ID NO: 1167272 - RNA, 16 nt, Human
agagacacaagccuuc

SEQ ID NO: 1167273 - RNA, 19 nt, Human
agagacacaagccuucggc

SEQ ID NO: 1167274 - RNA, 16 nt, Human
agagacacacugaaga

SEQ ID NO: 1167275 - RNA, 14 nt, Human
agagacagaaagca

SEQ ID NO: 1167276 - RNA, 15 nt, Human
agagacagaaagcag

SEQ ID NO: 1167277 - RNA, 14 nt, Human
ucuuuguacagaca

SEQ ID NO: 1167278 - RNA, 15 nt, Human
ucuuuguacagacaa

SEQ ID NO: 1167279 - RNA, 20 nt, Human
ucuuuguacagacaacaaac

SEQ ID NO: 1167280 - RNA, 14 nt, Human
ucuuuguggcuucc

SEQ ID NO: 1167281 - RNA, 11 nt, Human
agagagaaaau

SEQ ID NO: 1167282 - RNA, 12 nt, Human
agagagaaaaua

SEQ ID NO: 1167283 - RNA, 12 nt, Human
agagacuccugc

SEQ ID NO: 1167284 - RNA, 13 nt, Human
agagacuccugca

SEQ ID NO: 1167285 - RNA, 14 nt, Human
agagacuccugcag

SEQ ID NO: 1167286 - RNA, 15 nt, Human
agagacuccugcagg

SEQ ID NO: 1167287 - RNA, 16 nt, Human
ugaaagacuguacaaa

SEQ ID NO: 1167288 - RNA, 18 nt, Human
ugaaagacuguacaaagu

SEQ ID NO: 1167289 - RNA, 19 nt, Human
ugaaagacuguacaaagua

SEQ ID NO: 1167290 - RNA, 22 nt, Human
ugaaagacuguacaaaguagaa

SEQ ID NO: 1167291 - RNA, 17 nt, Human
ugaaagaggaaugaagu

SEQ ID NO: 1167292 - RNA, 18 nt, Human
ugaaagaggaaugaagua

SEQ ID NO: 1167293 - RNA, 19 nt, Human
agagaccaucccugaaggc

SEQ ID NO: 1167294 - RNA, 21 nt, Human
agagaccaucccugaaggccc

SEQ ID NO: 1167295 - RNA, 22 nt, Human
agagaccaucccugaaggcccc

SEQ ID NO: 1167296 - RNA, 23 nt, Human
agagaccaucccugaaggccccg

SEQ ID NO: 1167297 - RNA, 12 nt, Human
ugaaaacacauu

SEQ ID NO: 1167298 - RNA, 13 nt, Human
ugaaaacacauuu

SEQ ID NO: 1167299 - RNA, 14 nt, Human
ugaaaacacauuuu

SEQ ID NO: 1167300 - RNA, 15 nt, Human
ugaaaacacauuuuu

SEQ ID NO: 1167301 - RNA, 17 nt, Human
ugaaaacacauuuuucu

SEQ ID NO: 1167302 - RNA, 19 nt, Human
ugaaaacacauuuuucuua

SEQ ID NO: 1167303 - RNA, 20 nt, Human
ugaaaacacauuuuucuuag

SEQ ID NO: 1167304 - RNA, 13 nt, Human
ugaaagaaaauaa

SEQ ID NO: 1167305 - RNA, 17 nt, Human
ugaaacuggauuaaacu

SEQ ID NO: 1167306 - RNA, 18 nt, Human
ugaaacuggauuaaacuu

SEQ ID NO: 1167307 - RNA, 16 nt, Human
ugaaaaucgugacaac

SEQ ID NO: 1167308 - RNA, 20 nt, Human
ugaaauuuuuauuaaauuau

SEQ ID NO: 1167309 - RNA, 16 nt, Human
agagauugugguuuca

SEQ ID NO: 1167310 - RNA, 14 nt, Human
ugaaauaagccaga

SEQ ID NO: 1167311 - RNA, 11 nt, Human
ugaacuccugg

SEQ ID NO: 1167312 - RNA, 22 nt, Human
ugaagacaaugacuuacuguac

SEQ ID NO: 1167313 - RNA, 23 nt, Human
ugaagacaaugacuuacuguaca

SEQ ID NO: 1167314 - RNA, 13 nt, Human
ugaagacagagcu

SEQ ID NO: 1167315 - RNA, 13 nt, Human
ugaacaaauuuac

SEQ ID NO: 1167316 - RNA, 22 nt, Human
ugaaccaccacacccagcccac

SEQ ID NO: 1167317 - RNA, 18 nt, Human
ugaacaaauuuacagaga

SEQ ID NO: 1167318 - RNA, 22 nt, Human
ugaacccauauuuguacaccaa

SEQ ID NO: 1167319 - RNA, 18 nt, Human
ugaacccgggaggcagag

SEQ ID NO: 1167320 - RNA, 22 nt, Human
ugaaccgaugagaaauaaaguu

SEQ ID NO: 1167321 - RNA, 23 nt, Human
ugaacuagaguuuagcuggaaaa

SEQ ID NO: 1167322 - RNA, 15 nt, Human
ugaaguaauaugcac

SEQ ID NO: 1167323 - RNA, 16 nt, Human
ugaaguaauaugcaca

SEQ ID NO: 1167324 - RNA, 20 nt, Human
ugaaguaauaugcacacauu

SEQ ID NO: 1167325 - RNA, 21 nt, Human
ugaaguaauaugcacacauuu

SEQ ID NO: 1167326 - RNA, 22 nt, Human
ugaaguaauaugcacacauuuu

SEQ ID NO: 1167327 - RNA, 17 nt, Human
ugaagauuuaccacuug

SEQ ID NO: 1167328 - RNA, 20 nt, Human
ugaagauuuaccacuugugu

SEQ ID NO: 1167329 - RNA, 17 nt, Human
ugaaguacucauacaug

SEQ ID NO: 1167330 - RNA, 13 nt, Human
ugaagucacacag

SEQ ID NO: 1167331 - RNA, 14 nt, Human
ugaagucacacagu

SEQ ID NO: 1167332 - RNA, 12 nt, Human
ugaauaauacag

SEQ ID NO: 1167333 - RNA, 13 nt, Human
ugaauaauacagu

SEQ ID NO: 1167334 - RNA, 22 nt, Human
agaggcagccccauucugccug

SEQ ID NO: 1167335 - RNA, 23 nt, Human
agaggcagccccauucugccugc

SEQ ID NO: 1167336 - RNA, 24 nt, Human
agaggcagccccauucugccugcc

SEQ ID NO: 1167337 - RNA, 22 nt, Human
agaggcugccucucccaucacu

SEQ ID NO: 1167338 - RNA, 15 nt, Human
agagggagugacaga

SEQ ID NO: 1167339 - RNA, 20 nt, Human
agagggagugacagaggcag

SEQ ID NO: 1167340 - RNA, 16 nt, Human
agagguucaaagauau

SEQ ID NO: 1167341 - RNA, 19 nt, Human
agagguucaaagauauuuu

SEQ ID NO: 1167342 - RNA, 20 nt, Human
agagguucaaagauauuuug

SEQ ID NO: 1167343 - RNA, 13 nt, Human
agauccuggaaau

SEQ ID NO: 1167344 - RNA, 14 nt, Human
agauccuggaaauc

SEQ ID NO: 1167345 - RNA, 18 nt, Human
agaucucuaacuucacca

SEQ ID NO: 1167346 - RNA, 21 nt, Human
agaugcaguucugaagaagau

SEQ ID NO: 1167347 - RNA, 19 nt, Human
agaugcuagaacucccuuu

SEQ ID NO: 1167348 - RNA, 21 nt, Human
agaugcuagaacucccuuuca

SEQ ID NO: 1167349 - RNA, 22 nt, Human
agaugcuagaacucccuuucaa

SEQ ID NO: 1167350 - RNA, 17 nt, Human
ugacaggcaaugcuggc

SEQ ID NO: 1167351 - RNA, 19 nt, Human
ugacaggcaaugcuggcug

SEQ ID NO: 1167352 - RNA, 22 nt, Human
ugacagggcacaccgggcacuc

SEQ ID NO: 1167353 - RNA, 16 nt, Human
ugacacgaauauugcu

SEQ ID NO: 1167354 - RNA, 19 nt, Human
ugacacgaauauugcugau

SEQ ID NO: 1167355 - RNA, 15 nt, Human
ugacacuuaaaaaug

SEQ ID NO: 1167356 - RNA, 16 nt, Human
ugacacuuaaaaaugg

SEQ ID NO: 1167357 - RNA, 12 nt, Human
ugaccuuucaau

SEQ ID NO: 1167358 - RNA, 13 nt, Human
ugaccuuucaaua

SEQ ID NO: 1167359 - RNA, 22 nt, Human
agauguauguacuucaugcugu

SEQ ID NO: 1167360 - RNA, 15 nt, Human
ugaccuuuaagagaa

SEQ ID NO: 1167361 - RNA, 19 nt, Human
agauucauauuuacuucuu

SEQ ID NO: 1167362 - RNA, 19 nt, Human
agauuucacucuccuuggu

SEQ ID NO: 1167363 - RNA, 13 nt, Human
agauucauauuua

SEQ ID NO: 1167364 - RNA, 16 nt, Human
agauucauauuuacuu

SEQ ID NO: 1167365 - RNA, 12 nt, Human
ugacuuacugua

SEQ ID NO: 1167366 - RNA, 20 nt, Human
ugacuuacuguacaugaaaa

SEQ ID NO: 1167367 - RNA, 11 nt, Human
ugagacagagu

SEQ ID NO: 1167368 - RNA, 21 nt, Human
ugagacagaguuuucacucuu

SEQ ID NO: 1167369 - RNA, 13 nt, Human
ugagacagcccgg

SEQ ID NO: 1167370 - RNA, 12 nt, Human
ugagaauuaccc

SEQ ID NO: 1167371 - RNA, 15 nt, Human
agauuuuccugaaaa

SEQ ID NO: 1167372 - RNA, 16 nt, Human
agauuuuccugaaaac

SEQ ID NO: 1167373 - RNA, 17 nt, Human
ugagacagcccgggcuc

SEQ ID NO: 1167374 - RNA, 18 nt, Human
ugagacagcccgggcucu

SEQ ID NO: 1167375 - RNA, 19 nt, Human
ugagacagcccgggcucug

SEQ ID NO: 1167376 - RNA, 20 nt, Human
ugagacagcccgggcucugc

SEQ ID NO: 1167377 - RNA, 22 nt, Human
ugagacagcccgggcucugccu

SEQ ID NO: 1167378 - RNA, 12 nt, Human
ugagacagcucu

SEQ ID NO: 1167379 - RNA, 20 nt, Human
ugagacucugucucagucca

SEQ ID NO: 1167380 - RNA, 16 nt, Human
ugagagacacacugaa

SEQ ID NO: 1167381 - RNA, 17 nt, Human
ugagagacacacugaag

SEQ ID NO: 1167382 - RNA, 19 nt, Human
ugagagacacacugaagaa

SEQ ID NO: 1167383 - RNA, 20 nt, Human
ugagagacacacugaagaag

SEQ ID NO: 1167384 - RNA, 21 nt, Human
ugagagacacacugaagaagc

SEQ ID NO: 1167385 - RNA, 22 nt, Human
ugagagacacacugaagaagca

SEQ ID NO: 1167386 - RNA, 14 nt, Human
ugagagcugggugu

SEQ ID NO: 1167387 - RNA, 10 nt, Human
ugagaggaaa

SEQ ID NO: 1167388 - RNA, 11 nt, Human
ugagaggaaau

SEQ ID NO: 1167389 - RNA, 12 nt, Human
ugagaggaaauc

SEQ ID NO: 1167390 - RNA, 13 nt, Human
ugagaggaaauca

SEQ ID NO: 1167391 - RNA, 14 nt, Human
ugagaggaaaucac

SEQ ID NO: 1167392 - RNA, 17 nt, Human
ugagaggaaaucaccga

SEQ ID NO: 1167393 - RNA, 23 nt, Human
ugagaggacuuuucuuuguggcu

SEQ ID NO: 1167394 - RNA, 12 nt, Human
ugagccacugca

SEQ ID NO: 1167395 - RNA, 13 nt, Human
ugagccacugcac

SEQ ID NO: 1167396 - RNA, 14 nt, Human
ugagccacugcacc

SEQ ID NO: 1167397 - RNA, 18 nt, Human
ugagccacugcaccgggc

SEQ ID NO: 1167398 - RNA, 19 nt, Human
ugagccagauuucacucuc

SEQ ID NO: 1167399 - RNA, 20 nt, Human
ugagccagauuucacucucc

SEQ ID NO: 1167400 - RNA, 21 nt, Human
ugagccagauuucacucuccu

SEQ ID NO: 1167401 - RNA, 14 nt, Human
agcaaggagauuua

SEQ ID NO: 1167402 - RNA, 17 nt, Human
agcaaggagauuuacaa

SEQ ID NO: 1167403 - RNA, 19 nt, Human
agcaaggagauuuacaacu

SEQ ID NO: 1167404 - RNA, 16 nt, Human
agcaagugagacccug

SEQ ID NO: 1167405 - RNA, 15 nt, Human
agcaagugagagcug

SEQ ID NO: 1167406 - RNA, 16 nt, Human
agcaagugagagcugg

SEQ ID NO: 1167407 - RNA, 13 nt, Human
agcaccuccugcc

SEQ ID NO: 1167408 - RNA, 14 nt, Human
agcaccuccugccu

SEQ ID NO: 1167409 - RNA, 16 nt, Human
agcaccuccugccucg

SEQ ID NO: 1167410 - RNA, 23 nt, Human
agcacaugccucucucaggccaa

SEQ ID NO: 1167411 - RNA, 22 nt, Human
agcaccaaaagcuuaccaaggg

SEQ ID NO: 1167412 - RNA, 16 nt, Human
agcaccaucucuccuc

SEQ ID NO: 1167413 - RNA, 17 nt, Human
agcaagugagagcuggg

SEQ ID NO: 1167414 - RNA, 18 nt, Human
agcaagugagagcugggu

SEQ ID NO: 1167415 - RNA, 21 nt, Human
agcacagcuucauuuccugug

SEQ ID NO: 1167416 - RNA, 18 nt, Human
agcacaugccucucucag

SEQ ID NO: 1167417 - RNA, 19 nt, Human
agcacaugccucucucagg

SEQ ID NO: 1167418 - RNA, 20 nt, Human
agcacaugccucucucaggc

SEQ ID NO: 1167419 - RNA, 21 nt, Human
agcacaugccucucucaggcc

SEQ ID NO: 1167420 - RNA, 22 nt, Human
agcacaugccucucucaggcca

SEQ ID NO: 1167421 - RNA, 13 nt, Human
ugauggugcaaug

SEQ ID NO: 1167422 - RNA, 15 nt, Human
ugauggugcaaugac

SEQ ID NO: 1167423 - RNA, 19 nt, Human
ugauuaaauucuugcaaag

SEQ ID NO: 1167424 - RNA, 20 nt, Human
ugauuaaauucuugcaaagu

SEQ ID NO: 1167425 - RNA, 19 nt, Human
ugauuaaccacuucagcug

SEQ ID NO: 1167426 - RNA, 18 nt, Human
ugauuaaguaaugauaac

SEQ ID NO: 1167427 - RNA, 15 nt, Human
ugauuaauuaaaaca

SEQ ID NO: 1167428 - RNA, 23 nt, Human
ugauuaaguaaugauaacuggaa

SEQ ID NO: 1167429 - RNA, 20 nt, Human
ugauuaaccacuucagcuga

SEQ ID NO: 1167430 - RNA, 18 nt, Human
agccacugcaccgggcca

SEQ ID NO: 1167431 - RNA, 19 nt, Human
agccacugcaccgggccac

SEQ ID NO: 1167432 - RNA, 20 nt, Human
agccacugcaccgggccaca

SEQ ID NO: 1167433 - RNA, 10 nt, Human
agccagagga

SEQ ID NO: 1167434 - RNA, 11 nt, Human
agccagaggag

SEQ ID NO: 1167435 - RNA, 16 nt, Human
ugauccuaguuccacc

SEQ ID NO: 1167436 - RNA, 15 nt, Human
ugauccucccaccuc

SEQ ID NO: 1167437 - RNA, 16 nt, Human
ugauccucccaccuca

SEQ ID NO: 1167438 - RNA, 21 nt, Human
ugauccucccaccucagccuc

SEQ ID NO: 1167439 - RNA, 22 nt, Human
ugauccucccaccucagccucc

SEQ ID NO: 1167440 - RNA, 11 nt, Human
ugaugaagaag

SEQ ID NO: 1167441 - RNA, 12 nt, Human
ugaugaagaagu

SEQ ID NO: 1167442 - RNA, 13 nt, Human
ugaugagaggaaa

SEQ ID NO: 1167443 - RNA, 14 nt, Human
ugaugagaggaaau

SEQ ID NO: 1167444 - RNA, 15 nt, Human
ugaugagaggaaauc

SEQ ID NO: 1167445 - RNA, 16 nt, Human
ugaugagaggaaauca

SEQ ID NO: 1167446 - RNA, 21 nt, Human
ugaugggcaacccccagccug

SEQ ID NO: 1167447 - RNA, 15 nt, Human
ugauggggcccugcc

SEQ ID NO: 1167448 - RNA, 16 nt, Human
ugauggggcccugccu

SEQ ID NO: 1167449 - RNA, 19 nt, Human
ugauggggcccugccuccu

SEQ ID NO: 1167450 - RNA, 14 nt, Human
agcccaggaaaggc

SEQ ID NO: 1167451 - RNA, 18 nt, Human
agcccaggaaaggcucca

SEQ ID NO: 1167452 - RNA, 16 nt, Human
ugauucauaaugacuu

SEQ ID NO: 1167453 - RNA, 21 nt, Human
ugauucauaaugacuuaagca

SEQ ID NO: 1167454 - RNA, 13 nt, Human
ugauucuccugcc

SEQ ID NO: 1167455 - RNA, 22 nt, Human
ugauucccaagcucugcuccuc

SEQ ID NO: 1167456 - RNA, 23 nt, Human
ugauucccaagcucugcuccucu

SEQ ID NO: 1167457 - RNA, 22 nt, Human
ugauuuccguuaaaauaccagc

SEQ ID NO: 1167458 - RNA, 13 nt, Human
ugauuucauucaa

SEQ ID NO: 1167459 - RNA, 17 nt, Human
ugauuuggggauauuuu

SEQ ID NO: 1167460 - RNA, 13 nt, Human
agccaguaaaugg

SEQ ID NO: 1167461 - RNA, 21 nt, Human
agccaguaaaugggggugcau

SEQ ID NO: 1167462 - RNA, 22 nt, Human
agccaguaaaugggggugcauu

SEQ ID NO: 1167463 - RNA, 13 nt, Human
agcccacuucugc

SEQ ID NO: 1167464 - RNA, 14 nt, Human
agcccacuucugcc

SEQ ID NO: 1167465 - RNA, 15 nt, Human
agcccacuucugcca

SEQ ID NO: 1167466 - RNA, 22 nt, Human
agcccacuucugccauauucug

SEQ ID NO: 1167467 - RNA, 13 nt, Human
agcccgggcucug

SEQ ID NO: 1167468 - RNA, 14 nt, Human
agcccugguggcag

SEQ ID NO: 1167469 - RNA, 15 nt, Human
agcccugguggcagu

SEQ ID NO: 1167470 - RNA, 16 nt, Human
agcccugguggcagug

SEQ ID NO: 1167471 - RNA, 18 nt, Human
ugcacacaccagagccca

SEQ ID NO: 1167472 - RNA, 21 nt, Human
ugcacacaccagagcccaccu

SEQ ID NO: 1167473 - RNA, 22 nt, Human
ugcacacaccagagcccaccuu

SEQ ID NO: 1167474 - RNA, 23 nt, Human
agccccauucugccugcccaggc

SEQ ID NO: 1167475 - RNA, 21 nt, Human
ugcaaaccaucauugaaaucu

SEQ ID NO: 1167476 - RNA, 16 nt, Human
agccccaaaacucucc

SEQ ID NO: 1167477 - RNA, 17 nt, Human
agccccaaaacucuccu

SEQ ID NO: 1167478 - RNA, 18 nt, Human
agccccaaaacucuccuc

SEQ ID NO: 1167479 - RNA, 20 nt, Human
agccccaaaacucuccucug

SEQ ID NO: 1167480 - RNA, 21 nt, Human
agccccauucugccugcccag

SEQ ID NO: 1167481 - RNA, 22 nt, Human
agccccauucugccugcccagg

SEQ ID NO: 1167482 - RNA, 18 nt, Human
agccgagaucacgccacu

SEQ ID NO: 1167483 - RNA, 20 nt, Human
agccucaaccuccugggcua

SEQ ID NO: 1167484 - RNA, 17 nt, Human
agccucacaguccuuac

SEQ ID NO: 1167485 - RNA, 18 nt, Human
agccucacaguccuuacc

SEQ ID NO: 1167486 - RNA, 23 nt, Human
agccucugaaaaccaauguucuc

SEQ ID NO: 1167487 - RNA, 21 nt, Human
ugcagccucaaccuccugggc

SEQ ID NO: 1167488 - RNA, 22 nt, Human
ugcagccucaaccuccugggcu

SEQ ID NO: 1167489 - RNA, 23 nt, Human
ugcagccucaaccuccugggcua

SEQ ID NO: 1167490 - RNA, 12 nt, Human
ugcacacauuuu

SEQ ID NO: 1167491 - RNA, 13 nt, Human
ugcacacauuuuu

SEQ ID NO: 1167492 - RNA, 15 nt, Human
ugcacacauuuuuua

SEQ ID NO: 1167493 - RNA, 16 nt, Human
ugcacuccccugcugg

SEQ ID NO: 1167494 - RNA, 17 nt, Human
ugcacuccccugcuggg

SEQ ID NO: 1167495 - RNA, 19 nt, Human
ugcacuccccugcugggug

SEQ ID NO: 1167496 - RNA, 21 nt, Human
agcccugguggcagugggagc

SEQ ID NO: 1167497 - RNA, 20 nt, Human
ugcacacauuuuuuaaaugc

SEQ ID NO: 1167498 - RNA, 14 nt, Human
ugcagaagacagua

SEQ ID NO: 1167499 - RNA, 15 nt, Human
ugcagaagacaguau

SEQ ID NO: 1167500 - RNA, 22 nt, Human
ugcagacaggcaagcaccuccu

SEQ ID NO: 1167501 - RNA, 22 nt, Human
ugcagaagacaguauggcagcu

SEQ ID NO: 1167502 - RNA, 16 nt, Human
ugcagacucuacagag

SEQ ID NO: 1167503 - RNA, 17 nt, Human
ugcagacucuacagagg

SEQ ID NO: 1167504 - RNA, 18 nt, Human
ugcagacucuacagaggc

SEQ ID NO: 1167505 - RNA, 16 nt, Human
agcccuuagcagggaa

SEQ ID NO: 1167506 - RNA, 21 nt, Human
agcccuuagcagggaaacagc

SEQ ID NO: 1167507 - RNA, 21 nt, Human
agccgagauagccaaggccaa

SEQ ID NO: 1167508 - RNA, 17 nt, Human
agccgagaucacgccac

SEQ ID NO: 1167509 - RNA, 19 nt, Human
ugcauuugaggucuguucu

SEQ ID NO: 1167510 - RNA, 20 nt, Human
ugcauuuaaaagauacaguu

SEQ ID NO: 1167511 - RNA, 18 nt, Human
agccuuccagggguggga

SEQ ID NO: 1167512 - RNA, 15 nt, Human
agccuugaacuuuga

SEQ ID NO: 1167513 - RNA, 16 nt, Human
agccuugaacuuugac

SEQ ID NO: 1167514 - RNA, 22 nt, Human
agccuugaacuuugaccucugc

SEQ ID NO: 1167515 - RNA, 23 nt, Human
agccuugaacuuugaccucugca

SEQ ID NO: 1167516 - RNA, 23 nt, Human
agccuugaccauucuccaccugc

SEQ ID NO: 1167517 - RNA, 22 nt, Human
agcgauucuucugcuucagccu

SEQ ID NO: 1167518 - RNA, 20 nt, Human
ugcauuugaggucuguucuu

SEQ ID NO: 1167519 - RNA, 21 nt, Human
ugcauuugaggucuguucuuu

SEQ ID NO: 1167520 - RNA, 18 nt, Human
ugccagcuuaucucaggg

SEQ ID NO: 1167521 - RNA, 12 nt, Human
ugccaggaagcc

SEQ ID NO: 1167522 - RNA, 13 nt, Human
agcggcuggcagc

SEQ ID NO: 1167523 - RNA, 23 nt, Human
agcggcuggcagcccaccccuca

SEQ ID NO: 1167524 - RNA, 19 nt, Human
agcggggacagcuccuucu

SEQ ID NO: 1167525 - RNA, 20 nt, Human
agcggggacagcuccuucug

SEQ ID NO: 1167526 - RNA, 22 nt, Human
agcggggacagcuccuucuguc

SEQ ID NO: 1167527 - RNA, 23 nt, Human
ugccccgaacauguuuuucuucu

SEQ ID NO: 1167528 - RNA, 20 nt, Human
ugcccuaaaguguauuuuuu

SEQ ID NO: 1167529 - RNA, 16 nt, Human
ugccccauucaacauc

SEQ ID NO: 1167530 - RNA, 17 nt, Human
ugcccaaagaugcagcc

SEQ ID NO: 1167531 - RNA, 20 nt, Human
ugcccaaagaugcagccggu

SEQ ID NO: 1167532 - RNA, 13 nt, Human
ugcccagccccuu

SEQ ID NO: 1167533 - RNA, 16 nt, Human
ugcccagccccuucug

SEQ ID NO: 1167534 - RNA, 17 nt, Human
ugcccagccccuucuga

SEQ ID NO: 1167535 - RNA, 20 nt, Human
ugcccagccccuucugaccc

SEQ ID NO: 1167536 - RNA, 15 nt, Human
ugcccaggccccugc

SEQ ID NO: 1167537 - RNA, 17 nt, Human
ugcccaggccccugcca

SEQ ID NO: 1167538 - RNA, 18 nt, Human
ugcccaggccccugccac

SEQ ID NO: 1167539 - RNA, 13 nt, Human
agcgugagccacu

SEQ ID NO: 1167540 - RNA, 21 nt, Human
agcuaggccuggccagaugca

SEQ ID NO: 1167541 - RNA, 19 nt, Human
agcuauucaguaauaacuc

SEQ ID NO: 1167542 - RNA, 12 nt, Human
agcucagggccu

SEQ ID NO: 1167543 - RNA, 13 nt, Human
agcucagggccug

SEQ ID NO: 1167544 - RNA, 14 nt, Human
agcucagggccugg

SEQ ID NO: 1167545 - RNA, 19 nt, Human
agcucagggccuggcucag

SEQ ID NO: 1167546 - RNA, 20 nt, Human
agcucagggccuggcucagg

SEQ ID NO: 1167547 - RNA, 17 nt, Human
agcucaggugucccugc

SEQ ID NO: 1167548 - RNA, 15 nt, Human
agcuccaagcuccca

SEQ ID NO: 1167549 - RNA, 16 nt, Human
agcuccaagcucccag

SEQ ID NO: 1167550 - RNA, 14 nt, Human
ugcccugcccaccu

SEQ ID NO: 1167551 - RNA, 17 nt, Human
agcuccaagcucccagg

SEQ ID NO: 1167552 - RNA, 18 nt, Human
agcuccaagcucccaggc

SEQ ID NO: 1167553 - RNA, 19 nt, Human
agcuccaagcucccaggca

SEQ ID NO: 1167554 - RNA, 13 nt, Human
agcuccagcucac

SEQ ID NO: 1167555 - RNA, 17 nt, Human
agcuccagcucaccagc

SEQ ID NO: 1167556 - RNA, 23 nt, Human
agcucugcccauccugccccuga

SEQ ID NO: 1167557 - RNA, 18 nt, Human
agcuccagcucaccagcc

SEQ ID NO: 1167558 - RNA, 19 nt, Human
agcuccagcucaccagccc

SEQ ID NO: 1167559 - RNA, 21 nt, Human
agcuccagcucaccagcccca

SEQ ID NO: 1167560 - RNA, 23 nt, Human
agcuccuucuguccuacucugug

SEQ ID NO: 1167561 - RNA, 18 nt, Human
ugccucagaaaacaagga

SEQ ID NO: 1167562 - RNA, 22 nt, Human
ugccucccaucacccgcuaaga

SEQ ID NO: 1167563 - RNA, 17 nt, Human
ugccucucucaggccaa

SEQ ID NO: 1167564 - RNA, 15 nt, Human
agcucuucuccaggc

SEQ ID NO: 1167565 - RNA, 16 nt, Human
agcucuucuccaggcu

SEQ ID NO: 1167566 - RNA, 17 nt, Human
agcucuucuccaggcug

SEQ ID NO: 1167567 - RNA, 15 nt, Human
ugcccugugggcccc

SEQ ID NO: 1167568 - RNA, 18 nt, Human
ugcccugugggcccccaa

SEQ ID NO: 1167569 - RNA, 22 nt, Human
ugcccuuaccugccaggaagcc

SEQ ID NO: 1167570 - RNA, 20 nt, Human
ugccgcagcccugcagaggg

SEQ ID NO: 1167571 - RNA, 15 nt, Human
ugccucaccccuugc

SEQ ID NO: 1167572 - RNA, 11 nt, Human
ugccucugccu

SEQ ID NO: 1167573 - RNA, 14 nt, Human
ugccucugacacac

SEQ ID NO: 1167574 - RNA, 16 nt, Human
ugccucugacacacag

SEQ ID NO: 1167575 - RNA, 12 nt, Human
ugccucugccuc

SEQ ID NO: 1167576 - RNA, 17 nt, Human
ugccugcccaggccccu

SEQ ID NO: 1167577 - RNA, 18 nt, Human
ugccugcccaggccccug

SEQ ID NO: 1167578 - RNA, 19 nt, Human
ugccugcccaggccccugc

SEQ ID NO: 1167579 - RNA, 20 nt, Human
ugccugcccaggccccugcc

SEQ ID NO: 1167580 - RNA, 23 nt, Human
agcugcuuuugucuaugggacuc

SEQ ID NO: 1167581 - RNA, 24 nt, Human
agcugcuuuugucuaugggacuca

SEQ ID NO: 1167582 - RNA, 13 nt, Human
agcuggaaaagua

SEQ ID NO: 1167583 - RNA, 13 nt, Human
agcugccuguuca

SEQ ID NO: 1167584 - RNA, 15 nt, Human
ugcugagucugaagg

SEQ ID NO: 1167585 - RNA, 21 nt, Human
ugcucugcugacagacacagg

SEQ ID NO: 1167586 - RNA, 22 nt, Human
ugcucugcugacagacacaggc

SEQ ID NO: 1167587 - RNA, 16 nt, Human
agcugggacuacaggc

SEQ ID NO: 1167588 - RNA, 18 nt, Human
agcugggacuacaggcac

SEQ ID NO: 1167589 - RNA, 19 nt, Human
agcugggacuacaggcacc

SEQ ID NO: 1167590 - RNA, 16 nt, Human
ugcuccagcuguucag

SEQ ID NO: 1167591 - RNA, 19 nt, Human
ugcuccagcuguucagcug

SEQ ID NO: 1167592 - RNA, 20 nt, Human
ugcuccagcuguucagcugg

SEQ ID NO: 1167593 - RNA, 11 nt, Human
aggaauuuaaa

SEQ ID NO: 1167594 - RNA, 17 nt, Human
aggaagccagcaggcuc

SEQ ID NO: 1167595 - RNA, 18 nt, Human
aggaagccagcaggcucu

SEQ ID NO: 1167596 - RNA, 18 nt, Human
aggaaggaaacccagcuc

SEQ ID NO: 1167597 - RNA, 19 nt, Human
aggaaggaaacccagcucu

SEQ ID NO: 1167598 - RNA, 20 nt, Human
aggaaggaaacccagcucug

SEQ ID NO: 1167599 - RNA, 15 nt, Human
aggaaggagaggaga

SEQ ID NO: 1167600 - RNA, 16 nt, Human
ugcugagucugaaggc

SEQ ID NO: 1167601 - RNA, 17 nt, Human
ugcugagucugaaggcu

SEQ ID NO: 1167602 - RNA, 18 nt, Human
ugcugagucugaaggcug

SEQ ID NO: 1167603 - RNA, 21 nt, Human
ugcugagucugaaggcugggu

SEQ ID NO: 1167604 - RNA, 22 nt, Human
ugcugagucugaaggcuggguu

SEQ ID NO: 1167605 - RNA, 23 nt, Human
ugcugagucugaaggcuggguuc

SEQ ID NO: 1167606 - RNA, 13 nt, Human
aggaagacuucau

SEQ ID NO: 1167607 - RNA, 19 nt, Human
aggaagacuucaucccucu

SEQ ID NO: 1167608 - RNA, 13 nt, Human
aggaagacuuugg

SEQ ID NO: 1167609 - RNA, 14 nt, Human
aggaagacuuugga

SEQ ID NO: 1167610 - RNA, 23 nt, Human
aggaagcacaugccucucucagg

SEQ ID NO: 1167611 - RNA, 24 nt, Human
aggaagcacaugccucucucaggc

SEQ ID NO: 1167612 - RNA, 14 nt, Human
aggaagccagcagg

SEQ ID NO: 1167613 - RNA, 15 nt, Human
aggaagccagcaggc

SEQ ID NO: 1167614 - RNA, 16 nt, Human
ugcuggcugguuagag

SEQ ID NO: 1167615 - RNA, 18 nt, Human
ugcuggcuguuggcuggg

SEQ ID NO: 1167616 - RNA, 13 nt, Human
ugcugcccuguga

SEQ ID NO: 1167617 - RNA, 14 nt, Human
ugcugcccugugag

SEQ ID NO: 1167618 - RNA, 15 nt, Human
ugcugcccugugagu

SEQ ID NO: 1167619 - RNA, 13 nt, Human
ugcuggagcucug

SEQ ID NO: 1167620 - RNA, 14 nt, Human
ugcuggagcucugc

SEQ ID NO: 1167621 - RNA, 17 nt, Human
ugcugucccuuacguga

SEQ ID NO: 1167622 - RNA, 22 nt, Human
aggacagggaggugaccccagg

SEQ ID NO: 1167623 - RNA, 17 nt, Human
aggacacugauaugggu

SEQ ID NO: 1167624 - RNA, 23 nt, Human
aggacacuaaccacgcuggaccu

SEQ ID NO: 1167625 - RNA, 14 nt, Human
aggacacugauaug

SEQ ID NO: 1167626 - RNA, 13 nt, Human
ugcuuauacacuu

SEQ ID NO: 1167627 - RNA, 16 nt, Human
ugcuucaaggauccug

SEQ ID NO: 1167628 - RNA, 18 nt, Human
ugcuucaaggauccugag

SEQ ID NO: 1167629 - RNA, 19 nt, Human
ugcuucaaggauccugagc

SEQ ID NO: 1167630 - RNA, 20 nt, Human
ugcuucaaggauccugagcc

SEQ ID NO: 1167631 - RNA, 13 nt, Human
ugcuucagccucc

SEQ ID NO: 1167632 - RNA, 14 nt, Human
ugcuucagccuccc

SEQ ID NO: 1167633 - RNA, 19 nt, Human
ugcuugggcuucauccucc

SEQ ID NO: 1167634 - RNA, 13 nt, Human
uggaaaggcagcu

SEQ ID NO: 1167635 - RNA, 15 nt, Human
uggaaauauuaagaa

SEQ ID NO: 1167636 - RNA, 21 nt, Human
ugcuuggaggaaggaaaccca

SEQ ID NO: 1167637 - RNA, 12 nt, Human
ugcuugggcuuc

SEQ ID NO: 1167638 - RNA, 16 nt, Human
ugcuugggcuucaucc

SEQ ID NO: 1167639 - RNA, 15 nt, Human
aggacauugcggaca

SEQ ID NO: 1167640 - RNA, 17 nt, Human
aggacauugcggacagc

SEQ ID NO: 1167641 - RNA, 18 nt, Human
aggacauugcggacagcc

SEQ ID NO: 1167642 - RNA, 19 nt, Human
aggacauugcggacagcca

SEQ ID NO: 1167643 - RNA, 23 nt, Human
aggacauugcggacagccacggc

SEQ ID NO: 1167644 - RNA, 11 nt, Human
aggagaaacug

SEQ ID NO: 1167645 - RNA, 17 nt, Human
aggagaaacuggaacuc

SEQ ID NO: 1167646 - RNA, 17 nt, Human
aggagauuggaaggaac

SEQ ID NO: 1167647 - RNA, 22 nt, Human
aggagccccgaggccuucucug

SEQ ID NO: 1167648 - RNA, 21 nt, Human
aggauacaaaagcaugugaga

SEQ ID NO: 1167649 - RNA, 15 nt, Human
aggauccugagccag

SEQ ID NO: 1167650 - RNA, 16 nt, Human
aggauccugagccaga

SEQ ID NO: 1167651 - RNA, 17 nt, Human
aggauccugagccagau

SEQ ID NO: 1167652 - RNA, 18 nt, Human
aggauccugagccagauu

SEQ ID NO: 1167653 - RNA, 21 nt, Human
aggaucucuugagccugggag

SEQ ID NO: 1167654 - RNA, 22 nt, Human
aggaucucuugagccugggagg

SEQ ID NO: 1167655 - RNA, 16 nt, Human
aggaugaucuaggaag

SEQ ID NO: 1167656 - RNA, 17 nt, Human
aggaugaucuaggaaga

SEQ ID NO: 1167657 - RNA, 20 nt, Human
uggaaauauuaagaaagacu

SEQ ID NO: 1167658 - RNA, 23 nt, Human
uggaaaugggcagagcagagacc

SEQ ID NO: 1167659 - RNA, 19 nt, Human
aggauuuugauccaagcug

SEQ ID NO: 1167660 - RNA, 20 nt, Human
aggaugaucuaggaagacuu

SEQ ID NO: 1167661 - RNA, 14 nt, Human
aggaugcccaaaga

SEQ ID NO: 1167662 - RNA, 19 nt, Human
aggaugcccaaagaugcag

SEQ ID NO: 1167663 - RNA, 17 nt, Human
aggcaacucaucuuagg

SEQ ID NO: 1167664 - RNA, 19 nt, Human
aggcaacugcauuggcuuu

SEQ ID NO: 1167665 - RNA, 18 nt, Human
uggaauuggagcucgugg

SEQ ID NO: 1167666 - RNA, 15 nt, Human
uggacacagcucuuc

SEQ ID NO: 1167667 - RNA, 16 nt, Human
uggacacagcucuucu

SEQ ID NO: 1167668 - RNA, 18 nt, Human
uggacacagcucuucucc

SEQ ID NO: 1167669 - RNA, 21 nt, Human
uggacacagcucuucuccagg

SEQ ID NO: 1167670 - RNA, 12 nt, Human
uggacccugagg

SEQ ID NO: 1167671 - RNA, 13 nt, Human
uggacccugaggc

SEQ ID NO: 1167672 - RNA, 14 nt, Human
uggacccugaggcc

SEQ ID NO: 1167673 - RNA, 15 nt, Human
uggacccugaggccc

SEQ ID NO: 1167674 - RNA, 15 nt, Human
aggccacaagacccu

SEQ ID NO: 1167675 - RNA, 16 nt, Human
aggccacaagacccuu

SEQ ID NO: 1167676 - RNA, 16 nt, Human
uggaguucaucuugaa

SEQ ID NO: 1167677 - RNA, 17 nt, Human
uggaguucaucuugaau

SEQ ID NO: 1167678 - RNA, 20 nt, Human
uggaguucaucuugaauugu

SEQ ID NO: 1167679 - RNA, 18 nt, Human
uggaugccugguggcagc

SEQ ID NO: 1167680 - RNA, 19 nt, Human
uggaugccugguggcagcu

SEQ ID NO: 1167681 - RNA, 20 nt, Human
uggaugccugguggcagcug

SEQ ID NO: 1167682 - RNA, 18 nt, Human
uggacgagaaaacaauaa

SEQ ID NO: 1167683 - RNA, 18 nt, Human
aggcauuuguuugaacug

SEQ ID NO: 1167684 - RNA, 16 nt, Human
aggccaaacucaccug

SEQ ID NO: 1167685 - RNA, 20 nt, Human
aggccaaacucaccugcccc

SEQ ID NO: 1167686 - RNA, 14 nt, Human
aggccaaaggaagc

SEQ ID NO: 1167687 - RNA, 15 nt, Human
aggccaaaggaagca

SEQ ID NO: 1167688 - RNA, 23 nt, Human
aggccaaaggaagcacaugccuc

SEQ ID NO: 1167689 - RNA, 12 nt, Human
uggcagccccug

SEQ ID NO: 1167690 - RNA, 13 nt, Human
uggcagccuuggc

SEQ ID NO: 1167691 - RNA, 12 nt, Human
aggccagagaca

SEQ ID NO: 1167692 - RNA, 12 nt, Human
uggauguucuga

SEQ ID NO: 1167693 - RNA, 22 nt, Human
uggauuaaacuuaaucuaaaug

SEQ ID NO: 1167694 - RNA, 20 nt, Human
uggcacaucagcacgauuuc

SEQ ID NO: 1167695 - RNA, 21 nt, Human
uggcacaucagcacgauuucu

SEQ ID NO: 1167696 - RNA, 15 nt, Human
uggcacccggccccu

SEQ ID NO: 1167697 - RNA, 16 nt, Human
uggcacccggccccug

SEQ ID NO: 1167698 - RNA, 21 nt, Human
uggcagaguugaagacagagc

SEQ ID NO: 1167699 - RNA, 22 nt, Human
uggcagaguugaagacagagcu

SEQ ID NO: 1167700 - RNA, 12 nt, Human
uggcaugggaau

SEQ ID NO: 1167701 - RNA, 15 nt, Human
uggcaugggaaugaa

SEQ ID NO: 1167702 - RNA, 22 nt, Human
uggcaugggaaugaaugucagu

SEQ ID NO: 1167703 - RNA, 17 nt, Human
uggccaggcuggucuca

SEQ ID NO: 1167704 - RNA, 13 nt, Human
aggcccucugccc

SEQ ID NO: 1167705 - RNA, 14 nt, Human
aggcccucugccca

SEQ ID NO: 1167706 - RNA, 15 nt, Human
aggcccucugcccac

SEQ ID NO: 1167707 - RNA, 21 nt, Human
uggccccugcccggcugcgga

SEQ ID NO: 1167708 - RNA, 14 nt, Human
uggccucugcacuc

SEQ ID NO: 1167709 - RNA, 15 nt, Human
uggccucugcacucc

SEQ ID NO: 1167710 - RNA, 17 nt, Human
uggccucugcacucccc

SEQ ID NO: 1167711 - RNA, 23 nt, Human
uggccgggcgcgguggcucacgc

SEQ ID NO: 1167712 - RNA, 18 nt, Human
uggccucugcacuccccu

SEQ ID NO: 1167713 - RNA, 16 nt, Human
aggccuggccagaugc

SEQ ID NO: 1167714 - RNA, 17 nt, Human
aggccuggccagaugca

SEQ ID NO: 1167715 - RNA, 21 nt, Human
aggccuggccagaugcaccag

SEQ ID NO: 1167716 - RNA, 22 nt, Human
aggccuggccagaugcaccagc

SEQ ID NO: 1167717 - RNA, 23 nt, Human
aggccuggccagaugcaccagcc

SEQ ID NO: 1167718 - RNA, 12 nt, Human
uggccuggcccc

SEQ ID NO: 1167719 - RNA, 23 nt, Human
aggccugggggcugggcagagga

SEQ ID NO: 1167720 - RNA, 19 nt, Human
aggcuccuuuagcgcccag

SEQ ID NO: 1167721 - RNA, 12 nt, Human
aggcucgagcau

SEQ ID NO: 1167722 - RNA, 15 nt, Human
aggcucgagcaugcc

SEQ ID NO: 1167723 - RNA, 17 nt, Human
aggcucgagcaugccug

SEQ ID NO: 1167724 - RNA, 18 nt, Human
aggcucgagcaugccugg

SEQ ID NO: 1167725 - RNA, 19 nt, Human
aggcucgagcaugccugga

SEQ ID NO: 1167726 - RNA, 21 nt, Human
aggcucgagcaugccuggaug

SEQ ID NO: 1167727 - RNA, 11 nt, Human
aggcucucagg

SEQ ID NO: 1167728 - RNA, 12 nt, Human
aggcucucaggc

SEQ ID NO: 1167729 - RNA, 14 nt, Human
aggcucucaggcca

SEQ ID NO: 1167730 - RNA, 15 nt, Human
aggcucucaggccag

SEQ ID NO: 1167731 - RNA, 16 nt, Human
aggcucucaggccagc

SEQ ID NO: 1167732 - RNA, 18 nt, Human
aggcucucaggccagcug

SEQ ID NO: 1167733 - RNA, 19 nt, Human
aggcucucaggccagcugc

SEQ ID NO: 1167734 - RNA, 20 nt, Human
aggcucucaggccagcugcu

SEQ ID NO: 1167735 - RNA, 21 nt, Human
aggcucucaggccagcugcuu

SEQ ID NO: 1167736 - RNA, 11 nt, Human
aggcucugccc

SEQ ID NO: 1167737 - RNA, 12 nt, Human
aggcucugcccu

SEQ ID NO: 1167738 - RNA, 13 nt, Human
aggcucugcccuu

SEQ ID NO: 1167739 - RNA, 14 nt, Human
aggcucugcccuug

SEQ ID NO: 1167740 - RNA, 15 nt, Human
aggcucugcccuugg

SEQ ID NO: 1167741 - RNA, 16 nt, Human
aggcucugcccuuggu

SEQ ID NO: 1167742 - RNA, 13 nt, Human
aggcuggcgugca

SEQ ID NO: 1167743 - RNA, 17 nt, Human
aggcuggcgugcagugg

SEQ ID NO: 1167744 - RNA, 16 nt, Human
ugggaaaggggaaguu

SEQ ID NO: 1167745 - RNA, 11 nt, Human
uggcugcugaa

SEQ ID NO: 1167746 - RNA, 14 nt, Human
uggcugugucuccc

SEQ ID NO: 1167747 - RNA, 13 nt, Human
uggcuguuggcug

SEQ ID NO: 1167748 - RNA, 15 nt, Human
uggcuguuggcuggg

SEQ ID NO: 1167749 - RNA, 17 nt, Human
uggcuuaaaacaacacu

SEQ ID NO: 1167750 - RNA, 23 nt, Human
uggcuucacggaagagccuugcg

SEQ ID NO: 1167751 - RNA, 14 nt, Human
aggcugggagagcc

SEQ ID NO: 1167752 - RNA, 16 nt, Human
aggcugggagagccuu

SEQ ID NO: 1167753 - RNA, 18 nt, Human
aggcuggcgugcaguggu

SEQ ID NO: 1167754 - RNA, 20 nt, Human
aggcuggcgugcaguggugc

SEQ ID NO: 1167755 - RNA, 14 nt, Human
uggcuaugcauuug

SEQ ID NO: 1167756 - RNA, 15 nt, Human
uggcuaugcauuuga

SEQ ID NO: 1167757 - RNA, 17 nt, Human
uggcuaugcauuugaaa

SEQ ID NO: 1167758 - RNA, 19 nt, Human
uggcuaugcauuugaaaau

SEQ ID NO: 1167759 - RNA, 22 nt, Human
uggcuauuagagaucaaccccu

SEQ ID NO: 1167760 - RNA, 18 nt, Human
uggcucaaguccucuuuu

SEQ ID NO: 1167761 - RNA, 20 nt, Human
uggcucuuccaggcugggag

SEQ ID NO: 1167762 - RNA, 21 nt, Human
uggcucuuccaggcugggaga

SEQ ID NO: 1167763 - RNA, 12 nt, Human
uggcugcaaagg

SEQ ID NO: 1167764 - RNA, 13 nt, Human
uggcugcagggag

SEQ ID NO: 1167765 - RNA, 14 nt, Human
uggcugcagggagu

SEQ ID NO: 1167766 - RNA, 15 nt, Human
uggcugcagggaguc

SEQ ID NO: 1167767 - RNA, 18 nt, Human
uggcugccaaugggagcu

SEQ ID NO: 1167768 - RNA, 20 nt, Human
uggcugccaaugggagcuca

SEQ ID NO: 1167769 - RNA, 23 nt, Human
uggcugcaaaggguaucaggugc

SEQ ID NO: 1167770 - RNA, 16 nt, Human
aggggauagagagaga

SEQ ID NO: 1167771 - RNA, 16 nt, Human
aggguaucaggugcug

SEQ ID NO: 1167772 - RNA, 18 nt, Human
aggguaucaggugcugcc

SEQ ID NO: 1167773 - RNA, 19 nt, Human
aggguacuaaggaaucuuu

SEQ ID NO: 1167774 - RNA, 14 nt, Human
uggguggaugccug

SEQ ID NO: 1167775 - RNA, 23 nt, Human
uggguggaugccugguggcagcu

SEQ ID NO: 1167776 - RNA, 21 nt, Human
uggucaccaaaucagcugcua

SEQ ID NO: 1167777 - RNA, 23 nt, Human
uggucaccaaaucagcugcuacu

SEQ ID NO: 1167778 - RNA, 15 nt, Human
ugguccauagagagc

SEQ ID NO: 1167779 - RNA, 16 nt, Human
ugguccauagagagca

SEQ ID NO: 1167780 - RNA, 13 nt, Human
uggucccacccca

SEQ ID NO: 1167781 - RNA, 22 nt, Human
ugguccaugggccauaugaaaa

SEQ ID NO: 1167782 - RNA, 19 nt, Human
ugguccauagagagcaaga

SEQ ID NO: 1167783 - RNA, 22 nt, Human
uggucugugagaugcuagaacu

SEQ ID NO: 1167784 - RNA, 12 nt, Human
uggucuguguga

SEQ ID NO: 1167785 - RNA, 19 nt, Human
uggugaacagaacaaaagg

SEQ ID NO: 1167786 - RNA, 18 nt, Human
aggguggugaccucugcc

SEQ ID NO: 1167787 - RNA, 19 nt, Human
aggguggugaccucugccu

SEQ ID NO: 1167788 - RNA, 21 nt, Human
aggguggugaccucugccuga

SEQ ID NO: 1167789 - RNA, 13 nt, Human
aggguuggccccu

SEQ ID NO: 1167790 - RNA, 14 nt, Human
aggguuggccccug

SEQ ID NO: 1167791 - RNA, 17 nt, Human
aggguuggccccugccc

SEQ ID NO: 1167792 - RNA, 15 nt, Human
aggguugggcuggug

SEQ ID NO: 1167793 - RNA, 20 nt, Human
aggucuugaacuccuggccu

SEQ ID NO: 1167794 - RNA, 21 nt, Human
aggucuugaacuccuggccuc

SEQ ID NO: 1167795 - RNA, 22 nt, Human
aggucuugaacuccuggccuca

SEQ ID NO: 1167796 - RNA, 15 nt, Human
aggucagugcaaaua

SEQ ID NO: 1167797 - RNA, 21 nt, Human
aggucaaggcugcagugagcc

SEQ ID NO: 1167798 - RNA, 22 nt, Human
aggucauuuuuuuuaagaaaaa

SEQ ID NO: 1167799 - RNA, 23 nt, Human
aggucauuuuuuuuaagaaaaag

SEQ ID NO: 1167800 - RNA, 17 nt, Human
agguaugcaaucaaauc

SEQ ID NO: 1167801 - RNA, 17 nt, Human
aggguugggcugguguc

SEQ ID NO: 1167802 - RNA, 20 nt, Human
aggguuuauguuuaggaugu

SEQ ID NO: 1167803 - RNA, 12 nt, Human
ugguggcagcug

SEQ ID NO: 1167804 - RNA, 13 nt, Human
ugguggcagcugc

SEQ ID NO: 1167805 - RNA, 15 nt, Human
ugguggcagagugga

SEQ ID NO: 1167806 - RNA, 12 nt, Human
ugguggcagcuc

SEQ ID NO: 1167807 - RNA, 16 nt, Human
ugguggcagcucaccu

SEQ ID NO: 1167808 - RNA, 19 nt, Human
ugguggcagcucaccucuc

SEQ ID NO: 1167809 - RNA, 20 nt, Human
ugguggcagcucaccucucc

SEQ ID NO: 1167810 - RNA, 23 nt, Human
ugguggcagcucaccucucccuu

SEQ ID NO: 1167811 - RNA, 15 nt, Human
ugguguuuccuggca

SEQ ID NO: 1167812 - RNA, 17 nt, Human
ugguguuuccuggcacu

SEQ ID NO: 1167813 - RNA, 20 nt, Human
ugguucaggguuggccccug

SEQ ID NO: 1167814 - RNA, 22 nt, Human
ugguucaggguuggccccugcc

SEQ ID NO: 1167815 - RNA, 23 nt, Human
ugguucaggguuggccccugccc

SEQ ID NO: 1167816 - RNA, 23 nt, Human
aggugauccacccaccucagccu

SEQ ID NO: 1167817 - RNA, 16 nt, Human
uguaaaggaauuuaaa

SEQ ID NO: 1167818 - RNA, 13 nt, Human
ugguuuucuguuc

SEQ ID NO: 1167819 - RNA, 15 nt, Human
ugguuuucuguucuu

SEQ ID NO: 1167820 - RNA, 23 nt, Human
uguaaagaaagagagaaaauaaa

SEQ ID NO: 1167821 - RNA, 14 nt, Human
ugguuucagaaaug

SEQ ID NO: 1167822 - RNA, 15 nt, Human
ugguuucagaaaugu

SEQ ID NO: 1167823 - RNA, 12 nt, Human
ugguuuucuguu

SEQ ID NO: 1167824 - RNA, 13 nt, Human
agguggggcagcu

SEQ ID NO: 1167825 - RNA, 14 nt, Human
agguggggcagcuu

SEQ ID NO: 1167826 - RNA, 16 nt, Human
agguggggcagcuuga

SEQ ID NO: 1167827 - RNA, 20 nt, Human
aggugugacugaauuucuuu

SEQ ID NO: 1167828 - RNA, 14 nt, Human
aggugugagucacc

SEQ ID NO: 1167829 - RNA, 20 nt, Human
aggugugagucaccaagccc

SEQ ID NO: 1167830 - RNA, 22 nt, Human
aggugugaaccaccacacccag

SEQ ID NO: 1167831 - RNA, 23 nt, Human
aggugugaaccaccacacccagc

SEQ ID NO: 1167832 - RNA, 18 nt, Human
aggugugacugaauuucu

SEQ ID NO: 1167833 - RNA, 18 nt, Human
uguaagaaaauaucacuu

SEQ ID NO: 1167834 - RNA, 13 nt, Human
uguaaggaaugau

SEQ ID NO: 1167835 - RNA, 14 nt, Human
uguaaggaaugauu

SEQ ID NO: 1167836 - RNA, 15 nt, Human
uguaaggaaugauua

SEQ ID NO: 1167837 - RNA, 17 nt, Human
uguacaugaaaacacau

SEQ ID NO: 1167838 - RNA, 18 nt, Human
uguacaugaaaacacauu

SEQ ID NO: 1167839 - RNA, 19 nt, Human
uguacaugaaaacacauuu

SEQ ID NO: 1167840 - RNA, 20 nt, Human
uguacaugaaaacacauuuu

SEQ ID NO: 1167841 - RNA, 18 nt, Human
uguaaggaaugauuaauu

SEQ ID NO: 1167842 - RNA, 16 nt, Human
uguaauuugugauaca

SEQ ID NO: 1167843 - RNA, 17 nt, Human
uguaauuugugauacaa

SEQ ID NO: 1167844 - RNA, 21 nt, Human
uguaauuugugauacaaugcu

SEQ ID NO: 1167845 - RNA, 19 nt, Human
uguacaaaguagaagucuu

SEQ ID NO: 1167846 - RNA, 23 nt, Human
uguacaaaguagaagucuuagau

SEQ ID NO: 1167847 - RNA, 14 nt, Human
ugucaaagugguga

SEQ ID NO: 1167848 - RNA, 15 nt, Human
ugucaaaguggugag

SEQ ID NO: 1167849 - RNA, 16 nt, Human
ugucaaaguggugaga

SEQ ID NO: 1167850 - RNA, 19 nt, Human
ugucaaaguggugagaggc

SEQ ID NO: 1167851 - RNA, 13 nt, Human
aguagcugggacu

SEQ ID NO: 1167852 - RNA, 14 nt, Human
aguagcugggacua

SEQ ID NO: 1167853 - RNA, 12 nt, Human
uguagagccagg

SEQ ID NO: 1167854 - RNA, 15 nt, Human
uguagagccaggguc

SEQ ID NO: 1167855 - RNA, 15 nt, Human
uguaucccaugagcc

SEQ ID NO: 1167856 - RNA, 16 nt, Human
uguaucccaugagccu

SEQ ID NO: 1167857 - RNA, 14 nt, Human
uguauguguaagua

SEQ ID NO: 1167858 - RNA, 15 nt, Human
aguauuguccagguc

SEQ ID NO: 1167859 - RNA, 16 nt, Human
aguauuguccaggucu

SEQ ID NO: 1167860 - RNA, 20 nt, Human
agucacauuccaagccucau

SEQ ID NO: 1167861 - RNA, 15 nt, Human
agucacugagacagc

SEQ ID NO: 1167862 - RNA, 16 nt, Human
agucacugagacagcc

SEQ ID NO: 1167863 - RNA, 17 nt, Human
agucacugagacagccc

SEQ ID NO: 1167864 - RNA, 15 nt, Human
ugucagcauagaagu

SEQ ID NO: 1167865 - RNA, 15 nt, Human
aguauuauaccuuuu

SEQ ID NO: 1167866 - RNA, 14 nt, Human
aguauuauaccuuu

SEQ ID NO: 1167867 - RNA, 19 nt, Human
aguagcugggacuacaggc

SEQ ID NO: 1167868 - RNA, 21 nt, Human
aguagcugggacuacaggcac

SEQ ID NO: 1167869 - RNA, 22 nt, Human
aguagcugggacuacaggcacc

SEQ ID NO: 1167870 - RNA, 18 nt, Human
aguauguuagugcaaauu

SEQ ID NO: 1167871 - RNA, 21 nt, Human
aguauguuagugcaaauuguc

SEQ ID NO: 1167872 - RNA, 16 nt, Human
ugucagccauuccugu

SEQ ID NO: 1167873 - RNA, 18 nt, Human
agucacugagacagcccg

SEQ ID NO: 1167874 - RNA, 14 nt, Human
ugucccugcacuug

SEQ ID NO: 1167875 - RNA, 12 nt, Human
ugucccuuuucc

SEQ ID NO: 1167876 - RNA, 17 nt, Human
ugucccuuuuccuuuuu

SEQ ID NO: 1167877 - RNA, 21 nt, Human
agucccaccuuggcugcaggg

SEQ ID NO: 1167878 - RNA, 23 nt, Human
agucccaccuuggcugcagggag

SEQ ID NO: 1167879 - RNA, 14 nt, Human
aguccccuguuugu

SEQ ID NO: 1167880 - RNA, 19 nt, Human
aguccccuguuuguuucug

SEQ ID NO: 1167881 - RNA, 14 nt, Human
ugugaagcaaaauu

SEQ ID NO: 1167882 - RNA, 19 nt, Human
ugugagcacaaagguagcu

SEQ ID NO: 1167883 - RNA, 11 nt, Human
agugaaaaagg

SEQ ID NO: 1167884 - RNA, 17 nt, Human
agugaaaaaggaggaag

SEQ ID NO: 1167885 - RNA, 20 nt, Human
agugaaaaaggaggaagaga

SEQ ID NO: 1167886 - RNA, 23 nt, Human
agugaaaaaggaggaagagaaaa

SEQ ID NO: 1167887 - RNA, 21 nt, Human
agugagcagucaggaaagaga

SEQ ID NO: 1167888 - RNA, 14 nt, Human
agugagagcugggu

SEQ ID NO: 1167889 - RNA, 16 nt, Human
agugagccgagauugu

SEQ ID NO: 1167890 - RNA, 15 nt, Human
ugugauggggcccug

SEQ ID NO: 1167891 - RNA, 16 nt, Human
ugugauggggcccugc

SEQ ID NO: 1167892 - RNA, 17 nt, Human
ugugauggggcccugcc

SEQ ID NO: 1167893 - RNA, 18 nt, Human
ugugauggggcccugccu

SEQ ID NO: 1167894 - RNA, 20 nt, Human
agugaaacucguuaauuugu

SEQ ID NO: 1167895 - RNA, 14 nt, Human
agugagacagcucu

SEQ ID NO: 1167896 - RNA, 17 nt, Human
agugagacccugucuca

SEQ ID NO: 1167897 - RNA, 21 nt, Human
agugagacccugucucaaaaa

SEQ ID NO: 1167898 - RNA, 13 nt, Human
agugagacucugu

SEQ ID NO: 1167899 - RNA, 16 nt, Human
agugagacucugucuc

SEQ ID NO: 1167900 - RNA, 17 nt, Human
agugagacucugucuca

SEQ ID NO: 1167901 - RNA, 22 nt, Human
agugagacucugucucaaaaaa

SEQ ID NO: 1167902 - RNA, 23 nt, Human
aguccccuguuuguuucugaaag

SEQ ID NO: 1167903 - RNA, 13 nt, Human
agucccugccaau

SEQ ID NO: 1167904 - RNA, 14 nt, Human
agucccugccaaug

SEQ ID NO: 1167905 - RNA, 16 nt, Human
agucccugccaaugga

SEQ ID NO: 1167906 - RNA, 17 nt, Human
ugucucuacuaaaaaua

SEQ ID NO: 1167907 - RNA, 13 nt, Human
ugucucugagagu

SEQ ID NO: 1167908 - RNA, 18 nt, Human
ugucucuugguccugcug

SEQ ID NO: 1167909 - RNA, 19 nt, Human
ugucucuugguccugcugc

SEQ ID NO: 1167910 - RNA, 20 nt, Human
ugucucuugguccugcugca

SEQ ID NO: 1167911 - RNA, 21 nt, Human
ugucucuugguccugcugcag

SEQ ID NO: 1167912 - RNA, 22 nt, Human
ugucucuugguccugcugcagu

SEQ ID NO: 1167913 - RNA, 21 nt, Human
ugucucuuuaaugucacaggc

SEQ ID NO: 1167914 - RNA, 22 nt, Human
ugucucuuuaaugucacaggca

SEQ ID NO: 1167915 - RNA, 15 nt, Human
ugucuugcaauggca

SEQ ID NO: 1167916 - RNA, 17 nt, Human
ugucuugcaauggcagc

SEQ ID NO: 1167917 - RNA, 18 nt, Human
ugucuugcaauggcagcc

SEQ ID NO: 1167918 - RNA, 20 nt, Human
ugucuugcaauggcagccuu

SEQ ID NO: 1167919 - RNA, 21 nt, Human
ugucuugcaauggcagccuug

SEQ ID NO: 1167920 - RNA, 17 nt, Human
ugucuuuaaaugcugcu

SEQ ID NO: 1167921 - RNA, 15 nt, Human
ugugaaccaccacac

SEQ ID NO: 1167922 - RNA, 16 nt, Human
ugugaaccaccacacc

SEQ ID NO: 1167923 - RNA, 17 nt, Human
ugugaaccaccacaccc

SEQ ID NO: 1167924 - RNA, 22 nt, Human
ugugaaccaccacacccagccc

SEQ ID NO: 1167925 - RNA, 23 nt, Human
ugugaaccaccacacccagccca

SEQ ID NO: 1167926 - RNA, 23 nt, Human
aguguacauggaauaacauguaa

SEQ ID NO: 1167927 - RNA, 13 nt, Human
uguucugggacac

SEQ ID NO: 1167928 - RNA, 14 nt, Human
uguucugggacaca

SEQ ID NO: 1167929 - RNA, 15 nt, Human
uguucugggacacag

SEQ ID NO: 1167930 - RNA, 14 nt, Human
uguucuuaauucuu

SEQ ID NO: 1167931 - RNA, 16 nt, Human
uguucuuaauucuuag

SEQ ID NO: 1167932 - RNA, 17 nt, Human
uguucuugguuuguaaa

SEQ ID NO: 1167933 - RNA, 18 nt, Human
uguucuugguuuguaaau

SEQ ID NO: 1167934 - RNA, 19 nt, Human
uguucuugguuuguaaauu

SEQ ID NO: 1167935 - RNA, 13 nt, Human
uguucuuuccaaa

SEQ ID NO: 1167936 - RNA, 14 nt, Human
uguucuuuccaaag

SEQ ID NO: 1167937 - RNA, 21 nt, Human
aguguacauggaauaacaugu

SEQ ID NO: 1167938 - RNA, 22 nt, Human
aguguacauggaauaacaugua

SEQ ID NO: 1167939 - RNA, 19 nt, Human
agugggugaauaauacagu

SEQ ID NO: 1167940 - RNA, 16 nt, Human
aguggugcgaucuggg

SEQ ID NO: 1167941 - RNA, 21 nt, Human
agugguuccuaauccucuagg

SEQ ID NO: 1167942 - RNA, 12 nt, Human
aguggcagcugc

SEQ ID NO: 1167943 - RNA, 13 nt, Human
aguggcagcugcu

SEQ ID NO: 1167944 - RNA, 14 nt, Human
aguggcagcugcuu

SEQ ID NO: 1167945 - RNA, 20 nt, Human
aguggcagcugcuuuugucu

SEQ ID NO: 1167946 - RNA, 19 nt, Human
agugggggaguggccacag

SEQ ID NO: 1167947 - RNA, 20 nt, Human
agugggggaguggccacaga

SEQ ID NO: 1167948 - RNA, 18 nt, Human
agugggggaucacagccu

SEQ ID NO: 1167949 - RNA, 13 nt, Human
agugggugaauaa

SEQ ID NO: 1167950 - RNA, 18 nt, Human
agugggugaauaauacag

SEQ ID NO: 1167951 - RNA, 21 nt, Human
aguuauuuuuauuuauuuaaa

SEQ ID NO: 1167952 - RNA, 13 nt, Human
uguugucagcuga

SEQ ID NO: 1167953 - RNA, 13 nt, Human
uguugggccagga

SEQ ID NO: 1167954 - RNA, 16 nt, Human
uguugggccaggagcc

SEQ ID NO: 1167955 - RNA, 20 nt, Human
aguuauuauauuuacaaaug

SEQ ID NO: 1167956 - RNA, 18 nt, Human
uguucuuuccaaaguaca

SEQ ID NO: 1167957 - RNA, 20 nt, Human
uguucuuuccaaaguacacu

SEQ ID NO: 1167958 - RNA, 17 nt, Human
uuaaaccgccaaggcug

SEQ ID NO: 1167959 - RNA, 13 nt, Human
uuaaauaaaucau

SEQ ID NO: 1167960 - RNA, 15 nt, Human
uuaaauaaaucauaa

SEQ ID NO: 1167961 - RNA, 20 nt, Human
uuaaauaaugugaaacugga

SEQ ID NO: 1167962 - RNA, 21 nt, Human
uuaaauaaugugaaacuggau

SEQ ID NO: 1167963 - RNA, 22 nt, Human
uuaaauaaugugaaacuggauu

SEQ ID NO: 1167964 - RNA, 20 nt, Human
aguugccagucaccccggcc

SEQ ID NO: 1167965 - RNA, 15 nt, Human
uuaaaaaagaaacau

SEQ ID NO: 1167966 - RNA, 18 nt, Human
uuaaaaaagaaacauuug

SEQ ID NO: 1167967 - RNA, 19 nt, Human
uuaaaaaagaaacauuugg

SEQ ID NO: 1167968 - RNA, 18 nt, Human
uuaaaaaguggaaaaaua

SEQ ID NO: 1167969 - RNA, 17 nt, Human
uuaaaacaacacucaca

SEQ ID NO: 1167970 - RNA, 21 nt, Human
aguuucuccaagcaggacaug

SEQ ID NO: 1167971 - RNA, 13 nt, Human
aguuucuccaagc

SEQ ID NO: 1167972 - RNA, 15 nt, Human
aguuucuccaagcag

SEQ ID NO: 1167973 - RNA, 13 nt, Human
uuaaauucuugca

SEQ ID NO: 1167974 - RNA, 16 nt, Human
uuaaauucuugcaaag

SEQ ID NO: 1167975 - RNA, 20 nt, Human
uuaaauucuugcaaaguauc

SEQ ID NO: 1167976 - RNA, 22 nt, Human
aguuuucacucuuauugcccac

SEQ ID NO: 1167977 - RNA, 13 nt, Human
aguucucuccuuc

SEQ ID NO: 1167978 - RNA, 16 nt, Human
aguucucuccuucuuc

SEQ ID NO: 1167979 - RNA, 15 nt, Human
uguuuucucuugaga

SEQ ID NO: 1167980 - RNA, 17 nt, Human
uguuuucaguguacaug

SEQ ID NO: 1167981 - RNA, 13 nt, Human
uguuuuauaauuu

SEQ ID NO: 1167982 - RNA, 20 nt, Human
uguuuuauaauuuugugaag

SEQ ID NO: 1167983 - RNA, 15 nt, Human
uguuuucaguguaca

SEQ ID NO: 1167984 - RNA, 14 nt, Human
uguugucagcugaa

SEQ ID NO: 1167985 - RNA, 14 nt, Human
uguuugccucugcc

SEQ ID NO: 1167986 - RNA, 16 nt, Human
uguuugccucugccuc

SEQ ID NO: 1167987 - RNA, 15 nt, Human
uguuugcuaagcauu

SEQ ID NO: 1167988 - RNA, 19 nt, Human
uguuugcuaagcauuccaa

SEQ ID NO: 1167989 - RNA, 15 nt, Human
uguuuggggaugaga

SEQ ID NO: 1167990 - RNA, 19 nt, Human
uguuuggggaugagaaagg

SEQ ID NO: 1167991 - RNA, 13 nt, Human
aguucugaagaag

SEQ ID NO: 1167992 - RNA, 14 nt, Human
aguucugaagaaga

SEQ ID NO: 1167993 - RNA, 15 nt, Human
aguucugaagaagau

SEQ ID NO: 1167994 - RNA, 16 nt, Human
aguucugaagaagaug

SEQ ID NO: 1167995 - RNA, 15 nt, Human
aguugauagcacaga

SEQ ID NO: 1167996 - RNA, 19 nt, Human
aguugauagcacagacccu

SEQ ID NO: 1167997 - RNA, 20 nt, Human
aguugauagcacagacccug

SEQ ID NO: 1167998 - RNA, 21 nt, Human
aguugauagcacagacccugc

SEQ ID NO: 1167999 - RNA, 22 nt, Human
aguugauagcacagacccugcc

SEQ ID NO: 1168000 - RNA, 23 nt, Human
aguugauagcacagacccugccc

SEQ ID NO: 1168001 - RNA, 21 nt, Human
aguugauaugccuuuucccaa

SEQ ID NO: 1168002 - RNA, 13 nt, Human
aguugauucagcu

SEQ ID NO: 1168003 - RNA, 14 nt, Human
aguugauucagcuc

SEQ ID NO: 1168004 - RNA, 15 nt, Human
aguugauucagcucu

SEQ ID NO: 1168005 - RNA, 17 nt, Human
aguugauucagcucugc

SEQ ID NO: 1168006 - RNA, 18 nt, Human
aguugauucagcucugca

SEQ ID NO: 1168007 - RNA, 23 nt, Human
aguugauucagcucugcaagaau

SEQ ID NO: 1168008 - RNA, 18 nt, Human
uuauauaagcuuguauuc

SEQ ID NO: 1168009 - RNA, 13 nt, Human
auaauuuugugaa

SEQ ID NO: 1168010 - RNA, 14 nt, Human
auaauuuugugaag

SEQ ID NO: 1168011 - RNA, 15 nt, Human
auaauuuugugaagc

SEQ ID NO: 1168012 - RNA, 20 nt, Human
auaauuuugugaagcaaaau

SEQ ID NO: 1168013 - RNA, 14 nt, Human
auaauuuuuauauu

SEQ ID NO: 1168014 - RNA, 16 nt, Human
auaauuuuuauauuug

SEQ ID NO: 1168015 - RNA, 19 nt, Human
auaauuuuuauauuugaaa

SEQ ID NO: 1168016 - RNA, 21 nt, Human
auaauuuuuauauuugaaaua

SEQ ID NO: 1168017 - RNA, 22 nt, Human
auaauuuuuauauuugaaauau

SEQ ID NO: 1168018 - RNA, 22 nt, Human
auacaaaaaaaaaaaaaaauua

SEQ ID NO: 1168019 - RNA, 12 nt, Human
auacaaaagcau

SEQ ID NO: 1168020 - RNA, 13 nt, Human
auacaaaagcaug

SEQ ID NO: 1168021 - RNA, 15 nt, Human
auacaaaagcaugug

SEQ ID NO: 1168022 - RNA, 22 nt, Human
auaccacaggaaccacaagacu

SEQ ID NO: 1168023 - RNA, 19 nt, Human
auaccagccaguaaauggg

SEQ ID NO: 1168024 - RNA, 21 nt, Human
auacuaaccagcagaaaugcc

SEQ ID NO: 1168025 - RNA, 13 nt, Human
auacuacaguuug

SEQ ID NO: 1168026 - RNA, 15 nt, Human
auacuacaguuuguu

SEQ ID NO: 1168027 - RNA, 16 nt, Human
auacuacaguuuguua

SEQ ID NO: 1168028 - RNA, 20 nt, Human
auacuacaguuuguuaguau

SEQ ID NO: 1168029 - RNA, 16 nt, Human
auacauuugauaaagu

SEQ ID NO: 1168030 - RNA, 20 nt, Human
auacaucccuuaccugggaa

SEQ ID NO: 1168031 - RNA, 20 nt, Human
auacauaaacaagaccacgu

SEQ ID NO: 1168032 - RNA, 14 nt, Human
auacaggaaaagcu

SEQ ID NO: 1168033 - RNA, 19 nt, Human
auacaggaaaagcugcuga

SEQ ID NO: 1168034 - RNA, 20 nt, Human
auacaggaaaagcugcugac

SEQ ID NO: 1168035 - RNA, 22 nt, Human
auacaggaaaagcugcugacag

SEQ ID NO: 1168036 - RNA, 14 nt, Human
auaaugaauacuuu

SEQ ID NO: 1168037 - RNA, 15 nt, Human
auaaugaaugaaaca

SEQ ID NO: 1168038 - RNA, 14 nt, Human
auaauucuacuuug

SEQ ID NO: 1168039 - RNA, 19 nt, Human
auaauacaguaucucaggg

SEQ ID NO: 1168040 - RNA, 23 nt, Human
uuagaugcaguucugaagaagau

SEQ ID NO: 1168041 - RNA, 12 nt, Human
uuaccugggaaa

SEQ ID NO: 1168042 - RNA, 22 nt, Human
auaagaaccuuuugagugccuu

SEQ ID NO: 1168043 - RNA, 23 nt, Human
auaagaaccuuuugagugccuua

SEQ ID NO: 1168044 - RNA, 17 nt, Human
auaaguuaacuuccaau

SEQ ID NO: 1168045 - RNA, 22 nt, Human
auaaguuaacuuccaauuuaca

SEQ ID NO: 1168046 - RNA, 23 nt, Human
auaauacaccacuacauucuguu

SEQ ID NO: 1168047 - RNA, 13 nt, Human
auaaacuuuaccu

SEQ ID NO: 1168048 - RNA, 15 nt, Human
auaaacuuuaccuuu

SEQ ID NO: 1168049 - RNA, 16 nt, Human
auaaacuuuaccuuuu

SEQ ID NO: 1168050 - RNA, 20 nt, Human
auaaccaguguuguggauuu

SEQ ID NO: 1168051 - RNA, 12 nt, Human
auaacuggaaac

SEQ ID NO: 1168052 - RNA, 16 nt, Human
uuacaggaaguacugg

SEQ ID NO: 1168053 - RNA, 18 nt, Human
uuacaggaaguacuggag

SEQ ID NO: 1168054 - RNA, 22 nt, Human
uuacaggaaguacuggagaaaa

SEQ ID NO: 1168055 - RNA, 23 nt, Human
uuaccauuuugggguacccacug

SEQ ID NO: 1168056 - RNA, 14 nt, Human
uucaggguuggccc

SEQ ID NO: 1168057 - RNA, 16 nt, Human
uucaggguuggccccu

SEQ ID NO: 1168058 - RNA, 17 nt, Human
uucaggguuggccccug

SEQ ID NO: 1168059 - RNA, 19 nt, Human
uucaggguuggccccugcc

SEQ ID NO: 1168060 - RNA, 22 nt, Human
uucaggguuggccccugcccgg

SEQ ID NO: 1168061 - RNA, 15 nt, Human
uucagguaacaggca

SEQ ID NO: 1168062 - RNA, 16 nt, Human
uucagguaacaggcag

SEQ ID NO: 1168063 - RNA, 14 nt, Human
uucagccaagaauu

SEQ ID NO: 1168064 - RNA, 20 nt, Human
uucagccugccuucuuuucu

SEQ ID NO: 1168065 - RNA, 17 nt, Human
uucagcgguuuauauaa

SEQ ID NO: 1168066 - RNA, 16 nt, Human
uucagaaauguguuau

SEQ ID NO: 1168067 - RNA, 13 nt, Human
auauaugcuaagu

SEQ ID NO: 1168068 - RNA, 15 nt, Human
uucaucaaugaauga

SEQ ID NO: 1168069 - RNA, 18 nt, Human
uucaucauccuaagcuau

SEQ ID NO: 1168070 - RNA, 21 nt, Human
auauauguuuuaagaggcagg

SEQ ID NO: 1168071 - RNA, 22 nt, Human
auauauguuuuaagaggcaggg

SEQ ID NO: 1168072 - RNA, 16 nt, Human
uucagugccaaaaaca

SEQ ID NO: 1168073 - RNA, 17 nt, Human
uucagguaacaggcaga

SEQ ID NO: 1168074 - RNA, 14 nt, Human
uucaguaagccgug

SEQ ID NO: 1168075 - RNA, 18 nt, Human
uuccaccaucaagccacc

SEQ ID NO: 1168076 - RNA, 21 nt, Human
uuccacaagagcccaggccuc

SEQ ID NO: 1168077 - RNA, 22 nt, Human
uuccacaagagcccaggccucc

SEQ ID NO: 1168078 - RNA, 15 nt, Human
uuccaggcugggaga

SEQ ID NO: 1168079 - RNA, 17 nt, Human
uuccaggcugggagagc

SEQ ID NO: 1168080 - RNA, 17 nt, Human
uuccaggggugggacac

SEQ ID NO: 1168081 - RNA, 18 nt, Human
uuccagguuuaagcuguu

SEQ ID NO: 1168082 - RNA, 22 nt, Human
uuccaauuuacauacucugcuu

SEQ ID NO: 1168083 - RNA, 23 nt, Human
auauguaccuaacgaaguauccu

SEQ ID NO: 1168084 - RNA, 20 nt, Human
auauguggaguucaucuuga

SEQ ID NO: 1168085 - RNA, 21 nt, Human
auauguggaguucaucuugaa

SEQ ID NO: 1168086 - RNA, 15 nt, Human
uuccagugaggcucu

SEQ ID NO: 1168087 - RNA, 16 nt, Human
uuccagugaggcucug

SEQ ID NO: 1168088 - RNA, 17 nt, Human
uuccagugaggcucugc

SEQ ID NO: 1168089 - RNA, 16 nt, Human
auauuaagaaagacua

SEQ ID NO: 1168090 - RNA, 17 nt, Human
auauuaagaaagacuau

SEQ ID NO: 1168091 - RNA, 22 nt, Human
auauuaagaaagacuaucuaaa

SEQ ID NO: 1168092 - RNA, 17 nt, Human
auauuaccacagacaua

SEQ ID NO: 1168093 - RNA, 19 nt, Human
auauuaccacagacauacu

SEQ ID NO: 1168094 - RNA, 15 nt, Human
auauugauaugcuua

SEQ ID NO: 1168095 - RNA, 22 nt, Human
auauugcugauggugcaaugac

SEQ ID NO: 1168096 - RNA, 13 nt, Human
auauuuacaaaug

SEQ ID NO: 1168097 - RNA, 14 nt, Human
auauuguuugcuaa

SEQ ID NO: 1168098 - RNA, 13 nt, Human
auauuguuuucag

SEQ ID NO: 1168099 - RNA, 17 nt, Human
auauuguuuucagugua

SEQ ID NO: 1168100 - RNA, 22 nt, Human
uuccucuuuuuauuuaguuccu

SEQ ID NO: 1168101 - RNA, 20 nt, Human
uuccuggcacugcuuccagu

SEQ ID NO: 1168102 - RNA, 22 nt, Human
uuccuggcacugcuuccaguga

SEQ ID NO: 1168103 - RNA, 21 nt, Human
aucaacugcaucaagauguga

SEQ ID NO: 1168104 - RNA, 21 nt, Human
aucaaggguacacugccuucu

SEQ ID NO: 1168105 - RNA, 13 nt, Human
aucaauuuaaaaa

SEQ ID NO: 1168106 - RNA, 15 nt, Human
aucacgccacugcac

SEQ ID NO: 1168107 - RNA, 17 nt, Human
aucacgccacugcacua

SEQ ID NO: 1168108 - RNA, 19 nt, Human
aucagucugauucccaagc

SEQ ID NO: 1168109 - RNA, 23 nt, Human
aucacuugaacccgggaggcaga

SEQ ID NO: 1168110 - RNA, 15 nt, Human
aucaggugcugccau

SEQ ID NO: 1168111 - RNA, 17 nt, Human
aucaggugcugccaucc

SEQ ID NO: 1168112 - RNA, 19 nt, Human
aucaggugcugccauccag

SEQ ID NO: 1168113 - RNA, 15 nt, Human
aucauaaaacuugau

SEQ ID NO: 1168114 - RNA, 21 nt, Human
aucauccacugugccaugugc

SEQ ID NO: 1168115 - RNA, 23 nt, Human
aucauccacugugccaugugcca

SEQ ID NO: 1168116 - RNA, 16 nt, Human
aucauuaggugugacu

SEQ ID NO: 1168117 - RNA, 21 nt, Human
uucucuaguuugauuaaauuc

SEQ ID NO: 1168118 - RNA, 12 nt, Human
aucauugaaauc

SEQ ID NO: 1168119 - RNA, 13 nt, Human
aucauugaaaucu

SEQ ID NO: 1168120 - RNA, 17 nt, Human
auccagguucagcuugu

SEQ ID NO: 1168121 - RNA, 14 nt, Human
auccaguaucuuga

SEQ ID NO: 1168122 - RNA, 15 nt, Human
auccaguaucuugaa

SEQ ID NO: 1168123 - RNA, 15 nt, Human
uucugccugcccagg

SEQ ID NO: 1168124 - RNA, 16 nt, Human
uucugccugcccaggc

SEQ ID NO: 1168125 - RNA, 17 nt, Human
uucugccugcccaggcc

SEQ ID NO: 1168126 - RNA, 11 nt, Human
aucccagcccc

SEQ ID NO: 1168127 - RNA, 12 nt, Human
aucccagcccca

SEQ ID NO: 1168128 - RNA, 16 nt, Human
aucccaugagccucag

SEQ ID NO: 1168129 - RNA, 17 nt, Human
aucccaugagccucagc

SEQ ID NO: 1168130 - RNA, 18 nt, Human
aucccaugagccucagca

SEQ ID NO: 1168131 - RNA, 17 nt, Human
aucccugaaggccccgc

SEQ ID NO: 1168132 - RNA, 22 nt, Human
aucccugaaggccccgcccagg

SEQ ID NO: 1168133 - RNA, 13 nt, Human
uucuguuuagaua

SEQ ID NO: 1168134 - RNA, 18 nt, Human
uucuguuuagauaauaca

SEQ ID NO: 1168135 - RNA, 16 nt, Human
uucuguuuuauaauuu

SEQ ID NO: 1168136 - RNA, 17 nt, Human
uucuguuuuauaauuuu

SEQ ID NO: 1168137 - RNA, 22 nt, Human
uucuucuccacuuucuagccag

SEQ ID NO: 1168138 - RNA, 11 nt, Human
uucuucucccu

SEQ ID NO: 1168139 - RNA, 12 nt, Human
uucuuucuggcu

SEQ ID NO: 1168140 - RNA, 17 nt, Human
uucuuucuggcuaugca

SEQ ID NO: 1168141 - RNA, 20 nt, Human
uucuuucuggcuaugcauuu

SEQ ID NO: 1168142 - RNA, 22 nt, Human
uucuuucuggcuaugcauuuga

SEQ ID NO: 1168143 - RNA, 15 nt, Human
aucuaaauguugaaa

SEQ ID NO: 1168144 - RNA, 14 nt, Human
aucgucacugcuua

SEQ ID NO: 1168145 - RNA, 18 nt, Human
aucgucacugcuuaacuu

SEQ ID NO: 1168146 - RNA, 14 nt, Human
aucgugacaacacu

SEQ ID NO: 1168147 - RNA, 15 nt, Human
aucgugacaacacuu

SEQ ID NO: 1168148 - RNA, 17 nt, Human
uugacacuuaaaaaugg

SEQ ID NO: 1168149 - RNA, 15 nt, Human
uugagaucagccugg

SEQ ID NO: 1168150 - RNA, 16 nt, Human
uugaggucuguucuuu

SEQ ID NO: 1168151 - RNA, 12 nt, Human
uugauaaaguaa

SEQ ID NO: 1168152 - RNA, 24 nt, Human
uugaccauucuccaccugccaggg

SEQ ID NO: 1168153 - RNA, 14 nt, Human
uugacccacaagaa

SEQ ID NO: 1168154 - RNA, 19 nt, Human
uugacacuuaaaaaugguu

SEQ ID NO: 1168155 - RNA, 13 nt, Human
uugacaucaacug

SEQ ID NO: 1168156 - RNA, 18 nt, Human
uugaccauucuccaccug

SEQ ID NO: 1168157 - RNA, 19 nt, Human
uugaccauucuccaccugc

SEQ ID NO: 1168158 - RNA, 15 nt, Human
auccuggaguucugg

SEQ ID NO: 1168159 - RNA, 17 nt, Human
auccuggcacccggccc

SEQ ID NO: 1168160 - RNA, 19 nt, Human
auccuggcacccggccccu

SEQ ID NO: 1168161 - RNA, 20 nt, Human
auccuggcacccggccccug

SEQ ID NO: 1168162 - RNA, 21 nt, Human
auccuggcacccggccccugc

SEQ ID NO: 1168163 - RNA, 22 nt, Human
auccuggcacccggccccugcu

SEQ ID NO: 1168164 - RNA, 23 nt, Human
auccuggcacccggccccugcug

SEQ ID NO: 1168165 - RNA, 20 nt, Human
auccuggcugucgagaaaca

SEQ ID NO: 1168166 - RNA, 20 nt, Human
auccucuguacagagcccac

SEQ ID NO: 1168167 - RNA, 20 nt, Human
uucuuuugccguuauuaaaa

SEQ ID NO: 1168168 - RNA, 17 nt, Human
auccucuuugagugaag

SEQ ID NO: 1168169 - RNA, 11 nt, Human
auccugagcca

SEQ ID NO: 1168170 - RNA, 12 nt, Human
auccugagccag

SEQ ID NO: 1168171 - RNA, 13 nt, Human
auccugagccaga

SEQ ID NO: 1168172 - RNA, 14 nt, Human
auccugagccagau

SEQ ID NO: 1168173 - RNA, 15 nt, Human
auccugagccagauu

SEQ ID NO: 1168174 - RNA, 17 nt, Human
auccugagccagauuuc

SEQ ID NO: 1168175 - RNA, 21 nt, Human
auccugagccagauuucacuc

SEQ ID NO: 1168176 - RNA, 11 nt, Human
auccugaggcu

SEQ ID NO: 1168177 - RNA, 13 nt, Human
auccugaggcucc

SEQ ID NO: 1168178 - RNA, 16 nt, Human
auccugaggcuccacu

SEQ ID NO: 1168179 - RNA, 18 nt, Human
auccugaggcuccacuug

SEQ ID NO: 1168180 - RNA, 22 nt, Human
auccugaggcuccacuuggucu

SEQ ID NO: 1168181 - RNA, 16 nt, Human
auccugcaauuccacu

SEQ ID NO: 1168182 - RNA, 13 nt, Human
auccugccccuga

SEQ ID NO: 1168183 - RNA, 20 nt, Human
augaaagacuguacaaagua

SEQ ID NO: 1168184 - RNA, 21 nt, Human
augaaauauuauguuaaaacu

SEQ ID NO: 1168185 - RNA, 14 nt, Human
augaaaugagguca

SEQ ID NO: 1168186 - RNA, 22 nt, Human
uuggcgcugccccuggcagccc

SEQ ID NO: 1168187 - RNA, 16 nt, Human
uuggcugcugaaggcu

SEQ ID NO: 1168188 - RNA, 18 nt, Human
uuggaaagaguaggaaga

SEQ ID NO: 1168189 - RNA, 23 nt, Human
uuggaaagaguaggaagacuuug

SEQ ID NO: 1168190 - RNA, 21 nt, Human
uuggcuagagguucaaagaua

SEQ ID NO: 1168191 - RNA, 22 nt, Human
uuggcuagagguucaaagauau

SEQ ID NO: 1168192 - RNA, 22 nt, Human
uuggcuaggaccccuccaugug

SEQ ID NO: 1168193 - RNA, 23 nt, Human
uuggcuauuagagaucaaccccu

SEQ ID NO: 1168194 - RNA, 14 nt, Human
uuggcugcagggag

SEQ ID NO: 1168195 - RNA, 11 nt, Human
uuggcugcuga

SEQ ID NO: 1168196 - RNA, 15 nt, Human
uuggcugcugaaggc

SEQ ID NO: 1168197 - RNA, 17 nt, Human
uugcugauggugcaaug

SEQ ID NO: 1168198 - RNA, 18 nt, Human
uugcugauggugcaauga

SEQ ID NO: 1168199 - RNA, 19 nt, Human
uugcugauggugcaaugac

SEQ ID NO: 1168200 - RNA, 17 nt, Human
uuggaaagaguaggaag

SEQ ID NO: 1168201 - RNA, 20 nt, Human
uugcuaagugaggaugaaaa

SEQ ID NO: 1168202 - RNA, 11 nt, Human
uugcucaugga

SEQ ID NO: 1168203 - RNA, 12 nt, Human
uugcucauggaa

SEQ ID NO: 1168204 - RNA, 19 nt, Human
uugcugaauacagaggcaa

SEQ ID NO: 1168205 - RNA, 14 nt, Human
uuguaaggaaugau

SEQ ID NO: 1168206 - RNA, 22 nt, Human
uugggguacccacugcucuggu

SEQ ID NO: 1168207 - RNA, 19 nt, Human
uugguuaggcauuguggga

SEQ ID NO: 1168208 - RNA, 13 nt, Human
augaaccacaucu

SEQ ID NO: 1168209 - RNA, 20 nt, Human
augaaccacaucuugcucug

SEQ ID NO: 1168210 - RNA, 22 nt, Human
augaaccacaucuugcucugcu

SEQ ID NO: 1168211 - RNA, 18 nt, Human
augaauuacauuuguaua

SEQ ID NO: 1168212 - RNA, 19 nt, Human
augaauuacauuuguauaa

SEQ ID NO: 1168213 - RNA, 22 nt, Human
augaauuacauuuguauaaaau

SEQ ID NO: 1168214 - RNA, 19 nt, Human
uuggggaagaacgaagcca

SEQ ID NO: 1168215 - RNA, 17 nt, Human
uugggguacccacugcu

SEQ ID NO: 1168216 - RNA, 19 nt, Human
augacacgaauauugcuga

SEQ ID NO: 1168217 - RNA, 20 nt, Human
augacacgaauauugcugau

SEQ ID NO: 1168218 - RNA, 21 nt, Human
augaauuaguuuuauaugcuu

SEQ ID NO: 1168219 - RNA, 23 nt, Human
augaauuaguuuuauaugcuucu

SEQ ID NO: 1168220 - RNA, 20 nt, Human
uuguaaggaaugauuaauua

SEQ ID NO: 1168221 - RNA, 13 nt, Human
uuguauaaaauaa

SEQ ID NO: 1168222 - RNA, 15 nt, Human
uuguauaaaauaauu

SEQ ID NO: 1168223 - RNA, 15 nt, Human
augaucuaggaagac

SEQ ID NO: 1168224 - RNA, 14 nt, Human
augaucuucuuuau

SEQ ID NO: 1168225 - RNA, 23 nt, Human
augaucacggcucacugcagccu

SEQ ID NO: 1168226 - RNA, 16 nt, Human
augauccuaggcauuu

SEQ ID NO: 1168227 - RNA, 15 nt, Human
augaucacggcucac

SEQ ID NO: 1168228 - RNA, 18 nt, Human
augaucacggcucacugc

SEQ ID NO: 1168229 - RNA, 19 nt, Human
augaucacggcucacugca

SEQ ID NO: 1168230 - RNA, 18 nt, Human
uugugaagcaaaauuuuu

SEQ ID NO: 1168231 - RNA, 19 nt, Human
augcaccuggaauauauaa

SEQ ID NO: 1168232 - RNA, 15 nt, Human
augaucuucuuuaua

SEQ ID NO: 1168233 - RNA, 18 nt, Human
augaucuucuuuauaauu

SEQ ID NO: 1168234 - RNA, 16 nt, Human
augcaaaccaucauug

SEQ ID NO: 1168235 - RNA, 18 nt, Human
augcaaaccaucauugaa

SEQ ID NO: 1168236 - RNA, 19 nt, Human
augcaaaccaucauugaaa

SEQ ID NO: 1168237 - RNA, 20 nt, Human
augcaaaccaucauugaaau

SEQ ID NO: 1168238 - RNA, 21 nt, Human
augcaaaccaucauugaaauc

SEQ ID NO: 1168239 - RNA, 22 nt, Human
augcaaaccaucauugaaaucu

SEQ ID NO: 1168240 - RNA, 14 nt, Human
augcaaggucauuu

SEQ ID NO: 1168241 - RNA, 16 nt, Human
augcaaggucauuuuu

SEQ ID NO: 1168242 - RNA, 22 nt, Human
augcaaggucauuuuuuuuaag

SEQ ID NO: 1168243 - RNA, 16 nt, Human
augcaccuggaauaua

SEQ ID NO: 1168244 - RNA, 12 nt, Human
augagaggaaau

SEQ ID NO: 1168245 - RNA, 13 nt, Human
augagaggaaauc

SEQ ID NO: 1168246 - RNA, 14 nt, Human
augagaggaaauca

SEQ ID NO: 1168247 - RNA, 15 nt, Human
augagaggaaaucac

SEQ ID NO: 1168248 - RNA, 16 nt, Human
augagaggaaaucacc

SEQ ID NO: 1168249 - RNA, 15 nt, Human
augagcaucaggcca

SEQ ID NO: 1168250 - RNA, 16 nt, Human
augagcaucaggccag

SEQ ID NO: 1168251 - RNA, 17 nt, Human
augagcaucaggccagg

SEQ ID NO: 1168252 - RNA, 18 nt, Human
augagcaucaggccaggc

SEQ ID NO: 1168253 - RNA, 19 nt, Human
augagcaucaggccaggcc

SEQ ID NO: 1168254 - RNA, 20 nt, Human
augagcaucaggccaggccc

SEQ ID NO: 1168255 - RNA, 21 nt, Human
augagcaucaggccaggcccu

SEQ ID NO: 1168256 - RNA, 22 nt, Human
augagcaucaggccaggcccuc

SEQ ID NO: 1168257 - RNA, 12 nt, Human
augagccucagc

SEQ ID NO: 1168258 - RNA, 15 nt, Human
augagccucagcauc

SEQ ID NO: 1168259 - RNA, 16 nt, Human
augagccucagcaucc

SEQ ID NO: 1168260 - RNA, 17 nt, Human
augagccucagcauccu

SEQ ID NO: 1168261 - RNA, 18 nt, Human
augagccucagcauccug

SEQ ID NO: 1168262 - RNA, 19 nt, Human
augagccucagcauccugg

SEQ ID NO: 1168263 - RNA, 15 nt, Human
augauaaaacacaaa

SEQ ID NO: 1168264 - RNA, 14 nt, Human
augauaacuggaaa

SEQ ID NO: 1168265 - RNA, 16 nt, Human
augcgggccagugcuc

SEQ ID NO: 1168266 - RNA, 18 nt, Human
augcuacaggauuugaaa

SEQ ID NO: 1168267 - RNA, 18 nt, Human
augcuacacacugcaugu

SEQ ID NO: 1168268 - RNA, 17 nt, Human
augcuacacacugcaug

SEQ ID NO: 1168269 - RNA, 14 nt, Human
uuuaccuuuuuuau

SEQ ID NO: 1168270 - RNA, 19 nt, Human
uuuaccuuuuuuauacaua

SEQ ID NO: 1168271 - RNA, 20 nt, Human
uuuaccuuuuuuauacauaa

SEQ ID NO: 1168272 - RNA, 21 nt, Human
uuuaccuuuuuuauacauaaa

SEQ ID NO: 1168273 - RNA, 14 nt, Human
uuuacuaauagaca

SEQ ID NO: 1168274 - RNA, 17 nt, Human
uuuacuaauagacaauu

SEQ ID NO: 1168275 - RNA, 18 nt, Human
uuuacuaauagacaauuu

SEQ ID NO: 1168276 - RNA, 20 nt, Human
uuuagcuggaaaaguauguu

SEQ ID NO: 1168277 - RNA, 15 nt, Human
uuuaguagagacagg

SEQ ID NO: 1168278 - RNA, 13 nt, Human
uuuagauaauaca

SEQ ID NO: 1168279 - RNA, 15 nt, Human
uuuagauaauacacc

SEQ ID NO: 1168280 - RNA, 17 nt, Human
uuuauaugcuucuguuu

SEQ ID NO: 1168281 - RNA, 19 nt, Human
uuuauaugcuucuguuuua

SEQ ID NO: 1168282 - RNA, 19 nt, Human
uuuauuaaaugcccagccc

SEQ ID NO: 1168283 - RNA, 14 nt, Human
augcuguauuuuaa

SEQ ID NO: 1168284 - RNA, 19 nt, Human
augcuguauuuuaaaagaa

SEQ ID NO: 1168285 - RNA, 19 nt, Human
augcugugcccuaaagugu

SEQ ID NO: 1168286 - RNA, 22 nt, Human
augcugugcccuaaaguguauu

SEQ ID NO: 1168287 - RNA, 19 nt, Human
uuuauuacuguaagaaaau

SEQ ID NO: 1168288 - RNA, 13 nt, Human
uuuauuaugcaug

SEQ ID NO: 1168289 - RNA, 14 nt, Human
auggaauaacaugu

SEQ ID NO: 1168290 - RNA, 15 nt, Human
auggaauaacaugua

SEQ ID NO: 1168291 - RNA, 16 nt, Human
uuuauuuuaauaaugu

SEQ ID NO: 1168292 - RNA, 18 nt, Human
auggaacacucugagacu

SEQ ID NO: 1168293 - RNA, 21 nt, Human
auggaaguacuauaauuuacc

SEQ ID NO: 1168294 - RNA, 14 nt, Human
uuucacucuccuug

SEQ ID NO: 1168295 - RNA, 15 nt, Human
uuucacucuccuugg

SEQ ID NO: 1168296 - RNA, 24 nt, Human
uuucacucuuauugcccacgcugg

SEQ ID NO: 1168297 - RNA, 23 nt, Human
auggaauuggagcucgugggaca

SEQ ID NO: 1168298 - RNA, 19 nt, Human
uuuccagguuuaagcuguu

SEQ ID NO: 1168299 - RNA, 13 nt, Human
augggagcucaug

SEQ ID NO: 1168300 - RNA, 19 nt, Human
augggcaacccccagccug

SEQ ID NO: 1168301 - RNA, 21 nt, Human
augggcaacccccagccugcu

SEQ ID NO: 1168302 - RNA, 13 nt, Human
augggcagagcag

SEQ ID NO: 1168303 - RNA, 14 nt, Human
augggcagagcaga

SEQ ID NO: 1168304 - RNA, 15 nt, Human
augggcagagcagag

SEQ ID NO: 1168305 - RNA, 15 nt, Human
augggccuccugugu

SEQ ID NO: 1168306 - RNA, 21 nt, Human
auggacccaauauuuaccaga

SEQ ID NO: 1168307 - RNA, 18 nt, Human
auggccucuucagaucuc

SEQ ID NO: 1168308 - RNA, 22 nt, Human
augggacauuugcucauggaau

SEQ ID NO: 1168309 - RNA, 18 nt, Human
uuucgcaggauucuuccu

SEQ ID NO: 1168310 - RNA, 22 nt, Human
uuucgcaggauucuuccucccu

SEQ ID NO: 1168311 - RNA, 17 nt, Human
augggccuccugugugu

SEQ ID NO: 1168312 - RNA, 12 nt, Human
uuuccugugucu

SEQ ID NO: 1168313 - RNA, 11 nt, Human
uuuccuucagu

SEQ ID NO: 1168314 - RNA, 12 nt, Human
uuuccuucagug

SEQ ID NO: 1168315 - RNA, 15 nt, Human
uuuccuucagugccu

SEQ ID NO: 1168316 - RNA, 18 nt, Human
uuuccuucagugccuuau

SEQ ID NO: 1168317 - RNA, 21 nt, Human
uuuccuucagugccuuaugga

SEQ ID NO: 1168318 - RNA, 22 nt, Human
uuuccuucagugccuuauggaa

SEQ ID NO: 1168319 - RNA, 21 nt, Human
uuuccuucauucaacccaccu

SEQ ID NO: 1168320 - RNA, 23 nt, Human
uuuccuucauucaacccaccugc

SEQ ID NO: 1168321 - RNA, 14 nt, Human
uuucugccgcagcc

SEQ ID NO: 1168322 - RNA, 16 nt, Human
uuucugccgcagcccu

SEQ ID NO: 1168323 - RNA, 14 nt, Human
uuucuaaagcugcc

SEQ ID NO: 1168324 - RNA, 13 nt, Human
uuucuaugaaaua

SEQ ID NO: 1168325 - RNA, 14 nt, Human
uuucuaugaaauau

SEQ ID NO: 1168326 - RNA, 20 nt, Human
uuucuaugaaauauuauguu

SEQ ID NO: 1168327 - RNA, 15 nt, Human
uuucuaugacacaug

SEQ ID NO: 1168328 - RNA, 21 nt, Human
uuucuaugacacaugcaaggu

SEQ ID NO: 1168329 - RNA, 13 nt, Human
uuucuuuguggcu

SEQ ID NO: 1168330 - RNA, 14 nt, Human
uuugaaauauugac

SEQ ID NO: 1168331 - RNA, 15 nt, Human
uuugaaauauugacu

SEQ ID NO: 1168332 - RNA, 23 nt, Human
augggcuggguucuacccaggug

SEQ ID NO: 1168333 - RNA, 14 nt, Human
auggggcccugccu

SEQ ID NO: 1168334 - RNA, 20 nt, Human
augugcuaguaauuggaaag

SEQ ID NO: 1168335 - RNA, 20 nt, Human
auguggaguucaucuugaau

SEQ ID NO: 1168336 - RNA, 24 nt, Human
auguggaguucaucuugaauugua

SEQ ID NO: 1168337 - RNA, 20 nt, Human
auggggcccugccuccuuug

SEQ ID NO: 1168338 - RNA, 12 nt, Human
auggggcugcac

SEQ ID NO: 1168339 - RNA, 12 nt, Human
uuuuaauaaugu

SEQ ID NO: 1168340 - RNA, 13 nt, Human
uuuuaauaauguu

SEQ ID NO: 1168341 - RNA, 14 nt, Human
uuuuaauaauguuu

SEQ ID NO: 1168342 - RNA, 16 nt, Human
uuuuaauaauguuuca

SEQ ID NO: 1168343 - RNA, 22 nt, Human
augugccagguuuuuggucuga

SEQ ID NO: 1168344 - RNA, 20 nt, Human
uuuuaauaauguuucaaaca

SEQ ID NO: 1168345 - RNA, 19 nt, Human
augugcuaguaauuggaaa

SEQ ID NO: 1168346 - RNA, 18 nt, Human
auguucaucaaugaauga

SEQ ID NO: 1168347 - RNA, 12 nt, Human
auguugcccagg

SEQ ID NO: 1168348 - RNA, 17 nt, Human
auguugcccaggcaggu

SEQ ID NO: 1168349 - RNA, 20 nt, Human
auguugcccaggcaggucuu

SEQ ID NO: 1168350 - RNA, 16 nt, Human
auuaaacuuaaucuaa

SEQ ID NO: 1168351 - RNA, 19 nt, Human
auuaaaaaucucaaauuuc

SEQ ID NO: 1168352 - RNA, 20 nt, Human
auuaaaaaucucaaauuucu

SEQ ID NO: 1168353 - RNA, 22 nt, Human
auuaaaaaucucaaauuucuaa

SEQ ID NO: 1168354 - RNA, 17 nt, Human
auguuuucaggcuagau

SEQ ID NO: 1168355 - RNA, 21 nt, Human
auguuuucaggcuagauguau

SEQ ID NO: 1168356 - RNA, 11 nt, Human
uuuuauuuuau

SEQ ID NO: 1168357 - RNA, 13 nt, Human
uuuuauuaugcau

SEQ ID NO: 1168358 - RNA, 20 nt, Human
uuuucauuuaggugaggaag

SEQ ID NO: 1168359 - RNA, 14 nt, Human
uuuucucuaggaaa

SEQ ID NO: 1168360 - RNA, 16 nt, Human
uuuucucuaggaaaua

SEQ ID NO: 1168361 - RNA, 17 nt, Human
uuuugugcauuaucuag

SEQ ID NO: 1168362 - RNA, 20 nt, Human
uuuugugcauuaucuagaua

SEQ ID NO: 1168363 - RNA, 23 nt, Human
uuuugugcauuaucuagauacug

SEQ ID NO: 1168364 - RNA, 15 nt, Human
uuuuguuccacaagu

SEQ ID NO: 1168365 - RNA, 21 nt, Human
uuuuguuccacaaguuaaaua

SEQ ID NO: 1168366 - RNA, 22 nt, Human
uuuuuagacagagucucacugu

SEQ ID NO: 1168367 - RNA, 11 nt, Human
uuuuuacuaau

SEQ ID NO: 1168368 - RNA, 23 nt, Human
uuuuuauacauaaacaagaccac

SEQ ID NO: 1168369 - RNA, 19 nt, Human
uuuuuauauuugaaauauu

SEQ ID NO: 1168370 - RNA, 20 nt, Human
uuuuuaucgucacugcuuaa

SEQ ID NO: 1168371 - RNA, 12 nt, Human
uuuuuauggcuu

SEQ ID NO: 1168372 - RNA, 17 nt, Human
uuuugagugccuuacac

SEQ ID NO: 1168373 - RNA, 17 nt, Human
uuuugauccaagcuggu

SEQ ID NO: 1168374 - RNA, 23 nt, Human
uuuugccauguuggccaggcugg

SEQ ID NO: 1168375 - RNA, 12 nt, Human
auuacuucugcu

SEQ ID NO: 1168376 - RNA, 19 nt, Human
uuuuugugaaaagcuccau

SEQ ID NO: 1168377 - RNA, 19 nt, Human
uuuuuguagagccaggguc

SEQ ID NO: 1168378 - RNA, 20 nt, Human
uuuuuguagagccagggucu

SEQ ID NO: 1168379 - RNA, 22 nt, Human
uuuuuguuccacaaguuaaaua

SEQ ID NO: 1168380 - RNA, 23 nt, Human
auuaaguaaugauaacuggaaac

SEQ ID NO: 1168381 - RNA, 20 nt, Human
uuuuuauggcuuuugugcau

SEQ ID NO: 1168382 - RNA, 21 nt, Human
uuuuuauggcuuuugugcauu

SEQ ID NO: 1168383 - RNA, 22 nt, Human
uuuuuauggcuuuugugcauua

SEQ ID NO: 1168384 - RNA, 14 nt, Human
auuaaguacuaugu

SEQ ID NO: 1168385 - RNA, 16 nt, Human
auuaaguacuauguau

SEQ ID NO: 1168386 - RNA, 17 nt, Human
auuacauuuguauaaaa

SEQ ID NO: 1168387 - RNA, 18 nt, Human
auuacauuuguauaaaau

SEQ ID NO: 1168388 - RNA, 20 nt, Human
auuacauuuguauaaaauaa

SEQ ID NO: 1168389 - RNA, 19 nt, Human
auucuccaccugccaggga

SEQ ID NO: 1168390 - RNA, 20 nt, Human
auucuccaccugccagggac

SEQ ID NO: 1168391 - RNA, 21 nt, Human
auucuccaccugccagggaca

SEQ ID NO: 1168392 - RNA, 11 nt, Human
auucuccugcc

SEQ ID NO: 1168393 - RNA, 13 nt, Human
auucuccugccuc

SEQ ID NO: 1168394 - RNA, 14 nt, Human
auucuccugccuca

SEQ ID NO: 1168395 - RNA, 15 nt, Human
auucuccugccucag

SEQ ID NO: 1168396 - RNA, 17 nt, Human
auucuccugccucagcc

SEQ ID NO: 1168397 - RNA, 19 nt, Human
auucuccugccucagccuc

SEQ ID NO: 1168398 - RNA, 20 nt, Human
auucuccugccucagccucc

SEQ ID NO: 1168399 - RNA, 16 nt, Human
auucuccuuguguuac

SEQ ID NO: 1168400 - RNA, 14 nt, Human
auucccaagcucug

SEQ ID NO: 1168401 - RNA, 15 nt, Human
auucccaagcucugc

SEQ ID NO: 1168402 - RNA, 16 nt, Human
auucccaagcucugcu

SEQ ID NO: 1168403 - RNA, 17 nt, Human
auucccaagcucugcuc

SEQ ID NO: 1168404 - RNA, 14 nt, Human
auucaggaagcuca

SEQ ID NO: 1168405 - RNA, 17 nt, Human
auucaggaagcucaggg

SEQ ID NO: 1168406 - RNA, 19 nt, Human
auucaggaagcucagggcc

SEQ ID NO: 1168407 - RNA, 20 nt, Human
auucaggaagcucagggccu

SEQ ID NO: 1168408 - RNA, 15 nt, Human
auucaguaauaacuc

SEQ ID NO: 1168409 - RNA, 19 nt, Human
auucaguaauaacucuacc

SEQ ID NO: 1168410 - RNA, 12 nt, Human
auugaaaucuuu

SEQ ID NO: 1168411 - RNA, 19 nt, Human
auuuauuuuaauaauguuu

SEQ ID NO: 1168412 - RNA, 20 nt, Human
auuuauuuuaauaauguuuc

SEQ ID NO: 1168413 - RNA, 21 nt, Human
auuuauuuuaauaauguuuca

SEQ ID NO: 1168414 - RNA, 17 nt, Human
auuuccagccaaagccu

SEQ ID NO: 1168415 - RNA, 15 nt, Human
auuuccguuaaaaua

SEQ ID NO: 1168416 - RNA, 16 nt, Human
auuuccguuaaaauac

SEQ ID NO: 1168417 - RNA, 17 nt, Human
auuuccguuaaaauacc

SEQ ID NO: 1168418 - RNA, 14 nt, Human
auuugaaaauuuug

SEQ ID NO: 1168419 - RNA, 15 nt, Human
auuugaaaauuuuga

SEQ ID NO: 1168420 - RNA, 14 nt, Human
auuugaaauauuga

SEQ ID NO: 1168421 - RNA, 13 nt, Human
auuuauucugcuc

SEQ ID NO: 1168422 - RNA, 12 nt, Human
auuuaacagaaa

SEQ ID NO: 1168423 - RNA, 14 nt, Human
auuuaacagaaaug

SEQ ID NO: 1168424 - RNA, 15 nt, Human
auuuaacagaaaugu

SEQ ID NO: 1168425 - RNA, 14 nt, Human
auuuacuucuuaua

SEQ ID NO: 1168426 - RNA, 16 nt, Human
auuuacuucuuauaca

SEQ ID NO: 1168427 - RNA, 17 nt, Human
auuuacuucuuauacau

SEQ ID NO: 1168428 - RNA, 15 nt, Human
auuuagaaauauaau

SEQ ID NO: 1168429 - RNA, 13 nt, Human
auuuagauguaua

SEQ ID NO: 1168430 - RNA, 14 nt, Human
auuuauucugcuca

SEQ ID NO: 1168431 - RNA, 14 nt, Human
auugugucucuugg

SEQ ID NO: 1168432 - RNA, 18 nt, Human
auugugucucuugguccu

SEQ ID NO: 1168433 - RNA, 16 nt, Human
auugucaaagugguga

SEQ ID NO: 1168434 - RNA, 17 nt, Human
auuguccccgacccuug

SEQ ID NO: 1168435 - RNA, 19 nt, Human
auuguccccgacccuugcc

SEQ ID NO: 1168436 - RNA, 20 nt, Human
auuguccccgacccuugccg

SEQ ID NO: 1168437 - RNA, 14 nt, Human
auucuuauuuaaug

SEQ ID NO: 1168438 - RNA, 18 nt, Human
auucuuauuuaaugaaag

SEQ ID NO: 1168439 - RNA, 13 nt, Human
auucuuauuuaau

SEQ ID NO: 1168440 - RNA, 22 nt, Human
auucuuccucccucccucuuuc

SEQ ID NO: 1168441 - RNA, 13 nt, Human
auucuucuccacu

SEQ ID NO: 1168442 - RNA, 17 nt, Human
auucuccuuguguuacu

SEQ ID NO: 1168443 - RNA, 21 nt, Human
auugacccacaagaaaugaaa

SEQ ID NO: 1168444 - RNA, 18 nt, Human
auugacccacaagaaaug

SEQ ID NO: 1168445 - RNA, 22 nt, Human
auuuucaguuauuauauuuaca

SEQ ID NO: 1168446 - RNA, 18 nt, Human
auuuguauaaaauaauuu

SEQ ID NO: 1168447 - RNA, 19 nt, Human
auuuguauaaaauaauuuu

SEQ ID NO: 1168448 - RNA, 21 nt, Human
auuuguauaaaauaauuuuua

SEQ ID NO: 1168449 - RNA, 14 nt, Human
auuugugauacaau

SEQ ID NO: 1168450 - RNA, 15 nt, Human
auuugugauacaaug

SEQ ID NO: 1168451 - RNA, 18 nt, Human
auuuuaaaagaaugauua

SEQ ID NO: 1168452 - RNA, 22 nt, Human
auuuuaaaagaaugauuaugaa

SEQ ID NO: 1168453 - RNA, 15 nt, Human
auuuuaauucaguug

SEQ ID NO: 1168454 - RNA, 20 nt, Human
cagaaguuucugccgcagcc

SEQ ID NO: 1168455 - RNA, 21 nt, Human
cagaaguuucugccgcagccc

SEQ ID NO: 1168456 - RNA, 22 nt, Human
cagaaguuucugccgcagcccu

SEQ ID NO: 1168457 - RNA, 23 nt, Human
cagaaguuucugccgcagcccug

SEQ ID NO: 1168458 - RNA, 15 nt, Human
cacuguugcccaggc

SEQ ID NO: 1168459 - RNA, 16 nt, Human
cacuguugcccaggcu

SEQ ID NO: 1168460 - RNA, 17 nt, Human
cacuggugacaugucuu

SEQ ID NO: 1168461 - RNA, 22 nt, Human
cacugggcuuggggaccagagc

SEQ ID NO: 1168462 - RNA, 23 nt, Human
cacugggcuuggggaccagagcu

SEQ ID NO: 1168463 - RNA, 19 nt, Human
cacuguuucaaacuuuacu

SEQ ID NO: 1168464 - RNA, 17 nt, Human
cacuguugcccaggcug

SEQ ID NO: 1168465 - RNA, 20 nt, Human
cacuuggucugugagaugcu

SEQ ID NO: 1168466 - RNA, 14 nt, Human
caccugccagggac

SEQ ID NO: 1168467 - RNA, 16 nt, Human
caccugccagggacag

SEQ ID NO: 1168468 - RNA, 21 nt, Human
caccuacaugagguacugaga

SEQ ID NO: 1168469 - RNA, 17 nt, Human
caccuuuguccccaccg

SEQ ID NO: 1168470 - RNA, 14 nt, Human
caccuuugucccca

SEQ ID NO: 1168471 - RNA, 15 nt, Human
caccuuuguccccac

SEQ ID NO: 1168472 - RNA, 17 nt, Human
caccugccagggacaga

SEQ ID NO: 1168473 - RNA, 19 nt, Human
caccuugacagggcacacc

SEQ ID NO: 1168474 - RNA, 13 nt, Human
caccuuggcucaa

SEQ ID NO: 1168475 - RNA, 14 nt, Human
caccuuggcucaag

SEQ ID NO: 1168476 - RNA, 23 nt, Human
cacuacggaauaguuggcuagga

SEQ ID NO: 1168477 - RNA, 17 nt, Human
cacggccaggccagagg

SEQ ID NO: 1168478 - RNA, 20 nt, Human
cacggagggugacgggggug

SEQ ID NO: 1168479 - RNA, 14 nt, Human
cacggccaggccag

SEQ ID NO: 1168480 - RNA, 15 nt, Human
cacggccaggccaga

SEQ ID NO: 1168481 - RNA, 16 nt, Human
cacggccaggccagag

SEQ ID NO: 1168482 - RNA, 17 nt, Human
cacucuuauugcccacg

SEQ ID NO: 1168483 - RNA, 18 nt, Human
cacucuuauugcccacgc

SEQ ID NO: 1168484 - RNA, 19 nt, Human
cacucuuauugcccacgcu

SEQ ID NO: 1168485 - RNA, 11 nt, Human
cacugaagaag

SEQ ID NO: 1168486 - RNA, 22 nt, Human
caaugcugugcccuaaagugua

SEQ ID NO: 1168487 - RNA, 12 nt, Human
caauauuucaga

SEQ ID NO: 1168488 - RNA, 20 nt, Human
caauauuucagauaaucaca

SEQ ID NO: 1168489 - RNA, 21 nt, Human
caauauuucagauaaucacaa

SEQ ID NO: 1168490 - RNA, 22 nt, Human
caaugcuggcuguuggcugggg

SEQ ID NO: 1168491 - RNA, 23 nt, Human
caaugcuggcuguuggcuggggg

SEQ ID NO: 1168492 - RNA, 14 nt, Human
caaugcuguauuuu

SEQ ID NO: 1168493 - RNA, 15 nt, Human
caaugcuguauuuua

SEQ ID NO: 1168494 - RNA, 13 nt, Human
cacaagcuccaag

SEQ ID NO: 1168495 - RNA, 14 nt, Human
cacaagccuucggc

SEQ ID NO: 1168496 - RNA, 12 nt, Human
caauuuaaaaaa

SEQ ID NO: 1168497 - RNA, 14 nt, Human
cacaagacccuugu

SEQ ID NO: 1168498 - RNA, 16 nt, Human
cacaagacccuugugg

SEQ ID NO: 1168499 - RNA, 16 nt, Human
cacaagacugcacauc

SEQ ID NO: 1168500 - RNA, 18 nt, Human
cacaagacugcacaucaa

SEQ ID NO: 1168501 - RNA, 14 nt, Human
caaguauuagaaua

SEQ ID NO: 1168502 - RNA, 20 nt, Human
caaguauuagaauaccacag

SEQ ID NO: 1168503 - RNA, 13 nt, Human
caaguauuauacc

SEQ ID NO: 1168504 - RNA, 19 nt, Human
cacagacccugcccugugg

SEQ ID NO: 1168505 - RNA, 20 nt, Human
cacagacccugcccuguggg

SEQ ID NO: 1168506 - RNA, 21 nt, Human
cacagacccugcccugugggc

SEQ ID NO: 1168507 - RNA, 18 nt, Human
cacagacauacuaaccag

SEQ ID NO: 1168508 - RNA, 22 nt, Human
cacagacccugcccugugggcc

SEQ ID NO: 1168509 - RNA, 15 nt, Human
cacagcuaacaugga

SEQ ID NO: 1168510 - RNA, 16 nt, Human
cacagcuaacauggaa

SEQ ID NO: 1168511 - RNA, 22 nt, Human
cacagcuaacauggaaguacua

SEQ ID NO: 1168512 - RNA, 20 nt, Human
cacagcucuguccugggagu

SEQ ID NO: 1168513 - RNA, 23 nt, Human
cacagcucuguccugggagugag

SEQ ID NO: 1168514 - RNA, 10 nt, Human
cacagcucuu

SEQ ID NO: 1168515 - RNA, 16 nt, Human
cacaguauuacuucug

SEQ ID NO: 1168516 - RNA, 18 nt, Human
cacaguauuacuucugcu

SEQ ID NO: 1168517 - RNA, 19 nt, Human
cacaguauuacuucugcua

SEQ ID NO: 1168518 - RNA, 20 nt, Human
cacaucagcacgauuucugu

SEQ ID NO: 1168519 - RNA, 21 nt, Human
cacaucagcacgauuucuguu

SEQ ID NO: 1168520 - RNA, 22 nt, Human
cacaucagcacgauuucuguuu

SEQ ID NO: 1168521 - RNA, 17 nt, Human
cacaucuugcucugcug

SEQ ID NO: 1168522 - RNA, 18 nt, Human
cacaucuugcucugcuga

SEQ ID NO: 1168523 - RNA, 19 nt, Human
cacaucuugcucugcugac

SEQ ID NO: 1168524 - RNA, 15 nt, Human
cacauuuuauuuuau

SEQ ID NO: 1168525 - RNA, 17 nt, Human
cacauuuuauuuuauua

SEQ ID NO: 1168526 - RNA, 13 nt, Human
cacauuuuucuua

SEQ ID NO: 1168527 - RNA, 14 nt, Human
cacauuuuucuuag

SEQ ID NO: 1168528 - RNA, 17 nt, Human
cacauuuuuuaaaugca

SEQ ID NO: 1168529 - RNA, 21 nt, Human
cacauuuuuuaaaugcaccug

SEQ ID NO: 1168530 - RNA, 20 nt, Human
caccaacauacucccaucug

SEQ ID NO: 1168531 - RNA, 21 nt, Human
caccaacauacucccaucugu

SEQ ID NO: 1168532 - RNA, 24 nt, Human
cacccaggagccccgaggccuucu

SEQ ID NO: 1168533 - RNA, 19 nt, Human
cacccagcccacuucugcc

SEQ ID NO: 1168534 - RNA, 20 nt, Human
cacccaggagccccgaggcc

SEQ ID NO: 1168535 - RNA, 23 nt, Human
cacccaggagccccgaggccuuc

SEQ ID NO: 1168536 - RNA, 23 nt, Human
caccaacauacucccaucuguga

SEQ ID NO: 1168537 - RNA, 14 nt, Human
caccagcagccugg

SEQ ID NO: 1168538 - RNA, 15 nt, Human
caccagcagccugga

SEQ ID NO: 1168539 - RNA, 17 nt, Human
cacccagcccacuucug

SEQ ID NO: 1168540 - RNA, 21 nt, Human
caaaucugcuuuuuaaagaau

SEQ ID NO: 1168541 - RNA, 23 nt, Human
caacaaaccuguuucugcagcca

SEQ ID NO: 1168542 - RNA, 13 nt, Human
caaagaugcagcc

SEQ ID NO: 1168543 - RNA, 14 nt, Human
caaagaugcagccg

SEQ ID NO: 1168544 - RNA, 16 nt, Human
caaaguacacuguuuc

SEQ ID NO: 1168545 - RNA, 20 nt, Human
caaaguacacuguuucaaac

SEQ ID NO: 1168546 - RNA, 21 nt, Human
caaaguacacuguuucaaacu

SEQ ID NO: 1168547 - RNA, 22 nt, Human
caaaguacacuguuucaaacuu

SEQ ID NO: 1168548 - RNA, 20 nt, Human
caacaccuuguuucccucuc

SEQ ID NO: 1168549 - RNA, 22 nt, Human
caacaccucugcacaagcugca

SEQ ID NO: 1168550 - RNA, 19 nt, Human
caacccaaauguucaucaa

SEQ ID NO: 1168551 - RNA, 15 nt, Human
caacccccagccugc

SEQ ID NO: 1168552 - RNA, 16 nt, Human
caacccccagccugcu

SEQ ID NO: 1168553 - RNA, 17 nt, Human
caacccccagccugcua

SEQ ID NO: 1168554 - RNA, 18 nt, Human
caagacccuugugguccc

SEQ ID NO: 1168555 - RNA, 19 nt, Human
caagacccuugugguccca

SEQ ID NO: 1168556 - RNA, 22 nt, Human
caagacccuuguggucccaccc

SEQ ID NO: 1168557 - RNA, 23 nt, Human
caagacccuuguggucccacccc

SEQ ID NO: 1168558 - RNA, 13 nt, Human
caacucaccccag

SEQ ID NO: 1168559 - RNA, 15 nt, Human
caacucaccccagcc

SEQ ID NO: 1168560 - RNA, 16 nt, Human
caacucaccccagccc

SEQ ID NO: 1168561 - RNA, 17 nt, Human
caacucaccccagcccc

SEQ ID NO: 1168562 - RNA, 18 nt, Human
caaccacugcgaccacaa

SEQ ID NO: 1168563 - RNA, 17 nt, Human
auuuuauagcuacuaau

SEQ ID NO: 1168564 - RNA, 20 nt, Human
auuuguuugaacugauaaag

SEQ ID NO: 1168565 - RNA, 14 nt, Human
auuuguuugaacug

SEQ ID NO: 1168566 - RNA, 16 nt, Human
auuuguuugaacugau

SEQ ID NO: 1168567 - RNA, 13 nt, Human
auuuguuugaacu

SEQ ID NO: 1168568 - RNA, 18 nt, Human
auuuugauccaagcuggu

SEQ ID NO: 1168569 - RNA, 15 nt, Human
caaaagcugggcagg

SEQ ID NO: 1168570 - RNA, 19 nt, Human
caaaagcugggcagguugg

SEQ ID NO: 1168571 - RNA, 13 nt, Human
auuuuuaagugcu

SEQ ID NO: 1168572 - RNA, 13 nt, Human
auuuuuuuuuccu

SEQ ID NO: 1168573 - RNA, 16 nt, Human
auuuuuuuuuccuuca

SEQ ID NO: 1168574 - RNA, 17 nt, Human
auuuuuuuuuccuucag

SEQ ID NO: 1168575 - RNA, 16 nt, Human
auuucagcagcugcag

SEQ ID NO: 1168576 - RNA, 14 nt, Human
auuuaaugaaagac

SEQ ID NO: 1168577 - RNA, 15 nt, Human
auuuaaugaaagacu

SEQ ID NO: 1168578 - RNA, 19 nt, Human
auuucuguuuagauaauac

SEQ ID NO: 1168579 - RNA, 12 nt, Human
auuucuguuuag

SEQ ID NO: 1168580 - RNA, 14 nt, Human
auuucuguuuagau

SEQ ID NO: 1168581 - RNA, 16 nt, Human
auuucuguuuagauaa

SEQ ID NO: 1168582 - RNA, 15 nt, Human
auuucuaugaaauau

SEQ ID NO: 1168583 - RNA, 18 nt, Human
auuucuaugaaauauuau

SEQ ID NO: 1168584 - RNA, 20 nt, Human
auuucuaugaaauauuaugu

SEQ ID NO: 1168585 - RNA, 23 nt, Human
auuguaauaggcguaacuaauuu

SEQ ID NO: 1168586 - RNA, 16 nt, Human
auuguaaggaaugauu

SEQ ID NO: 1168587 - RNA, 15 nt, Human
auuguaaggaaugau

SEQ ID NO: 1168588 - RNA, 13 nt, Human
auuguaaaauggu

SEQ ID NO: 1168589 - RNA, 19 nt, Human
auuguucuuaguuugcagu

SEQ ID NO: 1168590 - RNA, 18 nt, Human
auucacaagacccaaaag

SEQ ID NO: 1168591 - RNA, 21 nt, Human
auuauguuaaaacugggacag

SEQ ID NO: 1168592 - RNA, 14 nt, Human
auuaaauucuugca

SEQ ID NO: 1168593 - RNA, 18 nt, Human
auuaaauucuugcaaagu

SEQ ID NO: 1168594 - RNA, 20 nt, Human
auuaaauucuugcaaaguau

SEQ ID NO: 1168595 - RNA, 19 nt, Human
auucacaagacccaaaagg

SEQ ID NO: 1168596 - RNA, 18 nt, Human
auucauauuuacuucuua

SEQ ID NO: 1168597 - RNA, 19 nt, Human
auucauauuuacuucuuau

SEQ ID NO: 1168598 - RNA, 20 nt, Human
auucauauuuacuucuuaua

SEQ ID NO: 1168599 - RNA, 17 nt, Human
auucuuuccugaggcug

SEQ ID NO: 1168600 - RNA, 22 nt, Human
auucuuuccugaggcugggcuc

SEQ ID NO: 1168601 - RNA, 21 nt, Human
auuccugaugcuucuucagag

SEQ ID NO: 1168602 - RNA, 19 nt, Human
auucucuccuguaccucuu

SEQ ID NO: 1168603 - RNA, 21 nt, Human
auucucuccuguaccucuuga

SEQ ID NO: 1168604 - RNA, 13 nt, Human
cagauccuggaaa

SEQ ID NO: 1168605 - RNA, 12 nt, Human
cagauccuggaa

SEQ ID NO: 1168606 - RNA, 17 nt, Human
cagagguugcagugagc

SEQ ID NO: 1168607 - RNA, 23 nt, Human
cagaggggguggccucccaacuc

SEQ ID NO: 1168608 - RNA, 17 nt, Human
cagauucuuuccugagg

SEQ ID NO: 1168609 - RNA, 18 nt, Human
cagauucuuuccugaggc

SEQ ID NO: 1168610 - RNA, 19 nt, Human
cagauucuuuccugaggcu

SEQ ID NO: 1168611 - RNA, 13 nt, Human
cagccaguaaaug

SEQ ID NO: 1168612 - RNA, 20 nt, Human
cagcaucauggagguuugaa

SEQ ID NO: 1168613 - RNA, 17 nt, Human
cagauugcaacaggcug

SEQ ID NO: 1168614 - RNA, 20 nt, Human
cagauucuuuccugaggcug

SEQ ID NO: 1168615 - RNA, 22 nt, Human
cagauucuuuccugaggcuggg

SEQ ID NO: 1168616 - RNA, 16 nt, Human
cagcacgauuucuguu

SEQ ID NO: 1168617 - RNA, 18 nt, Human
cagcacgauuucuguuua

SEQ ID NO: 1168618 - RNA, 19 nt, Human
cagcacgauuucuguuuag

SEQ ID NO: 1168619 - RNA, 20 nt, Human
cagcacgauuucuguuuaga

SEQ ID NO: 1168620 - RNA, 17 nt, Human
cagcauagaaguaacuu

SEQ ID NO: 1168621 - RNA, 18 nt, Human
caggaaaagcugcugaca

SEQ ID NO: 1168622 - RNA, 15 nt, Human
caggaaaagcugcug

SEQ ID NO: 1168623 - RNA, 16 nt, Human
caggaaaagcugcuga

SEQ ID NO: 1168624 - RNA, 12 nt, Human
cagcugccuggg

SEQ ID NO: 1168625 - RNA, 13 nt, Human
cagcugccuggga

SEQ ID NO: 1168626 - RNA, 14 nt, Human
cagcugccugggau

SEQ ID NO: 1168627 - RNA, 15 nt, Human
cagcugccugggauc

SEQ ID NO: 1168628 - RNA, 20 nt, Human
cagcugugcucuggacaggc

SEQ ID NO: 1168629 - RNA, 24 nt, Human
cagcugugcucuggacaggcaugu

SEQ ID NO: 1168630 - RNA, 21 nt, Human
cagcggggacagcuccuucug

SEQ ID NO: 1168631 - RNA, 18 nt, Human
cagcggggacagcuccuu

SEQ ID NO: 1168632 - RNA, 19 nt, Human
cagcggggacagcuccuuc

SEQ ID NO: 1168633 - RNA, 19 nt, Human
cagccugcuaauuccccag

SEQ ID NO: 1168634 - RNA, 12 nt, Human
cagccugcucca

SEQ ID NO: 1168635 - RNA, 15 nt, Human
cagccugcuccagcu

SEQ ID NO: 1168636 - RNA, 19 nt, Human
cagccgagauagccaaggc

SEQ ID NO: 1168637 - RNA, 20 nt, Human
cagccgagauagccaaggcc

SEQ ID NO: 1168638 - RNA, 18 nt, Human
caggcagauacaggaaaa

SEQ ID NO: 1168639 - RNA, 13 nt, Human
caggccagaggga

SEQ ID NO: 1168640 - RNA, 15 nt, Human
caggccagagggagu

SEQ ID NO: 1168641 - RNA, 18 nt, Human
caggcacccaccaucaug

SEQ ID NO: 1168642 - RNA, 19 nt, Human
caggccagcugcuugggcu

SEQ ID NO: 1168643 - RNA, 21 nt, Human
caggccagcugcuugggcuuc

SEQ ID NO: 1168644 - RNA, 23 nt, Human
caggccagcugcuugggcuucau

SEQ ID NO: 1168645 - RNA, 17 nt, Human
caggccaggcccucugc

SEQ ID NO: 1168646 - RNA, 18 nt, Human
caggccaggcccucugcc

SEQ ID NO: 1168647 - RNA, 19 nt, Human
caggccaggcccucugccc

SEQ ID NO: 1168648 - RNA, 16 nt, Human
caggccagagggagug

SEQ ID NO: 1168649 - RNA, 20 nt, Human
caggccaggcccucugccca

SEQ ID NO: 1168650 - RNA, 12 nt, Human
caggcugggaga

SEQ ID NO: 1168651 - RNA, 14 nt, Human
caggcugggagagc

SEQ ID NO: 1168652 - RNA, 15 nt, Human
caggcugggagagcc

SEQ ID NO: 1168653 - RNA, 20 nt, Human
caggcugggcuucaguggca

SEQ ID NO: 1168654 - RNA, 21 nt, Human
caggcugggcuucaguggcag

SEQ ID NO: 1168655 - RNA, 22 nt, Human
caggcugggcuucaguggcagc

SEQ ID NO: 1168656 - RNA, 23 nt, Human
caggcugggcuucaguggcagcu

SEQ ID NO: 1168657 - RNA, 21 nt, Human
cagggcucagcggggacagcu

SEQ ID NO: 1168658 - RNA, 23 nt, Human
cagggcucagcggggacagcucc

SEQ ID NO: 1168659 - RNA, 19 nt, Human
caggggaaaaucagccugc

SEQ ID NO: 1168660 - RNA, 20 nt, Human
caggggaaaaucagccugcu

SEQ ID NO: 1168661 - RNA, 21 nt, Human
caggugcacaagcuccaagcu

SEQ ID NO: 1168662 - RNA, 22 nt, Human
caggugcacaagcuccaagcuc

SEQ ID NO: 1168663 - RNA, 14 nt, Human
cagguuuaagcugu

SEQ ID NO: 1168664 - RNA, 12 nt, Human
cagguuuuccug

SEQ ID NO: 1168665 - RNA, 16 nt, Human
cagguuuuccugaaga

SEQ ID NO: 1168666 - RNA, 21 nt, Human
caggugauccacccaccucag

SEQ ID NO: 1168667 - RNA, 15 nt, Human
caggugcacaagcuc

SEQ ID NO: 1168668 - RNA, 22 nt, Human
caggugauccacccaccucagc

SEQ ID NO: 1168669 - RNA, 23 nt, Human
caggugauccacccaccucagcc

SEQ ID NO: 1168670 - RNA, 17 nt, Human
caggugcacaagcucca

SEQ ID NO: 1168671 - RNA, 18 nt, Human
caggugcacaagcuccaa

SEQ ID NO: 1168672 - RNA, 19 nt, Human
caggugcacaagcuccaag

SEQ ID NO: 1168673 - RNA, 20 nt, Human
caggugcacaagcuccaagc

SEQ ID NO: 1168674 - RNA, 15 nt, Human
cagucacauuccaag

SEQ ID NO: 1168675 - RNA, 16 nt, Human
cagucaccucauggaa

SEQ ID NO: 1168676 - RNA, 19 nt, Human
cagucaccucauggaauug

SEQ ID NO: 1168677 - RNA, 14 nt, Human
cagucaccccggcc

SEQ ID NO: 1168678 - RNA, 18 nt, Human
cagucuggaaugcagugg

SEQ ID NO: 1168679 - RNA, 17 nt, Human
cagucuggaaugcagug

SEQ ID NO: 1168680 - RNA, 15 nt, Human
cagucuggaaugcag

SEQ ID NO: 1168681 - RNA, 13 nt, Human
cagugcaugcugu

SEQ ID NO: 1168682 - RNA, 14 nt, Human
cagugcaugcuguc

SEQ ID NO: 1168683 - RNA, 20 nt, Human
cagucugacuguuuccauca

SEQ ID NO: 1168684 - RNA, 21 nt, Human
caguggugcgaucuggguuca

SEQ ID NO: 1168685 - RNA, 18 nt, Human
caguggugguuuucuguu

SEQ ID NO: 1168686 - RNA, 16 nt, Human
cagugcaugcuguccc

SEQ ID NO: 1168687 - RNA, 17 nt, Human
cagugcaugcugucccu

SEQ ID NO: 1168688 - RNA, 13 nt, Human
cagugcccacagg

SEQ ID NO: 1168689 - RNA, 15 nt, Human
cagugcccacaggau

SEQ ID NO: 1168690 - RNA, 17 nt, Human
cagugcccacaggauca

SEQ ID NO: 1168691 - RNA, 20 nt, Human
cagugggagcugccuguuca

SEQ ID NO: 1168692 - RNA, 23 nt, Human
cagugggagcugccuguucagcu

SEQ ID NO: 1168693 - RNA, 18 nt, Human
cagugcccacaggaucag

SEQ ID NO: 1168694 - RNA, 19 nt, Human
cagugcaugcugucccuua

SEQ ID NO: 1168695 - RNA, 16 nt, Human
cauguuggccaggcug

SEQ ID NO: 1168696 - RNA, 14 nt, Human
cauguuggccaggc

SEQ ID NO: 1168697 - RNA, 15 nt, Human
cauguuggccaggcu

SEQ ID NO: 1168698 - RNA, 13 nt, Human
cauucuccaccug

SEQ ID NO: 1168699 - RNA, 14 nt, Human
cauucuccaccugc

SEQ ID NO: 1168700 - RNA, 16 nt, Human
cauucuccaccugcca

SEQ ID NO: 1168701 - RNA, 17 nt, Human
cauucuccaccugccag

SEQ ID NO: 1168702 - RNA, 19 nt, Human
cauuauauuuauuacugua

SEQ ID NO: 1168703 - RNA, 14 nt, Human
caugcuacacacug

SEQ ID NO: 1168704 - RNA, 20 nt, Human
caugcuacacacugcauguu

SEQ ID NO: 1168705 - RNA, 23 nt, Human
caugcuacacacugcauguuugu

SEQ ID NO: 1168706 - RNA, 13 nt, Human
caugauguuuucc

SEQ ID NO: 1168707 - RNA, 14 nt, Human
caugauguuuagaa

SEQ ID NO: 1168708 - RNA, 17 nt, Human
cauggcugccaauggga

SEQ ID NO: 1168709 - RNA, 14 nt, Human
caugggaaugaaug

SEQ ID NO: 1168710 - RNA, 15 nt, Human
caugggaaugaaugu

SEQ ID NO: 1168711 - RNA, 16 nt, Human
caugggaaugaauguc

SEQ ID NO: 1168712 - RNA, 17 nt, Human
caugggaaugaauguca

SEQ ID NO: 1168713 - RNA, 16 nt, Human
cauauuaccacagaca

SEQ ID NO: 1168714 - RNA, 17 nt, Human
cauauucuguuggccag

SEQ ID NO: 1168715 - RNA, 18 nt, Human
cauauucuguuggccagu

SEQ ID NO: 1168716 - RNA, 19 nt, Human
caguggugguuuucuguuc

SEQ ID NO: 1168717 - RNA, 20 nt, Human
caguggugguuuucuguucu

SEQ ID NO: 1168718 - RNA, 21 nt, Human
caguggugguuuucuguucuu

SEQ ID NO: 1168719 - RNA, 22 nt, Human
caguggugguuuucuguucuuu

SEQ ID NO: 1168720 - RNA, 12 nt, Human
caucacuucccu

SEQ ID NO: 1168721 - RNA, 14 nt, Human
caucacuucccuac

SEQ ID NO: 1168722 - RNA, 15 nt, Human
cauccuggcacccgg

SEQ ID NO: 1168723 - RNA, 22 nt, Human
cauccuggcacccggccccugc

SEQ ID NO: 1168724 - RNA, 23 nt, Human
cauccuggcacccggccccugcu

SEQ ID NO: 1168725 - RNA, 18 nt, Human
ccacgcccccacugguga

SEQ ID NO: 1168726 - RNA, 19 nt, Human
ccacgcccccacuggugac

SEQ ID NO: 1168727 - RNA, 16 nt, Human
ccacgcccccacuggu

SEQ ID NO: 1168728 - RNA, 17 nt, Human
ccacgcccccacuggug

SEQ ID NO: 1168729 - RNA, 13 nt, Human
ccaccgcagacag

SEQ ID NO: 1168730 - RNA, 22 nt, Human
ccaccgcagacaggaccaggga

SEQ ID NO: 1168731 - RNA, 21 nt, Human
ccaccuuugaagaaguaagga

SEQ ID NO: 1168732 - RNA, 13 nt, Human
ccaccaucaagcc

SEQ ID NO: 1168733 - RNA, 14 nt, Human
ccaccaucaagcca

SEQ ID NO: 1168734 - RNA, 15 nt, Human
ccaccaucaagccac

SEQ ID NO: 1168735 - RNA, 19 nt, Human
cauuuguauaaaauaauuu

SEQ ID NO: 1168736 - RNA, 20 nt, Human
cauuuguauaaaauaauuuu

SEQ ID NO: 1168737 - RNA, 22 nt, Human
cauuuuuuuuaagaaaaaggau

SEQ ID NO: 1168738 - RNA, 21 nt, Human
ccaaaacucuccucugcugcu

SEQ ID NO: 1168739 - RNA, 17 nt, Human
ccaaugggagcucaugg

SEQ ID NO: 1168740 - RNA, 17 nt, Human
ccaaauguucaucaaug

SEQ ID NO: 1168741 - RNA, 16 nt, Human
ccaacucaccccagcc

SEQ ID NO: 1168742 - RNA, 17 nt, Human
ccaacucaccccagccc

SEQ ID NO: 1168743 - RNA, 18 nt, Human
ccaacucaccccagcccc

SEQ ID NO: 1168744 - RNA, 18 nt, Human
ccaaauguucaucaauga

SEQ ID NO: 1168745 - RNA, 12 nt, Human
ccaagcucugcu

SEQ ID NO: 1168746 - RNA, 13 nt, Human
ccaagcucugcuc

SEQ ID NO: 1168747 - RNA, 18 nt, Human
ccaagcucugcuccucuc

SEQ ID NO: 1168748 - RNA, 17 nt, Human
ccaauauuuaccagacc

SEQ ID NO: 1168749 - RNA, 15 nt, Human
ccaaugauggucacc

SEQ ID NO: 1168750 - RNA, 14 nt, Human
ccaaugcacuuugu

SEQ ID NO: 1168751 - RNA, 12 nt, Human
cucauguucuua

SEQ ID NO: 1168752 - RNA, 15 nt, Human
cuccaagaccuucuc

SEQ ID NO: 1168753 - RNA, 22 nt, Human
cuccaagaccuucuccuucacc

SEQ ID NO: 1168754 - RNA, 13 nt, Human
cuccaagcaggac

SEQ ID NO: 1168755 - RNA, 14 nt, Human
cuccaagcaggaca

SEQ ID NO: 1168756 - RNA, 22 nt, Human
cuccaagcaggacauggacaag

SEQ ID NO: 1168757 - RNA, 24 nt, Human
cuccaagcaggacauggacaagga

SEQ ID NO: 1168758 - RNA, 13 nt, Human
cuccaagcuccca

SEQ ID NO: 1168759 - RNA, 14 nt, Human
cuccaagcucccag

SEQ ID NO: 1168760 - RNA, 15 nt, Human
cuccaagcucccagg

SEQ ID NO: 1168761 - RNA, 16 nt, Human
cuccaagcucccaggc

SEQ ID NO: 1168762 - RNA, 17 nt, Human
cuccaagcucccaggca

SEQ ID NO: 1168763 - RNA, 13 nt, Human
cuccacuuggucu

SEQ ID NO: 1168764 - RNA, 15 nt, Human
cuccacuuggucugu

SEQ ID NO: 1168765 - RNA, 16 nt, Human
cuccacuuggucugug

SEQ ID NO: 1168766 - RNA, 17 nt, Human
cuccacuuggucuguga

SEQ ID NO: 1168767 - RNA, 21 nt, Human
cuccacuuggucugugagaug

SEQ ID NO: 1168768 - RNA, 22 nt, Human
cuccacuuggucugugagaugc

SEQ ID NO: 1168769 - RNA, 23 nt, Human
cuccacuuggucugugagaugcu

SEQ ID NO: 1168770 - RNA, 16 nt, Human
cuccacuuucuagcca

SEQ ID NO: 1168771 - RNA, 19 nt, Human
cuccacuuucuagccagag

SEQ ID NO: 1168772 - RNA, 20 nt, Human
cuccacuuucuagccagagg

SEQ ID NO: 1168773 - RNA, 22 nt, Human
cucccccagccccauccucugu

SEQ ID NO: 1168774 - RNA, 15 nt, Human
cucccccagccccau

SEQ ID NO: 1168775 - RNA, 20 nt, Human
cucccccagccccauccucu

SEQ ID NO: 1168776 - RNA, 16 nt, Human
cuccucugcugcuggc

SEQ ID NO: 1168777 - RNA, 18 nt, Human
cuccucugcugcuggcug

SEQ ID NO: 1168778 - RNA, 16 nt, Human
cuccuggcccacugca

SEQ ID NO: 1168779 - RNA, 18 nt, Human
cuccuggcccacugcauc

SEQ ID NO: 1168780 - RNA, 13 nt, Human
cucgaacuggcug

SEQ ID NO: 1168781 - RNA, 14 nt, Human
cucgaacuggcugc

SEQ ID NO: 1168782 - RNA, 15 nt, Human
cucgaacuggcugca

SEQ ID NO: 1168783 - RNA, 16 nt, Human
cucgaacuggcugcaa

SEQ ID NO: 1168784 - RNA, 14 nt, Human
cucguuaauuugua

SEQ ID NO: 1168785 - RNA, 15 nt, Human
cucugguuaucuaau

SEQ ID NO: 1168786 - RNA, 15 nt, Human
cucugguccauagag

SEQ ID NO: 1168787 - RNA, 13 nt, Human
cucugcugacaga

SEQ ID NO: 1168788 - RNA, 14 nt, Human
cucugcugacagac

SEQ ID NO: 1168789 - RNA, 16 nt, Human
cucugcugacagacac

SEQ ID NO: 1168790 - RNA, 14 nt, Human
cucugguccauaga

SEQ ID NO: 1168791 - RNA, 20 nt, Human
cucugcacuccccugcuggg

SEQ ID NO: 1168792 - RNA, 21 nt, Human
cucugcacuccccugcugggu

SEQ ID NO: 1168793 - RNA, 13 nt, Human
cucugcagcaaua

SEQ ID NO: 1168794 - RNA, 13 nt, Human
cucugcuccucuc

SEQ ID NO: 1168795 - RNA, 18 nt, Human
cucugcuccucuccccag

SEQ ID NO: 1168796 - RNA, 20 nt, Human
cucugcuccucuccccagca

SEQ ID NO: 1168797 - RNA, 14 nt, Human
cucuucaaucucuu

SEQ ID NO: 1168798 - RNA, 18 nt, Human
cucuucagaucucuaacu

SEQ ID NO: 1168799 - RNA, 19 nt, Human
cucuucagaucucuaacuu

SEQ ID NO: 1168800 - RNA, 22 nt, Human
cucuuagaugcaguucugaaga

SEQ ID NO: 1168801 - RNA, 14 nt, Human
cucuuauugcccac

SEQ ID NO: 1168802 - RNA, 15 nt, Human
cucuuauugcccacg

SEQ ID NO: 1168803 - RNA, 19 nt, Human
cucuuauugcccacgcugg

SEQ ID NO: 1168804 - RNA, 20 nt, Human
cucuuauugcccacgcugga

SEQ ID NO: 1168805 - RNA, 22 nt, Human
cugacaacacucauugaccuga

SEQ ID NO: 1168806 - RNA, 23 nt, Human
cugacaacacucauugaccugag

SEQ ID NO: 1168807 - RNA, 19 nt, Human
cugaaggccccgcccaggc

SEQ ID NO: 1168808 - RNA, 21 nt, Human
cugaaggccccgcccaggcuu

SEQ ID NO: 1168809 - RNA, 17 nt, Human
cugaaggcuggguucug

SEQ ID NO: 1168810 - RNA, 23 nt, Human
cugaaggacauugcggacagcca

SEQ ID NO: 1168811 - RNA, 22 nt, Human
cucuugauucauaaugacuuaa

SEQ ID NO: 1168812 - RNA, 16 nt, Human
cucuugagccuugaac

SEQ ID NO: 1168813 - RNA, 17 nt, Human
cucuugagccuugaacu

SEQ ID NO: 1168814 - RNA, 18 nt, Human
cucuugagccuugaacuu

SEQ ID NO: 1168815 - RNA, 23 nt, Human
cucuugagccuugaacuuugacc

SEQ ID NO: 1168816 - RNA, 21 nt, Human
cugacccaugcugcccuguga

SEQ ID NO: 1168817 - RNA, 22 nt, Human
cugacccaugcugcccugugag

SEQ ID NO: 1168818 - RNA, 23 nt, Human
cugagacagcccgggcucugccu

SEQ ID NO: 1168819 - RNA, 21 nt, Human
cugagacucgcgacaaugcaa

SEQ ID NO: 1168820 - RNA, 22 nt, Human
cugagacucgcgacaaugcaaa

SEQ ID NO: 1168821 - RNA, 21 nt, Human
cugagaggacuuuucuuugug

SEQ ID NO: 1168822 - RNA, 22 nt, Human
cugagaggacuuuucuuugugg

SEQ ID NO: 1168823 - RNA, 17 nt, Human
cugagaguagagucacu

SEQ ID NO: 1168824 - RNA, 18 nt, Human
cugaguacguugugcauu

SEQ ID NO: 1168825 - RNA, 19 nt, Human
cugaguacguugugcauuu

SEQ ID NO: 1168826 - RNA, 20 nt, Human
cugaguacguugugcauuug

SEQ ID NO: 1168827 - RNA, 21 nt, Human
cugaguacguugugcauuugg

SEQ ID NO: 1168828 - RNA, 12 nt, Human
cugaggugggag

SEQ ID NO: 1168829 - RNA, 21 nt, Human
cugagaucaaaacgguuuuac

SEQ ID NO: 1168830 - RNA, 14 nt, Human
cugagcuuucugcu

SEQ ID NO: 1168831 - RNA, 15 nt, Human
cugagcuuucugcua

SEQ ID NO: 1168832 - RNA, 17 nt, Human
cugaggaauccagaccc

SEQ ID NO: 1168833 - RNA, 20 nt, Human
cugaggaauccagacccggc

SEQ ID NO: 1168834 - RNA, 21 nt, Human
cugaggaauccagacccggcu

SEQ ID NO: 1168835 - RNA, 20 nt, Human
cugaggacacuaaccacgcu

SEQ ID NO: 1168836 - RNA, 23 nt, Human
cugaggacacuaaccacgcugga

SEQ ID NO: 1168837 - RNA, 16 nt, Human
cgguuuuacugcagcu

SEQ ID NO: 1168838 - RNA, 18 nt, Human
cgugaguccuggcauggg

SEQ ID NO: 1168839 - RNA, 17 nt, Human
cgugaguccuggcaugg

SEQ ID NO: 1168840 - RNA, 17 nt, Human
cgugaggccagagacac

SEQ ID NO: 1168841 - RNA, 16 nt, Human
cgugaguccuggcaug

SEQ ID NO: 1168842 - RNA, 14 nt, Human
cgugcacacaccag

SEQ ID NO: 1168843 - RNA, 20 nt, Human
cguguaaccauggacccaau

SEQ ID NO: 1168844 - RNA, 13 nt, Human
cgcugccccuggc

SEQ ID NO: 1168845 - RNA, 16 nt, Human
cggagucccaccuugg

SEQ ID NO: 1168846 - RNA, 18 nt, Human
cggagucccaccuuggcu

SEQ ID NO: 1168847 - RNA, 20 nt, Human
cggagucccaccuuggcugc

SEQ ID NO: 1168848 - RNA, 21 nt, Human
cggagucccaccuuggcugca

SEQ ID NO: 1168849 - RNA, 15 nt, Human
cggcucacugcagcc

SEQ ID NO: 1168850 - RNA, 16 nt, Human
cggcucacugcagccu

SEQ ID NO: 1168851 - RNA, 17 nt, Human
cggcucacugcagccuc

SEQ ID NO: 1168852 - RNA, 12 nt, Human
cggcuccaggcu

SEQ ID NO: 1168853 - RNA, 13 nt, Human
cggcuccaggcuc

SEQ ID NO: 1168854 - RNA, 14 nt, Human
cggcuccaggcucc

SEQ ID NO: 1168855 - RNA, 15 nt, Human
cggcuccaggcuccu

SEQ ID NO: 1168856 - RNA, 16 nt, Human
cggcuccaggcuccuu

SEQ ID NO: 1168857 - RNA, 12 nt, Human
cgggccacagag

SEQ ID NO: 1168858 - RNA, 14 nt, Human
cgggccacagagaa

SEQ ID NO: 1168859 - RNA, 17 nt, Human
cgggccacagagaaagu

SEQ ID NO: 1168860 - RNA, 11 nt, Human
cgggcucagca

SEQ ID NO: 1168861 - RNA, 15 nt, Human
cgggcucagcaaaag

SEQ ID NO: 1168862 - RNA, 19 nt, Human
cgggcucagcaaaagaugc

SEQ ID NO: 1168863 - RNA, 14 nt, Human
cgggcucugccucc

SEQ ID NO: 1168864 - RNA, 16 nt, Human
cgggcucugccuccca

SEQ ID NO: 1168865 - RNA, 17 nt, Human
cgggcucugccucccau

SEQ ID NO: 1168866 - RNA, 14 nt, Human
cggggacagcuccu

SEQ ID NO: 1168867 - RNA, 15 nt, Human
cggggacagcuccuu

SEQ ID NO: 1168868 - RNA, 22 nt, Human
cggggacagcuccuucuguccu

SEQ ID NO: 1168869 - RNA, 18 nt, Human
cgguguggagaagcggcu

SEQ ID NO: 1168870 - RNA, 17 nt, Human
cgccagauucuuuccug

SEQ ID NO: 1168871 - RNA, 14 nt, Human
cgauagugguggug

SEQ ID NO: 1168872 - RNA, 22 nt, Human
cgcaggauucuuccucccuccc

SEQ ID NO: 1168873 - RNA, 21 nt, Human
ccuuucaauaggaaaaacuga

SEQ ID NO: 1168874 - RNA, 15 nt, Human
ccuuuugagugccuu

SEQ ID NO: 1168875 - RNA, 17 nt, Human
ccuuuugagugccuuac

SEQ ID NO: 1168876 - RNA, 16 nt, Human
ccuugccgucuaccug

SEQ ID NO: 1168877 - RNA, 17 nt, Human
ccuugccgucuaccuga

SEQ ID NO: 1168878 - RNA, 12 nt, Human
cgacaaugcaaa

SEQ ID NO: 1168879 - RNA, 13 nt, Human
cgacaaugcaaac

SEQ ID NO: 1168880 - RNA, 21 nt, Human
ccuuuuuuagaguugauacua

SEQ ID NO: 1168881 - RNA, 17 nt, Human
cgacugcccggcagggu

SEQ ID NO: 1168882 - RNA, 19 nt, Human
cgacccuugccgucuaccu

SEQ ID NO: 1168883 - RNA, 20 nt, Human
cgacccuugccgucuaccug

SEQ ID NO: 1168884 - RNA, 21 nt, Human
cuaagugguacuaacuuuccu

SEQ ID NO: 1168885 - RNA, 23 nt, Human
cuaaguuuuuauggcuuuugugc

SEQ ID NO: 1168886 - RNA, 20 nt, Human
cuacaugagguacugagagu

SEQ ID NO: 1168887 - RNA, 19 nt, Human
cuacaguccucccaucuca

SEQ ID NO: 1168888 - RNA, 20 nt, Human
cuacaguccucccaucucac

SEQ ID NO: 1168889 - RNA, 21 nt, Human
cuacaguugaaaaacagcuga

SEQ ID NO: 1168890 - RNA, 22 nt, Human
cuacaguugaaaaacagcugag

SEQ ID NO: 1168891 - RNA, 12 nt, Human
cuagaacucccu

SEQ ID NO: 1168892 - RNA, 13 nt, Human
cuagaacucccuu

SEQ ID NO: 1168893 - RNA, 22 nt, Human
cuagaagauuuugaaauuuuua

SEQ ID NO: 1168894 - RNA, 21 nt, Human
cuagcauacguacacauuuua

SEQ ID NO: 1168895 - RNA, 23 nt, Human
cuagcauacguacacauuuuauu

SEQ ID NO: 1168896 - RNA, 13 nt, Human
cucaaugcacuga

SEQ ID NO: 1168897 - RNA, 15 nt, Human
cucaaugcacugaca

SEQ ID NO: 1168898 - RNA, 20 nt, Human
cucaaacucuugaccucagg

SEQ ID NO: 1168899 - RNA, 18 nt, Human
cuaucucccccagcccca

SEQ ID NO: 1168900 - RNA, 16 nt, Human
cuaucucccccagccc

SEQ ID NO: 1168901 - RNA, 17 nt, Human
cuaucucccccagcccc

SEQ ID NO: 1168902 - RNA, 17 nt, Human
cucaaaaaaagaaaaag

SEQ ID NO: 1168903 - RNA, 18 nt, Human
cucaaaagcugggcaggu

SEQ ID NO: 1168904 - RNA, 14 nt, Human
cuaucuaaauguug

SEQ ID NO: 1168905 - RNA, 15 nt, Human
cuaucucccccagcc

SEQ ID NO: 1168906 - RNA, 22 nt, Human
cuaguuugauuaaauucuugca

SEQ ID NO: 1168907 - RNA, 12 nt, Human
cuagccagagga

SEQ ID NO: 1168908 - RNA, 13 nt, Human
cuagccagaggag

SEQ ID NO: 1168909 - RNA, 15 nt, Human
cuagccagaggagag

SEQ ID NO: 1168910 - RNA, 17 nt, Human
cuagccagaggagagag

SEQ ID NO: 1168911 - RNA, 23 nt, Human
cuaguuguuugauucagacagcu

SEQ ID NO: 1168912 - RNA, 13 nt, Human
cuaguuugauuaa

SEQ ID NO: 1168913 - RNA, 15 nt, Human
cuaguuugauuaaau

SEQ ID NO: 1168914 - RNA, 13 nt, Human
ccucuuucccucc

SEQ ID NO: 1168915 - RNA, 16 nt, Human
ccucuuucccucccuu

SEQ ID NO: 1168916 - RNA, 17 nt, Human
ccugcacuugcagacuc

SEQ ID NO: 1168917 - RNA, 18 nt, Human
ccugcacuugcagacucu

SEQ ID NO: 1168918 - RNA, 19 nt, Human
ccugcacuugcagacucua

SEQ ID NO: 1168919 - RNA, 13 nt, Human
ccugcccaggccc

SEQ ID NO: 1168920 - RNA, 15 nt, Human
ccugcccaccuggcc

SEQ ID NO: 1168921 - RNA, 12 nt, Human
ccugcccaccug

SEQ ID NO: 1168922 - RNA, 13 nt, Human
ccugcccaccugg

SEQ ID NO: 1168923 - RNA, 14 nt, Human
ccugcccaccuggc

SEQ ID NO: 1168924 - RNA, 20 nt, Human
ccugcccaccuggccucugc

SEQ ID NO: 1168925 - RNA, 20 nt, Human
ccugcugcaguugccaguca

SEQ ID NO: 1168926 - RNA, 21 nt, Human
ccugcugcaguugccagucac

SEQ ID NO: 1168927 - RNA, 21 nt, Human
ccugccucgaacuggcugcaa

SEQ ID NO: 1168928 - RNA, 23 nt, Human
ccugccucgaacuggcugcaaag

SEQ ID NO: 1168929 - RNA, 17 nt, Human
ccugcugcaguugccag

SEQ ID NO: 1168930 - RNA, 19 nt, Human
ccugcugcaguugccaguc

SEQ ID NO: 1168931 - RNA, 11 nt, Human
ccucuuucccu

SEQ ID NO: 1168932 - RNA, 15 nt, Human
ccugucuaaugaaac

SEQ ID NO: 1168933 - RNA, 22 nt, Human
ccugucuaaugaaaccuguguc

SEQ ID NO: 1168934 - RNA, 15 nt, Human
ccuguaaucacagcu

SEQ ID NO: 1168935 - RNA, 18 nt, Human
ccugggggcugggcagag

SEQ ID NO: 1168936 - RNA, 21 nt, Human
ccugguggcagugggagcugc

SEQ ID NO: 1168937 - RNA, 22 nt, Human
ccuggccucugcacuccccugc

SEQ ID NO: 1168938 - RNA, 22 nt, Human
ccuggccuagcauacguacaca

SEQ ID NO: 1168939 - RNA, 22 nt, Human
ccuggccucaagugauucuccu

SEQ ID NO: 1168940 - RNA, 20 nt, Human
ccuggccucugcacuccccu

SEQ ID NO: 1168941 - RNA, 21 nt, Human
ccuggccucugcacuccccug

SEQ ID NO: 1168942 - RNA, 15 nt, Human
ccucauguccacugg

SEQ ID NO: 1168943 - RNA, 15 nt, Human
ccucccaccucagcc

SEQ ID NO: 1168944 - RNA, 17 nt, Human
ccucccaccucagccuc

SEQ ID NO: 1168945 - RNA, 13 nt, Human
ccucccaucucac

SEQ ID NO: 1168946 - RNA, 16 nt, Human
ccucccaucucacaca

SEQ ID NO: 1168947 - RNA, 23 nt, Human
ccucauggaauuggagcucgugg

SEQ ID NO: 1168948 - RNA, 14 nt, Human
ccggccccugcugg

SEQ ID NO: 1168949 - RNA, 15 nt, Human
ccggccccugcuggu

SEQ ID NO: 1168950 - RNA, 16 nt, Human
cccugucuaaugaaac

SEQ ID NO: 1168951 - RNA, 20 nt, Human
cccugucucaaaaaaagaaa

SEQ ID NO: 1168952 - RNA, 23 nt, Human
cccugucucaaaaaaagaaaaag

SEQ ID NO: 1168953 - RNA, 18 nt, Human
cccugugauggggcccug

SEQ ID NO: 1168954 - RNA, 19 nt, Human
cccugugauggggcccugc

SEQ ID NO: 1168955 - RNA, 20 nt, Human
cccugugauggggcccugcc

SEQ ID NO: 1168956 - RNA, 13 nt, Human
cccuucgcuccug

SEQ ID NO: 1168957 - RNA, 13 nt, Human
ccggccccugcug

SEQ ID NO: 1168958 - RNA, 14 nt, Human
cccuucgcuccugu

SEQ ID NO: 1168959 - RNA, 15 nt, Human
cccuucgcuccugug

SEQ ID NO: 1168960 - RNA, 21 nt, Human
cccuucucuccagccccugga

SEQ ID NO: 1168961 - RNA, 22 nt, Human
cccuucucuccagccccuggau

SEQ ID NO: 1168962 - RNA, 12 nt, Human
cccggcugcgga

SEQ ID NO: 1168963 - RNA, 12 nt, Human
cccgggaagggg

SEQ ID NO: 1168964 - RNA, 17 nt, Human
ccccuucugacccaugc

SEQ ID NO: 1168965 - RNA, 18 nt, Human
ccccugcacuccagccug

SEQ ID NO: 1168966 - RNA, 14 nt, Human
ccccuucgcuccug

SEQ ID NO: 1168967 - RNA, 15 nt, Human
ccccuucgcuccugu

SEQ ID NO: 1168968 - RNA, 17 nt, Human
ccccuucgcuccugugu

SEQ ID NO: 1168969 - RNA, 19 nt, Human
ccccuucgcuccugugucu

SEQ ID NO: 1168970 - RNA, 21 nt, Human
ccccauucugccugcccaggc

SEQ ID NO: 1168971 - RNA, 15 nt, Human
ccccauucugccugc

SEQ ID NO: 1168972 - RNA, 13 nt, Human
ccccauucugccu

SEQ ID NO: 1168973 - RNA, 14 nt, Human
ccccauucugccug

SEQ ID NO: 1168974 - RNA, 21 nt, Human
cccauucugccugcccaggcc

SEQ ID NO: 1168975 - RNA, 22 nt, Human
cccauucugccugcccaggccc

SEQ ID NO: 1168976 - RNA, 23 nt, Human
cccauucugccugcccaggcccc

SEQ ID NO: 1168977 - RNA, 22 nt, Human
ccccagauugcaacaggcuggg

SEQ ID NO: 1168978 - RNA, 23 nt, Human
ccccagauugcaacaggcugggc

SEQ ID NO: 1168979 - RNA, 17 nt, Human
ccccagcaagugagagc

SEQ ID NO: 1168980 - RNA, 19 nt, Human
ccccagcaagugagagcug

SEQ ID NO: 1168981 - RNA, 20 nt, Human
ccccagcaagugagagcugg

SEQ ID NO: 1168982 - RNA, 21 nt, Human
ccccagcaagugagagcuggg

SEQ ID NO: 1168983 - RNA, 19 nt, Human
ccccauccucuguacagag

SEQ ID NO: 1168984 - RNA, 21 nt, Human
ccccauccucuguacagagcc

SEQ ID NO: 1168985 - RNA, 22 nt, Human
ccccauccucuguacagagccc

SEQ ID NO: 1168986 - RNA, 14 nt, Human
cccagcccacuucu

SEQ ID NO: 1168987 - RNA, 17 nt, Human
cccagcccacuucugcc

SEQ ID NO: 1168988 - RNA, 21 nt, Human
cccagcugugcucuggacagg

SEQ ID NO: 1168989 - RNA, 23 nt, Human
cccagcugugcucuggacaggca

SEQ ID NO: 1168990 - RNA, 22 nt, Human
cccagcuuaaaggggcuagagu

SEQ ID NO: 1168991 - RNA, 21 nt, Human
cccaggaaaggcuccaggagc

SEQ ID NO: 1168992 - RNA, 22 nt, Human
cccaggaaaggcuccaggagca

SEQ ID NO: 1168993 - RNA, 23 nt, Human
cccaggaaaggcuccaggagcag

SEQ ID NO: 1168994 - RNA, 15 nt, Human
cccaggcuuagucac

SEQ ID NO: 1168995 - RNA, 20 nt, Human
cccaggcuuagucacugaga

SEQ ID NO: 1168996 - RNA, 12 nt, Human
ccagucaccccg

SEQ ID NO: 1168997 - RNA, 13 nt, Human
ccagucaccccgg

SEQ ID NO: 1168998 - RNA, 20 nt, Human
ccagucaccccggccaccug

SEQ ID NO: 1168999 - RNA, 21 nt, Human
ccagucaccccggccaccugc

SEQ ID NO: 1169000 - RNA, 13 nt, Human
ccaggcugggaga

SEQ ID NO: 1169001 - RNA, 14 nt, Human
ccaggcugggagag

SEQ ID NO: 1169002 - RNA, 15 nt, Human
ccaggcugggagagc

SEQ ID NO: 1169003 - RNA, 17 nt, Human
ccaggcugggagagccu

SEQ ID NO: 1169004 - RNA, 18 nt, Human
ccaggcugggagagccuu

SEQ ID NO: 1169005 - RNA, 21 nt, Human
ccaggcugggagagccuucca

SEQ ID NO: 1169006 - RNA, 22 nt, Human
ccaggcugggagagccuuccag

SEQ ID NO: 1169007 - RNA, 23 nt, Human
ccaggcugggagagccuuccagg

SEQ ID NO: 1169008 - RNA, 21 nt, Human
ccaggaaaggcuccaggagca

SEQ ID NO: 1169009 - RNA, 22 nt, Human
ccaggaaaggcuccaggagcag

SEQ ID NO: 1169010 - RNA, 23 nt, Human
ccaggaaaggcuccaggagcagc

SEQ ID NO: 1169011 - RNA, 15 nt, Human
ccagcagccuggacc

SEQ ID NO: 1169012 - RNA, 19 nt, Human
ccagcagccuggacccugu

SEQ ID NO: 1169013 - RNA, 20 nt, Human
ccagcagccuggacccugug

SEQ ID NO: 1169014 - RNA, 21 nt, Human
ccagccccuggaugcagccuc

SEQ ID NO: 1169015 - RNA, 10 nt, Human
ccagccccuu

SEQ ID NO: 1169016 - RNA, 23 nt, Human
ccagcagagcaccuuagacaguc

SEQ ID NO: 1169017 - RNA, 19 nt, Human
ccagcagagcaccuuagac

SEQ ID NO: 1169018 - RNA, 13 nt, Human
ccauacauuugug

SEQ ID NO: 1169019 - RNA, 14 nt, Human
ccauacauuugugu

SEQ ID NO: 1169020 - RNA, 23 nt, Human
ccaucccaaacccuucagugcca

SEQ ID NO: 1169021 - RNA, 12 nt, Human
ccaucccagccc

SEQ ID NO: 1169022 - RNA, 13 nt, Human
ccaucccagcccc

SEQ ID NO: 1169023 - RNA, 16 nt, Human
ccauccccuguagagu

SEQ ID NO: 1169024 - RNA, 22 nt, Human
ccauccccuguagagugggagc

SEQ ID NO: 1169025 - RNA, 14 nt, Human
ccaugagccucagc

SEQ ID NO: 1169026 - RNA, 18 nt, Human
ccaugagccucagcaucc

SEQ ID NO: 1169027 - RNA, 19 nt, Human
ccaugagccucagcauccu

SEQ ID NO: 1169028 - RNA, 14 nt, Human
ccaugaguccccug

SEQ ID NO: 1169029 - RNA, 15 nt, Human
ccaugaguccccugu

SEQ ID NO: 1169030 - RNA, 16 nt, Human
ccaugaguccccuguu

SEQ ID NO: 1169031 - RNA, 13 nt, Human
ccaugggccuccu

SEQ ID NO: 1169032 - RNA, 18 nt, Human
ccaugaguccccuguuug

SEQ ID NO: 1169033 - RNA, 17 nt, Human
ccaugggccuccugugu

SEQ ID NO: 1169034 - RNA, 14 nt, Human
ccaugggccuccug

SEQ ID NO: 1169035 - RNA, 15 nt, Human
ccaugggccuccugu

SEQ ID NO: 1169036 - RNA, 16 nt, Human
aaaauauuuuccugcc

SEQ ID NO: 1169037 - RNA, 20 nt, Human
aaaauggaagacagcucuua

SEQ ID NO: 1169038 - RNA, 22 nt, Human
aaaaggagccaauuuaaagaaa

SEQ ID NO: 1169039 - RNA, 13 nt, Human
aaaaggaugcaca

SEQ ID NO: 1169040 - RNA, 14 nt, Human
aaaaggaugcacag

SEQ ID NO: 1169041 - RNA, 15 nt, Human
aaaaggaugcacaga

SEQ ID NO: 1169042 - RNA, 19 nt, Human
aaaaggaugcacagaguug

SEQ ID NO: 1169043 - RNA, 22 nt, Human
aaaaggaugcacagaguuguua

SEQ ID NO: 1169044 - RNA, 11 nt, Human
aaaaggcagga

SEQ ID NO: 1169045 - RNA, 16 nt, Human
aaaagguuaauaaagu

SEQ ID NO: 1169046 - RNA, 17 nt, Human
aaaagguuaauaaagua

SEQ ID NO: 1169047 - RNA, 11 nt, Human
aaaauaauuuu

SEQ ID NO: 1169048 - RNA, 16 nt, Human
aaaauaauuuuuauau

SEQ ID NO: 1169049 - RNA, 17 nt, Human
aaaauaauuuuuauauu

SEQ ID NO: 1169050 - RNA, 20 nt, Human
aaaauaauuuuuauauuuga

SEQ ID NO: 1169051 - RNA, 15 nt, Human
gggcgugguggugag

SEQ ID NO: 1169052 - RNA, 13 nt, Human
gggccucagugcc

SEQ ID NO: 1169053 - RNA, 14 nt, Human
gggccucagugcca

SEQ ID NO: 1169054 - RNA, 15 nt, Human
gggccucagugccac

SEQ ID NO: 1169055 - RNA, 22 nt, Human
gggccucgguguggagaagcgg

SEQ ID NO: 1169056 - RNA, 18 nt, Human
gggccucuuaugggcugg

SEQ ID NO: 1169057 - RNA, 19 nt, Human
gggccucuuaugggcuggg

SEQ ID NO: 1169058 - RNA, 13 nt, Human
gggccaggagccu

SEQ ID NO: 1169059 - RNA, 14 nt, Human
gggccaggagccuc

SEQ ID NO: 1169060 - RNA, 15 nt, Human
gggcuaguugggcuu

SEQ ID NO: 1169061 - RNA, 18 nt, Human
gggcuaguugggcuuccu

SEQ ID NO: 1169062 - RNA, 22 nt, Human
gggcucagcaaaagaugcuucu

SEQ ID NO: 1169063 - RNA, 17 nt, Human
gggcucagcggggacag

SEQ ID NO: 1169064 - RNA, 19 nt, Human
gggcucagcggggacagcu

SEQ ID NO: 1169065 - RNA, 21 nt, Human
gggcucagcggggacagcucc

SEQ ID NO: 1169066 - RNA, 10 nt, Human
gggcuccaga

SEQ ID NO: 1169067 - RNA, 13 nt, Human
gggcuccagacac

SEQ ID NO: 1169068 - RNA, 19 nt, Human
gggcugcaccggcuggccu

SEQ ID NO: 1169069 - RNA, 20 nt, Human
gggcugcaccggcuggccug

SEQ ID NO: 1169070 - RNA, 21 nt, Human
gggcugcaccggcuggccugg

SEQ ID NO: 1169071 - RNA, 22 nt, Human
gggcugcaccggcuggccuggc

SEQ ID NO: 1169072 - RNA, 15 nt, Human
gggcugggcagagga

SEQ ID NO: 1169073 - RNA, 17 nt, Human
gggcuggguucuaccca

SEQ ID NO: 1169074 - RNA, 16 nt, Human
aaaaugguuuaaaugg

SEQ ID NO: 1169075 - RNA, 18 nt, Human
aaaaugguuuaaaugguc

SEQ ID NO: 1169076 - RNA, 22 nt, Human
aaaccugugucucugagaguag

SEQ ID NO: 1169077 - RNA, 14 nt, Human
gggucacucuggca

SEQ ID NO: 1169078 - RNA, 20 nt, Human
gggucacucuggcagcucag

SEQ ID NO: 1169079 - RNA, 22 nt, Human
gggucacucuggcagcucagag

SEQ ID NO: 1169080 - RNA, 19 nt, Human
aaacauuuugucauauaag

SEQ ID NO: 1169081 - RNA, 18 nt, Human
aaaauguauguguaagua

SEQ ID NO: 1169082 - RNA, 12 nt, Human
ggggaccagagc

SEQ ID NO: 1169083 - RNA, 13 nt, Human
ggggaccagagcu

SEQ ID NO: 1169084 - RNA, 14 nt, Human
ggggaccagagcug

SEQ ID NO: 1169085 - RNA, 15 nt, Human
ggggaccagagcugc

SEQ ID NO: 1169086 - RNA, 15 nt, Human
ggggcccugccuccu

SEQ ID NO: 1169087 - RNA, 11 nt, Human
gggggcuggga

SEQ ID NO: 1169088 - RNA, 15 nt, Human
gggggcugggcagag

SEQ ID NO: 1169089 - RNA, 13 nt, Human
ggggguggccucc

SEQ ID NO: 1169090 - RNA, 21 nt, Human
ggggucacucuggcagcucag

SEQ ID NO: 1169091 - RNA, 19 nt, Human
gggugggacacccugugau

SEQ ID NO: 1169092 - RNA, 23 nt, Human
ggguuuugccauguuggccaggc

SEQ ID NO: 1169093 - RNA, 20 nt, Human
ggguuuugccauguuggcca

SEQ ID NO: 1169094 - RNA, 13 nt, Human
gguaacaggcaga

SEQ ID NO: 1169095 - RNA, 21 nt, Human
aaacguggcugcuucaaggau

SEQ ID NO: 1169096 - RNA, 14 nt, Human
aaacuuaaucuaaa

SEQ ID NO: 1169097 - RNA, 19 nt, Human
aaacuucagacauagaauu

SEQ ID NO: 1169098 - RNA, 15 nt, Human
gggugggacacccug

SEQ ID NO: 1169099 - RNA, 18 nt, Human
gggugggacacccuguga

SEQ ID NO: 1169100 - RNA, 20 nt, Human
gguaggguaagugagagagg

SEQ ID NO: 1169101 - RNA, 14 nt, Human
gguaucaggugcug

SEQ ID NO: 1169102 - RNA, 20 nt, Human
gguaaggaauaccugucccc

SEQ ID NO: 1169103 - RNA, 22 nt, Human
aaacuugauguguuaucucuua

SEQ ID NO: 1169104 - RNA, 14 nt, Human
ggucagugcaaaua

SEQ ID NO: 1169105 - RNA, 19 nt, Human
gguaucaggugcugccauc

SEQ ID NO: 1169106 - RNA, 16 nt, Human
gguuucuaaagcugcc

SEQ ID NO: 1169107 - RNA, 22 nt, Human
gguuucuaaagcugccagccga

SEQ ID NO: 1169108 - RNA, 20 nt, Human
gguuuguaaauuaacuuuua

SEQ ID NO: 1169109 - RNA, 18 nt, Human
aaaguacacuguuucaaa

SEQ ID NO: 1169110 - RNA, 19 nt, Human
aaaguacacuguuucaaac

SEQ ID NO: 1169111 - RNA, 20 nt, Human
aaaguacacuguuucaaacu

SEQ ID NO: 1169112 - RNA, 20 nt, Human
aaaguagaagucuuagaugu

SEQ ID NO: 1169113 - RNA, 22 nt, Human
aaaguagaagucuuagauguau

SEQ ID NO: 1169114 - RNA, 21 nt, Human
aaaguaucccuacuguaauuu

SEQ ID NO: 1169115 - RNA, 17 nt, Human
aaaguauguuagugcaa

SEQ ID NO: 1169116 - RNA, 14 nt, Human
aaaguguauuuuuu

SEQ ID NO: 1169117 - RNA, 21 nt, Human
aaaguguauuuuuuuacuaau

SEQ ID NO: 1169118 - RNA, 13 nt, Human
ggugggggccucg

SEQ ID NO: 1169119 - RNA, 14 nt, Human
gguguggagaagcg

SEQ ID NO: 1169120 - RNA, 23 nt, Human
gguguggagaagcggcuggcagc

SEQ ID NO: 1169121 - RNA, 11 nt, Human
gguguggggga

SEQ ID NO: 1169122 - RNA, 13 nt, Human
ggugugggggaag

SEQ ID NO: 1169123 - RNA, 17 nt, Human
gguguuuccuggcacug

SEQ ID NO: 1169124 - RNA, 19 nt, Human
gguguuuccuggcacugcu

SEQ ID NO: 1169125 - RNA, 17 nt, Human
gguucccauuugcuccu

SEQ ID NO: 1169126 - RNA, 23 nt, Human
gguucccuuugacgccaucccag

SEQ ID NO: 1169127 - RNA, 22 nt, Human
gguucccuuuuuuggcugcuga

SEQ ID NO: 1169128 - RNA, 15 nt, Human
aaagcagcguuucua

SEQ ID NO: 1169129 - RNA, 13 nt, Human
aaagcagugcaug

SEQ ID NO: 1169130 - RNA, 16 nt, Human
aaagcagugcaugcug

SEQ ID NO: 1169131 - RNA, 14 nt, Human
aaagcuaggccugg

SEQ ID NO: 1169132 - RNA, 16 nt, Human
aaagcuaggccuggcc

SEQ ID NO: 1169133 - RNA, 17 nt, Human
aaagcuaggccuggcca

SEQ ID NO: 1169134 - RNA, 12 nt, Human
aaagcugccagc

SEQ ID NO: 1169135 - RNA, 13 nt, Human
aaagcugccagcc

SEQ ID NO: 1169136 - RNA, 22 nt, Human
aaagcugccagccgagauagcc

SEQ ID NO: 1169137 - RNA, 12 nt, Human
aaacuuuaugcu

SEQ ID NO: 1169138 - RNA, 19 nt, Human
aaacuuuaugcuaagugaa

SEQ ID NO: 1169139 - RNA, 14 nt, Human
gguggcaccagcag

SEQ ID NO: 1169140 - RNA, 20 nt, Human
gguggcaccagcagccugga

SEQ ID NO: 1169141 - RNA, 16 nt, Human
aaagcagaacagugau

SEQ ID NO: 1169142 - RNA, 13 nt, Human
gguggcagcucac

SEQ ID NO: 1169143 - RNA, 20 nt, Human
aaagggcccagagagggugg

SEQ ID NO: 1169144 - RNA, 20 nt, Human
aaagggcuguuauaaucuuu

SEQ ID NO: 1169145 - RNA, 22 nt, Human
aaagggcuguuauaaucuuuca

SEQ ID NO: 1169146 - RNA, 18 nt, Human
gguggcuggguuggaggg

SEQ ID NO: 1169147 - RNA, 13 nt, Human
ggugggacacccu

SEQ ID NO: 1169148 - RNA, 16 nt, Human
ggugggacacccugug

SEQ ID NO: 1169149 - RNA, 17 nt, Human
ggugggacacccuguga

SEQ ID NO: 1169150 - RNA, 20 nt, Human
ggugggaggaucucuugagc

SEQ ID NO: 1169151 - RNA, 19 nt, Human
gguggggaccucaggccug

SEQ ID NO: 1169152 - RNA, 23 nt, Human
guaauccuagcacuuugggaggc

SEQ ID NO: 1169153 - RNA, 15 nt, Human
guaauuugugauaca

SEQ ID NO: 1169154 - RNA, 17 nt, Human
guaauuugugauacaau

SEQ ID NO: 1169155 - RNA, 20 nt, Human
guaauuugugauacaaugcu

SEQ ID NO: 1169156 - RNA, 22 nt, Human
guaauuugugauacaaugcugu

SEQ ID NO: 1169157 - RNA, 22 nt, Human
aaaguguauuuuuuuacuaaua

SEQ ID NO: 1169158 - RNA, 12 nt, Human
aaaguggugaga

SEQ ID NO: 1169159 - RNA, 22 nt, Human
aaauaaugugaaacuggauuaa

SEQ ID NO: 1169160 - RNA, 16 nt, Human
guaacaagccacccca

SEQ ID NO: 1169161 - RNA, 19 nt, Human
guaacaggaaaauuuuaaa

SEQ ID NO: 1169162 - RNA, 20 nt, Human
guaacaggaaaauuuuaaaa

SEQ ID NO: 1169163 - RNA, 19 nt, Human
aaauauuaagaaagacuau

SEQ ID NO: 1169164 - RNA, 19 nt, Human
aaaucagccugcuccagcu

SEQ ID NO: 1169165 - RNA, 21 nt, Human
aaaucagccugcuccagcugu

SEQ ID NO: 1169166 - RNA, 23 nt, Human
aaaucagccugcuccagcuguuc

SEQ ID NO: 1169167 - RNA, 16 nt, Human
aaaucagcugcuacua

SEQ ID NO: 1169168 - RNA, 12 nt, Human
aaauaucugaaa

SEQ ID NO: 1169169 - RNA, 14 nt, Human
aaauaucugaaaau

SEQ ID NO: 1169170 - RNA, 17 nt, Human
aaauaucugaaaaugua

SEQ ID NO: 1169171 - RNA, 18 nt, Human
aaauaucugaaaauguau

SEQ ID NO: 1169172 - RNA, 19 nt, Human
aaauaucugaaaauguaug

SEQ ID NO: 1169173 - RNA, 21 nt, Human
aaauaucugaaaauguaugug

SEQ ID NO: 1169174 - RNA, 22 nt, Human
aaauaucugaaaauguaugugu

SEQ ID NO: 1169175 - RNA, 23 nt, Human
aaauaucugaaaauguaugugua

SEQ ID NO: 1169176 - RNA, 18 nt, Human
aaauauaugcuaagucuu

SEQ ID NO: 1169177 - RNA, 22 nt, Human
aaauaucacuugucaauaaaau

SEQ ID NO: 1169178 - RNA, 15 nt, Human
aaauauaggaacuua

SEQ ID NO: 1169179 - RNA, 16 nt, Human
guacacacacauacac

SEQ ID NO: 1169180 - RNA, 19 nt, Human
aaauaccagccaguaaaug

SEQ ID NO: 1169181 - RNA, 20 nt, Human
aaauaccagccaguaaaugg

SEQ ID NO: 1169182 - RNA, 21 nt, Human
aaauaccagccaguaaauggg

SEQ ID NO: 1169183 - RNA, 13 nt, Human
ggcucccuuccca

SEQ ID NO: 1169184 - RNA, 15 nt, Human
ggcucuuccaggcug

SEQ ID NO: 1169185 - RNA, 17 nt, Human
ggcucuuccaggcuggg

SEQ ID NO: 1169186 - RNA, 18 nt, Human
ggcucuuccaggcuggga

SEQ ID NO: 1169187 - RNA, 20 nt, Human
ggcucuuccaggcugggaga

SEQ ID NO: 1169188 - RNA, 13 nt, Human
ggcucacugcagc

SEQ ID NO: 1169189 - RNA, 14 nt, Human
ggcucacugcagcc

SEQ ID NO: 1169190 - RNA, 15 nt, Human
ggcucacugcagccu

SEQ ID NO: 1169191 - RNA, 13 nt, Human
ggcuggccuggcc

SEQ ID NO: 1169192 - RNA, 14 nt, Human
ggcuggccuggccc

SEQ ID NO: 1169193 - RNA, 15 nt, Human
ggcuggccuggcccc

SEQ ID NO: 1169194 - RNA, 22 nt, Human
aaaaaacugcugacuguuuucu

SEQ ID NO: 1169195 - RNA, 14 nt, Human
aaaaaggaggaaga

SEQ ID NO: 1169196 - RNA, 21 nt, Human
aaaaaggaugcacagaguugu

SEQ ID NO: 1169197 - RNA, 12 nt, Human
aaaaaggcagga

SEQ ID NO: 1169198 - RNA, 13 nt, Human
aaaaauacaaaaa

SEQ ID NO: 1169199 - RNA, 14 nt, Human
ggcuggguuggagg

SEQ ID NO: 1169200 - RNA, 20 nt, Human
ggcuaagcuucacuguaaaa

SEQ ID NO: 1169201 - RNA, 14 nt, Human
ggcgugcaguggug

SEQ ID NO: 1169202 - RNA, 16 nt, Human
ggccuucggccuccau

SEQ ID NO: 1169203 - RNA, 18 nt, Human
ggccuucggccuccaucc

SEQ ID NO: 1169204 - RNA, 22 nt, Human
ggccuucggccuccauccugag

SEQ ID NO: 1169205 - RNA, 20 nt, Human
ggcuaagugauccucccacc

SEQ ID NO: 1169206 - RNA, 16 nt, Human
ggcuaauguacugcau

SEQ ID NO: 1169207 - RNA, 13 nt, Human
ggcuaccuuugua

SEQ ID NO: 1169208 - RNA, 14 nt, Human
ggcuaccuuuguau

SEQ ID NO: 1169209 - RNA, 16 nt, Human
ggcuagagguucaaag

SEQ ID NO: 1169210 - RNA, 12 nt, Human
ggccuggccaga

SEQ ID NO: 1169211 - RNA, 15 nt, Human
ggccuggccagaugc

SEQ ID NO: 1169212 - RNA, 16 nt, Human
ggccuggccagaugca

SEQ ID NO: 1169213 - RNA, 16 nt, Human
ggccugcaagggagug

SEQ ID NO: 1169214 - RNA, 22 nt, Human
ggccagagggagugacagaggc

SEQ ID NO: 1169215 - RNA, 15 nt, Human
ggccagaugcaccag

SEQ ID NO: 1169216 - RNA, 16 nt, Human
ggccagaugcaccagc

SEQ ID NO: 1169217 - RNA, 17 nt, Human
ggccagaugcaccagcc

SEQ ID NO: 1169218 - RNA, 13 nt, Human
ggccucagugcca

SEQ ID NO: 1169219 - RNA, 18 nt, Human
ggccucccaacucacccc

SEQ ID NO: 1169220 - RNA, 19 nt, Human
ggccucccaacucacccca

SEQ ID NO: 1169221 - RNA, 20 nt, Human
ggccucccaacucaccccag

SEQ ID NO: 1169222 - RNA, 22 nt, Human
ggccucccaacucaccccagcc

SEQ ID NO: 1169223 - RNA, 23 nt, Human
ggccucccaacucaccccagccc

SEQ ID NO: 1169224 - RNA, 14 nt, Human
ggcauuugcugaau

SEQ ID NO: 1169225 - RNA, 19 nt, Human
ggccaaaggaagcacaugc

SEQ ID NO: 1169226 - RNA, 21 nt, Human
ggccaaaggaagcacaugccu

SEQ ID NO: 1169227 - RNA, 17 nt, Human
ggcauuuguuugaacug

SEQ ID NO: 1169228 - RNA, 14 nt, Human
ggccaaaggaagca

SEQ ID NO: 1169229 - RNA, 16 nt, Human
ggccaaaggaagcaca

SEQ ID NO: 1169230 - RNA, 17 nt, Human
ggccagagacacaagcc

SEQ ID NO: 1169231 - RNA, 18 nt, Human
ggccagagacacaagccu

SEQ ID NO: 1169232 - RNA, 17 nt, Human
ggccagagggagugaca

SEQ ID NO: 1169233 - RNA, 19 nt, Human
ggccagagggagugacaga

SEQ ID NO: 1169234 - RNA, 22 nt, Human
ggcagccccauucugccugccc

SEQ ID NO: 1169235 - RNA, 23 nt, Human
ggcagccccauucugccugccca

SEQ ID NO: 1169236 - RNA, 16 nt, Human
ggcagccccauucugc

SEQ ID NO: 1169237 - RNA, 20 nt, Human
ggcagccccauucugccugc

SEQ ID NO: 1169238 - RNA, 21 nt, Human
ggcagccccauucugccugcc

SEQ ID NO: 1169239 - RNA, 20 nt, Human
ggcacugcuuccagugaggc

SEQ ID NO: 1169240 - RNA, 22 nt, Human
ggcacugcuuccagugaggcuc

SEQ ID NO: 1169241 - RNA, 13 nt, Human
ggcagccaggcca

SEQ ID NO: 1169242 - RNA, 14 nt, Human
ggcagccaggccac

SEQ ID NO: 1169243 - RNA, 18 nt, Human
ggcaggaggaucacuuga

SEQ ID NO: 1169244 - RNA, 10 nt, Human
ggcaaaauaa

SEQ ID NO: 1169245 - RNA, 15 nt, Human
ggcaaaaaggcagga

SEQ ID NO: 1169246 - RNA, 18 nt, Human
ggcacaccgggcacucag

SEQ ID NO: 1169247 - RNA, 19 nt, Human
ggcacagaaaauggaagac

SEQ ID NO: 1169248 - RNA, 16 nt, Human
ggcacugcuuccagug

SEQ ID NO: 1169249 - RNA, 14 nt, Human
ggaugaaaaaauaa

SEQ ID NO: 1169250 - RNA, 13 nt, Human
ggauuguccccga

SEQ ID NO: 1169251 - RNA, 16 nt, Human
ggauuguccccgaccc

SEQ ID NO: 1169252 - RNA, 20 nt, Human
ggauuguccccgacccuugc

SEQ ID NO: 1169253 - RNA, 12 nt, Human
ggauuuaacaga

SEQ ID NO: 1169254 - RNA, 16 nt, Human
ggauuuaacagaaaug

SEQ ID NO: 1169255 - RNA, 17 nt, Human
ggauuuaacagaaaugu

SEQ ID NO: 1169256 - RNA, 22 nt, Human
ggauuuaacagaaauguacagc

SEQ ID NO: 1169257 - RNA, 18 nt, Human
ggaucucuugagccuggg

SEQ ID NO: 1169258 - RNA, 16 nt, Human
ggaguucaucuugaau

SEQ ID NO: 1169259 - RNA, 16 nt, Human
ggauccugagccagau

SEQ ID NO: 1169260 - RNA, 18 nt, Human
ggauccugagccagauuu

SEQ ID NO: 1169261 - RNA, 19 nt, Human
ggauccugagccagauuuc

SEQ ID NO: 1169262 - RNA, 20 nt, Human
ggauccugagccagauuuca

SEQ ID NO: 1169263 - RNA, 23 nt, Human
ggauccugagccagauuucacuc

SEQ ID NO: 1169264 - RNA, 15 nt, Human
ggaguggccacagaa

SEQ ID NO: 1169265 - RNA, 16 nt, Human
ggaguggccacagaaa

SEQ ID NO: 1169266 - RNA, 12 nt, Human
ggagugggccca

SEQ ID NO: 1169267 - RNA, 22 nt, Human
ggagugggcccaaugcacuuug

SEQ ID NO: 1169268 - RNA, 21 nt, Human
ggagggugacgggggugaacu

SEQ ID NO: 1169269 - RNA, 22 nt, Human
ggagguaaggaauaccuguccc

SEQ ID NO: 1169270 - RNA, 22 nt, Human
ggaggugggauccuccaggugc

SEQ ID NO: 1169271 - RNA, 23 nt, Human
ggaggugggauccuccaggugca

SEQ ID NO: 1169272 - RNA, 13 nt, Human
ggaggggggaggu

SEQ ID NO: 1169273 - RNA, 14 nt, Human
ggaggggggaggug

SEQ ID NO: 1169274 - RNA, 17 nt, Human
ggacagucaccucaugg

SEQ ID NO: 1169275 - RNA, 18 nt, Human
ggacagucaccucaugga

SEQ ID NO: 1169276 - RNA, 21 nt, Human
ggacagucaccucauggaauu

SEQ ID NO: 1169277 - RNA, 17 nt, Human
ggacagggaggugaccc

SEQ ID NO: 1169278 - RNA, 13 nt, Human
ggacacccuguga

SEQ ID NO: 1169279 - RNA, 23 nt, Human
ggacacccugugauggggcccug

SEQ ID NO: 1169280 - RNA, 13 nt, Human
ggacauggacaag

SEQ ID NO: 1169281 - RNA, 14 nt, Human
ggacauggacaagg

SEQ ID NO: 1169282 - RNA, 16 nt, Human
ggaagcucagggccug

SEQ ID NO: 1169283 - RNA, 17 nt, Human
ggaagcucagggccugg

SEQ ID NO: 1169284 - RNA, 21 nt, Human
ggaagcucagggccuggcuca

SEQ ID NO: 1169285 - RNA, 22 nt, Human
ggaagcucagggccuggcucag

SEQ ID NO: 1169286 - RNA, 15 nt, Human
ggaauaccugucccc

SEQ ID NO: 1169287 - RNA, 16 nt, Human
ggaauaccuguccccc

SEQ ID NO: 1169288 - RNA, 19 nt, Human
ggaauaccugucccccuga

SEQ ID NO: 1169289 - RNA, 16 nt, Human
ggaauauauaaccagu

SEQ ID NO: 1169290 - RNA, 19 nt, Human
ggaaugaaugucaguguga

SEQ ID NO: 1169291 - RNA, 14 nt, Human
ggaaugauuaauua

SEQ ID NO: 1169292 - RNA, 12 nt, Human
ggacacagcucu

SEQ ID NO: 1169293 - RNA, 13 nt, Human
ggacacagcucuu

SEQ ID NO: 1169294 - RNA, 14 nt, Human
ggacacagcucuuc

SEQ ID NO: 1169295 - RNA, 12 nt, Human
ggacacccugug

SEQ ID NO: 1169296 - RNA, 19 nt, Human
ggaaaucaggguuaguauu

SEQ ID NO: 1169297 - RNA, 21 nt, Human
ggaagccagcaggcucucagg

SEQ ID NO: 1169298 - RNA, 22 nt, Human
ggaagccagcaggcucucaggc

SEQ ID NO: 1169299 - RNA, 23 nt, Human
ggaagccagcaggcucucaggcc

SEQ ID NO: 1169300 - RNA, 18 nt, Human
ggaagccgcuggggccag

SEQ ID NO: 1169301 - RNA, 16 nt, Human
gcuuaacuucacauau

SEQ ID NO: 1169302 - RNA, 17 nt, Human
gcuuaacuucacauauu

SEQ ID NO: 1169303 - RNA, 16 nt, Human
gcuucuucagagacuc

SEQ ID NO: 1169304 - RNA, 19 nt, Human
gcuucuucagagacuccug

SEQ ID NO: 1169305 - RNA, 21 nt, Human
gcuucuucagagacuccugca

SEQ ID NO: 1169306 - RNA, 23 nt, Human
gcuucuucagagacuccugcagg

SEQ ID NO: 1169307 - RNA, 17 nt, Human
gcuugaccgugaggcca

SEQ ID NO: 1169308 - RNA, 18 nt, Human
gcuugaccgugaggccag

SEQ ID NO: 1169309 - RNA, 19 nt, Human
gcuugaccgugaggccaga

SEQ ID NO: 1169310 - RNA, 23 nt, Human
gcuugggcuucauccuccucaga

SEQ ID NO: 1169311 - RNA, 16 nt, Human
gcuuggggaccagagc

SEQ ID NO: 1169312 - RNA, 17 nt, Human
gcuuggggaccagagcu

SEQ ID NO: 1169313 - RNA, 18 nt, Human
gcuuggggaccagagcug

SEQ ID NO: 1169314 - RNA, 20 nt, Human
gcuuggggaccagagcugcc

SEQ ID NO: 1169315 - RNA, 21 nt, Human
gcuuggggaccagagcugcca

SEQ ID NO: 1169316 - RNA, 22 nt, Human
gcuuggggaccagagcugccac

SEQ ID NO: 1169317 - RNA, 20 nt, Human
gcuugaccgugaggccagag

SEQ ID NO: 1169318 - RNA, 13 nt, Human
gcuuucuacccag

SEQ ID NO: 1169319 - RNA, 19 nt, Human
gcuuucuacccagcgagcc

SEQ ID NO: 1169320 - RNA, 22 nt, Human
gcuuucuacccagcgagcccug

SEQ ID NO: 1169321 - RNA, 23 nt, Human
gcuuucuacccagcgagcccugg

SEQ ID NO: 1169322 - RNA, 16 nt, Human
ggaaaaaauaacaaug

SEQ ID NO: 1169323 - RNA, 15 nt, Human
gcuuuuuaauauuga

SEQ ID NO: 1169324 - RNA, 13 nt, Human
gcuuuugugcauu

SEQ ID NO: 1169325 - RNA, 19 nt, Human
gcuuuugugcauuaucuag

SEQ ID NO: 1169326 - RNA, 20 nt, Human
ggaaacagcuaaugggacac

SEQ ID NO: 1169327 - RNA, 15 nt, Human
ggaaacccagcucug

SEQ ID NO: 1169328 - RNA, 20 nt, Human
ggaaagacuuuuccaacccu

SEQ ID NO: 1169329 - RNA, 14 nt, Human
ggaaagaggcucug

SEQ ID NO: 1169330 - RNA, 16 nt, Human
ggaaagaguaggaaga

SEQ ID NO: 1169331 - RNA, 17 nt, Human
ggaaagaguaggaagac

SEQ ID NO: 1169332 - RNA, 19 nt, Human
ggaaagcaaaggagauugg

SEQ ID NO: 1169333 - RNA, 16 nt, Human
ggaaagcccugugcuc

SEQ ID NO: 1169334 - RNA, 13 nt, Human
gcugugcucugga

SEQ ID NO: 1169335 - RNA, 15 nt, Human
gcugugcucuggaca

SEQ ID NO: 1169336 - RNA, 16 nt, Human
gcugugcucuggacag

SEQ ID NO: 1169337 - RNA, 18 nt, Human
gcugugcucuggacaggc

SEQ ID NO: 1169338 - RNA, 16 nt, Human
gcuguuggcugggggc

SEQ ID NO: 1169339 - RNA, 20 nt, Human
gcuguuggcugggggccuca

SEQ ID NO: 1169340 - RNA, 15 nt, Human
gcugugcugcccugc

SEQ ID NO: 1169341 - RNA, 16 nt, Human
gcugugcugcccugcc

SEQ ID NO: 1169342 - RNA, 17 nt, Human
gcugugcugcccugccc

SEQ ID NO: 1169343 - RNA, 15 nt, Human
gcuguuggcuggggg

SEQ ID NO: 1169344 - RNA, 17 nt, Human
gcuguaucccaugagcc

SEQ ID NO: 1169345 - RNA, 19 nt, Human
gcuguaucccaugagccuc

SEQ ID NO: 1169346 - RNA, 20 nt, Human
gcuguauuuuaaaagaauga

SEQ ID NO: 1169347 - RNA, 21 nt, Human
gcuguauuuuaaaagaaugau

SEQ ID NO: 1169348 - RNA, 22 nt, Human
gcuguauuuuaaaagaaugauu

SEQ ID NO: 1169349 - RNA, 18 nt, Human
gcuggcuguuggcugggg

SEQ ID NO: 1169350 - RNA, 19 nt, Human
gcuggcuguuggcuggggg

SEQ ID NO: 1169351 - RNA, 15 nt, Human
gcuggcgugcagugg

SEQ ID NO: 1169352 - RNA, 18 nt, Human
gcuggcgugcaguggugc

SEQ ID NO: 1169353 - RNA, 20 nt, Human
gcuggcgugcaguggugcga

SEQ ID NO: 1169354 - RNA, 14 nt, Human
gcuggcgugcagug

SEQ ID NO: 1169355 - RNA, 12 nt, Human
gcugcugaaggc

SEQ ID NO: 1169356 - RNA, 22 nt, Human
gcugggguggggaccucaggcc

SEQ ID NO: 1169357 - RNA, 23 nt, Human
gcugggguggggaccucaggccu

SEQ ID NO: 1169358 - RNA, 18 nt, Human
gcuggguucuacccaggu

SEQ ID NO: 1169359 - RNA, 20 nt, Human
gcuggguucuacccaggugc

SEQ ID NO: 1169360 - RNA, 21 nt, Human
gcuggguucuacccaggugcu

SEQ ID NO: 1169361 - RNA, 20 nt, Human
gcuggcuguuggcugggggc

SEQ ID NO: 1169362 - RNA, 23 nt, Human
gcuggcuguuggcugggggccuc

SEQ ID NO: 1169363 - RNA, 19 nt, Human
gcugggguggggaccucag

SEQ ID NO: 1169364 - RNA, 16 nt, Human
gcugccucucccauca

SEQ ID NO: 1169365 - RNA, 18 nt, Human
gcugccuguucagcucca

SEQ ID NO: 1169366 - RNA, 17 nt, Human
gcugccuguucagcucc

SEQ ID NO: 1169367 - RNA, 12 nt, Human
gcugccuguuca

SEQ ID NO: 1169368 - RNA, 13 nt, Human
gcugccuguucag

SEQ ID NO: 1169369 - RNA, 21 nt, Human
gcugccugggaucccucaucc

SEQ ID NO: 1169370 - RNA, 18 nt, Human
gcugccccuggcagcccc

SEQ ID NO: 1169371 - RNA, 19 nt, Human
gcugccccuggcagccccu

SEQ ID NO: 1169372 - RNA, 20 nt, Human
gcugccccuggcagccccug

SEQ ID NO: 1169373 - RNA, 18 nt, Human
gcugcacccucaggcagg

SEQ ID NO: 1169374 - RNA, 19 nt, Human
gcugcacccucaggcaggu

SEQ ID NO: 1169375 - RNA, 13 nt, Human
gcugcaccggcug

SEQ ID NO: 1169376 - RNA, 14 nt, Human
gcugcaccggcugg

SEQ ID NO: 1169377 - RNA, 23 nt, Human
gcugagggugagugggugaauaa

SEQ ID NO: 1169378 - RNA, 14 nt, Human
gcugaggugggagg

SEQ ID NO: 1169379 - RNA, 15 nt, Human
gcugaggugggagga

SEQ ID NO: 1169380 - RNA, 21 nt, Human
gcgcagcauauucaggaagcu

SEQ ID NO: 1169381 - RNA, 23 nt, Human
gcgauucuucugcuucagccucc

SEQ ID NO: 1169382 - RNA, 23 nt, Human
gccuugaacuuugaccucugcag

SEQ ID NO: 1169383 - RNA, 16 nt, Human
gccuugaccauucucc

SEQ ID NO: 1169384 - RNA, 22 nt, Human
gccuugaccauucuccaccugc

SEQ ID NO: 1169385 - RNA, 23 nt, Human
gccuugaccauucuccaccugcc

SEQ ID NO: 1169386 - RNA, 22 nt, Human
gcgauucuucugcuucagccuc

SEQ ID NO: 1169387 - RNA, 23 nt, Human
gccugggaucccucauccucaua

SEQ ID NO: 1169388 - RNA, 11 nt, Human
gccugggcaga

SEQ ID NO: 1169389 - RNA, 15 nt, Human
gccuguucagcucca

SEQ ID NO: 1169390 - RNA, 16 nt, Human
gccuguucagcuccag

SEQ ID NO: 1169391 - RNA, 17 nt, Human
gccuguucagcuccagc

SEQ ID NO: 1169392 - RNA, 15 nt, Human
gccuucucugaagga

SEQ ID NO: 1169393 - RNA, 16 nt, Human
gccuucucugaaggac

SEQ ID NO: 1169394 - RNA, 21 nt, Human
gccuucuuuucucccuuuuaa

SEQ ID NO: 1169395 - RNA, 14 nt, Human
gccuugaacuuuga

SEQ ID NO: 1169396 - RNA, 15 nt, Human
gcggcuggcagccca

SEQ ID NO: 1169397 - RNA, 20 nt, Human
gcgggaggauguucugggac

SEQ ID NO: 1169398 - RNA, 20 nt, Human
gcuaggaccccuccaugugg

SEQ ID NO: 1169399 - RNA, 22 nt, Human
gcuaggaccccuccaugugggc

SEQ ID NO: 1169400 - RNA, 21 nt, Human
gcuaguaauuggaaaggcagc

SEQ ID NO: 1169401 - RNA, 14 nt, Human
gcuaguugggcuuc

SEQ ID NO: 1169402 - RNA, 16 nt, Human
gcuaguugggcuuccu

SEQ ID NO: 1169403 - RNA, 21 nt, Human
gcuaguugggcuuccucauag

SEQ ID NO: 1169404 - RNA, 18 nt, Human
gcuauucaguaauaacuc

SEQ ID NO: 1169405 - RNA, 18 nt, Human
gcuaagugauccucccac

SEQ ID NO: 1169406 - RNA, 22 nt, Human
gcuaagugauccucccaccuca

SEQ ID NO: 1169407 - RNA, 23 nt, Human
gcuaagugauccucccaccucag

SEQ ID NO: 1169408 - RNA, 20 nt, Human
gcucagggccuggcucaggu

SEQ ID NO: 1169409 - RNA, 13 nt, Human
gcucaggaguuug

SEQ ID NO: 1169410 - RNA, 18 nt, Human
gcucagggccuggcucag

SEQ ID NO: 1169411 - RNA, 19 nt, Human
gcucagggccuggcucagg

SEQ ID NO: 1169412 - RNA, 22 nt, Human
gccucauguccacugguucuuc

SEQ ID NO: 1169413 - RNA, 18 nt, Human
gccuccugcccuuaccug

SEQ ID NO: 1169414 - RNA, 22 nt, Human
gccuccuuugugaggaagccgc

SEQ ID NO: 1169415 - RNA, 13 nt, Human
gccucgaacuggc

SEQ ID NO: 1169416 - RNA, 16 nt, Human
gccucgaacuggcugc

SEQ ID NO: 1169417 - RNA, 13 nt, Human
gccuccauccuga

SEQ ID NO: 1169418 - RNA, 14 nt, Human
gccuccauccugag

SEQ ID NO: 1169419 - RNA, 15 nt, Human
gccuccauccugagg

SEQ ID NO: 1169420 - RNA, 17 nt, Human
gccuacaggagugagca

SEQ ID NO: 1169421 - RNA, 12 nt, Human
gccuagcauacg

SEQ ID NO: 1169422 - RNA, 19 nt, Human
gccuagcauacguacacau

SEQ ID NO: 1169423 - RNA, 13 nt, Human
gcccugugcucca

SEQ ID NO: 1169424 - RNA, 14 nt, Human
gcccugcccaccug

SEQ ID NO: 1169425 - RNA, 15 nt, Human
gcccugcccaccugg

SEQ ID NO: 1169426 - RNA, 16 nt, Human
gcccugugggccccca

SEQ ID NO: 1169427 - RNA, 17 nt, Human
gcccugugggcccccaa

SEQ ID NO: 1169428 - RNA, 22 nt, Human
gcccuuaccugccaggaagcca

SEQ ID NO: 1169429 - RNA, 23 nt, Human
gcccuuaccugccaggaagccag

SEQ ID NO: 1169430 - RNA, 21 nt, Human
gcccugugggcccccaaaugg

SEQ ID NO: 1169431 - RNA, 19 nt, Human
gcccuuagcagggaaacag

SEQ ID NO: 1169432 - RNA, 16 nt, Human
gccuacaggagugagc

SEQ ID NO: 1169433 - RNA, 16 nt, Human
gccccuggcagccccu

SEQ ID NO: 1169434 - RNA, 17 nt, Human
gccccuggcagccccug

SEQ ID NO: 1169435 - RNA, 21 nt, Human
gccccugcugguucaggguug

SEQ ID NO: 1169436 - RNA, 15 nt, Human
gccccugcugguuca

SEQ ID NO: 1169437 - RNA, 16 nt, Human
gccccugcugguucag

SEQ ID NO: 1169438 - RNA, 12 nt, Human
gccccuggcagc

SEQ ID NO: 1169439 - RNA, 15 nt, Human
gccccuggcagcccc

SEQ ID NO: 1169440 - RNA, 20 nt, Human
gccccaaaacucuccucugc

SEQ ID NO: 1169441 - RNA, 21 nt, Human
gccccaaaacucuccucugcu

SEQ ID NO: 1169442 - RNA, 11 nt, Human
gccccaaaagg

SEQ ID NO: 1169443 - RNA, 16 nt, Human
gcccacgcccccacug

SEQ ID NO: 1169444 - RNA, 17 nt, Human
gcccacgcccccacugg

SEQ ID NO: 1169445 - RNA, 21 nt, Human
gcccacgcccccacuggugac

SEQ ID NO: 1169446 - RNA, 18 nt, Human
gcauuuacuuuguguuca

SEQ ID NO: 1169447 - RNA, 12 nt, Human
gcauuuagaugu

SEQ ID NO: 1169448 - RNA, 13 nt, Human
gcauuuagaugua

SEQ ID NO: 1169449 - RNA, 19 nt, Human
gcauuuaggccaugggaca

SEQ ID NO: 1169450 - RNA, 21 nt, Human
gcccacgcuggagugcaguga

SEQ ID NO: 1169451 - RNA, 23 nt, Human
gcccacgcuggagugcagugagc

SEQ ID NO: 1169452 - RNA, 13 nt, Human
gcccacuucugcc

SEQ ID NO: 1169453 - RNA, 22 nt, Human
gcccaggaaaggcuccaggagc

SEQ ID NO: 1169454 - RNA, 23 nt, Human
gcccaggaaaggcuccaggagca

SEQ ID NO: 1169455 - RNA, 24 nt, Human
gcccaggaaaggcuccaggagcag

SEQ ID NO: 1169456 - RNA, 14 nt, Human
gcccacuucugcca

SEQ ID NO: 1169457 - RNA, 11 nt, Human
gcccaggcagg

SEQ ID NO: 1169458 - RNA, 12 nt, Human
gcccaggcaggu

SEQ ID NO: 1169459 - RNA, 11 nt, Human
gcccaggcccc

SEQ ID NO: 1169460 - RNA, 12 nt, Human
gcccaggccccu

SEQ ID NO: 1169461 - RNA, 20 nt, Human
gcccaggccccugccacccu

SEQ ID NO: 1169462 - RNA, 21 nt, Human
gcccaggccccugccacccug

SEQ ID NO: 1169463 - RNA, 22 nt, Human
gcccaggccccugccacccugg

SEQ ID NO: 1169464 - RNA, 13 nt, Human
gcccaggccccug

SEQ ID NO: 1169465 - RNA, 13 nt, Human
gcauccuggcacc

SEQ ID NO: 1169466 - RNA, 14 nt, Human
gcauccuggcaccc

SEQ ID NO: 1169467 - RNA, 20 nt, Human
gcaucuagcaugucgucaaa

SEQ ID NO: 1169468 - RNA, 21 nt, Human
gcauggcugccaaugggagcu

SEQ ID NO: 1169469 - RNA, 13 nt, Human
gcaugggaaugaa

SEQ ID NO: 1169470 - RNA, 19 nt, Human
gcaugugaugagaggaaau

SEQ ID NO: 1169471 - RNA, 21 nt, Human
gcaugugaugagaggaaauca

SEQ ID NO: 1169472 - RNA, 13 nt, Human
gcauugugggaag

SEQ ID NO: 1169473 - RNA, 15 nt, Human
gcauugugggaaggg

SEQ ID NO: 1169474 - RNA, 16 nt, Human
gcauugugggaagggg

SEQ ID NO: 1169475 - RNA, 18 nt, Human
gcauugugggaaggggag

SEQ ID NO: 1169476 - RNA, 16 nt, Human
gcauuuaaaagauaca

SEQ ID NO: 1169477 - RNA, 17 nt, Human
gcauuuaaaagauacag

SEQ ID NO: 1169478 - RNA, 18 nt, Human
gcauuuaaaagauacagu

SEQ ID NO: 1169479 - RNA, 22 nt, Human
gcauuuaaaagauacaguuacu

SEQ ID NO: 1169480 - RNA, 15 nt, Human
gcauuuacuuugugu

SEQ ID NO: 1169481 - RNA, 14 nt, Human
gcauccaguaucuu

SEQ ID NO: 1169482 - RNA, 17 nt, Human
gcauccaguaucuugaa

SEQ ID NO: 1169483 - RNA, 18 nt, Human
gcauccaguaucuugaag

SEQ ID NO: 1169484 - RNA, 22 nt, Human
gcaguuguugcccacagcugua

SEQ ID NO: 1169485 - RNA, 15 nt, Human
gcauacguacacauu

SEQ ID NO: 1169486 - RNA, 16 nt, Human
gcauacguacacauuu

SEQ ID NO: 1169487 - RNA, 17 nt, Human
gcauacguacacauuuu

SEQ ID NO: 1169488 - RNA, 18 nt, Human
gcauacguacacauuuua

SEQ ID NO: 1169489 - RNA, 18 nt, Human
gcagcccaccccucaaca

SEQ ID NO: 1169490 - RNA, 15 nt, Human
gcagccacauuccug

SEQ ID NO: 1169491 - RNA, 20 nt, Human
gcacucagaagacacugaug

SEQ ID NO: 1169492 - RNA, 18 nt, Human
gcaagugagagcugggug

SEQ ID NO: 1169493 - RNA, 19 nt, Human
gcaagugagagcugggugu

SEQ ID NO: 1169494 - RNA, 14 nt, Human
gcacuccagccugg

SEQ ID NO: 1169495 - RNA, 15 nt, Human
gcacuccagccuggg

SEQ ID NO: 1169496 - RNA, 13 nt, Human
gcacuccccugcu

SEQ ID NO: 1169497 - RNA, 14 nt, Human
gcacuccccugcug

SEQ ID NO: 1169498 - RNA, 15 nt, Human
gcacuccccugcugg

SEQ ID NO: 1169499 - RNA, 16 nt, Human
gcacuccccugcuggg

SEQ ID NO: 1169500 - RNA, 18 nt, Human
gcacuuuguucuggcucu

SEQ ID NO: 1169501 - RNA, 19 nt, Human
gcacuuuguucuggcucuu

SEQ ID NO: 1169502 - RNA, 22 nt, Human
gcacuuuguucuggcucuucca

SEQ ID NO: 1169503 - RNA, 12 nt, Human
gcagaacaguga

SEQ ID NO: 1169504 - RNA, 13 nt, Human
gcagaacagugau

SEQ ID NO: 1169505 - RNA, 18 nt, Human
gcagaacagugauuacca

SEQ ID NO: 1169506 - RNA, 22 nt, Human
gcagaacagugauuaccaggga

SEQ ID NO: 1169507 - RNA, 13 nt, Human
gcagaggaaagca

SEQ ID NO: 1169508 - RNA, 14 nt, Human
gcagaggaaagcaa

SEQ ID NO: 1169509 - RNA, 18 nt, Human
gcagaggaaagcaaagga

SEQ ID NO: 1169510 - RNA, 20 nt, Human
gcagaggaaagcaaaggaga

SEQ ID NO: 1169511 - RNA, 21 nt, Human
gcagaggaaagcaaaggagau

SEQ ID NO: 1169512 - RNA, 14 nt, Human
gcagagggcacaga

SEQ ID NO: 1169513 - RNA, 17 nt, Human
gcagcauauucaggaag

SEQ ID NO: 1169514 - RNA, 18 nt, Human
gcagcauauucaggaagc

SEQ ID NO: 1169515 - RNA, 19 nt, Human
gcagcauauucaggaagcu

SEQ ID NO: 1169516 - RNA, 23 nt, Human
gcagcauauucaggaagcucagg

SEQ ID NO: 1169517 - RNA, 20 nt, Human
gcaaccuccgccucuugggu

SEQ ID NO: 1169518 - RNA, 14 nt, Human
gcaacccccagccu

SEQ ID NO: 1169519 - RNA, 15 nt, Human
gcaacccccagccug

SEQ ID NO: 1169520 - RNA, 16 nt, Human
gcaacccccagccugc

SEQ ID NO: 1169521 - RNA, 17 nt, Human
gcaacccccagccugcu

SEQ ID NO: 1169522 - RNA, 13 nt, Human
gcaacaggcuggg

SEQ ID NO: 1169523 - RNA, 14 nt, Human
gcaacaggcugggc

SEQ ID NO: 1169524 - RNA, 15 nt, Human
gcaacaggcugggcu

SEQ ID NO: 1169525 - RNA, 16 nt, Human
gcaacaggcugggcuu

SEQ ID NO: 1169526 - RNA, 19 nt, Human
gcaacaggcugggcuucag

SEQ ID NO: 1169527 - RNA, 13 nt, Human
gcaaccaccacca

SEQ ID NO: 1169528 - RNA, 16 nt, Human
gcaaccaccaccaacc

SEQ ID NO: 1169529 - RNA, 18 nt, Human
gcaaccaccaccaaccac

SEQ ID NO: 1169530 - RNA, 16 nt, Human
gcaagugagagcuggg

SEQ ID NO: 1169531 - RNA, 13 nt, Human
gauucuucugcuu

SEQ ID NO: 1169532 - RNA, 15 nt, Human
gauucuucugcuuca

SEQ ID NO: 1169533 - RNA, 20 nt, Human
gauucuucugcuucagccuc

SEQ ID NO: 1169534 - RNA, 17 nt, Human
gauuuaacagaaaugua

SEQ ID NO: 1169535 - RNA, 18 nt, Human
gauuuaacagaaauguac

SEQ ID NO: 1169536 - RNA, 19 nt, Human
gauuuaacagaaauguaca

SEQ ID NO: 1169537 - RNA, 11 nt, Human
gauuucacucu

SEQ ID NO: 1169538 - RNA, 12 nt, Human
gauuucacucuc

SEQ ID NO: 1169539 - RNA, 17 nt, Human
gauuuuuuuuuccuuca

SEQ ID NO: 1169540 - RNA, 18 nt, Human
gauuuuuuuuuccuucag

SEQ ID NO: 1169541 - RNA, 21 nt, Human
gauuuuuuuuuccuucagugc

SEQ ID NO: 1169542 - RNA, 14 nt, Human
gcaaaaaggcagga

SEQ ID NO: 1169543 - RNA, 22 nt, Human
gcaaaagaugcuucucacugcc

SEQ ID NO: 1169544 - RNA, 19 nt, Human
gaucucuugagccugggag

SEQ ID NO: 1169545 - RNA, 13 nt, Human
gaugauccuaggc

SEQ ID NO: 1169546 - RNA, 14 nt, Human
gaugauccuaggca

SEQ ID NO: 1169547 - RNA, 22 nt, Human
gaugauuggaggggggaggugg

SEQ ID NO: 1169548 - RNA, 17 nt, Human
gaugcuucuucagagac

SEQ ID NO: 1169549 - RNA, 20 nt, Human
gaugcuucuucagagacucc

SEQ ID NO: 1169550 - RNA, 21 nt, Human
gaugcuucuucagagacuccu

SEQ ID NO: 1169551 - RNA, 15 nt, Human
gauauuuugcuuugu

SEQ ID NO: 1169552 - RNA, 20 nt, Human
gaucaaaagguuaauaaagu

SEQ ID NO: 1169553 - RNA, 23 nt, Human
gaucaaaagguuaauaaaguaau

SEQ ID NO: 1169554 - RNA, 21 nt, Human
gaucaaccccuucgcuccugu

SEQ ID NO: 1169555 - RNA, 12 nt, Human
gauccaagcugg

SEQ ID NO: 1169556 - RNA, 16 nt, Human
gauccaagcugguccc

SEQ ID NO: 1169557 - RNA, 17 nt, Human
gauccaagcugguccca

SEQ ID NO: 1169558 - RNA, 19 nt, Human
gauccaagcuggucccacu

SEQ ID NO: 1169559 - RNA, 21 nt, Human
gauccaagcuggucccacuca

SEQ ID NO: 1169560 - RNA, 18 nt, Human
gauccacccaccucagcc

SEQ ID NO: 1169561 - RNA, 19 nt, Human
gauccacccaccucagccu

SEQ ID NO: 1169562 - RNA, 20 nt, Human
gauccacccaccucagccuc

SEQ ID NO: 1169563 - RNA, 21 nt, Human
gauccacccaccucagccucc

SEQ ID NO: 1169564 - RNA, 22 nt, Human
gauccacccaccucagccuccc

SEQ ID NO: 1169565 - RNA, 16 nt, Human
gauacaguuacucaga

SEQ ID NO: 1169566 - RNA, 19 nt, Human
gauacaguuacucagaauu

SEQ ID NO: 1169567 - RNA, 23 nt, Human
gauacaguuacucagaauucucu

SEQ ID NO: 1169568 - RNA, 17 nt, Human
gauacuguaucaugaca

SEQ ID NO: 1169569 - RNA, 21 nt, Human
gauacuguaucaugacaaaga

SEQ ID NO: 1169570 - RNA, 14 nt, Human
gagggccugcaagg

SEQ ID NO: 1169571 - RNA, 17 nt, Human
gagggccugcaagggag

SEQ ID NO: 1169572 - RNA, 21 nt, Human
gagggccugcaagggagugag

SEQ ID NO: 1169573 - RNA, 20 nt, Human
gaggcaugugaugagaggaa

SEQ ID NO: 1169574 - RNA, 21 nt, Human
gaggcaugugaugagaggaaa

SEQ ID NO: 1169575 - RNA, 22 nt, Human
gaggcaugugaugagaggaaau

SEQ ID NO: 1169576 - RNA, 19 nt, Human
gaggcauuuguuugaacug

SEQ ID NO: 1169577 - RNA, 21 nt, Human
gaggcauuuguuugaacugau

SEQ ID NO: 1169578 - RNA, 17 nt, Human
gaggccaaggugggagg

SEQ ID NO: 1169579 - RNA, 15 nt, Human
gaggcuccacuuggu

SEQ ID NO: 1169580 - RNA, 17 nt, Human
gaggcuccacuuggucu

SEQ ID NO: 1169581 - RNA, 18 nt, Human
gaggcuccacuuggucug

SEQ ID NO: 1169582 - RNA, 18 nt, Human
gaggcugagaugggagaa

SEQ ID NO: 1169583 - RNA, 21 nt, Human
gaggacgcucucuggccuucg

SEQ ID NO: 1169584 - RNA, 16 nt, Human
gaggacuuuucuuugu

SEQ ID NO: 1169585 - RNA, 20 nt, Human
gaggacuuuucuuuguggcu

SEQ ID NO: 1169586 - RNA, 23 nt, Human
gaggacuuuucuuuguggcuucc

SEQ ID NO: 1169587 - RNA, 12 nt, Human
gaggagaaacug

SEQ ID NO: 1169588 - RNA, 14 nt, Human
gaggagaaacugga

SEQ ID NO: 1169589 - RNA, 12 nt, Human
gaggagagagga

SEQ ID NO: 1169590 - RNA, 14 nt, Human
gaggagagaggacc

SEQ ID NO: 1169591 - RNA, 15 nt, Human
gaggagagaggaccc

SEQ ID NO: 1169592 - RNA, 19 nt, Human
gaggcagggucucacucug

SEQ ID NO: 1169593 - RNA, 20 nt, Human
gaggcagggucucacucugu

SEQ ID NO: 1169594 - RNA, 22 nt, Human
gaggcagggucucacucugucg

SEQ ID NO: 1169595 - RNA, 14 nt, Human
gagcagucaggaaa

SEQ ID NO: 1169596 - RNA, 14 nt, Human
gagcaucaggccag

SEQ ID NO: 1169597 - RNA, 15 nt, Human
gagcaucaggccagg

SEQ ID NO: 1169598 - RNA, 16 nt, Human
gagcaucaggccaggc

SEQ ID NO: 1169599 - RNA, 17 nt, Human
gagcaucaggccaggcc

SEQ ID NO: 1169600 - RNA, 13 nt, Human
gagcaugccugga

SEQ ID NO: 1169601 - RNA, 21 nt, Human
gagcaugccuggauggggcug

SEQ ID NO: 1169602 - RNA, 14 nt, Human
gagccccgaggccu

SEQ ID NO: 1169603 - RNA, 17 nt, Human
gagccccgaggccuucu

SEQ ID NO: 1169604 - RNA, 13 nt, Human
gagcccugguggc

SEQ ID NO: 1169605 - RNA, 14 nt, Human
gagcccugguggca

SEQ ID NO: 1169606 - RNA, 12 nt, Human
gagaggaaauca

SEQ ID NO: 1169607 - RNA, 20 nt, Human
gagagcugggugucaagagg

SEQ ID NO: 1169608 - RNA, 15 nt, Human
gagaggacccccuga

SEQ ID NO: 1169609 - RNA, 13 nt, Human
gagacuccugcag

SEQ ID NO: 1169610 - RNA, 14 nt, Human
gagacuccugcagg

SEQ ID NO: 1169611 - RNA, 15 nt, Human
gagagccuuccaggg

SEQ ID NO: 1169612 - RNA, 16 nt, Human
gagagccuuccagggg

SEQ ID NO: 1169613 - RNA, 18 nt, Human
gagagccuuccaggggug

SEQ ID NO: 1169614 - RNA, 20 nt, Human
gagagccuuccagggguggg

SEQ ID NO: 1169615 - RNA, 15 nt, Human
gagagcuagcagcag

SEQ ID NO: 1169616 - RNA, 21 nt, Human
gagagcuagcagcagggaggg

SEQ ID NO: 1169617 - RNA, 13 nt, Human
gagagcugggugu

SEQ ID NO: 1169618 - RNA, 16 nt, Human
gagaugcuagaacucc

SEQ ID NO: 1169619 - RNA, 20 nt, Human
gagaugcuagaacucccuuu

SEQ ID NO: 1169620 - RNA, 14 nt, Human
gagauuggaaggaa

SEQ ID NO: 1169621 - RNA, 21 nt, Human
gagauugugccccugcacucc

SEQ ID NO: 1169622 - RNA, 14 nt, Human
gacuuuuccaaccc

SEQ ID NO: 1169623 - RNA, 19 nt, Human
gacuuuuccaacccucauc

SEQ ID NO: 1169624 - RNA, 22 nt, Human
gacuuuuuauggcacuaguauu

SEQ ID NO: 1169625 - RNA, 20 nt, Human
gacuuuuccaacccucauca

SEQ ID NO: 1169626 - RNA, 15 nt, Human
gagaaugaaagggcc

SEQ ID NO: 1169627 - RNA, 23 nt, Human
gagaaugaaagggcccagagagg

SEQ ID NO: 1169628 - RNA, 14 nt, Human
gagacggaguccca

SEQ ID NO: 1169629 - RNA, 16 nt, Human
gagacggagucccacc

SEQ ID NO: 1169630 - RNA, 19 nt, Human
gagacggagucccaccuug

SEQ ID NO: 1169631 - RNA, 18 nt, Human
gagacgggggcagagagg

SEQ ID NO: 1169632 - RNA, 19 nt, Human
gaccucaggccugggggcu

SEQ ID NO: 1169633 - RNA, 18 nt, Human
gaccucaggugagaagca

SEQ ID NO: 1169634 - RNA, 19 nt, Human
gaccucaggugagaagcag

SEQ ID NO: 1169635 - RNA, 21 nt, Human
gaccucaggugagaagcagag

SEQ ID NO: 1169636 - RNA, 19 nt, Human
gaccucaggugauccaccc

SEQ ID NO: 1169637 - RNA, 20 nt, Human
gaccucaggugauccaccca

SEQ ID NO: 1169638 - RNA, 21 nt, Human
gaccucaggugauccacccac

SEQ ID NO: 1169639 - RNA, 10 nt, Human
gacccugagg

SEQ ID NO: 1169640 - RNA, 14 nt, Human
gaccucaggccugg

SEQ ID NO: 1169641 - RNA, 22 nt, Human
gacgcuacccgggaagggggcu

SEQ ID NO: 1169642 - RNA, 23 nt, Human
gacgcuacccgggaagggggcug

SEQ ID NO: 1169643 - RNA, 14 nt, Human
gacgcucucuggcc

SEQ ID NO: 1169644 - RNA, 16 nt, Human
gacgcugugcugcccu

SEQ ID NO: 1169645 - RNA, 17 nt, Human
gacgcugugcugcccug

SEQ ID NO: 1169646 - RNA, 18 nt, Human
gacgcugugcugcccugc

SEQ ID NO: 1169647 - RNA, 15 nt, Human
gacgcucucuggccu

SEQ ID NO: 1169648 - RNA, 21 nt, Human
gacgcugugcugcccugccca

SEQ ID NO: 1169649 - RNA, 16 nt, Human
gaccucugcagcaaua

SEQ ID NO: 1169650 - RNA, 18 nt, Human
gaccucugcagcaauaaa

SEQ ID NO: 1169651 - RNA, 22 nt, Human
gaccucugcagcaauaaagcag

SEQ ID NO: 1169652 - RNA, 13 nt, Human
gaccucugccuga

SEQ ID NO: 1169653 - RNA, 12 nt, Human
gacgccauccca

SEQ ID NO: 1169654 - RNA, 13 nt, Human
gacgccaucccag

SEQ ID NO: 1169655 - RNA, 15 nt, Human
gacgccaucccagcc

SEQ ID NO: 1169656 - RNA, 21 nt, Human
gacgccaucccagccccaaug

SEQ ID NO: 1169657 - RNA, 23 nt, Human
gacauugcggacagccacggcca

SEQ ID NO: 1169658 - RNA, 14 nt, Human
gacagcccgggcuc

SEQ ID NO: 1169659 - RNA, 16 nt, Human
gacagcccgggcucug

SEQ ID NO: 1169660 - RNA, 17 nt, Human
gacagcuccuucugucc

SEQ ID NO: 1169661 - RNA, 18 nt, Human
gacagcuccuucuguccu

SEQ ID NO: 1169662 - RNA, 19 nt, Human
gacagcuccuucuguccua

SEQ ID NO: 1169663 - RNA, 12 nt, Human
gacagcucugca

SEQ ID NO: 1169664 - RNA, 10 nt, Human
gacagcucuu

SEQ ID NO: 1169665 - RNA, 11 nt, Human
gacagcucuua

SEQ ID NO: 1169666 - RNA, 18 nt, Human
gacagucaccucauggaa

SEQ ID NO: 1169667 - RNA, 12 nt, Human
gacagcugccug

SEQ ID NO: 1169668 - RNA, 12 nt, Human
gacagucccugc

SEQ ID NO: 1169669 - RNA, 14 nt, Human
gacagucccugcca

SEQ ID NO: 1169670 - RNA, 15 nt, Human
gacagucccugccaa

SEQ ID NO: 1169671 - RNA, 16 nt, Human
gacagucccugccaau

SEQ ID NO: 1169672 - RNA, 20 nt, Human
gacagucccugccaauggac

SEQ ID NO: 1169673 - RNA, 14 nt, Human
gaaugaauggcuaa

SEQ ID NO: 1169674 - RNA, 22 nt, Human
gaauauugcugauggugcaaug

SEQ ID NO: 1169675 - RNA, 23 nt, Human
gaauauugcugauggugcaauga

SEQ ID NO: 1169676 - RNA, 24 nt, Human
gaauauugcugauggugcaaugac

SEQ ID NO: 1169677 - RNA, 15 nt, Human
gaauauauaaccagu

SEQ ID NO: 1169678 - RNA, 11 nt, Human
gaauauugcug

SEQ ID NO: 1169679 - RNA, 12 nt, Human
gaauauugcuga

SEQ ID NO: 1169680 - RNA, 13 nt, Human
gaauauugcugau

SEQ ID NO: 1169681 - RNA, 21 nt, Human
gacacagcucuucuccaggcu

SEQ ID NO: 1169682 - RNA, 13 nt, Human
gacacagcucuuc

SEQ ID NO: 1169683 - RNA, 12 nt, Human
gacacagcucuu

SEQ ID NO: 1169684 - RNA, 19 nt, Human
gacacagcucuucuccagg

SEQ ID NO: 1169685 - RNA, 20 nt, Human
gacacagcucuucuccaggc

SEQ ID NO: 1169686 - RNA, 22 nt, Human
gaaugauuaugaauuacauuug

SEQ ID NO: 1169687 - RNA, 18 nt, Human
gaaugcacaaacagaggc

SEQ ID NO: 1169688 - RNA, 19 nt, Human
gaaugcacaaacagaggcc

SEQ ID NO: 1169689 - RNA, 16 nt, Human
gaauguuugccucugc

SEQ ID NO: 1169690 - RNA, 17 nt, Human
gaauguuugccucugcc

SEQ ID NO: 1169691 - RNA, 15 nt, Human
gaaugaauggcuaag

SEQ ID NO: 1169692 - RNA, 20 nt, Human
gaaugaauggcuaagcaaaa

SEQ ID NO: 1169693 - RNA, 20 nt, Human
gaaugaugauccuaggcauu

SEQ ID NO: 1169694 - RNA, 14 nt, Human
gaaugaugccauga

SEQ ID NO: 1169695 - RNA, 14 nt, Human
gaaugauuaauuaa

SEQ ID NO: 1169696 - RNA, 14 nt, Human
gaaugauuaugaau

SEQ ID NO: 1169697 - RNA, 18 nt, Human
gaauguuugccucugccu

SEQ ID NO: 1169698 - RNA, 19 nt, Human
gaauguuugccucugccuc

SEQ ID NO: 1169699 - RNA, 14 nt, Human
gaauuaacacauga

SEQ ID NO: 1169700 - RNA, 15 nt, Human
gaauuaacacaugau

SEQ ID NO: 1169701 - RNA, 13 nt, Human
gaauuacauuugu

SEQ ID NO: 1169702 - RNA, 15 nt, Human
gaauuacauuuguau

SEQ ID NO: 1169703 - RNA, 18 nt, Human
gaauuacauuuguauaaa

SEQ ID NO: 1169704 - RNA, 20 nt, Human
gaauuacauuuguauaaaau

SEQ ID NO: 1169705 - RNA, 23 nt, Human
gaaacuucagcgguuuauauaag

SEQ ID NO: 1169706 - RNA, 18 nt, Human
gaaagacuaucuaaaugu

SEQ ID NO: 1169707 - RNA, 20 nt, Human
gaaagacuaucuaaauguug

SEQ ID NO: 1169708 - RNA, 17 nt, Human
gaaaggcuccaggagca

SEQ ID NO: 1169709 - RNA, 18 nt, Human
gaaaggcuccaggagcag

SEQ ID NO: 1169710 - RNA, 19 nt, Human
gaaaggcuccaggagcagc

SEQ ID NO: 1169711 - RNA, 20 nt, Human
gaaaggcuccaggagcagcc

SEQ ID NO: 1169712 - RNA, 21 nt, Human
gaaaguacuucuccacccugc

SEQ ID NO: 1169713 - RNA, 22 nt, Human
gaaaguacuucuccacccugcu

SEQ ID NO: 1169714 - RNA, 17 nt, Human
gaaaucaccgaaaacgu

SEQ ID NO: 1169715 - RNA, 19 nt, Human
gaaaucaccgaaaacgugg

SEQ ID NO: 1169716 - RNA, 18 nt, Human
gaaaugaaagcagggacu

SEQ ID NO: 1169717 - RNA, 18 nt, Human
gaaauuuuuauuaaauua

SEQ ID NO: 1169718 - RNA, 19 nt, Human
gaaauuuuuauuaaauuau

SEQ ID NO: 1169719 - RNA, 18 nt, Human
gaacaaauuuacagagac

SEQ ID NO: 1169720 - RNA, 23 nt, Human
gaacaaauuuacagagacagaaa

SEQ ID NO: 1169721 - RNA, 14 nt, Human
gaacaaggcaaggc

SEQ ID NO: 1169722 - RNA, 15 nt, Human
gaacaaggcaaggcu

SEQ ID NO: 1169723 - RNA, 17 nt, Human
gaacaaggcaaggcugu

SEQ ID NO: 1169724 - RNA, 18 nt, Human
gaacaaggcaaggcuguc

SEQ ID NO: 1169725 - RNA, 21 nt, Human
gaacaaggcaaggcugucaau

SEQ ID NO: 1169726 - RNA, 18 nt, Human
gaaaauuuugauguuuua

SEQ ID NO: 1169727 - RNA, 18 nt, Human
cuuuugccguuauuaaaa

SEQ ID NO: 1169728 - RNA, 15 nt, Human
cuuuuggucugugug

SEQ ID NO: 1169729 - RNA, 16 nt, Human
cuuuuggucuguguga

SEQ ID NO: 1169730 - RNA, 17 nt, Human
cuuuugucuaugggacu

SEQ ID NO: 1169731 - RNA, 14 nt, Human
cuuuugugcauuau

SEQ ID NO: 1169732 - RNA, 18 nt, Human
cuuuugugcauuaucuag

SEQ ID NO: 1169733 - RNA, 21 nt, Human
cuuuuuuuuuuuuuuugacaa

SEQ ID NO: 1169734 - RNA, 19 nt, Human
gaaaaaauauuuuccugcc

SEQ ID NO: 1169735 - RNA, 21 nt, Human
cuuccucuuuccaucuacccu

SEQ ID NO: 1169736 - RNA, 12 nt, Human
cuuccucccucc

SEQ ID NO: 1169737 - RNA, 13 nt, Human
cuuccucccuccc

SEQ ID NO: 1169738 - RNA, 14 nt, Human
cuuccucccucccu

SEQ ID NO: 1169739 - RNA, 18 nt, Human
cuuccucccucccucuuu

SEQ ID NO: 1169740 - RNA, 19 nt, Human
cuucugaacuuggcgcugc

SEQ ID NO: 1169741 - RNA, 22 nt, Human
cuucugaacuuggcgcugcccc

SEQ ID NO: 1169742 - RNA, 16 nt, Human
cuucugacccaugcug

SEQ ID NO: 1169743 - RNA, 17 nt, Human
cuucugacccaugcugc

SEQ ID NO: 1169744 - RNA, 18 nt, Human
cuucugacccaugcugcc

SEQ ID NO: 1169745 - RNA, 23 nt, Human
cuucugaacuuggcgcugccccu

SEQ ID NO: 1169746 - RNA, 20 nt, Human
cuucugacccaugcugcccu

SEQ ID NO: 1169747 - RNA, 13 nt, Human
cuucuuauacauu

SEQ ID NO: 1169748 - RNA, 16 nt, Human
cuucuuauacauuuga

SEQ ID NO: 1169749 - RNA, 15 nt, Human
cuugauguguuaucu

SEQ ID NO: 1169750 - RNA, 19 nt, Human
cuugauucauaaugacuua

SEQ ID NO: 1169751 - RNA, 18 nt, Human
cuugccgucuaccugagg

SEQ ID NO: 1169752 - RNA, 19 nt, Human
cuugccgucuaccugaggg

SEQ ID NO: 1169753 - RNA, 15 nt, Human
cuuggauuguccccg

SEQ ID NO: 1169754 - RNA, 18 nt, Human
cuuggauuguccccgacc

SEQ ID NO: 1169755 - RNA, 20 nt, Human
cuuggauuguccccgacccu

SEQ ID NO: 1169756 - RNA, 22 nt, Human
cuuggauuguccccgacccuug

SEQ ID NO: 1169757 - RNA, 21 nt, Human
cuuggcgcugccccuggcagc

SEQ ID NO: 1169758 - RNA, 22 nt, Human
cuuggcgcugccccuggcagcc

SEQ ID NO: 1169759 - RNA, 23 nt, Human
cuuggcgcugccccuggcagccc

SEQ ID NO: 1169760 - RNA, 16 nt, Human
cuugguccugcugcag

SEQ ID NO: 1169761 - RNA, 17 nt, Human
cuugguccugcugcagu

SEQ ID NO: 1169762 - RNA, 18 nt, Human
cuugguccugcugcaguu

SEQ ID NO: 1169763 - RNA, 20 nt, Human
cuugguccugcugcaguugc

SEQ ID NO: 1169764 - RNA, 22 nt, Human
cuugguccugcugcaguugcca

SEQ ID NO: 1169765 - RNA, 23 nt, Human
cuuggucucagugucaaugcagc

SEQ ID NO: 1169766 - RNA, 16 nt, Human
cuugguucccauuugc

SEQ ID NO: 1169767 - RNA, 20 nt, Human
cuugguucccauuugcuccu

SEQ ID NO: 1169768 - RNA, 13 nt, Human
cuugucuguagau

SEQ ID NO: 1169769 - RNA, 20 nt, Human
cuugucuuuggacccugagg

SEQ ID NO: 1169770 - RNA, 21 nt, Human
cuugucuuuggacccugaggc

SEQ ID NO: 1169771 - RNA, 22 nt, Human
cuugucuuuggacccugaggcc

SEQ ID NO: 1169772 - RNA, 17 nt, Human
cuuuaaugucacaggca

SEQ ID NO: 1169773 - RNA, 18 nt, Human
cuuuaaugucacaggcag

SEQ ID NO: 1169774 - RNA, 19 nt, Human
cuuuaaugucacaggcagg

SEQ ID NO: 1169775 - RNA, 20 nt, Human
cuuuaaugucacaggcaggu

SEQ ID NO: 1169776 - RNA, 22 nt, Human
cuuuaaugucacaggcaggucc

SEQ ID NO: 1169777 - RNA, 23 nt, Human
cuuuaaugucacaggcaggucca

SEQ ID NO: 1169778 - RNA, 14 nt, Human
cuuucaauaggaaa

SEQ ID NO: 1169779 - RNA, 15 nt, Human
cuuucaauaggaaaa

SEQ ID NO: 1169780 - RNA, 17 nt, Human
cuuucaauaggaaaaac

SEQ ID NO: 1169781 - RNA, 18 nt, Human
cuuucaauaggaaaaacu

SEQ ID NO: 1169782 - RNA, 12 nt, Human
cuguuggccagu

SEQ ID NO: 1169783 - RNA, 15 nt, Human
cuguuggccagugug

SEQ ID NO: 1169784 - RNA, 14 nt, Human
cuuaaauaauguga

SEQ ID NO: 1169785 - RNA, 16 nt, Human
cuuaaauaaugugaaa

SEQ ID NO: 1169786 - RNA, 19 nt, Human
cuuaaauaaugugaaacug

SEQ ID NO: 1169787 - RNA, 13 nt, Human
cuuaaaaaugguu

SEQ ID NO: 1169788 - RNA, 20 nt, Human
cuuaaaaaugguuuaaaugg

SEQ ID NO: 1169789 - RNA, 21 nt, Human
cuuaaaaaugguuuaaauggu

SEQ ID NO: 1169790 - RNA, 15 nt, Human
cuguucagcuccagc

SEQ ID NO: 1169791 - RNA, 16 nt, Human
cuguucagcuccagcu

SEQ ID NO: 1169792 - RNA, 18 nt, Human
cuguucagcuccagcuca

SEQ ID NO: 1169793 - RNA, 19 nt, Human
cuguucagcuccagcucac

SEQ ID NO: 1169794 - RNA, 22 nt, Human
cuguucagcuccagcucaccag

SEQ ID NO: 1169795 - RNA, 12 nt, Human
cuguucagcugg

SEQ ID NO: 1169796 - RNA, 18 nt, Human
cuguucagcugguugagg

SEQ ID NO: 1169797 - RNA, 18 nt, Human
cugugcucuggacaggca

SEQ ID NO: 1169798 - RNA, 19 nt, Human
cugugcucuggacaggcau

SEQ ID NO: 1169799 - RNA, 17 nt, Human
cuguuacugucuucagu

SEQ ID NO: 1169800 - RNA, 23 nt, Human
cugugagaugcuagaacucccuu

SEQ ID NO: 1169801 - RNA, 17 nt, Human
cugugcucuggacaggc

SEQ ID NO: 1169802 - RNA, 12 nt, Human
cuggugccucac

SEQ ID NO: 1169803 - RNA, 22 nt, Human
cugucuaaugaaaccugugucu

SEQ ID NO: 1169804 - RNA, 20 nt, Human
cugucuacacuaagagagaa

SEQ ID NO: 1169805 - RNA, 18 nt, Human
cuguaggaagguuaaugu

SEQ ID NO: 1169806 - RNA, 14 nt, Human
cugucauuugagca

SEQ ID NO: 1169807 - RNA, 13 nt, Human
cuguccugggagu

SEQ ID NO: 1169808 - RNA, 14 nt, Human
cuguccugggagug

SEQ ID NO: 1169809 - RNA, 20 nt, Human
cuguccugggagugagcugg

SEQ ID NO: 1169810 - RNA, 16 nt, Human
cugucauuugagcagg

SEQ ID NO: 1169811 - RNA, 21 nt, Human
cuguccugggagugagcuggu

SEQ ID NO: 1169812 - RNA, 20 nt, Human
cuguaagaaaauaucacuug

SEQ ID NO: 1169813 - RNA, 16 nt, Human
cuggcagcucagagag

SEQ ID NO: 1169814 - RNA, 17 nt, Human
cuggcagcucagagagg

SEQ ID NO: 1169815 - RNA, 19 nt, Human
cuggcagcucagagagggu

SEQ ID NO: 1169816 - RNA, 13 nt, Human
cuggcucuuccag

SEQ ID NO: 1169817 - RNA, 14 nt, Human
cuggcucuuccagg

SEQ ID NO: 1169818 - RNA, 15 nt, Human
cuggcucuuccaggc

SEQ ID NO: 1169819 - RNA, 17 nt, Human
cuggcucuuccaggcug

SEQ ID NO: 1169820 - RNA, 17 nt, Human
cugggacuacaggcacc

SEQ ID NO: 1169821 - RNA, 21 nt, Human
cugggacuacaggcacccacc

SEQ ID NO: 1169822 - RNA, 17 nt, Human
cugggacuacaggugug

SEQ ID NO: 1169823 - RNA, 23 nt, Human
cuggcagccccuguucuggcaga

SEQ ID NO: 1169824 - RNA, 22 nt, Human
cuggcagaguugaagacagagc

SEQ ID NO: 1169825 - RNA, 20 nt, Human
cuggcagaguugaagacaga

SEQ ID NO: 1169826 - RNA, 21 nt, Human
cuggcagaguugaagacagag

SEQ ID NO: 1169827 - RNA, 16 nt, Human
cuggaugcagccucac

SEQ ID NO: 1169828 - RNA, 17 nt, Human
cuggaugcagccucaca

SEQ ID NO: 1169829 - RNA, 18 nt, Human
cuggaugcagccucacag

SEQ ID NO: 1169830 - RNA, 22 nt, Human
cuggaugcagccucacaguccu

SEQ ID NO: 1169831 - RNA, 21 nt, Human
cuggagaaaauggacguguua

SEQ ID NO: 1169832 - RNA, 14 nt, Human
cugcuucaaggauc

SEQ ID NO: 1169833 - RNA, 16 nt, Human
cugcuucaaggauccu

SEQ ID NO: 1169834 - RNA, 19 nt, Human
cugcuucaaggauccugag

SEQ ID NO: 1169835 - RNA, 20 nt, Human
cugcuucaaggauccugagc

SEQ ID NO: 1169836 - RNA, 14 nt, Human
cugcuuccagugag

SEQ ID NO: 1169837 - RNA, 15 nt, Human
cugcuuccagugagg

SEQ ID NO: 1169838 - RNA, 23 nt, Human
cuggaaaaguauguuagugcaaa

SEQ ID NO: 1169839 - RNA, 14 nt, Human
cugccuguugggcc

SEQ ID NO: 1169840 - RNA, 23 nt, Human
cugccuguucagcuccagcucac

SEQ ID NO: 1169841 - RNA, 14 nt, Human
cugcucacauaucu

SEQ ID NO: 1169842 - RNA, 23 nt, Human
cugcugaaggcucgagcaugccu

SEQ ID NO: 1169843 - RNA, 24 nt, Human
cugcugaaggcucgagcaugccug

SEQ ID NO: 1169844 - RNA, 14 nt, Human
cugccuccuuugug

SEQ ID NO: 1169845 - RNA, 17 nt, Human
cugccuccuuugugagg

SEQ ID NO: 1169846 - RNA, 21 nt, Human
cugccuccuuugugaggaagc

SEQ ID NO: 1169847 - RNA, 23 nt, Human
cugccuccuuugugaggaagccg

SEQ ID NO: 1169848 - RNA, 14 nt, Human
cugccucgaacugg

SEQ ID NO: 1169849 - RNA, 20 nt, Human
cugccucgaacuggcugcaa

SEQ ID NO: 1169850 - RNA, 24 nt, Human
cugcccugugaguacuacaguccu

SEQ ID NO: 1169851 - RNA, 14 nt, Human
cugcccugugggcc

SEQ ID NO: 1169852 - RNA, 19 nt, Human
cugcccuuaccugccagga

SEQ ID NO: 1169853 - RNA, 11 nt, Human
cugcccugugg

SEQ ID NO: 1169854 - RNA, 12 nt, Human
cugcccuguggg

SEQ ID NO: 1169855 - RNA, 22 nt, Human
cugcccuuaccugccaggaagc

SEQ ID NO: 1169856 - RNA, 23 nt, Human
cugcccuuaccugccaggaagcc

SEQ ID NO: 1169857 - RNA, 19 nt, Human
caaagugcugggauuacag

SEQ ID NO: 1169858 - RNA, 19 nt, Human
caaaggguaucaggugcug

SEQ ID NO: 1169859 - RNA, 23 nt, Human
caaagugcugggauuacaggugu

SEQ ID NO: 1169860 - RNA, 15 nt, Human
caaauugugugaaag

SEQ ID NO: 1169861 - RNA, 11 nt, Human
caaauuucuaa

SEQ ID NO: 1169862 - RNA, 12 nt, Human
caaauuucuaaa

SEQ ID NO: 1169863 - RNA, 14 nt, Human
caaauuucuaaauc

SEQ ID NO: 1169864 - RNA, 12 nt, Human
caaaauaaaacu

SEQ ID NO: 1169865 - RNA, 14 nt, Human
caaaauaaaacuuu

SEQ ID NO: 1169866 - RNA, 15 nt, Human
caaaauguaggguua

SEQ ID NO: 1169867 - RNA, 21 nt, Human
caaaauuuuuucucuaggaaa

SEQ ID NO: 1169868 - RNA, 22 nt, Human
caaaauuuuuucucuaggaaau

SEQ ID NO: 1169869 - RNA, 15 nt, Human
caaacacauacagga

SEQ ID NO: 1169870 - RNA, 20 nt, Human
caaacccuucagugccaaaa

SEQ ID NO: 1169871 - RNA, 17 nt, Human
caaacucaccugccccu

SEQ ID NO: 1169872 - RNA, 17 nt, Human
caaagccuccuccagcc

SEQ ID NO: 1169873 - RNA, 18 nt, Human
caaagccuccuccagccg

SEQ ID NO: 1169874 - RNA, 13 nt, Human
caaagcuaggccu

SEQ ID NO: 1169875 - RNA, 14 nt, Human
caaagcuaggccug

SEQ ID NO: 1169876 - RNA, 15 nt, Human
caaagcuaggccugg

SEQ ID NO: 1169877 - RNA, 19 nt, Human
caaagcuaggccuggccag

SEQ ID NO: 1169878 - RNA, 13 nt, Human
caaaggaagcaca

SEQ ID NO: 1169879 - RNA, 14 nt, Human
caaaggaagcacau

SEQ ID NO: 1169880 - RNA, 16 nt, Human
caaaggguaucaggug

SEQ ID NO: 1169881 - RNA, 18 nt, Human
caaaggguaucaggugcu

SEQ ID NO: 1169882 - RNA, 23 nt, Human
caaaacuucagacauagaauuaa

SEQ ID NO: 1169883 - RNA, 17 nt, Human
caaaauaaaaaugaggu

SEQ ID NO: 1169884 - RNA, 20 nt, Human
caaaacucuccucugcugcu

SEQ ID NO: 1169885 - RNA, 21 nt, Human
caaaacucuccucugcugcug

SEQ ID NO: 1169886 - RNA, 22 nt, Human
caaaacucuccucugcugcugg

SEQ ID NO: 1169887 - RNA, 23 nt, Human
caaaacucuccucugcugcuggc

SEQ ID NO: 1169888 - RNA, 19 nt, Human
caaaaaucucaauauuuca

SEQ ID NO: 1169889 - RNA, 13 nt, Human
auuuuccugaaaa

SEQ ID NO: 1169890 - RNA, 14 nt, Human
auuuuccugaaaac

SEQ ID NO: 1169891 - RNA, 21 nt, Human
auuuugggguacccacugcuc

SEQ ID NO: 1169892 - RNA, 22 nt, Human
auuuugggguacccacugcucu

SEQ ID NO: 1169893 - RNA, 23 nt, Human
auuuugggguacccacugcucug

SEQ ID NO: 1169894 - RNA, 13 nt, Human
caaaaaggcagga

SEQ ID NO: 1169895 - RNA, 18 nt, Human
caacacucauugaccuga

SEQ ID NO: 1169896 - RNA, 20 nt, Human
caacacucauugaccugagg

SEQ ID NO: 1169897 - RNA, 22 nt, Human
caacacucauugaccugaggcc

SEQ ID NO: 1169898 - RNA, 13 nt, Human
caacgucugugcc

SEQ ID NO: 1169899 - RNA, 14 nt, Human
caacgucugugcca

SEQ ID NO: 1169900 - RNA, 14 nt, Human
caaccuccugggcu

SEQ ID NO: 1169901 - RNA, 15 nt, Human
caaccuccugggcua

SEQ ID NO: 1169902 - RNA, 20 nt, Human
caagaacuuuccaggaaggc

SEQ ID NO: 1169903 - RNA, 16 nt, Human
caagaccuucuccuuc

SEQ ID NO: 1169904 - RNA, 17 nt, Human
caagaccuucuccuuca

SEQ ID NO: 1169905 - RNA, 18 nt, Human
caagaccuucuccuucac

SEQ ID NO: 1169906 - RNA, 16 nt, Human
caagacgcugugcugc

SEQ ID NO: 1169907 - RNA, 17 nt, Human
caagacgcugugcugcc

SEQ ID NO: 1169908 - RNA, 16 nt, Human
caagagcccaggccuc

SEQ ID NO: 1169909 - RNA, 17 nt, Human
caagagcccaggccucc

SEQ ID NO: 1169910 - RNA, 15 nt, Human
caagcaccuccugcc

SEQ ID NO: 1169911 - RNA, 16 nt, Human
caagcaccuccugccu

SEQ ID NO: 1169912 - RNA, 17 nt, Human
caagcaccuccugccuc

SEQ ID NO: 1169913 - RNA, 18 nt, Human
caagacgcugugcugccc

SEQ ID NO: 1169914 - RNA, 19 nt, Human
caagacgcugugcugcccu

SEQ ID NO: 1169915 - RNA, 18 nt, Human
caagacucuuuggacacu

SEQ ID NO: 1169916 - RNA, 19 nt, Human
caagacugcacaucaaaau

SEQ ID NO: 1169917 - RNA, 14 nt, Human
caagagcccaggcc

SEQ ID NO: 1169918 - RNA, 15 nt, Human
caagagcccaggccu

SEQ ID NO: 1169919 - RNA, 18 nt, Human
caagcaccuccugccucg

SEQ ID NO: 1169920 - RNA, 14 nt, Human
caagcaggacaugg

SEQ ID NO: 1169921 - RNA, 18 nt, Human
caagcaggacauggacaa

SEQ ID NO: 1169922 - RNA, 21 nt, Human
caagccagauuuuccugaaaa

SEQ ID NO: 1169923 - RNA, 20 nt, Human
caagcgauucuucugcuuca

SEQ ID NO: 1169924 - RNA, 22 nt, Human
caagcgauucuucugcuucagc

SEQ ID NO: 1169925 - RNA, 21 nt, Human
caagcuggucccacucagucc

SEQ ID NO: 1169926 - RNA, 17 nt, Human
caagcuggucccacuca

SEQ ID NO: 1169927 - RNA, 19 nt, Human
caagcuggucccacucagu

SEQ ID NO: 1169928 - RNA, 17 nt, Human
caaggcugauuaaacca

SEQ ID NO: 1169929 - RNA, 14 nt, Human
caaggucauuuuuu

SEQ ID NO: 1169930 - RNA, 20 nt, Human
caaggucauuuuuuuuaaga

SEQ ID NO: 1169931 - RNA, 14 nt, Human
caaguccucuuuuc

SEQ ID NO: 1169932 - RNA, 12 nt, Human
caaggcugcagu

SEQ ID NO: 1169933 - RNA, 15 nt, Human
caaggcugcagugag

SEQ ID NO: 1169934 - RNA, 23 nt, Human
caaggcugucaauuacaggaagu

SEQ ID NO: 1169935 - RNA, 18 nt, Human
caaggggcccaaauucuu

SEQ ID NO: 1169936 - RNA, 18 nt, Human
caagugagagcugggugu

SEQ ID NO: 1169937 - RNA, 21 nt, Human
caaguccucuuuucugagagg

SEQ ID NO: 1169938 - RNA, 14 nt, Human
caagugagagcugg

SEQ ID NO: 1169939 - RNA, 15 nt, Human
caagugagagcuggg

SEQ ID NO: 1169940 - RNA, 17 nt, Human
caagugagagcugggug

SEQ ID NO: 1169941 - RNA, 17 nt, Human
caauuacaggaaguacu

SEQ ID NO: 1169942 - RNA, 23 nt, Human
caauucucauuugucacacacuu

SEQ ID NO: 1169943 - RNA, 16 nt, Human
caauuacaggaaguac

SEQ ID NO: 1169944 - RNA, 15 nt, Human
caaugugauaaaacc

SEQ ID NO: 1169945 - RNA, 17 nt, Human
caaugugauaaaacccc

SEQ ID NO: 1169946 - RNA, 17 nt, Human
caaugcacuuuguucug

SEQ ID NO: 1169947 - RNA, 20 nt, Human
caaugcacuuuguucuggcu

SEQ ID NO: 1169948 - RNA, 21 nt, Human
caaugcacuuuguucuggcuc

SEQ ID NO: 1169949 - RNA, 22 nt, Human
caaugcacuuuguucuggcucu

SEQ ID NO: 1169950 - RNA, 23 nt, Human
caauacaucccuuaccugggaaa

SEQ ID NO: 1169951 - RNA, 12 nt, Human
caauaggaaaaa

SEQ ID NO: 1169952 - RNA, 13 nt, Human
caauaggaaaaac

SEQ ID NO: 1169953 - RNA, 17 nt, Human
caauauucgcuguguca

SEQ ID NO: 1169954 - RNA, 23 nt, Human
caaugaccuuucaauaggaaaaa

SEQ ID NO: 1169955 - RNA, 15 nt, Human
caaugacuuacugua

SEQ ID NO: 1169956 - RNA, 17 nt, Human
caaugacuuacuguaca

SEQ ID NO: 1169957 - RNA, 18 nt, Human
caaugacuuacuguacau

SEQ ID NO: 1169958 - RNA, 14 nt, Human
caauguucucucuu

SEQ ID NO: 1169959 - RNA, 14 nt, Human
caauaggaaaaacu

SEQ ID NO: 1169960 - RNA, 11 nt, Human
cacaggcaggu

SEQ ID NO: 1169961 - RNA, 14 nt, Human
cacaggcaggucca

SEQ ID NO: 1169962 - RNA, 15 nt, Human
cacaggcagguccag

SEQ ID NO: 1169963 - RNA, 22 nt, Human
cacagcugggguggggaccuca

SEQ ID NO: 1169964 - RNA, 23 nt, Human
cacagcugggguggggaccucag

SEQ ID NO: 1169965 - RNA, 21 nt, Human
cacagcuucauuuccuguguc

SEQ ID NO: 1169966 - RNA, 22 nt, Human
cacagcuucauuuccugugucu

SEQ ID NO: 1169967 - RNA, 19 nt, Human
cacaggcagguccaggguu

SEQ ID NO: 1169968 - RNA, 22 nt, Human
cacagugagucgaggacaggga

SEQ ID NO: 1169969 - RNA, 15 nt, Human
cacaguccuuaccag

SEQ ID NO: 1169970 - RNA, 21 nt, Human
cacaguccuuaccagcagagc

SEQ ID NO: 1169971 - RNA, 22 nt, Human
cacaguccuuaccagcagagca

SEQ ID NO: 1169972 - RNA, 14 nt, Human
cacaguucucuccu

SEQ ID NO: 1169973 - RNA, 15 nt, Human
cacaguucucuccuu

SEQ ID NO: 1169974 - RNA, 15 nt, Human
caccgggcacucaga

SEQ ID NO: 1169975 - RNA, 22 nt, Human
caccgggcacucagaagacacu

SEQ ID NO: 1169976 - RNA, 15 nt, Human
caccgggccacagag

SEQ ID NO: 1169977 - RNA, 18 nt, Human
caccgggccacagagaaa

SEQ ID NO: 1169978 - RNA, 14 nt, Human
caccggcuggccug

SEQ ID NO: 1169979 - RNA, 15 nt, Human
caccggcuggccugg

SEQ ID NO: 1169980 - RNA, 16 nt, Human
caccggcuggccuggc

SEQ ID NO: 1169981 - RNA, 17 nt, Human
caccggcuggccuggcc

SEQ ID NO: 1169982 - RNA, 18 nt, Human
caccggcuggccuggccc

SEQ ID NO: 1169983 - RNA, 20 nt, Human
caccggcuggccuggccccu

SEQ ID NO: 1169984 - RNA, 14 nt, Human
caccgggcacucag

SEQ ID NO: 1169985 - RNA, 21 nt, Human
caccgcagacaggaccaggga

SEQ ID NO: 1169986 - RNA, 11 nt, Human
caccucaugga

SEQ ID NO: 1169987 - RNA, 12 nt, Human
caccucauggaa

SEQ ID NO: 1169988 - RNA, 14 nt, Human
caccucauggaauu

SEQ ID NO: 1169989 - RNA, 11 nt, Human
caccuccugcc

SEQ ID NO: 1169990 - RNA, 13 nt, Human
caccuccugccuc

SEQ ID NO: 1169991 - RNA, 14 nt, Human
caccuccugccucg

SEQ ID NO: 1169992 - RNA, 14 nt, Human
caccuccugcuggg

SEQ ID NO: 1169993 - RNA, 15 nt, Human
caccuccugcugggc

SEQ ID NO: 1169994 - RNA, 17 nt, Human
caccuccugcugggcag

SEQ ID NO: 1169995 - RNA, 13 nt, Human
caccucucccuug

SEQ ID NO: 1169996 - RNA, 14 nt, Human
caccucucccuugg

SEQ ID NO: 1169997 - RNA, 17 nt, Human
caccucucccuuggauu

SEQ ID NO: 1169998 - RNA, 15 nt, Human
caccucucucacucc

SEQ ID NO: 1169999 - RNA, 17 nt, Human
caccucucucacuccuu

SEQ ID NO: 1170000 - RNA, 18 nt, Human
caccucucucacuccuug

SEQ ID NO: 1170001 - RNA, 19 nt, Human
caccucucucacuccuuga

SEQ ID NO: 1170002 - RNA, 18 nt, Human
caccucugcacaagcugc

SEQ ID NO: 1170003 - RNA, 19 nt, Human
caccucugcacaagcugca

SEQ ID NO: 1170004 - RNA, 14 nt, Human
caccugaagacuca

SEQ ID NO: 1170005 - RNA, 15 nt, Human
caccugaagacucau

SEQ ID NO: 1170006 - RNA, 23 nt, Human
caccugaagacucauucuucugu

SEQ ID NO: 1170007 - RNA, 23 nt, Human
caccugcggugcuaucuccccca

SEQ ID NO: 1170008 - RNA, 20 nt, Human
caccuggaauauauaaccag

SEQ ID NO: 1170009 - RNA, 12 nt, Human
caccuggccucu

SEQ ID NO: 1170010 - RNA, 13 nt, Human
caccuggccucug

SEQ ID NO: 1170011 - RNA, 14 nt, Human
caccuggccucugc

SEQ ID NO: 1170012 - RNA, 15 nt, Human
caccuggccucugca

SEQ ID NO: 1170013 - RNA, 17 nt, Human
caccuggccucugcacu

SEQ ID NO: 1170014 - RNA, 18 nt, Human
caccuggccucugcacuc

SEQ ID NO: 1170015 - RNA, 19 nt, Human
caccuggccucugcacucc

SEQ ID NO: 1170016 - RNA, 20 nt, Human
caccuggccucugcacuccc

SEQ ID NO: 1170017 - RNA, 23 nt, Human
caccuggccucugcacuccccug

SEQ ID NO: 1170018 - RNA, 20 nt, Human
cacauauugauuuccguuaa

SEQ ID NO: 1170019 - RNA, 13 nt, Human
cacauauugauuu

SEQ ID NO: 1170020 - RNA, 20 nt, Human
caccccucaacaccucugca

SEQ ID NO: 1170021 - RNA, 19 nt, Human
cacccgcuaagagggaggg

SEQ ID NO: 1170022 - RNA, 12 nt, Human
cacccggccccu

SEQ ID NO: 1170023 - RNA, 13 nt, Human
cacccggccccug

SEQ ID NO: 1170024 - RNA, 14 nt, Human
cacccggccccugc

SEQ ID NO: 1170025 - RNA, 16 nt, Human
cacccggccccugcug

SEQ ID NO: 1170026 - RNA, 17 nt, Human
cacccggccccugcugg

SEQ ID NO: 1170027 - RNA, 18 nt, Human
cacccggccccugcuggu

SEQ ID NO: 1170028 - RNA, 21 nt, Human
cacccggccccugcugguuca

SEQ ID NO: 1170029 - RNA, 11 nt, Human
cacccugugau

SEQ ID NO: 1170030 - RNA, 12 nt, Human
cacccugugaug

SEQ ID NO: 1170031 - RNA, 15 nt, Human
cacccugugaugggg

SEQ ID NO: 1170032 - RNA, 18 nt, Human
cacccugugauggggccc

SEQ ID NO: 1170033 - RNA, 20 nt, Human
cacccugugauggggcccug

SEQ ID NO: 1170034 - RNA, 21 nt, Human
cacccugugauggggcccugc

SEQ ID NO: 1170035 - RNA, 22 nt, Human
cacccugugauggggcccugcc

SEQ ID NO: 1170036 - RNA, 23 nt, Human
cacccugugauggggcccugccu

SEQ ID NO: 1170037 - RNA, 15 nt, Human
caccgaaaacguggc

SEQ ID NO: 1170038 - RNA, 18 nt, Human
caccgaaaacguggcugc

SEQ ID NO: 1170039 - RNA, 19 nt, Human
caccgaaaacguggcugcu

SEQ ID NO: 1170040 - RNA, 21 nt, Human
caccgaaaacguggcugcuuc

SEQ ID NO: 1170041 - RNA, 22 nt, Human
caccgaaaacguggcugcuuca

SEQ ID NO: 1170042 - RNA, 12 nt, Human
caccgcagacag

SEQ ID NO: 1170043 - RNA, 13 nt, Human
caccgcagacagg

SEQ ID NO: 1170044 - RNA, 14 nt, Human
caccgcagacagga

SEQ ID NO: 1170045 - RNA, 15 nt, Human
caccgcagacaggac

SEQ ID NO: 1170046 - RNA, 17 nt, Human
caccgcagacaggacca

SEQ ID NO: 1170047 - RNA, 18 nt, Human
caccgcagacaggaccag

SEQ ID NO: 1170048 - RNA, 16 nt, Human
cacgccagauucuuuc

SEQ ID NO: 1170049 - RNA, 21 nt, Human
caccuuagacagucccugcca

SEQ ID NO: 1170050 - RNA, 23 nt, Human
caccuuagacagucccugccaau

SEQ ID NO: 1170051 - RNA, 14 nt, Human
caccuuagacaguc

SEQ ID NO: 1170052 - RNA, 16 nt, Human
caccuuagacaguccc

SEQ ID NO: 1170053 - RNA, 18 nt, Human
caccuuagacagucccug

SEQ ID NO: 1170054 - RNA, 19 nt, Human
caccuuagacagucccugc

SEQ ID NO: 1170055 - RNA, 13 nt, Human
caccuugacaggg

SEQ ID NO: 1170056 - RNA, 15 nt, Human
caccuugacagggca

SEQ ID NO: 1170057 - RNA, 16 nt, Human
caccuugacagggcac

SEQ ID NO: 1170058 - RNA, 18 nt, Human
caccuugacagggcacac

SEQ ID NO: 1170059 - RNA, 16 nt, Human
cacgaauauugcugau

SEQ ID NO: 1170060 - RNA, 19 nt, Human
cacgaauauugcugauggu

SEQ ID NO: 1170061 - RNA, 22 nt, Human
cacgaauauugcugauggugca

SEQ ID NO: 1170062 - RNA, 16 nt, Human
cacgacugcccggcag

SEQ ID NO: 1170063 - RNA, 17 nt, Human
cacgacugcccggcagg

SEQ ID NO: 1170064 - RNA, 12 nt, Human
cacgauuucugu

SEQ ID NO: 1170065 - RNA, 14 nt, Human
cacgauuucuguuu

SEQ ID NO: 1170066 - RNA, 16 nt, Human
cacgauuucuguuuag

SEQ ID NO: 1170067 - RNA, 17 nt, Human
cacgcacuucgggaggu

SEQ ID NO: 1170068 - RNA, 13 nt, Human
cacgccacugcac

SEQ ID NO: 1170069 - RNA, 15 nt, Human
cacgccacugcacua

SEQ ID NO: 1170070 - RNA, 19 nt, Human
cacgccagauucuuuccug

SEQ ID NO: 1170071 - RNA, 20 nt, Human
cacgccagauucuuuccuga

SEQ ID NO: 1170072 - RNA, 22 nt, Human
cacgccagauucuuuccugagg

SEQ ID NO: 1170073 - RNA, 23 nt, Human
cacgccagauucuuuccugaggc

SEQ ID NO: 1170074 - RNA, 13 nt, Human
cacgcccccacug

SEQ ID NO: 1170075 - RNA, 15 nt, Human
cacgcccccacuggu

SEQ ID NO: 1170076 - RNA, 17 nt, Human
cacgcccccacugguga

SEQ ID NO: 1170077 - RNA, 18 nt, Human
cacgcccccacuggugac

SEQ ID NO: 1170078 - RNA, 17 nt, Human
cacgcuggaccuugaac

SEQ ID NO: 1170079 - RNA, 20 nt, Human
cacgcuggaccuugaacugg

SEQ ID NO: 1170080 - RNA, 15 nt, Human
cacgcuggagugcag

SEQ ID NO: 1170081 - RNA, 16 nt, Human
cacggcucacugcagc

SEQ ID NO: 1170082 - RNA, 17 nt, Human
cacggcucacugcagcc

SEQ ID NO: 1170083 - RNA, 19 nt, Human
cacggcucacugcagccuc

SEQ ID NO: 1170084 - RNA, 20 nt, Human
cacggcucacugcagccuca

SEQ ID NO: 1170085 - RNA, 19 nt, Human
cacgccuguaauccuagca

SEQ ID NO: 1170086 - RNA, 20 nt, Human
cacgccuguaauccuagcac

SEQ ID NO: 1170087 - RNA, 15 nt, Human
cacgcgugcacacac

SEQ ID NO: 1170088 - RNA, 16 nt, Human
cacgcgugcacacacc

SEQ ID NO: 1170089 - RNA, 21 nt, Human
cacgcgugcacacaccagagc

SEQ ID NO: 1170090 - RNA, 23 nt, Human
cacgcgugcacacaccagagccc

SEQ ID NO: 1170091 - RNA, 14 nt, Human
cacguacacacaca

SEQ ID NO: 1170092 - RNA, 18 nt, Human
cacguacacacacauaca

SEQ ID NO: 1170093 - RNA, 19 nt, Human
cacguacacacacauacac

SEQ ID NO: 1170094 - RNA, 13 nt, Human
cacuaaacaaaga

SEQ ID NO: 1170095 - RNA, 12 nt, Human
cacguuucuaaa

SEQ ID NO: 1170096 - RNA, 14 nt, Human
cacguuucuaaagg

SEQ ID NO: 1170097 - RNA, 23 nt, Human
cacguuucuaaaggcuaccuuug

SEQ ID NO: 1170098 - RNA, 16 nt, Human
cacgugguccuaaucu

SEQ ID NO: 1170099 - RNA, 19 nt, Human
cacgugguccuaaucuucu

SEQ ID NO: 1170100 - RNA, 22 nt, Human
cacguucuuacuaguuucccuu

SEQ ID NO: 1170101 - RNA, 15 nt, Human
cacuauguugcccag

SEQ ID NO: 1170102 - RNA, 16 nt, Human
cacuauguugcccagg

SEQ ID NO: 1170103 - RNA, 17 nt, Human
cacuauguugcccaggc

SEQ ID NO: 1170104 - RNA, 18 nt, Human
cacuauguugcccaggca

SEQ ID NO: 1170105 - RNA, 19 nt, Human
cacuauguugcccaggcag

SEQ ID NO: 1170106 - RNA, 19 nt, Human
cacuaguauuucuaugaaa

SEQ ID NO: 1170107 - RNA, 14 nt, Human
cacuauaauguaag

SEQ ID NO: 1170108 - RNA, 18 nt, Human
cacuauaauguaagcucu

SEQ ID NO: 1170109 - RNA, 14 nt, Human
cacuauagccuagg

SEQ ID NO: 1170110 - RNA, 21 nt, Human
cacuauagccuaggugacaga

SEQ ID NO: 1170111 - RNA, 21 nt, Human
cacuaaauugacacuuaaaaa

SEQ ID NO: 1170112 - RNA, 14 nt, Human
cacuaaccacgcug

SEQ ID NO: 1170113 - RNA, 15 nt, Human
cacuaaccacgcugg

SEQ ID NO: 1170114 - RNA, 16 nt, Human
cacuaaccacgcugga

SEQ ID NO: 1170115 - RNA, 18 nt, Human
cacuaaccacgcuggacc

SEQ ID NO: 1170116 - RNA, 17 nt, Human
cacuaagagagaaugag

SEQ ID NO: 1170117 - RNA, 17 nt, Human
cacuaaggugugcucug

SEQ ID NO: 1170118 - RNA, 18 nt, Human
cacuaaggugugcucuga

SEQ ID NO: 1170119 - RNA, 20 nt, Human
cacuauguugcccaggcagg

SEQ ID NO: 1170120 - RNA, 21 nt, Human
cacuauguugcccaggcaggu

SEQ ID NO: 1170121 - RNA, 15 nt, Human
cacucaaaagcuggg

SEQ ID NO: 1170122 - RNA, 17 nt, Human
cacucaaaagcugggca

SEQ ID NO: 1170123 - RNA, 18 nt, Human
cacucaaaagcugggcag

SEQ ID NO: 1170124 - RNA, 19 nt, Human
cacucaaaagcugggcagg

SEQ ID NO: 1170125 - RNA, 20 nt, Human
cacucaaaagcugggcaggu

SEQ ID NO: 1170126 - RNA, 19 nt, Human
cacucacauuuauucugcu

SEQ ID NO: 1170127 - RNA, 20 nt, Human
cacucacauuuauucugcuc

SEQ ID NO: 1170128 - RNA, 12 nt, Human
cacucagaagac

SEQ ID NO: 1170129 - RNA, 16 nt, Human
cacucagaagacacug

SEQ ID NO: 1170130 - RNA, 17 nt, Human
cacucagaagacacuga

SEQ ID NO: 1170131 - RNA, 18 nt, Human
cacucagaagacacugau

SEQ ID NO: 1170132 - RNA, 19 nt, Human
cacucagaagacacugaug

SEQ ID NO: 1170133 - RNA, 22 nt, Human
cacucagaagacacugaugggc

SEQ ID NO: 1170134 - RNA, 17 nt, Human
cacucccugcaaccuga

SEQ ID NO: 1170135 - RNA, 14 nt, Human
cacuccuucacaga

SEQ ID NO: 1170136 - RNA, 21 nt, Human
cacuccuucacagaugggugc

SEQ ID NO: 1170137 - RNA, 16 nt, Human
cacucaguccauagca

SEQ ID NO: 1170138 - RNA, 15 nt, Human
cacucauugaccuga

SEQ ID NO: 1170139 - RNA, 18 nt, Human
cacucauugaccugaggc

SEQ ID NO: 1170140 - RNA, 19 nt, Human
cacucauugaccugaggcc

SEQ ID NO: 1170141 - RNA, 20 nt, Human
cacucauugaccugaggccc

SEQ ID NO: 1170142 - RNA, 22 nt, Human
cacucauugaccugaggcccuu

SEQ ID NO: 1170143 - RNA, 12 nt, Human
cacucccugcaa

SEQ ID NO: 1170144 - RNA, 13 nt, Human
cacucccugcaac

SEQ ID NO: 1170145 - RNA, 16 nt, Human
cacucccugcaaccug

SEQ ID NO: 1170146 - RNA, 12 nt, Human
cacucuccuugg

SEQ ID NO: 1170147 - RNA, 12 nt, Human
cacucugagacu

SEQ ID NO: 1170148 - RNA, 23 nt, Human
cacucugagacucgcgacaaugc

SEQ ID NO: 1170149 - RNA, 12 nt, Human
cacucuggcagc

SEQ ID NO: 1170150 - RNA, 13 nt, Human
cacucuggcagcu

SEQ ID NO: 1170151 - RNA, 14 nt, Human
cacucuggcagcuc

SEQ ID NO: 1170152 - RNA, 13 nt, Human
cacugcaaccucc

SEQ ID NO: 1170153 - RNA, 14 nt, Human
cacugcaaccuccg

SEQ ID NO: 1170154 - RNA, 16 nt, Human
cacugcaaccuccgcc

SEQ ID NO: 1170155 - RNA, 23 nt, Human
cacugcaaccuccgccucuuggg

SEQ ID NO: 1170156 - RNA, 23 nt, Human
cacugagacagcccgggcucugc

SEQ ID NO: 1170157 - RNA, 14 nt, Human
cacugaugggcaac

SEQ ID NO: 1170158 - RNA, 18 nt, Human
cacugaugggcaaccccc

SEQ ID NO: 1170159 - RNA, 24 nt, Human
cacugaugggcaacccccagccug

SEQ ID NO: 1170160 - RNA, 15 nt, Human
cacucuggcagcuca

SEQ ID NO: 1170161 - RNA, 16 nt, Human
cacucuggcagcucag

SEQ ID NO: 1170162 - RNA, 17 nt, Human
cacucuggcagcucaga

SEQ ID NO: 1170163 - RNA, 19 nt, Human
cacucuggcagcucagaga

SEQ ID NO: 1170164 - RNA, 20 nt, Human
cacucuggcagcucagagag

SEQ ID NO: 1170165 - RNA, 21 nt, Human
cacucuggcagcucagagagg

SEQ ID NO: 1170166 - RNA, 23 nt, Human
cacucuggcagcucagagagggu

SEQ ID NO: 1170167 - RNA, 15 nt, Human
cacucugucgcccag

SEQ ID NO: 1170168 - RNA, 16 nt, Human
cacucugucgcccagu

SEQ ID NO: 1170169 - RNA, 19 nt, Human
cacucugucgcccagucug

SEQ ID NO: 1170170 - RNA, 20 nt, Human
cacucugucgcccagucugg

SEQ ID NO: 1170171 - RNA, 23 nt, Human
cacugacauuguuggccaaagcc

SEQ ID NO: 1170172 - RNA, 12 nt, Human
cacugagacagc

SEQ ID NO: 1170173 - RNA, 13 nt, Human
cacugagacagcc

SEQ ID NO: 1170174 - RNA, 14 nt, Human
cacugagacagccc

SEQ ID NO: 1170175 - RNA, 17 nt, Human
cacugagacagcccggg

SEQ ID NO: 1170176 - RNA, 19 nt, Human
cacugagacagcccgggcu

SEQ ID NO: 1170177 - RNA, 22 nt, Human
cacugagacagcccgggcucug

SEQ ID NO: 1170178 - RNA, 14 nt, Human
cacugcaccgggcc

SEQ ID NO: 1170179 - RNA, 15 nt, Human
cacugcaccgggcca

SEQ ID NO: 1170180 - RNA, 16 nt, Human
cacugcaccgggccac

SEQ ID NO: 1170181 - RNA, 18 nt, Human
cacugcaccgggccacag

SEQ ID NO: 1170182 - RNA, 19 nt, Human
cacugcaccgggccacaga

SEQ ID NO: 1170183 - RNA, 18 nt, Human
cacugcacuauagccuag

SEQ ID NO: 1170184 - RNA, 19 nt, Human
cacugcacuauagccuagg

SEQ ID NO: 1170185 - RNA, 20 nt, Human
cacugccuucucaacuccaa

SEQ ID NO: 1170186 - RNA, 12 nt, Human
cacugcucuggu

SEQ ID NO: 1170187 - RNA, 13 nt, Human
cacugcuuaacuu

SEQ ID NO: 1170188 - RNA, 14 nt, Human
cacugcuuccagug

SEQ ID NO: 1170189 - RNA, 15 nt, Human
cacugcuuccaguga

SEQ ID NO: 1170190 - RNA, 16 nt, Human
cacugcuuccagugag

SEQ ID NO: 1170191 - RNA, 18 nt, Human
cacugcuuccagugaggc

SEQ ID NO: 1170192 - RNA, 19 nt, Human
cacugcuuccagugaggcu

SEQ ID NO: 1170193 - RNA, 20 nt, Human
cacugcuuccagugaggcuc

SEQ ID NO: 1170194 - RNA, 21 nt, Human
cacugcuuccagugaggcucu

SEQ ID NO: 1170195 - RNA, 22 nt, Human
cacugcuuccagugaggcucug

SEQ ID NO: 1170196 - RNA, 20 nt, Human
cacugcuuuuggucugugug

SEQ ID NO: 1170197 - RNA, 21 nt, Human
cacugcuuuuggucuguguga

SEQ ID NO: 1170198 - RNA, 17 nt, Human
cacuggaacacuaauga

SEQ ID NO: 1170199 - RNA, 12 nt, Human
cacuucagcuga

SEQ ID NO: 1170200 - RNA, 21 nt, Human
cacuucagcugacuuuucugu

SEQ ID NO: 1170201 - RNA, 14 nt, Human
cacuguugcccagg

SEQ ID NO: 1170202 - RNA, 16 nt, Human
cacuucccuacaugga

SEQ ID NO: 1170203 - RNA, 21 nt, Human
cacuucgggaggucgaggcag

SEQ ID NO: 1170204 - RNA, 23 nt, Human
cacuucgggaggucgaggcagga

SEQ ID NO: 1170205 - RNA, 22 nt, Human
cacuucugccauauucuguugg

SEQ ID NO: 1170206 - RNA, 13 nt, Human
cacuugaguccag

SEQ ID NO: 1170207 - RNA, 13 nt, Human
cacuugcagacuc

SEQ ID NO: 1170208 - RNA, 19 nt, Human
cacuugacaucaacugcau

SEQ ID NO: 1170209 - RNA, 17 nt, Human
cacuugagaauuacccu

SEQ ID NO: 1170210 - RNA, 20 nt, Human
cacuugagaauuacccuuuu

SEQ ID NO: 1170211 - RNA, 20 nt, Human
cacuugaacccgggaggcag

SEQ ID NO: 1170212 - RNA, 21 nt, Human
cacuugaacccgggaggcaga

SEQ ID NO: 1170213 - RNA, 23 nt, Human
cacuugaacccgggaggcagagg

SEQ ID NO: 1170214 - RNA, 16 nt, Human
cacuugacaucaacug

SEQ ID NO: 1170215 - RNA, 14 nt, Human
cacuugcagacucu

SEQ ID NO: 1170216 - RNA, 18 nt, Human
cacuugcagacucuacag

SEQ ID NO: 1170217 - RNA, 19 nt, Human
cacuugcagacucuacaga

SEQ ID NO: 1170218 - RNA, 22 nt, Human
cacuugcagacucuacagaggc

SEQ ID NO: 1170219 - RNA, 24 nt, Human
cacuugcagacucuacagaggcca

SEQ ID NO: 1170220 - RNA, 15 nt, Human
cacuuggucugugag

SEQ ID NO: 1170221 - RNA, 17 nt, Human
cacuuggucugugagau

SEQ ID NO: 1170222 - RNA, 19 nt, Human
cacuuucuagccagaggag

SEQ ID NO: 1170223 - RNA, 20 nt, Human
cacuuucuagccagaggaga

SEQ ID NO: 1170224 - RNA, 19 nt, Human
cacuguggguagacacaca

SEQ ID NO: 1170225 - RNA, 17 nt, Human
cacugugcugagucuga

SEQ ID NO: 1170226 - RNA, 20 nt, Human
cacugugcugagucugaagg

SEQ ID NO: 1170227 - RNA, 21 nt, Human
cacugugcugagucugaaggc

SEQ ID NO: 1170228 - RNA, 22 nt, Human
cacugugcugagucugaaggcu

SEQ ID NO: 1170229 - RNA, 15 nt, Human
cacugugccaugugc

SEQ ID NO: 1170230 - RNA, 16 nt, Human
cacugugccaugugcc

SEQ ID NO: 1170231 - RNA, 18 nt, Human
cacugugccaugugccag

SEQ ID NO: 1170232 - RNA, 13 nt, Human
cacugugcugagu

SEQ ID NO: 1170233 - RNA, 15 nt, Human
cacugugcugagucu

SEQ ID NO: 1170234 - RNA, 22 nt, Human
cacuguggguagacacacauga

SEQ ID NO: 1170235 - RNA, 24 nt, Human
cacuguggguagacacacaugaag

SEQ ID NO: 1170236 - RNA, 13 nt, Human
cacuguucucugc

SEQ ID NO: 1170237 - RNA, 14 nt, Human
cacuguucucugcc

SEQ ID NO: 1170238 - RNA, 15 nt, Human
cacuguucucugccc

SEQ ID NO: 1170239 - RNA, 16 nt, Human
cacuguucucugcccu

SEQ ID NO: 1170240 - RNA, 17 nt, Human
cacuguucucugcccuc

SEQ ID NO: 1170241 - RNA, 19 nt, Human
cacuguucucugcccucca

SEQ ID NO: 1170242 - RNA, 21 nt, Human
cacuguucucugcccuccaag

SEQ ID NO: 1170243 - RNA, 22 nt, Human
cacuguucucugcccuccaaga

SEQ ID NO: 1170244 - RNA, 13 nt, Human
cacugugaagaga

SEQ ID NO: 1170245 - RNA, 14 nt, Human
cacugugccaugug

SEQ ID NO: 1170246 - RNA, 14 nt, Human
cacuuuuguucuug

SEQ ID NO: 1170247 - RNA, 22 nt, Human
cacuuuuguucuugguuuguaa

SEQ ID NO: 1170248 - RNA, 22 nt, Human
cacuuucuagccagaggagaga

SEQ ID NO: 1170249 - RNA, 12 nt, Human
cacuuugggagg

SEQ ID NO: 1170250 - RNA, 13 nt, Human
cacuuugggaggc

SEQ ID NO: 1170251 - RNA, 16 nt, Human
cacuuugggaggccaa

SEQ ID NO: 1170252 - RNA, 13 nt, Human
cacuuuguucugg

SEQ ID NO: 1170253 - RNA, 14 nt, Human
cacuuuguucuggc

SEQ ID NO: 1170254 - RNA, 16 nt, Human
cacuuuguucuggcuc

SEQ ID NO: 1170255 - RNA, 23 nt, Human
cacuuuguucuggcucuuccagg

SEQ ID NO: 1170256 - RNA, 18 nt, Human
cagaaagcagaacaguga

SEQ ID NO: 1170257 - RNA, 19 nt, Human
cagaaagcagaacagugau

SEQ ID NO: 1170258 - RNA, 23 nt, Human
cagaacagugauuaccagggacu

SEQ ID NO: 1170259 - RNA, 21 nt, Human
cagaaaagaaaguucaugcuu

SEQ ID NO: 1170260 - RNA, 11 nt, Human
cagaaaauaua

SEQ ID NO: 1170261 - RNA, 12 nt, Human
cagaaaauauac

SEQ ID NO: 1170262 - RNA, 13 nt, Human
cagaaaauauacu

SEQ ID NO: 1170263 - RNA, 14 nt, Human
cagaaaauauacug

SEQ ID NO: 1170264 - RNA, 15 nt, Human
cagaaaauauacugu

SEQ ID NO: 1170265 - RNA, 16 nt, Human
cagaaaauauacugua

SEQ ID NO: 1170266 - RNA, 17 nt, Human
cagaaaauauacuguaa

SEQ ID NO: 1170267 - RNA, 18 nt, Human
cagaaaauauacuguaaa

SEQ ID NO: 1170268 - RNA, 19 nt, Human
cagaaaauauacuguaaag

SEQ ID NO: 1170269 - RNA, 20 nt, Human
cagaaaauauacuguaaaga

SEQ ID NO: 1170270 - RNA, 21 nt, Human
cagaaaauauacuguaaagaa

SEQ ID NO: 1170271 - RNA, 16 nt, Human
cagaaaauggaagaca

SEQ ID NO: 1170272 - RNA, 20 nt, Human
cagaaaauggaagacagcuc

SEQ ID NO: 1170273 - RNA, 21 nt, Human
cagaaaauggaagacagcucu

SEQ ID NO: 1170274 - RNA, 22 nt, Human
cagaaaauggaagacagcucuu

SEQ ID NO: 1170275 - RNA, 23 nt, Human
cagaaaauggaagacagcucuua

SEQ ID NO: 1170276 - RNA, 19 nt, Human
cagaagcaacccaaauguu

SEQ ID NO: 1170277 - RNA, 20 nt, Human
cagaagcaacccaaauguuc

SEQ ID NO: 1170278 - RNA, 21 nt, Human
cagaagacacugaugggcaac

SEQ ID NO: 1170279 - RNA, 16 nt, Human
cagaaggaagacuuca

SEQ ID NO: 1170280 - RNA, 17 nt, Human
cagaaggaagacuucau

SEQ ID NO: 1170281 - RNA, 18 nt, Human
cagaaggaagacuucauc

SEQ ID NO: 1170282 - RNA, 19 nt, Human
cagaaggaagacuucaucc

SEQ ID NO: 1170283 - RNA, 17 nt, Human
cagaaucucaaauaacu

SEQ ID NO: 1170284 - RNA, 18 nt, Human
cagaaucucaaauaacua

SEQ ID NO: 1170285 - RNA, 11 nt, Human
cagaauucuca

SEQ ID NO: 1170286 - RNA, 15 nt, Human
cagaauucucuaguu

SEQ ID NO: 1170287 - RNA, 18 nt, Human
cagaauucucuaguuuga

SEQ ID NO: 1170288 - RNA, 14 nt, Human
cagaauuucccaaa

SEQ ID NO: 1170289 - RNA, 17 nt, Human
cagaauuucccaaagca

SEQ ID NO: 1170290 - RNA, 18 nt, Human
cagaauuucccaaagcag

SEQ ID NO: 1170291 - RNA, 19 nt, Human
cagaauuucccaaagcagu

SEQ ID NO: 1170292 - RNA, 20 nt, Human
cagaauuucccaaagcagug

SEQ ID NO: 1170293 - RNA, 24 nt, Human
cagaauuucccaaagcagugcaug

SEQ ID NO: 1170294 - RNA, 12 nt, Human
cagacaaagcgu

SEQ ID NO: 1170295 - RNA, 22 nt, Human
cagacaaagcgugguggacaug

SEQ ID NO: 1170296 - RNA, 20 nt, Human
cagacaacaaaccuguuucu

SEQ ID NO: 1170297 - RNA, 13 nt, Human
cagacacaggccc

SEQ ID NO: 1170298 - RNA, 14 nt, Human
cagacacaggcccg

SEQ ID NO: 1170299 - RNA, 15 nt, Human
cagacacaggcccgg

SEQ ID NO: 1170300 - RNA, 17 nt, Human
cagacacaggcccggcu

SEQ ID NO: 1170301 - RNA, 18 nt, Human
cagacacaggcccggcuc

SEQ ID NO: 1170302 - RNA, 21 nt, Human
cagacacaggcccggcuccag

SEQ ID NO: 1170303 - RNA, 22 nt, Human
cagacacaggcccggcuccagg

SEQ ID NO: 1170304 - RNA, 23 nt, Human
cagacacaggcccggcuccaggc

SEQ ID NO: 1170305 - RNA, 14 nt, Human
cagacacaugucca

SEQ ID NO: 1170306 - RNA, 17 nt, Human
cagacacauguccaaga

SEQ ID NO: 1170307 - RNA, 21 nt, Human
cagacacauguccaagaagcc

SEQ ID NO: 1170308 - RNA, 22 nt, Human
cagacacauguccaagaagccc

SEQ ID NO: 1170309 - RNA, 23 nt, Human
cagacacauguccaagaagccca

SEQ ID NO: 1170310 - RNA, 19 nt, Human
cagacaccuugacagggca

SEQ ID NO: 1170311 - RNA, 20 nt, Human
cagacaccuugacagggcac

SEQ ID NO: 1170312 - RNA, 22 nt, Human
cagacaccuugacagggcacac

SEQ ID NO: 1170313 - RNA, 20 nt, Human
cagacaguuaagagaaauga

SEQ ID NO: 1170314 - RNA, 19 nt, Human
cagacauacuaaccagcag

SEQ ID NO: 1170315 - RNA, 17 nt, Human
cagacauagaauuaaca

SEQ ID NO: 1170316 - RNA, 19 nt, Human
cagacauagaauuaacaca

SEQ ID NO: 1170317 - RNA, 14 nt, Human
cagaccacaaaacu

SEQ ID NO: 1170318 - RNA, 20 nt, Human
cagaccacaaaacuuuucua

SEQ ID NO: 1170319 - RNA, 12 nt, Human
cagacccggcug

SEQ ID NO: 1170320 - RNA, 14 nt, Human
cagacccggcugcg

SEQ ID NO: 1170321 - RNA, 16 nt, Human
cagacccggcugcgug

SEQ ID NO: 1170322 - RNA, 12 nt, Human
cagacccugccc

SEQ ID NO: 1170323 - RNA, 13 nt, Human
cagacccugcccu

SEQ ID NO: 1170324 - RNA, 14 nt, Human
cagacccugcccug

SEQ ID NO: 1170325 - RNA, 15 nt, Human
cagacccugcccugu

SEQ ID NO: 1170326 - RNA, 16 nt, Human
cagacccugcccugug

SEQ ID NO: 1170327 - RNA, 17 nt, Human
cagacccugcccugugg

SEQ ID NO: 1170328 - RNA, 21 nt, Human
cagacccugcccugugggccc

SEQ ID NO: 1170329 - RNA, 22 nt, Human
cagacccugcccugugggcccc

SEQ ID NO: 1170330 - RNA, 19 nt, Human
cagagaaaguacuucucca

SEQ ID NO: 1170331 - RNA, 23 nt, Human
cagagaaaguacuucuccacccu

SEQ ID NO: 1170332 - RNA, 16 nt, Human
cagacaacaaaccugu

SEQ ID NO: 1170333 - RNA, 16 nt, Human
cagagcaccuuagaca

SEQ ID NO: 1170334 - RNA, 14 nt, Human
cagagcaagugaga

SEQ ID NO: 1170335 - RNA, 20 nt, Human
cagagcaagugagacccugu

SEQ ID NO: 1170336 - RNA, 17 nt, Human
cagagaccaucccugaa

SEQ ID NO: 1170337 - RNA, 18 nt, Human
cagagaccaucccugaag

SEQ ID NO: 1170338 - RNA, 19 nt, Human
cagagaccaucccugaagg

SEQ ID NO: 1170339 - RNA, 20 nt, Human
cagagaccaucccugaaggc

SEQ ID NO: 1170340 - RNA, 21 nt, Human
cagagaccaucccugaaggcc

SEQ ID NO: 1170341 - RNA, 13 nt, Human
cagagacuccugc

SEQ ID NO: 1170342 - RNA, 14 nt, Human
cagagacuccugca

SEQ ID NO: 1170343 - RNA, 15 nt, Human
cagagacuccugcag

SEQ ID NO: 1170344 - RNA, 16 nt, Human
cagagacuccugcagg

SEQ ID NO: 1170345 - RNA, 17 nt, Human
cagagacuccugcaggc

SEQ ID NO: 1170346 - RNA, 18 nt, Human
cagagacuccugcaggca

SEQ ID NO: 1170347 - RNA, 19 nt, Human
cagagacuccugcaggcag

SEQ ID NO: 1170348 - RNA, 19 nt, Human
cagagaaugaaagggccca

SEQ ID NO: 1170349 - RNA, 20 nt, Human
cagagaaugaaagggcccag

SEQ ID NO: 1170350 - RNA, 21 nt, Human
cagagaaugaaagggcccaga

SEQ ID NO: 1170351 - RNA, 15 nt, Human
cagagaauucucuua

SEQ ID NO: 1170352 - RNA, 14 nt, Human
cagagacacaagcc

SEQ ID NO: 1170353 - RNA, 15 nt, Human
cagagacacaagccu

SEQ ID NO: 1170354 - RNA, 16 nt, Human
cagagacacaagccuu

SEQ ID NO: 1170355 - RNA, 17 nt, Human
cagagacacaagccuuc

SEQ ID NO: 1170356 - RNA, 13 nt, Human
cagagaccauccc

SEQ ID NO: 1170357 - RNA, 14 nt, Human
cagagaccaucccu

SEQ ID NO: 1170358 - RNA, 16 nt, Human
cagagaccaucccuga

SEQ ID NO: 1170359 - RNA, 15 nt, Human
cagagcccaccuugg

SEQ ID NO: 1170360 - RNA, 17 nt, Human
cagagcccaccuuggcu

SEQ ID NO: 1170361 - RNA, 19 nt, Human
cagagcccaccuuggcuca

SEQ ID NO: 1170362 - RNA, 20 nt, Human
cagagcccaccuuggcucaa

SEQ ID NO: 1170363 - RNA, 16 nt, Human
cagagcccacgccccc

SEQ ID NO: 1170364 - RNA, 18 nt, Human
cagagcaccuuagacagu

SEQ ID NO: 1170365 - RNA, 19 nt, Human
cagagcaccuuagacaguc

SEQ ID NO: 1170366 - RNA, 21 nt, Human
cagagcaccuuagacaguccc

SEQ ID NO: 1170367 - RNA, 22 nt, Human
cagagcaccuuagacagucccu

SEQ ID NO: 1170368 - RNA, 23 nt, Human
cagagcaccuuagacagucccug

SEQ ID NO: 1170369 - RNA, 11 nt, Human
cagagcagaga

SEQ ID NO: 1170370 - RNA, 12 nt, Human
cagagcagagac

SEQ ID NO: 1170371 - RNA, 13 nt, Human
cagagcagagacc

SEQ ID NO: 1170372 - RNA, 14 nt, Human
cagagcagagacca

SEQ ID NO: 1170373 - RNA, 15 nt, Human
cagagcagagaccau

SEQ ID NO: 1170374 - RNA, 17 nt, Human
cagagcagagaccaucc

SEQ ID NO: 1170375 - RNA, 18 nt, Human
cagagcagagaccauccc

SEQ ID NO: 1170376 - RNA, 19 nt, Human
cagagcagagaccaucccu

SEQ ID NO: 1170377 - RNA, 21 nt, Human
cagagcagagaccaucccuga

SEQ ID NO: 1170378 - RNA, 17 nt, Human
cagagcccacgccccca

SEQ ID NO: 1170379 - RNA, 19 nt, Human
cagagcccacgcccccacu

SEQ ID NO: 1170380 - RNA, 20 nt, Human
cagagcccacgcccccacug

SEQ ID NO: 1170381 - RNA, 21 nt, Human
cagagcccacgcccccacugg

SEQ ID NO: 1170382 - RNA, 23 nt, Human
cagagcccacgcccccacuggug

SEQ ID NO: 1170383 - RNA, 12 nt, Human
cagagccugcag

SEQ ID NO: 1170384 - RNA, 13 nt, Human
cagagccugcagu

SEQ ID NO: 1170385 - RNA, 13 nt, Human
cagaggaaggaga

SEQ ID NO: 1170386 - RNA, 13 nt, Human
cagaggagagagg

SEQ ID NO: 1170387 - RNA, 15 nt, Human
cagaggagagaggac

SEQ ID NO: 1170388 - RNA, 19 nt, Human
cagaggagagaggaccccc

SEQ ID NO: 1170389 - RNA, 20 nt, Human
cagaggagagaggacccccu

SEQ ID NO: 1170390 - RNA, 11 nt, Human
cagaggcagcc

SEQ ID NO: 1170391 - RNA, 13 nt, Human
cagaugcaccagc

SEQ ID NO: 1170392 - RNA, 14 nt, Human
cagaugcaccagcc

SEQ ID NO: 1170393 - RNA, 16 nt, Human
cagaugcaccagcccu

SEQ ID NO: 1170394 - RNA, 17 nt, Human
cagaugcaccagcccuu

SEQ ID NO: 1170395 - RNA, 22 nt, Human
cagaugcaccagcccuuagcag

SEQ ID NO: 1170396 - RNA, 20 nt, Human
cagauacaggaaaagcugcu

SEQ ID NO: 1170397 - RNA, 21 nt, Human
cagauacaggaaaagcugcug

SEQ ID NO: 1170398 - RNA, 22 nt, Human
cagauacaggaaaagcugcuga

SEQ ID NO: 1170399 - RNA, 23 nt, Human
cagauacaggaaaagcugcugac

SEQ ID NO: 1170400 - RNA, 14 nt, Human
cagauccuggaaau

SEQ ID NO: 1170401 - RNA, 20 nt, Human
cagaucucuaacuucaccau

SEQ ID NO: 1170402 - RNA, 14 nt, Human
cagaguugaagaca

SEQ ID NO: 1170403 - RNA, 15 nt, Human
cagaguugaagacag

SEQ ID NO: 1170404 - RNA, 16 nt, Human
cagaguugaagacaga

SEQ ID NO: 1170405 - RNA, 17 nt, Human
cagaguugaagacagag

SEQ ID NO: 1170406 - RNA, 18 nt, Human
cagaguugaagacagagc

SEQ ID NO: 1170407 - RNA, 19 nt, Human
cagaguugaagacagagcu

SEQ ID NO: 1170408 - RNA, 20 nt, Human
cagaguugaagacagagcua

SEQ ID NO: 1170409 - RNA, 22 nt, Human
cagaguugaagacagagcuaca

SEQ ID NO: 1170410 - RNA, 14 nt, Human
cagaguuguuacau

SEQ ID NO: 1170411 - RNA, 15 nt, Human
cagaguuguuacauu

SEQ ID NO: 1170412 - RNA, 18 nt, Human
cagaguuguuacauuuuu

SEQ ID NO: 1170413 - RNA, 19 nt, Human
cagaguuguuacauuuuua

SEQ ID NO: 1170414 - RNA, 14 nt, Human
cagauaaacaguag

SEQ ID NO: 1170415 - RNA, 23 nt, Human
cagauaaauaguuuaugauucca

SEQ ID NO: 1170416 - RNA, 14 nt, Human
cagauaaucacaau

SEQ ID NO: 1170417 - RNA, 12 nt, Human
cagaggcagccc

SEQ ID NO: 1170418 - RNA, 13 nt, Human
cagaggcagcccc

SEQ ID NO: 1170419 - RNA, 14 nt, Human
cagaggcagcccca

SEQ ID NO: 1170420 - RNA, 15 nt, Human
cagaggcagccccau

SEQ ID NO: 1170421 - RNA, 18 nt, Human
cagaggcagccccauucu

SEQ ID NO: 1170422 - RNA, 19 nt, Human
cagaggcagccccauucug

SEQ ID NO: 1170423 - RNA, 20 nt, Human
cagaggcagccccauucugc

SEQ ID NO: 1170424 - RNA, 22 nt, Human
cagaggcagccccauucugccu

SEQ ID NO: 1170425 - RNA, 23 nt, Human
cagaggcagccccauucugccug

SEQ ID NO: 1170426 - RNA, 19 nt, Human
cagaggccaugggccuccu

SEQ ID NO: 1170427 - RNA, 20 nt, Human
cagaggccaugggccuccug

SEQ ID NO: 1170428 - RNA, 21 nt, Human
cagaggccaugggccuccugu

SEQ ID NO: 1170429 - RNA, 13 nt, Human
cagaggcugccuc

SEQ ID NO: 1170430 - RNA, 23 nt, Human
cagaggcugccucucccaucacu

SEQ ID NO: 1170431 - RNA, 14 nt, Human
cagagggagugaca

SEQ ID NO: 1170432 - RNA, 16 nt, Human
cagagggagugacaga

SEQ ID NO: 1170433 - RNA, 18 nt, Human
cagagggagugacagagg

SEQ ID NO: 1170434 - RNA, 19 nt, Human
cagagggagugacagaggc

SEQ ID NO: 1170435 - RNA, 20 nt, Human
cagagggagugacagaggca

SEQ ID NO: 1170436 - RNA, 21 nt, Human
cagagggagugacagaggcag

SEQ ID NO: 1170437 - RNA, 22 nt, Human
cagagggagugacagaggcagc

SEQ ID NO: 1170438 - RNA, 23 nt, Human
cagagggagugacagaggcagcc

SEQ ID NO: 1170439 - RNA, 15 nt, Human
cagagggccugcaag

SEQ ID NO: 1170440 - RNA, 19 nt, Human
cagagggccugcaagggag

SEQ ID NO: 1170441 - RNA, 13 nt, Human
cagagucucacug

SEQ ID NO: 1170442 - RNA, 17 nt, Human
cagagucucacuguugc

SEQ ID NO: 1170443 - RNA, 19 nt, Human
cagagucucacuguugccc

SEQ ID NO: 1170444 - RNA, 20 nt, Human
cagagucucacuguugccca

SEQ ID NO: 1170445 - RNA, 21 nt, Human
cagagucucacuguugcccag

SEQ ID NO: 1170446 - RNA, 22 nt, Human
cagagucucacuguugcccagg

SEQ ID NO: 1170447 - RNA, 23 nt, Human
cagagucucacuguugcccaggc

SEQ ID NO: 1170448 - RNA, 16 nt, Human
cagagugagacucugu

SEQ ID NO: 1170449 - RNA, 17 nt, Human
cagagugagacucuguc

SEQ ID NO: 1170450 - RNA, 18 nt, Human
cagagugagacucugucu

SEQ ID NO: 1170451 - RNA, 19 nt, Human
cagagugagacucugucuc

SEQ ID NO: 1170452 - RNA, 20 nt, Human
cagagugagacucugucuca

SEQ ID NO: 1170453 - RNA, 16 nt, Human
cagaggccaugggccu

SEQ ID NO: 1170454 - RNA, 18 nt, Human
cagaugggugcuuggagg

SEQ ID NO: 1170455 - RNA, 23 nt, Human
cagaugggugcuuggaggaagga

SEQ ID NO: 1170456 - RNA, 14 nt, Human
cagauuuuccugaa

SEQ ID NO: 1170457 - RNA, 15 nt, Human
cagauuuuccugaaa

SEQ ID NO: 1170458 - RNA, 14 nt, Human
cagauucuuuccug

SEQ ID NO: 1170459 - RNA, 15 nt, Human
cagauucuuuccuga

SEQ ID NO: 1170460 - RNA, 18 nt, Human
cagcaaaagaugcuucuc

SEQ ID NO: 1170461 - RNA, 19 nt, Human
cagcaagugagagcugggu

SEQ ID NO: 1170462 - RNA, 21 nt, Human
cagcaagugagagcugggugu

SEQ ID NO: 1170463 - RNA, 13 nt, Human
cagcaauaaagca

SEQ ID NO: 1170464 - RNA, 21 nt, Human
cagcaauaaagcagcguuucu

SEQ ID NO: 1170465 - RNA, 22 nt, Human
cagcaauaaagcagcguuucua

SEQ ID NO: 1170466 - RNA, 17 nt, Human
cagcaaggagauuuaca

SEQ ID NO: 1170467 - RNA, 18 nt, Human
cagcaaggagauuuacaa

SEQ ID NO: 1170468 - RNA, 12 nt, Human
cagcaagugaga

SEQ ID NO: 1170469 - RNA, 14 nt, Human
cagcaagugagagc

SEQ ID NO: 1170470 - RNA, 15 nt, Human
cagcaagugagagcu

SEQ ID NO: 1170471 - RNA, 16 nt, Human
cagcaagugagagcug

SEQ ID NO: 1170472 - RNA, 17 nt, Human
cagcaagugagagcugg

SEQ ID NO: 1170473 - RNA, 15 nt, Human
cagcagaaaugccuu

SEQ ID NO: 1170474 - RNA, 17 nt, Human
cagcagaaaugccuuac

SEQ ID NO: 1170475 - RNA, 19 nt, Human
cagcagaaaugccuuaccc

SEQ ID NO: 1170476 - RNA, 22 nt, Human
cagcagaaaugccuuacccuca

SEQ ID NO: 1170477 - RNA, 11 nt, Human
cagcagagcac

SEQ ID NO: 1170478 - RNA, 13 nt, Human
cagcagagcaccu

SEQ ID NO: 1170479 - RNA, 19 nt, Human
cagcauccuggcacccggc

SEQ ID NO: 1170480 - RNA, 20 nt, Human
cagcauccuggcacccggcc

SEQ ID NO: 1170481 - RNA, 21 nt, Human
cagcauccuggcacccggccc

SEQ ID NO: 1170482 - RNA, 15 nt, Human
cagccaaagccuccu

SEQ ID NO: 1170483 - RNA, 16 nt, Human
cagccaaagccuccuc

SEQ ID NO: 1170484 - RNA, 18 nt, Human
cagccaaagccuccucca

SEQ ID NO: 1170485 - RNA, 21 nt, Human
cagccaaagccuccuccagcc

SEQ ID NO: 1170486 - RNA, 12 nt, Human
cagcagccugga

SEQ ID NO: 1170487 - RNA, 14 nt, Human
cagcagccuggacc

SEQ ID NO: 1170488 - RNA, 15 nt, Human
cagcagccuggaccc

SEQ ID NO: 1170489 - RNA, 18 nt, Human
cagcagccuggacccugu

SEQ ID NO: 1170490 - RNA, 19 nt, Human
cagcagccuggacccugug

SEQ ID NO: 1170491 - RNA, 22 nt, Human
cagcagccuggacccuguggau

SEQ ID NO: 1170492 - RNA, 12 nt, Human
cagcaggcucuc

SEQ ID NO: 1170493 - RNA, 14 nt, Human
cagcaggcucucag

SEQ ID NO: 1170494 - RNA, 15 nt, Human
cagcaggcucucagg

SEQ ID NO: 1170495 - RNA, 16 nt, Human
cagcaggcucucaggc

SEQ ID NO: 1170496 - RNA, 17 nt, Human
cagcaggcucucaggcc

SEQ ID NO: 1170497 - RNA, 18 nt, Human
cagcaggcucucaggcca

SEQ ID NO: 1170498 - RNA, 19 nt, Human
cagcaggcucucaggccag

SEQ ID NO: 1170499 - RNA, 20 nt, Human
cagcaggcucucaggccagc

SEQ ID NO: 1170500 - RNA, 22 nt, Human
cagcaggcucucaggccagcug

SEQ ID NO: 1170501 - RNA, 18 nt, Human
cagcagggagggcuucug

SEQ ID NO: 1170502 - RNA, 20 nt, Human
cagcagggagggcuucugcc

SEQ ID NO: 1170503 - RNA, 14 nt, Human
cagcauccuggcac

SEQ ID NO: 1170504 - RNA, 15 nt, Human
cagcauccuggcacc

SEQ ID NO: 1170505 - RNA, 16 nt, Human
cagcauccuggcaccc

SEQ ID NO: 1170506 - RNA, 17 nt, Human
cagcauccuggcacccg

SEQ ID NO: 1170507 - RNA, 15 nt, Human
cagcccaccccucaa

SEQ ID NO: 1170508 - RNA, 15 nt, Human
cagcccacuucugcc

SEQ ID NO: 1170509 - RNA, 18 nt, Human
cagcccacuucugccaua

SEQ ID NO: 1170510 - RNA, 20 nt, Human
cagccccaaaacucuccucu

SEQ ID NO: 1170511 - RNA, 21 nt, Human
cagccccaaaacucuccucug

SEQ ID NO: 1170512 - RNA, 22 nt, Human
cagccccaaaacucuccucugc

SEQ ID NO: 1170513 - RNA, 9 nt, Human
cagccacac

SEQ ID NO: 1170514 - RNA, 11 nt, Human
cagccacacac

SEQ ID NO: 1170515 - RNA, 12 nt, Human
cagccacacaca

SEQ ID NO: 1170516 - RNA, 13 nt, Human
cagccacacacac

SEQ ID NO: 1170517 - RNA, 14 nt, Human
cagccacacacaca

SEQ ID NO: 1170518 - RNA, 15 nt, Human
cagccacacacacag

SEQ ID NO: 1170519 - RNA, 16 nt, Human
cagccacacacacaga

SEQ ID NO: 1170520 - RNA, 17 nt, Human
cagccacacacacagaa

SEQ ID NO: 1170521 - RNA, 18 nt, Human
cagccacacacacagaaa

SEQ ID NO: 1170522 - RNA, 19 nt, Human
cagccacacacacagaaaa

SEQ ID NO: 1170523 - RNA, 20 nt, Human
cagccacacacacagaaaau

SEQ ID NO: 1170524 - RNA, 21 nt, Human
cagccacacacacagaaaaua

SEQ ID NO: 1170525 - RNA, 22 nt, Human
cagccacacacacagaaaauau

SEQ ID NO: 1170526 - RNA, 23 nt, Human
cagccacacacacagaaaauaua

SEQ ID NO: 1170527 - RNA, 14 nt, Human
cagccacauuccug

SEQ ID NO: 1170528 - RNA, 15 nt, Human
cagccacauuccuga

SEQ ID NO: 1170529 - RNA, 17 nt, Human
cagccacauuccugaug

SEQ ID NO: 1170530 - RNA, 19 nt, Human
cagccacauuccugaugcu

SEQ ID NO: 1170531 - RNA, 14 nt, Human
cagccacggccagg

SEQ ID NO: 1170532 - RNA, 15 nt, Human
cagccacggccaggc

SEQ ID NO: 1170533 - RNA, 16 nt, Human
cagccacggccaggcc

SEQ ID NO: 1170534 - RNA, 17 nt, Human
cagccacggccaggcca

SEQ ID NO: 1170535 - RNA, 18 nt, Human
cagccacggccaggccag

SEQ ID NO: 1170536 - RNA, 19 nt, Human
cagccacggccaggccaga

SEQ ID NO: 1170537 - RNA, 21 nt, Human
cagccacggccaggccagagg

SEQ ID NO: 1170538 - RNA, 22 nt, Human
cagccacggccaggccagaggg

SEQ ID NO: 1170539 - RNA, 23 nt, Human
cagccacggccaggccagaggga

SEQ ID NO: 1170540 - RNA, 22 nt, Human
cagccaguaaaugggggugcau

SEQ ID NO: 1170541 - RNA, 14 nt, Human
cagcucaccagccc

SEQ ID NO: 1170542 - RNA, 17 nt, Human
cagcccgggcucugccu

SEQ ID NO: 1170543 - RNA, 18 nt, Human
cagcccgggcucugccuc

SEQ ID NO: 1170544 - RNA, 19 nt, Human
cagcccgggcucugccucc

SEQ ID NO: 1170545 - RNA, 20 nt, Human
cagcccgggcucugccuccc

SEQ ID NO: 1170546 - RNA, 21 nt, Human
cagcccgggcucugccuccca

SEQ ID NO: 1170547 - RNA, 22 nt, Human
cagcccgggcucugccucccau

SEQ ID NO: 1170548 - RNA, 16 nt, Human
cagccccuucugaccc

SEQ ID NO: 1170549 - RNA, 17 nt, Human
cagccccuucugaccca

SEQ ID NO: 1170550 - RNA, 19 nt, Human
cagccccuucugacccaug

SEQ ID NO: 1170551 - RNA, 21 nt, Human
cagccccuucugacccaugcu

SEQ ID NO: 1170552 - RNA, 22 nt, Human
cagccccuucugacccaugcug

SEQ ID NO: 1170553 - RNA, 23 nt, Human
cagccccuucugacccaugcugc

SEQ ID NO: 1170554 - RNA, 24 nt, Human
cagccccuucugacccaugcugcc

SEQ ID NO: 1170555 - RNA, 13 nt, Human
cagcccgggcucu

SEQ ID NO: 1170556 - RNA, 14 nt, Human
cagcccgggcucug

SEQ ID NO: 1170557 - RNA, 15 nt, Human
cagcccgggcucugc

SEQ ID NO: 1170558 - RNA, 16 nt, Human
cagcccgggcucugcc

SEQ ID NO: 1170559 - RNA, 13 nt, Human
cagccccagugcc

SEQ ID NO: 1170560 - RNA, 14 nt, Human
cagccccagugccc

SEQ ID NO: 1170561 - RNA, 15 nt, Human
cagccccagugccca

SEQ ID NO: 1170562 - RNA, 16 nt, Human
cagccccagugcccac

SEQ ID NO: 1170563 - RNA, 17 nt, Human
cagccccagugcccaca

SEQ ID NO: 1170564 - RNA, 18 nt, Human
cagccccagugcccacag

SEQ ID NO: 1170565 - RNA, 11 nt, Human
cagccccaucc

SEQ ID NO: 1170566 - RNA, 21 nt, Human
cagccccaucccaaacccuuc

SEQ ID NO: 1170567 - RNA, 22 nt, Human
cagccccaucccaaacccuuca

SEQ ID NO: 1170568 - RNA, 12 nt, Human
cagccccauccu

SEQ ID NO: 1170569 - RNA, 13 nt, Human
cagccccauccuc

SEQ ID NO: 1170570 - RNA, 14 nt, Human
cagccccauccucu

SEQ ID NO: 1170571 - RNA, 16 nt, Human
cagccccauccucugu

SEQ ID NO: 1170572 - RNA, 22 nt, Human
cagccccauccucuguacagag

SEQ ID NO: 1170573 - RNA, 13 nt, Human
cagccccauucug

SEQ ID NO: 1170574 - RNA, 14 nt, Human
cagccccauucugc

SEQ ID NO: 1170575 - RNA, 16 nt, Human
cagccccauucugccu

SEQ ID NO: 1170576 - RNA, 17 nt, Human
cagccccauucugccug

SEQ ID NO: 1170577 - RNA, 18 nt, Human
cagccccauucugccugc

SEQ ID NO: 1170578 - RNA, 23 nt, Human
cagccccuggaugcagccucaca

SEQ ID NO: 1170579 - RNA, 20 nt, Human
cagccccuguucuggcagag

SEQ ID NO: 1170580 - RNA, 21 nt, Human
cagccccuguucuggcagagu

SEQ ID NO: 1170581 - RNA, 13 nt, Human
cagcccugcagag

SEQ ID NO: 1170582 - RNA, 14 nt, Human
cagcccugcagagg

SEQ ID NO: 1170583 - RNA, 15 nt, Human
cagcccugcagaggg

SEQ ID NO: 1170584 - RNA, 16 nt, Human
cagcccugcagagggc

SEQ ID NO: 1170585 - RNA, 18 nt, Human
cagcccugcagagggcac

SEQ ID NO: 1170586 - RNA, 20 nt, Human
cagcccugcagagggcacag

SEQ ID NO: 1170587 - RNA, 21 nt, Human
cagccguguaaccauggaccc

SEQ ID NO: 1170588 - RNA, 14 nt, Human
cagccucacagucc

SEQ ID NO: 1170589 - RNA, 15 nt, Human
cagccucacaguccu

SEQ ID NO: 1170590 - RNA, 20 nt, Human
cagccucacaguccuuacca

SEQ ID NO: 1170591 - RNA, 16 nt, Human
cagccuaguugaucag

SEQ ID NO: 1170592 - RNA, 17 nt, Human
cagccucaaccuccugg

SEQ ID NO: 1170593 - RNA, 18 nt, Human
cagccucaaccuccuggg

SEQ ID NO: 1170594 - RNA, 19 nt, Human
cagccucaaccuccugggc

SEQ ID NO: 1170595 - RNA, 20 nt, Human
cagccucaaccuccugggcu

SEQ ID NO: 1170596 - RNA, 21 nt, Human
cagccucaaccuccugggcua

SEQ ID NO: 1170597 - RNA, 19 nt, Human
cagccucccaaagugcugg

SEQ ID NO: 1170598 - RNA, 20 nt, Human
cagccucccaaagugcuggg

SEQ ID NO: 1170599 - RNA, 21 nt, Human
cagccucccaaagugcuggga

SEQ ID NO: 1170600 - RNA, 23 nt, Human
cagccucccaaagugcugggauu

SEQ ID NO: 1170601 - RNA, 20 nt, Human
cagccucccgaauagcuggg

SEQ ID NO: 1170602 - RNA, 21 nt, Human
cagccucccgaauagcuggga

SEQ ID NO: 1170603 - RNA, 22 nt, Human
cagccucccgaauagcugggac

SEQ ID NO: 1170604 - RNA, 20 nt, Human
cagccugcuccagcuguuca

SEQ ID NO: 1170605 - RNA, 23 nt, Human
cagccucccgaauagcugggacu

SEQ ID NO: 1170606 - RNA, 19 nt, Human
cagccucccgaguagcugg

SEQ ID NO: 1170607 - RNA, 20 nt, Human
cagccucccgaguagcuggg

SEQ ID NO: 1170608 - RNA, 21 nt, Human
cagccucccgaguagcuggga

SEQ ID NO: 1170609 - RNA, 22 nt, Human
cagccucccgaguagcugggac

SEQ ID NO: 1170610 - RNA, 23 nt, Human
cagccucccgaguagcugggacu

SEQ ID NO: 1170611 - RNA, 15 nt, Human
cagccuggacccugu

SEQ ID NO: 1170612 - RNA, 19 nt, Human
cagccuggacccuguggau

SEQ ID NO: 1170613 - RNA, 16 nt, Human
cagccugggcaaugug

SEQ ID NO: 1170614 - RNA, 19 nt, Human
cagccugggcaaugugaua

SEQ ID NO: 1170615 - RNA, 23 nt, Human
cagccugugucuuuaaaugcugc

SEQ ID NO: 1170616 - RNA, 14 nt, Human
cagccugugucuuu

SEQ ID NO: 1170617 - RNA, 17 nt, Human
cagccuugaccauucuc

SEQ ID NO: 1170618 - RNA, 20 nt, Human
cagccuugaccauucuccac

SEQ ID NO: 1170619 - RNA, 21 nt, Human
cagccuugaccauucuccacc

SEQ ID NO: 1170620 - RNA, 22 nt, Human
cagccuugaccauucuccaccu

SEQ ID NO: 1170621 - RNA, 23 nt, Human
cagccuugaccauucuccaccug

SEQ ID NO: 1170622 - RNA, 24 nt, Human
cagccuugaccauucuccaccugc

SEQ ID NO: 1170623 - RNA, 15 nt, Human
cagcuaaugggacac

SEQ ID NO: 1170624 - RNA, 16 nt, Human
cagcuaaugggacacu

SEQ ID NO: 1170625 - RNA, 20 nt, Human
cagcuaacauggaaguacua

SEQ ID NO: 1170626 - RNA, 19 nt, Human
cagcuacuugggaggcuga

SEQ ID NO: 1170627 - RNA, 13 nt, Human
cagcgagcccugg

SEQ ID NO: 1170628 - RNA, 16 nt, Human
cagcgagcccuggugg

SEQ ID NO: 1170629 - RNA, 17 nt, Human
cagcgagcccugguggc

SEQ ID NO: 1170630 - RNA, 19 nt, Human
cagcgagcccugguggcag

SEQ ID NO: 1170631 - RNA, 20 nt, Human
cagcgagcccugguggcagu

SEQ ID NO: 1170632 - RNA, 21 nt, Human
cagcgagcccugguggcagug

SEQ ID NO: 1170633 - RNA, 19 nt, Human
cagcuaacauggaaguacu

SEQ ID NO: 1170634 - RNA, 19 nt, Human
cagcucaccucucccuugg

SEQ ID NO: 1170635 - RNA, 20 nt, Human
cagcucaccucucccuugga

SEQ ID NO: 1170636 - RNA, 12 nt, Human
cagcucagagag

SEQ ID NO: 1170637 - RNA, 20 nt, Human
cagcucaccagccccagugc

SEQ ID NO: 1170638 - RNA, 21 nt, Human
cagcucaccagccccagugcc

SEQ ID NO: 1170639 - RNA, 22 nt, Human
cagcucaccagccccagugccc

SEQ ID NO: 1170640 - RNA, 13 nt, Human
cagcucaccucuc

SEQ ID NO: 1170641 - RNA, 15 nt, Human
cagcucaccucuccc

SEQ ID NO: 1170642 - RNA, 16 nt, Human
cagcucaccucucccu

SEQ ID NO: 1170643 - RNA, 17 nt, Human
cagcucaccucucccuu

SEQ ID NO: 1170644 - RNA, 13 nt, Human
cagcucaccagcc

SEQ ID NO: 1170645 - RNA, 15 nt, Human
cagcucaccagcccc

SEQ ID NO: 1170646 - RNA, 16 nt, Human
cagcucaccagcccca

SEQ ID NO: 1170647 - RNA, 17 nt, Human
cagcucaccagccccag

SEQ ID NO: 1170648 - RNA, 19 nt, Human
cagcucaccagccccagug

SEQ ID NO: 1170649 - RNA, 23 nt, Human
cagcugcuuuugucuaugggacu

SEQ ID NO: 1170650 - RNA, 17 nt, Human
cagcugcuacuacuccu

SEQ ID NO: 1170651 - RNA, 13 nt, Human
cagcugcuugggc

SEQ ID NO: 1170652 - RNA, 14 nt, Human
cagcugcuugggcu

SEQ ID NO: 1170653 - RNA, 15 nt, Human
cagcugcuugggcuu

SEQ ID NO: 1170654 - RNA, 16 nt, Human
cagcugcuugggcuuc

SEQ ID NO: 1170655 - RNA, 18 nt, Human
cagcugcuugggcuucau

SEQ ID NO: 1170656 - RNA, 19 nt, Human
cagcugcuugggcuucauc

SEQ ID NO: 1170657 - RNA, 21 nt, Human
cagcugcuugggcuucauccu

SEQ ID NO: 1170658 - RNA, 22 nt, Human
cagcugcuugggcuucauccuc

SEQ ID NO: 1170659 - RNA, 18 nt, Human
cagcugccugggaucccu

SEQ ID NO: 1170660 - RNA, 23 nt, Human
cagcugccugggaucccucaucc

SEQ ID NO: 1170661 - RNA, 18 nt, Human
cagcugcgguccacccag

SEQ ID NO: 1170662 - RNA, 19 nt, Human
cagcugcgguccacccagg

SEQ ID NO: 1170663 - RNA, 20 nt, Human
cagcugcgguccacccagga

SEQ ID NO: 1170664 - RNA, 21 nt, Human
cagcugcgguccacccaggag

SEQ ID NO: 1170665 - RNA, 22 nt, Human
cagcugcgguccacccaggagc

SEQ ID NO: 1170666 - RNA, 23 nt, Human
cagcugcgguccacccaggagcc

SEQ ID NO: 1170667 - RNA, 24 nt, Human
cagcugcgguccacccaggagccc

SEQ ID NO: 1170668 - RNA, 22 nt, Human
cagcugcuuuugucuaugggac

SEQ ID NO: 1170669 - RNA, 18 nt, Human
cagcugguugagguuuca

SEQ ID NO: 1170670 - RNA, 18 nt, Human
cagcuguaugauucccag

SEQ ID NO: 1170671 - RNA, 21 nt, Human
cagcugggguggggaccucag

SEQ ID NO: 1170672 - RNA, 22 nt, Human
cagcugggguggggaccucagg

SEQ ID NO: 1170673 - RNA, 23 nt, Human
cagcugggguggggaccucaggc

SEQ ID NO: 1170674 - RNA, 13 nt, Human
cagcucagagagg

SEQ ID NO: 1170675 - RNA, 17 nt, Human
cagcucagagagggugg

SEQ ID NO: 1170676 - RNA, 19 nt, Human
cagcucagagaggguggga

SEQ ID NO: 1170677 - RNA, 20 nt, Human
cagcucagagagggugggag

SEQ ID NO: 1170678 - RNA, 16 nt, Human
cagcuccuucuguccu

SEQ ID NO: 1170679 - RNA, 17 nt, Human
cagcuccuucuguccua

SEQ ID NO: 1170680 - RNA, 21 nt, Human
cagcuccuucuguccuacucu

SEQ ID NO: 1170681 - RNA, 23 nt, Human
cagcuccuucuguccuacucugu

SEQ ID NO: 1170682 - RNA, 15 nt, Human
cagcucugcaagaau

SEQ ID NO: 1170683 - RNA, 16 nt, Human
cagcucugcaagaauu

SEQ ID NO: 1170684 - RNA, 21 nt, Human
cagcucugcaagaauugaagc

SEQ ID NO: 1170685 - RNA, 20 nt, Human
cagcucugcauacucauuag

SEQ ID NO: 1170686 - RNA, 10 nt, Human
cagcucuggu

SEQ ID NO: 1170687 - RNA, 13 nt, Human
cagcucuggucca

SEQ ID NO: 1170688 - RNA, 16 nt, Human
cagcucugguccauag

SEQ ID NO: 1170689 - RNA, 17 nt, Human
cagcucugguccauaga

SEQ ID NO: 1170690 - RNA, 18 nt, Human
cagcucugguccauagag

SEQ ID NO: 1170691 - RNA, 21 nt, Human
cagcucugguccauagagagc

SEQ ID NO: 1170692 - RNA, 22 nt, Human
cagcucugguccauagagagca

SEQ ID NO: 1170693 - RNA, 23 nt, Human
cagcucugguccauagagagcaa

SEQ ID NO: 1170694 - RNA, 12 nt, Human
cagcucuguccu

SEQ ID NO: 1170695 - RNA, 13 nt, Human
cagcucuguccug

SEQ ID NO: 1170696 - RNA, 14 nt, Human
cagcucuguccugg

SEQ ID NO: 1170697 - RNA, 16 nt, Human
cagcucuguccuggga

SEQ ID NO: 1170698 - RNA, 17 nt, Human
cagcucuguccugggag

SEQ ID NO: 1170699 - RNA, 18 nt, Human
cagcucuguccugggagu

SEQ ID NO: 1170700 - RNA, 23 nt, Human
cagcucuguccugggagugagcu

SEQ ID NO: 1170701 - RNA, 10 nt, Human
cagcucuuau

SEQ ID NO: 1170702 - RNA, 21 nt, Human
cagcucuuauauugccauuuc

SEQ ID NO: 1170703 - RNA, 13 nt, Human
cagcucuucucca

SEQ ID NO: 1170704 - RNA, 14 nt, Human
cagcucuucuccag

SEQ ID NO: 1170705 - RNA, 15 nt, Human
cagcucuucuccagg

SEQ ID NO: 1170706 - RNA, 16 nt, Human
cagcucuucuccaggc

SEQ ID NO: 1170707 - RNA, 17 nt, Human
cagcucuucuccaggcu

SEQ ID NO: 1170708 - RNA, 18 nt, Human
cagcucuucuccaggcug

SEQ ID NO: 1170709 - RNA, 19 nt, Human
cagcucuucuccaggcugu

SEQ ID NO: 1170710 - RNA, 23 nt, Human
cagcucuucuccaggcuguaucc

SEQ ID NO: 1170711 - RNA, 23 nt, Human
cagcuuuccucaaaacuucagac

SEQ ID NO: 1170712 - RNA, 18 nt, Human
cagcuuguaaauagcuca

SEQ ID NO: 1170713 - RNA, 19 nt, Human
cagcuuguaaauagcucag

SEQ ID NO: 1170714 - RNA, 20 nt, Human
cagcuuguaaauagcucagg

SEQ ID NO: 1170715 - RNA, 21 nt, Human
cagcuuguaaauagcucaggu

SEQ ID NO: 1170716 - RNA, 22 nt, Human
cagcuuguaaauagcucaggug

SEQ ID NO: 1170717 - RNA, 12 nt, Human
cagcuuuguuug

SEQ ID NO: 1170718 - RNA, 21 nt, Human
cagcuuuguuuguugucagcu

SEQ ID NO: 1170719 - RNA, 22 nt, Human
cagcuuuguuuguugucagcug

SEQ ID NO: 1170720 - RNA, 23 nt, Human
cagcuuuguuuguugucagcuga

SEQ ID NO: 1170721 - RNA, 18 nt, Human
caggaaccacaagacugc

SEQ ID NO: 1170722 - RNA, 19 nt, Human
cagcuguaugauucccagc

SEQ ID NO: 1170723 - RNA, 20 nt, Human
cagcuucauuuccugugucu

SEQ ID NO: 1170724 - RNA, 21 nt, Human
cagcuucauuuccugugucuu

SEQ ID NO: 1170725 - RNA, 18 nt, Human
cagcuugaccgugaggcc

SEQ ID NO: 1170726 - RNA, 19 nt, Human
cagcuugaccgugaggcca

SEQ ID NO: 1170727 - RNA, 20 nt, Human
cagcuugaccgugaggccag

SEQ ID NO: 1170728 - RNA, 21 nt, Human
cagcuugaccgugaggccaga

SEQ ID NO: 1170729 - RNA, 14 nt, Human
cagcuugaggguug

SEQ ID NO: 1170730 - RNA, 15 nt, Human
cagcuugaggguugg

SEQ ID NO: 1170731 - RNA, 18 nt, Human
cagcuugaggguugggcu

SEQ ID NO: 1170732 - RNA, 19 nt, Human
cagcuugaggguugggcug

SEQ ID NO: 1170733 - RNA, 20 nt, Human
cagcuugaggguugggcugg

SEQ ID NO: 1170734 - RNA, 21 nt, Human
cagcuugaggguugggcuggu

SEQ ID NO: 1170735 - RNA, 14 nt, Human
caggaagccagcag

SEQ ID NO: 1170736 - RNA, 16 nt, Human
caggaagccagcaggc

SEQ ID NO: 1170737 - RNA, 17 nt, Human
caggaagccagcaggcu

SEQ ID NO: 1170738 - RNA, 18 nt, Human
caggaagccagcaggcuc

SEQ ID NO: 1170739 - RNA, 19 nt, Human
caggaagccagcaggcucu

SEQ ID NO: 1170740 - RNA, 21 nt, Human
caggaagccagcaggcucuca

SEQ ID NO: 1170741 - RNA, 22 nt, Human
caggaagccagcaggcucucag

SEQ ID NO: 1170742 - RNA, 13 nt, Human
caggaagcucagg

SEQ ID NO: 1170743 - RNA, 14 nt, Human
caggaagcucaggg

SEQ ID NO: 1170744 - RNA, 15 nt, Human
caggaagcucagggc

SEQ ID NO: 1170745 - RNA, 16 nt, Human
caggaagcucagggcc

SEQ ID NO: 1170746 - RNA, 17 nt, Human
caggaagcucagggccu

SEQ ID NO: 1170747 - RNA, 18 nt, Human
caggaagcucagggccug

SEQ ID NO: 1170748 - RNA, 19 nt, Human
caggaagcucagggccugg

SEQ ID NO: 1170749 - RNA, 20 nt, Human
caggaagcucagggccuggc

SEQ ID NO: 1170750 - RNA, 21 nt, Human
caggaagcucagggccuggcu

SEQ ID NO: 1170751 - RNA, 23 nt, Human
caggaagcucagggccuggcuca

SEQ ID NO: 1170752 - RNA, 15 nt, Human
caggaaggcuaaagg

SEQ ID NO: 1170753 - RNA, 12 nt, Human
caggaaguacug

SEQ ID NO: 1170754 - RNA, 14 nt, Human
caggaaguacugga

SEQ ID NO: 1170755 - RNA, 16 nt, Human
caggaaguacuggaga

SEQ ID NO: 1170756 - RNA, 17 nt, Human
caggaaguacuggagaa

SEQ ID NO: 1170757 - RNA, 18 nt, Human
caggaaguacuggagaaa

SEQ ID NO: 1170758 - RNA, 20 nt, Human
caggaaguacuggagaaaau

SEQ ID NO: 1170759 - RNA, 15 nt, Human
caggaaguagaggag

SEQ ID NO: 1170760 - RNA, 16 nt, Human
caggaaguagaggagg

SEQ ID NO: 1170761 - RNA, 22 nt, Human
caggaagcucagggccuggcuc

SEQ ID NO: 1170762 - RNA, 12 nt, Human
caggagcagcca

SEQ ID NO: 1170763 - RNA, 13 nt, Human
caggagcagccac

SEQ ID NO: 1170764 - RNA, 14 nt, Human
caggagcagccaca

SEQ ID NO: 1170765 - RNA, 19 nt, Human
caggagcagccacauuccu

SEQ ID NO: 1170766 - RNA, 15 nt, Human
caggagccccgaggc

SEQ ID NO: 1170767 - RNA, 16 nt, Human
caggagccccgaggcc

SEQ ID NO: 1170768 - RNA, 18 nt, Human
caggagccccgaggccuu

SEQ ID NO: 1170769 - RNA, 20 nt, Human
caggagccccgaggccuucu

SEQ ID NO: 1170770 - RNA, 22 nt, Human
caggagccccgaggccuucucu

SEQ ID NO: 1170771 - RNA, 23 nt, Human
caggagccccgaggccuucucug

SEQ ID NO: 1170772 - RNA, 14 nt, Human
caggagccuccugc

SEQ ID NO: 1170773 - RNA, 17 nt, Human
caggagccuccugcccu

SEQ ID NO: 1170774 - RNA, 20 nt, Human
caggagccuccugcccuuac

SEQ ID NO: 1170775 - RNA, 12 nt, Human
caggagugagca

SEQ ID NO: 1170776 - RNA, 21 nt, Human
caggaguuugagaccaaccug

SEQ ID NO: 1170777 - RNA, 22 nt, Human
caggaguuugagaccaaccugg

SEQ ID NO: 1170778 - RNA, 23 nt, Human
caggaguuugagaccaaccuggg

SEQ ID NO: 1170779 - RNA, 17 nt, Human
caggauucuuccucccu

SEQ ID NO: 1170780 - RNA, 18 nt, Human
caggauucuuccucccuc

SEQ ID NO: 1170781 - RNA, 21 nt, Human
caggaugguucccuugaugaa

SEQ ID NO: 1170782 - RNA, 23 nt, Human
caggaugguucccuugaugaaga

SEQ ID NO: 1170783 - RNA, 23 nt, Human
caggauggccgggcgcgguggcu

SEQ ID NO: 1170784 - RNA, 13 nt, Human
caggaucagucug

SEQ ID NO: 1170785 - RNA, 14 nt, Human
caggaucagucuga

SEQ ID NO: 1170786 - RNA, 16 nt, Human
caggcagccaggccac

SEQ ID NO: 1170787 - RNA, 17 nt, Human
caggcagccaggccaca

SEQ ID NO: 1170788 - RNA, 13 nt, Human
caggcagguccag

SEQ ID NO: 1170789 - RNA, 20 nt, Human
caggauucuuccucccuccc

SEQ ID NO: 1170790 - RNA, 14 nt, Human
caggcaagcaccuc

SEQ ID NO: 1170791 - RNA, 15 nt, Human
caggcaagcaccucc

SEQ ID NO: 1170792 - RNA, 16 nt, Human
caggcaagcaccuccu

SEQ ID NO: 1170793 - RNA, 21 nt, Human
caggcaagcaccuccugccuc

SEQ ID NO: 1170794 - RNA, 14 nt, Human
caggcaaugcuggc

SEQ ID NO: 1170795 - RNA, 14 nt, Human
caggcagccaggcc

SEQ ID NO: 1170796 - RNA, 15 nt, Human
caggcagccaggcca

SEQ ID NO: 1170797 - RNA, 14 nt, Human
caggcagguccagg

SEQ ID NO: 1170798 - RNA, 15 nt, Human
caggcagguccaggg

SEQ ID NO: 1170799 - RNA, 19 nt, Human
caggcagguccaggguuug

SEQ ID NO: 1170800 - RNA, 12 nt, Human
caggcaggucuu

SEQ ID NO: 1170801 - RNA, 13 nt, Human
caggcaggucuug

SEQ ID NO: 1170802 - RNA, 22 nt, Human
caggcaggucuugaacuccugg

SEQ ID NO: 1170803 - RNA, 23 nt, Human
caggcaggucuugaacuccuggc

SEQ ID NO: 1170804 - RNA, 15 nt, Human
caggcaggugggaug

SEQ ID NO: 1170805 - RNA, 17 nt, Human
caggcaugguggcccac

SEQ ID NO: 1170806 - RNA, 15 nt, Human
caggcauguucucug

SEQ ID NO: 1170807 - RNA, 18 nt, Human
caggcauguucucugagg

SEQ ID NO: 1170808 - RNA, 19 nt, Human
caggcauguucucugagga

SEQ ID NO: 1170809 - RNA, 20 nt, Human
caggcauguucucugaggac

SEQ ID NO: 1170810 - RNA, 13 nt, Human
caggcauucccca

SEQ ID NO: 1170811 - RNA, 15 nt, Human
caggcauuccccagg

SEQ ID NO: 1170812 - RNA, 16 nt, Human
caggcauuccccagga

SEQ ID NO: 1170813 - RNA, 17 nt, Human
caggcauuccccaggag

SEQ ID NO: 1170814 - RNA, 18 nt, Human
caggcauuccccaggagg

SEQ ID NO: 1170815 - RNA, 19 nt, Human
caggcauuccccaggaggc

SEQ ID NO: 1170816 - RNA, 20 nt, Human
caggcauuccccaggaggcc

SEQ ID NO: 1170817 - RNA, 21 nt, Human
caggcauuccccaggaggcca

SEQ ID NO: 1170818 - RNA, 22 nt, Human
caggcauuccccaggaggccag

SEQ ID NO: 1170819 - RNA, 23 nt, Human
caggcauuccccaggaggccagc

SEQ ID NO: 1170820 - RNA, 24 nt, Human
caggcauuccccaggaggccagcc

SEQ ID NO: 1170821 - RNA, 20 nt, Human
caggccacaagacccuugug

SEQ ID NO: 1170822 - RNA, 21 nt, Human
caggccaggcccucugcccac

SEQ ID NO: 1170823 - RNA, 22 nt, Human
caggccaggcccucugcccacu

SEQ ID NO: 1170824 - RNA, 18 nt, Human
caggccaaacucaccugc

SEQ ID NO: 1170825 - RNA, 23 nt, Human
caggccaaacucaccugccccuc

SEQ ID NO: 1170826 - RNA, 13 nt, Human
caggccacaagac

SEQ ID NO: 1170827 - RNA, 17 nt, Human
caggccacaagacccuu

SEQ ID NO: 1170828 - RNA, 18 nt, Human
caggccacaagacccuug

SEQ ID NO: 1170829 - RNA, 13 nt, Human
caggccccugcca

SEQ ID NO: 1170830 - RNA, 15 nt, Human
caggccccugccacc

SEQ ID NO: 1170831 - RNA, 17 nt, Human
caggccccugccacccu

SEQ ID NO: 1170832 - RNA, 19 nt, Human
caggccccugccacccugg

SEQ ID NO: 1170833 - RNA, 20 nt, Human
caggccccugccacccuggg

SEQ ID NO: 1170834 - RNA, 13 nt, Human
caggcccggcucc

SEQ ID NO: 1170835 - RNA, 14 nt, Human
caggcccggcucca

SEQ ID NO: 1170836 - RNA, 15 nt, Human
caggcccggcuccag

SEQ ID NO: 1170837 - RNA, 16 nt, Human
caggcccggcuccagg

SEQ ID NO: 1170838 - RNA, 16 nt, Human
caggcccucugcccac

SEQ ID NO: 1170839 - RNA, 17 nt, Human
caggcccucugcccacu

SEQ ID NO: 1170840 - RNA, 19 nt, Human
caggcccucugcccacucc

SEQ ID NO: 1170841 - RNA, 20 nt, Human
caggcccucugcccacuccc

SEQ ID NO: 1170842 - RNA, 21 nt, Human
caggcccucugcccacucccu

SEQ ID NO: 1170843 - RNA, 22 nt, Human
caggcccucugcccacucccug

SEQ ID NO: 1170844 - RNA, 17 nt, Human
caggcccggcuccaggc

SEQ ID NO: 1170845 - RNA, 18 nt, Human
caggcccggcuccaggcu

SEQ ID NO: 1170846 - RNA, 19 nt, Human
caggcccggcuccaggcuc

SEQ ID NO: 1170847 - RNA, 20 nt, Human
caggcccggcuccaggcucc

SEQ ID NO: 1170848 - RNA, 21 nt, Human
caggcccggcuccaggcuccu

SEQ ID NO: 1170849 - RNA, 22 nt, Human
caggcccggcuccaggcuccuu

SEQ ID NO: 1170850 - RNA, 13 nt, Human
caggcccucugcc

SEQ ID NO: 1170851 - RNA, 14 nt, Human
caggcccucugccc

SEQ ID NO: 1170852 - RNA, 15 nt, Human
caggcccucugccca

SEQ ID NO: 1170853 - RNA, 14 nt, Human
caggcuccuuuagc

SEQ ID NO: 1170854 - RNA, 19 nt, Human
caggcuccuuuagcgccca

SEQ ID NO: 1170855 - RNA, 20 nt, Human
caggcuccuuuagcgcccag

SEQ ID NO: 1170856 - RNA, 13 nt, Human
caggcuagaugua

SEQ ID NO: 1170857 - RNA, 19 nt, Human
caggcuagauguauguacu

SEQ ID NO: 1170858 - RNA, 21 nt, Human
caggcuccuuuagcgcccagu

SEQ ID NO: 1170859 - RNA, 20 nt, Human
caggcucgggcuccccagcc

SEQ ID NO: 1170860 - RNA, 12 nt, Human
caggcucucagg

SEQ ID NO: 1170861 - RNA, 13 nt, Human
caggcucucaggc

SEQ ID NO: 1170862 - RNA, 14 nt, Human
caggcucucaggcc

SEQ ID NO: 1170863 - RNA, 15 nt, Human
caggcucucaggcca

SEQ ID NO: 1170864 - RNA, 16 nt, Human
caggcucucaggccag

SEQ ID NO: 1170865 - RNA, 17 nt, Human
caggcucucaggccagc

SEQ ID NO: 1170866 - RNA, 18 nt, Human
caggcucucaggccagcu

SEQ ID NO: 1170867 - RNA, 19 nt, Human
caggcucucaggccagcug

SEQ ID NO: 1170868 - RNA, 20 nt, Human
caggcucucaggccagcugc

SEQ ID NO: 1170869 - RNA, 21 nt, Human
caggcucucaggccagcugcu

SEQ ID NO: 1170870 - RNA, 23 nt, Human
caggcucucaggccagcugcuug

SEQ ID NO: 1170871 - RNA, 19 nt, Human
caggcuggucucaaacucu

SEQ ID NO: 1170872 - RNA, 12 nt, Human
caggcuggucuc

SEQ ID NO: 1170873 - RNA, 14 nt, Human
caggcuguauccca

SEQ ID NO: 1170874 - RNA, 20 nt, Human
caggcuguaucccaugagcc

SEQ ID NO: 1170875 - RNA, 21 nt, Human
caggcuguaucccaugagccu

SEQ ID NO: 1170876 - RNA, 22 nt, Human
caggcuguaucccaugagccuc

SEQ ID NO: 1170877 - RNA, 23 nt, Human
caggcuguaucccaugagccuca

SEQ ID NO: 1170878 - RNA, 16 nt, Human
caggcuuagucacuga

SEQ ID NO: 1170879 - RNA, 17 nt, Human
caggcuuagucacugag

SEQ ID NO: 1170880 - RNA, 20 nt, Human
caggcuuagucacugagaca

SEQ ID NO: 1170881 - RNA, 21 nt, Human
caggcuuagucacugagacag

SEQ ID NO: 1170882 - RNA, 22 nt, Human
caggcuuagucacugagacagc

SEQ ID NO: 1170883 - RNA, 23 nt, Human
caggcuuagucacugagacagcc

SEQ ID NO: 1170884 - RNA, 16 nt, Human
cagggaaacagcuaau

SEQ ID NO: 1170885 - RNA, 13 nt, Human
cagggacagaggg

SEQ ID NO: 1170886 - RNA, 14 nt, Human
cagggacagagggg

SEQ ID NO: 1170887 - RNA, 20 nt, Human
cagggacagaggggguggcc

SEQ ID NO: 1170888 - RNA, 22 nt, Human
cagggaaacagcuaaugggaca

SEQ ID NO: 1170889 - RNA, 23 nt, Human
cagggacagaggggguggccucc

SEQ ID NO: 1170890 - RNA, 14 nt, Human
cagggcacaccggg

SEQ ID NO: 1170891 - RNA, 15 nt, Human
cagggcacaccgggc

SEQ ID NO: 1170892 - RNA, 17 nt, Human
cagggcacaccgggcac

SEQ ID NO: 1170893 - RNA, 19 nt, Human
cagggcacaccgggcacuc

SEQ ID NO: 1170894 - RNA, 21 nt, Human
cagggcacaccgggcacucag

SEQ ID NO: 1170895 - RNA, 22 nt, Human
cagggcacaccgggcacucaga

SEQ ID NO: 1170896 - RNA, 23 nt, Human
cagggcacaccgggcacucagaa

SEQ ID NO: 1170897 - RNA, 13 nt, Human
cagggccuggcuc

SEQ ID NO: 1170898 - RNA, 14 nt, Human
cagggccuggcuca

SEQ ID NO: 1170899 - RNA, 15 nt, Human
cagggccuggcucag

SEQ ID NO: 1170900 - RNA, 16 nt, Human
cagggccuggcucagg

SEQ ID NO: 1170901 - RNA, 19 nt, Human
cagggccuggcucaggugg

SEQ ID NO: 1170902 - RNA, 11 nt, Human
caggggacagg

SEQ ID NO: 1170903 - RNA, 16 nt, Human
caggggacaggauggu

SEQ ID NO: 1170904 - RNA, 19 nt, Human
caggggaggguagagcgga

SEQ ID NO: 1170905 - RNA, 20 nt, Human
cagguaacaggcagauacag

SEQ ID NO: 1170906 - RNA, 21 nt, Human
cagguaacaggcagauacagg

SEQ ID NO: 1170907 - RNA, 13 nt, Human
caggugagaagca

SEQ ID NO: 1170908 - RNA, 20 nt, Human
caggugagaagcagaggaag

SEQ ID NO: 1170909 - RNA, 21 nt, Human
caggugagaagcagaggaagg

SEQ ID NO: 1170910 - RNA, 18 nt, Human
caggucuugaacuccugg

SEQ ID NO: 1170911 - RNA, 19 nt, Human
caggucuugaacuccuggc

SEQ ID NO: 1170912 - RNA, 20 nt, Human
caggucuugaacuccuggcc

SEQ ID NO: 1170913 - RNA, 21 nt, Human
caggucuugaacuccuggccu

SEQ ID NO: 1170914 - RNA, 22 nt, Human
caggucuugaacuccuggccuc

SEQ ID NO: 1170915 - RNA, 23 nt, Human
caggucuugaacuccuggccuca

SEQ ID NO: 1170916 - RNA, 20 nt, Human
caggguauuccagagugggg

SEQ ID NO: 1170917 - RNA, 21 nt, Human
caggguauuccagagugggga

SEQ ID NO: 1170918 - RNA, 12 nt, Human
cagggucccugg

SEQ ID NO: 1170919 - RNA, 14 nt, Human
cagggucccuggug

SEQ ID NO: 1170920 - RNA, 15 nt, Human
cagggucccuggugg

SEQ ID NO: 1170921 - RNA, 18 nt, Human
cagggucccugguggcag

SEQ ID NO: 1170922 - RNA, 19 nt, Human
cagggucccugguggcagc

SEQ ID NO: 1170923 - RNA, 22 nt, Human
cagggucccugguggcagcuca

SEQ ID NO: 1170924 - RNA, 23 nt, Human
cagggucccugguggcagcucac

SEQ ID NO: 1170925 - RNA, 18 nt, Human
caggguccuguagcccua

SEQ ID NO: 1170926 - RNA, 21 nt, Human
cagggucucacuauguugccc

SEQ ID NO: 1170927 - RNA, 22 nt, Human
cagggucucacuauguugccca

SEQ ID NO: 1170928 - RNA, 23 nt, Human
cagggucucacuauguugcccag

SEQ ID NO: 1170929 - RNA, 15 nt, Human
cagggucucacucug

SEQ ID NO: 1170930 - RNA, 16 nt, Human
cagggucucacucugu

SEQ ID NO: 1170931 - RNA, 17 nt, Human
cagggucucacucuguc

SEQ ID NO: 1170932 - RNA, 16 nt, Human
caggguuuugccaugu

SEQ ID NO: 1170933 - RNA, 14 nt, Human
cagguaacaggcag

SEQ ID NO: 1170934 - RNA, 15 nt, Human
cagguaacaggcaga

SEQ ID NO: 1170935 - RNA, 16 nt, Human
cagguaacaggcagau

SEQ ID NO: 1170936 - RNA, 17 nt, Human
cagguaacaggcagaua

SEQ ID NO: 1170937 - RNA, 14 nt, Human
caggggugggacac

SEQ ID NO: 1170938 - RNA, 15 nt, Human
caggggugggacacc

SEQ ID NO: 1170939 - RNA, 20 nt, Human
caggggugggacacccugug

SEQ ID NO: 1170940 - RNA, 21 nt, Human
caggggugggacacccuguga

SEQ ID NO: 1170941 - RNA, 16 nt, Human
caggugugagucacca

SEQ ID NO: 1170942 - RNA, 20 nt, Human
caggugugagucaccaagcc

SEQ ID NO: 1170943 - RNA, 21 nt, Human
caggugugagucaccaagccc

SEQ ID NO: 1170944 - RNA, 16 nt, Human
caggugugaaccacca

SEQ ID NO: 1170945 - RNA, 19 nt, Human
caggugugaaccaccacac

SEQ ID NO: 1170946 - RNA, 22 nt, Human
caggugugaaccaccacaccca

SEQ ID NO: 1170947 - RNA, 23 nt, Human
caggugugaaccaccacacccag

SEQ ID NO: 1170948 - RNA, 22 nt, Human
caggugugagucaccaagccca

SEQ ID NO: 1170949 - RNA, 23 nt, Human
caggugugagucaccaagcccag

SEQ ID NO: 1170950 - RNA, 16 nt, Human
caggugucccugcacu

SEQ ID NO: 1170951 - RNA, 15 nt, Human
caggugucccugcac

SEQ ID NO: 1170952 - RNA, 18 nt, Human
caggugucccugcacuug

SEQ ID NO: 1170953 - RNA, 19 nt, Human
caggugucccugcacuugc

SEQ ID NO: 1170954 - RNA, 12 nt, Human
caggugugaacc

SEQ ID NO: 1170955 - RNA, 12 nt, Human
caguaauaacuc

SEQ ID NO: 1170956 - RNA, 13 nt, Human
caguaauaacucu

SEQ ID NO: 1170957 - RNA, 12 nt, Human
cagguucagcuu

SEQ ID NO: 1170958 - RNA, 13 nt, Human
cagguucagcuug

SEQ ID NO: 1170959 - RNA, 21 nt, Human
caguaaaugggggugcauuug

SEQ ID NO: 1170960 - RNA, 22 nt, Human
caguaaaugggggugcauuuga

SEQ ID NO: 1170961 - RNA, 13 nt, Human
cagguggggcagc

SEQ ID NO: 1170962 - RNA, 14 nt, Human
cagguggggcagcu

SEQ ID NO: 1170963 - RNA, 15 nt, Human
cagguggggcagcuu

SEQ ID NO: 1170964 - RNA, 16 nt, Human
cagguggggcagcuug

SEQ ID NO: 1170965 - RNA, 17 nt, Human
cagguggggcagcuuga

SEQ ID NO: 1170966 - RNA, 18 nt, Human
cagguggggucacucugg

SEQ ID NO: 1170967 - RNA, 19 nt, Human
cagguggggucacucuggc

SEQ ID NO: 1170968 - RNA, 20 nt, Human
cagguggggucacucuggca

SEQ ID NO: 1170969 - RNA, 21 nt, Human
cagguggggucacucuggcag

SEQ ID NO: 1170970 - RNA, 22 nt, Human
cagguggggucacucuggcagc

SEQ ID NO: 1170971 - RNA, 23 nt, Human
cagguggggucacucuggcagcu

SEQ ID NO: 1170972 - RNA, 18 nt, Human
caggugguuauggagagg

SEQ ID NO: 1170973 - RNA, 20 nt, Human
caggugguuauggagagggu

SEQ ID NO: 1170974 - RNA, 11 nt, Human
caggugucccu

SEQ ID NO: 1170975 - RNA, 14 nt, Human
caggugucccugca

SEQ ID NO: 1170976 - RNA, 13 nt, Human
caguaucucaggg

SEQ ID NO: 1170977 - RNA, 15 nt, Human
caguaucucagggcc

SEQ ID NO: 1170978 - RNA, 12 nt, Human
caguaucuugaa

SEQ ID NO: 1170979 - RNA, 18 nt, Human
caguaucuugaagacuuu

SEQ ID NO: 1170980 - RNA, 21 nt, Human
caguaucuugaagacuuuucu

SEQ ID NO: 1170981 - RNA, 12 nt, Human
caguauggcagc

SEQ ID NO: 1170982 - RNA, 12 nt, Human
caguagugauag

SEQ ID NO: 1170983 - RNA, 16 nt, Human
caguauuacuucugcu

SEQ ID NO: 1170984 - RNA, 18 nt, Human
caguauuacuucugcuac

SEQ ID NO: 1170985 - RNA, 19 nt, Human
caguauuacuucugcuaca

SEQ ID NO: 1170986 - RNA, 15 nt, Human
cagucaggaaagaga

SEQ ID NO: 1170987 - RNA, 18 nt, Human
cagucaggaaagagaacu

SEQ ID NO: 1170988 - RNA, 22 nt, Human
cagucaggaaagagaacuucca

SEQ ID NO: 1170989 - RNA, 16 nt, Human
caguccauagcagaga

SEQ ID NO: 1170990 - RNA, 13 nt, Human
caguccaugaaga

SEQ ID NO: 1170991 - RNA, 12 nt, Human
cagucccugcca

SEQ ID NO: 1170992 - RNA, 13 nt, Human
cagucccugccaa

SEQ ID NO: 1170993 - RNA, 14 nt, Human
cagucccugccaau

SEQ ID NO: 1170994 - RNA, 15 nt, Human
cagucccugccaaug

SEQ ID NO: 1170995 - RNA, 16 nt, Human
cagucccugccaaugg

SEQ ID NO: 1170996 - RNA, 17 nt, Human
cagucccugccaaugga

SEQ ID NO: 1170997 - RNA, 12 nt, Human
caguccucccau

SEQ ID NO: 1170998 - RNA, 13 nt, Human
caguccucccauc

SEQ ID NO: 1170999 - RNA, 14 nt, Human
caguccucccaucu

SEQ ID NO: 1171000 - RNA, 15 nt, Human
caguccucccaucuc

SEQ ID NO: 1171001 - RNA, 17 nt, Human
cagugauuaccagggac

SEQ ID NO: 1171002 - RNA, 18 nt, Human
cagugauuaccagggacu

SEQ ID NO: 1171003 - RNA, 22 nt, Human
cagugauuaccagggacugagg

SEQ ID NO: 1171004 - RNA, 19 nt, Human
cagugagucgaggacaggg

SEQ ID NO: 1171005 - RNA, 20 nt, Human
cagugagucgaggacaggga

SEQ ID NO: 1171006 - RNA, 22 nt, Human
cagugagucgaggacagggagg

SEQ ID NO: 1171007 - RNA, 23 nt, Human
cagugagucgaggacagggaggu

SEQ ID NO: 1171008 - RNA, 15 nt, Human
cagugccgagaagga

SEQ ID NO: 1171009 - RNA, 18 nt, Human
cagugccgagaaggaagc

SEQ ID NO: 1171010 - RNA, 11 nt, Human
cagugccuuau

SEQ ID NO: 1171011 - RNA, 13 nt, Human
cagugccuuaugg

SEQ ID NO: 1171012 - RNA, 15 nt, Human
cagugccuuauggaa

SEQ ID NO: 1171013 - RNA, 16 nt, Human
cagugccuuauggaac

SEQ ID NO: 1171014 - RNA, 17 nt, Human
cagugccuuauggaaca

SEQ ID NO: 1171015 - RNA, 18 nt, Human
cagugccuuauggaacac

SEQ ID NO: 1171016 - RNA, 19 nt, Human
cagugccuuauggaacacu

SEQ ID NO: 1171017 - RNA, 20 nt, Human
cagugccuuauggaacacuc

SEQ ID NO: 1171018 - RNA, 21 nt, Human
cagugccuuauggaacacucu

SEQ ID NO: 1171019 - RNA, 22 nt, Human
cagugccuuauggaacacucug

SEQ ID NO: 1171020 - RNA, 20 nt, Human
cagugaaagaaaauaacaau

SEQ ID NO: 1171021 - RNA, 16 nt, Human
cagugaaagaaaauaa

SEQ ID NO: 1171022 - RNA, 19 nt, Human
cagucuggaaugcaguggu

SEQ ID NO: 1171023 - RNA, 16 nt, Human
caguccucccaucuca

SEQ ID NO: 1171024 - RNA, 17 nt, Human
caguccucccaucucac

SEQ ID NO: 1171025 - RNA, 15 nt, Human
caguccuuaccagca

SEQ ID NO: 1171026 - RNA, 18 nt, Human
caguccuuaccagcagag

SEQ ID NO: 1171027 - RNA, 19 nt, Human
caguccuuaccagcagagc

SEQ ID NO: 1171028 - RNA, 20 nt, Human
caguccuuaccagcagagca

SEQ ID NO: 1171029 - RNA, 21 nt, Human
caguccuuaccagcagagcac

SEQ ID NO: 1171030 - RNA, 15 nt, Human
cagugagacagcucu

SEQ ID NO: 1171031 - RNA, 24 nt, Human
cagugagccgagauugcaccacug

SEQ ID NO: 1171032 - RNA, 12 nt, Human
cagugaggcucu

SEQ ID NO: 1171033 - RNA, 13 nt, Human
cagugaggcucug

SEQ ID NO: 1171034 - RNA, 14 nt, Human
cagugaggcucugc

SEQ ID NO: 1171035 - RNA, 15 nt, Human
cagugaggcucugcc

SEQ ID NO: 1171036 - RNA, 16 nt, Human
cagugaggcucugccc

SEQ ID NO: 1171037 - RNA, 17 nt, Human
cagugaggcucugcccu

SEQ ID NO: 1171038 - RNA, 18 nt, Human
cagugaggcucugcccuu

SEQ ID NO: 1171039 - RNA, 19 nt, Human
cagugaggcucugcccuug

SEQ ID NO: 1171040 - RNA, 20 nt, Human
cagugaggcucugcccuugg

SEQ ID NO: 1171041 - RNA, 21 nt, Human
cagugaggcucugcccuuggu

SEQ ID NO: 1171042 - RNA, 17 nt, Human
cagugagucgaggacag

SEQ ID NO: 1171043 - RNA, 18 nt, Human
cagugagucgaggacagg

SEQ ID NO: 1171044 - RNA, 23 nt, Human
cagugccuuauggaacacucuga

SEQ ID NO: 1171045 - RNA, 13 nt, Human
cagugcuccagcc

SEQ ID NO: 1171046 - RNA, 13 nt, Human
cauauauaacaau

SEQ ID NO: 1171047 - RNA, 23 nt, Human
cauauaagauucauauuuacuuc

SEQ ID NO: 1171048 - RNA, 15 nt, Human
cauauauaacaaugc

SEQ ID NO: 1171049 - RNA, 20 nt, Human
cauauauaacaaugcuguau

SEQ ID NO: 1171050 - RNA, 15 nt, Human
cauaguaugguggcu

SEQ ID NO: 1171051 - RNA, 16 nt, Human
cauaguaugguggcug

SEQ ID NO: 1171052 - RNA, 17 nt, Human
cauaguaugguggcugg

SEQ ID NO: 1171053 - RNA, 22 nt, Human
cauauucuguuggccaguguga

SEQ ID NO: 1171054 - RNA, 17 nt, Human
cauauugauuuccguua

SEQ ID NO: 1171055 - RNA, 21 nt, Human
cauauugauuuccguuaaaau

SEQ ID NO: 1171056 - RNA, 14 nt, Human
caucaacaucuugg

SEQ ID NO: 1171057 - RNA, 14 nt, Human
cauccacugugcca

SEQ ID NO: 1171058 - RNA, 17 nt, Human
cauccacugugccaugu

SEQ ID NO: 1171059 - RNA, 23 nt, Human
cauccacugugccaugugccagg

SEQ ID NO: 1171060 - RNA, 15 nt, Human
caucccucuggggcu

SEQ ID NO: 1171061 - RNA, 18 nt, Human
caucccuuaccugggaaa

SEQ ID NO: 1171062 - RNA, 12 nt, Human
caucacccgcua

SEQ ID NO: 1171063 - RNA, 16 nt, Human
caucauccuaagcuau

SEQ ID NO: 1171064 - RNA, 13 nt, Human
caucaugucuggc

SEQ ID NO: 1171065 - RNA, 14 nt, Human
caucaugucuggcu

SEQ ID NO: 1171066 - RNA, 15 nt, Human
caucaugucuggcua

SEQ ID NO: 1171067 - RNA, 16 nt, Human
caucucuacaaaaagc

SEQ ID NO: 1171068 - RNA, 15 nt, Human
caucucuccuccuuu

SEQ ID NO: 1171069 - RNA, 16 nt, Human
caucuugaauuguaag

SEQ ID NO: 1171070 - RNA, 21 nt, Human
caucuugaauuguaaggaaug

SEQ ID NO: 1171071 - RNA, 16 nt, Human
caucuugcucugcuga

SEQ ID NO: 1171072 - RNA, 17 nt, Human
caucuugcucugcugac

SEQ ID NO: 1171073 - RNA, 19 nt, Human
caucuugcucugcugacag

SEQ ID NO: 1171074 - RNA, 18 nt, Human
caugaagauguagaggag

SEQ ID NO: 1171075 - RNA, 19 nt, Human
caugaagauguagaggaga

SEQ ID NO: 1171076 - RNA, 13 nt, Human
caugagcaucagg

SEQ ID NO: 1171077 - RNA, 15 nt, Human
caugagcaucaggcc

SEQ ID NO: 1171078 - RNA, 16 nt, Human
caugagcaucaggcca

SEQ ID NO: 1171079 - RNA, 17 nt, Human
caugagcaucaggccag

SEQ ID NO: 1171080 - RNA, 18 nt, Human
caugagcaucaggccagg

SEQ ID NO: 1171081 - RNA, 20 nt, Human
caugagcaucaggccaggcc

SEQ ID NO: 1171082 - RNA, 21 nt, Human
caugagcaucaggccaggccc

SEQ ID NO: 1171083 - RNA, 22 nt, Human
caugagcaucaggccaggcccu

SEQ ID NO: 1171084 - RNA, 23 nt, Human
caugagcaucaggccaggcccuc

SEQ ID NO: 1171085 - RNA, 12 nt, Human
caugagccucag

SEQ ID NO: 1171086 - RNA, 15 nt, Human
caugagccucagcau

SEQ ID NO: 1171087 - RNA, 17 nt, Human
caugagccucagcaucc

SEQ ID NO: 1171088 - RNA, 18 nt, Human
caugagccucagcauccu

SEQ ID NO: 1171089 - RNA, 19 nt, Human
caugagccucagcauccug

SEQ ID NO: 1171090 - RNA, 20 nt, Human
caugagccucagcauccugg

SEQ ID NO: 1171091 - RNA, 21 nt, Human
caugagccucagcauccuggc

SEQ ID NO: 1171092 - RNA, 22 nt, Human
caugagccucagcauccuggca

SEQ ID NO: 1171093 - RNA, 23 nt, Human
caugagccucagcauccuggcac

SEQ ID NO: 1171094 - RNA, 16 nt, Human
caugaggaacaaggca

SEQ ID NO: 1171095 - RNA, 17 nt, Human
caugaggaacaaggcaa

SEQ ID NO: 1171096 - RNA, 20 nt, Human
caugaggaacaaggcaaggc

SEQ ID NO: 1171097 - RNA, 21 nt, Human
caugaggaacaaggcaaggcu

SEQ ID NO: 1171098 - RNA, 23 nt, Human
caugaggaacaaggcaaggcugu

SEQ ID NO: 1171099 - RNA, 16 nt, Human
caugagguacugagag

SEQ ID NO: 1171100 - RNA, 19 nt, Human
caugagguacugagaguga

SEQ ID NO: 1171101 - RNA, 13 nt, Human
caugaguccccug

SEQ ID NO: 1171102 - RNA, 14 nt, Human
caugaguccccugu

SEQ ID NO: 1171103 - RNA, 15 nt, Human
caugaguccccuguu

SEQ ID NO: 1171104 - RNA, 23 nt, Human
caugaguccccuguuuguuucug

SEQ ID NO: 1171105 - RNA, 19 nt, Human
caugaaaacacauuuuucu

SEQ ID NO: 1171106 - RNA, 21 nt, Human
caugaaaacacauuuuucuua

SEQ ID NO: 1171107 - RNA, 13 nt, Human
caugaaaacacau

SEQ ID NO: 1171108 - RNA, 14 nt, Human
caugaaaacacauu

SEQ ID NO: 1171109 - RNA, 15 nt, Human
caugaaaacacauuu

SEQ ID NO: 1171110 - RNA, 16 nt, Human
caugaaaacacauuuu

SEQ ID NO: 1171111 - RNA, 17 nt, Human
caugaaaacacauuuuu

SEQ ID NO: 1171112 - RNA, 17 nt, Human
caugcgggcuuccuccu

SEQ ID NO: 1171113 - RNA, 13 nt, Human
caugcugucccuu

SEQ ID NO: 1171114 - RNA, 15 nt, Human
caugcugucccuuac

SEQ ID NO: 1171115 - RNA, 17 nt, Human
caugcugucccuuacgu

SEQ ID NO: 1171116 - RNA, 20 nt, Human
cauggaauuggagcucgugg

SEQ ID NO: 1171117 - RNA, 15 nt, Human
cauggacuuccacug

SEQ ID NO: 1171118 - RNA, 12 nt, Human
caugucuggcua

SEQ ID NO: 1171119 - RNA, 15 nt, Human
caugugaugagagga

SEQ ID NO: 1171120 - RNA, 16 nt, Human
caugugaugagaggaa

SEQ ID NO: 1171121 - RNA, 17 nt, Human
caugugaugagaggaaa

SEQ ID NO: 1171122 - RNA, 18 nt, Human
caugugaugagaggaaau

SEQ ID NO: 1171123 - RNA, 20 nt, Human
caugugaugagaggaaauca

SEQ ID NO: 1171124 - RNA, 21 nt, Human
caugugaugagaggaaaucac

SEQ ID NO: 1171125 - RNA, 14 nt, Human
caugugcacaugca

SEQ ID NO: 1171126 - RNA, 15 nt, Human
caugugcacaugcac

SEQ ID NO: 1171127 - RNA, 20 nt, Human
caugugcuaguaauuggaaa

SEQ ID NO: 1171128 - RNA, 23 nt, Human
cauggucggaaaacaugcuacac

SEQ ID NO: 1171129 - RNA, 19 nt, Human
cauggucggaaaacaugcu

SEQ ID NO: 1171130 - RNA, 12 nt, Human
cauguuugugau

SEQ ID NO: 1171131 - RNA, 14 nt, Human
cauguuugugauug

SEQ ID NO: 1171132 - RNA, 19 nt, Human
cauguuuuucuucucccuc

SEQ ID NO: 1171133 - RNA, 20 nt, Human
cauguuuuucuucucccuca

SEQ ID NO: 1171134 - RNA, 15 nt, Human
cauguuugugauuga

SEQ ID NO: 1171135 - RNA, 22 nt, Human
cauuccaacuaucucauuucca

SEQ ID NO: 1171136 - RNA, 20 nt, Human
cauuccccaggaggccagcc

SEQ ID NO: 1171137 - RNA, 18 nt, Human
cauuccccaggaggccag

SEQ ID NO: 1171138 - RNA, 19 nt, Human
cauuccccaggaggccagc

SEQ ID NO: 1171139 - RNA, 13 nt, Human
cauuccccaggag

SEQ ID NO: 1171140 - RNA, 15 nt, Human
cauuccccaggaggc

SEQ ID NO: 1171141 - RNA, 17 nt, Human
cauuccccaggaggcca

SEQ ID NO: 1171142 - RNA, 17 nt, Human
cauucuguuaaucauua

SEQ ID NO: 1171143 - RNA, 13 nt, Human
cauucuggaauaa

SEQ ID NO: 1171144 - RNA, 12 nt, Human
cauucugccugc

SEQ ID NO: 1171145 - RNA, 13 nt, Human
cauucugccugcc

SEQ ID NO: 1171146 - RNA, 15 nt, Human
cauucugccugccca

SEQ ID NO: 1171147 - RNA, 16 nt, Human
cauucugccugcccag

SEQ ID NO: 1171148 - RNA, 17 nt, Human
cauucugccugcccagg

SEQ ID NO: 1171149 - RNA, 18 nt, Human
cauucugccugcccaggc

SEQ ID NO: 1171150 - RNA, 19 nt, Human
cauucugccugcccaggcc

SEQ ID NO: 1171151 - RNA, 20 nt, Human
cauucugccugcccaggccc

SEQ ID NO: 1171152 - RNA, 14 nt, Human
cauuccugaugcuu

SEQ ID NO: 1171153 - RNA, 16 nt, Human
cauuccugaugcuucu

SEQ ID NO: 1171154 - RNA, 19 nt, Human
cauuccugaugcuucuuca

SEQ ID NO: 1171155 - RNA, 22 nt, Human
cauuccugaugcuucuucagag

SEQ ID NO: 1171156 - RNA, 23 nt, Human
cauuccugaugcuucuucagaga

SEQ ID NO: 1171157 - RNA, 12 nt, Human
cauuccuguucc

SEQ ID NO: 1171158 - RNA, 23 nt, Human
cauucuucuguacgucugacagg

SEQ ID NO: 1171159 - RNA, 17 nt, Human
cauuuuuaguagagaca

SEQ ID NO: 1171160 - RNA, 18 nt, Human
cauuuuuaguagagacag

SEQ ID NO: 1171161 - RNA, 16 nt, Human
ccaaacccuucagugc

SEQ ID NO: 1171162 - RNA, 23 nt, Human
cauuuuauuuuauuaugcaugaa

SEQ ID NO: 1171163 - RNA, 15 nt, Human
cauugaccugaggcc

SEQ ID NO: 1171164 - RNA, 17 nt, Human
cauugaccugaggcccu

SEQ ID NO: 1171165 - RNA, 18 nt, Human
cauugaccugaggcccuu

SEQ ID NO: 1171166 - RNA, 15 nt, Human
cauugugggaagggg

SEQ ID NO: 1171167 - RNA, 15 nt, Human
cauuuaaaaaaaauc

SEQ ID NO: 1171168 - RNA, 17 nt, Human
cauuugaaaauuuugau

SEQ ID NO: 1171169 - RNA, 19 nt, Human
cauuugaaaauuuugaugu

SEQ ID NO: 1171170 - RNA, 20 nt, Human
cauuugaaaauuuugauguu

SEQ ID NO: 1171171 - RNA, 13 nt, Human
ccacacccagccc

SEQ ID NO: 1171172 - RNA, 14 nt, Human
ccacacccagccca

SEQ ID NO: 1171173 - RNA, 15 nt, Human
ccacacccagcccac

SEQ ID NO: 1171174 - RNA, 18 nt, Human
ccacacacacagaaaaua

SEQ ID NO: 1171175 - RNA, 19 nt, Human
ccacacacacagaaaauau

SEQ ID NO: 1171176 - RNA, 20 nt, Human
ccacacacacagaaaauaua

SEQ ID NO: 1171177 - RNA, 21 nt, Human
ccacacacacagaaaauauac

SEQ ID NO: 1171178 - RNA, 22 nt, Human
ccacacacacagaaaauauacu

SEQ ID NO: 1171179 - RNA, 23 nt, Human
ccacacacacagaaaauauacug

SEQ ID NO: 1171180 - RNA, 12 nt, Human
ccacacccagcc

SEQ ID NO: 1171181 - RNA, 14 nt, Human
ccacaucuugcucu

SEQ ID NO: 1171182 - RNA, 16 nt, Human
ccacaucuugcucugc

SEQ ID NO: 1171183 - RNA, 17 nt, Human
ccacaucuugcucugcu

SEQ ID NO: 1171184 - RNA, 22 nt, Human
ccacaucuugcucugcugacag

SEQ ID NO: 1171185 - RNA, 23 nt, Human
ccacaucuugcucugcugacaga

SEQ ID NO: 1171186 - RNA, 14 nt, Human
ccaccaacauacuc

SEQ ID NO: 1171187 - RNA, 18 nt, Human
ccaccaacauacucccau

SEQ ID NO: 1171188 - RNA, 20 nt, Human
ccaccaacauacucccaucu

SEQ ID NO: 1171189 - RNA, 21 nt, Human
ccaccaacauacucccaucug

SEQ ID NO: 1171190 - RNA, 14 nt, Human
ccaccacacccagc

SEQ ID NO: 1171191 - RNA, 16 nt, Human
ccaccacacccagccc

SEQ ID NO: 1171192 - RNA, 17 nt, Human
ccaccacacccagccca

SEQ ID NO: 1171193 - RNA, 16 nt, Human
ccacccaagggccugg

SEQ ID NO: 1171194 - RNA, 17 nt, Human
ccacccaagggccuggc

SEQ ID NO: 1171195 - RNA, 19 nt, Human
ccacccaagggccuggccu

SEQ ID NO: 1171196 - RNA, 20 nt, Human
ccacccaagggccuggccug

SEQ ID NO: 1171197 - RNA, 21 nt, Human
ccacccaagggccuggccuga

SEQ ID NO: 1171198 - RNA, 22 nt, Human
ccacccaagggccuggccugag

SEQ ID NO: 1171199 - RNA, 13 nt, Human
ccacccaccucag

SEQ ID NO: 1171200 - RNA, 14 nt, Human
ccacccaccucagc

SEQ ID NO: 1171201 - RNA, 15 nt, Human
ccacccaccucagcc

SEQ ID NO: 1171202 - RNA, 16 nt, Human
ccacccaccucagccu

SEQ ID NO: 1171203 - RNA, 21 nt, Human
ccacccaggagccccgaggcc

SEQ ID NO: 1171204 - RNA, 12 nt, Human
ccaccugccagg

SEQ ID NO: 1171205 - RNA, 17 nt, Human
ccaccugccuguugggc

SEQ ID NO: 1171206 - RNA, 20 nt, Human
ccaccugccuguugggccag

SEQ ID NO: 1171207 - RNA, 17 nt, Human
ccaccucccacaaagga

SEQ ID NO: 1171208 - RNA, 22 nt, Human
ccaccugcggugcuaucucccc

SEQ ID NO: 1171209 - RNA, 15 nt, Human
ccaccuggccucugc

SEQ ID NO: 1171210 - RNA, 16 nt, Human
ccaccuggccucugca

SEQ ID NO: 1171211 - RNA, 17 nt, Human
ccaccuggccucugcac

SEQ ID NO: 1171212 - RNA, 18 nt, Human
ccaccuggccucugcacu

SEQ ID NO: 1171213 - RNA, 12 nt, Human
ccacggccaggc

SEQ ID NO: 1171214 - RNA, 13 nt, Human
ccacggccaggcc

SEQ ID NO: 1171215 - RNA, 14 nt, Human
ccacggccaggcca

SEQ ID NO: 1171216 - RNA, 15 nt, Human
ccacggccaggccag

SEQ ID NO: 1171217 - RNA, 16 nt, Human
ccacggccaggccaga

SEQ ID NO: 1171218 - RNA, 12 nt, Human
ccacccaggagc

SEQ ID NO: 1171219 - RNA, 14 nt, Human
ccacccaggagccc

SEQ ID NO: 1171220 - RNA, 19 nt, Human
ccaccccucaacaccucug

SEQ ID NO: 1171221 - RNA, 16 nt, Human
ccacccugaaagcccu

SEQ ID NO: 1171222 - RNA, 17 nt, Human
ccacccugaaagcccug

SEQ ID NO: 1171223 - RNA, 18 nt, Human
ccacccugaaagcccuga

SEQ ID NO: 1171224 - RNA, 12 nt, Human
ccaccucagccu

SEQ ID NO: 1171225 - RNA, 13 nt, Human
ccaccucagccuc

SEQ ID NO: 1171226 - RNA, 14 nt, Human
ccaccucagccucc

SEQ ID NO: 1171227 - RNA, 15 nt, Human
ccaccucagccuccc

SEQ ID NO: 1171228 - RNA, 12 nt, Human
ccacucccugca

SEQ ID NO: 1171229 - RNA, 13 nt, Human
ccacucccugcaa

SEQ ID NO: 1171230 - RNA, 18 nt, Human
ccacuacauucuguuaau

SEQ ID NO: 1171231 - RNA, 22 nt, Human
ccacuacggaauaguuggcuag

SEQ ID NO: 1171232 - RNA, 23 nt, Human
ccacuacggaauaguuggcuagg

SEQ ID NO: 1171233 - RNA, 16 nt, Human
ccacugcgaccacaag

SEQ ID NO: 1171234 - RNA, 11 nt, Human
ccacugcucug

SEQ ID NO: 1171235 - RNA, 15 nt, Human
ccacucccugcaacc

SEQ ID NO: 1171236 - RNA, 17 nt, Human
ccacucccugcaaccug

SEQ ID NO: 1171237 - RNA, 19 nt, Human
ccacugcacuccagccugg

SEQ ID NO: 1171238 - RNA, 20 nt, Human
ccacugcacuccagccuggg

SEQ ID NO: 1171239 - RNA, 23 nt, Human
ccacugcacuccagccuggguga

SEQ ID NO: 1171240 - RNA, 13 nt, Human
ccacguuucuaaa

SEQ ID NO: 1171241 - RNA, 16 nt, Human
ccagcaagugagagcu

SEQ ID NO: 1171242 - RNA, 21 nt, Human
ccagcaagugagagcugggug

SEQ ID NO: 1171243 - RNA, 22 nt, Human
ccagcaagugagagcugggugu

SEQ ID NO: 1171244 - RNA, 15 nt, Human
ccagauuucacucuc

SEQ ID NO: 1171245 - RNA, 14 nt, Human
ccagauuucacucu

SEQ ID NO: 1171246 - RNA, 15 nt, Human
ccagcaagugagagc

SEQ ID NO: 1171247 - RNA, 16 nt, Human
ccagcccuuagcaggg

SEQ ID NO: 1171248 - RNA, 17 nt, Human
ccagcccuuagcaggga

SEQ ID NO: 1171249 - RNA, 16 nt, Human
ccagccccagugccca

SEQ ID NO: 1171250 - RNA, 23 nt, Human
ccagccccaaaacucuccucugc

SEQ ID NO: 1171251 - RNA, 13 nt, Human
ccagccccagugc

SEQ ID NO: 1171252 - RNA, 15 nt, Human
ccagccccagugccc

SEQ ID NO: 1171253 - RNA, 14 nt, Human
ccagccgccaugcu

SEQ ID NO: 1171254 - RNA, 18 nt, Human
ccagccgccaugcuccug

SEQ ID NO: 1171255 - RNA, 19 nt, Human
ccagccgccaugcuccugg

SEQ ID NO: 1171256 - RNA, 15 nt, Human
ccagccaaagccucc

SEQ ID NO: 1171257 - RNA, 18 nt, Human
ccagccaaagccuccucc

SEQ ID NO: 1171258 - RNA, 19 nt, Human
ccagccaaagccuccucca

SEQ ID NO: 1171259 - RNA, 17 nt, Human
ccagacaccuugacagg

SEQ ID NO: 1171260 - RNA, 19 nt, Human
ccagacaccuugacagggc

SEQ ID NO: 1171261 - RNA, 20 nt, Human
ccagacaccuugacagggca

SEQ ID NO: 1171262 - RNA, 14 nt, Human
ccagagaggguggu

SEQ ID NO: 1171263 - RNA, 21 nt, Human
ccagagaggguggugaccucu

SEQ ID NO: 1171264 - RNA, 23 nt, Human
ccagagaggguggugaccucugc

SEQ ID NO: 1171265 - RNA, 11 nt, Human
ccagagcugcc

SEQ ID NO: 1171266 - RNA, 12 nt, Human
ccagagcugcca

SEQ ID NO: 1171267 - RNA, 13 nt, Human
ccagagcugccac

SEQ ID NO: 1171268 - RNA, 14 nt, Human
ccagagcugccacc

SEQ ID NO: 1171269 - RNA, 15 nt, Human
ccagagcugccaccu

SEQ ID NO: 1171270 - RNA, 16 nt, Human
ccagagcugccaccug

SEQ ID NO: 1171271 - RNA, 19 nt, Human
ccagagcugccaccugccu

SEQ ID NO: 1171272 - RNA, 21 nt, Human
ccagaggagagaggacccccu

SEQ ID NO: 1171273 - RNA, 22 nt, Human
ccagaggagagaggacccccug

SEQ ID NO: 1171274 - RNA, 16 nt, Human
ccagagggagugacag

SEQ ID NO: 1171275 - RNA, 17 nt, Human
ccagagggagugacaga

SEQ ID NO: 1171276 - RNA, 18 nt, Human
ccagagggagugacagag

SEQ ID NO: 1171277 - RNA, 19 nt, Human
ccagagggagugacagagg

SEQ ID NO: 1171278 - RNA, 20 nt, Human
ccagagggagugacagaggc

SEQ ID NO: 1171279 - RNA, 21 nt, Human
ccagagggagugacagaggca

SEQ ID NO: 1171280 - RNA, 22 nt, Human
ccagagggagugacagaggcag

SEQ ID NO: 1171281 - RNA, 23 nt, Human
ccagagggagugacagaggcagc

SEQ ID NO: 1171282 - RNA, 13 nt, Human
ccagagggccugc

SEQ ID NO: 1171283 - RNA, 15 nt, Human
ccagagggccugcaa

SEQ ID NO: 1171284 - RNA, 16 nt, Human
ccagagggccugcaag

SEQ ID NO: 1171285 - RNA, 18 nt, Human
ccagauucuuuccugagg

SEQ ID NO: 1171286 - RNA, 19 nt, Human
ccagauucuuuccugaggc

SEQ ID NO: 1171287 - RNA, 20 nt, Human
ccagauucuuuccugaggcu

SEQ ID NO: 1171288 - RNA, 21 nt, Human
ccagauucuuuccugaggcug

SEQ ID NO: 1171289 - RNA, 22 nt, Human
ccagauucuuuccugaggcugg

SEQ ID NO: 1171290 - RNA, 23 nt, Human
ccagauucuuuccugaggcuggg

SEQ ID NO: 1171291 - RNA, 19 nt, Human
ccagauugcaacaggcugg

SEQ ID NO: 1171292 - RNA, 20 nt, Human
ccagauugcaacaggcuggg

SEQ ID NO: 1171293 - RNA, 21 nt, Human
ccagauugcaacaggcugggc

SEQ ID NO: 1171294 - RNA, 12 nt, Human
ccagauuucacu

SEQ ID NO: 1171295 - RNA, 17 nt, Human
ccaggcuuagucacuga

SEQ ID NO: 1171296 - RNA, 21 nt, Human
ccaggcccucugcccacuccc

SEQ ID NO: 1171297 - RNA, 22 nt, Human
ccaggcccucugcccacucccu

SEQ ID NO: 1171298 - RNA, 23 nt, Human
ccaggcccucugcccacucccug

SEQ ID NO: 1171299 - RNA, 19 nt, Human
ccaggagccccgaggccuu

SEQ ID NO: 1171300 - RNA, 20 nt, Human
ccaggagccccgaggccuuc

SEQ ID NO: 1171301 - RNA, 12 nt, Human
ccaggagccucc

SEQ ID NO: 1171302 - RNA, 18 nt, Human
ccaggcauuccccaggag

SEQ ID NO: 1171303 - RNA, 19 nt, Human
ccaggcauuccccaggagg

SEQ ID NO: 1171304 - RNA, 21 nt, Human
ccaggcauuccccaggaggcc

SEQ ID NO: 1171305 - RNA, 22 nt, Human
ccaggcauuccccaggaggcca

SEQ ID NO: 1171306 - RNA, 19 nt, Human
ccaggugcacaagcuccaa

SEQ ID NO: 1171307 - RNA, 20 nt, Human
ccaggugcacaagcuccaag

SEQ ID NO: 1171308 - RNA, 24 nt, Human
ccaggugcacaagcuccaagcucc

SEQ ID NO: 1171309 - RNA, 17 nt, Human
ccagguuuuuggucuga

SEQ ID NO: 1171310 - RNA, 18 nt, Human
ccagucuggaaugcagug

SEQ ID NO: 1171311 - RNA, 19 nt, Human
ccagucuggaaugcagugg

SEQ ID NO: 1171312 - RNA, 20 nt, Human
ccagucuggaaugcaguggu

SEQ ID NO: 1171313 - RNA, 22 nt, Human
ccagggacagaggggguggccu

SEQ ID NO: 1171314 - RNA, 20 nt, Human
ccaggcuuagucacugagac

SEQ ID NO: 1171315 - RNA, 15 nt, Human
ccagggacagagggg

SEQ ID NO: 1171316 - RNA, 21 nt, Human
ccagggacagaggggguggcc

SEQ ID NO: 1171317 - RNA, 23 nt, Human
ccauauucuguuggccaguguga

SEQ ID NO: 1171318 - RNA, 22 nt, Human
ccaguguuguggauuuaacaga

SEQ ID NO: 1171319 - RNA, 17 nt, Human
ccagugaggcucugccc

SEQ ID NO: 1171320 - RNA, 14 nt, Human
ccagugaggcucug

SEQ ID NO: 1171321 - RNA, 15 nt, Human
ccagugaggcucugc

SEQ ID NO: 1171322 - RNA, 16 nt, Human
ccagugaggcucugcc

SEQ ID NO: 1171323 - RNA, 20 nt, Human
ccagugccgagaaggaagcc

SEQ ID NO: 1171324 - RNA, 13 nt, Human
ccaucuacccucc

SEQ ID NO: 1171325 - RNA, 18 nt, Human
ccauguuggccaggcugg

SEQ ID NO: 1171326 - RNA, 17 nt, Human
ccauguuggccaggcug

SEQ ID NO: 1171327 - RNA, 16 nt, Human
ccaugggacagggagg

SEQ ID NO: 1171328 - RNA, 19 nt, Human
ccaugggacagggaggacg

SEQ ID NO: 1171329 - RNA, 16 nt, Human
cccaaagugcugggau

SEQ ID NO: 1171330 - RNA, 18 nt, Human
cccaaauggaaaugggca

SEQ ID NO: 1171331 - RNA, 22 nt, Human
cccaaauggaaaugggcagagc

SEQ ID NO: 1171332 - RNA, 23 nt, Human
cccaaauggaaaugggcagagca

SEQ ID NO: 1171333 - RNA, 14 nt, Human
ccauuuguguuuau

SEQ ID NO: 1171334 - RNA, 19 nt, Human
ccauucuccaccugccagg

SEQ ID NO: 1171335 - RNA, 20 nt, Human
ccauucuccaccugccaggg

SEQ ID NO: 1171336 - RNA, 16 nt, Human
cccaaaacucuccucu

SEQ ID NO: 1171337 - RNA, 18 nt, Human
cccaaaacucuccucugc

SEQ ID NO: 1171338 - RNA, 20 nt, Human
cccaaaacucuccucugcug

SEQ ID NO: 1171339 - RNA, 13 nt, Human
cccaaagugcugg

SEQ ID NO: 1171340 - RNA, 15 nt, Human
cccaaagugcuggga

SEQ ID NO: 1171341 - RNA, 18 nt, Human
ccauguuuuguuuacggu

SEQ ID NO: 1171342 - RNA, 17 nt, Human
cccacacacacacacau

SEQ ID NO: 1171343 - RNA, 18 nt, Human
cccacacacacacacaug

SEQ ID NO: 1171344 - RNA, 19 nt, Human
cccacacacacacacaugc

SEQ ID NO: 1171345 - RNA, 20 nt, Human
cccacacacacacacaugca

SEQ ID NO: 1171346 - RNA, 13 nt, Human
cccacaggaucag

SEQ ID NO: 1171347 - RNA, 16 nt, Human
cccaaugcacuuuguu

SEQ ID NO: 1171348 - RNA, 20 nt, Human
cccaaugcacuuuguucugg

SEQ ID NO: 1171349 - RNA, 23 nt, Human
cccaaugcacuuuguucuggcuc

SEQ ID NO: 1171350 - RNA, 13 nt, Human
cccacaagaaaug

SEQ ID NO: 1171351 - RNA, 20 nt, Human
cccacaagaaaugaaagcag

SEQ ID NO: 1171352 - RNA, 10 nt, Human
cccacacaca

SEQ ID NO: 1171353 - RNA, 11 nt, Human
cccacacacac

SEQ ID NO: 1171354 - RNA, 13 nt, Human
cccacacacacac

SEQ ID NO: 1171355 - RNA, 14 nt, Human
cccacacacacaca

SEQ ID NO: 1171356 - RNA, 22 nt, Human
cccaccucucucacuccuugaa

SEQ ID NO: 1171357 - RNA, 18 nt, Human
cccaccaucaugucuggc

SEQ ID NO: 1171358 - RNA, 20 nt, Human
cccaccgcagacaggaccag

SEQ ID NO: 1171359 - RNA, 17 nt, Human
cccaccuggccucugca

SEQ ID NO: 1171360 - RNA, 19 nt, Human
cccaccuggccucugcacu

SEQ ID NO: 1171361 - RNA, 21 nt, Human
cccaccuggccucugcacucc

SEQ ID NO: 1171362 - RNA, 20 nt, Human
cccacgacugcccggcaggg

SEQ ID NO: 1171363 - RNA, 21 nt, Human
cccacgacugcccggcagggu

SEQ ID NO: 1171364 - RNA, 19 nt, Human
cccacgcuggagugcagug

SEQ ID NO: 1171365 - RNA, 20 nt, Human
cccacgcuggagugcaguga

SEQ ID NO: 1171366 - RNA, 21 nt, Human
cccacgcuggagugcagugag

SEQ ID NO: 1171367 - RNA, 23 nt, Human
cccacuugagaauuacccuuuug

SEQ ID NO: 1171368 - RNA, 16 nt, Human
cccgggcucugccucc

SEQ ID NO: 1171369 - RNA, 15 nt, Human
cccgugggguuccuc

SEQ ID NO: 1171370 - RNA, 20 nt, Human
cccuacaguugaaaaacagc

SEQ ID NO: 1171371 - RNA, 14 nt, Human
cccagagggccugc

SEQ ID NO: 1171372 - RNA, 15 nt, Human
cccagagggccugca

SEQ ID NO: 1171373 - RNA, 18 nt, Human
cccagagggccugcaagg

SEQ ID NO: 1171374 - RNA, 13 nt, Human
cccgaguagcugg

SEQ ID NO: 1171375 - RNA, 14 nt, Human
cccgaguagcuggg

SEQ ID NO: 1171376 - RNA, 15 nt, Human
cccgaguagcuggga

SEQ ID NO: 1171377 - RNA, 16 nt, Human
cccgaguagcugggac

SEQ ID NO: 1171378 - RNA, 17 nt, Human
cccgaguagcugggacu

SEQ ID NO: 1171379 - RNA, 18 nt, Human
cccgaguagcugggacua

SEQ ID NO: 1171380 - RNA, 21 nt, Human
cccgaguagcugggacuacag

SEQ ID NO: 1171381 - RNA, 22 nt, Human
cccgaguagcugggacuacagg

SEQ ID NO: 1171382 - RNA, 19 nt, Human
cccgcugucagccauuccu

SEQ ID NO: 1171383 - RNA, 20 nt, Human
cccgcugucagccauuccug

SEQ ID NO: 1171384 - RNA, 12 nt, Human
cccgggcucugc

SEQ ID NO: 1171385 - RNA, 14 nt, Human
cccgggcucugccu

SEQ ID NO: 1171386 - RNA, 15 nt, Human
cccgggcucugccuc

SEQ ID NO: 1171387 - RNA, 16 nt, Human
cccugcaaccugauug

SEQ ID NO: 1171388 - RNA, 12 nt, Human
cccugcacuugc

SEQ ID NO: 1171389 - RNA, 19 nt, Human
cccugcacuugcagacucu

SEQ ID NO: 1171390 - RNA, 22 nt, Human
cccugcacuugcagacucuaca

SEQ ID NO: 1171391 - RNA, 16 nt, Human
cccucuggggcuguuc

SEQ ID NO: 1171392 - RNA, 15 nt, Human
cccugaaagcccuga

SEQ ID NO: 1171393 - RNA, 16 nt, Human
cccugaaagcccugag

SEQ ID NO: 1171394 - RNA, 14 nt, Human
cccugaggcccaga

SEQ ID NO: 1171395 - RNA, 15 nt, Human
cccugaggcccagag

SEQ ID NO: 1171396 - RNA, 16 nt, Human
cccugaggcccagagg

SEQ ID NO: 1171397 - RNA, 17 nt, Human
cccugaggcccagaggg

SEQ ID NO: 1171398 - RNA, 18 nt, Human
cccugaggcccagagggc

SEQ ID NO: 1171399 - RNA, 19 nt, Human
cccugaggcccagagggcc

SEQ ID NO: 1171400 - RNA, 20 nt, Human
cccugaggcccagagggccu

SEQ ID NO: 1171401 - RNA, 23 nt, Human
cccugaggcccagagggccugca

SEQ ID NO: 1171402 - RNA, 22 nt, Human
cccugcuggguguggcgcagca

SEQ ID NO: 1171403 - RNA, 14 nt, Human
cccugcccaccugg

SEQ ID NO: 1171404 - RNA, 17 nt, Human
cccugcccaccuggccu

SEQ ID NO: 1171405 - RNA, 18 nt, Human
cccugcccaccuggccuc

SEQ ID NO: 1171406 - RNA, 20 nt, Human
cccugcccaccuggccucug

SEQ ID NO: 1171407 - RNA, 16 nt, Human
cccugcuggguguggc

SEQ ID NO: 1171408 - RNA, 21 nt, Human
cccugcuggguguggcgcagc

SEQ ID NO: 1171409 - RNA, 15 nt, Human
cccugguggcagcuc

SEQ ID NO: 1171410 - RNA, 16 nt, Human
cccugguggcagcuca

SEQ ID NO: 1171411 - RNA, 17 nt, Human
cccugguggcagcucac

SEQ ID NO: 1171412 - RNA, 21 nt, Human
cccuggugaccagcaccaucu

SEQ ID NO: 1171413 - RNA, 20 nt, Human
cccugguggcagcucaccuc

SEQ ID NO: 1171414 - RNA, 14 nt, Human
ccgaggccuucucu

SEQ ID NO: 1171415 - RNA, 17 nt, Human
ccgaggccuucucugaa

SEQ ID NO: 1171416 - RNA, 17 nt, Human
ccgaguagcugggacua

SEQ ID NO: 1171417 - RNA, 20 nt, Human
ccgaguagcugggacuacag

SEQ ID NO: 1171418 - RNA, 23 nt, Human
ccgcuaagagggagggagggcuc

SEQ ID NO: 1171419 - RNA, 21 nt, Human
ccgcuaagagggagggagggc

SEQ ID NO: 1171420 - RNA, 14 nt, Human
ccgcacugggcuug

SEQ ID NO: 1171421 - RNA, 19 nt, Human
ccgcacugggcuuggggac

SEQ ID NO: 1171422 - RNA, 12 nt, Human
ccgcuuucuacc

SEQ ID NO: 1171423 - RNA, 19 nt, Human
ccgcuuucuacccagcgag

SEQ ID NO: 1171424 - RNA, 23 nt, Human
ccgcuuucuacccagcgagcccu

SEQ ID NO: 1171425 - RNA, 17 nt, Human
ccggcuggccuggcccc

SEQ ID NO: 1171426 - RNA, 18 nt, Human
ccggcuggccuggccccu

SEQ ID NO: 1171427 - RNA, 16 nt, Human
ccgggcguggugguga

SEQ ID NO: 1171428 - RNA, 13 nt, Human
ccgggcucugccu

SEQ ID NO: 1171429 - RNA, 15 nt, Human
ccuaaaauucagugg

SEQ ID NO: 1171430 - RNA, 22 nt, Human
ccuauauuguuuucaguguaca

SEQ ID NO: 1171431 - RNA, 18 nt, Human
ccuauauuguuuucagug

SEQ ID NO: 1171432 - RNA, 13 nt, Human
ccuaguuccacca

SEQ ID NO: 1171433 - RNA, 21 nt, Human
ccuaguuccaccaucaagcca

SEQ ID NO: 1171434 - RNA, 23 nt, Human
ccuaguuccaccaucaagccacc

SEQ ID NO: 1171435 - RNA, 20 nt, Human
ccucagucuggcccuuccuu

SEQ ID NO: 1171436 - RNA, 11 nt, Human
ccucagugcca

SEQ ID NO: 1171437 - RNA, 13 nt, Human
ccucauacccacc

SEQ ID NO: 1171438 - RNA, 20 nt, Human
ccucauaguaugguggcugg

SEQ ID NO: 1171439 - RNA, 21 nt, Human
ccucauaguaugguggcuggg

SEQ ID NO: 1171440 - RNA, 22 nt, Human
ccucauaguaugguggcugggu

SEQ ID NO: 1171441 - RNA, 13 nt, Human
ccucaucaccaac

SEQ ID NO: 1171442 - RNA, 14 nt, Human
ccucaucaccaacg

SEQ ID NO: 1171443 - RNA, 13 nt, Human
ccucauccucaua

SEQ ID NO: 1171444 - RNA, 20 nt, Human
ccucauccucauacccaccc

SEQ ID NO: 1171445 - RNA, 22 nt, Human
ccuccaggugcacaagcuccaa

SEQ ID NO: 1171446 - RNA, 19 nt, Human
ccuccaggugcacaagcuc

SEQ ID NO: 1171447 - RNA, 21 nt, Human
ccuccaggugcacaagcucca

SEQ ID NO: 1171448 - RNA, 23 nt, Human
ccuccaugugggcuaguugggcu

SEQ ID NO: 1171449 - RNA, 15 nt, Human
ccucccaaagugcug

SEQ ID NO: 1171450 - RNA, 16 nt, Human
ccucccaaagugcugg

SEQ ID NO: 1171451 - RNA, 10 nt, Human
ccucccuccc

SEQ ID NO: 1171452 - RNA, 20 nt, Human
ccucccgaguagcugggacu

SEQ ID NO: 1171453 - RNA, 21 nt, Human
ccucccgaguagcugggacua

SEQ ID NO: 1171454 - RNA, 23 nt, Human
ccuccugccucgaacuggcugca

SEQ ID NO: 1171455 - RNA, 14 nt, Human
ccuccugggcuaag

SEQ ID NO: 1171456 - RNA, 13 nt, Human
ccuccugcugggc

SEQ ID NO: 1171457 - RNA, 16 nt, Human
ccucggugccuuccuc

SEQ ID NO: 1171458 - RNA, 14 nt, Human
ccucgguguggaga

SEQ ID NO: 1171459 - RNA, 18 nt, Human
ccucgguguggagaagcg

SEQ ID NO: 1171460 - RNA, 16 nt, Human
ccucuaggaggucucu

SEQ ID NO: 1171461 - RNA, 17 nt, Human
ccucccgaauagcuggg

SEQ ID NO: 1171462 - RNA, 12 nt, Human
ccugagccagau

SEQ ID NO: 1171463 - RNA, 11 nt, Human
ccugagcccca

SEQ ID NO: 1171464 - RNA, 14 nt, Human
ccugagcuuucugc

SEQ ID NO: 1171465 - RNA, 16 nt, Human
ccugagcuuucugcua

SEQ ID NO: 1171466 - RNA, 21 nt, Human
ccugaggcccagagggccugc

SEQ ID NO: 1171467 - RNA, 14 nt, Human
ccugcaagaacaag

SEQ ID NO: 1171468 - RNA, 11 nt, Human
ccugaggcccu

SEQ ID NO: 1171469 - RNA, 12 nt, Human
ccugaggcccuu

SEQ ID NO: 1171470 - RNA, 20 nt, Human
ccugaugcuucuucagagac

SEQ ID NO: 1171471 - RNA, 21 nt, Human
ccugaugcuucuucagagacu

SEQ ID NO: 1171472 - RNA, 22 nt, Human
ccugaugcuucuucagagacuc

SEQ ID NO: 1171473 - RNA, 14 nt, Human
ccugaggcccuucu

SEQ ID NO: 1171474 - RNA, 15 nt, Human
ccugauugugucucu

SEQ ID NO: 1171475 - RNA, 17 nt, Human
ccugauugugucucuug

SEQ ID NO: 1171476 - RNA, 19 nt, Human
ccugauugugucucuuggu

SEQ ID NO: 1171477 - RNA, 22 nt, Human
ccugcaaccugauugugucucu

SEQ ID NO: 1171478 - RNA, 13 nt, Human
ccugccaggaagc

SEQ ID NO: 1171479 - RNA, 14 nt, Human
ccugccaggaagcc

SEQ ID NO: 1171480 - RNA, 15 nt, Human
ccugccaggaagcca

SEQ ID NO: 1171481 - RNA, 17 nt, Human
ccugccaggaagccagc

SEQ ID NO: 1171482 - RNA, 18 nt, Human
ccugccaggaagccagca

SEQ ID NO: 1171483 - RNA, 19 nt, Human
ccugccaggaagccagcag

SEQ ID NO: 1171484 - RNA, 21 nt, Human
ccugccaggaagccagcaggc

SEQ ID NO: 1171485 - RNA, 22 nt, Human
ccugccaggaagccagcaggcu

SEQ ID NO: 1171486 - RNA, 23 nt, Human
ccugccaggaagccagcaggcuc

SEQ ID NO: 1171487 - RNA, 16 nt, Human
ccugccaggcauggug

SEQ ID NO: 1171488 - RNA, 11 nt, Human
ccugccaggga

SEQ ID NO: 1171489 - RNA, 12 nt, Human
ccugccagggac

SEQ ID NO: 1171490 - RNA, 13 nt, Human
ccugccagggaca

SEQ ID NO: 1171491 - RNA, 14 nt, Human
ccugccagggacag

SEQ ID NO: 1171492 - RNA, 15 nt, Human
ccugccagggacaga

SEQ ID NO: 1171493 - RNA, 16 nt, Human
ccugccagggacagag

SEQ ID NO: 1171494 - RNA, 22 nt, Human
ccugccagggacagagggggug

SEQ ID NO: 1171495 - RNA, 22 nt, Human
ccugccccucaacucuccucca

SEQ ID NO: 1171496 - RNA, 11 nt, Human
ccugccucagc

SEQ ID NO: 1171497 - RNA, 23 nt, Human
ccugccuguugggccaggagccu

SEQ ID NO: 1171498 - RNA, 16 nt, Human
ccugcggugcuaucuc

SEQ ID NO: 1171499 - RNA, 17 nt, Human
ccugcggugcuaucucc

SEQ ID NO: 1171500 - RNA, 22 nt, Human
ccugcucuccgaccagacaccu

SEQ ID NO: 1171501 - RNA, 22 nt, Human
ccugcggugcuaucucccccag

SEQ ID NO: 1171502 - RNA, 21 nt, Human
ccugcucuccgaccagacacc

SEQ ID NO: 1171503 - RNA, 14 nt, Human
ccugcuucaaauau

SEQ ID NO: 1171504 - RNA, 23 nt, Human
ccuggaaaucaggguuaguauug

SEQ ID NO: 1171505 - RNA, 15 nt, Human
ccuggccagaugcac

SEQ ID NO: 1171506 - RNA, 20 nt, Human
ccuggccagaugcaccagcc

SEQ ID NO: 1171507 - RNA, 18 nt, Human
ccuggaauauauaaccag

SEQ ID NO: 1171508 - RNA, 22 nt, Human
ccuggcacccggccccugcugg

SEQ ID NO: 1171509 - RNA, 23 nt, Human
ccuggcacccggccccugcuggu

SEQ ID NO: 1171510 - RNA, 22 nt, Human
ccuggcacuauaauguaagcuc

SEQ ID NO: 1171511 - RNA, 12 nt, Human
ccuggcagcccc

SEQ ID NO: 1171512 - RNA, 13 nt, Human
ccuggcagccccu

SEQ ID NO: 1171513 - RNA, 14 nt, Human
ccuggcagccccug

SEQ ID NO: 1171514 - RNA, 13 nt, Human
ccuuaccagcaga

SEQ ID NO: 1171515 - RNA, 20 nt, Human
ccuuaccagcagagcaccuu

SEQ ID NO: 1171516 - RNA, 15 nt, Human
ccuuacccucauguu

SEQ ID NO: 1171517 - RNA, 19 nt, Human
ccuuacccucauguucuua

SEQ ID NO: 1171518 - RNA, 19 nt, Human
ccuuaccugccaggaagcc

SEQ ID NO: 1171519 - RNA, 17 nt, Human
ccuuagaagucacacag

SEQ ID NO: 1171520 - RNA, 18 nt, Human
ccuuagaagucacacagu

SEQ ID NO: 1171521 - RNA, 17 nt, Human
ccuuaaagaguguggca

SEQ ID NO: 1171522 - RNA, 14 nt, Human
ccuuacacaauggu

SEQ ID NO: 1171523 - RNA, 20 nt, Human
ccuuacacaaugguuuucuu

SEQ ID NO: 1171524 - RNA, 16 nt, Human
ccuguuucugcagcca

SEQ ID NO: 1171525 - RNA, 14 nt, Human
ccuguuuguuucug

SEQ ID NO: 1171526 - RNA, 18 nt, Human
ccuguuuguuucugaaag

SEQ ID NO: 1171527 - RNA, 17 nt, Human
ccugugucuugcaaugg

SEQ ID NO: 1171528 - RNA, 19 nt, Human
ccugugucuugcaauggca

SEQ ID NO: 1171529 - RNA, 21 nt, Human
ccugugucuugcaauggcagc

SEQ ID NO: 1171530 - RNA, 22 nt, Human
ccugugucuugcaauggcagcc

SEQ ID NO: 1171531 - RNA, 22 nt, Human
ccugugucuuuaaaugcugcuu

SEQ ID NO: 1171532 - RNA, 20 nt, Human
ccugugugugcgccuacagg

SEQ ID NO: 1171533 - RNA, 21 nt, Human
ccugugugugcgccuacagga

SEQ ID NO: 1171534 - RNA, 12 nt, Human
ccuucagugccu

SEQ ID NO: 1171535 - RNA, 21 nt, Human
ccuucaccuuuguccccaccg

SEQ ID NO: 1171536 - RNA, 17 nt, Human
ccuucacagaugggugc

SEQ ID NO: 1171537 - RNA, 14 nt, Human
ccuuagacaguccc

SEQ ID NO: 1171538 - RNA, 19 nt, Human
ccuucaccuuuguccccac

SEQ ID NO: 1171539 - RNA, 20 nt, Human
ccuucaccuuuguccccacc

SEQ ID NO: 1171540 - RNA, 12 nt, Human
ccuucagccuga

SEQ ID NO: 1171541 - RNA, 11 nt, Human
ccuucagugcc

SEQ ID NO: 1171542 - RNA, 14 nt, Human
ccuucagugccaaa

SEQ ID NO: 1171543 - RNA, 22 nt, Human
ccuucauuuggcauuccccacu

SEQ ID NO: 1171544 - RNA, 14 nt, Human
ccuucggccuccau

SEQ ID NO: 1171545 - RNA, 20 nt, Human
ccuucggccuccauccugag

SEQ ID NO: 1171546 - RNA, 17 nt, Human
ccuugaaugaugccaug

SEQ ID NO: 1171547 - RNA, 15 nt, Human
ccuucggcgccuuaa

SEQ ID NO: 1171548 - RNA, 16 nt, Human
ccuucggccuccaucc

SEQ ID NO: 1171549 - RNA, 15 nt, Human
ccuucuccuucaccu

SEQ ID NO: 1171550 - RNA, 19 nt, Human
ccuucuccuucaccuuugu

SEQ ID NO: 1171551 - RNA, 23 nt, Human
ccuugaccauucuccaccugcca

SEQ ID NO: 1171552 - RNA, 13 nt, Human
ccuugacucuuuc

SEQ ID NO: 1171553 - RNA, 20 nt, Human
ccuugaguugauucagcucu

SEQ ID NO: 1171554 - RNA, 19 nt, Human
ccuuggggcugaugcaguu

SEQ ID NO: 1171555 - RNA, 22 nt, Human
ccuuggugucgggcaugacacg

SEQ ID NO: 1171556 - RNA, 21 nt, Human
ccuugguuaggcauuguggga

SEQ ID NO: 1171557 - RNA, 22 nt, Human
ccuugguuaggcauugugggaa

SEQ ID NO: 1171558 - RNA, 16 nt, Human
ccuuugacgccauccc

SEQ ID NO: 1171559 - RNA, 17 nt, Human
ccuuugacgccauccca

SEQ ID NO: 1171560 - RNA, 18 nt, Human
ccuuugacgccaucccag

SEQ ID NO: 1171561 - RNA, 12 nt, Human
cgaacuggcugc

SEQ ID NO: 1171562 - RNA, 14 nt, Human
cgaacuggcugcaa

SEQ ID NO: 1171563 - RNA, 20 nt, Human
cgaaaggaugaaagugacca

SEQ ID NO: 1171564 - RNA, 19 nt, Human
cgaaagggacuuggaagcu

SEQ ID NO: 1171565 - RNA, 22 nt, Human
cgaaagggacuuggaagcuccg

SEQ ID NO: 1171566 - RNA, 23 nt, Human
cgaaagggacuuggaagcuccgc

SEQ ID NO: 1171567 - RNA, 20 nt, Human
ccuuugacgccaucccagcc

SEQ ID NO: 1171568 - RNA, 21 nt, Human
ccuuugacgccaucccagccc

SEQ ID NO: 1171569 - RNA, 22 nt, Human
ccuuugacgccaucccagcccc

SEQ ID NO: 1171570 - RNA, 23 nt, Human
ccuuugacgccaucccagcccca

SEQ ID NO: 1171571 - RNA, 15 nt, Human
cgaaaacguggcugc

SEQ ID NO: 1171572 - RNA, 18 nt, Human
cgaaaacguggcugcuuc

SEQ ID NO: 1171573 - RNA, 19 nt, Human
cgaaaacguggcugcuuca

SEQ ID NO: 1171574 - RNA, 20 nt, Human
cgaaaacguggcugcuucaa

SEQ ID NO: 1171575 - RNA, 15 nt, Human
cgaauagcugggacu

SEQ ID NO: 1171576 - RNA, 13 nt, Human
cgaauagcuggga

SEQ ID NO: 1171577 - RNA, 14 nt, Human
cgaauagcugggac

SEQ ID NO: 1171578 - RNA, 17 nt, Human
cgagaaacagccugugu

SEQ ID NO: 1171579 - RNA, 18 nt, Human
cgagauagccaaggccaa

SEQ ID NO: 1171580 - RNA, 17 nt, Human
cgagaucacgccacugc

SEQ ID NO: 1171581 - RNA, 18 nt, Human
cgagaucacgccacugca

SEQ ID NO: 1171582 - RNA, 20 nt, Human
cgagaucacgccacugcacu

SEQ ID NO: 1171583 - RNA, 20 nt, Human
cgagauugcaccacugcacu

SEQ ID NO: 1171584 - RNA, 20 nt, Human
cgagcaggcuucuucccccc

SEQ ID NO: 1171585 - RNA, 13 nt, Human
cgagcaugccugg

SEQ ID NO: 1171586 - RNA, 16 nt, Human
cgagcaugccuggaug

SEQ ID NO: 1171587 - RNA, 17 nt, Human
cgagcaugccuggaugg

SEQ ID NO: 1171588 - RNA, 14 nt, Human
cgcagcccugcaga

SEQ ID NO: 1171589 - RNA, 15 nt, Human
cgcagacaggaccag

SEQ ID NO: 1171590 - RNA, 16 nt, Human
cgcagacaggaccagg

SEQ ID NO: 1171591 - RNA, 15 nt, Human
cgcagcccugcagag

SEQ ID NO: 1171592 - RNA, 19 nt, Human
cgccagauucuuuccugag

SEQ ID NO: 1171593 - RNA, 20 nt, Human
cgccagauucuuuccugagg

SEQ ID NO: 1171594 - RNA, 21 nt, Human
cgccagauucuuuccugaggc

SEQ ID NO: 1171595 - RNA, 22 nt, Human
cgccagauucuuuccugaggcu

SEQ ID NO: 1171596 - RNA, 22 nt, Human
cgccaggggaaaaucagccugc

SEQ ID NO: 1171597 - RNA, 18 nt, Human
cgagcaugccuggauggg

SEQ ID NO: 1171598 - RNA, 15 nt, Human
cgagcccugguggca

SEQ ID NO: 1171599 - RNA, 16 nt, Human
cgagcccugguggcag

SEQ ID NO: 1171600 - RNA, 18 nt, Human
cgagcccugguggcagug

SEQ ID NO: 1171601 - RNA, 17 nt, Human
cgccaugcuccuggccc

SEQ ID NO: 1171602 - RNA, 14 nt, Human
cgagcaugccugga

SEQ ID NO: 1171603 - RNA, 18 nt, Human
cuaugggacucaaugcac

SEQ ID NO: 1171604 - RNA, 22 nt, Human
cuaugggacucaaugcacugac

SEQ ID NO: 1171605 - RNA, 23 nt, Human
cuaugggacucaaugcacugaca

SEQ ID NO: 1171606 - RNA, 15 nt, Human
cuauuagagaagaga

SEQ ID NO: 1171607 - RNA, 17 nt, Human
cuauagccuaggugaca

SEQ ID NO: 1171608 - RNA, 18 nt, Human
cuauagccuaggugacag

SEQ ID NO: 1171609 - RNA, 18 nt, Human
cuauauuguuugcuaagc

SEQ ID NO: 1171610 - RNA, 16 nt, Human
cuauaauguaagcucu

SEQ ID NO: 1171611 - RNA, 21 nt, Human
cuauaauguaagcucuacuga

SEQ ID NO: 1171612 - RNA, 22 nt, Human
cuauaauuuaccugaagucuuu

SEQ ID NO: 1171613 - RNA, 16 nt, Human
cuaguaauuggaaagg

SEQ ID NO: 1171614 - RNA, 20 nt, Human
cuagugaaacucguuaauuu

SEQ ID NO: 1171615 - RNA, 21 nt, Human
cuagugagcagucaggaaaga

SEQ ID NO: 1171616 - RNA, 20 nt, Human
cgccaucccagccccaauga

SEQ ID NO: 1171617 - RNA, 15 nt, Human
cgccaugcuccuggc

SEQ ID NO: 1171618 - RNA, 22 nt, Human
cgcccaguuggguggaugccug

SEQ ID NO: 1171619 - RNA, 23 nt, Human
cgcccaguuggguggaugccugg

SEQ ID NO: 1171620 - RNA, 14 nt, Human
cuaggugacagagu

SEQ ID NO: 1171621 - RNA, 18 nt, Human
cuaggugacagagugaga

SEQ ID NO: 1171622 - RNA, 24 nt, Human
cuaggugacagagugagacucugu

SEQ ID NO: 1171623 - RNA, 18 nt, Human
cuauuguuagucucuuga

SEQ ID NO: 1171624 - RNA, 21 nt, Human
cucaacaccucugcacaagcu

SEQ ID NO: 1171625 - RNA, 13 nt, Human
cucaaccuccugg

SEQ ID NO: 1171626 - RNA, 15 nt, Human
cucaaccuccugggc

SEQ ID NO: 1171627 - RNA, 17 nt, Human
cucaaccuccugggcua

SEQ ID NO: 1171628 - RNA, 21 nt, Human
cucaaguccucuuuucugaga

SEQ ID NO: 1171629 - RNA, 17 nt, Human
cucaagugauucuccug

SEQ ID NO: 1171630 - RNA, 22 nt, Human
cucacacaugagcaucaggcca

SEQ ID NO: 1171631 - RNA, 24 nt, Human
cucacacaugagcaucaggccagg

SEQ ID NO: 1171632 - RNA, 15 nt, Human
cucacaguccuuacc

SEQ ID NO: 1171633 - RNA, 17 nt, Human
cucacaguccuuaccag

SEQ ID NO: 1171634 - RNA, 19 nt, Human
cucacaguccuuaccagca

SEQ ID NO: 1171635 - RNA, 22 nt, Human
cucacaguccuuaccagcagag

SEQ ID NO: 1171636 - RNA, 23 nt, Human
cucacaguccuuaccagcagagc

SEQ ID NO: 1171637 - RNA, 15 nt, Human
cucacauuuauucug

SEQ ID NO: 1171638 - RNA, 19 nt, Human
cucacauuuauucugcuca

SEQ ID NO: 1171639 - RNA, 22 nt, Human
cucacauuuauucugcucacau

SEQ ID NO: 1171640 - RNA, 13 nt, Human
cucaccagcccca

SEQ ID NO: 1171641 - RNA, 14 nt, Human
cucaccagccccag

SEQ ID NO: 1171642 - RNA, 15 nt, Human
cucaccagccccagu

SEQ ID NO: 1171643 - RNA, 17 nt, Human
cucaccagccccagugc

SEQ ID NO: 1171644 - RNA, 18 nt, Human
cucaccagccccagugcc

SEQ ID NO: 1171645 - RNA, 19 nt, Human
cucaccagccccagugccc

SEQ ID NO: 1171646 - RNA, 21 nt, Human
cucacuauguugcccaggcag

SEQ ID NO: 1171647 - RNA, 22 nt, Human
cucacuauguugcccaggcagg

SEQ ID NO: 1171648 - RNA, 23 nt, Human
cucacuauguugcccaggcaggu

SEQ ID NO: 1171649 - RNA, 15 nt, Human
cucaccccagcccca

SEQ ID NO: 1171650 - RNA, 20 nt, Human
cucacuauguugcccaggca

SEQ ID NO: 1171651 - RNA, 13 nt, Human
cucacuccuugaa

SEQ ID NO: 1171652 - RNA, 11 nt, Human
cucacucuguc

SEQ ID NO: 1171653 - RNA, 12 nt, Human
cucacucugucg

SEQ ID NO: 1171654 - RNA, 14 nt, Human
cucacugcagccuc

SEQ ID NO: 1171655 - RNA, 13 nt, Human
cucacugcagccu

SEQ ID NO: 1171656 - RNA, 12 nt, Human
cucacugcagcc

SEQ ID NO: 1171657 - RNA, 13 nt, Human
cucacucugucgc

SEQ ID NO: 1171658 - RNA, 21 nt, Human
cucacucugucgcccagucug

SEQ ID NO: 1171659 - RNA, 22 nt, Human
cucacucugucgcccagucugg

SEQ ID NO: 1171660 - RNA, 19 nt, Human
cucacugccaugccagcuu

SEQ ID NO: 1171661 - RNA, 22 nt, Human
cucacugccaugccagcuuauc

SEQ ID NO: 1171662 - RNA, 20 nt, Human
cucacuguugcccaggcugg

SEQ ID NO: 1171663 - RNA, 21 nt, Human
cucacuguugcccaggcuggc

SEQ ID NO: 1171664 - RNA, 22 nt, Human
cucacuguugcccaggcuggcg

SEQ ID NO: 1171665 - RNA, 14 nt, Human
cucagagagggugg

SEQ ID NO: 1171666 - RNA, 18 nt, Human
cucagagagggugggagu

SEQ ID NO: 1171667 - RNA, 15 nt, Human
cucagaucuucugug

SEQ ID NO: 1171668 - RNA, 16 nt, Human
cucagaucuucugugg

SEQ ID NO: 1171669 - RNA, 16 nt, Human
cucagcauccuggcac

SEQ ID NO: 1171670 - RNA, 17 nt, Human
cucagcauccuggcacc

SEQ ID NO: 1171671 - RNA, 18 nt, Human
cucaggaguuugagacca

SEQ ID NO: 1171672 - RNA, 23 nt, Human
cucaggaguuugagaccaaccug

SEQ ID NO: 1171673 - RNA, 18 nt, Human
cucagcauccuggcaccc

SEQ ID NO: 1171674 - RNA, 14 nt, Human
cucagggccuggcu

SEQ ID NO: 1171675 - RNA, 15 nt, Human
cucagggccuggcuc

SEQ ID NO: 1171676 - RNA, 16 nt, Human
cucagggccuggcuca

SEQ ID NO: 1171677 - RNA, 15 nt, Human
cucagggccuggucg

SEQ ID NO: 1171678 - RNA, 18 nt, Human
cucagggccuggcucagg

SEQ ID NO: 1171679 - RNA, 15 nt, Human
cucagggucccuggu

SEQ ID NO: 1171680 - RNA, 16 nt, Human
cucagggucccuggug

SEQ ID NO: 1171681 - RNA, 17 nt, Human
cucagggucccuggugg

SEQ ID NO: 1171682 - RNA, 18 nt, Human
cucagggucccugguggc

SEQ ID NO: 1171683 - RNA, 16 nt, Human
cucaggugagaagcag

SEQ ID NO: 1171684 - RNA, 19 nt, Human
cucaggugagaagcagagg

SEQ ID NO: 1171685 - RNA, 20 nt, Human
cucaggugagaagcagagga

SEQ ID NO: 1171686 - RNA, 21 nt, Human
cucauaguaugguggcugggu

SEQ ID NO: 1171687 - RNA, 14 nt, Human
cucauacucaccuc

SEQ ID NO: 1171688 - RNA, 22 nt, Human
cucauacucaccucaccccacu

SEQ ID NO: 1171689 - RNA, 18 nt, Human
cucaggugauccacccac

SEQ ID NO: 1171690 - RNA, 19 nt, Human
cucaggugauccacccacc

SEQ ID NO: 1171691 - RNA, 20 nt, Human
cucaggugauccacccaccu

SEQ ID NO: 1171692 - RNA, 22 nt, Human
cucaggugauccacccaccuca

SEQ ID NO: 1171693 - RNA, 16 nt, Human
cucauacccaccccca

SEQ ID NO: 1171694 - RNA, 18 nt, Human
cucauacccacccccacc

SEQ ID NO: 1171695 - RNA, 19 nt, Human
cucauacccacccccaccc

SEQ ID NO: 1171696 - RNA, 21 nt, Human
cucauacccacccccacccaa

SEQ ID NO: 1171697 - RNA, 23 nt, Human
cucauaguaugguggcuggguug

SEQ ID NO: 1171698 - RNA, 21 nt, Human
cucaucaccaacgucugugcc

SEQ ID NO: 1171699 - RNA, 22 nt, Human
cucaucaccaacgucugugcca

SEQ ID NO: 1171700 - RNA, 15 nt, Human
cucauccucauaccc

SEQ ID NO: 1171701 - RNA, 13 nt, Human
cuccacccugcuc

SEQ ID NO: 1171702 - RNA, 15 nt, Human
cuccacccugcucuc

SEQ ID NO: 1171703 - RNA, 18 nt, Human
cuccaaaauaaaacuuuu

SEQ ID NO: 1171704 - RNA, 21 nt, Human
cuccaaacugacucuuaagaa

SEQ ID NO: 1171705 - RNA, 18 nt, Human
cucauuugucacacacuu

SEQ ID NO: 1171706 - RNA, 15 nt, Human
cuccaaaauaaaacu

SEQ ID NO: 1171707 - RNA, 16 nt, Human
cuccaaaauaaaacuu

SEQ ID NO: 1171708 - RNA, 17 nt, Human
cucauuugucacacacu

SEQ ID NO: 1171709 - RNA, 12 nt, Human
cuccaccugcca

SEQ ID NO: 1171710 - RNA, 13 nt, Human
cuccaccugccag

SEQ ID NO: 1171711 - RNA, 14 nt, Human
cuccaccugccagg

SEQ ID NO: 1171712 - RNA, 15 nt, Human
cuccaccugccaggg

SEQ ID NO: 1171713 - RNA, 16 nt, Human
cuccagccccuggaug

SEQ ID NO: 1171714 - RNA, 17 nt, Human
cuccagccccuggaugc

SEQ ID NO: 1171715 - RNA, 20 nt, Human
cuccagccccuggaugcagc

SEQ ID NO: 1171716 - RNA, 12 nt, Human
cuccagccuggg

SEQ ID NO: 1171717 - RNA, 14 nt, Human
cuccagcucaccag

SEQ ID NO: 1171718 - RNA, 11 nt, Human
cuccaggagca

SEQ ID NO: 1171719 - RNA, 13 nt, Human
cuccaggagcagc

SEQ ID NO: 1171720 - RNA, 14 nt, Human
cuccaggagcagcc

SEQ ID NO: 1171721 - RNA, 15 nt, Human
cuccaggagcagcca

SEQ ID NO: 1171722 - RNA, 16 nt, Human
cuccaggagcagccac

SEQ ID NO: 1171723 - RNA, 17 nt, Human
cuccaggagcagccaca

SEQ ID NO: 1171724 - RNA, 18 nt, Human
cuccaggagcagccacau

SEQ ID NO: 1171725 - RNA, 23 nt, Human
cuccaggagcagccacauuccug

SEQ ID NO: 1171726 - RNA, 12 nt, Human
cuccauccugag

SEQ ID NO: 1171727 - RNA, 13 nt, Human
cuccauccugagg

SEQ ID NO: 1171728 - RNA, 14 nt, Human
cuccauccugaggc

SEQ ID NO: 1171729 - RNA, 22 nt, Human
cuccccagcaagugagagcugg

SEQ ID NO: 1171730 - RNA, 23 nt, Human
cuccccagcaagugagagcuggg

SEQ ID NO: 1171731 - RNA, 16 nt, Human
cucccgaauagcuggg

SEQ ID NO: 1171732 - RNA, 19 nt, Human
cucccgaguagcugggacu

SEQ ID NO: 1171733 - RNA, 20 nt, Human
cucccgaguagcugggacua

SEQ ID NO: 1171734 - RNA, 12 nt, Human
cucccuuucaac

SEQ ID NO: 1171735 - RNA, 18 nt, Human
cuccucagaucuucugug

SEQ ID NO: 1171736 - RNA, 13 nt, Human
cuccuccagaguc

SEQ ID NO: 1171737 - RNA, 15 nt, Human
cuccuccagagucag

SEQ ID NO: 1171738 - RNA, 15 nt, Human
cuccuccagccgcca

SEQ ID NO: 1171739 - RNA, 22 nt, Human
cuccuccagccgccaugcuccu

SEQ ID NO: 1171740 - RNA, 11 nt, Human
cuccugccuca

SEQ ID NO: 1171741 - RNA, 12 nt, Human
cuccugccucag

SEQ ID NO: 1171742 - RNA, 17 nt, Human
cuccugccucagccucc

SEQ ID NO: 1171743 - RNA, 13 nt, Human
cuccucuccccag

SEQ ID NO: 1171744 - RNA, 15 nt, Human
cuccucuccccagca

SEQ ID NO: 1171745 - RNA, 22 nt, Human
cuccucuccccagcaagugaga

SEQ ID NO: 1171746 - RNA, 18 nt, Human
cuccugccucgaacuggc

SEQ ID NO: 1171747 - RNA, 20 nt, Human
cuccugccucgaacuggcug

SEQ ID NO: 1171748 - RNA, 21 nt, Human
cuccugccucgaacuggcugc

SEQ ID NO: 1171749 - RNA, 22 nt, Human
cuccugccucgaacuggcugca

SEQ ID NO: 1171750 - RNA, 21 nt, Human
cuccugugugugcgccuacag

SEQ ID NO: 1171751 - RNA, 23 nt, Human
cuccugugugugcgccuacagga

SEQ ID NO: 1171752 - RNA, 24 nt, Human
cuccugugugugcgccuacaggag

SEQ ID NO: 1171753 - RNA, 13 nt, Human
cuccugcugggca

SEQ ID NO: 1171754 - RNA, 14 nt, Human
cuccuggaaauauu

SEQ ID NO: 1171755 - RNA, 13 nt, Human
cucgcgacaaugc

SEQ ID NO: 1171756 - RNA, 22 nt, Human
cucgagcaugccuggauggggc

SEQ ID NO: 1171757 - RNA, 23 nt, Human
cuccuuggugucgggcaugacac

SEQ ID NO: 1171758 - RNA, 13 nt, Human
cucgagcaugccu

SEQ ID NO: 1171759 - RNA, 15 nt, Human
cucgagcaugccugg

SEQ ID NO: 1171760 - RNA, 16 nt, Human
cucgagcaugccugga

SEQ ID NO: 1171761 - RNA, 19 nt, Human
cucgagcaugccuggaugg

SEQ ID NO: 1171762 - RNA, 14 nt, Human
cucugacacacagc

SEQ ID NO: 1171763 - RNA, 15 nt, Human
cucugacacacagcu

SEQ ID NO: 1171764 - RNA, 16 nt, Human
cucugacacacagcuc

SEQ ID NO: 1171765 - RNA, 17 nt, Human
cucugacacacagcucu

SEQ ID NO: 1171766 - RNA, 18 nt, Human
cucugacacacagcucug

SEQ ID NO: 1171767 - RNA, 19 nt, Human
cucugacacacagcucugu

SEQ ID NO: 1171768 - RNA, 23 nt, Human
cucugacagaagaaccccagggu

SEQ ID NO: 1171769 - RNA, 21 nt, Human
cucugagacucgcgacaaugc

SEQ ID NO: 1171770 - RNA, 23 nt, Human
cucugagacucgcgacaaugcaa

SEQ ID NO: 1171771 - RNA, 12 nt, Human
cucugaggacac

SEQ ID NO: 1171772 - RNA, 14 nt, Human
cucugaggacacua

SEQ ID NO: 1171773 - RNA, 16 nt, Human
cucugaggacacuaac

SEQ ID NO: 1171774 - RNA, 13 nt, Human
cucugccucccau

SEQ ID NO: 1171775 - RNA, 14 nt, Human
cucugccucccauc

SEQ ID NO: 1171776 - RNA, 16 nt, Human
cucugccucccaucac

SEQ ID NO: 1171777 - RNA, 17 nt, Human
cucugccucccaucacc

SEQ ID NO: 1171778 - RNA, 13 nt, Human
cucugcccacucc

SEQ ID NO: 1171779 - RNA, 15 nt, Human
cucugcccacucccu

SEQ ID NO: 1171780 - RNA, 16 nt, Human
cucugcccacucccug

SEQ ID NO: 1171781 - RNA, 17 nt, Human
cucugcccacucccugc

SEQ ID NO: 1171782 - RNA, 18 nt, Human
cucugcccacucccugca

SEQ ID NO: 1171783 - RNA, 20 nt, Human
cucugcccacucccugcaac

SEQ ID NO: 1171784 - RNA, 13 nt, Human
cucugcacaagcu

SEQ ID NO: 1171785 - RNA, 14 nt, Human
cucugcacaagcug

SEQ ID NO: 1171786 - RNA, 15 nt, Human
cucugcacaagcugc

SEQ ID NO: 1171787 - RNA, 16 nt, Human
cucugcacaagcugca

SEQ ID NO: 1171788 - RNA, 13 nt, Human
cucugucgcccag

SEQ ID NO: 1171789 - RNA, 17 nt, Human
cucugucgcccagucug

SEQ ID NO: 1171790 - RNA, 18 nt, Human
cucugucgcccagucugg

SEQ ID NO: 1171791 - RNA, 19 nt, Human
cucugucgcccagucugga

SEQ ID NO: 1171792 - RNA, 14 nt, Human
cucuguccugggag

SEQ ID NO: 1171793 - RNA, 15 nt, Human
cucuguccugggagu

SEQ ID NO: 1171794 - RNA, 22 nt, Human
cucuguccugggagugagcugg

SEQ ID NO: 1171795 - RNA, 21 nt, Human
cucugccucccaucacccgcu

SEQ ID NO: 1171796 - RNA, 19 nt, Human
cucugccucugacacacag

SEQ ID NO: 1171797 - RNA, 20 nt, Human
cucugccucugacacacagc

SEQ ID NO: 1171798 - RNA, 10 nt, Human
cucugccuga

SEQ ID NO: 1171799 - RNA, 23 nt, Human
cucuggcagcucagagagggugg

SEQ ID NO: 1171800 - RNA, 21 nt, Human
cucuggccuucggccuccauc

SEQ ID NO: 1171801 - RNA, 22 nt, Human
cucuggccuucggccuccaucc

SEQ ID NO: 1171802 - RNA, 15 nt, Human
cucuucuccaggcug

SEQ ID NO: 1171803 - RNA, 20 nt, Human
cucugugucagguggggcag

SEQ ID NO: 1171804 - RNA, 21 nt, Human
cucugugucagguggggcagc

SEQ ID NO: 1171805 - RNA, 22 nt, Human
cucugugucagguggggcagcu

SEQ ID NO: 1171806 - RNA, 23 nt, Human
cucugugucagguggggcagcuu

SEQ ID NO: 1171807 - RNA, 13 nt, Human
cucuuaaaaccca

SEQ ID NO: 1171808 - RNA, 19 nt, Human
cucuuaagaagacugcauu

SEQ ID NO: 1171809 - RNA, 21 nt, Human
cugaagucacacagugagucg

SEQ ID NO: 1171810 - RNA, 14 nt, Human
cugaagaagauggu

SEQ ID NO: 1171811 - RNA, 17 nt, Human
cugaagucacacaguga

SEQ ID NO: 1171812 - RNA, 18 nt, Human
cugaagucacacagugag

SEQ ID NO: 1171813 - RNA, 19 nt, Human
cugaagucacacagugagu

SEQ ID NO: 1171814 - RNA, 22 nt, Human
cugaagucccagauacuugggg

SEQ ID NO: 1171815 - RNA, 17 nt, Human
cugaagucuuuguacag

SEQ ID NO: 1171816 - RNA, 20 nt, Human
cugaagucuuuguacagaca

SEQ ID NO: 1171817 - RNA, 24 nt, Human
cugaagucuuuguacagacaacaa

SEQ ID NO: 1171818 - RNA, 19 nt, Human
cugaaugguuuucaaaaua

SEQ ID NO: 1171819 - RNA, 20 nt, Human
cugaaugguuuucaaaauaa

SEQ ID NO: 1171820 - RNA, 12 nt, Human
cugaauuucuuu

SEQ ID NO: 1171821 - RNA, 16 nt, Human
cucuucuccaggcugu

SEQ ID NO: 1171822 - RNA, 22 nt, Human
cucuuuggucuacacugugcug

SEQ ID NO: 1171823 - RNA, 23 nt, Human
cucuuuggucuacacugugcuga

SEQ ID NO: 1171824 - RNA, 14 nt, Human
cucuuuucaaaaca

SEQ ID NO: 1171825 - RNA, 23 nt, Human
cugaaagggacgcuacccgggaa

SEQ ID NO: 1171826 - RNA, 19 nt, Human
cugacagacacaggcccgg

SEQ ID NO: 1171827 - RNA, 17 nt, Human
cugacagacacaggccc

SEQ ID NO: 1171828 - RNA, 18 nt, Human
cugacagacacaggcccg

SEQ ID NO: 1171829 - RNA, 14 nt, Human
cugaauuucuuuug

SEQ ID NO: 1171830 - RNA, 16 nt, Human
cugacagacacaggcc

SEQ ID NO: 1171831 - RNA, 20 nt, Human
cugagacagcccgggcucug

SEQ ID NO: 1171832 - RNA, 21 nt, Human
cugagacagcccgggcucugc

SEQ ID NO: 1171833 - RNA, 22 nt, Human
cugagacagcccgggcucugcc

SEQ ID NO: 1171834 - RNA, 13 nt, Human
cugagccagauuu

SEQ ID NO: 1171835 - RNA, 14 nt, Human
cugagccagauuuc

SEQ ID NO: 1171836 - RNA, 15 nt, Human
cugagccagauuuca

SEQ ID NO: 1171837 - RNA, 18 nt, Human
cugagucugaaggcuggg

SEQ ID NO: 1171838 - RNA, 19 nt, Human
cugagucugaaggcugggu

SEQ ID NO: 1171839 - RNA, 20 nt, Human
cugauccuaguuccaccauc

SEQ ID NO: 1171840 - RNA, 21 nt, Human
cugauccuaguuccaccauca

SEQ ID NO: 1171841 - RNA, 14 nt, Human
cugauggugcaaug

SEQ ID NO: 1171842 - RNA, 15 nt, Human
cugauggugcaauga

SEQ ID NO: 1171843 - RNA, 16 nt, Human
cugauggugcaaugac

SEQ ID NO: 1171844 - RNA, 15 nt, Human
cugaggcuccacuug

SEQ ID NO: 1171845 - RNA, 21 nt, Human
cugaggcuccacuuggucugu

SEQ ID NO: 1171846 - RNA, 13 nt, Human
cugaggcugggcu

SEQ ID NO: 1171847 - RNA, 15 nt, Human
cugaggcugggcucc

SEQ ID NO: 1171848 - RNA, 16 nt, Human
cugaggcugggcuccc

SEQ ID NO: 1171849 - RNA, 17 nt, Human
cugaggcugggcucccu

SEQ ID NO: 1171850 - RNA, 22 nt, Human
cugaggcugggcucccuuccca

SEQ ID NO: 1171851 - RNA, 21 nt, Human
cugauuuuuuuuuccuucagu

SEQ ID NO: 1171852 - RNA, 22 nt, Human
cugauuuuuuuuuccuucagug

SEQ ID NO: 1171853 - RNA, 23 nt, Human
cugauuuuuuuuuccuucagugc

SEQ ID NO: 1171854 - RNA, 16 nt, Human
cugauuuuuuuuuccu

SEQ ID NO: 1171855 - RNA, 18 nt, Human
cugauuuuuuuuuccuuc

SEQ ID NO: 1171856 - RNA, 19 nt, Human
cugauuuuuuuuuccuuca

SEQ ID NO: 1171857 - RNA, 20 nt, Human
cugauuuuuuuuuccuucag

SEQ ID NO: 1171858 - RNA, 17 nt, Human
cugauggugcaaugacc

SEQ ID NO: 1171859 - RNA, 19 nt, Human
cugauggugcaaugaccuu

SEQ ID NO: 1171860 - RNA, 20 nt, Human
cugauggugcaaugaccuuu

SEQ ID NO: 1171861 - RNA, 21 nt, Human
cugauggugcaaugaccuuuc

SEQ ID NO: 1171862 - RNA, 17 nt, Human
cugauugugucucuugg

SEQ ID NO: 1171863 - RNA, 21 nt, Human
cugauugugucucuugguccu

SEQ ID NO: 1171864 - RNA, 18 nt, Human
cugcaauaaggggagagu

SEQ ID NO: 1171865 - RNA, 22 nt, Human
cugcacaagcugcacccucagg

SEQ ID NO: 1171866 - RNA, 13 nt, Human
cugcacccucagg

SEQ ID NO: 1171867 - RNA, 14 nt, Human
cugcacccucaggc

SEQ ID NO: 1171868 - RNA, 16 nt, Human
cugcacccucaggcag

SEQ ID NO: 1171869 - RNA, 22 nt, Human
cugcaccggcuggccuggcccc

SEQ ID NO: 1171870 - RNA, 23 nt, Human
cugcaccggcuggccuggccccu

SEQ ID NO: 1171871 - RNA, 12 nt, Human
cugcaccgggcc

SEQ ID NO: 1171872 - RNA, 14 nt, Human
cugcaccgggccac

SEQ ID NO: 1171873 - RNA, 15 nt, Human
cugcacuccccugcu

SEQ ID NO: 1171874 - RNA, 16 nt, Human
cugcacuccccugcug

SEQ ID NO: 1171875 - RNA, 17 nt, Human
cugcacuccccugcugg

SEQ ID NO: 1171876 - RNA, 18 nt, Human
cugcacuccccugcuggg

SEQ ID NO: 1171877 - RNA, 18 nt, Human
cugcacuugcagacucua

SEQ ID NO: 1171878 - RNA, 16 nt, Human
cugcaucguuucaucu

SEQ ID NO: 1171879 - RNA, 22 nt, Human
cugcaucguuucaucuuccaac

SEQ ID NO: 1171880 - RNA, 23 nt, Human
cugcacuugcagacucuacagag

SEQ ID NO: 1171881 - RNA, 19 nt, Human
cugcaguugccagucaccc

SEQ ID NO: 1171882 - RNA, 21 nt, Human
cugcaguugccagucaccccg

SEQ ID NO: 1171883 - RNA, 22 nt, Human
cugcaguugccagucaccccgg

SEQ ID NO: 1171884 - RNA, 18 nt, Human
cugcaugcgggcuuccuc

SEQ ID NO: 1171885 - RNA, 22 nt, Human
cugcaugcgggcuuccuccugg

SEQ ID NO: 1171886 - RNA, 18 nt, Human
cugccaaugggagcucau

SEQ ID NO: 1171887 - RNA, 19 nt, Human
cugccaaugggagcucaug

SEQ ID NO: 1171888 - RNA, 18 nt, Human
cugcccacucccugcaac

SEQ ID NO: 1171889 - RNA, 17 nt, Human
cugcccaccuggccucu

SEQ ID NO: 1171890 - RNA, 18 nt, Human
cugcccaccuggccucug

SEQ ID NO: 1171891 - RNA, 19 nt, Human
cugcccaccuggccucugc

SEQ ID NO: 1171892 - RNA, 20 nt, Human
cugcccaccuggccucugca

SEQ ID NO: 1171893 - RNA, 22 nt, Human
cugcccaccuggccucugcacu

SEQ ID NO: 1171894 - RNA, 14 nt, Human
cugcccacucccug

SEQ ID NO: 1171895 - RNA, 15 nt, Human
cugcccacucccugc

SEQ ID NO: 1171896 - RNA, 16 nt, Human
cugcccacucccugca

SEQ ID NO: 1171897 - RNA, 11 nt, Human
cugccaggcau

SEQ ID NO: 1171898 - RNA, 13 nt, Human
cugccaggcaugg

SEQ ID NO: 1171899 - RNA, 23 nt, Human
cugccaucucaccuccugcuggg

SEQ ID NO: 1171900 - RNA, 21 nt, Human
cugccaucucaccuccugcug

SEQ ID NO: 1171901 - RNA, 14 nt, Human
cugccaugccagcu

SEQ ID NO: 1171902 - RNA, 15 nt, Human
cugccaugccagcuu

SEQ ID NO: 1171903 - RNA, 14 nt, Human
cugcccaccuggcc

SEQ ID NO: 1171904 - RNA, 15 nt, Human
cugcccaccuggccu

SEQ ID NO: 1171905 - RNA, 12 nt, Human
cugccgcagccc

SEQ ID NO: 1171906 - RNA, 13 nt, Human
cugccgcagcccu

SEQ ID NO: 1171907 - RNA, 20 nt, Human
cugccgcagcccugcagagg

SEQ ID NO: 1171908 - RNA, 21 nt, Human
cugccgcagcccugcagaggg

SEQ ID NO: 1171909 - RNA, 22 nt, Human
cugccgcagcccugcagagggc

SEQ ID NO: 1171910 - RNA, 23 nt, Human
cugccgcagcccugcagagggca

SEQ ID NO: 1171911 - RNA, 14 nt, Human
cugccgcagcccug

SEQ ID NO: 1171912 - RNA, 19 nt, Human
cugccucagccucccaaag

SEQ ID NO: 1171913 - RNA, 15 nt, Human
cugccucagccuccc

SEQ ID NO: 1171914 - RNA, 18 nt, Human
cugcgguccacccaggag

SEQ ID NO: 1171915 - RNA, 19 nt, Human
cugcgguccacccaggagc

SEQ ID NO: 1171916 - RNA, 20 nt, Human
cugcgguccacccaggagcc

SEQ ID NO: 1171917 - RNA, 17 nt, Human
cugccucugacacacag

SEQ ID NO: 1171918 - RNA, 18 nt, Human
cugccucugacacacagc

SEQ ID NO: 1171919 - RNA, 21 nt, Human
cugccucugacacacagcucu

SEQ ID NO: 1171920 - RNA, 22 nt, Human
cugccugcccaggccccugcca

SEQ ID NO: 1171921 - RNA, 21 nt, Human
cugggauuacaagcgugagcc

SEQ ID NO: 1171922 - RNA, 20 nt, Human
cuggguaacuagggaagaua

SEQ ID NO: 1171923 - RNA, 15 nt, Human
cugggcuucaguggc

SEQ ID NO: 1171924 - RNA, 17 nt, Human
cugggcuucaguggcag

SEQ ID NO: 1171925 - RNA, 22 nt, Human
cugggcuuggggaccagagcug

SEQ ID NO: 1171926 - RNA, 18 nt, Human
cugggcuugucuguagau

SEQ ID NO: 1171927 - RNA, 14 nt, Human
cugggggcugggca

SEQ ID NO: 1171928 - RNA, 18 nt, Human
cugggggcugggcagagg

SEQ ID NO: 1171929 - RNA, 19 nt, Human
cuguacgucugacaggcaa

SEQ ID NO: 1171930 - RNA, 20 nt, Human
cuguacgucugacaggcaau

SEQ ID NO: 1171931 - RNA, 17 nt, Human
cuguacaugaaaacaca

SEQ ID NO: 1171932 - RNA, 20 nt, Human
cuguacaugaaaacacauuu

SEQ ID NO: 1171933 - RNA, 21 nt, Human
cuguacaugaaaacacauuuu

SEQ ID NO: 1171934 - RNA, 14 nt, Human
cuguacgucugaca

SEQ ID NO: 1171935 - RNA, 15 nt, Human
cuguacgucugacag

SEQ ID NO: 1171936 - RNA, 16 nt, Human
cuguacgucugacagg

SEQ ID NO: 1171937 - RNA, 18 nt, Human
cuguacgucugacaggca

SEQ ID NO: 1171938 - RNA, 21 nt, Human
cuguaucccaugagccucagc

SEQ ID NO: 1171939 - RNA, 22 nt, Human
cuguaucccaugagccucagca

SEQ ID NO: 1171940 - RNA, 20 nt, Human
cuguaucccaugagccucag

SEQ ID NO: 1171941 - RNA, 20 nt, Human
cuguauuuuguuuuugucuu

SEQ ID NO: 1171942 - RNA, 15 nt, Human
cugucaauuacagga

SEQ ID NO: 1171943 - RNA, 16 nt, Human
cugucaauuacaggaa

SEQ ID NO: 1171944 - RNA, 17 nt, Human
cugguggcagcucaccu

SEQ ID NO: 1171945 - RNA, 18 nt, Human
cugguggcagcucaccuc

SEQ ID NO: 1171946 - RNA, 20 nt, Human
cugguggcagcucaccucuc

SEQ ID NO: 1171947 - RNA, 15 nt, Human
cugguggcagcugcg

SEQ ID NO: 1171948 - RNA, 14 nt, Human
cugguggcaguggg

SEQ ID NO: 1171949 - RNA, 18 nt, Human
cugguggcagugggagcu

SEQ ID NO: 1171950 - RNA, 21 nt, Human
cugguggcagcucaccucucc

SEQ ID NO: 1171951 - RNA, 19 nt, Human
cugguggcagugggagcug

SEQ ID NO: 1171952 - RNA, 21 nt, Human
cugguuagagguucccuuuga

SEQ ID NO: 1171953 - RNA, 22 nt, Human
cugguuagagguucccuuugac

SEQ ID NO: 1171954 - RNA, 19 nt, Human
cuguaauccuagcacuuug

SEQ ID NO: 1171955 - RNA, 14 nt, Human
cuguaauuugugau

SEQ ID NO: 1171956 - RNA, 15 nt, Human
cuguaauuugugaua

SEQ ID NO: 1171957 - RNA, 17 nt, Human
cuguaauuugugauaca

SEQ ID NO: 1171958 - RNA, 15 nt, Human
cuguacagagcccac

SEQ ID NO: 1171959 - RNA, 18 nt, Human
cuguacagagcccacgcc

SEQ ID NO: 1171960 - RNA, 22 nt, Human
cuguacagagcccacgccccca

SEQ ID NO: 1171961 - RNA, 14 nt, Human
cugugggcccccaa

SEQ ID NO: 1171962 - RNA, 21 nt, Human
cuguggguuucuaaagcugcc

SEQ ID NO: 1171963 - RNA, 22 nt, Human
cuguggguuucuaaagcugcca

SEQ ID NO: 1171964 - RNA, 19 nt, Human
cugugucuuuaaaugcugc

SEQ ID NO: 1171965 - RNA, 20 nt, Human
cugugucuuuaaaugcugcu

SEQ ID NO: 1171966 - RNA, 21 nt, Human
cugugucuuuaaaugcugcuu

SEQ ID NO: 1171967 - RNA, 20 nt, Human
cugugucuuuuuucacuaca

SEQ ID NO: 1171968 - RNA, 18 nt, Human
cugugugugcgccuacag

SEQ ID NO: 1171969 - RNA, 18 nt, Human
cugucaauuacaggaagu

SEQ ID NO: 1171970 - RNA, 19 nt, Human
cugucaauuacaggaagua

SEQ ID NO: 1171971 - RNA, 21 nt, Human
cugucauuugagcagggcuca

SEQ ID NO: 1171972 - RNA, 22 nt, Human
cugucauuugagcagggcucag

SEQ ID NO: 1171973 - RNA, 23 nt, Human
cugucauuugagcagggcucagc

SEQ ID NO: 1171974 - RNA, 18 nt, Human
cugucuucaguaagccgu

SEQ ID NO: 1171975 - RNA, 15 nt, Human
cugugaaaggaaaga

SEQ ID NO: 1171976 - RNA, 16 nt, Human
cugugaaaggaaagag

SEQ ID NO: 1171977 - RNA, 22 nt, Human
cugugaaaggaaagagggaggu

SEQ ID NO: 1171978 - RNA, 15 nt, Human
cugugauggggcccu

SEQ ID NO: 1171979 - RNA, 16 nt, Human
cugugauggggcccug

SEQ ID NO: 1171980 - RNA, 21 nt, Human
cugugauggggcccugccucc

SEQ ID NO: 1171981 - RNA, 23 nt, Human
cugugauggggcccugccuccuu

SEQ ID NO: 1171982 - RNA, 17 nt, Human
cugugauggggcccugc

SEQ ID NO: 1171983 - RNA, 14 nt, Human
cugugccaugugcc

SEQ ID NO: 1171984 - RNA, 15 nt, Human
cugugccaugugcca

SEQ ID NO: 1171985 - RNA, 19 nt, Human
cugugcccuaaaguguauu

SEQ ID NO: 1171986 - RNA, 14 nt, Human
cuguuuuauaauuu

SEQ ID NO: 1171987 - RNA, 15 nt, Human
cuguuuuauaauuuu

SEQ ID NO: 1171988 - RNA, 19 nt, Human
cuguuuuauaauuuuguga

SEQ ID NO: 1171989 - RNA, 13 nt, Human
cuguuuucucuug

SEQ ID NO: 1171990 - RNA, 16 nt, Human
cuuaaaaaguggaaaa

SEQ ID NO: 1171991 - RNA, 17 nt, Human
cuuaaaaaguggaaaaa

SEQ ID NO: 1171992 - RNA, 17 nt, Human
cuguuugcuaagugagg

SEQ ID NO: 1171993 - RNA, 19 nt, Human
cuguuugcuaagugaggau

SEQ ID NO: 1171994 - RNA, 17 nt, Human
cuguugcccaggcuggc

SEQ ID NO: 1171995 - RNA, 18 nt, Human
cuguugcccaggcuggcg

SEQ ID NO: 1171996 - RNA, 17 nt, Human
cuguuuagauaauacac

SEQ ID NO: 1171997 - RNA, 18 nt, Human
cuguuuagauaauacacc

SEQ ID NO: 1171998 - RNA, 15 nt, Human
cuguuucaaacuuua

SEQ ID NO: 1171999 - RNA, 17 nt, Human
cuguuucaaacuuuacu

SEQ ID NO: 1172000 - RNA, 16 nt, Human
cuguuaauaguucagg

SEQ ID NO: 1172001 - RNA, 15 nt, Human
cuguucuuuccaaag

SEQ ID NO: 1172002 - RNA, 16 nt, Human
cuguucuuuccaaagu

SEQ ID NO: 1172003 - RNA, 19 nt, Human
cuguucuuuccaaaguaca

SEQ ID NO: 1172004 - RNA, 21 nt, Human
cuguucuuuccaaaguacacu

SEQ ID NO: 1172005 - RNA, 13 nt, Human
cuguucuuucugg

SEQ ID NO: 1172006 - RNA, 14 nt, Human
cuguucuuucuggc

SEQ ID NO: 1172007 - RNA, 21 nt, Human
cuguucuuucuggcuaugcau

SEQ ID NO: 1172008 - RNA, 23 nt, Human
cuguucuuucuggcuaugcauuu

SEQ ID NO: 1172009 - RNA, 12 nt, Human
cuguugcccagg

SEQ ID NO: 1172010 - RNA, 13 nt, Human
cuguugcccaggc

SEQ ID NO: 1172011 - RNA, 14 nt, Human
cuguugcccaggcu

SEQ ID NO: 1172012 - RNA, 15 nt, Human
cuguugcccaggcug

SEQ ID NO: 1172013 - RNA, 16 nt, Human
cuguugcccaggcugg

SEQ ID NO: 1172014 - RNA, 23 nt, Human
cuuaagaagacugcauuauauuu

SEQ ID NO: 1172015 - RNA, 12 nt, Human
cuuaaaaauggu

SEQ ID NO: 1172016 - RNA, 20 nt, Human
cuuaauucuuagcucauucu

SEQ ID NO: 1172017 - RNA, 20 nt, Human
cuuagaagucacacaguauu

SEQ ID NO: 1172018 - RNA, 20 nt, Human
cuuagaaaaaccaccaccau

SEQ ID NO: 1172019 - RNA, 13 nt, Human
cuuacuguacaug

SEQ ID NO: 1172020 - RNA, 20 nt, Human
cuuaccugccaggaagccag

SEQ ID NO: 1172021 - RNA, 11 nt, Human
cuuagacaguc

SEQ ID NO: 1172022 - RNA, 23 nt, Human
cuuagguuggcaaaaaggcagga

SEQ ID NO: 1172023 - RNA, 14 nt, Human
cuuagucacugaga

SEQ ID NO: 1172024 - RNA, 17 nt, Human
cuucaaggauccugagc

SEQ ID NO: 1172025 - RNA, 18 nt, Human
cuucaaggauccugagcc

SEQ ID NO: 1172026 - RNA, 19 nt, Human
cuucaaggauccugagcca

SEQ ID NO: 1172027 - RNA, 20 nt, Human
cuucaaggauccugagccag

SEQ ID NO: 1172028 - RNA, 22 nt, Human
cuuagucacugagacagcccgg

SEQ ID NO: 1172029 - RNA, 21 nt, Human
cuuagucacugagacagcccg

SEQ ID NO: 1172030 - RNA, 17 nt, Human
cuucaaauccuugaaga

SEQ ID NO: 1172031 - RNA, 23 nt, Human
cuucaaggauccugagccagauu

SEQ ID NO: 1172032 - RNA, 21 nt, Human
cuucaaggauccugagccaga

SEQ ID NO: 1172033 - RNA, 22 nt, Human
cuucaaggauccugagccagau

SEQ ID NO: 1172034 - RNA, 14 nt, Human
cuucacauauugau

SEQ ID NO: 1172035 - RNA, 23 nt, Human
cuucacauauugauuuccguuaa

SEQ ID NO: 1172036 - RNA, 20 nt, Human
cuucauucaacccaccugcg

SEQ ID NO: 1172037 - RNA, 13 nt, Human
cuuccacaagagc

SEQ ID NO: 1172038 - RNA, 14 nt, Human
cuuccacaagagcc

SEQ ID NO: 1172039 - RNA, 15 nt, Human
cuuccacaagagccc

SEQ ID NO: 1172040 - RNA, 15 nt, Human
cuucaguaagccgug

SEQ ID NO: 1172041 - RNA, 14 nt, Human
cuucagugccaaaa

SEQ ID NO: 1172042 - RNA, 14 nt, Human
cuucagccucccga

SEQ ID NO: 1172043 - RNA, 16 nt, Human
cuucagccucccgagu

SEQ ID NO: 1172044 - RNA, 20 nt, Human
cuucagccucccgaguagcu

SEQ ID NO: 1172045 - RNA, 15 nt, Human
cuucagccugaaaga

SEQ ID NO: 1172046 - RNA, 16 nt, Human
cuucagcgguuuauau

SEQ ID NO: 1172047 - RNA, 19 nt, Human
cuucagcugacuuuucugu

SEQ ID NO: 1172048 - RNA, 14 nt, Human
cuucaguaagccgu

SEQ ID NO: 1172049 - RNA, 16 nt, Human
cuuccacaagagccca

SEQ ID NO: 1172050 - RNA, 19 nt, Human
cuuccagauccuggaaauc

SEQ ID NO: 1172051 - RNA, 17 nt, Human
cuucgcuccugugucuu

SEQ ID NO: 1172052 - RNA, 20 nt, Human
cuucggccuccauccugagg

SEQ ID NO: 1172053 - RNA, 19 nt, Human
cuucgggaggucgaggcag

SEQ ID NO: 1172054 - RNA, 16 nt, Human
cuucucacugccaugc

SEQ ID NO: 1172055 - RNA, 21 nt, Human
cuucucacugccaugccagcu

SEQ ID NO: 1172056 - RNA, 17 nt, Human
cuucuccacccugcucu

SEQ ID NO: 1172057 - RNA, 18 nt, Human
cuucuccacccugcucuc

SEQ ID NO: 1172058 - RNA, 21 nt, Human
cuucuccacccugcucuccga

SEQ ID NO: 1172059 - RNA, 18 nt, Human
cuugcccuggugccucac

SEQ ID NO: 1172060 - RNA, 14 nt, Human
cuugcucugcugac

SEQ ID NO: 1172061 - RNA, 16 nt, Human
cuugcucugcugacag

SEQ ID NO: 1172062 - RNA, 17 nt, Human
cuugcucugcugacaga

SEQ ID NO: 1172063 - RNA, 20 nt, Human
cuugcuucaaccccaugaga

SEQ ID NO: 1172064 - RNA, 16 nt, Human
cuuggaaaugggagac

SEQ ID NO: 1172065 - RNA, 13 nt, Human
cuuggaagcuccg

SEQ ID NO: 1172066 - RNA, 14 nt, Human
cuuggaagcuccgc

SEQ ID NO: 1172067 - RNA, 13 nt, Human
cuuggaggaagga

SEQ ID NO: 1172068 - RNA, 19 nt, Human
cuuguaaaggaauuuaaaa

SEQ ID NO: 1172069 - RNA, 16 nt, Human
cuuggggggcugaggu

SEQ ID NO: 1172070 - RNA, 22 nt, Human
cuuggggggcugaggugggagg

SEQ ID NO: 1172071 - RNA, 22 nt, Human
cuuggggaccagagcugccacc

SEQ ID NO: 1172072 - RNA, 16 nt, Human
cuuggggaccagagcu

SEQ ID NO: 1172073 - RNA, 15 nt, Human
cuuggggggcugagg

SEQ ID NO: 1172074 - RNA, 14 nt, Human
cuugggccacugug

SEQ ID NO: 1172075 - RNA, 18 nt, Human
cuugggccacugugaaga

SEQ ID NO: 1172076 - RNA, 13 nt, Human
cuugggcuucauc

SEQ ID NO: 1172077 - RNA, 22 nt, Human
cuugggcuucauccuccucaga

SEQ ID NO: 1172078 - RNA, 21 nt, Human
cuuggggaccagagcugccac

SEQ ID NO: 1172079 - RNA, 22 nt, Human
cuuggaggaaggaaacccagcu

SEQ ID NO: 1172080 - RNA, 16 nt, Human
cuuggcugcagggagu

SEQ ID NO: 1172081 - RNA, 17 nt, Human
cuuggcugcagggaguc

SEQ ID NO: 1172082 - RNA, 16 nt, Human
cuuguaaauagcucag

SEQ ID NO: 1172083 - RNA, 21 nt, Human
cuuguguguuuauugucaaag

SEQ ID NO: 1172084 - RNA, 13 nt, Human
cuuuauaauucua

SEQ ID NO: 1172085 - RNA, 21 nt, Human
cuuuauuuucuauaauuuaaa

SEQ ID NO: 1172086 - RNA, 18 nt, Human
cuuuccaaaugcccagcu

SEQ ID NO: 1172087 - RNA, 19 nt, Human
cuuuccaaaugcccagcuu

SEQ ID NO: 1172088 - RNA, 22 nt, Human
cuuuccaaaugcccagcuuaaa

SEQ ID NO: 1172089 - RNA, 13 nt, Human
cuuuccacagaag

SEQ ID NO: 1172090 - RNA, 15 nt, Human
cuuuggacccugagg

SEQ ID NO: 1172091 - RNA, 16 nt, Human
cuuuggacccugaggc

SEQ ID NO: 1172092 - RNA, 17 nt, Human
cuuuggacccugaggcc

SEQ ID NO: 1172093 - RNA, 18 nt, Human
cuuuggacccugaggccc

SEQ ID NO: 1172094 - RNA, 19 nt, Human
cuuuggacccugaggccca

SEQ ID NO: 1172095 - RNA, 16 nt, Human
cuuucccaucuuccaa

SEQ ID NO: 1172096 - RNA, 13 nt, Human
cuuugggaggcca

SEQ ID NO: 1172097 - RNA, 18 nt, Human
cuuuguccccaccgcaga

SEQ ID NO: 1172098 - RNA, 22 nt, Human
cuuuguccccaccgcagacagg

SEQ ID NO: 1172099 - RNA, 23 nt, Human
cuuugggaggccaaggugggagg

SEQ ID NO: 1172100 - RNA, 14 nt, Human
cuuugugauuuuug

SEQ ID NO: 1172101 - RNA, 17 nt, Human
cuuugugauuuuuguaa

SEQ ID NO: 1172102 - RNA, 18 nt, Human
cuuugugauuuuuguaau

SEQ ID NO: 1172103 - RNA, 19 nt, Human
cuuugugauuuuuguaauu

SEQ ID NO: 1172104 - RNA, 14 nt, Human
cuuuguucuggcuc

SEQ ID NO: 1172105 - RNA, 15 nt, Human
cuuuguucuggcucu

SEQ ID NO: 1172106 - RNA, 20 nt, Human
cuuuucauaaccuagccuua

SEQ ID NO: 1172107 - RNA, 22 nt, Human
cuuuucauaaccuagccuuaga

SEQ ID NO: 1172108 - RNA, 18 nt, Human
cuuuguuuguugucagcu

SEQ ID NO: 1172109 - RNA, 20 nt, Human
cuuuguuuguugucagcuga

SEQ ID NO: 1172110 - RNA, 18 nt, Human
cuuuucuguccgagcuuu

SEQ ID NO: 1172111 - RNA, 23 nt, Human
cuuuucuguccgagcuuugaaaa

SEQ ID NO: 1172112 - RNA, 23 nt, Human
cuuuucuugcaugaggcuagugu

SEQ ID NO: 1172113 - RNA, 16 nt, Human
cuuuucuuucagccaa

SEQ ID NO: 1172114 - RNA, 16 nt, Human
gaaaacaugcuacaca

SEQ ID NO: 1172115 - RNA, 15 nt, Human
gaaaacguggcugcu

SEQ ID NO: 1172116 - RNA, 16 nt, Human
gaaaacguggcugcuu

SEQ ID NO: 1172117 - RNA, 18 nt, Human
gaaaacguggcugcuuca

SEQ ID NO: 1172118 - RNA, 19 nt, Human
gaaaacguggcugcuucaa

SEQ ID NO: 1172119 - RNA, 22 nt, Human
gaaaacaauaacgauaaaagac

SEQ ID NO: 1172120 - RNA, 13 nt, Human
gaaaacacauuuu

SEQ ID NO: 1172121 - RNA, 14 nt, Human
gaaaacacauuuuu

SEQ ID NO: 1172122 - RNA, 12 nt, Human
gaaaacaugcua

SEQ ID NO: 1172123 - RNA, 14 nt, Human
gaaaacaugcuaca

SEQ ID NO: 1172124 - RNA, 15 nt, Human
gaaaacaugcuacac

SEQ ID NO: 1172125 - RNA, 16 nt, Human
cuuuugagcauuuaga

SEQ ID NO: 1172126 - RNA, 21 nt, Human
cuuuugagugccuuacacaau

SEQ ID NO: 1172127 - RNA, 14 nt, Human
cuuuuuuggcugcu

SEQ ID NO: 1172128 - RNA, 15 nt, Human
cuuuuuuggcugcug

SEQ ID NO: 1172129 - RNA, 23 nt, Human
gaaaaaggaugcacagaguuguu

SEQ ID NO: 1172130 - RNA, 16 nt, Human
cuuuuuuggcugcuga

SEQ ID NO: 1172131 - RNA, 20 nt, Human
gaaaaucuuauaauuuaaaa

SEQ ID NO: 1172132 - RNA, 16 nt, Human
gaaacagccugugucu

SEQ ID NO: 1172133 - RNA, 17 nt, Human
gaaacagccugugucuu

SEQ ID NO: 1172134 - RNA, 18 nt, Human
gaaacagcuaaugggaca

SEQ ID NO: 1172135 - RNA, 19 nt, Human
gaaaaucuuauaauuuaaa

SEQ ID NO: 1172136 - RNA, 16 nt, Human
gaaaaucagccugcuc

SEQ ID NO: 1172137 - RNA, 18 nt, Human
gaaaaucagccugcucca

SEQ ID NO: 1172138 - RNA, 12 nt, Human
gaaaauaucacu

SEQ ID NO: 1172139 - RNA, 21 nt, Human
gaaaauauacuguaaagaaag

SEQ ID NO: 1172140 - RNA, 23 nt, Human
gaaaauauacuguaaagaaagag

SEQ ID NO: 1172141 - RNA, 14 nt, Human
gaaaaucagccugc

SEQ ID NO: 1172142 - RNA, 19 nt, Human
gaaaauaacgauaaaagac

SEQ ID NO: 1172143 - RNA, 13 nt, Human
gaaaagcugcuga

SEQ ID NO: 1172144 - RNA, 17 nt, Human
gaaaagcugcugacagu

SEQ ID NO: 1172145 - RNA, 19 nt, Human
gaaaagcugcugacagugu

SEQ ID NO: 1172146 - RNA, 19 nt, Human
gaaaauauacuguaaagaa

SEQ ID NO: 1172147 - RNA, 20 nt, Human
gaaaauauacuguaaagaaa

SEQ ID NO: 1172148 - RNA, 11 nt, Human
gaaacauuugg

SEQ ID NO: 1172149 - RNA, 20 nt, Human
gaaacagccugugucuuuaa

SEQ ID NO: 1172150 - RNA, 13 nt, Human
gaaauauaauuga

SEQ ID NO: 1172151 - RNA, 17 nt, Human
gaaauauaggaacuuaa

SEQ ID NO: 1172152 - RNA, 21 nt, Human
gaaauaucugaaaauguaugu

SEQ ID NO: 1172153 - RNA, 17 nt, Human
gaaauuuguuauaauga

SEQ ID NO: 1172154 - RNA, 13 nt, Human
gaaauauuauguu

SEQ ID NO: 1172155 - RNA, 16 nt, Human
gaaauauuauguuaaa

SEQ ID NO: 1172156 - RNA, 14 nt, Human
gaaaugggcagagc

SEQ ID NO: 1172157 - RNA, 20 nt, Human
gaaaugggcagagcagagac

SEQ ID NO: 1172158 - RNA, 15 nt, Human
gaaaugggcagagca

SEQ ID NO: 1172159 - RNA, 16 nt, Human
gaaccaccacacccag

SEQ ID NO: 1172160 - RNA, 17 nt, Human
gaaccaccacacccagc

SEQ ID NO: 1172161 - RNA, 15 nt, Human
gaacagacuggaagc

SEQ ID NO: 1172162 - RNA, 16 nt, Human
gaacagacuggaagca

SEQ ID NO: 1172163 - RNA, 19 nt, Human
gaacagacuggaagcacag

SEQ ID NO: 1172164 - RNA, 21 nt, Human
gaaccacaucuugcucugcug

SEQ ID NO: 1172165 - RNA, 22 nt, Human
gaacuagaguuuagcuggaaaa

SEQ ID NO: 1172166 - RNA, 22 nt, Human
gaacuuguaaaggaauuuaaaa

SEQ ID NO: 1172167 - RNA, 21 nt, Human
gaagaagcaccaaucaugaau

SEQ ID NO: 1172168 - RNA, 21 nt, Human
gaacuuguaaaggaauuuaaa

SEQ ID NO: 1172169 - RNA, 17 nt, Human
gaacuuggcgcugcccc

SEQ ID NO: 1172170 - RNA, 23 nt, Human
gaacuugguucccauuugcuccu

SEQ ID NO: 1172171 - RNA, 13 nt, Human
gaacuuggcgcug

SEQ ID NO: 1172172 - RNA, 15 nt, Human
gaacuuggcgcugcc

SEQ ID NO: 1172173 - RNA, 16 nt, Human
gaacuuggcgcugccc

SEQ ID NO: 1172174 - RNA, 14 nt, Human
gaacucccuuucaa

SEQ ID NO: 1172175 - RNA, 15 nt, Human
gaacucccuuucaac

SEQ ID NO: 1172176 - RNA, 22 nt, Human
gaacuggguacuuguggacaca

SEQ ID NO: 1172177 - RNA, 22 nt, Human
gaacuuccagauccuggaaauc

SEQ ID NO: 1172178 - RNA, 14 nt, Human
gaagcggcuggcag

SEQ ID NO: 1172179 - RNA, 21 nt, Human
gaagccuuggggcugaugcag

SEQ ID NO: 1172180 - RNA, 20 nt, Human
gaagcccaggaaaggcucca

SEQ ID NO: 1172181 - RNA, 21 nt, Human
gaagcccaggaaaggcuccag

SEQ ID NO: 1172182 - RNA, 22 nt, Human
gaagcccaggaaaggcuccagg

SEQ ID NO: 1172183 - RNA, 23 nt, Human
gaagcccaggaaaggcuccagga

SEQ ID NO: 1172184 - RNA, 19 nt, Human
gaagacucauucuucugua

SEQ ID NO: 1172185 - RNA, 21 nt, Human
gaagacucauucuucuguacg

SEQ ID NO: 1172186 - RNA, 14 nt, Human
gaagaagcucucuc

SEQ ID NO: 1172187 - RNA, 17 nt, Human
gaagacugcauuauauu

SEQ ID NO: 1172188 - RNA, 15 nt, Human
gaagccagcaggcuc

SEQ ID NO: 1172189 - RNA, 16 nt, Human
gaagccagcaggcucu

SEQ ID NO: 1172190 - RNA, 19 nt, Human
gaagccagcaggcucucag

SEQ ID NO: 1172191 - RNA, 14 nt, Human
gaaggccccgccca

SEQ ID NO: 1172192 - RNA, 15 nt, Human
gaaggccccgcccag

SEQ ID NO: 1172193 - RNA, 16 nt, Human
gaaggccccgcccagg

SEQ ID NO: 1172194 - RNA, 17 nt, Human
gaaggccccgcccaggc

SEQ ID NO: 1172195 - RNA, 14 nt, Human
gaaggaaacccagc

SEQ ID NO: 1172196 - RNA, 17 nt, Human
gaaggaaacccagcucu

SEQ ID NO: 1172197 - RNA, 18 nt, Human
gaaggaaacccagcucug

SEQ ID NO: 1172198 - RNA, 19 nt, Human
gaaggaaacccagcucugg

SEQ ID NO: 1172199 - RNA, 12 nt, Human
gaaggauacaaa

SEQ ID NO: 1172200 - RNA, 19 nt, Human
gaaggauacaaaagcaugu

SEQ ID NO: 1172201 - RNA, 21 nt, Human
gaaggauacaaaagcauguga

SEQ ID NO: 1172202 - RNA, 12 nt, Human
gaaguuucugcc

SEQ ID NO: 1172203 - RNA, 20 nt, Human
gaaguuucugccgcagcccu

SEQ ID NO: 1172204 - RNA, 14 nt, Human
gaauaacauguaau

SEQ ID NO: 1172205 - RNA, 14 nt, Human
gaauacuuuauaaa

SEQ ID NO: 1172206 - RNA, 14 nt, Human
gaauagcugggacu

SEQ ID NO: 1172207 - RNA, 15 nt, Human
gaauagcugggacua

SEQ ID NO: 1172208 - RNA, 18 nt, Human
gaauccagacccggcugc

SEQ ID NO: 1172209 - RNA, 16 nt, Human
gaaucucaaauaacua

SEQ ID NO: 1172210 - RNA, 19 nt, Human
gaaugaaacccccacacac

SEQ ID NO: 1172211 - RNA, 20 nt, Human
gaaugaaacccccacacaca

SEQ ID NO: 1172212 - RNA, 14 nt, Human
gaaugaaagggccc

SEQ ID NO: 1172213 - RNA, 19 nt, Human
gaaugaaagggcccagaga

SEQ ID NO: 1172214 - RNA, 21 nt, Human
gaaugaaacccccacacacac

SEQ ID NO: 1172215 - RNA, 21 nt, Human
gaaugaaagggcccagagagg

SEQ ID NO: 1172216 - RNA, 13 nt, Human
gagccacugcacc

SEQ ID NO: 1172217 - RNA, 21 nt, Human
gagcagccacauuccugaugc

SEQ ID NO: 1172218 - RNA, 18 nt, Human
gagcagccacauuccuga

SEQ ID NO: 1172219 - RNA, 22 nt, Human
gagccacugcaccgggccacag

SEQ ID NO: 1172220 - RNA, 13 nt, Human
gagccagauuuca

SEQ ID NO: 1172221 - RNA, 12 nt, Human
gagcccacgccc

SEQ ID NO: 1172222 - RNA, 15 nt, Human
gagcccacgccccca

SEQ ID NO: 1172223 - RNA, 16 nt, Human
gagcccacgcccccac

SEQ ID NO: 1172224 - RNA, 12 nt, Human
gagcccaggccu

SEQ ID NO: 1172225 - RNA, 13 nt, Human
gagcccaggccuc

SEQ ID NO: 1172226 - RNA, 14 nt, Human
gagcccaggccucc

SEQ ID NO: 1172227 - RNA, 18 nt, Human
gagcccacgcccccacug

SEQ ID NO: 1172228 - RNA, 20 nt, Human
gagaucaaccccuucgcucc

SEQ ID NO: 1172229 - RNA, 23 nt, Human
gagaucaaccccuucgcuccugu

SEQ ID NO: 1172230 - RNA, 13 nt, Human
gagaucagccugg

SEQ ID NO: 1172231 - RNA, 14 nt, Human
gagaucagccuggg

SEQ ID NO: 1172232 - RNA, 16 nt, Human
gagaucagccugggca

SEQ ID NO: 1172233 - RNA, 19 nt, Human
gagcaaaaucgaugcagug

SEQ ID NO: 1172234 - RNA, 21 nt, Human
gagcaagacgcugugcugccc

SEQ ID NO: 1172235 - RNA, 22 nt, Human
gagcaagacgcugugcugcccu

SEQ ID NO: 1172236 - RNA, 23 nt, Human
gagcaagacgcugugcugcccug

SEQ ID NO: 1172237 - RNA, 17 nt, Human
gagcaccuuagacaguc

SEQ ID NO: 1172238 - RNA, 19 nt, Human
gagcaccuuagacaguccc

SEQ ID NO: 1172239 - RNA, 18 nt, Human
gagcccugguggcagugg

SEQ ID NO: 1172240 - RNA, 14 nt, Human
gagccuccugcccu

SEQ ID NO: 1172241 - RNA, 20 nt, Human
gagccucagcauccuggcac

SEQ ID NO: 1172242 - RNA, 21 nt, Human
gagccucagcauccuggcacc

SEQ ID NO: 1172243 - RNA, 15 nt, Human
gagcccugguggcag

SEQ ID NO: 1172244 - RNA, 16 nt, Human
gagcccugguggcagu

SEQ ID NO: 1172245 - RNA, 17 nt, Human
gagcccugguggcagug

SEQ ID NO: 1172246 - RNA, 20 nt, Human
gagccuccugcccuuaccug

SEQ ID NO: 1172247 - RNA, 22 nt, Human
gagccuccugcccuuaccugcc

SEQ ID NO: 1172248 - RNA, 13 nt, Human
gagcuacaaaugc

SEQ ID NO: 1172249 - RNA, 12 nt, Human
gagcuacaaaug

SEQ ID NO: 1172250 - RNA, 10 nt, Human
gagccuggca

SEQ ID NO: 1172251 - RNA, 15 nt, Human
gagccuggcaagaau

SEQ ID NO: 1172252 - RNA, 13 nt, Human
gagccugggaggu

SEQ ID NO: 1172253 - RNA, 21 nt, Human
gagccugggaggucaaggcug

SEQ ID NO: 1172254 - RNA, 13 nt, Human
gagcugccaccug

SEQ ID NO: 1172255 - RNA, 15 nt, Human
gagcugccaccugcc

SEQ ID NO: 1172256 - RNA, 16 nt, Human
gagcugccaccugccu

SEQ ID NO: 1172257 - RNA, 14 nt, Human
gagcuacaaaugca

SEQ ID NO: 1172258 - RNA, 23 nt, Human
gagcuacacaggggaaaagagga

SEQ ID NO: 1172259 - RNA, 22 nt, Human
gaggaaggaaacccagcucugg

SEQ ID NO: 1172260 - RNA, 14 nt, Human
gaggaauccagacc

SEQ ID NO: 1172261 - RNA, 15 nt, Human
gaggaauccagaccc

SEQ ID NO: 1172262 - RNA, 13 nt, Human
gaggacagggagg

SEQ ID NO: 1172263 - RNA, 22 nt, Human
gaggacagggaggugaccccag

SEQ ID NO: 1172264 - RNA, 23 nt, Human
gaggacagggaggugaccccagg

SEQ ID NO: 1172265 - RNA, 23 nt, Human
gaggaguuugggguaugggagag

SEQ ID NO: 1172266 - RNA, 12 nt, Human
gaggauguucug

SEQ ID NO: 1172267 - RNA, 17 nt, Human
gaggauguucugggaca

SEQ ID NO: 1172268 - RNA, 20 nt, Human
gaggauguucugggacacag

SEQ ID NO: 1172269 - RNA, 16 nt, Human
gaggauugcuugagcu

SEQ ID NO: 1172270 - RNA, 13 nt, Human
gaggcagccccau

SEQ ID NO: 1172271 - RNA, 18 nt, Human
gaggcagccccauucugc

SEQ ID NO: 1172272 - RNA, 22 nt, Human
gaggcagccccauucugccugc

SEQ ID NO: 1172273 - RNA, 23 nt, Human
gaggcagccccauucugccugcc

SEQ ID NO: 1172274 - RNA, 12 nt, Human
gaggccagccuu

SEQ ID NO: 1172275 - RNA, 13 nt, Human
gaggccagccuug

SEQ ID NO: 1172276 - RNA, 14 nt, Human
gaggccuucucuga

SEQ ID NO: 1172277 - RNA, 13 nt, Human
gaggcugggcucc

SEQ ID NO: 1172278 - RNA, 14 nt, Human
gaggcugggcuccc

SEQ ID NO: 1172279 - RNA, 15 nt, Human
gaggcugggcucccu

SEQ ID NO: 1172280 - RNA, 16 nt, Human
gaggcugggcucccuu

SEQ ID NO: 1172281 - RNA, 19 nt, Human
gaggcccccaucuccuuaa

SEQ ID NO: 1172282 - RNA, 14 nt, Human
gaggcccuucucuc

SEQ ID NO: 1172283 - RNA, 23 nt, Human
gaggcccuucucuccagccccug

SEQ ID NO: 1172284 - RNA, 24 nt, Human
gaggcccuucucuccagccccugg

SEQ ID NO: 1172285 - RNA, 23 nt, Human
gagggcacagaaaauggaagaca

SEQ ID NO: 1172286 - RNA, 22 nt, Human
gagggcacagaaaauggaagac

SEQ ID NO: 1172287 - RNA, 13 nt, Human
gagggagugacag

SEQ ID NO: 1172288 - RNA, 14 nt, Human
gagggagugacaga

SEQ ID NO: 1172289 - RNA, 16 nt, Human
gagggagggcuccaga

SEQ ID NO: 1172290 - RNA, 16 nt, Human
gagggagugacagagg

SEQ ID NO: 1172291 - RNA, 22 nt, Human
gaggggccucuuaugggcuggg

SEQ ID NO: 1172292 - RNA, 14 nt, Human
gagggagggagggc

SEQ ID NO: 1172293 - RNA, 15 nt, Human
gagggagggagggcu

SEQ ID NO: 1172294 - RNA, 15 nt, Human
gagggagggcuccag

SEQ ID NO: 1172295 - RNA, 15 nt, Human
gaggggguggccucc

SEQ ID NO: 1172296 - RNA, 22 nt, Human
gaggggggaggugggauccucc

SEQ ID NO: 1172297 - RNA, 15 nt, Human
gaggggggagguggg

SEQ ID NO: 1172298 - RNA, 21 nt, Human
gaggugggauccuccaggugc

SEQ ID NO: 1172299 - RNA, 22 nt, Human
gaggugggauccuccaggugca

SEQ ID NO: 1172300 - RNA, 19 nt, Human
gagguucaaagauauuuug

SEQ ID NO: 1172301 - RNA, 14 nt, Human
gagguucccuuuga

SEQ ID NO: 1172302 - RNA, 19 nt, Human
gagguuuuaaaaaaauccc

SEQ ID NO: 1172303 - RNA, 16 nt, Human
gaguacguugugcauu

SEQ ID NO: 1172304 - RNA, 17 nt, Human
gaguacguugugcauuu

SEQ ID NO: 1172305 - RNA, 18 nt, Human
gaguacguugugcauuug

SEQ ID NO: 1172306 - RNA, 20 nt, Human
gaguacguugugcauuuggu

SEQ ID NO: 1172307 - RNA, 15 nt, Human
gaguacuacaguccu

SEQ ID NO: 1172308 - RNA, 18 nt, Human
gaguacuacaguccuccc

SEQ ID NO: 1172309 - RNA, 19 nt, Human
gaguacuacaguccuccca

SEQ ID NO: 1172310 - RNA, 20 nt, Human
gaguacuacaguccucccau

SEQ ID NO: 1172311 - RNA, 12 nt, Human
gaguccccuguu

SEQ ID NO: 1172312 - RNA, 14 nt, Human
gaguccccuguuug

SEQ ID NO: 1172313 - RNA, 23 nt, Human
gaguccccuguuuguuucugaaa

SEQ ID NO: 1172314 - RNA, 12 nt, Human
gaguagcuggga

SEQ ID NO: 1172315 - RNA, 14 nt, Human
gaguagcugggacu

SEQ ID NO: 1172316 - RNA, 19 nt, Human
gaguagcugggacuacagg

SEQ ID NO: 1172317 - RNA, 22 nt, Human
gagucucacuguugcccaggcu

SEQ ID NO: 1172318 - RNA, 23 nt, Human
gagucucacuguugcccaggcug

SEQ ID NO: 1172319 - RNA, 21 nt, Human
gagucugaaggcuggguucug

SEQ ID NO: 1172320 - RNA, 17 nt, Human
gagucgaggacagggag

SEQ ID NO: 1172321 - RNA, 20 nt, Human
gagucucacuguugcccagg

SEQ ID NO: 1172322 - RNA, 21 nt, Human
gagucucacuguugcccaggc

SEQ ID NO: 1172323 - RNA, 12 nt, Human
gagugggcccaa

SEQ ID NO: 1172324 - RNA, 23 nt, Human
gagugggggaucacagccucuga

SEQ ID NO: 1172325 - RNA, 19 nt, Human
gagugaacaaauuuacaga

SEQ ID NO: 1172326 - RNA, 22 nt, Human
gagugaacaaauuuacagagac

SEQ ID NO: 1172327 - RNA, 23 nt, Human
gagugaacaaauuuacagagaca

SEQ ID NO: 1172328 - RNA, 21 nt, Human
gaguugaaaaucuuauaauuu

SEQ ID NO: 1172329 - RNA, 14 nt, Human
gaguugaagacaga

SEQ ID NO: 1172330 - RNA, 17 nt, Human
gagugugccugaagucc

SEQ ID NO: 1172331 - RNA, 23 nt, Human
gaguucaucuugaauuguaagga

SEQ ID NO: 1172332 - RNA, 23 nt, Human
gauagauaggucagugcaaauac

SEQ ID NO: 1172333 - RNA, 12 nt, Human
gauagccaaggc

SEQ ID NO: 1172334 - RNA, 19 nt, Human
gauagcacagacccugccc

SEQ ID NO: 1172335 - RNA, 20 nt, Human
gauagcacagacccugcccu

SEQ ID NO: 1172336 - RNA, 13 nt, Human
gauagccaaggcc

SEQ ID NO: 1172337 - RNA, 14 nt, Human
gauagccaaggcca

SEQ ID NO: 1172338 - RNA, 22 nt, Human
gaucaaccccuucgcuccugug

SEQ ID NO: 1172339 - RNA, 13 nt, Human
gauacaaugcugu

SEQ ID NO: 1172340 - RNA, 18 nt, Human
gauacaaugcugugcccu

SEQ ID NO: 1172341 - RNA, 17 nt, Human
gauagcacagacccugc

SEQ ID NO: 1172342 - RNA, 18 nt, Human
gauagcacagacccugcc

SEQ ID NO: 1172343 - RNA, 21 nt, Human
gauccugagccagauuucacu

SEQ ID NO: 1172344 - RNA, 16 nt, Human
gaucuuugcagacagg

SEQ ID NO: 1172345 - RNA, 17 nt, Human
gaucuuugcagacaggc

SEQ ID NO: 1172346 - RNA, 15 nt, Human
gaugaaaaaauaaca

SEQ ID NO: 1172347 - RNA, 23 nt, Human
gaucaaccccuucgcuccugugu

SEQ ID NO: 1172348 - RNA, 13 nt, Human
gaucacgccacug

SEQ ID NO: 1172349 - RNA, 14 nt, Human
gaucacgccacugc

SEQ ID NO: 1172350 - RNA, 15 nt, Human
gaucacgccacugca

SEQ ID NO: 1172351 - RNA, 18 nt, Human
gauccuaguuccaccauc

SEQ ID NO: 1172352 - RNA, 16 nt, Human
gaucacgccacugcac

SEQ ID NO: 1172353 - RNA, 11 nt, Human
gauccuccagg

SEQ ID NO: 1172354 - RNA, 12 nt, Human
gauccuccaggu

SEQ ID NO: 1172355 - RNA, 19 nt, Human
gauccucccaccucagccu

SEQ ID NO: 1172356 - RNA, 20 nt, Human
gauccucccaccucagccuc

SEQ ID NO: 1172357 - RNA, 21 nt, Human
gauccucccaccucagccucc

SEQ ID NO: 1172358 - RNA, 14 nt, Human
gauccugagccaga

SEQ ID NO: 1172359 - RNA, 15 nt, Human
gauccugagccagau

SEQ ID NO: 1172360 - RNA, 19 nt, Human
gauccugagccagauuuca

SEQ ID NO: 1172361 - RNA, 14 nt, Human
gaugccugguggca

SEQ ID NO: 1172362 - RNA, 11 nt, Human
gaugagaaagg

SEQ ID NO: 1172363 - RNA, 22 nt, Human
gaugagaaagguugaagcacca

SEQ ID NO: 1172364 - RNA, 23 nt, Human
gaugagaaauaaaguuucuguug

SEQ ID NO: 1172365 - RNA, 21 nt, Human
gaugcacagaguuguuacauu

SEQ ID NO: 1172366 - RNA, 23 nt, Human
gauggugcaaugaccuuucaaua

SEQ ID NO: 1172367 - RNA, 20 nt, Human
gauggugcaaugaccuuuca

SEQ ID NO: 1172368 - RNA, 16 nt, Human
gauguucugggacaca

SEQ ID NO: 1172369 - RNA, 21 nt, Human
gauguucuuucacccuuuucu

SEQ ID NO: 1172370 - RNA, 19 nt, Human
gauguugaaaaaguucugc

SEQ ID NO: 1172371 - RNA, 14 nt, Human
gauguuuuccauga

SEQ ID NO: 1172372 - RNA, 15 nt, Human
gauguuuuccaugag

SEQ ID NO: 1172373 - RNA, 23 nt, Human
gauguuuuccaugaguccccugu

SEQ ID NO: 1172374 - RNA, 12 nt, Human
gauuaaauucuu

SEQ ID NO: 1172375 - RNA, 19 nt, Human
gauuaaauucuugcaaagu

SEQ ID NO: 1172376 - RNA, 18 nt, Human
gauuaaccacuucagcug

SEQ ID NO: 1172377 - RNA, 19 nt, Human
gauuaaccacuucagcuga

SEQ ID NO: 1172378 - RNA, 21 nt, Human
gauuaaccacuucagcugacu

SEQ ID NO: 1172379 - RNA, 19 nt, Human
gauucaacagguuuuccug

SEQ ID NO: 1172380 - RNA, 23 nt, Human
gauugacgggacuguugguauug

SEQ ID NO: 1172381 - RNA, 15 nt, Human
gauuguccccgaccc

SEQ ID NO: 1172382 - RNA, 20 nt, Human
gauuguccccgacccuugcc

SEQ ID NO: 1172383 - RNA, 13 nt, Human
gauugugccccug

SEQ ID NO: 1172384 - RNA, 12 nt, Human
gauucagacagc

SEQ ID NO: 1172385 - RNA, 22 nt, Human
gauucccaagcucugcuccucu

SEQ ID NO: 1172386 - RNA, 18 nt, Human
gcacagccucuuagaugc

SEQ ID NO: 1172387 - RNA, 23 nt, Human
gcacagcuucauuuccugugucu

SEQ ID NO: 1172388 - RNA, 15 nt, Human
gcacagccucuuaga

SEQ ID NO: 1172389 - RNA, 20 nt, Human
gauugugucucuugguccug

SEQ ID NO: 1172390 - RNA, 13 nt, Human
gcaccagcagccu

SEQ ID NO: 1172391 - RNA, 14 nt, Human
gcaccagcagccug

SEQ ID NO: 1172392 - RNA, 14 nt, Human
gcaccaucucuccu

SEQ ID NO: 1172393 - RNA, 15 nt, Human
gcaccaucucuccuc

SEQ ID NO: 1172394 - RNA, 17 nt, Human
gcaccaucucuccuccu

SEQ ID NO: 1172395 - RNA, 19 nt, Human
gcacuguuuuauuuuaauu

SEQ ID NO: 1172396 - RNA, 14 nt, Human
gcacugggcuuggg

SEQ ID NO: 1172397 - RNA, 12 nt, Human
gcacugggcuug

SEQ ID NO: 1172398 - RNA, 14 nt, Human
gcacuauaauguaa

SEQ ID NO: 1172399 - RNA, 15 nt, Human
gcacuauaauguaag

SEQ ID NO: 1172400 - RNA, 20 nt, Human
gcacuauaauguaagcucua

SEQ ID NO: 1172401 - RNA, 22 nt, Human
gcacuauaauguaagcucuacu

SEQ ID NO: 1172402 - RNA, 12 nt, Human
gcacugcuucca

SEQ ID NO: 1172403 - RNA, 13 nt, Human
gcacugcuuccag

SEQ ID NO: 1172404 - RNA, 14 nt, Human
gcacugcuuccagu

SEQ ID NO: 1172405 - RNA, 15 nt, Human
gcacugcuuccagug

SEQ ID NO: 1172406 - RNA, 14 nt, Human
gcacccggccccug

SEQ ID NO: 1172407 - RNA, 19 nt, Human
gcacccucaggcagguggg

SEQ ID NO: 1172408 - RNA, 14 nt, Human
gcacgugugugcac

SEQ ID NO: 1172409 - RNA, 20 nt, Human
gcacuaaggugugcucugau

SEQ ID NO: 1172410 - RNA, 18 nt, Human
gcagagguugcagugagc

SEQ ID NO: 1172411 - RNA, 23 nt, Human
gcagagguugcagugagccgaga

SEQ ID NO: 1172412 - RNA, 18 nt, Human
gcagauggagaccccuug

SEQ ID NO: 1172413 - RNA, 22 nt, Human
gcacuucgggaggucgaggcag

SEQ ID NO: 1172414 - RNA, 14 nt, Human
gcacuugcagacuc

SEQ ID NO: 1172415 - RNA, 16 nt, Human
gcacuugcagacucua

SEQ ID NO: 1172416 - RNA, 18 nt, Human
gcagacucuacagaggcc

SEQ ID NO: 1172417 - RNA, 19 nt, Human
gcagacucuacagaggcca

SEQ ID NO: 1172418 - RNA, 22 nt, Human
gcagacucuacagaggccaugg

SEQ ID NO: 1172419 - RNA, 20 nt, Human
gcagagaccaucccugaagg

SEQ ID NO: 1172420 - RNA, 21 nt, Human
gcagagaccaucccugaaggc

SEQ ID NO: 1172421 - RNA, 22 nt, Human
gcagagaccaucccugaaggcc

SEQ ID NO: 1172422 - RNA, 20 nt, Human
gcagcagggagggcuucugc

SEQ ID NO: 1172423 - RNA, 18 nt, Human
gcagcagggagggcuucu

SEQ ID NO: 1172424 - RNA, 19 nt, Human
gcagcagggagggcuucug

SEQ ID NO: 1172425 - RNA, 17 nt, Human
gcagccucacaguccuu

SEQ ID NO: 1172426 - RNA, 19 nt, Human
gcagccucacaguccuuac

SEQ ID NO: 1172427 - RNA, 16 nt, Human
gcagcucaccucuccc

SEQ ID NO: 1172428 - RNA, 17 nt, Human
gcagcucaccucucccu

SEQ ID NO: 1172429 - RNA, 20 nt, Human
gcagcucaccucucccuugg

SEQ ID NO: 1172430 - RNA, 21 nt, Human
gcagcucaccucucccuugga

SEQ ID NO: 1172431 - RNA, 14 nt, Human
gcagcucagagagg

SEQ ID NO: 1172432 - RNA, 18 nt, Human
gcagcucagagagggugg

SEQ ID NO: 1172433 - RNA, 19 nt, Human
gcagcucagagaggguggg

SEQ ID NO: 1172434 - RNA, 11 nt, Human
gcagugggagc

SEQ ID NO: 1172435 - RNA, 12 nt, Human
gcagugggagcu

SEQ ID NO: 1172436 - RNA, 18 nt, Human
gcaguggugcgaucuggg

SEQ ID NO: 1172437 - RNA, 19 nt, Human
gcaguggugcgaucugggu

SEQ ID NO: 1172438 - RNA, 17 nt, Human
gcagggucucacucugu

SEQ ID NO: 1172439 - RNA, 20 nt, Human
gcaguggugcgaucuggguu

SEQ ID NO: 1172440 - RNA, 21 nt, Human
gcaguggugcgaucuggguuc

SEQ ID NO: 1172441 - RNA, 22 nt, Human
gcaguggugcgaucuggguuca

SEQ ID NO: 1172442 - RNA, 19 nt, Human
gcaguggugguuuucuguu

SEQ ID NO: 1172443 - RNA, 20 nt, Human
gcaguggugguuuucuguuc

SEQ ID NO: 1172444 - RNA, 21 nt, Human
gcaguggugguuuucuguucu

SEQ ID NO: 1172445 - RNA, 22 nt, Human
gcaguggugguuuucuguucuu

SEQ ID NO: 1172446 - RNA, 19 nt, Human
gcauacguacacauuuuau

SEQ ID NO: 1172447 - RNA, 18 nt, Human
gcaggcagccaggccaca

SEQ ID NO: 1172448 - RNA, 22 nt, Human
gcaggggaggguagagcggaga

SEQ ID NO: 1172449 - RNA, 19 nt, Human
gcaggguccuagaaauucc

SEQ ID NO: 1172450 - RNA, 16 nt, Human
gcagggucucacucug

SEQ ID NO: 1172451 - RNA, 23 nt, Human
gcaucaggccaggcccucugccc

SEQ ID NO: 1172452 - RNA, 13 nt, Human
gcaucaggccagg

SEQ ID NO: 1172453 - RNA, 12 nt, Human
gcaucaggccag

SEQ ID NO: 1172454 - RNA, 20 nt, Human
gcaugaaguaauaugcacac

SEQ ID NO: 1172455 - RNA, 21 nt, Human
gcaugaaguaauaugcacaca

SEQ ID NO: 1172456 - RNA, 22 nt, Human
gcaugaaguaauaugcacacau

SEQ ID NO: 1172457 - RNA, 23 nt, Human
gcaugaaguaauaugcacacauu

SEQ ID NO: 1172458 - RNA, 21 nt, Human
gcaugacacgaauauugcuga

SEQ ID NO: 1172459 - RNA, 22 nt, Human
gcaugacacgaauauugcugau

SEQ ID NO: 1172460 - RNA, 14 nt, Human
gcaugccuggaugg

SEQ ID NO: 1172461 - RNA, 15 nt, Human
gcaugccuggauggg

SEQ ID NO: 1172462 - RNA, 13 nt, Human
gcauguuacauaa

SEQ ID NO: 1172463 - RNA, 14 nt, Human
gcauguucucugag

SEQ ID NO: 1172464 - RNA, 22 nt, Human
gcauuaucuagauacuguauca

SEQ ID NO: 1172465 - RNA, 24 nt, Human
gcauuaucuagauacuguaucaug

SEQ ID NO: 1172466 - RNA, 14 nt, Human
gcauuccccaggag

SEQ ID NO: 1172467 - RNA, 15 nt, Human
gcauuccccaggagg

SEQ ID NO: 1172468 - RNA, 16 nt, Human
gcauuccccaggaggc

SEQ ID NO: 1172469 - RNA, 17 nt, Human
gcauuccccaggaggcc

SEQ ID NO: 1172470 - RNA, 18 nt, Human
gcauuccccaggaggcca

SEQ ID NO: 1172471 - RNA, 19 nt, Human
gcauuccccaggaggccag

SEQ ID NO: 1172472 - RNA, 20 nt, Human
gcauuccccaggaggccagc

SEQ ID NO: 1172473 - RNA, 21 nt, Human
gcauuccccaggaggccagcc

SEQ ID NO: 1172474 - RNA, 22 nt, Human
gcauuccccaggaggccagccu

SEQ ID NO: 1172475 - RNA, 18 nt, Human
gcauuugaggucuguucu

SEQ ID NO: 1172476 - RNA, 21 nt, Human
gccaaggcugggggaagaagc

SEQ ID NO: 1172477 - RNA, 21 nt, Human
gcauuugaggucuguucuuuc

SEQ ID NO: 1172478 - RNA, 19 nt, Human
gcauuugaggucuguucuu

SEQ ID NO: 1172479 - RNA, 20 nt, Human
gcauuugaggucuguucuuu

SEQ ID NO: 1172480 - RNA, 22 nt, Human
gcauuuggugguuucagaaaug

SEQ ID NO: 1172481 - RNA, 23 nt, Human
gcauuuggugguuucagaaaugu

SEQ ID NO: 1172482 - RNA, 14 nt, Human
gccaaggugggagg

SEQ ID NO: 1172483 - RNA, 15 nt, Human
gccaaggugggagga

SEQ ID NO: 1172484 - RNA, 23 nt, Human
gccaaggugggaggauugcuuga

SEQ ID NO: 1172485 - RNA, 13 nt, Human
gccacagagaaag

SEQ ID NO: 1172486 - RNA, 14 nt, Human
gccacagagaaagu

SEQ ID NO: 1172487 - RNA, 20 nt, Human
gccacagagaaaguacuucu

SEQ ID NO: 1172488 - RNA, 23 nt, Human
gccacagagaaaguacuucucca

SEQ ID NO: 1172489 - RNA, 16 nt, Human
gccacaagacccuugu

SEQ ID NO: 1172490 - RNA, 22 nt, Human
gccacaagacccuugugguccc

SEQ ID NO: 1172491 - RNA, 10 nt, Human
gccacacaca

SEQ ID NO: 1172492 - RNA, 11 nt, Human
gccacacacac

SEQ ID NO: 1172493 - RNA, 12 nt, Human
gccacacacaca

SEQ ID NO: 1172494 - RNA, 13 nt, Human
gccacacacacag

SEQ ID NO: 1172495 - RNA, 14 nt, Human
gccacacacacaga

SEQ ID NO: 1172496 - RNA, 15 nt, Human
gccacacacacagaa

SEQ ID NO: 1172497 - RNA, 16 nt, Human
gccacacacacagaaa

SEQ ID NO: 1172498 - RNA, 17 nt, Human
gccacacacacagaaaa

SEQ ID NO: 1172499 - RNA, 18 nt, Human
gccacacacacagaaaau

SEQ ID NO: 1172500 - RNA, 19 nt, Human
gccacacacacagaaaaua

SEQ ID NO: 1172501 - RNA, 20 nt, Human
gccacacacacagaaaauau

SEQ ID NO: 1172502 - RNA, 21 nt, Human
gccacacacacagaaaauaua

SEQ ID NO: 1172503 - RNA, 22 nt, Human
gccacacacacagaaaauauac

SEQ ID NO: 1172504 - RNA, 23 nt, Human
gccacacacacagaaaauauacu

SEQ ID NO: 1172505 - RNA, 17 nt, Human
gccaccugccuguuggg

SEQ ID NO: 1172506 - RNA, 14 nt, Human
gccaccugcggugc

SEQ ID NO: 1172507 - RNA, 20 nt, Human
gccaccugcggugcuaucuc

SEQ ID NO: 1172508 - RNA, 22 nt, Human
gccaccugcggugcuaucuccc

SEQ ID NO: 1172509 - RNA, 18 nt, Human
gccacggccaggccagag

SEQ ID NO: 1172510 - RNA, 19 nt, Human
gccacggccaggccagagg

SEQ ID NO: 1172511 - RNA, 20 nt, Human
gccacuauuguuagucucuu

SEQ ID NO: 1172512 - RNA, 17 nt, Human
gccagagacacaagccu

SEQ ID NO: 1172513 - RNA, 19 nt, Human
gccagagacacaagccuuc

SEQ ID NO: 1172514 - RNA, 20 nt, Human
gccagagacacaagccuucg

SEQ ID NO: 1172515 - RNA, 10 nt, Human
gccagaggag

SEQ ID NO: 1172516 - RNA, 12 nt, Human
gccagaggagag

SEQ ID NO: 1172517 - RNA, 13 nt, Human
gccagaggagaga

SEQ ID NO: 1172518 - RNA, 15 nt, Human
gccagaggagagagg

SEQ ID NO: 1172519 - RNA, 17 nt, Human
gccagaggagagaggac

SEQ ID NO: 1172520 - RNA, 19 nt, Human
gccagaggagagaggaccc

SEQ ID NO: 1172521 - RNA, 22 nt, Human
gccagaggagagaggacccccu

SEQ ID NO: 1172522 - RNA, 21 nt, Human
gccagagggagugacagaggc

SEQ ID NO: 1172523 - RNA, 22 nt, Human
gccagagggagugacagaggca

SEQ ID NO: 1172524 - RNA, 23 nt, Human
gccagagggagugacagaggcag

SEQ ID NO: 1172525 - RNA, 16 nt, Human
gccagaugcaccagcc

SEQ ID NO: 1172526 - RNA, 17 nt, Human
gccagaugcaccagccc

SEQ ID NO: 1172527 - RNA, 18 nt, Human
gccagaugcaccagcccu

SEQ ID NO: 1172528 - RNA, 19 nt, Human
gccagauuuuccugaaaac

SEQ ID NO: 1172529 - RNA, 18 nt, Human
gccagauuucacucuccu

SEQ ID NO: 1172530 - RNA, 21 nt, Human
gccagauuucacucuccuugg

SEQ ID NO: 1172531 - RNA, 13 nt, Human
gccagggacagag

SEQ ID NO: 1172532 - RNA, 16 nt, Human
gccagggacagagggg

SEQ ID NO: 1172533 - RNA, 18 nt, Human
gccagggacagagggggu

SEQ ID NO: 1172534 - RNA, 23 nt, Human
gccagggacagaggggguggccu

SEQ ID NO: 1172535 - RNA, 17 nt, Human
gccagguuuuuggucug

SEQ ID NO: 1172536 - RNA, 12 nt, Human
gccaguaaaugg

SEQ ID NO: 1172537 - RNA, 17 nt, Human
gccagucaccccggcca

SEQ ID NO: 1172538 - RNA, 18 nt, Human
gccagucaccccggccac

SEQ ID NO: 1172539 - RNA, 20 nt, Human
gccagucaccccggccaccu

SEQ ID NO: 1172540 - RNA, 21 nt, Human
gccagucaccccggccaccug

SEQ ID NO: 1172541 - RNA, 15 nt, Human
gcccaaagaugcagc

SEQ ID NO: 1172542 - RNA, 23 nt, Human
gccaugggacagggaggacgcuc

SEQ ID NO: 1172543 - RNA, 19 nt, Human
gccaugggcacugugggua

SEQ ID NO: 1172544 - RNA, 19 nt, Human
gccaucucaccuccugcug

SEQ ID NO: 1172545 - RNA, 20 nt, Human
gccaucucaccuccugcugg

SEQ ID NO: 1172546 - RNA, 21 nt, Human
gccaucucaccuccugcuggg

SEQ ID NO: 1172547 - RNA, 18 nt, Human
gccaugaggaacaaggca

SEQ ID NO: 1172548 - RNA, 20 nt, Human
gccaugaggaacaaggcaag

SEQ ID NO: 1172549 - RNA, 13 nt, Human
gccaugccagcuu

SEQ ID NO: 1172550 - RNA, 18 nt, Human
gccaugccagcuuaucuc

SEQ ID NO: 1172551 - RNA, 19 nt, Human
gccaugccagcuuaucuca

SEQ ID NO: 1172552 - RNA, 13 nt, Human
gcccagccccuuc

SEQ ID NO: 1172553 - RNA, 14 nt, Human
gcccagccccuucu

SEQ ID NO: 1172554 - RNA, 16 nt, Human
gcccagccccuucuga

SEQ ID NO: 1172555 - RNA, 17 nt, Human
gcccagccccuucugac

SEQ ID NO: 1172556 - RNA, 20 nt, Human
gcccagccccuucugaccca

SEQ ID NO: 1172557 - RNA, 24 nt, Human
gcccagccccuucugacccaugcu

SEQ ID NO: 1172558 - RNA, 18 nt, Human
gcccaggaaaggcuccag

SEQ ID NO: 1172559 - RNA, 19 nt, Human
gcccaggaaaggcuccagg

SEQ ID NO: 1172560 - RNA, 20 nt, Human
gcccaggaaaggcuccagga

SEQ ID NO: 1172561 - RNA, 21 nt, Human
gcccaggaaaggcuccaggag

SEQ ID NO: 1172562 - RNA, 19 nt, Human
gcccaggcuggcgugcagu

SEQ ID NO: 1172563 - RNA, 20 nt, Human
gcccaggcuggcgugcagug

SEQ ID NO: 1172564 - RNA, 22 nt, Human
gcccaggcuggcgugcaguggu

SEQ ID NO: 1172565 - RNA, 19 nt, Human
gcccaggcuuagucacuga

SEQ ID NO: 1172566 - RNA, 21 nt, Human
gcccaggcuuagucacugaga

SEQ ID NO: 1172567 - RNA, 23 nt, Human
gcccaggcuuagucacugagaca

SEQ ID NO: 1172568 - RNA, 19 nt, Human
gcccagucuggaaugcagu

SEQ ID NO: 1172569 - RNA, 20 nt, Human
gcccagucuggaaugcagug

SEQ ID NO: 1172570 - RNA, 21 nt, Human
gcccaaugcacuuuguucugg

SEQ ID NO: 1172571 - RNA, 15 nt, Human
gcccagagagggugg

SEQ ID NO: 1172572 - RNA, 12 nt, Human
gcccagagggcc

SEQ ID NO: 1172573 - RNA, 14 nt, Human
gcccagagggccug

SEQ ID NO: 1172574 - RNA, 15 nt, Human
gcccagagggccugc

SEQ ID NO: 1172575 - RNA, 18 nt, Human
gcccagagggccugcaag

SEQ ID NO: 1172576 - RNA, 19 nt, Human
gcccagagggccugcaagg

SEQ ID NO: 1172577 - RNA, 20 nt, Human
gcccagagggccugcaaggg

SEQ ID NO: 1172578 - RNA, 21 nt, Human
gcccagagggccugcaaggga

SEQ ID NO: 1172579 - RNA, 22 nt, Human
gcccagagggccugcaagggag

SEQ ID NO: 1172580 - RNA, 9 nt, Human
gcccagccc

SEQ ID NO: 1172581 - RNA, 11 nt, Human
gcccagccccu

SEQ ID NO: 1172582 - RNA, 12 nt, Human
gcccagccccuu

SEQ ID NO: 1172583 - RNA, 20 nt, Human
gccuggauggggcugcaccg

SEQ ID NO: 1172584 - RNA, 14 nt, Human
gccuggacccugug

SEQ ID NO: 1172585 - RNA, 18 nt, Human
gccuggauggggcugcac

SEQ ID NO: 1172586 - RNA, 19 nt, Human
gcccaguuggguggaugcc

SEQ ID NO: 1172587 - RNA, 21 nt, Human
gcccaguuggguggaugccug

SEQ ID NO: 1172588 - RNA, 22 nt, Human
gcccaguuggguggaugccugg

SEQ ID NO: 1172589 - RNA, 16 nt, Human
gccugaagucacacag

SEQ ID NO: 1172590 - RNA, 17 nt, Human
gccugaagucacacagu

SEQ ID NO: 1172591 - RNA, 18 nt, Human
gccugaagucacacagug

SEQ ID NO: 1172592 - RNA, 17 nt, Human
gccugagcgacagugag

SEQ ID NO: 1172593 - RNA, 20 nt, Human
gccugagcgacagugagacu

SEQ ID NO: 1172594 - RNA, 12 nt, Human
gccugagcuggg

SEQ ID NO: 1172595 - RNA, 20 nt, Human
gccuggccagaugcaccagc

SEQ ID NO: 1172596 - RNA, 21 nt, Human
gccuggccagaugcaccagcc

SEQ ID NO: 1172597 - RNA, 22 nt, Human
gccuggccagaugcaccagccc

SEQ ID NO: 1172598 - RNA, 13 nt, Human
gccuggccccuca

SEQ ID NO: 1172599 - RNA, 14 nt, Human
gccuggccccucag

SEQ ID NO: 1172600 - RNA, 15 nt, Human
gccuguaauccuagc

SEQ ID NO: 1172601 - RNA, 20 nt, Human
gccuguaauccuagcacuuu

SEQ ID NO: 1172602 - RNA, 12 nt, Human
gcgacaaugcaa

SEQ ID NO: 1172603 - RNA, 13 nt, Human
gcgacaaugcaaa

SEQ ID NO: 1172604 - RNA, 20 nt, Human
gcgacaaugcaaaccaucau

SEQ ID NO: 1172605 - RNA, 21 nt, Human
gcgacaaugcaaaccaucauu

SEQ ID NO: 1172606 - RNA, 15 nt, Human
gccuuacacaauggu

SEQ ID NO: 1172607 - RNA, 16 nt, Human
gccuuacacaaugguu

SEQ ID NO: 1172608 - RNA, 23 nt, Human
gcgcccaguuggguggaugccug

SEQ ID NO: 1172609 - RNA, 21 nt, Human
gcgccuuaaggauguucuagc

SEQ ID NO: 1172610 - RNA, 18 nt, Human
gcgcugccccuggcagcc

SEQ ID NO: 1172611 - RNA, 21 nt, Human
gcgcugccccuggcagccccu

SEQ ID NO: 1172612 - RNA, 16 nt, Human
gcggagaaaggaaggg

SEQ ID NO: 1172613 - RNA, 19 nt, Human
gcggagacggagucccacc

SEQ ID NO: 1172614 - RNA, 14 nt, Human
gcggggacagcucc

SEQ ID NO: 1172615 - RNA, 15 nt, Human
gcggggacagcuccu

SEQ ID NO: 1172616 - RNA, 17 nt, Human
gcggggacagcuccuuc

SEQ ID NO: 1172617 - RNA, 18 nt, Human
gcggggacagcuccuucu

SEQ ID NO: 1172618 - RNA, 13 nt, Human
gcgguccacccag

SEQ ID NO: 1172619 - RNA, 14 nt, Human
gcgguccacccagg

SEQ ID NO: 1172620 - RNA, 19 nt, Human
gcggugagaggggaacaga

SEQ ID NO: 1172621 - RNA, 19 nt, Human
gcggugcuaucucccccag

SEQ ID NO: 1172622 - RNA, 22 nt, Human
gcggugcuaucucccccagccc

SEQ ID NO: 1172623 - RNA, 13 nt, Human
gcuagauguaugu

SEQ ID NO: 1172624 - RNA, 14 nt, Human
gcuagauguaugua

SEQ ID NO: 1172625 - RNA, 16 nt, Human
gcuagauguauguacu

SEQ ID NO: 1172626 - RNA, 13 nt, Human
gcuaucuccccca

SEQ ID NO: 1172627 - RNA, 14 nt, Human
gcuaucucccccag

SEQ ID NO: 1172628 - RNA, 15 nt, Human
gcuaucucccccagc

SEQ ID NO: 1172629 - RNA, 18 nt, Human
gcucaaguccucuuuucu

SEQ ID NO: 1172630 - RNA, 19 nt, Human
gcucaaguccucuuuucug

SEQ ID NO: 1172631 - RNA, 22 nt, Human
gcucaaguccucuuuucugaga

SEQ ID NO: 1172632 - RNA, 16 nt, Human
gcucacauaucuguca

SEQ ID NO: 1172633 - RNA, 12 nt, Human
gcucaccagccc

SEQ ID NO: 1172634 - RNA, 13 nt, Human
gcucaccagcccc

SEQ ID NO: 1172635 - RNA, 14 nt, Human
gcucaccagcccca

SEQ ID NO: 1172636 - RNA, 15 nt, Human
gcucaccagccccag

SEQ ID NO: 1172637 - RNA, 18 nt, Human
gcucaccagccccagugc

SEQ ID NO: 1172638 - RNA, 16 nt, Human
gcucaccucucccuug

SEQ ID NO: 1172639 - RNA, 17 nt, Human
gcucaccucucccuugg

SEQ ID NO: 1172640 - RNA, 18 nt, Human
gcucaccucucccuugga

SEQ ID NO: 1172641 - RNA, 17 nt, Human
gcucagcggggacagcu

SEQ ID NO: 1172642 - RNA, 18 nt, Human
gcucagcggggacagcuc

SEQ ID NO: 1172643 - RNA, 19 nt, Human
gcucagcggggacagcucc

SEQ ID NO: 1172644 - RNA, 23 nt, Human
gcucagcggggacagcuccuucu

SEQ ID NO: 1172645 - RNA, 21 nt, Human
gcuccagcuguucagcugguu

SEQ ID NO: 1172646 - RNA, 11 nt, Human
gcuccaggagc

SEQ ID NO: 1172647 - RNA, 12 nt, Human
gcuccaggagca

SEQ ID NO: 1172648 - RNA, 14 nt, Human
gcuccaggagcagc

SEQ ID NO: 1172649 - RNA, 15 nt, Human
gcuccaggagcagcc

SEQ ID NO: 1172650 - RNA, 16 nt, Human
gcuccaggagcagcca

SEQ ID NO: 1172651 - RNA, 17 nt, Human
gcuccaggagcagccac

SEQ ID NO: 1172652 - RNA, 18 nt, Human
gcuccaggagcagccaca

SEQ ID NO: 1172653 - RNA, 12 nt, Human
gcuccaggcucc

SEQ ID NO: 1172654 - RNA, 13 nt, Human
gcuccaggcuccu

SEQ ID NO: 1172655 - RNA, 20 nt, Human
gcucccuucccaccucucuc

SEQ ID NO: 1172656 - RNA, 18 nt, Human
gcuccgcuuucuacccag

SEQ ID NO: 1172657 - RNA, 21 nt, Human
gcuccgcuuucuacccagcga

SEQ ID NO: 1172658 - RNA, 22 nt, Human
gcuccgcuuucuacccagcgag

SEQ ID NO: 1172659 - RNA, 23 nt, Human
gcuccgcuuucuacccagcgagc

SEQ ID NO: 1172660 - RNA, 24 nt, Human
gcuccgcuuucuacccagcgagcc

SEQ ID NO: 1172661 - RNA, 12 nt, Human
gcuccugugucu

SEQ ID NO: 1172662 - RNA, 13 nt, Human
gcuccugugucuu

SEQ ID NO: 1172663 - RNA, 13 nt, Human
gcuccuucugucc

SEQ ID NO: 1172664 - RNA, 15 nt, Human
gcuccuucuguccua

SEQ ID NO: 1172665 - RNA, 17 nt, Human
gcuccuuuagcgcccag

SEQ ID NO: 1172666 - RNA, 19 nt, Human
gcucgagcaugccuggaug

SEQ ID NO: 1172667 - RNA, 21 nt, Human
gcucgagcaugccuggauggg

SEQ ID NO: 1172668 - RNA, 21 nt, Human
gcucucaggccagcugcuugg

SEQ ID NO: 1172669 - RNA, 18 nt, Human
gcugacagacacaggccc

SEQ ID NO: 1172670 - RNA, 19 nt, Human
gcugacagacacaggcccg

SEQ ID NO: 1172671 - RNA, 20 nt, Human
gcugacagacacaggcccgg

SEQ ID NO: 1172672 - RNA, 22 nt, Human
gcugacuguuuucucuugagag

SEQ ID NO: 1172673 - RNA, 21 nt, Human
gcugauuaaaccaaggcuaga

SEQ ID NO: 1172674 - RNA, 22 nt, Human
gcugcaaaggguaucaggugcu

SEQ ID NO: 1172675 - RNA, 23 nt, Human
gcugcaaaggguaucaggugcug

SEQ ID NO: 1172676 - RNA, 12 nt, Human
gcugccaccugc

SEQ ID NO: 1172677 - RNA, 13 nt, Human
gcugccaccugcc

SEQ ID NO: 1172678 - RNA, 13 nt, Human
gcugcaguugcca

SEQ ID NO: 1172679 - RNA, 14 nt, Human
gcugcaguugccag

SEQ ID NO: 1172680 - RNA, 17 nt, Human
gcugcaguugccaguca

SEQ ID NO: 1172681 - RNA, 18 nt, Human
gcugcauuuaaaagauac

SEQ ID NO: 1172682 - RNA, 19 nt, Human
gcugcauuuaaaagauaca

SEQ ID NO: 1172683 - RNA, 19 nt, Human
gcugccuguucagcuccag

SEQ ID NO: 1172684 - RNA, 20 nt, Human
gcugccuguucagcuccagc

SEQ ID NO: 1172685 - RNA, 22 nt, Human
gcugccuguucagcuccagcuc

SEQ ID NO: 1172686 - RNA, 22 nt, Human
gcugcgguccacccaggagccc

SEQ ID NO: 1172687 - RNA, 16 nt, Human
gcugcgguccacccag

SEQ ID NO: 1172688 - RNA, 21 nt, Human
gcugcgguccacccaggagcc

SEQ ID NO: 1172689 - RNA, 14 nt, Human
gcugcgguccaccc

SEQ ID NO: 1172690 - RNA, 15 nt, Human
gcugcgguccaccca

SEQ ID NO: 1172691 - RNA, 12 nt, Human
gcugcccugccc

SEQ ID NO: 1172692 - RNA, 13 nt, Human
gcugcccugccca

SEQ ID NO: 1172693 - RNA, 14 nt, Human
gcugcccugcccac

SEQ ID NO: 1172694 - RNA, 16 nt, Human
gcugcccugcccaccu

SEQ ID NO: 1172695 - RNA, 18 nt, Human
gcugcccugcccaccugg

SEQ ID NO: 1172696 - RNA, 20 nt, Human
gcugcccugcccaccuggcc

SEQ ID NO: 1172697 - RNA, 21 nt, Human
gcugcccugcccaccuggccu

SEQ ID NO: 1172698 - RNA, 22 nt, Human
gcugcccugcccaccuggccuc

SEQ ID NO: 1172699 - RNA, 23 nt, Human
gcugcccugcccaccuggccucu

SEQ ID NO: 1172700 - RNA, 24 nt, Human
gcugcccugcccaccuggccucug

SEQ ID NO: 1172701 - RNA, 21 nt, Human
gcuggaaaaguauguuagugc

SEQ ID NO: 1172702 - RNA, 23 nt, Human
gcuggaaaaguauguuagugcaa

SEQ ID NO: 1172703 - RNA, 22 nt, Human
gcugcuuuugucuaugggacuc

SEQ ID NO: 1172704 - RNA, 15 nt, Human
gcuggaccuugaacu

SEQ ID NO: 1172705 - RNA, 16 nt, Human
gcuggaccuugaacug

SEQ ID NO: 1172706 - RNA, 14 nt, Human
gcuggucccacuca

SEQ ID NO: 1172707 - RNA, 14 nt, Human
gcugggggccucag

SEQ ID NO: 1172708 - RNA, 15 nt, Human
gcugggggccucagu

SEQ ID NO: 1172709 - RNA, 18 nt, Human
gcugggggccucagugcc

SEQ ID NO: 1172710 - RNA, 13 nt, Human
gcuggccuggccc

SEQ ID NO: 1172711 - RNA, 14 nt, Human
gcuggccuggcccc

SEQ ID NO: 1172712 - RNA, 15 nt, Human
gcuggccuggccccu

SEQ ID NO: 1172713 - RNA, 16 nt, Human
gcuggccuggccccuc

SEQ ID NO: 1172714 - RNA, 19 nt, Human
gcugggaugauuggagggg

SEQ ID NO: 1172715 - RNA, 21 nt, Human
gcugggaugauuggagggggg

SEQ ID NO: 1172716 - RNA, 20 nt, Human
gcugggcuucaguggcagcu

SEQ ID NO: 1172717 - RNA, 21 nt, Human
gcugggcuucaguggcagcug

SEQ ID NO: 1172718 - RNA, 22 nt, Human
gcugggcuucaguggcagcugc

SEQ ID NO: 1172719 - RNA, 17 nt, Human
gcugucagccauuccug

SEQ ID NO: 1172720 - RNA, 16 nt, Human
gcuggugucaccugaa

SEQ ID NO: 1172721 - RNA, 14 nt, Human
gcuggugucaccug

SEQ ID NO: 1172722 - RNA, 15 nt, Human
gcuggugucaccuga

SEQ ID NO: 1172723 - RNA, 23 nt, Human
gcugucccuuacgugaguccugg

SEQ ID NO: 1172724 - RNA, 16 nt, Human
gcugucccuuuuccuu

SEQ ID NO: 1172725 - RNA, 15 nt, Human
gcugugucucccuuc

SEQ ID NO: 1172726 - RNA, 19 nt, Human
gcuucuguuuuauaauuuu

SEQ ID NO: 1172727 - RNA, 22 nt, Human
gcuucucacugccaugccagcu

SEQ ID NO: 1172728 - RNA, 20 nt, Human
gcuucaguggcagcugcuuu

SEQ ID NO: 1172729 - RNA, 13 nt, Human
gcuuaucucaggg

SEQ ID NO: 1172730 - RNA, 16 nt, Human
ggacagaggggguggc

SEQ ID NO: 1172731 - RNA, 20 nt, Human
ggacagaggggguggccucc

SEQ ID NO: 1172732 - RNA, 11 nt, Human
ggacagcuccu

SEQ ID NO: 1172733 - RNA, 15 nt, Human
ggacagcuccuucug

SEQ ID NO: 1172734 - RNA, 16 nt, Human
ggacagcuccuucugu

SEQ ID NO: 1172735 - RNA, 17 nt, Human
ggacagcuccuucuguc

SEQ ID NO: 1172736 - RNA, 17 nt, Human
ggacauuugcucaugga

SEQ ID NO: 1172737 - RNA, 20 nt, Human
ggacauuugcucauggaauu

SEQ ID NO: 1172738 - RNA, 19 nt, Human
ggaccagagcugccaccug

SEQ ID NO: 1172739 - RNA, 16 nt, Human
ggacgcucucuggccu

SEQ ID NO: 1172740 - RNA, 19 nt, Human
ggacgcucucuggccuucg

SEQ ID NO: 1172741 - RNA, 11 nt, Human
ggagaagaacu

SEQ ID NO: 1172742 - RNA, 14 nt, Human
ggagaagaacugaa

SEQ ID NO: 1172743 - RNA, 22 nt, Human
ggagucccaccuuggcugcagg

SEQ ID NO: 1172744 - RNA, 16 nt, Human
ggaggacgcucucugg

SEQ ID NO: 1172745 - RNA, 19 nt, Human
ggaggacgcucucuggccu

SEQ ID NO: 1172746 - RNA, 18 nt, Human
ggaggauguucugggaca

SEQ ID NO: 1172747 - RNA, 21 nt, Human
ggaggauguucugggacacag

SEQ ID NO: 1172748 - RNA, 13 nt, Human
ggagggagggcuc

SEQ ID NO: 1172749 - RNA, 16 nt, Human
ggagggagggcuccag

SEQ ID NO: 1172750 - RNA, 17 nt, Human
ggagggagggcuccaga

SEQ ID NO: 1172751 - RNA, 21 nt, Human
ggagaccccuuggggagcagg

SEQ ID NO: 1172752 - RNA, 14 nt, Human
ggagccuccugccc

SEQ ID NO: 1172753 - RNA, 15 nt, Human
ggagccuccugcccu

SEQ ID NO: 1172754 - RNA, 19 nt, Human
ggaugcccaaagaugcagc

SEQ ID NO: 1172755 - RNA, 13 nt, Human
ggaugccuggugg

SEQ ID NO: 1172756 - RNA, 17 nt, Human
ggaugccugguggcagc

SEQ ID NO: 1172757 - RNA, 18 nt, Human
ggaugcccaaagaugcag

SEQ ID NO: 1172758 - RNA, 23 nt, Human
ggagucccaccuuggcugcaggg

SEQ ID NO: 1172759 - RNA, 16 nt, Human
ggaugaucuaggaaga

SEQ ID NO: 1172760 - RNA, 18 nt, Human
ggaugaucuaggaagacu

SEQ ID NO: 1172761 - RNA, 22 nt, Human
ggaugaucuaggaagacuuugg

SEQ ID NO: 1172762 - RNA, 18 nt, Human
ggaugccugguggcagcu

SEQ ID NO: 1172763 - RNA, 19 nt, Human
ggaugccugguggcagcug

SEQ ID NO: 1172764 - RNA, 20 nt, Human
ggaugccugguggcagcugc

SEQ ID NO: 1172765 - RNA, 21 nt, Human
ggaugccugguggcagcugcg

SEQ ID NO: 1172766 - RNA, 21 nt, Human
ggauucuuccucccucccucu

SEQ ID NO: 1172767 - RNA, 17 nt, Human
ggcaagcaccuccugcc

SEQ ID NO: 1172768 - RNA, 18 nt, Human
ggcaagcaccuccugccu

SEQ ID NO: 1172769 - RNA, 19 nt, Human
ggcaagcaccuccugccuc

SEQ ID NO: 1172770 - RNA, 15 nt, Human
ggcaaggcugucaau

SEQ ID NO: 1172771 - RNA, 17 nt, Human
ggcaccagcagccugga

SEQ ID NO: 1172772 - RNA, 20 nt, Human
ggcacccaccaucaugucug

SEQ ID NO: 1172773 - RNA, 18 nt, Human
ggcacccggccccugcug

SEQ ID NO: 1172774 - RNA, 19 nt, Human
ggcacccggccccugcugg

SEQ ID NO: 1172775 - RNA, 20 nt, Human
ggcacccggccccugcuggu

SEQ ID NO: 1172776 - RNA, 18 nt, Human
ggcacucagaagacacug

SEQ ID NO: 1172777 - RNA, 19 nt, Human
ggcacucagaagacacuga

SEQ ID NO: 1172778 - RNA, 20 nt, Human
ggcacucagaagacacugau

SEQ ID NO: 1172779 - RNA, 21 nt, Human
ggcagagguugcagugagccg

SEQ ID NO: 1172780 - RNA, 15 nt, Human
ggcaugaugcgggcc

SEQ ID NO: 1172781 - RNA, 18 nt, Human
ggcaugugaugagaggaa

SEQ ID NO: 1172782 - RNA, 23 nt, Human
ggcaugugaugagaggaaaucac

SEQ ID NO: 1172783 - RNA, 17 nt, Human
ggcagaguugaagacag

SEQ ID NO: 1172784 - RNA, 19 nt, Human
ggcagaguugaagacagag

SEQ ID NO: 1172785 - RNA, 21 nt, Human
ggcagaguugaagacagagcu

SEQ ID NO: 1172786 - RNA, 23 nt, Human
ggcagcugcgguccacccaggag

SEQ ID NO: 1172787 - RNA, 24 nt, Human
ggcagcugcgguccacccaggagc

SEQ ID NO: 1172788 - RNA, 22 nt, Human
ggcagcugcuuuugucuauggg

SEQ ID NO: 1172789 - RNA, 12 nt, Human
ggcaggguccua

SEQ ID NO: 1172790 - RNA, 17 nt, Human
ggcagggucucacucug

SEQ ID NO: 1172791 - RNA, 18 nt, Human
ggcagggucucacucugu

SEQ ID NO: 1172792 - RNA, 20 nt, Human
ggcauguucucugaggacac

SEQ ID NO: 1172793 - RNA, 23 nt, Human
ggcauguucucugaggacacuaa

SEQ ID NO: 1172794 - RNA, 22 nt, Human
ggccacagaaaauucuucucca

SEQ ID NO: 1172795 - RNA, 11 nt, Human
ggccaggagcc

SEQ ID NO: 1172796 - RNA, 13 nt, Human
ggccaggagccuc

SEQ ID NO: 1172797 - RNA, 14 nt, Human
ggccaggagccucc

SEQ ID NO: 1172798 - RNA, 15 nt, Human
ggccaggcccucugc

SEQ ID NO: 1172799 - RNA, 16 nt, Human
ggccaggcccucugcc

SEQ ID NO: 1172800 - RNA, 17 nt, Human
ggccaggcccucugccc

SEQ ID NO: 1172801 - RNA, 14 nt, Human
ggcccagagggccu

SEQ ID NO: 1172802 - RNA, 17 nt, Human
ggcccagagggccugca

SEQ ID NO: 1172803 - RNA, 19 nt, Human
ggcccagagggccugcaag

SEQ ID NO: 1172804 - RNA, 20 nt, Human
ggcccagagggccugcaagg

SEQ ID NO: 1172805 - RNA, 14 nt, Human
ggccuccugugugu

SEQ ID NO: 1172806 - RNA, 20 nt, Human
ggccuagcauacguacacau

SEQ ID NO: 1172807 - RNA, 22 nt, Human
ggccuagcauacguacacauuu

SEQ ID NO: 1172808 - RNA, 23 nt, Human
ggccuagcauacguacacauuuu

SEQ ID NO: 1172809 - RNA, 14 nt, Human
ggccucaagugauu

SEQ ID NO: 1172810 - RNA, 22 nt, Human
ggccucaagugauucuccugcc

SEQ ID NO: 1172811 - RNA, 23 nt, Human
ggccucaagugauucuccugccu

SEQ ID NO: 1172812 - RNA, 23 nt, Human
ggccugggggcugggcagaggaa

SEQ ID NO: 1172813 - RNA, 15 nt, Human
ggccuggccugagcu

SEQ ID NO: 1172814 - RNA, 16 nt, Human
ggccuggccugagcug

SEQ ID NO: 1172815 - RNA, 19 nt, Human
ggccuggccugagcuggga

SEQ ID NO: 1172816 - RNA, 23 nt, Human
ggcgcagcauauucaggaagcuc

SEQ ID NO: 1172817 - RNA, 24 nt, Human
ggcgcagcauauucaggaagcuca

SEQ ID NO: 1172818 - RNA, 18 nt, Human
ggccucugcacuccccug

SEQ ID NO: 1172819 - RNA, 19 nt, Human
ggccucugcacuccccugc

SEQ ID NO: 1172820 - RNA, 22 nt, Human
ggccucugcacuccccugcugg

SEQ ID NO: 1172821 - RNA, 12 nt, Human
ggccugagcugg

SEQ ID NO: 1172822 - RNA, 13 nt, Human
ggccuggccccuc

SEQ ID NO: 1172823 - RNA, 14 nt, Human
ggccuggccccuca

SEQ ID NO: 1172824 - RNA, 15 nt, Human
ggccuggccccucag

SEQ ID NO: 1172825 - RNA, 17 nt, Human
ggccuggccccucaggg

SEQ ID NO: 1172826 - RNA, 18 nt, Human
ggccuggccccucagggu

SEQ ID NO: 1172827 - RNA, 23 nt, Human
ggccuggccccucagggucccug

SEQ ID NO: 1172828 - RNA, 10 nt, Human
ggccuggccu

SEQ ID NO: 1172829 - RNA, 13 nt, Human
ggccuggccugag

SEQ ID NO: 1172830 - RNA, 14 nt, Human
ggccuggccugagc

SEQ ID NO: 1172831 - RNA, 11 nt, Human
ggcgcugcccc

SEQ ID NO: 1172832 - RNA, 17 nt, Human
ggcgcugccccuggcag

SEQ ID NO: 1172833 - RNA, 18 nt, Human
ggcgcugccccuggcagc

SEQ ID NO: 1172834 - RNA, 20 nt, Human
ggcuaguaucaaaagaaaga

SEQ ID NO: 1172835 - RNA, 23 nt, Human
ggcuagugugguguuuccuggca

SEQ ID NO: 1172836 - RNA, 12 nt, Human
ggcuaugcauuu

SEQ ID NO: 1172837 - RNA, 13 nt, Human
ggcuaugcauuug

SEQ ID NO: 1172838 - RNA, 14 nt, Human
ggcuaugcauuuga

SEQ ID NO: 1172839 - RNA, 9 nt, Human
ggcuccaga

SEQ ID NO: 1172840 - RNA, 10 nt, Human
ggcuccagac

SEQ ID NO: 1172841 - RNA, 14 nt, Human
ggcuccaggagcag

SEQ ID NO: 1172842 - RNA, 16 nt, Human
ggcuccaggagcagcc

SEQ ID NO: 1172843 - RNA, 17 nt, Human
ggcuccaggagcagcca

SEQ ID NO: 1172844 - RNA, 18 nt, Human
ggcuccaggagcagccac

SEQ ID NO: 1172845 - RNA, 12 nt, Human
ggcuccaggcuc

SEQ ID NO: 1172846 - RNA, 13 nt, Human
ggcuccaggcucc

SEQ ID NO: 1172847 - RNA, 14 nt, Human
ggcuccaggcuccu

SEQ ID NO: 1172848 - RNA, 15 nt, Human
ggcuccaggcuccuu

SEQ ID NO: 1172849 - RNA, 15 nt, Human
ggcucucaggccagc

SEQ ID NO: 1172850 - RNA, 16 nt, Human
ggcucucaggccagcu

SEQ ID NO: 1172851 - RNA, 17 nt, Human
ggcucucaggccagcug

SEQ ID NO: 1172852 - RNA, 18 nt, Human
ggcucucaggccagcugc

SEQ ID NO: 1172853 - RNA, 19 nt, Human
ggcucucaggccagcugcu

SEQ ID NO: 1172854 - RNA, 20 nt, Human
ggcucucaggccagcugcuu

SEQ ID NO: 1172855 - RNA, 12 nt, Human
ggcucugcccuu

SEQ ID NO: 1172856 - RNA, 14 nt, Human
ggcucugcccuugg

SEQ ID NO: 1172857 - RNA, 15 nt, Human
ggcucugcccuuggu

SEQ ID NO: 1172858 - RNA, 13 nt, Human
ggcucugccuccc

SEQ ID NO: 1172859 - RNA, 15 nt, Human
ggcucugccucccau

SEQ ID NO: 1172860 - RNA, 16 nt, Human
ggcucugccucccauc

SEQ ID NO: 1172861 - RNA, 20 nt, Human
ggcugggcucccuucccacc

SEQ ID NO: 1172862 - RNA, 21 nt, Human
ggcugggcucccuucccaccu

SEQ ID NO: 1172863 - RNA, 11 nt, Human
ggcugggcuuc

SEQ ID NO: 1172864 - RNA, 21 nt, Human
ggcugggcuucaguggcagcu

SEQ ID NO: 1172865 - RNA, 22 nt, Human
ggcugggcuucaguggcagcug

SEQ ID NO: 1172866 - RNA, 16 nt, Human
ggcugggggaagaagc

SEQ ID NO: 1172867 - RNA, 14 nt, Human
ggcugggggccuca

SEQ ID NO: 1172868 - RNA, 17 nt, Human
ggcucugccucccauca

SEQ ID NO: 1172869 - RNA, 15 nt, Human
ggcugcuucaaggau

SEQ ID NO: 1172870 - RNA, 19 nt, Human
ggcugcuucaaggauccug

SEQ ID NO: 1172871 - RNA, 20 nt, Human
ggcugcuucaaggauccuga

SEQ ID NO: 1172872 - RNA, 21 nt, Human
ggcugcuucaaggauccugag

SEQ ID NO: 1172873 - RNA, 14 nt, Human
ggcuguuggcuggg

SEQ ID NO: 1172874 - RNA, 15 nt, Human
ggcuguuggcugggg

SEQ ID NO: 1172875 - RNA, 16 nt, Human
ggcuguuggcuggggg

SEQ ID NO: 1172876 - RNA, 20 nt, Human
ggcuguuggcugggggccuc

SEQ ID NO: 1172877 - RNA, 15 nt, Human
ggcuuaaaacaacac

SEQ ID NO: 1172878 - RNA, 17 nt, Human
ggcuuggggaccagagc

SEQ ID NO: 1172879 - RNA, 18 nt, Human
ggcuuggggaccagagcu

SEQ ID NO: 1172880 - RNA, 19 nt, Human
ggcuuggggaccagagcug

SEQ ID NO: 1172881 - RNA, 14 nt, Human
ggcuuagucacuga

SEQ ID NO: 1172882 - RNA, 15 nt, Human
ggcuuagucacugag

SEQ ID NO: 1172883 - RNA, 20 nt, Human
ggcuucacggaagagccuug

SEQ ID NO: 1172884 - RNA, 21 nt, Human
ggcuucacggaagagccuugc

SEQ ID NO: 1172885 - RNA, 19 nt, Human
gggaauguuugccucugcc

SEQ ID NO: 1172886 - RNA, 21 nt, Human
gggaauguuugccucugccuc

SEQ ID NO: 1172887 - RNA, 14 nt, Human
gggaauugaggaca

SEQ ID NO: 1172888 - RNA, 14 nt, Human
gggacacccuguga

SEQ ID NO: 1172889 - RNA, 17 nt, Human
gggacucaaugcacuga

SEQ ID NO: 1172890 - RNA, 19 nt, Human
gggacucaaugcacugaca

SEQ ID NO: 1172891 - RNA, 23 nt, Human
gggacucaaugcacugacauugu

SEQ ID NO: 1172892 - RNA, 21 nt, Human
gggacugaggggaggggagca

SEQ ID NO: 1172893 - RNA, 13 nt, Human
gggagcugccugu

SEQ ID NO: 1172894 - RNA, 21 nt, Human
gggagcugccuguucagcucc

SEQ ID NO: 1172895 - RNA, 22 nt, Human
gggagcugccuguucagcucca

SEQ ID NO: 1172896 - RNA, 17 nt, Human
gggaggacgcucucugg

SEQ ID NO: 1172897 - RNA, 20 nt, Human
gggaggacgcucucuggccu

SEQ ID NO: 1172898 - RNA, 23 nt, Human
gggaggaucucuugagccuggga

SEQ ID NO: 1172899 - RNA, 22 nt, Human
gggaggauguucugggacacag

SEQ ID NO: 1172900 - RNA, 21 nt, Human
gggaggauugcuugagcucag

SEQ ID NO: 1172901 - RNA, 23 nt, Human
gggaggauugcuugagcucagga

SEQ ID NO: 1172902 - RNA, 11 nt, Human
gggaggcagag

SEQ ID NO: 1172903 - RNA, 17 nt, Human
gggagugacagaggcag

SEQ ID NO: 1172904 - RNA, 21 nt, Human
gggagugaguugauagcacag

SEQ ID NO: 1172905 - RNA, 13 nt, Human
uauguugcccagg

SEQ ID NO: 1172906 - RNA, 16 nt, Human
uauguugcccaggcag

SEQ ID NO: 1172907 - RNA, 19 nt, Human
uauguugcccaggcagguc

SEQ ID NO: 1172908 - RNA, 20 nt, Human
uauguugcccaggcaggucu

SEQ ID NO: 1172909 - RNA, 12 nt, Human
uauuaaauuaug

SEQ ID NO: 1172910 - RNA, 13 nt, Human
gggaguggccaca

SEQ ID NO: 1172911 - RNA, 15 nt, Human
gggaguggccacaga

SEQ ID NO: 1172912 - RNA, 13 nt, Human
uauguacuucaug

SEQ ID NO: 1172913 - RNA, 17 nt, Human
uauguacuucaugcugu

SEQ ID NO: 1172914 - RNA, 17 nt, Human
uauugcugauggugcaa

SEQ ID NO: 1172915 - RNA, 22 nt, Human
uauugcugauggugcaaugacc

SEQ ID NO: 1172916 - RNA, 22 nt, Human
uauuggaaauuuguuauaauga

SEQ ID NO: 1172917 - RNA, 17 nt, Human
uauucucuccuguaccu

SEQ ID NO: 1172918 - RNA, 18 nt, Human
uauucucuccuguaccuc

SEQ ID NO: 1172919 - RNA, 12 nt, Human
uauuguuuucag

SEQ ID NO: 1172920 - RNA, 18 nt, Human
uauuguuuucaguguaca

SEQ ID NO: 1172921 - RNA, 20 nt, Human
uauuguuuucaguguacaug

SEQ ID NO: 1172922 - RNA, 22 nt, Human
uauuguuuucaguguacaugga

SEQ ID NO: 1172923 - RNA, 14 nt, Human
uauuuuauuaugca

SEQ ID NO: 1172924 - RNA, 17 nt, Human
uauuuuauuaugcauga

SEQ ID NO: 1172925 - RNA, 22 nt, Human
uauuuucccuauuagagaagag

SEQ ID NO: 1172926 - RNA, 14 nt, Human
uauuuuuuuacuaa

SEQ ID NO: 1172927 - RNA, 15 nt, Human
uauuuuuuuacuaau

SEQ ID NO: 1172928 - RNA, 17 nt, Human
uauuuuuuucuuuucuu

SEQ ID NO: 1172929 - RNA, 14 nt, Human
ucaaaaaaagaaaa

SEQ ID NO: 1172930 - RNA, 15 nt, Human
ucaaaaaaagaaaaa

SEQ ID NO: 1172931 - RNA, 15 nt, Human
ucaaauccuugaaga

SEQ ID NO: 1172932 - RNA, 14 nt, Human
ucaaauugugugaa

SEQ ID NO: 1172933 - RNA, 15 nt, Human
ucaaauugugugaaa

SEQ ID NO: 1172934 - RNA, 23 nt, Human
ucaaccccuucgcuccugugucu

SEQ ID NO: 1172935 - RNA, 20 nt, Human
ucaagugauucuccugccuc

SEQ ID NO: 1172936 - RNA, 21 nt, Human
ucaagugauucuccugccuca

SEQ ID NO: 1172937 - RNA, 21 nt, Human
ucaauaaaauccauacauuug

SEQ ID NO: 1172938 - RNA, 21 nt, Human
ucaauuacaggaaguacugga

SEQ ID NO: 1172939 - RNA, 23 nt, Human
ucaauuacaggaaguacuggaga

SEQ ID NO: 1172940 - RNA, 13 nt, Human
ucacaagacccaa

SEQ ID NO: 1172941 - RNA, 17 nt, Human
ucacaagacccaaaagg

SEQ ID NO: 1172942 - RNA, 18 nt, Human
ucacaagacccaaaaggc

SEQ ID NO: 1172943 - RNA, 17 nt, Human
ucacaggcagguccagg

SEQ ID NO: 1172944 - RNA, 18 nt, Human
ucacaggcagguccaggg

SEQ ID NO: 1172945 - RNA, 19 nt, Human
ucacaggcagguccagggu

SEQ ID NO: 1172946 - RNA, 19 nt, Human
ucacaguccuuaccagcag

SEQ ID NO: 1172947 - RNA, 22 nt, Human
ucacaguccuuaccagcagagc

SEQ ID NO: 1172948 - RNA, 23 nt, Human
ucacaguccuuaccagcagagca

SEQ ID NO: 1172949 - RNA, 17 nt, Human
ucacauuuauucugcuc

SEQ ID NO: 1172950 - RNA, 18 nt, Human
ucacauuuauucugcuca

SEQ ID NO: 1172951 - RNA, 19 nt, Human
ucacauuuauucugcucac

SEQ ID NO: 1172952 - RNA, 19 nt, Human
ucaccaaaucagcugcuac

SEQ ID NO: 1172953 - RNA, 20 nt, Human
ucaccaaaucagcugcuacu

SEQ ID NO: 1172954 - RNA, 21 nt, Human
ucaccaaaucagcugcuacua

SEQ ID NO: 1172955 - RNA, 14 nt, Human
ucaccaaggcugau

SEQ ID NO: 1172956 - RNA, 16 nt, Human
ucaccacaugugcaca

SEQ ID NO: 1172957 - RNA, 20 nt, Human
ucacucuuauugcccacgcu

SEQ ID NO: 1172958 - RNA, 18 nt, Human
ucacugccaugccagcuu

SEQ ID NO: 1172959 - RNA, 13 nt, Human
ucaccagccccag

SEQ ID NO: 1172960 - RNA, 16 nt, Human
ucaccagccccagugc

SEQ ID NO: 1172961 - RNA, 17 nt, Human
ucacucuuauugcccac

SEQ ID NO: 1172962 - RNA, 14 nt, Human
ucacugcuuaacuu

SEQ ID NO: 1172963 - RNA, 10 nt, Human
ucagaaaugu

SEQ ID NO: 1172964 - RNA, 15 nt, Human
ucagaaauguguuau

SEQ ID NO: 1172965 - RNA, 23 nt, Human
ucagaauucucuaguuugauuaa

SEQ ID NO: 1172966 - RNA, 13 nt, Human
ucagacagcugcc

SEQ ID NO: 1172967 - RNA, 14 nt, Human
ucagacagcugccu

SEQ ID NO: 1172968 - RNA, 14 nt, Human
ucagccucccaaag

SEQ ID NO: 1172969 - RNA, 19 nt, Human
ucagccucccaaagugcug

SEQ ID NO: 1172970 - RNA, 21 nt, Human
ucagccucccaaagugcuggg

SEQ ID NO: 1172971 - RNA, 21 nt, Human
ucagccucccgaauagcuggg

SEQ ID NO: 1172972 - RNA, 22 nt, Human
ucagccucccgaauagcuggga

SEQ ID NO: 1172973 - RNA, 18 nt, Human
ucagccucccgaguagcu

SEQ ID NO: 1172974 - RNA, 20 nt, Human
ucagccucccgaguagcugg

SEQ ID NO: 1172975 - RNA, 21 nt, Human
ucagccucccgaguagcuggg

SEQ ID NO: 1172976 - RNA, 22 nt, Human
ucagccucccgaguagcuggga

SEQ ID NO: 1172977 - RNA, 19 nt, Human
ucagccugcuccagcuguu

SEQ ID NO: 1172978 - RNA, 15 nt, Human
ucagcugaaccuggg

SEQ ID NO: 1172979 - RNA, 16 nt, Human
ucagcugaaccugggu

SEQ ID NO: 1172980 - RNA, 17 nt, Human
ucaggcuagauguaugu

SEQ ID NO: 1172981 - RNA, 14 nt, Human
ucagggccuggcuc

SEQ ID NO: 1172982 - RNA, 16 nt, Human
ucagggccuggcucag

SEQ ID NO: 1172983 - RNA, 15 nt, Human
ucaggugagaagcag

SEQ ID NO: 1172984 - RNA, 16 nt, Human
ucaggugagaagcaga

SEQ ID NO: 1172985 - RNA, 15 nt, Human
ucauacucaccucac

SEQ ID NO: 1172986 - RNA, 19 nt, Human
ucaucaccaacgucugugc

SEQ ID NO: 1172987 - RNA, 20 nt, Human
ucaucaccaacgucugugcc

SEQ ID NO: 1172988 - RNA, 21 nt, Human
ucaucaccaacgucugugcca

SEQ ID NO: 1172989 - RNA, 21 nt, Human
ucaggugagaagcagaggaag

SEQ ID NO: 1172990 - RNA, 23 nt, Human
ucaggugagaagcagaggaagga

SEQ ID NO: 1172991 - RNA, 13 nt, Human
ucaggugcugcca

SEQ ID NO: 1172992 - RNA, 14 nt, Human
ucaggugcugccau

SEQ ID NO: 1172993 - RNA, 15 nt, Human
ucaggugcugccauc

SEQ ID NO: 1172994 - RNA, 23 nt, Human
ucaucuuagguuggcaaaaaggc

SEQ ID NO: 1172995 - RNA, 19 nt, Human
ucaucuugaauuguaagga

SEQ ID NO: 1172996 - RNA, 21 nt, Human
ucauucaacccaccugcgucu

SEQ ID NO: 1172997 - RNA, 13 nt, Human
ucauuuccaagca

SEQ ID NO: 1172998 - RNA, 16 nt, Human
ucauuuccaagcaagu

SEQ ID NO: 1172999 - RNA, 13 nt, Human
ucauuuccugugu

SEQ ID NO: 1173000 - RNA, 16 nt, Human
ucauuuccugugucuu

SEQ ID NO: 1173001 - RNA, 15 nt, Human
uccacuuggucugug

SEQ ID NO: 1173002 - RNA, 16 nt, Human
uccacuuggucuguga

SEQ ID NO: 1173003 - RNA, 17 nt, Human
uccacuuggucugugag

SEQ ID NO: 1173004 - RNA, 17 nt, Human
uccagccacagaaaaga

SEQ ID NO: 1173005 - RNA, 16 nt, Human
uccagcucaccagccc

SEQ ID NO: 1173006 - RNA, 17 nt, Human
uccagcucaccagcccc

SEQ ID NO: 1173007 - RNA, 18 nt, Human
uccagcucaccagcccca

SEQ ID NO: 1173008 - RNA, 17 nt, Human
uccagcuguucagcugg

SEQ ID NO: 1173009 - RNA, 16 nt, Human
uccaggagcagccaca

SEQ ID NO: 1173010 - RNA, 15 nt, Human
uccagguucagcuug

SEQ ID NO: 1173011 - RNA, 16 nt, Human
uccagguucagcuugu

SEQ ID NO: 1173012 - RNA, 18 nt, Human
uccaggugcacaagcucc

SEQ ID NO: 1173013 - RNA, 20 nt, Human
uccaggugcacaagcuccaa

SEQ ID NO: 1173014 - RNA, 21 nt, Human
uccaggugcacaagcuccaag

SEQ ID NO: 1173015 - RNA, 22 nt, Human
uccaggugcacaagcuccaagc

SEQ ID NO: 1173016 - RNA, 17 nt, Human
uccaggagcagccacau

SEQ ID NO: 1173017 - RNA, 18 nt, Human
uccaggagcagccacauu

SEQ ID NO: 1173018 - RNA, 22 nt, Human
uccaggagcagccacauuccug

SEQ ID NO: 1173019 - RNA, 23 nt, Human
uccaggggugggacacccuguga

SEQ ID NO: 1173020 - RNA, 15 nt, Human
uccaggugcacaagc

SEQ ID NO: 1173021 - RNA, 17 nt, Human
uccaauuuacauacucu

SEQ ID NO: 1173022 - RNA, 18 nt, Human
uccaauuuacauacucug

SEQ ID NO: 1173023 - RNA, 20 nt, Human
uccaaaauaaaacuuuuuaa

SEQ ID NO: 1173024 - RNA, 16 nt, Human
uccacaagagcccagg

SEQ ID NO: 1173025 - RNA, 17 nt, Human
uccacaagagcccaggc

SEQ ID NO: 1173026 - RNA, 18 nt, Human
uccacaagagcccaggcc

SEQ ID NO: 1173027 - RNA, 19 nt, Human
uccacaagagcccaggccu

SEQ ID NO: 1173028 - RNA, 17 nt, Human
uccacaaguuaaauaaa

SEQ ID NO: 1173029 - RNA, 18 nt, Human
uccacaaguuaaauaaau

SEQ ID NO: 1173030 - RNA, 19 nt, Human
uccacagaagcuccaggua

SEQ ID NO: 1173031 - RNA, 12 nt, Human
uccacccugcuc

SEQ ID NO: 1173032 - RNA, 13 nt, Human
uccacccugcucu

SEQ ID NO: 1173033 - RNA, 17 nt, Human
uccaccugccagggaca

SEQ ID NO: 1173034 - RNA, 18 nt, Human
uccaccugccagggacag

SEQ ID NO: 1173035 - RNA, 21 nt, Human
uccaccugccagggacagagg

SEQ ID NO: 1173036 - RNA, 13 nt, Human
ucccugcacuugc

SEQ ID NO: 1173037 - RNA, 14 nt, Human
ucccugcacuugca

SEQ ID NO: 1173038 - RNA, 20 nt, Human
ucccugcacuugcagacucu

SEQ ID NO: 1173039 - RNA, 13 nt, Human
ucccuucccaccu

SEQ ID NO: 1173040 - RNA, 14 nt, Human
ucccuucccaccuc

SEQ ID NO: 1173041 - RNA, 15 nt, Human
ucccuugaugaagaa

SEQ ID NO: 1173042 - RNA, 16 nt, Human
ucccuugaugaagaag

SEQ ID NO: 1173043 - RNA, 16 nt, Human
ucccuauuagagaaga

SEQ ID NO: 1173044 - RNA, 17 nt, Human
uccagguuuaagcuguu

SEQ ID NO: 1173045 - RNA, 18 nt, Human
uccagguuuaagcuguua

SEQ ID NO: 1173046 - RNA, 20 nt, Human
uccccuguuuguuucugaaa

SEQ ID NO: 1173047 - RNA, 21 nt, Human
uccccuguuuguuucugaaag

SEQ ID NO: 1173048 - RNA, 18 nt, Human
uccuacccacccuccuuu

SEQ ID NO: 1173049 - RNA, 13 nt, Human
uccgaccagacac

SEQ ID NO: 1173050 - RNA, 17 nt, Human
uccgaccagacaccuug

SEQ ID NO: 1173051 - RNA, 16 nt, Human
uccuaaucuucugaac

SEQ ID NO: 1173052 - RNA, 18 nt, Human
uccuauauuguuuucagu

SEQ ID NO: 1173053 - RNA, 21 nt, Human
uccuauauuguuuucagugua

SEQ ID NO: 1173054 - RNA, 17 nt, Human
uccucauuagcauuuug

SEQ ID NO: 1173055 - RNA, 16 nt, Human
uccucuguacagagcc

SEQ ID NO: 1173056 - RNA, 17 nt, Human
uccucuguacagagccc

SEQ ID NO: 1173057 - RNA, 18 nt, Human
uccucuguacagagccca

SEQ ID NO: 1173058 - RNA, 19 nt, Human
uccucuguacagagcccac

SEQ ID NO: 1173059 - RNA, 17 nt, Human
uccucuaggaggucucu

SEQ ID NO: 1173060 - RNA, 14 nt, Human
uccucugcugcugg

SEQ ID NO: 1173061 - RNA, 15 nt, Human
uccucugcugcuggc

SEQ ID NO: 1173062 - RNA, 16 nt, Human
uccucugcugcuggcu

SEQ ID NO: 1173063 - RNA, 17 nt, Human
uccucugcugcuggcug

SEQ ID NO: 1173064 - RNA, 19 nt, Human
uccuccuuuucacaguucu

SEQ ID NO: 1173065 - RNA, 14 nt, Human
uccucuaggagguc

SEQ ID NO: 1173066 - RNA, 14 nt, Human
uccugccucagccu

SEQ ID NO: 1173067 - RNA, 14 nt, Human
uccugagccagauu

SEQ ID NO: 1173068 - RNA, 13 nt, Human
uccugagccagau

SEQ ID NO: 1173069 - RNA, 13 nt, Human
uccugccucagcc

SEQ ID NO: 1173070 - RNA, 15 nt, Human
uccugccucagccuc

SEQ ID NO: 1173071 - RNA, 16 nt, Human
uccugccucagccucc

SEQ ID NO: 1173072 - RNA, 17 nt, Human
uccugccucagccuccc

SEQ ID NO: 1173073 - RNA, 14 nt, Human
uccuggcacccggc

SEQ ID NO: 1173074 - RNA, 16 nt, Human
uccuggcacccggccc

SEQ ID NO: 1173075 - RNA, 19 nt, Human
uccuggcacccggccccug

SEQ ID NO: 1173076 - RNA, 20 nt, Human
uccuggcacccggccccugc

SEQ ID NO: 1173077 - RNA, 21 nt, Human
uccuggcacccggccccugcu

SEQ ID NO: 1173078 - RNA, 22 nt, Human
uccuggcacccggccccugcug

SEQ ID NO: 1173079 - RNA, 18 nt, Human
uccuggcacugcuuccag

SEQ ID NO: 1173080 - RNA, 22 nt, Human
uccuggcacugcuuccagugag

SEQ ID NO: 1173081 - RNA, 20 nt, Human
uccuguaccucuugagccuu

SEQ ID NO: 1173082 - RNA, 22 nt, Human
uccuguaccucuugagccuuga

SEQ ID NO: 1173083 - RNA, 23 nt, Human
uccuuuucacaguucucuccuuc

SEQ ID NO: 1173084 - RNA, 13 nt, Human
ucgaacuggcugc

SEQ ID NO: 1173085 - RNA, 18 nt, Human
uccuuuucgcaggauucu

SEQ ID NO: 1173086 - RNA, 21 nt, Human
uccuucaccuuuguccccacc

SEQ ID NO: 1173087 - RNA, 22 nt, Human
uccuucaccuuuguccccaccg

SEQ ID NO: 1173088 - RNA, 16 nt, Human
uccuuaccagcagagc

SEQ ID NO: 1173089 - RNA, 17 nt, Human
uccuuaccagcagagca

SEQ ID NO: 1173090 - RNA, 18 nt, Human
uccuuaccagcagagcac

SEQ ID NO: 1173091 - RNA, 18 nt, Human
uccuucacagaugggugc

SEQ ID NO: 1173092 - RNA, 19 nt, Human
uccuucacagaugggugcu

SEQ ID NO: 1173093 - RNA, 20 nt, Human
uccuuaccagcagagcaccu

SEQ ID NO: 1173094 - RNA, 18 nt, Human
uccuucaccuuugucccc

SEQ ID NO: 1173095 - RNA, 20 nt, Human
uccuucaccuuuguccccac

SEQ ID NO: 1173096 - RNA, 16 nt, Human
ucgugauugauaagaa

SEQ ID NO: 1173097 - RNA, 18 nt, Human
ucggccuccauccugagg

SEQ ID NO: 1173098 - RNA, 21 nt, Human
ucguggaacaguuaccucugc

SEQ ID NO: 1173099 - RNA, 22 nt, Human
ucgugggacagucaccucaugg

SEQ ID NO: 1173100 - RNA, 22 nt, Human
ucuaaaucuccaaaauaaaacu

SEQ ID NO: 1173101 - RNA, 13 nt, Human
ucguuaauuugua

SEQ ID NO: 1173102 - RNA, 21 nt, Human
ucuaaaucuccaaaauaaaac

SEQ ID NO: 1173103 - RNA, 14 nt, Human
ucuaauauguaaca

SEQ ID NO: 1173104 - RNA, 18 nt, Human
ucuaggaggucucuaaga

SEQ ID NO: 1173105 - RNA, 19 nt, Human
ucuagugagcagucaggaa

SEQ ID NO: 1173106 - RNA, 22 nt, Human
ucuagugagcagucaggaaaga

SEQ ID NO: 1173107 - RNA, 15 nt, Human
ucuaucaaguauuau

SEQ ID NO: 1173108 - RNA, 21 nt, Human
ucuaucaaguauuauaccuuu

SEQ ID NO: 1173109 - RNA, 22 nt, Human
ucuaucaaguauuauaccuuuu

SEQ ID NO: 1173110 - RNA, 14 nt, Human
ucuaugaaauauua

SEQ ID NO: 1173111 - RNA, 17 nt, Human
ucuaugaaauauuaugu

SEQ ID NO: 1173112 - RNA, 18 nt, Human
ucuaugaaauauuauguu

SEQ ID NO: 1173113 - RNA, 17 nt, Human
ucucaaauaacuaaaag

SEQ ID NO: 1173114 - RNA, 17 nt, Human
ucuccugccucagccuc

SEQ ID NO: 1173115 - RNA, 15 nt, Human
ucuccugccucagcc

SEQ ID NO: 1173116 - RNA, 19 nt, Human
ucuccugccucagccuccc

SEQ ID NO: 1173117 - RNA, 21 nt, Human
ucuccuggaaauauuaagaaa

SEQ ID NO: 1173118 - RNA, 15 nt, Human
ucuccuguaccucuu

SEQ ID NO: 1173119 - RNA, 16 nt, Human
ucuccuguaccucuug

SEQ ID NO: 1173120 - RNA, 17 nt, Human
ucuccuguaccucuuga

SEQ ID NO: 1173121 - RNA, 19 nt, Human
ucuccuguaccucuugagc

SEQ ID NO: 1173122 - RNA, 14 nt, Human
ucucgugauugaua

SEQ ID NO: 1173123 - RNA, 22 nt, Human
ucucgugauugauaagaaccuu

SEQ ID NO: 1173124 - RNA, 12 nt, Human
ucucuaacuuca

SEQ ID NO: 1173125 - RNA, 19 nt, Human
ucucuaacuucaccauauu

SEQ ID NO: 1173126 - RNA, 15 nt, Human
ucucuaguuugauua

SEQ ID NO: 1173127 - RNA, 16 nt, Human
ucucuaguuugauuaa

SEQ ID NO: 1173128 - RNA, 17 nt, Human
ucucugaggacacuaac

SEQ ID NO: 1173129 - RNA, 20 nt, Human
ucugcaagaauugaagcagg

SEQ ID NO: 1173130 - RNA, 21 nt, Human
ucugcaagaauugaagcagga

SEQ ID NO: 1173131 - RNA, 14 nt, Human
ucugacccacugcu

SEQ ID NO: 1173132 - RNA, 15 nt, Human
ucugacccacugcuu

SEQ ID NO: 1173133 - RNA, 13 nt, Human
ucugaaaauguau

SEQ ID NO: 1173134 - RNA, 14 nt, Human
ucugaaaauguaug

SEQ ID NO: 1173135 - RNA, 17 nt, Human
ucugacacacagcucug

SEQ ID NO: 1173136 - RNA, 18 nt, Human
ucugacacacagcucugu

SEQ ID NO: 1173137 - RNA, 19 nt, Human
ucugacacacagcucuguc

SEQ ID NO: 1173138 - RNA, 12 nt, Human
ucugacaggcaa

SEQ ID NO: 1173139 - RNA, 21 nt, Human
ucugacaggcaaugcuggcug

SEQ ID NO: 1173140 - RNA, 22 nt, Human
ucugacaggcaaugcuggcugu

SEQ ID NO: 1173141 - RNA, 13 nt, Human
ucugacccacugc

SEQ ID NO: 1173142 - RNA, 19 nt, Human
ucugcugacagacacaggc

SEQ ID NO: 1173143 - RNA, 20 nt, Human
ucugcugacagacacaggcc

SEQ ID NO: 1173144 - RNA, 21 nt, Human
ucugcugacagacacaggccc

SEQ ID NO: 1173145 - RNA, 22 nt, Human
ucugcugacagacacaggcccg

SEQ ID NO: 1173146 - RNA, 15 nt, Human
ucuggaaugcagugg

SEQ ID NO: 1173147 - RNA, 16 nt, Human
ucuggaaugcaguggu

SEQ ID NO: 1173148 - RNA, 14 nt, Human
ucuggacaggcaug

SEQ ID NO: 1173149 - RNA, 21 nt, Human
ucuggacaggcauguucucug

SEQ ID NO: 1173150 - RNA, 18 nt, Human
ucugccauauucuguugg

SEQ ID NO: 1173151 - RNA, 14 nt, Human
ucugccugcccagg

SEQ ID NO: 1173152 - RNA, 15 nt, Human
ucugccugcccaggc

SEQ ID NO: 1173153 - RNA, 16 nt, Human
ucugccugcccaggcc

SEQ ID NO: 1173154 - RNA, 18 nt, Human
ucugcuccucuccccagc

SEQ ID NO: 1173155 - RNA, 21 nt, Human
ucugcuccucuccccagcaag

SEQ ID NO: 1173156 - RNA, 18 nt, Human
ucugcugacagacacagg

SEQ ID NO: 1173157 - RNA, 19 nt, Human
ucuggcuaugcauuugaaa

SEQ ID NO: 1173158 - RNA, 22 nt, Human
ucuggcuaugcauuugaaaauu

SEQ ID NO: 1173159 - RNA, 17 nt, Human
ucuggccuucggccucc

SEQ ID NO: 1173160 - RNA, 18 nt, Human
ucuggccuucggccucca

SEQ ID NO: 1173161 - RNA, 23 nt, Human
ucuggccuucggccuccauccug

SEQ ID NO: 1173162 - RNA, 23 nt, Human
ucuggcucuuccaggcugggaga

SEQ ID NO: 1173163 - RNA, 14 nt, Human
ucugggacacaguu

SEQ ID NO: 1173164 - RNA, 23 nt, Human
ucuggugacuuuccucuuugguc

SEQ ID NO: 1173165 - RNA, 15 nt, Human
ucuguccuacucugu

SEQ ID NO: 1173166 - RNA, 19 nt, Human
ucuguccuacucuguguca

SEQ ID NO: 1173167 - RNA, 20 nt, Human
ucuguccuacucugugucag

SEQ ID NO: 1173168 - RNA, 14 nt, Human
ucugucgcccaguc

SEQ ID NO: 1173169 - RNA, 16 nt, Human
ucugucgcccagucug

SEQ ID NO: 1173170 - RNA, 22 nt, Human
ucuuaggguuaugauuaaguaa

SEQ ID NO: 1173171 - RNA, 18 nt, Human
ucuucagaucucuaacuu

SEQ ID NO: 1173172 - RNA, 23 nt, Human
ucuucagaucucuaacuucacca

SEQ ID NO: 1173173 - RNA, 12 nt, Human
ucuugaacuccu

SEQ ID NO: 1173174 - RNA, 13 nt, Human
ucuuaaaaagugg

SEQ ID NO: 1173175 - RNA, 22 nt, Human
ucuuaaauauguggaguucauc

SEQ ID NO: 1173176 - RNA, 12 nt, Human
ucuuaagaagac

SEQ ID NO: 1173177 - RNA, 18 nt, Human
ucuuaagaagacugcauu

SEQ ID NO: 1173178 - RNA, 22 nt, Human
ugaccucaggugauccacccac

SEQ ID NO: 1173179 - RNA, 13 nt, Human
ugaccucugcagc

SEQ ID NO: 1173180 - RNA, 16 nt, Human
ugaccucugcagcaau

SEQ ID NO: 1173181 - RNA, 18 nt, Human
ugaccucugcagcaauaa

SEQ ID NO: 1173182 - RNA, 21 nt, Human
ugaccucugcagcaauaaagc

SEQ ID NO: 1173183 - RNA, 23 nt, Human
ugaccucugcagcaauaaagcag

SEQ ID NO: 1173184 - RNA, 12 nt, Human
ugaccucugccu

SEQ ID NO: 1173185 - RNA, 13 nt, Human
ugaccucugccug

SEQ ID NO: 1173186 - RNA, 14 nt, Human
ugaccuuucaauag

SEQ ID NO: 1173187 - RNA, 15 nt, Human
ugaccuuucaauagg

SEQ ID NO: 1173188 - RNA, 16 nt, Human
ugaccuuucaauagga

SEQ ID NO: 1173189 - RNA, 23 nt, Human
ugaccauucuccaccugccaggg

SEQ ID NO: 1173190 - RNA, 15 nt, Human
ucuugaacuccuggc

SEQ ID NO: 1173191 - RNA, 17 nt, Human
ucuugaauuguaaggaa

SEQ ID NO: 1173192 - RNA, 20 nt, Human
ugaccauucuccaccugcca

SEQ ID NO: 1173193 - RNA, 21 nt, Human
ugaccauucuccaccugccag

SEQ ID NO: 1173194 - RNA, 22 nt, Human
ugaccauucuccaccugccagg

SEQ ID NO: 1173195 - RNA, 18 nt, Human
ugaccuuucaauaggaaa

SEQ ID NO: 1173196 - RNA, 22 nt, Human
ugaccuuucaauaggaaaaacu

SEQ ID NO: 1173197 - RNA, 13 nt, Human
ugacgccauccca

SEQ ID NO: 1173198 - RNA, 14 nt, Human
ugacgccaucccag

SEQ ID NO: 1173199 - RNA, 15 nt, Human
ugacgccaucccagc

SEQ ID NO: 1173200 - RNA, 16 nt, Human
ugacgccaucccagcc

SEQ ID NO: 1173201 - RNA, 17 nt, Human
ugacgccaucccagccc

SEQ ID NO: 1173202 - RNA, 18 nt, Human
ugacgccaucccagcccc

SEQ ID NO: 1173203 - RNA, 19 nt, Human
ugacgccaucccagcccca

SEQ ID NO: 1173204 - RNA, 20 nt, Human
ugacgccaucccagccccaa

SEQ ID NO: 1173205 - RNA, 12 nt, Human
ugacucuuaaga

SEQ ID NO: 1173206 - RNA, 13 nt, Human
ugacugaauuucu

SEQ ID NO: 1173207 - RNA, 14 nt, Human
ugacugaauuucuu

SEQ ID NO: 1173208 - RNA, 15 nt, Human
ugacugaauuucuuu

SEQ ID NO: 1173209 - RNA, 13 nt, Human
ugacucuuaagaa

SEQ ID NO: 1173210 - RNA, 14 nt, Human
ugagacagcucugc

SEQ ID NO: 1173211 - RNA, 16 nt, Human
ugagacagcucugcau

SEQ ID NO: 1173212 - RNA, 12 nt, Human
ugagacccuguc

SEQ ID NO: 1173213 - RNA, 12 nt, Human
ugagacucuguc

SEQ ID NO: 1173214 - RNA, 13 nt, Human
ugagacucugucu

SEQ ID NO: 1173215 - RNA, 14 nt, Human
ugagacucugucuc

SEQ ID NO: 1173216 - RNA, 22 nt, Human
ugagaggcauccaguaucuuga

SEQ ID NO: 1173217 - RNA, 23 nt, Human
ugagaggcauccaguaucuugaa

SEQ ID NO: 1173218 - RNA, 20 nt, Human
ugagacucugucucaaaaaa

SEQ ID NO: 1173219 - RNA, 17 nt, Human
ugagaguagagucacug

SEQ ID NO: 1173220 - RNA, 14 nt, Human
ugagaugcuagaac

SEQ ID NO: 1173221 - RNA, 16 nt, Human
ugagaugcuagaacuc

SEQ ID NO: 1173222 - RNA, 20 nt, Human
ugagaugcuagaacucccuu

SEQ ID NO: 1173223 - RNA, 17 nt, Human
ugagcagucaggaaaga

SEQ ID NO: 1173224 - RNA, 20 nt, Human
ugagcagucaggaaagagaa

SEQ ID NO: 1173225 - RNA, 13 nt, Human
ugagcaucaggcc

SEQ ID NO: 1173226 - RNA, 14 nt, Human
ugagcaucaggcca

SEQ ID NO: 1173227 - RNA, 15 nt, Human
ugagcaucaggccag

SEQ ID NO: 1173228 - RNA, 16 nt, Human
ugagcaucaggccagg

SEQ ID NO: 1173229 - RNA, 13 nt, Human
ugagccccaaaag

SEQ ID NO: 1173230 - RNA, 13 nt, Human
ugagccucagcau

SEQ ID NO: 1173231 - RNA, 15 nt, Human
ugagccucagcaucc

SEQ ID NO: 1173232 - RNA, 11 nt, Human
ugaggcugggc

SEQ ID NO: 1173233 - RNA, 14 nt, Human
ugaggucuguucuu

SEQ ID NO: 1173234 - RNA, 15 nt, Human
ugaggucuguucuuu

SEQ ID NO: 1173235 - RNA, 20 nt, Human
ugaggucuguucuuuccaaa

SEQ ID NO: 1173236 - RNA, 16 nt, Human
ugaggugcuauguucu

SEQ ID NO: 1173237 - RNA, 19 nt, Human
ugagguuucaaaccucccu

SEQ ID NO: 1173238 - RNA, 21 nt, Human
ugaguccccuguuuguuucug

SEQ ID NO: 1173239 - RNA, 11 nt, Human
ugaguccuggc

SEQ ID NO: 1173240 - RNA, 18 nt, Human
ugaguccuggcaugggaa

SEQ ID NO: 1173241 - RNA, 19 nt, Human
ugaguccuggcaugggaau

SEQ ID NO: 1173242 - RNA, 22 nt, Human
ugaguccuggcaugggaaugaa

SEQ ID NO: 1173243 - RNA, 14 nt, Human
ugagucgaggacag

SEQ ID NO: 1173244 - RNA, 22 nt, Human
ugauagcacagacccugcccug

SEQ ID NO: 1173245 - RNA, 23 nt, Human
ugauagcacagacccugcccugu

SEQ ID NO: 1173246 - RNA, 15 nt, Human
ugauagcacagaccc

SEQ ID NO: 1173247 - RNA, 16 nt, Human
ugauagcacagacccu

SEQ ID NO: 1173248 - RNA, 17 nt, Human
ugauagcacagacccug

SEQ ID NO: 1173249 - RNA, 18 nt, Human
ugauagcacagacccugc

SEQ ID NO: 1173250 - RNA, 20 nt, Human
ugauagcacagacccugccc

SEQ ID NO: 1173251 - RNA, 21 nt, Human
ugauagcacagacccugcccu

SEQ ID NO: 1173252 - RNA, 15 nt, Human
ugagucgaggacagg

SEQ ID NO: 1173253 - RNA, 16 nt, Human
ugagucgaggacaggg

SEQ ID NO: 1173254 - RNA, 23 nt, Human
ugaguugauagcacagacccugc

SEQ ID NO: 1173255 - RNA, 16 nt, Human
ugaguugauucagcuc

SEQ ID NO: 1173256 - RNA, 19 nt, Human
ugaguugauucagcucugc

SEQ ID NO: 1173257 - RNA, 18 nt, Human
ugagucgaggacagggag

SEQ ID NO: 1173258 - RNA, 21 nt, Human
ugauccacccaccucagccuc

SEQ ID NO: 1173259 - RNA, 22 nt, Human
ugauccacccaccucagccucc

SEQ ID NO: 1173260 - RNA, 19 nt, Human
ugaucuaggaagacuuugg

SEQ ID NO: 1173261 - RNA, 21 nt, Human
ugaucuaggaagacuuuggaa

SEQ ID NO: 1173262 - RNA, 13 nt, Human
ugaucauccacug

SEQ ID NO: 1173263 - RNA, 24 nt, Human
ugaucauccacugugccaugugcc

SEQ ID NO: 1173264 - RNA, 21 nt, Human
ugauccaagcuggucccacuc

SEQ ID NO: 1173265 - RNA, 15 nt, Human
ugauccacccaccuc

SEQ ID NO: 1173266 - RNA, 16 nt, Human
ugauccacccaccuca

SEQ ID NO: 1173267 - RNA, 20 nt, Human
ugauccacccaccucagccu

SEQ ID NO: 1173268 - RNA, 24 nt, Human
ugauaguuguaccgcaaugugacu

SEQ ID NO: 1173269 - RNA, 22 nt, Human
ugaucacggcucacugcagccu

SEQ ID NO: 1173270 - RNA, 19 nt, Human
ugaucuuugcagacaggca

SEQ ID NO: 1173271 - RNA, 20 nt, Human
ugaucuuugcagacaggcaa

SEQ ID NO: 1173272 - RNA, 21 nt, Human
ugaucuuugcagacaggcaag

SEQ ID NO: 1173273 - RNA, 23 nt, Human
ugaucuuugcagacaggcaagca

SEQ ID NO: 1173274 - RNA, 23 nt, Human
ugaugaucuuugcagacaggcaa

SEQ ID NO: 1173275 - RNA, 20 nt, Human
ugaugaugaaaugaggucag

SEQ ID NO: 1173276 - RNA, 14 nt, Human
ugaugccaugagga

SEQ ID NO: 1173277 - RNA, 19 nt, Human
ugaugcuucuucagagacu

SEQ ID NO: 1173278 - RNA, 21 nt, Human
ugaugcuucuucagagacucc

SEQ ID NO: 1173279 - RNA, 22 nt, Human
ugaugcuucuucagagacuccu

SEQ ID NO: 1173280 - RNA, 23 nt, Human
ugaugcuucuucagagacuccug

SEQ ID NO: 1173281 - RNA, 16 nt, Human
ugauuuuuuuuuccuu

SEQ ID NO: 1173282 - RNA, 17 nt, Human
ugauuuuuuuuuccuuc

SEQ ID NO: 1173283 - RNA, 19 nt, Human
ugauuuuuuuuuccuucag

SEQ ID NO: 1173284 - RNA, 20 nt, Human
ugauuuuuuuuuccuucagu

SEQ ID NO: 1173285 - RNA, 22 nt, Human
ugauuuuuuuuuccuucagugc

SEQ ID NO: 1173286 - RNA, 23 nt, Human
ugauuuuuuuuuccuucagugcc

SEQ ID NO: 1173287 - RNA, 13 nt, Human
ugauuuucauugc

SEQ ID NO: 1173288 - RNA, 15 nt, Human
ugauuuucauugcug

SEQ ID NO: 1173289 - RNA, 22 nt, Human
ugcaaccugauugugucucuug

SEQ ID NO: 1173290 - RNA, 18 nt, Human
ugcaaccuccgccucuug

SEQ ID NO: 1173291 - RNA, 20 nt, Human
ugcaaccuccgccucuuggg

SEQ ID NO: 1173292 - RNA, 21 nt, Human
ugcaaccuccgccucuugggu

SEQ ID NO: 1173293 - RNA, 19 nt, Human
ugcaaccugauugugucuc

SEQ ID NO: 1173294 - RNA, 20 nt, Human
ugcaaccugauugugucucu

SEQ ID NO: 1173295 - RNA, 14 nt, Human
ugcaacaggcuggg

SEQ ID NO: 1173296 - RNA, 15 nt, Human
ugcaacaggcugggc

SEQ ID NO: 1173297 - RNA, 16 nt, Human
ugcaacaggcugggcu

SEQ ID NO: 1173298 - RNA, 17 nt, Human
ugcaacaggcugggcuu

SEQ ID NO: 1173299 - RNA, 19 nt, Human
ugcaacaggcugggcuuca

SEQ ID NO: 1173300 - RNA, 20 nt, Human
ugcaacaggcugggcuucag

SEQ ID NO: 1173301 - RNA, 13 nt, Human
ugcaaccuccgcc

SEQ ID NO: 1173302 - RNA, 14 nt, Human
ugcaaccuccgccu

SEQ ID NO: 1173303 - RNA, 17 nt, Human
ugcacagaguuguuaca

SEQ ID NO: 1173304 - RNA, 18 nt, Human
ugcacagaguuguuacau

SEQ ID NO: 1173305 - RNA, 19 nt, Human
ugcacagaguuguuacauu

SEQ ID NO: 1173306 - RNA, 17 nt, Human
ugcacaaacagaggccg

SEQ ID NO: 1173307 - RNA, 19 nt, Human
ugcacaaacagaggccgcc

SEQ ID NO: 1173308 - RNA, 20 nt, Human
ugcacaaacagaggccgcca

SEQ ID NO: 1173309 - RNA, 15 nt, Human
ugcacaaacagaggc

SEQ ID NO: 1173310 - RNA, 16 nt, Human
ugcacaaacagaggcc

SEQ ID NO: 1173311 - RNA, 13 nt, Human
ugcaaugaccuuu

SEQ ID NO: 1173312 - RNA, 16 nt, Human
ugcaaugaccuuucaa

SEQ ID NO: 1173313 - RNA, 17 nt, Human
ugcaaugaccuuucaau

SEQ ID NO: 1173314 - RNA, 19 nt, Human
ugcaaugaccuuucaauag

SEQ ID NO: 1173315 - RNA, 22 nt, Human
ugcaaugaccuuucaauaggaa

SEQ ID NO: 1173316 - RNA, 23 nt, Human
ugcaaugaccuuucaauaggaaa

SEQ ID NO: 1173317 - RNA, 13 nt, Human
ugcaauggcagcc

SEQ ID NO: 1173318 - RNA, 14 nt, Human
ugcaauggcagccu

SEQ ID NO: 1173319 - RNA, 15 nt, Human
ugcaauggcagccuu

SEQ ID NO: 1173320 - RNA, 16 nt, Human
ugcaauggcagccuug

SEQ ID NO: 1173321 - RNA, 20 nt, Human
ugcacagaguuguuacauuu

SEQ ID NO: 1173322 - RNA, 19 nt, Human
ugcaccggcuggccuggcc

SEQ ID NO: 1173323 - RNA, 20 nt, Human
ugcaccggcuggccuggccc

SEQ ID NO: 1173324 - RNA, 21 nt, Human
ugcaccggcuggccuggcccc

SEQ ID NO: 1173325 - RNA, 17 nt, Human
ugcaccuggaauauaua

SEQ ID NO: 1173326 - RNA, 20 nt, Human
ugcaccuggaauauauaacc

SEQ ID NO: 1173327 - RNA, 22 nt, Human
ugcaccuggaauauauaaccag

SEQ ID NO: 1173328 - RNA, 16 nt, Human
ugcacuugcagacucu

SEQ ID NO: 1173329 - RNA, 18 nt, Human
ugcacugacauuguuggc

SEQ ID NO: 1173330 - RNA, 21 nt, Human
ugcacugacauuguuggccaa

SEQ ID NO: 1173331 - RNA, 19 nt, Human
ugcagauaaacaguaguga

SEQ ID NO: 1173332 - RNA, 15 nt, Human
ugcauguuugugauu

SEQ ID NO: 1173333 - RNA, 14 nt, Human
ugcauuauauuuau

SEQ ID NO: 1173334 - RNA, 12 nt, Human
ugcauuaucuag

SEQ ID NO: 1173335 - RNA, 17 nt, Human
ugcauuaucuagauacu

SEQ ID NO: 1173336 - RNA, 18 nt, Human
ugcauuaucuagauacug

SEQ ID NO: 1173337 - RNA, 16 nt, Human
ugccaggaagccagca

SEQ ID NO: 1173338 - RNA, 18 nt, Human
ugccaggaagccagcagg

SEQ ID NO: 1173339 - RNA, 19 nt, Human
ugccaggaagccagcaggc

SEQ ID NO: 1173340 - RNA, 17 nt, Human
ugccagguuuuuggucu

SEQ ID NO: 1173341 - RNA, 12 nt, Human
ugccauccaggu

SEQ ID NO: 1173342 - RNA, 15 nt, Human
ugccauccagguuca

SEQ ID NO: 1173343 - RNA, 20 nt, Human
ugccauccagguucagcuug

SEQ ID NO: 1173344 - RNA, 20 nt, Human
ugccaugaggaacaaggcaa

SEQ ID NO: 1173345 - RNA, 23 nt, Human
ugccaugaggaacaaggcaaggc

SEQ ID NO: 1173346 - RNA, 14 nt, Human
ugccaugugccagg

SEQ ID NO: 1173347 - RNA, 15 nt, Human
ugccaugugccaggu

SEQ ID NO: 1173348 - RNA, 12 nt, Human
ugccauguuggc

SEQ ID NO: 1173349 - RNA, 15 nt, Human
ugccauguuggccag

SEQ ID NO: 1173350 - RNA, 16 nt, Human
ugccauguuggccagg

SEQ ID NO: 1173351 - RNA, 20 nt, Human
ugcccaccuggccucugcac

SEQ ID NO: 1173352 - RNA, 18 nt, Human
ugcccacgcuggagugca

SEQ ID NO: 1173353 - RNA, 13 nt, Human
ugcccacucccug

SEQ ID NO: 1173354 - RNA, 17 nt, Human
ugcccuaaaguguauuu

SEQ ID NO: 1173355 - RNA, 19 nt, Human
ugcccuaaaguguauuuuu

SEQ ID NO: 1173356 - RNA, 22 nt, Human
ugcccugcccaccuggccucug

SEQ ID NO: 1173357 - RNA, 23 nt, Human
ugcccugcccaccuggccucugc

SEQ ID NO: 1173358 - RNA, 15 nt, Human
ugccgucuaccugag

SEQ ID NO: 1173359 - RNA, 16 nt, Human
ugccgucuaccugagg

SEQ ID NO: 1173360 - RNA, 17 nt, Human
ugccgucuaccugaggg

SEQ ID NO: 1173361 - RNA, 19 nt, Human
ugccgucuaccugaggggc

SEQ ID NO: 1173362 - RNA, 13 nt, Human
ugccucugggacu

SEQ ID NO: 1173363 - RNA, 14 nt, Human
ugccucugggacug

SEQ ID NO: 1173364 - RNA, 21 nt, Human
ugccuccuuugugaggaagcc

SEQ ID NO: 1173365 - RNA, 22 nt, Human
ugccuccuuugugaggaagccg

SEQ ID NO: 1173366 - RNA, 21 nt, Human
ugccucuucucuacucuaggg

SEQ ID NO: 1173367 - RNA, 13 nt, Human
ugccugcccaggc

SEQ ID NO: 1173368 - RNA, 17 nt, Human
ugccugguggcagcugc

SEQ ID NO: 1173369 - RNA, 18 nt, Human
ugccugguggcagcugcg

SEQ ID NO: 1173370 - RNA, 19 nt, Human
ugccugguggcagcugcgg

SEQ ID NO: 1173371 - RNA, 22 nt, Human
ugcuucuguuuuauaauuuugu

SEQ ID NO: 1173372 - RNA, 13 nt, Human
ugcuucuucagag

SEQ ID NO: 1173373 - RNA, 18 nt, Human
ugcuugugaaaggaaaga

SEQ ID NO: 1173374 - RNA, 22 nt, Human
uggaaaaguauguuagugcaaa

SEQ ID NO: 1173375 - RNA, 15 nt, Human
uggaacacucugaga

SEQ ID NO: 1173376 - RNA, 17 nt, Human
uggaacacucugagacu

SEQ ID NO: 1173377 - RNA, 19 nt, Human
ugcuuaacuucacauauug

SEQ ID NO: 1173378 - RNA, 13 nt, Human
ugcuuaacuucac

SEQ ID NO: 1173379 - RNA, 14 nt, Human
ugcuuaacuucaca

SEQ ID NO: 1173380 - RNA, 17 nt, Human
ugcuuaacuucacauau

SEQ ID NO: 1173381 - RNA, 18 nt, Human
ugcuuaacuucacauauu

SEQ ID NO: 1173382 - RNA, 22 nt, Human
ugcuuccagugaggcucugccc

SEQ ID NO: 1173383 - RNA, 23 nt, Human
ugcuuccagugaggcucugcccu

SEQ ID NO: 1173384 - RNA, 18 nt, Human
uggacaggcauguucucu

SEQ ID NO: 1173385 - RNA, 22 nt, Human
uggacaggcauguucucugagg

SEQ ID NO: 1173386 - RNA, 23 nt, Human
uggacaggcauguucucugagga

SEQ ID NO: 1173387 - RNA, 19 nt, Human
uggacguguuaugacucca

SEQ ID NO: 1173388 - RNA, 23 nt, Human
uggacguguuaugacuccagaau

SEQ ID NO: 1173389 - RNA, 19 nt, Human
uggacuaacuugucuuugg

SEQ ID NO: 1173390 - RNA, 20 nt, Human
uggacuaacuugucuuugga

SEQ ID NO: 1173391 - RNA, 23 nt, Human
uggaggggggaggugggauccuc

SEQ ID NO: 1173392 - RNA, 13 nt, Human
uggaugcagccuc

SEQ ID NO: 1173393 - RNA, 21 nt, Human
uggaugcagccucacaguccu

SEQ ID NO: 1173394 - RNA, 22 nt, Human
uggaugcagccucacaguccuu

SEQ ID NO: 1173395 - RNA, 15 nt, Human
uggauuuaacagaaa

SEQ ID NO: 1173396 - RNA, 17 nt, Human
uggauuuaacagaaaug

SEQ ID NO: 1173397 - RNA, 22 nt, Human
uggcacuauaauguaagcucua

SEQ ID NO: 1173398 - RNA, 22 nt, Human
uggcacugcuuccagugaggcu

SEQ ID NO: 1173399 - RNA, 22 nt, Human
uggccuucggccuccauccuga

SEQ ID NO: 1173400 - RNA, 23 nt, Human
uggccuucggccuccauccugag

SEQ ID NO: 1173401 - RNA, 13 nt, Human
uggccucugcacu

SEQ ID NO: 1173402 - RNA, 13 nt, Human
uggcugcugaagg

SEQ ID NO: 1173403 - RNA, 14 nt, Human
uggcugcugaaggc

SEQ ID NO: 1173404 - RNA, 16 nt, Human
uggcugcugaaggcuc

SEQ ID NO: 1173405 - RNA, 22 nt, Human
uggcuuccuaaaauucagugga

SEQ ID NO: 1173406 - RNA, 17 nt, Human
uggcagcugcgguccac

SEQ ID NO: 1173407 - RNA, 19 nt, Human
uggcagcugcgguccaccc

SEQ ID NO: 1173408 - RNA, 13 nt, Human
uggccccucaggg

SEQ ID NO: 1173409 - RNA, 20 nt, Human
uggccccucagggucccugg

SEQ ID NO: 1173410 - RNA, 21 nt, Human
uggccccucagggucccuggu

SEQ ID NO: 1173411 - RNA, 22 nt, Human
uggccccucagggucccuggug

SEQ ID NO: 1173412 - RNA, 14 nt, Human
uggccccugcccgg

SEQ ID NO: 1173413 - RNA, 20 nt, Human
uggccuagcauacguacaca

SEQ ID NO: 1173414 - RNA, 23 nt, Human
uggccuagcauacguacacauuu

SEQ ID NO: 1173415 - RNA, 18 nt, Human
uggccucaagugauucuc

SEQ ID NO: 1173416 - RNA, 23 nt, Human
uggccucaagugauucuccugcc

SEQ ID NO: 1173417 - RNA, 11 nt, Human
uggccucccaa

SEQ ID NO: 1173418 - RNA, 14 nt, Human
uggccucccaacuc

SEQ ID NO: 1173419 - RNA, 19 nt, Human
uggccucccaacucacccc

SEQ ID NO: 1173420 - RNA, 20 nt, Human
uggccucccaacucacccca

SEQ ID NO: 1173421 - RNA, 21 nt, Human
uggccucccaacucaccccag

SEQ ID NO: 1173422 - RNA, 22 nt, Human
uggccucccaacucaccccagc

SEQ ID NO: 1173423 - RNA, 23 nt, Human
uggccucccaacucaccccagcc

SEQ ID NO: 1173424 - RNA, 18 nt, Human
ugggaugauuggaggggg

SEQ ID NO: 1173425 - RNA, 18 nt, Human
ugggaggaucucuugagc

SEQ ID NO: 1173426 - RNA, 16 nt, Human
ugggaaugaaugucag

SEQ ID NO: 1173427 - RNA, 21 nt, Human
ugggaaugaaugucaguguga

SEQ ID NO: 1173428 - RNA, 14 nt, Human
ugggacacccugug

SEQ ID NO: 1173429 - RNA, 15 nt, Human
ugggacacccuguga

SEQ ID NO: 1173430 - RNA, 14 nt, Human
ugggacagggagga

SEQ ID NO: 1173431 - RNA, 16 nt, Human
ugggaggaucucuuga

SEQ ID NO: 1173432 - RNA, 14 nt, Human
ugggcagagcagag

SEQ ID NO: 1173433 - RNA, 15 nt, Human
ugggcagagcagaga

SEQ ID NO: 1173434 - RNA, 17 nt, Human
ugggcagagcagagacc

SEQ ID NO: 1173435 - RNA, 18 nt, Human
ugggcagagcagagacca

SEQ ID NO: 1173436 - RNA, 14 nt, Human
ugggccuggcuccc

SEQ ID NO: 1173437 - RNA, 22 nt, Human
ugggcuucaguggcagcugcuu

SEQ ID NO: 1173438 - RNA, 15 nt, Human
ugggcuucauccucc

SEQ ID NO: 1173439 - RNA, 22 nt, Human
ugggcuucauccuccucagauc

SEQ ID NO: 1173440 - RNA, 23 nt, Human
ugggcuuggggaccagagcugcc

SEQ ID NO: 1173441 - RNA, 17 nt, Human
ugggcuugucuguagau

SEQ ID NO: 1173442 - RNA, 21 nt, Human
ugggcuugucuguagauuuua

SEQ ID NO: 1173443 - RNA, 13 nt, Human
uggggcagcuuga

SEQ ID NO: 1173444 - RNA, 16 nt, Human
ugggggccucagugcc

SEQ ID NO: 1173445 - RNA, 19 nt, Human
uggggggcugaggugggag

SEQ ID NO: 1173446 - RNA, 20 nt, Human
ugguggcagugggagcugcc

SEQ ID NO: 1173447 - RNA, 13 nt, Human
ugguggcaguggg

SEQ ID NO: 1173448 - RNA, 18 nt, Human
ugguggcagugggagcug

SEQ ID NO: 1173449 - RNA, 14 nt, Human
uggugcaaugaccu

SEQ ID NO: 1173450 - RNA, 19 nt, Human
uggugcaaugaccuuucaa

SEQ ID NO: 1173451 - RNA, 20 nt, Human
uggugcaaugaccuuucaau

SEQ ID NO: 1173452 - RNA, 23 nt, Human
uggguacuuguggacacagcucu

SEQ ID NO: 1173453 - RNA, 14 nt, Human
uggguagacacaca

SEQ ID NO: 1173454 - RNA, 16 nt, Human
uggguagacacacaug

SEQ ID NO: 1173455 - RNA, 14 nt, Human
uggugagaggcauc

SEQ ID NO: 1173456 - RNA, 13 nt, Human
ugguggcuggguu

SEQ ID NO: 1173457 - RNA, 16 nt, Human
uggugggggccucggu

SEQ ID NO: 1173458 - RNA, 18 nt, Human
uggugggggccucggugu

SEQ ID NO: 1173459 - RNA, 17 nt, Human
uggugguuucagaaaug

SEQ ID NO: 1173460 - RNA, 18 nt, Human
uggugguuucagaaaugu

SEQ ID NO: 1173461 - RNA, 19 nt, Human
uggugguuuucuguucuuu

SEQ ID NO: 1173462 - RNA, 18 nt, Human
uggugucgggcaugacac

SEQ ID NO: 1173463 - RNA, 19 nt, Human
uggugucgggcaugacacg

SEQ ID NO: 1173464 - RNA, 16 nt, Human
uggugucaccugaaga

SEQ ID NO: 1173465 - RNA, 15 nt, Human
uggugucgggcauga

SEQ ID NO: 1173466 - RNA, 16 nt, Human
ugguucccuugaugaa

SEQ ID NO: 1173467 - RNA, 17 nt, Human
ugguucccuugaugaag

SEQ ID NO: 1173468 - RNA, 20 nt, Human
ugguucccuugaugaagaag

SEQ ID NO: 1173469 - RNA, 18 nt, Human
ugguugaugaucuuugca

SEQ ID NO: 1173470 - RNA, 16 nt, Human
ugguuuucuguucuuu

SEQ ID NO: 1173471 - RNA, 19 nt, Human
ugguuuucuuguguguuua

SEQ ID NO: 1173472 - RNA, 21 nt, Human
ugguuuuuaaaaaacugcuga

SEQ ID NO: 1173473 - RNA, 23 nt, Human
ugguuuuuaaaaaacugcugacu

SEQ ID NO: 1173474 - RNA, 11 nt, Human
uguaaaauggu

SEQ ID NO: 1173475 - RNA, 12 nt, Human
uguaaaauggug

SEQ ID NO: 1173476 - RNA, 14 nt, Human
uguaacaagccacc

SEQ ID NO: 1173477 - RNA, 17 nt, Human
uguaacaagccacccca

SEQ ID NO: 1173478 - RNA, 14 nt, Human
uguacagacaacaa

SEQ ID NO: 1173479 - RNA, 11 nt, Human
uguacagagcc

SEQ ID NO: 1173480 - RNA, 13 nt, Human
uguaucugagcag

SEQ ID NO: 1173481 - RNA, 18 nt, Human
uguaggaagguuaauguu

SEQ ID NO: 1173482 - RNA, 22 nt, Human
uguaguguuggagaagaacuga

SEQ ID NO: 1173483 - RNA, 13 nt, Human
uguauaaaauaau

SEQ ID NO: 1173484 - RNA, 14 nt, Human
uguauaaaauaauu

SEQ ID NO: 1173485 - RNA, 20 nt, Human
uguaguguuggagaagaacu

SEQ ID NO: 1173486 - RNA, 21 nt, Human
uguaguguuggagaagaacug

SEQ ID NO: 1173487 - RNA, 12 nt, Human
uguacagagccc

SEQ ID NO: 1173488 - RNA, 13 nt, Human
uguacagagccca

SEQ ID NO: 1173489 - RNA, 22 nt, Human
uguacagcaaggagauuuacaa

SEQ ID NO: 1173490 - RNA, 23 nt, Human
uguacagcaaggagauuuacaac

SEQ ID NO: 1173491 - RNA, 18 nt, Human
uguauuuuaaaagaauga

SEQ ID NO: 1173492 - RNA, 19 nt, Human
uguauuuuaaaagaaugau

SEQ ID NO: 1173493 - RNA, 19 nt, Human
uguauuuuacuaauaaaau

SEQ ID NO: 1173494 - RNA, 21 nt, Human
ugucaauuacaggaaguacug

SEQ ID NO: 1173495 - RNA, 13 nt, Human
ugucacacacuuu

SEQ ID NO: 1173496 - RNA, 14 nt, Human
ugucacaggcaggu

SEQ ID NO: 1173497 - RNA, 15 nt, Human
ugucacaggcagguc

SEQ ID NO: 1173498 - RNA, 16 nt, Human
ugucacaggcaggucc

SEQ ID NO: 1173499 - RNA, 17 nt, Human
ugucacaggcaggucca

SEQ ID NO: 1173500 - RNA, 21 nt, Human
ugucacaggcagguccagggu

SEQ ID NO: 1173501 - RNA, 15 nt, Human
ugucagugugacuga

SEQ ID NO: 1173502 - RNA, 16 nt, Human
ugucagugugacugau

SEQ ID NO: 1173503 - RNA, 19 nt, Human
ugucagugugacugaucuc

SEQ ID NO: 1173504 - RNA, 17 nt, Human
uguccccgcacugggcu

SEQ ID NO: 1173505 - RNA, 19 nt, Human
uguccccgcacugggcuug

SEQ ID NO: 1173506 - RNA, 12 nt, Human
uguccugggagu

SEQ ID NO: 1173507 - RNA, 19 nt, Human
uguccugggagugagcugg

SEQ ID NO: 1173508 - RNA, 20 nt, Human
uguccugggagugagcuggu

SEQ ID NO: 1173509 - RNA, 14 nt, Human
ugucuaaugaaacc

SEQ ID NO: 1173510 - RNA, 17 nt, Human
ugucuacacuaagagag

SEQ ID NO: 1173511 - RNA, 22 nt, Human
ugucuacacuaagagagaauga

SEQ ID NO: 1173512 - RNA, 21 nt, Human
ugucucaaaaaaagaaaaaga

SEQ ID NO: 1173513 - RNA, 15 nt, Human
ugucuaguuguuuga

SEQ ID NO: 1173514 - RNA, 23 nt, Human
ugucuaguuguuugauucagaca

SEQ ID NO: 1173515 - RNA, 14 nt, Human
ugucuaugggacuc

SEQ ID NO: 1173516 - RNA, 15 nt, Human
ugucuaugggacuca

SEQ ID NO: 1173517 - RNA, 16 nt, Human
ugucuaugggacucaa

SEQ ID NO: 1173518 - RNA, 23 nt, Human
ugucuuuggacccugaggcccag

SEQ ID NO: 1173519 - RNA, 16 nt, Human
ugucuuuucuugcaug

SEQ ID NO: 1173520 - RNA, 13 nt, Human
ugugaaaagaaaa

SEQ ID NO: 1173521 - RNA, 15 nt, Human
ugugaaaagaaaaau

SEQ ID NO: 1173522 - RNA, 17 nt, Human
ugugaaaagaaaaauga

SEQ ID NO: 1173523 - RNA, 21 nt, Human
ugucuuuucuugcaugaggcu

SEQ ID NO: 1173524 - RNA, 21 nt, Human
ugugaaaagaaaaaugagccu

SEQ ID NO: 1173525 - RNA, 12 nt, Human
uuauaauuuaaa

SEQ ID NO: 1173526 - RNA, 14 nt, Human
uuauaauuuuguga

SEQ ID NO: 1173527 - RNA, 15 nt, Human
uuauaauuuugugaa

SEQ ID NO: 1173528 - RNA, 15 nt, Human
uuauaauaauguuaa

SEQ ID NO: 1173529 - RNA, 18 nt, Human
uuauaauaauguuaacau

SEQ ID NO: 1173530 - RNA, 11 nt, Human
uuauaaucuuu

SEQ ID NO: 1173531 - RNA, 15 nt, Human
uuauaaugaaugaaa

SEQ ID NO: 1173532 - RNA, 16 nt, Human
uuauaauuuugugaag

SEQ ID NO: 1173533 - RNA, 17 nt, Human
uuauaauuuugugaagc

SEQ ID NO: 1173534 - RNA, 18 nt, Human
uuauaauuuugugaagca

SEQ ID NO: 1173535 - RNA, 11 nt, Human
uuauacauaaa

SEQ ID NO: 1173536 - RNA, 13 nt, Human
uuauacauaaaca

SEQ ID NO: 1173537 - RNA, 14 nt, Human
uuaucuagauacug

SEQ ID NO: 1173538 - RNA, 16 nt, Human
uuauauuuacaaaugg

SEQ ID NO: 1173539 - RNA, 20 nt, Human
uuauauuuauuacuguaaga

SEQ ID NO: 1173540 - RNA, 12 nt, Human
uuauauuugaaa

SEQ ID NO: 1173541 - RNA, 13 nt, Human
uuauauuugaaau

SEQ ID NO: 1173542 - RNA, 15 nt, Human
uuauauuugaaauau

SEQ ID NO: 1173543 - RNA, 17 nt, Human
uuauggaacacucugag

SEQ ID NO: 1173544 - RNA, 18 nt, Human
uuauggaacacucugaga

SEQ ID NO: 1173545 - RNA, 20 nt, Human
uuauggaacacucugagacu

SEQ ID NO: 1173546 - RNA, 21 nt, Human
uuauggacaaugacccagugg

SEQ ID NO: 1173547 - RNA, 14 nt, Human
uuauggcacaucag

SEQ ID NO: 1173548 - RNA, 16 nt, Human
uuauggcuuuugugca

SEQ ID NO: 1173549 - RNA, 17 nt, Human
uuauggcuuuugugcau

SEQ ID NO: 1173550 - RNA, 18 nt, Human
uuauggcuuuugugcauu

SEQ ID NO: 1173551 - RNA, 23 nt, Human
uuauuaaaaaucucaaauuucua

SEQ ID NO: 1173552 - RNA, 19 nt, Human
uuauuaaaugcccagcccc

SEQ ID NO: 1173553 - RNA, 21 nt, Human
uuauuaaaugcccagccccuu

SEQ ID NO: 1173554 - RNA, 16 nt, Human
uuauuacuguaagaaa

SEQ ID NO: 1173555 - RNA, 22 nt, Human
uuauuuuggaaaauaaauuauu

SEQ ID NO: 1173556 - RNA, 19 nt, Human
uuauuuuaauaauguuuca

SEQ ID NO: 1173557 - RNA, 20 nt, Human
uuauuuuaauaauguuucaa

SEQ ID NO: 1173558 - RNA, 17 nt, Human
uuauuuuaauucaguug

SEQ ID NO: 1173559 - RNA, 18 nt, Human
uuauuuuauuaugcauga

SEQ ID NO: 1173560 - RNA, 22 nt, Human
uucacaagacccaaaaggcaga

SEQ ID NO: 1173561 - RNA, 13 nt, Human
uucacccuuuucu

SEQ ID NO: 1173562 - RNA, 14 nt, Human
uucaccuuuguccc

SEQ ID NO: 1173563 - RNA, 19 nt, Human
uucaccuuuguccccaccg

SEQ ID NO: 1173564 - RNA, 20 nt, Human
uucaccuuuguccccaccgc

SEQ ID NO: 1173565 - RNA, 21 nt, Human
uucaauaggaaaaacugauuu

SEQ ID NO: 1173566 - RNA, 22 nt, Human
uucaauaggaaaaacugauuuu

SEQ ID NO: 1173567 - RNA, 22 nt, Human
uucaccuuuguccccaccgcag

SEQ ID NO: 1173568 - RNA, 13 nt, Human
uucacggaagagc

SEQ ID NO: 1173569 - RNA, 17 nt, Human
uucacggaagagccuug

SEQ ID NO: 1173570 - RNA, 18 nt, Human
uucacggaagagccuugc

SEQ ID NO: 1173571 - RNA, 15 nt, Human
uucagacagcugccu

SEQ ID NO: 1173572 - RNA, 16 nt, Human
uucagacagcugccug

SEQ ID NO: 1173573 - RNA, 17 nt, Human
uucagacagcugccugg

SEQ ID NO: 1173574 - RNA, 21 nt, Human
uucagacagcugccugggauc

SEQ ID NO: 1173575 - RNA, 19 nt, Human
uuccagauccuggaaauca

SEQ ID NO: 1173576 - RNA, 14 nt, Human
uuccauggacuuug

SEQ ID NO: 1173577 - RNA, 15 nt, Human
uuccauggacuuugu

SEQ ID NO: 1173578 - RNA, 19 nt, Human
uuccaacccucaucaccaa

SEQ ID NO: 1173579 - RNA, 18 nt, Human
uuccagauccuggaaauc

SEQ ID NO: 1173580 - RNA, 13 nt, Human
uuccaaaguacac

SEQ ID NO: 1173581 - RNA, 16 nt, Human
uuccaaaguacacugu

SEQ ID NO: 1173582 - RNA, 23 nt, Human
uucaguuauuauauuuacaaaug

SEQ ID NO: 1173583 - RNA, 15 nt, Human
uucauaaccuagccu

SEQ ID NO: 1173584 - RNA, 15 nt, Human
uucauccuccucaga

SEQ ID NO: 1173585 - RNA, 19 nt, Human
uucauccuccucagaucuu

SEQ ID NO: 1173586 - RNA, 12 nt, Human
uucagcuccagc

SEQ ID NO: 1173587 - RNA, 15 nt, Human
uucagcuccagcuca

SEQ ID NO: 1173588 - RNA, 22 nt, Human
uucagcuccagcucaccagccc

SEQ ID NO: 1173589 - RNA, 22 nt, Human
uucagcuuguaaauagcucagg

SEQ ID NO: 1173590 - RNA, 14 nt, Human
uucaguggcagcug

SEQ ID NO: 1173591 - RNA, 15 nt, Human
uucaguggcagcugc

SEQ ID NO: 1173592 - RNA, 16 nt, Human
uucaguggcagcugcu

SEQ ID NO: 1173593 - RNA, 17 nt, Human
uucaguggcagcugcuu

SEQ ID NO: 1173594 - RNA, 12 nt, Human
uucaguguacau

SEQ ID NO: 1173595 - RNA, 13 nt, Human
uucaguguacaug

SEQ ID NO: 1173596 - RNA, 12 nt, Human
uuccauggccuc

SEQ ID NO: 1173597 - RNA, 16 nt, Human
uuccauggccucuuca

SEQ ID NO: 1173598 - RNA, 15 nt, Human
uuccugaggcugggc

SEQ ID NO: 1173599 - RNA, 20 nt, Human
uuccugaggcugggcucccu

SEQ ID NO: 1173600 - RNA, 21 nt, Human
uuccuugaguugauucagcuc

SEQ ID NO: 1173601 - RNA, 18 nt, Human
uucggugagcuacaaaug

SEQ ID NO: 1173602 - RNA, 12 nt, Human
uucuacccagcg

SEQ ID NO: 1173603 - RNA, 19 nt, Human
uucuacccagcgagcccug

SEQ ID NO: 1173604 - RNA, 13 nt, Human
uucuacgccaggg

SEQ ID NO: 1173605 - RNA, 20 nt, Human
uucuacccagcgagcccugg

SEQ ID NO: 1173606 - RNA, 21 nt, Human
uucuacccagcgagcccuggu

SEQ ID NO: 1173607 - RNA, 14 nt, Human
uucuacccaggugc

SEQ ID NO: 1173608 - RNA, 22 nt, Human
uucuacucgaguuacagacaaa

SEQ ID NO: 1173609 - RNA, 14 nt, Human
uucuaugaaauauu

SEQ ID NO: 1173610 - RNA, 21 nt, Human
uucuaugaaauauuauguuaa

SEQ ID NO: 1173611 - RNA, 20 nt, Human
uucuccaccugccagggaca

SEQ ID NO: 1173612 - RNA, 16 nt, Human
uucuccaccugccagg

SEQ ID NO: 1173613 - RNA, 18 nt, Human
uucuccaccugccaggga

SEQ ID NO: 1173614 - RNA, 21 nt, Human
uucuccaccucccacaaagga

SEQ ID NO: 1173615 - RNA, 12 nt, Human
uucuccaccugc

SEQ ID NO: 1173616 - RNA, 14 nt, Human
uucuccaccugcca

SEQ ID NO: 1173617 - RNA, 15 nt, Human
uucuccaccugccag

SEQ ID NO: 1173618 - RNA, 13 nt, Human
uucucuccagccc

SEQ ID NO: 1173619 - RNA, 14 nt, Human
uucucuccagcccc

SEQ ID NO: 1173620 - RNA, 15 nt, Human
uucucuccagccccu

SEQ ID NO: 1173621 - RNA, 16 nt, Human
uucucuccagccccug

SEQ ID NO: 1173622 - RNA, 14 nt, Human
uucucuccuguacc

SEQ ID NO: 1173623 - RNA, 18 nt, Human
uucucuccuguaccucuu

SEQ ID NO: 1173624 - RNA, 19 nt, Human
uucucuccuguaccucuug

SEQ ID NO: 1173625 - RNA, 22 nt, Human
uucucuccuguaccucuugagc

SEQ ID NO: 1173626 - RNA, 14 nt, Human
uucucugaggacac

SEQ ID NO: 1173627 - RNA, 20 nt, Human
uucucugaggacacuaacca

SEQ ID NO: 1173628 - RNA, 11 nt, Human
uucucugcccu

SEQ ID NO: 1173629 - RNA, 12 nt, Human
uucucugcccuc

SEQ ID NO: 1173630 - RNA, 16 nt, Human
uucucugcccuccaag

SEQ ID NO: 1173631 - RNA, 17 nt, Human
uucucugcccuccaaga

SEQ ID NO: 1173632 - RNA, 23 nt, Human
uucugacccaugcugcccuguga

SEQ ID NO: 1173633 - RNA, 18 nt, Human
uucugacccugcuucaaa

SEQ ID NO: 1173634 - RNA, 21 nt, Human
uucugacccugcuucaaauau

SEQ ID NO: 1173635 - RNA, 19 nt, Human
uucugauccuaguuccacc

SEQ ID NO: 1173636 - RNA, 19 nt, Human
uucugcucacauaucuguc

SEQ ID NO: 1173637 - RNA, 14 nt, Human
uucugcuucagccu

SEQ ID NO: 1173638 - RNA, 15 nt, Human
uucugcuucagccuc

SEQ ID NO: 1173639 - RNA, 16 nt, Human
uucugcuucagccucc

SEQ ID NO: 1173640 - RNA, 19 nt, Human
uucugcuucagccucccga

SEQ ID NO: 1173641 - RNA, 18 nt, Human
uucuguauuuuguuuuug

SEQ ID NO: 1173642 - RNA, 17 nt, Human
uucuguccgagcuuuga

SEQ ID NO: 1173643 - RNA, 21 nt, Human
uucuuauacauuugauaaagu

SEQ ID NO: 1173644 - RNA, 21 nt, Human
uucuuccacaagagcccaggc

SEQ ID NO: 1173645 - RNA, 13 nt, Human
uucuuccucccuc

SEQ ID NO: 1173646 - RNA, 23 nt, Human
uucuuccucccucccucuuuccc

SEQ ID NO: 1173647 - RNA, 21 nt, Human
uucuuguguguuuauugucaa

SEQ ID NO: 1173648 - RNA, 12 nt, Human
uucuuucagcca

SEQ ID NO: 1173649 - RNA, 14 nt, Human
uucuuuccaaagua

SEQ ID NO: 1173650 - RNA, 21 nt, Human
uucuuuccaaaguacacuguu

SEQ ID NO: 1173651 - RNA, 18 nt, Human
uucuuuccacagaagcuc

SEQ ID NO: 1173652 - RNA, 20 nt, Human
uugaaaaaccauuuugcugu

SEQ ID NO: 1173653 - RNA, 23 nt, Human
uugaaaacacuguucucugcccu

SEQ ID NO: 1173654 - RNA, 15 nt, Human
uugaacuccuggccu

SEQ ID NO: 1173655 - RNA, 16 nt, Human
uugaacuccuggccuc

SEQ ID NO: 1173656 - RNA, 18 nt, Human
uugaacuggguacuugug

SEQ ID NO: 1173657 - RNA, 13 nt, Human
uugaacuuugacc

SEQ ID NO: 1173658 - RNA, 17 nt, Human
uugacccacaagaaaug

SEQ ID NO: 1173659 - RNA, 17 nt, Human
uugaccgugaggccaga

SEQ ID NO: 1173660 - RNA, 14 nt, Human
uugaccucugcagc

SEQ ID NO: 1173661 - RNA, 15 nt, Human
uugaccucugcagca

SEQ ID NO: 1173662 - RNA, 16 nt, Human
uugaccucugcagcaa

SEQ ID NO: 1173663 - RNA, 17 nt, Human
uugacgccaucccagcc

SEQ ID NO: 1173664 - RNA, 18 nt, Human
uugacgccaucccagccc

SEQ ID NO: 1173665 - RNA, 19 nt, Human
uugacgccaucccagcccc

SEQ ID NO: 1173666 - RNA, 20 nt, Human
uugacgccaucccagcccca

SEQ ID NO: 1173667 - RNA, 16 nt, Human
uugaugaucuuugcag

SEQ ID NO: 1173668 - RNA, 21 nt, Human
uugcaaaguaucccuacugua

SEQ ID NO: 1173669 - RNA, 11 nt, Human
uugagccuggg

SEQ ID NO: 1173670 - RNA, 14 nt, Human
uugagccugggagg

SEQ ID NO: 1173671 - RNA, 13 nt, Human
uugaggguugggc

SEQ ID NO: 1173672 - RNA, 16 nt, Human
uugaggguugggcugg

SEQ ID NO: 1173673 - RNA, 15 nt, Human
uugaggucuguucuu

SEQ ID NO: 1173674 - RNA, 23 nt, Human
uugauauccucuuugagugaagc

SEQ ID NO: 1173675 - RNA, 14 nt, Human
uugaugaagaaguu

SEQ ID NO: 1173676 - RNA, 23 nt, Human
uugaugaagaaguugauaugccu

SEQ ID NO: 1173677 - RNA, 17 nt, Human
uuguaaauagcucaggu

SEQ ID NO: 1173678 - RNA, 18 nt, Human
uuguacauaaugcgugca

SEQ ID NO: 1173679 - RNA, 15 nt, Human
uuguaaauuaacuuu

SEQ ID NO: 1173680 - RNA, 16 nt, Human
uuguaaauuaacuuuu

SEQ ID NO: 1173681 - RNA, 18 nt, Human
uuguaaauuaacuuuuau

SEQ ID NO: 1173682 - RNA, 23 nt, Human
uuguaaauuaacuuuuauaaacu

SEQ ID NO: 1173683 - RNA, 22 nt, Human
uuggguucaagcgauucuucug

SEQ ID NO: 1173684 - RNA, 16 nt, Human
uuggucccccuuccau

SEQ ID NO: 1173685 - RNA, 16 nt, Human
uuggucugugagaugc

SEQ ID NO: 1173686 - RNA, 13 nt, Human
uuggucuguguga

SEQ ID NO: 1173687 - RNA, 15 nt, Human
uugucuuaaaaagug

SEQ ID NO: 1173688 - RNA, 15 nt, Human
uugucuagugaaacu

SEQ ID NO: 1173689 - RNA, 12 nt, Human
uugugauuuuug

SEQ ID NO: 1173690 - RNA, 16 nt, Human
uugugauuuuuguaau

SEQ ID NO: 1173691 - RNA, 17 nt, Human
uugugauuuuuguaauu

SEQ ID NO: 1173692 - RNA, 22 nt, Human
uugucuuaaaaaguggaaaaau

SEQ ID NO: 1173693 - RNA, 20 nt, Human
uugugaaaggaaagaggcuc

SEQ ID NO: 1173694 - RNA, 14 nt, Human
uuguauuacaaauc

SEQ ID NO: 1173695 - RNA, 15 nt, Human
uuguauucucuccug

SEQ ID NO: 1173696 - RNA, 16 nt, Human
uuguauucucuccugu

SEQ ID NO: 1173697 - RNA, 19 nt, Human
uuguauucucuccuguacc

SEQ ID NO: 1173698 - RNA, 21 nt, Human
uuguauucucuccuguaccuc

SEQ ID NO: 1173699 - RNA, 12 nt, Human
uugugccccugc

SEQ ID NO: 1173700 - RNA, 17 nt, Human
uugugcauuaucuagau

SEQ ID NO: 1173701 - RNA, 22 nt, Human
uugugcauuaucuagauacugu

SEQ ID NO: 1173702 - RNA, 23 nt, Human
uugugcauuaucuagauacugua

SEQ ID NO: 1173703 - RNA, 12 nt, Human
uugugcauuugg

SEQ ID NO: 1173704 - RNA, 16 nt, Human
uuguggacacagcucu

SEQ ID NO: 1173705 - RNA, 17 nt, Human
uuguggacacagcucuu

SEQ ID NO: 1173706 - RNA, 20 nt, Human
uuguggauuuaacagaaaug

SEQ ID NO: 1173707 - RNA, 21 nt, Human
uuguggauuuaacagaaaugu

SEQ ID NO: 1173708 - RNA, 21 nt, Human
uuguguuuauauauaagccaa

SEQ ID NO: 1173709 - RNA, 22 nt, Human
uuguggauuuaacagaaaugua

SEQ ID NO: 1173710 - RNA, 23 nt, Human
uuguggauuuaacagaaauguac

SEQ ID NO: 1173711 - RNA, 22 nt, Human
uuguuaguaugaggcauuuguu

SEQ ID NO: 1173712 - RNA, 20 nt, Human
uuguuagugugucuuagugu

SEQ ID NO: 1173713 - RNA, 18 nt, Human
uuguguuuugcaagccag

SEQ ID NO: 1173714 - RNA, 14 nt, Human
uuguuacauuuuua

SEQ ID NO: 1173715 - RNA, 19 nt, Human
uuguuaguaugaggcauuu

SEQ ID NO: 1173716 - RNA, 21 nt, Human
uuguuaguaugaggcauuugu

SEQ ID NO: 1173717 - RNA, 19 nt, Human
uuuaacucuauaauguguu

SEQ ID NO: 1173718 - RNA, 22 nt, Human
uuuaagaaaaaggaugcacaga

SEQ ID NO: 1173719 - RNA, 18 nt, Human
uuuaagaaaaaggaugca

SEQ ID NO: 1173720 - RNA, 13 nt, Human
uuuaauaauguuu

SEQ ID NO: 1173721 - RNA, 13 nt, Human
uuuacagagacag

SEQ ID NO: 1173722 - RNA, 13 nt, Human
uuuaccacuugug

SEQ ID NO: 1173723 - RNA, 14 nt, Human
uuuaauaauguuuc

SEQ ID NO: 1173724 - RNA, 19 nt, Human
uuuacuucuuauacauuug

SEQ ID NO: 1173725 - RNA, 22 nt, Human
uuuacuucuuauacauuugaua

SEQ ID NO: 1173726 - RNA, 14 nt, Human
uuuagaaauauaau

SEQ ID NO: 1173727 - RNA, 12 nt, Human
uuuagacagagu

SEQ ID NO: 1173728 - RNA, 19 nt, Human
uuuauuuaguuccuugagu

SEQ ID NO: 1173729 - RNA, 14 nt, Human
uuuauggcuuuugu

SEQ ID NO: 1173730 - RNA, 16 nt, Human
uuuauggcuuuugugc

SEQ ID NO: 1173731 - RNA, 13 nt, Human
uuuauuauggcac

SEQ ID NO: 1173732 - RNA, 20 nt, Human
uuuauggcuuuugugcauua

SEQ ID NO: 1173733 - RNA, 22 nt, Human
uuuauaauuuugugaagcaaaa

SEQ ID NO: 1173734 - RNA, 12 nt, Human
uuucaauaggaa

SEQ ID NO: 1173735 - RNA, 14 nt, Human
uuucaauaggaaaa

SEQ ID NO: 1173736 - RNA, 17 nt, Human
uuucaauaggaaaaacu

SEQ ID NO: 1173737 - RNA, 19 nt, Human
uuucaauaggaaaaacuga

SEQ ID NO: 1173738 - RNA, 15 nt, Human
uuucagcagcugcag

SEQ ID NO: 1173739 - RNA, 13 nt, Human
uuucaguguacau

SEQ ID NO: 1173740 - RNA, 14 nt, Human
uuucaguguacaug

SEQ ID NO: 1173741 - RNA, 14 nt, Human
uuucauuuagguga

SEQ ID NO: 1173742 - RNA, 18 nt, Human
uuucauuuaggugaggaa

SEQ ID NO: 1173743 - RNA, 17 nt, Human
uuuggucuacacugugc

SEQ ID NO: 1173744 - RNA, 17 nt, Human
uuuguauaaaauaauuu

SEQ ID NO: 1173745 - RNA, 18 nt, Human
uuuguauaaaauaauuuu

SEQ ID NO: 1173746 - RNA, 19 nt, Human
uuuguauaaaauaauuuuu

SEQ ID NO: 1173747 - RNA, 16 nt, Human
uuuguugucagcugaa

SEQ ID NO: 1173748 - RNA, 22 nt, Human
uuuguuaguaugaggcauuugu

SEQ ID NO: 1173749 - RNA, 15 nt, Human
uuuguugucagcuga

SEQ ID NO: 1173750 - RNA, 15 nt, Human
uuuccacagaagcuc

SEQ ID NO: 1173751 - RNA, 15 nt, Human
uuuccguuaaaauac

SEQ ID NO: 1173752 - RNA, 17 nt, Human
uuuccguuaaaauacca

SEQ ID NO: 1173753 - RNA, 21 nt, Human
uuugagugccuuacacaaugg

SEQ ID NO: 1173754 - RNA, 13 nt, Human
uuuggacccugag

SEQ ID NO: 1173755 - RNA, 21 nt, Human
uuuuaaaguaacccuacaaaa

SEQ ID NO: 1173756 - RNA, 15 nt, Human
uuuuacuaauagaca

SEQ ID NO: 1173757 - RNA, 23 nt, Human
uuuuauaauuuugugaagcaaaa

SEQ ID NO: 1173758 - RNA, 13 nt, Human
uuuuauacauaaa

SEQ ID NO: 1173759 - RNA, 21 nt, Human
uuuuauacauaaacaagacca

SEQ ID NO: 1173760 - RNA, 13 nt, Human
uuuuauauuugaa

SEQ ID NO: 1173761 - RNA, 18 nt, Human
uuuuauauuugaaauauu

SEQ ID NO: 1173762 - RNA, 18 nt, Human
uuuuauuuuuagacagag

SEQ ID NO: 1173763 - RNA, 17 nt, Human
uuuucaaaauaaaaaug

SEQ ID NO: 1173764 - RNA, 18 nt, Human
uuuucccuauuagagaag

SEQ ID NO: 1173765 - RNA, 22 nt, Human
uuuucccuauuagagaagagau

SEQ ID NO: 1173766 - RNA, 13 nt, Human
uuuucuacucgag

SEQ ID NO: 1173767 - RNA, 20 nt, Human
uuuucuacucgaguuacaga

SEQ ID NO: 1173768 - RNA, 22 nt, Human
uuuucuacucgaguuacagaca

SEQ ID NO: 1173769 - RNA, 23 nt, Human
uuuucuacucgaguuacagacaa

SEQ ID NO: 1173770 - RNA, 13 nt, Human
uuuucuucucccu

SEQ ID NO: 1173771 - RNA, 22 nt, Human
uuuucuuguguguuuauuguca

SEQ ID NO: 1173772 - RNA, 14 nt, Human
uuuucuucucccuc

SEQ ID NO: 1173773 - RNA, 16 nt, Human
uuuucuuucagccaag

SEQ ID NO: 1173774 - RNA, 17 nt, Human
uuuuuuccuucagugcc

SEQ ID NO: 1173775 - RNA, 11 nt, Human
uuuuuuuacua

SEQ ID NO: 1173776 - RNA, 12 nt, Human
uuuuuuuuaaga

SEQ ID NO: 1173777 - RNA, 12 nt, Human
uuuuuuacuaau

SEQ ID NO: 1173778 - RNA, 12 nt, Human
uuuuuaagaaaa

SEQ ID NO: 1173779 - RNA, 23 nt, Human
uuuuuaagaaaaaggaugcacag

SEQ ID NO: 1173780 - RNA, 16 nt, Human
uuuuuaagugcugcau

SEQ ID NO: 1173781 - RNA, 17 nt, Human
uuuuuaagugcugcauu

SEQ ID NO: 1173782 - RNA, 18 nt, Human
uuuuuaagugcugcauuu

SEQ ID NO: 1173783 - RNA, 19 nt, Human
uuuuuaagugcugcauuua

SEQ ID NO: 1173784 - RNA, 22 nt, Human
uuuuuaagugcugcauuuaaaa

SEQ ID NO: 1173785 - RNA, 23 nt, Human
uuuuuaagugcugcauuuaaaag

SEQ ID NO: 1173786 - RNA, 13 nt, Human
uuuuuuuugacaa

SEQ ID NO: 1173787 - RNA, 14 nt, Human
caaagagguuuuaa

SEQ ID NO: 1173788 - RNA, 21 nt, Human
caaagagguuuuaaaaaaauc

SEQ ID NO: 1173789 - RNA, 18 nt, Human
auuuuaauaauguuucaa

SEQ ID NO: 1173790 - RNA, 19 nt, Human
auuuuaauaauguuucaaa

SEQ ID NO: 1173791 - RNA, 14 nt, Human
caaaggagauugga

SEQ ID NO: 1173792 - RNA, 20 nt, Human
caaaggagauuggaaggaac

SEQ ID NO: 1173793 - RNA, 20 nt, Human
caaaggguaucaggugcugc

SEQ ID NO: 1173794 - RNA, 21 nt, Human
caaaggguaucaggugcugcc

SEQ ID NO: 1173795 - RNA, 23 nt, Human
caaaggguaucaggugcugccau

SEQ ID NO: 1173796 - RNA, 16 nt, Human
caaaguggugagaggc

SEQ ID NO: 1173797 - RNA, 17 nt, Human
caaaguggugagaggca

SEQ ID NO: 1173798 - RNA, 19 nt, Human
caaaguggugagaggcauc

SEQ ID NO: 1173799 - RNA, 20 nt, Human
caacaggcugggcuucagug

SEQ ID NO: 1173800 - RNA, 12 nt, Human
caagagggucug

SEQ ID NO: 1173801 - RNA, 16 nt, Human
caagagggucugagga

SEQ ID NO: 1173802 - RNA, 17 nt, Human
caagagggucugaggaa

SEQ ID NO: 1173803 - RNA, 13 nt, Human
caagaaaugaaag

SEQ ID NO: 1173804 - RNA, 15 nt, Human
caagaaaugaaagca

SEQ ID NO: 1173805 - RNA, 13 nt, Human
caagaccuucucc

SEQ ID NO: 1173806 - RNA, 14 nt, Human
caagaccuucuccu

SEQ ID NO: 1173807 - RNA, 20 nt, Human
caagacgcugugcugcccug

SEQ ID NO: 1173808 - RNA, 21 nt, Human
caagacgcugugcugcccugc

SEQ ID NO: 1173809 - RNA, 22 nt, Human
caagacgcugugcugcccugcc

SEQ ID NO: 1173810 - RNA, 23 nt, Human
caagacgcugugcugcccugccc

SEQ ID NO: 1173811 - RNA, 14 nt, Human
caaggauccugagc

SEQ ID NO: 1173812 - RNA, 15 nt, Human
caaggauccugagcc

SEQ ID NO: 1173813 - RNA, 16 nt, Human
caaggauccugagcca

SEQ ID NO: 1173814 - RNA, 17 nt, Human
caaggauccugagccag

SEQ ID NO: 1173815 - RNA, 21 nt, Human
caaggcugggggaagaagcuc

SEQ ID NO: 1173816 - RNA, 13 nt, Human
caaggcugucaau

SEQ ID NO: 1173817 - RNA, 14 nt, Human
caaggcugucaauu

SEQ ID NO: 1173818 - RNA, 21 nt, Human
caaggcugucaauuacaggaa

SEQ ID NO: 1173819 - RNA, 16 nt, Human
caagcauuuagaugua

SEQ ID NO: 1173820 - RNA, 19 nt, Human
caagcauuuagauguauag

SEQ ID NO: 1173821 - RNA, 13 nt, Human
caagggccuggcc

SEQ ID NO: 1173822 - RNA, 14 nt, Human
caagggccuggccu

SEQ ID NO: 1173823 - RNA, 15 nt, Human
caagggccuggccug

SEQ ID NO: 1173824 - RNA, 21 nt, Human
caaggggaauguuugccucug

SEQ ID NO: 1173825 - RNA, 23 nt, Human
caaggggaauguuugccucugcc

SEQ ID NO: 1173826 - RNA, 17 nt, Human
caaggggcccaaauucu

SEQ ID NO: 1173827 - RNA, 13 nt, Human
caaggucauuuuu

SEQ ID NO: 1173828 - RNA, 22 nt, Human
caagugaaaaaggaggaagaga

SEQ ID NO: 1173829 - RNA, 23 nt, Human
caagugaaaaaggaggaagagaa

SEQ ID NO: 1173830 - RNA, 14 nt, Human
caagugagacccug

SEQ ID NO: 1173831 - RNA, 15 nt, Human
caagugagacccugu

SEQ ID NO: 1173832 - RNA, 19 nt, Human
caagugagacccugucuca

SEQ ID NO: 1173833 - RNA, 19 nt, Human
caagugauucuccugccuc

SEQ ID NO: 1173834 - RNA, 20 nt, Human
caagugauucuccugccuca

SEQ ID NO: 1173835 - RNA, 21 nt, Human
caagugauucuccugccucag

SEQ ID NO: 1173836 - RNA, 16 nt, Human
caagggccuggccuga

SEQ ID NO: 1173837 - RNA, 17 nt, Human
caaauuuacagagacag

SEQ ID NO: 1173838 - RNA, 23 nt, Human
caaauuuacagagacagaaagca

SEQ ID NO: 1173839 - RNA, 14 nt, Human
caacaggcugggcu

SEQ ID NO: 1173840 - RNA, 17 nt, Human
caacaggcugggcuuca

SEQ ID NO: 1173841 - RNA, 14 nt, Human
caacauacucccau

SEQ ID NO: 1173842 - RNA, 15 nt, Human
caacauacucccauc

SEQ ID NO: 1173843 - RNA, 16 nt, Human
caacauacucccaucu

SEQ ID NO: 1173844 - RNA, 17 nt, Human
caaccugauugugucuc

SEQ ID NO: 1173845 - RNA, 19 nt, Human
caaccugauugugucucuu

SEQ ID NO: 1173846 - RNA, 21 nt, Human
caaccugauugugucucuugg

SEQ ID NO: 1173847 - RNA, 17 nt, Human
caacugcaucaagaugu

SEQ ID NO: 1173848 - RNA, 20 nt, Human
caacugcaucaagaugugac

SEQ ID NO: 1173849 - RNA, 23 nt, Human
caacugcaucaagaugugacaug

SEQ ID NO: 1173850 - RNA, 16 nt, Human
caacugcauuggcuuu

SEQ ID NO: 1173851 - RNA, 14 nt, Human
caaugaccuuucaa

SEQ ID NO: 1173852 - RNA, 15 nt, Human
caaugaccuuucaau

SEQ ID NO: 1173853 - RNA, 16 nt, Human
caaugaccuuucaaua

SEQ ID NO: 1173854 - RNA, 21 nt, Human
caaugaccuuucaauaggaaa

SEQ ID NO: 1173855 - RNA, 13 nt, Human
caaugauggucac

SEQ ID NO: 1173856 - RNA, 14 nt, Human
caaugauggucacc

SEQ ID NO: 1173857 - RNA, 14 nt, Human
caaugcaaaccauc

SEQ ID NO: 1173858 - RNA, 21 nt, Human
caaugcaaaccaucauugaaa

SEQ ID NO: 1173859 - RNA, 22 nt, Human
caaugcaaaccaucauugaaau

SEQ ID NO: 1173860 - RNA, 23 nt, Human
caaugcaaaccaucauugaaauc

SEQ ID NO: 1173861 - RNA, 14 nt, Human
caaugcacugacau

SEQ ID NO: 1173862 - RNA, 13 nt, Human
caaugcacuuugu

SEQ ID NO: 1173863 - RNA, 23 nt, Human
cacaagaaaugaaagcagggacu

SEQ ID NO: 1173864 - RNA, 23 nt, Human
cacaagacccaaaaggcagaagc

SEQ ID NO: 1173865 - RNA, 13 nt, Human
cacaagaaaugaa

SEQ ID NO: 1173866 - RNA, 15 nt, Human
cacaagaaaugaaag

SEQ ID NO: 1173867 - RNA, 18 nt, Human
cacaagaaaugaaagcag

SEQ ID NO: 1173868 - RNA, 14 nt, Human
caaugcacuuuguu

SEQ ID NO: 1173869 - RNA, 18 nt, Human
caaugguuuucuugugug

SEQ ID NO: 1173870 - RNA, 17 nt, Human
cacaaacgggcucagca

SEQ ID NO: 1173871 - RNA, 16 nt, Human
cacacaccagagccca

SEQ ID NO: 1173872 - RNA, 20 nt, Human
cacacaccagagcccaccuu

SEQ ID NO: 1173873 - RNA, 17 nt, Human
cacacagaaaauauacu

SEQ ID NO: 1173874 - RNA, 18 nt, Human
cacacagaaaauauacug

SEQ ID NO: 1173875 - RNA, 19 nt, Human
cacacagaaaauauacugu

SEQ ID NO: 1173876 - RNA, 13 nt, Human
cacacagaaaaua

SEQ ID NO: 1173877 - RNA, 14 nt, Human
cacacagaaaauau

SEQ ID NO: 1173878 - RNA, 15 nt, Human
cacacagaaaauaua

SEQ ID NO: 1173879 - RNA, 16 nt, Human
cacacagaaaauauac

SEQ ID NO: 1173880 - RNA, 11 nt, Human
cacacacacac

SEQ ID NO: 1173881 - RNA, 12 nt, Human
cacacacacaca

SEQ ID NO: 1173882 - RNA, 14 nt, Human
cacacacuuuggcu

SEQ ID NO: 1173883 - RNA, 11 nt, Human
cacacagaaaa

SEQ ID NO: 1173884 - RNA, 12 nt, Human
cacacagaaaau

SEQ ID NO: 1173885 - RNA, 13 nt, Human
cacacagcucugu

SEQ ID NO: 1173886 - RNA, 14 nt, Human
cacacagcucuguc

SEQ ID NO: 1173887 - RNA, 15 nt, Human
cacacagcucugucc

SEQ ID NO: 1173888 - RNA, 21 nt, Human
cacaccagagcccaccuuggc

SEQ ID NO: 1173889 - RNA, 22 nt, Human
cacaccagagcccaccuuggcu

SEQ ID NO: 1173890 - RNA, 16 nt, Human
cacacagcucuguccu

SEQ ID NO: 1173891 - RNA, 14 nt, Human
cacacccagcccac

SEQ ID NO: 1173892 - RNA, 20 nt, Human
cacacccagcccacuucugc

SEQ ID NO: 1173893 - RNA, 18 nt, Human
cacagugagucgaggaca

SEQ ID NO: 1173894 - RNA, 19 nt, Human
cacagcucuucuccaggcu

SEQ ID NO: 1173895 - RNA, 20 nt, Human
cacagcucuucuccaggcug

SEQ ID NO: 1173896 - RNA, 21 nt, Human
cacagcucuucuccaggcugu

SEQ ID NO: 1173897 - RNA, 14 nt, Human
cacaggcccggcuc

SEQ ID NO: 1173898 - RNA, 23 nt, Human
cacaguccuuaccagcagagcac

SEQ ID NO: 1173899 - RNA, 22 nt, Human
cacacggacacucaaaagcugg

SEQ ID NO: 1173900 - RNA, 17 nt, Human
cacaugaaguccaagca

SEQ ID NO: 1173901 - RNA, 20 nt, Human
cacaugaaguccaagcauuu

SEQ ID NO: 1173902 - RNA, 13 nt, Human
cacaugagcauca

SEQ ID NO: 1173903 - RNA, 17 nt, Human
cacaugagcaucaggcc

SEQ ID NO: 1173904 - RNA, 18 nt, Human
cacaugagcaucaggcca

SEQ ID NO: 1173905 - RNA, 19 nt, Human
cacaugagcaucaggccag

SEQ ID NO: 1173906 - RNA, 20 nt, Human
cacaugagcaucaggccagg

SEQ ID NO: 1173907 - RNA, 21 nt, Human
cacaugagcaucaggccaggc

SEQ ID NO: 1173908 - RNA, 17 nt, Human
cacaugcaaggucauuu

SEQ ID NO: 1173909 - RNA, 19 nt, Human
cacaugcaaggucauuuuu

SEQ ID NO: 1173910 - RNA, 20 nt, Human
cacaugcaaggucauuuuuu

SEQ ID NO: 1173911 - RNA, 18 nt, Human
cacaugcacgugugugca

SEQ ID NO: 1173912 - RNA, 13 nt, Human
cacaugcauacac

SEQ ID NO: 1173913 - RNA, 14 nt, Human
cacaugcauacaca

SEQ ID NO: 1173914 - RNA, 15 nt, Human
cacaugcauacacac

SEQ ID NO: 1173915 - RNA, 16 nt, Human
cacaugcauacacaca

SEQ ID NO: 1173916 - RNA, 17 nt, Human
cacaugcauacacacac

SEQ ID NO: 1173917 - RNA, 18 nt, Human
cacaugcauacacacaca

SEQ ID NO: 1173918 - RNA, 20 nt, Human
cacaugccucucucaggcca

SEQ ID NO: 1173919 - RNA, 21 nt, Human
cacaugccucucucaggccaa

SEQ ID NO: 1173920 - RNA, 13 nt, Human
cacaugccucucu

SEQ ID NO: 1173921 - RNA, 16 nt, Human
cacauguccaagaagc

SEQ ID NO: 1173922 - RNA, 17 nt, Human
cacauguccaagaagcc

SEQ ID NO: 1173923 - RNA, 19 nt, Human
caccacacccagcccacuu

SEQ ID NO: 1173924 - RNA, 15 nt, Human
caccagagcccaccu

SEQ ID NO: 1173925 - RNA, 17 nt, Human
caccagagcccaccuug

SEQ ID NO: 1173926 - RNA, 18 nt, Human
caccagagcccaccuugg

SEQ ID NO: 1173927 - RNA, 20 nt, Human
caccagagcccaccuuggcu

SEQ ID NO: 1173928 - RNA, 22 nt, Human
caccagagcccaccuuggcuca

SEQ ID NO: 1173929 - RNA, 18 nt, Human
cacauguccaagaagccc

SEQ ID NO: 1173930 - RNA, 19 nt, Human
cacauguccaagaagccca

SEQ ID NO: 1173931 - RNA, 21 nt, Human
cacauguccaagaagcccagg

SEQ ID NO: 1173932 - RNA, 22 nt, Human
cacauguccaagaagcccagga

SEQ ID NO: 1173933 - RNA, 17 nt, Human
caccaacgucugugcca

SEQ ID NO: 1173934 - RNA, 23 nt, Human
cacauguccaagaagcccaggaa

SEQ ID NO: 1173935 - RNA, 12 nt, Human
caccaagcccag

SEQ ID NO: 1173936 - RNA, 13 nt, Human
caccaagcccagu

SEQ ID NO: 1173937 - RNA, 15 nt, Human
caccaagcccaguua

SEQ ID NO: 1173938 - RNA, 21 nt, Human
caccauauuaccacagacaua

SEQ ID NO: 1173939 - RNA, 13 nt, Human
caccaucaagcca

SEQ ID NO: 1173940 - RNA, 14 nt, Human
caccaucaagccac

SEQ ID NO: 1173941 - RNA, 15 nt, Human
caccaucaagccacc

SEQ ID NO: 1173942 - RNA, 12 nt, Human
caccagcagccu

SEQ ID NO: 1173943 - RNA, 16 nt, Human
caccaucaagccacca

SEQ ID NO: 1173944 - RNA, 17 nt, Human
caccaucaagccaccaa

SEQ ID NO: 1173945 - RNA, 19 nt, Human
caccaucaagccaccaaca

SEQ ID NO: 1173946 - RNA, 24 nt, Human
caccaucaagccaccaacauacuc

SEQ ID NO: 1173947 - RNA, 15 nt, Human
caccaucaugucugg

SEQ ID NO: 1173948 - RNA, 17 nt, Human
caccaucaugucuggcu

SEQ ID NO: 1173949 - RNA, 18 nt, Human
caccaucaugucuggcua

SEQ ID NO: 1173950 - RNA, 13 nt, Human
cacccaagggccu

SEQ ID NO: 1173951 - RNA, 11 nt, Human
aagaacugaaa

SEQ ID NO: 1173952 - RNA, 12 nt, Human
aagaacugaaau

SEQ ID NO: 1173953 - RNA, 13 nt, Human
aagaacugaaauc

SEQ ID NO: 1173954 - RNA, 15 nt, Human
aagaacugaaaucau

SEQ ID NO: 1173955 - RNA, 21 nt, Human
aagacaaggaaaaaauaacaa

SEQ ID NO: 1173956 - RNA, 20 nt, Human
aagaagacugcauuauauuu

SEQ ID NO: 1173957 - RNA, 15 nt, Human
aagaagacugcauua

SEQ ID NO: 1173958 - RNA, 22 nt, Human
aagacaaugacuuacuguacau

SEQ ID NO: 1173959 - RNA, 19 nt, Human
aagacaaugugaaaagaaa

SEQ ID NO: 1173960 - RNA, 20 nt, Human
aagacaaugugaaaagaaaa

SEQ ID NO: 1173961 - RNA, 16 nt, Human
aagagagaaaauaaaa

SEQ ID NO: 1173962 - RNA, 17 nt, Human
aagagagaaaauaaaaa

SEQ ID NO: 1173963 - RNA, 18 nt, Human
aagagagaaaauaaaaag

SEQ ID NO: 1173964 - RNA, 14 nt, Human
aagagagaaaauaa

SEQ ID NO: 1173965 - RNA, 12 nt, Human
aagagagaaaau

SEQ ID NO: 1173966 - RNA, 13 nt, Human
aagagagaaaaua

SEQ ID NO: 1173967 - RNA, 15 nt, Human
aagagagaaaauaaa

SEQ ID NO: 1173968 - RNA, 15 nt, Human
aagaccacguuucua

SEQ ID NO: 1173969 - RNA, 17 nt, Human
aagaccacguuucuaaa

SEQ ID NO: 1173970 - RNA, 21 nt, Human
aagacuuuuccaacccucauc

SEQ ID NO: 1173971 - RNA, 12 nt, Human
aagacuuuucuu

SEQ ID NO: 1173972 - RNA, 19 nt, Human
aagacuuuucuuucagcca

SEQ ID NO: 1173973 - RNA, 13 nt, Human
aagagaaaaaaua

SEQ ID NO: 1173974 - RNA, 12 nt, Human
aagaguguggca

SEQ ID NO: 1173975 - RNA, 15 nt, Human
aaggcaaggcuguca

SEQ ID NO: 1173976 - RNA, 16 nt, Human
aaggcaaggcugucaa

SEQ ID NO: 1173977 - RNA, 13 nt, Human
aaggcaaggcugu

SEQ ID NO: 1173978 - RNA, 22 nt, Human
aagcuagacgagcaggcuucuu

SEQ ID NO: 1173979 - RNA, 13 nt, Human
aagcugcacccuc

SEQ ID NO: 1173980 - RNA, 19 nt, Human
aagcugcacccucaggcag

SEQ ID NO: 1173981 - RNA, 20 nt, Human
aagcugcacccucaggcagg

SEQ ID NO: 1173982 - RNA, 14 nt, Human
aagcggcuggcagc

SEQ ID NO: 1173983 - RNA, 14 nt, Human
aagcgauucuucug

SEQ ID NO: 1173984 - RNA, 15 nt, Human
aagcgugagccacug

SEQ ID NO: 1173985 - RNA, 16 nt, Human
aagcgugagccacugc

SEQ ID NO: 1173986 - RNA, 18 nt, Human
aagccauaauuguucuua

SEQ ID NO: 1173987 - RNA, 19 nt, Human
aagauaauauuaaggaaga

SEQ ID NO: 1173988 - RNA, 21 nt, Human
aagauaauauuaaggaagaca

SEQ ID NO: 1173989 - RNA, 17 nt, Human
aagauacaguuacucag

SEQ ID NO: 1173990 - RNA, 23 nt, Human
aagauacaguuacucagaauucu

SEQ ID NO: 1173991 - RNA, 21 nt, Human
aaucaccgaaaacguggcugc

SEQ ID NO: 1173992 - RNA, 23 nt, Human
aaucaccgaaaacguggcugcuu

SEQ ID NO: 1173993 - RNA, 23 nt, Human
aauauguggaguucaucuugaau

SEQ ID NO: 1173994 - RNA, 13 nt, Human
aauauuaagaaag

SEQ ID NO: 1173995 - RNA, 20 nt, Human
aaugaugccaugaggaacaa

SEQ ID NO: 1173996 - RNA, 20 nt, Human
aaugaauacuuuauaaagga

SEQ ID NO: 1173997 - RNA, 20 nt, Human
aaugaaagacuguacaaagu

SEQ ID NO: 1173998 - RNA, 21 nt, Human
aaugaaagacuguacaaagua

SEQ ID NO: 1173999 - RNA, 16 nt, Human
aaucucaauauuucag

SEQ ID NO: 1174000 - RNA, 10 nt, Human
aauaaaccau

SEQ ID NO: 1174001 - RNA, 22 nt, Human
aaguuguaggcauaaagucagg

SEQ ID NO: 1174002 - RNA, 22 nt, Human
aagugcugcauuuaaaagauac

SEQ ID NO: 1174003 - RNA, 12 nt, Human
aagugcugggau

SEQ ID NO: 1174004 - RNA, 22 nt, Human
aagugcugggauuacaggugug

SEQ ID NO: 1174005 - RNA, 19 nt, Human
aauaauguuaacauggaca

SEQ ID NO: 1174006 - RNA, 14 nt, Human
aauaaagcagcguu

SEQ ID NO: 1174007 - RNA, 17 nt, Human
aauaaugugaaacugga

SEQ ID NO: 1174008 - RNA, 22 nt, Human
aauaaugugaaacuggauuaaa

SEQ ID NO: 1174009 - RNA, 23 nt, Human
aaccuuuugagugccuuacacaa

SEQ ID NO: 1174010 - RNA, 16 nt, Human
aaccuuuugagugccu

SEQ ID NO: 1174011 - RNA, 13 nt, Human
aacaggcugggcu

SEQ ID NO: 1174012 - RNA, 12 nt, Human
aacagccugugu

SEQ ID NO: 1174013 - RNA, 15 nt, Human
aacagccugugucuu

SEQ ID NO: 1174014 - RNA, 11 nt, Human
aacaggcagau

SEQ ID NO: 1174015 - RNA, 18 nt, Human
aaauucuugcaaaguauc

SEQ ID NO: 1174016 - RNA, 23 nt, Human
aaauucuucuccacuuucuagcc

SEQ ID NO: 1174017 - RNA, 15 nt, Human
aaauucuugcaaagu

SEQ ID NO: 1174018 - RNA, 20 nt, Human
aaaggaugcccaaagaugca

SEQ ID NO: 1174019 - RNA, 13 nt, Human
aaauauuuauuuu

SEQ ID NO: 1174020 - RNA, 18 nt, Human
aaaucucaauauuucaga

SEQ ID NO: 1174021 - RNA, 19 nt, Human
aaaucuccaaaauaaaacu

SEQ ID NO: 1174022 - RNA, 13 nt, Human
aaaucuuuuugcu

SEQ ID NO: 1174023 - RNA, 14 nt, Human
aaaucuuuuugcuu

SEQ ID NO: 1174024 - RNA, 10 nt, Human
aaaugcugcu

SEQ ID NO: 1174025 - RNA, 23 nt, Human
aaaugcugcuuuuucucaaaaug

SEQ ID NO: 1174026 - RNA, 13 nt, Human
aaauguucaucaa

SEQ ID NO: 1174027 - RNA, 17 nt, Human
aaauguucaucaaugaa

SEQ ID NO: 1174028 - RNA, 22 nt, Human
aaauguugacaugggacauuug

SEQ ID NO: 1174029 - RNA, 23 nt, Human
aaauguugacaugggacauuugc

SEQ ID NO: 1174030 - RNA, 17 nt, Human
aaaagaaagaaaaucag

SEQ ID NO: 1174031 - RNA, 20 nt, Human
aaaagacaaggaaaaaauaa

SEQ ID NO: 1174032 - RNA, 11 nt, Human
aaaagaaugau

SEQ ID NO: 1174033 - RNA, 17 nt, Human
aaaacacauuuuucuua

SEQ ID NO: 1174034 - RNA, 19 nt, Human
aaaacacuguucucugccc

SEQ ID NO: 1174035 - RNA, 11 nt, Human
aaaagaaaaag

SEQ ID NO: 1174036 - RNA, 15 nt, Human
aaaauaaaaaguuaa

SEQ ID NO: 1174037 - RNA, 16 nt, Human
aaaauaaaaaguuaaa

SEQ ID NO: 1174038 - RNA, 19 nt, Human
aaaauaaaaaguuaaaaag

SEQ ID NO: 1174039 - RNA, 14 nt, Human
aaaauaaaacuuuu

SEQ ID NO: 1174040 - RNA, 16 nt, Human
aaaauaaaacuuuuua

SEQ ID NO: 1174041 - RNA, 13 nt, Human
aaaaucagccugc

SEQ ID NO: 1174042 - RNA, 17 nt, Human
aaaaucagccugcucca

SEQ ID NO: 1174043 - RNA, 21 nt, Human
aaaaucagccugcuccagcug

SEQ ID NO: 1174044 - RNA, 18 nt, Human
aaaaucucaaauuucuaa

SEQ ID NO: 1174045 - RNA, 15 nt, Human
aaaaucucaaauuuc

SEQ ID NO: 1174046 - RNA, 16 nt, Human
aaaaucucaaauuucu

SEQ ID NO: 1174047 - RNA, 12 nt, Human
aaacccagcucu

SEQ ID NO: 1174048 - RNA, 16 nt, Human
aaacccagcucugguc

SEQ ID NO: 1174049 - RNA, 18 nt, Human
aaacccagcucuggucca

SEQ ID NO: 1174050 - RNA, 15 nt, Human
aaaccgccaaggcug

SEQ ID NO: 1174051 - RNA, 16 nt, Human
aaaccgccaaggcugg

SEQ ID NO: 1174052 - RNA, 12 nt, Human
aaacucuuaaaa

SEQ ID NO: 1174053 - RNA, 23 nt, Human
aaacucuuaaaacccaagugccu

SEQ ID NO: 1174054 - RNA, 23 nt, Human
aaacugauuuuuuuuuccuucag

SEQ ID NO: 1174055 - RNA, 22 nt, Human
acucccaucugugaaaggaaag

SEQ ID NO: 1174056 - RNA, 14 nt, Human
acucccuuucaaca

SEQ ID NO: 1174057 - RNA, 14 nt, Human
acucguuaauuugu

SEQ ID NO: 1174058 - RNA, 19 nt, Human
acucguuaauuuguagugu

SEQ ID NO: 1174059 - RNA, 15 nt, Human
acucuacagaggcca

SEQ ID NO: 1174060 - RNA, 23 nt, Human
acugaauuucuuuugccguuauu

SEQ ID NO: 1174061 - RNA, 17 nt, Human
acugacauuguuggcca

SEQ ID NO: 1174062 - RNA, 18 nt, Human
acugacauuguuggccaa

SEQ ID NO: 1174063 - RNA, 13 nt, Human
acucuacccucuu

SEQ ID NO: 1174064 - RNA, 23 nt, Human
acugaaugaaacccccacacaca

SEQ ID NO: 1174065 - RNA, 12 nt, Human
acugaauuucuu

SEQ ID NO: 1174066 - RNA, 19 nt, Human
acugauaugggucuugaua

SEQ ID NO: 1174067 - RNA, 22 nt, Human
acugacauuguuggccaaagcc

SEQ ID NO: 1174068 - RNA, 16 nt, Human
acugauuuuuuuuucc

SEQ ID NO: 1174069 - RNA, 17 nt, Human
acugauuuuuuuuuccu

SEQ ID NO: 1174070 - RNA, 18 nt, Human
acugauuuuuuuuuccuu

SEQ ID NO: 1174071 - RNA, 19 nt, Human
acugauuuuuuuuuccuuc

SEQ ID NO: 1174072 - RNA, 20 nt, Human
acugauuuuuuuuuccuuca

SEQ ID NO: 1174073 - RNA, 13 nt, Human
acuguaaagaaag

SEQ ID NO: 1174074 - RNA, 14 nt, Human
acuguaaagaaaga

SEQ ID NO: 1174075 - RNA, 15 nt, Human
acuguaaagaaagag

SEQ ID NO: 1174076 - RNA, 16 nt, Human
acuguaaagaaagaga

SEQ ID NO: 1174077 - RNA, 18 nt, Human
acuguaaagaaagagaga

SEQ ID NO: 1174078 - RNA, 19 nt, Human
acuguaaagaaagagagaa

SEQ ID NO: 1174079 - RNA, 20 nt, Human
acuguaaagaaagagagaaa

SEQ ID NO: 1174080 - RNA, 21 nt, Human
acuguaaagaaagagagaaaa

SEQ ID NO: 1174081 - RNA, 22 nt, Human
acuguaaagaaagagagaaaau

SEQ ID NO: 1174082 - RNA, 23 nt, Human
acuguaaagaaagagagaaaaua

SEQ ID NO: 1174083 - RNA, 17 nt, Human
acugugccaugugccag

SEQ ID NO: 1174084 - RNA, 18 nt, Human
acugugccaugugccagg

SEQ ID NO: 1174085 - RNA, 16 nt, Human
acugugaagagaacca

SEQ ID NO: 1174086 - RNA, 13 nt, Human
acuguaagaaaau

SEQ ID NO: 1174087 - RNA, 17 nt, Human
acuguaaaauaauaacu

SEQ ID NO: 1174088 - RNA, 12 nt, Human
acuggaacucuc

SEQ ID NO: 1174089 - RNA, 17 nt, Human
acuucaaauccuugaag

SEQ ID NO: 1174090 - RNA, 18 nt, Human
acuucaaauccuugaaga

SEQ ID NO: 1174091 - RNA, 19 nt, Human
acuucaaauccuugaagau

SEQ ID NO: 1174092 - RNA, 22 nt, Human
acuuaaaaaugguuuaaauggu

SEQ ID NO: 1174093 - RNA, 19 nt, Human
acuguuucaaacuuuacua

SEQ ID NO: 1174094 - RNA, 15 nt, Human
acuguuucaaacuuu

SEQ ID NO: 1174095 - RNA, 18 nt, Human
acuguuucaaacuuuacu

SEQ ID NO: 1174096 - RNA, 21 nt, Human
acuucagacauagaauuaaca

SEQ ID NO: 1174097 - RNA, 17 nt, Human
acuucagcgguuuauau

SEQ ID NO: 1174098 - RNA, 23 nt, Human
acuuggggggcugaggugggagg

SEQ ID NO: 1174099 - RNA, 13 nt, Human
acuuggucuguga

SEQ ID NO: 1174100 - RNA, 22 nt, Human
acgcugugcugcccugcccacc

SEQ ID NO: 1174101 - RNA, 19 nt, Human
acggaauaguuggcuagga

SEQ ID NO: 1174102 - RNA, 17 nt, Human
acggacacucaaaagcu

SEQ ID NO: 1174103 - RNA, 19 nt, Human
acggacacucaaaagcugg

SEQ ID NO: 1174104 - RNA, 13 nt, Human
acgucugugccau

SEQ ID NO: 1174105 - RNA, 20 nt, Human
acgauuucuguuuagauaau

SEQ ID NO: 1174106 - RNA, 23 nt, Human
acgauuucuguuuagauaauaca

SEQ ID NO: 1174107 - RNA, 18 nt, Human
acuaauggggcggugaga

SEQ ID NO: 1174108 - RNA, 12 nt, Human
accucugccuga

SEQ ID NO: 1174109 - RNA, 20 nt, Human
accucugccugaagucacac

SEQ ID NO: 1174110 - RNA, 23 nt, Human
accucugccugaagucacacagu

SEQ ID NO: 1174111 - RNA, 21 nt, Human
accugccaggaagccagcagg

SEQ ID NO: 1174112 - RNA, 22 nt, Human
accugccaggaagccagcaggc

SEQ ID NO: 1174113 - RNA, 23 nt, Human
accugccaggaagccagcaggcu

SEQ ID NO: 1174114 - RNA, 12 nt, Human
accugccccuca

SEQ ID NO: 1174115 - RNA, 15 nt, Human
accugccccucaacu

SEQ ID NO: 1174116 - RNA, 20 nt, Human
accugccccucaacucuccu

SEQ ID NO: 1174117 - RNA, 12 nt, Human
accuuggcucaa

SEQ ID NO: 1174118 - RNA, 18 nt, Human
accgugaggccagagaca

SEQ ID NO: 1174119 - RNA, 23 nt, Human
accgugaggccagagacacaagc

SEQ ID NO: 1174120 - RNA, 12 nt, Human
accucagccucc

SEQ ID NO: 1174121 - RNA, 17 nt, Human
acccugugauggggccc

SEQ ID NO: 1174122 - RNA, 19 nt, Human
acccugugauggggcccug

SEQ ID NO: 1174123 - RNA, 20 nt, Human
acccugugauggggcccugc

SEQ ID NO: 1174124 - RNA, 21 nt, Human
acccugugauggggcccugcc

SEQ ID NO: 1174125 - RNA, 12 nt, Human
accgggcacuca

SEQ ID NO: 1174126 - RNA, 14 nt, Human
accgggcacucaga

SEQ ID NO: 1174127 - RNA, 16 nt, Human
accgggcacucagaag

SEQ ID NO: 1174128 - RNA, 20 nt, Human
accgggcacucagaagacac

SEQ ID NO: 1174129 - RNA, 11 nt, Human
accucaggccu

SEQ ID NO: 1174130 - RNA, 20 nt, Human
accucaggugauccacccac

SEQ ID NO: 1174131 - RNA, 21 nt, Human
accucaggugauccacccacc

SEQ ID NO: 1174132 - RNA, 14 nt, Human
acccuauugcugcu

SEQ ID NO: 1174133 - RNA, 19 nt, Human
acccuauugcugcuugagg

SEQ ID NO: 1174134 - RNA, 13 nt, Human
acccuauugcugc

SEQ ID NO: 1174135 - RNA, 13 nt, Human
acccucaggcagg

SEQ ID NO: 1174136 - RNA, 14 nt, Human
acccucaggcaggu

SEQ ID NO: 1174137 - RNA, 15 nt, Human
acccucaggcaggug

SEQ ID NO: 1174138 - RNA, 16 nt, Human
acccucaggcaggugg

SEQ ID NO: 1174139 - RNA, 13 nt, Human
acccucaucacca

SEQ ID NO: 1174140 - RNA, 23 nt, Human
acccuggcacuauaauguaagcu

SEQ ID NO: 1174141 - RNA, 23 nt, Human
acccucaucaccaacgucugugc

SEQ ID NO: 1174142 - RNA, 16 nt, Human
acccuggggagaaagu

SEQ ID NO: 1174143 - RNA, 21 nt, Human
acccugucucuacuaaaaaua

SEQ ID NO: 1174144 - RNA, 16 nt, Human
acccugugauggggcc

SEQ ID NO: 1174145 - RNA, 19 nt, Human
acagugauuaccagggacu

SEQ ID NO: 1174146 - RNA, 20 nt, Human
acagugauuaccagggacug

SEQ ID NO: 1174147 - RNA, 23 nt, Human
acaggcacccaccaucaugucug

SEQ ID NO: 1174148 - RNA, 18 nt, Human
acaggcaaugcuggcugu

SEQ ID NO: 1174149 - RNA, 15 nt, Human
acaggcagauacagg

SEQ ID NO: 1174150 - RNA, 19 nt, Human
acagcucuucuccaggcug

SEQ ID NO: 1174151 - RNA, 20 nt, Human
acagcucuucuccaggcugu

SEQ ID NO: 1174152 - RNA, 24 nt, Human
acaggaugguucccuugaugaaga

SEQ ID NO: 1174153 - RNA, 14 nt, Human
acaggauuauugga

SEQ ID NO: 1174154 - RNA, 15 nt, Human
acaggcaaugcuggc

SEQ ID NO: 1174155 - RNA, 16 nt, Human
acaggcaaugcuggcu

SEQ ID NO: 1174156 - RNA, 17 nt, Human
acaggcaaugcuggcug

SEQ ID NO: 1174157 - RNA, 21 nt, Human
accaacgucugugccauuuug

SEQ ID NO: 1174158 - RNA, 16 nt, Human
accacgcuggaccuug

SEQ ID NO: 1174159 - RNA, 18 nt, Human
accacgcuggaccuugaa

SEQ ID NO: 1174160 - RNA, 13 nt, Human
accacguuucuaa

SEQ ID NO: 1174161 - RNA, 14 nt, Human
accacguuucuaaa

SEQ ID NO: 1174162 - RNA, 15 nt, Human
acauuugcucaugga

SEQ ID NO: 1174163 - RNA, 16 nt, Human
acauuugcucauggaa

SEQ ID NO: 1174164 - RNA, 16 nt, Human
acauuuguauaaaaua

SEQ ID NO: 1174165 - RNA, 19 nt, Human
acauuuguauaaaauaauu

SEQ ID NO: 1174166 - RNA, 21 nt, Human
acauuuguauaaaauaauuuu

SEQ ID NO: 1174167 - RNA, 14 nt, Human
accaacgucugugc

SEQ ID NO: 1174168 - RNA, 17 nt, Human
accaacgucugugccau

SEQ ID NO: 1174169 - RNA, 19 nt, Human
accagagcugccaccugcc

SEQ ID NO: 1174170 - RNA, 13 nt, Human
accagagcugcca

SEQ ID NO: 1174171 - RNA, 14 nt, Human
accagagcugccac

SEQ ID NO: 1174172 - RNA, 16 nt, Human
accagagcugccaccu

SEQ ID NO: 1174173 - RNA, 19 nt, Human
acauguuuuucuucucccu

SEQ ID NO: 1174174 - RNA, 15 nt, Human
acauaagauaaaugu

SEQ ID NO: 1174175 - RNA, 16 nt, Human
acauacaauuccaaac

SEQ ID NO: 1174176 - RNA, 21 nt, Human
acauaaugcgugcauaccacu

SEQ ID NO: 1174177 - RNA, 20 nt, Human
acauacaggaagguagaaau

SEQ ID NO: 1174178 - RNA, 20 nt, Human
acaucccuuaccugggaaag

SEQ ID NO: 1174179 - RNA, 13 nt, Human
acaugcacgugug

SEQ ID NO: 1174180 - RNA, 19 nt, Human
aauuaugaguuauuuuuau

SEQ ID NO: 1174181 - RNA, 14 nt, Human
aauucuacuuugag

SEQ ID NO: 1174182 - RNA, 19 nt, Human
aauucucagaaucucaaau

SEQ ID NO: 1174183 - RNA, 21 nt, Human
aauucucauuugucacacacu

SEQ ID NO: 1174184 - RNA, 15 nt, Human
aauucucuaguuuga

SEQ ID NO: 1174185 - RNA, 17 nt, Human
aauucucuaguuugauu

SEQ ID NO: 1174186 - RNA, 15 nt, Human
aauucucuuauccaa

SEQ ID NO: 1174187 - RNA, 14 nt, Human
aauucuguuuuucu

SEQ ID NO: 1174188 - RNA, 18 nt, Human
aauucuguuuuucuaggc

SEQ ID NO: 1174189 - RNA, 13 nt, Human
aauucuuaaauau

SEQ ID NO: 1174190 - RNA, 22 nt, Human
aauuguaaggaaugauuaauua

SEQ ID NO: 1174191 - RNA, 11 nt, Human
aauuguaauag

SEQ ID NO: 1174192 - RNA, 15 nt, Human
aauuucccaaagcag

SEQ ID NO: 1174193 - RNA, 17 nt, Human
aauuucccaaagcagug

SEQ ID NO: 1174194 - RNA, 15 nt, Human
acaaguuaaauaaau

SEQ ID NO: 1174195 - RNA, 16 nt, Human
acaaggcaaggcuguc

SEQ ID NO: 1174196 - RNA, 17 nt, Human
acaaggcaaggcuguca

SEQ ID NO: 1174197 - RNA, 19 nt, Human
acaaggcaaggcugucaau

SEQ ID NO: 1174198 - RNA, 20 nt, Human
acaaggcaaggcugucaauu

SEQ ID NO: 1174199 - RNA, 11 nt, Human
acacagaaaau

SEQ ID NO: 1174200 - RNA, 12 nt, Human
acacagaaaaua

SEQ ID NO: 1174201 - RNA, 13 nt, Human
acacagaaaauau

SEQ ID NO: 1174202 - RNA, 14 nt, Human
acacagaaaauaua

SEQ ID NO: 1174203 - RNA, 15 nt, Human
acacagaaaauauac

SEQ ID NO: 1174204 - RNA, 16 nt, Human
acacagaaaauauacu

SEQ ID NO: 1174205 - RNA, 17 nt, Human
acacagaaaauauacug

SEQ ID NO: 1174206 - RNA, 18 nt, Human
acacagaaaauauacugu

SEQ ID NO: 1174207 - RNA, 19 nt, Human
acacagaaaauauacugua

SEQ ID NO: 1174208 - RNA, 20 nt, Human
acacagaaaauauacuguaa

SEQ ID NO: 1174209 - RNA, 21 nt, Human
acacagaaaauauacuguaaa

SEQ ID NO: 1174210 - RNA, 22 nt, Human
acacagaaaauauacuguaaag

SEQ ID NO: 1174211 - RNA, 23 nt, Human
acacagaaaauauacuguaaaga

SEQ ID NO: 1174212 - RNA, 11 nt, Human
acacagccaca

SEQ ID NO: 1174213 - RNA, 12 nt, Human
acacagccacac

SEQ ID NO: 1174214 - RNA, 13 nt, Human
acacagccacaca

SEQ ID NO: 1174215 - RNA, 14 nt, Human
acacagccacacac

SEQ ID NO: 1174216 - RNA, 15 nt, Human
acacagccacacaca

SEQ ID NO: 1174217 - RNA, 18 nt, Human
acacagccacacacacag

SEQ ID NO: 1174218 - RNA, 19 nt, Human
acacagccacacacacaga

SEQ ID NO: 1174219 - RNA, 20 nt, Human
acacagccacacacacagaa

SEQ ID NO: 1174220 - RNA, 21 nt, Human
acacagccacacacacagaaa

SEQ ID NO: 1174221 - RNA, 22 nt, Human
acacagccacacacacagaaaa

SEQ ID NO: 1174222 - RNA, 23 nt, Human
acacagccacacacacagaaaau

SEQ ID NO: 1174223 - RNA, 14 nt, Human
acacagcucuucuc

SEQ ID NO: 1174224 - RNA, 16 nt, Human
acacagcucuucucca

SEQ ID NO: 1174225 - RNA, 18 nt, Human
acacagcucuucuccagg

SEQ ID NO: 1174226 - RNA, 19 nt, Human
acacagcucuucuccaggc

SEQ ID NO: 1174227 - RNA, 15 nt, Human
acaccaauauucaua

SEQ ID NO: 1174228 - RNA, 18 nt, Human
acaccagagcccaccuug

SEQ ID NO: 1174229 - RNA, 23 nt, Human
acaccagagcccaccuuggcuca

SEQ ID NO: 1174230 - RNA, 12 nt, Human
auccuugaagau

SEQ ID NO: 1174231 - RNA, 19 nt, Human
aucauggagguuugaagau

SEQ ID NO: 1174232 - RNA, 15 nt, Human
aucauccuaagcuau

SEQ ID NO: 1174233 - RNA, 20 nt, Human
aucaugacaaagacugagua

SEQ ID NO: 1174234 - RNA, 21 nt, Human
auccacugugccaugugccag

SEQ ID NO: 1174235 - RNA, 20 nt, Human
aucaaagagguuuuaaaaaa

SEQ ID NO: 1174236 - RNA, 19 nt, Human
aucaaagagguuuuaaaaa

SEQ ID NO: 1174237 - RNA, 20 nt, Human
aucaaaagguuaauaaagua

SEQ ID NO: 1174238 - RNA, 24 nt, Human
aucaaaagguuaauaaaguaauua

SEQ ID NO: 1174239 - RNA, 14 nt, Human
aucaaaagaaagaa

SEQ ID NO: 1174240 - RNA, 18 nt, Human
auauuuuuuucuuuucuu

SEQ ID NO: 1174241 - RNA, 15 nt, Human
auagcacagacccug

SEQ ID NO: 1174242 - RNA, 14 nt, Human
auagcacagacccu

SEQ ID NO: 1174243 - RNA, 14 nt, Human
augaaguaauaugc

SEQ ID NO: 1174244 - RNA, 21 nt, Human
augaaguaauaugcacacauu

SEQ ID NO: 1174245 - RNA, 23 nt, Human
augaaguaauaugcacacauuuu

SEQ ID NO: 1174246 - RNA, 13 nt, Human
augaaguacucau

SEQ ID NO: 1174247 - RNA, 12 nt, Human
augaaagacugu

SEQ ID NO: 1174248 - RNA, 13 nt, Human
augaaagacugua

SEQ ID NO: 1174249 - RNA, 13 nt, Human
augaccuuucaau

SEQ ID NO: 1174250 - RNA, 15 nt, Human
augaccuuucaauag

SEQ ID NO: 1174251 - RNA, 18 nt, Human
augaccuuucaauaggaa

SEQ ID NO: 1174252 - RNA, 21 nt, Human
augagccucagcauccuggca

SEQ ID NO: 1174253 - RNA, 11 nt, Human
augagccuggc

SEQ ID NO: 1174254 - RNA, 12 nt, Human
augagccuggca

SEQ ID NO: 1174255 - RNA, 23 nt, Human
aucuaggaagacuuuggaaagag

SEQ ID NO: 1174256 - RNA, 22 nt, Human
augcauacacacacacacacag

SEQ ID NO: 1174257 - RNA, 23 nt, Human
augcauacacacacacacacagc

SEQ ID NO: 1174258 - RNA, 10 nt, Human
augcauacac

SEQ ID NO: 1174259 - RNA, 11 nt, Human
augcauacaca

SEQ ID NO: 1174260 - RNA, 12 nt, Human
augcauacacac

SEQ ID NO: 1174261 - RNA, 13 nt, Human
augcauacacaca

SEQ ID NO: 1174262 - RNA, 14 nt, Human
augcauacacacac

SEQ ID NO: 1174263 - RNA, 15 nt, Human
augcauacacacaca

SEQ ID NO: 1174264 - RNA, 17 nt, Human
augcauacacacacaca

SEQ ID NO: 1174265 - RNA, 21 nt, Human
augccugguggcagcugcggu

SEQ ID NO: 1174266 - RNA, 12 nt, Human
augccugguggc

SEQ ID NO: 1174267 - RNA, 13 nt, Human
augccugguggca

SEQ ID NO: 1174268 - RNA, 14 nt, Human
augccugguggcag

SEQ ID NO: 1174269 - RNA, 19 nt, Human
augccugguggcagcugcg

SEQ ID NO: 1174270 - RNA, 16 nt, Human
augcuuugaucccuuc

SEQ ID NO: 1174271 - RNA, 18 nt, Human
augcucugcauguuacau

SEQ ID NO: 1174272 - RNA, 19 nt, Human
augcucugcauguuacaua

SEQ ID NO: 1174273 - RNA, 14 nt, Human
augcuucuucagag

SEQ ID NO: 1174274 - RNA, 17 nt, Human
augcuucuucagagacu

SEQ ID NO: 1174275 - RNA, 20 nt, Human
augcuucuucagagacuccu

SEQ ID NO: 1174276 - RNA, 22 nt, Human
augcuucuucagagacuccugc

SEQ ID NO: 1174277 - RNA, 21 nt, Human
augggacauuugcucauggaa

SEQ ID NO: 1174278 - RNA, 15 nt, Human
augggacagggagga

SEQ ID NO: 1174279 - RNA, 20 nt, Human
augggacauuugcucaugga

SEQ ID NO: 1174280 - RNA, 23 nt, Human
auggcuuccuggcaauagucaaa

SEQ ID NO: 1174281 - RNA, 17 nt, Human
auacaccacuacauucu

SEQ ID NO: 1174282 - RNA, 18 nt, Human
auacaccacuacauucug

SEQ ID NO: 1174283 - RNA, 13 nt, Human
auacacuuacacu

SEQ ID NO: 1174284 - RNA, 12 nt, Human
auaauguuaaca

SEQ ID NO: 1174285 - RNA, 23 nt, Human
auacaaugcugugcccuaaagug

SEQ ID NO: 1174286 - RNA, 15 nt, Human
auacaccacuacauu

SEQ ID NO: 1174287 - RNA, 21 nt, Human
auaaagaugagugagcaugcc

SEQ ID NO: 1174288 - RNA, 14 nt, Human
aguucauacccugu

SEQ ID NO: 1174289 - RNA, 18 nt, Human
aguuacacuaaaagguga

SEQ ID NO: 1174290 - RNA, 18 nt, Human
aguuccaccaucaagcca

SEQ ID NO: 1174291 - RNA, 21 nt, Human
aguuccaccaucaagccacca

SEQ ID NO: 1174292 - RNA, 17 nt, Human
aguugaaaaacagcuga

SEQ ID NO: 1174293 - RNA, 18 nt, Human
aguugaaaaacagcugag

SEQ ID NO: 1174294 - RNA, 16 nt, Human
aguugaagacagagcu

SEQ ID NO: 1174295 - RNA, 17 nt, Human
aguugaagacagagcua

SEQ ID NO: 1174296 - RNA, 12 nt, Human
agugcuccagcc

SEQ ID NO: 1174297 - RNA, 17 nt, Human
aguuguuagugugucuu

SEQ ID NO: 1174298 - RNA, 22 nt, Human
aguuguuagugugucuuagugu

SEQ ID NO: 1174299 - RNA, 16 nt, Human
auaaaagacagugaaa

SEQ ID NO: 1174300 - RNA, 14 nt, Human
aguuugauuaaauu

SEQ ID NO: 1174301 - RNA, 16 nt, Human
aguuugauuaaauucu

SEQ ID NO: 1174302 - RNA, 11 nt, Human
aguuugcaguu

SEQ ID NO: 1174303 - RNA, 19 nt, Human
aguaaaugggggugcauuu

SEQ ID NO: 1174304 - RNA, 20 nt, Human
aguaaaugggggugcauuug

SEQ ID NO: 1174305 - RNA, 21 nt, Human
aguaaaugggggugcauuuga

SEQ ID NO: 1174306 - RNA, 17 nt, Human
aguaacuuacuuaggug

SEQ ID NO: 1174307 - RNA, 14 nt, Human
aguacguugugcau

SEQ ID NO: 1174308 - RNA, 15 nt, Human
aguacuggagaaaau

SEQ ID NO: 1174309 - RNA, 20 nt, Human
aguacuucuccacccugcuc

SEQ ID NO: 1174310 - RNA, 21 nt, Human
aguacuucuccacccugcucu

SEQ ID NO: 1174311 - RNA, 22 nt, Human
aguacuucuccacccugcucuc

SEQ ID NO: 1174312 - RNA, 22 nt, Human
aggggcccaaauucuuucagug

SEQ ID NO: 1174313 - RNA, 18 nt, Human
agugauucuccugccuca

SEQ ID NO: 1174314 - RNA, 19 nt, Human
agugauucuccugccucag

SEQ ID NO: 1174315 - RNA, 20 nt, Human
agugauucuccugccucagc

SEQ ID NO: 1174316 - RNA, 15 nt, Human
agugauuaccaggga

SEQ ID NO: 1174317 - RNA, 22 nt, Human
agugauucuccugccucagccu

SEQ ID NO: 1174318 - RNA, 19 nt, Human
agugccuuauggaacacuc

SEQ ID NO: 1174319 - RNA, 20 nt, Human
agugccuuauggaacacucu

SEQ ID NO: 1174320 - RNA, 21 nt, Human
agugccuuauggaacacucug

SEQ ID NO: 1174321 - RNA, 22 nt, Human
agugccuuauggaacacucuga

SEQ ID NO: 1174322 - RNA, 20 nt, Human
agugauccucccaccucagc

SEQ ID NO: 1174323 - RNA, 22 nt, Human
agugauccucccaccucagccu

SEQ ID NO: 1174324 - RNA, 23 nt, Human
agugauccucccaccucagccuc

SEQ ID NO: 1174325 - RNA, 13 nt, Human
agugauuaccagg

SEQ ID NO: 1174326 - RNA, 16 nt, Human
agugacagaggcagcc

SEQ ID NO: 1174327 - RNA, 19 nt, Human
agugacagaggcagcccca

SEQ ID NO: 1174328 - RNA, 14 nt, Human
aguccucuuuucug

SEQ ID NO: 1174329 - RNA, 16 nt, Human
aguccuuaccagcaga

SEQ ID NO: 1174330 - RNA, 18 nt, Human
aguccuuaccagcagagc

SEQ ID NO: 1174331 - RNA, 21 nt, Human
agucugauucccaagcucugc

SEQ ID NO: 1174332 - RNA, 22 nt, Human
agucugauucccaagcucugcu

SEQ ID NO: 1174333 - RNA, 19 nt, Human
aguccuuaccagcagagca

SEQ ID NO: 1174334 - RNA, 16 nt, Human
agucgaggacagggag

SEQ ID NO: 1174335 - RNA, 18 nt, Human
agucuggcccuuccuuuu

SEQ ID NO: 1174336 - RNA, 21 nt, Human
agaaccaaaaagaggcuaugu

SEQ ID NO: 1174337 - RNA, 21 nt, Human
agaagacugcauuauauuuau

SEQ ID NO: 1174338 - RNA, 15 nt, Human
agaagagaaugcaca

SEQ ID NO: 1174339 - RNA, 23 nt, Human
agaagagaaugcacaaacagagg

SEQ ID NO: 1174340 - RNA, 14 nt, Human
agaagucacacagu

SEQ ID NO: 1174341 - RNA, 17 nt, Human
agaagucuuagauguau

SEQ ID NO: 1174342 - RNA, 19 nt, Human
agaagucuuagauguauau

SEQ ID NO: 1174343 - RNA, 23 nt, Human
agaaugcacaaacagaggccgcc

SEQ ID NO: 1174344 - RNA, 17 nt, Human
agaaugauuaugaauua

SEQ ID NO: 1174345 - RNA, 18 nt, Human
agaaugcucuuuacuuca

SEQ ID NO: 1174346 - RNA, 17 nt, Human
agaaucucaaauaacua

SEQ ID NO: 1174347 - RNA, 16 nt, Human
agaaugaaagggccca

SEQ ID NO: 1174348 - RNA, 22 nt, Human
agaacagugauuaccagggacu

SEQ ID NO: 1174349 - RNA, 17 nt, Human
agaaccaaaaagaggcu

SEQ ID NO: 1174350 - RNA, 18 nt, Human
agaaccaaaaagaggcua

SEQ ID NO: 1174351 - RNA, 19 nt, Human
agacaaggaaaaaauaaca

SEQ ID NO: 1174352 - RNA, 20 nt, Human
agacaaugugaaaagaaaaa

SEQ ID NO: 1174353 - RNA, 14 nt, Human
agacaauuuauuau

SEQ ID NO: 1174354 - RNA, 22 nt, Human
agacagcccgggcucugccucc

SEQ ID NO: 1174355 - RNA, 23 nt, Human
agacagcccgggcucugccuccc

SEQ ID NO: 1174356 - RNA, 17 nt, Human
agacccaaaaggcagaa

SEQ ID NO: 1174357 - RNA, 14 nt, Human
agaccacguuucua

SEQ ID NO: 1174358 - RNA, 23 nt, Human
agaccaucccugaaggccccgcc

SEQ ID NO: 1174359 - RNA, 15 nt, Human
agaccacguuucuaa

SEQ ID NO: 1174360 - RNA, 15 nt, Human
agacuaucuaaaugu

SEQ ID NO: 1174361 - RNA, 17 nt, Human
agacgcugugcugcccu

SEQ ID NO: 1174362 - RNA, 18 nt, Human
agacgcugugcugcccug

SEQ ID NO: 1174363 - RNA, 19 nt, Human
agacgcugugcugcccugc

SEQ ID NO: 1174364 - RNA, 20 nt, Human
agacgcugugcugcccugcc

SEQ ID NO: 1174365 - RNA, 16 nt, Human
agacucuuuggacacu

SEQ ID NO: 1174366 - RNA, 11 nt, Human
agagagcaaga

SEQ ID NO: 1174367 - RNA, 19 nt, Human
agagagcaagacgcugugc

SEQ ID NO: 1174368 - RNA, 23 nt, Human
agagagcaagacgcugugcugcc

SEQ ID NO: 1174369 - RNA, 18 nt, Human
agagcccacgcccccacu

SEQ ID NO: 1174370 - RNA, 19 nt, Human
agagaaaauaaaaaguuaa

SEQ ID NO: 1174371 - RNA, 20 nt, Human
agagaaaauaaaaaguuaaa

SEQ ID NO: 1174372 - RNA, 18 nt, Human
agaugacaucugucuagg

SEQ ID NO: 1174373 - RNA, 20 nt, Human
agaugggugcuuggaggaag

SEQ ID NO: 1174374 - RNA, 22 nt, Human
agaugggugcuuggaggaagga

SEQ ID NO: 1174375 - RNA, 14 nt, Human
agauucuuuccuga

SEQ ID NO: 1174376 - RNA, 19 nt, Human
agcaaauucuguuuuucua

SEQ ID NO: 1174377 - RNA, 23 nt, Human
agcaaaauuuuuucucuaggaaa

SEQ ID NO: 1174378 - RNA, 15 nt, Human
agauucuuuccugag

SEQ ID NO: 1174379 - RNA, 16 nt, Human
agauucuuuccugagg

SEQ ID NO: 1174380 - RNA, 18 nt, Human
agauucuuuccugaggcu

SEQ ID NO: 1174381 - RNA, 16 nt, Human
agauugcaacaggcug

SEQ ID NO: 1174382 - RNA, 17 nt, Human
agauugcaacaggcugg

SEQ ID NO: 1174383 - RNA, 19 nt, Human
agauugcaacaggcugggc

SEQ ID NO: 1174384 - RNA, 16 nt, Human
agauugcaccacugca

SEQ ID NO: 1174385 - RNA, 20 nt, Human
agagggucugaggaauccag

SEQ ID NO: 1174386 - RNA, 19 nt, Human
agaggguggugaccucugc

SEQ ID NO: 1174387 - RNA, 20 nt, Human
agauagauaggucagugcaa

SEQ ID NO: 1174388 - RNA, 13 nt, Human
agaguugaagaca

SEQ ID NO: 1174389 - RNA, 14 nt, Human
agaguugaagacag

SEQ ID NO: 1174390 - RNA, 15 nt, Human
agaguugaagacaga

SEQ ID NO: 1174391 - RNA, 21 nt, Human
agcacagacccugcccugugg

SEQ ID NO: 1174392 - RNA, 17 nt, Human
agcagugcaugcugucc

SEQ ID NO: 1174393 - RNA, 18 nt, Human
agcagugcaugcuguccc

SEQ ID NO: 1174394 - RNA, 16 nt, Human
agcagccuggacccug

SEQ ID NO: 1174395 - RNA, 20 nt, Human
agcagccuggacccugugga

SEQ ID NO: 1174396 - RNA, 19 nt, Human
agcagcguuucuaugacac

SEQ ID NO: 1174397 - RNA, 13 nt, Human
agcagugcaugcu

SEQ ID NO: 1174398 - RNA, 16 nt, Human
agcagugcaugcuguc

SEQ ID NO: 1174399 - RNA, 16 nt, Human
agcaucuaugugagac

SEQ ID NO: 1174400 - RNA, 14 nt, Human
agccagauuucacu

SEQ ID NO: 1174401 - RNA, 17 nt, Human
agccagauuucacucuc

SEQ ID NO: 1174402 - RNA, 20 nt, Human
agccagauuucacucuccuu

SEQ ID NO: 1174403 - RNA, 22 nt, Human
agccagauuucacucuccuugg

SEQ ID NO: 1174404 - RNA, 22 nt, Human
agccagcaggcucucaggccag

SEQ ID NO: 1174405 - RNA, 23 nt, Human
agccagcaggcucucaggccagc

SEQ ID NO: 1174406 - RNA, 23 nt, Human
agcccaccccucaacaccucugc

SEQ ID NO: 1174407 - RNA, 13 nt, Human
agcccaccuuggc

SEQ ID NO: 1174408 - RNA, 17 nt, Human
agcccacgcccccacug

SEQ ID NO: 1174409 - RNA, 18 nt, Human
agcccacgcccccacugg

SEQ ID NO: 1174410 - RNA, 19 nt, Human
agcccacgcccccacuggu

SEQ ID NO: 1174411 - RNA, 14 nt, Human
agcccaccuuggcu

SEQ ID NO: 1174412 - RNA, 20 nt, Human
agcccacgcccccacuggug

SEQ ID NO: 1174413 - RNA, 23 nt, Human
aggcuagugugguguuuccuggc

SEQ ID NO: 1174414 - RNA, 24 nt, Human
aggcuguaucccaugagccucagc

SEQ ID NO: 1174415 - RNA, 12 nt, Human
aggcugucaauu

SEQ ID NO: 1174416 - RNA, 19 nt, Human
aggcugucaauuacaggaa

SEQ ID NO: 1174417 - RNA, 17 nt, Human
aggcugcagugagccga

SEQ ID NO: 1174418 - RNA, 19 nt, Human
aggcugcagugagccgaga

SEQ ID NO: 1174419 - RNA, 21 nt, Human
aggcccucugcccacucccug

SEQ ID NO: 1174420 - RNA, 19 nt, Human
aggcccucugcccacuccc

SEQ ID NO: 1174421 - RNA, 20 nt, Human
aggcccucugcccacucccu

SEQ ID NO: 1174422 - RNA, 13 nt, Human
agggccuggcuca

SEQ ID NO: 1174423 - RNA, 14 nt, Human
agggccuggcucag

SEQ ID NO: 1174424 - RNA, 18 nt, Human
agggccuggcucaggugg

SEQ ID NO: 1174425 - RNA, 18 nt, Human
aggcagccaggccacaag

SEQ ID NO: 1174426 - RNA, 23 nt, Human
aggcaugugaugagaggaaauca

SEQ ID NO: 1174427 - RNA, 24 nt, Human
aggcaugugaugagaggaaaucac

SEQ ID NO: 1174428 - RNA, 12 nt, Human
aggcauguucuc

SEQ ID NO: 1174429 - RNA, 20 nt, Human
aggcauguucucugaggaca

SEQ ID NO: 1174430 - RNA, 22 nt, Human
aggcauguucucugaggacacu

SEQ ID NO: 1174431 - RNA, 22 nt, Human
aggcauuccccaggaggccagc

SEQ ID NO: 1174432 - RNA, 23 nt, Human
aggcauuccccaggaggccagcc

SEQ ID NO: 1174433 - RNA, 17 nt, Human
aggcauuccccaggagg

SEQ ID NO: 1174434 - RNA, 13 nt, Human
aggccagcugcuu

SEQ ID NO: 1174435 - RNA, 14 nt, Human
aggccagcugcuug

SEQ ID NO: 1174436 - RNA, 16 nt, Human
aggccagcugcuuggg

SEQ ID NO: 1174437 - RNA, 17 nt, Human
aggccaggcccucugcc

SEQ ID NO: 1174438 - RNA, 18 nt, Human
aggccaggcccucugccc

SEQ ID NO: 1174439 - RNA, 19 nt, Human
aggccaggcccucugccca

SEQ ID NO: 1174440 - RNA, 23 nt, Human
aggccaggcccucugcccacucc

SEQ ID NO: 1174441 - RNA, 23 nt, Human
aggccagcugcuugggcuucauc

SEQ ID NO: 1174442 - RNA, 14 nt, Human
aggccaugggccuc

SEQ ID NO: 1174443 - RNA, 16 nt, Human
aggccaugggccuccu

SEQ ID NO: 1174444 - RNA, 17 nt, Human
aggccaugggccuccug

SEQ ID NO: 1174445 - RNA, 17 nt, Human
aggcccucugcccacuc

SEQ ID NO: 1174446 - RNA, 20 nt, Human
aggcagagguugcagugagc

SEQ ID NO: 1174447 - RNA, 13 nt, Human
aggcagauacagg

SEQ ID NO: 1174448 - RNA, 14 nt, Human
aggcagccaggcca

SEQ ID NO: 1174449 - RNA, 15 nt, Human
aggcagccaggccac

SEQ ID NO: 1174450 - RNA, 16 nt, Human
aggcagccaggccaca

SEQ ID NO: 1174451 - RNA, 19 nt, Human
aggaaguacuggagaaaau

SEQ ID NO: 1174452 - RNA, 13 nt, Human
aggaaguagagga

SEQ ID NO: 1174453 - RNA, 14 nt, Human
aggaggucucuaag

SEQ ID NO: 1174454 - RNA, 15 nt, Human
aggaggucucuaaga

SEQ ID NO: 1174455 - RNA, 12 nt, Human
aggagugagcac

SEQ ID NO: 1174456 - RNA, 14 nt, Human
aggagugagcacua

SEQ ID NO: 1174457 - RNA, 22 nt, Human
aggauguucuagcauggcugcc

SEQ ID NO: 1174458 - RNA, 18 nt, Human
aggaaaaaauaacaauga

SEQ ID NO: 1174459 - RNA, 21 nt, Human
agcuuuguuuguugucagcug

SEQ ID NO: 1174460 - RNA, 22 nt, Human
agcuuuguuuguugucagcuga

SEQ ID NO: 1174461 - RNA, 12 nt, Human
aggaacacuccu

SEQ ID NO: 1174462 - RNA, 15 nt, Human
aggaacacuccuuca

SEQ ID NO: 1174463 - RNA, 14 nt, Human
aggaagguagaaau

SEQ ID NO: 1174464 - RNA, 11 nt, Human
aggaaguacug

SEQ ID NO: 1174465 - RNA, 15 nt, Human
aggaaguacuggaga

SEQ ID NO: 1174466 - RNA, 17 nt, Human
agcuguaugauucccag

SEQ ID NO: 1174467 - RNA, 18 nt, Human
agcuguaugauucccagc

SEQ ID NO: 1174468 - RNA, 15 nt, Human
agcuggucccacuca

SEQ ID NO: 1174469 - RNA, 16 nt, Human
agcuggucccacucag

SEQ ID NO: 1174470 - RNA, 16 nt, Human
agcugguugagguuuc

SEQ ID NO: 1174471 - RNA, 15 nt, Human
agcugacuuuucugu

SEQ ID NO: 1174472 - RNA, 21 nt, Human
agcugacuuuucuguccgagc

SEQ ID NO: 1174473 - RNA, 22 nt, Human
agcucaccagccccagugccca

SEQ ID NO: 1174474 - RNA, 23 nt, Human
agcucaccagccccagugcccac

SEQ ID NO: 1174475 - RNA, 14 nt, Human
agccuggacccugu

SEQ ID NO: 1174476 - RNA, 18 nt, Human
agccugggcaaugugaua

SEQ ID NO: 1174477 - RNA, 13 nt, Human
agcuacaaaugca

SEQ ID NO: 1174478 - RNA, 13 nt, Human
agcucaccagccc

SEQ ID NO: 1174479 - RNA, 14 nt, Human
agcucaccagcccc

SEQ ID NO: 1174480 - RNA, 15 nt, Human
agcucaccagcccca

SEQ ID NO: 1174481 - RNA, 21 nt, Human
agcucaccagccccagugccc

SEQ ID NO: 1174482 - RNA, 13 nt, Human
agcuaaugggaca

SEQ ID NO: 1174483 - RNA, 14 nt, Human
agcuaaugggacac

SEQ ID NO: 1174484 - RNA, 15 nt, Human
agcuaaugggacacu

SEQ ID NO: 1174485 - RNA, 13 nt, Human
agcgacagugaga

SEQ ID NO: 1174486 - RNA, 15 nt, Human
agcgacagugagacu

SEQ ID NO: 1174487 - RNA, 17 nt, Human
agcgacagugagacucu

SEQ ID NO: 1174488 - RNA, 15 nt, Human
agcgauucuucugcu

SEQ ID NO: 1174489 - RNA, 17 nt, Human
agcgauucuucugcuuc

SEQ ID NO: 1174490 - RNA, 19 nt, Human
agcgauucuucugcuucag

SEQ ID NO: 1174491 - RNA, 19 nt, Human
agcuaacauggaaguacua

SEQ ID NO: 1174492 - RNA, 20 nt, Human
agcuaacauggaaguacuau

SEQ ID NO: 1174493 - RNA, 21 nt, Human
guagcugggacuacaggcacc

SEQ ID NO: 1174494 - RNA, 12 nt, Human
guagcugggacu

SEQ ID NO: 1174495 - RNA, 18 nt, Human
guagcugggacuacaggc

SEQ ID NO: 1174496 - RNA, 19 nt, Human
guagcugggacuacaggca

SEQ ID NO: 1174497 - RNA, 17 nt, Human
aaaggagagcuagcagc

SEQ ID NO: 1174498 - RNA, 14 nt, Human
aaaggaugcacaga

SEQ ID NO: 1174499 - RNA, 18 nt, Human
guaggaagguuaauguuc

SEQ ID NO: 1174500 - RNA, 15 nt, Human
guaggaagacuuugg

SEQ ID NO: 1174501 - RNA, 17 nt, Human
aaaugaaaaucgugaca

SEQ ID NO: 1174502 - RNA, 15 nt, Human
aaaucucaaauuucu

SEQ ID NO: 1174503 - RNA, 16 nt, Human
aaaucucaaauuucua

SEQ ID NO: 1174504 - RNA, 17 nt, Human
aaaucucaaauuucuaa

SEQ ID NO: 1174505 - RNA, 19 nt, Human
aaaucucaaauuucuaaau

SEQ ID NO: 1174506 - RNA, 19 nt, Human
aaaucuacacuccagugag

SEQ ID NO: 1174507 - RNA, 14 nt, Human
aaauccuugaagau

SEQ ID NO: 1174508 - RNA, 13 nt, Human
aaaucgaugcagu

SEQ ID NO: 1174509 - RNA, 15 nt, Human
aaaucccauuuaaaa

SEQ ID NO: 1174510 - RNA, 18 nt, Human
aaaucccuuaccucggug

SEQ ID NO: 1174511 - RNA, 14 nt, Human
aaaugcauuucuaa

SEQ ID NO: 1174512 - RNA, 13 nt, Human
aaaugcccagccc

SEQ ID NO: 1174513 - RNA, 14 nt, Human
aaaugcccagcccc

SEQ ID NO: 1174514 - RNA, 15 nt, Human
aaaugcccagccccu

SEQ ID NO: 1174515 - RNA, 18 nt, Human
aaaugcccagccccuucu

SEQ ID NO: 1174516 - RNA, 13 nt, Human
aaaugcccagcuu

SEQ ID NO: 1174517 - RNA, 23 nt, Human
aaaugccuuacccucauguucuu

SEQ ID NO: 1174518 - RNA, 19 nt, Human
aaauggcuuccuggcaaua

SEQ ID NO: 1174519 - RNA, 15 nt, Human
aaaugggcagagcag

SEQ ID NO: 1174520 - RNA, 18 nt, Human
aaaugggcagagcagaga

SEQ ID NO: 1174521 - RNA, 20 nt, Human
aaaugggcagagcagagacc

SEQ ID NO: 1174522 - RNA, 14 nt, Human
aaaugcaccuggaa

SEQ ID NO: 1174523 - RNA, 18 nt, Human
aaaugcaccuggaauaua

SEQ ID NO: 1174524 - RNA, 22 nt, Human
aaaugcaccuggaauauauaac

SEQ ID NO: 1174525 - RNA, 21 nt, Human
aaaugaaagcagggacuugaa

SEQ ID NO: 1174526 - RNA, 22 nt, Human
aaaugaaagcagggacuugaac

SEQ ID NO: 1174527 - RNA, 13 nt, Human
aaaugagccuggc

SEQ ID NO: 1174528 - RNA, 19 nt, Human
aaaugagccuggcaagaau

SEQ ID NO: 1174529 - RNA, 16 nt, Human
aaaugagguacucucc

SEQ ID NO: 1174530 - RNA, 23 nt, Human
aaaugagguacucuccuggaaau

SEQ ID NO: 1174531 - RNA, 17 nt, Human
aaaugaggucagagccu

SEQ ID NO: 1174532 - RNA, 19 nt, Human
aaaugaggucagagccugc

SEQ ID NO: 1174533 - RNA, 15 nt, Human
guaugggagagaaga

SEQ ID NO: 1174534 - RNA, 13 nt, Human
guaugguggcugg

SEQ ID NO: 1174535 - RNA, 15 nt, Human
guauucuuauuuaau

SEQ ID NO: 1174536 - RNA, 15 nt, Human
guaucccuacuguaa

SEQ ID NO: 1174537 - RNA, 14 nt, Human
guaugauucccagc

SEQ ID NO: 1174538 - RNA, 14 nt, Human
guaugggagagaag

SEQ ID NO: 1174539 - RNA, 15 nt, Human
aaaugggggugcauu

SEQ ID NO: 1174540 - RNA, 16 nt, Human
aaaugggggugcauuu

SEQ ID NO: 1174541 - RNA, 17 nt, Human
aaaugggggugcauuug

SEQ ID NO: 1174542 - RNA, 18 nt, Human
aaaugggggugcauuuga

SEQ ID NO: 1174543 - RNA, 19 nt, Human
aaaugggggugcauuugag

SEQ ID NO: 1174544 - RNA, 21 nt, Human
aaauuaacuuuuauaaacuuu

SEQ ID NO: 1174545 - RNA, 22 nt, Human
aaauuaacuuuuauaaacuuua

SEQ ID NO: 1174546 - RNA, 23 nt, Human
aaauuaacuuuuauaaacuuuac

SEQ ID NO: 1174547 - RNA, 22 nt, Human
guauuggcuagagguucaaaga

SEQ ID NO: 1174548 - RNA, 14 nt, Human
aaauucaugcugcu

SEQ ID NO: 1174549 - RNA, 18 nt, Human
aaauuucagcagcugcag

SEQ ID NO: 1174550 - RNA, 17 nt, Human
aaauuucagcagcugca

SEQ ID NO: 1174551 - RNA, 12 nt, Human
aaauuucuaaau

SEQ ID NO: 1174552 - RNA, 14 nt, Human
guauuuuuuuacua

SEQ ID NO: 1174553 - RNA, 15 nt, Human
guauuuuuuuacuaa

SEQ ID NO: 1174554 - RNA, 17 nt, Human
guauuuuuuuacuaaua

SEQ ID NO: 1174555 - RNA, 21 nt, Human
guauuuuuuuacuaauagaca

SEQ ID NO: 1174556 - RNA, 19 nt, Human
gucaaaguggugagaggca

SEQ ID NO: 1174557 - RNA, 16 nt, Human
gucaaauugugugaaa

SEQ ID NO: 1174558 - RNA, 16 nt, Human
gucacacacuuuggcu

SEQ ID NO: 1174559 - RNA, 20 nt, Human
gucacacaguauuacuucug

SEQ ID NO: 1174560 - RNA, 21 nt, Human
gucauuugagcagggcucagc

SEQ ID NO: 1174561 - RNA, 21 nt, Human
aacacuguucucugcccucca

SEQ ID NO: 1174562 - RNA, 16 nt, Human
aacacuguucucugcc

SEQ ID NO: 1174563 - RNA, 22 nt, Human
gucauuugagcagggcucagcg

SEQ ID NO: 1174564 - RNA, 21 nt, Human
guccaagcauuuagauguaua

SEQ ID NO: 1174565 - RNA, 21 nt, Human
aacacucauugaccugaggcc

SEQ ID NO: 1174566 - RNA, 12 nt, Human
aacacuccuuca

SEQ ID NO: 1174567 - RNA, 11 nt, Human
aacacucugag

SEQ ID NO: 1174568 - RNA, 12 nt, Human
aacacucugaga

SEQ ID NO: 1174569 - RNA, 13 nt, Human
aacacucugagac

SEQ ID NO: 1174570 - RNA, 14 nt, Human
aacacucugagacu

SEQ ID NO: 1174571 - RNA, 15 nt, Human
aacacuguucucugc

SEQ ID NO: 1174572 - RNA, 20 nt, Human
aacacuguucucugcccucc

SEQ ID NO: 1174573 - RNA, 14 nt, Human
aacaaugcuguauu

SEQ ID NO: 1174574 - RNA, 13 nt, Human
gucacaggcaggu

SEQ ID NO: 1174575 - RNA, 15 nt, Human
gucacaggcaggucc

SEQ ID NO: 1174576 - RNA, 16 nt, Human
gucacaggcaggucca

SEQ ID NO: 1174577 - RNA, 21 nt, Human
gucacacaguauuacuucugc

SEQ ID NO: 1174578 - RNA, 16 nt, Human
aacaagaccacguuuc

SEQ ID NO: 1174579 - RNA, 17 nt, Human
aacaagaccacguuucu

SEQ ID NO: 1174580 - RNA, 19 nt, Human
aacaagaccacguuucuaa

SEQ ID NO: 1174581 - RNA, 20 nt, Human
aacaagaccacguuucuaaa

SEQ ID NO: 1174582 - RNA, 15 nt, Human
aacaaggaugaauua

SEQ ID NO: 1174583 - RNA, 15 nt, Human
aacaaggcaaggcug

SEQ ID NO: 1174584 - RNA, 21 nt, Human
guccggucccugucccagugc

SEQ ID NO: 1174585 - RNA, 10 nt, Human
aacagaaaug

SEQ ID NO: 1174586 - RNA, 11 nt, Human
aacagaaaugu

SEQ ID NO: 1174587 - RNA, 21 nt, Human
aacagaaauguacagcaagga

SEQ ID NO: 1174588 - RNA, 19 nt, Human
aacagacuggaagcacagc

SEQ ID NO: 1174589 - RNA, 20 nt, Human
aacagacuggaagcacagcu

SEQ ID NO: 1174590 - RNA, 22 nt, Human
aacaggcugggcuucaguggca

SEQ ID NO: 1174591 - RNA, 23 nt, Human
aacaggcugggcuucaguggcag

SEQ ID NO: 1174592 - RNA, 22 nt, Human
aacaguagugauaguuguaccg

SEQ ID NO: 1174593 - RNA, 14 nt, Human
aacauacucccauc

SEQ ID NO: 1174594 - RNA, 15 nt, Human
aacauacucccaucu

SEQ ID NO: 1174595 - RNA, 16 nt, Human
aacauacucccaucug

SEQ ID NO: 1174596 - RNA, 18 nt, Human
aacauuugguaaggggaa

SEQ ID NO: 1174597 - RNA, 20 nt, Human
aaccacaucuugcucugcug

SEQ ID NO: 1174598 - RNA, 22 nt, Human
aaccacaucuugcucugcugac

SEQ ID NO: 1174599 - RNA, 19 nt, Human
aaccaucauugaaaucuuu

SEQ ID NO: 1174600 - RNA, 20 nt, Human
aaccaucauugaaaucuuuu

SEQ ID NO: 1174601 - RNA, 21 nt, Human
aaccaucauugaaaucuuuuu

SEQ ID NO: 1174602 - RNA, 23 nt, Human
aaccaucauugaaaucuuuuugc

SEQ ID NO: 1174603 - RNA, 13 nt, Human
aacccaaauguuc

SEQ ID NO: 1174604 - RNA, 18 nt, Human
aacccaaauguucaucaa

SEQ ID NO: 1174605 - RNA, 11 nt, Human
aacccagcucu

SEQ ID NO: 1174606 - RNA, 13 nt, Human
aacccagcucugg

SEQ ID NO: 1174607 - RNA, 14 nt, Human
aacccagcucuggu

SEQ ID NO: 1174608 - RNA, 17 nt, Human
aacccagcucuggucca

SEQ ID NO: 1174609 - RNA, 23 nt, Human
aacccaaauguucaucaaugaau

SEQ ID NO: 1174610 - RNA, 20 nt, Human
aacccauauuuguacaccaa

SEQ ID NO: 1174611 - RNA, 13 nt, Human
aacccccagccug

SEQ ID NO: 1174612 - RNA, 14 nt, Human
aacccccagccugc

SEQ ID NO: 1174613 - RNA, 15 nt, Human
aacccccagccugcu

SEQ ID NO: 1174614 - RNA, 20 nt, Human
aaccuagggugauauuaacc

SEQ ID NO: 1174615 - RNA, 17 nt, Human
aaccuccgccucuuggg

SEQ ID NO: 1174616 - RNA, 14 nt, Human
aaccuccugggcua

SEQ ID NO: 1174617 - RNA, 19 nt, Human
gucuuauauauuguagaua

SEQ ID NO: 1174618 - RNA, 15 nt, Human
gucuuagauguauau

SEQ ID NO: 1174619 - RNA, 14 nt, Human
gucuuuggacccug

SEQ ID NO: 1174620 - RNA, 15 nt, Human
gucuuuggacccuga

SEQ ID NO: 1174621 - RNA, 17 nt, Human
gucuuuggacccugagg

SEQ ID NO: 1174622 - RNA, 18 nt, Human
gucuuuggacccugaggc

SEQ ID NO: 1174623 - RNA, 14 nt, Human
gucuuuucuugcau

SEQ ID NO: 1174624 - RNA, 19 nt, Human
gucuuuucuugcaugaggc

SEQ ID NO: 1174625 - RNA, 24 nt, Human
gucuuuucuugcaugaggcuagug

SEQ ID NO: 1174626 - RNA, 16 nt, Human
aacguggcugcuucaa

SEQ ID NO: 1174627 - RNA, 19 nt, Human
aacguggcugcuucaagga

SEQ ID NO: 1174628 - RNA, 22 nt, Human
aacguggcugcuucaaggaucc

SEQ ID NO: 1174629 - RNA, 21 nt, Human
aacuccagaaagugacaagcu

SEQ ID NO: 1174630 - RNA, 13 nt, Human
aacucccuuucaa

SEQ ID NO: 1174631 - RNA, 14 nt, Human
aacucccuuucaac

SEQ ID NO: 1174632 - RNA, 18 nt, Human
aacucguuaauuuguagu

SEQ ID NO: 1174633 - RNA, 19 nt, Human
gugaaccaccacacccagc

SEQ ID NO: 1174634 - RNA, 12 nt, Human
gugccucuggga

SEQ ID NO: 1174635 - RNA, 13 nt, Human
gugccucugggac

SEQ ID NO: 1174636 - RNA, 14 nt, Human
gugccucugggacu

SEQ ID NO: 1174637 - RNA, 14 nt, Human
gugccuuauggaac

SEQ ID NO: 1174638 - RNA, 21 nt, Human
gugccuuauggaacacucuga

SEQ ID NO: 1174639 - RNA, 23 nt, Human
gugccuuauggaacacucugaga

SEQ ID NO: 1174640 - RNA, 15 nt, Human
gugccucaagagaag

SEQ ID NO: 1174641 - RNA, 21 nt, Human
gugaaccaccacacccagccc

SEQ ID NO: 1174642 - RNA, 18 nt, Human
aacuugucuuuggacccu

SEQ ID NO: 1174643 - RNA, 22 nt, Human
aacuugucuuuggacccugagg

SEQ ID NO: 1174644 - RNA, 13 nt, Human
aacuuuaccuuuu

SEQ ID NO: 1174645 - RNA, 21 nt, Human
aacuuuaccuuuuuuauacau

SEQ ID NO: 1174646 - RNA, 16 nt, Human
aagaagugaaaaucua

SEQ ID NO: 1174647 - RNA, 22 nt, Human
aagaagugaaaaucuacacucc

SEQ ID NO: 1174648 - RNA, 18 nt, Human
gugcuaggaacacuccuu

SEQ ID NO: 1174649 - RNA, 22 nt, Human
gugcuaggaacacuccuucaca

SEQ ID NO: 1174650 - RNA, 18 nt, Human
gugcuaguaauuggaaag

SEQ ID NO: 1174651 - RNA, 21 nt, Human
gugcuaucucccccagcccca

SEQ ID NO: 1174652 - RNA, 15 nt, Human
aagaaaaaggaugca

SEQ ID NO: 1174653 - RNA, 17 nt, Human
aagaaaaaggaugcaca

SEQ ID NO: 1174654 - RNA, 18 nt, Human
aagaaaaaggaugcacag

SEQ ID NO: 1174655 - RNA, 19 nt, Human
aagaaaaaggaugcacaga

SEQ ID NO: 1174656 - RNA, 13 nt, Human
aagaaagaaaauc

SEQ ID NO: 1174657 - RNA, 20 nt, Human
aagaaagacuaucuaaaugu

SEQ ID NO: 1174658 - RNA, 22 nt, Human
aagaaagacuaucuaaauguug

SEQ ID NO: 1174659 - RNA, 20 nt, Human
gugcugggauuacaggugug

SEQ ID NO: 1174660 - RNA, 21 nt, Human
gugcugggauuacaagcguga

SEQ ID NO: 1174661 - RNA, 22 nt, Human
gugcugggauuacaagcgugag

SEQ ID NO: 1174662 - RNA, 22 nt, Human
gugcuaucucccccagccccau

SEQ ID NO: 1174663 - RNA, 12 nt, Human
gugcuauguucu

SEQ ID NO: 1174664 - RNA, 21 nt, Human
guggaugccugguggcagcug

SEQ ID NO: 1174665 - RNA, 18 nt, Human
guggacacagcucuucuc

SEQ ID NO: 1174666 - RNA, 22 nt, Human
guggacacagcucuucuccagg

SEQ ID NO: 1174667 - RNA, 23 nt, Human
guggacacagcucuucuccaggc

SEQ ID NO: 1174668 - RNA, 18 nt, Human
aagaaugauuaugaauua

SEQ ID NO: 1174669 - RNA, 16 nt, Human
aagaauugaagcagga

SEQ ID NO: 1174670 - RNA, 18 nt, Human
guggauuuaacagaaaug

SEQ ID NO: 1174671 - RNA, 19 nt, Human
guggauuuaacagaaaugu

SEQ ID NO: 1174672 - RNA, 20 nt, Human
guggauuuaacagaaaugua

SEQ ID NO: 1174673 - RNA, 19 nt, Human
guggcaccagcagccugga

SEQ ID NO: 1174674 - RNA, 14 nt, Human
guggcagcucaccu

SEQ ID NO: 1174675 - RNA, 16 nt, Human
guggcagcucaccucu

SEQ ID NO: 1174676 - RNA, 20 nt, Human
guggcagcucaccucucccu

SEQ ID NO: 1174677 - RNA, 16 nt, Human
aagaaugauuaugaau

SEQ ID NO: 1174678 - RNA, 18 nt, Human
aagacccuugugguccca

SEQ ID NO: 1174679 - RNA, 21 nt, Human
aagacccuuguggucccaccc

SEQ ID NO: 1174680 - RNA, 22 nt, Human
aagacccuuguggucccacccc

SEQ ID NO: 1174681 - RNA, 16 nt, Human
aagacuaucuaaaugu

SEQ ID NO: 1174682 - RNA, 17 nt, Human
aagacuaucuaaauguu

SEQ ID NO: 1174683 - RNA, 18 nt, Human
aagacuaucuaaauguug

SEQ ID NO: 1174684 - RNA, 17 nt, Human
aagacugaguacguugu

SEQ ID NO: 1174685 - RNA, 21 nt, Human
aagacugaguacguugugcau

SEQ ID NO: 1174686 - RNA, 22 nt, Human
aagacugaguacguugugcauu

SEQ ID NO: 1174687 - RNA, 17 nt, Human
aagacuguacaaaguag

SEQ ID NO: 1174688 - RNA, 23 nt, Human
guggcgcagcauauucaggaagc

SEQ ID NO: 1174689 - RNA, 21 nt, Human
gugggacagucaccucaugga

SEQ ID NO: 1174690 - RNA, 13 nt, Human
gugggagugggcc

SEQ ID NO: 1174691 - RNA, 14 nt, Human
gugggagugggccc

SEQ ID NO: 1174692 - RNA, 13 nt, Human
gugggauccucca

SEQ ID NO: 1174693 - RNA, 20 nt, Human
gugggggaucacagccucug

SEQ ID NO: 1174694 - RNA, 14 nt, Human
guggguacgggagg

SEQ ID NO: 1174695 - RNA, 14 nt, Human
guggguagacacac

SEQ ID NO: 1174696 - RNA, 14 nt, Human
guggugguuuucug

SEQ ID NO: 1174697 - RNA, 14 nt, Human
aagaugugacaugu

SEQ ID NO: 1174698 - RNA, 18 nt, Human
aagaugugacauguuuua

SEQ ID NO: 1174699 - RNA, 16 nt, Human
aagaugcuucucacug

SEQ ID NO: 1174700 - RNA, 12 nt, Human
aagcaaaggaga

SEQ ID NO: 1174701 - RNA, 13 nt, Human
aagcaaaggagau

SEQ ID NO: 1174702 - RNA, 20 nt, Human
guggugguuuucuguucuuu

SEQ ID NO: 1174703 - RNA, 17 nt, Human
gugguuuucuguucuuu

SEQ ID NO: 1174704 - RNA, 18 nt, Human
aagagguuuuaaaaaaau

SEQ ID NO: 1174705 - RNA, 15 nt, Human
aagauauuuugcuuu

SEQ ID NO: 1174706 - RNA, 12 nt, Human
aagaugcagccg

SEQ ID NO: 1174707 - RNA, 18 nt, Human
gugucuuuuuucacuaca

SEQ ID NO: 1174708 - RNA, 17 nt, Human
gugugacuacuccccca

SEQ ID NO: 1174709 - RNA, 17 nt, Human
gugucuugcaauggcag

SEQ ID NO: 1174710 - RNA, 18 nt, Human
gugucuugcaauggcagc

SEQ ID NO: 1174711 - RNA, 19 nt, Human
gugucuugcaauggcagcc

SEQ ID NO: 1174712 - RNA, 23 nt, Human
guguuuccuggcacugcuuccag

SEQ ID NO: 1174713 - RNA, 18 nt, Human
guuaaugauagcuacugu

SEQ ID NO: 1174714 - RNA, 17 nt, Human
guuaguaugaggcauuu

SEQ ID NO: 1174715 - RNA, 20 nt, Human
guuaguaugaggcauuuguu

SEQ ID NO: 1174716 - RNA, 16 nt, Human
guucagcuccagcuca

SEQ ID NO: 1174717 - RNA, 17 nt, Human
guucagcuccagcucac

SEQ ID NO: 1174718 - RNA, 18 nt, Human
guucagcuccagcucacc

SEQ ID NO: 1174719 - RNA, 17 nt, Human
guucaggguuggccccu

SEQ ID NO: 1174720 - RNA, 18 nt, Human
guucaggguuggccccug

SEQ ID NO: 1174721 - RNA, 19 nt, Human
guucaggguuggccccugc

SEQ ID NO: 1174722 - RNA, 20 nt, Human
guucaggguuggccccugcc

SEQ ID NO: 1174723 - RNA, 17 nt, Human
aagcuaggccuggccag

SEQ ID NO: 1174724 - RNA, 18 nt, Human
aagcuaggccuggccaga

SEQ ID NO: 1174725 - RNA, 22 nt, Human
aagcuaggccuggccagaugca

SEQ ID NO: 1174726 - RNA, 20 nt, Human
guucccauuugcuccuuucu

SEQ ID NO: 1174727 - RNA, 16 nt, Human
guucccauuugcuccu

SEQ ID NO: 1174728 - RNA, 20 nt, Human
guuccauggccucuucagau

SEQ ID NO: 1174729 - RNA, 22 nt, Human
aagcuauucaguaauaacucua

SEQ ID NO: 1174730 - RNA, 21 nt, Human
aagcucuacugaggugcuaug

SEQ ID NO: 1174731 - RNA, 20 nt, Human
guucccuuugacgccauccc

SEQ ID NO: 1174732 - RNA, 21 nt, Human
guucccuuugacgccauccca

SEQ ID NO: 1174733 - RNA, 22 nt, Human
guucccuuugacgccaucccag

SEQ ID NO: 1174734 - RNA, 16 nt, Human
guucuacccaggugcu

SEQ ID NO: 1174735 - RNA, 13 nt, Human
guucucuccuucu

SEQ ID NO: 1174736 - RNA, 17 nt, Human
guucuuaguuugcaguu

SEQ ID NO: 1174737 - RNA, 21 nt, Human
guucuugguuuguaaauuaac

SEQ ID NO: 1174738 - RNA, 14 nt, Human
guugacaugggaca

SEQ ID NO: 1174739 - RNA, 18 nt, Human
guugacaugggacauuug

SEQ ID NO: 1174740 - RNA, 22 nt, Human
guugaugaucuuugcagacagg

SEQ ID NO: 1174741 - RNA, 23 nt, Human
guugaugaucuuugcagacaggc

SEQ ID NO: 1174742 - RNA, 14 nt, Human
aaggauccugagcc

SEQ ID NO: 1174743 - RNA, 15 nt, Human
aaggauccugagcca

SEQ ID NO: 1174744 - RNA, 17 nt, Human
aaggauccugagccaga

SEQ ID NO: 1174745 - RNA, 18 nt, Human
aaggaugaucuaggaaga

SEQ ID NO: 1174746 - RNA, 23 nt, Human
aaggaugaucuaggaagacuuug

SEQ ID NO: 1174747 - RNA, 17 nt, Human
aaggaugcuuguacaua

SEQ ID NO: 1174748 - RNA, 19 nt, Human
aaggaugcuuguacauaau

SEQ ID NO: 1174749 - RNA, 18 nt, Human
aaggaugcacagaguugu

SEQ ID NO: 1174750 - RNA, 20 nt, Human
aaggauccugagccagauuu

SEQ ID NO: 1174751 - RNA, 22 nt, Human
aaggaugcacagaguuguuaca

SEQ ID NO: 1174752 - RNA, 15 nt, Human
aaggaugcuuguaca

SEQ ID NO: 1174753 - RNA, 16 nt, Human
aaggaugcuuguacau

SEQ ID NO: 1174754 - RNA, 18 nt, Human
aaggccaaaggaagcaca

SEQ ID NO: 1174755 - RNA, 19 nt, Human
aaggcuaccuuuguauucu

SEQ ID NO: 1174756 - RNA, 14 nt, Human
aaggcuccaggagc

SEQ ID NO: 1174757 - RNA, 17 nt, Human
guugcccaggcaggucu

SEQ ID NO: 1174758 - RNA, 18 nt, Human
guugcccaggcaggucuu

SEQ ID NO: 1174759 - RNA, 19 nt, Human
guugcccaggcaggucuug

SEQ ID NO: 1174760 - RNA, 15 nt, Human
aaggcuccaggagca

SEQ ID NO: 1174761 - RNA, 21 nt, Human
guugcccaggcuggcgugcag

SEQ ID NO: 1174762 - RNA, 18 nt, Human
guuguaccgcaaugugac

SEQ ID NO: 1174763 - RNA, 18 nt, Human
guuggucccccuuccaug

SEQ ID NO: 1174764 - RNA, 18 nt, Human
guuuggggaugagaaagg

SEQ ID NO: 1174765 - RNA, 15 nt, Human
guuuuacugcagcuu

SEQ ID NO: 1174766 - RNA, 11 nt, Human
guuuucuguuc

SEQ ID NO: 1174767 - RNA, 12 nt, Human
guuuucuguucu

SEQ ID NO: 1174768 - RNA, 22 nt, Human
guuucuaaaggcuaccuuugua

SEQ ID NO: 1174769 - RNA, 23 nt, Human
guuucuaaaggcuaccuuuguau

SEQ ID NO: 1174770 - RNA, 22 nt, Human
guuugauucagacagcugccug

SEQ ID NO: 1174771 - RNA, 13 nt, Human
guuugccucugcc

SEQ ID NO: 1174772 - RNA, 16 nt, Human
guuugccucugccucu

SEQ ID NO: 1174773 - RNA, 13 nt, Human
aagguacuucaaa

SEQ ID NO: 1174774 - RNA, 16 nt, Human
aaggguaucaggugcu

SEQ ID NO: 1174775 - RNA, 17 nt, Human
aaggguaucaggugcug

SEQ ID NO: 1174776 - RNA, 12 nt, Human
aaguaauaugca

SEQ ID NO: 1174777 - RNA, 15 nt, Human
aaguaauaugcacac

SEQ ID NO: 1174778 - RNA, 16 nt, Human
aaguaauaugcacaca

SEQ ID NO: 1174779 - RNA, 17 nt, Human
aaguaauaugcacacau

SEQ ID NO: 1174780 - RNA, 19 nt, Human
guuucuaaaggcuaccuuu

SEQ ID NO: 1174781 - RNA, 21 nt, Human
guuucaaacauauauaacaau

SEQ ID NO: 1174782 - RNA, 14 nt, Human
aagggccuggccug

SEQ ID NO: 1174783 - RNA, 17 nt, Human
aagggccuggccugagc

SEQ ID NO: 1174784 - RNA, 19 nt, Human
aagggccuggccugagcug

SEQ ID NO: 1174785 - RNA, 22 nt, Human
aaggggaauguuugccucugcc

SEQ ID NO: 1174786 - RNA, 23 nt, Human
aaggggaauguuugccucugccu

SEQ ID NO: 1174787 - RNA, 17 nt, Human
aaggggaauugaggaca

SEQ ID NO: 1174788 - RNA, 21 nt, Human
aauaacaaugaaaguugauaa

SEQ ID NO: 1174789 - RNA, 15 nt, Human
aauaacgauaaaaga

SEQ ID NO: 1174790 - RNA, 12 nt, Human
aauaaaacuuuu

SEQ ID NO: 1174791 - RNA, 14 nt, Human
aauaaaacuuuuua

SEQ ID NO: 1174792 - RNA, 15 nt, Human
aauaaaacuuuuuaa

SEQ ID NO: 1174793 - RNA, 18 nt, Human
aauaaaacuuuuuaaaau

SEQ ID NO: 1174794 - RNA, 16 nt, Human
aauaaaucauaaaacu

SEQ ID NO: 1174795 - RNA, 20 nt, Human
aaguuuuuauggcuuuugug

SEQ ID NO: 1174796 - RNA, 12 nt, Human
aauaaaaaguua

SEQ ID NO: 1174797 - RNA, 13 nt, Human
aauaaaaaguuaa

SEQ ID NO: 1174798 - RNA, 14 nt, Human
aauaaaaaguuaaa

SEQ ID NO: 1174799 - RNA, 15 nt, Human
aauaaaaaguuaaaa

SEQ ID NO: 1174800 - RNA, 14 nt, Human
uaaaucuccaaaau

SEQ ID NO: 1174801 - RNA, 15 nt, Human
uaaaucuccaaaaua

SEQ ID NO: 1174802 - RNA, 18 nt, Human
uaaaucuccaaaauaaaa

SEQ ID NO: 1174803 - RNA, 23 nt, Human
uaaaugcaccuggaauauauaac

SEQ ID NO: 1174804 - RNA, 15 nt, Human
uaaauguugaaagau

SEQ ID NO: 1174805 - RNA, 20 nt, Human
uaaauguugaaagaucaaaa

SEQ ID NO: 1174806 - RNA, 15 nt, Human
uaaauguugacaugg

SEQ ID NO: 1174807 - RNA, 12 nt, Human
uaaauuaacuuu

SEQ ID NO: 1174808 - RNA, 14 nt, Human
uaaauuaacuuuua

SEQ ID NO: 1174809 - RNA, 15 nt, Human
uaaauuaacuuuuau

SEQ ID NO: 1174810 - RNA, 16 nt, Human
uaaauuaacuuuuaua

SEQ ID NO: 1174811 - RNA, 17 nt, Human
uaaauuaacuuuuauaa

SEQ ID NO: 1174812 - RNA, 18 nt, Human
uaaauuaacuuuuauaaa

SEQ ID NO: 1174813 - RNA, 16 nt, Human
aauaauuuuuauauuu

SEQ ID NO: 1174814 - RNA, 17 nt, Human
aauaauuuuuauauuug

SEQ ID NO: 1174815 - RNA, 19 nt, Human
aauaauuuuuauauuugaa

SEQ ID NO: 1174816 - RNA, 20 nt, Human
aauaauuuuuauauuugaaa

SEQ ID NO: 1174817 - RNA, 19 nt, Human
uaaauaaugugaaacugga

SEQ ID NO: 1174818 - RNA, 23 nt, Human
aauagacaauuuauuauggcaca

SEQ ID NO: 1174819 - RNA, 20 nt, Human
aauagccugccucuucucua

SEQ ID NO: 1174820 - RNA, 13 nt, Human
aauagcugggacu

SEQ ID NO: 1174821 - RNA, 14 nt, Human
aauagcugggacua

SEQ ID NO: 1174822 - RNA, 18 nt, Human
aauaggcguaacuaauuu

SEQ ID NO: 1174823 - RNA, 15 nt, Human
aauaggaaaaacuga

SEQ ID NO: 1174824 - RNA, 16 nt, Human
aauaggaaaaacugau

SEQ ID NO: 1174825 - RNA, 17 nt, Human
aauaggaaaaacugauu

SEQ ID NO: 1174826 - RNA, 18 nt, Human
aauaggaaaaacugauuu

SEQ ID NO: 1174827 - RNA, 19 nt, Human
aauaggaaaaacugauuuu

SEQ ID NO: 1174828 - RNA, 12 nt, Human
aauaucacuugu

SEQ ID NO: 1174829 - RNA, 15 nt, Human
aauaucacuugucaa

SEQ ID NO: 1174830 - RNA, 20 nt, Human
aauaucacuugucaauaaaa

SEQ ID NO: 1174831 - RNA, 14 nt, Human
uaacauggaaguac

SEQ ID NO: 1174832 - RNA, 15 nt, Human
uaacauggaaguacu

SEQ ID NO: 1174833 - RNA, 16 nt, Human
uaacauggaaguacua

SEQ ID NO: 1174834 - RNA, 15 nt, Human
uaacuaaaagguaug

SEQ ID NO: 1174835 - RNA, 19 nt, Human
uaacuuuuauaaacuuuac

SEQ ID NO: 1174836 - RNA, 15 nt, Human
uaacuuuuauaaacu

SEQ ID NO: 1174837 - RNA, 17 nt, Human
uaacuuuuauaaacuuu

SEQ ID NO: 1174838 - RNA, 18 nt, Human
uaacuuuuauaaacuuua

SEQ ID NO: 1174839 - RNA, 16 nt, Human
aauaucugaaaaugua

SEQ ID NO: 1174840 - RNA, 17 nt, Human
aauaucugaaaauguau

SEQ ID NO: 1174841 - RNA, 18 nt, Human
aauaucugaaaauguaug

SEQ ID NO: 1174842 - RNA, 19 nt, Human
aauaucugaaaauguaugu

SEQ ID NO: 1174843 - RNA, 20 nt, Human
aauaucugaaaauguaugug

SEQ ID NO: 1174844 - RNA, 19 nt, Human
aauaucuuuuuuuuaauaa

SEQ ID NO: 1174845 - RNA, 15 nt, Human
aauaugcacacauuu

SEQ ID NO: 1174846 - RNA, 18 nt, Human
aauauugauaugcuuaua

SEQ ID NO: 1174847 - RNA, 11 nt, Human
aauauugcuga

SEQ ID NO: 1174848 - RNA, 12 nt, Human
aauauugcugau

SEQ ID NO: 1174849 - RNA, 13 nt, Human
aauauugcugaug

SEQ ID NO: 1174850 - RNA, 15 nt, Human
aauauugcugauggu

SEQ ID NO: 1174851 - RNA, 18 nt, Human
aauauugcugauggugca

SEQ ID NO: 1174852 - RNA, 21 nt, Human
aauauugcugauggugcaaug

SEQ ID NO: 1174853 - RNA, 22 nt, Human
aauauugcugauggugcaauga

SEQ ID NO: 1174854 - RNA, 15 nt, Human
aauauuucagauaau

SEQ ID NO: 1174855 - RNA, 20 nt, Human
uaaguuuuuauggcuuuugu

SEQ ID NO: 1174856 - RNA, 18 nt, Human
uaaguuuuuuuuuaaaaa

SEQ ID NO: 1174857 - RNA, 15 nt, Human
aaucaucaagucuuu

SEQ ID NO: 1174858 - RNA, 19 nt, Human
aaucaugaauuaguuuuau

SEQ ID NO: 1174859 - RNA, 23 nt, Human
aaucaugaauuaguuuuauaugc

SEQ ID NO: 1174860 - RNA, 16 nt, Human
aaucuuauaauuuaaa

SEQ ID NO: 1174861 - RNA, 14 nt, Human
aaucuuauaauuua

SEQ ID NO: 1174862 - RNA, 15 nt, Human
aaucucaaauaacua

SEQ ID NO: 1174863 - RNA, 12 nt, Human
aaucucaaauuu

SEQ ID NO: 1174864 - RNA, 14 nt, Human
aaucucaaauuucu

SEQ ID NO: 1174865 - RNA, 15 nt, Human
aaucucaaauuucua

SEQ ID NO: 1174866 - RNA, 13 nt, Human
aauccuugaagau

SEQ ID NO: 1174867 - RNA, 13 nt, Human
aaucuaaauggaa

SEQ ID NO: 1174868 - RNA, 15 nt, Human
aaucuaaauggaacc

SEQ ID NO: 1174869 - RNA, 18 nt, Human
aaucuaaauggaaccacu

SEQ ID NO: 1174870 - RNA, 20 nt, Human
aauccucaguuuuugugaaa

SEQ ID NO: 1174871 - RNA, 14 nt, Human
uaaugaaagacugu

SEQ ID NO: 1174872 - RNA, 17 nt, Human
uaaugaaagacuguaca

SEQ ID NO: 1174873 - RNA, 18 nt, Human
uaaugaaagacuguacaa

SEQ ID NO: 1174874 - RNA, 19 nt, Human
uaaugaaagacuguacaaa

SEQ ID NO: 1174875 - RNA, 22 nt, Human
uaaugaaagacuguacaaagua

SEQ ID NO: 1174876 - RNA, 23 nt, Human
uaaugaaagacuguacaaaguag

SEQ ID NO: 1174877 - RNA, 15 nt, Human
uaaugacuuaagcac

SEQ ID NO: 1174878 - RNA, 21 nt, Human
uaaugacuuaagcacacuuga

SEQ ID NO: 1174879 - RNA, 21 nt, Human
uaauaguucagguaacaggca

SEQ ID NO: 1174880 - RNA, 13 nt, Human
aaucuucugaacu

SEQ ID NO: 1174881 - RNA, 20 nt, Human
aaucuucugaacuuggcgcu

SEQ ID NO: 1174882 - RNA, 23 nt, Human
aaucuucugaacuuggcgcugcc

SEQ ID NO: 1174883 - RNA, 13 nt, Human
uaaugaggaaacu

SEQ ID NO: 1174884 - RNA, 16 nt, Human
uaaugauaacuggaaa

SEQ ID NO: 1174885 - RNA, 14 nt, Human
aaugacuuacugua

SEQ ID NO: 1174886 - RNA, 17 nt, Human
aaugacuuacuguacau

SEQ ID NO: 1174887 - RNA, 18 nt, Human
aaugacuuacuguacaug

SEQ ID NO: 1174888 - RNA, 21 nt, Human
aaugagagacacacugaagaa

SEQ ID NO: 1174889 - RNA, 15 nt, Human
aaugagccuggcaag

SEQ ID NO: 1174890 - RNA, 20 nt, Human
uacaaaaagcauaaaaauua

SEQ ID NO: 1174891 - RNA, 15 nt, Human
uacaaaagcauguga

SEQ ID NO: 1174892 - RNA, 14 nt, Human
aaugcccagccccu

SEQ ID NO: 1174893 - RNA, 15 nt, Human
aaugcccagccccuu

SEQ ID NO: 1174894 - RNA, 20 nt, Human
aaugcccagccccuucugac

SEQ ID NO: 1174895 - RNA, 22 nt, Human
aaugcccagccccuucugaccc

SEQ ID NO: 1174896 - RNA, 23 nt, Human
aaugcccagccccuucugaccca

SEQ ID NO: 1174897 - RNA, 24 nt, Human
aaugcccagccccuucugacccau

SEQ ID NO: 1174898 - RNA, 13 nt, Human
aaugcugugcccu

SEQ ID NO: 1174899 - RNA, 20 nt, Human
aaugcugugcccuaaagugu

SEQ ID NO: 1174900 - RNA, 21 nt, Human
aaugcugugcccuaaagugua

SEQ ID NO: 1174901 - RNA, 16 nt, Human
aauggacguguuauga

SEQ ID NO: 1174902 - RNA, 19 nt, Human
uacacuaagagagaaugag

SEQ ID NO: 1174903 - RNA, 14 nt, Human
uacacuccagugag

SEQ ID NO: 1174904 - RNA, 18 nt, Human
uacagaggccaugggccu

SEQ ID NO: 1174905 - RNA, 19 nt, Human
aauggacuuuuguacauag

SEQ ID NO: 1174906 - RNA, 21 nt, Human
aauggacguguuaugacucca

SEQ ID NO: 1174907 - RNA, 15 nt, Human
uacaccacuacauuc

SEQ ID NO: 1174908 - RNA, 16 nt, Human
uacaccacuacauucu

SEQ ID NO: 1174909 - RNA, 17 nt, Human
uacaccacuacauucug

SEQ ID NO: 1174910 - RNA, 18 nt, Human
uacaccacuacauucugu

SEQ ID NO: 1174911 - RNA, 19 nt, Human
uacaccacuacauucuguu

SEQ ID NO: 1174912 - RNA, 20 nt, Human
uacaccacuacauucuguua

SEQ ID NO: 1174913 - RNA, 11 nt, Human
aaugugauaug

SEQ ID NO: 1174914 - RNA, 14 nt, Human
aauguacugcauau

SEQ ID NO: 1174915 - RNA, 18 nt, Human
aauguacugcauaugaaa

SEQ ID NO: 1174916 - RNA, 12 nt, Human
aauguaugugua

SEQ ID NO: 1174917 - RNA, 14 nt, Human
aauguauguguaag

SEQ ID NO: 1174918 - RNA, 19 nt, Human
aauguauguguaaguauuc

SEQ ID NO: 1174919 - RNA, 12 nt, Human
aauguacugcau

SEQ ID NO: 1174920 - RNA, 21 nt, Human
uacauaaugcgugcauaccac

SEQ ID NO: 1174921 - RNA, 19 nt, Human
uacauaaugcgugcauacc

SEQ ID NO: 1174922 - RNA, 20 nt, Human
uacauaaugcgugcauacca

SEQ ID NO: 1174923 - RNA, 15 nt, Human
uacaguaucucaggg

SEQ ID NO: 1174924 - RNA, 17 nt, Human
uacauaaugcgugcaua

SEQ ID NO: 1174925 - RNA, 18 nt, Human
uacuguacaugaaaacac

SEQ ID NO: 1174926 - RNA, 18 nt, Human
aauugaggacacugauau

SEQ ID NO: 1174927 - RNA, 17 nt, Human
uacugagagugaacaaa

SEQ ID NO: 1174928 - RNA, 19 nt, Human
uacugagagugaacaaauu

SEQ ID NO: 1174929 - RNA, 15 nt, Human
uacuguaauuuguga

SEQ ID NO: 1174930 - RNA, 16 nt, Human
uacuguaauuugugau

SEQ ID NO: 1174931 - RNA, 17 nt, Human
uacuguaauuugugaua

SEQ ID NO: 1174932 - RNA, 13 nt, Human
aauugacccacaa

SEQ ID NO: 1174933 - RNA, 15 nt, Human
uacgucugacaggca

SEQ ID NO: 1174934 - RNA, 16 nt, Human
uacgucugacaggcaa

SEQ ID NO: 1174935 - RNA, 18 nt, Human
uacgggaggguaaggcug

SEQ ID NO: 1174936 - RNA, 13 nt, Human
uacgugaguccug

SEQ ID NO: 1174937 - RNA, 14 nt, Human
uacuaaaaauacaa

SEQ ID NO: 1174938 - RNA, 18 nt, Human
uacuaaaaauacaaaaaa

SEQ ID NO: 1174939 - RNA, 22 nt, Human
uacucuacccucuuagaaaaac

SEQ ID NO: 1174940 - RNA, 13 nt, Human
uacuucuccaccc

SEQ ID NO: 1174941 - RNA, 18 nt, Human
uacuucuccacccugcuc

SEQ ID NO: 1174942 - RNA, 20 nt, Human
uacuucuccacccugcucuc

SEQ ID NO: 1174943 - RNA, 15 nt, Human
uacuucugcuacaua

SEQ ID NO: 1174944 - RNA, 19 nt, Human
uacuucuuaggguuaugau

SEQ ID NO: 1174945 - RNA, 14 nt, Human
uacuucuuauacau

SEQ ID NO: 1174946 - RNA, 15 nt, Human
uacuucuuauacauu

SEQ ID NO: 1174947 - RNA, 16 nt, Human
uacuucuuauacauuu

SEQ ID NO: 1174948 - RNA, 13 nt, Human
aauuuauuauggc

SEQ ID NO: 1174949 - RNA, 14 nt, Human
aauuuauuauggca

SEQ ID NO: 1174950 - RNA, 17 nt, Human
aauuuauuauggcacau

SEQ ID NO: 1174951 - RNA, 15 nt, Human
aauuggagcucgugg

SEQ ID NO: 1174952 - RNA, 17 nt, Human
aauuuacagagacagaa

SEQ ID NO: 1174953 - RNA, 18 nt, Human
aauuuacagagacagaaa

SEQ ID NO: 1174954 - RNA, 15 nt, Human
aauuuacauacucug

SEQ ID NO: 1174955 - RNA, 17 nt, Human
aauuuaccugaagucuu

SEQ ID NO: 1174956 - RNA, 21 nt, Human
acaaagcgugguggacaugca

SEQ ID NO: 1174957 - RNA, 14 nt, Human
acaaaacuuuucua

SEQ ID NO: 1174958 - RNA, 22 nt, Human
uagauaggucagugcaaauacu

SEQ ID NO: 1174959 - RNA, 21 nt, Human
uagaugcaguucugaagaaga

SEQ ID NO: 1174960 - RNA, 16 nt, Human
aauuuguuauaaugaa

SEQ ID NO: 1174961 - RNA, 22 nt, Human
aauuuuuuuaucgucacugcuu

SEQ ID NO: 1174962 - RNA, 17 nt, Human
acaaauuuacagagaca

SEQ ID NO: 1174963 - RNA, 17 nt, Human
acaacaucuuuuucuac

SEQ ID NO: 1174964 - RNA, 16 nt, Human
acaagaccacguuucu

SEQ ID NO: 1174965 - RNA, 17 nt, Human
acaagaccacguuucua

SEQ ID NO: 1174966 - RNA, 18 nt, Human
acaagaccacguuucuaa

SEQ ID NO: 1174967 - RNA, 22 nt, Human
acaagagcccaggccuccuaca

SEQ ID NO: 1174968 - RNA, 17 nt, Human
acaagcgugagccacug

SEQ ID NO: 1174969 - RNA, 13 nt, Human
acaagcuccaagc

SEQ ID NO: 1174970 - RNA, 13 nt, Human
acaagcugcaccc

SEQ ID NO: 1174971 - RNA, 18 nt, Human
acaagcgugagccacugc

SEQ ID NO: 1174972 - RNA, 22 nt, Human
acaagcuccaagcucccaggca

SEQ ID NO: 1174973 - RNA, 15 nt, Human
acaagcuccaagcuc

SEQ ID NO: 1174974 - RNA, 16 nt, Human
acaagcuccaagcucc

SEQ ID NO: 1174975 - RNA, 17 nt, Human
acaagcuccaagcuccc

SEQ ID NO: 1174976 - RNA, 19 nt, Human
acaagcuccaagcucccag

SEQ ID NO: 1174977 - RNA, 16 nt, Human
uagcuacuaauuuuaa

SEQ ID NO: 1174978 - RNA, 16 nt, Human
uagcucaggugucccu

SEQ ID NO: 1174979 - RNA, 13 nt, Human
acacagugagucg

SEQ ID NO: 1174980 - RNA, 21 nt, Human
uagguuggcaaaaaggcagga

SEQ ID NO: 1174981 - RNA, 14 nt, Human
acacacugaagaag

SEQ ID NO: 1174982 - RNA, 11 nt, Human
acacagugagu

SEQ ID NO: 1174983 - RNA, 14 nt, Human
uaguagagacaggg

SEQ ID NO: 1174984 - RNA, 13 nt, Human
uaguagagacagg

SEQ ID NO: 1174985 - RNA, 12 nt, Human
uaguguuggaga

SEQ ID NO: 1174986 - RNA, 16 nt, Human
uaguguuggagaagaa

SEQ ID NO: 1174987 - RNA, 17 nt, Human
uaguguuggagaagaac

SEQ ID NO: 1174988 - RNA, 14 nt, Human
acaaugcuguauuu

SEQ ID NO: 1174989 - RNA, 17 nt, Human
acaaugcuguauuuuaa

SEQ ID NO: 1174990 - RNA, 18 nt, Human
acaaugcuguauuuuaaa

SEQ ID NO: 1174991 - RNA, 15 nt, Human
acaaugguuuucuug

SEQ ID NO: 1174992 - RNA, 21 nt, Human
acaaugguuuucuuguguguu

SEQ ID NO: 1174993 - RNA, 17 nt, Human
acacaacuauauuguuu

SEQ ID NO: 1174994 - RNA, 17 nt, Human
acacacacacaugcaua

SEQ ID NO: 1174995 - RNA, 12 nt, Human
acacacacagaa

SEQ ID NO: 1174996 - RNA, 13 nt, Human
acacacacagaaa

SEQ ID NO: 1174997 - RNA, 14 nt, Human
acacacacagaaaa

SEQ ID NO: 1174998 - RNA, 15 nt, Human
acacacacagaaaau

SEQ ID NO: 1174999 - RNA, 16 nt, Human
acacacacagaaaaua

SEQ ID NO: 1175000 - RNA, 12 nt, Human
acacacacagcc

SEQ ID NO: 1175001 - RNA, 13 nt, Human
acacacacagcca

SEQ ID NO: 1175002 - RNA, 14 nt, Human
acacacacagccac

SEQ ID NO: 1175003 - RNA, 15 nt, Human
acacacacagccaca

SEQ ID NO: 1175004 - RNA, 16 nt, Human
acacacacagccacac

SEQ ID NO: 1175005 - RNA, 14 nt, Human
acacacacauacac

SEQ ID NO: 1175006 - RNA, 13 nt, Human
acacacagccaca

SEQ ID NO: 1175007 - RNA, 14 nt, Human
acacacagccacac

SEQ ID NO: 1175008 - RNA, 15 nt, Human
acacacagccacaca

SEQ ID NO: 1175009 - RNA, 17 nt, Human
acacacagccacacaca

SEQ ID NO: 1175010 - RNA, 18 nt, Human
acacacagccacacacac

SEQ ID NO: 1175011 - RNA, 21 nt, Human
acacacagccacacacacaga

SEQ ID NO: 1175012 - RNA, 22 nt, Human
acacacagccacacacacagaa

SEQ ID NO: 1175013 - RNA, 11 nt, Human
acacacagcuc

SEQ ID NO: 1175014 - RNA, 12 nt, Human
acacacagcucu

SEQ ID NO: 1175015 - RNA, 13 nt, Human
acacacagcucug

SEQ ID NO: 1175016 - RNA, 14 nt, Human
acacacaugcauac

SEQ ID NO: 1175017 - RNA, 15 nt, Human
acacacaugcauaca

SEQ ID NO: 1175018 - RNA, 16 nt, Human
acacacaugcauacac

SEQ ID NO: 1175019 - RNA, 17 nt, Human
acacacaugcauacaca

SEQ ID NO: 1175020 - RNA, 18 nt, Human
acacacaugcauacacac

SEQ ID NO: 1175021 - RNA, 19 nt, Human
acacacaugcauacacaca

SEQ ID NO: 1175022 - RNA, 20 nt, Human
acacacaugcauacacacac

SEQ ID NO: 1175023 - RNA, 21 nt, Human
acacacaugcauacacacaca

SEQ ID NO: 1175024 - RNA, 13 nt, Human
acacacugaagaa

SEQ ID NO: 1175025 - RNA, 22 nt, Human
uauaaccaguguuguggauuua

SEQ ID NO: 1175026 - RNA, 16 nt, Human
acacuaaccacgcugg

SEQ ID NO: 1175027 - RNA, 17 nt, Human
acacuaaccacgcugga

SEQ ID NO: 1175028 - RNA, 19 nt, Human
acacuaaccacgcuggacc

SEQ ID NO: 1175029 - RNA, 17 nt, Human
acacuaagagagaauga

SEQ ID NO: 1175030 - RNA, 18 nt, Human
acacuaagagagaaugag

SEQ ID NO: 1175031 - RNA, 19 nt, Human
acacuaagagagaaugaga

SEQ ID NO: 1175032 - RNA, 20 nt, Human
acacuaaccacgcuggaccu

SEQ ID NO: 1175033 - RNA, 19 nt, Human
acacccagcccacuucugc

SEQ ID NO: 1175034 - RNA, 18 nt, Human
acaccucugcacaagcug

SEQ ID NO: 1175035 - RNA, 19 nt, Human
acaccucugcacaagcugc

SEQ ID NO: 1175036 - RNA, 14 nt, Human
acaccuugacaggg

SEQ ID NO: 1175037 - RNA, 15 nt, Human
acaccuugacagggc

SEQ ID NO: 1175038 - RNA, 16 nt, Human
acaccuugacagggca

SEQ ID NO: 1175039 - RNA, 18 nt, Human
uaguucagguaacaggca

SEQ ID NO: 1175040 - RNA, 13 nt, Human
acacaugcauaca

SEQ ID NO: 1175041 - RNA, 14 nt, Human
acacaugcauacac

SEQ ID NO: 1175042 - RNA, 15 nt, Human
acacaugcauacaca

SEQ ID NO: 1175043 - RNA, 16 nt, Human
acacaugcauacacac

SEQ ID NO: 1175044 - RNA, 17 nt, Human
acacaugcauacacaca

SEQ ID NO: 1175045 - RNA, 18 nt, Human
acacaugcauacacacac

SEQ ID NO: 1175046 - RNA, 19 nt, Human
acacaugcauacacacaca

SEQ ID NO: 1175047 - RNA, 13 nt, Human
acacauguccaag

SEQ ID NO: 1175048 - RNA, 18 nt, Human
acacauguccaagaagcc

SEQ ID NO: 1175049 - RNA, 19 nt, Human
acacauguccaagaagccc

SEQ ID NO: 1175050 - RNA, 21 nt, Human
acacauguccaagaagcccag

SEQ ID NO: 1175051 - RNA, 22 nt, Human
acacauguccaagaagcccagg

SEQ ID NO: 1175052 - RNA, 13 nt, Human
acacauuuuauuu

SEQ ID NO: 1175053 - RNA, 12 nt, Human
acacccagccca

SEQ ID NO: 1175054 - RNA, 13 nt, Human
acacccagcccac

SEQ ID NO: 1175055 - RNA, 15 nt, Human
acacuguuucaaacu

SEQ ID NO: 1175056 - RNA, 16 nt, Human
acacuguuucaaacuu

SEQ ID NO: 1175057 - RNA, 13 nt, Human
acacuuaaaaaug

SEQ ID NO: 1175058 - RNA, 15 nt, Human
acacuuaaaaauggu

SEQ ID NO: 1175059 - RNA, 12 nt, Human
uauauuuacaaa

SEQ ID NO: 1175060 - RNA, 19 nt, Human
acagaaagcagaacaguga

SEQ ID NO: 1175061 - RNA, 17 nt, Human
acagacacaggcccggc

SEQ ID NO: 1175062 - RNA, 18 nt, Human
acagacacaggcccggcu

SEQ ID NO: 1175063 - RNA, 22 nt, Human
acagacacaggcccggcuccag

SEQ ID NO: 1175064 - RNA, 19 nt, Human
acagacuggaagcacagcu

SEQ ID NO: 1175065 - RNA, 21 nt, Human
acagacuggaagcacagcuuc

SEQ ID NO: 1175066 - RNA, 22 nt, Human
acagacuggaagcacagcuuca

SEQ ID NO: 1175067 - RNA, 14 nt, Human
acacuccagugaga

SEQ ID NO: 1175068 - RNA, 11 nt, Human
acacucugaga

SEQ ID NO: 1175069 - RNA, 13 nt, Human
acacucugagacu

SEQ ID NO: 1175070 - RNA, 12 nt, Human
acacugaagaag

SEQ ID NO: 1175071 - RNA, 14 nt, Human
acacugaagaagca

SEQ ID NO: 1175072 - RNA, 14 nt, Human
acacuguucucugc

SEQ ID NO: 1175073 - RNA, 15 nt, Human
acacuguucucugcc

SEQ ID NO: 1175074 - RNA, 16 nt, Human
acacuguucucugccc

SEQ ID NO: 1175075 - RNA, 17 nt, Human
acacuguucucugcccu

SEQ ID NO: 1175076 - RNA, 18 nt, Human
acacuguucucugcccuc

SEQ ID NO: 1175077 - RNA, 20 nt, Human
acacuguucucugcccucca

SEQ ID NO: 1175078 - RNA, 22 nt, Human
acacuguucucugcccuccaag

SEQ ID NO: 1175079 - RNA, 23 nt, Human
acacuguucucugcccuccaaga

SEQ ID NO: 1175080 - RNA, 19 nt, Human
uaucccuacuguaauuugu

SEQ ID NO: 1175081 - RNA, 20 nt, Human
uaucccuacuguaauuugug

SEQ ID NO: 1175082 - RNA, 15 nt, Human
uauauuuauuacugu

SEQ ID NO: 1175083 - RNA, 19 nt, Human
uauauuuauuacuguaaga

SEQ ID NO: 1175084 - RNA, 20 nt, Human
uauauuuauuacuguaagaa

SEQ ID NO: 1175085 - RNA, 13 nt, Human
uaucucagggccu

SEQ ID NO: 1175086 - RNA, 15 nt, Human
uaucucagggccugg

SEQ ID NO: 1175087 - RNA, 21 nt, Human
acagagcaagugagacccugu

SEQ ID NO: 1175088 - RNA, 14 nt, Human
acagagcccacgcc

SEQ ID NO: 1175089 - RNA, 16 nt, Human
acagaguuguuacauu

SEQ ID NO: 1175090 - RNA, 17 nt, Human
acagaguuguuacauuu

SEQ ID NO: 1175091 - RNA, 18 nt, Human
acagaguuguuacauuuu

SEQ ID NO: 1175092 - RNA, 19 nt, Human
acagaguuguuacauuuuu

SEQ ID NO: 1175093 - RNA, 20 nt, Human
acagaguuguuacauuuuua

SEQ ID NO: 1175094 - RNA, 16 nt, Human
acagcaaggagauuua

SEQ ID NO: 1175095 - RNA, 21 nt, Human
acagcccgggcucugccuccc

SEQ ID NO: 1175096 - RNA, 22 nt, Human
acagcccgggcucugccuccca

SEQ ID NO: 1175097 - RNA, 23 nt, Human
acagcccgggcucugccucccau

SEQ ID NO: 1175098 - RNA, 20 nt, Human
acagcccuucuuuccacaga

SEQ ID NO: 1175099 - RNA, 21 nt, Human
acagcccuucuuuccacagaa

SEQ ID NO: 1175100 - RNA, 23 nt, Human
acagaugggugcuuggaggaagg

SEQ ID NO: 1175101 - RNA, 21 nt, Human
acagaguuguuacauuuuuaa

SEQ ID NO: 1175102 - RNA, 22 nt, Human
acagaguuguuacauuuuuaag

SEQ ID NO: 1175103 - RNA, 20 nt, Human
acagauagauauaugcucug

SEQ ID NO: 1175104 - RNA, 19 nt, Human
acauauauaacaaugcugu

SEQ ID NO: 1175105 - RNA, 14 nt, Human
acauagaauuaaca

SEQ ID NO: 1175106 - RNA, 18 nt, Human
acauagaauuaacacaug

SEQ ID NO: 1175107 - RNA, 14 nt, Human
acauauugauuucc

SEQ ID NO: 1175108 - RNA, 16 nt, Human
acauauugauuuccgu

SEQ ID NO: 1175109 - RNA, 18 nt, Human
acauauugauuuccguua

SEQ ID NO: 1175110 - RNA, 22 nt, Human
acauauugauuuccguuaaaau

SEQ ID NO: 1175111 - RNA, 23 nt, Human
acauauugauuuccguuaaaaua

SEQ ID NO: 1175112 - RNA, 13 nt, Human
acaucaacagaua

SEQ ID NO: 1175113 - RNA, 16 nt, Human
acaucaacaucuuggu

SEQ ID NO: 1175114 - RNA, 18 nt, Human
acaucaacaucuugguca

SEQ ID NO: 1175115 - RNA, 13 nt, Human
acaucuugcucug

SEQ ID NO: 1175116 - RNA, 14 nt, Human
acaucuugcucugc

SEQ ID NO: 1175117 - RNA, 18 nt, Human
acaucuugcucugcugac

SEQ ID NO: 1175118 - RNA, 19 nt, Human
acaucuugcucugcugaca

SEQ ID NO: 1175119 - RNA, 21 nt, Human
acaucuugcucugcugacaga

SEQ ID NO: 1175120 - RNA, 17 nt, Human
acaugaaaacacauuuu

SEQ ID NO: 1175121 - RNA, 18 nt, Human
acaugaaaacacauuuuu

SEQ ID NO: 1175122 - RNA, 19 nt, Human
acaugaaaacacauuuuuc

SEQ ID NO: 1175123 - RNA, 22 nt, Human
acaucuugcucugcugacagac

SEQ ID NO: 1175124 - RNA, 22 nt, Human
acaugaaaacacauuuuucuua

SEQ ID NO: 1175125 - RNA, 13 nt, Human
acauacuaaccag

SEQ ID NO: 1175126 - RNA, 21 nt, Human
acauacuaaccagcagaaaug

SEQ ID NO: 1175127 - RNA, 22 nt, Human
acauacuaaccagcagaaaugc

SEQ ID NO: 1175128 - RNA, 13 nt, Human
acauacucccauc

SEQ ID NO: 1175129 - RNA, 17 nt, Human
acauacucccaucugug

SEQ ID NO: 1175130 - RNA, 14 nt, Human
acauacucugcuua

SEQ ID NO: 1175131 - RNA, 16 nt, Human
acaguuuguuaguaug

SEQ ID NO: 1175132 - RNA, 20 nt, Human
acaguuuguuaguaugaggc

SEQ ID NO: 1175133 - RNA, 20 nt, Human
acaguugaaaaacagcugag

SEQ ID NO: 1175134 - RNA, 15 nt, Human
acaguugaaaaacag

SEQ ID NO: 1175135 - RNA, 16 nt, Human
acaguugaaaaacagc

SEQ ID NO: 1175136 - RNA, 23 nt, Human
uauuuccuauauuguuuucagug

SEQ ID NO: 1175137 - RNA, 22 nt, Human
uauuucccucaccuuucccauc

SEQ ID NO: 1175138 - RNA, 21 nt, Human
uaugaaauauuauguuaaaac

SEQ ID NO: 1175139 - RNA, 21 nt, Human
acauguccaagaagcccagga

SEQ ID NO: 1175140 - RNA, 12 nt, Human
acauucuguuaa

SEQ ID NO: 1175141 - RNA, 15 nt, Human
acauucuguuaauca

SEQ ID NO: 1175142 - RNA, 15 nt, Human
ucaaauuucuaaauc

SEQ ID NO: 1175143 - RNA, 16 nt, Human
ucaaauuucuaaaucu

SEQ ID NO: 1175144 - RNA, 17 nt, Human
ucaaauuucuaaaucuc

SEQ ID NO: 1175145 - RNA, 16 nt, Human
ucaacagguuuuccug

SEQ ID NO: 1175146 - RNA, 11 nt, Human
ucaaguauuau

SEQ ID NO: 1175147 - RNA, 15 nt, Human
ucaaguauuauaccu

SEQ ID NO: 1175148 - RNA, 16 nt, Human
ucaaguauuauaccuu

SEQ ID NO: 1175149 - RNA, 21 nt, Human
ucaaguauuauaccuuuuuua

SEQ ID NO: 1175150 - RNA, 23 nt, Human
ucaaguauuauaccuuuuuuaga

SEQ ID NO: 1175151 - RNA, 16 nt, Human
acaugaaguccaagca

SEQ ID NO: 1175152 - RNA, 18 nt, Human
ucaaauaacuaaaaggua

SEQ ID NO: 1175153 - RNA, 17 nt, Human
acaugagcaucaggcca

SEQ ID NO: 1175154 - RNA, 18 nt, Human
acaugagcaucaggccag

SEQ ID NO: 1175155 - RNA, 19 nt, Human
acaugagcaucaggccagg

SEQ ID NO: 1175156 - RNA, 19 nt, Human
acaugauccugcaauucca

SEQ ID NO: 1175157 - RNA, 15 nt, Human
acaugaucuucuuua

SEQ ID NO: 1175158 - RNA, 17 nt, Human
acaugaucuucuuuaua

SEQ ID NO: 1175159 - RNA, 19 nt, Human
acaugaucuucuuuauaau

SEQ ID NO: 1175160 - RNA, 20 nt, Human
acaugagcaucaggccaggc

SEQ ID NO: 1175161 - RNA, 14 nt, Human
ucaaagcugaaaug

SEQ ID NO: 1175162 - RNA, 16 nt, Human
ucaaaagcugggcagg

SEQ ID NO: 1175163 - RNA, 21 nt, Human
ucaaaauaugccccauucaac

SEQ ID NO: 1175164 - RNA, 18 nt, Human
ucaaaagaaagaaaauca

SEQ ID NO: 1175165 - RNA, 23 nt, Human
ucaagugaaaaaggaggaagaga

SEQ ID NO: 1175166 - RNA, 22 nt, Human
ucaaguccucuuuucugagagg

SEQ ID NO: 1175167 - RNA, 15 nt, Human
ucaagugaaaaagga

SEQ ID NO: 1175168 - RNA, 19 nt, Human
accaacauacucccaucug

SEQ ID NO: 1175169 - RNA, 21 nt, Human
accaacauacucccaucugug

SEQ ID NO: 1175170 - RNA, 22 nt, Human
accaacauacucccaucuguga

SEQ ID NO: 1175171 - RNA, 13 nt, Human
accaaucaugaau

SEQ ID NO: 1175172 - RNA, 15 nt, Human
accaaucaugaauua

SEQ ID NO: 1175173 - RNA, 15 nt, Human
accaauguucucucu

SEQ ID NO: 1175174 - RNA, 15 nt, Human
ucaauucuugccaaa

SEQ ID NO: 1175175 - RNA, 15 nt, Human
ucacaguucucuccu

SEQ ID NO: 1175176 - RNA, 12 nt, Human
ucacauaucugu

SEQ ID NO: 1175177 - RNA, 15 nt, Human
ucacauaucugucau

SEQ ID NO: 1175178 - RNA, 16 nt, Human
ucacaguucucuccuu

SEQ ID NO: 1175179 - RNA, 13 nt, Human
ucaccccagcccc

SEQ ID NO: 1175180 - RNA, 14 nt, Human
ucaccccagcccca

SEQ ID NO: 1175181 - RNA, 20 nt, Human
ucaccccagccccaaaacuc

SEQ ID NO: 1175182 - RNA, 15 nt, Human
ucaccccggccaccu

SEQ ID NO: 1175183 - RNA, 21 nt, Human
accacugcacuccagccuggg

SEQ ID NO: 1175184 - RNA, 22 nt, Human
ucaccccggccaccugcggugc

SEQ ID NO: 1175185 - RNA, 13 nt, Human
accacugcagaag

SEQ ID NO: 1175186 - RNA, 17 nt, Human
ucaccccggccaccugc

SEQ ID NO: 1175187 - RNA, 18 nt, Human
ucaccccggccaccugcg

SEQ ID NO: 1175188 - RNA, 20 nt, Human
accacugcacuccagccugg

SEQ ID NO: 1175189 - RNA, 18 nt, Human
accacuuguguuuugcaa

SEQ ID NO: 1175190 - RNA, 15 nt, Human
accacuuuuguucuu

SEQ ID NO: 1175191 - RNA, 16 nt, Human
accacuuuuguucuug

SEQ ID NO: 1175192 - RNA, 21 nt, Human
accacuuuuguucuugguuug

SEQ ID NO: 1175193 - RNA, 22 nt, Human
accacuuuuguucuugguuugu

SEQ ID NO: 1175194 - RNA, 14 nt, Human
accagacaccuuga

SEQ ID NO: 1175195 - RNA, 17 nt, Human
accagacaccuugacag

SEQ ID NO: 1175196 - RNA, 14 nt, Human
accagagcccaccu

SEQ ID NO: 1175197 - RNA, 16 nt, Human
accagagcccaccuug

SEQ ID NO: 1175198 - RNA, 17 nt, Human
accagagcccaccuugg

SEQ ID NO: 1175199 - RNA, 14 nt, Human
accagggacugagg

SEQ ID NO: 1175200 - RNA, 15 nt, Human
ucaccucucccuugg

SEQ ID NO: 1175201 - RNA, 16 nt, Human
ucaccugaagacucau

SEQ ID NO: 1175202 - RNA, 13 nt, Human
ucaccugccccuc

SEQ ID NO: 1175203 - RNA, 15 nt, Human
ucaccugccccucaa

SEQ ID NO: 1175204 - RNA, 16 nt, Human
ucaccugccccucaac

SEQ ID NO: 1175205 - RNA, 18 nt, Human
ucacuauguugcccaggc

SEQ ID NO: 1175206 - RNA, 19 nt, Human
ucacuauguugcccaggca

SEQ ID NO: 1175207 - RNA, 20 nt, Human
ucacuauguugcccaggcag

SEQ ID NO: 1175208 - RNA, 21 nt, Human
ucacucuuauugcccacgcug

SEQ ID NO: 1175209 - RNA, 23 nt, Human
ucacucuuauugcccacgcugga

SEQ ID NO: 1175210 - RNA, 22 nt, Human
accauggucggaaaacaugcua

SEQ ID NO: 1175211 - RNA, 23 nt, Human
accauuucuugagguaaaagcau

SEQ ID NO: 1175212 - RNA, 10 nt, Human
acccacugcu

SEQ ID NO: 1175213 - RNA, 11 nt, Human
acccacugcuc

SEQ ID NO: 1175214 - RNA, 13 nt, Human
acccacugcucug

SEQ ID NO: 1175215 - RNA, 14 nt, Human
acccacugcucugg

SEQ ID NO: 1175216 - RNA, 15 nt, Human
acccacugcucuggu

SEQ ID NO: 1175217 - RNA, 11 nt, Human
acccacugcuu

SEQ ID NO: 1175218 - RNA, 19 nt, Human
ucagaaguuucugccgcag

SEQ ID NO: 1175219 - RNA, 22 nt, Human
ucagaaguuucugccgcagccc

SEQ ID NO: 1175220 - RNA, 18 nt, Human
ucagaaucucaaauaacu

SEQ ID NO: 1175221 - RNA, 19 nt, Human
ucagaaucucaaauaacua

SEQ ID NO: 1175222 - RNA, 23 nt, Human
ucagaaguuucugccgcagcccu

SEQ ID NO: 1175223 - RNA, 17 nt, Human
ucagagacuccugcagg

SEQ ID NO: 1175224 - RNA, 20 nt, Human
ucagagacuccugcaggcag

SEQ ID NO: 1175225 - RNA, 21 nt, Human
ucagagacuccugcaggcagc

SEQ ID NO: 1175226 - RNA, 22 nt, Human
ucagagacuccugcaggcagcc

SEQ ID NO: 1175227 - RNA, 16 nt, Human
ucagagagggugggag

SEQ ID NO: 1175228 - RNA, 21 nt, Human
ucagagagggugggagugggc

SEQ ID NO: 1175229 - RNA, 23 nt, Human
ucagagagggugggagugggccc

SEQ ID NO: 1175230 - RNA, 12 nt, Human
ucagagccugca

SEQ ID NO: 1175231 - RNA, 13 nt, Human
ucagagccugcag

SEQ ID NO: 1175232 - RNA, 14 nt, Human
ucagagccugcagu

SEQ ID NO: 1175233 - RNA, 15 nt, Human
ucagagccugcaguu

SEQ ID NO: 1175234 - RNA, 18 nt, Human
ucagagccugcaguuauu

SEQ ID NO: 1175235 - RNA, 14 nt, Human
ucagcggggacagc

SEQ ID NO: 1175236 - RNA, 15 nt, Human
ucagcggggacagcu

SEQ ID NO: 1175237 - RNA, 20 nt, Human
ucagcuuguaaauagcucag

SEQ ID NO: 1175238 - RNA, 13 nt, Human
ucaggaaagagaa

SEQ ID NO: 1175239 - RNA, 19 nt, Human
ucaggaaagagaacuucca

SEQ ID NO: 1175240 - RNA, 12 nt, Human
acccccacccaa

SEQ ID NO: 1175241 - RNA, 14 nt, Human
accccuucgcuccu

SEQ ID NO: 1175242 - RNA, 15 nt, Human
accccuucgcuccug

SEQ ID NO: 1175243 - RNA, 16 nt, Human
accccuucgcuccugu

SEQ ID NO: 1175244 - RNA, 22 nt, Human
ucagccaagaauucuuaaauau

SEQ ID NO: 1175245 - RNA, 23 nt, Human
ucagccguguaaccauggaccca

SEQ ID NO: 1175246 - RNA, 19 nt, Human
acccagcgagcccuggugg

SEQ ID NO: 1175247 - RNA, 23 nt, Human
acccagcgagcccugguggcagu

SEQ ID NO: 1175248 - RNA, 24 nt, Human
acccagcgagcccugguggcagug

SEQ ID NO: 1175249 - RNA, 12 nt, Human
acccccacacac

SEQ ID NO: 1175250 - RNA, 13 nt, Human
acccccacacaca

SEQ ID NO: 1175251 - RNA, 14 nt, Human
acccccacacacac

SEQ ID NO: 1175252 - RNA, 15 nt, Human
acccccacacacaca

SEQ ID NO: 1175253 - RNA, 20 nt, Human
acccccacacacacacacau

SEQ ID NO: 1175254 - RNA, 21 nt, Human
acccccacacacacacacaug

SEQ ID NO: 1175255 - RNA, 21 nt, Human
accuagggugauauuaaccag

SEQ ID NO: 1175256 - RNA, 13 nt, Human
ucaggaagcucag

SEQ ID NO: 1175257 - RNA, 14 nt, Human
ucaggaagcucagg

SEQ ID NO: 1175258 - RNA, 15 nt, Human
ucaggaagcucaggg

SEQ ID NO: 1175259 - RNA, 16 nt, Human
ucaggaagcucagggc

SEQ ID NO: 1175260 - RNA, 13 nt, Human
accuccugccucg

SEQ ID NO: 1175261 - RNA, 23 nt, Human
accuccugccucgaacuggcugc

SEQ ID NO: 1175262 - RNA, 11 nt, Human
accuccugcug

SEQ ID NO: 1175263 - RNA, 12 nt, Human
accuccugcugg

SEQ ID NO: 1175264 - RNA, 13 nt, Human
accuccugcuggg

SEQ ID NO: 1175265 - RNA, 15 nt, Human
ucauccuaagcuauu

SEQ ID NO: 1175266 - RNA, 18 nt, Human
ucauccucauacccaccc

SEQ ID NO: 1175267 - RNA, 13 nt, Human
ucauccuccucag

SEQ ID NO: 1175268 - RNA, 19 nt, Human
ucauccuccucagaucuuc

SEQ ID NO: 1175269 - RNA, 14 nt, Human
ucauccuucuggaa

SEQ ID NO: 1175270 - RNA, 22 nt, Human
ucauccuucuggaauaaggaga

SEQ ID NO: 1175271 - RNA, 16 nt, Human
ucaugaauuaguuuua

SEQ ID NO: 1175272 - RNA, 21 nt, Human
ucaugaauuaguuuuauaugc

SEQ ID NO: 1175273 - RNA, 12 nt, Human
ucauucuucugu

SEQ ID NO: 1175274 - RNA, 12 nt, Human
ucauugaaaucu

SEQ ID NO: 1175275 - RNA, 13 nt, Human
ucauugaaaucuu

SEQ ID NO: 1175276 - RNA, 22 nt, Human
ucauugaaaucuuuuugcuuug

SEQ ID NO: 1175277 - RNA, 12 nt, Human
ucauugaccuga

SEQ ID NO: 1175278 - RNA, 14 nt, Human
ucauugaccugagg

SEQ ID NO: 1175279 - RNA, 15 nt, Human
ucauugaccugaggc

SEQ ID NO: 1175280 - RNA, 19 nt, Human
ucauugaccugaggcccuu

SEQ ID NO: 1175281 - RNA, 13 nt, Human
accuccugggcua

SEQ ID NO: 1175282 - RNA, 14 nt, Human
accuccugcugggc

SEQ ID NO: 1175283 - RNA, 16 nt, Human
accuccugcugggcag

SEQ ID NO: 1175284 - RNA, 19 nt, Human
accucggugccuuccucuu

SEQ ID NO: 1175285 - RNA, 14 nt, Human
accugaggcccuuc

SEQ ID NO: 1175286 - RNA, 15 nt, Human
accugaggcccuucu

SEQ ID NO: 1175287 - RNA, 16 nt, Human
accugaggcccuucuc

SEQ ID NO: 1175288 - RNA, 20 nt, Human
accugaggcccuucucucca

SEQ ID NO: 1175289 - RNA, 21 nt, Human
accugaggcccuucucuccag

SEQ ID NO: 1175290 - RNA, 22 nt, Human
accugaggcccuucucuccagc

SEQ ID NO: 1175291 - RNA, 15 nt, Human
accugauugugucuc

SEQ ID NO: 1175292 - RNA, 17 nt, Human
accugauugugucucuu

SEQ ID NO: 1175293 - RNA, 18 nt, Human
accugauugugucucuug

SEQ ID NO: 1175294 - RNA, 21 nt, Human
uccaagcuggucccacucagu

SEQ ID NO: 1175295 - RNA, 12 nt, Human
uccaagaagccc

SEQ ID NO: 1175296 - RNA, 20 nt, Human
uccaagcuggucccacucag

SEQ ID NO: 1175297 - RNA, 12 nt, Human
accugccaggaa

SEQ ID NO: 1175298 - RNA, 14 nt, Human
accugccaggaagc

SEQ ID NO: 1175299 - RNA, 15 nt, Human
accugccaggaagcc

SEQ ID NO: 1175300 - RNA, 14 nt, Human
uccaacccucauca

SEQ ID NO: 1175301 - RNA, 16 nt, Human
uccaacccucaucacc

SEQ ID NO: 1175302 - RNA, 17 nt, Human
uccaacccucaucacca

SEQ ID NO: 1175303 - RNA, 23 nt, Human
uccaacccucaucaccaacgucu

SEQ ID NO: 1175304 - RNA, 19 nt, Human
accuguuucugcagccacu

SEQ ID NO: 1175305 - RNA, 18 nt, Human
accuuagacagucccugc

SEQ ID NO: 1175306 - RNA, 19 nt, Human
accuuagacagucccugcc

SEQ ID NO: 1175307 - RNA, 20 nt, Human
accuuagacagucccugcca

SEQ ID NO: 1175308 - RNA, 18 nt, Human
accuggccucugcacucc

SEQ ID NO: 1175309 - RNA, 20 nt, Human
accuggccucugcacucccc

SEQ ID NO: 1175310 - RNA, 23 nt, Human
accuggccucugcacuccccugc

SEQ ID NO: 1175311 - RNA, 18 nt, Human
uccacccaccucagccuc

SEQ ID NO: 1175312 - RNA, 19 nt, Human
uccacccaccucagccucc

SEQ ID NO: 1175313 - RNA, 12 nt, Human
uccacccaggag

SEQ ID NO: 1175314 - RNA, 14 nt, Human
uccacccaggagcc

SEQ ID NO: 1175315 - RNA, 15 nt, Human
uccacccaggagccc

SEQ ID NO: 1175316 - RNA, 17 nt, Human
uccacccaggagccccg

SEQ ID NO: 1175317 - RNA, 14 nt, Human
accuggccucugca

SEQ ID NO: 1175318 - RNA, 16 nt, Human
accuggccucugcacu

SEQ ID NO: 1175319 - RNA, 17 nt, Human
accuggccucugcacuc

SEQ ID NO: 1175320 - RNA, 20 nt, Human
accuuuuggucuggagggaa

SEQ ID NO: 1175321 - RNA, 14 nt, Human
accuuuugagugcc

SEQ ID NO: 1175322 - RNA, 17 nt, Human
accuuuugagugccuua

SEQ ID NO: 1175323 - RNA, 20 nt, Human
accuuuugagugccuuacac

SEQ ID NO: 1175324 - RNA, 20 nt, Human
uccagaauuucccaaagcag

SEQ ID NO: 1175325 - RNA, 22 nt, Human
uccagaauuucccaaagcagug

SEQ ID NO: 1175326 - RNA, 13 nt, Human
uccagacacaugu

SEQ ID NO: 1175327 - RNA, 15 nt, Human
uccagacccggcugc

SEQ ID NO: 1175328 - RNA, 18 nt, Human
uccagacccggcugcgug

SEQ ID NO: 1175329 - RNA, 19 nt, Human
uccagacccggcugcgugg

SEQ ID NO: 1175330 - RNA, 12 nt, Human
uccagccccugg

SEQ ID NO: 1175331 - RNA, 13 nt, Human
uccagccccugga

SEQ ID NO: 1175332 - RNA, 14 nt, Human
uccagccccuggau

SEQ ID NO: 1175333 - RNA, 16 nt, Human
acgagcaggcuucuuc

SEQ ID NO: 1175334 - RNA, 19 nt, Human
acgccagauucuuuccuga

SEQ ID NO: 1175335 - RNA, 21 nt, Human
uccaggcuguaucccaugagc

SEQ ID NO: 1175336 - RNA, 19 nt, Human
accuuuuuuauacauaaac

SEQ ID NO: 1175337 - RNA, 20 nt, Human
accuuuuuuauacauaaaca

SEQ ID NO: 1175338 - RNA, 21 nt, Human
accuuuuuuauacauaaacaa

SEQ ID NO: 1175339 - RNA, 22 nt, Human
accuuuuuuauacauaaacaag

SEQ ID NO: 1175340 - RNA, 14 nt, Human
acgagaaaacaaua

SEQ ID NO: 1175341 - RNA, 20 nt, Human
acgggaggguaaggcugugg

SEQ ID NO: 1175342 - RNA, 15 nt, Human
ucccaccccacacac

SEQ ID NO: 1175343 - RNA, 20 nt, Human
ucccaccccacacacgccag

SEQ ID NO: 1175344 - RNA, 15 nt, Human
acgguuuuacugcag

SEQ ID NO: 1175345 - RNA, 17 nt, Human
acgguuuuacugcagcu

SEQ ID NO: 1175346 - RNA, 22 nt, Human
acgccagauucuuuccugaggc

SEQ ID NO: 1175347 - RNA, 23 nt, Human
acgccagauucuuuccugaggcu

SEQ ID NO: 1175348 - RNA, 20 nt, Human
uccauccugaggcuccacuu

SEQ ID NO: 1175349 - RNA, 21 nt, Human
uccauccugaggcuccacuug

SEQ ID NO: 1175350 - RNA, 13 nt, Human
uccaugaagaugu

SEQ ID NO: 1175351 - RNA, 21 nt, Human
uccaugaagauguagaggaga

SEQ ID NO: 1175352 - RNA, 22 nt, Human
uccaugaagauguagaggagaa

SEQ ID NO: 1175353 - RNA, 18 nt, Human
ucccaaacccuucagugc

SEQ ID NO: 1175354 - RNA, 16 nt, Human
ucccaaagcagugcau

SEQ ID NO: 1175355 - RNA, 17 nt, Human
ucccaaagcagugcaug

SEQ ID NO: 1175356 - RNA, 18 nt, Human
ucccaaagcagugcaugc

SEQ ID NO: 1175357 - RNA, 21 nt, Human
ucccaaagcagugcaugcugu

SEQ ID NO: 1175358 - RNA, 13 nt, Human
ucccaaagugcug

SEQ ID NO: 1175359 - RNA, 14 nt, Human
ucccaaagugcugg

SEQ ID NO: 1175360 - RNA, 22 nt, Human
uccccaccgcagacaggaccag

SEQ ID NO: 1175361 - RNA, 12 nt, Human
uccccacccuga

SEQ ID NO: 1175362 - RNA, 17 nt, Human
uccccaccgcagacagg

SEQ ID NO: 1175363 - RNA, 18 nt, Human
uccccaccgcagacagga

SEQ ID NO: 1175364 - RNA, 21 nt, Human
uccccaccgcagacaggacca

SEQ ID NO: 1175365 - RNA, 20 nt, Human
ucccagcugugcucuggaca

SEQ ID NO: 1175366 - RNA, 22 nt, Human
ucccauaugccugggcagaagg

SEQ ID NO: 1175367 - RNA, 15 nt, Human
ucccaucacccgcua

SEQ ID NO: 1175368 - RNA, 12 nt, Human
acuaaccacgcu

SEQ ID NO: 1175369 - RNA, 11 nt, Human
acuacaggcac

SEQ ID NO: 1175370 - RNA, 15 nt, Human
acuacaggcacccac

SEQ ID NO: 1175371 - RNA, 23 nt, Human
acuacaggugugagucaccaagc

SEQ ID NO: 1175372 - RNA, 13 nt, Human
acuacaguuuguu

SEQ ID NO: 1175373 - RNA, 14 nt, Human
acuacaguuuguua

SEQ ID NO: 1175374 - RNA, 15 nt, Human
acuacaguuuguuag

SEQ ID NO: 1175375 - RNA, 12 nt, Human
acuacauucugu

SEQ ID NO: 1175376 - RNA, 13 nt, Human
acuacauucuguu

SEQ ID NO: 1175377 - RNA, 14 nt, Human
acuacauucuguua

SEQ ID NO: 1175378 - RNA, 15 nt, Human
acuacauucuguuaa

SEQ ID NO: 1175379 - RNA, 12 nt, Human
ucccagccccaa

SEQ ID NO: 1175380 - RNA, 17 nt, Human
ucccagcugugcucugg

SEQ ID NO: 1175381 - RNA, 20 nt, Human
ucccgaguagcugggacuac

SEQ ID NO: 1175382 - RNA, 18 nt, Human
ucccgaguagcugggacu

SEQ ID NO: 1175383 - RNA, 16 nt, Human
ucccgaguagcuggga

SEQ ID NO: 1175384 - RNA, 17 nt, Human
ucccgaguagcugggac

SEQ ID NO: 1175385 - RNA, 20 nt, Human
ucccgaauagcugggacuac

SEQ ID NO: 1175386 - RNA, 15 nt, Human
ucccgaguagcuggg

SEQ ID NO: 1175387 - RNA, 12 nt, Human
acucaccccagc

SEQ ID NO: 1175388 - RNA, 17 nt, Human
acuacucccccaggugg

SEQ ID NO: 1175389 - RNA, 18 nt, Human
ucccucuuucccucccuu

SEQ ID NO: 1175390 - RNA, 20 nt, Human
ucccucuuucccucccuucc

SEQ ID NO: 1175391 - RNA, 21 nt, Human
ucccucuuucccucccuuccu

SEQ ID NO: 1175392 - RNA, 11 nt, Human
ucccugaaggc

SEQ ID NO: 1175393 - RNA, 15 nt, Human
ucccugaaggccccg

SEQ ID NO: 1175394 - RNA, 16 nt, Human
ucccugaaggccccgc

SEQ ID NO: 1175395 - RNA, 17 nt, Human
ucccugaaggccccgcc

SEQ ID NO: 1175396 - RNA, 23 nt, Human
acuccagaauuucccaaagcagu

SEQ ID NO: 1175397 - RNA, 12 nt, Human
acuccagccugg

SEQ ID NO: 1175398 - RNA, 13 nt, Human
acuccagccuggg

SEQ ID NO: 1175399 - RNA, 18 nt, Human
acuccugcaggcagccag

SEQ ID NO: 1175400 - RNA, 19 nt, Human
acuccugcaggcagccagg

SEQ ID NO: 1175401 - RNA, 15 nt, Human
acucauucuucugua

SEQ ID NO: 1175402 - RNA, 14 nt, Human
acucauugaccuga

SEQ ID NO: 1175403 - RNA, 15 nt, Human
acucauugaccugag

SEQ ID NO: 1175404 - RNA, 15 nt, Human
acuccagaauuuccc

SEQ ID NO: 1175405 - RNA, 17 nt, Human
acuccagaauuucccaa

SEQ ID NO: 1175406 - RNA, 16 nt, Human
uccuagaaauucccca

SEQ ID NO: 1175407 - RNA, 17 nt, Human
uccggucccugucccag

SEQ ID NO: 1175408 - RNA, 17 nt, Human
ucccuuuuuuggcugcu

SEQ ID NO: 1175409 - RNA, 12 nt, Human
ucccuuuuccuu

SEQ ID NO: 1175410 - RNA, 21 nt, Human
acuccugcaggcagccaggcc

SEQ ID NO: 1175411 - RNA, 15 nt, Human
ucccugguggcagcu

SEQ ID NO: 1175412 - RNA, 12 nt, Human
ucccugucccag

SEQ ID NO: 1175413 - RNA, 16 nt, Human
ucccugguggcagcuc

SEQ ID NO: 1175414 - RNA, 17 nt, Human
ucccuuacgugaguccu

SEQ ID NO: 1175415 - RNA, 20 nt, Human
acugcaucaagaugugacau

SEQ ID NO: 1175416 - RNA, 22 nt, Human
acugcaucaagaugugacaugu

SEQ ID NO: 1175417 - RNA, 15 nt, Human
acugcauguuuguga

SEQ ID NO: 1175418 - RNA, 16 nt, Human
acugcauguuugugau

SEQ ID NO: 1175419 - RNA, 21 nt, Human
uccuagaaauuccccacccug

SEQ ID NO: 1175420 - RNA, 22 nt, Human
uccuagaaauuccccacccuga

SEQ ID NO: 1175421 - RNA, 16 nt, Human
acugcauaugaaagga

SEQ ID NO: 1175422 - RNA, 15 nt, Human
acugcauuauauuua

SEQ ID NO: 1175423 - RNA, 14 nt, Human
acugcauuauauuu

SEQ ID NO: 1175424 - RNA, 18 nt, Human
acugcuuaacuucacaua

SEQ ID NO: 1175425 - RNA, 13 nt, Human
acugccuucucaa

SEQ ID NO: 1175426 - RNA, 19 nt, Human
acugccuucucaacuccaa

SEQ ID NO: 1175427 - RNA, 20 nt, Human
acugccuucucaacuccaaa

SEQ ID NO: 1175428 - RNA, 20 nt, Human
acugcuuaacuucacauauu

SEQ ID NO: 1175429 - RNA, 17 nt, Human
acugcuuccagugaggc

SEQ ID NO: 1175430 - RNA, 14 nt, Human
acugcuuuuggucu

SEQ ID NO: 1175431 - RNA, 15 nt, Human
acuggauuaaacuua

SEQ ID NO: 1175432 - RNA, 22 nt, Human
acuggauuaaacuuaaucuaaa

SEQ ID NO: 1175433 - RNA, 15 nt, Human
uccuucagugccuua

SEQ ID NO: 1175434 - RNA, 16 nt, Human
uccuucagugccuuau

SEQ ID NO: 1175435 - RNA, 17 nt, Human
uccuucagugccuuaug

SEQ ID NO: 1175436 - RNA, 20 nt, Human
uccuucagugccuuauggaa

SEQ ID NO: 1175437 - RNA, 14 nt, Human
uccuuguguuacua

SEQ ID NO: 1175438 - RNA, 23 nt, Human
uccuuguguuacuaaguuuuuau

SEQ ID NO: 1175439 - RNA, 15 nt, Human
uccuuuagcgcccag

SEQ ID NO: 1175440 - RNA, 19 nt, Human
uccuuuagcgcccaguugg

SEQ ID NO: 1175441 - RNA, 16 nt, Human
ucgagcaugccuggau

SEQ ID NO: 1175442 - RNA, 18 nt, Human
ucgagcaugccuggaugg

SEQ ID NO: 1175443 - RNA, 13 nt, Human
ucgaggacaggga

SEQ ID NO: 1175444 - RNA, 16 nt, Human
ucgcgacaaugcaaac

SEQ ID NO: 1175445 - RNA, 19 nt, Human
ucgcgacaaugcaaaccau

SEQ ID NO: 1175446 - RNA, 18 nt, Human
ucgagaaacagccugugu

SEQ ID NO: 1175447 - RNA, 22 nt, Human
uccuuuagcgcccaguugggug

SEQ ID NO: 1175448 - RNA, 23 nt, Human
uccuuuagcgcccaguugggugg

SEQ ID NO: 1175449 - RNA, 19 nt, Human
ucgggaggucgaggcagga

SEQ ID NO: 1175450 - RNA, 21 nt, Human
ucgggaggucgaggcaggagg

SEQ ID NO: 1175451 - RNA, 11 nt, Human
ucgggcaugac

SEQ ID NO: 1175452 - RNA, 12 nt, Human
ucgggcaugaca

SEQ ID NO: 1175453 - RNA, 18 nt, Human
acuguggguagacacaca

SEQ ID NO: 1175454 - RNA, 17 nt, Human
acuguccuacccacccu

SEQ ID NO: 1175455 - RNA, 18 nt, Human
acuguccuacccacccuc

SEQ ID NO: 1175456 - RNA, 23 nt, Human
acuguccuacccacccuccuuuc

SEQ ID NO: 1175457 - RNA, 18 nt, Human
acugggacaggggagaac

SEQ ID NO: 1175458 - RNA, 17 nt, Human
acuuaaucuaaauggaa

SEQ ID NO: 1175459 - RNA, 13 nt, Human
acuuaaucuaaau

SEQ ID NO: 1175460 - RNA, 15 nt, Human
acuuaaucuaaaugg

SEQ ID NO: 1175461 - RNA, 16 nt, Human
acuuaaucuaaaugga

SEQ ID NO: 1175462 - RNA, 13 nt, Human
acuguugcccagg

SEQ ID NO: 1175463 - RNA, 14 nt, Human
acuguugcccaggc

SEQ ID NO: 1175464 - RNA, 17 nt, Human
acuguugcccaggcugg

SEQ ID NO: 1175465 - RNA, 18 nt, Human
acuguugcccaggcuggc

SEQ ID NO: 1175466 - RNA, 16 nt, Human
acuuaaauaaugugaa

SEQ ID NO: 1175467 - RNA, 17 nt, Human
acuuaaauaaugugaaa

SEQ ID NO: 1175468 - RNA, 18 nt, Human
acuuaaauaaugugaaac

SEQ ID NO: 1175469 - RNA, 20 nt, Human
acuuaaauaaugugaaacug

SEQ ID NO: 1175470 - RNA, 14 nt, Human
acuguucucugccc

SEQ ID NO: 1175471 - RNA, 15 nt, Human
acuguucucugcccu

SEQ ID NO: 1175472 - RNA, 20 nt, Human
acuguucucugcccuccaag

SEQ ID NO: 1175473 - RNA, 21 nt, Human
acuguucucugcccuccaaga

SEQ ID NO: 1175474 - RNA, 20 nt, Human
ucuaaagccauuguaguccu

SEQ ID NO: 1175475 - RNA, 13 nt, Human
ucuaaagcugcca

SEQ ID NO: 1175476 - RNA, 14 nt, Human
ucuaaagcugccag

SEQ ID NO: 1175477 - RNA, 15 nt, Human
ucuaaagcugccagc

SEQ ID NO: 1175478 - RNA, 16 nt, Human
ucuaaagcugccagcc

SEQ ID NO: 1175479 - RNA, 11 nt, Human
acuucagcuga

SEQ ID NO: 1175480 - RNA, 16 nt, Human
acuucagcugacuuuu

SEQ ID NO: 1175481 - RNA, 11 nt, Human
ucucacuccuu

SEQ ID NO: 1175482 - RNA, 13 nt, Human
ucucacuccuuga

SEQ ID NO: 1175483 - RNA, 16 nt, Human
ucucacuauguugccc

SEQ ID NO: 1175484 - RNA, 12 nt, Human
ucucacucuguc

SEQ ID NO: 1175485 - RNA, 16 nt, Human
ucucacucugucgccc

SEQ ID NO: 1175486 - RNA, 14 nt, Human
acuucuccacccug

SEQ ID NO: 1175487 - RNA, 15 nt, Human
acuucuccacccugc

SEQ ID NO: 1175488 - RNA, 16 nt, Human
acuucuccacccugcu

SEQ ID NO: 1175489 - RNA, 18 nt, Human
acuucuccacccugcucu

SEQ ID NO: 1175490 - RNA, 21 nt, Human
acuugaacccauauuuguaca

SEQ ID NO: 1175491 - RNA, 19 nt, Human
acuugaacccgggaggcag

SEQ ID NO: 1175492 - RNA, 20 nt, Human
acuugaacccgggaggcaga

SEQ ID NO: 1175493 - RNA, 21 nt, Human
acuugaacccgggaggcagag

SEQ ID NO: 1175494 - RNA, 19 nt, Human
acuugagcccagagugaac

SEQ ID NO: 1175495 - RNA, 16 nt, Human
acuuguggacacagcu

SEQ ID NO: 1175496 - RNA, 17 nt, Human
acuuguggacacagcuc

SEQ ID NO: 1175497 - RNA, 18 nt, Human
acuuguggacacagcucu

SEQ ID NO: 1175498 - RNA, 12 nt, Human
ucucagggccug

SEQ ID NO: 1175499 - RNA, 13 nt, Human
ucucagggccugg

SEQ ID NO: 1175500 - RNA, 14 nt, Human
ucucagggccuggu

SEQ ID NO: 1175501 - RNA, 15 nt, Human
ucucagggccugguc

SEQ ID NO: 1175502 - RNA, 19 nt, Human
ucucagggccuggucguuu

SEQ ID NO: 1175503 - RNA, 17 nt, Human
ucuccaaaauaaaacuu

SEQ ID NO: 1175504 - RNA, 19 nt, Human
ucuccaaaauaaaacuuuu

SEQ ID NO: 1175505 - RNA, 22 nt, Human
ucuccaaaauaaaacuuuuuaa

SEQ ID NO: 1175506 - RNA, 15 nt, Human
ucuccaagcaggaca

SEQ ID NO: 1175507 - RNA, 16 nt, Human
ucuccaggcuguaucc

SEQ ID NO: 1175508 - RNA, 16 nt, Human
ucuccauguuugaugu

SEQ ID NO: 1175509 - RNA, 21 nt, Human
ucuccuccuuuucacaguucu

SEQ ID NO: 1175510 - RNA, 16 nt, Human
acuuguguuuugcaag

SEQ ID NO: 1175511 - RNA, 17 nt, Human
acuuucuagccagagga

SEQ ID NO: 1175512 - RNA, 18 nt, Human
ucugauucccaagcucug

SEQ ID NO: 1175513 - RNA, 18 nt, Human
ucugcacuccccugcugg

SEQ ID NO: 1175514 - RNA, 19 nt, Human
ucugcacuccccugcuggg

SEQ ID NO: 1175515 - RNA, 23 nt, Human
ucugagacucgcgacaaugcaaa

SEQ ID NO: 1175516 - RNA, 20 nt, Human
ucugcacuccccugcugggu

SEQ ID NO: 1175517 - RNA, 22 nt, Human
ucugcacuccccugcugggugu

SEQ ID NO: 1175518 - RNA, 12 nt, Human
ucugacacacag

SEQ ID NO: 1175519 - RNA, 14 nt, Human
agaaaugaaagcag

SEQ ID NO: 1175520 - RNA, 12 nt, Human
ucugaagaagau

SEQ ID NO: 1175521 - RNA, 14 nt, Human
agaaagaaaaucag

SEQ ID NO: 1175522 - RNA, 14 nt, Human
agaaauauaauuga

SEQ ID NO: 1175523 - RNA, 19 nt, Human
agaaauaucugaaaaugua

SEQ ID NO: 1175524 - RNA, 20 nt, Human
agaaauaucugaaaauguau

SEQ ID NO: 1175525 - RNA, 15 nt, Human
acuuugaccucugca

SEQ ID NO: 1175526 - RNA, 16 nt, Human
acuuugaccucugcag

SEQ ID NO: 1175527 - RNA, 18 nt, Human
acuuugaccucugcagca

SEQ ID NO: 1175528 - RNA, 13 nt, Human
ucucucacuccuu

SEQ ID NO: 1175529 - RNA, 15 nt, Human
ucucucacuccuuga

SEQ ID NO: 1175530 - RNA, 17 nt, Human
ucucuccagccccugga

SEQ ID NO: 1175531 - RNA, 18 nt, Human
ucucuccagccccuggau

SEQ ID NO: 1175532 - RNA, 19 nt, Human
ucucuccagccccuggaug

SEQ ID NO: 1175533 - RNA, 14 nt, Human
ucucuccuguaccu

SEQ ID NO: 1175534 - RNA, 16 nt, Human
ucucuccuguaccucu

SEQ ID NO: 1175535 - RNA, 17 nt, Human
ucucuccuguaccucuu

SEQ ID NO: 1175536 - RNA, 15 nt, Human
ucucugcccuccaag

SEQ ID NO: 1175537 - RNA, 16 nt, Human
ucucugcccuccaaga

SEQ ID NO: 1175538 - RNA, 17 nt, Human
ucucugcccuccaagac

SEQ ID NO: 1175539 - RNA, 12 nt, Human
ucucuggccuuc

SEQ ID NO: 1175540 - RNA, 22 nt, Human
ucucuggccuucggccuccauc

SEQ ID NO: 1175541 - RNA, 23 nt, Human
ucucuggccuucggccuccaucc

SEQ ID NO: 1175542 - RNA, 18 nt, Human
ucucuugagccugggagg

SEQ ID NO: 1175543 - RNA, 13 nt, Human
ucucuggccuucg

SEQ ID NO: 1175544 - RNA, 14 nt, Human
ucucuugauucaua

SEQ ID NO: 1175545 - RNA, 16 nt, Human
ucucuugauucauaau

SEQ ID NO: 1175546 - RNA, 16 nt, Human
ucucuugguccugcug

SEQ ID NO: 1175547 - RNA, 20 nt, Human
ucucuuuaaugucacaggca

SEQ ID NO: 1175548 - RNA, 21 nt, Human
ucucuuuaaugucacaggcag

SEQ ID NO: 1175549 - RNA, 13 nt, Human
agaaaaagaaaaa

SEQ ID NO: 1175550 - RNA, 17 nt, Human
agaaaaaggaugcacag

SEQ ID NO: 1175551 - RNA, 18 nt, Human
agaaaaaggaugcacaga

SEQ ID NO: 1175552 - RNA, 20 nt, Human
agaauuauaauuaguuccuc

SEQ ID NO: 1175553 - RNA, 20 nt, Human
agaauucucagaaucucaaa

SEQ ID NO: 1175554 - RNA, 14 nt, Human
agaauucucuaguu

SEQ ID NO: 1175555 - RNA, 18 nt, Human
agaauucucuaguuugau

SEQ ID NO: 1175556 - RNA, 23 nt, Human
agaaccccaggguccuguagccc

SEQ ID NO: 1175557 - RNA, 21 nt, Human
agaauguguuuaaacuugguu

SEQ ID NO: 1175558 - RNA, 16 nt, Human
ucuguuuagauaauac

SEQ ID NO: 1175559 - RNA, 19 nt, Human
ucuguuuagauaauacacc

SEQ ID NO: 1175560 - RNA, 23 nt, Human
ucuguuuagauaauacaccacua

SEQ ID NO: 1175561 - RNA, 15 nt, Human
agacagcugccuggg

SEQ ID NO: 1175562 - RNA, 16 nt, Human
agacagcugccuggga

SEQ ID NO: 1175563 - RNA, 12 nt, Human
agacagucccug

SEQ ID NO: 1175564 - RNA, 13 nt, Human
agacagucccugc

SEQ ID NO: 1175565 - RNA, 14 nt, Human
agacagucccugcc

SEQ ID NO: 1175566 - RNA, 23 nt, Human
ucuuagaugcaguucugaagaag

SEQ ID NO: 1175567 - RNA, 12 nt, Human
ucuuagauguau

SEQ ID NO: 1175568 - RNA, 14 nt, Human
ucuuagauguauau

SEQ ID NO: 1175569 - RNA, 19 nt, Human
agaauucucuaguuugauu

SEQ ID NO: 1175570 - RNA, 17 nt, Human
agaauucucuuauccaa

SEQ ID NO: 1175571 - RNA, 13 nt, Human
agacacaagccuu

SEQ ID NO: 1175572 - RNA, 14 nt, Human
agacacaagccuuc

SEQ ID NO: 1175573 - RNA, 16 nt, Human
agacacacugaagaag

SEQ ID NO: 1175574 - RNA, 17 nt, Human
agacacacugaagaagc

SEQ ID NO: 1175575 - RNA, 17 nt, Human
agacacaggcccggcuc

SEQ ID NO: 1175576 - RNA, 19 nt, Human
agacacaggcccggcucca

SEQ ID NO: 1175577 - RNA, 20 nt, Human
agacacaggcccggcuccag

SEQ ID NO: 1175578 - RNA, 21 nt, Human
agacacaggcccggcuccagg

SEQ ID NO: 1175579 - RNA, 22 nt, Human
agacacaggcccggcuccaggc

SEQ ID NO: 1175580 - RNA, 23 nt, Human
agacacaggcccggcuccaggcu

SEQ ID NO: 1175581 - RNA, 21 nt, Human
agacacauguccaagaagccc

SEQ ID NO: 1175582 - RNA, 22 nt, Human
agacacauguccaagaagccca

SEQ ID NO: 1175583 - RNA, 24 nt, Human
agacacauguccaagaagcccagg

SEQ ID NO: 1175584 - RNA, 22 nt, Human
agacaccuugacagggcacacc

SEQ ID NO: 1175585 - RNA, 13 nt, Human
agacagcugccug

SEQ ID NO: 1175586 - RNA, 14 nt, Human
agacagcugccugg

SEQ ID NO: 1175587 - RNA, 14 nt, Human
agacccggcugcgu

SEQ ID NO: 1175588 - RNA, 15 nt, Human
agacucauucuucug

SEQ ID NO: 1175589 - RNA, 17 nt, Human
ucuugagccuugaacuu

SEQ ID NO: 1175590 - RNA, 20 nt, Human
ucuugagccuugaacuuuga

SEQ ID NO: 1175591 - RNA, 18 nt, Human
ucuugagccuugaacuuu

SEQ ID NO: 1175592 - RNA, 19 nt, Human
ucuugagccuugaacuuug

SEQ ID NO: 1175593 - RNA, 23 nt, Human
ucuucuguacgucugacaggcaa

SEQ ID NO: 1175594 - RNA, 14 nt, Human
agacauagaauuaa

SEQ ID NO: 1175595 - RNA, 14 nt, Human
ucuuauugcccacg

SEQ ID NO: 1175596 - RNA, 22 nt, Human
ucuucugcuucagccucccgag

SEQ ID NO: 1175597 - RNA, 21 nt, Human
ucuucuguacgucugacaggc

SEQ ID NO: 1175598 - RNA, 22 nt, Human
ucuucuguacgucugacaggca

SEQ ID NO: 1175599 - RNA, 19 nt, Human
ucuuucuggcuaugcauuu

SEQ ID NO: 1175600 - RNA, 18 nt, Human
ucuuucuggcuaugcauu

SEQ ID NO: 1175601 - RNA, 20 nt, Human
ucuuuauaauucuacuuuga

SEQ ID NO: 1175602 - RNA, 13 nt, Human
ucuuucugcuuug

SEQ ID NO: 1175603 - RNA, 15 nt, Human
agacucgcgacaaug

SEQ ID NO: 1175604 - RNA, 17 nt, Human
agacucgcgacaaugca

SEQ ID NO: 1175605 - RNA, 18 nt, Human
agacucgcgacaaugcaa

SEQ ID NO: 1175606 - RNA, 19 nt, Human
agacucgcgacaaugcaaa

SEQ ID NO: 1175607 - RNA, 14 nt, Human
ucuugguuuguaaa

SEQ ID NO: 1175608 - RNA, 16 nt, Human
ucuugguuuguaaauu

SEQ ID NO: 1175609 - RNA, 20 nt, Human
ucuuuaaugucacaggcagg

SEQ ID NO: 1175610 - RNA, 22 nt, Human
ucuuuaaugucacaggcagguc

SEQ ID NO: 1175611 - RNA, 20 nt, Human
agacucgcgacaaugcaaac

SEQ ID NO: 1175612 - RNA, 21 nt, Human
agacucgcgacaaugcaaacc

SEQ ID NO: 1175613 - RNA, 15 nt, Human
agacuguacaaagua

SEQ ID NO: 1175614 - RNA, 16 nt, Human
agacuguacaaaguag

SEQ ID NO: 1175615 - RNA, 22 nt, Human
agagaaaaaauauuuuccugcc

SEQ ID NO: 1175616 - RNA, 15 nt, Human
agagacacaagccuu

SEQ ID NO: 1175617 - RNA, 24 nt, Human
agagacagaaagcagaacagugau

SEQ ID NO: 1175618 - RNA, 19 nt, Human
ugaacuuugaccucugcag

SEQ ID NO: 1175619 - RNA, 20 nt, Human
ugaacuuugaccucugcagc

SEQ ID NO: 1175620 - RNA, 22 nt, Human
ugaacuuugaccucugcagcaa

SEQ ID NO: 1175621 - RNA, 16 nt, Human
ugaacuccuggccuca

SEQ ID NO: 1175622 - RNA, 15 nt, Human
ugaaauuuuuauuaa

SEQ ID NO: 1175623 - RNA, 19 nt, Human
ugaaauuuuuauuaaauua

SEQ ID NO: 1175624 - RNA, 19 nt, Human
ugaacaaauuuacagagac

SEQ ID NO: 1175625 - RNA, 20 nt, Human
ugaacaaauuuacagagaca

SEQ ID NO: 1175626 - RNA, 12 nt, Human
ugaacuccuggc

SEQ ID NO: 1175627 - RNA, 14 nt, Human
ugaacuccuggccu

SEQ ID NO: 1175628 - RNA, 15 nt, Human
ugaacuccuggccuc

SEQ ID NO: 1175629 - RNA, 15 nt, Human
agagguugcagugag

SEQ ID NO: 1175630 - RNA, 13 nt, Human
agaggcagcccca

SEQ ID NO: 1175631 - RNA, 19 nt, Human
agaggcagccccauucugc

SEQ ID NO: 1175632 - RNA, 21 nt, Human
agaggcagccccauucugccu

SEQ ID NO: 1175633 - RNA, 10 nt, Human
agaggcaggg

SEQ ID NO: 1175634 - RNA, 13 nt, Human
agaggcagggucu

SEQ ID NO: 1175635 - RNA, 21 nt, Human
agaggcagggucucacucugu

SEQ ID NO: 1175636 - RNA, 19 nt, Human
agaggccaugggccuccug

SEQ ID NO: 1175637 - RNA, 15 nt, Human
ugaaauuguauuaca

SEQ ID NO: 1175638 - RNA, 18 nt, Human
ugaaauauuauguuaaaa

SEQ ID NO: 1175639 - RNA, 18 nt, Human
agagcugccaccugccug

SEQ ID NO: 1175640 - RNA, 17 nt, Human
ugaaauaagccagacau

SEQ ID NO: 1175641 - RNA, 18 nt, Human
ugaaauaagccagacauc

SEQ ID NO: 1175642 - RNA, 20 nt, Human
ugaaauaagccagacaucaa

SEQ ID NO: 1175643 - RNA, 23 nt, Human
ugaaauaagccagacaucaacag

SEQ ID NO: 1175644 - RNA, 17 nt, Human
ucuuuggacccugaggc

SEQ ID NO: 1175645 - RNA, 21 nt, Human
ucuuuggacccugaggcccag

SEQ ID NO: 1175646 - RNA, 21 nt, Human
agagcaccuuagacagucccu

SEQ ID NO: 1175647 - RNA, 12 nt, Human
agagcagagacc

SEQ ID NO: 1175648 - RNA, 17 nt, Human
agagcagagaccauccc

SEQ ID NO: 1175649 - RNA, 18 nt, Human
agagcagagaccaucccu

SEQ ID NO: 1175650 - RNA, 20 nt, Human
agagcagagaccaucccuga

SEQ ID NO: 1175651 - RNA, 11 nt, Human
agagccuugcg

SEQ ID NO: 1175652 - RNA, 21 nt, Human
agagccuugcggaagguucua

SEQ ID NO: 1175653 - RNA, 20 nt, Human
ugaaugguuuucaaaauaaa

SEQ ID NO: 1175654 - RNA, 19 nt, Human
ugaaugucagugugacuga

SEQ ID NO: 1175655 - RNA, 14 nt, Human
agagugaacaaauu

SEQ ID NO: 1175656 - RNA, 17 nt, Human
agaguugauacuacagu

SEQ ID NO: 1175657 - RNA, 20 nt, Human
agaguugauacuacaguuug

SEQ ID NO: 1175658 - RNA, 22 nt, Human
agaguugauacuacaguuuguu

SEQ ID NO: 1175659 - RNA, 12 nt, Human
agaguuguuaca

SEQ ID NO: 1175660 - RNA, 16 nt, Human
agaguuguuacauuuu

SEQ ID NO: 1175661 - RNA, 16 nt, Human
agaguuuagcuggaaa

SEQ ID NO: 1175662 - RNA, 17 nt, Human
agaguuuagcuggaaaa

SEQ ID NO: 1175663 - RNA, 12 nt, Human
agauaaaugugc

SEQ ID NO: 1175664 - RNA, 14 nt, Human
agaucacgccacug

SEQ ID NO: 1175665 - RNA, 15 nt, Human
agaucacgccacugc

SEQ ID NO: 1175666 - RNA, 16 nt, Human
agaucacgccacugca

SEQ ID NO: 1175667 - RNA, 17 nt, Human
agaucacgccacugcac

SEQ ID NO: 1175668 - RNA, 18 nt, Human
agaucacgccacugcacu

SEQ ID NO: 1175669 - RNA, 15 nt, Human
ugaauuucuuuugcc

SEQ ID NO: 1175670 - RNA, 21 nt, Human
ugacacacagcucuguccugg

SEQ ID NO: 1175671 - RNA, 20 nt, Human
ugacaggcaaugcuggcugu

SEQ ID NO: 1175672 - RNA, 11 nt, Human
ugacagggcac

SEQ ID NO: 1175673 - RNA, 16 nt, Human
ugacagggcacaccgg

SEQ ID NO: 1175674 - RNA, 20 nt, Human
ugacagggcacaccgggcac

SEQ ID NO: 1175675 - RNA, 21 nt, Human
ugacagggcacaccgggcacu

SEQ ID NO: 1175676 - RNA, 20 nt, Human
ugacauuguuggccaaagcc

SEQ ID NO: 1175677 - RNA, 21 nt, Human
ugacauuguuggccaaagcca

SEQ ID NO: 1175678 - RNA, 18 nt, Human
ugaccaaugauggucacc

SEQ ID NO: 1175679 - RNA, 13 nt, Human
agaucagccuggg

SEQ ID NO: 1175680 - RNA, 15 nt, Human
agaucagccugggca

SEQ ID NO: 1175681 - RNA, 14 nt, Human
agaugcaccagccc

SEQ ID NO: 1175682 - RNA, 15 nt, Human
agaugcaccagcccu

SEQ ID NO: 1175683 - RNA, 18 nt, Human
agaugcaguucugaagaa

SEQ ID NO: 1175684 - RNA, 19 nt, Human
agaugcaguucugaagaag

SEQ ID NO: 1175685 - RNA, 20 nt, Human
agaugcaguucugaagaaga

SEQ ID NO: 1175686 - RNA, 14 nt, Human
agaugcuagaacuc

SEQ ID NO: 1175687 - RNA, 15 nt, Human
agaugcuagaacucc

SEQ ID NO: 1175688 - RNA, 15 nt, Human
agaugcuucucacug

SEQ ID NO: 1175689 - RNA, 16 nt, Human
agaugcuucucacugc

SEQ ID NO: 1175690 - RNA, 17 nt, Human
ugacccacaagaaauga

SEQ ID NO: 1175691 - RNA, 12 nt, Human
ugacccacugcu

SEQ ID NO: 1175692 - RNA, 13 nt, Human
ugacccacugcuu

SEQ ID NO: 1175693 - RNA, 13 nt, Human
agcagggaaacag

SEQ ID NO: 1175694 - RNA, 14 nt, Human
agcagggaaacagc

SEQ ID NO: 1175695 - RNA, 15 nt, Human
agcagggaaacagcu

SEQ ID NO: 1175696 - RNA, 21 nt, Human
agcaggcucucaggccagcug

SEQ ID NO: 1175697 - RNA, 22 nt, Human
agcaggcucucaggccagcugc

SEQ ID NO: 1175698 - RNA, 23 nt, Human
agcaggcucucaggccagcugcu

SEQ ID NO: 1175699 - RNA, 17 nt, Human
agcaggcucgggcuccc

SEQ ID NO: 1175700 - RNA, 13 nt, Human
agcaggcucucag

SEQ ID NO: 1175701 - RNA, 14 nt, Human
agcaggcucucagg

SEQ ID NO: 1175702 - RNA, 15 nt, Human
agcaggcucucaggc

SEQ ID NO: 1175703 - RNA, 16 nt, Human
agcaggcucucaggcc

SEQ ID NO: 1175704 - RNA, 17 nt, Human
agcaggcucucaggcca

SEQ ID NO: 1175705 - RNA, 18 nt, Human
agcaggcucucaggccag

SEQ ID NO: 1175706 - RNA, 19 nt, Human
agcaggcucucaggccagc

SEQ ID NO: 1175707 - RNA, 20 nt, Human
agcagggagggcuucugcca

SEQ ID NO: 1175708 - RNA, 13 nt, Human
agcagggcucagc

SEQ ID NO: 1175709 - RNA, 14 nt, Human
agcagggcucagcg

SEQ ID NO: 1175710 - RNA, 15 nt, Human
agcagggcucagcgg

SEQ ID NO: 1175711 - RNA, 22 nt, Human
agcagggcucagcggggacagc

SEQ ID NO: 1175712 - RNA, 18 nt, Human
ugacccaugcugcccugu

SEQ ID NO: 1175713 - RNA, 19 nt, Human
ugacccaugcugcccugug

SEQ ID NO: 1175714 - RNA, 20 nt, Human
ugacccaugcugcccuguga

SEQ ID NO: 1175715 - RNA, 16 nt, Human
agcagcagggagggcu

SEQ ID NO: 1175716 - RNA, 11 nt, Human
agcagccacau

SEQ ID NO: 1175717 - RNA, 15 nt, Human
agcagccacauuccu

SEQ ID NO: 1175718 - RNA, 13 nt, Human
agcaggacaugga

SEQ ID NO: 1175719 - RNA, 19 nt, Human
agcauaaaaauuagccaag

SEQ ID NO: 1175720 - RNA, 19 nt, Human
agcagucaggaaagagaac

SEQ ID NO: 1175721 - RNA, 17 nt, Human
agcagucaggaaagaga

SEQ ID NO: 1175722 - RNA, 18 nt, Human
agcagucaggaaagagaa

SEQ ID NO: 1175723 - RNA, 23 nt, Human
agcauaaaaauuagccaagugug

SEQ ID NO: 1175724 - RNA, 16 nt, Human
ugaguacguugugcau

SEQ ID NO: 1175725 - RNA, 17 nt, Human
ugaguacguugugcauu

SEQ ID NO: 1175726 - RNA, 18 nt, Human
ugaguacguugugcauuu

SEQ ID NO: 1175727 - RNA, 19 nt, Human
ugaguacguugugcauuug

SEQ ID NO: 1175728 - RNA, 20 nt, Human
ugaguacguugugcauuugg

SEQ ID NO: 1175729 - RNA, 14 nt, Human
ugaguacuacaguc

SEQ ID NO: 1175730 - RNA, 13 nt, Human
ugaguccagaagu

SEQ ID NO: 1175731 - RNA, 17 nt, Human
ugagugcagcucuggag

SEQ ID NO: 1175732 - RNA, 13 nt, Human
ugagugccuuaca

SEQ ID NO: 1175733 - RNA, 14 nt, Human
ugagugccuuacac

SEQ ID NO: 1175734 - RNA, 16 nt, Human
ugagugccuuacacaa

SEQ ID NO: 1175735 - RNA, 21 nt, Human
ugagugggggaucacagccuc

SEQ ID NO: 1175736 - RNA, 23 nt, Human
ugagugggggaucacagccucug

SEQ ID NO: 1175737 - RNA, 14 nt, Human
ugauacaaugcugu

SEQ ID NO: 1175738 - RNA, 15 nt, Human
ugauacaaugcugug

SEQ ID NO: 1175739 - RNA, 18 nt, Human
ugaucacggcucacugca

SEQ ID NO: 1175740 - RNA, 15 nt, Human
ugaucacggcucacu

SEQ ID NO: 1175741 - RNA, 13 nt, Human
ugaucacggcuca

SEQ ID NO: 1175742 - RNA, 14 nt, Human
ugaucacggcucac

SEQ ID NO: 1175743 - RNA, 17 nt, Human
agcauauucaggaagcu

SEQ ID NO: 1175744 - RNA, 19 nt, Human
agcauauucaggaagcuca

SEQ ID NO: 1175745 - RNA, 21 nt, Human
agcauauucaggaagcucagg

SEQ ID NO: 1175746 - RNA, 22 nt, Human
agcauauucaggaagcucaggg

SEQ ID NO: 1175747 - RNA, 18 nt, Human
ugauacaaugcugugccc

SEQ ID NO: 1175748 - RNA, 12 nt, Human
agcaucaggcca

SEQ ID NO: 1175749 - RNA, 22 nt, Human
agcaucaggccaggcccucugc

SEQ ID NO: 1175750 - RNA, 23 nt, Human
agcaucaggccaggcccucugcc

SEQ ID NO: 1175751 - RNA, 13 nt, Human
agcauccuggcac

SEQ ID NO: 1175752 - RNA, 19 nt, Human
agcauggcugccaauggga

SEQ ID NO: 1175753 - RNA, 22 nt, Human
agcauuuagauguauagguuga

SEQ ID NO: 1175754 - RNA, 22 nt, Human
agcauuuugcuaaaugugaaug

SEQ ID NO: 1175755 - RNA, 15 nt, Human
agcauuuugcuaaau

SEQ ID NO: 1175756 - RNA, 22 nt, Human
agccacacacacagaaaauaua

SEQ ID NO: 1175757 - RNA, 23 nt, Human
agccacacacacagaaaauauac

SEQ ID NO: 1175758 - RNA, 10 nt, Human
agccacacac

SEQ ID NO: 1175759 - RNA, 12 nt, Human
agccacacacac

SEQ ID NO: 1175760 - RNA, 13 nt, Human
agccacacacaca

SEQ ID NO: 1175761 - RNA, 14 nt, Human
agccacacacacag

SEQ ID NO: 1175762 - RNA, 15 nt, Human
agccacacacacaga

SEQ ID NO: 1175763 - RNA, 16 nt, Human
agccacacacacagaa

SEQ ID NO: 1175764 - RNA, 17 nt, Human
agccacacacacagaaa

SEQ ID NO: 1175765 - RNA, 18 nt, Human
agccacacacacagaaaa

SEQ ID NO: 1175766 - RNA, 19 nt, Human
agccacacacacagaaaau

SEQ ID NO: 1175767 - RNA, 20 nt, Human
agccacacacacagaaaaua

SEQ ID NO: 1175768 - RNA, 21 nt, Human
agccacacacacagaaaauau

SEQ ID NO: 1175769 - RNA, 13 nt, Human
ugaucuaggaaga

SEQ ID NO: 1175770 - RNA, 19 nt, Human
ugauccucccaccucagcc

SEQ ID NO: 1175771 - RNA, 20 nt, Human
ugauccucccaccucagccu

SEQ ID NO: 1175772 - RNA, 18 nt, Human
ugauccucccaccucagc

SEQ ID NO: 1175773 - RNA, 23 nt, Human
ugaugaaaugaggucagagccug

SEQ ID NO: 1175774 - RNA, 19 nt, Human
ugaugaucuuugcagacag

SEQ ID NO: 1175775 - RNA, 20 nt, Human
ugaugaucuuugcagacagg

SEQ ID NO: 1175776 - RNA, 14 nt, Human
ugaucuaggaagac

SEQ ID NO: 1175777 - RNA, 15 nt, Human
ugaucuaggaagacu

SEQ ID NO: 1175778 - RNA, 22 nt, Human
ugaugaaaugaggucagagccu

SEQ ID NO: 1175779 - RNA, 21 nt, Human
ugaugaucuuugcagacaggc

SEQ ID NO: 1175780 - RNA, 22 nt, Human
ugaugaucuuugcagacaggca

SEQ ID NO: 1175781 - RNA, 22 nt, Human
ugaugggcaacccccagccugc

SEQ ID NO: 1175782 - RNA, 13 nt, Human
ugauggggcccug

SEQ ID NO: 1175783 - RNA, 14 nt, Human
ugauggggcccugc

SEQ ID NO: 1175784 - RNA, 22 nt, Human
ugauggggcccugccuccuuug

SEQ ID NO: 1175785 - RNA, 21 nt, Human
ugauguuuuaaggaugcuugu

SEQ ID NO: 1175786 - RNA, 17 nt, Human
ugauguuuuccaugagu

SEQ ID NO: 1175787 - RNA, 19 nt, Human
ugauguuuuccaugagucc

SEQ ID NO: 1175788 - RNA, 23 nt, Human
ugauguuuuccaugaguccccug

SEQ ID NO: 1175789 - RNA, 13 nt, Human
ugauuaaauucuu

SEQ ID NO: 1175790 - RNA, 16 nt, Human
ugauuaaauucuugca

SEQ ID NO: 1175791 - RNA, 17 nt, Human
ugauuaaauucuugcaa

SEQ ID NO: 1175792 - RNA, 15 nt, Human
ugauuaaguaaugau

SEQ ID NO: 1175793 - RNA, 16 nt, Human
ugauuaaguaaugaua

SEQ ID NO: 1175794 - RNA, 12 nt, Human
ugcaaaccauca

SEQ ID NO: 1175795 - RNA, 13 nt, Human
ugcaaaccaucau

SEQ ID NO: 1175796 - RNA, 18 nt, Human
ugauuuccguuaaaauac

SEQ ID NO: 1175797 - RNA, 17 nt, Human
agccacggccaggccag

SEQ ID NO: 1175798 - RNA, 18 nt, Human
agccacggccaggccaga

SEQ ID NO: 1175799 - RNA, 21 nt, Human
ugcaaaggguaucaggugcug

SEQ ID NO: 1175800 - RNA, 20 nt, Human
ugcaaaguaucccuacugua

SEQ ID NO: 1175801 - RNA, 18 nt, Human
ugcaaaccaucauugaaa

SEQ ID NO: 1175802 - RNA, 20 nt, Human
ugcaaaccaucauugaaauc

SEQ ID NO: 1175803 - RNA, 13 nt, Human
ugcaacaggcugg

SEQ ID NO: 1175804 - RNA, 15 nt, Human
ugcaagccagauuuu

SEQ ID NO: 1175805 - RNA, 21 nt, Human
ugcaagccagauuuuccugaa

SEQ ID NO: 1175806 - RNA, 15 nt, Human
ugcaaggucauuuuu

SEQ ID NO: 1175807 - RNA, 12 nt, Human
agcccaggccuc

SEQ ID NO: 1175808 - RNA, 14 nt, Human
agcccaggccuccu

SEQ ID NO: 1175809 - RNA, 19 nt, Human
agcccaggccuccuacagc

SEQ ID NO: 1175810 - RNA, 21 nt, Human
agcccaggccuccuacagcuu

SEQ ID NO: 1175811 - RNA, 14 nt, Human
agccccgaggccuu

SEQ ID NO: 1175812 - RNA, 16 nt, Human
agccccgaggccuucu

SEQ ID NO: 1175813 - RNA, 18 nt, Human
agccccgugggguuccuc

SEQ ID NO: 1175814 - RNA, 14 nt, Human
agccccuucugacc

SEQ ID NO: 1175815 - RNA, 15 nt, Human
agccccuucugaccc

SEQ ID NO: 1175816 - RNA, 16 nt, Human
agccccuucugaccca

SEQ ID NO: 1175817 - RNA, 19 nt, Human
agccccuucugacccaugc

SEQ ID NO: 1175818 - RNA, 14 nt, Human
agcccgggcucugc

SEQ ID NO: 1175819 - RNA, 15 nt, Human
agcccgggcucugcc

SEQ ID NO: 1175820 - RNA, 16 nt, Human
agcccgggcucugccu

SEQ ID NO: 1175821 - RNA, 17 nt, Human
agcccgggcucugccuc

SEQ ID NO: 1175822 - RNA, 14 nt, Human
agcccugcagaggg

SEQ ID NO: 1175823 - RNA, 15 nt, Human
agcccugcagagggc

SEQ ID NO: 1175824 - RNA, 16 nt, Human
agcccugcagagggca

SEQ ID NO: 1175825 - RNA, 19 nt, Human
agcccugcagagggcacag

SEQ ID NO: 1175826 - RNA, 21 nt, Human
ugcaccacugcacuccagccu

SEQ ID NO: 1175827 - RNA, 13 nt, Human
ugcaccagcccuu

SEQ ID NO: 1175828 - RNA, 14 nt, Human
ugcaccggcuggcc

SEQ ID NO: 1175829 - RNA, 15 nt, Human
ugcaccggcuggccu

SEQ ID NO: 1175830 - RNA, 16 nt, Human
ugcaccggcuggccug

SEQ ID NO: 1175831 - RNA, 18 nt, Human
ugcaccggcuggccuggc

SEQ ID NO: 1175832 - RNA, 14 nt, Human
ugcacuccagccug

SEQ ID NO: 1175833 - RNA, 15 nt, Human
ugcacuccagccuga

SEQ ID NO: 1175834 - RNA, 17 nt, Human
ugcacuccagccugagc

SEQ ID NO: 1175835 - RNA, 15 nt, Human
ugcacuccagccugg

SEQ ID NO: 1175836 - RNA, 16 nt, Human
ugcacuccagccuggg

SEQ ID NO: 1175837 - RNA, 20 nt, Human
ugcaugaaguaauaugcaca

SEQ ID NO: 1175838 - RNA, 18 nt, Human
ugcaugcugucccuuacg

SEQ ID NO: 1175839 - RNA, 19 nt, Human
ugcaugcugucccuuacgu

SEQ ID NO: 1175840 - RNA, 21 nt, Human
ugcaugcugucccuuacguga

SEQ ID NO: 1175841 - RNA, 16 nt, Human
ugcauaccacuuuugu

SEQ ID NO: 1175842 - RNA, 18 nt, Human
ugcauaccacuuuuguuc

SEQ ID NO: 1175843 - RNA, 20 nt, Human
ugcauaccacuuuuguucuu

SEQ ID NO: 1175844 - RNA, 21 nt, Human
ugcauaccacuuuuguucuug

SEQ ID NO: 1175845 - RNA, 19 nt, Human
ugcauacucauuaggaugg

SEQ ID NO: 1175846 - RNA, 12 nt, Human
ugcagacaggca

SEQ ID NO: 1175847 - RNA, 13 nt, Human
ugcagacaggcaa

SEQ ID NO: 1175848 - RNA, 21 nt, Human
ugcagacaggcaagcaccucc

SEQ ID NO: 1175849 - RNA, 13 nt, Human
agccuccugcccu

SEQ ID NO: 1175850 - RNA, 14 nt, Human
agccuccugcccuu

SEQ ID NO: 1175851 - RNA, 18 nt, Human
agccuccugcccuuaccu

SEQ ID NO: 1175852 - RNA, 18 nt, Human
ugcagccucacaguccuu

SEQ ID NO: 1175853 - RNA, 21 nt, Human
ugcagccucacaguccuuacc

SEQ ID NO: 1175854 - RNA, 22 nt, Human
agccuugaccauucuccaccug

SEQ ID NO: 1175855 - RNA, 20 nt, Human
agccuuggggcugaugcagu

SEQ ID NO: 1175856 - RNA, 18 nt, Human
agccuugaccauucucca

SEQ ID NO: 1175857 - RNA, 19 nt, Human
agccuugaccauucuccac

SEQ ID NO: 1175858 - RNA, 21 nt, Human
agccuugaccauucuccaccu

SEQ ID NO: 1175859 - RNA, 19 nt, Human
agccuugcggaagguucua

SEQ ID NO: 1175860 - RNA, 20 nt, Human
agccuuagaagucacacagu

SEQ ID NO: 1175861 - RNA, 22 nt, Human
agccuuagaagucacacaguau

SEQ ID NO: 1175862 - RNA, 13 nt, Human
agccuugaacuuu

SEQ ID NO: 1175863 - RNA, 17 nt, Human
agccugugccucuggga

SEQ ID NO: 1175864 - RNA, 18 nt, Human
agccugugccucugggac

SEQ ID NO: 1175865 - RNA, 19 nt, Human
agccugugccucugggacu

SEQ ID NO: 1175866 - RNA, 16 nt, Human
ugcauuuaaaagauac

SEQ ID NO: 1175867 - RNA, 13 nt, Human
ugccaauggacua

SEQ ID NO: 1175868 - RNA, 14 nt, Human
ugccaaugggagcu

SEQ ID NO: 1175869 - RNA, 18 nt, Human
ugccaaugggagcucaug

SEQ ID NO: 1175870 - RNA, 17 nt, Human
ugccagccgagauagcc

SEQ ID NO: 1175871 - RNA, 22 nt, Human
ugccagccgagauagccaaggc

SEQ ID NO: 1175872 - RNA, 13 nt, Human
ugccauaauuacu

SEQ ID NO: 1175873 - RNA, 13 nt, Human
agcucccaggcau

SEQ ID NO: 1175874 - RNA, 23 nt, Human
agcucccaggcauuccccaggag

SEQ ID NO: 1175875 - RNA, 15 nt, Human
agcuccuucuguccu

SEQ ID NO: 1175876 - RNA, 16 nt, Human
agcuccuucuguccua

SEQ ID NO: 1175877 - RNA, 21 nt, Human
agcuccuucuguccuacucug

SEQ ID NO: 1175878 - RNA, 22 nt, Human
agcuccuucuguccuacucugu

SEQ ID NO: 1175879 - RNA, 12 nt, Human
agcucuggucca

SEQ ID NO: 1175880 - RNA, 17 nt, Human
agcucugguccauagag

SEQ ID NO: 1175881 - RNA, 20 nt, Human
agcucugguccauagagagc

SEQ ID NO: 1175882 - RNA, 16 nt, Human
agcucuguccugggag

SEQ ID NO: 1175883 - RNA, 21 nt, Human
agcucuguccugggagugagc

SEQ ID NO: 1175884 - RNA, 23 nt, Human
agcucuguccugggagugagcug

SEQ ID NO: 1175885 - RNA, 20 nt, Human
agcugccagccgagauagcc

SEQ ID NO: 1175886 - RNA, 18 nt, Human
ugcccuuaccugccagga

SEQ ID NO: 1175887 - RNA, 19 nt, Human
ugcccuuaccugccaggaa

SEQ ID NO: 1175888 - RNA, 12 nt, Human
ugccgcagcccu

SEQ ID NO: 1175889 - RNA, 14 nt, Human
ugccgcagcccugc

SEQ ID NO: 1175890 - RNA, 12 nt, Human
ugccucagccuc

SEQ ID NO: 1175891 - RNA, 13 nt, Human
ugccucagccucc

SEQ ID NO: 1175892 - RNA, 22 nt, Human
ugccugcccaggccccugccac

SEQ ID NO: 1175893 - RNA, 23 nt, Human
ugccugcccaggccccugccacc

SEQ ID NO: 1175894 - RNA, 24 nt, Human
ugccugcccaggccccugccaccc

SEQ ID NO: 1175895 - RNA, 14 nt, Human
ugccucagccuccc

SEQ ID NO: 1175896 - RNA, 18 nt, Human
ugccucugccucugacac

SEQ ID NO: 1175897 - RNA, 20 nt, Human
ugccucugccucugacacac

SEQ ID NO: 1175898 - RNA, 16 nt, Human
agcugcuugggcuuca

SEQ ID NO: 1175899 - RNA, 20 nt, Human
agcugcuugggcuucauccu

SEQ ID NO: 1175900 - RNA, 16 nt, Human
ugccuggauggggcug

SEQ ID NO: 1175901 - RNA, 17 nt, Human
ugccuggauggggcugc

SEQ ID NO: 1175902 - RNA, 20 nt, Human
ugccuggauggggcugcacc

SEQ ID NO: 1175903 - RNA, 21 nt, Human
ugccuggauggggcugcaccg

SEQ ID NO: 1175904 - RNA, 14 nt, Human
agcugccuguucag

SEQ ID NO: 1175905 - RNA, 16 nt, Human
agcugccuguucagcu

SEQ ID NO: 1175906 - RNA, 18 nt, Human
agcugccuguucagcucc

SEQ ID NO: 1175907 - RNA, 19 nt, Human
agcugccuguucagcucca

SEQ ID NO: 1175908 - RNA, 19 nt, Human
agcuguuacugucuucagu

SEQ ID NO: 1175909 - RNA, 16 nt, Human
ugccuguugggccagg

SEQ ID NO: 1175910 - RNA, 17 nt, Human
ugccuguugggccagga

SEQ ID NO: 1175911 - RNA, 19 nt, Human
ugccuguugggccaggagc

SEQ ID NO: 1175912 - RNA, 20 nt, Human
ugccuuacccucauguucuu

SEQ ID NO: 1175913 - RNA, 21 nt, Human
ugccuuacccucauguucuua

SEQ ID NO: 1175914 - RNA, 16 nt, Human
ugccuuggggacaaga

SEQ ID NO: 1175915 - RNA, 20 nt, Human
agcugggacuacaggcaccc

SEQ ID NO: 1175916 - RNA, 23 nt, Human
agcugggacuacaggcacccacc

SEQ ID NO: 1175917 - RNA, 16 nt, Human
agcugggacuacaggu

SEQ ID NO: 1175918 - RNA, 20 nt, Human
agcugggguggggaccucag

SEQ ID NO: 1175919 - RNA, 22 nt, Human
agcugggguggggaccucaggc

SEQ ID NO: 1175920 - RNA, 23 nt, Human
agcugggguggggaccucaggcc

SEQ ID NO: 1175921 - RNA, 17 nt, Human
agcugggacuacaggug

SEQ ID NO: 1175922 - RNA, 17 nt, Human
agcugugcucuggacag

SEQ ID NO: 1175923 - RNA, 18 nt, Human
agcugugcucuggacagg

SEQ ID NO: 1175924 - RNA, 19 nt, Human
agcugugcucuggacaggc

SEQ ID NO: 1175925 - RNA, 18 nt, Human
agcuguuacugucuucag

SEQ ID NO: 1175926 - RNA, 19 nt, Human
ugccuuuucccaacuccag

SEQ ID NO: 1175927 - RNA, 14 nt, Human
ugcgguccacccag

SEQ ID NO: 1175928 - RNA, 15 nt, Human
ugcgguccacccagg

SEQ ID NO: 1175929 - RNA, 17 nt, Human
ugcgguccacccaggag

SEQ ID NO: 1175930 - RNA, 14 nt, Human
aggaaaagcugcug

SEQ ID NO: 1175931 - RNA, 20 nt, Human
agcuugaccgugaggccaga

SEQ ID NO: 1175932 - RNA, 22 nt, Human
agcuugaccgugaggccagaga

SEQ ID NO: 1175933 - RNA, 23 nt, Human
agcuugaccgugaggccagagac

SEQ ID NO: 1175934 - RNA, 20 nt, Human
agcuugcccuggugccucac

SEQ ID NO: 1175935 - RNA, 16 nt, Human
ugcucugcugacagac

SEQ ID NO: 1175936 - RNA, 14 nt, Human
ugcucugcugacag

SEQ ID NO: 1175937 - RNA, 15 nt, Human
ugcucugcugacaga

SEQ ID NO: 1175938 - RNA, 21 nt, Human
ugcuccagcuguucagcuggu

SEQ ID NO: 1175939 - RNA, 19 nt, Human
ugcucugaucauccacugu

SEQ ID NO: 1175940 - RNA, 18 nt, Human
ugcuaucucccccagccc

SEQ ID NO: 1175941 - RNA, 16 nt, Human
aggaaaagcugcugac

SEQ ID NO: 1175942 - RNA, 13 nt, Human
ugcuaucuccccc

SEQ ID NO: 1175943 - RNA, 14 nt, Human
ugcuaucuccccca

SEQ ID NO: 1175944 - RNA, 17 nt, Human
ugcuaucucccccagcc

SEQ ID NO: 1175945 - RNA, 13 nt, Human
aggaagccagcag

SEQ ID NO: 1175946 - RNA, 13 nt, Human
aggaagcucaggg

SEQ ID NO: 1175947 - RNA, 14 nt, Human
aggaagcucagggc

SEQ ID NO: 1175948 - RNA, 15 nt, Human
aggaagcucagggcc

SEQ ID NO: 1175949 - RNA, 16 nt, Human
aggaagcucagggccu

SEQ ID NO: 1175950 - RNA, 13 nt, Human
aggacgcucucug

SEQ ID NO: 1175951 - RNA, 14 nt, Human
aggacgcucucugg

SEQ ID NO: 1175952 - RNA, 16 nt, Human
aggacgcucucuggcc

SEQ ID NO: 1175953 - RNA, 17 nt, Human
aggacgcucucuggccu

SEQ ID NO: 1175954 - RNA, 19 nt, Human
aggacgcucucuggccuuc

SEQ ID NO: 1175955 - RNA, 20 nt, Human
aggacgcucucuggccuucg

SEQ ID NO: 1175956 - RNA, 17 nt, Human
aggacuuuucuuugugg

SEQ ID NO: 1175957 - RNA, 19 nt, Human
aggacuuuucuuuguggcu

SEQ ID NO: 1175958 - RNA, 22 nt, Human
aggacuuuucuuuguggcuucc

SEQ ID NO: 1175959 - RNA, 23 nt, Human
aggacuuuucuuuguggcuuccu

SEQ ID NO: 1175960 - RNA, 18 nt, Human
aggagaaacuggaacucu

SEQ ID NO: 1175961 - RNA, 19 nt, Human
aggagaaacuggaacucuc

SEQ ID NO: 1175962 - RNA, 12 nt, Human
aggagcagccac

SEQ ID NO: 1175963 - RNA, 13 nt, Human
aggagcagccaca

SEQ ID NO: 1175964 - RNA, 14 nt, Human
aggagcagccacau

SEQ ID NO: 1175965 - RNA, 17 nt, Human
aggagccccgaggccuu

SEQ ID NO: 1175966 - RNA, 16 nt, Human
aggagccuccugcccu

SEQ ID NO: 1175967 - RNA, 17 nt, Human
aggagccuccugcccuu

SEQ ID NO: 1175968 - RNA, 15 nt, Human
ugcuugagcucagga

SEQ ID NO: 1175969 - RNA, 22 nt, Human
ugcuuugugauuuuuguaauuu

SEQ ID NO: 1175970 - RNA, 18 nt, Human
ugcuuuuggucuguguga

SEQ ID NO: 1175971 - RNA, 20 nt, Human
ugcuuuugucuaugggacuc

SEQ ID NO: 1175972 - RNA, 23 nt, Human
ugcuuuuuaauauugauaugcuu

SEQ ID NO: 1175973 - RNA, 17 nt, Human
ugcuuuuucucaaaaug

SEQ ID NO: 1175974 - RNA, 21 nt, Human
uggaaauuuguuauaaugaau

SEQ ID NO: 1175975 - RNA, 23 nt, Human
uggaaauuuguuauaaugaauga

SEQ ID NO: 1175976 - RNA, 16 nt, Human
uggaagacagcucuua

SEQ ID NO: 1175977 - RNA, 13 nt, Human
aggaucagucuga

SEQ ID NO: 1175978 - RNA, 22 nt, Human
aggaugaucuaggaagacuuug

SEQ ID NO: 1175979 - RNA, 23 nt, Human
aggaugaucuaggaagacuuugg

SEQ ID NO: 1175980 - RNA, 22 nt, Human
aggaugcacagaguuguuacau

SEQ ID NO: 1175981 - RNA, 17 nt, Human
aggauucuuccucccuc

SEQ ID NO: 1175982 - RNA, 19 nt, Human
aggauucuuccucccuccc

SEQ ID NO: 1175983 - RNA, 17 nt, Human
uggagcucguggaacag

SEQ ID NO: 1175984 - RNA, 21 nt, Human
uggagcucguggaacaguuac

SEQ ID NO: 1175985 - RNA, 21 nt, Human
uggagcucgugggacagucac

SEQ ID NO: 1175986 - RNA, 18 nt, Human
aggcaagcaccuccugcc

SEQ ID NO: 1175987 - RNA, 19 nt, Human
aggcaagcaccuccugccu

SEQ ID NO: 1175988 - RNA, 20 nt, Human
aggcaagcaccuccugccuc

SEQ ID NO: 1175989 - RNA, 16 nt, Human
aggcaaggcugucaau

SEQ ID NO: 1175990 - RNA, 17 nt, Human
aggcaaggcugucaauu

SEQ ID NO: 1175991 - RNA, 15 nt, Human
aggauugcuacuguc

SEQ ID NO: 1175992 - RNA, 17 nt, Human
aggauugcuacuguccu

SEQ ID NO: 1175993 - RNA, 18 nt, Human
aggauugcuacuguccua

SEQ ID NO: 1175994 - RNA, 22 nt, Human
aggauugcuacuguccuaccca

SEQ ID NO: 1175995 - RNA, 12 nt, Human
aggcagggucuc

SEQ ID NO: 1175996 - RNA, 18 nt, Human
aggcagggucucacucug

SEQ ID NO: 1175997 - RNA, 17 nt, Human
aggcaggugggauggau

SEQ ID NO: 1175998 - RNA, 15 nt, Human
aggcauaaagucagg

SEQ ID NO: 1175999 - RNA, 22 nt, Human
aggcauaaagucagggguuccc

SEQ ID NO: 1176000 - RNA, 18 nt, Human
aggcauugugggaagggg

SEQ ID NO: 1176001 - RNA, 20 nt, Human
aggcauuuaggccaugggac

SEQ ID NO: 1176002 - RNA, 21 nt, Human
uggaugccugguggcagcugc

SEQ ID NO: 1176003 - RNA, 23 nt, Human
uggaugccugguggcagcugcgg

SEQ ID NO: 1176004 - RNA, 23 nt, Human
uggcacaucagcacgauuucugu

SEQ ID NO: 1176005 - RNA, 14 nt, Human
uggaguugaaaauc

SEQ ID NO: 1176006 - RNA, 16 nt, Human
aggcauuugcugaaua

SEQ ID NO: 1176007 - RNA, 20 nt, Human
aggcauuugcugaauacaga

SEQ ID NO: 1176008 - RNA, 14 nt, Human
uggagugcagugag

SEQ ID NO: 1176009 - RNA, 16 nt, Human
aggccccgcccaggcu

SEQ ID NO: 1176010 - RNA, 14 nt, Human
aggcccggcuccag

SEQ ID NO: 1176011 - RNA, 13 nt, Human
aggcccggcucca

SEQ ID NO: 1176012 - RNA, 14 nt, Human
aggccccgcccagg

SEQ ID NO: 1176013 - RNA, 13 nt, Human
aggcccagagggc

SEQ ID NO: 1176014 - RNA, 15 nt, Human
aggcccagagggccu

SEQ ID NO: 1176015 - RNA, 18 nt, Human
uggcacccggccccugcu

SEQ ID NO: 1176016 - RNA, 19 nt, Human
uggcacccggccccugcug

SEQ ID NO: 1176017 - RNA, 20 nt, Human
uggcacccggccccugcugg

SEQ ID NO: 1176018 - RNA, 21 nt, Human
uggcagcucaccucucccuug

SEQ ID NO: 1176019 - RNA, 22 nt, Human
uggcagcucaccucucccuugg

SEQ ID NO: 1176020 - RNA, 23 nt, Human
uggcagcucaccucucccuugga

SEQ ID NO: 1176021 - RNA, 13 nt, Human
uggcagcucagag

SEQ ID NO: 1176022 - RNA, 13 nt, Human
aggccagccuuga

SEQ ID NO: 1176023 - RNA, 15 nt, Human
aggccagccuugacc

SEQ ID NO: 1176024 - RNA, 12 nt, Human
aggccagcugcu

SEQ ID NO: 1176025 - RNA, 22 nt, Human
agggaaggauacaaaagcaugu

SEQ ID NO: 1176026 - RNA, 18 nt, Human
aggcccggcuccaggcuc

SEQ ID NO: 1176027 - RNA, 20 nt, Human
aggcccggcuccaggcuccu

SEQ ID NO: 1176028 - RNA, 21 nt, Human
aggcccggcuccaggcuccuu

SEQ ID NO: 1176029 - RNA, 20 nt, Human
ugggacucaaugcacugaca

SEQ ID NO: 1176030 - RNA, 16 nt, Human
ugggagagccuuccag

SEQ ID NO: 1176031 - RNA, 19 nt, Human
ugggagagaagagaaugca

SEQ ID NO: 1176032 - RNA, 21 nt, Human
ugggagagaagagaaugcaca

SEQ ID NO: 1176033 - RNA, 21 nt, Human
agggaggacgcucucuggccu

SEQ ID NO: 1176034 - RNA, 22 nt, Human
agggaggacgcucucuggccuu

SEQ ID NO: 1176035 - RNA, 23 nt, Human
agggaggacgcucucuggccuuc

SEQ ID NO: 1176036 - RNA, 14 nt, Human
ugggacuacaggca

SEQ ID NO: 1176037 - RNA, 15 nt, Human
ugggacuacaggcac

SEQ ID NO: 1176038 - RNA, 16 nt, Human
ugggacuacaggcacc

SEQ ID NO: 1176039 - RNA, 16 nt, Human
ugggcccccaaaugga

SEQ ID NO: 1176040 - RNA, 21 nt, Human
ugggcccccaaauggaaaugg

SEQ ID NO: 1176041 - RNA, 15 nt, Human
agggagggagggcuc

SEQ ID NO: 1176042 - RNA, 17 nt, Human
agggagggagggcucca

SEQ ID NO: 1176043 - RNA, 20 nt, Human
ugggaggaucucuugagccu

SEQ ID NO: 1176044 - RNA, 21 nt, Human
ugggaggaucucuugagccug

SEQ ID NO: 1176045 - RNA, 22 nt, Human
ugggaggaucucuugagccugg

SEQ ID NO: 1176046 - RNA, 19 nt, Human
ugggaggccaaggugggag

SEQ ID NO: 1176047 - RNA, 20 nt, Human
ugggaggccaaggugggagg

SEQ ID NO: 1176048 - RNA, 12 nt, Human
ugggcagaagga

SEQ ID NO: 1176049 - RNA, 11 nt, Human
ugggcagagca

SEQ ID NO: 1176050 - RNA, 12 nt, Human
ugggcagagcag

SEQ ID NO: 1176051 - RNA, 18 nt, Human
ugggccaggagccuccug

SEQ ID NO: 1176052 - RNA, 13 nt, Human
ugggcagagcaga

SEQ ID NO: 1176053 - RNA, 14 nt, Human
agggagggcuccag

SEQ ID NO: 1176054 - RNA, 15 nt, Human
agggagggcuccaga

SEQ ID NO: 1176055 - RNA, 16 nt, Human
agggagggcuccagac

SEQ ID NO: 1176056 - RNA, 17 nt, Human
agggagggcuccagaca

SEQ ID NO: 1176057 - RNA, 19 nt, Human
agggcucagcggggacagc

SEQ ID NO: 1176058 - RNA, 20 nt, Human
agggcucagcggggacagcu

SEQ ID NO: 1176059 - RNA, 22 nt, Human
agggcucagcggggacagcucc

SEQ ID NO: 1176060 - RNA, 23 nt, Human
agggcucagcggggacagcuccu

SEQ ID NO: 1176061 - RNA, 12 nt, Human
uggggcccugcc

SEQ ID NO: 1176062 - RNA, 14 nt, Human
uggggcccugccuc

SEQ ID NO: 1176063 - RNA, 23 nt, Human
uggggcugcaccggcuggccugg

SEQ ID NO: 1176064 - RNA, 12 nt, Human
agggcuccagac

SEQ ID NO: 1176065 - RNA, 15 nt, Human
agggcuccagacaca

SEQ ID NO: 1176066 - RNA, 14 nt, Human
uggggaccucaggc

SEQ ID NO: 1176067 - RNA, 15 nt, Human
uggggaccucaggcc

SEQ ID NO: 1176068 - RNA, 16 nt, Human
uggggaccucaggccu

SEQ ID NO: 1176069 - RNA, 17 nt, Human
uggggaccucaggccug

SEQ ID NO: 1176070 - RNA, 13 nt, Human
aggggaauguuug

SEQ ID NO: 1176071 - RNA, 18 nt, Human
aggggaaaaucagccugc

SEQ ID NO: 1176072 - RNA, 22 nt, Human
aggggaaaaucagccugcucca

SEQ ID NO: 1176073 - RNA, 14 nt, Human
aggggaacagacug

SEQ ID NO: 1176074 - RNA, 13 nt, Human
aggggaaaagagg

SEQ ID NO: 1176075 - RNA, 17 nt, Human
ugggguacccacugcuc

SEQ ID NO: 1176076 - RNA, 18 nt, Human
ugggguacccacugcucu

SEQ ID NO: 1176077 - RNA, 19 nt, Human
ugggguacccacugcucug

SEQ ID NO: 1176078 - RNA, 20 nt, Human
ugggguacccacugcucugg

SEQ ID NO: 1176079 - RNA, 13 nt, Human
uggggucacucug

SEQ ID NO: 1176080 - RNA, 14 nt, Human
uggggucacucugg

SEQ ID NO: 1176081 - RNA, 16 nt, Human
uggggucacucuggca

SEQ ID NO: 1176082 - RNA, 22 nt, Human
uggggucacucuggcagcucag

SEQ ID NO: 1176083 - RNA, 20 nt, Human
ugguagagugugccugaagu

SEQ ID NO: 1176084 - RNA, 17 nt, Human
uggguggcaccagcagc

SEQ ID NO: 1176085 - RNA, 20 nt, Human
uggguggcaccagcagccug

SEQ ID NO: 1176086 - RNA, 21 nt, Human
uggguggcaccagcagccugg

SEQ ID NO: 1176087 - RNA, 22 nt, Human
uggguggcaccagcagccugga

SEQ ID NO: 1176088 - RNA, 16 nt, Human
aggguggugaccucug

SEQ ID NO: 1176089 - RNA, 17 nt, Human
aggguggugaccucugc

SEQ ID NO: 1176090 - RNA, 21 nt, Human
agggucucacucugucgccca

SEQ ID NO: 1176091 - RNA, 16 nt, Human
agggucucacucuguc

SEQ ID NO: 1176092 - RNA, 14 nt, Human
agggucucacucug

SEQ ID NO: 1176093 - RNA, 15 nt, Human
agggucucacucugu

SEQ ID NO: 1176094 - RNA, 15 nt, Human
aggguaaggcugugg

SEQ ID NO: 1176095 - RNA, 20 nt, Human
aggggguggccucccaacuc

SEQ ID NO: 1176096 - RNA, 13 nt, Human
agggggcugggac

SEQ ID NO: 1176097 - RNA, 18 nt, Human
aggggugggacacccugu

SEQ ID NO: 1176098 - RNA, 19 nt, Human
aggggaauguuugccucug

SEQ ID NO: 1176099 - RNA, 20 nt, Human
aggggaauguuugccucugc

SEQ ID NO: 1176100 - RNA, 21 nt, Human
aggggaauguuugccucugcc

SEQ ID NO: 1176101 - RNA, 16 nt, Human
aggggaauugaggaca

SEQ ID NO: 1176102 - RNA, 18 nt, Human
aggggagcaugggaagug

SEQ ID NO: 1176103 - RNA, 16 nt, Human
uggugcgaucuggguu

SEQ ID NO: 1176104 - RNA, 17 nt, Human
uggugcgaucuggguuc

SEQ ID NO: 1176105 - RNA, 14 nt, Human
ugguggcagcugcg

SEQ ID NO: 1176106 - RNA, 15 nt, Human
ugguggcagcugcgg

SEQ ID NO: 1176107 - RNA, 12 nt, Human
ugguggcagugg

SEQ ID NO: 1176108 - RNA, 23 nt, Human
uggugugaccacugcagaagaca

SEQ ID NO: 1176109 - RNA, 18 nt, Human
ugguuaggcauuguggga

SEQ ID NO: 1176110 - RNA, 20 nt, Human
ugguuaggcauugugggaag

SEQ ID NO: 1176111 - RNA, 15 nt, Human
uggucagauuugaac

SEQ ID NO: 1176112 - RNA, 16 nt, Human
uggucagauuugaacu

SEQ ID NO: 1176113 - RNA, 22 nt, Human
uggucagauuugaacucuucaa

SEQ ID NO: 1176114 - RNA, 14 nt, Human
aggucagagccugc

SEQ ID NO: 1176115 - RNA, 15 nt, Human
aggucagagccugca

SEQ ID NO: 1176116 - RNA, 17 nt, Human
aggucagagccugcagu

SEQ ID NO: 1176117 - RNA, 18 nt, Human
aggucagagccugcaguu

SEQ ID NO: 1176118 - RNA, 16 nt, Human
aggucuugaacuccug

SEQ ID NO: 1176119 - RNA, 17 nt, Human
aggucuugaacuccugg

SEQ ID NO: 1176120 - RNA, 18 nt, Human
aggucuugaacuccuggc

SEQ ID NO: 1176121 - RNA, 13 nt, Human
aggugacagagug

SEQ ID NO: 1176122 - RNA, 15 nt, Human
aggugacagagugag

SEQ ID NO: 1176123 - RNA, 22 nt, Human
aggugacagagugagacucugu

SEQ ID NO: 1176124 - RNA, 13 nt, Human
aggugaccccagg

SEQ ID NO: 1176125 - RNA, 16 nt, Human
aggugagaagcagagg

SEQ ID NO: 1176126 - RNA, 21 nt, Human
aggugagaagcagaggaagga

SEQ ID NO: 1176127 - RNA, 23 nt, Human
aggugagaagcagaggaaggaga

SEQ ID NO: 1176128 - RNA, 14 nt, Human
ugguuauggagagg

SEQ ID NO: 1176129 - RNA, 15 nt, Human
ugguuuguaaauuaa

SEQ ID NO: 1176130 - RNA, 14 nt, Human
ugguuuucaaaaua

SEQ ID NO: 1176131 - RNA, 15 nt, Human
ugguuuucaaaauaa

SEQ ID NO: 1176132 - RNA, 17 nt, Human
ugguuuucaaaauaaaa

SEQ ID NO: 1176133 - RNA, 21 nt, Human
ugguuuguaaauuaacuuuua

SEQ ID NO: 1176134 - RNA, 15 nt, Human
uguaaauagcucagg

SEQ ID NO: 1176135 - RNA, 16 nt, Human
uguaaauagcucaggu

SEQ ID NO: 1176136 - RNA, 13 nt, Human
uguaaagaaagag

SEQ ID NO: 1176137 - RNA, 14 nt, Human
uguaaagaaagaga

SEQ ID NO: 1176138 - RNA, 15 nt, Human
uguaaagaaagagag

SEQ ID NO: 1176139 - RNA, 16 nt, Human
uguaaagaaagagaga

SEQ ID NO: 1176140 - RNA, 17 nt, Human
uguaaagaaagagagaa

SEQ ID NO: 1176141 - RNA, 18 nt, Human
uguaaagaaagagagaaa

SEQ ID NO: 1176142 - RNA, 19 nt, Human
uguaaagaaagagagaaaa

SEQ ID NO: 1176143 - RNA, 20 nt, Human
uguaaagaaagagagaaaau

SEQ ID NO: 1176144 - RNA, 21 nt, Human
uguaaagaaagagagaaaaua

SEQ ID NO: 1176145 - RNA, 22 nt, Human
uguaaagaaagagagaaaauaa

SEQ ID NO: 1176146 - RNA, 14 nt, Human
aggugauccaccca

SEQ ID NO: 1176147 - RNA, 20 nt, Human
aggugauccacccaccucag

SEQ ID NO: 1176148 - RNA, 21 nt, Human
aggugauccacccaccucagc

SEQ ID NO: 1176149 - RNA, 18 nt, Human
aggugccucaagagaagg

SEQ ID NO: 1176150 - RNA, 15 nt, Human
aggugggauccucca

SEQ ID NO: 1176151 - RNA, 16 nt, Human
aggugggauccuccag

SEQ ID NO: 1176152 - RNA, 17 nt, Human
aggugggauccuccagg

SEQ ID NO: 1176153 - RNA, 18 nt, Human
aggugggauccuccaggu

SEQ ID NO: 1176154 - RNA, 23 nt, Human
agguggggcagcuugaggguugg

SEQ ID NO: 1176155 - RNA, 19 nt, Human
agguggggucacucuggca

SEQ ID NO: 1176156 - RNA, 23 nt, Human
agguggggucacucuggcagcuc

SEQ ID NO: 1176157 - RNA, 17 nt, Human
aggugugaaccaccaca

SEQ ID NO: 1176158 - RNA, 15 nt, Human
aggugugcucugauc

SEQ ID NO: 1176159 - RNA, 20 nt, Human
aggugugcucugaucaucca

SEQ ID NO: 1176160 - RNA, 14 nt, Human
agguuuaagcuguu

SEQ ID NO: 1176161 - RNA, 16 nt, Human
uguagaggagaaacug

SEQ ID NO: 1176162 - RNA, 16 nt, Human
uguagagccagggucu

SEQ ID NO: 1176163 - RNA, 18 nt, Human
uguagagccagggucuca

SEQ ID NO: 1176164 - RNA, 13 nt, Human
aguaaaauccaca

SEQ ID NO: 1176165 - RNA, 14 nt, Human
aguaauaugcacac

SEQ ID NO: 1176166 - RNA, 15 nt, Human
aguaauaugcacaca

SEQ ID NO: 1176167 - RNA, 17 nt, Human
aguaauaugcacacauu

SEQ ID NO: 1176168 - RNA, 17 nt, Human
aguaaugauaacuggaa

SEQ ID NO: 1176169 - RNA, 18 nt, Human
aguaaugauaacuggaaa

SEQ ID NO: 1176170 - RNA, 20 nt, Human
aguaaugauaacuggaaacu

SEQ ID NO: 1176171 - RNA, 12 nt, Human
aguagagacagg

SEQ ID NO: 1176172 - RNA, 11 nt, Human
aguagagacag

SEQ ID NO: 1176173 - RNA, 17 nt, Human
uguaggcauaaagucag

SEQ ID NO: 1176174 - RNA, 20 nt, Human
uguaggcauaaagucagggg

SEQ ID NO: 1176175 - RNA, 19 nt, Human
aguagaagucuuagaugua

SEQ ID NO: 1176176 - RNA, 20 nt, Human
aguagaagucuuagauguau

SEQ ID NO: 1176177 - RNA, 21 nt, Human
aguagaagucuuagauguaua

SEQ ID NO: 1176178 - RNA, 19 nt, Human
agucaccccggccaccugc

SEQ ID NO: 1176179 - RNA, 15 nt, Human
agucacacagugagu

SEQ ID NO: 1176180 - RNA, 23 nt, Human
agucacacagugagucgaggaca

SEQ ID NO: 1176181 - RNA, 14 nt, Human
agucaccucaugga

SEQ ID NO: 1176182 - RNA, 15 nt, Human
agucaccucauggaa

SEQ ID NO: 1176183 - RNA, 17 nt, Human
agucaccucauggaauu

SEQ ID NO: 1176184 - RNA, 17 nt, Human
aguauuucuaugaaaua

SEQ ID NO: 1176185 - RNA, 18 nt, Human
aguauuucuaugaaauau

SEQ ID NO: 1176186 - RNA, 22 nt, Human
aguauuucuaugaaauauuaug

SEQ ID NO: 1176187 - RNA, 21 nt, Human
aguauuagaauaccacaggaa

SEQ ID NO: 1176188 - RNA, 14 nt, Human
ugucaauuacagga

SEQ ID NO: 1176189 - RNA, 15 nt, Human
ugucaauuacaggaa

SEQ ID NO: 1176190 - RNA, 17 nt, Human
ugucaauuacaggaagu

SEQ ID NO: 1176191 - RNA, 21 nt, Human
ugucaauaaaauccauacauu

SEQ ID NO: 1176192 - RNA, 19 nt, Human
ugucaauuacaggaaguac

SEQ ID NO: 1176193 - RNA, 15 nt, Human
aguaugguggcuggg

SEQ ID NO: 1176194 - RNA, 16 nt, Human
aguaugguggcugggu

SEQ ID NO: 1176195 - RNA, 17 nt, Human
aguaugguggcuggguu

SEQ ID NO: 1176196 - RNA, 18 nt, Human
aguauuacuucugcuaca

SEQ ID NO: 1176197 - RNA, 18 nt, Human
aguauuagaauaccacag

SEQ ID NO: 1176198 - RNA, 19 nt, Human
uguauucucuccuguaccu

SEQ ID NO: 1176199 - RNA, 20 nt, Human
uguauucucuccuguaccuc

SEQ ID NO: 1176200 - RNA, 22 nt, Human
uguauuacaaauccaaugaaau

SEQ ID NO: 1176201 - RNA, 13 nt, Human
uguauuacaaauc

SEQ ID NO: 1176202 - RNA, 17 nt, Human
uguaucaaugaguaaca

SEQ ID NO: 1176203 - RNA, 14 nt, Human
uguaguguuggaga

SEQ ID NO: 1176204 - RNA, 15 nt, Human
uguaguguuggagaa

SEQ ID NO: 1176205 - RNA, 16 nt, Human
uguaguguuggagaag

SEQ ID NO: 1176206 - RNA, 15 nt, Human
ugugacugaauuucu

SEQ ID NO: 1176207 - RNA, 16 nt, Human
ugugacugaauuucuu

SEQ ID NO: 1176208 - RNA, 16 nt, Human
ugugacugaucucucg

SEQ ID NO: 1176209 - RNA, 15 nt, Human
ugugagaugcuagaa

SEQ ID NO: 1176210 - RNA, 19 nt, Human
ugugagaugcuagaacucc

SEQ ID NO: 1176211 - RNA, 22 nt, Human
ugugagaugcuagaacucccuu

SEQ ID NO: 1176212 - RNA, 14 nt, Human
agucuuuguacaga

SEQ ID NO: 1176213 - RNA, 15 nt, Human
ugugaaaggaaagag

SEQ ID NO: 1176214 - RNA, 18 nt, Human
ugugaaaggaaagaggcu

SEQ ID NO: 1176215 - RNA, 21 nt, Human
ugugaaaggaaagagggaggu

SEQ ID NO: 1176216 - RNA, 19 nt, Human
ugugaaccaccacacccag

SEQ ID NO: 1176217 - RNA, 20 nt, Human
ugugaaccaccacacccagc

SEQ ID NO: 1176218 - RNA, 21 nt, Human
ugugaaccaccacacccagcc

SEQ ID NO: 1176219 - RNA, 14 nt, Human
ugugaagagaacca

SEQ ID NO: 1176220 - RNA, 21 nt, Human
agugaggcucugcccuugguu

SEQ ID NO: 1176221 - RNA, 19 nt, Human
agugaggcucugcccuugg

SEQ ID NO: 1176222 - RNA, 20 nt, Human
agugaggcucugcccuuggu

SEQ ID NO: 1176223 - RNA, 15 nt, Human
agugagucgaggaca

SEQ ID NO: 1176224 - RNA, 15 nt, Human
agugaggcucugccc

SEQ ID NO: 1176225 - RNA, 16 nt, Human
agugaggcucugcccu

SEQ ID NO: 1176226 - RNA, 17 nt, Human
agugaggcucugcccuu

SEQ ID NO: 1176227 - RNA, 21 nt, Human
ugugcccccauguaagcaccc

SEQ ID NO: 1176228 - RNA, 17 nt, Human
uguggaguucaucuuga

SEQ ID NO: 1176229 - RNA, 21 nt, Human
uguggaguucaucuugaauug

SEQ ID NO: 1176230 - RNA, 17 nt, Human
agugaaagaaaauaaca

SEQ ID NO: 1176231 - RNA, 15 nt, Human
agugaaagaaaauaa

SEQ ID NO: 1176232 - RNA, 16 nt, Human
agugaacaaauuuaca

SEQ ID NO: 1176233 - RNA, 20 nt, Human
agugaacaaauuuacagaga

SEQ ID NO: 1176234 - RNA, 18 nt, Human
ugugaugagaggaaauca

SEQ ID NO: 1176235 - RNA, 19 nt, Human
ugugauggggcccugccuc

SEQ ID NO: 1176236 - RNA, 20 nt, Human
ugugauggggcccugccucc

SEQ ID NO: 1176237 - RNA, 20 nt, Human
ugugccagguuuuuggucug

SEQ ID NO: 1176238 - RNA, 12 nt, Human
ugugccaugugc

SEQ ID NO: 1176239 - RNA, 16 nt, Human
ugugccaugugccagg

SEQ ID NO: 1176240 - RNA, 19 nt, Human
uguguguuuauugucaaag

SEQ ID NO: 1176241 - RNA, 23 nt, Human
uguguguuuauugucaaaguggu

SEQ ID NO: 1176242 - RNA, 20 nt, Human
ugugugaaagguacuucaaa

SEQ ID NO: 1176243 - RNA, 13 nt, Human
uguguaaguagau

SEQ ID NO: 1176244 - RNA, 17 nt, Human
ugugucucuugguccug

SEQ ID NO: 1176245 - RNA, 20 nt, Human
ugugucucuugguccugcug

SEQ ID NO: 1176246 - RNA, 21 nt, Human
ugugucucuugguccugcugc

SEQ ID NO: 1176247 - RNA, 22 nt, Human
ugugucucuugguccugcugca

SEQ ID NO: 1176248 - RNA, 21 nt, Human
ugugucuugcaauggcagccu

SEQ ID NO: 1176249 - RNA, 19 nt, Human
ugugucuuuaaaugcugcu

SEQ ID NO: 1176250 - RNA, 16 nt, Human
uguggucccaccccac

SEQ ID NO: 1176251 - RNA, 13 nt, Human
uguggucccaccc

SEQ ID NO: 1176252 - RNA, 15 nt, Human
uguggucccacccca

SEQ ID NO: 1176253 - RNA, 14 nt, Human
ugugguguuuccug

SEQ ID NO: 1176254 - RNA, 16 nt, Human
ugugguguuuccuggc

SEQ ID NO: 1176255 - RNA, 20 nt, Human
ugugguguuuccuggcacug

SEQ ID NO: 1176256 - RNA, 21 nt, Human
uguggguuucuaaagcugcca

SEQ ID NO: 1176257 - RNA, 23 nt, Human
uguggguuucuaaagcugccagc

SEQ ID NO: 1176258 - RNA, 22 nt, Human
agugaguugauagcacagaccc

SEQ ID NO: 1176259 - RNA, 23 nt, Human
agugaguugauagcacagacccu

SEQ ID NO: 1176260 - RNA, 12 nt, Human
agugcugcauuu

SEQ ID NO: 1176261 - RNA, 13 nt, Human
agugcugcauuua

SEQ ID NO: 1176262 - RNA, 16 nt, Human
agugcugcauuuaaaa

SEQ ID NO: 1176263 - RNA, 17 nt, Human
agugcugcauuuaaaag

SEQ ID NO: 1176264 - RNA, 19 nt, Human
agugcugcauuuaaaagau

SEQ ID NO: 1176265 - RNA, 20 nt, Human
agugcugcauuuaaaagaua

SEQ ID NO: 1176266 - RNA, 21 nt, Human
agugcugggauuacaggugug

SEQ ID NO: 1176267 - RNA, 17 nt, Human
aguggugcgaucugggu

SEQ ID NO: 1176268 - RNA, 21 nt, Human
agugguggugaacagaacaaa

SEQ ID NO: 1176269 - RNA, 17 nt, Human
aguggugguuuucuguu

SEQ ID NO: 1176270 - RNA, 18 nt, Human
aguggugguuuucuguuc

SEQ ID NO: 1176271 - RNA, 19 nt, Human
aguggugguuuucuguucu

SEQ ID NO: 1176272 - RNA, 20 nt, Human
aguggugguuuucuguucuu

SEQ ID NO: 1176273 - RNA, 21 nt, Human
aguggugguuuucuguucuuu

SEQ ID NO: 1176274 - RNA, 23 nt, Human
aguggugguuuucuguucuuucu

SEQ ID NO: 1176275 - RNA, 20 nt, Human
agugugccugaagucccaga

SEQ ID NO: 1176276 - RNA, 17 nt, Human
agugugguguuuccugg

SEQ ID NO: 1176277 - RNA, 19 nt, Human
agugugguguuuccuggca

SEQ ID NO: 1176278 - RNA, 20 nt, Human
agugugguguuuccuggcac

SEQ ID NO: 1176279 - RNA, 20 nt, Human
agugugucuuagugugugca

SEQ ID NO: 1176280 - RNA, 15 nt, Human
uguuauaaucuuuca

SEQ ID NO: 1176281 - RNA, 20 nt, Human
uguuccacaaguuaaauaaa

SEQ ID NO: 1176282 - RNA, 16 nt, Human
uguucugggacacagu

SEQ ID NO: 1176283 - RNA, 13 nt, Human
uguugcccaggca

SEQ ID NO: 1176284 - RNA, 15 nt, Human
uguugcccaggcagg

SEQ ID NO: 1176285 - RNA, 16 nt, Human
uguugcccaggcaggu

SEQ ID NO: 1176286 - RNA, 17 nt, Human
uguugcccaggcagguc

SEQ ID NO: 1176287 - RNA, 18 nt, Human
uguugcccaggcaggucu

SEQ ID NO: 1176288 - RNA, 21 nt, Human
uguuuuauuuuaauucaguug

SEQ ID NO: 1176289 - RNA, 20 nt, Human
uguuuuccaugaguccccug

SEQ ID NO: 1176290 - RNA, 14 nt, Human
uguuuugcaagcca

SEQ ID NO: 1176291 - RNA, 16 nt, Human
aguucugcagauaaac

SEQ ID NO: 1176292 - RNA, 21 nt, Human
aguucugcagauaaacaguag

SEQ ID NO: 1176293 - RNA, 14 nt, Human
aguucugguuccua

SEQ ID NO: 1176294 - RNA, 19 nt, Human
uguugcccaggcaggucuu

SEQ ID NO: 1176295 - RNA, 19 nt, Human
uguuuauugucaaaguggu

SEQ ID NO: 1176296 - RNA, 17 nt, Human
uguuugauucagacagc

SEQ ID NO: 1176297 - RNA, 22 nt, Human
uguuugauucagacagcugccu

SEQ ID NO: 1176298 - RNA, 13 nt, Human
aguugggcuuccu

SEQ ID NO: 1176299 - RNA, 21 nt, Human
aguuggguggaugccuggugg

SEQ ID NO: 1176300 - RNA, 16 nt, Human
aguuggcuaggacccc

SEQ ID NO: 1176301 - RNA, 22 nt, Human
aguugcauagguuuaauaauuu

SEQ ID NO: 1176302 - RNA, 18 nt, Human
aguuguaccgcaauguga

SEQ ID NO: 1176303 - RNA, 21 nt, Human
aguuguuugauucagacagcu

SEQ ID NO: 1176304 - RNA, 23 nt, Human
aguuguuugauucagacagcugc

SEQ ID NO: 1176305 - RNA, 13 nt, Human
uuaaauaauguga

SEQ ID NO: 1176306 - RNA, 19 nt, Human
uuaauuuuuuugagacaga

SEQ ID NO: 1176307 - RNA, 15 nt, Human
auaaacaagaccacg

SEQ ID NO: 1176308 - RNA, 22 nt, Human
auaaacaagaccacguuucuaa

SEQ ID NO: 1176309 - RNA, 23 nt, Human
auaaacaagaccacguuucuaaa

SEQ ID NO: 1176310 - RNA, 23 nt, Human
uuaaugaaagacuguacaaagua

SEQ ID NO: 1176311 - RNA, 15 nt, Human
uuaauucuuagcuca

SEQ ID NO: 1176312 - RNA, 16 nt, Human
auaaaauaauuuuuau

SEQ ID NO: 1176313 - RNA, 21 nt, Human
auaaaauaauuuuuauauuug

SEQ ID NO: 1176314 - RNA, 22 nt, Human
auaaaauaauuuuuauauuuga

SEQ ID NO: 1176315 - RNA, 18 nt, Human
auaaaauccauacauuug

SEQ ID NO: 1176316 - RNA, 19 nt, Human
auaaaauccauacauuugu

SEQ ID NO: 1176317 - RNA, 22 nt, Human
uuaagaagacugcauuauauuu

SEQ ID NO: 1176318 - RNA, 13 nt, Human
uuaagaggcaggg

SEQ ID NO: 1176319 - RNA, 15 nt, Human
uuaagaggcaggguc

SEQ ID NO: 1176320 - RNA, 16 nt, Human
uuaagaggcagggucu

SEQ ID NO: 1176321 - RNA, 18 nt, Human
uuaaguaaugauaacugg

SEQ ID NO: 1176322 - RNA, 17 nt, Human
uuaaguacuauguauca

SEQ ID NO: 1176323 - RNA, 14 nt, Human
uuaagugcugcauu

SEQ ID NO: 1176324 - RNA, 14 nt, Human
uuacaggaaguacu

SEQ ID NO: 1176325 - RNA, 15 nt, Human
uuacaggaaguacug

SEQ ID NO: 1176326 - RNA, 11 nt, Human
uuagacagagu

SEQ ID NO: 1176327 - RNA, 13 nt, Human
uuagacagagucu

SEQ ID NO: 1176328 - RNA, 15 nt, Human
uuacuguaagaaaau

SEQ ID NO: 1176329 - RNA, 11 nt, Human
uuagaaauaua

SEQ ID NO: 1176330 - RNA, 12 nt, Human
uuagaaauauaa

SEQ ID NO: 1176331 - RNA, 14 nt, Human
uuagaaauauaauu

SEQ ID NO: 1176332 - RNA, 18 nt, Human
uuacucagaauucucuag

SEQ ID NO: 1176333 - RNA, 23 nt, Human
uuacucagaauucucuaguuuga

SEQ ID NO: 1176334 - RNA, 16 nt, Human
uuauuuaguuccuuga

SEQ ID NO: 1176335 - RNA, 17 nt, Human
auagcugggacuacagg

SEQ ID NO: 1176336 - RNA, 14 nt, Human
uuauuuaaauuuua

SEQ ID NO: 1176337 - RNA, 18 nt, Human
uuauuuaaugaaagacug

SEQ ID NO: 1176338 - RNA, 22 nt, Human
uuauuuaaugaaagacuguaca

SEQ ID NO: 1176339 - RNA, 12 nt, Human
auagcugggacu

SEQ ID NO: 1176340 - RNA, 20 nt, Human
auagcucaggugucccugca

SEQ ID NO: 1176341 - RNA, 21 nt, Human
auagcucaggugucccugcac

SEQ ID NO: 1176342 - RNA, 22 nt, Human
auagcucaggugucccugcacu

SEQ ID NO: 1176343 - RNA, 18 nt, Human
auagcuacuaauuuuaaa

SEQ ID NO: 1176344 - RNA, 19 nt, Human
auagcucaggugucccugc

SEQ ID NO: 1176345 - RNA, 17 nt, Human
auagcuacuaauuuuaa

SEQ ID NO: 1176346 - RNA, 14 nt, Human
auagcuacuaauuu

SEQ ID NO: 1176347 - RNA, 13 nt, Human
auaagauaaaugu

SEQ ID NO: 1176348 - RNA, 17 nt, Human
auaagauaaaugugcug

SEQ ID NO: 1176349 - RNA, 18 nt, Human
auagccugccucuucucu

SEQ ID NO: 1176350 - RNA, 15 nt, Human
uucaaggauccugag

SEQ ID NO: 1176351 - RNA, 16 nt, Human
uucaaggauccugagc

SEQ ID NO: 1176352 - RNA, 18 nt, Human
uucaaggauccugagcca

SEQ ID NO: 1176353 - RNA, 19 nt, Human
uucaaggauccugagccag

SEQ ID NO: 1176354 - RNA, 21 nt, Human
uucaaggauccugagccagau

SEQ ID NO: 1176355 - RNA, 15 nt, Human
uucaaacauauauaa

SEQ ID NO: 1176356 - RNA, 21 nt, Human
auaggaauugacccacaagaa

SEQ ID NO: 1176357 - RNA, 22 nt, Human
auaggaauugacccacaagaaa

SEQ ID NO: 1176358 - RNA, 13 nt, Human
uucacaguucucu

SEQ ID NO: 1176359 - RNA, 17 nt, Human
uucacauauugauuucc

SEQ ID NO: 1176360 - RNA, 22 nt, Human
uucaccacaugugcacaugcac

SEQ ID NO: 1176361 - RNA, 17 nt, Human
uucagaucucuaacuuc

SEQ ID NO: 1176362 - RNA, 14 nt, Human
uucagacagcugcc

SEQ ID NO: 1176363 - RNA, 19 nt, Human
uucagccaagaauucuuaa

SEQ ID NO: 1176364 - RNA, 17 nt, Human
auauaacaaugcuguau

SEQ ID NO: 1176365 - RNA, 19 nt, Human
auauaagcuuguauuccuu

SEQ ID NO: 1176366 - RNA, 12 nt, Human
auauaacaaugc

SEQ ID NO: 1176367 - RNA, 15 nt, Human
auauaacaaugcugu

SEQ ID NO: 1176368 - RNA, 17 nt, Human
auauauaacaaugcugu

SEQ ID NO: 1176369 - RNA, 18 nt, Human
auauauaacaaugcugua

SEQ ID NO: 1176370 - RNA, 19 nt, Human
auauauaacaaugcuguau

SEQ ID NO: 1176371 - RNA, 18 nt, Human
auagucaaauugugugaa

SEQ ID NO: 1176372 - RNA, 21 nt, Human
uucaucauccuaagcuauuca

SEQ ID NO: 1176373 - RNA, 14 nt, Human
uucagccugccuuc

SEQ ID NO: 1176374 - RNA, 15 nt, Human
uucagccugccuucu

SEQ ID NO: 1176375 - RNA, 14 nt, Human
uucaguaauaacuc

SEQ ID NO: 1176376 - RNA, 16 nt, Human
uucauauuuacuucuu

SEQ ID NO: 1176377 - RNA, 21 nt, Human
uucauauuuacuucuuauaca

SEQ ID NO: 1176378 - RNA, 20 nt, Human
auaugauuuaaaucagccgu

SEQ ID NO: 1176379 - RNA, 13 nt, Human
auaugcacacauu

SEQ ID NO: 1176380 - RNA, 14 nt, Human
auaugucaagccau

SEQ ID NO: 1176381 - RNA, 15 nt, Human
uuccuucagugccuu

SEQ ID NO: 1176382 - RNA, 11 nt, Human
uuccuucagug

SEQ ID NO: 1176383 - RNA, 14 nt, Human
uuccuucagugccu

SEQ ID NO: 1176384 - RNA, 11 nt, Human
uuccucuuucc

SEQ ID NO: 1176385 - RNA, 17 nt, Human
uuccuguucccaugaga

SEQ ID NO: 1176386 - RNA, 13 nt, Human
uuccuaauccucu

SEQ ID NO: 1176387 - RNA, 15 nt, Human
uuccuaauccucuag

SEQ ID NO: 1176388 - RNA, 17 nt, Human
uuccuaauccucuagga

SEQ ID NO: 1176389 - RNA, 22 nt, Human
aucacggcucacugcagccuca

SEQ ID NO: 1176390 - RNA, 21 nt, Human
aucaagaugugacauguuuua

SEQ ID NO: 1176391 - RNA, 13 nt, Human
aucaaguauuaua

SEQ ID NO: 1176392 - RNA, 14 nt, Human
aucaaguauuauac

SEQ ID NO: 1176393 - RNA, 18 nt, Human
aucaaguauuauaccuuu

SEQ ID NO: 1176394 - RNA, 17 nt, Human
auauugcugauggugca

SEQ ID NO: 1176395 - RNA, 21 nt, Human
auauugcugauggugcaauga

SEQ ID NO: 1176396 - RNA, 20 nt, Human
auauuguuuucaguguacau

SEQ ID NO: 1176397 - RNA, 13 nt, Human
auauuugaaauau

SEQ ID NO: 1176398 - RNA, 14 nt, Human
auauuugaaauauu

SEQ ID NO: 1176399 - RNA, 19 nt, Human
auauuugaaauauugacuu

SEQ ID NO: 1176400 - RNA, 23 nt, Human
auauuugaaauauugacuuuuua

SEQ ID NO: 1176401 - RNA, 16 nt, Human
auauucuguuggccag

SEQ ID NO: 1176402 - RNA, 19 nt, Human
auauugauuuccguuaaaa

SEQ ID NO: 1176403 - RNA, 21 nt, Human
auauugauuuccguuaaaaua

SEQ ID NO: 1176404 - RNA, 22 nt, Human
auauugauuuccguuaaaauac

SEQ ID NO: 1176405 - RNA, 15 nt, Human
auauuaagaaagacu

SEQ ID NO: 1176406 - RNA, 24 nt, Human
auauuaagaaagacuaucuaaaug

SEQ ID NO: 1176407 - RNA, 22 nt, Human
auauuaaggaagacaaugugaa

SEQ ID NO: 1176408 - RNA, 18 nt, Human
auauguuuuaagaggcag

SEQ ID NO: 1176409 - RNA, 20 nt, Human
auauguuuuaagaggcaggg

SEQ ID NO: 1176410 - RNA, 15 nt, Human
auccagguucagcuu

SEQ ID NO: 1176411 - RNA, 16 nt, Human
auccagguucagcuug

SEQ ID NO: 1176412 - RNA, 16 nt, Human
aucccauaugccuggg

SEQ ID NO: 1176413 - RNA, 17 nt, Human
aucccauaugccugggc

SEQ ID NO: 1176414 - RNA, 14 nt, Human
uucugaagaagaug

SEQ ID NO: 1176415 - RNA, 12 nt, Human
uucugaagaaga

SEQ ID NO: 1176416 - RNA, 13 nt, Human
uucugaagaagau

SEQ ID NO: 1176417 - RNA, 19 nt, Human
aucauugaaaucuuuuugc

SEQ ID NO: 1176418 - RNA, 20 nt, Human
aucauugaaaucuuuuugcu

SEQ ID NO: 1176419 - RNA, 15 nt, Human
uucugaaagggacgc

SEQ ID NO: 1176420 - RNA, 23 nt, Human
uucugccgcagcccugcagaggg

SEQ ID NO: 1176421 - RNA, 10 nt, Human
uucugggaca

SEQ ID NO: 1176422 - RNA, 11 nt, Human
uucugggacac

SEQ ID NO: 1176423 - RNA, 22 nt, Human
uucugggacacaguucaauucu

SEQ ID NO: 1176424 - RNA, 14 nt, Human
aucauugaaaucuu

SEQ ID NO: 1176425 - RNA, 15 nt, Human
aucauugaaaucuuu

SEQ ID NO: 1176426 - RNA, 23 nt, Human
aucauaguggcuuaaaacaacac

SEQ ID NO: 1176427 - RNA, 16 nt, Human
aucagcacgauuucug

SEQ ID NO: 1176428 - RNA, 17 nt, Human
aucagcacgauuucugu

SEQ ID NO: 1176429 - RNA, 18 nt, Human
aucagcacgauuucuguu

SEQ ID NO: 1176430 - RNA, 13 nt, Human
uucuaggccuggg

SEQ ID NO: 1176431 - RNA, 14 nt, Human
uucucaacuccaaa

SEQ ID NO: 1176432 - RNA, 18 nt, Human
uucucaacuccaaacuga

SEQ ID NO: 1176433 - RNA, 19 nt, Human
uucucagaaucucaaauaa

SEQ ID NO: 1176434 - RNA, 22 nt, Human
uucucagaaucucaaauaacua

SEQ ID NO: 1176435 - RNA, 23 nt, Human
uucucagaaucucaaauaacuaa

SEQ ID NO: 1176436 - RNA, 11 nt, Human
uugagacagag

SEQ ID NO: 1176437 - RNA, 12 nt, Human
uugagacagagu

SEQ ID NO: 1176438 - RNA, 12 nt, Human
uugagcagggcu

SEQ ID NO: 1176439 - RNA, 16 nt, Human
uugagcagggcucagc

SEQ ID NO: 1176440 - RNA, 17 nt, Human
uugaccauucuccaccu

SEQ ID NO: 1176441 - RNA, 12 nt, Human
uugacuuuuuau

SEQ ID NO: 1176442 - RNA, 19 nt, Human
uugacaggauuauuggaaa

SEQ ID NO: 1176443 - RNA, 10 nt, Human
uugacagggc

SEQ ID NO: 1176444 - RNA, 12 nt, Human
uugacagggcac

SEQ ID NO: 1176445 - RNA, 19 nt, Human
uugacagggcacaccgggc

SEQ ID NO: 1176446 - RNA, 16 nt, Human
uugacaucaacugcau

SEQ ID NO: 1176447 - RNA, 13 nt, Human
uugacaugggaca

SEQ ID NO: 1176448 - RNA, 21 nt, Human
uugagugcugucuccauguuu

SEQ ID NO: 1176449 - RNA, 17 nt, Human
uugauacuacaguuugu

SEQ ID NO: 1176450 - RNA, 18 nt, Human
uugauagcacagacccug

SEQ ID NO: 1176451 - RNA, 23 nt, Human
aucuaauauguaacaagccaccc

SEQ ID NO: 1176452 - RNA, 18 nt, Human
aucuagauacuguaucau

SEQ ID NO: 1176453 - RNA, 19 nt, Human
aucuagauacuguaucaug

SEQ ID NO: 1176454 - RNA, 17 nt, Human
aucuaggaagacuuugg

SEQ ID NO: 1176455 - RNA, 18 nt, Human
aucuaggaagacuuugga

SEQ ID NO: 1176456 - RNA, 19 nt, Human
aucuaggaagacuuuggaa

SEQ ID NO: 1176457 - RNA, 22 nt, Human
aucuaggaagacuuuggaaaga

SEQ ID NO: 1176458 - RNA, 14 nt, Human
aucucaaauaacua

SEQ ID NO: 1176459 - RNA, 21 nt, Human
aucucaaauaacuaaaaggua

SEQ ID NO: 1176460 - RNA, 23 nt, Human
aucucaaauaacuaaaagguaug

SEQ ID NO: 1176461 - RNA, 14 nt, Human
aucucaaauuucua

SEQ ID NO: 1176462 - RNA, 16 nt, Human
aucucaaauuucuaaa

SEQ ID NO: 1176463 - RNA, 17 nt, Human
aucucaaauuucuaaau

SEQ ID NO: 1176464 - RNA, 23 nt, Human
aucucacacaugagcaucaggcc

SEQ ID NO: 1176465 - RNA, 13 nt, Human
aucucaauauuuc

SEQ ID NO: 1176466 - RNA, 15 nt, Human
aucucaccuccugcu

SEQ ID NO: 1176467 - RNA, 16 nt, Human
aucucaccuccugcug

SEQ ID NO: 1176468 - RNA, 17 nt, Human
aucucaccuccugcugg

SEQ ID NO: 1176469 - RNA, 12 nt, Human
aucugaaaaugu

SEQ ID NO: 1176470 - RNA, 23 nt, Human
uugauguucuuucacccuuuucu

SEQ ID NO: 1176471 - RNA, 15 nt, Human
uugauuaaauucuug

SEQ ID NO: 1176472 - RNA, 16 nt, Human
uugauuaaauucuugc

SEQ ID NO: 1176473 - RNA, 20 nt, Human
uugauuaaauucuugcaaag

SEQ ID NO: 1176474 - RNA, 21 nt, Human
uugauuaaauucuugcaaagu

SEQ ID NO: 1176475 - RNA, 22 nt, Human
uugcaagccagauuuuccugaa

SEQ ID NO: 1176476 - RNA, 14 nt, Human
uugcaauggcagcc

SEQ ID NO: 1176477 - RNA, 21 nt, Human
uugcaccacugcacuccagcc

SEQ ID NO: 1176478 - RNA, 14 nt, Human
uugcaugaggcuag

SEQ ID NO: 1176479 - RNA, 13 nt, Human
uugcccaggcagg

SEQ ID NO: 1176480 - RNA, 14 nt, Human
uugcccaggcaggu

SEQ ID NO: 1176481 - RNA, 16 nt, Human
uugcccaggcaggucu

SEQ ID NO: 1176482 - RNA, 18 nt, Human
uugcccaggcaggucuug

SEQ ID NO: 1176483 - RNA, 11 nt, Human
uugcccaggcu

SEQ ID NO: 1176484 - RNA, 12 nt, Human
uugcccaggcug

SEQ ID NO: 1176485 - RNA, 14 nt, Human
uugcccaggcuggc

SEQ ID NO: 1176486 - RNA, 23 nt, Human
uugcccaggcuggcgugcagugg

SEQ ID NO: 1176487 - RNA, 15 nt, Human
uugcuuugugauuuu

SEQ ID NO: 1176488 - RNA, 20 nt, Human
uugcuuugugauuuuuguaa

SEQ ID NO: 1176489 - RNA, 17 nt, Human
uuggaaaauaaauuauu

SEQ ID NO: 1176490 - RNA, 15 nt, Human
uuggagaagaacuga

SEQ ID NO: 1176491 - RNA, 17 nt, Human
uuggagaagaacugaaa

SEQ ID NO: 1176492 - RNA, 22 nt, Human
uuggagaagaacugaaaucaua

SEQ ID NO: 1176493 - RNA, 16 nt, Human
aucuuauaauuuaaaa

SEQ ID NO: 1176494 - RNA, 14 nt, Human
aucuugcucugcug

SEQ ID NO: 1176495 - RNA, 15 nt, Human
aucuuauaauuuaaa

SEQ ID NO: 1176496 - RNA, 15 nt, Human
aucuugcucugcuga

SEQ ID NO: 1176497 - RNA, 16 nt, Human
aucuugcucugcugac

SEQ ID NO: 1176498 - RNA, 17 nt, Human
aucuugcucugcugaca

SEQ ID NO: 1176499 - RNA, 12 nt, Human
aucugucauuug

SEQ ID NO: 1176500 - RNA, 17 nt, Human
aucugucauuugagcag

SEQ ID NO: 1176501 - RNA, 22 nt, Human
aucugucauuugagcagggcuc

SEQ ID NO: 1176502 - RNA, 13 nt, Human
augaaauauuaug

SEQ ID NO: 1176503 - RNA, 23 nt, Human
augaaccacaucuugcucugcug

SEQ ID NO: 1176504 - RNA, 23 nt, Human
augaagcauuuacuuuguguuca

SEQ ID NO: 1176505 - RNA, 17 nt, Human
augaaugaaacauuuug

SEQ ID NO: 1176506 - RNA, 13 nt, Human
augaaugaauggc

SEQ ID NO: 1176507 - RNA, 16 nt, Human
augaaugucaguguga

SEQ ID NO: 1176508 - RNA, 18 nt, Human
augaaugucagugugacu

SEQ ID NO: 1176509 - RNA, 20 nt, Human
augaaugucagugugacuga

SEQ ID NO: 1176510 - RNA, 18 nt, Human
uuggugguuucagaaaug

SEQ ID NO: 1176511 - RNA, 19 nt, Human
uuggugguuucagaaaugu

SEQ ID NO: 1176512 - RNA, 16 nt, Human
uuggguggaugccugg

SEQ ID NO: 1176513 - RNA, 17 nt, Human
uuggugucgggcaugac

SEQ ID NO: 1176514 - RNA, 18 nt, Human
uuggugucgggcaugaca

SEQ ID NO: 1176515 - RNA, 19 nt, Human
uuggugucgggcaugacac

SEQ ID NO: 1176516 - RNA, 14 nt, Human
uugguuuguaaauu

SEQ ID NO: 1176517 - RNA, 15 nt, Human
augaggucagagccu

SEQ ID NO: 1176518 - RNA, 16 nt, Human
augaggucagagccug

SEQ ID NO: 1176519 - RNA, 18 nt, Human
augaggucagagccugca

SEQ ID NO: 1176520 - RNA, 19 nt, Human
augaggucagagccugcag

SEQ ID NO: 1176521 - RNA, 20 nt, Human
augaggucagagccugcagu

SEQ ID NO: 1176522 - RNA, 22 nt, Human
augaggucagagccugcaguua

SEQ ID NO: 1176523 - RNA, 15 nt, Human
augagguacugagag

SEQ ID NO: 1176524 - RNA, 17 nt, Human
augagguacugagagug

SEQ ID NO: 1176525 - RNA, 18 nt, Human
augagguacugagaguga

SEQ ID NO: 1176526 - RNA, 13 nt, Human
augaguccccugu

SEQ ID NO: 1176527 - RNA, 23 nt, Human
augaguccccuguuuguuucuga

SEQ ID NO: 1176528 - RNA, 20 nt, Human
uugucaauaaaauccauaca

SEQ ID NO: 1176529 - RNA, 17 nt, Human
uugucacacacuuuggc

SEQ ID NO: 1176530 - RNA, 18 nt, Human
uugucacacacuuuggcu

SEQ ID NO: 1176531 - RNA, 21 nt, Human
uugucauauaagauucauauu

SEQ ID NO: 1176532 - RNA, 18 nt, Human
uuguccccaccgcagaca

SEQ ID NO: 1176533 - RNA, 20 nt, Human
uuguccccaccgcagacagg

SEQ ID NO: 1176534 - RNA, 15 nt, Human
uuguccccgacccuu

SEQ ID NO: 1176535 - RNA, 16 nt, Human
uuguccccgacccuug

SEQ ID NO: 1176536 - RNA, 13 nt, Human
uugugaggaagcc

SEQ ID NO: 1176537 - RNA, 17 nt, Human
uugugaggaagccgcug

SEQ ID NO: 1176538 - RNA, 18 nt, Human
uugugaggaagccgcugg

SEQ ID NO: 1176539 - RNA, 20 nt, Human
uugugauacaaugcugugcc

SEQ ID NO: 1176540 - RNA, 21 nt, Human
uugugaggaagccgcuggggc

SEQ ID NO: 1176541 - RNA, 18 nt, Human
uuuaaaaaaauuccaagu

SEQ ID NO: 1176542 - RNA, 23 nt, Human
augcacuuuguucuggcucuucc

SEQ ID NO: 1176543 - RNA, 17 nt, Human
uuguucuugguuuguaa

SEQ ID NO: 1176544 - RNA, 19 nt, Human
uuguucuugguuuguaaau

SEQ ID NO: 1176545 - RNA, 20 nt, Human
uuguucuugguuuguaaauu

SEQ ID NO: 1176546 - RNA, 13 nt, Human
augauuucauuca

SEQ ID NO: 1176547 - RNA, 16 nt, Human
uuuaaugaaagacugu

SEQ ID NO: 1176548 - RNA, 20 nt, Human
uuuaaggaugcuuguacaua

SEQ ID NO: 1176549 - RNA, 21 nt, Human
uuuaaggaugcuuguacauaa

SEQ ID NO: 1176550 - RNA, 22 nt, Human
uuuaaggaugcuuguacauaau

SEQ ID NO: 1176551 - RNA, 12 nt, Human
uuuaagagaaau

SEQ ID NO: 1176552 - RNA, 14 nt, Human
uuuaagaggcaggg

SEQ ID NO: 1176553 - RNA, 21 nt, Human
uuuaagcuguuacugucuuca

SEQ ID NO: 1176554 - RNA, 19 nt, Human
uuuaaggaugcuuguacau

SEQ ID NO: 1176555 - RNA, 21 nt, Human
uuuaaauauaugcuaagucuu

SEQ ID NO: 1176556 - RNA, 11 nt, Human
uuuaaaugcac

SEQ ID NO: 1176557 - RNA, 14 nt, Human
uuuaaaugcugcuu

SEQ ID NO: 1176558 - RNA, 20 nt, Human
uuuaaaaaagaaacauuugg

SEQ ID NO: 1176559 - RNA, 23 nt, Human
uuuaaaaauacagauagauauau

SEQ ID NO: 1176560 - RNA, 17 nt, Human
augcccagccccuucug

SEQ ID NO: 1176561 - RNA, 21 nt, Human
augccaugaggaacaaggcaa

SEQ ID NO: 1176562 - RNA, 16 nt, Human
augcccagccccuucu

SEQ ID NO: 1176563 - RNA, 21 nt, Human
uuuaaugaaagacuguacaaa

SEQ ID NO: 1176564 - RNA, 23 nt, Human
uuuaaugaaagacuguacaaagu

SEQ ID NO: 1176565 - RNA, 17 nt, Human
augccucucucaggcca

SEQ ID NO: 1176566 - RNA, 22 nt, Human
augcgugcauaccacuuuuguu

SEQ ID NO: 1176567 - RNA, 13 nt, Human
augccucucucag

SEQ ID NO: 1176568 - RNA, 14 nt, Human
augccucucucagg

SEQ ID NO: 1176569 - RNA, 15 nt, Human
augccucucucaggc

SEQ ID NO: 1176570 - RNA, 20 nt, Human
augccuuuucccaacuccag

SEQ ID NO: 1176571 - RNA, 22 nt, Human
augccuuuucccaacuccagaa

SEQ ID NO: 1176572 - RNA, 18 nt, Human
uuuaccugaagucuuugu

SEQ ID NO: 1176573 - RNA, 22 nt, Human
uuuaccugaagucuuuguacag

SEQ ID NO: 1176574 - RNA, 16 nt, Human
uuuacugcagcuuugu

SEQ ID NO: 1176575 - RNA, 11 nt, Human
uuuacuuaaac

SEQ ID NO: 1176576 - RNA, 21 nt, Human
uuuauaugcuucuguuuuaua

SEQ ID NO: 1176577 - RNA, 13 nt, Human
uuuacuucuuaua

SEQ ID NO: 1176578 - RNA, 14 nt, Human
uuuacuucuuauac

SEQ ID NO: 1176579 - RNA, 15 nt, Human
uuuacuucuuauaca

SEQ ID NO: 1176580 - RNA, 17 nt, Human
auggaagacagcucuua

SEQ ID NO: 1176581 - RNA, 18 nt, Human
auggaagacagcucuuau

SEQ ID NO: 1176582 - RNA, 21 nt, Human
augcuucuguuuuauaauuuu

SEQ ID NO: 1176583 - RNA, 16 nt, Human
augcuucucacugcca

SEQ ID NO: 1176584 - RNA, 20 nt, Human
augcuucucacugccaugcc

SEQ ID NO: 1176585 - RNA, 19 nt, Human
augcuggcuguuggcuggg

SEQ ID NO: 1176586 - RNA, 20 nt, Human
augcuggcuguuggcugggg

SEQ ID NO: 1176587 - RNA, 22 nt, Human
augcuggcuguuggcugggggc

SEQ ID NO: 1176588 - RNA, 22 nt, Human
augcuguauuuuaaaagaauga

SEQ ID NO: 1176589 - RNA, 23 nt, Human
augcuguauuuuaaaagaaugau

SEQ ID NO: 1176590 - RNA, 14 nt, Human
uuuaucagaauucu

SEQ ID NO: 1176591 - RNA, 14 nt, Human
augcuccuggccca

SEQ ID NO: 1176592 - RNA, 19 nt, Human
augcuccuggcccacugca

SEQ ID NO: 1176593 - RNA, 18 nt, Human
augcuggcuguuggcugg

SEQ ID NO: 1176594 - RNA, 19 nt, Human
uuucaaacauauauaacaa

SEQ ID NO: 1176595 - RNA, 12 nt, Human
uuucaaacuuua

SEQ ID NO: 1176596 - RNA, 15 nt, Human
uuucaaacuuuacua

SEQ ID NO: 1176597 - RNA, 16 nt, Human
uuucccuauuagagaa

SEQ ID NO: 1176598 - RNA, 11 nt, Human
uuucagaaaug

SEQ ID NO: 1176599 - RNA, 12 nt, Human
uuucagaaaugu

SEQ ID NO: 1176600 - RNA, 13 nt, Human
uuucagaaaugug

SEQ ID NO: 1176601 - RNA, 12 nt, Human
uuuggcugcuga

SEQ ID NO: 1176602 - RNA, 13 nt, Human
uuuggcugcugaa

SEQ ID NO: 1176603 - RNA, 13 nt, Human
uuuggggaagaac

SEQ ID NO: 1176604 - RNA, 21 nt, Human
uuugggguacccacugcucug

SEQ ID NO: 1176605 - RNA, 22 nt, Human
uuugggguacccacugcucugg

SEQ ID NO: 1176606 - RNA, 22 nt, Human
uuuggauuggaugaauuccaaa

SEQ ID NO: 1176607 - RNA, 19 nt, Human
uuugcuaagcauuccaacu

SEQ ID NO: 1176608 - RNA, 20 nt, Human
uuugcuggagcucugcccau

SEQ ID NO: 1176609 - RNA, 18 nt, Human
uuugauucagacagcugc

SEQ ID NO: 1176610 - RNA, 13 nt, Human
uuugagacagagu

SEQ ID NO: 1176611 - RNA, 15 nt, Human
uuugauccaagcugg

SEQ ID NO: 1176612 - RNA, 15 nt, Human
uuugauucagacagc

SEQ ID NO: 1176613 - RNA, 23 nt, Human
uuucccucccuuccucuuuccau

SEQ ID NO: 1176614 - RNA, 14 nt, Human
uuugacaaggggca

SEQ ID NO: 1176615 - RNA, 19 nt, Human
uuugaccucugcagcaaua

SEQ ID NO: 1176616 - RNA, 21 nt, Human
uuugaccucugcagcaauaaa

SEQ ID NO: 1176617 - RNA, 15 nt, Human
augugaugagaggaa

SEQ ID NO: 1176618 - RNA, 16 nt, Human
uuuguaauuuuuuuau

SEQ ID NO: 1176619 - RNA, 14 nt, Human
uuuguacagacaac

SEQ ID NO: 1176620 - RNA, 17 nt, Human
uuuguaguguuggagaa

SEQ ID NO: 1176621 - RNA, 13 nt, Human
uuugucuuaaaaa

SEQ ID NO: 1176622 - RNA, 14 nt, Human
uuugucuuaaaaag

SEQ ID NO: 1176623 - RNA, 23 nt, Human
uuugucuuaaaaaguggaaaaau

SEQ ID NO: 1176624 - RNA, 16 nt, Human
uuugugauacaaugcu

SEQ ID NO: 1176625 - RNA, 22 nt, Human
uuugugauacaaugcugugccc

SEQ ID NO: 1176626 - RNA, 19 nt, Human
uuugugcauuaucuagaua

SEQ ID NO: 1176627 - RNA, 22 nt, Human
uuugugcauuaucuagauacug

SEQ ID NO: 1176628 - RNA, 14 nt, Human
uuuguuucugaaag

SEQ ID NO: 1176629 - RNA, 16 nt, Human
uuuguuucugaaaggg

SEQ ID NO: 1176630 - RNA, 23 nt, Human
augucgucaaagcugaaauggac

SEQ ID NO: 1176631 - RNA, 13 nt, Human
augugagaccauu

SEQ ID NO: 1176632 - RNA, 14 nt, Human
augugagacugguu

SEQ ID NO: 1176633 - RNA, 19 nt, Human
auguauauuuuauaucaau

SEQ ID NO: 1176634 - RNA, 12 nt, Human
auguaucaauga

SEQ ID NO: 1176635 - RNA, 15 nt, Human
auguaucaaugagua

SEQ ID NO: 1176636 - RNA, 16 nt, Human
auguccaagaagccca

SEQ ID NO: 1176637 - RNA, 17 nt, Human
auguccaagaagcccag

SEQ ID NO: 1176638 - RNA, 18 nt, Human
auguccaagaagcccagg

SEQ ID NO: 1176639 - RNA, 16 nt, Human
auguugcccaggcagg

SEQ ID NO: 1176640 - RNA, 13 nt, Human
auguuggccaggc

SEQ ID NO: 1176641 - RNA, 21 nt, Human
uuuuagacccuauugcugcuu

SEQ ID NO: 1176642 - RNA, 17 nt, Human
uuuuagaguugauacua

SEQ ID NO: 1176643 - RNA, 12 nt, Human
auguugaaagau

SEQ ID NO: 1176644 - RNA, 18 nt, Human
auguugaaagaucaaaag

SEQ ID NO: 1176645 - RNA, 13 nt, Human
auguugcccaggc

SEQ ID NO: 1176646 - RNA, 14 nt, Human
auguugcccaggca

SEQ ID NO: 1176647 - RNA, 15 nt, Human
auguugcccaggcag

SEQ ID NO: 1176648 - RNA, 20 nt, Human
auguuacauaagauaaaugu

SEQ ID NO: 1176649 - RNA, 19 nt, Human
auguuacauaagauaaaug

SEQ ID NO: 1176650 - RNA, 18 nt, Human
uuuuaaaaaacugcugac

SEQ ID NO: 1176651 - RNA, 21 nt, Human
uuuuaaaaaacugcugacugu

SEQ ID NO: 1176652 - RNA, 21 nt, Human
augugccagguuuuuggucug

SEQ ID NO: 1176653 - RNA, 21 nt, Human
augugcuaguaauuggaaagg

SEQ ID NO: 1176654 - RNA, 17 nt, Human
auguuggccaggcuggu

SEQ ID NO: 1176655 - RNA, 13 nt, Human
uuuucuguucuuu

SEQ ID NO: 1176656 - RNA, 17 nt, Human
auguuuuucuucucccu

SEQ ID NO: 1176657 - RNA, 23 nt, Human
auuaaaaaucucaaauuucuaaa

SEQ ID NO: 1176658 - RNA, 19 nt, Human
auuaaaacacaacaucuuu

SEQ ID NO: 1176659 - RNA, 16 nt, Human
uuuucuauaauuuaaa

SEQ ID NO: 1176660 - RNA, 20 nt, Human
uuuucaggcuagauguaugu

SEQ ID NO: 1176661 - RNA, 14 nt, Human
uuuucaguguacau

SEQ ID NO: 1176662 - RNA, 18 nt, Human
uuuuauggcuuuugugca

SEQ ID NO: 1176663 - RNA, 19 nt, Human
uuuuauggcuuuugugcau

SEQ ID NO: 1176664 - RNA, 23 nt, Human
uuuuagaguugauacuacaguuu

SEQ ID NO: 1176665 - RNA, 15 nt, Human
uuuuaguagagacag

SEQ ID NO: 1176666 - RNA, 21 nt, Human
uuuuauggcuuuugugcauua

SEQ ID NO: 1176667 - RNA, 12 nt, Human
uuuuauuaaauu

SEQ ID NO: 1176668 - RNA, 13 nt, Human
auuaaggaagaca

SEQ ID NO: 1176669 - RNA, 18 nt, Human
auuaaguacuauguauca

SEQ ID NO: 1176670 - RNA, 19 nt, Human
auuaaguacuauguaucaa

SEQ ID NO: 1176671 - RNA, 17 nt, Human
uuuuuauauuugaaaua

SEQ ID NO: 1176672 - RNA, 23 nt, Human
auuaaaacacaacaucuuuuucu

SEQ ID NO: 1176673 - RNA, 14 nt, Human
uuuugugaagcaaa

SEQ ID NO: 1176674 - RNA, 16 nt, Human
uuuuguuuuugucuua

SEQ ID NO: 1176675 - RNA, 15 nt, Human
auuacuguaagaaaa

SEQ ID NO: 1176676 - RNA, 16 nt, Human
auuacuguaagaaaau

SEQ ID NO: 1176677 - RNA, 13 nt, Human
auuacuucugcua

SEQ ID NO: 1176678 - RNA, 14 nt, Human
auuacuucugcuac

SEQ ID NO: 1176679 - RNA, 13 nt, Human
auuagagaagaga

SEQ ID NO: 1176680 - RNA, 17 nt, Human
auuccaagugauugaaa

SEQ ID NO: 1176681 - RNA, 18 nt, Human
auucccaagcucugcucc

SEQ ID NO: 1176682 - RNA, 19 nt, Human
auucccaagcucugcuccu

SEQ ID NO: 1176683 - RNA, 20 nt, Human
auuccccaggaggccagccu

SEQ ID NO: 1176684 - RNA, 22 nt, Human
auuccccaggaggccagccuug

SEQ ID NO: 1176685 - RNA, 16 nt, Human
auucaguuguuagugu

SEQ ID NO: 1176686 - RNA, 20 nt, Human
auuauauggcuugaguuuaa

SEQ ID NO: 1176687 - RNA, 16 nt, Human
auuggagcucguggaa

SEQ ID NO: 1176688 - RNA, 17 nt, Human
auuggagcucgugggac

SEQ ID NO: 1176689 - RNA, 19 nt, Human
auuggagcucgugggacag

SEQ ID NO: 1176690 - RNA, 19 nt, Human
auuggcuagagguucaaag

SEQ ID NO: 1176691 - RNA, 20 nt, Human
auuggcuagagguucaaaga

SEQ ID NO: 1176692 - RNA, 22 nt, Human
auuggcuagagguucaaagaua

SEQ ID NO: 1176693 - RNA, 23 nt, Human
auuggcuagagguucaaagauau

SEQ ID NO: 1176694 - RNA, 17 nt, Human
auugcaacaggcugggc

SEQ ID NO: 1176695 - RNA, 18 nt, Human
auugcaacaggcugggcu

SEQ ID NO: 1176696 - RNA, 19 nt, Human
auugcaacaggcugggcuu

SEQ ID NO: 1176697 - RNA, 12 nt, Human
auugcaccacug

SEQ ID NO: 1176698 - RNA, 21 nt, Human
auuugaggucuguucuuucca

SEQ ID NO: 1176699 - RNA, 22 nt, Human
auuugaggucuguucuuuccaa

SEQ ID NO: 1176700 - RNA, 15 nt, Human
auuugagcagggcuc

SEQ ID NO: 1176701 - RNA, 16 nt, Human
auuugagcagggcuca

SEQ ID NO: 1176702 - RNA, 17 nt, Human
auuugaggucuguucuu

SEQ ID NO: 1176703 - RNA, 18 nt, Human
auuugaggucuguucuuu

SEQ ID NO: 1176704 - RNA, 16 nt, Human
auuucuuccacaagag

SEQ ID NO: 1176705 - RNA, 14 nt, Human
auuucccaaagcag

SEQ ID NO: 1176706 - RNA, 16 nt, Human
auuucccaaagcagug

SEQ ID NO: 1176707 - RNA, 19 nt, Human
auuuauuacuguaagaaaa

SEQ ID NO: 1176708 - RNA, 20 nt, Human
auuuauuacuguaagaaaau

SEQ ID NO: 1176709 - RNA, 19 nt, Human
auuuacuucuuauacauuu

SEQ ID NO: 1176710 - RNA, 20 nt, Human
auuuacuucuuauacauuug

SEQ ID NO: 1176711 - RNA, 16 nt, Human
auuguaguccuguaau

SEQ ID NO: 1176712 - RNA, 17 nt, Human
auuguuuucaguguaca

SEQ ID NO: 1176713 - RNA, 18 nt, Human
auuguuuucaguguacau

SEQ ID NO: 1176714 - RNA, 19 nt, Human
auuguuuucaguguacaug

SEQ ID NO: 1176715 - RNA, 17 nt, Human
auuuaaaaaaaaaccug

SEQ ID NO: 1176716 - RNA, 14 nt, Human
auuuaaaaaaaauc

SEQ ID NO: 1176717 - RNA, 15 nt, Human
auuuaccacuugugu

SEQ ID NO: 1176718 - RNA, 22 nt, Human
auuuaccacuuguguuuugcaa

SEQ ID NO: 1176719 - RNA, 23 nt, Human
cuccaggugcacaagcuccaagc

SEQ ID NO: 1176720 - RNA, 23 nt, Human
cuccaggcuccuuuagcgcccag

SEQ ID NO: 1176721 - RNA, 20 nt, Human
cuccaggcuguaucccauga

SEQ ID NO: 1176722 - RNA, 22 nt, Human
cuccaggcuguaucccaugagc

SEQ ID NO: 1176723 - RNA, 20 nt, Human
cucccucuuucccucccuuc

SEQ ID NO: 1176724 - RNA, 15 nt, Human
cucccaggcauuccc

SEQ ID NO: 1176725 - RNA, 13 nt, Human
cuccucugcugcu

SEQ ID NO: 1176726 - RNA, 14 nt, Human
cuccucugcugcug

SEQ ID NO: 1176727 - RNA, 15 nt, Human
cuccucugcugcugg

SEQ ID NO: 1176728 - RNA, 19 nt, Human
cuccuggcccacugcaucg

SEQ ID NO: 1176729 - RNA, 19 nt, Human
cuccuggccucaagugauu

SEQ ID NO: 1176730 - RNA, 18 nt, Human
cuccugggcuaagugauc

SEQ ID NO: 1176731 - RNA, 16 nt, Human
cuccuguaccucuuga

SEQ ID NO: 1176732 - RNA, 15 nt, Human
cuccuuucaccacau

SEQ ID NO: 1176733 - RNA, 14 nt, Human
cuccuuguguuacu

SEQ ID NO: 1176734 - RNA, 17 nt, Human
cuccuuugugaggaagc

SEQ ID NO: 1176735 - RNA, 18 nt, Human
cuccuuugugaggaagcc

SEQ ID NO: 1176736 - RNA, 23 nt, Human
cuccuuugugaggaagccgcugg

SEQ ID NO: 1176737 - RNA, 16 nt, Human
cucgguguggagaagc

SEQ ID NO: 1176738 - RNA, 17 nt, Human
cucgguguggagaagcg

SEQ ID NO: 1176739 - RNA, 23 nt, Human
cucgguguggagaagcggcuggc

SEQ ID NO: 1176740 - RNA, 19 nt, Human
cucuauguucuaagaagug

SEQ ID NO: 1176741 - RNA, 16 nt, Human
cucuccccaugauguu

SEQ ID NO: 1176742 - RNA, 13 nt, Human
cucuccuccagag

SEQ ID NO: 1176743 - RNA, 15 nt, Human
cucuccuccagaguc

SEQ ID NO: 1176744 - RNA, 16 nt, Human
cucuccuccagaguca

SEQ ID NO: 1176745 - RNA, 14 nt, Human
cucucuggccuucg

SEQ ID NO: 1176746 - RNA, 16 nt, Human
cucucuggccuucggc

SEQ ID NO: 1176747 - RNA, 17 nt, Human
cucucuggccuucggcc

SEQ ID NO: 1176748 - RNA, 20 nt, Human
cucugcacaagcugcacccu

SEQ ID NO: 1176749 - RNA, 21 nt, Human
cucugcacaagcugcacccuc

SEQ ID NO: 1176750 - RNA, 15 nt, Human
cucugcacuccccug

SEQ ID NO: 1176751 - RNA, 16 nt, Human
cucugcacuccccugc

SEQ ID NO: 1176752 - RNA, 17 nt, Human
cucugcacuccccugcu

SEQ ID NO: 1176753 - RNA, 18 nt, Human
cucugcacuccccugcug

SEQ ID NO: 1176754 - RNA, 21 nt, Human
cucugcuccucuccccagcaa

SEQ ID NO: 1176755 - RNA, 21 nt, Human
cucugcugacagacacaggcc

SEQ ID NO: 1176756 - RNA, 22 nt, Human
cucugcugacagacacaggccc

SEQ ID NO: 1176757 - RNA, 23 nt, Human
cucugcugacagacacaggcccg

SEQ ID NO: 1176758 - RNA, 13 nt, Human
cucugcugcuggc

SEQ ID NO: 1176759 - RNA, 14 nt, Human
cucugcugcuggcu

SEQ ID NO: 1176760 - RNA, 15 nt, Human
cucugcugcuggcug

SEQ ID NO: 1176761 - RNA, 16 nt, Human
cucugcugcuggcugg

SEQ ID NO: 1176762 - RNA, 14 nt, Human
cucuguacagagcc

SEQ ID NO: 1176763 - RNA, 15 nt, Human
cucuguacagagccc

SEQ ID NO: 1176764 - RNA, 16 nt, Human
cucuguacagagccca

SEQ ID NO: 1176765 - RNA, 17 nt, Human
cucuguacagagcccac

SEQ ID NO: 1176766 - RNA, 13 nt, Human
cucuguccuggga

SEQ ID NO: 1176767 - RNA, 23 nt, Human
cucaggugucccugcacuugcag

SEQ ID NO: 1176768 - RNA, 15 nt, Human
cucaguccauagcag

SEQ ID NO: 1176769 - RNA, 17 nt, Human
cucaguccauagcagag

SEQ ID NO: 1176770 - RNA, 16 nt, Human
cucaguccaugaagau

SEQ ID NO: 1176771 - RNA, 22 nt, Human
cucagucuggcccuuccuuuuc

SEQ ID NO: 1176772 - RNA, 13 nt, Human
cucaggccugggg

SEQ ID NO: 1176773 - RNA, 19 nt, Human
cucaggccaaacucaccug

SEQ ID NO: 1176774 - RNA, 20 nt, Human
cucaggccaaacucaccugc

SEQ ID NO: 1176775 - RNA, 21 nt, Human
cucaggccaaacucaccugcc

SEQ ID NO: 1176776 - RNA, 16 nt, Human
cucaggccagcugcuu

SEQ ID NO: 1176777 - RNA, 17 nt, Human
cucaggccagcugcuug

SEQ ID NO: 1176778 - RNA, 18 nt, Human
cucaggccagcugcuugg

SEQ ID NO: 1176779 - RNA, 20 nt, Human
cucaggccagcugcuugggc

SEQ ID NO: 1176780 - RNA, 11 nt, Human
cucaggccugg

SEQ ID NO: 1176781 - RNA, 17 nt, Human
cucaccuuucccaucuu

SEQ ID NO: 1176782 - RNA, 13 nt, Human
cucagaagacacu

SEQ ID NO: 1176783 - RNA, 15 nt, Human
cucagaagacacuga

SEQ ID NO: 1176784 - RNA, 17 nt, Human
cucagaagacacugaug

SEQ ID NO: 1176785 - RNA, 20 nt, Human
cucagaagacacugaugggc

SEQ ID NO: 1176786 - RNA, 22 nt, Human
cucagaagacacugaugggcaa

SEQ ID NO: 1176787 - RNA, 23 nt, Human
cucagaagacacugaugggcaac

SEQ ID NO: 1176788 - RNA, 19 nt, Human
cucagccucccgaauagcu

SEQ ID NO: 1176789 - RNA, 21 nt, Human
cucagccucccgaauagcugg

SEQ ID NO: 1176790 - RNA, 22 nt, Human
cucagccucccgaauagcuggg

SEQ ID NO: 1176791 - RNA, 23 nt, Human
cucagccucccgaauagcuggga

SEQ ID NO: 1176792 - RNA, 18 nt, Human
cuaucucauuuccaagca

SEQ ID NO: 1176793 - RNA, 13 nt, Human
cuaucucccccag

SEQ ID NO: 1176794 - RNA, 14 nt, Human
cuaucucccccagc

SEQ ID NO: 1176795 - RNA, 14 nt, Human
cuaugugagaccau

SEQ ID NO: 1176796 - RNA, 17 nt, Human
cuaugugagcacaaagg

SEQ ID NO: 1176797 - RNA, 18 nt, Human
cuauguucuaagaaguga

SEQ ID NO: 1176798 - RNA, 14 nt, Human
cuauguugcccagg

SEQ ID NO: 1176799 - RNA, 18 nt, Human
cuauguugcccaggcagg

SEQ ID NO: 1176800 - RNA, 19 nt, Human
cuauguugcccaggcaggu

SEQ ID NO: 1176801 - RNA, 21 nt, Human
cuauguugcccaggcaggucu

SEQ ID NO: 1176802 - RNA, 22 nt, Human
cuauguugcccaggcaggucuu

SEQ ID NO: 1176803 - RNA, 23 nt, Human
cucaauuauuuugcauuuuuucu

SEQ ID NO: 1176804 - RNA, 13 nt, Human
ccuguucagcucc

SEQ ID NO: 1176805 - RNA, 18 nt, Human
ccuguucccaugagauga

SEQ ID NO: 1176806 - RNA, 12 nt, Human
ccuguucuggca

SEQ ID NO: 1176807 - RNA, 17 nt, Human
ccuguucuggcagaguu

SEQ ID NO: 1176808 - RNA, 14 nt, Human
ccuguucagcucca

SEQ ID NO: 1176809 - RNA, 15 nt, Human
ccuguucagcuccag

SEQ ID NO: 1176810 - RNA, 16 nt, Human
ccuguucagcuccagc

SEQ ID NO: 1176811 - RNA, 19 nt, Human
ccuguucagcuccagcuca

SEQ ID NO: 1176812 - RNA, 20 nt, Human
ccuguucagcuccagcucac

SEQ ID NO: 1176813 - RNA, 21 nt, Human
ccuguucagcuccagcucacc

SEQ ID NO: 1176814 - RNA, 23 nt, Human
ccuguucagcuccagcucaccag

SEQ ID NO: 1176815 - RNA, 16 nt, Human
ccuguugggccaggag

SEQ ID NO: 1176816 - RNA, 17 nt, Human
ccuguugggccaggagc

SEQ ID NO: 1176817 - RNA, 18 nt, Human
ccuguugggccaggagcc

SEQ ID NO: 1176818 - RNA, 19 nt, Human
ccuguugggccaggagccu

SEQ ID NO: 1176819 - RNA, 20 nt, Human
ccuguugggccaggagccuc

SEQ ID NO: 1176820 - RNA, 23 nt, Human
ccuguugggccaggagccuccug

SEQ ID NO: 1176821 - RNA, 16 nt, Human
ccuuagcaaauucugu

SEQ ID NO: 1176822 - RNA, 19 nt, Human
ccuuagcagggaaacagcu

SEQ ID NO: 1176823 - RNA, 20 nt, Human
ccuuagcagggaaacagcua

SEQ ID NO: 1176824 - RNA, 12 nt, Human
ccuuauggaaca

SEQ ID NO: 1176825 - RNA, 12 nt, Human
ccuucccaccuc

SEQ ID NO: 1176826 - RNA, 14 nt, Human
ccuucccaccucuc

SEQ ID NO: 1176827 - RNA, 19 nt, Human
ccuucccaccucucucacu

SEQ ID NO: 1176828 - RNA, 14 nt, Human
ccuuauggaacacu

SEQ ID NO: 1176829 - RNA, 16 nt, Human
ccuuauggaacacucu

SEQ ID NO: 1176830 - RNA, 17 nt, Human
ccuuauggaacacucug

SEQ ID NO: 1176831 - RNA, 18 nt, Human
ccuuauggaacacucuga

SEQ ID NO: 1176832 - RNA, 19 nt, Human
ccuuauggaacacucugag

SEQ ID NO: 1176833 - RNA, 20 nt, Human
ccuuauggaacacucugaga

SEQ ID NO: 1176834 - RNA, 22 nt, Human
ccuuauggaacacucugagacu

SEQ ID NO: 1176835 - RNA, 20 nt, Human
ccuucucuccagccccugga

SEQ ID NO: 1176836 - RNA, 21 nt, Human
ccuucucuccagccccuggau

SEQ ID NO: 1176837 - RNA, 23 nt, Human
ccuucucuccagccccuggaugc

SEQ ID NO: 1176838 - RNA, 14 nt, Human
ccuucucugaagga

SEQ ID NO: 1176839 - RNA, 16 nt, Human
ccuucucugaaggaca

SEQ ID NO: 1176840 - RNA, 22 nt, Human
ccuucuguccuacucuguguca

SEQ ID NO: 1176841 - RNA, 17 nt, Human
ccuucucuucacaguca

SEQ ID NO: 1176842 - RNA, 21 nt, Human
ccuucuguccuacucuguguc

SEQ ID NO: 1176843 - RNA, 15 nt, Human
ccuuucaauaggaaa

SEQ ID NO: 1176844 - RNA, 17 nt, Human
ccuuucaauaggaaaaa

SEQ ID NO: 1176845 - RNA, 18 nt, Human
ccuuucaauaggaaaaac

SEQ ID NO: 1176846 - RNA, 20 nt, Human
ccuuuucgcaggauucuucc

SEQ ID NO: 1176847 - RNA, 12 nt, Human
ccuuuucccaac

SEQ ID NO: 1176848 - RNA, 20 nt, Human
cgcugccccuggcagccccu

SEQ ID NO: 1176849 - RNA, 17 nt, Human
cgcuggagugcagugag

SEQ ID NO: 1176850 - RNA, 18 nt, Human
cgcuggagugcagugagc

SEQ ID NO: 1176851 - RNA, 12 nt, Human
cgggcucugccu

SEQ ID NO: 1176852 - RNA, 13 nt, Human
cgggcucugccuc

SEQ ID NO: 1176853 - RNA, 14 nt, Human
cggcucacugcagc

SEQ ID NO: 1176854 - RNA, 14 nt, Human
cgggccagugcucc

SEQ ID NO: 1176855 - RNA, 18 nt, Human
cgggccagugcuccagcc

SEQ ID NO: 1176856 - RNA, 22 nt, Human
cguacacauuuuauuuuauuau

SEQ ID NO: 1176857 - RNA, 20 nt, Human
cgguggcucacgccuguaau

SEQ ID NO: 1176858 - RNA, 22 nt, Human
cggagucccaccuuggcugcag

SEQ ID NO: 1176859 - RNA, 23 nt, Human
cggagucccaccuuggcugcagg

SEQ ID NO: 1176860 - RNA, 17 nt, Human
cggagacggagucccac

SEQ ID NO: 1176861 - RNA, 20 nt, Human
cggagacggagucccaccuu

SEQ ID NO: 1176862 - RNA, 14 nt, Human
cuaaguuuuuaugg

SEQ ID NO: 1176863 - RNA, 20 nt, Human
cuaaguuuuuauggcuuuug

SEQ ID NO: 1176864 - RNA, 20 nt, Human
cuaauaaaauuuaaaagucu

SEQ ID NO: 1176865 - RNA, 19 nt, Human
cuacaaaaagcauaaaaau

SEQ ID NO: 1176866 - RNA, 14 nt, Human
cuaacuugucuuug

SEQ ID NO: 1176867 - RNA, 22 nt, Human
cuaacuugucuuuggacccuga

SEQ ID NO: 1176868 - RNA, 16 nt, Human
cuaacuuuccuucauu

SEQ ID NO: 1176869 - RNA, 19 nt, Human
cuaaaguguauuuuuuuac

SEQ ID NO: 1176870 - RNA, 19 nt, Human
cgugaguccuggcauggga

SEQ ID NO: 1176871 - RNA, 16 nt, Human
cgugaggccagagaca

SEQ ID NO: 1176872 - RNA, 15 nt, Human
cguguuaugacucca

SEQ ID NO: 1176873 - RNA, 19 nt, Human
cguguuaugacuccagaau

SEQ ID NO: 1176874 - RNA, 11 nt, Human
cuaaagcugcc

SEQ ID NO: 1176875 - RNA, 14 nt, Human
cgugacaacacuug

SEQ ID NO: 1176876 - RNA, 15 nt, Human
cgugacaacacuugu

SEQ ID NO: 1176877 - RNA, 14 nt, Human
cgugagccacugca

SEQ ID NO: 1176878 - RNA, 15 nt, Human
cgugagccacugcac

SEQ ID NO: 1176879 - RNA, 20 nt, Human
cgugagccacugcaccgggc

SEQ ID NO: 1176880 - RNA, 22 nt, Human
cgugagccacugcaccgggcca

SEQ ID NO: 1176881 - RNA, 14 nt, Human
cgugaggccagaga

SEQ ID NO: 1176882 - RNA, 11 nt, Human
ccucaggcagg

SEQ ID NO: 1176883 - RNA, 17 nt, Human
ccucccaacucacccca

SEQ ID NO: 1176884 - RNA, 20 nt, Human
ccucccaacucaccccagcc

SEQ ID NO: 1176885 - RNA, 21 nt, Human
ccucccaacucaccccagccc

SEQ ID NO: 1176886 - RNA, 23 nt, Human
ccucccaacucaccccagcccca

SEQ ID NO: 1176887 - RNA, 13 nt, Human
ccuccgccucuug

SEQ ID NO: 1176888 - RNA, 18 nt, Human
ccuccuuugugaggaagc

SEQ ID NO: 1176889 - RNA, 19 nt, Human
ccuccuuugugaggaagcc

SEQ ID NO: 1176890 - RNA, 20 nt, Human
ccuccuuugugaggaagccg

SEQ ID NO: 1176891 - RNA, 16 nt, Human
ccucgaacuggcugca

SEQ ID NO: 1176892 - RNA, 20 nt, Human
ccucugccucugacacacag

SEQ ID NO: 1176893 - RNA, 21 nt, Human
ccucugccucugacacacagc

SEQ ID NO: 1176894 - RNA, 23 nt, Human
ccucugccucugacacacagcuc

SEQ ID NO: 1176895 - RNA, 11 nt, Human
ccucugccuga

SEQ ID NO: 1176896 - RNA, 20 nt, Human
ccucugccugaagucacaca

SEQ ID NO: 1176897 - RNA, 12 nt, Human
ccucucucacuc

SEQ ID NO: 1176898 - RNA, 21 nt, Human
ccucugccugaagucacacag

SEQ ID NO: 1176899 - RNA, 13 nt, Human
ccucuuggguuca

SEQ ID NO: 1176900 - RNA, 19 nt, Human
ccucuuuggucuacacugu

SEQ ID NO: 1176901 - RNA, 14 nt, Human
ccugcagagggcac

SEQ ID NO: 1176902 - RNA, 23 nt, Human
ccugcaggcagccaggccacaag

SEQ ID NO: 1176903 - RNA, 18 nt, Human
ccugcaggcagccaggcc

SEQ ID NO: 1176904 - RNA, 19 nt, Human
ccugcaggcagccaggcca

SEQ ID NO: 1176905 - RNA, 20 nt, Human
ccugcaggcagccaggccac

SEQ ID NO: 1176906 - RNA, 21 nt, Human
ccugcaggcagccaggccaca

SEQ ID NO: 1176907 - RNA, 12 nt, Human
ccugcagagggc

SEQ ID NO: 1176908 - RNA, 16 nt, Human
ccugcaggcagccagg

SEQ ID NO: 1176909 - RNA, 17 nt, Human
ccugcaggcagccaggc

SEQ ID NO: 1176910 - RNA, 17 nt, Human
ccugaggcugggcuccc

SEQ ID NO: 1176911 - RNA, 19 nt, Human
ccugaggcugggcucccuu

SEQ ID NO: 1176912 - RNA, 21 nt, Human
ccugaggcugggcucccuucc

SEQ ID NO: 1176913 - RNA, 12 nt, Human
ccugaggggccu

SEQ ID NO: 1176914 - RNA, 16 nt, Human
ccugaggggccucuua

SEQ ID NO: 1176915 - RNA, 13 nt, Human
ccugccuccuuug

SEQ ID NO: 1176916 - RNA, 15 nt, Human
ccugccuccuuugug

SEQ ID NO: 1176917 - RNA, 19 nt, Human
ccugccuccuuugugagga

SEQ ID NO: 1176918 - RNA, 20 nt, Human
ccugccuccuuugugaggaa

SEQ ID NO: 1176919 - RNA, 21 nt, Human
ccugccuccuuugugaggaag

SEQ ID NO: 1176920 - RNA, 22 nt, Human
ccugccuccuuugugaggaagc

SEQ ID NO: 1176921 - RNA, 23 nt, Human
ccugccuccuuugugaggaagcc

SEQ ID NO: 1176922 - RNA, 19 nt, Human
ccugccucgaacuggcugc

SEQ ID NO: 1176923 - RNA, 15 nt, Human
ccugccucuucucua

SEQ ID NO: 1176924 - RNA, 11 nt, Human
ccugcugcagu

SEQ ID NO: 1176925 - RNA, 12 nt, Human
ccugcugcaguu

SEQ ID NO: 1176926 - RNA, 16 nt, Human
ccugcugcaguugcca

SEQ ID NO: 1176927 - RNA, 22 nt, Human
ccugcugcaguugccagucacc

SEQ ID NO: 1176928 - RNA, 18 nt, Human
ccgaccagacaccuugac

SEQ ID NO: 1176929 - RNA, 13 nt, Human
ccgaccagacacc

SEQ ID NO: 1176930 - RNA, 17 nt, Human
ccgaccagacaccuuga

SEQ ID NO: 1176931 - RNA, 16 nt, Human
ccgaauagcugggacu

SEQ ID NO: 1176932 - RNA, 17 nt, Human
ccgaauagcugggacua

SEQ ID NO: 1176933 - RNA, 15 nt, Human
cccuuccucuuucca

SEQ ID NO: 1176934 - RNA, 16 nt, Human
ccgaaaacguggcugc

SEQ ID NO: 1176935 - RNA, 17 nt, Human
ccgaaaacguggcugcu

SEQ ID NO: 1176936 - RNA, 19 nt, Human
ccgaaagggacuuggaagc

SEQ ID NO: 1176937 - RNA, 12 nt, Human
ccgcccaggcuu

SEQ ID NO: 1176938 - RNA, 16 nt, Human
ccgcagacaggaccag

SEQ ID NO: 1176939 - RNA, 17 nt, Human
ccgcagacaggaccagg

SEQ ID NO: 1176940 - RNA, 13 nt, Human
cccugucuaauga

SEQ ID NO: 1176941 - RNA, 21 nt, Human
cccugugauggggcccugccu

SEQ ID NO: 1176942 - RNA, 22 nt, Human
cccugugauggggcccugccuc

SEQ ID NO: 1176943 - RNA, 23 nt, Human
cccugugauggggcccugccucc

SEQ ID NO: 1176944 - RNA, 19 nt, Human
ccuagcauacguacacauu

SEQ ID NO: 1176945 - RNA, 21 nt, Human
ccuagcauacguacacauuuu

SEQ ID NO: 1176946 - RNA, 20 nt, Human
ccuagccugugccucuggga

SEQ ID NO: 1176947 - RNA, 14 nt, Human
ccuaaucuucugaa

SEQ ID NO: 1176948 - RNA, 15 nt, Human
ccggcuccaggcucc

SEQ ID NO: 1176949 - RNA, 14 nt, Human
ccgucuaccugagg

SEQ ID NO: 1176950 - RNA, 15 nt, Human
ccgucuaccugaggg

SEQ ID NO: 1176951 - RNA, 13 nt, Human
ccggcuccaggcu

SEQ ID NO: 1176952 - RNA, 14 nt, Human
ccggcuccaggcuc

SEQ ID NO: 1176953 - RNA, 17 nt, Human
ccgucuaccugaggggc

SEQ ID NO: 1176954 - RNA, 12 nt, Human
ccgugaggccag

SEQ ID NO: 1176955 - RNA, 13 nt, Human
ccgugaggccaga

SEQ ID NO: 1176956 - RNA, 14 nt, Human
ccgugaggccagag

SEQ ID NO: 1176957 - RNA, 16 nt, Human
ccgugaggccagagac

SEQ ID NO: 1176958 - RNA, 20 nt, Human
ccuaacgaaguauccuucag

SEQ ID NO: 1176959 - RNA, 16 nt, Human
ccggccaccugcggug

SEQ ID NO: 1176960 - RNA, 11 nt, Human
cccugcccugu

SEQ ID NO: 1176961 - RNA, 13 nt, Human
cccuggaugcagc

SEQ ID NO: 1176962 - RNA, 17 nt, Human
cccuggaugcagccuca

SEQ ID NO: 1176963 - RNA, 21 nt, Human
cccuggaugcagccucacagu

SEQ ID NO: 1176964 - RNA, 22 nt, Human
cccugcccaccuggccucugca

SEQ ID NO: 1176965 - RNA, 14 nt, Human
cccugcccggcugc

SEQ ID NO: 1176966 - RNA, 17 nt, Human
cccugcccggcugcgga

SEQ ID NO: 1176967 - RNA, 16 nt, Human
cccugagcuuucugcu

SEQ ID NO: 1176968 - RNA, 18 nt, Human
cccugaaagcccugagcu

SEQ ID NO: 1176969 - RNA, 12 nt, Human
cccugaaggccc

SEQ ID NO: 1176970 - RNA, 13 nt, Human
cccugaaggcccc

SEQ ID NO: 1176971 - RNA, 14 nt, Human
cccugaaggccccg

SEQ ID NO: 1176972 - RNA, 16 nt, Human
cccugaaggccccgcc

SEQ ID NO: 1176973 - RNA, 19 nt, Human
cccugaaggccccgcccag

SEQ ID NO: 1176974 - RNA, 20 nt, Human
cccugaaggccccgcccagg

SEQ ID NO: 1176975 - RNA, 22 nt, Human
cccugaaggccccgcccaggcu

SEQ ID NO: 1176976 - RNA, 14 nt, Human
cccugacaacacuc

SEQ ID NO: 1176977 - RNA, 16 nt, Human
cccugacaacacucau

SEQ ID NO: 1176978 - RNA, 22 nt, Human
cccugacaacacucauugaccu

SEQ ID NO: 1176979 - RNA, 13 nt, Human
ccaugagccucag

SEQ ID NO: 1176980 - RNA, 16 nt, Human
ccaugaggaacaaggc

SEQ ID NO: 1176981 - RNA, 17 nt, Human
ccaugaggaacaaggca

SEQ ID NO: 1176982 - RNA, 18 nt, Human
ccaugaggaacaaggcaa

SEQ ID NO: 1176983 - RNA, 18 nt, Human
ccaugggcacugugggua

SEQ ID NO: 1176984 - RNA, 22 nt, Human
ccauuguggucacaggaaguag

SEQ ID NO: 1176985 - RNA, 17 nt, Human
cccaagcucugcuccuc

SEQ ID NO: 1176986 - RNA, 12 nt, Human
cccaagcucugc

SEQ ID NO: 1176987 - RNA, 15 nt, Human
cccacccaagggccu

SEQ ID NO: 1176988 - RNA, 18 nt, Human
cccacccaagggccuggc

SEQ ID NO: 1176989 - RNA, 15 nt, Human
cccaccgcagacagg

SEQ ID NO: 1176990 - RNA, 18 nt, Human
cccaccgcagacaggacc

SEQ ID NO: 1176991 - RNA, 19 nt, Human
cccaccgcagacaggacca

SEQ ID NO: 1176992 - RNA, 14 nt, Human
ccccagccccaucc

SEQ ID NO: 1176993 - RNA, 14 nt, Human
ccccagccccaaaa

SEQ ID NO: 1176994 - RNA, 16 nt, Human
ccccagccccauccca

SEQ ID NO: 1176995 - RNA, 12 nt, Human
ccccagccccaa

SEQ ID NO: 1176996 - RNA, 18 nt, Human
ccccaaaacucuccucug

SEQ ID NO: 1176997 - RNA, 20 nt, Human
ccccaaaacucuccucugcu

SEQ ID NO: 1176998 - RNA, 21 nt, Human
ccccaaaacucuccucugcug

SEQ ID NO: 1176999 - RNA, 14 nt, Human
cccccuuccaugga

SEQ ID NO: 1177000 - RNA, 15 nt, Human
ccccauuguggucac

SEQ ID NO: 1177001 - RNA, 12 nt, Human
ccccgcccaggc

SEQ ID NO: 1177002 - RNA, 14 nt, Human
ccccgcccaggcuu

SEQ ID NO: 1177003 - RNA, 14 nt, Human
ccccggccaccugc

SEQ ID NO: 1177004 - RNA, 18 nt, Human
ccccggccaccugcggug

SEQ ID NO: 1177005 - RNA, 19 nt, Human
cccagcccacuucugccau

SEQ ID NO: 1177006 - RNA, 21 nt, Human
cccagccccaaaacucuccuc

SEQ ID NO: 1177007 - RNA, 23 nt, Human
cccagccccaaaacucuccucug

SEQ ID NO: 1177008 - RNA, 13 nt, Human
cccagccccaaug

SEQ ID NO: 1177009 - RNA, 20 nt, Human
cccauccucuguacagagcc

SEQ ID NO: 1177010 - RNA, 15 nt, Human
cccauccucuguaca

SEQ ID NO: 1177011 - RNA, 19 nt, Human
cccauccucuguacagagc

SEQ ID NO: 1177012 - RNA, 21 nt, Human
cccaggcuggcgugcaguggu

SEQ ID NO: 1177013 - RNA, 19 nt, Human
cccaggcuggcgugcagug

SEQ ID NO: 1177014 - RNA, 20 nt, Human
cccaggcuggcgugcagugg

SEQ ID NO: 1177015 - RNA, 18 nt, Human
cccaggcuggcgugcagu

SEQ ID NO: 1177016 - RNA, 14 nt, Human
cccauccucuguac

SEQ ID NO: 1177017 - RNA, 15 nt, Human
ccaggggccaugaau

SEQ ID NO: 1177018 - RNA, 20 nt, Human
ccaggggugggacacccugu

SEQ ID NO: 1177019 - RNA, 21 nt, Human
ccaggggugggacacccugug

SEQ ID NO: 1177020 - RNA, 22 nt, Human
ccaggggugggacacccuguga

SEQ ID NO: 1177021 - RNA, 23 nt, Human
ccaggggugggacacccugugau

SEQ ID NO: 1177022 - RNA, 19 nt, Human
ccaguaucuugaagacuuu

SEQ ID NO: 1177023 - RNA, 22 nt, Human
ccaguaucuugaagacuuuucu

SEQ ID NO: 1177024 - RNA, 16 nt, Human
ccagucaccccggcca

SEQ ID NO: 1177025 - RNA, 17 nt, Human
ccagucaccccggccac

SEQ ID NO: 1177026 - RNA, 18 nt, Human
ccagucaccccggccacc

SEQ ID NO: 1177027 - RNA, 19 nt, Human
ccagucaccccggccaccu

SEQ ID NO: 1177028 - RNA, 11 nt, Human
ccagcagccug

SEQ ID NO: 1177029 - RNA, 12 nt, Human
ccagcagccugg

SEQ ID NO: 1177030 - RNA, 16 nt, Human
ccagcagaaaugccuu

SEQ ID NO: 1177031 - RNA, 17 nt, Human
ccagcagaaaugccuua

SEQ ID NO: 1177032 - RNA, 22 nt, Human
ccagcagaaaugccuuacccuc

SEQ ID NO: 1177033 - RNA, 13 nt, Human
ccagcagccugga

SEQ ID NO: 1177034 - RNA, 23 nt, Human
ccagccccauccucuguacagag

SEQ ID NO: 1177035 - RNA, 14 nt, Human
ccagcagccuggac

SEQ ID NO: 1177036 - RNA, 13 nt, Human
ccagccccuggau

SEQ ID NO: 1177037 - RNA, 14 nt, Human
ccagccccuggaug

SEQ ID NO: 1177038 - RNA, 15 nt, Human
ccagccccuggaugc

SEQ ID NO: 1177039 - RNA, 18 nt, Human
ccagccccuggaugcagc

SEQ ID NO: 1177040 - RNA, 15 nt, Human
ccagccccuucugac

SEQ ID NO: 1177041 - RNA, 16 nt, Human
ccagccccuucugacc

SEQ ID NO: 1177042 - RNA, 17 nt, Human
ccagccccuucugaccc

SEQ ID NO: 1177043 - RNA, 18 nt, Human
ccagccccuucugaccca

SEQ ID NO: 1177044 - RNA, 20 nt, Human
ccaggaaaggcuccaggagc

SEQ ID NO: 1177045 - RNA, 18 nt, Human
ccaggaaaggcuccagga

SEQ ID NO: 1177046 - RNA, 19 nt, Human
ccaggaaaggcuccaggag

SEQ ID NO: 1177047 - RNA, 13 nt, Human
ccacuuucuagcc

SEQ ID NO: 1177048 - RNA, 18 nt, Human
ccacuuucuagccagagg

SEQ ID NO: 1177049 - RNA, 19 nt, Human
ccacuuucuagccagagga

SEQ ID NO: 1177050 - RNA, 20 nt, Human
ccacuuucuagccagaggag

SEQ ID NO: 1177051 - RNA, 15 nt, Human
ccacuuggucuguga

SEQ ID NO: 1177052 - RNA, 16 nt, Human
ccacuuggucugugag

SEQ ID NO: 1177053 - RNA, 17 nt, Human
ccacuuggucugugaga

SEQ ID NO: 1177054 - RNA, 19 nt, Human
ccacuuggucugugagaug

SEQ ID NO: 1177055 - RNA, 20 nt, Human
ccacuuggucugugagaugc

SEQ ID NO: 1177056 - RNA, 22 nt, Human
ccacuuggucugugagaugcua

SEQ ID NO: 1177057 - RNA, 14 nt, Human
ccacuuuuguucuu

SEQ ID NO: 1177058 - RNA, 15 nt, Human
ccacuuuuguucuug

SEQ ID NO: 1177059 - RNA, 21 nt, Human
ccacuuuuguucuugguuugu

SEQ ID NO: 1177060 - RNA, 22 nt, Human
ccacuuuuguucuugguuugua

SEQ ID NO: 1177061 - RNA, 17 nt, Human
ccagacccggcugcgug

SEQ ID NO: 1177062 - RNA, 12 nt, Human
ccacuuggucug

SEQ ID NO: 1177063 - RNA, 18 nt, Human
ccacugcacuccagccug

SEQ ID NO: 1177064 - RNA, 19 nt, Human
ccacugcacuauagccuag

SEQ ID NO: 1177065 - RNA, 20 nt, Human
ccacugcacuauagccuagg

SEQ ID NO: 1177066 - RNA, 13 nt, Human
ccacugcaccggg

SEQ ID NO: 1177067 - RNA, 14 nt, Human
ccacugcaccgggc

SEQ ID NO: 1177068 - RNA, 17 nt, Human
ccacugcaccgggccac

SEQ ID NO: 1177069 - RNA, 19 nt, Human
ccacugcaccgggccacag

SEQ ID NO: 1177070 - RNA, 15 nt, Human
ccagaugcaccagcc

SEQ ID NO: 1177071 - RNA, 14 nt, Human
ccagaugcaccagc

SEQ ID NO: 1177072 - RNA, 13 nt, Human
ccagaugcaccag

SEQ ID NO: 1177073 - RNA, 13 nt, Human
ccagagagggugg

SEQ ID NO: 1177074 - RNA, 16 nt, Human
ccagagacacaagccu

SEQ ID NO: 1177075 - RNA, 18 nt, Human
ccagagacacaagccuuc

SEQ ID NO: 1177076 - RNA, 18 nt, Human
cauccugaggcuccacuu

SEQ ID NO: 1177077 - RNA, 19 nt, Human
cauccugaggcuccacuug

SEQ ID NO: 1177078 - RNA, 12 nt, Human
caucccagcccc

SEQ ID NO: 1177079 - RNA, 22 nt, Human
cauccucuguacagagcccacg

SEQ ID NO: 1177080 - RNA, 20 nt, Human
caucccaaacccuucagugc

SEQ ID NO: 1177081 - RNA, 11 nt, Human
caucccagccc

SEQ ID NO: 1177082 - RNA, 19 nt, Human
caucccaaacccuucagug

SEQ ID NO: 1177083 - RNA, 21 nt, Human
caucagcacgauuucuguuua

SEQ ID NO: 1177084 - RNA, 16 nt, Human
cauagguuuaauaauu

SEQ ID NO: 1177085 - RNA, 19 nt, Human
cauagcagcuuauucacaa

SEQ ID NO: 1177086 - RNA, 20 nt, Human
cauagcagcuuauucacaag

SEQ ID NO: 1177087 - RNA, 23 nt, Human
cauacaggaagguagaaauaucu

SEQ ID NO: 1177088 - RNA, 22 nt, Human
caguuguuagugugucuuagug

SEQ ID NO: 1177089 - RNA, 23 nt, Human
caguuuguuaguaugaggcauuu

SEQ ID NO: 1177090 - RNA, 21 nt, Human
caguuauuauauuuacaaaug

SEQ ID NO: 1177091 - RNA, 17 nt, Human
caguuauuauauuuaca

SEQ ID NO: 1177092 - RNA, 21 nt, Human
cagugguaugaucacggcuca

SEQ ID NO: 1177093 - RNA, 19 nt, Human
caguggugcgaucuggguu

SEQ ID NO: 1177094 - RNA, 20 nt, Human
caguggugcgaucuggguuc

SEQ ID NO: 1177095 - RNA, 20 nt, Human
caguuacucagaauucucua

SEQ ID NO: 1177096 - RNA, 23 nt, Human
cagucugauucccaagcucugcu

SEQ ID NO: 1177097 - RNA, 21 nt, Human
cagugcccacaggaucagucu

SEQ ID NO: 1177098 - RNA, 22 nt, Human
cagugcccacaggaucagucug

SEQ ID NO: 1177099 - RNA, 16 nt, Human
cagugggagcugccug

SEQ ID NO: 1177100 - RNA, 17 nt, Human
cagugggagcugccugu

SEQ ID NO: 1177101 - RNA, 18 nt, Human
cagugggagcugccuguu

SEQ ID NO: 1177102 - RNA, 20 nt, Human
cagugguaugaucacggcuc

SEQ ID NO: 1177103 - RNA, 21 nt, Human
cagucugauucccaagcucug

SEQ ID NO: 1177104 - RNA, 22 nt, Human
cagucugauucccaagcucugc

SEQ ID NO: 1177105 - RNA, 22 nt, Human
caguuauuauauuuacaaaugg

SEQ ID NO: 1177106 - RNA, 23 nt, Human
ccaauggacuaacuugucuuugg

SEQ ID NO: 1177107 - RNA, 14 nt, Human
ccaaugggagcuca

SEQ ID NO: 1177108 - RNA, 15 nt, Human
ccaaaucagcugcua

SEQ ID NO: 1177109 - RNA, 23 nt, Human
ccaaaucagcugcuacuacuccu

SEQ ID NO: 1177110 - RNA, 16 nt, Human
ccaaaucauaguggcu

SEQ ID NO: 1177111 - RNA, 13 nt, Human
ccaacucacccca

SEQ ID NO: 1177112 - RNA, 21 nt, Human
ccaacucaccccagccccaaa

SEQ ID NO: 1177113 - RNA, 14 nt, Human
ccaacucaccccag

SEQ ID NO: 1177114 - RNA, 21 nt, Human
ccaacuccagaaagugacaag

SEQ ID NO: 1177115 - RNA, 14 nt, Human
ccaagcucugcucc

SEQ ID NO: 1177116 - RNA, 15 nt, Human
ccaagcucugcuccu

SEQ ID NO: 1177117 - RNA, 16 nt, Human
ccaagcucugcuccuc

SEQ ID NO: 1177118 - RNA, 17 nt, Human
ccaagcucugcuccucu

SEQ ID NO: 1177119 - RNA, 22 nt, Human
ccaaaguacacuguuucaaacu

SEQ ID NO: 1177120 - RNA, 14 nt, Human
ccaaagugcuggga

SEQ ID NO: 1177121 - RNA, 23 nt, Human
cauuuuuuuuaagaaaaaggaug

SEQ ID NO: 1177122 - RNA, 17 nt, Human
cauuuguuugaacugau

SEQ ID NO: 1177123 - RNA, 17 nt, Human
cauuuguauaaaauaau

SEQ ID NO: 1177124 - RNA, 14 nt, Human
cauuuguauaaaau

SEQ ID NO: 1177125 - RNA, 16 nt, Human
cauuuguauaaaauaa

SEQ ID NO: 1177126 - RNA, 21 nt, Human
cauuuggugguuucagaaaug

SEQ ID NO: 1177127 - RNA, 17 nt, Human
ccaaaaaaugcuugcuu

SEQ ID NO: 1177128 - RNA, 14 nt, Human
ccaaaaggcagaag

SEQ ID NO: 1177129 - RNA, 16 nt, Human
cauuuaggugaggaag

SEQ ID NO: 1177130 - RNA, 18 nt, Human
cauuuaggugaggaagca

SEQ ID NO: 1177131 - RNA, 18 nt, Human
cauguuggccaggcuggu

SEQ ID NO: 1177132 - RNA, 17 nt, Human
cauguuggccaggcugg

SEQ ID NO: 1177133 - RNA, 18 nt, Human
cauguucuuaauucuuag

SEQ ID NO: 1177134 - RNA, 19 nt, Human
cauguuggccaggcugguc

SEQ ID NO: 1177135 - RNA, 15 nt, Human
cauguccaagaagcc

SEQ ID NO: 1177136 - RNA, 16 nt, Human
cauguccaagaagccc

SEQ ID NO: 1177137 - RNA, 16 nt, Human
cauguuacauaagaua

SEQ ID NO: 1177138 - RNA, 17 nt, Human
cauguuacauaagauaa

SEQ ID NO: 1177139 - RNA, 21 nt, Human
cauguuacauaagauaaaugu

SEQ ID NO: 1177140 - RNA, 13 nt, Human
cauguucuuaauu

SEQ ID NO: 1177141 - RNA, 16 nt, Human
cauguucuuaauucuu

SEQ ID NO: 1177142 - RNA, 12 nt, Human
cauuaucuagau

SEQ ID NO: 1177143 - RNA, 18 nt, Human
cauucuccaccugccagg

SEQ ID NO: 1177144 - RNA, 19 nt, Human
cauucuccaccugccaggg

SEQ ID NO: 1177145 - RNA, 21 nt, Human
cauucuccaccugccagggac

SEQ ID NO: 1177146 - RNA, 18 nt, Human
caugggaaaggggaaguu

SEQ ID NO: 1177147 - RNA, 21 nt, Human
cauggccucuucagaucucua

SEQ ID NO: 1177148 - RNA, 22 nt, Human
cauggccucuucagaucucuaa

SEQ ID NO: 1177149 - RNA, 20 nt, Human
caugcuccuggcccacugca

SEQ ID NO: 1177150 - RNA, 17 nt, Human
caugcuccuggcccacu

SEQ ID NO: 1177151 - RNA, 14 nt, Human
caugcuccuggccc

SEQ ID NO: 1177152 - RNA, 16 nt, Human
caugcuccuggcccac

SEQ ID NO: 1177153 - RNA, 13 nt, Human
caugacaaagacu

SEQ ID NO: 1177154 - RNA, 14 nt, Human
caugaugcgggcca

SEQ ID NO: 1177155 - RNA, 15 nt, Human
caugaugcgggccag

SEQ ID NO: 1177156 - RNA, 20 nt, Human
caugaugcgggccagugcuc

SEQ ID NO: 1177157 - RNA, 12 nt, Human
caugcaagguca

SEQ ID NO: 1177158 - RNA, 15 nt, Human
caugcaaggucauuu

SEQ ID NO: 1177159 - RNA, 21 nt, Human
cagcggaaagcccugugcucc

SEQ ID NO: 1177160 - RNA, 18 nt, Human
cagcuaacauggaaguac

SEQ ID NO: 1177161 - RNA, 15 nt, Human
cagcuaacauggaag

SEQ ID NO: 1177162 - RNA, 16 nt, Human
cagccugcuccagcug

SEQ ID NO: 1177163 - RNA, 17 nt, Human
cagccugcuccagcugu

SEQ ID NO: 1177164 - RNA, 19 nt, Human
cagccugcuccagcuguuc

SEQ ID NO: 1177165 - RNA, 21 nt, Human
cagcugacuuuucuguccgag

SEQ ID NO: 1177166 - RNA, 19 nt, Human
cagcugagggugagugggu

SEQ ID NO: 1177167 - RNA, 19 nt, Human
caggaaaggcuccaggagc

SEQ ID NO: 1177168 - RNA, 20 nt, Human
caggaaaggcuccaggagca

SEQ ID NO: 1177169 - RNA, 16 nt, Human
caggaaagagaacuuc

SEQ ID NO: 1177170 - RNA, 20 nt, Human
caggaaagagaacuuccaga

SEQ ID NO: 1177171 - RNA, 16 nt, Human
caggaaaggcuccagg

SEQ ID NO: 1177172 - RNA, 17 nt, Human
caggaaaggcuccagga

SEQ ID NO: 1177173 - RNA, 20 nt, Human
cagcuguaugauucccagcc

SEQ ID NO: 1177174 - RNA, 14 nt, Human
cagcuuauugucua

SEQ ID NO: 1177175 - RNA, 20 nt, Human
cagcuuauugucuagugaaa

SEQ ID NO: 1177176 - RNA, 21 nt, Human
caggcugggagagccuuccag

SEQ ID NO: 1177177 - RNA, 14 nt, Human
caggccuccuacag

SEQ ID NO: 1177178 - RNA, 17 nt, Human
caggggaaaaucagccu

SEQ ID NO: 1177179 - RNA, 14 nt, Human
caggggaaaagagg

SEQ ID NO: 1177180 - RNA, 16 nt, Human
caggggaaaagaggag

SEQ ID NO: 1177181 - RNA, 22 nt, Human
caggcugggagagccuuccagg

SEQ ID NO: 1177182 - RNA, 23 nt, Human
caggcugggagagccuuccaggg

SEQ ID NO: 1177183 - RNA, 11 nt, Human
caggccaggcc

SEQ ID NO: 1177184 - RNA, 12 nt, Human
caggccaggccc

SEQ ID NO: 1177185 - RNA, 16 nt, Human
caggaccucaggugag

SEQ ID NO: 1177186 - RNA, 23 nt, Human
caggaccucaggugagaagcaga

SEQ ID NO: 1177187 - RNA, 19 nt, Human
caggaggaucacuugaguc

SEQ ID NO: 1177188 - RNA, 19 nt, Human
caggaggccagccuugacc

SEQ ID NO: 1177189 - RNA, 22 nt, Human
caggaggccagccuugaccauu

SEQ ID NO: 1177190 - RNA, 15 nt, Human
caggcaaugcuggcu

SEQ ID NO: 1177191 - RNA, 16 nt, Human
caggcaaugcuggcug

SEQ ID NO: 1177192 - RNA, 17 nt, Human
caggcaaugcuggcugu

SEQ ID NO: 1177193 - RNA, 13 nt, Human
cagacagcugccu

SEQ ID NO: 1177194 - RNA, 14 nt, Human
cagacagcugccug

SEQ ID NO: 1177195 - RNA, 15 nt, Human
cagacagcugccugg

SEQ ID NO: 1177196 - RNA, 16 nt, Human
cagacagcugccuggg

SEQ ID NO: 1177197 - RNA, 17 nt, Human
cagacagcugccuggga

SEQ ID NO: 1177198 - RNA, 18 nt, Human
cagacagcugccugggau

SEQ ID NO: 1177199 - RNA, 13 nt, Human
cagacaggaccag

SEQ ID NO: 1177200 - RNA, 15 nt, Human
cagacaggaccaggg

SEQ ID NO: 1177201 - RNA, 16 nt, Human
cagacaggaccaggga

SEQ ID NO: 1177202 - RNA, 17 nt, Human
cagacaggaccagggau

SEQ ID NO: 1177203 - RNA, 24 nt, Human
cagacaggaccagggauuuccaug

SEQ ID NO: 1177204 - RNA, 11 nt, Human
cagacaggcaa

SEQ ID NO: 1177205 - RNA, 13 nt, Human
cagacaggcaagc

SEQ ID NO: 1177206 - RNA, 18 nt, Human
cagacaggcaagcaccuc

SEQ ID NO: 1177207 - RNA, 20 nt, Human
cagacaggcaagcaccuccu

SEQ ID NO: 1177208 - RNA, 21 nt, Human
cagacaggcaagcaccuccug

SEQ ID NO: 1177209 - RNA, 22 nt, Human
cagacaggcaagcaccuccugc

SEQ ID NO: 1177210 - RNA, 23 nt, Human
cagacaggcaagcaccuccugcc

SEQ ID NO: 1177211 - RNA, 17 nt, Human
cagacucuacagaggcc

SEQ ID NO: 1177212 - RNA, 18 nt, Human
cagacucuacagaggcca

SEQ ID NO: 1177213 - RNA, 19 nt, Human
cagacucuacagaggccau

SEQ ID NO: 1177214 - RNA, 20 nt, Human
cagacucuacagaggccaug

SEQ ID NO: 1177215 - RNA, 21 nt, Human
cagacucuacagaggccaugg

SEQ ID NO: 1177216 - RNA, 23 nt, Human
cagacucuacagaggccaugggc

SEQ ID NO: 1177217 - RNA, 13 nt, Human
cagacuggaagca

SEQ ID NO: 1177218 - RNA, 14 nt, Human
cagacuggaagcac

SEQ ID NO: 1177219 - RNA, 16 nt, Human
cagacuggaagcacag

SEQ ID NO: 1177220 - RNA, 17 nt, Human
cagacuggaagcacagc

SEQ ID NO: 1177221 - RNA, 18 nt, Human
cagacuggaagcacagcu

SEQ ID NO: 1177222 - RNA, 20 nt, Human
cagacuggaagcacagcuuc

SEQ ID NO: 1177223 - RNA, 21 nt, Human
cagacuggaagcacagcuuca

SEQ ID NO: 1177224 - RNA, 14 nt, Human
cagcacgauuucug

SEQ ID NO: 1177225 - RNA, 15 nt, Human
cagcacgauuucugu

SEQ ID NO: 1177226 - RNA, 18 nt, Human
cagauugcaacaggcugg

SEQ ID NO: 1177227 - RNA, 21 nt, Human
cagauugcaacaggcugggcu

SEQ ID NO: 1177228 - RNA, 19 nt, Human
cagauugcaacaggcuggg

SEQ ID NO: 1177229 - RNA, 20 nt, Human
cagauugcaacaggcugggc

SEQ ID NO: 1177230 - RNA, 13 nt, Human
cagauuucacucu

SEQ ID NO: 1177231 - RNA, 20 nt, Human
cagauuucacucuccuuggu

SEQ ID NO: 1177232 - RNA, 19 nt, Human
cagauuugaacucuucaau

SEQ ID NO: 1177233 - RNA, 17 nt, Human
cagcaccaucucuccuc

SEQ ID NO: 1177234 - RNA, 19 nt, Human
cagcaccaucucuccuccu

SEQ ID NO: 1177235 - RNA, 14 nt, Human
cagaggggguggcc

SEQ ID NO: 1177236 - RNA, 16 nt, Human
cagaggggguggccuc

SEQ ID NO: 1177237 - RNA, 17 nt, Human
cagaggggguggccucc

SEQ ID NO: 1177238 - RNA, 19 nt, Human
cagauacuuggggggcuga

SEQ ID NO: 1177239 - RNA, 19 nt, Human
cagauagauauaugcucug

SEQ ID NO: 1177240 - RNA, 12 nt, Human
cagagagggugg

SEQ ID NO: 1177241 - RNA, 13 nt, Human
cagagaggguggg

SEQ ID NO: 1177242 - RNA, 17 nt, Human
cagagaggguggugacc

SEQ ID NO: 1177243 - RNA, 20 nt, Human
cagagaggguggugaccucu

SEQ ID NO: 1177244 - RNA, 22 nt, Human
cagagaggguggugaccucugc

SEQ ID NO: 1177245 - RNA, 23 nt, Human
cagagaggguggugaccucugcc

SEQ ID NO: 1177246 - RNA, 20 nt, Human
cagagagguuaaggugggua

SEQ ID NO: 1177247 - RNA, 13 nt, Human
cagagcugccacc

SEQ ID NO: 1177248 - RNA, 16 nt, Human
cagagcugccaccugc

SEQ ID NO: 1177249 - RNA, 17 nt, Human
cagaggaaagcaaagga

SEQ ID NO: 1177250 - RNA, 19 nt, Human
cagaggaaagcaaaggaga

SEQ ID NO: 1177251 - RNA, 20 nt, Human
cagaggaaagcaaaggagau

SEQ ID NO: 1177252 - RNA, 13 nt, Human
cagaggggguggc

SEQ ID NO: 1177253 - RNA, 16 nt, Human
auuacaggugugaacc

SEQ ID NO: 1177254 - RNA, 14 nt, Human
auucauauuuacuu

SEQ ID NO: 1177255 - RNA, 22 nt, Human
auugaggacacugauauggguc

SEQ ID NO: 1177256 - RNA, 15 nt, Human
auucucuuauccaac

SEQ ID NO: 1177257 - RNA, 16 nt, Human
auucucuccuguaccu

SEQ ID NO: 1177258 - RNA, 20 nt, Human
auucucuaguuugauuaaau

SEQ ID NO: 1177259 - RNA, 23 nt, Human
auucucuaguuugauuaaauucu

SEQ ID NO: 1177260 - RNA, 12 nt, Human
auucucuuaucc

SEQ ID NO: 1177261 - RNA, 14 nt, Human
auucucuuauccaa

SEQ ID NO: 1177262 - RNA, 20 nt, Human
caaaagguuaauaaaguaau

SEQ ID NO: 1177263 - RNA, 19 nt, Human
caaaagcaucuaugugaga

SEQ ID NO: 1177264 - RNA, 13 nt, Human
caaaagcauguga

SEQ ID NO: 1177265 - RNA, 21 nt, Human
caaaagguauuuuaaucacca

SEQ ID NO: 1177266 - RNA, 12 nt, Human
auuuuuuuuucc

SEQ ID NO: 1177267 - RNA, 19 nt, Human
auuuuuauauuugaaauau

SEQ ID NO: 1177268 - RNA, 22 nt, Human
auuuuguuuuugucuuaaaaag

SEQ ID NO: 1177269 - RNA, 16 nt, Human
auuuuuauuaaauuau

SEQ ID NO: 1177270 - RNA, 19 nt, Human
caaaccaucauugaaaucu

SEQ ID NO: 1177271 - RNA, 17 nt, Human
caaaccaucauugaaau

SEQ ID NO: 1177272 - RNA, 14 nt, Human
caaaccaucauuga

SEQ ID NO: 1177273 - RNA, 16 nt, Human
caaaccaucauugaaa

SEQ ID NO: 1177274 - RNA, 19 nt, Human
auuuucuauaauuuaaaua

SEQ ID NO: 1177275 - RNA, 18 nt, Human
auuuucuauaauuuaaau

SEQ ID NO: 1177276 - RNA, 17 nt, Human
auuuucuauaauuuaaa

SEQ ID NO: 1177277 - RNA, 14 nt, Human
auuuguuauaauga

SEQ ID NO: 1177278 - RNA, 12 nt, Human
auuucacucucc

SEQ ID NO: 1177279 - RNA, 14 nt, Human
auuucacucuccuu

SEQ ID NO: 1177280 - RNA, 21 nt, Human
auuucuguuuagauaauacac

SEQ ID NO: 1177281 - RNA, 20 nt, Human
auuucuguuuagauaauaca

SEQ ID NO: 1177282 - RNA, 12 nt, Human
cacuccagccug

SEQ ID NO: 1177283 - RNA, 21 nt, Human
cacuccagugagacagcucug

SEQ ID NO: 1177284 - RNA, 23 nt, Human
cacugaagaagcaccaaucauga

SEQ ID NO: 1177285 - RNA, 16 nt, Human
cacuacauucuguuaa

SEQ ID NO: 1177286 - RNA, 15 nt, Human
cacuacauucuguua

SEQ ID NO: 1177287 - RNA, 16 nt, Human
cacggaagagccuugc

SEQ ID NO: 1177288 - RNA, 22 nt, Human
cacggaagagccuugcggaagg

SEQ ID NO: 1177289 - RNA, 13 nt, Human
cacuacauucugu

SEQ ID NO: 1177290 - RNA, 14 nt, Human
cacuacauucuguu

SEQ ID NO: 1177291 - RNA, 21 nt, Human
cacgcuggagugcagugagcc

SEQ ID NO: 1177292 - RNA, 16 nt, Human
cacgcuggagugcagu

SEQ ID NO: 1177293 - RNA, 17 nt, Human
cacgcuggagugcagug

SEQ ID NO: 1177294 - RNA, 18 nt, Human
cacgcuggagugcaguga

SEQ ID NO: 1177295 - RNA, 20 nt, Human
cacgcuggagugcagugagc

SEQ ID NO: 1177296 - RNA, 12 nt, Human
cacccugcucuc

SEQ ID NO: 1177297 - RNA, 12 nt, Human
cacccuccuuuc

SEQ ID NO: 1177298 - RNA, 11 nt, Human
caccugccagg

SEQ ID NO: 1177299 - RNA, 12 nt, Human
caccugccaggg

SEQ ID NO: 1177300 - RNA, 18 nt, Human
caccugccccucaacucu

SEQ ID NO: 1177301 - RNA, 21 nt, Human
caccugccccucaacucuccu

SEQ ID NO: 1177302 - RNA, 13 nt, Human
caccugccaggga

SEQ ID NO: 1177303 - RNA, 20 nt, Human
caccugcggugcuaucuccc

SEQ ID NO: 1177304 - RNA, 16 nt, Human
caccugcggugcuauc

SEQ ID NO: 1177305 - RNA, 17 nt, Human
caccugcggugcuaucu

SEQ ID NO: 1177306 - RNA, 19 nt, Human
caccugcggugcuaucucc

SEQ ID NO: 1177307 - RNA, 13 nt, Human
cacaucuugcucu

SEQ ID NO: 1177308 - RNA, 14 nt, Human
cacaucuugcucug

SEQ ID NO: 1177309 - RNA, 15 nt, Human
cacaucuugcucugc

SEQ ID NO: 1177310 - RNA, 20 nt, Human
cacaucuugcucugcugaca

SEQ ID NO: 1177311 - RNA, 21 nt, Human
cacaucuugcucugcugacag

SEQ ID NO: 1177312 - RNA, 22 nt, Human
cacaucuugcucugcugacaga

SEQ ID NO: 1177313 - RNA, 12 nt, Human
cacccagcccac

SEQ ID NO: 1177314 - RNA, 16 nt, Human
cacccagcccacuucu

SEQ ID NO: 1177315 - RNA, 23 nt, Human
cacaucuugcucugcugacagac

SEQ ID NO: 1177316 - RNA, 16 nt, Human
cacaucuugcucugcu

SEQ ID NO: 1177317 - RNA, 16 nt, Human
cacaugaaguccaagc

SEQ ID NO: 1177318 - RNA, 17 nt, Human
cacauuuauucugcuca

SEQ ID NO: 1177319 - RNA, 18 nt, Human
cacauuuauucugcucac

SEQ ID NO: 1177320 - RNA, 17 nt, Human
caccagccccagugccc

SEQ ID NO: 1177321 - RNA, 18 nt, Human
caccagccccagugccca

SEQ ID NO: 1177322 - RNA, 21 nt, Human
caccagccccagugcccacag

SEQ ID NO: 1177323 - RNA, 22 nt, Human
caccagccccagugcccacagg

SEQ ID NO: 1177324 - RNA, 19 nt, Human
caccagcccuuagcaggga

SEQ ID NO: 1177325 - RNA, 21 nt, Human
caccagcccuuagcagggaaa

SEQ ID NO: 1177326 - RNA, 19 nt, Human
caagcuccaagcucccagg

SEQ ID NO: 1177327 - RNA, 21 nt, Human
caagcuccaagcucccaggca

SEQ ID NO: 1177328 - RNA, 18 nt, Human
caagcuccaagcucccag

SEQ ID NO: 1177329 - RNA, 12 nt, Human
caagcucccagg

SEQ ID NO: 1177330 - RNA, 14 nt, Human
caagcucccaggca

SEQ ID NO: 1177331 - RNA, 15 nt, Human
caagcucccaggcau

SEQ ID NO: 1177332 - RNA, 17 nt, Human
caagcucccaggcauuc

SEQ ID NO: 1177333 - RNA, 16 nt, Human
caagcucugcuccucu

SEQ ID NO: 1177334 - RNA, 13 nt, Human
caagcugcacccu

SEQ ID NO: 1177335 - RNA, 20 nt, Human
caaggauugcuacuguccua

SEQ ID NO: 1177336 - RNA, 14 nt, Human
caaggcaaggcugu

SEQ ID NO: 1177337 - RNA, 16 nt, Human
caaggcaaggcuguca

SEQ ID NO: 1177338 - RNA, 17 nt, Human
caaguauuauaccuuuu

SEQ ID NO: 1177339 - RNA, 22 nt, Human
caaguauuauaccuuuuuuaga

SEQ ID NO: 1177340 - RNA, 14 nt, Human
caaucaaaucugcu

SEQ ID NO: 1177341 - RNA, 17 nt, Human
caaucagccuaguugau

SEQ ID NO: 1177342 - RNA, 13 nt, Human
caauggcagccuu

SEQ ID NO: 1177343 - RNA, 14 nt, Human
caauggcagccuug

SEQ ID NO: 1177344 - RNA, 15 nt, Human
caauggcagccuugg

SEQ ID NO: 1177345 - RNA, 12 nt, Human
caaugcuggcug

SEQ ID NO: 1177346 - RNA, 16 nt, Human
caauggcagccuuggc

SEQ ID NO: 1177347 - RNA, 20 nt, Human
caauuuauuauggcacauca

SEQ ID NO: 1177348 - RNA, 14 nt, Human
caagcaccuccugc

SEQ ID NO: 1177349 - RNA, 13 nt, Human
caagcaccuccug

SEQ ID NO: 1177350 - RNA, 14 nt, Human
caagcaaguauuag

SEQ ID NO: 1177351 - RNA, 14 nt, Human
caagaccacguuuc

SEQ ID NO: 1177352 - RNA, 16 nt, Human
caagaccacguuucua

SEQ ID NO: 1177353 - RNA, 15 nt, Human
caagaagcccaggaa

SEQ ID NO: 1177354 - RNA, 12 nt, Human
caacuccagaaa

SEQ ID NO: 1177355 - RNA, 18 nt, Human
caagaagcccaggaaagg

SEQ ID NO: 1177356 - RNA, 17 nt, Human
caagaaggaugauucaa

SEQ ID NO: 1177357 - RNA, 14 nt, Human
caacccccagccug

SEQ ID NO: 1177358 - RNA, 14 nt, Human
caaccccuucgcuc

SEQ ID NO: 1177359 - RNA, 16 nt, Human
caaccccuucgcuccu

SEQ ID NO: 1177360 - RNA, 17 nt, Human
caaccccuucgcuccug

SEQ ID NO: 1177361 - RNA, 19 nt, Human
caacuauauuguuugcuaa

SEQ ID NO: 1177362 - RNA, 19 nt, Human
caacuaucucauuuccaag

SEQ ID NO: 1177363 - RNA, 21 nt, Human
caacuaucucauuuccaagca

SEQ ID NO: 1177364 - RNA, 22 nt, Human
gggucucacuauguugcccagg

SEQ ID NO: 1177365 - RNA, 23 nt, Human
gggucucacuauguugcccaggc

SEQ ID NO: 1177366 - RNA, 12 nt, Human
gggucucacucu

SEQ ID NO: 1177367 - RNA, 20 nt, Human
ggguaucaggugcugccauc

SEQ ID NO: 1177368 - RNA, 16 nt, Human
aaacguggcugcuuca

SEQ ID NO: 1177369 - RNA, 17 nt, Human
aaacguggcugcuucaa

SEQ ID NO: 1177370 - RNA, 20 nt, Human
aaacguggcugcuucaagga

SEQ ID NO: 1177371 - RNA, 16 nt, Human
aaacuggauuaaacuu

SEQ ID NO: 1177372 - RNA, 21 nt, Human
aaaauggacguguuaugacuc

SEQ ID NO: 1177373 - RNA, 21 nt, Human
aaaauguaggguuauaauaau

SEQ ID NO: 1177374 - RNA, 19 nt, Human
aaaauuuuuucucuaggaa

SEQ ID NO: 1177375 - RNA, 22 nt, Human
aaaauuuuuucucuaggaaaua

SEQ ID NO: 1177376 - RNA, 18 nt, Human
aaacaagaccacguuucu

SEQ ID NO: 1177377 - RNA, 17 nt, Human
aaacaaggaugaauuaa

SEQ ID NO: 1177378 - RNA, 14 nt, Human
aaacacaacuauau

SEQ ID NO: 1177379 - RNA, 13 nt, Human
aaacauauauaac

SEQ ID NO: 1177380 - RNA, 16 nt, Human
aaacauauauaacaau

SEQ ID NO: 1177381 - RNA, 19 nt, Human
aaacauauauaacaaugcu

SEQ ID NO: 1177382 - RNA, 21 nt, Human
aaacauauauaacaaugcugu

SEQ ID NO: 1177383 - RNA, 22 nt, Human
aaacaugcuacacacugcaugu

SEQ ID NO: 1177384 - RNA, 15 nt, Human
ggggaccucaggccu

SEQ ID NO: 1177385 - RNA, 16 nt, Human
ggggaccucaggccug

SEQ ID NO: 1177386 - RNA, 17 nt, Human
ggggaccucaggccugg

SEQ ID NO: 1177387 - RNA, 17 nt, Human
ggggccaguuggucccc

SEQ ID NO: 1177388 - RNA, 19 nt, Human
ggggccaguuggucccccu

SEQ ID NO: 1177389 - RNA, 16 nt, Human
ggggcccugccuccuu

SEQ ID NO: 1177390 - RNA, 19 nt, Human
ggggcccugccuccuuugu

SEQ ID NO: 1177391 - RNA, 23 nt, Human
ggggcccugccuccuuugugagg

SEQ ID NO: 1177392 - RNA, 23 nt, Human
gguauuggcuagagguucaaaga

SEQ ID NO: 1177393 - RNA, 20 nt, Human
gguccacccaggagccccga

SEQ ID NO: 1177394 - RNA, 22 nt, Human
gguccacccaggagccccgagg

SEQ ID NO: 1177395 - RNA, 12 nt, Human
ggucccacccca

SEQ ID NO: 1177396 - RNA, 14 nt, Human
ggucccaccccaca

SEQ ID NO: 1177397 - RNA, 14 nt, Human
aaacuuuaccuuuu

SEQ ID NO: 1177398 - RNA, 17 nt, Human
aaacuuuaccuuuuuua

SEQ ID NO: 1177399 - RNA, 15 nt, Human
aaagacuguacaaag

SEQ ID NO: 1177400 - RNA, 19 nt, Human
aaagacuuuuccaacccuc

SEQ ID NO: 1177401 - RNA, 18 nt, Human
aaagagaacuuccagauc

SEQ ID NO: 1177402 - RNA, 12 nt, Human
aaagagagaaaa

SEQ ID NO: 1177403 - RNA, 13 nt, Human
aaagagagaaaau

SEQ ID NO: 1177404 - RNA, 14 nt, Human
aaagagagaaaaua

SEQ ID NO: 1177405 - RNA, 15 nt, Human
aaagagagaaaauaa

SEQ ID NO: 1177406 - RNA, 16 nt, Human
aaagagagaaaauaaa

SEQ ID NO: 1177407 - RNA, 17 nt, Human
aaagagagaaaauaaaa

SEQ ID NO: 1177408 - RNA, 18 nt, Human
aaagagagaaaauaaaaa

SEQ ID NO: 1177409 - RNA, 19 nt, Human
aaagagagaaaauaaaaag

SEQ ID NO: 1177410 - RNA, 21 nt, Human
aaagagagaaaauaaaaaguu

SEQ ID NO: 1177411 - RNA, 22 nt, Human
aaagagagaaaauaaaaaguua

SEQ ID NO: 1177412 - RNA, 13 nt, Human
aaagaggcuaugu

SEQ ID NO: 1177413 - RNA, 18 nt, Human
aaagaggcuaugugagca

SEQ ID NO: 1177414 - RNA, 15 nt, Human
aaagaugagugagca

SEQ ID NO: 1177415 - RNA, 14 nt, Human
aaagaugcuucuca

SEQ ID NO: 1177416 - RNA, 22 nt, Human
ggugcacaagcuccaagcuccc

SEQ ID NO: 1177417 - RNA, 14 nt, Human
ggucugugagaugc

SEQ ID NO: 1177418 - RNA, 24 nt, Human
ggucugugagaugcuagaacuccc

SEQ ID NO: 1177419 - RNA, 12 nt, Human
ggucuguucuuu

SEQ ID NO: 1177420 - RNA, 17 nt, Human
ggucuguucuuuccaaa

SEQ ID NO: 1177421 - RNA, 19 nt, Human
ggucuguucuuuccaaagu

SEQ ID NO: 1177422 - RNA, 22 nt, Human
ggucuugaacuccuggccucaa

SEQ ID NO: 1177423 - RNA, 13 nt, Human
aaaggaauuuaaa

SEQ ID NO: 1177424 - RNA, 11 nt, Human
aaaggaaagag

SEQ ID NO: 1177425 - RNA, 22 nt, Human
aaaggaaagagggagguaagga

SEQ ID NO: 1177426 - RNA, 15 nt, Human
aaagcuuguuaagau

SEQ ID NO: 1177427 - RNA, 17 nt, Human
aaagcagugcaugcugu

SEQ ID NO: 1177428 - RNA, 21 nt, Human
aaagcagugcaugcugucccu

SEQ ID NO: 1177429 - RNA, 22 nt, Human
aaagcagugcaugcugucccuu

SEQ ID NO: 1177430 - RNA, 18 nt, Human
aaagcuaggccuggccag

SEQ ID NO: 1177431 - RNA, 21 nt, Human
aaaacguggcugcuucaagga

SEQ ID NO: 1177432 - RNA, 22 nt, Human
aaaacugauuuuuuuuuccuuc

SEQ ID NO: 1177433 - RNA, 20 nt, Human
aaaacugcugacuguuuucu

SEQ ID NO: 1177434 - RNA, 15 nt, Human
aaaaccaauguucuc

SEQ ID NO: 1177435 - RNA, 21 nt, Human
aaaaccaauguucucucuucu

SEQ ID NO: 1177436 - RNA, 16 nt, Human
aaaacguggcugcuuc

SEQ ID NO: 1177437 - RNA, 17 nt, Human
aaaacguggcugcuuca

SEQ ID NO: 1177438 - RNA, 18 nt, Human
aaaacguggcugcuucaa

SEQ ID NO: 1177439 - RNA, 14 nt, Human
gggaacagacugga

SEQ ID NO: 1177440 - RNA, 22 nt, Human
gggaacagacuggaagcacagc

SEQ ID NO: 1177441 - RNA, 19 nt, Human
aaaaaucucaaauuucuaa

SEQ ID NO: 1177442 - RNA, 20 nt, Human
aaaaaucucaaauuucuaaa

SEQ ID NO: 1177443 - RNA, 11 nt, Human
gggagggcucc

SEQ ID NO: 1177444 - RNA, 13 nt, Human
gggagggcuccag

SEQ ID NO: 1177445 - RNA, 20 nt, Human
gggaggcagagguugcagug

SEQ ID NO: 1177446 - RNA, 19 nt, Human
gggaggccaaggugggagg

SEQ ID NO: 1177447 - RNA, 22 nt, Human
aaaagcuccauuuuuagugaaa

SEQ ID NO: 1177448 - RNA, 14 nt, Human
aaaagcugggcagg

SEQ ID NO: 1177449 - RNA, 21 nt, Human
aaaacuuuaugcuaagugaaa

SEQ ID NO: 1177450 - RNA, 15 nt, Human
gggauuuccaugaug

SEQ ID NO: 1177451 - RNA, 14 nt, Human
gggcagaggaaagc

SEQ ID NO: 1177452 - RNA, 12 nt, Human
aaaauaaauuau

SEQ ID NO: 1177453 - RNA, 21 nt, Human
aaaauaauuuuuauauuugaa

SEQ ID NO: 1177454 - RNA, 23 nt, Human
aaaauaauuuuuauauuugaaau

SEQ ID NO: 1177455 - RNA, 14 nt, Human
aaaauaccagccag

SEQ ID NO: 1177456 - RNA, 15 nt, Human
aaaauaccagccagu

SEQ ID NO: 1177457 - RNA, 12 nt, Human
aaaauagccugc

SEQ ID NO: 1177458 - RNA, 18 nt, Human
aaaauaguggugugauuu

SEQ ID NO: 1177459 - RNA, 11 nt, Human
aaaauauacug

SEQ ID NO: 1177460 - RNA, 12 nt, Human
aaaauauacugu

SEQ ID NO: 1177461 - RNA, 13 nt, Human
aaaauauacugua

SEQ ID NO: 1177462 - RNA, 14 nt, Human
aaaauauacuguaa

SEQ ID NO: 1177463 - RNA, 15 nt, Human
aaaauauacuguaaa

SEQ ID NO: 1177464 - RNA, 16 nt, Human
aaaauauacuguaaag

SEQ ID NO: 1177465 - RNA, 17 nt, Human
aaaauauacuguaaaga

SEQ ID NO: 1177466 - RNA, 18 nt, Human
aaaauauacuguaaagaa

SEQ ID NO: 1177467 - RNA, 20 nt, Human
aaaauauacuguaaagaaag

SEQ ID NO: 1177468 - RNA, 22 nt, Human
aaaauauacuguaaagaaagag

SEQ ID NO: 1177469 - RNA, 23 nt, Human
aaaauauacuguaaagaaagaga

SEQ ID NO: 1177470 - RNA, 13 nt, Human
aaaaaaacacaaa

SEQ ID NO: 1177471 - RNA, 16 nt, Human
ggcuucaguggcagcu

SEQ ID NO: 1177472 - RNA, 17 nt, Human
ggcuucaguggcagcug

SEQ ID NO: 1177473 - RNA, 13 nt, Human
gggaaaaucagcc

SEQ ID NO: 1177474 - RNA, 23 nt, Human
gggaaaaucagccugcuccagcu

SEQ ID NO: 1177475 - RNA, 16 nt, Human
ggcuggugucaccuga

SEQ ID NO: 1177476 - RNA, 20 nt, Human
ggcuguaucccaugagccuc

SEQ ID NO: 1177477 - RNA, 22 nt, Human
ggcuguaucccaugagccucag

SEQ ID NO: 1177478 - RNA, 23 nt, Human
ggcuguaucccaugagccucagc

SEQ ID NO: 1177479 - RNA, 15 nt, Human
ggcugucaauuacag

SEQ ID NO: 1177480 - RNA, 15 nt, Human
ggcuucaguggcagc

SEQ ID NO: 1177481 - RNA, 20 nt, Human
ggcucccuucccaccucucu

SEQ ID NO: 1177482 - RNA, 22 nt, Human
ggcucccuucccaccucucuca

SEQ ID NO: 1177483 - RNA, 16 nt, Human
ggcucccuucccaccu

SEQ ID NO: 1177484 - RNA, 17 nt, Human
ggcucccuucccaccuc

SEQ ID NO: 1177485 - RNA, 18 nt, Human
ggcucccuucccaccucu

SEQ ID NO: 1177486 - RNA, 18 nt, Human
ggcucgagcaugccugga

SEQ ID NO: 1177487 - RNA, 23 nt, Human
ggcucuuccaggcugggagagcc

SEQ ID NO: 1177488 - RNA, 24 nt, Human
ggcucuuccaggcugggagagccu

SEQ ID NO: 1177489 - RNA, 20 nt, Human
ggcugcaugcgggcuuccuc

SEQ ID NO: 1177490 - RNA, 22 nt, Human
ggcugcaugcgggcuuccuccu

SEQ ID NO: 1177491 - RNA, 17 nt, Human
ggcuggccuggccccuc

SEQ ID NO: 1177492 - RNA, 22 nt, Human
ggcuggccuggccccucagggu

SEQ ID NO: 1177493 - RNA, 14 nt, Human
ggcuggcgugcagu

SEQ ID NO: 1177494 - RNA, 16 nt, Human
ggcuggcgugcagugg

SEQ ID NO: 1177495 - RNA, 20 nt, Human
ggcuggcgugcaguggugcg

SEQ ID NO: 1177496 - RNA, 21 nt, Human
ggcugccaucucaccuccugc

SEQ ID NO: 1177497 - RNA, 22 nt, Human
ggcugccaucucaccuccugcu

SEQ ID NO: 1177498 - RNA, 23 nt, Human
ggcugccaucucaccuccugcug

SEQ ID NO: 1177499 - RNA, 13 nt, Human
ggcugggagagcc

SEQ ID NO: 1177500 - RNA, 14 nt, Human
ggcccuuccuuuuc

SEQ ID NO: 1177501 - RNA, 13 nt, Human
ggccucccaacuc

SEQ ID NO: 1177502 - RNA, 14 nt, Human
ggccucccaacuca

SEQ ID NO: 1177503 - RNA, 17 nt, Human
ggccucccaacucaccc

SEQ ID NO: 1177504 - RNA, 13 nt, Human
ggccaagguggga

SEQ ID NO: 1177505 - RNA, 23 nt, Human
ggccagagggagugacagaggca

SEQ ID NO: 1177506 - RNA, 19 nt, Human
ggccagaugcaccagcccu

SEQ ID NO: 1177507 - RNA, 20 nt, Human
ggccagaugcaccagcccuu

SEQ ID NO: 1177508 - RNA, 12 nt, Human
ggcauuguggga

SEQ ID NO: 1177509 - RNA, 15 nt, Human
ggccaaagccaaagc

SEQ ID NO: 1177510 - RNA, 12 nt, Human
ggccaaaggaag

SEQ ID NO: 1177511 - RNA, 13 nt, Human
ggccaaaggaagc

SEQ ID NO: 1177512 - RNA, 10 nt, Human
ggcagagcag

SEQ ID NO: 1177513 - RNA, 12 nt, Human
ggcagagcagag

SEQ ID NO: 1177514 - RNA, 15 nt, Human
ggcagccaggccaca

SEQ ID NO: 1177515 - RNA, 17 nt, Human
ggcagccaggccacaag

SEQ ID NO: 1177516 - RNA, 12 nt, Human
ggcagaaggaag

SEQ ID NO: 1177517 - RNA, 21 nt, Human
ggaugaauuccaaauucugcu

SEQ ID NO: 1177518 - RNA, 12 nt, Human
ggaugagaaagg

SEQ ID NO: 1177519 - RNA, 22 nt, Human
ggaugagaaagguugaagcacc

SEQ ID NO: 1177520 - RNA, 22 nt, Human
ggaugguucccuugaugaagaa

SEQ ID NO: 1177521 - RNA, 23 nt, Human
ggaugguucccuugaugaagaag

SEQ ID NO: 1177522 - RNA, 13 nt, Human
ggauguucuggga

SEQ ID NO: 1177523 - RNA, 23 nt, Human
ggauuaaacuuaaucuaaaugga

SEQ ID NO: 1177524 - RNA, 21 nt, Human
ggauuuugauccaagcugguc

SEQ ID NO: 1177525 - RNA, 11 nt, Human
ggcaaaauaau

SEQ ID NO: 1177526 - RNA, 12 nt, Human
ggaggaagagaa

SEQ ID NO: 1177527 - RNA, 19 nt, Human
ggaggaaggaaacccagcu

SEQ ID NO: 1177528 - RNA, 21 nt, Human
ggaggcaugugaugagaggaa

SEQ ID NO: 1177529 - RNA, 18 nt, Human
ggaggccaaggugggagg

SEQ ID NO: 1177530 - RNA, 20 nt, Human
ggaggccaaggugggaggau

SEQ ID NO: 1177531 - RNA, 13 nt, Human
ggaggccagccuu

SEQ ID NO: 1177532 - RNA, 16 nt, Human
ggagcugaguggggga

SEQ ID NO: 1177533 - RNA, 18 nt, Human
ggaggucgaggcaggagg

SEQ ID NO: 1177534 - RNA, 15 nt, Human
ggaggcugagauggg

SEQ ID NO: 1177535 - RNA, 19 nt, Human
ggaggcugagaugggagaa

SEQ ID NO: 1177536 - RNA, 15 nt, Human
ggaggucgaggcagg

SEQ ID NO: 1177537 - RNA, 16 nt, Human
ggaggucgaggcagga

SEQ ID NO: 1177538 - RNA, 13 nt, Human
ggagcagccacau

SEQ ID NO: 1177539 - RNA, 21 nt, Human
ggagcagccacauuccugaug

SEQ ID NO: 1177540 - RNA, 22 nt, Human
ggacucaaugcacugacauugu

SEQ ID NO: 1177541 - RNA, 20 nt, Human
ggacuacaggugugagucac

SEQ ID NO: 1177542 - RNA, 12 nt, Human
ggaccucaggcc

SEQ ID NO: 1177543 - RNA, 19 nt, Human
ggagaaaauggacguguua

SEQ ID NO: 1177544 - RNA, 17 nt, Human
ggacuuggaagcuccgc

SEQ ID NO: 1177545 - RNA, 22 nt, Human
ggagaaccaaaaagaggcuaug

SEQ ID NO: 1177546 - RNA, 13 nt, Human
ggagagccuucca

SEQ ID NO: 1177547 - RNA, 16 nt, Human
ggagagccuuccaggg

SEQ ID NO: 1177548 - RNA, 17 nt, Human
ggagagccuuccagggg

SEQ ID NO: 1177549 - RNA, 18 nt, Human
ggagagccuuccaggggu

SEQ ID NO: 1177550 - RNA, 22 nt, Human
ggagagccuuccagggguggga

SEQ ID NO: 1177551 - RNA, 15 nt, Human
ggagagcuagcagca

SEQ ID NO: 1177552 - RNA, 17 nt, Human
ggagagcuagcagcagg

SEQ ID NO: 1177553 - RNA, 14 nt, Human
ggacccugaggccc

SEQ ID NO: 1177554 - RNA, 15 nt, Human
ggacccugaggccca

SEQ ID NO: 1177555 - RNA, 18 nt, Human
ggacccugaggcccagag

SEQ ID NO: 1177556 - RNA, 19 nt, Human
ggacccugaggcccagagg

SEQ ID NO: 1177557 - RNA, 19 nt, Human
gcuuguacauaaugcgugc

SEQ ID NO: 1177558 - RNA, 19 nt, Human
gcuugggcuucauccuccu

SEQ ID NO: 1177559 - RNA, 14 nt, Human
gcuuguacauaaug

SEQ ID NO: 1177560 - RNA, 16 nt, Human
gcuuguacauaaugcg

SEQ ID NO: 1177561 - RNA, 21 nt, Human
gcugugcucuggacaggcaug

SEQ ID NO: 1177562 - RNA, 12 nt, Human
gcugugcugccc

SEQ ID NO: 1177563 - RNA, 13 nt, Human
gcugugcugcccu

SEQ ID NO: 1177564 - RNA, 14 nt, Human
gcugugcugcccug

SEQ ID NO: 1177565 - RNA, 19 nt, Human
gcugugcugcccugcccac

SEQ ID NO: 1177566 - RNA, 22 nt, Human
gcugugcugcccugcccaccug

SEQ ID NO: 1177567 - RNA, 21 nt, Human
gcuguuggcugggggccucag

SEQ ID NO: 1177568 - RNA, 22 nt, Human
gcuguuggcugggggccucagu

SEQ ID NO: 1177569 - RNA, 20 nt, Human
gcuucacggaagagccuugc

SEQ ID NO: 1177570 - RNA, 14 nt, Human
gcuuaacuucacau

SEQ ID NO: 1177571 - RNA, 15 nt, Human
gcuucacggaagagc

SEQ ID NO: 1177572 - RNA, 17 nt, Human
gcuggguucuacccagg

SEQ ID NO: 1177573 - RNA, 15 nt, Human
gcuggguucuaccca

SEQ ID NO: 1177574 - RNA, 15 nt, Human
gcuggguucugaucc

SEQ ID NO: 1177575 - RNA, 14 nt, Human
gcuggguuggaggg

SEQ ID NO: 1177576 - RNA, 21 nt, Human
gcuggguuggaggguguccca

SEQ ID NO: 1177577 - RNA, 20 nt, Human
gcuguaucccaugagccuca

SEQ ID NO: 1177578 - RNA, 23 nt, Human
gcuguaucccaugagccucagca

SEQ ID NO: 1177579 - RNA, 16 nt, Human
gcugggauuacaggug

SEQ ID NO: 1177580 - RNA, 18 nt, Human
gcuggccuggccccucag

SEQ ID NO: 1177581 - RNA, 19 nt, Human
gcuggccuggccccucagg

SEQ ID NO: 1177582 - RNA, 14 nt, Human
gcuggagugcagug

SEQ ID NO: 1177583 - RNA, 15 nt, Human
gcuggagugcaguga

SEQ ID NO: 1177584 - RNA, 17 nt, Human
gcuggagugcagugagc

SEQ ID NO: 1177585 - RNA, 17 nt, Human
gcuggccuggccccuca

SEQ ID NO: 1177586 - RNA, 18 nt, Human
gcugggauuacaggugug

SEQ ID NO: 1177587 - RNA, 19 nt, Human
gcugggauuacagguguga

SEQ ID NO: 1177588 - RNA, 13 nt, Human
gcugggcagagga

SEQ ID NO: 1177589 - RNA, 14 nt, Human
gcugggcagaggaa

SEQ ID NO: 1177590 - RNA, 15 nt, Human
gcugggcagaggaaa

SEQ ID NO: 1177591 - RNA, 16 nt, Human
gcugggcagaggaaag

SEQ ID NO: 1177592 - RNA, 17 nt, Human
gcugggcagaggaaagc

SEQ ID NO: 1177593 - RNA, 19 nt, Human
gcugggcagaggaaagcaa

SEQ ID NO: 1177594 - RNA, 16 nt, Human
gcugggcucccuuccc

SEQ ID NO: 1177595 - RNA, 17 nt, Human
gcugggcucccuuccca

SEQ ID NO: 1177596 - RNA, 20 nt, Human
gcugggcucccuucccaccu

SEQ ID NO: 1177597 - RNA, 14 nt, Human
gcugggcagguugg

SEQ ID NO: 1177598 - RNA, 21 nt, Human
gcugggcucccuucccaccuc

SEQ ID NO: 1177599 - RNA, 15 nt, Human
gcuggguguggcgca

SEQ ID NO: 1177600 - RNA, 17 nt, Human
gcuggagcucugcccau

SEQ ID NO: 1177601 - RNA, 12 nt, Human
gcuggagugcag

SEQ ID NO: 1177602 - RNA, 18 nt, Human
gcugagggugagugggug

SEQ ID NO: 1177603 - RNA, 16 nt, Human
gcugcaccggcuggcc

SEQ ID NO: 1177604 - RNA, 17 nt, Human
gcugcaccggcuggccu

SEQ ID NO: 1177605 - RNA, 18 nt, Human
gcugcaccggcuggccug

SEQ ID NO: 1177606 - RNA, 19 nt, Human
gcugcaccggcuggccugg

SEQ ID NO: 1177607 - RNA, 22 nt, Human
gcugcaccggcuggccuggccc

SEQ ID NO: 1177608 - RNA, 19 nt, Human
gcugccagccgagauagcc

SEQ ID NO: 1177609 - RNA, 21 nt, Human
gcugccagccgagauagccaa

SEQ ID NO: 1177610 - RNA, 21 nt, Human
gcugccauccagguucagcuu

SEQ ID NO: 1177611 - RNA, 23 nt, Human
gcugccauccagguucagcuugu

SEQ ID NO: 1177612 - RNA, 23 nt, Human
gcugccaucucaccuccugcugg

SEQ ID NO: 1177613 - RNA, 22 nt, Human
gcugccaucucaccuccugcug

SEQ ID NO: 1177614 - RNA, 13 nt, Human
gcugccugggauc

SEQ ID NO: 1177615 - RNA, 16 nt, Human
gcugccugggaucccu

SEQ ID NO: 1177616 - RNA, 18 nt, Human
gcugccugggaucccuca

SEQ ID NO: 1177617 - RNA, 19 nt, Human
gcugccugggaucccucau

SEQ ID NO: 1177618 - RNA, 20 nt, Human
gcugccugggaucccucauc

SEQ ID NO: 1177619 - RNA, 16 nt, Human
gcucuguccugggagu

SEQ ID NO: 1177620 - RNA, 15 nt, Human
gcucuguccugggag

SEQ ID NO: 1177621 - RNA, 12 nt, Human
gcucuuccaggc

SEQ ID NO: 1177622 - RNA, 15 nt, Human
gcucuuccaggcugg

SEQ ID NO: 1177623 - RNA, 16 nt, Human
gcucuuccaggcuggg

SEQ ID NO: 1177624 - RNA, 18 nt, Human
gcucuuccaggcugggag

SEQ ID NO: 1177625 - RNA, 12 nt, Human
gcugaaggcucg

SEQ ID NO: 1177626 - RNA, 20 nt, Human
gcugaaggcucgagcaugcc

SEQ ID NO: 1177627 - RNA, 23 nt, Human
gcugaaggcucgagcaugccugg

SEQ ID NO: 1177628 - RNA, 17 nt, Human
gcugaaugguuuucaaa

SEQ ID NO: 1177629 - RNA, 14 nt, Human
gcugacagacacag

SEQ ID NO: 1177630 - RNA, 15 nt, Human
gcugacagacacagg

SEQ ID NO: 1177631 - RNA, 16 nt, Human
gcugacagacacaggc

SEQ ID NO: 1177632 - RNA, 17 nt, Human
gcugacagacacaggcc

SEQ ID NO: 1177633 - RNA, 20 nt, Human
gcucccaggcauuccccagg

SEQ ID NO: 1177634 - RNA, 21 nt, Human
gcucccaggcauuccccagga

SEQ ID NO: 1177635 - RNA, 22 nt, Human
gcucccaggcauuccccaggag

SEQ ID NO: 1177636 - RNA, 23 nt, Human
gcucccaggcauuccccaggagg

SEQ ID NO: 1177637 - RNA, 14 nt, Human
gcuccccagcccca

SEQ ID NO: 1177638 - RNA, 13 nt, Human
gcucucaggccag

SEQ ID NO: 1177639 - RNA, 14 nt, Human
gcucucaggccagc

SEQ ID NO: 1177640 - RNA, 15 nt, Human
gcucucaggccagcu

SEQ ID NO: 1177641 - RNA, 16 nt, Human
gcucucaggccagcug

SEQ ID NO: 1177642 - RNA, 14 nt, Human
gcuaggccuggcca

SEQ ID NO: 1177643 - RNA, 15 nt, Human
gcuaggccuggccag

SEQ ID NO: 1177644 - RNA, 16 nt, Human
gcuaguaucaaaagaa

SEQ ID NO: 1177645 - RNA, 18 nt, Human
gcuaggaacacuccuuca

SEQ ID NO: 1177646 - RNA, 19 nt, Human
gcuaggaacacuccuucac

SEQ ID NO: 1177647 - RNA, 21 nt, Human
gcuaggaacacuccuucacag

SEQ ID NO: 1177648 - RNA, 14 nt, Human
gccugugucuuuaa

SEQ ID NO: 1177649 - RNA, 19 nt, Human
gccuguucagcuccagcuc

SEQ ID NO: 1177650 - RNA, 20 nt, Human
gccuguucagcuccagcuca

SEQ ID NO: 1177651 - RNA, 14 nt, Human
gccuguucagcucc

SEQ ID NO: 1177652 - RNA, 23 nt, Human
gcucagguggggucacucuggca

SEQ ID NO: 1177653 - RNA, 21 nt, Human
gcucagguggggucacucugg

SEQ ID NO: 1177654 - RNA, 22 nt, Human
gcucagguggggucacucuggc

SEQ ID NO: 1177655 - RNA, 15 nt, Human
gcucagagagggugg

SEQ ID NO: 1177656 - RNA, 18 nt, Human
gcucagagagggugggag

SEQ ID NO: 1177657 - RNA, 20 nt, Human
gcucagagagggugggagug

SEQ ID NO: 1177658 - RNA, 22 nt, Human
gcucagagagggugggaguggg

SEQ ID NO: 1177659 - RNA, 12 nt, Human
gcucagggccug

SEQ ID NO: 1177660 - RNA, 13 nt, Human
gcucagggccugg

SEQ ID NO: 1177661 - RNA, 16 nt, Human
gcucagggccuggcuc

SEQ ID NO: 1177662 - RNA, 17 nt, Human
gcucagggccuggcuca

SEQ ID NO: 1177663 - RNA, 16 nt, Human
gccugccucuucucua

SEQ ID NO: 1177664 - RNA, 15 nt, Human
gccuggccccucagg

SEQ ID NO: 1177665 - RNA, 16 nt, Human
gccuggccccucaggg

SEQ ID NO: 1177666 - RNA, 17 nt, Human
gccuggccccucagggu

SEQ ID NO: 1177667 - RNA, 20 nt, Human
gccuggccccucaggguccc

SEQ ID NO: 1177668 - RNA, 22 nt, Human
gccuggccccucagggucccug

SEQ ID NO: 1177669 - RNA, 10 nt, Human
gccuggccug

SEQ ID NO: 1177670 - RNA, 21 nt, Human
gccugggaggucaaggcugca

SEQ ID NO: 1177671 - RNA, 22 nt, Human
gccugggaggucaaggcugcag

SEQ ID NO: 1177672 - RNA, 14 nt, Human
gccugggaucccuc

SEQ ID NO: 1177673 - RNA, 18 nt, Human
gccugggaucccucaucc

SEQ ID NO: 1177674 - RNA, 21 nt, Human
gccugggaucccucauccuca

SEQ ID NO: 1177675 - RNA, 13 nt, Human
gccugugucuuua

SEQ ID NO: 1177676 - RNA, 22 nt, Human
gccugugucuuuaaaugcugcu

SEQ ID NO: 1177677 - RNA, 12 nt, Human
gccucuucucua

SEQ ID NO: 1177678 - RNA, 23 nt, Human
gccucuucucuacucuagggaaa

SEQ ID NO: 1177679 - RNA, 18 nt, Human
gccugcccaggccccugc

SEQ ID NO: 1177680 - RNA, 19 nt, Human
gccugcccaggccccugcc

SEQ ID NO: 1177681 - RNA, 20 nt, Human
gccugcccaggccccugcca

SEQ ID NO: 1177682 - RNA, 13 nt, Human
gccuccuccagcc

SEQ ID NO: 1177683 - RNA, 13 nt, Human
gccuccugugugu

SEQ ID NO: 1177684 - RNA, 12 nt, Human
gccucugggacu

SEQ ID NO: 1177685 - RNA, 14 nt, Human
gccucugggacugg

SEQ ID NO: 1177686 - RNA, 16 nt, Human
gcccugccuccuuugu

SEQ ID NO: 1177687 - RNA, 22 nt, Human
gcccugccuccuuugugaggaa

SEQ ID NO: 1177688 - RNA, 16 nt, Human
gcccuuaccugccagg

SEQ ID NO: 1177689 - RNA, 20 nt, Human
gcccuuaccugccaggaagc

SEQ ID NO: 1177690 - RNA, 21 nt, Human
gcccuuaccugccaggaagcc

SEQ ID NO: 1177691 - RNA, 15 nt, Human
gccgccaugcuccug

SEQ ID NO: 1177692 - RNA, 16 nt, Human
gccgccaugcuccugg

SEQ ID NO: 1177693 - RNA, 13 nt, Human
gccccugcccggc

SEQ ID NO: 1177694 - RNA, 14 nt, Human
gccccugcccggcu

SEQ ID NO: 1177695 - RNA, 18 nt, Human
gccccaaaacucuccucu

SEQ ID NO: 1177696 - RNA, 19 nt, Human
gccccaaaacucuccucug

SEQ ID NO: 1177697 - RNA, 15 nt, Human
gccccugcccggcug

SEQ ID NO: 1177698 - RNA, 16 nt, Human
gccccuggaugcagcc

SEQ ID NO: 1177699 - RNA, 18 nt, Human
gccccuggaugcagccuc

SEQ ID NO: 1177700 - RNA, 22 nt, Human
gccccuggaugcagccucacag

SEQ ID NO: 1177701 - RNA, 22 nt, Human
gcccuaaaguguauuuuuuuac

SEQ ID NO: 1177702 - RNA, 19 nt, Human
gcccacgcuggagugcagu

SEQ ID NO: 1177703 - RNA, 13 nt, Human
gcccacucccugc

SEQ ID NO: 1177704 - RNA, 14 nt, Human
gcccacucccugca

SEQ ID NO: 1177705 - RNA, 15 nt, Human
gcccacucccugcaa

SEQ ID NO: 1177706 - RNA, 19 nt, Human
gcccacucccugcaaccug

SEQ ID NO: 1177707 - RNA, 19 nt, Human
gccauguuggccaggcugg

SEQ ID NO: 1177708 - RNA, 20 nt, Human
gccauguuggccaggcuggu

SEQ ID NO: 1177709 - RNA, 22 nt, Human
gccauguuggccaggcuggucu

SEQ ID NO: 1177710 - RNA, 24 nt, Human
gccauguuggccaggcuggucuca

SEQ ID NO: 1177711 - RNA, 18 nt, Human
gcccaccuuggcucaagu

SEQ ID NO: 1177712 - RNA, 13 nt, Human
gcccacgccccca

SEQ ID NO: 1177713 - RNA, 14 nt, Human
gcccacgcccccac

SEQ ID NO: 1177714 - RNA, 15 nt, Human
gcccacgcccccacu

SEQ ID NO: 1177715 - RNA, 15 nt, Human
gcccacgcuggagug

SEQ ID NO: 1177716 - RNA, 16 nt, Human
gcccacgcuggagugc

SEQ ID NO: 1177717 - RNA, 17 nt, Human
gcccacgcuggagugca

SEQ ID NO: 1177718 - RNA, 19 nt, Human
gccauauucuguuggccag

SEQ ID NO: 1177719 - RNA, 20 nt, Human
gccauauucuguuggccagu

SEQ ID NO: 1177720 - RNA, 14 nt, Human
gccauguuggccag

SEQ ID NO: 1177721 - RNA, 15 nt, Human
gccauguuggccagg

SEQ ID NO: 1177722 - RNA, 16 nt, Human
gccauguuggccaggc

SEQ ID NO: 1177723 - RNA, 17 nt, Human
gccauguuggccaggcu

SEQ ID NO: 1177724 - RNA, 18 nt, Human
gccauguuggccaggcug

SEQ ID NO: 1177725 - RNA, 22 nt, Human
gccagacaucaacagauaaaua

SEQ ID NO: 1177726 - RNA, 13 nt, Human
gccagcaggcucu

SEQ ID NO: 1177727 - RNA, 16 nt, Human
gccagcaggcucucag

SEQ ID NO: 1177728 - RNA, 17 nt, Human
gccagcaggcucucagg

SEQ ID NO: 1177729 - RNA, 18 nt, Human
gccagcaggcucucaggc

SEQ ID NO: 1177730 - RNA, 19 nt, Human
gccagcaggcucucaggcc

SEQ ID NO: 1177731 - RNA, 20 nt, Human
gccagcaggcucucaggcca

SEQ ID NO: 1177732 - RNA, 21 nt, Human
gccagcaggcucucaggccag

SEQ ID NO: 1177733 - RNA, 23 nt, Human
gccagcaggcucucaggccagcu

SEQ ID NO: 1177734 - RNA, 12 nt, Human
gccaggccagag

SEQ ID NO: 1177735 - RNA, 13 nt, Human
gccaggccagagg

SEQ ID NO: 1177736 - RNA, 16 nt, Human
gccaggcccucugccc

SEQ ID NO: 1177737 - RNA, 17 nt, Human
gccaggcccucugccca

SEQ ID NO: 1177738 - RNA, 19 nt, Human
gccaggcccucugcccacu

SEQ ID NO: 1177739 - RNA, 20 nt, Human
gccaggcccucugcccacuc

SEQ ID NO: 1177740 - RNA, 21 nt, Human
gccaggcccucugcccacucc

SEQ ID NO: 1177741 - RNA, 18 nt, Human
gccacugugaagagaacc

SEQ ID NO: 1177742 - RNA, 19 nt, Human
gccacugugaagagaacca

SEQ ID NO: 1177743 - RNA, 13 nt, Human
gccacccugggga

SEQ ID NO: 1177744 - RNA, 19 nt, Human
gccacccuggggagaaagu

SEQ ID NO: 1177745 - RNA, 23 nt, Human
gccacugcaccgggccacagaga

SEQ ID NO: 1177746 - RNA, 21 nt, Human
gccacugcacuauagccuagg

SEQ ID NO: 1177747 - RNA, 22 nt, Human
gccaccaacauacucccaucug

SEQ ID NO: 1177748 - RNA, 19 nt, Human
gccaccaacauacucccau

SEQ ID NO: 1177749 - RNA, 20 nt, Human
gccaccaacauacucccauc

SEQ ID NO: 1177750 - RNA, 21 nt, Human
gccaccaacauacucccaucu

SEQ ID NO: 1177751 - RNA, 16 nt, Human
gccacauuccugaugc

SEQ ID NO: 1177752 - RNA, 20 nt, Human
gccacauuccugaugcuucu

SEQ ID NO: 1177753 - RNA, 23 nt, Human
gcaccgggccacagagaaaguac

SEQ ID NO: 1177754 - RNA, 22 nt, Human
gcacaucagcacgauuucuguu

SEQ ID NO: 1177755 - RNA, 23 nt, Human
gcacaucagcacgauuucuguuu

SEQ ID NO: 1177756 - RNA, 13 nt, Human
gcacucagaagac

SEQ ID NO: 1177757 - RNA, 16 nt, Human
gcacucagaagacacu

SEQ ID NO: 1177758 - RNA, 17 nt, Human
gcacucagaagacacug

SEQ ID NO: 1177759 - RNA, 17 nt, Human
gcacuccccugcugggu

SEQ ID NO: 1177760 - RNA, 22 nt, Human
gcacuccccugcuggguguggc

SEQ ID NO: 1177761 - RNA, 20 nt, Human
gcacaccgggcacucagaag

SEQ ID NO: 1177762 - RNA, 14 nt, Human
gcacaccgggcacu

SEQ ID NO: 1177763 - RNA, 16 nt, Human
gauuuuuuuuuccuuc

SEQ ID NO: 1177764 - RNA, 12 nt, Human
gauuauuggaaa

SEQ ID NO: 1177765 - RNA, 16 nt, Human
gauuuaccacuugugu

SEQ ID NO: 1177766 - RNA, 17 nt, Human
gauucuuccucccuccc

SEQ ID NO: 1177767 - RNA, 18 nt, Human
gauucuuccucccucccu

SEQ ID NO: 1177768 - RNA, 12 nt, Human
gauucuucugcu

SEQ ID NO: 1177769 - RNA, 15 nt, Human
gauuuaccacuugug

SEQ ID NO: 1177770 - RNA, 15 nt, Human
gauucuccugccuca

SEQ ID NO: 1177771 - RNA, 17 nt, Human
gauucuccugccucagc

SEQ ID NO: 1177772 - RNA, 18 nt, Human
gauucuccugccucagcc

SEQ ID NO: 1177773 - RNA, 16 nt, Human
gaugagugagcaugcc

SEQ ID NO: 1177774 - RNA, 15 nt, Human
gaugaucuaggaaga

SEQ ID NO: 1177775 - RNA, 21 nt, Human
gaugaucuaggaagacuuugg

SEQ ID NO: 1177776 - RNA, 14 nt, Human
gaugaucuuugcag

SEQ ID NO: 1177777 - RNA, 18 nt, Human
gauguagaggagaaacug

SEQ ID NO: 1177778 - RNA, 13 nt, Human
gaggccagagaca

SEQ ID NO: 1177779 - RNA, 14 nt, Human
gaggccagagacac

SEQ ID NO: 1177780 - RNA, 19 nt, Human
gaggccagagacacaagcc

SEQ ID NO: 1177781 - RNA, 22 nt, Human
gaggcuagugugguguuuccug

SEQ ID NO: 1177782 - RNA, 19 nt, Human
gaggcuccacuuggucugu

SEQ ID NO: 1177783 - RNA, 23 nt, Human
gaggcuccacuuggucugugaga

SEQ ID NO: 1177784 - RNA, 12 nt, Human
gaggcuccacuu

SEQ ID NO: 1177785 - RNA, 15 nt, Human
gaggacgcucucugg

SEQ ID NO: 1177786 - RNA, 20 nt, Human
gaggacgcucucuggccuuc

SEQ ID NO: 1177787 - RNA, 14 nt, Human
gaggcagggucuca

SEQ ID NO: 1177788 - RNA, 15 nt, Human
gaggcagggucucac

SEQ ID NO: 1177789 - RNA, 18 nt, Human
gaggcagggucucacucu

SEQ ID NO: 1177790 - RNA, 22 nt, Human
gaggccaaggugggaggauugc

SEQ ID NO: 1177791 - RNA, 12 nt, Human
gaggggccucuu

SEQ ID NO: 1177792 - RNA, 23 nt, Human
gagccuuccaggggugggacacc

SEQ ID NO: 1177793 - RNA, 13 nt, Human
gagccuugaacuu

SEQ ID NO: 1177794 - RNA, 19 nt, Human
gagccuugaacuuugaccu

SEQ ID NO: 1177795 - RNA, 20 nt, Human
gagccuuccaggggugggac

SEQ ID NO: 1177796 - RNA, 15 nt, Human
gaggucgaggcagga

SEQ ID NO: 1177797 - RNA, 23 nt, Human
gaggugaccccagguuucuaugu

SEQ ID NO: 1177798 - RNA, 16 nt, Human
gagucaccaagcccag

SEQ ID NO: 1177799 - RNA, 17 nt, Human
gagucaccaagcccagu

SEQ ID NO: 1177800 - RNA, 22 nt, Human
gagucagaaguuucugccgcag

SEQ ID NO: 1177801 - RNA, 12 nt, Human
gagucccaccuu

SEQ ID NO: 1177802 - RNA, 13 nt, Human
gagucccaccuug

SEQ ID NO: 1177803 - RNA, 18 nt, Human
gagugacagaggcagccc

SEQ ID NO: 1177804 - RNA, 20 nt, Human
gagugacagaggcagcccca

SEQ ID NO: 1177805 - RNA, 15 nt, Human
gaguugauucagcuc

SEQ ID NO: 1177806 - RNA, 16 nt, Human
gaguugauucagcucu

SEQ ID NO: 1177807 - RNA, 17 nt, Human
gaguugauucagcucug

SEQ ID NO: 1177808 - RNA, 16 nt, Human
gaguuuaaauuguaau

SEQ ID NO: 1177809 - RNA, 18 nt, Human
gaguugauucagcucugc

SEQ ID NO: 1177810 - RNA, 14 nt, Human
gacucuuaagaaga

SEQ ID NO: 1177811 - RNA, 15 nt, Human
gacucuuaagaagac

SEQ ID NO: 1177812 - RNA, 21 nt, Human
gacucuuaagaagacugcauu

SEQ ID NO: 1177813 - RNA, 16 nt, Human
gacugaauuucuuuug

SEQ ID NO: 1177814 - RNA, 14 nt, Human
gacugaauuucuuu

SEQ ID NO: 1177815 - RNA, 20 nt, Human
gaccaucccugaaggccccg

SEQ ID NO: 1177816 - RNA, 14 nt, Human
gaccaucccugaag

SEQ ID NO: 1177817 - RNA, 14 nt, Human
gaccucugcagcaa

SEQ ID NO: 1177818 - RNA, 11 nt, Human
gaccugaggcc

SEQ ID NO: 1177819 - RNA, 13 nt, Human
gaccugaggcccu

SEQ ID NO: 1177820 - RNA, 14 nt, Human
gaccugaggcccuu

SEQ ID NO: 1177821 - RNA, 16 nt, Human
gacgccaucccagccc

SEQ ID NO: 1177822 - RNA, 17 nt, Human
gacgccaucccagcccc

SEQ ID NO: 1177823 - RNA, 18 nt, Human
gacgccaucccagcccca

SEQ ID NO: 1177824 - RNA, 19 nt, Human
gacgccaucccagccccaa

SEQ ID NO: 1177825 - RNA, 16 nt, Human
gacgcuacccgggaag

SEQ ID NO: 1177826 - RNA, 18 nt, Human
gacgcuacccgggaaggg

SEQ ID NO: 1177827 - RNA, 19 nt, Human
gacgcuacccgggaagggg

SEQ ID NO: 1177828 - RNA, 16 nt, Human
gacgcucucuggccuu

SEQ ID NO: 1177829 - RNA, 17 nt, Human
gacgcucucuggccuuc

SEQ ID NO: 1177830 - RNA, 20 nt, Human
gacagcccgggcucugccuc

SEQ ID NO: 1177831 - RNA, 18 nt, Human
gacagcccgggcucugcc

SEQ ID NO: 1177832 - RNA, 19 nt, Human
gacagcccgggcucugccu

SEQ ID NO: 1177833 - RNA, 21 nt, Human
gacagugagacucugucucag

SEQ ID NO: 1177834 - RNA, 14 nt, Human
gacauugcggacag

SEQ ID NO: 1177835 - RNA, 15 nt, Human
gacauugcggacagc

SEQ ID NO: 1177836 - RNA, 17 nt, Human
gacauugcggacagcca

SEQ ID NO: 1177837 - RNA, 19 nt, Human
gacauuguuggccaaagcc

SEQ ID NO: 1177838 - RNA, 16 nt, Human
gacauuugcucaugga

SEQ ID NO: 1177839 - RNA, 17 nt, Human
gacauuugcucauggaa

SEQ ID NO: 1177840 - RNA, 20 nt, Human
gaccagggauuuccaugaug

SEQ ID NO: 1177841 - RNA, 12 nt, Human
gaccaucccuga

SEQ ID NO: 1177842 - RNA, 13 nt, Human
gaccaucccugaa

SEQ ID NO: 1177843 - RNA, 19 nt, Human
gaccaucccugaaggcccc

SEQ ID NO: 1177844 - RNA, 18 nt, Human
gaccagggauuuccauga

SEQ ID NO: 1177845 - RNA, 17 nt, Human
gacagcccgggcucugc

SEQ ID NO: 1177846 - RNA, 15 nt, Human
gacacacugaagaag

SEQ ID NO: 1177847 - RNA, 16 nt, Human
gacacacugaagaagc

SEQ ID NO: 1177848 - RNA, 14 nt, Human
gacacagcucuucu

SEQ ID NO: 1177849 - RNA, 16 nt, Human
gacacagcucuucucc

SEQ ID NO: 1177850 - RNA, 17 nt, Human
gacacagcucuucucca

SEQ ID NO: 1177851 - RNA, 22 nt, Human
gacacagcucuucuccaggcug

SEQ ID NO: 1177852 - RNA, 23 nt, Human
gacacagcucuucuccaggcugu

SEQ ID NO: 1177853 - RNA, 12 nt, Human
gacacaggcccg

SEQ ID NO: 1177854 - RNA, 14 nt, Human
gaauauugcugaug

SEQ ID NO: 1177855 - RNA, 15 nt, Human
gaauauugcugaugg

SEQ ID NO: 1177856 - RNA, 19 nt, Human
gaauauugcugauggugca

SEQ ID NO: 1177857 - RNA, 20 nt, Human
gaauauugcugauggugcaa

SEQ ID NO: 1177858 - RNA, 22 nt, Human
gaaggggagauaaggguaucug

SEQ ID NO: 1177859 - RNA, 22 nt, Human
gaagcuccgcuuucuacccagc

SEQ ID NO: 1177860 - RNA, 18 nt, Human
gaaggccccgcccaggcu

SEQ ID NO: 1177861 - RNA, 19 nt, Human
gaaggccccgcccaggcuu

SEQ ID NO: 1177862 - RNA, 21 nt, Human
gaaggcucgagcaugccugga

SEQ ID NO: 1177863 - RNA, 15 nt, Human
gaaggcuggguucug

SEQ ID NO: 1177864 - RNA, 19 nt, Human
gaaggcuggguucugaucc

SEQ ID NO: 1177865 - RNA, 20 nt, Human
gaaggcuggguucugauccu

SEQ ID NO: 1177866 - RNA, 22 nt, Human
gaaggcuggguucugauccuag

SEQ ID NO: 1177867 - RNA, 14 nt, Human
gaacugaaaucaua

SEQ ID NO: 1177868 - RNA, 11 nt, Human
gaacuggcugc

SEQ ID NO: 1177869 - RNA, 12 nt, Human
gaacuggcugca

SEQ ID NO: 1177870 - RNA, 16 nt, Human
gaagacaaugacuuac

SEQ ID NO: 1177871 - RNA, 22 nt, Human
gaagacaaugacuuacuguaca

SEQ ID NO: 1177872 - RNA, 23 nt, Human
gaagacaaugugaaaagaaaaau

SEQ ID NO: 1177873 - RNA, 14 nt, Human
gaagcaaaauuuuu

SEQ ID NO: 1177874 - RNA, 23 nt, Human
gaagcaacccaaauguucaucaa

SEQ ID NO: 1177875 - RNA, 15 nt, Human
gaagcacaugccucu

SEQ ID NO: 1177876 - RNA, 17 nt, Human
gaagcacaugccucucu

SEQ ID NO: 1177877 - RNA, 20 nt, Human
gaagcacaugccucucucag

SEQ ID NO: 1177878 - RNA, 21 nt, Human
gaagcacaugccucucucagg

SEQ ID NO: 1177879 - RNA, 15 nt, Human
gaagcagaggaagga

SEQ ID NO: 1177880 - RNA, 19 nt, Human
cuuugacgccaucccagcc

SEQ ID NO: 1177881 - RNA, 21 nt, Human
cuuugacgccaucccagcccc

SEQ ID NO: 1177882 - RNA, 22 nt, Human
cuuugacgccaucccagcccca

SEQ ID NO: 1177883 - RNA, 19 nt, Human
cuuuuauaaacuuuaccuu

SEQ ID NO: 1177884 - RNA, 16 nt, Human
cuuuuauaaacuuuac

SEQ ID NO: 1177885 - RNA, 18 nt, Human
cuuuuauaaacuuuaccu

SEQ ID NO: 1177886 - RNA, 15 nt, Human
cuuuuauaaacuuua

SEQ ID NO: 1177887 - RNA, 16 nt, Human
cuuuggucuacacugu

SEQ ID NO: 1177888 - RNA, 20 nt, Human
cuuuggucuacacugugcug

SEQ ID NO: 1177889 - RNA, 15 nt, Human
cuuuucaaaacauuu

SEQ ID NO: 1177890 - RNA, 14 nt, Human
cuuguggacacagc

SEQ ID NO: 1177891 - RNA, 15 nt, Human
cuuguggacacagcu

SEQ ID NO: 1177892 - RNA, 16 nt, Human
cuuguggacacagcuc

SEQ ID NO: 1177893 - RNA, 14 nt, Human
cuuuaaaugcugcu

SEQ ID NO: 1177894 - RNA, 15 nt, Human
cuuuaaaugcugcuu

SEQ ID NO: 1177895 - RNA, 20 nt, Human
cuuucaauaggaaaaacuga

SEQ ID NO: 1177896 - RNA, 21 nt, Human
cuuucaauaggaaaaacugau

SEQ ID NO: 1177897 - RNA, 22 nt, Human
cuuucaauaggaaaaacugauu

SEQ ID NO: 1177898 - RNA, 23 nt, Human
cuuucaauaggaaaaacugauuu

SEQ ID NO: 1177899 - RNA, 23 nt, Human
cuugaaugaugccaugaggaaca

SEQ ID NO: 1177900 - RNA, 12 nt, Human
cuugacagggca

SEQ ID NO: 1177901 - RNA, 20 nt, Human
cuugccgucuaccugagggg

SEQ ID NO: 1177902 - RNA, 23 nt, Human
cuugccgucuaccugaggggccu

SEQ ID NO: 1177903 - RNA, 13 nt, Human
cuugacagggcac

SEQ ID NO: 1177904 - RNA, 12 nt, Human
cuugcucugcug

SEQ ID NO: 1177905 - RNA, 13 nt, Human
cuugcucugcuga

SEQ ID NO: 1177906 - RNA, 20 nt, Human
cuugaaugaugccaugagga

SEQ ID NO: 1177907 - RNA, 22 nt, Human
cuucuucagagacuccugcagg

SEQ ID NO: 1177908 - RNA, 23 nt, Human
cuucuucagagacuccugcaggc

SEQ ID NO: 1177909 - RNA, 15 nt, Human
cuucuguuuuauaau

SEQ ID NO: 1177910 - RNA, 20 nt, Human
cuucuguuuuauaauuuugu

SEQ ID NO: 1177911 - RNA, 20 nt, Human
cuucuucagagacuccugca

SEQ ID NO: 1177912 - RNA, 21 nt, Human
cuucuucagagacuccugcag

SEQ ID NO: 1177913 - RNA, 18 nt, Human
cuucaguggcagcugcuu

SEQ ID NO: 1177914 - RNA, 23 nt, Human
cuucagagacuccugcaggcagc

SEQ ID NO: 1177915 - RNA, 24 nt, Human
cuucagagacuccugcaggcagcc

SEQ ID NO: 1177916 - RNA, 13 nt, Human
cuucaucccucug

SEQ ID NO: 1177917 - RNA, 15 nt, Human
cuucauccuccucag

SEQ ID NO: 1177918 - RNA, 16 nt, Human
cuucauccuccucaga

SEQ ID NO: 1177919 - RNA, 23 nt, Human
cuucaugcugucuacacuaagag

SEQ ID NO: 1177920 - RNA, 17 nt, Human
cuucaccuuugucccca

SEQ ID NO: 1177921 - RNA, 20 nt, Human
cuucaccuuuguccccaccg

SEQ ID NO: 1177922 - RNA, 18 nt, Human
cuuauugcccacgcugga

SEQ ID NO: 1177923 - RNA, 14 nt, Human
cuucaccuuugucc

SEQ ID NO: 1177924 - RNA, 11 nt, Human
cuucagacaua

SEQ ID NO: 1177925 - RNA, 16 nt, Human
cuucagagacuccugc

SEQ ID NO: 1177926 - RNA, 17 nt, Human
cuucagagacuccugca

SEQ ID NO: 1177927 - RNA, 21 nt, Human
cuucagagacuccugcaggca

SEQ ID NO: 1177928 - RNA, 22 nt, Human
cuucagagacuccugcaggcag

SEQ ID NO: 1177929 - RNA, 16 nt, Human
cuuccauggacuuugu

SEQ ID NO: 1177930 - RNA, 17 nt, Human
cuuccauggacuuuguu

SEQ ID NO: 1177931 - RNA, 18 nt, Human
cuuccagugaggcucugc

SEQ ID NO: 1177932 - RNA, 19 nt, Human
cuuccagugaggcucugcc

SEQ ID NO: 1177933 - RNA, 20 nt, Human
cuuccagugaggcucugccc

SEQ ID NO: 1177934 - RNA, 18 nt, Human
cuuagcagggaaacagcu

SEQ ID NO: 1177935 - RNA, 21 nt, Human
cuuagcagggaaacagcuaau

SEQ ID NO: 1177936 - RNA, 14 nt, Human
cuuaugggcugggu

SEQ ID NO: 1177937 - RNA, 21 nt, Human
cuuaugggcuggguucuaccc

SEQ ID NO: 1177938 - RNA, 22 nt, Human
cuuaugggcuggguucuaccca

SEQ ID NO: 1177939 - RNA, 23 nt, Human
cuuaugggcuggguucuacccag

SEQ ID NO: 1177940 - RNA, 13 nt, Human
cuuauugcccacg

SEQ ID NO: 1177941 - RNA, 16 nt, Human
cuguugggccaggagc

SEQ ID NO: 1177942 - RNA, 17 nt, Human
cuguugggccaggagcc

SEQ ID NO: 1177943 - RNA, 20 nt, Human
cuguugggccaggagccucc

SEQ ID NO: 1177944 - RNA, 21 nt, Human
cuuaaagaguguggcaaaaua

SEQ ID NO: 1177945 - RNA, 15 nt, Human
cuuaaagaguguggc

SEQ ID NO: 1177946 - RNA, 13 nt, Human
cuuaccucggugc

SEQ ID NO: 1177947 - RNA, 17 nt, Human
cuuacccucauguucuu

SEQ ID NO: 1177948 - RNA, 18 nt, Human
cuuacccucauguucuua

SEQ ID NO: 1177949 - RNA, 19 nt, Human
cuuacccucauguucuuaa

SEQ ID NO: 1177950 - RNA, 19 nt, Human
cuuaccucggugccuuccu

SEQ ID NO: 1177951 - RNA, 21 nt, Human
cuuaccucggugccuuccucu

SEQ ID NO: 1177952 - RNA, 13 nt, Human
cuuaccugccagg

SEQ ID NO: 1177953 - RNA, 20 nt, Human
cugugucuugcaauggcagc

SEQ ID NO: 1177954 - RNA, 16 nt, Human
cugugucuugcaaugg

SEQ ID NO: 1177955 - RNA, 19 nt, Human
cugugucuugcaauggcag

SEQ ID NO: 1177956 - RNA, 13 nt, Human
cuguucagcucca

SEQ ID NO: 1177957 - RNA, 14 nt, Human
cuguucagcuccag

SEQ ID NO: 1177958 - RNA, 20 nt, Human
cugugcugagucugaaggcu

SEQ ID NO: 1177959 - RNA, 22 nt, Human
cugugcugagucugaaggcugg

SEQ ID NO: 1177960 - RNA, 11 nt, Human
cugugcugccc

SEQ ID NO: 1177961 - RNA, 20 nt, Human
cugugucagcauagaaguaa

SEQ ID NO: 1177962 - RNA, 19 nt, Human
cugugucagguggggcagc

SEQ ID NO: 1177963 - RNA, 21 nt, Human
cugugucagguggggcagcuu

SEQ ID NO: 1177964 - RNA, 22 nt, Human
cugugucagguggggcagcuug

SEQ ID NO: 1177965 - RNA, 14 nt, Human
cugugucucccuuc

SEQ ID NO: 1177966 - RNA, 19 nt, Human
cugugucucccuucauccu

SEQ ID NO: 1177967 - RNA, 14 nt, Human
cugugucuugcaau

SEQ ID NO: 1177968 - RNA, 18 nt, Human
cugcugaaggcucgagca

SEQ ID NO: 1177969 - RNA, 13 nt, Human
cugcugacagugu

SEQ ID NO: 1177970 - RNA, 15 nt, Human
cugcugacaguguug

SEQ ID NO: 1177971 - RNA, 13 nt, Human
cugcugaaggcuc

SEQ ID NO: 1177972 - RNA, 14 nt, Human
cugcugaaggcucg

SEQ ID NO: 1177973 - RNA, 15 nt, Human
cugcugaaggcucga

SEQ ID NO: 1177974 - RNA, 12 nt, Human
cugcugacagug

SEQ ID NO: 1177975 - RNA, 16 nt, Human
cugcucacauaucugu

SEQ ID NO: 1177976 - RNA, 19 nt, Human
cugcucacauaucugucau

SEQ ID NO: 1177977 - RNA, 15 nt, Human
cuggaugcagccuca

SEQ ID NO: 1177978 - RNA, 15 nt, Human
cuggaguucugguuc

SEQ ID NO: 1177979 - RNA, 16 nt, Human
cuggaguucugguucc

SEQ ID NO: 1177980 - RNA, 17 nt, Human
cuggaguucugguuccu

SEQ ID NO: 1177981 - RNA, 12 nt, Human
cuggcccuuccu

SEQ ID NO: 1177982 - RNA, 13 nt, Human
cuggcuaugcauu

SEQ ID NO: 1177983 - RNA, 14 nt, Human
cuggcuaugcauuu

SEQ ID NO: 1177984 - RNA, 15 nt, Human
cuggcuaugcauuug

SEQ ID NO: 1177985 - RNA, 16 nt, Human
cuggcuaugcauuuga

SEQ ID NO: 1177986 - RNA, 22 nt, Human
cuggcuaugcauuugaaaauuu

SEQ ID NO: 1177987 - RNA, 14 nt, Human
cugggacaugggaa

SEQ ID NO: 1177988 - RNA, 18 nt, Human
cugggacaugggaaaggg

SEQ ID NO: 1177989 - RNA, 22 nt, Human
cugggacaugggaaaggggaag

SEQ ID NO: 1177990 - RNA, 13 nt, Human
cugggacuacagg

SEQ ID NO: 1177991 - RNA, 15 nt, Human
cugggacuacaggca

SEQ ID NO: 1177992 - RNA, 16 nt, Human
cugggacuacaggcac

SEQ ID NO: 1177993 - RNA, 22 nt, Human
cugggagaaccaaaaagaggcu

SEQ ID NO: 1177994 - RNA, 13 nt, Human
cugggcagaggaa

SEQ ID NO: 1177995 - RNA, 16 nt, Human
cugggcagaggaaagc

SEQ ID NO: 1177996 - RNA, 20 nt, Human
cugggcagaggaaagcaaag

SEQ ID NO: 1177997 - RNA, 20 nt, Human
cugggcagguuggugggggc

SEQ ID NO: 1177998 - RNA, 13 nt, Human
cuggggagaaagu

SEQ ID NO: 1177999 - RNA, 14 nt, Human
cuggggagaaagua

SEQ ID NO: 1178000 - RNA, 18 nt, Human
cuggguggcaccagcagc

SEQ ID NO: 1178001 - RNA, 20 nt, Human
cuggguggcaccagcagccu

SEQ ID NO: 1178002 - RNA, 21 nt, Human
cuggguggcaccagcagccug

SEQ ID NO: 1178003 - RNA, 22 nt, Human
cuggguggcaccagcagccugg

SEQ ID NO: 1178004 - RNA, 14 nt, Human
cuggguguggcgca

SEQ ID NO: 1178005 - RNA, 15 nt, Human
cuggguguggcgcag

SEQ ID NO: 1178006 - RNA, 21 nt, Human
cuggugccucaccccuugcca

SEQ ID NO: 1178007 - RNA, 21 nt, Human
cugcaaaggguaucaggugcu

SEQ ID NO: 1178008 - RNA, 22 nt, Human
cugcaaaggguaucaggugcug

SEQ ID NO: 1178009 - RNA, 22 nt, Human
cugaugggcaacccccagccug

SEQ ID NO: 1178010 - RNA, 23 nt, Human
cugaugggcaacccccagccugc

SEQ ID NO: 1178011 - RNA, 24 nt, Human
cugaugggcaacccccagccugcu

SEQ ID NO: 1178012 - RNA, 18 nt, Human
cugaugcuucuucagaga

SEQ ID NO: 1178013 - RNA, 19 nt, Human
cugaugcuucuucagagac

SEQ ID NO: 1178014 - RNA, 20 nt, Human
cugaugcuucuucagagacu

SEQ ID NO: 1178015 - RNA, 18 nt, Human
cugaugggcaacccccag

SEQ ID NO: 1178016 - RNA, 21 nt, Human
cugaugggcaacccccagccu

SEQ ID NO: 1178017 - RNA, 14 nt, Human
cucuuaugggcugg

SEQ ID NO: 1178018 - RNA, 15 nt, Human
cucuuaugggcuggg

SEQ ID NO: 1178019 - RNA, 13 nt, Human
cucuuauugccca

SEQ ID NO: 1178020 - RNA, 16 nt, Human
cugaugcuucuucaga

SEQ ID NO: 1178021 - RNA, 17 nt, Human
cugaugcuucuucagag

SEQ ID NO: 1178022 - RNA, 22 nt, Human
cugcaaccugauugugucucuu

SEQ ID NO: 1178023 - RNA, 18 nt, Human
cugcaagaauugaagcag

SEQ ID NO: 1178024 - RNA, 20 nt, Human
cugcaaccuccgccucuugg

SEQ ID NO: 1178025 - RNA, 22 nt, Human
cugcaaccuccgccucuugggu

SEQ ID NO: 1178026 - RNA, 14 nt, Human
cugcaaccugauug

SEQ ID NO: 1178027 - RNA, 19 nt, Human
cugcaaccugauugugucu

SEQ ID NO: 1178028 - RNA, 21 nt, Human
cugcaaccugauugugucucu

SEQ ID NO: 1178029 - RNA, 20 nt, Human
cugcaagaauugaagcagga

SEQ ID NO: 1178030 - RNA, 12 nt, Human
cugcaagggagu

SEQ ID NO: 1178031 - RNA, 23 nt, Human
cugcaccgggccacagagaaagu

SEQ ID NO: 1178032 - RNA, 13 nt, Human
cugcacuccagcc

SEQ ID NO: 1178033 - RNA, 22 nt, Human
cugcacuauagccuaggugaca

SEQ ID NO: 1178034 - RNA, 23 nt, Human
cugcacuauagccuaggugacag

SEQ ID NO: 1178035 - RNA, 15 nt, Human
cugcacuccagccug

SEQ ID NO: 1178036 - RNA, 16 nt, Human
cugcacuccagccuga

SEQ ID NO: 1178037 - RNA, 17 nt, Human
cugcacuccagccugag

SEQ ID NO: 1178038 - RNA, 20 nt, Human
cugcacuccagccugagcga

SEQ ID NO: 1178039 - RNA, 16 nt, Human
cugcacuauagccuag

SEQ ID NO: 1178040 - RNA, 17 nt, Human
cugcacuauagccuagg

SEQ ID NO: 1178041 - RNA, 18 nt, Human
cugcacuauagccuaggu

SEQ ID NO: 1178042 - RNA, 20 nt, Human
cugcacuauagccuagguga

SEQ ID NO: 1178043 - RNA, 16 nt, Human
cugcacuccagccugg

SEQ ID NO: 1178044 - RNA, 17 nt, Human
cugcacuccagccuggg

SEQ ID NO: 1178045 - RNA, 18 nt, Human
cugcacuccagccugggu

SEQ ID NO: 1178046 - RNA, 19 nt, Human
cugcacuccagccugggug

SEQ ID NO: 1178047 - RNA, 24 nt, Human
cugcagccucaaccuccugggcua

SEQ ID NO: 1178048 - RNA, 12 nt, Human
cugcagcuuugu

SEQ ID NO: 1178049 - RNA, 13 nt, Human
cugcaggcagcca

SEQ ID NO: 1178050 - RNA, 14 nt, Human
cugcaggcagccag

SEQ ID NO: 1178051 - RNA, 15 nt, Human
cugcaggcagccagg

SEQ ID NO: 1178052 - RNA, 16 nt, Human
cugcaggcagccaggc

SEQ ID NO: 1178053 - RNA, 17 nt, Human
cugcaggcagccaggcc

SEQ ID NO: 1178054 - RNA, 18 nt, Human
cugcaggcagccaggcca

SEQ ID NO: 1178055 - RNA, 19 nt, Human
cugcaggcagccaggccac

SEQ ID NO: 1178056 - RNA, 20 nt, Human
cugcaggcagccaggccaca

SEQ ID NO: 1178057 - RNA, 17 nt, Human
cugcauuuaaaagauac

SEQ ID NO: 1178058 - RNA, 18 nt, Human
cugcauuuaaaagauaca

SEQ ID NO: 1178059 - RNA, 20 nt, Human
cugccagggacagagggggu

SEQ ID NO: 1178060 - RNA, 22 nt, Human
cugccagggacagagggggugg

SEQ ID NO: 1178061 - RNA, 23 nt, Human
cugccagggacagaggggguggc

SEQ ID NO: 1178062 - RNA, 16 nt, Human
cugccauauucuguug

SEQ ID NO: 1178063 - RNA, 16 nt, Human
cugccauccagguuca

SEQ ID NO: 1178064 - RNA, 18 nt, Human
cugccauccagguucagc

SEQ ID NO: 1178065 - RNA, 19 nt, Human
cugccauccagguucagcu

SEQ ID NO: 1178066 - RNA, 20 nt, Human
cugccauauucuguuggcca

SEQ ID NO: 1178067 - RNA, 12 nt, Human
cugcccuuaccu

SEQ ID NO: 1178068 - RNA, 16 nt, Human
cugcccuuaccugcca

SEQ ID NO: 1178069 - RNA, 17 nt, Human
cugcccuuaccugccag

SEQ ID NO: 1178070 - RNA, 14 nt, Human
cugcauuuaaaaga

SEQ ID NO: 1178071 - RNA, 14 nt, Human
cacccaagggccug

SEQ ID NO: 1178072 - RNA, 15 nt, Human
cacccaagggccugg

SEQ ID NO: 1178073 - RNA, 13 nt, Human
cauugugggaagg

SEQ ID NO: 1178074 - RNA, 17 nt, Human
cauuguuggccaaagcc

SEQ ID NO: 1178075 - RNA, 18 nt, Human
cauuguuggccaaagcca

SEQ ID NO: 1178076 - RNA, 17 nt, Human
cauuuaggccaugggac

SEQ ID NO: 1178077 - RNA, 12 nt, Human
cauuuaaaagau

SEQ ID NO: 1178078 - RNA, 15 nt, Human
cauuuaaaagauaca

SEQ ID NO: 1178079 - RNA, 16 nt, Human
cauuuaaaagauacag

SEQ ID NO: 1178080 - RNA, 21 nt, Human
cauuuaaaagauacaguuacu

SEQ ID NO: 1178081 - RNA, 12 nt, Human
cauuuccugugu

SEQ ID NO: 1178082 - RNA, 13 nt, Human
cauuuccuguguc

SEQ ID NO: 1178083 - RNA, 16 nt, Human
cacccaagggccuggc

SEQ ID NO: 1178084 - RNA, 23 nt, Human
cauuuuucuuagggaaggauaca

SEQ ID NO: 1178085 - RNA, 22 nt, Human
cauuugaaaauuuugauguuuu

SEQ ID NO: 1178086 - RNA, 17 nt, Human
cauuugagcagggcuca

SEQ ID NO: 1178087 - RNA, 18 nt, Human
cauuugagcagggcucag

SEQ ID NO: 1178088 - RNA, 20 nt, Human
cauuugagcagggcucagcg

SEQ ID NO: 1178089 - RNA, 13 nt, Human
cauuugcucaugg

SEQ ID NO: 1178090 - RNA, 14 nt, Human
cauuugcucaugga

SEQ ID NO: 1178091 - RNA, 13 nt, Human
cauuugcuccuuu

SEQ ID NO: 1178092 - RNA, 14 nt, Human
cauuugcuccuuuc

SEQ ID NO: 1178093 - RNA, 13 nt, Human
cauuugcugaaua

SEQ ID NO: 1178094 - RNA, 20 nt, Human
cauuuguuugaacugauaaa

SEQ ID NO: 1178095 - RNA, 22 nt, Human
cauuuguuugaacugauaaaga

SEQ ID NO: 1178096 - RNA, 13 nt, Human
ccaacaucaacau

SEQ ID NO: 1178097 - RNA, 21 nt, Human
ccaacauacucccaucuguga

SEQ ID NO: 1178098 - RNA, 22 nt, Human
ccaacauacucccaucugugaa

SEQ ID NO: 1178099 - RNA, 17 nt, Human
ccaacauacucccaucu

SEQ ID NO: 1178100 - RNA, 18 nt, Human
ccaacauacucccaucug

SEQ ID NO: 1178101 - RNA, 19 nt, Human
ccaacauacucccaucugu

SEQ ID NO: 1178102 - RNA, 20 nt, Human
ccaacauacucccaucugug

SEQ ID NO: 1178103 - RNA, 15 nt, Human
ccaaaguacacuguu

SEQ ID NO: 1178104 - RNA, 18 nt, Human
ccaaaguacacuguuuca

SEQ ID NO: 1178105 - RNA, 20 nt, Human
ccaaaguacacuguuucaaa

SEQ ID NO: 1178106 - RNA, 20 nt, Human
ccaaacucaccugccccuca

SEQ ID NO: 1178107 - RNA, 22 nt, Human
ccaaacugacucuuaagaagac

SEQ ID NO: 1178108 - RNA, 23 nt, Human
ccaaagcagugcaugcugucccu

SEQ ID NO: 1178109 - RNA, 19 nt, Human
ccaaagccaaagcuaggcc

SEQ ID NO: 1178110 - RNA, 17 nt, Human
ccaaagccuccuccagc

SEQ ID NO: 1178111 - RNA, 22 nt, Human
ccaaagccuccuccagccgcca

SEQ ID NO: 1178112 - RNA, 15 nt, Human
ccaaagcuaggccug

SEQ ID NO: 1178113 - RNA, 16 nt, Human
ccaaagcuaggccugg

SEQ ID NO: 1178114 - RNA, 17 nt, Human
ccaaagcuaggccuggc

SEQ ID NO: 1178115 - RNA, 21 nt, Human
ccaaagcuaggccuggccaga

SEQ ID NO: 1178116 - RNA, 15 nt, Human
ccaaaggaagcacau

SEQ ID NO: 1178117 - RNA, 23 nt, Human
ccaaaggaagcacaugccucucu

SEQ ID NO: 1178118 - RNA, 12 nt, Human
ccaacccucauc

SEQ ID NO: 1178119 - RNA, 13 nt, Human
ccaacccucauca

SEQ ID NO: 1178120 - RNA, 19 nt, Human
ccaagaagcccaggaaagg

SEQ ID NO: 1178121 - RNA, 20 nt, Human
ccaagaagcccaggaaaggc

SEQ ID NO: 1178122 - RNA, 23 nt, Human
ccaagcagagguugggaggccau

SEQ ID NO: 1178123 - RNA, 15 nt, Human
ccaagcucccaggca

SEQ ID NO: 1178124 - RNA, 16 nt, Human
ccaagcucccaggcau

SEQ ID NO: 1178125 - RNA, 22 nt, Human
ccaagcucccaggcauucccca

SEQ ID NO: 1178126 - RNA, 17 nt, Human
ccaaggccaaaggaagc

SEQ ID NO: 1178127 - RNA, 17 nt, Human
ccaagcauuuagaugua

SEQ ID NO: 1178128 - RNA, 13 nt, Human
ccaaggugggagg

SEQ ID NO: 1178129 - RNA, 18 nt, Human
ccaaggugggaggauugc

SEQ ID NO: 1178130 - RNA, 23 nt, Human
ccaagguuuggggaagaacgaag

SEQ ID NO: 1178131 - RNA, 20 nt, Human
ccaagucaagugaaaaagga

SEQ ID NO: 1178132 - RNA, 18 nt, Human
ccaaggccaaaggaagca

SEQ ID NO: 1178133 - RNA, 21 nt, Human
ccaaggccaaaggaagcacau

SEQ ID NO: 1178134 - RNA, 15 nt, Human
ccaagggccuggccu

SEQ ID NO: 1178135 - RNA, 16 nt, Human
ccaagggccuggccug

SEQ ID NO: 1178136 - RNA, 18 nt, Human
ccaagggccuggccugag

SEQ ID NO: 1178137 - RNA, 19 nt, Human
ccaagggccuggccugagc

SEQ ID NO: 1178138 - RNA, 22 nt, Human
ccaaggggaauguuugccucug

SEQ ID NO: 1178139 - RNA, 14 nt, Human
ccaagcaaguauua

SEQ ID NO: 1178140 - RNA, 20 nt, Human
ccacaggaaccacaagacug

SEQ ID NO: 1178141 - RNA, 16 nt, Human
ccacaggaucagucug

SEQ ID NO: 1178142 - RNA, 20 nt, Human
ccacacccagcccacuucug

SEQ ID NO: 1178143 - RNA, 21 nt, Human
ccacacccagcccacuucugc

SEQ ID NO: 1178144 - RNA, 22 nt, Human
ccacacccagcccacuucugcc

SEQ ID NO: 1178145 - RNA, 18 nt, Human
ccacaucuugcucugcug

SEQ ID NO: 1178146 - RNA, 19 nt, Human
ccacaucuugcucugcuga

SEQ ID NO: 1178147 - RNA, 20 nt, Human
ccacaucuugcucugcugac

SEQ ID NO: 1178148 - RNA, 16 nt, Human
ccacaugugcacaugc

SEQ ID NO: 1178149 - RNA, 16 nt, Human
ccacauuccugaugcu

SEQ ID NO: 1178150 - RNA, 16 nt, Human
ccaauauucauagcag

SEQ ID NO: 1178151 - RNA, 23 nt, Human
ccacccaggagccccgaggccuu

SEQ ID NO: 1178152 - RNA, 17 nt, Human
ccacccccacccaaggg

SEQ ID NO: 1178153 - RNA, 16 nt, Human
ccacuacauucuguua

SEQ ID NO: 1178154 - RNA, 17 nt, Human
ccacuacauucuguuaa

SEQ ID NO: 1178155 - RNA, 11 nt, Human
ccacuacauuc

SEQ ID NO: 1178156 - RNA, 15 nt, Human
ccacuacauucuguu

SEQ ID NO: 1178157 - RNA, 18 nt, Human
ccacucaguccauagcag

SEQ ID NO: 1178158 - RNA, 15 nt, Human
ccaccccacacacgc

SEQ ID NO: 1178159 - RNA, 15 nt, Human
ccacccccacccaag

SEQ ID NO: 1178160 - RNA, 16 nt, Human
ccacgcuggagugcag

SEQ ID NO: 1178161 - RNA, 18 nt, Human
ccacgcuggagugcagug

SEQ ID NO: 1178162 - RNA, 19 nt, Human
ccacgcuggagugcaguga

SEQ ID NO: 1178163 - RNA, 18 nt, Human
ccacggccaggccagagg

SEQ ID NO: 1178164 - RNA, 23 nt, Human
ccacggccaggccagagggagug

SEQ ID NO: 1178165 - RNA, 14 nt, Human
ccacuacauucugu

SEQ ID NO: 1178166 - RNA, 13 nt, Human
ccacugcagaaga

SEQ ID NO: 1178167 - RNA, 18 nt, Human
ccacugcagaagacagua

SEQ ID NO: 1178168 - RNA, 13 nt, Human
ccacuucagcuga

SEQ ID NO: 1178169 - RNA, 14 nt, Human
ccacuucagcugac

SEQ ID NO: 1178170 - RNA, 22 nt, Human
ccagaaguuugagaucagccug

SEQ ID NO: 1178171 - RNA, 23 nt, Human
ccagaaguuugagaucagccugg

SEQ ID NO: 1178172 - RNA, 18 nt, Human
ccagaauuucccaaagca

SEQ ID NO: 1178173 - RNA, 12 nt, Human
ccagaauuuccc

SEQ ID NO: 1178174 - RNA, 19 nt, Human
ccagaauuucccaaagcag

SEQ ID NO: 1178175 - RNA, 21 nt, Human
ccagaauuucccaaagcagug

SEQ ID NO: 1178176 - RNA, 21 nt, Human
ccagacaccuugacagggcac

SEQ ID NO: 1178177 - RNA, 19 nt, Human
ccaggcuggucucaaacuc

SEQ ID NO: 1178178 - RNA, 20 nt, Human
ccaggcuguaucccaugagc

SEQ ID NO: 1178179 - RNA, 13 nt, Human
ccaggccccugcc

SEQ ID NO: 1178180 - RNA, 24 nt, Human
ccaggcuguaucccaugagccuca

SEQ ID NO: 1178181 - RNA, 13 nt, Human
ccaguaucuugaa

SEQ ID NO: 1178182 - RNA, 15 nt, Human
ccagguucagcuugu

SEQ ID NO: 1178183 - RNA, 21 nt, Human
ccaggugcuaggaacacuccu

SEQ ID NO: 1178184 - RNA, 14 nt, Human
ccagguucagcuug

SEQ ID NO: 1178185 - RNA, 18 nt, Human
ccaggugcacaagcucca

SEQ ID NO: 1178186 - RNA, 19 nt, Human
ccaggugcuaggaacacuc

SEQ ID NO: 1178187 - RNA, 16 nt, Human
ccaggagcagccacau

SEQ ID NO: 1178188 - RNA, 15 nt, Human
ccaggagccccgagg

SEQ ID NO: 1178189 - RNA, 13 nt, Human
ccaggagccuccu

SEQ ID NO: 1178190 - RNA, 14 nt, Human
ccaggagccuccug

SEQ ID NO: 1178191 - RNA, 18 nt, Human
ccaggagccuccugcccu

SEQ ID NO: 1178192 - RNA, 16 nt, Human
ccaggagccccgaggc

SEQ ID NO: 1178193 - RNA, 19 nt, Human
ccaggagccuccugcccuu

SEQ ID NO: 1178194 - RNA, 12 nt, Human
ccaggaggccag

SEQ ID NO: 1178195 - RNA, 13 nt, Human
ccaggaggccagc

SEQ ID NO: 1178196 - RNA, 14 nt, Human
ccaggaggccagcc

SEQ ID NO: 1178197 - RNA, 13 nt, Human
ccaggcauggugg

SEQ ID NO: 1178198 - RNA, 14 nt, Human
ccaggcauucccca

SEQ ID NO: 1178199 - RNA, 17 nt, Human
ccaggcauuccccagga

SEQ ID NO: 1178200 - RNA, 23 nt, Human
ccaggcauuccccaggaggccag

SEQ ID NO: 1178201 - RNA, 24 nt, Human
ccaggcauuccccaggaggccagc

SEQ ID NO: 1178202 - RNA, 21 nt, Human
ccaggccacaagacccuugug

SEQ ID NO: 1178203 - RNA, 22 nt, Human
ccaggaagccagcaggcucuca

SEQ ID NO: 1178204 - RNA, 16 nt, Human
ccagagcccaccuugg

SEQ ID NO: 1178205 - RNA, 22 nt, Human
ccagagcccaccuuggcucaag

SEQ ID NO: 1178206 - RNA, 19 nt, Human
ccagccuugaccauucucc

SEQ ID NO: 1178207 - RNA, 20 nt, Human
ccagccuugaccauucucca

SEQ ID NO: 1178208 - RNA, 22 nt, Human
ccagccuugaccauucuccacc

SEQ ID NO: 1178209 - RNA, 14 nt, Human
ccagcgagcccugg

SEQ ID NO: 1178210 - RNA, 15 nt, Human
ccagcgagcccuggu

SEQ ID NO: 1178211 - RNA, 16 nt, Human
ccagcgagcccuggug

SEQ ID NO: 1178212 - RNA, 21 nt, Human
ccagcgagcccugguggcagu

SEQ ID NO: 1178213 - RNA, 11 nt, Human
ccagcucuggu

SEQ ID NO: 1178214 - RNA, 12 nt, Human
ccagcucugguc

SEQ ID NO: 1178215 - RNA, 13 nt, Human
ccagcucuggucc

SEQ ID NO: 1178216 - RNA, 14 nt, Human
ccagcucuggucca

SEQ ID NO: 1178217 - RNA, 17 nt, Human
ccagcucugguccauag

SEQ ID NO: 1178218 - RNA, 21 nt, Human
ccagcucugguccauagagag

SEQ ID NO: 1178219 - RNA, 22 nt, Human
ccagcucugguccauagagagc

SEQ ID NO: 1178220 - RNA, 23 nt, Human
ccagcugcuugggcuucauccuc

SEQ ID NO: 1178221 - RNA, 13 nt, Human
ccagcugcuuggg

SEQ ID NO: 1178222 - RNA, 18 nt, Human
ccagugaggcucugcccu

SEQ ID NO: 1178223 - RNA, 19 nt, Human
ccagugaggcucugcccuu

SEQ ID NO: 1178224 - RNA, 20 nt, Human
ccagugaggcucugcccuug

SEQ ID NO: 1178225 - RNA, 13 nt, Human
ccauaugccuggg

SEQ ID NO: 1178226 - RNA, 13 nt, Human
ccaucaccagaca

SEQ ID NO: 1178227 - RNA, 22 nt, Human
ccaucauugaaaucuuuuugcu

SEQ ID NO: 1178228 - RNA, 18 nt, Human
ccauccagguucagcuug

SEQ ID NO: 1178229 - RNA, 12 nt, Human
ccauccucugua

SEQ ID NO: 1178230 - RNA, 19 nt, Human
ccauccucuguacagagcc

SEQ ID NO: 1178231 - RNA, 16 nt, Human
ccaugauguuuagaaa

SEQ ID NO: 1178232 - RNA, 18 nt, Human
ccaugauguuuuccauga

SEQ ID NO: 1178233 - RNA, 19 nt, Human
ccaugauuaaccacuucag

SEQ ID NO: 1178234 - RNA, 21 nt, Human
ccaugauuaaccacuucagcu

SEQ ID NO: 1178235 - RNA, 14 nt, Human
ccaugaagauguag

SEQ ID NO: 1178236 - RNA, 13 nt, Human
ccaugcuccuggc

SEQ ID NO: 1178237 - RNA, 11 nt, Human
ccaugcugccc

SEQ ID NO: 1178238 - RNA, 13 nt, Human
ccaugcugcccug

SEQ ID NO: 1178239 - RNA, 14 nt, Human
ccaugcugcccugu

SEQ ID NO: 1178240 - RNA, 15 nt, Human
ccaugcugcccugug

SEQ ID NO: 1178241 - RNA, 20 nt, Human
ccauccucuguacagagccc

SEQ ID NO: 1178242 - RNA, 18 nt, Human
cccaaaaggcagaagcaa

SEQ ID NO: 1178243 - RNA, 21 nt, Human
ccauuuuguauuuuacuaaua

SEQ ID NO: 1178244 - RNA, 13 nt, Human
cccaaaaggcaga

SEQ ID NO: 1178245 - RNA, 20 nt, Human
ccauuuugggguacccacug

SEQ ID NO: 1178246 - RNA, 22 nt, Human
ccauuuugggguacccacugcu

SEQ ID NO: 1178247 - RNA, 12 nt, Human
cccaaagaugca

SEQ ID NO: 1178248 - RNA, 15 nt, Human
cccaaagaugcagcc

SEQ ID NO: 1178249 - RNA, 16 nt, Human
cccaaagcagugcaug

SEQ ID NO: 1178250 - RNA, 13 nt, Human
ccauggacuuugu

SEQ ID NO: 1178251 - RNA, 14 nt, Human
ccauggacuuuguu

SEQ ID NO: 1178252 - RNA, 15 nt, Human
ccauucuccaccugc

SEQ ID NO: 1178253 - RNA, 16 nt, Human
ccauucuccaccugcc

SEQ ID NO: 1178254 - RNA, 17 nt, Human
ccauucuccaccugcca

SEQ ID NO: 1178255 - RNA, 18 nt, Human
ccauucuccaccugccag

SEQ ID NO: 1178256 - RNA, 17 nt, Human
ccauucugccugcccag

SEQ ID NO: 1178257 - RNA, 18 nt, Human
ccauucugccugcccagg

SEQ ID NO: 1178258 - RNA, 19 nt, Human
ccauucugccugcccaggc

SEQ ID NO: 1178259 - RNA, 20 nt, Human
ccauucugccugcccaggcc

SEQ ID NO: 1178260 - RNA, 21 nt, Human
ccauucugccugcccaggccc

SEQ ID NO: 1178261 - RNA, 21 nt, Human
cccacaaaggagagcuagcag

SEQ ID NO: 1178262 - RNA, 17 nt, Human
cccaggccuccuacagc

SEQ ID NO: 1178263 - RNA, 18 nt, Human
cccaggccuccuacagcu

SEQ ID NO: 1178264 - RNA, 22 nt, Human
cccaggugcuaggaacacuccu

SEQ ID NO: 1178265 - RNA, 23 nt, Human
cccaggugcuaggaacacuccuu

SEQ ID NO: 1178266 - RNA, 13 nt, Human
cccagguuucuau

SEQ ID NO: 1178267 - RNA, 20 nt, Human
cccagucuggaaugcagugg

SEQ ID NO: 1178268 - RNA, 13 nt, Human
cccagugcccaca

SEQ ID NO: 1178269 - RNA, 21 nt, Human
cccaggagccccgaggccuuc

SEQ ID NO: 1178270 - RNA, 13 nt, Human
cccaggaggccag

SEQ ID NO: 1178271 - RNA, 22 nt, Human
cccaggaggccagccuugacca

SEQ ID NO: 1178272 - RNA, 11 nt, Human
cccaggcaggu

SEQ ID NO: 1178273 - RNA, 13 nt, Human
cccaggcaggucu

SEQ ID NO: 1178274 - RNA, 17 nt, Human
cccaggcaggucuugaa

SEQ ID NO: 1178275 - RNA, 20 nt, Human
cccaggcauuccccaggagg

SEQ ID NO: 1178276 - RNA, 21 nt, Human
cccaggcauuccccaggaggc

SEQ ID NO: 1178277 - RNA, 22 nt, Human
cccaggcauuccccaggaggcc

SEQ ID NO: 1178278 - RNA, 23 nt, Human
cccaggcauuccccaggaggcca

SEQ ID NO: 1178279 - RNA, 11 nt, Human
cccaggccccu

SEQ ID NO: 1178280 - RNA, 16 nt, Human
cccaggccccugccac

SEQ ID NO: 1178281 - RNA, 18 nt, Human
cccaggccccugccaccc

SEQ ID NO: 1178282 - RNA, 21 nt, Human
cccaggccccugccacccugg

SEQ ID NO: 1178283 - RNA, 22 nt, Human
cccaggccccugccacccuggg

SEQ ID NO: 1178284 - RNA, 18 nt, Human
cccaagggccuggccuga

SEQ ID NO: 1178285 - RNA, 19 nt, Human
cccaagggccuggccugag

SEQ ID NO: 1178286 - RNA, 23 nt, Human
cccaagggccuggccugagcugg

SEQ ID NO: 1178287 - RNA, 20 nt, Human
cccagagggccugcaaggga

SEQ ID NO: 1178288 - RNA, 20 nt, Human
cccagauugcaacaggcugg

SEQ ID NO: 1178289 - RNA, 21 nt, Human
cccagauugcaacaggcuggg

SEQ ID NO: 1178290 - RNA, 22 nt, Human
cccagauugcaacaggcugggc

SEQ ID NO: 1178291 - RNA, 18 nt, Human
cccagcaagugagagcug

SEQ ID NO: 1178292 - RNA, 19 nt, Human
cccagcaagugagagcugg

SEQ ID NO: 1178293 - RNA, 20 nt, Human
cccagcaagugagagcuggg

SEQ ID NO: 1178294 - RNA, 21 nt, Human
cccagcaagugagagcugggu

SEQ ID NO: 1178295 - RNA, 22 nt, Human
cccagcaagugagagcugggug

SEQ ID NO: 1178296 - RNA, 23 nt, Human
cccagcaagugagagcugggugu

SEQ ID NO: 1178297 - RNA, 23 nt, Human
cccagauugcaacaggcugggcu

SEQ ID NO: 1178298 - RNA, 11 nt, Human
cccagccccuu

SEQ ID NO: 1178299 - RNA, 18 nt, Human
cccagccccuucugaccc

SEQ ID NO: 1178300 - RNA, 12 nt, Human
cccagccugcua

SEQ ID NO: 1178301 - RNA, 17 nt, Human
cccagcgagcccuggug

SEQ ID NO: 1178302 - RNA, 18 nt, Human
cccagcgagcccuggugg

SEQ ID NO: 1178303 - RNA, 19 nt, Human
cccagcgagcccugguggc

SEQ ID NO: 1178304 - RNA, 23 nt, Human
cccagcgagcccugguggcagug

SEQ ID NO: 1178305 - RNA, 14 nt, Human
ccccacccaagggc

SEQ ID NO: 1178306 - RNA, 20 nt, Human
ccccacccaagggccuggcc

SEQ ID NO: 1178307 - RNA, 21 nt, Human
ccccacccaagggccuggccu

SEQ ID NO: 1178308 - RNA, 13 nt, Human
cccauucugccug

SEQ ID NO: 1178309 - RNA, 22 nt, Human
ccccaaauggaaaugggcagag

SEQ ID NO: 1178310 - RNA, 15 nt, Human
cccagugcccacagg

SEQ ID NO: 1178311 - RNA, 20 nt, Human
cccagugcccacaggaucag

SEQ ID NO: 1178312 - RNA, 21 nt, Human
cccagugcccacaggaucagu

SEQ ID NO: 1178313 - RNA, 18 nt, Human
cccagugccgagaaggaa

SEQ ID NO: 1178314 - RNA, 15 nt, Human
cccaugcugcccugu

SEQ ID NO: 1178315 - RNA, 16 nt, Human
cccaugcugcccugug

SEQ ID NO: 1178316 - RNA, 17 nt, Human
cccaugcugcccuguga

SEQ ID NO: 1178317 - RNA, 18 nt, Human
cccaugcugcccugugag

SEQ ID NO: 1178318 - RNA, 17 nt, Human
ccccaggaggccagccu

SEQ ID NO: 1178319 - RNA, 22 nt, Human
ccccucagggucccugguggca

SEQ ID NO: 1178320 - RNA, 14 nt, Human
ccccaggaggccag

SEQ ID NO: 1178321 - RNA, 15 nt, Human
ccccaggaggccagc

SEQ ID NO: 1178322 - RNA, 21 nt, Human
ccccaggaggccagccuugac

SEQ ID NO: 1178323 - RNA, 22 nt, Human
ccccaggaggccagccuugacc

SEQ ID NO: 1178324 - RNA, 12 nt, Human
ccccacugguga

SEQ ID NO: 1178325 - RNA, 13 nt, Human
ccccacuggugac

SEQ ID NO: 1178326 - RNA, 14 nt, Human
ccccacuggugaca

SEQ ID NO: 1178327 - RNA, 12 nt, Human
cccccagcccca

SEQ ID NO: 1178328 - RNA, 11 nt, Human
cccccacacac

SEQ ID NO: 1178329 - RNA, 12 nt, Human
cccccacacaca

SEQ ID NO: 1178330 - RNA, 14 nt, Human
cccccacacacaca

SEQ ID NO: 1178331 - RNA, 19 nt, Human
cccccacacacacacacau

SEQ ID NO: 1178332 - RNA, 21 nt, Human
cccccgcugucagccauuccu

SEQ ID NO: 1178333 - RNA, 21 nt, Human
cccugguggcagugggagcug

SEQ ID NO: 1178334 - RNA, 16 nt, Human
cccugguggcaguggg

SEQ ID NO: 1178335 - RNA, 19 nt, Human
cccugguggcagugggagc

SEQ ID NO: 1178336 - RNA, 17 nt, Human
ccccucagggucccugg

SEQ ID NO: 1178337 - RNA, 18 nt, Human
ccccucagggucccuggu

SEQ ID NO: 1178338 - RNA, 20 nt, Human
ccccucagggucccuggugg

SEQ ID NO: 1178339 - RNA, 21 nt, Human
cccuguagagugggagcugag

SEQ ID NO: 1178340 - RNA, 16 nt, Human
cccugugggcccccaa

SEQ ID NO: 1178341 - RNA, 18 nt, Human
cccugugggcccccaaau

SEQ ID NO: 1178342 - RNA, 15 nt, Human
cccuguuuguuucug

SEQ ID NO: 1178343 - RNA, 16 nt, Human
cccuguuuguuucuga

SEQ ID NO: 1178344 - RNA, 19 nt, Human
cccuuaccucggugccuuc

SEQ ID NO: 1178345 - RNA, 16 nt, Human
cccuugaugaagaagu

SEQ ID NO: 1178346 - RNA, 17 nt, Human
cccuugccgucuaccug

SEQ ID NO: 1178347 - RNA, 18 nt, Human
cccuugccgucuaccuga

SEQ ID NO: 1178348 - RNA, 22 nt, Human
cccuugccgucuaccugagggg

SEQ ID NO: 1178349 - RNA, 20 nt, Human
cccuuugacgccaucccagc

SEQ ID NO: 1178350 - RNA, 18 nt, Human
cccuuggggagcaggcuc

SEQ ID NO: 1178351 - RNA, 14 nt, Human
cccuugugguccca

SEQ ID NO: 1178352 - RNA, 16 nt, Human
cccuuguggucccacc

SEQ ID NO: 1178353 - RNA, 18 nt, Human
cccuuguggucccacccc

SEQ ID NO: 1178354 - RNA, 20 nt, Human
cccuuguggucccaccccac

SEQ ID NO: 1178355 - RNA, 18 nt, Human
ccgagaucacgccacugc

SEQ ID NO: 1178356 - RNA, 11 nt, Human
cccuuuuccuu

SEQ ID NO: 1178357 - RNA, 13 nt, Human
cccuuuucuguuu

SEQ ID NO: 1178358 - RNA, 17 nt, Human
cccuuuuuuggcugcug

SEQ ID NO: 1178359 - RNA, 18 nt, Human
cccuuuuuuggcugcuga

SEQ ID NO: 1178360 - RNA, 19 nt, Human
cccuuuuuuggcugcugaa

SEQ ID NO: 1178361 - RNA, 17 nt, Human
ccgagaaggaagccucc

SEQ ID NO: 1178362 - RNA, 19 nt, Human
ccgagauagccaaggccaa

SEQ ID NO: 1178363 - RNA, 22 nt, Human
ccgagauagccaaggccaaagg

SEQ ID NO: 1178364 - RNA, 12 nt, Human
ccggcuggccug

SEQ ID NO: 1178365 - RNA, 13 nt, Human
ccggcuggccugg

SEQ ID NO: 1178366 - RNA, 15 nt, Human
ccggcuggccuggcc

SEQ ID NO: 1178367 - RNA, 15 nt, Human
ccgggcacucagaag

SEQ ID NO: 1178368 - RNA, 20 nt, Human
ccgggcacucagaagacacu

SEQ ID NO: 1178369 - RNA, 20 nt, Human
ccgggcgcgguggcucacgc

SEQ ID NO: 1178370 - RNA, 14 nt, Human
ccuaaaguguauuu

SEQ ID NO: 1178371 - RNA, 17 nt, Human
ccucacaguccuuacca

SEQ ID NO: 1178372 - RNA, 20 nt, Human
ccucacaguccuuaccagca

SEQ ID NO: 1178373 - RNA, 22 nt, Human
ccucacaguccuuaccagcaga

SEQ ID NO: 1178374 - RNA, 23 nt, Human
ccucacaguccuuaccagcagag

SEQ ID NO: 1178375 - RNA, 12 nt, Human
ccucaccccacu

SEQ ID NO: 1178376 - RNA, 15 nt, Human
ccucaccccacugug

SEQ ID NO: 1178377 - RNA, 17 nt, Human
ccucaccuuucccaucu

SEQ ID NO: 1178378 - RNA, 20 nt, Human
ccucagaaaacaaggaugaa

SEQ ID NO: 1178379 - RNA, 16 nt, Human
ccucagcauccuggca

SEQ ID NO: 1178380 - RNA, 17 nt, Human
ccucagcauccuggcac

SEQ ID NO: 1178381 - RNA, 11 nt, Human
ccucaggccug

SEQ ID NO: 1178382 - RNA, 14 nt, Human
ccucaggccugggg

SEQ ID NO: 1178383 - RNA, 21 nt, Human
ccucaggccugggggcugggc

SEQ ID NO: 1178384 - RNA, 23 nt, Human
ccucaggccugggggcugggcag

SEQ ID NO: 1178385 - RNA, 14 nt, Human
ccucagggucccug

SEQ ID NO: 1178386 - RNA, 15 nt, Human
ccucagggucccugg

SEQ ID NO: 1178387 - RNA, 16 nt, Human
ccucaggugagaagca

SEQ ID NO: 1178388 - RNA, 17 nt, Human
ccucaggugauccaccc

SEQ ID NO: 1178389 - RNA, 19 nt, Human
ccucaggugauccacccac

SEQ ID NO: 1178390 - RNA, 22 nt, Human
ccucaggugauccacccaccuc

SEQ ID NO: 1178391 - RNA, 17 nt, Human
ccucaggugagaagcag

SEQ ID NO: 1178392 - RNA, 19 nt, Human
ccucagucuggcccuuccu

SEQ ID NO: 1178393 - RNA, 15 nt, Human
ccucagucuggcccu

SEQ ID NO: 1178394 - RNA, 13 nt, Human
ccucccucccucu

SEQ ID NO: 1178395 - RNA, 15 nt, Human
ccucccucccucuuu

SEQ ID NO: 1178396 - RNA, 16 nt, Human
ccucccucccucuuuc

SEQ ID NO: 1178397 - RNA, 13 nt, Human
ccuccugccucga

SEQ ID NO: 1178398 - RNA, 13 nt, Human
ccuccugggcuaa

SEQ ID NO: 1178399 - RNA, 13 nt, Human
ccuccugugugug

SEQ ID NO: 1178400 - RNA, 15 nt, Human
ccuccugugugugcg

SEQ ID NO: 1178401 - RNA, 22 nt, Human
ccuccugugugugcgccuacag

SEQ ID NO: 1178402 - RNA, 23 nt, Human
ccuccugugugugcgccuacagg

SEQ ID NO: 1178403 - RNA, 12 nt, Human
ccucucccauca

SEQ ID NO: 1178404 - RNA, 23 nt, Human
ccucugaaaaccaauguucucuc

SEQ ID NO: 1178405 - RNA, 16 nt, Human
ccucugacacacagcu

SEQ ID NO: 1178406 - RNA, 12 nt, Human
ccucugggacug

SEQ ID NO: 1178407 - RNA, 17 nt, Human
ccucugacacacagcuc

SEQ ID NO: 1178408 - RNA, 18 nt, Human
ccucugacacacagcucu

SEQ ID NO: 1178409 - RNA, 15 nt, Human
ccucugcacaagcug

SEQ ID NO: 1178410 - RNA, 17 nt, Human
ccucugcacaagcugca

SEQ ID NO: 1178411 - RNA, 19 nt, Human
ccucugcacaagcugcacc

SEQ ID NO: 1178412 - RNA, 20 nt, Human
ccucugcacaagcugcaccc

SEQ ID NO: 1178413 - RNA, 14 nt, Human
ccucugcacucccc

SEQ ID NO: 1178414 - RNA, 15 nt, Human
ccucugcacuccccu

SEQ ID NO: 1178415 - RNA, 20 nt, Human
ccucugcacuccccugcugg

SEQ ID NO: 1178416 - RNA, 21 nt, Human
ccucugcacuccccugcuggg

SEQ ID NO: 1178417 - RNA, 22 nt, Human
ccucugcacuccccugcugggu

SEQ ID NO: 1178418 - RNA, 23 nt, Human
ccucugcacuccccugcugggug

SEQ ID NO: 1178419 - RNA, 14 nt, Human
ccucuguacagagc

SEQ ID NO: 1178420 - RNA, 15 nt, Human
ccucuguacagagcc

SEQ ID NO: 1178421 - RNA, 16 nt, Human
ccucuguacagagccc

SEQ ID NO: 1178422 - RNA, 17 nt, Human
ccucuguacagagccca

SEQ ID NO: 1178423 - RNA, 18 nt, Human
ccucuguacagagcccac

SEQ ID NO: 1178424 - RNA, 23 nt, Human
ccucuguacagagcccacgcccc

SEQ ID NO: 1178425 - RNA, 14 nt, Human
ccucuuagaaaaac

SEQ ID NO: 1178426 - RNA, 23 nt, Human
ccucuuagaugcaguucugaaga

SEQ ID NO: 1178427 - RNA, 14 nt, Human
ccucuuaugggcug

SEQ ID NO: 1178428 - RNA, 15 nt, Human
ccucuuaugggcugg

SEQ ID NO: 1178429 - RNA, 16 nt, Human
ccucuuaugggcuggg

SEQ ID NO: 1178430 - RNA, 22 nt, Human
ccucuuuggucuacacugugcu

SEQ ID NO: 1178431 - RNA, 17 nt, Human
ccucuuaugggcugggu

SEQ ID NO: 1178432 - RNA, 18 nt, Human
ccugaaagaggaaugaag

SEQ ID NO: 1178433 - RNA, 23 nt, Human
ccugaaagaggaaugaaguacuc

SEQ ID NO: 1178434 - RNA, 14 nt, Human
ccugaaggccccgc

SEQ ID NO: 1178435 - RNA, 19 nt, Human
ccugaagucacacagugag

SEQ ID NO: 1178436 - RNA, 13 nt, Human
ccugaaggccccg

SEQ ID NO: 1178437 - RNA, 15 nt, Human
ccugaagucacacag

SEQ ID NO: 1178438 - RNA, 16 nt, Human
ccugaagucacacagu

SEQ ID NO: 1178439 - RNA, 17 nt, Human
ccugaagucacacagug

SEQ ID NO: 1178440 - RNA, 21 nt, Human
ccugaagacucauucuucugu

SEQ ID NO: 1178441 - RNA, 23 nt, Human
ccugacaacacucauugaccuga

SEQ ID NO: 1178442 - RNA, 12 nt, Human
ccugacaacacu

SEQ ID NO: 1178443 - RNA, 14 nt, Human
ccugacaacacuca

SEQ ID NO: 1178444 - RNA, 15 nt, Human
ccugacaacacucau

SEQ ID NO: 1178445 - RNA, 16 nt, Human
ccugacaacacucauu

SEQ ID NO: 1178446 - RNA, 12 nt, Human
ccugaggcccag

SEQ ID NO: 1178447 - RNA, 13 nt, Human
ccugaggcccaga

SEQ ID NO: 1178448 - RNA, 14 nt, Human
ccugaggcccagag

SEQ ID NO: 1178449 - RNA, 16 nt, Human
ccugaggcccuucucu

SEQ ID NO: 1178450 - RNA, 17 nt, Human
ccugaggcccuucucuc

SEQ ID NO: 1178451 - RNA, 19 nt, Human
ccugaggcccuucucucca

SEQ ID NO: 1178452 - RNA, 20 nt, Human
ccugaggcccuucucuccag

SEQ ID NO: 1178453 - RNA, 21 nt, Human
ccugaggcccuucucuccagc

SEQ ID NO: 1178454 - RNA, 22 nt, Human
ccugaggcccuucucuccagcc

SEQ ID NO: 1178455 - RNA, 23 nt, Human
ccugaggcccuucucuccagccc

SEQ ID NO: 1178456 - RNA, 18 nt, Human
ccugaggcuccacuuggu

SEQ ID NO: 1178457 - RNA, 20 nt, Human
ccugaggcuccacuuggucu

SEQ ID NO: 1178458 - RNA, 14 nt, Human
ccugaugcuucuuc

SEQ ID NO: 1178459 - RNA, 17 nt, Human
ccugaugcuucuucaga

SEQ ID NO: 1178460 - RNA, 18 nt, Human
ccugaugcuucuucagag

SEQ ID NO: 1178461 - RNA, 19 nt, Human
ccugaugcuucuucagaga

SEQ ID NO: 1178462 - RNA, 23 nt, Human
ccugauugugucucuugguccug

SEQ ID NO: 1178463 - RNA, 13 nt, Human
ccugcugguucag

SEQ ID NO: 1178464 - RNA, 19 nt, Human
ccugcugguucaggguugg

SEQ ID NO: 1178465 - RNA, 18 nt, Human
ccugcaacaccuuguuuc

SEQ ID NO: 1178466 - RNA, 19 nt, Human
ccugcaacaccuuguuucc

SEQ ID NO: 1178467 - RNA, 16 nt, Human
ccugcaaccugauugu

SEQ ID NO: 1178468 - RNA, 21 nt, Human
ccugcaaccugauugugucuc

SEQ ID NO: 1178469 - RNA, 23 nt, Human
ccugcgucucauacucaccucac

SEQ ID NO: 1178470 - RNA, 17 nt, Human
ccugcuaauuccccaga

SEQ ID NO: 1178471 - RNA, 12 nt, Human
ccugcuccagcu

SEQ ID NO: 1178472 - RNA, 13 nt, Human
ccugcuccagcug

SEQ ID NO: 1178473 - RNA, 14 nt, Human
ccugcuccagcugu

SEQ ID NO: 1178474 - RNA, 22 nt, Human
ccugcuccagcuguucagcugg

SEQ ID NO: 1178475 - RNA, 20 nt, Human
ccugggaggucaaggcugca

SEQ ID NO: 1178476 - RNA, 16 nt, Human
ccugggaucccucauc

SEQ ID NO: 1178477 - RNA, 20 nt, Human
ccugggaucccucauccuca

SEQ ID NO: 1178478 - RNA, 12 nt, Human
ccugggcagaag

SEQ ID NO: 1178479 - RNA, 14 nt, Human
ccugggcagaagga

SEQ ID NO: 1178480 - RNA, 15 nt, Human
ccugggcagaaggaa

SEQ ID NO: 1178481 - RNA, 14 nt, Human
ccuggccccucagg

SEQ ID NO: 1178482 - RNA, 16 nt, Human
ccuggccccucagggu

SEQ ID NO: 1178483 - RNA, 18 nt, Human
ccuggcaugggaaugaau

SEQ ID NO: 1178484 - RNA, 23 nt, Human
ccuggcaugggaaugaaugucag

SEQ ID NO: 1178485 - RNA, 13 nt, Human
ccuggacccugug

SEQ ID NO: 1178486 - RNA, 14 nt, Human
ccuggacccugugg

SEQ ID NO: 1178487 - RNA, 16 nt, Human
ccuggcaugggaauga

SEQ ID NO: 1178488 - RNA, 17 nt, Human
ccuggcaugggaaugaa

SEQ ID NO: 1178489 - RNA, 21 nt, Human
ccuggcacugcuuccagugag

SEQ ID NO: 1178490 - RNA, 16 nt, Human
ccuggcagccccuguu

SEQ ID NO: 1178491 - RNA, 20 nt, Human
ccuggcacugcuuccaguga

SEQ ID NO: 1178492 - RNA, 12 nt, Human
ccugguggcagc

SEQ ID NO: 1178493 - RNA, 13 nt, Human
ccugguggcagcu

SEQ ID NO: 1178494 - RNA, 14 nt, Human
ccugguggcagcuc

SEQ ID NO: 1178495 - RNA, 16 nt, Human
ccugguggcagcucac

SEQ ID NO: 1178496 - RNA, 17 nt, Human
ccugguggcagcucacc

SEQ ID NO: 1178497 - RNA, 18 nt, Human
ccugguggcagcucaccu

SEQ ID NO: 1178498 - RNA, 19 nt, Human
ccugguggcagcucaccuc

SEQ ID NO: 1178499 - RNA, 20 nt, Human
ccuguaauccuagcacuuug

SEQ ID NO: 1178500 - RNA, 21 nt, Human
ccuguagagugggagcugagu

SEQ ID NO: 1178501 - RNA, 23 nt, Human
ccuguagagugggagcugagugg

SEQ ID NO: 1178502 - RNA, 15 nt, Human
ccugugccucuggga

SEQ ID NO: 1178503 - RNA, 17 nt, Human
ccugugccucugggacu

SEQ ID NO: 1178504 - RNA, 19 nt, Human
ccugugccucugggacugg

SEQ ID NO: 1178505 - RNA, 17 nt, Human
ccugugauggggcccug

SEQ ID NO: 1178506 - RNA, 18 nt, Human
ccugugauggggcccugc

SEQ ID NO: 1178507 - RNA, 19 nt, Human
ccugugauggggcccugcc

SEQ ID NO: 1178508 - RNA, 20 nt, Human
ccugugauggggcccugccu

SEQ ID NO: 1178509 - RNA, 21 nt, Human
ccugugauggggcccugccuc

SEQ ID NO: 1178510 - RNA, 22 nt, Human
ccugugauggggcccugccucc

SEQ ID NO: 1178511 - RNA, 17 nt, Human
ccugucccccugacaac

SEQ ID NO: 1178512 - RNA, 18 nt, Human
ccuguccccgcacugggc

SEQ ID NO: 1178513 - RNA, 20 nt, Human
ccugugaguacuacaguccu

SEQ ID NO: 1178514 - RNA, 16 nt, Human
ccuuagacagucccug

SEQ ID NO: 1178515 - RNA, 17 nt, Human
ccuuagacagucccugc

SEQ ID NO: 1178516 - RNA, 18 nt, Human
ccuuagacagucccugcc

SEQ ID NO: 1178517 - RNA, 19 nt, Human
ccuuagacagucccugcca

SEQ ID NO: 1178518 - RNA, 21 nt, Human
ccuuagacagucccugccaau

SEQ ID NO: 1178519 - RNA, 14 nt, Human
ccuuaccagcagag

SEQ ID NO: 1178520 - RNA, 15 nt, Human
ccuuaccagcagagc

SEQ ID NO: 1178521 - RNA, 16 nt, Human
ccuuaccagcagagca

SEQ ID NO: 1178522 - RNA, 17 nt, Human
ccuuaccagcagagcac

SEQ ID NO: 1178523 - RNA, 20 nt, Human
ccuuaccucggugccuuccu

SEQ ID NO: 1178524 - RNA, 14 nt, Human
ccuuaccugccagg

SEQ ID NO: 1178525 - RNA, 18 nt, Human
ccuuccaggggugggaca

SEQ ID NO: 1178526 - RNA, 22 nt, Human
ccuuccaggggugggacacccu

SEQ ID NO: 1178527 - RNA, 15 nt, Human
ccuuccagggguggg

SEQ ID NO: 1178528 - RNA, 16 nt, Human
ccuuccagggguggga

SEQ ID NO: 1178529 - RNA, 14 nt, Human
ccuuccucuuucca

SEQ ID NO: 1178530 - RNA, 10 nt, Human
ccuucagugc

SEQ ID NO: 1178531 - RNA, 13 nt, Human
ccuucagugccuu

SEQ ID NO: 1178532 - RNA, 14 nt, Human
ccuucagugccuua

SEQ ID NO: 1178533 - RNA, 15 nt, Human
ccuucagugccuuau

SEQ ID NO: 1178534 - RNA, 20 nt, Human
ccuucagugccuuauggaac

SEQ ID NO: 1178535 - RNA, 19 nt, Human
ccuucagugccuuauggaa

SEQ ID NO: 1178536 - RNA, 15 nt, Human
ccuugaaaacacugu

SEQ ID NO: 1178537 - RNA, 13 nt, Human
ccuucgcuccugu

SEQ ID NO: 1178538 - RNA, 14 nt, Human
ccuucgcuccugug

SEQ ID NO: 1178539 - RNA, 15 nt, Human
ccuucgcuccugugu

SEQ ID NO: 1178540 - RNA, 18 nt, Human
ccuucgcuccugugucuu

SEQ ID NO: 1178541 - RNA, 19 nt, Human
ccuugaaaacacuguucuc

SEQ ID NO: 1178542 - RNA, 21 nt, Human
ccuugaaaacacuguucucug

SEQ ID NO: 1178543 - RNA, 22 nt, Human
ccuugaaaacacuguucucugc

SEQ ID NO: 1178544 - RNA, 14 nt, Human
ccuugaacugggua

SEQ ID NO: 1178545 - RNA, 16 nt, Human
ccuugaacuggguacu

SEQ ID NO: 1178546 - RNA, 17 nt, Human
ccuugaacuuugaccuc

SEQ ID NO: 1178547 - RNA, 20 nt, Human
ccuugaaaacuuuaugcuaa

SEQ ID NO: 1178548 - RNA, 19 nt, Human
ccuugaacuuugaccucug

SEQ ID NO: 1178549 - RNA, 14 nt, Human
ccuugacagggcac

SEQ ID NO: 1178550 - RNA, 15 nt, Human
ccuugacagggcaca

SEQ ID NO: 1178551 - RNA, 17 nt, Human
ccuugacagggcacacc

SEQ ID NO: 1178552 - RNA, 19 nt, Human
ccuugaccauucuccaccu

SEQ ID NO: 1178553 - RNA, 20 nt, Human
ccuugaccauucuccaccug

SEQ ID NO: 1178554 - RNA, 21 nt, Human
ccuugaccauucuccaccugc

SEQ ID NO: 1178555 - RNA, 22 nt, Human
ccuugaccauucuccaccugcc

SEQ ID NO: 1178556 - RNA, 22 nt, Human
ccuugaguugauucagcucugc

SEQ ID NO: 1178557 - RNA, 23 nt, Human
ccuugaguugauucagcucugca

SEQ ID NO: 1178558 - RNA, 14 nt, Human
ccuugaugaagaag

SEQ ID NO: 1178559 - RNA, 13 nt, Human
ccuugacagggca

SEQ ID NO: 1178560 - RNA, 11 nt, Human
ccuuuggcuuc

SEQ ID NO: 1178561 - RNA, 15 nt, Human
cgcccccacugguga

SEQ ID NO: 1178562 - RNA, 13 nt, Human
cgcagacaggacc

SEQ ID NO: 1178563 - RNA, 14 nt, Human
cgcagacaggacca

SEQ ID NO: 1178564 - RNA, 16 nt, Human
cgcgacaaugcaaacc

SEQ ID NO: 1178565 - RNA, 17 nt, Human
cgcgacaaugcaaacca

SEQ ID NO: 1178566 - RNA, 16 nt, Human
cgcgugcacacaccag

SEQ ID NO: 1178567 - RNA, 19 nt, Human
cgcgugcacacaccagagc

SEQ ID NO: 1178568 - RNA, 20 nt, Human
cgcgugcacacaccagagcc

SEQ ID NO: 1178569 - RNA, 14 nt, Human
cgcuaagagggagg

SEQ ID NO: 1178570 - RNA, 15 nt, Human
cgcuaagagggaggg

SEQ ID NO: 1178571 - RNA, 16 nt, Human
cgcuaagagggaggga

SEQ ID NO: 1178572 - RNA, 21 nt, Human
cgcuaagagggagggagggcu

SEQ ID NO: 1178573 - RNA, 12 nt, Human
ccuuggcugcag

SEQ ID NO: 1178574 - RNA, 13 nt, Human
ccuuggcugcagg

SEQ ID NO: 1178575 - RNA, 19 nt, Human
ccuuguggucccaccccac

SEQ ID NO: 1178576 - RNA, 20 nt, Human
ccuuguggucccaccccaca

SEQ ID NO: 1178577 - RNA, 14 nt, Human
ccuuggcugcaggg

SEQ ID NO: 1178578 - RNA, 13 nt, Human
ccuuuaagagaaa

SEQ ID NO: 1178579 - RNA, 14 nt, Human
ccuuuaagagaaau

SEQ ID NO: 1178580 - RNA, 15 nt, Human
ccuuuguauucucuc

SEQ ID NO: 1178581 - RNA, 18 nt, Human
ccuuuguauucucuccug

SEQ ID NO: 1178582 - RNA, 20 nt, Human
ccuuuguauucucuccugua

SEQ ID NO: 1178583 - RNA, 12 nt, Human
cgaggacaggga

SEQ ID NO: 1178584 - RNA, 13 nt, Human
cgaggacagggag

SEQ ID NO: 1178585 - RNA, 14 nt, Human
cgaggacagggagg

SEQ ID NO: 1178586 - RNA, 18 nt, Human
cgaggccuucucugaagg

SEQ ID NO: 1178587 - RNA, 19 nt, Human
cgaggccuucucugaagga

SEQ ID NO: 1178588 - RNA, 19 nt, Human
cgaucuggguucacugcaa

SEQ ID NO: 1178589 - RNA, 13 nt, Human
cgauucuucugcu

SEQ ID NO: 1178590 - RNA, 19 nt, Human
cgauucuucugcuucagcc

SEQ ID NO: 1178591 - RNA, 21 nt, Human
cgauucuucugcuucagccuc

SEQ ID NO: 1178592 - RNA, 12 nt, Human
cgauuucuguuu

SEQ ID NO: 1178593 - RNA, 20 nt, Human
cgauuucuguuuagauaaua

SEQ ID NO: 1178594 - RNA, 11 nt, Human
cgcaaugugac

SEQ ID NO: 1178595 - RNA, 20 nt, Human
cggacagccacggccaggcc

SEQ ID NO: 1178596 - RNA, 13 nt, Human
cgcuccugugucu

SEQ ID NO: 1178597 - RNA, 17 nt, Human
cggaaagcccugugcuc

SEQ ID NO: 1178598 - RNA, 20 nt, Human
cggaaugaaccacaucuugc

SEQ ID NO: 1178599 - RNA, 15 nt, Human
cggacagccacggcc

SEQ ID NO: 1178600 - RNA, 16 nt, Human
cggacagccacggcca

SEQ ID NO: 1178601 - RNA, 18 nt, Human
cggacagccacggccagg

SEQ ID NO: 1178602 - RNA, 14 nt, Human
cgcucucuggccuu

SEQ ID NO: 1178603 - RNA, 20 nt, Human
cgggaggauguucugggaca

SEQ ID NO: 1178604 - RNA, 21 nt, Human
cgggaggauguucugggacac

SEQ ID NO: 1178605 - RNA, 16 nt, Human
cgggaggucgaggcag

SEQ ID NO: 1178606 - RNA, 17 nt, Human
cgggaggucgaggcagg

SEQ ID NO: 1178607 - RNA, 12 nt, Human
cgggcaugacac

SEQ ID NO: 1178608 - RNA, 15 nt, Human
cgggcaugacacgaa

SEQ ID NO: 1178609 - RNA, 16 nt, Human
cggccuccauccugag

SEQ ID NO: 1178610 - RNA, 17 nt, Human
cggccuccauccugagg

SEQ ID NO: 1178611 - RNA, 15 nt, Human
cggccuuuggcuuca

SEQ ID NO: 1178612 - RNA, 15 nt, Human
cggcuggccuggccc

SEQ ID NO: 1178613 - RNA, 16 nt, Human
cggcuggccuggcccc

SEQ ID NO: 1178614 - RNA, 18 nt, Human
cggcuggccuggccccuc

SEQ ID NO: 1178615 - RNA, 19 nt, Human
cggcuggccuggccccuca

SEQ ID NO: 1178616 - RNA, 23 nt, Human
cggugcuaucucccccagcccca

SEQ ID NO: 1178617 - RNA, 11 nt, Human
cguccccuguc

SEQ ID NO: 1178618 - RNA, 14 nt, Human
cguccccugucccc

SEQ ID NO: 1178619 - RNA, 14 nt, Human
cgucuaccugaggg

SEQ ID NO: 1178620 - RNA, 16 nt, Human
cgucuaccugaggggc

SEQ ID NO: 1178621 - RNA, 13 nt, Human
cgucugacaggca

SEQ ID NO: 1178622 - RNA, 14 nt, Human
cgucugacaggcaa

SEQ ID NO: 1178623 - RNA, 12 nt, Human
cgugacaacacu

SEQ ID NO: 1178624 - RNA, 21 nt, Human
cgugcacacaccagagcccac

SEQ ID NO: 1178625 - RNA, 22 nt, Human
cgugcacacaccagagcccacc

SEQ ID NO: 1178626 - RNA, 14 nt, Human
cgugcauaccacuu

SEQ ID NO: 1178627 - RNA, 18 nt, Human
cgugcauaccacuuuugu

SEQ ID NO: 1178628 - RNA, 19 nt, Human
cgugcauaccacuuuuguu

SEQ ID NO: 1178629 - RNA, 23 nt, Human
cgugcauaccacuuuuguucuug

SEQ ID NO: 1178630 - RNA, 12 nt, Human
cguggcugcuuc

SEQ ID NO: 1178631 - RNA, 14 nt, Human
cguggcugcuucaa

SEQ ID NO: 1178632 - RNA, 15 nt, Human
cguggcugcuucaag

SEQ ID NO: 1178633 - RNA, 17 nt, Human
cguggcugcuucaagga

SEQ ID NO: 1178634 - RNA, 19 nt, Human
cguuucuaaaggcuaccuu

SEQ ID NO: 1178635 - RNA, 21 nt, Human
cguuucuaaaggcuaccuuug

SEQ ID NO: 1178636 - RNA, 20 nt, Human
cguuucuaugacacaugcaa

SEQ ID NO: 1178637 - RNA, 14 nt, Human
cucagggucccugg

SEQ ID NO: 1178638 - RNA, 23 nt, Human
cucagguggggucacucuggcag

SEQ ID NO: 1178639 - RNA, 15 nt, Human
cucaggugucccugc

SEQ ID NO: 1178640 - RNA, 16 nt, Human
cucaggugucccugca

SEQ ID NO: 1178641 - RNA, 23 nt, Human
cuaaaagguaugcaaucaaaucu

SEQ ID NO: 1178642 - RNA, 12 nt, Human
cucagggucccu

SEQ ID NO: 1178643 - RNA, 17 nt, Human
cucaggugucccugcac

SEQ ID NO: 1178644 - RNA, 18 nt, Human
cucaggugucccugcacu

SEQ ID NO: 1178645 - RNA, 19 nt, Human
cucaggugucccugcacuu

SEQ ID NO: 1178646 - RNA, 14 nt, Human
cucaggugagaagc

SEQ ID NO: 1178647 - RNA, 15 nt, Human
cucauacccaccccc

SEQ ID NO: 1178648 - RNA, 18 nt, Human
cucauaguaugguggcug

SEQ ID NO: 1178649 - RNA, 19 nt, Human
cucauaguaugguggcugg

SEQ ID NO: 1178650 - RNA, 20 nt, Human
cucauaguaugguggcuggg

SEQ ID NO: 1178651 - RNA, 13 nt, Human
cucauucuucugu

SEQ ID NO: 1178652 - RNA, 14 nt, Human
cucauucuucugua

SEQ ID NO: 1178653 - RNA, 23 nt, Human
cucauucuucuguacgucugaca

SEQ ID NO: 1178654 - RNA, 13 nt, Human
cucauugaccuga

SEQ ID NO: 1178655 - RNA, 15 nt, Human
cucauugaccugagg

SEQ ID NO: 1178656 - RNA, 16 nt, Human
cucauugaccugaggc

SEQ ID NO: 1178657 - RNA, 17 nt, Human
cucauugaccugaggcc

SEQ ID NO: 1178658 - RNA, 21 nt, Human
cucauuagcauuuugcuaaau

SEQ ID NO: 1178659 - RNA, 17 nt, Human
cucauuaggauggcuag

SEQ ID NO: 1178660 - RNA, 18 nt, Human
cucauuaggauggcuagu

SEQ ID NO: 1178661 - RNA, 20 nt, Human
cuccagcucaccagccccag

SEQ ID NO: 1178662 - RNA, 11 nt, Human
cuccacccugc

SEQ ID NO: 1178663 - RNA, 12 nt, Human
cuccacccugcu

SEQ ID NO: 1178664 - RNA, 17 nt, Human
cuccaccugccagggac

SEQ ID NO: 1178665 - RNA, 18 nt, Human
cuccaccugccagggaca

SEQ ID NO: 1178666 - RNA, 21 nt, Human
cuccaccugccagggacagag

SEQ ID NO: 1178667 - RNA, 23 nt, Human
cuccauccugaggcuccacuugg

SEQ ID NO: 1178668 - RNA, 11 nt, Human
cuccaggcucc

SEQ ID NO: 1178669 - RNA, 15 nt, Human
cuccaggcuccuuua

SEQ ID NO: 1178670 - RNA, 21 nt, Human
cuccauccugaggcuccacuu

SEQ ID NO: 1178671 - RNA, 13 nt, Human
cuccagcuguuca

SEQ ID NO: 1178672 - RNA, 18 nt, Human
cuccagcuguucagcugg

SEQ ID NO: 1178673 - RNA, 19 nt, Human
cuccagcuguucagcuggu

SEQ ID NO: 1178674 - RNA, 21 nt, Human
cucccaaggggcccaaauucu

SEQ ID NO: 1178675 - RNA, 22 nt, Human
cucccaaggggcccaaauucuu

SEQ ID NO: 1178676 - RNA, 22 nt, Human
cucccaggcauuccccaggagg

SEQ ID NO: 1178677 - RNA, 17 nt, Human
cucccaggcauucccca

SEQ ID NO: 1178678 - RNA, 19 nt, Human
cucccaggcauuccccagg

SEQ ID NO: 1178679 - RNA, 20 nt, Human
cucccaggcauuccccagga

SEQ ID NO: 1178680 - RNA, 21 nt, Human
cucccaggcauuccccaggag

SEQ ID NO: 1178681 - RNA, 14 nt, Human
cucccaucacccgc

SEQ ID NO: 1178682 - RNA, 14 nt, Human
cucccaucucacac

SEQ ID NO: 1178683 - RNA, 15 nt, Human
cucccaucucacaca

SEQ ID NO: 1178684 - RNA, 18 nt, Human
cucccaucucacacauga

SEQ ID NO: 1178685 - RNA, 21 nt, Human
cucccaucucacacaugagca

SEQ ID NO: 1178686 - RNA, 10 nt, Human
cucccuuccu

SEQ ID NO: 1178687 - RNA, 13 nt, Human
cucccuuccucuu

SEQ ID NO: 1178688 - RNA, 14 nt, Human
cucccuuccucuuu

SEQ ID NO: 1178689 - RNA, 16 nt, Human
cucccuucucuucaca

SEQ ID NO: 1178690 - RNA, 17 nt, Human
cucccuuggauuguccc

SEQ ID NO: 1178691 - RNA, 20 nt, Human
cucccuuggauuguccccga

SEQ ID NO: 1178692 - RNA, 13 nt, Human
cucccuuucaaca

SEQ ID NO: 1178693 - RNA, 17 nt, Human
cucccuuucuucccuac

SEQ ID NO: 1178694 - RNA, 12 nt, Human
cuccucagaucu

SEQ ID NO: 1178695 - RNA, 14 nt, Human
cuccucagaucuuc

SEQ ID NO: 1178696 - RNA, 13 nt, Human
cuccugcaggcag

SEQ ID NO: 1178697 - RNA, 14 nt, Human
cuccugcaggcagc

SEQ ID NO: 1178698 - RNA, 23 nt, Human
cuccugugucuugcaauggcagc

SEQ ID NO: 1178699 - RNA, 11 nt, Human
cuccugugugu

SEQ ID NO: 1178700 - RNA, 15 nt, Human
cuccugcaggcagcc

SEQ ID NO: 1178701 - RNA, 22 nt, Human
cuccugcaggcagccaggccac

SEQ ID NO: 1178702 - RNA, 16 nt, Human
cuccugcaggcagcca

SEQ ID NO: 1178703 - RNA, 14 nt, Human
cuccugugugugcg

SEQ ID NO: 1178704 - RNA, 14 nt, Human
cuccuucaccuuug

SEQ ID NO: 1178705 - RNA, 16 nt, Human
cuccuucaccuuuguc

SEQ ID NO: 1178706 - RNA, 19 nt, Human
cuccuucaccuuugucccc

SEQ ID NO: 1178707 - RNA, 21 nt, Human
cuccuucaccuuuguccccac

SEQ ID NO: 1178708 - RNA, 14 nt, Human
cuccuucuguccua

SEQ ID NO: 1178709 - RNA, 15 nt, Human
cuccuucuguccuac

SEQ ID NO: 1178710 - RNA, 20 nt, Human
cuccuucuguccuacucugu

SEQ ID NO: 1178711 - RNA, 11 nt, Human
cuccuucuucc

SEQ ID NO: 1178712 - RNA, 21 nt, Human
cuccuugaaaacacuguucuc

SEQ ID NO: 1178713 - RNA, 15 nt, Human
cucgcgacaaugcaa

SEQ ID NO: 1178714 - RNA, 16 nt, Human
cucgaguuacagacaa

SEQ ID NO: 1178715 - RNA, 20 nt, Human
cucgaguuacagacaaagcg

SEQ ID NO: 1178716 - RNA, 23 nt, Human
cucucaggccagcugcuugggcu

SEQ ID NO: 1178717 - RNA, 12 nt, Human
cucuccagcccc

SEQ ID NO: 1178718 - RNA, 13 nt, Human
cucuccagccccu

SEQ ID NO: 1178719 - RNA, 13 nt, Human
cucucccaucacu

SEQ ID NO: 1178720 - RNA, 14 nt, Human
cucucccaucacuu

SEQ ID NO: 1178721 - RNA, 18 nt, Human
cucucccaucacuucccu

SEQ ID NO: 1178722 - RNA, 20 nt, Human
cucucccaucacuucccuac

SEQ ID NO: 1178723 - RNA, 13 nt, Human
cucuccccagcaa

SEQ ID NO: 1178724 - RNA, 13 nt, Human
cucuccuguaccu

SEQ ID NO: 1178725 - RNA, 14 nt, Human
cucuccuguaccuc

SEQ ID NO: 1178726 - RNA, 15 nt, Human
cucuccuguaccucu

SEQ ID NO: 1178727 - RNA, 17 nt, Human
cucuccuguaccucuug

SEQ ID NO: 1178728 - RNA, 18 nt, Human
cucuccuguaccucuuga

SEQ ID NO: 1178729 - RNA, 22 nt, Human
cucuccuguaccucuugagccu

SEQ ID NO: 1178730 - RNA, 15 nt, Human
cucucucacuccuug

SEQ ID NO: 1178731 - RNA, 16 nt, Human
cucucucacuccuuga

SEQ ID NO: 1178732 - RNA, 12 nt, Human
cucucucaggcc

SEQ ID NO: 1178733 - RNA, 13 nt, Human
cucucucaggcca

SEQ ID NO: 1178734 - RNA, 20 nt, Human
cucugagacucgcgacaaug

SEQ ID NO: 1178735 - RNA, 22 nt, Human
cucugcaagaauugaagcagga

SEQ ID NO: 1178736 - RNA, 10 nt, Human
cucugcacaa

SEQ ID NO: 1178737 - RNA, 23 nt, Human
cucugcauacucauuaggauggc

SEQ ID NO: 1178738 - RNA, 12 nt, Human
cucugcccuugg

SEQ ID NO: 1178739 - RNA, 14 nt, Human
cucugcccuccaag

SEQ ID NO: 1178740 - RNA, 15 nt, Human
cucugcccuccaaga

SEQ ID NO: 1178741 - RNA, 16 nt, Human
cucugcccuccaagac

SEQ ID NO: 1178742 - RNA, 23 nt, Human
cucugcccuccaagaccuucucc

SEQ ID NO: 1178743 - RNA, 14 nt, Human
cucugccucugaca

SEQ ID NO: 1178744 - RNA, 16 nt, Human
cucugccucugacaca

SEQ ID NO: 1178745 - RNA, 14 nt, Human
cucuggacaggcau

SEQ ID NO: 1178746 - RNA, 19 nt, Human
cucuggcagcucagagagg

SEQ ID NO: 1178747 - RNA, 20 nt, Human
cucuggcagcucagagaggg

SEQ ID NO: 1178748 - RNA, 17 nt, Human
cucuggcagcucagaga

SEQ ID NO: 1178749 - RNA, 18 nt, Human
cucuggcagcucagagag

SEQ ID NO: 1178750 - RNA, 13 nt, Human
cucuuaagaagac

SEQ ID NO: 1178751 - RNA, 24 nt, Human
cucuuaaaacccaagugccuuagc

SEQ ID NO: 1178752 - RNA, 13 nt, Human
cucuucuccaggc

SEQ ID NO: 1178753 - RNA, 12 nt, Human
cucuucuccagg

SEQ ID NO: 1178754 - RNA, 22 nt, Human
cucuuccaggcugggagagccu

SEQ ID NO: 1178755 - RNA, 23 nt, Human
cucuuccaggcugggagagccuu

SEQ ID NO: 1178756 - RNA, 13 nt, Human
cucuugaccucag

SEQ ID NO: 1178757 - RNA, 15 nt, Human
cucuugaccucaggu

SEQ ID NO: 1178758 - RNA, 16 nt, Human
cucuugaccucaggug

SEQ ID NO: 1178759 - RNA, 13 nt, Human
cucuugagccugg

SEQ ID NO: 1178760 - RNA, 18 nt, Human
cucuugguccugcugcag

SEQ ID NO: 1178761 - RNA, 19 nt, Human
cucuugguccugcugcagu

SEQ ID NO: 1178762 - RNA, 17 nt, Human
cucuuuccaucuacccu

SEQ ID NO: 1178763 - RNA, 13 nt, Human
cucuuucccuccc

SEQ ID NO: 1178764 - RNA, 15 nt, Human
cucuuuggacacuca

SEQ ID NO: 1178765 - RNA, 18 nt, Human
cucuuuggacacucacac

SEQ ID NO: 1178766 - RNA, 16 nt, Human
cugaagucacacagug

SEQ ID NO: 1178767 - RNA, 15 nt, Human
cugaagucacacagu

SEQ ID NO: 1178768 - RNA, 14 nt, Human
cugaagucacacag

SEQ ID NO: 1178769 - RNA, 16 nt, Human
cugaauacagaggcaa

SEQ ID NO: 1178770 - RNA, 18 nt, Human
cucuuugggccuggcucc

SEQ ID NO: 1178771 - RNA, 19 nt, Human
cucuuuggucuacacugug

SEQ ID NO: 1178772 - RNA, 21 nt, Human
cucuuuggucuacacugugcu

SEQ ID NO: 1178773 - RNA, 21 nt, Human
cugaaccuggguaacuaggga

SEQ ID NO: 1178774 - RNA, 15 nt, Human
cugaacuuggcgcug

SEQ ID NO: 1178775 - RNA, 16 nt, Human
cugaacuuggcgcugc

SEQ ID NO: 1178776 - RNA, 21 nt, Human
cugaacuuggcgcugccccug

SEQ ID NO: 1178777 - RNA, 21 nt, Human
cugaagacucauucuucugua

SEQ ID NO: 1178778 - RNA, 21 nt, Human
cugacagacacaggcccggcu

SEQ ID NO: 1178779 - RNA, 11 nt, Human
cugacaggcaa

SEQ ID NO: 1178780 - RNA, 17 nt, Human
cugaaugaaacccccac

SEQ ID NO: 1178781 - RNA, 18 nt, Human
cugaaugaaacccccaca

SEQ ID NO: 1178782 - RNA, 19 nt, Human
cugaaugaaacccccacac

SEQ ID NO: 1178783 - RNA, 20 nt, Human
cugaaugaaacccccacaca

SEQ ID NO: 1178784 - RNA, 21 nt, Human
cugaaugaaacccccacacac

SEQ ID NO: 1178785 - RNA, 22 nt, Human
cugaaugaaacccccacacaca

SEQ ID NO: 1178786 - RNA, 23 nt, Human
cugaaugaaacccccacacacac

SEQ ID NO: 1178787 - RNA, 21 nt, Human
cugacauuguuggccaaagcc

SEQ ID NO: 1178788 - RNA, 11 nt, Human
cugacccacug

SEQ ID NO: 1178789 - RNA, 16 nt, Human
cugacaggcaaugcug

SEQ ID NO: 1178790 - RNA, 17 nt, Human
cugacaggcaaugcugg

SEQ ID NO: 1178791 - RNA, 18 nt, Human
cugacaggcaaugcuggc

SEQ ID NO: 1178792 - RNA, 19 nt, Human
cugacaggcaaugcuggcu

SEQ ID NO: 1178793 - RNA, 20 nt, Human
cugacaggcaaugcuggcug

SEQ ID NO: 1178794 - RNA, 21 nt, Human
cugacaggcaaugcuggcugu

SEQ ID NO: 1178795 - RNA, 17 nt, Human
cugacauuguuggccaa

SEQ ID NO: 1178796 - RNA, 17 nt, Human
cugagucugaaggcugg

SEQ ID NO: 1178797 - RNA, 13 nt, Human
cugagucugaagg

SEQ ID NO: 1178798 - RNA, 14 nt, Human
cugagucugaaggc

SEQ ID NO: 1178799 - RNA, 15 nt, Human
cugagucugaaggcu

SEQ ID NO: 1178800 - RNA, 16 nt, Human
cugagucugaaggcug

SEQ ID NO: 1178801 - RNA, 22 nt, Human
cugagugggggaucacagccuc

SEQ ID NO: 1178802 - RNA, 13 nt, Human
cugauaaagauga

SEQ ID NO: 1178803 - RNA, 12 nt, Human
cugacccacugc

SEQ ID NO: 1178804 - RNA, 13 nt, Human
cugacccaugcug

SEQ ID NO: 1178805 - RNA, 15 nt, Human
cugauucccaagcuc

SEQ ID NO: 1178806 - RNA, 17 nt, Human
cugauucccaagcucug

SEQ ID NO: 1178807 - RNA, 18 nt, Human
cugauucccaagcucugc

SEQ ID NO: 1178808 - RNA, 19 nt, Human
cugauucccaagcucugcu

SEQ ID NO: 1178809 - RNA, 20 nt, Human
cugauucccaagcucugcuc

SEQ ID NO: 1178810 - RNA, 22 nt, Human
cugauucccaagcucugcuccu

SEQ ID NO: 1178811 - RNA, 21 nt, Human
cugauaaagaugagugagcau

SEQ ID NO: 1178812 - RNA, 14 nt, Human
cugaucucucguga

SEQ ID NO: 1178813 - RNA, 18 nt, Human
cugcacaagcugcacccu

SEQ ID NO: 1178814 - RNA, 13 nt, Human
cugcacaagcugc

SEQ ID NO: 1178815 - RNA, 14 nt, Human
cugcacaagcugca

SEQ ID NO: 1178816 - RNA, 15 nt, Human
cugcacaagcugcac

SEQ ID NO: 1178817 - RNA, 16 nt, Human
cugcacaagcugcacc

SEQ ID NO: 1178818 - RNA, 17 nt, Human
cugcacccucaggcagg

SEQ ID NO: 1178819 - RNA, 18 nt, Human
cugcacccucaggcaggu

SEQ ID NO: 1178820 - RNA, 13 nt, Human
cugcagaagacag

SEQ ID NO: 1178821 - RNA, 23 nt, Human
cugcagaagacaguauggcagcu

SEQ ID NO: 1178822 - RNA, 17 nt, Human
cugcaccggcuggccug

SEQ ID NO: 1178823 - RNA, 18 nt, Human
cugcaccggcuggccugg

SEQ ID NO: 1178824 - RNA, 19 nt, Human
cugcaccggcuggccuggc

SEQ ID NO: 1178825 - RNA, 20 nt, Human
cugcaccggcuggccuggcc

SEQ ID NO: 1178826 - RNA, 14 nt, Human
cugcacuugcagac

SEQ ID NO: 1178827 - RNA, 16 nt, Human
cugcacuugcagacuc

SEQ ID NO: 1178828 - RNA, 17 nt, Human
cugcacuugcagacucu

SEQ ID NO: 1178829 - RNA, 22 nt, Human
cugcagggaguccgaaagggac

SEQ ID NO: 1178830 - RNA, 19 nt, Human
cugcagccucaaccuccug

SEQ ID NO: 1178831 - RNA, 20 nt, Human
cugcagccucaaccuccugg

SEQ ID NO: 1178832 - RNA, 22 nt, Human
cugcagccucaaccuccugggc

SEQ ID NO: 1178833 - RNA, 23 nt, Human
cugcagccucaaccuccugggcu

SEQ ID NO: 1178834 - RNA, 11 nt, Human
cugcagccuca

SEQ ID NO: 1178835 - RNA, 15 nt, Human
cugccacccugggga

SEQ ID NO: 1178836 - RNA, 16 nt, Human
cugccacccuggggag

SEQ ID NO: 1178837 - RNA, 20 nt, Human
cugccacccuggggagaaag

SEQ ID NO: 1178838 - RNA, 19 nt, Human
cugccagccgagauagcca

SEQ ID NO: 1178839 - RNA, 15 nt, Human
cugccaggaagccag

SEQ ID NO: 1178840 - RNA, 16 nt, Human
cugccaggaagccagc

SEQ ID NO: 1178841 - RNA, 18 nt, Human
cugccaggaagccagcag

SEQ ID NO: 1178842 - RNA, 19 nt, Human
cugccaggaagccagcagg

SEQ ID NO: 1178843 - RNA, 17 nt, Human
cugccaugccagcuuau

SEQ ID NO: 1178844 - RNA, 19 nt, Human
cugccaugccagcuuaucu

SEQ ID NO: 1178845 - RNA, 13 nt, Human
cugcccaggcccc

SEQ ID NO: 1178846 - RNA, 14 nt, Human
cugccccuggcagc

SEQ ID NO: 1178847 - RNA, 15 nt, Human
cugccccuggcagcc

SEQ ID NO: 1178848 - RNA, 16 nt, Human
cugccccuggcagccc

SEQ ID NO: 1178849 - RNA, 17 nt, Human
cugccccuggcagcccc

SEQ ID NO: 1178850 - RNA, 11 nt, Human
cugcccggcug

SEQ ID NO: 1178851 - RNA, 15 nt, Human
cugcccggcugcgga

SEQ ID NO: 1178852 - RNA, 13 nt, Human
cugcccugcccac

SEQ ID NO: 1178853 - RNA, 14 nt, Human
cugcccugcccacc

SEQ ID NO: 1178854 - RNA, 15 nt, Human
cugcccugcccaccu

SEQ ID NO: 1178855 - RNA, 16 nt, Human
cugcccugcccaccug

SEQ ID NO: 1178856 - RNA, 17 nt, Human
cugcccugcccaccugg

SEQ ID NO: 1178857 - RNA, 15 nt, Human
cugccuaagugcagc

SEQ ID NO: 1178858 - RNA, 13 nt, Human
cugccucagccuc

SEQ ID NO: 1178859 - RNA, 14 nt, Human
cugccucagccucc

SEQ ID NO: 1178860 - RNA, 13 nt, Human
cugccucuucucu

SEQ ID NO: 1178861 - RNA, 14 nt, Human
cugccucuucucua

SEQ ID NO: 1178862 - RNA, 13 nt, Human
cugccugcccagg

SEQ ID NO: 1178863 - RNA, 14 nt, Human
cugccugcccaggc

SEQ ID NO: 1178864 - RNA, 15 nt, Human
cugccugcccaggcc

SEQ ID NO: 1178865 - RNA, 20 nt, Human
cugcggaaugaaccacaucu

SEQ ID NO: 1178866 - RNA, 21 nt, Human
cugcggaaugaaccacaucuu

SEQ ID NO: 1178867 - RNA, 15 nt, Human
cugcgguccacccag

SEQ ID NO: 1178868 - RNA, 16 nt, Human
cugcgguccacccagg

SEQ ID NO: 1178869 - RNA, 17 nt, Human
cugcgguccacccagga

SEQ ID NO: 1178870 - RNA, 14 nt, Human
cugcuccagcuguu

SEQ ID NO: 1178871 - RNA, 15 nt, Human
cugcuccagcuguuc

SEQ ID NO: 1178872 - RNA, 16 nt, Human
cugcuccucuccccag

SEQ ID NO: 1178873 - RNA, 17 nt, Human
cugcuccucuccccagc

SEQ ID NO: 1178874 - RNA, 18 nt, Human
cugcuccucuccccagca

SEQ ID NO: 1178875 - RNA, 23 nt, Human
cuggaauaauccuaaacauauga

SEQ ID NO: 1178876 - RNA, 15 nt, Human
cuggaagcacagcuu

SEQ ID NO: 1178877 - RNA, 18 nt, Human
cuggaagcacagcuucau

SEQ ID NO: 1178878 - RNA, 15 nt, Human
cuggaaugcaguggu

SEQ ID NO: 1178879 - RNA, 14 nt, Human
cuggacaggcaugu

SEQ ID NO: 1178880 - RNA, 12 nt, Human
cuggagcucugc

SEQ ID NO: 1178881 - RNA, 15 nt, Human
cuggauggggcugca

SEQ ID NO: 1178882 - RNA, 16 nt, Human
cuggauggggcugcac

SEQ ID NO: 1178883 - RNA, 13 nt, Human
cuggauuaaacuu

SEQ ID NO: 1178884 - RNA, 23 nt, Human
cuggauuaaacuuaaucuaaaug

SEQ ID NO: 1178885 - RNA, 23 nt, Human
cuggcacuauaauguaagcucua

SEQ ID NO: 1178886 - RNA, 13 nt, Human
cuggcacugcuuc

SEQ ID NO: 1178887 - RNA, 14 nt, Human
cuggcacugcuucc

SEQ ID NO: 1178888 - RNA, 15 nt, Human
cuggcacugcuucca

SEQ ID NO: 1178889 - RNA, 16 nt, Human
cuggcacugcuuccag

SEQ ID NO: 1178890 - RNA, 17 nt, Human
cuggcacugcuuccagu

SEQ ID NO: 1178891 - RNA, 18 nt, Human
cuggcacugcuuccagug

SEQ ID NO: 1178892 - RNA, 16 nt, Human
cuggccaacgggguga

SEQ ID NO: 1178893 - RNA, 16 nt, Human
cuggccagaugcacca

SEQ ID NO: 1178894 - RNA, 17 nt, Human
cuggccagaugcaccag

SEQ ID NO: 1178895 - RNA, 18 nt, Human
cuggccagaugcaccagc

SEQ ID NO: 1178896 - RNA, 19 nt, Human
cuggccagaugcaccagcc

SEQ ID NO: 1178897 - RNA, 20 nt, Human
cuggccagaugcaccagccc

SEQ ID NO: 1178898 - RNA, 21 nt, Human
cuggccagaugcaccagcccu

SEQ ID NO: 1178899 - RNA, 22 nt, Human
cuggccagaugcaccagcccuu

SEQ ID NO: 1178900 - RNA, 12 nt, Human
cuggcccacugc

SEQ ID NO: 1178901 - RNA, 13 nt, Human
cuggcccacugca

SEQ ID NO: 1178902 - RNA, 17 nt, Human
cuggccuagcauacgua

SEQ ID NO: 1178903 - RNA, 23 nt, Human
cuggccuagcauacguacacauu

SEQ ID NO: 1178904 - RNA, 22 nt, Human
cuggccucaagugauucuccug

SEQ ID NO: 1178905 - RNA, 13 nt, Human
cuggccugagcug

SEQ ID NO: 1178906 - RNA, 15 nt, Human
cuggccugagcuggg

SEQ ID NO: 1178907 - RNA, 18 nt, Human
cuggcucuuccaggcugg

SEQ ID NO: 1178908 - RNA, 19 nt, Human
cuggcucuuccaggcuggg

SEQ ID NO: 1178909 - RNA, 20 nt, Human
cuggcucuuccaggcuggga

SEQ ID NO: 1178910 - RNA, 20 nt, Human
cuggcuguuggcugggggcc

SEQ ID NO: 1178911 - RNA, 21 nt, Human
cuggcuggguggcaccagcag

SEQ ID NO: 1178912 - RNA, 22 nt, Human
cuggcuggguggcaccagcagc

SEQ ID NO: 1178913 - RNA, 19 nt, Human
cuggcuguuggcugggggc

SEQ ID NO: 1178914 - RNA, 18 nt, Human
cugggaggucaaggcugc

SEQ ID NO: 1178915 - RNA, 13 nt, Human
cugggagugagcu

SEQ ID NO: 1178916 - RNA, 16 nt, Human
cugggagugagcuggu

SEQ ID NO: 1178917 - RNA, 20 nt, Human
cugggcaaugugauaaaacc

SEQ ID NO: 1178918 - RNA, 13 nt, Human
cuggguuggaggg

SEQ ID NO: 1178919 - RNA, 15 nt, Human
cugguccauagagag

SEQ ID NO: 1178920 - RNA, 17 nt, Human
cugguccauagagagca

SEQ ID NO: 1178921 - RNA, 18 nt, Human
cugguccauagagagcaa

SEQ ID NO: 1178922 - RNA, 21 nt, Human
cugguccauagagagcaagac

SEQ ID NO: 1178923 - RNA, 15 nt, Human
cuggucccacucagu

SEQ ID NO: 1178924 - RNA, 18 nt, Human
cuggucccacucagucca

SEQ ID NO: 1178925 - RNA, 15 nt, Human
cuggguuggagggug

SEQ ID NO: 1178926 - RNA, 23 nt, Human
cugguggcagugggagcugccug

SEQ ID NO: 1178927 - RNA, 18 nt, Human
cugggcuucaguggcagc

SEQ ID NO: 1178928 - RNA, 19 nt, Human
cugggcuucaguggcagcu

SEQ ID NO: 1178929 - RNA, 20 nt, Human
cugggcuucaguggcagcug

SEQ ID NO: 1178930 - RNA, 21 nt, Human
cugggcuucaguggcagcugc

SEQ ID NO: 1178931 - RNA, 22 nt, Human
cugggcuucaguggcagcugcu

SEQ ID NO: 1178932 - RNA, 23 nt, Human
cugggcuucaguggcagcugcuu

SEQ ID NO: 1178933 - RNA, 17 nt, Human
cugggcuuggggaccag

SEQ ID NO: 1178934 - RNA, 20 nt, Human
cugggcuuggggaccagagc

SEQ ID NO: 1178935 - RNA, 21 nt, Human
cugggcuuggggaccagagcu

SEQ ID NO: 1178936 - RNA, 19 nt, Human
cugggcucccuucccaccu

SEQ ID NO: 1178937 - RNA, 13 nt, Human
cugggggccucag

SEQ ID NO: 1178938 - RNA, 17 nt, Human
cugggggccucagugcc

SEQ ID NO: 1178939 - RNA, 18 nt, Human
cugggggccucagugcca

SEQ ID NO: 1178940 - RNA, 17 nt, Human
cugggguggggaccuca

SEQ ID NO: 1178941 - RNA, 18 nt, Human
cugggguggggaccucag

SEQ ID NO: 1178942 - RNA, 19 nt, Human
cugggguggggaccucagg

SEQ ID NO: 1178943 - RNA, 21 nt, Human
cugggguggggaccucaggcc

SEQ ID NO: 1178944 - RNA, 22 nt, Human
cugggguggggaccucaggccu

SEQ ID NO: 1178945 - RNA, 23 nt, Human
cugggguggggaccucaggccug

SEQ ID NO: 1178946 - RNA, 20 nt, Human
cuggguacuuguggacacag

SEQ ID NO: 1178947 - RNA, 21 nt, Human
cuggguacuuguggacacagc

SEQ ID NO: 1178948 - RNA, 23 nt, Human
cuggguacuuguggacacagcuc

SEQ ID NO: 1178949 - RNA, 12 nt, Human
cuguuuagauaa

SEQ ID NO: 1178950 - RNA, 14 nt, Human
cuguuuagauaaua

SEQ ID NO: 1178951 - RNA, 18 nt, Human
cuguuuguuucugaaagg

SEQ ID NO: 1178952 - RNA, 21 nt, Human
cuguuuguuucugaaagggac

SEQ ID NO: 1178953 - RNA, 23 nt, Human
cuguuuguuucugaaagggacgc

SEQ ID NO: 1178954 - RNA, 21 nt, Human
cuguuuuauuuuaauucaguu

SEQ ID NO: 1178955 - RNA, 14 nt, Human
cuguuuucucuuga

SEQ ID NO: 1178956 - RNA, 17 nt, Human
cuguuuucucuugagag

SEQ ID NO: 1178957 - RNA, 14 nt, Human
cuuaaucuaaaugg

SEQ ID NO: 1178958 - RNA, 16 nt, Human
cuuaaucuaaauggaa

SEQ ID NO: 1178959 - RNA, 18 nt, Human
cuuaaugccacuaaauug

SEQ ID NO: 1178960 - RNA, 21 nt, Human
cuuaagaagacugcauuauau

SEQ ID NO: 1178961 - RNA, 12 nt, Human
cuuaacuucaca

SEQ ID NO: 1178962 - RNA, 14 nt, Human
cuuaacuucacaua

SEQ ID NO: 1178963 - RNA, 15 nt, Human
cuuaacuucacauau

SEQ ID NO: 1178964 - RNA, 16 nt, Human
cuuaacuucacauauu

SEQ ID NO: 1178965 - RNA, 17 nt, Human
cuuaacuucacauauug

SEQ ID NO: 1178966 - RNA, 22 nt, Human
cuuaacuucacauauugauuuc

SEQ ID NO: 1178967 - RNA, 15 nt, Human
cuuagaagucacaca

SEQ ID NO: 1178968 - RNA, 14 nt, Human
cuuagacagucccu

SEQ ID NO: 1178969 - RNA, 15 nt, Human
cuuagacagucccug

SEQ ID NO: 1178970 - RNA, 16 nt, Human
cuuagacagucccugc

SEQ ID NO: 1178971 - RNA, 17 nt, Human
cuuagacagucccugcc

SEQ ID NO: 1178972 - RNA, 18 nt, Human
cuuagacagucccugcca

SEQ ID NO: 1178973 - RNA, 19 nt, Human
cuuagacagucccugccaa

SEQ ID NO: 1178974 - RNA, 17 nt, Human
cuuagaagucacacagu

SEQ ID NO: 1178975 - RNA, 19 nt, Human
cuuagaugcaguucugaag

SEQ ID NO: 1178976 - RNA, 20 nt, Human
cuuagaugcaguucugaaga

SEQ ID NO: 1178977 - RNA, 15 nt, Human
cuuacgugaguccug

SEQ ID NO: 1178978 - RNA, 19 nt, Human
cuuacuaguuucccuugca

SEQ ID NO: 1178979 - RNA, 16 nt, Human
cuuacuguacaugaaa

SEQ ID NO: 1178980 - RNA, 21 nt, Human
cuuaggguuaugauuaaguaa

SEQ ID NO: 1178981 - RNA, 17 nt, Human
cuuagguuggcaaaaag

SEQ ID NO: 1178982 - RNA, 21 nt, Human
cuuagguuggcaaaaaggcag

SEQ ID NO: 1178983 - RNA, 13 nt, Human
cuuauaauuuaaa

SEQ ID NO: 1178984 - RNA, 14 nt, Human
cuuauaauuuaaaa

SEQ ID NO: 1178985 - RNA, 15 nt, Human
cuuauacauuugaua

SEQ ID NO: 1178986 - RNA, 15 nt, Human
cuuauuuaaugaaag

SEQ ID NO: 1178987 - RNA, 15 nt, Human
cuucagcugacuuuu

SEQ ID NO: 1178988 - RNA, 11 nt, Human
cuucagcugac

SEQ ID NO: 1178989 - RNA, 18 nt, Human
cuucagcgguuuauauaa

SEQ ID NO: 1178990 - RNA, 23 nt, Human
cuuccacaagagcccaggccucc

SEQ ID NO: 1178991 - RNA, 11 nt, Human
cuucagugccu

SEQ ID NO: 1178992 - RNA, 12 nt, Human
cuucagugccuu

SEQ ID NO: 1178993 - RNA, 13 nt, Human
cuucagugccuua

SEQ ID NO: 1178994 - RNA, 14 nt, Human
cuucagugccuuau

SEQ ID NO: 1178995 - RNA, 18 nt, Human
cuucauuuccugugucuu

SEQ ID NO: 1178996 - RNA, 22 nt, Human
cuuccaggggugggacacccug

SEQ ID NO: 1178997 - RNA, 24 nt, Human
cuuccaggggugggacacccugug

SEQ ID NO: 1178998 - RNA, 14 nt, Human
cuuccagugaggcu

SEQ ID NO: 1178999 - RNA, 15 nt, Human
cuuccagugaggcuc

SEQ ID NO: 1179000 - RNA, 17 nt, Human
cuuccagugaggcucug

SEQ ID NO: 1179001 - RNA, 20 nt, Human
cuucgggaggucgaggcagg

SEQ ID NO: 1179002 - RNA, 21 nt, Human
cuucgggaggucgaggcagga

SEQ ID NO: 1179003 - RNA, 16 nt, Human
cuucgcuccugugucu

SEQ ID NO: 1179004 - RNA, 17 nt, Human
cuucggccuccauccug

SEQ ID NO: 1179005 - RNA, 18 nt, Human
cuucggccuccauccuga

SEQ ID NO: 1179006 - RNA, 19 nt, Human
cuucggccuccauccugag

SEQ ID NO: 1179007 - RNA, 13 nt, Human
cuucgcuccugug

SEQ ID NO: 1179008 - RNA, 14 nt, Human
cuucgcuccugugu

SEQ ID NO: 1179009 - RNA, 15 nt, Human
cuucgcuccuguguc

SEQ ID NO: 1179010 - RNA, 22 nt, Human
cuucuccuucaccuuugucccc

SEQ ID NO: 1179011 - RNA, 14 nt, Human
cuucuccacccugc

SEQ ID NO: 1179012 - RNA, 15 nt, Human
cuucuccacccugcu

SEQ ID NO: 1179013 - RNA, 16 nt, Human
cuucuccacccugcuc

SEQ ID NO: 1179014 - RNA, 17 nt, Human
cuucuccaggcuguauc

SEQ ID NO: 1179015 - RNA, 12 nt, Human
cuucucuccagc

SEQ ID NO: 1179016 - RNA, 17 nt, Human
cuucugccauauucugu

SEQ ID NO: 1179017 - RNA, 21 nt, Human
cuucugccauauucuguuggc

SEQ ID NO: 1179018 - RNA, 20 nt, Human
cuucugccauuucugagauc

SEQ ID NO: 1179019 - RNA, 16 nt, Human
cuucugcuucagccuc

SEQ ID NO: 1179020 - RNA, 17 nt, Human
cuucugcuucagccucc

SEQ ID NO: 1179021 - RNA, 18 nt, Human
cuucugcuucagccuccc

SEQ ID NO: 1179022 - RNA, 14 nt, Human
cuugagagggugga

SEQ ID NO: 1179023 - RNA, 12 nt, Human
cuugagccuggg

SEQ ID NO: 1179024 - RNA, 15 nt, Human
cuugagccugggagg

SEQ ID NO: 1179025 - RNA, 16 nt, Human
cuugagccugggaggu

SEQ ID NO: 1179026 - RNA, 15 nt, Human
cuugaggguugggcu

SEQ ID NO: 1179027 - RNA, 17 nt, Human
cuugaggguugggcugg

SEQ ID NO: 1179028 - RNA, 19 nt, Human
cuugaguugauucagcucu

SEQ ID NO: 1179029 - RNA, 20 nt, Human
cuugaguugauucagcucug

SEQ ID NO: 1179030 - RNA, 21 nt, Human
cuugaguugauucagcucugc

SEQ ID NO: 1179031 - RNA, 16 nt, Human
cuugcaauggcagccu

SEQ ID NO: 1179032 - RNA, 17 nt, Human
cuugcaauggcagccuu

SEQ ID NO: 1179033 - RNA, 18 nt, Human
cuugcaauggcagccuug

SEQ ID NO: 1179034 - RNA, 21 nt, Human
cuugcagacucuacagaggcc

SEQ ID NO: 1179035 - RNA, 13 nt, Human
cuugcaugaggcu

SEQ ID NO: 1179036 - RNA, 14 nt, Human
cuugcaugaggcua

SEQ ID NO: 1179037 - RNA, 17 nt, Human
cuugcaugaggcuagug

SEQ ID NO: 1179038 - RNA, 20 nt, Human
cuugcuugauuguauggugg

SEQ ID NO: 1179039 - RNA, 13 nt, Human
cuugcuugcuuuu

SEQ ID NO: 1179040 - RNA, 20 nt, Human
cuuggaagcuccgcuuucua

SEQ ID NO: 1179041 - RNA, 22 nt, Human
cuugcucugcugacagacacag

SEQ ID NO: 1179042 - RNA, 20 nt, Human
cuugggccacugugaagaga

SEQ ID NO: 1179043 - RNA, 16 nt, Human
cuuggggcugaugcag

SEQ ID NO: 1179044 - RNA, 18 nt, Human
cuuggggcugaugcaguu

SEQ ID NO: 1179045 - RNA, 14 nt, Human
cuugguuuguaaau

SEQ ID NO: 1179046 - RNA, 15 nt, Human
cuugguuuguaaauu

SEQ ID NO: 1179047 - RNA, 20 nt, Human
cuugguuuguaaauuaacuu

SEQ ID NO: 1179048 - RNA, 12 nt, Human
cuuguacauaau

SEQ ID NO: 1179049 - RNA, 17 nt, Human
cuuuaccuuuuuuauac

SEQ ID NO: 1179050 - RNA, 19 nt, Human
cuuuaccuuuuuuauacau

SEQ ID NO: 1179051 - RNA, 20 nt, Human
cuuuaccuuuuuuauacaua

SEQ ID NO: 1179052 - RNA, 22 nt, Human
cuuuaccuuuuuuauacauaaa

SEQ ID NO: 1179053 - RNA, 15 nt, Human
cuuguggucccaccc

SEQ ID NO: 1179054 - RNA, 16 nt, Human
cuuguggucccacccc

SEQ ID NO: 1179055 - RNA, 19 nt, Human
cuuguggucccaccccaca

SEQ ID NO: 1179056 - RNA, 16 nt, Human
cuuguuaagauaguua

SEQ ID NO: 1179057 - RNA, 16 nt, Human
cuuuccucuuuggucu

SEQ ID NO: 1179058 - RNA, 13 nt, Human
cuuugaccucugc

SEQ ID NO: 1179059 - RNA, 12 nt, Human
cuuuggaaagac

SEQ ID NO: 1179060 - RNA, 23 nt, Human
cuuuggaaagacuuuuccaaccc

SEQ ID NO: 1179061 - RNA, 19 nt, Human
cuuuggaaagaguaggaag

SEQ ID NO: 1179062 - RNA, 17 nt, Human
cuuugggccuggcuccc

SEQ ID NO: 1179063 - RNA, 23 nt, Human
cuuugugaggaagccgcuggggc

SEQ ID NO: 1179064 - RNA, 12 nt, Human
cuuugugauuuu

SEQ ID NO: 1179065 - RNA, 13 nt, Human
cuuuguggcuucc

SEQ ID NO: 1179066 - RNA, 16 nt, Human
cuuuguucuggcucuu

SEQ ID NO: 1179067 - RNA, 21 nt, Human
cuuuguucuggcucuuccagg

SEQ ID NO: 1179068 - RNA, 21 nt, Human
cuuuguuuguugucagcugaa

SEQ ID NO: 1179069 - RNA, 15 nt, Human
cuuuucuguuugcua

SEQ ID NO: 1179070 - RNA, 18 nt, Human
cuuuucuugcaugaggcu

SEQ ID NO: 1179071 - RNA, 22 nt, Human
cuuuuguucuugguuuguaaau

SEQ ID NO: 1179072 - RNA, 15 nt, Human
gaaaauaaaaaguua

SEQ ID NO: 1179073 - RNA, 16 nt, Human
gaaaauaaaaaguuaa

SEQ ID NO: 1179074 - RNA, 19 nt, Human
gaaaauaacaauaaaagac

SEQ ID NO: 1179075 - RNA, 14 nt, Human
gaaaaguauguuag

SEQ ID NO: 1179076 - RNA, 20 nt, Human
gaaaaguauguuagugcaaa

SEQ ID NO: 1179077 - RNA, 19 nt, Human
gaaaacaugcuacacacug

SEQ ID NO: 1179078 - RNA, 22 nt, Human
gaaaacacuguucucugcccuc

SEQ ID NO: 1179079 - RNA, 14 nt, Human
gaaaacguggcugc

SEQ ID NO: 1179080 - RNA, 16 nt, Human
cuuuuuuagaguugau

SEQ ID NO: 1179081 - RNA, 14 nt, Human
gaaaacaaggauga

SEQ ID NO: 1179082 - RNA, 19 nt, Human
gaaaacacuguucucugcc

SEQ ID NO: 1179083 - RNA, 20 nt, Human
gaaaacacuguucucugccc

SEQ ID NO: 1179084 - RNA, 21 nt, Human
gaaaacacuguucucugcccu

SEQ ID NO: 1179085 - RNA, 18 nt, Human
gaaaacaugcuacacacu

SEQ ID NO: 1179086 - RNA, 17 nt, Human
gaaaauaaaaaguuaaa

SEQ ID NO: 1179087 - RNA, 16 nt, Human
gaaauuguauuacaaa

SEQ ID NO: 1179088 - RNA, 12 nt, Human
gaaaauauacug

SEQ ID NO: 1179089 - RNA, 13 nt, Human
gaaaauauacugu

SEQ ID NO: 1179090 - RNA, 14 nt, Human
gaaaauauacugua

SEQ ID NO: 1179091 - RNA, 15 nt, Human
gaaaauauacuguaa

SEQ ID NO: 1179092 - RNA, 16 nt, Human
gaaaauauacuguaaa

SEQ ID NO: 1179093 - RNA, 18 nt, Human
gaaauuguauuacaaauc

SEQ ID NO: 1179094 - RNA, 18 nt, Human
gaaaauauacuguaaaga

SEQ ID NO: 1179095 - RNA, 17 nt, Human
gaaaauauacuguaaag

SEQ ID NO: 1179096 - RNA, 14 nt, Human
gaacacucugagac

SEQ ID NO: 1179097 - RNA, 15 nt, Human
gaacacucugagacu

SEQ ID NO: 1179098 - RNA, 16 nt, Human
gaacagugauuaccag

SEQ ID NO: 1179099 - RNA, 20 nt, Human
gaacagugauuaccagggac

SEQ ID NO: 1179100 - RNA, 18 nt, Human
gaaccuuuugagugccuu

SEQ ID NO: 1179101 - RNA, 19 nt, Human
gaaccuuuugagugccuua

SEQ ID NO: 1179102 - RNA, 21 nt, Human
gaaccuuuugagugccuuaca

SEQ ID NO: 1179103 - RNA, 22 nt, Human
gaaccuuuugagugccuuacac

SEQ ID NO: 1179104 - RNA, 21 nt, Human
gaacuagaguuuagcuggaaa

SEQ ID NO: 1179105 - RNA, 19 nt, Human
gaagagaaugcacaaacag

SEQ ID NO: 1179106 - RNA, 20 nt, Human
gaagacuuuucuuucagcca

SEQ ID NO: 1179107 - RNA, 14 nt, Human
gaagacuuuggaaa

SEQ ID NO: 1179108 - RNA, 17 nt, Human
gaagacuuuggaaagag

SEQ ID NO: 1179109 - RNA, 23 nt, Human
gaacuuugaccucugcagcaaua

SEQ ID NO: 1179110 - RNA, 12 nt, Human
gaagaacugaaa

SEQ ID NO: 1179111 - RNA, 19 nt, Human
gaagacugcauuauauuua

SEQ ID NO: 1179112 - RNA, 11 nt, Human
gaagacuuugg

SEQ ID NO: 1179113 - RNA, 13 nt, Human
gaagacuuuggaa

SEQ ID NO: 1179114 - RNA, 20 nt, Human
gaagauaauauuaaggaaga

SEQ ID NO: 1179115 - RNA, 18 nt, Human
gaagauguagaggagaaa

SEQ ID NO: 1179116 - RNA, 17 nt, Human
gaagcauuuacuuugug

SEQ ID NO: 1179117 - RNA, 18 nt, Human
gaagcauuuacuuugugu

SEQ ID NO: 1179118 - RNA, 20 nt, Human
gaagccagcaggcucucagg

SEQ ID NO: 1179119 - RNA, 21 nt, Human
gaagccagcaggcucucaggc

SEQ ID NO: 1179120 - RNA, 22 nt, Human
gaagccagcaggcucucaggcc

SEQ ID NO: 1179121 - RNA, 13 nt, Human
gaagcccaggaaa

SEQ ID NO: 1179122 - RNA, 15 nt, Human
gaagcccaggaaagg

SEQ ID NO: 1179123 - RNA, 16 nt, Human
gaagcccaggaaaggc

SEQ ID NO: 1179124 - RNA, 19 nt, Human
gaagcccaggaaaggcucc

SEQ ID NO: 1179125 - RNA, 23 nt, Human
gaagccagcaggcucucaggcca

SEQ ID NO: 1179126 - RNA, 23 nt, Human
gaagcccuucuaccuuccugcaa

SEQ ID NO: 1179127 - RNA, 16 nt, Human
gaaugaaacccccaca

SEQ ID NO: 1179128 - RNA, 22 nt, Human
gaaugaaccacaucuugcucug

SEQ ID NO: 1179129 - RNA, 23 nt, Human
gaaugaaccacaucuugcucugc

SEQ ID NO: 1179130 - RNA, 14 nt, Human
gaaugaaaccccca

SEQ ID NO: 1179131 - RNA, 22 nt, Human
gaaugguuuucaaaauaaaaau

SEQ ID NO: 1179132 - RNA, 14 nt, Human
gaaugucaguguga

SEQ ID NO: 1179133 - RNA, 20 nt, Human
gaaugucagugugacugauc

SEQ ID NO: 1179134 - RNA, 21 nt, Human
gaaugucagugugacugaucu

SEQ ID NO: 1179135 - RNA, 17 nt, Human
gaauucucagaaucuca

SEQ ID NO: 1179136 - RNA, 17 nt, Human
gaauucucuaguuugau

SEQ ID NO: 1179137 - RNA, 19 nt, Human
gaauucucuaguuugauua

SEQ ID NO: 1179138 - RNA, 14 nt, Human
gaauugaaaaacca

SEQ ID NO: 1179139 - RNA, 14 nt, Human
gaauugaagcagga

SEQ ID NO: 1179140 - RNA, 22 nt, Human
gaauuguaaggaaugauuaauu

SEQ ID NO: 1179141 - RNA, 15 nt, Human
gaauuucccaaagca

SEQ ID NO: 1179142 - RNA, 22 nt, Human
gaauagcugggacuacaggugu

SEQ ID NO: 1179143 - RNA, 23 nt, Human
gaauagcugggacuacaggugug

SEQ ID NO: 1179144 - RNA, 15 nt, Human
gaauaccuguccccc

SEQ ID NO: 1179145 - RNA, 13 nt, Human
gaauaccuguccc

SEQ ID NO: 1179146 - RNA, 20 nt, Human
gaauaauccuaaacauauga

SEQ ID NO: 1179147 - RNA, 21 nt, Human
gaauacagaggcaacugcauu

SEQ ID NO: 1179148 - RNA, 17 nt, Human
gaauaauacaguaucuc

SEQ ID NO: 1179149 - RNA, 20 nt, Human
gaaguuugagaucagccugg

SEQ ID NO: 1179150 - RNA, 18 nt, Human
gaauaacauguaauuaag

SEQ ID NO: 1179151 - RNA, 19 nt, Human
gaauaacauguaauuaagu

SEQ ID NO: 1179152 - RNA, 16 nt, Human
gaaguauccuucagcc

SEQ ID NO: 1179153 - RNA, 14 nt, Human
gaaguauccuucag

SEQ ID NO: 1179154 - RNA, 12 nt, Human
gaaguccaagca

SEQ ID NO: 1179155 - RNA, 22 nt, Human
gaaguccaagcauuuagaugua

SEQ ID NO: 1179156 - RNA, 15 nt, Human
gaagucuuagaugua

SEQ ID NO: 1179157 - RNA, 21 nt, Human
gaaguuucugccgcagcccug

SEQ ID NO: 1179158 - RNA, 18 nt, Human
gaagucuuagauguauau

SEQ ID NO: 1179159 - RNA, 16 nt, Human
gaagggggcugggaca

SEQ ID NO: 1179160 - RNA, 19 nt, Human
gaagggggcugggacaugg

SEQ ID NO: 1179161 - RNA, 22 nt, Human
gaaguaauaugcacacauuuuu

SEQ ID NO: 1179162 - RNA, 18 nt, Human
gaaguacuauaauuuacc

SEQ ID NO: 1179163 - RNA, 15 nt, Human
gaaguacuggagaaa

SEQ ID NO: 1179164 - RNA, 20 nt, Human
gacagagcuacacaggggaa

SEQ ID NO: 1179165 - RNA, 12 nt, Human
gacagaggcagc

SEQ ID NO: 1179166 - RNA, 13 nt, Human
gacagagggggug

SEQ ID NO: 1179167 - RNA, 21 nt, Human
gacagagucucacuguugccc

SEQ ID NO: 1179168 - RNA, 16 nt, Human
gacagagugagacucu

SEQ ID NO: 1179169 - RNA, 19 nt, Human
gacagagugagacucuguc

SEQ ID NO: 1179170 - RNA, 16 nt, Human
gaauuucccaaagcag

SEQ ID NO: 1179171 - RNA, 18 nt, Human
gaauuucccaaagcagug

SEQ ID NO: 1179172 - RNA, 22 nt, Human
gaauuucccaaagcagugcaug

SEQ ID NO: 1179173 - RNA, 22 nt, Human
gacacgaauauugcugauggug

SEQ ID NO: 1179174 - RNA, 16 nt, Human
gacacuagaagauuuu

SEQ ID NO: 1179175 - RNA, 20 nt, Human
gacagacacaggcccggcuc

SEQ ID NO: 1179176 - RNA, 22 nt, Human
gacagacacaggcccggcucca

SEQ ID NO: 1179177 - RNA, 22 nt, Human
gacaggcauguucucugaggac

SEQ ID NO: 1179178 - RNA, 16 nt, Human
gacaucaacugcauca

SEQ ID NO: 1179179 - RNA, 23 nt, Human
gacaucaacugcaucaagaugug

SEQ ID NO: 1179180 - RNA, 13 nt, Human
gacaggcaagcac

SEQ ID NO: 1179181 - RNA, 17 nt, Human
gacaggcaagcaccucc

SEQ ID NO: 1179182 - RNA, 18 nt, Human
gacaggcaagcaccuccu

SEQ ID NO: 1179183 - RNA, 20 nt, Human
gacaggcaagcaccuccugc

SEQ ID NO: 1179184 - RNA, 21 nt, Human
gacaggcaagcaccuccugcc

SEQ ID NO: 1179185 - RNA, 19 nt, Human
gacaggcaaugcuggcugu

SEQ ID NO: 1179186 - RNA, 23 nt, Human
gacaggcaaugcuggcuguuggc

SEQ ID NO: 1179187 - RNA, 24 nt, Human
gacaggcaaugcuggcuguuggcu

SEQ ID NO: 1179188 - RNA, 21 nt, Human
gacaggcauguucucugagga

SEQ ID NO: 1179189 - RNA, 18 nt, Human
gaccacaaaacuuuucua

SEQ ID NO: 1179190 - RNA, 16 nt, Human
gaccacugcagaagac

SEQ ID NO: 1179191 - RNA, 18 nt, Human
gaccacugcagaagacag

SEQ ID NO: 1179192 - RNA, 22 nt, Human
gaccagacaccuugacagggca

SEQ ID NO: 1179193 - RNA, 23 nt, Human
gaccagacaccuugacagggcac

SEQ ID NO: 1179194 - RNA, 24 nt, Human
gaccagacaccuugacagggcaca

SEQ ID NO: 1179195 - RNA, 21 nt, Human
gaccagagcugccaccugccu

SEQ ID NO: 1179196 - RNA, 20 nt, Human
gaccagcaccaucucuccuc

SEQ ID NO: 1179197 - RNA, 21 nt, Human
gaccagcaccaucucuccucc

SEQ ID NO: 1179198 - RNA, 20 nt, Human
gacccaaaaggcagaagcaa

SEQ ID NO: 1179199 - RNA, 19 nt, Human
gacccaaaaggcagaagca

SEQ ID NO: 1179200 - RNA, 13 nt, Human
gacccaugcugcc

SEQ ID NO: 1179201 - RNA, 18 nt, Human
gacccaugcugcccugug

SEQ ID NO: 1179202 - RNA, 19 nt, Human
gacccaugcugcccuguga

SEQ ID NO: 1179203 - RNA, 20 nt, Human
gacccaugcugcccugugag

SEQ ID NO: 1179204 - RNA, 11 nt, Human
gacccugaggc

SEQ ID NO: 1179205 - RNA, 12 nt, Human
gacccugaggcc

SEQ ID NO: 1179206 - RNA, 16 nt, Human
gacccugaggcccaga

SEQ ID NO: 1179207 - RNA, 18 nt, Human
gacccugaggcccagagg

SEQ ID NO: 1179208 - RNA, 20 nt, Human
gacccugcccugugggcccc

SEQ ID NO: 1179209 - RNA, 22 nt, Human
gacccugcccugugggccccca

SEQ ID NO: 1179210 - RNA, 16 nt, Human
gacugaggggagggga

SEQ ID NO: 1179211 - RNA, 18 nt, Human
gacugaguacguugugca

SEQ ID NO: 1179212 - RNA, 13 nt, Human
gacuacaggcacc

SEQ ID NO: 1179213 - RNA, 15 nt, Human
gacuacaggcaccca

SEQ ID NO: 1179214 - RNA, 18 nt, Human
gacuacaggcacccacca

SEQ ID NO: 1179215 - RNA, 13 nt, Human
gacuacaggugug

SEQ ID NO: 1179216 - RNA, 19 nt, Human
gacuccugcaggcagccag

SEQ ID NO: 1179217 - RNA, 20 nt, Human
gacuccugcaggcagccagg

SEQ ID NO: 1179218 - RNA, 21 nt, Human
gacuccugcaggcagccaggc

SEQ ID NO: 1179219 - RNA, 15 nt, Human
gacucuacagaggcc

SEQ ID NO: 1179220 - RNA, 21 nt, Human
gacucuacagaggccaugggc

SEQ ID NO: 1179221 - RNA, 12 nt, Human
gacuucaucccu

SEQ ID NO: 1179222 - RNA, 20 nt, Human
gacuucaucccucuggggcu

SEQ ID NO: 1179223 - RNA, 12 nt, Human
gacuuacuguac

SEQ ID NO: 1179224 - RNA, 15 nt, Human
gacuuacuguacaug

SEQ ID NO: 1179225 - RNA, 16 nt, Human
gacuuacuguacauga

SEQ ID NO: 1179226 - RNA, 18 nt, Human
gacuuacuguacaugaaa

SEQ ID NO: 1179227 - RNA, 23 nt, Human
gacuuacuguacaugaaaacaca

SEQ ID NO: 1179228 - RNA, 23 nt, Human
gacuggccaagguuuggggaaga

SEQ ID NO: 1179229 - RNA, 16 nt, Human
gacuaacuugucuuug

SEQ ID NO: 1179230 - RNA, 23 nt, Human
gacuaacuugucuuuggacccug

SEQ ID NO: 1179231 - RNA, 11 nt, Human
gacguguuaug

SEQ ID NO: 1179232 - RNA, 14 nt, Human
gacguguuaugacu

SEQ ID NO: 1179233 - RNA, 15 nt, Human
gacguguuaugacuc

SEQ ID NO: 1179234 - RNA, 23 nt, Human
gaccuugaacuggguacuugugg

SEQ ID NO: 1179235 - RNA, 11 nt, Human
gaccuuucaau

SEQ ID NO: 1179236 - RNA, 19 nt, Human
gaccuuucaauaggaaaaa

SEQ ID NO: 1179237 - RNA, 20 nt, Human
gaccuuucaauaggaaaaac

SEQ ID NO: 1179238 - RNA, 22 nt, Human
gacgcugugcugcccugcccac

SEQ ID NO: 1179239 - RNA, 13 nt, Human
gacggagucccac

SEQ ID NO: 1179240 - RNA, 14 nt, Human
gacggagucccacc

SEQ ID NO: 1179241 - RNA, 19 nt, Human
gacccuugccgucuaccug

SEQ ID NO: 1179242 - RNA, 20 nt, Human
gacccuugccgucuaccuga

SEQ ID NO: 1179243 - RNA, 23 nt, Human
gacccuugccgucuaccugaggg

SEQ ID NO: 1179244 - RNA, 15 nt, Human
gacccuugugguccc

SEQ ID NO: 1179245 - RNA, 14 nt, Human
gaccuucuccuuca

SEQ ID NO: 1179246 - RNA, 15 nt, Human
gaccuucuccuucac

SEQ ID NO: 1179247 - RNA, 16 nt, Human
gaccuucuccuucacc

SEQ ID NO: 1179248 - RNA, 20 nt, Human
gaccuucuccuucaccuuug

SEQ ID NO: 1179249 - RNA, 21 nt, Human
gaccuucuccuucaccuuugu

SEQ ID NO: 1179250 - RNA, 14 nt, Human
gaccuugaacuggg

SEQ ID NO: 1179251 - RNA, 17 nt, Human
gauaggucagugcaaau

SEQ ID NO: 1179252 - RNA, 16 nt, Human
gauacaaaagcaugug

SEQ ID NO: 1179253 - RNA, 17 nt, Human
gauacaaaagcauguga

SEQ ID NO: 1179254 - RNA, 20 nt, Human
gauagugucccacggugccu

SEQ ID NO: 1179255 - RNA, 18 nt, Human
gauauaugcucugcaugu

SEQ ID NO: 1179256 - RNA, 23 nt, Human
gauauaugcucugcauguuacau

SEQ ID NO: 1179257 - RNA, 23 nt, Human
gaucacggcucacugcagccuca

SEQ ID NO: 1179258 - RNA, 23 nt, Human
gaucagcuuauugucuagugaaa

SEQ ID NO: 1179259 - RNA, 20 nt, Human
gaguucauacccuguuacca

SEQ ID NO: 1179260 - RNA, 13 nt, Human
gaguucugguucc

SEQ ID NO: 1179261 - RNA, 13 nt, Human
gauaaacaguagu

SEQ ID NO: 1179262 - RNA, 12 nt, Human
gauaauacacca

SEQ ID NO: 1179263 - RNA, 14 nt, Human
gauaauacaccacu

SEQ ID NO: 1179264 - RNA, 23 nt, Human
gauaauacaccacuacauucugu

SEQ ID NO: 1179265 - RNA, 24 nt, Human
gauaauacaccacuacauucuguu

SEQ ID NO: 1179266 - RNA, 18 nt, Human
gauccuaggcauuugcug

SEQ ID NO: 1179267 - RNA, 14 nt, Human
gauccuccaggugc

SEQ ID NO: 1179268 - RNA, 16 nt, Human
gauccucccaccucag

SEQ ID NO: 1179269 - RNA, 17 nt, Human
gauccucccaccucagc

SEQ ID NO: 1179270 - RNA, 18 nt, Human
gauccucccaccucagcc

SEQ ID NO: 1179271 - RNA, 13 nt, Human
gaucauccacugu

SEQ ID NO: 1179272 - RNA, 16 nt, Human
gaucauccacugugcc

SEQ ID NO: 1179273 - RNA, 12 nt, Human
gauccugagcca

SEQ ID NO: 1179274 - RNA, 13 nt, Human
gauccugagccag

SEQ ID NO: 1179275 - RNA, 14 nt, Human
gauccuggaaauca

SEQ ID NO: 1179276 - RNA, 13 nt, Human
gaucuaggaagac

SEQ ID NO: 1179277 - RNA, 14 nt, Human
gaucuaggaagacu

SEQ ID NO: 1179278 - RNA, 18 nt, Human
gaucuaggaagacuuugg

SEQ ID NO: 1179279 - RNA, 20 nt, Human
gaucuaggaagacuuuggaa

SEQ ID NO: 1179280 - RNA, 22 nt, Human
gaucuucuguggguuucuaaag

SEQ ID NO: 1179281 - RNA, 19 nt, Human
gaucuucuuuauaauucua

SEQ ID NO: 1179282 - RNA, 15 nt, Human
gaugaaaugagguca

SEQ ID NO: 1179283 - RNA, 21 nt, Human
gaugaaaugaggucagagccu

SEQ ID NO: 1179284 - RNA, 18 nt, Human
gaugaccuugaaugaugc

SEQ ID NO: 1179285 - RNA, 20 nt, Human
gaugaccuugaaugaugcca

SEQ ID NO: 1179286 - RNA, 14 nt, Human
gaugagaggaaauc

SEQ ID NO: 1179287 - RNA, 15 nt, Human
gaugcaccagcccuu

SEQ ID NO: 1179288 - RNA, 23 nt, Human
gaugcaccagcccuuagcaggga

SEQ ID NO: 1179289 - RNA, 16 nt, Human
gaugagaggaaaucac

SEQ ID NO: 1179290 - RNA, 14 nt, Human
gaugcagugcuucc

SEQ ID NO: 1179291 - RNA, 18 nt, Human
gaugcaguucugaagaag

SEQ ID NO: 1179292 - RNA, 15 nt, Human
gaugccugguggcag

SEQ ID NO: 1179293 - RNA, 16 nt, Human
gaugccugguggcagc

SEQ ID NO: 1179294 - RNA, 17 nt, Human
gaugccugguggcagcu

SEQ ID NO: 1179295 - RNA, 20 nt, Human
gaugcgggccagugcuccag

SEQ ID NO: 1179296 - RNA, 16 nt, Human
gaugcuagaacucccu

SEQ ID NO: 1179297 - RNA, 22 nt, Human
gaugcgggccagugcuccagcc

SEQ ID NO: 1179298 - RNA, 18 nt, Human
gaugcuagaacucccuuu

SEQ ID NO: 1179299 - RNA, 18 nt, Human
gauguucuagcauggcug

SEQ ID NO: 1179300 - RNA, 14 nt, Human
gauguucugggaca

SEQ ID NO: 1179301 - RNA, 21 nt, Human
gauguuuuaaggaugcuugua

SEQ ID NO: 1179302 - RNA, 14 nt, Human
gauuaaguaaugau

SEQ ID NO: 1179303 - RNA, 22 nt, Human
gauuaaguaaugauaacuggaa

SEQ ID NO: 1179304 - RNA, 13 nt, Human
gauuacaagcgug

SEQ ID NO: 1179305 - RNA, 21 nt, Human
gauuacaagcgugagccacug

SEQ ID NO: 1179306 - RNA, 13 nt, Human
gauucagacagcu

SEQ ID NO: 1179307 - RNA, 14 nt, Human
gauucagacagcug

SEQ ID NO: 1179308 - RNA, 17 nt, Human
gauucagacagcugccu

SEQ ID NO: 1179309 - RNA, 18 nt, Human
gauucagacagcugccug

SEQ ID NO: 1179310 - RNA, 15 nt, Human
gauucccaagcucug

SEQ ID NO: 1179311 - RNA, 22 nt, Human
gauuucuguuuagauaauacac

SEQ ID NO: 1179312 - RNA, 12 nt, Human
gauuuaaaucag

SEQ ID NO: 1179313 - RNA, 16 nt, Human
gauucccaagcucugc

SEQ ID NO: 1179314 - RNA, 17 nt, Human
gauucccaagcucugcu

SEQ ID NO: 1179315 - RNA, 18 nt, Human
gauucccaagcucugcuc

SEQ ID NO: 1179316 - RNA, 20 nt, Human
gauucuuuccugaggcuggg

SEQ ID NO: 1179317 - RNA, 22 nt, Human
gauucuuuccugaggcugggcu

SEQ ID NO: 1179318 - RNA, 16 nt, Human
gauugcaacaggcugg

SEQ ID NO: 1179319 - RNA, 17 nt, Human
gauugcaacaggcuggg

SEQ ID NO: 1179320 - RNA, 18 nt, Human
gauugcaacaggcugggc

SEQ ID NO: 1179321 - RNA, 18 nt, Human
gauugcuugagcucagga

SEQ ID NO: 1179322 - RNA, 18 nt, Human
gcaacugcauuggcuuug

SEQ ID NO: 1179323 - RNA, 16 nt, Human
gcaaaccaucauugaa

SEQ ID NO: 1179324 - RNA, 17 nt, Human
gcaaaccaucauugaaa

SEQ ID NO: 1179325 - RNA, 19 nt, Human
gcaaaccaucauugaaauc

SEQ ID NO: 1179326 - RNA, 20 nt, Human
gcaaaccaucauugaaaucu

SEQ ID NO: 1179327 - RNA, 21 nt, Human
gcaaaccaucauugaaaucuu

SEQ ID NO: 1179328 - RNA, 15 nt, Human
gcaagcaccuccugc

SEQ ID NO: 1179329 - RNA, 16 nt, Human
gcaagcaccuccugcc

SEQ ID NO: 1179330 - RNA, 18 nt, Human
gcaagcaccuccugccuc

SEQ ID NO: 1179331 - RNA, 20 nt, Human
gcaagcaccuccugccucga

SEQ ID NO: 1179332 - RNA, 14 nt, Human
gcaaggcugucaau

SEQ ID NO: 1179333 - RNA, 18 nt, Human
gcaaggcugucaauuaca

SEQ ID NO: 1179334 - RNA, 20 nt, Human
gcaaguauuagaauaccaca

SEQ ID NO: 1179335 - RNA, 17 nt, Human
gcaauccugcaagaaca

SEQ ID NO: 1179336 - RNA, 18 nt, Human
gcacuaaggugugcucug

SEQ ID NO: 1179337 - RNA, 19 nt, Human
gcacuaaggugugcucuga

SEQ ID NO: 1179338 - RNA, 18 nt, Human
gcacccggccccugcugg

SEQ ID NO: 1179339 - RNA, 18 nt, Human
gcaccuggaauauauaac

SEQ ID NO: 1179340 - RNA, 17 nt, Human
gcacuaaggugugcucu

SEQ ID NO: 1179341 - RNA, 22 nt, Human
gcacugggcuuggggaccagag

SEQ ID NO: 1179342 - RNA, 23 nt, Human
gcacugggcuuggggaccagagc

SEQ ID NO: 1179343 - RNA, 14 nt, Human
gcagaagacaguau

SEQ ID NO: 1179344 - RNA, 12 nt, Human
gcagaaggaaga

SEQ ID NO: 1179345 - RNA, 13 nt, Human
gcagaaggaagac

SEQ ID NO: 1179346 - RNA, 14 nt, Human
gcagaaggaagacu

SEQ ID NO: 1179347 - RNA, 13 nt, Human
gcaaugaccuuuc

SEQ ID NO: 1179348 - RNA, 14 nt, Human
gcaaugaccuuuca

SEQ ID NO: 1179349 - RNA, 15 nt, Human
gcaaugaccuuucaa

SEQ ID NO: 1179350 - RNA, 20 nt, Human
gcacagccucuuagaugcag

SEQ ID NO: 1179351 - RNA, 19 nt, Human
gcacagcuaacauggaagu

SEQ ID NO: 1179352 - RNA, 16 nt, Human
gcacagcuucauuucc

SEQ ID NO: 1179353 - RNA, 21 nt, Human
gcacagcuucauuuccugugu

SEQ ID NO: 1179354 - RNA, 19 nt, Human
gcaccacugcacuccagcc

SEQ ID NO: 1179355 - RNA, 20 nt, Human
gcaccacugcacuccagccu

SEQ ID NO: 1179356 - RNA, 15 nt, Human
gcacccggccccugc

SEQ ID NO: 1179357 - RNA, 17 nt, Human
gcacccggccccugcug

SEQ ID NO: 1179358 - RNA, 14 nt, Human
gcaccuccugccuc

SEQ ID NO: 1179359 - RNA, 15 nt, Human
gcaccuccugccucg

SEQ ID NO: 1179360 - RNA, 19 nt, Human
gcagccucaaccuccuggg

SEQ ID NO: 1179361 - RNA, 20 nt, Human
gcagccucaaccuccugggc

SEQ ID NO: 1179362 - RNA, 15 nt, Human
gcagccucacagucc

SEQ ID NO: 1179363 - RNA, 21 nt, Human
gcagccucaaccuccugggcu

SEQ ID NO: 1179364 - RNA, 22 nt, Human
gcagccucaaccuccugggcua

SEQ ID NO: 1179365 - RNA, 14 nt, Human
gcagccuggacccu

SEQ ID NO: 1179366 - RNA, 20 nt, Human
gcaggaggaucacuugaguc

SEQ ID NO: 1179367 - RNA, 18 nt, Human
gcagaaggaagacuucau

SEQ ID NO: 1179368 - RNA, 19 nt, Human
gcagagaaugaaagggccc

SEQ ID NO: 1179369 - RNA, 20 nt, Human
gcagagaaugaaagggccca

SEQ ID NO: 1179370 - RNA, 21 nt, Human
gcagagaaugaaagggcccag

SEQ ID NO: 1179371 - RNA, 22 nt, Human
gcagagaaugaaagggcccaga

SEQ ID NO: 1179372 - RNA, 23 nt, Human
gcagagaaugaaagggcccagag

SEQ ID NO: 1179373 - RNA, 21 nt, Human
gcagagaauucucuuauccaa

SEQ ID NO: 1179374 - RNA, 14 nt, Human
gcagagaccauccc

SEQ ID NO: 1179375 - RNA, 15 nt, Human
gcagagaccaucccu

SEQ ID NO: 1179376 - RNA, 17 nt, Human
gcagagaccaucccuga

SEQ ID NO: 1179377 - RNA, 19 nt, Human
gcagagaccaucccugaag

SEQ ID NO: 1179378 - RNA, 15 nt, Human
gcagaguugaagaca

SEQ ID NO: 1179379 - RNA, 16 nt, Human
gcagaguugaagacag

SEQ ID NO: 1179380 - RNA, 17 nt, Human
gcagaguugaagacaga

SEQ ID NO: 1179381 - RNA, 19 nt, Human
gcagaguugaagacagagc

SEQ ID NO: 1179382 - RNA, 20 nt, Human
gcagaguugaagacagagcu

SEQ ID NO: 1179383 - RNA, 12 nt, Human
gcagcaauaaag

SEQ ID NO: 1179384 - RNA, 20 nt, Human
gcaggauucuuccucccucc

SEQ ID NO: 1179385 - RNA, 16 nt, Human
gcagggagggcuucug

SEQ ID NO: 1179386 - RNA, 12 nt, Human
gcagggcucagc

SEQ ID NO: 1179387 - RNA, 14 nt, Human
gcagggcucagcgg

SEQ ID NO: 1179388 - RNA, 23 nt, Human
gcagugcuuccaaggauggacca

SEQ ID NO: 1179389 - RNA, 16 nt, Human
gcagugggagcugccu

SEQ ID NO: 1179390 - RNA, 15 nt, Human
gcauauucaggaagc

SEQ ID NO: 1179391 - RNA, 17 nt, Human
gcauauucaggaagcuc

SEQ ID NO: 1179392 - RNA, 18 nt, Human
gcauauucaggaagcuca

SEQ ID NO: 1179393 - RNA, 20 nt, Human
gcauauucaggaagcucagg

SEQ ID NO: 1179394 - RNA, 21 nt, Human
gcaucaagaugugacauguuu

SEQ ID NO: 1179395 - RNA, 13 nt, Human
gcaguucugaaga

SEQ ID NO: 1179396 - RNA, 14 nt, Human
gcaguucugaagaa

SEQ ID NO: 1179397 - RNA, 17 nt, Human
gcagugggagcugccug

SEQ ID NO: 1179398 - RNA, 18 nt, Human
gcagugggagcugccugu

SEQ ID NO: 1179399 - RNA, 15 nt, Human
gcaugcugucccuua

SEQ ID NO: 1179400 - RNA, 17 nt, Human
gcauguuugugauugac

SEQ ID NO: 1179401 - RNA, 15 nt, Human
gcaucaggccaggcc

SEQ ID NO: 1179402 - RNA, 16 nt, Human
gcaucaggccaggccc

SEQ ID NO: 1179403 - RNA, 17 nt, Human
gcaucaggccaggcccu

SEQ ID NO: 1179404 - RNA, 18 nt, Human
gcaucaggccaggcccuc

SEQ ID NO: 1179405 - RNA, 20 nt, Human
gcaugacacgaauauugcug

SEQ ID NO: 1179406 - RNA, 17 nt, Human
gcaugccuggauggggc

SEQ ID NO: 1179407 - RNA, 22 nt, Human
gcaugccuggauggggcugcac

SEQ ID NO: 1179408 - RNA, 12 nt, Human
gcauuccccacu

SEQ ID NO: 1179409 - RNA, 12 nt, Human
gcauuccccagg

SEQ ID NO: 1179410 - RNA, 23 nt, Human
gcauuugcugaauacagaggcaa

SEQ ID NO: 1179411 - RNA, 21 nt, Human
gcauuuggugguuucagaaau

SEQ ID NO: 1179412 - RNA, 22 nt, Human
gcauuuugcuaaaugugaauga

SEQ ID NO: 1179413 - RNA, 21 nt, Human
gccaaacucaccugccccuca

SEQ ID NO: 1179414 - RNA, 14 nt, Human
gccaaaggaagcac

SEQ ID NO: 1179415 - RNA, 16 nt, Human
gccaaaggaagcacau

SEQ ID NO: 1179416 - RNA, 20 nt, Human
gccaaaggaagcacaugccu

SEQ ID NO: 1179417 - RNA, 17 nt, Human
gccacugcaccgggcca

SEQ ID NO: 1179418 - RNA, 18 nt, Human
gccacugcaccgggccac

SEQ ID NO: 1179419 - RNA, 19 nt, Human
gccacugcaccgggccaca

SEQ ID NO: 1179420 - RNA, 12 nt, Human
gccagagacaca

SEQ ID NO: 1179421 - RNA, 15 nt, Human
gccagagacacaagc

SEQ ID NO: 1179422 - RNA, 16 nt, Human
gccagagacacaagcc

SEQ ID NO: 1179423 - RNA, 18 nt, Human
gccagagggagugacaga

SEQ ID NO: 1179424 - RNA, 13 nt, Human
gccaaagccaaag

SEQ ID NO: 1179425 - RNA, 14 nt, Human
gccacggccaggcc

SEQ ID NO: 1179426 - RNA, 15 nt, Human
gccacggccaggcca

SEQ ID NO: 1179427 - RNA, 16 nt, Human
gccacggccaggccag

SEQ ID NO: 1179428 - RNA, 17 nt, Human
gccacggccaggccaga

SEQ ID NO: 1179429 - RNA, 22 nt, Human
gccacguucuuacuaguuuccc

SEQ ID NO: 1179430 - RNA, 21 nt, Human
gccacuauuguuagucucuug

SEQ ID NO: 1179431 - RNA, 19 nt, Human
gccagagggagugacagag

SEQ ID NO: 1179432 - RNA, 20 nt, Human
gccagagggagugacagagg

SEQ ID NO: 1179433 - RNA, 16 nt, Human
gccagauucuuuccug

SEQ ID NO: 1179434 - RNA, 17 nt, Human
gccagauucuuuccuga

SEQ ID NO: 1179435 - RNA, 19 nt, Human
gccagauucuuuccugagg

SEQ ID NO: 1179436 - RNA, 20 nt, Human
gccagccgagauagccaagg

SEQ ID NO: 1179437 - RNA, 21 nt, Human
gccagccgagauagccaaggc

SEQ ID NO: 1179438 - RNA, 12 nt, Human
gccagccuugac

SEQ ID NO: 1179439 - RNA, 14 nt, Human
gccagccuugacca

SEQ ID NO: 1179440 - RNA, 20 nt, Human
gccagccuugaccauucucc

SEQ ID NO: 1179441 - RNA, 21 nt, Human
gccagccuugaccauucucca

SEQ ID NO: 1179442 - RNA, 22 nt, Human
gccagccuugaccauucuccac

SEQ ID NO: 1179443 - RNA, 14 nt, Human
gccagcugcuuggg

SEQ ID NO: 1179444 - RNA, 15 nt, Human
gccagcugcuugggc

SEQ ID NO: 1179445 - RNA, 16 nt, Human
gccagcugcuugggcu

SEQ ID NO: 1179446 - RNA, 19 nt, Human
gccauccagguucagcuug

SEQ ID NO: 1179447 - RNA, 20 nt, Human
gccauccagguucagcuugu

SEQ ID NO: 1179448 - RNA, 13 nt, Human
gccaucccagccc

SEQ ID NO: 1179449 - RNA, 14 nt, Human
gccaucccagcccc

SEQ ID NO: 1179450 - RNA, 15 nt, Human
gccaucccagcccca

SEQ ID NO: 1179451 - RNA, 16 nt, Human
gccaucccagccccaa

SEQ ID NO: 1179452 - RNA, 17 nt, Human
gccaucccagccccaau

SEQ ID NO: 1179453 - RNA, 11 nt, Human
gccaggaagcc

SEQ ID NO: 1179454 - RNA, 17 nt, Human
gccaggaagccagcagg

SEQ ID NO: 1179455 - RNA, 18 nt, Human
gccaggaagccagcaggc

SEQ ID NO: 1179456 - RNA, 19 nt, Human
gccaggaagccagcaggcu

SEQ ID NO: 1179457 - RNA, 20 nt, Human
gccaggaagccagcaggcuc

SEQ ID NO: 1179458 - RNA, 17 nt, Human
gccaggggaaaaucagc

SEQ ID NO: 1179459 - RNA, 21 nt, Human
gccaggggaaaaucagccugc

SEQ ID NO: 1179460 - RNA, 22 nt, Human
gccaggggaaaaucagccugcu

SEQ ID NO: 1179461 - RNA, 23 nt, Human
gccaggggaaaaucagccugcuc

SEQ ID NO: 1179462 - RNA, 14 nt, Human
gccaugggacaggg

SEQ ID NO: 1179463 - RNA, 19 nt, Human
gccaugggacagggaggac

SEQ ID NO: 1179464 - RNA, 22 nt, Human
gccaugggacagggaggacgcu

SEQ ID NO: 1179465 - RNA, 17 nt, Human
gccauuucuuccacaag

SEQ ID NO: 1179466 - RNA, 20 nt, Human
gccauuucuuccacaagagc

SEQ ID NO: 1179467 - RNA, 22 nt, Human
gccauuucuuccacaagagccc

SEQ ID NO: 1179468 - RNA, 16 nt, Human
gcccaaagaugcagcc

SEQ ID NO: 1179469 - RNA, 16 nt, Human
gccauuuguguuuaua

SEQ ID NO: 1179470 - RNA, 16 nt, Human
gcccacagcuguauga

SEQ ID NO: 1179471 - RNA, 13 nt, Human
gcccacaggauca

SEQ ID NO: 1179472 - RNA, 18 nt, Human
gcccacaggaucagucug

SEQ ID NO: 1179473 - RNA, 19 nt, Human
gcccacaggaucagucuga

SEQ ID NO: 1179474 - RNA, 15 nt, Human
gcccaccccucaaca

SEQ ID NO: 1179475 - RNA, 11 nt, Human
gcccaggcugg

SEQ ID NO: 1179476 - RNA, 12 nt, Human
gcccaggaaagg

SEQ ID NO: 1179477 - RNA, 15 nt, Human
gcccaggaaaggcuc

SEQ ID NO: 1179478 - RNA, 16 nt, Human
gcccaggaaaggcucc

SEQ ID NO: 1179479 - RNA, 18 nt, Human
gcccaggccuccuacagc

SEQ ID NO: 1179480 - RNA, 14 nt, Human
gcccaggcuggcgu

SEQ ID NO: 1179481 - RNA, 15 nt, Human
gcccaggcuggcgug

SEQ ID NO: 1179482 - RNA, 16 nt, Human
gcccaggcuggcgugc

SEQ ID NO: 1179483 - RNA, 22 nt, Human
gcccagucuggaaugcaguggu

SEQ ID NO: 1179484 - RNA, 15 nt, Human
gcccaguugggugga

SEQ ID NO: 1179485 - RNA, 16 nt, Human
gccccagugcccacag

SEQ ID NO: 1179486 - RNA, 17 nt, Human
gccccagugcccacagg

SEQ ID NO: 1179487 - RNA, 21 nt, Human
gccccagugcccacaggauca

SEQ ID NO: 1179488 - RNA, 23 nt, Human
gccccauccucuguacagagccc

SEQ ID NO: 1179489 - RNA, 17 nt, Human
gccccauucugccugcc

SEQ ID NO: 1179490 - RNA, 18 nt, Human
gccccauucugccugccc

SEQ ID NO: 1179491 - RNA, 20 nt, Human
gccccauucugccugcccag

SEQ ID NO: 1179492 - RNA, 21 nt, Human
gccccauucugccugcccagg

SEQ ID NO: 1179493 - RNA, 17 nt, Human
gccccgugggguuccuc

SEQ ID NO: 1179494 - RNA, 22 nt, Human
gccccauucugccugcccaggc

SEQ ID NO: 1179495 - RNA, 23 nt, Human
gccccauucugccugcccaggcc

SEQ ID NO: 1179496 - RNA, 23 nt, Human
gccccgaggccuucucugaagga

SEQ ID NO: 1179497 - RNA, 14 nt, Human
gccccgcccaggcu

SEQ ID NO: 1179498 - RNA, 19 nt, Human
gccccugcacuccagccug

SEQ ID NO: 1179499 - RNA, 23 nt, Human
gccccuggcagccccuguucugg

SEQ ID NO: 1179500 - RNA, 23 nt, Human
gccccucaacucuccuccagagu

SEQ ID NO: 1179501 - RNA, 19 nt, Human
gccccucagggucccuggu

SEQ ID NO: 1179502 - RNA, 21 nt, Human
gccccucagggucccuggugg

SEQ ID NO: 1179503 - RNA, 19 nt, Human
gcccgggcucugccuccca

SEQ ID NO: 1179504 - RNA, 20 nt, Human
gcccgggcucugccucccau

SEQ ID NO: 1179505 - RNA, 21 nt, Human
gcccgggcucugccucccauc

SEQ ID NO: 1179506 - RNA, 22 nt, Human
gcccucugcccacucccugcaa

SEQ ID NO: 1179507 - RNA, 19 nt, Human
gccccuucugacccaugcu

SEQ ID NO: 1179508 - RNA, 20 nt, Human
gccccuucugacccaugcug

SEQ ID NO: 1179509 - RNA, 13 nt, Human
gcccggcuccagg

SEQ ID NO: 1179510 - RNA, 14 nt, Human
gcccggcuccaggc

SEQ ID NO: 1179511 - RNA, 15 nt, Human
gcccggcuccaggcu

SEQ ID NO: 1179512 - RNA, 13 nt, Human
gcccgggcucugc

SEQ ID NO: 1179513 - RNA, 14 nt, Human
gcccgggcucugcc

SEQ ID NO: 1179514 - RNA, 15 nt, Human
gcccgggcucugccu

SEQ ID NO: 1179515 - RNA, 18 nt, Human
gcccgggcucugccuccc

SEQ ID NO: 1179516 - RNA, 13 nt, Human
gcccuucucucca

SEQ ID NO: 1179517 - RNA, 19 nt, Human
gcccuucuuuccacagaag

SEQ ID NO: 1179518 - RNA, 16 nt, Human
gccgagauagccaagg

SEQ ID NO: 1179519 - RNA, 17 nt, Human
gccgagauagccaaggc

SEQ ID NO: 1179520 - RNA, 19 nt, Human
gccgagauagccaaggcca

SEQ ID NO: 1179521 - RNA, 15 nt, Human
gccgcagcccugcag

SEQ ID NO: 1179522 - RNA, 16 nt, Human
gccgcagcccugcaga

SEQ ID NO: 1179523 - RNA, 17 nt, Human
gccgcagcccugcagag

SEQ ID NO: 1179524 - RNA, 19 nt, Human
gccgcagcccugcagaggg

SEQ ID NO: 1179525 - RNA, 20 nt, Human
gccgucuaccugaggggccu

SEQ ID NO: 1179526 - RNA, 22 nt, Human
gccgucuaccugaggggccucu

SEQ ID NO: 1179527 - RNA, 23 nt, Human
gccgucuaccugaggggccucuu

SEQ ID NO: 1179528 - RNA, 24 nt, Human
gccucaagugauucuccugccuca

SEQ ID NO: 1179529 - RNA, 18 nt, Human
gccucagcauccuggcac

SEQ ID NO: 1179530 - RNA, 21 nt, Human
gccucagcauccuggcacccg

SEQ ID NO: 1179531 - RNA, 21 nt, Human
gccucugcacuccccugcugg

SEQ ID NO: 1179532 - RNA, 15 nt, Human
gccugaagucacaca

SEQ ID NO: 1179533 - RNA, 15 nt, Human
gccucugacacacag

SEQ ID NO: 1179534 - RNA, 16 nt, Human
gccucugacacacagc

SEQ ID NO: 1179535 - RNA, 16 nt, Human
gccucugcacuccccu

SEQ ID NO: 1179536 - RNA, 17 nt, Human
gccucugcacuccccug

SEQ ID NO: 1179537 - RNA, 18 nt, Human
gccucugcacuccccugc

SEQ ID NO: 1179538 - RNA, 19 nt, Human
gccucugcacuccccugcu

SEQ ID NO: 1179539 - RNA, 20 nt, Human
gccucugcacuccccugcug

SEQ ID NO: 1179540 - RNA, 11 nt, Human
gccugcccagg

SEQ ID NO: 1179541 - RNA, 12 nt, Human
gccugcccaggc

SEQ ID NO: 1179542 - RNA, 12 nt, Human
gccucagccucc

SEQ ID NO: 1179543 - RNA, 14 nt, Human
gccucagccuccca

SEQ ID NO: 1179544 - RNA, 22 nt, Human
gccucagccucccaaagugcug

SEQ ID NO: 1179545 - RNA, 18 nt, Human
gccucccgaauagcuggg

SEQ ID NO: 1179546 - RNA, 19 nt, Human
gccucccgaauagcuggga

SEQ ID NO: 1179547 - RNA, 20 nt, Human
gccucccgaauagcugggac

SEQ ID NO: 1179548 - RNA, 21 nt, Human
gccucccgaauagcugggacu

SEQ ID NO: 1179549 - RNA, 21 nt, Human
gccucccgaguagcugggacu

SEQ ID NO: 1179550 - RNA, 23 nt, Human
gccucccgaguagcugggacuac

SEQ ID NO: 1179551 - RNA, 15 nt, Human
gccucucccaucacu

SEQ ID NO: 1179552 - RNA, 21 nt, Human
gccuuauggaacacucugaga

SEQ ID NO: 1179553 - RNA, 22 nt, Human
gccuuauggaacacucugagac

SEQ ID NO: 1179554 - RNA, 23 nt, Human
gccuuauggaacacucugagacu

SEQ ID NO: 1179555 - RNA, 15 nt, Human
gccugguggcagcug

SEQ ID NO: 1179556 - RNA, 16 nt, Human
gccugguggcagcugc

SEQ ID NO: 1179557 - RNA, 17 nt, Human
gccugguggcagcugcg

SEQ ID NO: 1179558 - RNA, 18 nt, Human
gccugguggcagcugcgg

SEQ ID NO: 1179559 - RNA, 18 nt, Human
gccuguaaucacagcuac

SEQ ID NO: 1179560 - RNA, 18 nt, Human
gccuucggccuccauccu

SEQ ID NO: 1179561 - RNA, 19 nt, Human
gccuucggccuccauccug

SEQ ID NO: 1179562 - RNA, 18 nt, Human
gccuuggggcugaugcag

SEQ ID NO: 1179563 - RNA, 17 nt, Human
gcgcugccccuggcagc

SEQ ID NO: 1179564 - RNA, 14 nt, Human
gcgcugccccuggc

SEQ ID NO: 1179565 - RNA, 20 nt, Human
gcgccuacaggagugagcac

SEQ ID NO: 1179566 - RNA, 21 nt, Human
gcgccuacaggagugagcacu

SEQ ID NO: 1179567 - RNA, 19 nt, Human
gcggaaugaaccacaucuu

SEQ ID NO: 1179568 - RNA, 19 nt, Human
gcggacagccacggccagg

SEQ ID NO: 1179569 - RNA, 23 nt, Human
gcggacagccacggccaggccag

SEQ ID NO: 1179570 - RNA, 19 nt, Human
gcggggacagcuccuucug

SEQ ID NO: 1179571 - RNA, 23 nt, Human
gcggggacagcuccuucuguccu

SEQ ID NO: 1179572 - RNA, 23 nt, Human
gcgguccacccaggagccccgag

SEQ ID NO: 1179573 - RNA, 16 nt, Human
gcgugagccacugcac

SEQ ID NO: 1179574 - RNA, 15 nt, Human
gcgugagccacugca

SEQ ID NO: 1179575 - RNA, 14 nt, Human
gcgugagccacugc

SEQ ID NO: 1179576 - RNA, 17 nt, Human
gcuaacauggaaguacu

SEQ ID NO: 1179577 - RNA, 18 nt, Human
gcuaacauggaaguacua

SEQ ID NO: 1179578 - RNA, 21 nt, Human
gcuagacgagcaggcuucuuc

SEQ ID NO: 1179579 - RNA, 22 nt, Human
gcuagacgagcaggcuucuucc

SEQ ID NO: 1179580 - RNA, 22 nt, Human
gcuagcagcagggagggcuucu

SEQ ID NO: 1179581 - RNA, 11 nt, Human
gcugcccugug

SEQ ID NO: 1179582 - RNA, 18 nt, Human
gcuagauguauguacuuc

SEQ ID NO: 1179583 - RNA, 12 nt, Human
gcugcccuguga

SEQ ID NO: 1179584 - RNA, 14 nt, Human
gcugcccugugagu

SEQ ID NO: 1179585 - RNA, 17 nt, Human
gcugcgguccacccagg

SEQ ID NO: 1179586 - RNA, 18 nt, Human
gcugcgguccacccagga

SEQ ID NO: 1179587 - RNA, 19 nt, Human
gcugcgguccacccaggag

SEQ ID NO: 1179588 - RNA, 13 nt, Human
gcugcuucaagga

SEQ ID NO: 1179589 - RNA, 21 nt, Human
gcugcuucaaggauccugagc

SEQ ID NO: 1179590 - RNA, 22 nt, Human
gcugcuucaaggauccugagcc

SEQ ID NO: 1179591 - RNA, 23 nt, Human
gcugcuucaaggauccugagcca

SEQ ID NO: 1179592 - RNA, 16 nt, Human
gcugcuugggcuucau

SEQ ID NO: 1179593 - RNA, 12 nt, Human
gcuggccuggcc

SEQ ID NO: 1179594 - RNA, 20 nt, Human
gcugggacaugggaaagggg

SEQ ID NO: 1179595 - RNA, 13 nt, Human
gcugggacuacag

SEQ ID NO: 1179596 - RNA, 18 nt, Human
gcugggacuacaggcacc

SEQ ID NO: 1179597 - RNA, 19 nt, Human
gcugggacuacaggcaccc

SEQ ID NO: 1179598 - RNA, 20 nt, Human
gcugggacuacaggcaccca

SEQ ID NO: 1179599 - RNA, 19 nt, Human
gcugggacuacagguguga

SEQ ID NO: 1179600 - RNA, 17 nt, Human
gcugcuugggcuucauc

SEQ ID NO: 1179601 - RNA, 22 nt, Human
gcugcuugggcuucauccuccu

SEQ ID NO: 1179602 - RNA, 18 nt, Human
gcuggaccuugaacuggg

SEQ ID NO: 1179603 - RNA, 21 nt, Human
gcuggaccuugaacuggguac

SEQ ID NO: 1179604 - RNA, 22 nt, Human
gcuggaccuugaacuggguacu

SEQ ID NO: 1179605 - RNA, 17 nt, Human
gcugggcuucaguggca

SEQ ID NO: 1179606 - RNA, 12 nt, Human
gcugggagagcc

SEQ ID NO: 1179607 - RNA, 13 nt, Human
gcugggagagccu

SEQ ID NO: 1179608 - RNA, 17 nt, Human
gcugggagagccuucca

SEQ ID NO: 1179609 - RNA, 18 nt, Human
gcugggagagccuuccag

SEQ ID NO: 1179610 - RNA, 19 nt, Human
gcugggagagccuuccagg

SEQ ID NO: 1179611 - RNA, 22 nt, Human
gcugggagagccuuccaggggu

SEQ ID NO: 1179612 - RNA, 18 nt, Human
gcugggcuucaguggcag

SEQ ID NO: 1179613 - RNA, 19 nt, Human
gcugggcuucaguggcagc

SEQ ID NO: 1179614 - RNA, 12 nt, Human
gcuggggccagu

SEQ ID NO: 1179615 - RNA, 23 nt, Human
gcugggggaagaagcucucuccu

SEQ ID NO: 1179616 - RNA, 19 nt, Human
gcugggggccucagugcca

SEQ ID NO: 1179617 - RNA, 20 nt, Human
gcugggggccucagugccac

SEQ ID NO: 1179618 - RNA, 13 nt, Human
gcugggggccuca

SEQ ID NO: 1179619 - RNA, 15 nt, Human
gcuggucccacucag

SEQ ID NO: 1179620 - RNA, 19 nt, Human
gcuggucccacucagucca

SEQ ID NO: 1179621 - RNA, 20 nt, Human
gcuggucccacucaguccau

SEQ ID NO: 1179622 - RNA, 17 nt, Human
gcugggguggggaccuc

SEQ ID NO: 1179623 - RNA, 18 nt, Human
gcuggugucaccugaaga

SEQ ID NO: 1179624 - RNA, 21 nt, Human
gcugguuagagguucccuuug

SEQ ID NO: 1179625 - RNA, 15 nt, Human
gcugguucaggguug

SEQ ID NO: 1179626 - RNA, 22 nt, Human
gcugguucaggguuggccccug

SEQ ID NO: 1179627 - RNA, 16 nt, Human
gcugucaauuacagga

SEQ ID NO: 1179628 - RNA, 17 nt, Human
gcugucaauuacaggaa

SEQ ID NO: 1179629 - RNA, 19 nt, Human
gcugucaauuacaggaagu

SEQ ID NO: 1179630 - RNA, 22 nt, Human
gcugucaauuacaggaaguacu

SEQ ID NO: 1179631 - RNA, 23 nt, Human
gcugucaauuacaggaaguacug

SEQ ID NO: 1179632 - RNA, 19 nt, Human
gcugucccuuacgugaguc

SEQ ID NO: 1179633 - RNA, 21 nt, Human
gcugucccuuacgugaguccu

SEQ ID NO: 1179634 - RNA, 22 nt, Human
gcugucccuuacgugaguccug

SEQ ID NO: 1179635 - RNA, 17 nt, Human
gcuugcccuggugccuc

SEQ ID NO: 1179636 - RNA, 19 nt, Human
gcuugcccuggugccucac

SEQ ID NO: 1179637 - RNA, 13 nt, Human
gcuuggaggaagg

SEQ ID NO: 1179638 - RNA, 14 nt, Human
gcuuggaggaagga

SEQ ID NO: 1179639 - RNA, 15 nt, Human
gcuuggaggaaggaa

SEQ ID NO: 1179640 - RNA, 13 nt, Human
gcuguucagcugg

SEQ ID NO: 1179641 - RNA, 19 nt, Human
gcuuccagugaggcucugc

SEQ ID NO: 1179642 - RNA, 20 nt, Human
gcuuccagugaggcucugcc

SEQ ID NO: 1179643 - RNA, 21 nt, Human
gcuuccagugaggcucugccc

SEQ ID NO: 1179644 - RNA, 22 nt, Human
gcuuccagugaggcucugcccu

SEQ ID NO: 1179645 - RNA, 17 nt, Human
gcuucucacugccaugc

SEQ ID NO: 1179646 - RNA, 20 nt, Human
ggaaaaaauaacaaugaaag

SEQ ID NO: 1179647 - RNA, 14 nt, Human
gcuuuuacuuaaac

SEQ ID NO: 1179648 - RNA, 15 nt, Human
ggaaaaauagccugc

SEQ ID NO: 1179649 - RNA, 14 nt, Human
ggaaaaacugauuu

SEQ ID NO: 1179650 - RNA, 13 nt, Human
ggaaaaauagccu

SEQ ID NO: 1179651 - RNA, 19 nt, Human
ggaacagacuggaagcaca

SEQ ID NO: 1179652 - RNA, 20 nt, Human
ggaacagacuggaagcacag

SEQ ID NO: 1179653 - RNA, 14 nt, Human
ggaaaauaaauuau

SEQ ID NO: 1179654 - RNA, 15 nt, Human
ggaaaaucagccugc

SEQ ID NO: 1179655 - RNA, 12 nt, Human
ggaaauauuuau

SEQ ID NO: 1179656 - RNA, 13 nt, Human
ggaaauauuuauu
